United States Patent Application Publication US 2007/0042381 A1 - sequence listing, part 74

SEQ ID NO: 3372639 - RNA, 16 nt, Human
acccugcuuggcccag

SEQ ID NO: 3372640 - RNA, 12 nt, Human
acccuggaggca

SEQ ID NO: 3372641 - RNA, 20 nt, Human
acccuggaggcaccuggugg

SEQ ID NO: 3372642 - RNA, 21 nt, Human
acccuggaggccccaacccug

SEQ ID NO: 3372643 - RNA, 15 nt, Human
acccuggcauuaugu

SEQ ID NO: 3372644 - RNA, 16 nt, Human
acccuggccccucucc

SEQ ID NO: 3372645 - RNA, 21 nt, Human
acccuggccgaguccaagcug

SEQ ID NO: 3372646 - RNA, 16 nt, Human
acccuggccgcccccu

SEQ ID NO: 3372647 - RNA, 23 nt, Human
acccuggccuagaccagcagaca

SEQ ID NO: 3372648 - RNA, 15 nt, Human
acccuggcuccuugu

SEQ ID NO: 3372649 - RNA, 22 nt, Human
acccugggcccugggcuggaau

SEQ ID NO: 3372650 - RNA, 21 nt, Human
acccugggcucugggagcagc

SEQ ID NO: 3372651 - RNA, 16 nt, Human
acagagaaaccagcuu

SEQ ID NO: 3372652 - RNA, 18 nt, Human
acagagaaaccagcuucc

SEQ ID NO: 3372653 - RNA, 20 nt, Human
acagagaaaccagcuuccuu

SEQ ID NO: 3372654 - RNA, 16 nt, Human
acagagaagccagcuu

SEQ ID NO: 3372655 - RNA, 18 nt, Human
acagagaagccagcuugu

SEQ ID NO: 3372656 - RNA, 20 nt, Human
acagagaagccaucaccuca

SEQ ID NO: 3372657 - RNA, 21 nt, Human
acagagaagccaucaccucag

SEQ ID NO: 3372658 - RNA, 20 nt, Human
acagagaagcggauuuccag

SEQ ID NO: 3372659 - RNA, 16 nt, Human
acagagaaggcaggaa

SEQ ID NO: 3372660 - RNA, 13 nt, Human
acagagaagucac

SEQ ID NO: 3372661 - RNA, 17 nt, Human
acagagaagucacaggg

SEQ ID NO: 3372662 - RNA, 15 nt, Human
acagagacaccugca

SEQ ID NO: 3372663 - RNA, 21 nt, Human
acagagacaccugcaccuccc

SEQ ID NO: 3372664 - RNA, 23 nt, Human
acagagacaggcccaagagauga

SEQ ID NO: 3372665 - RNA, 14 nt, Human
acagagaccaagau

SEQ ID NO: 3372666 - RNA, 11 nt, Human
acagagaccua

SEQ ID NO: 3372667 - RNA, 14 nt, Human
acagagaccuccug

SEQ ID NO: 3372668 - RNA, 20 nt, Human
acagagacugaauagauaug

SEQ ID NO: 3372669 - RNA, 23 nt, Human
acagagagacagacuugagaacu

SEQ ID NO: 3372670 - RNA, 19 nt, Human
acagagagagauacucugg

SEQ ID NO: 3372671 - RNA, 16 nt, Human
acagagaggacuguag

SEQ ID NO: 3372672 - RNA, 16 nt, Human
acagagaggagaaaca

SEQ ID NO: 3372673 - RNA, 16 nt, Human
acagagcaaccccugg

SEQ ID NO: 3372674 - RNA, 12 nt, Human
acagagcaagac

SEQ ID NO: 3372675 - RNA, 11 nt, Human
acagagccagu

SEQ ID NO: 3372676 - RNA, 18 nt, Human
acagagccgagcaauauu

SEQ ID NO: 3372677 - RNA, 17 nt, Human
acagagccucgcucugu

SEQ ID NO: 3372678 - RNA, 21 nt, Human
acagagccucgggacaucaaa

SEQ ID NO: 3372679 - RNA, 15 nt, Human
acagagccugcccca

SEQ ID NO: 3372680 - RNA, 23 nt, Human
acagagcgugagcugagcaggcc

SEQ ID NO: 3372681 - RNA, 16 nt, Human
acagagcuacacaggg

SEQ ID NO: 3372682 - RNA, 16 nt, Human
acagagcugacaaaau

SEQ ID NO: 3372683 - RNA, 18 nt, Human
acagagcugacaaaauuu

SEQ ID NO: 3372684 - RNA, 20 nt, Human
acagagcugacaaaauuuug

SEQ ID NO: 3372685 - RNA, 18 nt, Human
acagagcugggauguuuc

SEQ ID NO: 3372686 - RNA, 21 nt, Human
acagagcugggauguuucugu

SEQ ID NO: 3372687 - RNA, 19 nt, Human
acagaggaagaauuuguua

SEQ ID NO: 3372688 - RNA, 20 nt, Human
acagaggaagaauuuguuau

SEQ ID NO: 3372689 - RNA, 17 nt, Human
acagaggaagagcaggc

SEQ ID NO: 3372690 - RNA, 21 nt, Human
acagaggaauuuauaccucaa

SEQ ID NO: 3372691 - RNA, 23 nt, Human
acagaggacaguauuugugggga

SEQ ID NO: 3372692 - RNA, 14 nt, Human
acagaggaccagca

SEQ ID NO: 3372693 - RNA, 20 nt, Human
acagaggaccagcacacucc

SEQ ID NO: 3372694 - RNA, 21 nt, Human
acagaggaccagcacacuccc

SEQ ID NO: 3372695 - RNA, 16 nt, Human
acagaggaugagcucu

SEQ ID NO: 3372696 - RNA, 20 nt, Human
acagaggaugagcucuaccc

SEQ ID NO: 3372697 - RNA, 13 nt, Human
acagaggcagccc

SEQ ID NO: 3372698 - RNA, 17 nt, Human
acagaggccaugggccu

SEQ ID NO: 3372699 - RNA, 15 nt, Human
acagaggccccagcc

SEQ ID NO: 3372700 - RNA, 15 nt, Human
acagagggaagaaaa

SEQ ID NO: 3372701 - RNA, 14 nt, Human
acagaggggguggc

SEQ ID NO: 3372702 - RNA, 17 nt, Human
acagaggggguggccuc

SEQ ID NO: 3372703 - RNA, 20 nt, Human
accuggaagaacaggccucu

SEQ ID NO: 3372704 - RNA, 18 nt, Human
accuggaagcccucucug

SEQ ID NO: 3372705 - RNA, 14 nt, Human
accuggaauauaua

SEQ ID NO: 3372706 - RNA, 19 nt, Human
accuggaauuguggggcaa

SEQ ID NO: 3372707 - RNA, 16 nt, Human
accuggaccccugcau

SEQ ID NO: 3372708 - RNA, 23 nt, Human
accuggagaacuagaaccuggag

SEQ ID NO: 3372709 - RNA, 13 nt, Human
accuggagaccag

SEQ ID NO: 3372710 - RNA, 14 nt, Human
accuggagccccug

SEQ ID NO: 3372711 - RNA, 21 nt, Human
accuggagggcuagaaccuag

SEQ ID NO: 3372712 - RNA, 22 nt, Human
accuggagggcuagaaccuggc

SEQ ID NO: 3372713 - RNA, 15 nt, Human
accuggagggcugga

SEQ ID NO: 3372714 - RNA, 14 nt, Human
accuggauggggca

SEQ ID NO: 3372715 - RNA, 22 nt, Human
accuggcaagcuagaaccugga

SEQ ID NO: 3372716 - RNA, 15 nt, Human
accuggcacugcugu

SEQ ID NO: 3372717 - RNA, 17 nt, Human
accuggcagcucuggac

SEQ ID NO: 3372718 - RNA, 20 nt, Human
accuggccaccugagguggg

SEQ ID NO: 3372719 - RNA, 23 nt, Human
accuggccccaugucucucagaa

SEQ ID NO: 3372720 - RNA, 19 nt, Human
accuggcccucucugaagg

SEQ ID NO: 3372721 - RNA, 23 nt, Human
accuggcccucucugaaggaggc

SEQ ID NO: 3372722 - RNA, 15 nt, Human
accuggcccugcuuc

SEQ ID NO: 3372723 - RNA, 17 nt, Human
accuggcccugcuuccu

SEQ ID NO: 3372724 - RNA, 12 nt, Human
accuggcccugg

SEQ ID NO: 3372725 - RNA, 19 nt, Human
accuggcccuggggccugu

SEQ ID NO: 3372726 - RNA, 21 nt, Human
accuggcccuggggccuguac

SEQ ID NO: 3372727 - RNA, 16 nt, Human
accuggcucucaccuc

SEQ ID NO: 3372728 - RNA, 20 nt, Human
accuggcucucaccucuagg

SEQ ID NO: 3372729 - RNA, 13 nt, Human
accuggcugaggu

SEQ ID NO: 3372730 - RNA, 21 nt, Human
accuggcugagguuccucugc

SEQ ID NO: 3372731 - RNA, 14 nt, Human
accuggcuuauuua

SEQ ID NO: 3372732 - RNA, 22 nt, Human
accuggcuuguuuauuuugugg

SEQ ID NO: 3372733 - RNA, 22 nt, Human
accugggaaagagauuuaaacu

SEQ ID NO: 3372734 - RNA, 14 nt, Human
accugggcccuggg

SEQ ID NO: 3372735 - RNA, 15 nt, Human
accugggcccugggg

SEQ ID NO: 3372736 - RNA, 18 nt, Human
accugggcccuggggccu

SEQ ID NO: 3372737 - RNA, 20 nt, Human
accugggcccuggggccugu

SEQ ID NO: 3372738 - RNA, 21 nt, Human
accugggcccuggggccugua

SEQ ID NO: 3372739 - RNA, 18 nt, Human
accuggggcugcuggccu

SEQ ID NO: 3372740 - RNA, 18 nt, Human
accuggggugugggaggc

SEQ ID NO: 3372741 - RNA, 16 nt, Human
accugggguugucagc

SEQ ID NO: 3372742 - RNA, 21 nt, Human
accuggguaacuagggaagau

SEQ ID NO: 3372743 - RNA, 18 nt, Human
accuggguccaaauaaaa

SEQ ID NO: 3372744 - RNA, 20 nt, Human
accuggguccaaauaaaaac

SEQ ID NO: 3372745 - RNA, 23 nt, Human
accuggguccccagcccuuccuc

SEQ ID NO: 3372746 - RNA, 17 nt, Human
accuggguucccuuucc

SEQ ID NO: 3372747 - RNA, 22 nt, Human
accuggguucccuuuccuucca

SEQ ID NO: 3372748 - RNA, 18 nt, Human
accuggguugcagacagg

SEQ ID NO: 3372749 - RNA, 16 nt, Human
accugguacccuccug

SEQ ID NO: 3372750 - RNA, 21 nt, Human
accugguacucccucucagga

SEQ ID NO: 3372751 - RNA, 15 nt, Human
accugguccacaggg

SEQ ID NO: 3372752 - RNA, 10 nt, Human
accuggugcu

SEQ ID NO: 3372753 - RNA, 12 nt, Human
accuguaaauua

SEQ ID NO: 3372754 - RNA, 20 nt, Human
accuguaacuuuuguaaaua

SEQ ID NO: 3372755 - RNA, 14 nt, Human
accuguaaucccag

SEQ ID NO: 3372756 - RNA, 11 nt, Human
accuguacagu

SEQ ID NO: 3372757 - RNA, 14 nt, Human
accuguacuggaga

SEQ ID NO: 3372758 - RNA, 14 nt, Human
accuguagucccag

SEQ ID NO: 3372759 - RNA, 16 nt, Human
accuguauacagugca

SEQ ID NO: 3372760 - RNA, 20 nt, Human
accuguauauuuguaaagcu

SEQ ID NO: 3372761 - RNA, 21 nt, Human
accuguauauuuguaaagcua

SEQ ID NO: 3372762 - RNA, 23 nt, Human
accuguaucuuucuaugcugcuu

SEQ ID NO: 3372763 - RNA, 20 nt, Human
accuguauuuaaaaauagaa

SEQ ID NO: 3372764 - RNA, 23 nt, Human
accuguauuuaaaaauagaaaca

SEQ ID NO: 3372765 - RNA, 20 nt, Human
accugucaaacaaagccaga

SEQ ID NO: 3372766 - RNA, 20 nt, Human
accugucacauugcauucua

SEQ ID NO: 3372767 - RNA, 23 nt, Human
accugucacgauugucaucagga

SEQ ID NO: 3372768 - RNA, 19 nt, Human
accugucaugccccccuca

SEQ ID NO: 3372769 - RNA, 20 nt, Human
accugucaugccccccucaa

SEQ ID NO: 3372770 - RNA, 14 nt, Human
accugucccaccuc

SEQ ID NO: 3372771 - RNA, 14 nt, Human
accuguccccaccc

SEQ ID NO: 3372772 - RNA, 16 nt, Human
accugucccccugaca

SEQ ID NO: 3372773 - RNA, 15 nt, Human
accuguccuccuggu

SEQ ID NO: 3372774 - RNA, 18 nt, Human
accuguccuccugguggg

SEQ ID NO: 3372775 - RNA, 14 nt, Human
accugucgcccagu

SEQ ID NO: 3372776 - RNA, 16 nt, Human
accugucgcccagugc

SEQ ID NO: 3372777 - RNA, 14 nt, Human
accugucucagccu

SEQ ID NO: 3372778 - RNA, 17 nt, Human
accugucuccacugugc

SEQ ID NO: 3372779 - RNA, 18 nt, Human
accugucugaacuguuaa

SEQ ID NO: 3372780 - RNA, 20 nt, Human
accugucugucugucugucc

SEQ ID NO: 3372781 - RNA, 15 nt, Human
accugugagcccagc

SEQ ID NO: 3372782 - RNA, 23 nt, Human
accugugagcugcaccagguaga

SEQ ID NO: 3372783 - RNA, 17 nt, Human
accugugaguaaauauu

SEQ ID NO: 3372784 - RNA, 19 nt, Human
accugugcacaccccacuc

SEQ ID NO: 3372785 - RNA, 14 nt, Human
accugugccucggc

SEQ ID NO: 3372786 - RNA, 23 nt, Human
accuguggaacauaaaaaggaca

SEQ ID NO: 3372787 - RNA, 19 nt, Human
accuguggccaaguucuua

SEQ ID NO: 3372788 - RNA, 20 nt, Human
accuguggggauuucuccca

SEQ ID NO: 3372789 - RNA, 12 nt, Human
accugugggugu

SEQ ID NO: 3372790 - RNA, 13 nt, Human
accuguguacaua

SEQ ID NO: 3372791 - RNA, 16 nt, Human
accuguguacauaacu

SEQ ID NO: 3372792 - RNA, 11 nt, Human
accugugucuc

SEQ ID NO: 3372793 - RNA, 14 nt, Human
accugugucugcga

SEQ ID NO: 3372794 - RNA, 19 nt, Human
accuguguggacaggacua

SEQ ID NO: 3372795 - RNA, 19 nt, Human
acagcacuggcucucucca

SEQ ID NO: 3372796 - RNA, 13 nt, Human
acagcagacucag

SEQ ID NO: 3372797 - RNA, 18 nt, Human
acagcagacucagcucug

SEQ ID NO: 3372798 - RNA, 19 nt, Human
acagcagacucagcucuga

SEQ ID NO: 3372799 - RNA, 17 nt, Human
acagcagcaagaaaaaa

SEQ ID NO: 3372800 - RNA, 23 nt, Human
acagcagcaagaaaaaaaaaugc

SEQ ID NO: 3372801 - RNA, 14 nt, Human
acagcagcaucucu

SEQ ID NO: 3372802 - RNA, 12 nt, Human
acagcagcauuu

SEQ ID NO: 3372803 - RNA, 14 nt, Human
acagcagcauuuuu

SEQ ID NO: 3372804 - RNA, 18 nt, Human
acagcagccccugcacaa

SEQ ID NO: 3372805 - RNA, 18 nt, Human
acagcagccucugaaguu

SEQ ID NO: 3372806 - RNA, 14 nt, Human
acagcagcucaggc

SEQ ID NO: 3372807 - RNA, 22 nt, Human
acagcagcuuauaaugggcucu

SEQ ID NO: 3372808 - RNA, 13 nt, Human
acagcagcuucac

SEQ ID NO: 3372809 - RNA, 22 nt, Human
acagcagcuucaccagagcauu

SEQ ID NO: 3372810 - RNA, 15 nt, Human
acagcaggcugccag

SEQ ID NO: 3372811 - RNA, 15 nt, Human
acagcaguagacauu

SEQ ID NO: 3372812 - RNA, 16 nt, Human
acagcaguagacauuu

SEQ ID NO: 3372813 - RNA, 20 nt, Human
acagcaguagacauuuuaac

SEQ ID NO: 3372814 - RNA, 24 nt, Human
acagcaguagacauuuuaacaaga

SEQ ID NO: 3372815 - RNA, 20 nt, Human
acagcagucuuaugcuucca

SEQ ID NO: 3372816 - RNA, 21 nt, Human
acagcagugagacuggggcca

SEQ ID NO: 3372817 - RNA, 19 nt, Human
acagcaguguuccccaucu

SEQ ID NO: 3372818 - RNA, 22 nt, Human
acagcaguugaaaagacuccaa

SEQ ID NO: 3372819 - RNA, 15 nt, Human
acagcauaacaaggu

SEQ ID NO: 3372820 - RNA, 16 nt, Human
acagcaucauuuugca

SEQ ID NO: 3372821 - RNA, 22 nt, Human
acagcauccccaaaacaaaguc

SEQ ID NO: 3372822 - RNA, 14 nt, Human
acagcaucucagcu

SEQ ID NO: 3372823 - RNA, 15 nt, Human
acagcaucucagcuc

SEQ ID NO: 3372824 - RNA, 15 nt, Human
acagcaucuccaagc

SEQ ID NO: 3372825 - RNA, 20 nt, Human
acagcaugagaggcucugug

SEQ ID NO: 3372826 - RNA, 17 nt, Human
acagcauggcacucccu

SEQ ID NO: 3372827 - RNA, 22 nt, Human
acagcauguacggauuuucagu

SEQ ID NO: 3372828 - RNA, 21 nt, Human
acagcauguguuaaucuuaau

SEQ ID NO: 3372829 - RNA, 14 nt, Human
acagcauuuuccuc

SEQ ID NO: 3372830 - RNA, 18 nt, Human
acagcauuuuccucugcu

SEQ ID NO: 3372831 - RNA, 16 nt, Human
acagccaaaggcuggc

SEQ ID NO: 3372832 - RNA, 14 nt, Human
acagccaaauuuaa

SEQ ID NO: 3372833 - RNA, 15 nt, Human
acagccaaauuuaaa

SEQ ID NO: 3372834 - RNA, 24 nt, Human
acagccaacacgcaccugccucag

SEQ ID NO: 3372835 - RNA, 13 nt, Human
acagccaacaggu

SEQ ID NO: 3372836 - RNA, 23 nt, Human
acagccaacagguggcaggacca

SEQ ID NO: 3372837 - RNA, 18 nt, Human
acagccaacuagccccug

SEQ ID NO: 3372838 - RNA, 20 nt, Human
acagccaagauuuuccucuu

SEQ ID NO: 3372839 - RNA, 13 nt, Human
acagccaagugcc

SEQ ID NO: 3372840 - RNA, 15 nt, Human
acagccaagugccaa

SEQ ID NO: 3372841 - RNA, 12 nt, Human
acagccacacac

SEQ ID NO: 3372842 - RNA, 15 nt, Human
acagccacacacaca

SEQ ID NO: 3372843 - RNA, 16 nt, Human
acagccacacacacag

SEQ ID NO: 3372844 - RNA, 18 nt, Human
acagccacacacacagaa

SEQ ID NO: 3372845 - RNA, 20 nt, Human
acagccacacacacagaaaa

SEQ ID NO: 3372846 - RNA, 23 nt, Human
acagccacacacacagaaaauau

SEQ ID NO: 3372847 - RNA, 19 nt, Human
acagccacggccaggccag

SEQ ID NO: 3372848 - RNA, 16 nt, Human
acagccagacuggcac

SEQ ID NO: 3372849 - RNA, 16 nt, Human
acagccagcaccuggc

SEQ ID NO: 3372850 - RNA, 15 nt, Human
acagccaucccagcc

SEQ ID NO: 3372851 - RNA, 16 nt, Human
acagcccaaagaagga

SEQ ID NO: 3372852 - RNA, 13 nt, Human
acagcccaccugg

SEQ ID NO: 3372853 - RNA, 16 nt, Human
acagcccacguccugu

SEQ ID NO: 3372854 - RNA, 13 nt, Human
acagcccagagcc

SEQ ID NO: 3372855 - RNA, 15 nt, Human
acagcccagagccug

SEQ ID NO: 3372856 - RNA, 15 nt, Human
acagcccaggccucc

SEQ ID NO: 3372857 - RNA, 13 nt, Human
acagccccacccu

SEQ ID NO: 3372858 - RNA, 14 nt, Human
acagccccacccug

SEQ ID NO: 3372859 - RNA, 15 nt, Human
acagccccacccugg

SEQ ID NO: 3372860 - RNA, 18 nt, Human
acagccccucccuccucu

SEQ ID NO: 3372861 - RNA, 21 nt, Human
acagcccgggcucugccuccc

SEQ ID NO: 3372862 - RNA, 20 nt, Human
acgcuuguagaacucacucu

SEQ ID NO: 3372863 - RNA, 22 nt, Human
acgcuuguagaacucacucugg

SEQ ID NO: 3372864 - RNA, 12 nt, Human
acgcuugugaau

SEQ ID NO: 3372865 - RNA, 13 nt, Human
acgcuuugauuca

SEQ ID NO: 3372866 - RNA, 16 nt, Human
acgcuuugauucauag

SEQ ID NO: 3372867 - RNA, 17 nt, Human
acgcuuugggagaaugu

SEQ ID NO: 3372868 - RNA, 14 nt, Human
acgcuuuucuuugu

SEQ ID NO: 3372869 - RNA, 18 nt, Human
acggaaaaugccaaucuc

SEQ ID NO: 3372870 - RNA, 19 nt, Human
acggaaaaugccaaucucu

SEQ ID NO: 3372871 - RNA, 13 nt, Human
acggaaguuuuca

SEQ ID NO: 3372872 - RNA, 15 nt, Human
acggacaauaaaccu

SEQ ID NO: 3372873 - RNA, 17 nt, Human
acggacacucaaaagcu

SEQ ID NO: 3372874 - RNA, 17 nt, Human
acggacagagaccaaga

SEQ ID NO: 3372875 - RNA, 12 nt, Human
acggagagaaaa

SEQ ID NO: 3372876 - RNA, 19 nt, Human
acggagagcgccugccccu

SEQ ID NO: 3372877 - RNA, 14 nt, Human
acggagauguuuca

SEQ ID NO: 3372878 - RNA, 15 nt, Human
acggagcccagcccu

SEQ ID NO: 3372879 - RNA, 18 nt, Human
acggaggggaguagagaa

SEQ ID NO: 3372880 - RNA, 13 nt, Human
acggagucucgcu

SEQ ID NO: 3372881 - RNA, 21 nt, Human
acggauccauguagcaggacu

SEQ ID NO: 3372882 - RNA, 15 nt, Human
acggaugauuucuau

SEQ ID NO: 3372883 - RNA, 22 nt, Human
acggauuagggcauuugagaaa

SEQ ID NO: 3372884 - RNA, 23 nt, Human
acggauuagggcauuugagaaau

SEQ ID NO: 3372885 - RNA, 16 nt, Human
acggauuauuuuuuca

SEQ ID NO: 3372886 - RNA, 15 nt, Human
acggauuuucaguua

SEQ ID NO: 3372887 - RNA, 19 nt, Human
acggcaccugggcccuggg

SEQ ID NO: 3372888 - RNA, 23 nt, Human
acggcaccugggcccuggggccu

SEQ ID NO: 3372889 - RNA, 18 nt, Human
acggcacggucuucccuc

SEQ ID NO: 3372890 - RNA, 22 nt, Human
acggcacggucuucccucuucc

SEQ ID NO: 3372891 - RNA, 14 nt, Human
acggcacuguggcc

SEQ ID NO: 3372892 - RNA, 15 nt, Human
acggcagccacagcu

SEQ ID NO: 3372893 - RNA, 22 nt, Human
acggcaggcucacugccaggcc

SEQ ID NO: 3372894 - RNA, 23 nt, Human
acggccaagaauguacguccagc

SEQ ID NO: 3372895 - RNA, 17 nt, Human
acggccacacagcugcc

SEQ ID NO: 3372896 - RNA, 15 nt, Human
acggccacuggccau

SEQ ID NO: 3372897 - RNA, 23 nt, Human
acggccagggagaagcuccucuc

SEQ ID NO: 3372898 - RNA, 20 nt, Human
acggccccagcuucucagcu

SEQ ID NO: 3372899 - RNA, 21 nt, Human
acggccccgaagggcccccac

SEQ ID NO: 3372900 - RNA, 22 nt, Human
acggccccgaagggcccccaca

SEQ ID NO: 3372901 - RNA, 18 nt, Human
acggcccugcagccagcu

SEQ ID NO: 3372902 - RNA, 12 nt, Human
acggcccuggcc

SEQ ID NO: 3372903 - RNA, 14 nt, Human
acggcccuggccuu

SEQ ID NO: 3372904 - RNA, 18 nt, Human
acggccgcuccaggggug

SEQ ID NO: 3372905 - RNA, 13 nt, Human
acggccuccuuuc

SEQ ID NO: 3372906 - RNA, 17 nt, Human
acggcgcccccagugug

SEQ ID NO: 3372907 - RNA, 18 nt, Human
acggcucgauuucuccag

SEQ ID NO: 3372908 - RNA, 18 nt, Human
acggcucuagguggggcg

SEQ ID NO: 3372909 - RNA, 22 nt, Human
acggcugggcacacgccuccca

SEQ ID NO: 3372910 - RNA, 23 nt, Human
acggcuuagacuucgacucagga

SEQ ID NO: 3372911 - RNA, 18 nt, Human
acggcuuuuacuuaaacc

SEQ ID NO: 3372912 - RNA, 21 nt, Human
acgggaagcgcucagaacagu

SEQ ID NO: 3372913 - RNA, 23 nt, Human
acgggacaucacagggugggccu

SEQ ID NO: 3372914 - RNA, 21 nt, Human
acgggacccacaugcuccaga

SEQ ID NO: 3372915 - RNA, 18 nt, Human
acgggacugcggaggaag

SEQ ID NO: 3372916 - RNA, 16 nt, Human
acgggcaguagcugug

SEQ ID NO: 3372917 - RNA, 21 nt, Human
acgggcccggguugggucacc

SEQ ID NO: 3372918 - RNA, 18 nt, Human
acggggagcggcggaaag

SEQ ID NO: 3372919 - RNA, 20 nt, Human
acggggccgacauugucucc

SEQ ID NO: 3372920 - RNA, 15 nt, Human
acggggcucuucuca

SEQ ID NO: 3372921 - RNA, 18 nt, Human
acggggcucuucucauuu

SEQ ID NO: 3372922 - RNA, 15 nt, Human
acgggugccagaagc

SEQ ID NO: 3372923 - RNA, 13 nt, Human
acggguggucccc

SEQ ID NO: 3372924 - RNA, 14 nt, Human
acgggugguccccg

SEQ ID NO: 3372925 - RNA, 14 nt, Human
acgguauuaugcuu

SEQ ID NO: 3372926 - RNA, 20 nt, Human
acgguauuaugcuucuugga

SEQ ID NO: 3372927 - RNA, 20 nt, Human
acggucagguuuaacauuug

SEQ ID NO: 3372928 - RNA, 16 nt, Human
acggucgccaccuggc

SEQ ID NO: 3372929 - RNA, 21 nt, Human
acggucggggcaucuggccug

SEQ ID NO: 3372930 - RNA, 19 nt, Human
acggugaaggugacagcag

SEQ ID NO: 3372931 - RNA, 17 nt, Human
acggugcagucugggug

SEQ ID NO: 3372932 - RNA, 15 nt, Human
acggugcccaagcca

SEQ ID NO: 3372933 - RNA, 18 nt, Human
acggugcugugagggagg

SEQ ID NO: 3372934 - RNA, 18 nt, Human
acggugggcauuugugag

SEQ ID NO: 3372935 - RNA, 21 nt, Human
acggugggccuugcuggggac

SEQ ID NO: 3372936 - RNA, 22 nt, Human
acggugucuuguucugucacuc

SEQ ID NO: 3372937 - RNA, 19 nt, Human
acgguucaaaccugugaag

SEQ ID NO: 3372938 - RNA, 19 nt, Human
acgguucaccagccucucu

SEQ ID NO: 3372939 - RNA, 23 nt, Human
acagcugccugggaucccucauc

SEQ ID NO: 3372940 - RNA, 14 nt, Human
acagcugccuuagc

SEQ ID NO: 3372941 - RNA, 16 nt, Human
acagcugccuuagcuu

SEQ ID NO: 3372942 - RNA, 17 nt, Human
acagcugccuuagcuuc

SEQ ID NO: 3372943 - RNA, 20 nt, Human
acagcugccuuagcuucagg

SEQ ID NO: 3372944 - RNA, 21 nt, Human
acagcugccuuagcuucagga

SEQ ID NO: 3372945 - RNA, 10 nt, Human
acagcugcuc

SEQ ID NO: 3372946 - RNA, 22 nt, Human
acagcugcuccuagagggaggg

SEQ ID NO: 3372947 - RNA, 13 nt, Human
acagcugcuuucu

SEQ ID NO: 3372948 - RNA, 21 nt, Human
acagcugcuuucuguugucau

SEQ ID NO: 3372949 - RNA, 18 nt, Human
acagcuggguggcacugc

SEQ ID NO: 3372950 - RNA, 20 nt, Human
acagcuggguggcacugcca

SEQ ID NO: 3372951 - RNA, 23 nt, Human
acagcuggguggcacugccaugc

SEQ ID NO: 3372952 - RNA, 16 nt, Human
acagcugguguagcua

SEQ ID NO: 3372953 - RNA, 21 nt, Human
acagcugguguagcuacagag

SEQ ID NO: 3372954 - RNA, 19 nt, Human
acagcuguauugucugaac

SEQ ID NO: 3372955 - RNA, 18 nt, Human
acagcugucccugucacc

SEQ ID NO: 3372956 - RNA, 21 nt, Human
acagcugugcuguaacacaag

SEQ ID NO: 3372957 - RNA, 23 nt, Human
acagcuguucaguugcacuucua

SEQ ID NO: 3372958 - RNA, 16 nt, Human
acagcuguucuucugu

SEQ ID NO: 3372959 - RNA, 13 nt, Human
acagcuguugacu

SEQ ID NO: 3372960 - RNA, 14 nt, Human
acagcuuagauuuc

SEQ ID NO: 3372961 - RNA, 18 nt, Human
acagcuucagccaggagc

SEQ ID NO: 3372962 - RNA, 21 nt, Human
acagcuucagccaggagcugg

SEQ ID NO: 3372963 - RNA, 13 nt, Human
acagcuucagguu

SEQ ID NO: 3372964 - RNA, 17 nt, Human
acagcuucaugccuuug

SEQ ID NO: 3372965 - RNA, 17 nt, Human
acagcuucauuuccugu

SEQ ID NO: 3372966 - RNA, 21 nt, Human
acagcuucauuuccugugucu

SEQ ID NO: 3372967 - RNA, 15 nt, Human
acagcuuccuguccc

SEQ ID NO: 3372968 - RNA, 20 nt, Human
acagcuucucauccugcagg

SEQ ID NO: 3372969 - RNA, 17 nt, Human
acagcuugaccgugagg

SEQ ID NO: 3372970 - RNA, 20 nt, Human
acagcuugaccgugaggcca

SEQ ID NO: 3372971 - RNA, 17 nt, Human
acagcuugaccugaggc

SEQ ID NO: 3372972 - RNA, 23 nt, Human
acagcuugaccugaggcuguggu

SEQ ID NO: 3372973 - RNA, 16 nt, Human
acagcuugagccgggc

SEQ ID NO: 3372974 - RNA, 22 nt, Human
acagcuugagccgggccccugg

SEQ ID NO: 3372975 - RNA, 15 nt, Human
acagcuuucaagugc

SEQ ID NO: 3372976 - RNA, 15 nt, Human
acagcuuucugaccu

SEQ ID NO: 3372977 - RNA, 18 nt, Human
acagcuuucugaccuuca

SEQ ID NO: 3372978 - RNA, 22 nt, Human
acagcuuucuugcucccuucag

SEQ ID NO: 3372979 - RNA, 21 nt, Human
acagcuuugcugcugaaggcu

SEQ ID NO: 3372980 - RNA, 21 nt, Human
acagcuuuggggugucuuuuu

SEQ ID NO: 3372981 - RNA, 23 nt, Human
acagcuuugugacuguauauaaa

SEQ ID NO: 3372982 - RNA, 21 nt, Human
acagcuuuuaguacccaccug

SEQ ID NO: 3372983 - RNA, 12 nt, Human
acagcuuuugca

SEQ ID NO: 3372984 - RNA, 16 nt, Human
acaggaaaaaaacuuu

SEQ ID NO: 3372985 - RNA, 22 nt, Human
acaggaaaaaaacuuuuauaaa

SEQ ID NO: 3372986 - RNA, 16 nt, Human
acaggaaaagcugcug

SEQ ID NO: 3372987 - RNA, 19 nt, Human
acaggaaaagcugcugaca

SEQ ID NO: 3372988 - RNA, 16 nt, Human
acaggaaaauccucug

SEQ ID NO: 3372989 - RNA, 20 nt, Human
acaggaaaauuuuaaaaaua

SEQ ID NO: 3372990 - RNA, 20 nt, Human
acaggaaacuccugugacca

SEQ ID NO: 3372991 - RNA, 22 nt, Human
acaggaaacuccugugaccaca

SEQ ID NO: 3372992 - RNA, 16 nt, Human
acaggaaagggaaggc

SEQ ID NO: 3372993 - RNA, 19 nt, Human
acaggaaagggaaggcccc

SEQ ID NO: 3372994 - RNA, 22 nt, Human
acaggaaagggaaggccccaca

SEQ ID NO: 3372995 - RNA, 18 nt, Human
acaggaaaguucagaguu

SEQ ID NO: 3372996 - RNA, 15 nt, Human
acaggaagcacccca

SEQ ID NO: 3372997 - RNA, 15 nt, Human
acaggacacagucag

SEQ ID NO: 3372998 - RNA, 17 nt, Human
acaggacagugcuucag

SEQ ID NO: 3372999 - RNA, 14 nt, Human
acaggacauauauu

SEQ ID NO: 3373000 - RNA, 17 nt, Human
acaggacauauauuuuu

SEQ ID NO: 3373001 - RNA, 23 nt, Human
acaggaccagggauuuccaugau

SEQ ID NO: 3373002 - RNA, 12 nt, Human
acaggaccccag

SEQ ID NO: 3373003 - RNA, 16 nt, Human
acaggaccccagcucu

SEQ ID NO: 3373004 - RNA, 17 nt, Human
acaggaccccagcucug

SEQ ID NO: 3373005 - RNA, 18 nt, Human
acaggaccccagcucugc

SEQ ID NO: 3373006 - RNA, 17 nt, Human
acaggacccccuucccc

SEQ ID NO: 3373007 - RNA, 16 nt, Human
acaggaccccugcagu

SEQ ID NO: 3373008 - RNA, 20 nt, Human
acaggacuaacacucagaag

SEQ ID NO: 3373009 - RNA, 23 nt, Human
acaggacuaacacucagaagccu

SEQ ID NO: 3373010 - RNA, 24 nt, Human
acaggacuaacacucagaagccug

SEQ ID NO: 3373011 - RNA, 16 nt, Human
acaggacucugccucc

SEQ ID NO: 3373012 - RNA, 18 nt, Human
acaggacuuaaaaugaca

SEQ ID NO: 3373013 - RNA, 11 nt, Human
acaggagaaau

SEQ ID NO: 3373014 - RNA, 17 nt, Human
acaggagaagaaagaac

SEQ ID NO: 3373015 - RNA, 18 nt, Human
acaggagagaaaggggau

SEQ ID NO: 3373016 - RNA, 13 nt, Human
acaggagcuaccu

SEQ ID NO: 3373017 - RNA, 14 nt, Human
acaggagcugggau

SEQ ID NO: 3373018 - RNA, 20 nt, Human
acaggaggacaauucaugaa

SEQ ID NO: 3373019 - RNA, 21 nt, Human
acaggaggcaggcauggcccu

SEQ ID NO: 3373020 - RNA, 19 nt, Human
acguuccucuccaccugca

SEQ ID NO: 3373021 - RNA, 16 nt, Human
acguuccuuacugcag

SEQ ID NO: 3373022 - RNA, 17 nt, Human
acguucucacacccacc

SEQ ID NO: 3373023 - RNA, 12 nt, Human
acguuggacuuu

SEQ ID NO: 3373024 - RNA, 18 nt, Human
acguuggagaagcccgug

SEQ ID NO: 3373025 - RNA, 18 nt, Human
acguuuaaaguucugugu

SEQ ID NO: 3373026 - RNA, 17 nt, Human
acguuuaagccaaaaca

SEQ ID NO: 3373027 - RNA, 17 nt, Human
acguuuagcugacaaaa

SEQ ID NO: 3373028 - RNA, 11 nt, Human
acguuuauaaa

SEQ ID NO: 3373029 - RNA, 19 nt, Human
acguuuauaaacagaaaug

SEQ ID NO: 3373030 - RNA, 12 nt, Human
acguuuccauca

SEQ ID NO: 3373031 - RNA, 15 nt, Human
acguuucuaaaggcu

SEQ ID NO: 3373032 - RNA, 12 nt, Human
acguuucucauu

SEQ ID NO: 3373033 - RNA, 23 nt, Human
acguuuggaagauccugugagga

SEQ ID NO: 3373034 - RNA, 19 nt, Human
acguuugguucaaaugugu

SEQ ID NO: 3373035 - RNA, 21 nt, Human
acguuuuauaagcaucauuau

SEQ ID NO: 3373036 - RNA, 18 nt, Human
acguuuuauuguguuuuu

SEQ ID NO: 3373037 - RNA, 12 nt, Human
acguuuucuaau

SEQ ID NO: 3373038 - RNA, 19 nt, Human
acguuuucuaauugcuuau

SEQ ID NO: 3373039 - RNA, 13 nt, Human
acguuuuuccuuu

SEQ ID NO: 3373040 - RNA, 17 nt, Human
acuaaaaauacaaacaa

SEQ ID NO: 3373041 - RNA, 13 nt, Human
acuaaaaauauug

SEQ ID NO: 3373042 - RNA, 21 nt, Human
acuaaaaauauuguuucugca

SEQ ID NO: 3373043 - RNA, 16 nt, Human
acuaaaacaaagccac

SEQ ID NO: 3373044 - RNA, 13 nt, Human
acuaaaagacauu

SEQ ID NO: 3373045 - RNA, 20 nt, Human
acuaaaagauauaagugcug

SEQ ID NO: 3373046 - RNA, 21 nt, Human
acuaaaagauauaagugcugu

SEQ ID NO: 3373047 - RNA, 22 nt, Human
acuaaaauuuuaggcacucuua

SEQ ID NO: 3373048 - RNA, 18 nt, Human
acuaaacacgugacacaa

SEQ ID NO: 3373049 - RNA, 19 nt, Human
acuaaacauaugauuucac

SEQ ID NO: 3373050 - RNA, 16 nt, Human
acuaaacucauuuaua

SEQ ID NO: 3373051 - RNA, 15 nt, Human
acuaaacucucuuug

SEQ ID NO: 3373052 - RNA, 15 nt, Human
acuaaacuuucacac

SEQ ID NO: 3373053 - RNA, 17 nt, Human
acuaaacuuuuuuucug

SEQ ID NO: 3373054 - RNA, 18 nt, Human
acuaaacuuuuuuucugu

SEQ ID NO: 3373055 - RNA, 12 nt, Human
acuaaagagaga

SEQ ID NO: 3373056 - RNA, 16 nt, Human
acuaaagauccaagaa

SEQ ID NO: 3373057 - RNA, 13 nt, Human
acuaaagcaauag

SEQ ID NO: 3373058 - RNA, 14 nt, Human
acuaaagcaauaga

SEQ ID NO: 3373059 - RNA, 16 nt, Human
acuaaagcaauagaaa

SEQ ID NO: 3373060 - RNA, 17 nt, Human
acuaaagcaguagaaau

SEQ ID NO: 3373061 - RNA, 22 nt, Human
acuaaagcaugaaaugugaauu

SEQ ID NO: 3373062 - RNA, 17 nt, Human
acuaaagccaaacauau

SEQ ID NO: 3373063 - RNA, 16 nt, Human
acuaaagccagccuga

SEQ ID NO: 3373064 - RNA, 22 nt, Human
acuaaaguauguaaaguaugua

SEQ ID NO: 3373065 - RNA, 22 nt, Human
acuaaaguuguacuuuaaaaau

SEQ ID NO: 3373066 - RNA, 16 nt, Human
acuaaauagcauguau

SEQ ID NO: 3373067 - RNA, 18 nt, Human
acuaaauagcauguauug

SEQ ID NO: 3373068 - RNA, 20 nt, Human
acuaaauagcauguauugug

SEQ ID NO: 3373069 - RNA, 23 nt, Human
acuaaauagcauguauugugucu

SEQ ID NO: 3373070 - RNA, 22 nt, Human
acuaaauaugaacccuuuguuu

SEQ ID NO: 3373071 - RNA, 18 nt, Human
acuaaaucagagacaaaa

SEQ ID NO: 3373072 - RNA, 20 nt, Human
acuaaaucuguaagcucuuu

SEQ ID NO: 3373073 - RNA, 15 nt, Human
acuaaaugcccugcu

SEQ ID NO: 3373074 - RNA, 17 nt, Human
acuaaaugccuaguuuu

SEQ ID NO: 3373075 - RNA, 11 nt, Human
acuaaauguua

SEQ ID NO: 3373076 - RNA, 12 nt, Human
acuaaauguuaa

SEQ ID NO: 3373077 - RNA, 14 nt, Human
acuaaauguucuau

SEQ ID NO: 3373078 - RNA, 20 nt, Human
acuaaauucgugauuuucaa

SEQ ID NO: 3373079 - RNA, 21 nt, Human
acuaaauuugauacuuauauu

SEQ ID NO: 3373080 - RNA, 14 nt, Human
acuaaauuugggga

SEQ ID NO: 3373081 - RNA, 20 nt, Human
acuaaauuuggggacagauu

SEQ ID NO: 3373082 - RNA, 21 nt, Human
acuaaauuuggggacagauuc

SEQ ID NO: 3373083 - RNA, 17 nt, Human
acaguucuuugggccag

SEQ ID NO: 3373084 - RNA, 21 nt, Human
acaguucuuugggccagacau

SEQ ID NO: 3373085 - RNA, 22 nt, Human
acaguucuuugggccagacaug

SEQ ID NO: 3373086 - RNA, 20 nt, Human
acaguugaaaaacagcugag

SEQ ID NO: 3373087 - RNA, 22 nt, Human
acaguugaagggaggggcugug

SEQ ID NO: 3373088 - RNA, 19 nt, Human
acaguugcacagcaucuca

SEQ ID NO: 3373089 - RNA, 20 nt, Human
acaguugcacagcaucucag

SEQ ID NO: 3373090 - RNA, 18 nt, Human
acaguugcagcccuugug

SEQ ID NO: 3373091 - RNA, 16 nt, Human
acaguugcucuaugcu

SEQ ID NO: 3373092 - RNA, 21 nt, Human
acaguugcugucauaagaaug

SEQ ID NO: 3373093 - RNA, 18 nt, Human
acaguuggaaauccaucc

SEQ ID NO: 3373094 - RNA, 17 nt, Human
acaguugggaaaauaug

SEQ ID NO: 3373095 - RNA, 14 nt, Human
acaguugggugaga

SEQ ID NO: 3373096 - RNA, 16 nt, Human
acaguuggguuuuuua

SEQ ID NO: 3373097 - RNA, 18 nt, Human
acaguuggguuuuuuaag

SEQ ID NO: 3373098 - RNA, 15 nt, Human
acaguugguaacuuu

SEQ ID NO: 3373099 - RNA, 16 nt, Human
acaguugguaacuuuu

SEQ ID NO: 3373100 - RNA, 22 nt, Human
acaguuguauuuaacagaaauu

SEQ ID NO: 3373101 - RNA, 17 nt, Human
acaguugugcaggaggu

SEQ ID NO: 3373102 - RNA, 19 nt, Human
acaguuuaccaguugccuu

SEQ ID NO: 3373103 - RNA, 15 nt, Human
acaguuuaucaugaa

SEQ ID NO: 3373104 - RNA, 18 nt, Human
acaguuuaucaugaagcc

SEQ ID NO: 3373105 - RNA, 19 nt, Human
acaguuuaucaugaagccu

SEQ ID NO: 3373106 - RNA, 21 nt, Human
acaguuuaugcagugcugcuu

SEQ ID NO: 3373107 - RNA, 13 nt, Human
acaguuugaaaua

SEQ ID NO: 3373108 - RNA, 14 nt, Human
acaguuugaaauaa

SEQ ID NO: 3373109 - RNA, 15 nt, Human
acaguuugaaauaag

SEQ ID NO: 3373110 - RNA, 12 nt, Human
acaguuugcugu

SEQ ID NO: 3373111 - RNA, 13 nt, Human
acaguuugcugua

SEQ ID NO: 3373112 - RNA, 16 nt, Human
acaguuuguaaauguu

SEQ ID NO: 3373113 - RNA, 20 nt, Human
acaguuuguuaguaugaggc

SEQ ID NO: 3373114 - RNA, 16 nt, Human
acaguuuguuuacaca

SEQ ID NO: 3373115 - RNA, 22 nt, Human
acaguuuguuuacacacgugca

SEQ ID NO: 3373116 - RNA, 14 nt, Human
acaguuuuaaagaa

SEQ ID NO: 3373117 - RNA, 19 nt, Human
acaguuuuaaagaaucauu

SEQ ID NO: 3373118 - RNA, 21 nt, Human
acaguuuuaaagaaucauuau

SEQ ID NO: 3373119 - RNA, 13 nt, Human
acaguuuuaacug

SEQ ID NO: 3373120 - RNA, 12 nt, Human
acaguuuuaugc

SEQ ID NO: 3373121 - RNA, 19 nt, Human
acaguuuuaugcucuuuuu

SEQ ID NO: 3373122 - RNA, 21 nt, Human
acaguuuucagaaaaagaaau

SEQ ID NO: 3373123 - RNA, 18 nt, Human
acaguuuuccaugaaaac

SEQ ID NO: 3373124 - RNA, 19 nt, Human
acaguuuuccaugaaaacg

SEQ ID NO: 3373125 - RNA, 19 nt, Human
acaguuuuccuaaauguau

SEQ ID NO: 3373126 - RNA, 20 nt, Human
acaguuuuccuaaauguaua

SEQ ID NO: 3373127 - RNA, 15 nt, Human
acaguuuucugagaa

SEQ ID NO: 3373128 - RNA, 17 nt, Human
acaguuuucugagaaag

SEQ ID NO: 3373129 - RNA, 14 nt, Human
acaguuuuuccugg

SEQ ID NO: 3373130 - RNA, 19 nt, Human
acauaaaaacaacuuuaua

SEQ ID NO: 3373131 - RNA, 14 nt, Human
acauaaaaaggaca

SEQ ID NO: 3373132 - RNA, 20 nt, Human
acauaaaaaggacaucagca

SEQ ID NO: 3373133 - RNA, 21 nt, Human
acauaaaaaggacaucagcaa

SEQ ID NO: 3373134 - RNA, 19 nt, Human
acauaaaaaugaucuaaac

SEQ ID NO: 3373135 - RNA, 15 nt, Human
acauaaaagaaauaa

SEQ ID NO: 3373136 - RNA, 23 nt, Human
acauaaacaagaccacguuucua

SEQ ID NO: 3373137 - RNA, 12 nt, Human
acauaaacauca

SEQ ID NO: 3373138 - RNA, 22 nt, Human
acauaaaccauuuuuguuacuc

SEQ ID NO: 3373139 - RNA, 21 nt, Human
acauaaagcaaauagacacag

SEQ ID NO: 3373140 - RNA, 12 nt, Human
acauaaaggaaa

SEQ ID NO: 3373141 - RNA, 14 nt, Human
acauaaaggaaaag

SEQ ID NO: 3373142 - RNA, 20 nt, Human
acauaaaggaaaagacacau

SEQ ID NO: 3373143 - RNA, 21 nt, Human
acauaaaggugguaugugugu

SEQ ID NO: 3373144 - RNA, 15 nt, Human
acauaaaguugauaa

SEQ ID NO: 3373145 - RNA, 15 nt, Human
acauaaauaaaauga

SEQ ID NO: 3373146 - RNA, 23 nt, Human
acauaaauaaauuaaauaaaaua

SEQ ID NO: 3373147 - RNA, 16 nt, Human
acauaaaugcagccca

SEQ ID NO: 3373148 - RNA, 20 nt, Human
acauaaauuuaguauuuugu

SEQ ID NO: 3373149 - RNA, 22 nt, Human
acauaacaaaaucacuuccaua

SEQ ID NO: 3373150 - RNA, 14 nt, Human
acauaacaaauaac

SEQ ID NO: 3373151 - RNA, 12 nt, Human
acauaacaagaa

SEQ ID NO: 3373152 - RNA, 13 nt, Human
acauaacaagaaa

SEQ ID NO: 3373153 - RNA, 14 nt, Human
acauaacaagaaaa

SEQ ID NO: 3373154 - RNA, 15 nt, Human
acauaacaagaaaau

SEQ ID NO: 3373155 - RNA, 16 nt, Human
acauaacauaaauuuu

SEQ ID NO: 3373156 - RNA, 14 nt, Human
acauaacguuuuuc

SEQ ID NO: 3373157 - RNA, 18 nt, Human
acauaacguuuuuccuuu

SEQ ID NO: 3373158 - RNA, 20 nt, Human
acauaacguuuuuccuuuaa

SEQ ID NO: 3373159 - RNA, 21 nt, Human
acauaacguuuuuccuuuaaa

SEQ ID NO: 3373160 - RNA, 22 nt, Human
acauaacuaaauuugauacuua

SEQ ID NO: 3373161 - RNA, 20 nt, Human
acauaacugaaaaugugcua

SEQ ID NO: 3373162 - RNA, 15 nt, Human
acauaagauaaaugu

SEQ ID NO: 3373163 - RNA, 14 nt, Human
acauaagaucacug

SEQ ID NO: 3373164 - RNA, 15 nt, Human
acauaagccauuauu

SEQ ID NO: 3373165 - RNA, 22 nt, Human
acauaagcggcguaaguuuaaa

SEQ ID NO: 3373166 - RNA, 17 nt, Human
acauaagcuauuuuucu

SEQ ID NO: 3373167 - RNA, 19 nt, Human
acauaagcuauuuuucuaa

SEQ ID NO: 3373168 - RNA, 20 nt, Human
acauaagcuauuuuucuaac

SEQ ID NO: 3373169 - RNA, 15 nt, Human
acauaaguaauucaa

SEQ ID NO: 3373170 - RNA, 21 nt, Human
acauaaguaauucaagaaaac

SEQ ID NO: 3373171 - RNA, 19 nt, Human
acauaaguuuaggauaaaa

SEQ ID NO: 3373172 - RNA, 17 nt, Human
acauaauacugaaccac

SEQ ID NO: 3373173 - RNA, 20 nt, Human
acauaaugcuuaauuucuaa

SEQ ID NO: 3373174 - RNA, 19 nt, Human
acauaaugggccacugaaa

SEQ ID NO: 3373175 - RNA, 17 nt, Human
acauaaugggguccugg

SEQ ID NO: 3373176 - RNA, 16 nt, Human
acauaauuaaaguguc

SEQ ID NO: 3373177 - RNA, 18 nt, Human
acauaauucacucugagu

SEQ ID NO: 3373178 - RNA, 18 nt, Human
acauaauuuaguuguuuc

SEQ ID NO: 3373179 - RNA, 18 nt, Human
acauaauuuuuuauucaa

SEQ ID NO: 3373180 - RNA, 11 nt, Human
acauacaaaug

SEQ ID NO: 3373181 - RNA, 21 nt, Human
acauacaaaugcaucuuugau

SEQ ID NO: 3373182 - RNA, 18 nt, Human
acauacaacacaaagaga

SEQ ID NO: 3373183 - RNA, 14 nt, Human
acauacaccagcau

SEQ ID NO: 3373184 - RNA, 22 nt, Human
acauacacccaaacacuuacac

SEQ ID NO: 3373185 - RNA, 22 nt, Human
acauacacuguauguuauagaa

SEQ ID NO: 3373186 - RNA, 20 nt, Human
acauacacuuguauaaaugu

SEQ ID NO: 3373187 - RNA, 19 nt, Human
acauacagaauuacuguaa

SEQ ID NO: 3373188 - RNA, 15 nt, Human
acauaccagcuuaga

SEQ ID NO: 3373189 - RNA, 22 nt, Human
acauacccgccuagcugcuguc

SEQ ID NO: 3373190 - RNA, 14 nt, Human
acauacccuccccc

SEQ ID NO: 3373191 - RNA, 22 nt, Human
acauacccugaccuggcccccu

SEQ ID NO: 3373192 - RNA, 14 nt, Human
acauaccuaagaag

SEQ ID NO: 3373193 - RNA, 16 nt, Human
acauaccuaagcaaac

SEQ ID NO: 3373194 - RNA, 19 nt, Human
acauacgauuuaagguauu

SEQ ID NO: 3373195 - RNA, 14 nt, Human
acauacggucaggu

SEQ ID NO: 3373196 - RNA, 15 nt, Human
acauacguaaaaauc

SEQ ID NO: 3373197 - RNA, 13 nt, Human
acauacuaaccag

SEQ ID NO: 3373198 - RNA, 16 nt, Human
acauacucauuuuuca

SEQ ID NO: 3373199 - RNA, 13 nt, Human
acauacucccauc

SEQ ID NO: 3373200 - RNA, 15 nt, Human
acauacuugaagggc

SEQ ID NO: 3373201 - RNA, 15 nt, Human
acauacuuuaucaau

SEQ ID NO: 3373202 - RNA, 22 nt, Human
acauacuuucauccugacucug

SEQ ID NO: 3373203 - RNA, 23 nt, Human
acauacuuucauccugacucugc

SEQ ID NO: 3373204 - RNA, 20 nt, Human
acauacuuuuuggguuuauu

SEQ ID NO: 3373205 - RNA, 12 nt, Human
acauagaaaguu

SEQ ID NO: 3373206 - RNA, 12 nt, Human
acauagaaaugg

SEQ ID NO: 3373207 - RNA, 21 nt, Human
acauagaaauugccugacgaa

SEQ ID NO: 3373208 - RNA, 16 nt, Human
acauagacagaagaaa

SEQ ID NO: 3373209 - RNA, 18 nt, Human
acauagacagaagaaaca

SEQ ID NO: 3373210 - RNA, 16 nt, Human
acauagacuagagaaa

SEQ ID NO: 3373211 - RNA, 20 nt, Human
acauagagagggagaagaag

SEQ ID NO: 3373212 - RNA, 22 nt, Human
acauagagccggguguccccaa

SEQ ID NO: 3373213 - RNA, 22 nt, Human
acauagagugacuccaagaaca

SEQ ID NO: 3373214 - RNA, 15 nt, Human
acauagauauuuuca

SEQ ID NO: 3373215 - RNA, 16 nt, Human
acauagauauuuucac

SEQ ID NO: 3373216 - RNA, 17 nt, Human
acauagauucaccugua

SEQ ID NO: 3373217 - RNA, 18 nt, Human
acauagcaugacauuucu

SEQ ID NO: 3373218 - RNA, 19 nt, Human
acauagcccacuuacauuu

SEQ ID NO: 3373219 - RNA, 19 nt, Human
acauagcccaucccugccu

SEQ ID NO: 3373220 - RNA, 16 nt, Human
acucccaucaccucua

SEQ ID NO: 3373221 - RNA, 15 nt, Human
acucccaucagccca

SEQ ID NO: 3373222 - RNA, 16 nt, Human
acucccauuccugaag

SEQ ID NO: 3373223 - RNA, 22 nt, Human
acucccauuccugaagaaccag

SEQ ID NO: 3373224 - RNA, 14 nt, Human
acuccccaaggaag

SEQ ID NO: 3373225 - RNA, 21 nt, Human
acuccccagccagccuggcug

SEQ ID NO: 3373226 - RNA, 15 nt, Human
acuccccaggccagg

SEQ ID NO: 3373227 - RNA, 19 nt, Human
acucaggugggcccucuga

SEQ ID NO: 3373228 - RNA, 14 nt, Human
acucaguaauuugu

SEQ ID NO: 3373229 - RNA, 19 nt, Human
acucagucucucuucucuc

SEQ ID NO: 3373230 - RNA, 11 nt, Human
acucagugcag

SEQ ID NO: 3373231 - RNA, 12 nt, Human
acucagugcaga

SEQ ID NO: 3373232 - RNA, 20 nt, Human
acucaguggguuaacaucag

SEQ ID NO: 3373233 - RNA, 16 nt, Human
acucaguuuaugcugu

SEQ ID NO: 3373234 - RNA, 20 nt, Human
acucaguuuauguuguacaa

SEQ ID NO: 3373235 - RNA, 19 nt, Human
acucaguuugucagacuuu

SEQ ID NO: 3373236 - RNA, 18 nt, Human
acucuauagacucuagga

SEQ ID NO: 3373237 - RNA, 23 nt, Human
acucuaucggagaacaugaauca

SEQ ID NO: 3373238 - RNA, 15 nt, Human
acucuaucugggccu

SEQ ID NO: 3373239 - RNA, 13 nt, Human
acucuauggucuu

SEQ ID NO: 3373240 - RNA, 17 nt, Human
acucuauguucuaagaa

SEQ ID NO: 3373241 - RNA, 14 nt, Human
acucuauucucaaa

SEQ ID NO: 3373242 - RNA, 13 nt, Human
acucuauucuuua

SEQ ID NO: 3373243 - RNA, 14 nt, Human
acucuauucuuuaa

SEQ ID NO: 3373244 - RNA, 15 nt, Human
acucuauucuuuaac

SEQ ID NO: 3373245 - RNA, 15 nt, Human
acucucagugcuucu

SEQ ID NO: 3373246 - RNA, 15 nt, Human
acucucauuccccag

SEQ ID NO: 3373247 - RNA, 14 nt, Human
acucucccauggcu

SEQ ID NO: 3373248 - RNA, 15 nt, Human
acucucccauggcuu

SEQ ID NO: 3373249 - RNA, 11 nt, Human
acucuccccac

SEQ ID NO: 3373250 - RNA, 21 nt, Human
acucuccccacgagggcuggc

SEQ ID NO: 3373251 - RNA, 22 nt, Human
acucuccgcggugguuguuggg

SEQ ID NO: 3373252 - RNA, 17 nt, Human
acucuccuccagaguca

SEQ ID NO: 3373253 - RNA, 19 nt, Human
acucuccucggcccccucc

SEQ ID NO: 3373254 - RNA, 14 nt, Human
acucuccucugcug

SEQ ID NO: 3373255 - RNA, 12 nt, Human
acucuccugccu

SEQ ID NO: 3373256 - RNA, 15 nt, Human
acucuccugggcccc

SEQ ID NO: 3373257 - RNA, 18 nt, Human
acucuccugggccccucc

SEQ ID NO: 3373258 - RNA, 13 nt, Human
acucuccuugcag

SEQ ID NO: 3373259 - RNA, 23 nt, Human
acucuccuuggugucgggcauga

SEQ ID NO: 3373260 - RNA, 20 nt, Human
acucucuccacccuauaugu

SEQ ID NO: 3373261 - RNA, 22 nt, Human
acucucuggaagccccugggcc

SEQ ID NO: 3373262 - RNA, 23 nt, Human
acucucuuggcugucacccgauc

SEQ ID NO: 3373263 - RNA, 13 nt, Human
acucugaacuuug

SEQ ID NO: 3373264 - RNA, 17 nt, Human
acucugaacuuuggaga

SEQ ID NO: 3373265 - RNA, 18 nt, Human
acucugaagccucuggga

SEQ ID NO: 3373266 - RNA, 22 nt, Human
acucugaauaagcacuuuuuaa

SEQ ID NO: 3373267 - RNA, 15 nt, Human
acucugaauuuaucu

SEQ ID NO: 3373268 - RNA, 13 nt, Human
acucugacaacag

SEQ ID NO: 3373269 - RNA, 18 nt, Human
acucugacaacagacuuc

SEQ ID NO: 3373270 - RNA, 18 nt, Human
acucugacaagggcugac

SEQ ID NO: 3373271 - RNA, 20 nt, Human
acucugacaagggcugaccu

SEQ ID NO: 3373272 - RNA, 14 nt, Human
acucugagcccaug

SEQ ID NO: 3373273 - RNA, 21 nt, Human
acucugagcgggaggcagagu

SEQ ID NO: 3373274 - RNA, 21 nt, Human
acucugaggcucuuucugggc

SEQ ID NO: 3373275 - RNA, 14 nt, Human
acucugaguguuuu

SEQ ID NO: 3373276 - RNA, 19 nt, Human
acucugauguaaaugaagu

SEQ ID NO: 3373277 - RNA, 21 nt, Human
acucugcacaugucuuguaca

SEQ ID NO: 3373278 - RNA, 16 nt, Human
acucugcagccucaga

SEQ ID NO: 3373279 - RNA, 18 nt, Human
acucugcaucccagcacc

SEQ ID NO: 3373280 - RNA, 21 nt, Human
acucugcaucccagcaccugc

SEQ ID NO: 3373281 - RNA, 16 nt, Human
acucugcauucuagua

SEQ ID NO: 3373282 - RNA, 11 nt, Human
acucugccagg

SEQ ID NO: 3373283 - RNA, 20 nt, Human
acucugccccccccccccau

SEQ ID NO: 3373284 - RNA, 13 nt, Human
acucugcccccug

SEQ ID NO: 3373285 - RNA, 19 nt, Human
acucugcccccugcuggcu

SEQ ID NO: 3373286 - RNA, 13 nt, Human
acucugcccucua

SEQ ID NO: 3373287 - RNA, 19 nt, Human
acucugccuacagaacuuc

SEQ ID NO: 3373288 - RNA, 15 nt, Human
acucugccuccucuu

SEQ ID NO: 3373289 - RNA, 23 nt, Human
acucugccuccucuucaacugac

SEQ ID NO: 3373290 - RNA, 16 nt, Human
acucugccucugccug

SEQ ID NO: 3373291 - RNA, 19 nt, Human
acucugcuaccuugcccca

SEQ ID NO: 3373292 - RNA, 14 nt, Human
acucugcucugaug

SEQ ID NO: 3373293 - RNA, 13 nt, Human
acucugcugaggg

SEQ ID NO: 3373294 - RNA, 15 nt, Human
acucugcugcuuaga

SEQ ID NO: 3373295 - RNA, 22 nt, Human
acucugcugucuaaccugugac

SEQ ID NO: 3373296 - RNA, 14 nt, Human
acucugcuguuuga

SEQ ID NO: 3373297 - RNA, 17 nt, Human
acucugcuucucugacu

SEQ ID NO: 3373298 - RNA, 15 nt, Human
acucugcuugauuuu

SEQ ID NO: 3373299 - RNA, 22 nt, Human
acucugcuuugacugagcagac

SEQ ID NO: 3373300 - RNA, 16 nt, Human
acucuggacuuucucu

SEQ ID NO: 3373301 - RNA, 15 nt, Human
acucuggcaaagcuu

SEQ ID NO: 3373302 - RNA, 23 nt, Human
acucuggcaaagcuuuuagaaau

SEQ ID NO: 3373303 - RNA, 17 nt, Human
acucuggcagccacacu

SEQ ID NO: 3373304 - RNA, 13 nt, Human
acucuggcagcuc

SEQ ID NO: 3373305 - RNA, 17 nt, Human
acucuggcagcucagag

SEQ ID NO: 3373306 - RNA, 19 nt, Human
acucuggcagcucagagag

SEQ ID NO: 3373307 - RNA, 12 nt, Human
acucuggcccug

SEQ ID NO: 3373308 - RNA, 11 nt, Human
acucuggccuc

SEQ ID NO: 3373309 - RNA, 14 nt, Human
acucuggccucugu

SEQ ID NO: 3373310 - RNA, 14 nt, Human
acucuggcuuccag

SEQ ID NO: 3373311 - RNA, 20 nt, Human
acucugggcacacucugcca

SEQ ID NO: 3373312 - RNA, 19 nt, Human
acucugggcuauggacaca

SEQ ID NO: 3373313 - RNA, 16 nt, Human
acucugggcuccagag

SEQ ID NO: 3373314 - RNA, 15 nt, Human
acucuggguccuucc

SEQ ID NO: 3373315 - RNA, 16 nt, Human
acucuggguccuuccu

SEQ ID NO: 3373316 - RNA, 18 nt, Human
acucuggguccuuccuga

SEQ ID NO: 3373317 - RNA, 18 nt, Human
acucuggucuucuuuggg

SEQ ID NO: 3373318 - RNA, 17 nt, Human
acucuggucuuggaauu

SEQ ID NO: 3373319 - RNA, 15 nt, Human
acucugguucuuugu

SEQ ID NO: 3373320 - RNA, 12 nt, Human
acucuguccuga

SEQ ID NO: 3373321 - RNA, 13 nt, Human
acucuguccugaa

SEQ ID NO: 3373322 - RNA, 19 nt, Human
acucuguccugaaggccug

SEQ ID NO: 3373323 - RNA, 21 nt, Human
acucugucgagccugggggcu

SEQ ID NO: 3373324 - RNA, 15 nt, Human
acucugucuaaaaaa

SEQ ID NO: 3373325 - RNA, 16 nt, Human
acucugucuucaccug

SEQ ID NO: 3373326 - RNA, 15 nt, Human
acucugucuuguguu

SEQ ID NO: 3373327 - RNA, 16 nt, Human
acucugugccagagcc

SEQ ID NO: 3373328 - RNA, 19 nt, Human
acucugugccagagccugg

SEQ ID NO: 3373329 - RNA, 22 nt, Human
acucugugccagagccuggggc

SEQ ID NO: 3373330 - RNA, 17 nt, Human
acucugugcuggccagc

SEQ ID NO: 3373331 - RNA, 15 nt, Human
acucuguggccaaag

SEQ ID NO: 3373332 - RNA, 16 nt, Human
acucugugucaggugg

SEQ ID NO: 3373333 - RNA, 19 nt, Human
acucugugucagguggggc

SEQ ID NO: 3373334 - RNA, 15 nt, Human
acucugugucugagu

SEQ ID NO: 3373335 - RNA, 19 nt, Human
acucuguucauuccuccag

SEQ ID NO: 3373336 - RNA, 21 nt, Human
acucuguucauuccuccaggu

SEQ ID NO: 3373337 - RNA, 15 nt, Human
acucuguuccuggcu

SEQ ID NO: 3373338 - RNA, 20 nt, Human
acucuuaaagcaaaaaauga

SEQ ID NO: 3373339 - RNA, 14 nt, Human
acucuuaaguuucu

SEQ ID NO: 3373340 - RNA, 21 nt, Human
acucuuaaguuucucagcucc

SEQ ID NO: 3373341 - RNA, 22 nt, Human
acucuuacgaauauuuucagua

SEQ ID NO: 3373342 - RNA, 14 nt, Human
acucuuagaaauga

SEQ ID NO: 3373343 - RNA, 19 nt, Human
acucuuagauggauucucc

SEQ ID NO: 3373344 - RNA, 18 nt, Human
acucuuauaucuauauuu

SEQ ID NO: 3373345 - RNA, 23 nt, Human
acucuuauaucuauauuuuacau

SEQ ID NO: 3373346 - RNA, 23 nt, Human
acucuuaucucagucaugcauaa

SEQ ID NO: 3373347 - RNA, 19 nt, Human
acucuucaaggucugcuuu

SEQ ID NO: 3373348 - RNA, 17 nt, Human
acucuucacaaaaucug

SEQ ID NO: 3373349 - RNA, 16 nt, Human
acucuucacucuucaa

SEQ ID NO: 3373350 - RNA, 13 nt, Human
acucuucacuguu

SEQ ID NO: 3373351 - RNA, 16 nt, Human
acucuucuaugaccca

SEQ ID NO: 3373352 - RNA, 12 nt, Human
acucuucucagc

SEQ ID NO: 3373353 - RNA, 12 nt, Human
acucuucucauu

SEQ ID NO: 3373354 - RNA, 24 nt, Human
acucuucucauuacuuguugccua

SEQ ID NO: 3373355 - RNA, 14 nt, Human
acucuucucucugc

SEQ ID NO: 3373356 - RNA, 15 nt, Human
acucuucucucugcu

SEQ ID NO: 3373357 - RNA, 18 nt, Human
acucuucucucugcucug

SEQ ID NO: 3373358 - RNA, 19 nt, Human
acucuucucucugcucuga

SEQ ID NO: 3373359 - RNA, 17 nt, Human
acucuucugaauugacu

SEQ ID NO: 3373360 - RNA, 19 nt, Human
acucuucuuaacuuaaauu

SEQ ID NO: 3373361 - RNA, 20 nt, Human
acucuucuugauuaaaaguu

SEQ ID NO: 3373362 - RNA, 13 nt, Human
acucuugaaaaau

SEQ ID NO: 3373363 - RNA, 16 nt, Human
acucuugaccucaggu

SEQ ID NO: 3373364 - RNA, 22 nt, Human
acucuugaguuguuuuuguaua

SEQ ID NO: 3373365 - RNA, 16 nt, Human
acucuugauuauccau

SEQ ID NO: 3373366 - RNA, 14 nt, Human
acucuuguaagauu

SEQ ID NO: 3373367 - RNA, 21 nt, Human
acucuuguaagauuuugaaaa

SEQ ID NO: 3373368 - RNA, 23 nt, Human
acucuuguaagauuuugaaaacu

SEQ ID NO: 3373369 - RNA, 19 nt, Human
acucuuuacccuugagccc

SEQ ID NO: 3373370 - RNA, 18 nt, Human
acucuuuauagugcacaa

SEQ ID NO: 3373371 - RNA, 15 nt, Human
acucuuuaugcuugc

SEQ ID NO: 3373372 - RNA, 11 nt, Human
acucuuucaaa

SEQ ID NO: 3373373 - RNA, 17 nt, Human
aaaaguuuacaacauaa

SEQ ID NO: 3373374 - RNA, 22 nt, Human
aaaaguuuacaaguguauauca

SEQ ID NO: 3373375 - RNA, 13 nt, Human
aaaaguuucaaug

SEQ ID NO: 3373376 - RNA, 18 nt, Human
aaaaguuucaaugugauu

SEQ ID NO: 3373377 - RNA, 15 nt, Human
aaaauaaaaaaaaga

SEQ ID NO: 3373378 - RNA, 17 nt, Human
aaaauaaaaaaaagaaa

SEQ ID NO: 3373379 - RNA, 15 nt, Human
aaaauaaaaaacacu

SEQ ID NO: 3373380 - RNA, 17 nt, Human
aaaauaaaaaacauaua

SEQ ID NO: 3373381 - RNA, 20 nt, Human
aaaauaaaaagaucacuuuc

SEQ ID NO: 3373382 - RNA, 17 nt, Human
aaaauaaaaagugacac

SEQ ID NO: 3373383 - RNA, 16 nt, Human
aaaauaaaaaguuaaa

SEQ ID NO: 3373384 - RNA, 18 nt, Human
aaaauaaaacauagcaaa

SEQ ID NO: 3373385 - RNA, 16 nt, Human
aaaauaaaacauuuua

SEQ ID NO: 3373386 - RNA, 22 nt, Human
aaaauaaaacauuuuaaaugga

SEQ ID NO: 3373387 - RNA, 22 nt, Human
aaaauaaaacccguugauuacu

SEQ ID NO: 3373388 - RNA, 14 nt, Human
aaaauaaaacuuuu

SEQ ID NO: 3373389 - RNA, 14 nt, Human
aaaauaaacuauaa

SEQ ID NO: 3373390 - RNA, 14 nt, Human
aaaauaaacuuucu

SEQ ID NO: 3373391 - RNA, 16 nt, Human
aaaauaaagaaaagau

SEQ ID NO: 3373392 - RNA, 12 nt, Human
aaaauaaagaau

SEQ ID NO: 3373393 - RNA, 15 nt, Human
aaaauaaagaaugga

SEQ ID NO: 3373394 - RNA, 16 nt, Human
aaaauaaaguuacauu

SEQ ID NO: 3373395 - RNA, 17 nt, Human
aaaauaaauaaaagccu

SEQ ID NO: 3373396 - RNA, 14 nt, Human
aaaauaaauaaaua

SEQ ID NO: 3373397 - RNA, 12 nt, Human
aaaauaaauaua

SEQ ID NO: 3373398 - RNA, 15 nt, Human
aaaauaaauggaaau

SEQ ID NO: 3373399 - RNA, 13 nt, Human
aaaauaaauugga

SEQ ID NO: 3373400 - RNA, 12 nt, Human
aaaauaaauuua

SEQ ID NO: 3373401 - RNA, 17 nt, Human
aaaauaacuaaaaugua

SEQ ID NO: 3373402 - RNA, 15 nt, Human
aaaauaacugaauuu

SEQ ID NO: 3373403 - RNA, 12 nt, Human
aaaauaacugua

SEQ ID NO: 3373404 - RNA, 18 nt, Human
aaaauaacuuagacucua

SEQ ID NO: 3373405 - RNA, 22 nt, Human
aaaauaagaaaagauguagauu

SEQ ID NO: 3373406 - RNA, 13 nt, Human
aaaauaagcaggu

SEQ ID NO: 3373407 - RNA, 14 nt, Human
aaaauaagcaggug

SEQ ID NO: 3373408 - RNA, 21 nt, Human
aaaauaagugaauaauaauua

SEQ ID NO: 3373409 - RNA, 12 nt, Human
aaaauaauaaau

SEQ ID NO: 3373410 - RNA, 13 nt, Human
aaaauaauaauaa

SEQ ID NO: 3373411 - RNA, 22 nt, Human
aaaauaauaauuuuuauauuua

SEQ ID NO: 3373412 - RNA, 23 nt, Human
aaaauaaucaaaagcuauuuaaa

SEQ ID NO: 3373413 - RNA, 14 nt, Human
aaaauaaucucuga

SEQ ID NO: 3373414 - RNA, 14 nt, Human
aaaauaaugcugca

SEQ ID NO: 3373415 - RNA, 20 nt, Human
aaaauaauuauauaacugua

SEQ ID NO: 3373416 - RNA, 14 nt, Human
aaaauaauuauuua

SEQ ID NO: 3373417 - RNA, 14 nt, Human
aaaauaauucuaaa

SEQ ID NO: 3373418 - RNA, 12 nt, Human
aaaauaauuuua

SEQ ID NO: 3373419 - RNA, 19 nt, Human
aaaauaauuuuaaaaaugg

SEQ ID NO: 3373420 - RNA, 15 nt, Human
aaaauaauuuuauga

SEQ ID NO: 3373421 - RNA, 14 nt, Human
aaaauaauuuugua

SEQ ID NO: 3373422 - RNA, 16 nt, Human
aaaauaauuuuuauau

SEQ ID NO: 3373423 - RNA, 17 nt, Human
aaaauaauuuuuauauu

SEQ ID NO: 3373424 - RNA, 20 nt, Human
aaaauaauuuuuauauuuga

SEQ ID NO: 3373425 - RNA, 14 nt, Human
aaaauacaaaauua

SEQ ID NO: 3373426 - RNA, 15 nt, Human
aaaauacaagacugc

SEQ ID NO: 3373427 - RNA, 14 nt, Human
aaaauacaauaaac

SEQ ID NO: 3373428 - RNA, 16 nt, Human
aaaauacaauuuuuau

SEQ ID NO: 3373429 - RNA, 12 nt, Human
aaaauacaugaa

SEQ ID NO: 3373430 - RNA, 12 nt, Human
aaaauacauucu

SEQ ID NO: 3373431 - RNA, 12 nt, Human
aaaauacauuuu

SEQ ID NO: 3373432 - RNA, 24 nt, Human
aaaauaccucaggaaagaauagaa

SEQ ID NO: 3373433 - RNA, 17 nt, Human
aaaauacuauuuaagau

SEQ ID NO: 3373434 - RNA, 16 nt, Human
aaaauacucuaauucu

SEQ ID NO: 3373435 - RNA, 15 nt, Human
aaaauacugccagau

SEQ ID NO: 3373436 - RNA, 14 nt, Human
aaaauacuuaaaug

SEQ ID NO: 3373437 - RNA, 21 nt, Human
aaaauacuugucaauauuuaa

SEQ ID NO: 3373438 - RNA, 21 nt, Human
aaaauacuuuuacucugccua

SEQ ID NO: 3373439 - RNA, 16 nt, Human
aaaauacuuuuccuua

SEQ ID NO: 3373440 - RNA, 12 nt, Human
aaaauagaaaag

SEQ ID NO: 3373441 - RNA, 16 nt, Human
aaaauagaaaaguuau

SEQ ID NO: 3373442 - RNA, 15 nt, Human
aaaauagaaacauau

SEQ ID NO: 3373443 - RNA, 20 nt, Human
aaaauagaaauuuuguaaga

SEQ ID NO: 3373444 - RNA, 13 nt, Human
aaaauagacacuc

SEQ ID NO: 3373445 - RNA, 21 nt, Human
aaaauagagcuuuuaaaaaug

SEQ ID NO: 3373446 - RNA, 22 nt, Human
aaaauagauaagaguagaaacu

SEQ ID NO: 3373447 - RNA, 23 nt, Human
aaaauagauauaaauuuuuaaga

SEQ ID NO: 3373448 - RNA, 17 nt, Human
aaaauagaugucuuuua

SEQ ID NO: 3373449 - RNA, 18 nt, Human
aaaauagauuuuauaaga

SEQ ID NO: 3373450 - RNA, 21 nt, Human
aaaauagauuuuauaagauga

SEQ ID NO: 3373451 - RNA, 10 nt, Human
aaaauagcca

SEQ ID NO: 3373452 - RNA, 15 nt, Human
aaaauagcguucuug

SEQ ID NO: 3373453 - RNA, 17 nt, Human
aaaauagcguucuugua

SEQ ID NO: 3373454 - RNA, 20 nt, Human
aaaauagcguucuuguaauu

SEQ ID NO: 3373455 - RNA, 12 nt, Human
aaaauagcuugu

SEQ ID NO: 3373456 - RNA, 15 nt, Human
aaaauaggagagaga

SEQ ID NO: 3373457 - RNA, 13 nt, Human
aaaauaggcagga

SEQ ID NO: 3373458 - RNA, 15 nt, Human
aaaauaggcuuuuua

SEQ ID NO: 3373459 - RNA, 21 nt, Human
aaaauaggcuuuuuaaucaug

SEQ ID NO: 3373460 - RNA, 22 nt, Human
aaaauagggacuaucuaucuua

SEQ ID NO: 3373461 - RNA, 18 nt, Human
aaaauaggggauauuuaa

SEQ ID NO: 3373462 - RNA, 20 nt, Human
aaaauaggguauauuuuccu

SEQ ID NO: 3373463 - RNA, 23 nt, Human
aaaauaguuaagacaugauuucc

SEQ ID NO: 3373464 - RNA, 13 nt, Human
aaaauaguuugga

SEQ ID NO: 3373465 - RNA, 19 nt, Human
aaaauaguuuggauaugua

SEQ ID NO: 3373466 - RNA, 22 nt, Human
aaaauaguuuggauauguaaaa

SEQ ID NO: 3373467 - RNA, 12 nt, Human
aaaauaguuugu

SEQ ID NO: 3373468 - RNA, 13 nt, Human
aaaauaguuuguu

SEQ ID NO: 3373469 - RNA, 19 nt, Human
aaaacacuguucucugccc

SEQ ID NO: 3373470 - RNA, 19 nt, Human
aaaacacuucuguccugug

SEQ ID NO: 3373471 - RNA, 13 nt, Human
aaaacagaaauug

SEQ ID NO: 3373472 - RNA, 14 nt, Human
aaaacagaacacuu

SEQ ID NO: 3373473 - RNA, 18 nt, Human
aaaacagaacaucauuag

SEQ ID NO: 3373474 - RNA, 21 nt, Human
aaaacagaacaucauuagaac

SEQ ID NO: 3373475 - RNA, 22 nt, Human
aaaacagaacaucauuagaaca

SEQ ID NO: 3373476 - RNA, 16 nt, Human
aaaacagcauugcuuu

SEQ ID NO: 3373477 - RNA, 22 nt, Human
aaaacagccauaggcccuuuca

SEQ ID NO: 3373478 - RNA, 13 nt, Human
aaaacaggcagcu

SEQ ID NO: 3373479 - RNA, 23 nt, Human
aaaacagggccacauagaugcug

SEQ ID NO: 3373480 - RNA, 17 nt, Human
aaaacagguagaauuau

SEQ ID NO: 3373481 - RNA, 13 nt, Human
aaaacaguauuua

SEQ ID NO: 3373482 - RNA, 17 nt, Human
aaaacaguauuuauuuu

SEQ ID NO: 3373483 - RNA, 20 nt, Human
aaaacaguauuuauuuugua

SEQ ID NO: 3373484 - RNA, 15 nt, Human
aaaacauaacauaaa

SEQ ID NO: 3373485 - RNA, 20 nt, Human
aaaacauaaucuucugccuu

SEQ ID NO: 3373486 - RNA, 16 nt, Human
aaaacauagcaucuca

SEQ ID NO: 3373487 - RNA, 19 nt, Human
aaaacauauucuugugcuu

SEQ ID NO: 3373488 - RNA, 21 nt, Human
aaaacauccagauacacccaa

SEQ ID NO: 3373489 - RNA, 13 nt, Human
aaaacaucuauuc

SEQ ID NO: 3373490 - RNA, 16 nt, Human
aaaacaucuuugaaau

SEQ ID NO: 3373491 - RNA, 21 nt, Human
aaaacaugcagaacaaaugaa

SEQ ID NO: 3373492 - RNA, 15 nt, Human
aaaacaugcuacaca

SEQ ID NO: 3373493 - RNA, 15 nt, Human
aaaacauguuuauuu

SEQ ID NO: 3373494 - RNA, 15 nt, Human
aaaacauuaagaaaa

SEQ ID NO: 3373495 - RNA, 19 nt, Human
aaaacauucuaucuacuga

SEQ ID NO: 3373496 - RNA, 22 nt, Human
aaaacauugccuuugaauguua

SEQ ID NO: 3373497 - RNA, 21 nt, Human
aaaacauuggauuauccugag

SEQ ID NO: 3373498 - RNA, 13 nt, Human
aaaacauuguucc

SEQ ID NO: 3373499 - RNA, 13 nt, Human
aaaacauuuauuu

SEQ ID NO: 3373500 - RNA, 22 nt, Human
aaaacauuuauuuugacauaaa

SEQ ID NO: 3373501 - RNA, 13 nt, Human
aaaaccacagcag

SEQ ID NO: 3373502 - RNA, 12 nt, Human
aaaaccaccccu

SEQ ID NO: 3373503 - RNA, 16 nt, Human
aaaaccacuagaacuc

SEQ ID NO: 3373504 - RNA, 17 nt, Human
aaaaccaguauuguaca

SEQ ID NO: 3373505 - RNA, 13 nt, Human
aaaaccauugcuu

SEQ ID NO: 3373506 - RNA, 14 nt, Human
aaaaccauugcuuc

SEQ ID NO: 3373507 - RNA, 16 nt, Human
aaaaccauugcuucac

SEQ ID NO: 3373508 - RNA, 13 nt, Human
aaaaccauuugaa

SEQ ID NO: 3373509 - RNA, 15 nt, Human
aaaacccagagagga

SEQ ID NO: 3373510 - RNA, 15 nt, Human
aaaacccagauaaag

SEQ ID NO: 3373511 - RNA, 22 nt, Human
aaaacccagcugcaccccuucc

SEQ ID NO: 3373512 - RNA, 20 nt, Human
aaaaccccccagauaucauc

SEQ ID NO: 3373513 - RNA, 19 nt, Human
aaaacccuugggccagaag

SEQ ID NO: 3373514 - RNA, 23 nt, Human
aaaaccguguuugucucuucugg

SEQ ID NO: 3373515 - RNA, 20 nt, Human
aaaaccuaaguccuuuaugu

SEQ ID NO: 3373516 - RNA, 13 nt, Human
aaaaccugacaaa

SEQ ID NO: 3373517 - RNA, 11 nt, Human
aaaaccuguuc

SEQ ID NO: 3373518 - RNA, 23 nt, Human
aaaaccuguucaagucuaccaac

SEQ ID NO: 3373519 - RNA, 22 nt, Human
aaaaccuuccaugucaagauuc

SEQ ID NO: 3373520 - RNA, 11 nt, Human
aaacagcugcc

SEQ ID NO: 3373521 - RNA, 14 nt, Human
aaacagcugccuua

SEQ ID NO: 3373522 - RNA, 19 nt, Human
aaacagcugccuuagcuuc

SEQ ID NO: 3373523 - RNA, 16 nt, Human
aaacaggaaaaaaacu

SEQ ID NO: 3373524 - RNA, 20 nt, Human
aaacaggaaaaaaacuuuua

SEQ ID NO: 3373525 - RNA, 16 nt, Human
aaacaggagacaggaa

SEQ ID NO: 3373526 - RNA, 12 nt, Human
aaacaggagaga

SEQ ID NO: 3373527 - RNA, 12 nt, Human
aaacaggaucag

SEQ ID NO: 3373528 - RNA, 18 nt, Human
aaaauauacuguaaagaa

SEQ ID NO: 3373529 - RNA, 23 nt, Human
aaaauauacuguaaagaaagaga

SEQ ID NO: 3373530 - RNA, 16 nt, Human
aaaauauagcuguaca

SEQ ID NO: 3373531 - RNA, 20 nt, Human
aaaauauagcuguacaaaua

SEQ ID NO: 3373532 - RNA, 13 nt, Human
aaaauauauaucu

SEQ ID NO: 3373533 - RNA, 12 nt, Human
aaaauauaucuu

SEQ ID NO: 3373534 - RNA, 12 nt, Human
aaaauauaugua

SEQ ID NO: 3373535 - RNA, 14 nt, Human
aaaauauauuuaau

SEQ ID NO: 3373536 - RNA, 18 nt, Human
aaaauauauuuauaagga

SEQ ID NO: 3373537 - RNA, 14 nt, Human
aaaauaucauucag

SEQ ID NO: 3373538 - RNA, 19 nt, Human
aaaauaucuaguaauauau

SEQ ID NO: 3373539 - RNA, 12 nt, Human
aaaauaucuugg

SEQ ID NO: 3373540 - RNA, 11 nt, Human
aaaauaugcau

SEQ ID NO: 3373541 - RNA, 14 nt, Human
aaaauauguaccaa

SEQ ID NO: 3373542 - RNA, 18 nt, Human
aaaauaugugaaggaccu

SEQ ID NO: 3373543 - RNA, 22 nt, Human
aaaauauuacucaguuuauguu

SEQ ID NO: 3373544 - RNA, 16 nt, Human
aaaauauuauaacuua

SEQ ID NO: 3373545 - RNA, 19 nt, Human
aaaauauuauaacuuaaaa

SEQ ID NO: 3373546 - RNA, 19 nt, Human
aaaauauuauuuuauuaua

SEQ ID NO: 3373547 - RNA, 14 nt, Human
aaaauauucaauaa

SEQ ID NO: 3373548 - RNA, 16 nt, Human
aaaauauuguuucugc

SEQ ID NO: 3373549 - RNA, 22 nt, Human
aaaauauuguuucugcauucau

SEQ ID NO: 3373550 - RNA, 19 nt, Human
aaaauauuguuuuacaaua

SEQ ID NO: 3373551 - RNA, 20 nt, Human
aaaauauuguuuuacaauag

SEQ ID NO: 3373552 - RNA, 16 nt, Human
aaaauauuuaaaaaug

SEQ ID NO: 3373553 - RNA, 14 nt, Human
aaaauauuuaugaa

SEQ ID NO: 3373554 - RNA, 23 nt, Human
aaaauauuuauuaaauaaaauca

SEQ ID NO: 3373555 - RNA, 13 nt, Human
aaaauauuuucau

SEQ ID NO: 3373556 - RNA, 20 nt, Human
aaaauauuuucauacagcau

SEQ ID NO: 3373557 - RNA, 12 nt, Human
aaaauauuuucu

SEQ ID NO: 3373558 - RNA, 23 nt, Human
aaaauauuuucucuguacuuuuc

SEQ ID NO: 3373559 - RNA, 17 nt, Human
aaaauauuuucugugug

SEQ ID NO: 3373560 - RNA, 19 nt, Human
aaaauauuuucuguguguu

SEQ ID NO: 3373561 - RNA, 15 nt, Human
aaaauauuuugaucu

SEQ ID NO: 3373562 - RNA, 21 nt, Human
aaaauauuuugaucuucaaca

SEQ ID NO: 3373563 - RNA, 12 nt, Human
aaaauauuuugu

SEQ ID NO: 3373564 - RNA, 20 nt, Human
aaaauauuuuuuauauauac

SEQ ID NO: 3373565 - RNA, 16 nt, Human
aaaaucaaagcugagg

SEQ ID NO: 3373566 - RNA, 21 nt, Human
aaaaucaacuuuuuauugccu

SEQ ID NO: 3373567 - RNA, 22 nt, Human
aaaaucaacuuuuuauugccuu

SEQ ID NO: 3373568 - RNA, 15 nt, Human
aaaaucaaguauuau

SEQ ID NO: 3373569 - RNA, 14 nt, Human
aaaaucacuugauu

SEQ ID NO: 3373570 - RNA, 21 nt, Human
aaaaucacuuugucuaacuca

SEQ ID NO: 3373571 - RNA, 14 nt, Human
aaaaucagccaauu

SEQ ID NO: 3373572 - RNA, 17 nt, Human
aaaaucagccaauuaug

SEQ ID NO: 3373573 - RNA, 22 nt, Human
aaaaucagccaauuauguuaaa

SEQ ID NO: 3373574 - RNA, 21 nt, Human
aaaaucagccugcuccagcug

SEQ ID NO: 3373575 - RNA, 12 nt, Human
aaaaucaucaag

SEQ ID NO: 3373576 - RNA, 14 nt, Human
aaaaucaucuauuu

SEQ ID NO: 3373577 - RNA, 15 nt, Human
aaaaucaucuauuuu

SEQ ID NO: 3373578 - RNA, 18 nt, Human
aaaaucaucuauuuugau

SEQ ID NO: 3373579 - RNA, 12 nt, Human
aaaaucaugaga

SEQ ID NO: 3373580 - RNA, 19 nt, Human
aaaaucaugccaguauuuu

SEQ ID NO: 3373581 - RNA, 13 nt, Human
aaaaucauggaau

SEQ ID NO: 3373582 - RNA, 19 nt, Human
aaaaucauggaaugguuau

SEQ ID NO: 3373583 - RNA, 12 nt, Human
aaaaucauugau

SEQ ID NO: 3373584 - RNA, 11 nt, Human
aaaaucauuuc

SEQ ID NO: 3373585 - RNA, 12 nt, Human
aaaaucauuucu

SEQ ID NO: 3373586 - RNA, 14 nt, Human
aaaauccaaauauu

SEQ ID NO: 3373587 - RNA, 22 nt, Human
aaaauccaaauauuguuaaggg

SEQ ID NO: 3373588 - RNA, 21 nt, Human
aaaauccacuuuaucuugaau

SEQ ID NO: 3373589 - RNA, 21 nt, Human
aaaauccagaaacuuguucuu

SEQ ID NO: 3373590 - RNA, 15 nt, Human
aaaauccugugcaau

SEQ ID NO: 3373591 - RNA, 21 nt, Human
aaaauccuuccaaagaauucu

SEQ ID NO: 3373592 - RNA, 13 nt, Human
aaaaucuauucug

SEQ ID NO: 3373593 - RNA, 15 nt, Human
aaaaucucaaauuuc

SEQ ID NO: 3373594 - RNA, 11 nt, Human
aaaaucuccua

SEQ ID NO: 3373595 - RNA, 14 nt, Human
aaaaucuccuaaau

SEQ ID NO: 3373596 - RNA, 18 nt, Human
aaaaucucuccacuuuca

SEQ ID NO: 3373597 - RNA, 20 nt, Human
aaaaucucuccacuuucagc

SEQ ID NO: 3373598 - RNA, 23 nt, Human
aaaaucugaaaaugugaauaaaa

SEQ ID NO: 3373599 - RNA, 14 nt, Human
aaaaucugaagauu

SEQ ID NO: 3373600 - RNA, 16 nt, Human
aaaaucugaagauugu

SEQ ID NO: 3373601 - RNA, 18 nt, Human
aaaaucugaagauuguuu

SEQ ID NO: 3373602 - RNA, 15 nt, Human
aaaaucugcuaggga

SEQ ID NO: 3373603 - RNA, 15 nt, Human
aaaaucugcuguuaa

SEQ ID NO: 3373604 - RNA, 19 nt, Human
aaaaucuguuugaucccug

SEQ ID NO: 3373605 - RNA, 14 nt, Human
aaaaucuuaaugua

SEQ ID NO: 3373606 - RNA, 19 nt, Human
aaaaucuuauaguucuagg

SEQ ID NO: 3373607 - RNA, 18 nt, Human
aaaaucuuauuaaaguuu

SEQ ID NO: 3373608 - RNA, 21 nt, Human
aaaaucuuauuaaaguuucaa

SEQ ID NO: 3373609 - RNA, 20 nt, Human
aaaaucuuggagacccugca

SEQ ID NO: 3373610 - RNA, 18 nt, Human
aaaaucuuggcacagaaa

SEQ ID NO: 3373611 - RNA, 18 nt, Human
aaaaucuugugcuagaau

SEQ ID NO: 3373612 - RNA, 17 nt, Human
aaaaucuuucuuucuua

SEQ ID NO: 3373613 - RNA, 19 nt, Human
aaaaucuuucuuucuuaga

SEQ ID NO: 3373614 - RNA, 9 nt, Human
aaaaugaaa

SEQ ID NO: 3373615 - RNA, 13 nt, Human
aaaaugaaagaug

SEQ ID NO: 3373616 - RNA, 22 nt, Human
aaaaugaaagcaugucucaaua

SEQ ID NO: 3373617 - RNA, 15 nt, Human
aaaaugaaauauuuu

SEQ ID NO: 3373618 - RNA, 15 nt, Human
aaaaugaaauguuuu

SEQ ID NO: 3373619 - RNA, 15 nt, Human
aaaaugaagaauuua

SEQ ID NO: 3373620 - RNA, 16 nt, Human
aaaaugaagaauuuaa

SEQ ID NO: 3373621 - RNA, 15 nt, Human
aaaaugaagauuauu

SEQ ID NO: 3373622 - RNA, 23 nt, Human
aaaaugaagauuauuuuuuauga

SEQ ID NO: 3373623 - RNA, 20 nt, Human
aaaaugaagguuaggauuua

SEQ ID NO: 3373624 - RNA, 14 nt, Human
aaaaugaauaucua

SEQ ID NO: 3373625 - RNA, 18 nt, Human
aaaaugaauaucuauuaa

SEQ ID NO: 3373626 - RNA, 14 nt, Human
aaaaugacauccca

SEQ ID NO: 3373627 - RNA, 16 nt, Human
aaaaugacaucuuuuu

SEQ ID NO: 3373628 - RNA, 15 nt, Human
aaaaugagaacaugu

SEQ ID NO: 3373629 - RNA, 18 nt, Human
aaaaugagaacauguugg

SEQ ID NO: 3373630 - RNA, 16 nt, Human
aaaaugagcuugauua

SEQ ID NO: 3373631 - RNA, 16 nt, Human
aaaaugaggaauguau

SEQ ID NO: 3373632 - RNA, 18 nt, Human
aaaaugagguucaacugu

SEQ ID NO: 3373633 - RNA, 20 nt, Human
aaaaugaguugugaaaguuu

SEQ ID NO: 3373634 - RNA, 23 nt, Human
aaaaugaguuuuuauggggcuga

SEQ ID NO: 3373635 - RNA, 16 nt, Human
aaaaugauguucauuu

SEQ ID NO: 3373636 - RNA, 22 nt, Human
aaaaugauuuguaguggaaaca

SEQ ID NO: 3373637 - RNA, 18 nt, Human
aaaaugcaaauccuaugu

SEQ ID NO: 3373638 - RNA, 22 nt, Human
aaaaugcaaauccuaugugauu

SEQ ID NO: 3373639 - RNA, 17 nt, Human
aaaaugcaauauuugua

SEQ ID NO: 3373640 - RNA, 14 nt, Human
aaaaugcacauagc

SEQ ID NO: 3373641 - RNA, 14 nt, Human
aaaaugcauuguau

SEQ ID NO: 3373642 - RNA, 17 nt, Human
aaaaugccaagacauga

SEQ ID NO: 3373643 - RNA, 21 nt, Human
aaaaugccauaauacaaaagg

SEQ ID NO: 3373644 - RNA, 17 nt, Human
aaaaugcccuuaaauca

SEQ ID NO: 3373645 - RNA, 16 nt, Human
aaaaugccucagugua

SEQ ID NO: 3373646 - RNA, 20 nt, Human
aaaaugccucaguguauuug

SEQ ID NO: 3373647 - RNA, 12 nt, Human
aaaaugccuuug

SEQ ID NO: 3373648 - RNA, 13 nt, Human
aaaaugcuagguu

SEQ ID NO: 3373649 - RNA, 16 nt, Human
aaaaugcuagguucua

SEQ ID NO: 3373650 - RNA, 17 nt, Human
aaaaugcucuuauuuca

SEQ ID NO: 3373651 - RNA, 16 nt, Human
aaaaugcugaacauug

SEQ ID NO: 3373652 - RNA, 14 nt, Human
aaaaugcuucaaag

SEQ ID NO: 3373653 - RNA, 12 nt, Human
aaaauggaaaga

SEQ ID NO: 3373654 - RNA, 16 nt, Human
aaaauggaaccaggcu

SEQ ID NO: 3373655 - RNA, 14 nt, Human
aaaauggaacugug

SEQ ID NO: 3373656 - RNA, 12 nt, Human
aaaauggaauac

SEQ ID NO: 3373657 - RNA, 23 nt, Human
aaaauggacaugguggcuuuguu

SEQ ID NO: 3373658 - RNA, 14 nt, Human
aaaauggcagugau

SEQ ID NO: 3373659 - RNA, 23 nt, Human
aaaauggccauuugcuuuuucac

SEQ ID NO: 3373660 - RNA, 15 nt, Human
aaaaugggacuucuu

SEQ ID NO: 3373661 - RNA, 19 nt, Human
aaaaugggacuucuuuuca

SEQ ID NO: 3373662 - RNA, 21 nt, Human
aaaaugggacuucuuuucaca

SEQ ID NO: 3373663 - RNA, 16 nt, Human
aaaauggguuuuacug

SEQ ID NO: 3373664 - RNA, 24 nt, Human
aaaaugguaucaaaauuacauaua

SEQ ID NO: 3373665 - RNA, 15 nt, Human
aaaauggucucuaac

SEQ ID NO: 3373666 - RNA, 22 nt, Human
aaacuagaaagcagagauuuuc

SEQ ID NO: 3373667 - RNA, 15 nt, Human
aaacuagaauuucau

SEQ ID NO: 3373668 - RNA, 16 nt, Human
aaacuagaugaccuca

SEQ ID NO: 3373669 - RNA, 20 nt, Human
aaacuagaugaccucauuaa

SEQ ID NO: 3373670 - RNA, 20 nt, Human
aaacuagcauaucugccuuu

SEQ ID NO: 3373671 - RNA, 22 nt, Human
aaacuagcauaucugccuuuau

SEQ ID NO: 3373672 - RNA, 17 nt, Human
aaacuaggcauuuguaa

SEQ ID NO: 3373673 - RNA, 22 nt, Human
aaacuaggugcauauuuauaaa

SEQ ID NO: 3373674 - RNA, 15 nt, Human
aaacuaguaguucuc

SEQ ID NO: 3373675 - RNA, 18 nt, Human
aaacuaguaguucucuug

SEQ ID NO: 3373676 - RNA, 14 nt, Human
aaacuaguuuuucc

SEQ ID NO: 3373677 - RNA, 11 nt, Human
aaacuaucagu

SEQ ID NO: 3373678 - RNA, 15 nt, Human
aaacuaucuggccau

SEQ ID NO: 3373679 - RNA, 16 nt, Human
aaacuaucuuggugaa

SEQ ID NO: 3373680 - RNA, 20 nt, Human
aaacuauguguuuuucucau

SEQ ID NO: 3373681 - RNA, 20 nt, Human
aaacuauuggaaaguacucc

SEQ ID NO: 3373682 - RNA, 13 nt, Human
aaacuauuuaacu

SEQ ID NO: 3373683 - RNA, 17 nt, Human
aaacuauuuaacuugag

SEQ ID NO: 3373684 - RNA, 16 nt, Human
aaacaggcacugcccu

SEQ ID NO: 3373685 - RNA, 12 nt, Human
aaacaggcagcu

SEQ ID NO: 3373686 - RNA, 13 nt, Human
aaacaggcccagc

SEQ ID NO: 3373687 - RNA, 14 nt, Human
aaacaggcccagca

SEQ ID NO: 3373688 - RNA, 19 nt, Human
aaacagggcaucuccagga

SEQ ID NO: 3373689 - RNA, 15 nt, Human
aaacagggcugccuu

SEQ ID NO: 3373690 - RNA, 21 nt, Human
aaacagguauauacuuugaaa

SEQ ID NO: 3373691 - RNA, 18 nt, Human
aaacagguggugagaaau

SEQ ID NO: 3373692 - RNA, 12 nt, Human
aaacaguauuua

SEQ ID NO: 3373693 - RNA, 15 nt, Human
aaacaguauuuauuu

SEQ ID NO: 3373694 - RNA, 17 nt, Human
aaacaguauuucauugc

SEQ ID NO: 3373695 - RNA, 12 nt, Human
aaacagugccug

SEQ ID NO: 3373696 - RNA, 14 nt, Human
aaacagugcuguuu

SEQ ID NO: 3373697 - RNA, 18 nt, Human
aaacaguuaacuuucaga

SEQ ID NO: 3373698 - RNA, 18 nt, Human
aaacaguugcacagcauc

SEQ ID NO: 3373699 - RNA, 19 nt, Human
aaacaguugcacagcaucu

SEQ ID NO: 3373700 - RNA, 19 nt, Human
aaacaguugcauguaguaa

SEQ ID NO: 3373701 - RNA, 13 nt, Human
aaacauaaaaagu

SEQ ID NO: 3373702 - RNA, 17 nt, Human
aaacauaacauaaauuu

SEQ ID NO: 3373703 - RNA, 14 nt, Human
aaacauaagugcaa

SEQ ID NO: 3373704 - RNA, 17 nt, Human
aaacauaccaacauguu

SEQ ID NO: 3373705 - RNA, 15 nt, Human
aaacauaugauuuca

SEQ ID NO: 3373706 - RNA, 19 nt, Human
aaacaucaguuacucugaa

SEQ ID NO: 3373707 - RNA, 23 nt, Human
aaacaucaguuacucugaagggc

SEQ ID NO: 3373708 - RNA, 21 nt, Human
aaacaucauuccuuuuuauuu

SEQ ID NO: 3373709 - RNA, 22 nt, Human
aaacauccuacaagacacagug

SEQ ID NO: 3373710 - RNA, 13 nt, Human
aaacaucuagaaa

SEQ ID NO: 3373711 - RNA, 23 nt, Human
aaacaucucaucaugucuauugu

SEQ ID NO: 3373712 - RNA, 13 nt, Human
aaacaucuccuua

SEQ ID NO: 3373713 - RNA, 11 nt, Human
aaacaucugga

SEQ ID NO: 3373714 - RNA, 16 nt, Human
aaacaucuuugaaauu

SEQ ID NO: 3373715 - RNA, 19 nt, Human
aaacaugacccuaaaucuu

SEQ ID NO: 3373716 - RNA, 18 nt, Human
aaacaugcuguacauacu

SEQ ID NO: 3373717 - RNA, 20 nt, Human
aaacaugcuguacauacuuu

SEQ ID NO: 3373718 - RNA, 16 nt, Human
aaacauggccuuugcu

SEQ ID NO: 3373719 - RNA, 17 nt, Human
aaacaugguuacaauca

SEQ ID NO: 3373720 - RNA, 12 nt, Human
aaacauguaugu

SEQ ID NO: 3373721 - RNA, 16 nt, Human
aaacauguuagaagca

SEQ ID NO: 3373722 - RNA, 23 nt, Human
aaacauguuucuuuguaaugaaa

SEQ ID NO: 3373723 - RNA, 13 nt, Human
aaacauuaagaaa

SEQ ID NO: 3373724 - RNA, 15 nt, Human
aaacauuaagaaaau

SEQ ID NO: 3373725 - RNA, 20 nt, Human
aaacauuaauagcagccuuu

SEQ ID NO: 3373726 - RNA, 21 nt, Human
aaacauuaauagcagccuuuc

SEQ ID NO: 3373727 - RNA, 24 nt, Human
aaacauuaauguugauuucuaguu

SEQ ID NO: 3373728 - RNA, 23 nt, Human
aaacauucugauuuggaaaaaga

SEQ ID NO: 3373729 - RNA, 24 nt, Human
aaacauugacgauuccuucucuga

SEQ ID NO: 3373730 - RNA, 17 nt, Human
aaacauugccuuugaau

SEQ ID NO: 3373731 - RNA, 17 nt, Human
aaacauuggaagcaggu

SEQ ID NO: 3373732 - RNA, 17 nt, Human
aaacauugguucuugua

SEQ ID NO: 3373733 - RNA, 18 nt, Human
aaacauugguucuuguau

SEQ ID NO: 3373734 - RNA, 17 nt, Human
aaacauuguguugacau

SEQ ID NO: 3373735 - RNA, 11 nt, Human
aaacauuuaua

SEQ ID NO: 3373736 - RNA, 14 nt, Human
aaacauuuauuuug

SEQ ID NO: 3373737 - RNA, 18 nt, Human
aaacauuuauuuugacau

SEQ ID NO: 3373738 - RNA, 16 nt, Human
aaacauuucauaauuu

SEQ ID NO: 3373739 - RNA, 22 nt, Human
aaacauuucauaauuuguuucc

SEQ ID NO: 3373740 - RNA, 14 nt, Human
aaacauuugcugaa

SEQ ID NO: 3373741 - RNA, 13 nt, Human
aaacauuuucaca

SEQ ID NO: 3373742 - RNA, 21 nt, Human
aaacauuuuguggucauuaag

SEQ ID NO: 3373743 - RNA, 15 nt, Human
aaaccaaaaacugaa

SEQ ID NO: 3373744 - RNA, 13 nt, Human
aaaccaaaaugac

SEQ ID NO: 3373745 - RNA, 17 nt, Human
aaaccaaaaugacaucu

SEQ ID NO: 3373746 - RNA, 18 nt, Human
aaaccaaaaugacaucuu

SEQ ID NO: 3373747 - RNA, 20 nt, Human
aaaccaaaaugacaucuuuu

SEQ ID NO: 3373748 - RNA, 23 nt, Human
aaaccaaaaugacaucuuuuuaa

SEQ ID NO: 3373749 - RNA, 14 nt, Human
aaaccaaaaugaua

SEQ ID NO: 3373750 - RNA, 19 nt, Human
aaaccaaagagggcuuccu

SEQ ID NO: 3373751 - RNA, 21 nt, Human
aaaccaaagagggcuuccucu

SEQ ID NO: 3373752 - RNA, 18 nt, Human
aaaccaaaucacugaacu

SEQ ID NO: 3373753 - RNA, 15 nt, Human
aaaccaagcaaagga

SEQ ID NO: 3373754 - RNA, 16 nt, Human
aaaccaagcaucaggg

SEQ ID NO: 3373755 - RNA, 14 nt, Human
aaaccaagccgugg

SEQ ID NO: 3373756 - RNA, 20 nt, Human
aaaccaagucggaacagcag

SEQ ID NO: 3373757 - RNA, 17 nt, Human
aaaccaauccuaugcau

SEQ ID NO: 3373758 - RNA, 19 nt, Human
aaaccacaaaggccaaacu

SEQ ID NO: 3373759 - RNA, 20 nt, Human
aaaccacaaggcuguugcau

SEQ ID NO: 3373760 - RNA, 12 nt, Human
aaaccacacaaa

SEQ ID NO: 3373761 - RNA, 21 nt, Human
aaaccacauuggagauguuua

SEQ ID NO: 3373762 - RNA, 19 nt, Human
aaaccaccagaagcccaga

SEQ ID NO: 3373763 - RNA, 16 nt, Human
aaaccacuagaacucu

SEQ ID NO: 3373764 - RNA, 17 nt, Human
aaaccacugaaaaaaua

SEQ ID NO: 3373765 - RNA, 22 nt, Human
aaaccacuuaaacgaagaguuc

SEQ ID NO: 3373766 - RNA, 10 nt, Human
aaaccacuuu

SEQ ID NO: 3373767 - RNA, 15 nt, Human
aaaccagaggcagcu

SEQ ID NO: 3373768 - RNA, 13 nt, Human
aaaccagcucagc

SEQ ID NO: 3373769 - RNA, 12 nt, Human
aaaccagcuucc

SEQ ID NO: 3373770 - RNA, 13 nt, Human
aaaccagcuuccu

SEQ ID NO: 3373771 - RNA, 17 nt, Human
aaaccagcuuccuucag

SEQ ID NO: 3373772 - RNA, 19 nt, Human
aaaccagcuuccuucagag

SEQ ID NO: 3373773 - RNA, 17 nt, Human
aaaccagggagccccuu

SEQ ID NO: 3373774 - RNA, 20 nt, Human
aaaccagguccaaugagcuu

SEQ ID NO: 3373775 - RNA, 16 nt, Human
aaaccaguauuguaca

SEQ ID NO: 3373776 - RNA, 18 nt, Human
aaaccaguauuguacaaa

SEQ ID NO: 3373777 - RNA, 13 nt, Human
aaaccauaaacuu

SEQ ID NO: 3373778 - RNA, 23 nt, Human
aaaccaucucccuggugcuuaug

SEQ ID NO: 3373779 - RNA, 18 nt, Human
aaaccaucuggccuggcc

SEQ ID NO: 3373780 - RNA, 23 nt, Human
aaaccaugaagagauuuuucaug

SEQ ID NO: 3373781 - RNA, 15 nt, Human
aaaccaugcaaaugc

SEQ ID NO: 3373782 - RNA, 15 nt, Human
aaaccaugggauaaa

SEQ ID NO: 3373783 - RNA, 14 nt, Human
aaaccauugcuuca

SEQ ID NO: 3373784 - RNA, 16 nt, Human
aaaccauugcuucacu

SEQ ID NO: 3373785 - RNA, 12 nt, Human
aaacccagcucu

SEQ ID NO: 3373786 - RNA, 23 nt, Human
aaacccagcugcaccccuuccug

SEQ ID NO: 3373787 - RNA, 17 nt, Human
aaacccaguugccaucu

SEQ ID NO: 3373788 - RNA, 15 nt, Human
aaacccccacacaca

SEQ ID NO: 3373789 - RNA, 15 nt, Human
aaaccccccagauau

SEQ ID NO: 3373790 - RNA, 19 nt, Human
aaaccccuacccucacaau

SEQ ID NO: 3373791 - RNA, 13 nt, Human
aaaccccuguccc

SEQ ID NO: 3373792 - RNA, 19 nt, Human
aaacccgacagagggaaga

SEQ ID NO: 3373793 - RNA, 21 nt, Human
aaacccgggaaccuccccagc

SEQ ID NO: 3373794 - RNA, 20 nt, Human
aaacccgucucuacuaaaaa

SEQ ID NO: 3373795 - RNA, 14 nt, Human
aaacccuagccuug

SEQ ID NO: 3373796 - RNA, 16 nt, Human
aaacccuauugguaaa

SEQ ID NO: 3373797 - RNA, 15 nt, Human
aaacccucagagccu

SEQ ID NO: 3373798 - RNA, 24 nt, Human
aaacccucgaggcggaucuuugga

SEQ ID NO: 3373799 - RNA, 16 nt, Human
aaacccugucaaacau

SEQ ID NO: 3373800 - RNA, 19 nt, Human
aaacccuugccaugugcua

SEQ ID NO: 3373801 - RNA, 13 nt, Human
aaaccgaauaaau

SEQ ID NO: 3373802 - RNA, 14 nt, Human
aaaccgaauaaaug

SEQ ID NO: 3373803 - RNA, 16 nt, Human
aaaccgccaaggcugg

SEQ ID NO: 3373804 - RNA, 14 nt, Human
aaaccgccagcucu

SEQ ID NO: 3373805 - RNA, 18 nt, Human
aaaccgccagcucuguuc

SEQ ID NO: 3373806 - RNA, 15 nt, Human
aaaccgcuaaaagaa

SEQ ID NO: 3373807 - RNA, 18 nt, Human
aaaccgcuaaaagaaacu

SEQ ID NO: 3373808 - RNA, 19 nt, Human
aaaccuaaaaaagauauau

SEQ ID NO: 3373809 - RNA, 20 nt, Human
aaaccuaaguccuuuaugug

SEQ ID NO: 3373810 - RNA, 18 nt, Human
aaaccuacacacugucau

SEQ ID NO: 3373811 - RNA, 20 nt, Human
aaacuuugagaucuaaaaau

SEQ ID NO: 3373812 - RNA, 21 nt, Human
aaacuuugagaucuaaaaaua

SEQ ID NO: 3373813 - RNA, 12 nt, Human
aaacuuuguagu

SEQ ID NO: 3373814 - RNA, 14 nt, Human
aaacuuuuaaacua

SEQ ID NO: 3373815 - RNA, 16 nt, Human
aaacuuuuaauucauu

SEQ ID NO: 3373816 - RNA, 16 nt, Human
aaacuuuuauaaauua

SEQ ID NO: 3373817 - RNA, 17 nt, Human
aaacuuuuauaaauuaa

SEQ ID NO: 3373818 - RNA, 19 nt, Human
aaacuuuuauaaauuaaau

SEQ ID NO: 3373819 - RNA, 22 nt, Human
aaacuuuucaaggcuuauauuc

SEQ ID NO: 3373820 - RNA, 13 nt, Human
aaacuuuucuaga

SEQ ID NO: 3373821 - RNA, 13 nt, Human
aaacuuuucugau

SEQ ID NO: 3373822 - RNA, 14 nt, Human
aaacuuuucugaua

SEQ ID NO: 3373823 - RNA, 16 nt, Human
aaacuuuucugcugau

SEQ ID NO: 3373824 - RNA, 20 nt, Human
aaacuuuucuuaaaaaguua

SEQ ID NO: 3373825 - RNA, 12 nt, Human
aaacuuuuuuau

SEQ ID NO: 3373826 - RNA, 16 nt, Human
aaacuuuuuuucaaug

SEQ ID NO: 3373827 - RNA, 19 nt, Human
aaacuuuuuuucuguacca

SEQ ID NO: 3373828 - RNA, 23 nt, Human
aaacuuuuuuucuguaccaguua

SEQ ID NO: 3373829 - RNA, 13 nt, Human
aaagaaaaaaaau

SEQ ID NO: 3373830 - RNA, 17 nt, Human
aaagaaaaaaauguauu

SEQ ID NO: 3373831 - RNA, 22 nt, Human
aaagaaaaaaauguauuuuaug

SEQ ID NO: 3373832 - RNA, 13 nt, Human
aaagaaaaaaauu

SEQ ID NO: 3373833 - RNA, 18 nt, Human
aaagaaaaaauaauugau

SEQ ID NO: 3373834 - RNA, 14 nt, Human
aaagaaaacaaaaa

SEQ ID NO: 3373835 - RNA, 20 nt, Human
aaagaaaacuuguauuaugu

SEQ ID NO: 3373836 - RNA, 16 nt, Human
aaagaaaagaaaauuu

SEQ ID NO: 3373837 - RNA, 23 nt, Human
aaagaaaauaaagacaaccauau

SEQ ID NO: 3373838 - RNA, 14 nt, Human
aaagaaaauaugca

SEQ ID NO: 3373839 - RNA, 17 nt, Human
aaagaaaauaugcaucu

SEQ ID NO: 3373840 - RNA, 13 nt, Human
aaagaaaaugaaa

SEQ ID NO: 3373841 - RNA, 22 nt, Human
aaagaaaaugaaaaacaaccaa

SEQ ID NO: 3373842 - RNA, 18 nt, Human
aaagaaaauucuuggaau

SEQ ID NO: 3373843 - RNA, 13 nt, Human
aaagaaaauugag

SEQ ID NO: 3373844 - RNA, 15 nt, Human
aaagaaacagcuuuc

SEQ ID NO: 3373845 - RNA, 15 nt, Human
aaaauguaugcaugu

SEQ ID NO: 3373846 - RNA, 16 nt, Human
aaaauguaugcauguu

SEQ ID NO: 3373847 - RNA, 13 nt, Human
aaaauguauuuua

SEQ ID NO: 3373848 - RNA, 16 nt, Human
aaaauguauuuuaugu

SEQ ID NO: 3373849 - RNA, 16 nt, Human
aaaauguauuuuucua

SEQ ID NO: 3373850 - RNA, 14 nt, Human
aaaaugucaaaagu

SEQ ID NO: 3373851 - RNA, 15 nt, Human
aaaaugucaaaagua

SEQ ID NO: 3373852 - RNA, 21 nt, Human
aaaaugucaaaaguagaacuu

SEQ ID NO: 3373853 - RNA, 23 nt, Human
aaaaugucaaaaguagaacuuug

SEQ ID NO: 3373854 - RNA, 22 nt, Human
aaaaugucaaagagaaaacuua

SEQ ID NO: 3373855 - RNA, 23 nt, Human
aaaauguccaguaagaucacugu

SEQ ID NO: 3373856 - RNA, 18 nt, Human
aaaauguccugccuuuua

SEQ ID NO: 3373857 - RNA, 14 nt, Human
aaaauguccuugug

SEQ ID NO: 3373858 - RNA, 11 nt, Human
aaaaugucugu

SEQ ID NO: 3373859 - RNA, 18 nt, Human
aaaaugucuguaauaaua

SEQ ID NO: 3373860 - RNA, 18 nt, Human
aaaaugugaauaaaauua

SEQ ID NO: 3373861 - RNA, 19 nt, Human
aaaaugugacccagauccu

SEQ ID NO: 3373862 - RNA, 18 nt, Human
aaaaugugagugguugaa

SEQ ID NO: 3373863 - RNA, 12 nt, Human
aaaaugugauuu

SEQ ID NO: 3373864 - RNA, 23 nt, Human
aaaauguguguauucuuaaaaug

SEQ ID NO: 3373865 - RNA, 15 nt, Human
aaaauguguugaaac

SEQ ID NO: 3373866 - RNA, 14 nt, Human
aaaauguuaagcau

SEQ ID NO: 3373867 - RNA, 16 nt, Human
aaaauguuauuuaaca

SEQ ID NO: 3373868 - RNA, 13 nt, Human
aaaauguugaaaa

SEQ ID NO: 3373869 - RNA, 19 nt, Human
aaaauguugaaaagucaaa

SEQ ID NO: 3373870 - RNA, 19 nt, Human
aaaauguuggauuuauaaa

SEQ ID NO: 3373871 - RNA, 20 nt, Human
aaaauguuggauuuauaaau

SEQ ID NO: 3373872 - RNA, 12 nt, Human
aaaauguuuuaa

SEQ ID NO: 3373873 - RNA, 21 nt, Human
aaaauguuuuuucauguguuu

SEQ ID NO: 3373874 - RNA, 18 nt, Human
aaaauuaaacacaaagug

SEQ ID NO: 3373875 - RNA, 20 nt, Human
aaaauuaaaccggaccaucu

SEQ ID NO: 3373876 - RNA, 17 nt, Human
aaaauuaaaucaaccuu

SEQ ID NO: 3373877 - RNA, 14 nt, Human
aaaauuaacacugc

SEQ ID NO: 3373878 - RNA, 20 nt, Human
aaaauuaagaaaggauaaag

SEQ ID NO: 3373879 - RNA, 14 nt, Human
aaaauuaagaaugu

SEQ ID NO: 3373880 - RNA, 20 nt, Human
aaaauuaagcaaauguuaaa

SEQ ID NO: 3373881 - RNA, 17 nt, Human
aaaauuaaggcaacuga

SEQ ID NO: 3373882 - RNA, 20 nt, Human
aaaauuaagguguuugaaaa

SEQ ID NO: 3373883 - RNA, 14 nt, Human
aaaauuacaacuaa

SEQ ID NO: 3373884 - RNA, 15 nt, Human
aaaauuacuaauuuu

SEQ ID NO: 3373885 - RNA, 17 nt, Human
aaaauuacuaauuuuac

SEQ ID NO: 3373886 - RNA, 14 nt, Human
aaaauuagaaauug

SEQ ID NO: 3373887 - RNA, 19 nt, Human
aaaauuaggauuucaugau

SEQ ID NO: 3373888 - RNA, 21 nt, Human
aaaauuauacuaacuuauuua

SEQ ID NO: 3373889 - RNA, 13 nt, Human
aaaauuauacugu

SEQ ID NO: 3373890 - RNA, 18 nt, Human
aaaauuauacugugugug

SEQ ID NO: 3373891 - RNA, 15 nt, Human
aaaauuauagcucua

SEQ ID NO: 3373892 - RNA, 22 nt, Human
aaaauuauaucucaguaaacuu

SEQ ID NO: 3373893 - RNA, 15 nt, Human
aaaauuaucuauuug

SEQ ID NO: 3373894 - RNA, 19 nt, Human
aaaauuaugaaucugauuu

SEQ ID NO: 3373895 - RNA, 14 nt, Human
aaaauuauggaaac

SEQ ID NO: 3373896 - RNA, 23 nt, Human
aaaauuauguuugccacuuugca

SEQ ID NO: 3373897 - RNA, 19 nt, Human
aaaauuauugauugcuuuu

SEQ ID NO: 3373898 - RNA, 19 nt, Human
aaaauuauuuuaaacaaaa

SEQ ID NO: 3373899 - RNA, 16 nt, Human
aaaauuauuuuguuca

SEQ ID NO: 3373900 - RNA, 20 nt, Human
aaaauuauuuuguucauaca

SEQ ID NO: 3373901 - RNA, 14 nt, Human
aaaauucaaaaagu

SEQ ID NO: 3373902 - RNA, 16 nt, Human
aaaauucaaaaagugu

SEQ ID NO: 3373903 - RNA, 18 nt, Human
aaaauucaaaaaguguuu

SEQ ID NO: 3373904 - RNA, 21 nt, Human
aaaauucaaagcauggacauu

SEQ ID NO: 3373905 - RNA, 12 nt, Human
aaaauucagaga

SEQ ID NO: 3373906 - RNA, 13 nt, Human
aaaauucagcaaa

SEQ ID NO: 3373907 - RNA, 13 nt, Human
aaaauucagugga

SEQ ID NO: 3373908 - RNA, 18 nt, Human
aaaauucauaguaagauu

SEQ ID NO: 3373909 - RNA, 22 nt, Human
aaaauucaugauacucauuucu

SEQ ID NO: 3373910 - RNA, 13 nt, Human
aaaauucauuuca

SEQ ID NO: 3373911 - RNA, 14 nt, Human
aaaauucauuucac

SEQ ID NO: 3373912 - RNA, 21 nt, Human
aaaauucgaccugauuuacag

SEQ ID NO: 3373913 - RNA, 15 nt, Human
aaaauucugaaugua

SEQ ID NO: 3373914 - RNA, 19 nt, Human
aaaauugaauuuaacaaug

SEQ ID NO: 3373915 - RNA, 20 nt, Human
aaaauugaauuuaacaaugc

SEQ ID NO: 3373916 - RNA, 23 nt, Human
aaaauugaguucuuccuguaauc

SEQ ID NO: 3373917 - RNA, 21 nt, Human
aaaauugaugggauuugguca

SEQ ID NO: 3373918 - RNA, 12 nt, Human
aaaauugaugug

SEQ ID NO: 3373919 - RNA, 17 nt, Human
aaaauugccauauugca

SEQ ID NO: 3373920 - RNA, 19 nt, Human
aaaauugccauauugcaca

SEQ ID NO: 3373921 - RNA, 12 nt, Human
aaaauugccuuu

SEQ ID NO: 3373922 - RNA, 22 nt, Human
aaaauugccuuucuguguuuau

SEQ ID NO: 3373923 - RNA, 13 nt, Human
aaaauugcuaugu

SEQ ID NO: 3373924 - RNA, 20 nt, Human
aaaauugcugacuguagcuu

SEQ ID NO: 3373925 - RNA, 16 nt, Human
aaaauuggcaaaacua

SEQ ID NO: 3373926 - RNA, 21 nt, Human
aaaauuggggauucuuaaagu

SEQ ID NO: 3373927 - RNA, 15 nt, Human
aaaauuguauagaga

SEQ ID NO: 3373928 - RNA, 16 nt, Human
aaaauugucuucaugu

SEQ ID NO: 3373929 - RNA, 20 nt, Human
aaaauuguuaauuuuuccua

SEQ ID NO: 3373930 - RNA, 21 nt, Human
aaaauuguuuugagcuuucca

SEQ ID NO: 3373931 - RNA, 14 nt, Human
aaaauuuaagcauu

SEQ ID NO: 3373932 - RNA, 15 nt, Human
aaaauuuaagcauug

SEQ ID NO: 3373933 - RNA, 19 nt, Human
aaaauuuaagcugcaaaaa

SEQ ID NO: 3373934 - RNA, 19 nt, Human
aaaauuuaaguaucuuuuu

SEQ ID NO: 3373935 - RNA, 23 nt, Human
aaaauuuaagugcguguguagag

SEQ ID NO: 3373936 - RNA, 15 nt, Human
aaaauuuaguuuuug

SEQ ID NO: 3373937 - RNA, 19 nt, Human
aaaauuuaguuuuuguucu

SEQ ID NO: 3373938 - RNA, 23 nt, Human
aaaauuuaguuuuuguucuuaau

SEQ ID NO: 3373939 - RNA, 12 nt, Human
aaaauuuauaac

SEQ ID NO: 3373940 - RNA, 20 nt, Human
aaaauuuauauuguaaauau

SEQ ID NO: 3373941 - RNA, 22 nt, Human
aaaauuuaugguuuugguauuu

SEQ ID NO: 3373942 - RNA, 13 nt, Human
aaaauuucacauu

SEQ ID NO: 3373943 - RNA, 13 nt, Human
aaaauuucuaaga

SEQ ID NO: 3373944 - RNA, 20 nt, Human
aaaauuucuuagaaaacaau

SEQ ID NO: 3373945 - RNA, 19 nt, Human
aaaauuugaaacauugcuu

SEQ ID NO: 3373946 - RNA, 21 nt, Human
aaaauuugaaacauugcuuuu

SEQ ID NO: 3373947 - RNA, 23 nt, Human
aaaauuugaaccaaaacauuccg

SEQ ID NO: 3373948 - RNA, 16 nt, Human
aaaauuugcccuccca

SEQ ID NO: 3373949 - RNA, 14 nt, Human
aaaauuuggaauuc

SEQ ID NO: 3373950 - RNA, 22 nt, Human
aaaauuugucugaaacauuuca

SEQ ID NO: 3373951 - RNA, 20 nt, Human
aaaauuuguucuuguauuua

SEQ ID NO: 3373952 - RNA, 13 nt, Human
aaaauuuguugca

SEQ ID NO: 3373953 - RNA, 16 nt, Human
aaaauuuguuuugacg

SEQ ID NO: 3373954 - RNA, 17 nt, Human
aaaauuuuaaaaaucua

SEQ ID NO: 3373955 - RNA, 23 nt, Human
aaaauuuuauaagcaaauuucaa

SEQ ID NO: 3373956 - RNA, 14 nt, Human
aaaagauauaagug

SEQ ID NO: 3373957 - RNA, 15 nt, Human
aaaagauauaagugc

SEQ ID NO: 3373958 - RNA, 23 nt, Human
aaaagauauaagugcuguauaaa

SEQ ID NO: 3373959 - RNA, 21 nt, Human
aaaagauauauuaaaaauaua

SEQ ID NO: 3373960 - RNA, 22 nt, Human
aaaagauauauuaaaaauauaa

SEQ ID NO: 3373961 - RNA, 10 nt, Human
aaaagauccc

SEQ ID NO: 3373962 - RNA, 13 nt, Human
aaaagaucgcagu

SEQ ID NO: 3373963 - RNA, 21 nt, Human
aaaagauggggucuguaaaau

SEQ ID NO: 3373964 - RNA, 13 nt, Human
aaaagauguagau

SEQ ID NO: 3373965 - RNA, 15 nt, Human
aaaagauuaaacugc

SEQ ID NO: 3373966 - RNA, 18 nt, Human
aaaagauucuuuuucuga

SEQ ID NO: 3373967 - RNA, 21 nt, Human
aaaagauugcugaaauuuuau

SEQ ID NO: 3373968 - RNA, 17 nt, Human
aaaagauuguauugcug

SEQ ID NO: 3373969 - RNA, 14 nt, Human
aaaagauuuuaauc

SEQ ID NO: 3373970 - RNA, 21 nt, Human
aaaagcaaaauaaaaacuauu

SEQ ID NO: 3373971 - RNA, 14 nt, Human
aaaagcaaaaucau

SEQ ID NO: 3373972 - RNA, 17 nt, Human
aaaagcaacaucagcuu

SEQ ID NO: 3373973 - RNA, 12 nt, Human
aaaagcaagacu

SEQ ID NO: 3373974 - RNA, 11 nt, Human
aaaagcaccuc

SEQ ID NO: 3373975 - RNA, 15 nt, Human
aaaagcacuccugcu

SEQ ID NO: 3373976 - RNA, 19 nt, Human
aaaagcagcccuuggccag

SEQ ID NO: 3373977 - RNA, 18 nt, Human
aaaagcaucuaugugaga

SEQ ID NO: 3373978 - RNA, 15 nt, Human
aaaagcauguacagu

SEQ ID NO: 3373979 - RNA, 22 nt, Human
aaaagcauguacaguguucugu

SEQ ID NO: 3373980 - RNA, 21 nt, Human
aaaagcauuuuucaauauauu

SEQ ID NO: 3373981 - RNA, 18 nt, Human
aaaagccaagaggcugca

SEQ ID NO: 3373982 - RNA, 22 nt, Human
aaaagccagcaggcuucaaacu

SEQ ID NO: 3373983 - RNA, 12 nt, Human
aaaagccagggc

SEQ ID NO: 3373984 - RNA, 14 nt, Human
aaaagccaucaugu

SEQ ID NO: 3373985 - RNA, 14 nt, Human
aaaagcccaggagc

SEQ ID NO: 3373986 - RNA, 14 nt, Human
aaaagccucugugu

SEQ ID NO: 3373987 - RNA, 19 nt, Human
aaaagccugcaauuucaua

SEQ ID NO: 3373988 - RNA, 11 nt, Human
aaaagccugcu

SEQ ID NO: 3373989 - RNA, 16 nt, Human
aaaagccuguuuaaga

SEQ ID NO: 3373990 - RNA, 18 nt, Human
aaaagccuguuuaagaga

SEQ ID NO: 3373991 - RNA, 14 nt, Human
aaaagccuuggccu

SEQ ID NO: 3373992 - RNA, 20 nt, Human
aaaagccuuguguauauuug

SEQ ID NO: 3373993 - RNA, 22 nt, Human
aaaagcggaaaguuagugcuug

SEQ ID NO: 3373994 - RNA, 14 nt, Human
aaaagcuagaauug

SEQ ID NO: 3373995 - RNA, 21 nt, Human
aaaagcuaguguaccuccucu

SEQ ID NO: 3373996 - RNA, 16 nt, Human
aaaagcuaucuucaug

SEQ ID NO: 3373997 - RNA, 17 nt, Human
aaaagcuauuagccagg

SEQ ID NO: 3373998 - RNA, 20 nt, Human
aaaagcuauuagccaggauc

SEQ ID NO: 3373999 - RNA, 12 nt, Human
aaaagcuccugu

SEQ ID NO: 3374000 - RNA, 13 nt, Human
aaaagcuccuguc

SEQ ID NO: 3374001 - RNA, 19 nt, Human
aaaagcugaacacauuucu

SEQ ID NO: 3374002 - RNA, 20 nt, Human
aaaagcugaacacauuucuu

SEQ ID NO: 3374003 - RNA, 13 nt, Human
aaaagcugcucag

SEQ ID NO: 3374004 - RNA, 15 nt, Human
aaaagcuucuuaauu

SEQ ID NO: 3374005 - RNA, 18 nt, Human
aaaagcuuuaugauuuuc

SEQ ID NO: 3374006 - RNA, 22 nt, Human
aaaagcuuuaugauuuucauaa

SEQ ID NO: 3374007 - RNA, 13 nt, Human
aaaagcuuucaug

SEQ ID NO: 3374008 - RNA, 15 nt, Human
aaaagcuuuuaugag

SEQ ID NO: 3374009 - RNA, 10 nt, Human
aaaaggaaaa

SEQ ID NO: 3374010 - RNA, 15 nt, Human
aaaaggaaaaaaaga

SEQ ID NO: 3374011 - RNA, 11 nt, Human
aaaaggaaagc

SEQ ID NO: 3374012 - RNA, 16 nt, Human
aaaaggaacugcagca

SEQ ID NO: 3374013 - RNA, 20 nt, Human
aaaaggaagcuuacaugccu

SEQ ID NO: 3374014 - RNA, 16 nt, Human
aaaaggacaauuucaa

SEQ ID NO: 3374015 - RNA, 23 nt, Human
aaaaggaucuuuguggccaagga

SEQ ID NO: 3374016 - RNA, 14 nt, Human
aaaaggaugcacag

SEQ ID NO: 3374017 - RNA, 15 nt, Human
aaaaggaugcacaga

SEQ ID NO: 3374018 - RNA, 17 nt, Human
aaaaggcauuguuugag

SEQ ID NO: 3374019 - RNA, 14 nt, Human
aaaaggccaaaccu

SEQ ID NO: 3374020 - RNA, 11 nt, Human
aaaaggcccag

SEQ ID NO: 3374021 - RNA, 22 nt, Human
aaaaggccucuuguaaagacug

SEQ ID NO: 3374022 - RNA, 13 nt, Human
aaaaggccugggg

SEQ ID NO: 3374023 - RNA, 20 nt, Human
aaaaggcgcaucuaacgcgu

SEQ ID NO: 3374024 - RNA, 20 nt, Human
aaaaggcugugcugcccuga

SEQ ID NO: 3374025 - RNA, 20 nt, Human
aaaaggcuuauaaaacagag

SEQ ID NO: 3374026 - RNA, 14 nt, Human
aaaaggcuugaagc

SEQ ID NO: 3374027 - RNA, 18 nt, Human
aaaagggaacugaacauu

SEQ ID NO: 3374028 - RNA, 15 nt, Human
aaaagggaagaaacu

SEQ ID NO: 3374029 - RNA, 14 nt, Human
aaaagggacaugaa

SEQ ID NO: 3374030 - RNA, 19 nt, Human
aaaagggaguuuaaaaaug

SEQ ID NO: 3374031 - RNA, 23 nt, Human
aaagaaaagauaaagaugaucua

SEQ ID NO: 3374032 - RNA, 13 nt, Human
aaagaaaagaugc

SEQ ID NO: 3374033 - RNA, 14 nt, Human
aaagaaaagaugca

SEQ ID NO: 3374034 - RNA, 17 nt, Human
aaagaaaagaugcacuu

SEQ ID NO: 3374035 - RNA, 14 nt, Human
aaagaaaauaaaau

SEQ ID NO: 3374036 - RNA, 16 nt, Human
aaagaaaauaaagaca

SEQ ID NO: 3374037 - RNA, 15 nt, Human
aaagaaaauaugcau

SEQ ID NO: 3374038 - RNA, 13 nt, Human
aaagaaaauuccu

SEQ ID NO: 3374039 - RNA, 20 nt, Human
aaagaaacccgacagaggga

SEQ ID NO: 3374040 - RNA, 22 nt, Human
aaagaaacugacaugcccuccc

SEQ ID NO: 3374041 - RNA, 12 nt, Human
aaagaaacuuuc

SEQ ID NO: 3374042 - RNA, 18 nt, Human
aaagaaagagagaaaaua

SEQ ID NO: 3374043 - RNA, 15 nt, Human
aaagaaagaggaaaa

SEQ ID NO: 3374044 - RNA, 12 nt, Human
aaagaaagugua

SEQ ID NO: 3374045 - RNA, 16 nt, Human
aaagaaauaauaauau

SEQ ID NO: 3374046 - RNA, 13 nt, Human
aaagaaauaauuu

SEQ ID NO: 3374047 - RNA, 14 nt, Human
aaagaaauaccuug

SEQ ID NO: 3374048 - RNA, 11 nt, Human
aaagaaauauu

SEQ ID NO: 3374049 - RNA, 14 nt, Human
aaagaaaucauguu

SEQ ID NO: 3374050 - RNA, 13 nt, Human
aaagaaaugaaca

SEQ ID NO: 3374051 - RNA, 15 nt, Human
aaagaaaugaacauu

SEQ ID NO: 3374052 - RNA, 16 nt, Human
aaagaaaugacuaauu

SEQ ID NO: 3374053 - RNA, 13 nt, Human
aaagaaaugcaaa

SEQ ID NO: 3374054 - RNA, 13 nt, Human
aaagaaauuaugu

SEQ ID NO: 3374055 - RNA, 11 nt, Human
aaagaacaucc

SEQ ID NO: 3374056 - RNA, 19 nt, Human
aaagaacaugcaguuugaa

SEQ ID NO: 3374057 - RNA, 22 nt, Human
aaagaacauggacuuguauauu

SEQ ID NO: 3374058 - RNA, 15 nt, Human
aaagaacgcugauuu

SEQ ID NO: 3374059 - RNA, 18 nt, Human
aaagaacuaucuucaucu

SEQ ID NO: 3374060 - RNA, 17 nt, Human
aaagaagaacuugcaug

SEQ ID NO: 3374061 - RNA, 21 nt, Human
aaagaagaagaagaagaaaag

SEQ ID NO: 3374062 - RNA, 20 nt, Human
aaagaagaaggugggaggau

SEQ ID NO: 3374063 - RNA, 19 nt, Human
aaagaagacaacauuaaaa

SEQ ID NO: 3374064 - RNA, 12 nt, Human
aaagaagacaug

SEQ ID NO: 3374065 - RNA, 14 nt, Human
aaagaagacauguu

SEQ ID NO: 3374066 - RNA, 18 nt, Human
aaagaagacauguuuuag

SEQ ID NO: 3374067 - RNA, 18 nt, Human
aaagaagaccugagaaug

SEQ ID NO: 3374068 - RNA, 12 nt, Human
aaagaagagaca

SEQ ID NO: 3374069 - RNA, 21 nt, Human
aaagaagagccggagccucca

SEQ ID NO: 3374070 - RNA, 22 nt, Human
aaagaagguuuguguuuuucug

SEQ ID NO: 3374071 - RNA, 21 nt, Human
aaagaaguaacaagagugauu

SEQ ID NO: 3374072 - RNA, 23 nt, Human
aaagaaguaggggaagacaugca

SEQ ID NO: 3374073 - RNA, 16 nt, Human
aaagaaguauuuuuag

SEQ ID NO: 3374074 - RNA, 17 nt, Human
aaagaaguuugaacauu

SEQ ID NO: 3374075 - RNA, 17 nt, Human
aaagaauacagaaagau

SEQ ID NO: 3374076 - RNA, 18 nt, Human
aaagaauacuauuuccaa

SEQ ID NO: 3374077 - RNA, 14 nt, Human
aaagaauacuugaa

SEQ ID NO: 3374078 - RNA, 12 nt, Human
aaagaauagaaa

SEQ ID NO: 3374079 - RNA, 20 nt, Human
aaagaauaugacuuuuuaua

SEQ ID NO: 3374080 - RNA, 13 nt, Human
aaagaauauucag

SEQ ID NO: 3374081 - RNA, 19 nt, Human
aaagaaucauuauuuauua

SEQ ID NO: 3374082 - RNA, 23 nt, Human
aaagaaucauuauuuauuaaauu

SEQ ID NO: 3374083 - RNA, 17 nt, Human
aaagaauggaaggugga

SEQ ID NO: 3374084 - RNA, 17 nt, Human
aaagaauggcagaaaag

SEQ ID NO: 3374085 - RNA, 18 nt, Human
aaagaaugggcaguuaca

SEQ ID NO: 3374086 - RNA, 16 nt, Human
aaagaauucaaauuuu

SEQ ID NO: 3374087 - RNA, 14 nt, Human
aaagaauuuaguau

SEQ ID NO: 3374088 - RNA, 13 nt, Human
aaagaauuuguca

SEQ ID NO: 3374089 - RNA, 14 nt, Human
aaagacaaauagua

SEQ ID NO: 3374090 - RNA, 18 nt, Human
aaagacaaauaguaggca

SEQ ID NO: 3374091 - RNA, 14 nt, Human
aaagacaagaaaau

SEQ ID NO: 3374092 - RNA, 11 nt, Human
aaagacaauuc

SEQ ID NO: 3374093 - RNA, 16 nt, Human
aaagacaauucuuuau

SEQ ID NO: 3374094 - RNA, 19 nt, Human
aaagacaccuacugagugg

SEQ ID NO: 3374095 - RNA, 13 nt, Human
aaagacacugccu

SEQ ID NO: 3374096 - RNA, 17 nt, Human
aaagacacugccugggc

SEQ ID NO: 3374097 - RNA, 14 nt, Human
aaagacagagcugg

SEQ ID NO: 3374098 - RNA, 15 nt, Human
aaagacaggcucugu

SEQ ID NO: 3374099 - RNA, 22 nt, Human
aaagacaguguauguagaagca

SEQ ID NO: 3374100 - RNA, 15 nt, Human
aaagacaugaauaug

SEQ ID NO: 3374101 - RNA, 14 nt, Human
aaagacauguugua

SEQ ID NO: 3374102 - RNA, 11 nt, Human
aaagaccaaac

SEQ ID NO: 3374103 - RNA, 14 nt, Human
aaagaccagaaauu

SEQ ID NO: 3374104 - RNA, 20 nt, Human
aaagacccuaaaucugagga

SEQ ID NO: 3374105 - RNA, 18 nt, Human
aaagacguuuuauaagca

SEQ ID NO: 3374106 - RNA, 20 nt, Human
aaagacguuuuauaagcauc

SEQ ID NO: 3374107 - RNA, 17 nt, Human
aaagacuaucuaaaugu

SEQ ID NO: 3374108 - RNA, 13 nt, Human
aaagacuccaaag

SEQ ID NO: 3374109 - RNA, 15 nt, Human
aaagacuccaaagaa

SEQ ID NO: 3374110 - RNA, 21 nt, Human
aaagacuccaaagaaauguaa

SEQ ID NO: 3374111 - RNA, 12 nt, Human
aaagacuggcuu

SEQ ID NO: 3374112 - RNA, 14 nt, Human
aaagacuguacaaa

SEQ ID NO: 3374113 - RNA, 13 nt, Human
aaagacuuaaagg

SEQ ID NO: 3374114 - RNA, 20 nt, Human
aaagacuugguugguagggu

SEQ ID NO: 3374115 - RNA, 19 nt, Human
aaagacuuuuccaacccuc

SEQ ID NO: 3374116 - RNA, 18 nt, Human
aaagagaaaacaucucau

SEQ ID NO: 3374117 - RNA, 12 nt, Human
aaagagaaacuu

SEQ ID NO: 3374118 - RNA, 12 nt, Human
aaagagaagaag

SEQ ID NO: 3374119 - RNA, 15 nt, Human
aaagagaaguauuau

SEQ ID NO: 3374120 - RNA, 20 nt, Human
aaagagaaugaguccuugau

SEQ ID NO: 3374121 - RNA, 20 nt, Human
aaagagaaugccauucucuu

SEQ ID NO: 3374122 - RNA, 18 nt, Human
aaagagagaaaacuuauu

SEQ ID NO: 3374123 - RNA, 17 nt, Human
aaagagagaaaauaaaa

SEQ ID NO: 3374124 - RNA, 18 nt, Human
aaagagagaacaggacua

SEQ ID NO: 3374125 - RNA, 13 nt, Human
aaagagagaaugu

SEQ ID NO: 3374126 - RNA, 20 nt, Human
aaagagagagagagaaaaaa

SEQ ID NO: 3374127 - RNA, 15 nt, Human
aaagagagauuuuuu

SEQ ID NO: 3374128 - RNA, 13 nt, Human
aaagagagcacug

SEQ ID NO: 3374129 - RNA, 12 nt, Human
aaagagauauuu

SEQ ID NO: 3374130 - RNA, 20 nt, Human
aaagagauauuuuaaaauga

SEQ ID NO: 3374131 - RNA, 14 nt, Human
aaagagauuucaag

SEQ ID NO: 3374132 - RNA, 15 nt, Human
aaagagcaagucugg

SEQ ID NO: 3374133 - RNA, 23 nt, Human
aaagagcaagucuggaucuggga

SEQ ID NO: 3374134 - RNA, 12 nt, Human
aaagagcacaaa

SEQ ID NO: 3374135 - RNA, 15 nt, Human
aaagagcccuugccu

SEQ ID NO: 3374136 - RNA, 22 nt, Human
aaagagcuuucuucccgaaccc

SEQ ID NO: 3374137 - RNA, 14 nt, Human
aaagaggagugcuu

SEQ ID NO: 3374138 - RNA, 11 nt, Human
aaauaaacuuu

SEQ ID NO: 3374139 - RNA, 12 nt, Human
aaauaaacuuuu

SEQ ID NO: 3374140 - RNA, 19 nt, Human
aaauaaacuuuuuuucaau

SEQ ID NO: 3374141 - RNA, 21 nt, Human
aaauaaacuuuuuuucaaugu

SEQ ID NO: 3374142 - RNA, 22 nt, Human
aaauaaacuuuuuuucaaugug

SEQ ID NO: 3374143 - RNA, 11 nt, Human
aaauaaagaag

SEQ ID NO: 3374144 - RNA, 14 nt, Human
aaauaaagagagaa

SEQ ID NO: 3374145 - RNA, 22 nt, Human
aaauaaagagagaacaggacua

SEQ ID NO: 3374146 - RNA, 15 nt, Human
aaauaaagagccaua

SEQ ID NO: 3374147 - RNA, 15 nt, Human
aaauaaagcaucuca

SEQ ID NO: 3374148 - RNA, 12 nt, Human
aaauaaagcccu

SEQ ID NO: 3374149 - RNA, 20 nt, Human
aaauaaagcuugcaacaaaa

SEQ ID NO: 3374150 - RNA, 18 nt, Human
aaauaaaggauuucuaga

SEQ ID NO: 3374151 - RNA, 10 nt, Human
aaauaaauaa

SEQ ID NO: 3374152 - RNA, 12 nt, Human
aaauaaauauau

SEQ ID NO: 3374153 - RNA, 14 nt, Human
aaauaaauauauau

SEQ ID NO: 3374154 - RNA, 15 nt, Human
aaauaaauauauaua

SEQ ID NO: 3374155 - RNA, 17 nt, Human
aaauaaauuaguuguua

SEQ ID NO: 3374156 - RNA, 13 nt, Human
aaauaaauuguau

SEQ ID NO: 3374157 - RNA, 20 nt, Human
aaauaaauuguauauucacu

SEQ ID NO: 3374158 - RNA, 22 nt, Human
aaauaaauuguauauucacuuu

SEQ ID NO: 3374159 - RNA, 12 nt, Human
aaauaaauuguu

SEQ ID NO: 3374160 - RNA, 16 nt, Human
aaauaaauuuauauga

SEQ ID NO: 3374161 - RNA, 17 nt, Human
aaauaaauuuauaugaa

SEQ ID NO: 3374162 - RNA, 22 nt, Human
aaauaacaaguaccaaaguuuu

SEQ ID NO: 3374163 - RNA, 12 nt, Human
aaauaacaauga

SEQ ID NO: 3374164 - RNA, 18 nt, Human
aaauaacaauguuaagga

SEQ ID NO: 3374165 - RNA, 20 nt, Human
aaauaacaggcauuuguuca

SEQ ID NO: 3374166 - RNA, 20 nt, Human
aaauaaccuaauuaauauau

SEQ ID NO: 3374167 - RNA, 15 nt, Human
aaauaacugaauuug

SEQ ID NO: 3374168 - RNA, 13 nt, Human
aaauaacuguaau

SEQ ID NO: 3374169 - RNA, 21 nt, Human
aaauaacuguaauuauuugaa

SEQ ID NO: 3374170 - RNA, 18 nt, Human
aaauaacuucaagcaaac

SEQ ID NO: 3374171 - RNA, 15 nt, Human
aaauaacuucagucc

SEQ ID NO: 3374172 - RNA, 14 nt, Human
aaauaagaaaccua

SEQ ID NO: 3374173 - RNA, 12 nt, Human
aaauaagaaacu

SEQ ID NO: 3374174 - RNA, 15 nt, Human
aaauaagaaacuuuu

SEQ ID NO: 3374175 - RNA, 14 nt, Human
aaauaagaauagaa

SEQ ID NO: 3374176 - RNA, 12 nt, Human
aaauaagagauu

SEQ ID NO: 3374177 - RNA, 14 nt, Human
aaauaagauucuaa

SEQ ID NO: 3374178 - RNA, 15 nt, Human
aaauaagauucuaac

SEQ ID NO: 3374179 - RNA, 17 nt, Human
aaauaccauuauuauca

SEQ ID NO: 3374180 - RNA, 16 nt, Human
aaauaccauugacaca

SEQ ID NO: 3374181 - RNA, 15 nt, Human
aaauaccucaggaaa

SEQ ID NO: 3374182 - RNA, 18 nt, Human
aaauaccucaggaaagaa

SEQ ID NO: 3374183 - RNA, 16 nt, Human
aaauaccucauguuua

SEQ ID NO: 3374184 - RNA, 18 nt, Human
aaauaccucuuagcugag

SEQ ID NO: 3374185 - RNA, 21 nt, Human
aaauacgccagaacugcuuua

SEQ ID NO: 3374186 - RNA, 20 nt, Human
aaauacgugggcauucaaau

SEQ ID NO: 3374187 - RNA, 15 nt, Human
aaauacuauuuaaga

SEQ ID NO: 3374188 - RNA, 18 nt, Human
aaauacuauuuaagaugu

SEQ ID NO: 3374189 - RNA, 22 nt, Human
aaauacuauuuaagaugugaaa

SEQ ID NO: 3374190 - RNA, 15 nt, Human
aaauacucaugugua

SEQ ID NO: 3374191 - RNA, 14 nt, Human
aaauacucuaauuc

SEQ ID NO: 3374192 - RNA, 16 nt, Human
aaauacucuaauucua

SEQ ID NO: 3374193 - RNA, 19 nt, Human
aaauacucuaauucuaacc

SEQ ID NO: 3374194 - RNA, 17 nt, Human
aaauacugcaagaaaau

SEQ ID NO: 3374195 - RNA, 17 nt, Human
aaauacugccagaugcu

SEQ ID NO: 3374196 - RNA, 23 nt, Human
aaauacugccagaugcugauguu

SEQ ID NO: 3374197 - RNA, 15 nt, Human
aaauacuguacaaug

SEQ ID NO: 3374198 - RNA, 16 nt, Human
aaauacuguagauaau

SEQ ID NO: 3374199 - RNA, 14 nt, Human
aaauacuguuugag

SEQ ID NO: 3374200 - RNA, 16 nt, Human
aaauacuugucuguuu

SEQ ID NO: 3374201 - RNA, 19 nt, Human
aaauacuugucuguuuuaa

SEQ ID NO: 3374202 - RNA, 18 nt, Human
aaauagaaaacaggaaaa

SEQ ID NO: 3374203 - RNA, 18 nt, Human
aaauagaaaaguagacaa

SEQ ID NO: 3374204 - RNA, 15 nt, Human
aaauagaaaaugguc

SEQ ID NO: 3374205 - RNA, 12 nt, Human
aaauagaaacau

SEQ ID NO: 3374206 - RNA, 22 nt, Human
aaauagaaaguugcaaggcaaa

SEQ ID NO: 3374207 - RNA, 19 nt, Human
aaauagaaauuuuguaaga

SEQ ID NO: 3374208 - RNA, 16 nt, Human
aaauagaaccacuaug

SEQ ID NO: 3374209 - RNA, 22 nt, Human
aaauagaagaauacaaacauau

SEQ ID NO: 3374210 - RNA, 20 nt, Human
aaauagaauugacauugaaa

SEQ ID NO: 3374211 - RNA, 14 nt, Human
aaauagacaaaaag

SEQ ID NO: 3374212 - RNA, 18 nt, Human
aaauagacaaaaaguaua

SEQ ID NO: 3374213 - RNA, 15 nt, Human
aaauagacaaauaga

SEQ ID NO: 3374214 - RNA, 17 nt, Human
aaauagacagcaugaga

SEQ ID NO: 3374215 - RNA, 16 nt, Human
aaauagacaguauauu

SEQ ID NO: 3374216 - RNA, 19 nt, Human
aaauagacauauuaacaug

SEQ ID NO: 3374217 - RNA, 19 nt, Human
aaauagagaugagcuuucu

SEQ ID NO: 3374218 - RNA, 15 nt, Human
aaauagagcuuuuaa

SEQ ID NO: 3374219 - RNA, 20 nt, Human
aaauagagcuuuuaaaaaug

SEQ ID NO: 3374220 - RNA, 19 nt, Human
aaauagaguuugcuauuag

SEQ ID NO: 3374221 - RNA, 14 nt, Human
aaauagaugacauu

SEQ ID NO: 3374222 - RNA, 18 nt, Human
aaauagaugucuuuuaua

SEQ ID NO: 3374223 - RNA, 13 nt, Human
aaauagcaaaacu

SEQ ID NO: 3374224 - RNA, 21 nt, Human
aaauagcauguauugugucuu

SEQ ID NO: 3374225 - RNA, 18 nt, Human
aaauagcgcuguuuuugu

SEQ ID NO: 3374226 - RNA, 17 nt, Human
aaauagcguucuuguaa

SEQ ID NO: 3374227 - RNA, 18 nt, Human
aaauagcguucuuguaau

SEQ ID NO: 3374228 - RNA, 24 nt, Human
aaauagcucaggugucccugcacu

SEQ ID NO: 3374229 - RNA, 19 nt, Human
aaauagcuccguggagcag

SEQ ID NO: 3374230 - RNA, 16 nt, Human
aaauagcuuguauagu

SEQ ID NO: 3374231 - RNA, 17 nt, Human
aaauagcuuuuuucucu

SEQ ID NO: 3374232 - RNA, 16 nt, Human
aaauaggagaggauga

SEQ ID NO: 3374233 - RNA, 16 nt, Human
aaauaggauuuuuaga

SEQ ID NO: 3374234 - RNA, 14 nt, Human
aaauaggcaggaag

SEQ ID NO: 3374235 - RNA, 16 nt, Human
aaauaguaaaaauaaa

SEQ ID NO: 3374236 - RNA, 13 nt, Human
aaauaguaggcaa

SEQ ID NO: 3374237 - RNA, 22 nt, Human
aaauaguaggcaagauggcaca

SEQ ID NO: 3374238 - RNA, 16 nt, Human
aaauagucuaguguag

SEQ ID NO: 3374239 - RNA, 19 nt, Human
aaauagugacauaauauau

SEQ ID NO: 3374240 - RNA, 19 nt, Human
aaauaguggugugauuugg

SEQ ID NO: 3374241 - RNA, 15 nt, Human
aaauagugucuuugu

SEQ ID NO: 3374242 - RNA, 20 nt, Human
aaauaguguggaaauuaaga

SEQ ID NO: 3374243 - RNA, 19 nt, Human
aaauaguguuauugagaga

SEQ ID NO: 3374244 - RNA, 17 nt, Human
aaauaguuaagacauga

SEQ ID NO: 3374245 - RNA, 16 nt, Human
aaauaguucugugacu

SEQ ID NO: 3374246 - RNA, 22 nt, Human
aaauaguucugugacuaggaaa

SEQ ID NO: 3374247 - RNA, 13 nt, Human
aaauaguucuucu

SEQ ID NO: 3374248 - RNA, 19 nt, Human
aaauaguugagccagcaga

SEQ ID NO: 3374249 - RNA, 22 nt, Human
aaauaguugcauagcaguauau

SEQ ID NO: 3374250 - RNA, 20 nt, Human
aaauaguuuggauauguaaa

SEQ ID NO: 3374251 - RNA, 13 nt, Human
aaauauaaaauua

SEQ ID NO: 3374252 - RNA, 10 nt, Human
aaauauaaag

SEQ ID NO: 3374253 - RNA, 12 nt, Human
aaauauaauucu

SEQ ID NO: 3374254 - RNA, 19 nt, Human
aaauauaauucuguaaaug

SEQ ID NO: 3374255 - RNA, 21 nt, Human
aaauauaauuguuuuuuaucu

SEQ ID NO: 3374256 - RNA, 14 nt, Human
aaauauacauguuu

SEQ ID NO: 3374257 - RNA, 15 nt, Human
aaauauacauguuua

SEQ ID NO: 3374258 - RNA, 23 nt, Human
aaauauacauguuuauguaaaca

SEQ ID NO: 3374259 - RNA, 16 nt, Human
aaauauaccacucuuu

SEQ ID NO: 3374260 - RNA, 19 nt, Human
aaauauacuguaaagaaag

SEQ ID NO: 3374261 - RNA, 21 nt, Human
aaauauacuguaaagaaagag

SEQ ID NO: 3374262 - RNA, 22 nt, Human
aaauauacuuuuacaaguaaca

SEQ ID NO: 3374263 - RNA, 13 nt, Human
aaauauagaauuu

SEQ ID NO: 3374264 - RNA, 16 nt, Human
aaauauagaauuuuua

SEQ ID NO: 3374265 - RNA, 18 nt, Human
aaauauagaucaguuaua

SEQ ID NO: 3374266 - RNA, 17 nt, Human
aaauauagauuagaaaa

SEQ ID NO: 3374267 - RNA, 19 nt, Human
aaauauagauuagaaaaau

SEQ ID NO: 3374268 - RNA, 16 nt, Human
aaauauagcuguacaa

SEQ ID NO: 3374269 - RNA, 14 nt, Human
aaauauaguuccua

SEQ ID NO: 3374270 - RNA, 18 nt, Human
aaauauaguuccuaagaa

SEQ ID NO: 3374271 - RNA, 17 nt, Human
aaauauauaaauauaua

SEQ ID NO: 3374272 - RNA, 23 nt, Human
aaauauauacccccccaugcagu

SEQ ID NO: 3374273 - RNA, 16 nt, Human
aaauauauacuaaaca

SEQ ID NO: 3374274 - RNA, 16 nt, Human
aaauauauauaaaccu

SEQ ID NO: 3374275 - RNA, 21 nt, Human
aaauauauauaaauauauaua

SEQ ID NO: 3374276 - RNA, 14 nt, Human
aaauauauauagaa

SEQ ID NO: 3374277 - RNA, 15 nt, Human
aaauauauauauccu

SEQ ID NO: 3374278 - RNA, 14 nt, Human
aaauauauauuaua

SEQ ID NO: 3374279 - RNA, 23 nt, Human
aaauauaugauuaacuaauuuua

SEQ ID NO: 3374280 - RNA, 22 nt, Human
aaauauauggucuaauguuuaa

SEQ ID NO: 3374281 - RNA, 11 nt, Human
aaauauaugua

SEQ ID NO: 3374282 - RNA, 16 nt, Human
aaauauauguauguaa

SEQ ID NO: 3374283 - RNA, 20 nt, Human
aaauauauguauguaaaaau

SEQ ID NO: 3374284 - RNA, 18 nt, Human
aaauauauuacuuaacug

SEQ ID NO: 3374285 - RNA, 13 nt, Human
aaauauauuauua

SEQ ID NO: 3374286 - RNA, 16 nt, Human
aaauauauuauuacuu

SEQ ID NO: 3374287 - RNA, 19 nt, Human
aaauauauuauuacuugua

SEQ ID NO: 3374288 - RNA, 21 nt, Human
aaauauauuauuacuuguaaa

SEQ ID NO: 3374289 - RNA, 23 nt, Human
aaauauauuauuacuuguaaaua

SEQ ID NO: 3374290 - RNA, 20 nt, Human
aaauaucaaauuaauugugu

SEQ ID NO: 3374291 - RNA, 22 nt, Human
aaauaucaaucauuuuccuuuu

SEQ ID NO: 3374292 - RNA, 20 nt, Human
aaauaucaguuacucagccc

SEQ ID NO: 3374293 - RNA, 21 nt, Human
aaauaucauauaaauauugag

SEQ ID NO: 3374294 - RNA, 13 nt, Human
aaauaucauucag

SEQ ID NO: 3374295 - RNA, 18 nt, Human
aaauaucauuuauuuuuu

SEQ ID NO: 3374296 - RNA, 19 nt, Human
aaauaucccgggggugggg

SEQ ID NO: 3374297 - RNA, 22 nt, Human
aaauaucccuuggacauuuuau

SEQ ID NO: 3374298 - RNA, 16 nt, Human
aaauaucucuauuuaa

SEQ ID NO: 3374299 - RNA, 17 nt, Human
aaauaucugaaaaugua

SEQ ID NO: 3374300 - RNA, 20 nt, Human
aaauagcuuuuuucucugau

SEQ ID NO: 3374301 - RNA, 14 nt, Human
aaauaggagaggau

SEQ ID NO: 3374302 - RNA, 23 nt, Human
aaauaggagaggaugagagccca

SEQ ID NO: 3374303 - RNA, 19 nt, Human
aaauaggagggaaaccuuu

SEQ ID NO: 3374304 - RNA, 16 nt, Human
aaauagggucuaacuc

SEQ ID NO: 3374305 - RNA, 23 nt, Human
aaauaguaggcaagauggcacag

SEQ ID NO: 3374306 - RNA, 14 nt, Human
aaauaguauuugag

SEQ ID NO: 3374307 - RNA, 20 nt, Human
aaauagucuagacuaaaaga

SEQ ID NO: 3374308 - RNA, 21 nt, Human
aaauagugacauaauauauuc

SEQ ID NO: 3374309 - RNA, 20 nt, Human
aaauagugcagaaucucaua

SEQ ID NO: 3374310 - RNA, 21 nt, Human
aaauagugguucuuggaaaaa

SEQ ID NO: 3374311 - RNA, 23 nt, Human
aaauaguucugugacuaggaaaa

SEQ ID NO: 3374312 - RNA, 16 nt, Human
aaauaguuguccauau

SEQ ID NO: 3374313 - RNA, 17 nt, Human
aaauaguuuauuuuaaa

SEQ ID NO: 3374314 - RNA, 21 nt, Human
aaauaguuuauuuuaaaacaa

SEQ ID NO: 3374315 - RNA, 14 nt, Human
aaauaguuuggaua

SEQ ID NO: 3374316 - RNA, 11 nt, Human
aaauauaaaac

SEQ ID NO: 3374317 - RNA, 13 nt, Human
aaauauaaacaaa

SEQ ID NO: 3374318 - RNA, 24 nt, Human
aaauauaaagacguuuuauaagca

SEQ ID NO: 3374319 - RNA, 18 nt, Human
aaauauaaagcaucuaaa

SEQ ID NO: 3374320 - RNA, 22 nt, Human
aaauauaagccuuuuauacuga

SEQ ID NO: 3374321 - RNA, 11 nt, Human
aaauauaauuc

SEQ ID NO: 3374322 - RNA, 13 nt, Human
aaauauacauguu

SEQ ID NO: 3374323 - RNA, 20 nt, Human
aaauucuuucccagucuguc

SEQ ID NO: 3374324 - RNA, 21 nt, Human
aaauugaaaaguuauuucccu

SEQ ID NO: 3374325 - RNA, 20 nt, Human
aaauugaaaggcauucucug

SEQ ID NO: 3374326 - RNA, 22 nt, Human
aaauugaaaggcauucucugaa

SEQ ID NO: 3374327 - RNA, 13 nt, Human
aaauugaaauugu

SEQ ID NO: 3374328 - RNA, 15 nt, Human
aaauugaaccuuugu

SEQ ID NO: 3374329 - RNA, 12 nt, Human
aaauugaagaga

SEQ ID NO: 3374330 - RNA, 21 nt, Human
aaauugaagagagauauaucu

SEQ ID NO: 3374331 - RNA, 13 nt, Human
aaauugaaugcaa

SEQ ID NO: 3374332 - RNA, 14 nt, Human
aaauugaaugcaaa

SEQ ID NO: 3374333 - RNA, 13 nt, Human
aaauugaauuuaa

SEQ ID NO: 3374334 - RNA, 13 nt, Human
aaauugacuguac

SEQ ID NO: 3374335 - RNA, 18 nt, Human
aaauugagacagugcaca

SEQ ID NO: 3374336 - RNA, 23 nt, Human
aaauugagcugcuuuuuuugaaa

SEQ ID NO: 3374337 - RNA, 20 nt, Human
aaauugauaaugcuuucaca

SEQ ID NO: 3374338 - RNA, 21 nt, Human
aaauugauguguuuauuuaua

SEQ ID NO: 3374339 - RNA, 12 nt, Human
aaauugauguug

SEQ ID NO: 3374340 - RNA, 13 nt, Human
aaauugauguuga

SEQ ID NO: 3374341 - RNA, 15 nt, Human
aaauugauuuugaac

SEQ ID NO: 3374342 - RNA, 19 nt, Human
aaauugcaaaucuugaaau

SEQ ID NO: 3374343 - RNA, 17 nt, Human
aaauugcauaaagcaua

SEQ ID NO: 3374344 - RNA, 19 nt, Human
aaauugcaugcugcuuuaa

SEQ ID NO: 3374345 - RNA, 19 nt, Human
aaauugccauauugcacau

SEQ ID NO: 3374346 - RNA, 23 nt, Human
aaauugccauauugcacaugucu

SEQ ID NO: 3374347 - RNA, 14 nt, Human
aaauugccuuucug

SEQ ID NO: 3374348 - RNA, 17 nt, Human
aaauugcuaauguugcu

SEQ ID NO: 3374349 - RNA, 21 nt, Human
aaauggugguuguuucuucca

SEQ ID NO: 3374350 - RNA, 18 nt, Human
aaaugguguuuucaugua

SEQ ID NO: 3374351 - RNA, 13 nt, Human
aaaugguuaaaag

SEQ ID NO: 3374352 - RNA, 13 nt, Human
aaaugguuguauu

SEQ ID NO: 3374353 - RNA, 14 nt, Human
aaaugguuguauua

SEQ ID NO: 3374354 - RNA, 19 nt, Human
aaauguaaaaauaauaauu

SEQ ID NO: 3374355 - RNA, 13 nt, Human
aaauguaaacugc

SEQ ID NO: 3374356 - RNA, 14 nt, Human
aaauguaaacugcc

SEQ ID NO: 3374357 - RNA, 20 nt, Human
aaauguaaacuguuucuuua

SEQ ID NO: 3374358 - RNA, 13 nt, Human
aaauguaacaguc

SEQ ID NO: 3374359 - RNA, 18 nt, Human
aaauguaacuauguuuua

SEQ ID NO: 3374360 - RNA, 22 nt, Human
aaauguaagaucguucucugcc

SEQ ID NO: 3374361 - RNA, 12 nt, Human
aaauguaauuga

SEQ ID NO: 3374362 - RNA, 14 nt, Human
aaauguaauuuaaa

SEQ ID NO: 3374363 - RNA, 16 nt, Human
aaauguacagacauau

SEQ ID NO: 3374364 - RNA, 20 nt, Human
aaauguacagacauauuuaa

SEQ ID NO: 3374365 - RNA, 16 nt, Human
aaauguacauguauua

SEQ ID NO: 3374366 - RNA, 18 nt, Human
aaauguagaauauucaga

SEQ ID NO: 3374367 - RNA, 19 nt, Human
aaauguagaguuuuuaaac

SEQ ID NO: 3374368 - RNA, 21 nt, Human
aaauguaggcaucaugcaugu

SEQ ID NO: 3374369 - RNA, 16 nt, Human
aaauguagguaugaau

SEQ ID NO: 3374370 - RNA, 15 nt, Human
aaauguauaccugua

SEQ ID NO: 3374371 - RNA, 13 nt, Human
aaauguauauaca

SEQ ID NO: 3374372 - RNA, 17 nt, Human
aaauguauauacacaua

SEQ ID NO: 3374373 - RNA, 23 nt, Human
aaauguauauacacauauaccua

SEQ ID NO: 3374374 - RNA, 21 nt, Human
aaauguauauauuuagugcug

SEQ ID NO: 3374375 - RNA, 15 nt, Human
aaauguaucuaagaa

SEQ ID NO: 3374376 - RNA, 14 nt, Human
aaauguaucuuauu

SEQ ID NO: 3374377 - RNA, 17 nt, Human
aaauguaucuuauucac

SEQ ID NO: 3374378 - RNA, 13 nt, Human
aaauguaugugag

SEQ ID NO: 3374379 - RNA, 15 nt, Human
aaauguauuacagug

SEQ ID NO: 3374380 - RNA, 11 nt, Human
aaauguauuau

SEQ ID NO: 3374381 - RNA, 13 nt, Human
aaauguauuaugu

SEQ ID NO: 3374382 - RNA, 14 nt, Human
aaauguauucaaau

SEQ ID NO: 3374383 - RNA, 21 nt, Human
aaauguauuuuauguuauaua

SEQ ID NO: 3374384 - RNA, 21 nt, Human
aaaugucacguuuuguuuugu

SEQ ID NO: 3374385 - RNA, 14 nt, Human
aaaugucacuuuuu

SEQ ID NO: 3374386 - RNA, 16 nt, Human
aaaugucacuuuuuga

SEQ ID NO: 3374387 - RNA, 20 nt, Human
aaaugucagauacaauguau

SEQ ID NO: 3374388 - RNA, 22 nt, Human
aaaugucaguggaagaagcaga

SEQ ID NO: 3374389 - RNA, 20 nt, Human
aaaugucaugagauugcugu

SEQ ID NO: 3374390 - RNA, 15 nt, Human
aaaugucaugcugcc

SEQ ID NO: 3374391 - RNA, 16 nt, Human
aaaugucaugcugccu

SEQ ID NO: 3374392 - RNA, 18 nt, Human
aaaugucaugcugccuua

SEQ ID NO: 3374393 - RNA, 22 nt, Human
aaauguccuccagaagccucug

SEQ ID NO: 3374394 - RNA, 16 nt, Human
aaaugucuaauguauu

SEQ ID NO: 3374395 - RNA, 20 nt, Human
aaaugucuaauguauuuuau

SEQ ID NO: 3374396 - RNA, 18 nt, Human
aaaugucuguaauaauag

SEQ ID NO: 3374397 - RNA, 16 nt, Human
aaaugucuucuguauu

SEQ ID NO: 3374398 - RNA, 18 nt, Human
aaaugucuucuguauuca

SEQ ID NO: 3374399 - RNA, 22 nt, Human
aaaugucuugcuguugacauau

SEQ ID NO: 3374400 - RNA, 13 nt, Human
aaaugucuugugu

SEQ ID NO: 3374401 - RNA, 17 nt, Human
aaaugucuuuguaaguc

SEQ ID NO: 3374402 - RNA, 17 nt, Human
aaaugugaagaugcauu

SEQ ID NO: 3374403 - RNA, 22 nt, Human
aaaugugaagaugcauuguagu

SEQ ID NO: 3374404 - RNA, 15 nt, Human
aaaugugaauuacua

SEQ ID NO: 3374405 - RNA, 18 nt, Human
aaaugugaauuuuuauug

SEQ ID NO: 3374406 - RNA, 14 nt, Human
aaaugugaggaaga

SEQ ID NO: 3374407 - RNA, 20 nt, Human
aaaugugagugguugaauau

SEQ ID NO: 3374408 - RNA, 13 nt, Human
aaaugugauuuuu

SEQ ID NO: 3374409 - RNA, 15 nt, Human
aaaugugauuuuucu

SEQ ID NO: 3374410 - RNA, 18 nt, Human
aaaugugccuucauuuuu

SEQ ID NO: 3374411 - RNA, 15 nt, Human
aaaugugcuuuuaaa

SEQ ID NO: 3374412 - RNA, 18 nt, Human
aaauguggcauuugugau

SEQ ID NO: 3374413 - RNA, 20 nt, Human
aaaugugggauuauggguca

SEQ ID NO: 3374414 - RNA, 22 nt, Human
aaaugugggauuaugggucaca

SEQ ID NO: 3374415 - RNA, 10 nt, Human
aaauguguaa

SEQ ID NO: 3374416 - RNA, 13 nt, Human
aaauguguacaua

SEQ ID NO: 3374417 - RNA, 15 nt, Human
aaauguguauuuuaa

SEQ ID NO: 3374418 - RNA, 20 nt, Human
aaauguguccuaucuaucuu

SEQ ID NO: 3374419 - RNA, 21 nt, Human
aaauguguccuaucuaucuuc

SEQ ID NO: 3374420 - RNA, 19 nt, Human
aaaugugugagugcaugua

SEQ ID NO: 3374421 - RNA, 15 nt, Human
aaaugugugugaugu

SEQ ID NO: 3374422 - RNA, 22 nt, Human
aaaugugugugaugugacauuu

SEQ ID NO: 3374423 - RNA, 23 nt, Human
aaauguguguuuuuuuaggguuu

SEQ ID NO: 3374424 - RNA, 20 nt, Human
aaauguguuggacaaaugug

SEQ ID NO: 3374425 - RNA, 13 nt, Human
aaauguuaaaaug

SEQ ID NO: 3374426 - RNA, 13 nt, Human
aaauguuaacaau

SEQ ID NO: 3374427 - RNA, 15 nt, Human
aaauguuaccucuga

SEQ ID NO: 3374428 - RNA, 15 nt, Human
aaauguuaguuucuu

SEQ ID NO: 3374429 - RNA, 23 nt, Human
aaauguuaucuucucaaguucua

SEQ ID NO: 3374430 - RNA, 12 nt, Human
aaauguuaugua

SEQ ID NO: 3374431 - RNA, 23 nt, Human
aaauguuauguauauggugguaa

SEQ ID NO: 3374432 - RNA, 16 nt, Human
aaauguuauuaucugg

SEQ ID NO: 3374433 - RNA, 12 nt, Human
aaauguuauuuc

SEQ ID NO: 3374434 - RNA, 16 nt, Human
aaauguucacuuuuga

SEQ ID NO: 3374435 - RNA, 13 nt, Human
aaauguucaucaa

SEQ ID NO: 3374436 - RNA, 17 nt, Human
aaauguucaucaaugaa

SEQ ID NO: 3374437 - RNA, 13 nt, Human
aaauguucuaagu

SEQ ID NO: 3374438 - RNA, 14 nt, Human
aaauguucuaaguu

SEQ ID NO: 3374439 - RNA, 19 nt, Human
aaauguucuaaguuucuaa

SEQ ID NO: 3374440 - RNA, 21 nt, Human
aaauguucuaaguuucuaaga

SEQ ID NO: 3374441 - RNA, 21 nt, Human
aaauguugaaaagucaaacug

SEQ ID NO: 3374442 - RNA, 23 nt, Human
aaauguugaaauaugauguuaaa

SEQ ID NO: 3374443 - RNA, 22 nt, Human
aaauguugaaccaaaccucccu

SEQ ID NO: 3374444 - RNA, 22 nt, Human
aaauguugacauaccuuuuauu

SEQ ID NO: 3374445 - RNA, 19 nt, Human
aaauguugcugaaaaaugg

SEQ ID NO: 3374446 - RNA, 22 nt, Human
aaauguuggauuuauaaaugcu

SEQ ID NO: 3374447 - RNA, 13 nt, Human
aaauguuuaauca

SEQ ID NO: 3374448 - RNA, 19 nt, Human
aaauguuuaaucauauaaa

SEQ ID NO: 3374449 - RNA, 17 nt, Human
aaauguuuauuuaaaag

SEQ ID NO: 3374450 - RNA, 18 nt, Human
aaauguuuauuuaaaaga

SEQ ID NO: 3374451 - RNA, 22 nt, Human
aaauguuuauuuaaaagagcag

SEQ ID NO: 3374452 - RNA, 10 nt, Human
aaauguuucu

SEQ ID NO: 3374453 - RNA, 11 nt, Human
aaauguuucuu

SEQ ID NO: 3374454 - RNA, 14 nt, Human
aaauguuucuuuug

SEQ ID NO: 3374455 - RNA, 14 nt, Human
aaauguuugacaca

SEQ ID NO: 3374456 - RNA, 22 nt, Human
aaauguuuuauaaguucacaaa

SEQ ID NO: 3374457 - RNA, 11 nt, Human
aaauguuuuca

SEQ ID NO: 3374458 - RNA, 18 nt, Human
aaauguuuucagcuagga

SEQ ID NO: 3374459 - RNA, 17 nt, Human
aaauguuuuguaaacau

SEQ ID NO: 3374460 - RNA, 18 nt, Human
aaauguuuuguaaacauu

SEQ ID NO: 3374461 - RNA, 20 nt, Human
aaauguuuuguaaacauuua

SEQ ID NO: 3374462 - RNA, 16 nt, Human
aaauguuuuguaaacu

SEQ ID NO: 3374463 - RNA, 23 nt, Human
aaauguuuuguaaacuuugaaau

SEQ ID NO: 3374464 - RNA, 20 nt, Human
aaauguuuuuaauaaaagaa

SEQ ID NO: 3374465 - RNA, 21 nt, Human
aaauguuuuuaauaaaagaaa

SEQ ID NO: 3374466 - RNA, 16 nt, Human
aaauguuuuucugcca

SEQ ID NO: 3374467 - RNA, 12 nt, Human
aaauguuuuugg

SEQ ID NO: 3374468 - RNA, 21 nt, Human
aaauugagacagugcacauga

SEQ ID NO: 3374469 - RNA, 23 nt, Human
aaauugagcuggaccucaccaag

SEQ ID NO: 3374470 - RNA, 18 nt, Human
aaauugaugggauuuggu

SEQ ID NO: 3374471 - RNA, 14 nt, Human
aaauugauguugau

SEQ ID NO: 3374472 - RNA, 18 nt, Human
aaauugauguugaugcaa

SEQ ID NO: 3374473 - RNA, 14 nt, Human
aaauugcaaaucuu

SEQ ID NO: 3374474 - RNA, 20 nt, Human
aaauugcacacacucagugc

SEQ ID NO: 3374475 - RNA, 16 nt, Human
aaauugcauaaagcau

SEQ ID NO: 3374476 - RNA, 12 nt, Human
aaauugcauacu

SEQ ID NO: 3374477 - RNA, 14 nt, Human
aaauugcauacuuu

SEQ ID NO: 3374478 - RNA, 16 nt, Human
aaauugcaugcugcuu

SEQ ID NO: 3374479 - RNA, 23 nt, Human
aaauugcauggguuuuguaggua

SEQ ID NO: 3374480 - RNA, 18 nt, Human
aaauugcauuuccugaca

SEQ ID NO: 3374481 - RNA, 14 nt, Human
aaauugccauauug

SEQ ID NO: 3374482 - RNA, 22 nt, Human
aaauugcuauguuacuauuuuc

SEQ ID NO: 3374483 - RNA, 13 nt, Human
aaauugcuccuug

SEQ ID NO: 3374484 - RNA, 14 nt, Human
aaauugcuguguau

SEQ ID NO: 3374485 - RNA, 18 nt, Human
aaauugcuuacuuuggaa

SEQ ID NO: 3374486 - RNA, 13 nt, Human
aaauugcuugaaa

SEQ ID NO: 3374487 - RNA, 18 nt, Human
aaauuggauuagccugga

SEQ ID NO: 3374488 - RNA, 23 nt, Human
aaauuggauucccuuaaacaaaa

SEQ ID NO: 3374489 - RNA, 16 nt, Human
aaauuggcauggaaau

SEQ ID NO: 3374490 - RNA, 21 nt, Human
aaauuggcauggaaauuuaaa

SEQ ID NO: 3374491 - RNA, 14 nt, Human
aaauuggcauuaaa

SEQ ID NO: 3374492 - RNA, 22 nt, Human
aaauuggccugguauggcugca

SEQ ID NO: 3374493 - RNA, 22 nt, Human
aaauuggggauucuuaaaguug

SEQ ID NO: 3374494 - RNA, 15 nt, Human
aaauugggguuuauu

SEQ ID NO: 3374495 - RNA, 15 nt, Human
aaauuggguucauga

SEQ ID NO: 3374496 - RNA, 19 nt, Human
aaauuguaagcaugcacaa

SEQ ID NO: 3374497 - RNA, 22 nt, Human
aaauuguacauauuuguggaau

SEQ ID NO: 3374498 - RNA, 15 nt, Human
aaauuguaccuuuuu

SEQ ID NO: 3374499 - RNA, 14 nt, Human
aaauuguauauuca

SEQ ID NO: 3374500 - RNA, 13 nt, Human
aaauuguauauug

SEQ ID NO: 3374501 - RNA, 18 nt, Human
aaauuguaucucauuacu

SEQ ID NO: 3374502 - RNA, 23 nt, Human
aaauuguccguguucauacauuu

SEQ ID NO: 3374503 - RNA, 19 nt, Human
aaauugugggucuauuucu

SEQ ID NO: 3374504 - RNA, 21 nt, Human
aaauugugugugcucugcuuc

SEQ ID NO: 3374505 - RNA, 22 nt, Human
aaauugugugugcucugcuuca

SEQ ID NO: 3374506 - RNA, 19 nt, Human
aaauuguuacuccauauau

SEQ ID NO: 3374507 - RNA, 19 nt, Human
aaauuguuaucaaaauagu

SEQ ID NO: 3374508 - RNA, 13 nt, Human
aaauuguuuagug

SEQ ID NO: 3374509 - RNA, 22 nt, Human
aaauuguuuccaagauagagag

SEQ ID NO: 3374510 - RNA, 19 nt, Human
aaauuguuuggcuuccucc

SEQ ID NO: 3374511 - RNA, 21 nt, Human
aaauuguuuggcuuccuccug

SEQ ID NO: 3374512 - RNA, 12 nt, Human
aaauuuaaaaaa

SEQ ID NO: 3374513 - RNA, 23 nt, Human
aaauuuaaaagacacuguuuaca

SEQ ID NO: 3374514 - RNA, 19 nt, Human
aacaaagcuuagcaggaga

SEQ ID NO: 3374515 - RNA, 15 nt, Human
aacaaaggauacuua

SEQ ID NO: 3374516 - RNA, 17 nt, Human
aacaaaggcaaguuaag

SEQ ID NO: 3374517 - RNA, 20 nt, Human
aacaaaggcaaguuaagaga

SEQ ID NO: 3374518 - RNA, 19 nt, Human
aacaaaguggaaggaaaga

SEQ ID NO: 3374519 - RNA, 19 nt, Human
aacaaauaaaaaagcucuu

SEQ ID NO: 3374520 - RNA, 16 nt, Human
aacaaauaugcuaauu

SEQ ID NO: 3374521 - RNA, 13 nt, Human
aacaaaucuuccu

SEQ ID NO: 3374522 - RNA, 19 nt, Human
aacaaaugaacgauaugua

SEQ ID NO: 3374523 - RNA, 20 nt, Human
aacaaauuagguuuuguaca

SEQ ID NO: 3374524 - RNA, 18 nt, Human
aacaaauucauauucugu

SEQ ID NO: 3374525 - RNA, 22 nt, Human
aacaaauucaucaaauggaaga

SEQ ID NO: 3374526 - RNA, 13 nt, Human
aacaacaauuggu

SEQ ID NO: 3374527 - RNA, 14 nt, Human
aacaacauuuugag

SEQ ID NO: 3374528 - RNA, 21 nt, Human
aacaacauuuugagaacaaag

SEQ ID NO: 3374529 - RNA, 22 nt, Human
aacaaccccccaucacaaacuu

SEQ ID NO: 3374530 - RNA, 18 nt, Human
aacaaccucggcuccugg

SEQ ID NO: 3374531 - RNA, 15 nt, Human
aacaacucuuugaga

SEQ ID NO: 3374532 - RNA, 16 nt, Human
aacaacuucuuuguaa

SEQ ID NO: 3374533 - RNA, 17 nt, Human
aacaacuucuuuguaau

SEQ ID NO: 3374534 - RNA, 15 nt, Human
aacaacuuuuuuuuc

SEQ ID NO: 3374535 - RNA, 13 nt, Human
aacaagaaaacau

SEQ ID NO: 3374536 - RNA, 15 nt, Human
aacaagaaaguuucc

SEQ ID NO: 3374537 - RNA, 14 nt, Human
aacaagaagaauuu

SEQ ID NO: 3374538 - RNA, 17 nt, Human
aacaagaagaauuugaa

SEQ ID NO: 3374539 - RNA, 12 nt, Human
aacaagaaugca

SEQ ID NO: 3374540 - RNA, 22 nt, Human
aacaagaccaccacuucgaaac

SEQ ID NO: 3374541 - RNA, 16 nt, Human
aacaagaccacguuuc

SEQ ID NO: 3374542 - RNA, 17 nt, Human
aacaagaccacguuucu

SEQ ID NO: 3374543 - RNA, 19 nt, Human
aacaagaccccgucucaaa

SEQ ID NO: 3374544 - RNA, 17 nt, Human
aacaagagaagcauucu

SEQ ID NO: 3374545 - RNA, 21 nt, Human
aacaagagaagcauucucauu

SEQ ID NO: 3374546 - RNA, 19 nt, Human
aacaagaugguucuagcau

SEQ ID NO: 3374547 - RNA, 19 nt, Human
aacaagcaagcucccaagg

SEQ ID NO: 3374548 - RNA, 16 nt, Human
aacaagcauauaaaau

SEQ ID NO: 3374549 - RNA, 21 nt, Human
aacaagccuccuuuuaaagua

SEQ ID NO: 3374550 - RNA, 12 nt, Human
aacaagcuucag

SEQ ID NO: 3374551 - RNA, 14 nt, Human
aacaagcuucagua

SEQ ID NO: 3374552 - RNA, 16 nt, Human
aacaaggcaaggcugu

SEQ ID NO: 3374553 - RNA, 23 nt, Human
aacaaggcaaggcugucaauuac

SEQ ID NO: 3374554 - RNA, 23 nt, Human
aacaaggccugucagcuaaagaa

SEQ ID NO: 3374555 - RNA, 21 nt, Human
aacaagggagagaccucauca

SEQ ID NO: 3374556 - RNA, 18 nt, Human
aacaagggcaguggaggu

SEQ ID NO: 3374557 - RNA, 19 nt, Human
aacaagucgaugaacuauu

SEQ ID NO: 3374558 - RNA, 21 nt, Human
aacaagugaaauaacaaaaug

SEQ ID NO: 3374559 - RNA, 20 nt, Human
aacaagugaacacauugugu

SEQ ID NO: 3374560 - RNA, 17 nt, Human
aacaaguugagcuauga

SEQ ID NO: 3374561 - RNA, 22 nt, Human
aacaaguugagcuaugacuuaa

SEQ ID NO: 3374562 - RNA, 17 nt, Human
aacaaguuuuaauguau

SEQ ID NO: 3374563 - RNA, 16 nt, Human
aacaauaaaacauuau

SEQ ID NO: 3374564 - RNA, 17 nt, Human
aacaauaaaacauuaug

SEQ ID NO: 3374565 - RNA, 16 nt, Human
aacaauaaaauuuuuu

SEQ ID NO: 3374566 - RNA, 14 nt, Human
aacaauaaagagau

SEQ ID NO: 3374567 - RNA, 15 nt, Human
aacaauaacuacugu

SEQ ID NO: 3374568 - RNA, 17 nt, Human
aacaauaacuacugugu

SEQ ID NO: 3374569 - RNA, 14 nt, Human
aacaauacaaaugg

SEQ ID NO: 3374570 - RNA, 15 nt, Human
aacaauacaaaugga

SEQ ID NO: 3374571 - RNA, 17 nt, Human
aacaauacaaauggauu

SEQ ID NO: 3374572 - RNA, 19 nt, Human
aacaauacucauaauguga

SEQ ID NO: 3374573 - RNA, 21 nt, Human
aacaauacucauaaugugaag

SEQ ID NO: 3374574 - RNA, 23 nt, Human
aacaauaggaugggcuucugugc

SEQ ID NO: 3374575 - RNA, 13 nt, Human
aacaauaucauau

SEQ ID NO: 3374576 - RNA, 16 nt, Human
aacaauauugucugaa

SEQ ID NO: 3374577 - RNA, 15 nt, Human
aacaauauuuauugu

SEQ ID NO: 3374578 - RNA, 22 nt, Human
aacaauauuuuaugguuauguu

SEQ ID NO: 3374579 - RNA, 23 nt, Human
aacaaucaaagcacuuggacucu

SEQ ID NO: 3374580 - RNA, 13 nt, Human
aacaaucacacuc

SEQ ID NO: 3374581 - RNA, 17 nt, Human
aacaaucuggaagaaaa

SEQ ID NO: 3374582 - RNA, 14 nt, Human
aacaaucuuccugu

SEQ ID NO: 3374583 - RNA, 17 nt, Human
aacaaucuuccuguuua

SEQ ID NO: 3374584 - RNA, 18 nt, Human
aacaaugaagauaaaaag

SEQ ID NO: 3374585 - RNA, 16 nt, Human
aacaaugaaguugaaa

SEQ ID NO: 3374586 - RNA, 18 nt, Human
aacaaugaaguugaaaau

SEQ ID NO: 3374587 - RNA, 22 nt, Human
aacaaugaauaaaaacucaagg

SEQ ID NO: 3374588 - RNA, 15 nt, Human
aacaaugacauuuau

SEQ ID NO: 3374589 - RNA, 20 nt, Human
aacaaugacuaauucuugca

SEQ ID NO: 3374590 - RNA, 14 nt, Human
aacaaugauauaug

SEQ ID NO: 3374591 - RNA, 23 nt, Human
aacaaugccuauuguaauauaga

SEQ ID NO: 3374592 - RNA, 15 nt, Human
aacaaugcuguauuu

SEQ ID NO: 3374593 - RNA, 16 nt, Human
aacaauggaaacugaa

SEQ ID NO: 3374594 - RNA, 18 nt, Human
aacaauggaaacugaaug

SEQ ID NO: 3374595 - RNA, 16 nt, Human
aacaauggaguauucu

SEQ ID NO: 3374596 - RNA, 20 nt, Human
aacaaugguaacauuuuuca

SEQ ID NO: 3374597 - RNA, 21 nt, Human
aacaauguuaaggaaacucuu

SEQ ID NO: 3374598 - RNA, 22 nt, Human
aacaauucuaaaaugauuguag

SEQ ID NO: 3374599 - RNA, 22 nt, Human
aacaauucucccgggacucugc

SEQ ID NO: 3374600 - RNA, 23 nt, Human
aacaauucucccgggacucugca

SEQ ID NO: 3374601 - RNA, 16 nt, Human
aacaauugaaguaaac

SEQ ID NO: 3374602 - RNA, 23 nt, Human
aacaauugaaguaaacuuuuugu

SEQ ID NO: 3374603 - RNA, 16 nt, Human
aacaauugguaaaacu

SEQ ID NO: 3374604 - RNA, 20 nt, Human
aacaauuguguagccuuuuu

SEQ ID NO: 3374605 - RNA, 22 nt, Human
aacaauuguguagccuuuuugu

SEQ ID NO: 3374606 - RNA, 13 nt, Human
aacaauuuaaaaa

SEQ ID NO: 3374607 - RNA, 22 nt, Human
aacaauuuauuuuauuuuagca

SEQ ID NO: 3374608 - RNA, 14 nt, Human
aacaauuuggcaau

SEQ ID NO: 3374609 - RNA, 23 nt, Human
aacaauuuuaggaggaccagagc

SEQ ID NO: 3374610 - RNA, 14 nt, Human
aacaauuuucagau

SEQ ID NO: 3374611 - RNA, 17 nt, Human
aaccauucaaaaauuuc

SEQ ID NO: 3374612 - RNA, 12 nt, Human
aaccauugcuuc

SEQ ID NO: 3374613 - RNA, 13 nt, Human
aaccauugcuuca

SEQ ID NO: 3374614 - RNA, 16 nt, Human
aaccauugcuucacua

SEQ ID NO: 3374615 - RNA, 23 nt, Human
aaccauugcuucacuacccaucg

SEQ ID NO: 3374616 - RNA, 18 nt, Human
aaccauugucuuguucug

SEQ ID NO: 3374617 - RNA, 19 nt, Human
aaccauuugaaaccccugu

SEQ ID NO: 3374618 - RNA, 23 nt, Human
aaccauuugaaguguaccugugu

SEQ ID NO: 3374619 - RNA, 20 nt, Human
aaccauuuuauaaagugcuu

SEQ ID NO: 3374620 - RNA, 22 nt, Human
aaccauuuuauaaagugcuugu

SEQ ID NO: 3374621 - RNA, 22 nt, Human
aacccaaauuacguguacuaca

SEQ ID NO: 3374622 - RNA, 21 nt, Human
aacccaagaugcaagaaggag

SEQ ID NO: 3374623 - RNA, 16 nt, Human
aacccaagcuuagaac

SEQ ID NO: 3374624 - RNA, 18 nt, Human
aacccaaggacugaggga

SEQ ID NO: 3374625 - RNA, 22 nt, Human
aacccaaggagcacagguccca

SEQ ID NO: 3374626 - RNA, 15 nt, Human
aacccacccuuucua

SEQ ID NO: 3374627 - RNA, 14 nt, Human
aacccaccugcuga

SEQ ID NO: 3374628 - RNA, 21 nt, Human
aacccacuugucacugacaca

SEQ ID NO: 3374629 - RNA, 23 nt, Human
aacccacuuuaaaauaucuacau

SEQ ID NO: 3374630 - RNA, 23 nt, Human
aacccagaccuguuagcagacag

SEQ ID NO: 3374631 - RNA, 12 nt, Human
aacccagacuca

SEQ ID NO: 3374632 - RNA, 14 nt, Human
aacccagacucaga

SEQ ID NO: 3374633 - RNA, 13 nt, Human
aacccagauuuug

SEQ ID NO: 3374634 - RNA, 21 nt, Human
aacccagauuuugcuguauau

SEQ ID NO: 3374635 - RNA, 16 nt, Human
aacccagcccaccccc

SEQ ID NO: 3374636 - RNA, 16 nt, Human
aacccagccgcugccc

SEQ ID NO: 3374637 - RNA, 17 nt, Human
aacccagcucuggucca

SEQ ID NO: 3374638 - RNA, 23 nt, Human
aacccagcugcaccccuuccugg

SEQ ID NO: 3374639 - RNA, 13 nt, Human
aacccaggagcau

SEQ ID NO: 3374640 - RNA, 11 nt, Human
aacccaggagg

SEQ ID NO: 3374641 - RNA, 17 nt, Human
aacccagggcucugccc

SEQ ID NO: 3374642 - RNA, 20 nt, Human
aacccagguuggcgacugca

SEQ ID NO: 3374643 - RNA, 15 nt, Human
aacccagucgcccuu

SEQ ID NO: 3374644 - RNA, 17 nt, Human
aacccauauuguaaaac

SEQ ID NO: 3374645 - RNA, 15 nt, Human
aacccaucagaagga

SEQ ID NO: 3374646 - RNA, 17 nt, Human
aacccaucagaaggaga

SEQ ID NO: 3374647 - RNA, 17 nt, Human
aacccaucuaccccugg

SEQ ID NO: 3374648 - RNA, 15 nt, Human
aacccaugagauuca

SEQ ID NO: 3374649 - RNA, 23 nt, Human
aacccauuaaggggaagaaugaa

SEQ ID NO: 3374650 - RNA, 20 nt, Human
aacccauuugucucuacuuu

SEQ ID NO: 3374651 - RNA, 22 nt, Human
aaccccaaaaugaagauuauuu

SEQ ID NO: 3374652 - RNA, 14 nt, Human
aaccccaaacagug

SEQ ID NO: 3374653 - RNA, 17 nt, Human
aaccccaacgcacagga

SEQ ID NO: 3374654 - RNA, 19 nt, Human
aaccccaacuacuguguua

SEQ ID NO: 3374655 - RNA, 11 nt, Human
aaccccagccg

SEQ ID NO: 3374656 - RNA, 14 nt, Human
aaccccaggccccg

SEQ ID NO: 3374657 - RNA, 16 nt, Human
aaccccaguucugcuc

SEQ ID NO: 3374658 - RNA, 18 nt, Human
aaccccaguucugcuccu

SEQ ID NO: 3374659 - RNA, 22 nt, Human
aaccccaguucugcuccucucc

SEQ ID NO: 3374660 - RNA, 23 nt, Human
aaccccaguucugcuccucucca

SEQ ID NO: 3374661 - RNA, 17 nt, Human
aaccccauaccuacauu

SEQ ID NO: 3374662 - RNA, 13 nt, Human
aacccccacacac

SEQ ID NO: 3374663 - RNA, 15 nt, Human
aacccccaccccaca

SEQ ID NO: 3374664 - RNA, 18 nt, Human
aacccccaccccacacuu

SEQ ID NO: 3374665 - RNA, 19 nt, Human
aacccccagcacccgggcu

SEQ ID NO: 3374666 - RNA, 16 nt, Human
aacccccauucucauc

SEQ ID NO: 3374667 - RNA, 18 nt, Human
aaccccccagcacugagg

SEQ ID NO: 3374668 - RNA, 16 nt, Human
aacccccuuugugcug

SEQ ID NO: 3374669 - RNA, 19 nt, Human
aacccccuuugugcugugg

SEQ ID NO: 3374670 - RNA, 20 nt, Human
aaccccggggugcccacagg

SEQ ID NO: 3374671 - RNA, 14 nt, Human
aaccccgucaacaa

SEQ ID NO: 3374672 - RNA, 16 nt, Human
aaccccgucaacaaau

SEQ ID NO: 3374673 - RNA, 21 nt, Human
aaccccuacaugaaacagaaa

SEQ ID NO: 3374674 - RNA, 20 nt, Human
aaccccuccccuccaucccu

SEQ ID NO: 3374675 - RNA, 21 nt, Human
aaccccuccccuccaucccug

SEQ ID NO: 3374676 - RNA, 23 nt, Human
aaccccuccccuccaucccuggc

SEQ ID NO: 3374677 - RNA, 12 nt, Human
aaccccucgccc

SEQ ID NO: 3374678 - RNA, 16 nt, Human
aaccccucgcccaguc

SEQ ID NO: 3374679 - RNA, 20 nt, Human
aaccccuggaccccagccuc

SEQ ID NO: 3374680 - RNA, 23 nt, Human
aaccccugucccaugcaggcccu

SEQ ID NO: 3374681 - RNA, 18 nt, Human
aaccccuucucugugacc

SEQ ID NO: 3374682 - RNA, 20 nt, Human
aaccccuucucugugaccca

SEQ ID NO: 3374683 - RNA, 16 nt, Human
aacccgacagagggaa

SEQ ID NO: 3374684 - RNA, 23 nt, Human
aacccgggagcggagguugcagu

SEQ ID NO: 3374685 - RNA, 14 nt, Human
aacccguggaggcu

SEQ ID NO: 3374686 - RNA, 15 nt, Human
aacccguggaggcug

SEQ ID NO: 3374687 - RNA, 21 nt, Human
aacccuaaaaagcagagcuuu

SEQ ID NO: 3374688 - RNA, 19 nt, Human
aacccuagccuugcuuguu

SEQ ID NO: 3374689 - RNA, 16 nt, Human
aacccuaucuccugac

SEQ ID NO: 3374690 - RNA, 10 nt, Human
aacccucagg

SEQ ID NO: 3374691 - RNA, 19 nt, Human
aacccucccucagccccuc

SEQ ID NO: 3374692 - RNA, 20 nt, Human
aacccucccucagccccucu

SEQ ID NO: 3374693 - RNA, 23 nt, Human
aacccucccucagccccucuugc

SEQ ID NO: 3374694 - RNA, 21 nt, Human
aacccugccauggaacuguuu

SEQ ID NO: 3374695 - RNA, 17 nt, Human
aacccugcccccaaaua

SEQ ID NO: 3374696 - RNA, 12 nt, Human
aacccugccccu

SEQ ID NO: 3374697 - RNA, 15 nt, Human
aacccugccgucacc

SEQ ID NO: 3374698 - RNA, 20 nt, Human
aacccugccgucaccaccac

SEQ ID NO: 3374699 - RNA, 16 nt, Human
aacccuggggaaggag

SEQ ID NO: 3374700 - RNA, 20 nt, Human
aacccuggggaaggagccag

SEQ ID NO: 3374701 - RNA, 20 nt, Human
aacccuggggccugacugcu

SEQ ID NO: 3374702 - RNA, 14 nt, Human
aacccuggugacca

SEQ ID NO: 3374703 - RNA, 23 nt, Human
aacccugucaaacauuaguacuu

SEQ ID NO: 3374704 - RNA, 22 nt, Human
aacccugucuggauccuauccu

SEQ ID NO: 3374705 - RNA, 19 nt, Human
aacccugugcugguguccu

SEQ ID NO: 3374706 - RNA, 16 nt, Human
aacccuguuuuauacu

SEQ ID NO: 3374707 - RNA, 18 nt, Human
aacccuuaaacaguugca

SEQ ID NO: 3374708 - RNA, 23 nt, Human
aacccuuaaacaguugcacagca

SEQ ID NO: 3374709 - RNA, 21 nt, Human
aacccuuaccccuuagccucc

SEQ ID NO: 3374710 - RNA, 11 nt, Human
aacccuucucc

SEQ ID NO: 3374711 - RNA, 14 nt, Human
aacccuucuuuuaa

SEQ ID NO: 3374712 - RNA, 15 nt, Human
aacccuugcuugcaa

SEQ ID NO: 3374713 - RNA, 21 nt, Human
aacccuuggagccaauggaga

SEQ ID NO: 3374714 - RNA, 18 nt, Human
aacccuugggccagaagu

SEQ ID NO: 3374715 - RNA, 18 nt, Human
aacccuuuauuugaacaa

SEQ ID NO: 3374716 - RNA, 20 nt, Human
aacccuuugugugcucucca

SEQ ID NO: 3374717 - RNA, 13 nt, Human
aaccgaauaaaug

SEQ ID NO: 3374718 - RNA, 19 nt, Human
aaccgagggggcugcuccc

SEQ ID NO: 3374719 - RNA, 16 nt, Human
aaaugagguacucucc

SEQ ID NO: 3374720 - RNA, 21 nt, Human
aaaugaggucuguuuaaagug

SEQ ID NO: 3374721 - RNA, 13 nt, Human
aaaugaguaacau

SEQ ID NO: 3374722 - RNA, 14 nt, Human
aaaugaguaacauu

SEQ ID NO: 3374723 - RNA, 15 nt, Human
aaaugagugugaagg

SEQ ID NO: 3374724 - RNA, 21 nt, Human
aaaugaguuaccuacauuuua

SEQ ID NO: 3374725 - RNA, 14 nt, Human
aaaugaguugugaa

SEQ ID NO: 3374726 - RNA, 22 nt, Human
aaaugaguuuuuauggggcuga

SEQ ID NO: 3374727 - RNA, 13 nt, Human
aaaugauagauuu

SEQ ID NO: 3374728 - RNA, 20 nt, Human
aaaugauagauuugaccucc

SEQ ID NO: 3374729 - RNA, 23 nt, Human
aaaugauccccagcuguuuaugc

SEQ ID NO: 3374730 - RNA, 20 nt, Human
aaaugaucugagucccagga

SEQ ID NO: 3374731 - RNA, 19 nt, Human
aaaugaugugccugcuuca

SEQ ID NO: 3374732 - RNA, 22 nt, Human
aaaugauugcuuuuaaaauuuu

SEQ ID NO: 3374733 - RNA, 15 nt, Human
aaaugauuguaaaau

SEQ ID NO: 3374734 - RNA, 14 nt, Human
aaaugauuguagua

SEQ ID NO: 3374735 - RNA, 21 nt, Human
aaaugauuuaaauuuaaguaa

SEQ ID NO: 3374736 - RNA, 15 nt, Human
aaaugcaaaaaaaau

SEQ ID NO: 3374737 - RNA, 17 nt, Human
aaaugcaaaaaaaauua

SEQ ID NO: 3374738 - RNA, 22 nt, Human
aaaugcaaaaaaucuuaauacu

SEQ ID NO: 3374739 - RNA, 16 nt, Human
aaaugcaacaacaugu

SEQ ID NO: 3374740 - RNA, 14 nt, Human
aaaugcaauauuaa

SEQ ID NO: 3374741 - RNA, 14 nt, Human
aaaugcaaugugaa

SEQ ID NO: 3374742 - RNA, 13 nt, Human
aaaugcagcccau

SEQ ID NO: 3374743 - RNA, 21 nt, Human
aaaugcagcccauuucuccag

SEQ ID NO: 3374744 - RNA, 22 nt, Human
aaaugcagcccauuucuccaga

SEQ ID NO: 3374745 - RNA, 23 nt, Human
aaaugcagcgaaccaauauuugu

SEQ ID NO: 3374746 - RNA, 18 nt, Human
aaaugcaguauauuucuu

SEQ ID NO: 3374747 - RNA, 12 nt, Human
aaaugcagugaa

SEQ ID NO: 3374748 - RNA, 20 nt, Human
aaaugcauauccugagccau

SEQ ID NO: 3374749 - RNA, 11 nt, Human
aaaugcauauu

SEQ ID NO: 3374750 - RNA, 20 nt, Human
aaaugcauccauuccucagg

SEQ ID NO: 3374751 - RNA, 22 nt, Human
aaaugcauccauuccucaggga

SEQ ID NO: 3374752 - RNA, 16 nt, Human
aaaugcaucuuugaug

SEQ ID NO: 3374753 - RNA, 14 nt, Human
aaaugcaugaacaa

SEQ ID NO: 3374754 - RNA, 20 nt, Human
aaaugcaugauuuuguaacc

SEQ ID NO: 3374755 - RNA, 20 nt, Human
aaccacauuggagauguuua

SEQ ID NO: 3374756 - RNA, 19 nt, Human
aaccaccacacccagccca

SEQ ID NO: 3374757 - RNA, 21 nt, Human
aaccaccacacccagcccacu

SEQ ID NO: 3374758 - RNA, 14 nt, Human
aaccaccagaagcc

SEQ ID NO: 3374759 - RNA, 19 nt, Human
aaccaccgcuccccagccc

SEQ ID NO: 3374760 - RNA, 20 nt, Human
aaccaccgcuccccagccca

SEQ ID NO: 3374761 - RNA, 19 nt, Human
aaccaccuaaucaggcuga

SEQ ID NO: 3374762 - RNA, 15 nt, Human
aaccaccuaccccug

SEQ ID NO: 3374763 - RNA, 16 nt, Human
aaccaccuauuuuuga

SEQ ID NO: 3374764 - RNA, 15 nt, Human
aaccacgccucuuga

SEQ ID NO: 3374765 - RNA, 18 nt, Human
aaccacgucugucuucac

SEQ ID NO: 3374766 - RNA, 18 nt, Human
aaccacucccagucccca

SEQ ID NO: 3374767 - RNA, 22 nt, Human
aaccacucuaucaaguauuaua

SEQ ID NO: 3374768 - RNA, 19 nt, Human
aaccacugaaaaaauauau

SEQ ID NO: 3374769 - RNA, 11 nt, Human
aaccacugaau

SEQ ID NO: 3374770 - RNA, 17 nt, Human
aaccacugaaucuggac

SEQ ID NO: 3374771 - RNA, 12 nt, Human
aaccacugcuuc

SEQ ID NO: 3374772 - RNA, 20 nt, Human
aaccacuguaaaaugaaauu

SEQ ID NO: 3374773 - RNA, 21 nt, Human
aaccacugugcgucuuggugu

SEQ ID NO: 3374774 - RNA, 19 nt, Human
aaccacuuaaaaaaugucc

SEQ ID NO: 3374775 - RNA, 13 nt, Human
aaccacuucauuc

SEQ ID NO: 3374776 - RNA, 16 nt, Human
aaccacuucauucugc

SEQ ID NO: 3374777 - RNA, 12 nt, Human
aaccacuuguag

SEQ ID NO: 3374778 - RNA, 21 nt, Human
aaccacuuguagauuugauuu

SEQ ID NO: 3374779 - RNA, 22 nt, Human
aaccacuuguagauuugauuuu

SEQ ID NO: 3374780 - RNA, 16 nt, Human
aaccagaacaguauga

SEQ ID NO: 3374781 - RNA, 17 nt, Human
aaccagaagcaacagaa

SEQ ID NO: 3374782 - RNA, 21 nt, Human
aaccagaagcaacagaaaaaa

SEQ ID NO: 3374783 - RNA, 18 nt, Human
aaccagaauaaaguucug

SEQ ID NO: 3374784 - RNA, 12 nt, Human
aaccagaccugg

SEQ ID NO: 3374785 - RNA, 13 nt, Human
aaccagagcacug

SEQ ID NO: 3374786 - RNA, 16 nt, Human
aaccagauauauauuc

SEQ ID NO: 3374787 - RNA, 23 nt, Human
aaccagcacagcuuagauuucau

SEQ ID NO: 3374788 - RNA, 14 nt, Human
aaccagccggggcc

SEQ ID NO: 3374789 - RNA, 16 nt, Human
aaccagcuaagaaaag

SEQ ID NO: 3374790 - RNA, 22 nt, Human
aaccagcuguaacacagcugag

SEQ ID NO: 3374791 - RNA, 13 nt, Human
aaccagcuuccuu

SEQ ID NO: 3374792 - RNA, 23 nt, Human
aaccagcuugcgaauaacagucc

SEQ ID NO: 3374793 - RNA, 15 nt, Human
aaccaggagcugcuc

SEQ ID NO: 3374794 - RNA, 16 nt, Human
aaccaggcaccucuuc

SEQ ID NO: 3374795 - RNA, 17 nt, Human
aaccaggcuuucuagaa

SEQ ID NO: 3374796 - RNA, 21 nt, Human
aaccagguccaaugagcuuuc

SEQ ID NO: 3374797 - RNA, 17 nt, Human
aaccaguauacaagaua

SEQ ID NO: 3374798 - RNA, 18 nt, Human
aaccaguauacaagauaa

SEQ ID NO: 3374799 - RNA, 19 nt, Human
aaccaguauacaagauaag

SEQ ID NO: 3374800 - RNA, 11 nt, Human
aaccaguauug

SEQ ID NO: 3374801 - RNA, 13 nt, Human
aaccaguauugua

SEQ ID NO: 3374802 - RNA, 23 nt, Human
aaccaguauuuuugcugcuucug

SEQ ID NO: 3374803 - RNA, 21 nt, Human
aaccagucuuucaacucauug

SEQ ID NO: 3374804 - RNA, 14 nt, Human
aaccagugccaagg

SEQ ID NO: 3374805 - RNA, 12 nt, Human
aaccaguugugg

SEQ ID NO: 3374806 - RNA, 20 nt, Human
aaccaguuguggugugagua

SEQ ID NO: 3374807 - RNA, 18 nt, Human
aaccaguuucagguguuu

SEQ ID NO: 3374808 - RNA, 16 nt, Human
aaccauaguuacugua

SEQ ID NO: 3374809 - RNA, 17 nt, Human
aaccauaguuacuguaa

SEQ ID NO: 3374810 - RNA, 23 nt, Human
aaccauaguuacuguaaaaugca

SEQ ID NO: 3374811 - RNA, 22 nt, Human
aaccauccagugacaaaccauc

SEQ ID NO: 3374812 - RNA, 22 nt, Human
aaccaucccugaugucugucug

SEQ ID NO: 3374813 - RNA, 16 nt, Human
aaccaucuggccuggc

SEQ ID NO: 3374814 - RNA, 15 nt, Human
aaccaugacgcaaag

SEQ ID NO: 3374815 - RNA, 19 nt, Human
aaccaugcaaaugcuauga

SEQ ID NO: 3374816 - RNA, 22 nt, Human
aaccauggcugaaggaaaccag

SEQ ID NO: 3374817 - RNA, 15 nt, Human
aaccaugggauaaau

SEQ ID NO: 3374818 - RNA, 17 nt, Human
aaccaugggauaaaugc

SEQ ID NO: 3374819 - RNA, 17 nt, Human
aaccaugucagcaaaaa

SEQ ID NO: 3374820 - RNA, 17 nt, Human
aaccauuccauuuccaa

SEQ ID NO: 3374821 - RNA, 14 nt, Human
aaccauugcuucac

SEQ ID NO: 3374822 - RNA, 19 nt, Human
aaccauugucuuguucugu

SEQ ID NO: 3374823 - RNA, 13 nt, Human
aaccauugugcau

SEQ ID NO: 3374824 - RNA, 23 nt, Human
aaccauuguucugacacgacuuc

SEQ ID NO: 3374825 - RNA, 12 nt, Human
aaccauuuaucu

SEQ ID NO: 3374826 - RNA, 19 nt, Human
aaccauuuaucuugaagga

SEQ ID NO: 3374827 - RNA, 12 nt, Human
aaccauuuccuc

SEQ ID NO: 3374828 - RNA, 15 nt, Human
aaccauuuucauuug

SEQ ID NO: 3374829 - RNA, 14 nt, Human
aaccauuuuuguua

SEQ ID NO: 3374830 - RNA, 14 nt, Human
aacccaaaccugga

SEQ ID NO: 3374831 - RNA, 23 nt, Human
aacccaaauguucaucaaugaau

SEQ ID NO: 3374832 - RNA, 14 nt, Human
aacccaagcuccuc

SEQ ID NO: 3374833 - RNA, 16 nt, Human
aacccaagcuccuccu

SEQ ID NO: 3374834 - RNA, 15 nt, Human
aacccaagcuuagaa

SEQ ID NO: 3374835 - RNA, 21 nt, Human
aacccaaggagcacagguccc

SEQ ID NO: 3374836 - RNA, 22 nt, Human
aacccaagguggguagaucacg

SEQ ID NO: 3374837 - RNA, 18 nt, Human
aacccaaguccaagcaua

SEQ ID NO: 3374838 - RNA, 11 nt, Human
aacccacacug

SEQ ID NO: 3374839 - RNA, 19 nt, Human
aacccacaggcccacagua

SEQ ID NO: 3374840 - RNA, 20 nt, Human
aacccacuugucacugacac

SEQ ID NO: 3374841 - RNA, 19 nt, Human
aacccacuuuaaaauaucu

SEQ ID NO: 3374842 - RNA, 13 nt, Human
aacccagaaacac

SEQ ID NO: 3374843 - RNA, 22 nt, Human
aacccagaccuguuagcagaca

SEQ ID NO: 3374844 - RNA, 12 nt, Human
aacccagagagg

SEQ ID NO: 3374845 - RNA, 16 nt, Human
aacccagcaacagaaa

SEQ ID NO: 3374846 - RNA, 17 nt, Human
aacccagcaacagaaaa

SEQ ID NO: 3374847 - RNA, 17 nt, Human
aacccagcaguucuguu

SEQ ID NO: 3374848 - RNA, 11 nt, Human
aacccagcucu

SEQ ID NO: 3374849 - RNA, 16 nt, Human
aacccaggacgcuucu

SEQ ID NO: 3374850 - RNA, 20 nt, Human
aacccaggagcauccaccuc

SEQ ID NO: 3374851 - RNA, 22 nt, Human
aacccagggcucugccccaguc

SEQ ID NO: 3374852 - RNA, 18 nt, Human
aacccauaggcccacaca

SEQ ID NO: 3374853 - RNA, 19 nt, Human
aacccauaggcccacacac

SEQ ID NO: 3374854 - RNA, 23 nt, Human
aacccauaggcccacacacaggu

SEQ ID NO: 3374855 - RNA, 13 nt, Human
aacccauuuuagu

SEQ ID NO: 3374856 - RNA, 20 nt, Human
aaccccacccuugcccaccc

SEQ ID NO: 3374857 - RNA, 14 nt, Human
aaccccagcauccu

SEQ ID NO: 3374858 - RNA, 12 nt, Human
aaccccaguucu

SEQ ID NO: 3374859 - RNA, 13 nt, Human
aaccccaguucug

SEQ ID NO: 3374860 - RNA, 16 nt, Human
aacccccacuggacug

SEQ ID NO: 3374861 - RNA, 20 nt, Human
aacccccacuggacugaccu

SEQ ID NO: 3374862 - RNA, 14 nt, Human
aacccccagccugc

SEQ ID NO: 3374863 - RNA, 17 nt, Human
aaccccccauuucuucc

SEQ ID NO: 3374864 - RNA, 17 nt, Human
aaccccgucaacaaauc

SEQ ID NO: 3374865 - RNA, 20 nt, Human
aaccccucgcccagucccag

SEQ ID NO: 3374866 - RNA, 16 nt, Human
aaccccuggaccccag

SEQ ID NO: 3374867 - RNA, 13 nt, Human
aaccccuguggag

SEQ ID NO: 3374868 - RNA, 11 nt, Human
aaccccuuucc

SEQ ID NO: 3374869 - RNA, 16 nt, Human
aacccgggaggcagag

SEQ ID NO: 3374870 - RNA, 14 nt, Human
aacccgugccaagu

SEQ ID NO: 3374871 - RNA, 13 nt, Human
aacccguggaggc

SEQ ID NO: 3374872 - RNA, 12 nt, Human
aacccguggcgc

SEQ ID NO: 3374873 - RNA, 23 nt, Human
aacccuaaauaauaaaaauaaac

SEQ ID NO: 3374874 - RNA, 13 nt, Human
aacccuagccuug

SEQ ID NO: 3374875 - RNA, 17 nt, Human
aaccgaguagaaaaugu

SEQ ID NO: 3374876 - RNA, 19 nt, Human
aaccgaguagaaaauguga

SEQ ID NO: 3374877 - RNA, 14 nt, Human
aaccgcaggaagcu

SEQ ID NO: 3374878 - RNA, 14 nt, Human
aaccgccagcucug

SEQ ID NO: 3374879 - RNA, 17 nt, Human
aaccgccagcucuguuc

SEQ ID NO: 3374880 - RNA, 14 nt, Human
aaccgcugaauaug

SEQ ID NO: 3374881 - RNA, 13 nt, Human
aaccgggauggga

SEQ ID NO: 3374882 - RNA, 23 nt, Human
aaccggggagcccccgccccgcc

SEQ ID NO: 3374883 - RNA, 22 nt, Human
aaccguaaagguuuauuuuucu

SEQ ID NO: 3374884 - RNA, 15 nt, Human
aaccguccucuuuuu

SEQ ID NO: 3374885 - RNA, 18 nt, Human
aaccgucuguuaugcugu

SEQ ID NO: 3374886 - RNA, 11 nt, Human
aaccguggccc

SEQ ID NO: 3374887 - RNA, 19 nt, Human
aaccguggcccuuccugga

SEQ ID NO: 3374888 - RNA, 15 nt, Human
aaccuaaaaaagaua

SEQ ID NO: 3374889 - RNA, 16 nt, Human
aaccuaaaaaagauau

SEQ ID NO: 3374890 - RNA, 20 nt, Human
aaccuaaaauaauugguucu

SEQ ID NO: 3374891 - RNA, 22 nt, Human
aaccuaaauaaacacauagauu

SEQ ID NO: 3374892 - RNA, 22 nt, Human
aaccuaaauuugguucuaggcc

SEQ ID NO: 3374893 - RNA, 14 nt, Human
aaccuaaccugugu

SEQ ID NO: 3374894 - RNA, 13 nt, Human
aaccuaacuguau

SEQ ID NO: 3374895 - RNA, 20 nt, Human
aaccuaaucaccauguaagc

SEQ ID NO: 3374896 - RNA, 14 nt, Human
aaccuaauuaauau

SEQ ID NO: 3374897 - RNA, 15 nt, Human
aaccuacauauucca

SEQ ID NO: 3374898 - RNA, 19 nt, Human
aaccuaccaccccuuccug

SEQ ID NO: 3374899 - RNA, 18 nt, Human
aaccuaccucccacacuc

SEQ ID NO: 3374900 - RNA, 22 nt, Human
aaccuaccucccacacucccaa

SEQ ID NO: 3374901 - RNA, 19 nt, Human
aacgccugagcccagggag

SEQ ID NO: 3374902 - RNA, 21 nt, Human
aacgcgcagaugugcagcaga

SEQ ID NO: 3374903 - RNA, 14 nt, Human
aacgcguugaaauu

SEQ ID NO: 3374904 - RNA, 21 nt, Human
aacgcuaaagagcccuugccu

SEQ ID NO: 3374905 - RNA, 20 nt, Human
aacgcuccaaagucauaauu

SEQ ID NO: 3374906 - RNA, 16 nt, Human
aacgcuccuuugugug

SEQ ID NO: 3374907 - RNA, 12 nt, Human
aacgcugccugc

SEQ ID NO: 3374908 - RNA, 15 nt, Human
aacgcugccugccca

SEQ ID NO: 3374909 - RNA, 17 nt, Human
aacgcuuaaaggaaguc

SEQ ID NO: 3374910 - RNA, 22 nt, Human
aacgcuuguagaacucacucug

SEQ ID NO: 3374911 - RNA, 23 nt, Human
aacgcuuguagaacucacucugg

SEQ ID NO: 3374912 - RNA, 14 nt, Human
aacggaagaagaga

SEQ ID NO: 3374913 - RNA, 22 nt, Human
aacggaggccugcgacccuggg

SEQ ID NO: 3374914 - RNA, 13 nt, Human
aacggaucagaaa

SEQ ID NO: 3374915 - RNA, 17 nt, Human
aacggaucagaaauaca

SEQ ID NO: 3374916 - RNA, 15 nt, Human
aacggaugauuucua

SEQ ID NO: 3374917 - RNA, 20 nt, Human
aacggauuauuuuuucagac

SEQ ID NO: 3374918 - RNA, 15 nt, Human
aacggauuccaaaga

SEQ ID NO: 3374919 - RNA, 14 nt, Human
aacggccccagcuu

SEQ ID NO: 3374920 - RNA, 16 nt, Human
aacgggaacaugcccc

SEQ ID NO: 3374921 - RNA, 19 nt, Human
aacgggaacaugcccccug

SEQ ID NO: 3374922 - RNA, 17 nt, Human
aacgggcugcccugcca

SEQ ID NO: 3374923 - RNA, 14 nt, Human
aacgguuaaaacug

SEQ ID NO: 3374924 - RNA, 13 nt, Human
aacguauuuuaaa

SEQ ID NO: 3374925 - RNA, 13 nt, Human
aacgucugugcca

SEQ ID NO: 3374926 - RNA, 14 nt, Human
aacgucuuaaauau

SEQ ID NO: 3374927 - RNA, 17 nt, Human
aacgugcagacuaugca

SEQ ID NO: 3374928 - RNA, 16 nt, Human
aacgugcauugugcuu

SEQ ID NO: 3374929 - RNA, 13 nt, Human
aacgugcccucug

SEQ ID NO: 3374930 - RNA, 19 nt, Human
aacgugcucuuuguuuugu

SEQ ID NO: 3374931 - RNA, 15 nt, Human
aacguggcucugcug

SEQ ID NO: 3374932 - RNA, 16 nt, Human
aacguggcucugcugg

SEQ ID NO: 3374933 - RNA, 23 nt, Human
aacgugggaguucagcugcuucu

SEQ ID NO: 3374934 - RNA, 20 nt, Human
aacguguauguuuuucaguu

SEQ ID NO: 3374935 - RNA, 22 nt, Human
aacguguauguuuuucaguuca

SEQ ID NO: 3374936 - RNA, 17 nt, Human
aacguguucaauauuuu

SEQ ID NO: 3374937 - RNA, 14 nt, Human
aacguugcucccca

SEQ ID NO: 3374938 - RNA, 13 nt, Human
aacguugcugugg

SEQ ID NO: 3374939 - RNA, 21 nt, Human
aacguuucaguaauaaaacau

SEQ ID NO: 3374940 - RNA, 15 nt, Human
aacguuuucuaauug

SEQ ID NO: 3374941 - RNA, 20 nt, Human
aacguuuugaacuaauaaaa

SEQ ID NO: 3374942 - RNA, 13 nt, Human
aacuaaaacaaag

SEQ ID NO: 3374943 - RNA, 14 nt, Human
aacuaaaagacauu

SEQ ID NO: 3374944 - RNA, 15 nt, Human
aacuaaaauaauuuu

SEQ ID NO: 3374945 - RNA, 12 nt, Human
aacuaaaaugua

SEQ ID NO: 3374946 - RNA, 13 nt, Human
aacuaaaauguau

SEQ ID NO: 3374947 - RNA, 15 nt, Human
aacuaaaauguucua

SEQ ID NO: 3374948 - RNA, 15 nt, Human
aacuaaaauuugaag

SEQ ID NO: 3374949 - RNA, 15 nt, Human
aacuaaacucauuua

SEQ ID NO: 3374950 - RNA, 17 nt, Human
aacuaaacucauuuaua

SEQ ID NO: 3374951 - RNA, 23 nt, Human
aacuaaacucuuaccauauguuu

SEQ ID NO: 3374952 - RNA, 16 nt, Human
aacuaaagcaauagaa

SEQ ID NO: 3374953 - RNA, 19 nt, Human
aacuaaagcaauagaaaca

SEQ ID NO: 3374954 - RNA, 14 nt, Human
aacuaaauguucua

SEQ ID NO: 3374955 - RNA, 16 nt, Human
aacuaaauuguaaacu

SEQ ID NO: 3374956 - RNA, 14 nt, Human
aacuaaauuugaua

SEQ ID NO: 3374957 - RNA, 19 nt, Human
aacuaacacgugaugugau

SEQ ID NO: 3374958 - RNA, 20 nt, Human
aacuaacacgugaugugaua

SEQ ID NO: 3374959 - RNA, 11 nt, Human
aacuaacaugu

SEQ ID NO: 3374960 - RNA, 15 nt, Human
aacuaagaaacuuaa

SEQ ID NO: 3374961 - RNA, 22 nt, Human
aacuaagauucuuuuaaauuag

SEQ ID NO: 3374962 - RNA, 20 nt, Human
aacuaauaaaauauuuucug

SEQ ID NO: 3374963 - RNA, 21 nt, Human
aacuaauaaaauauuuucugu

SEQ ID NO: 3374964 - RNA, 23 nt, Human
aacuaauaaaauauuuucugugu

SEQ ID NO: 3374965 - RNA, 14 nt, Human
aacuaauaauugca

SEQ ID NO: 3374966 - RNA, 23 nt, Human
aacuaauccuucuggcagauuca

SEQ ID NO: 3374967 - RNA, 20 nt, Human
aacuaaucuauuggguucau

SEQ ID NO: 3374968 - RNA, 22 nt, Human
aacuaaucuauuggguucauua

SEQ ID NO: 3374969 - RNA, 13 nt, Human
aacuaaugaguuu

SEQ ID NO: 3374970 - RNA, 13 nt, Human
aacuacaaaucaa

SEQ ID NO: 3374971 - RNA, 22 nt, Human
aacuacaaccaagcucucugca

SEQ ID NO: 3374972 - RNA, 19 nt, Human
aacuacagaaaaaccagag

SEQ ID NO: 3374973 - RNA, 22 nt, Human
aacuacagaccugcuuuuugaa

SEQ ID NO: 3374974 - RNA, 14 nt, Human
aacuacagucuaaa

SEQ ID NO: 3374975 - RNA, 13 nt, Human
aacuacaguggcu

SEQ ID NO: 3374976 - RNA, 22 nt, Human
aacuacaugagaacaaacagau

SEQ ID NO: 3374977 - RNA, 13 nt, Human
aacuacauuuuaa

SEQ ID NO: 3374978 - RNA, 15 nt, Human
aacuacauuuuaaca

SEQ ID NO: 3374979 - RNA, 16 nt, Human
aacuacccaaaacaag

SEQ ID NO: 3374980 - RNA, 21 nt, Human
aacuacccuuaauuacuuaaa

SEQ ID NO: 3374981 - RNA, 20 nt, Human
aacuaccucgcaucauugca

SEQ ID NO: 3374982 - RNA, 23 nt, Human
aacuaccucgcaucauugcagau

SEQ ID NO: 3374983 - RNA, 15 nt, Human
aacuaccugagcuaa

SEQ ID NO: 3374984 - RNA, 19 nt, Human
aacuacgcuugcucauuuu

SEQ ID NO: 3374985 - RNA, 19 nt, Human
aacuacuccggagacaggg

SEQ ID NO: 3374986 - RNA, 13 nt, Human
aacuacucuuuga

SEQ ID NO: 3374987 - RNA, 16 nt, Human
aacuacucuuugauuu

SEQ ID NO: 3374988 - RNA, 21 nt, Human
aacuacugaaugaagcaguau

SEQ ID NO: 3374989 - RNA, 16 nt, Human
aacuacugcaccauuu

SEQ ID NO: 3374990 - RNA, 17 nt, Human
aacuacugccuuuagaa

SEQ ID NO: 3374991 - RNA, 13 nt, Human
aacuacuguguuc

SEQ ID NO: 3374992 - RNA, 13 nt, Human
aacuacuuuauaa

SEQ ID NO: 3374993 - RNA, 17 nt, Human
aacuacuuuauaacuaa

SEQ ID NO: 3374994 - RNA, 16 nt, Human
aacuagaaaucugcca

SEQ ID NO: 3374995 - RNA, 13 nt, Human
aacuagaacaaau

SEQ ID NO: 3374996 - RNA, 17 nt, Human
aacuagaacugaauuuu

SEQ ID NO: 3374997 - RNA, 19 nt, Human
aacuagaauuuauucaauu

SEQ ID NO: 3374998 - RNA, 15 nt, Human
aacuagaauuugauu

SEQ ID NO: 3374999 - RNA, 18 nt, Human
aacuagacauucugucgc

SEQ ID NO: 3375000 - RNA, 23 nt, Human
aacuagacucccaagcuggacua

SEQ ID NO: 3375001 - RNA, 22 nt, Human
aacuagagcagcccuggaguca

SEQ ID NO: 3375002 - RNA, 14 nt, Human
aacuagaugaccuc

SEQ ID NO: 3375003 - RNA, 18 nt, Human
aacuagaugaccucauua

SEQ ID NO: 3375004 - RNA, 14 nt, Human
aacuagauggugcu

SEQ ID NO: 3375005 - RNA, 14 nt, Human
aacuagcauaucug

SEQ ID NO: 3375006 - RNA, 19 nt, Human
aacuagcauaucugccuuu

SEQ ID NO: 3375007 - RNA, 18 nt, Human
aacuagccaaaccaggac

SEQ ID NO: 3375008 - RNA, 15 nt, Human
aacuagccaccaacu

SEQ ID NO: 3375009 - RNA, 20 nt, Human
aacuagcucuauguuuacaa

SEQ ID NO: 3375010 - RNA, 23 nt, Human
aacuagcuggaauuuuuuauucu

SEQ ID NO: 3375011 - RNA, 18 nt, Human
aacuagcuuggaaacugg

SEQ ID NO: 3375012 - RNA, 12 nt, Human
aacuaggaaaau

SEQ ID NO: 3375013 - RNA, 15 nt, Human
aacuaggaaaauugg

SEQ ID NO: 3375014 - RNA, 15 nt, Human
aacuaggcauuugua

SEQ ID NO: 3375015 - RNA, 23 nt, Human
aacuaggcauuuguaaauauuaa

SEQ ID NO: 3375016 - RNA, 22 nt, Human
aacuaggucugauauucaaaug

SEQ ID NO: 3375017 - RNA, 17 nt, Human
aacuaguaguucucuug

SEQ ID NO: 3375018 - RNA, 23 nt, Human
aacuagugggguuuccuggcacu

SEQ ID NO: 3375019 - RNA, 14 nt, Human
aacuaguuuuguuu

SEQ ID NO: 3375020 - RNA, 15 nt, Human
aacuaguuuuguuua

SEQ ID NO: 3375021 - RNA, 17 nt, Human
aacuauacuugaacaaa

SEQ ID NO: 3375022 - RNA, 14 nt, Human
aacuauaugugaau

SEQ ID NO: 3375023 - RNA, 20 nt, Human
aacuauauucauuuccacuc

SEQ ID NO: 3375024 - RNA, 16 nt, Human
aacuauauuuucuuua

SEQ ID NO: 3375025 - RNA, 16 nt, Human
aacuauauuuugucau

SEQ ID NO: 3375026 - RNA, 17 nt, Human
aacuaugcauggugccc

SEQ ID NO: 3375027 - RNA, 22 nt, Human
aacuaugcauggugccccagga

SEQ ID NO: 3375028 - RNA, 12 nt, Human
aacuauggccug

SEQ ID NO: 3375029 - RNA, 13 nt, Human
aacuauguacaau

SEQ ID NO: 3375030 - RNA, 16 nt, Human
aacuauguacaauauu

SEQ ID NO: 3375031 - RNA, 20 nt, Human
aacuauguguuuuucucaua

SEQ ID NO: 3375032 - RNA, 15 nt, Human
aacuauguugauaaa

SEQ ID NO: 3375033 - RNA, 17 nt, Human
aacuauguuuaaaguaa

SEQ ID NO: 3375034 - RNA, 22 nt, Human
aacuauuaagaggcagaaaauu

SEQ ID NO: 3375035 - RNA, 24 nt, Human
aacuauuaaggauguagcuuuuca

SEQ ID NO: 3375036 - RNA, 22 nt, Human
aacuauuacaccaaauaaauau

SEQ ID NO: 3375037 - RNA, 13 nt, Human
aacuauucacaaa

SEQ ID NO: 3375038 - RNA, 15 nt, Human
aacuauugcauuuau

SEQ ID NO: 3375039 - RNA, 14 nt, Human
aacuauugcccagg

SEQ ID NO: 3375040 - RNA, 15 nt, Human
aacuauuuaaagaaa

SEQ ID NO: 3375041 - RNA, 19 nt, Human
aaccuugccugguacagua

SEQ ID NO: 3375042 - RNA, 23 nt, Human
aaccuugccuuucucgauuuuau

SEQ ID NO: 3375043 - RNA, 13 nt, Human
aaccuugcugucc

SEQ ID NO: 3375044 - RNA, 18 nt, Human
aaccuugguguaguugaa

SEQ ID NO: 3375045 - RNA, 21 nt, Human
aaccuugugccuggcucagag

SEQ ID NO: 3375046 - RNA, 19 nt, Human
aagaacauggacuuguaua

SEQ ID NO: 3375047 - RNA, 21 nt, Human
aagaacauggacuuguauauu

SEQ ID NO: 3375048 - RNA, 17 nt, Human
aagaaccagucccccca

SEQ ID NO: 3375049 - RNA, 13 nt, Human
aagaaccuggaaa

SEQ ID NO: 3375050 - RNA, 14 nt, Human
aagaacggaagaag

SEQ ID NO: 3375051 - RNA, 17 nt, Human
aagaacggggcucuucu

SEQ ID NO: 3375052 - RNA, 22 nt, Human
aagaacggggcucuucucauuu

SEQ ID NO: 3375053 - RNA, 23 nt, Human
aagaacuauaugugaauccucuu

SEQ ID NO: 3375054 - RNA, 16 nt, Human
aagaacucaucacugu

SEQ ID NO: 3375055 - RNA, 20 nt, Human
aagaacucaucacuguggcu

SEQ ID NO: 3375056 - RNA, 14 nt, Human
aagaacucucugga

SEQ ID NO: 3375057 - RNA, 13 nt, Human
aagaacugaaauc

SEQ ID NO: 3375058 - RNA, 15 nt, Human
aagaacugaaaucau

SEQ ID NO: 3375059 - RNA, 19 nt, Human
aagaacugcacaugaagaa

SEQ ID NO: 3375060 - RNA, 22 nt, Human
aagaacugcaggcccuggccuc

SEQ ID NO: 3375061 - RNA, 12 nt, Human
aagaacugcuuu

SEQ ID NO: 3375062 - RNA, 20 nt, Human
aagaacugucauguaaacau

SEQ ID NO: 3375063 - RNA, 21 nt, Human
aagaacuguuuacugcuugau

SEQ ID NO: 3375064 - RNA, 17 nt, Human
aagaacuucuauaauug

SEQ ID NO: 3375065 - RNA, 20 nt, Human
aagaacuuugagcuacugcc

SEQ ID NO: 3375066 - RNA, 13 nt, Human
aagaagaaaaaaa

SEQ ID NO: 3375067 - RNA, 14 nt, Human
aagaagaaaaaaac

SEQ ID NO: 3375068 - RNA, 14 nt, Human
aagaagaaaaaggu

SEQ ID NO: 3375069 - RNA, 13 nt, Human
aagaagaaaacac

SEQ ID NO: 3375070 - RNA, 9 nt, Human
aagaagaag

SEQ ID NO: 3375071 - RNA, 15 nt, Human
aagaagaagaaaaga

SEQ ID NO: 3375072 - RNA, 16 nt, Human
aagaagacaaacuuug

SEQ ID NO: 3375073 - RNA, 16 nt, Human
aagaagacaugaacca

SEQ ID NO: 3375074 - RNA, 21 nt, Human
aagaagaccugagaauguauc

SEQ ID NO: 3375075 - RNA, 14 nt, Human
aagaagagaaagaa

SEQ ID NO: 3375076 - RNA, 18 nt, Human
aagaagagaagcugcuga

SEQ ID NO: 3375077 - RNA, 19 nt, Human
aagaagagcgagagaucaa

SEQ ID NO: 3375078 - RNA, 20 nt, Human
aagaagagcuaucaggagaa

SEQ ID NO: 3375079 - RNA, 13 nt, Human
aagaagagggaga

SEQ ID NO: 3375080 - RNA, 17 nt, Human
aagaagaucacgcuccc

SEQ ID NO: 3375081 - RNA, 22 nt, Human
aagaagaucacgcuccccgccu

SEQ ID NO: 3375082 - RNA, 15 nt, Human
aagaagaugaauggc

SEQ ID NO: 3375083 - RNA, 17 nt, Human
aagaagauguugaagaa

SEQ ID NO: 3375084 - RNA, 22 nt, Human
aagaagcaccaaucaugaauua

SEQ ID NO: 3375085 - RNA, 13 nt, Human
aagaagcagagag

SEQ ID NO: 3375086 - RNA, 14 nt, Human
aagaagcaggcuac

SEQ ID NO: 3375087 - RNA, 19 nt, Human
aagaagcaggcuacacuga

SEQ ID NO: 3375088 - RNA, 12 nt, Human
aagaagcauuuc

SEQ ID NO: 3375089 - RNA, 16 nt, Human
aagaagcccaggaaag

SEQ ID NO: 3375090 - RNA, 17 nt, Human
aagaagccgggaacaga

SEQ ID NO: 3375091 - RNA, 22 nt, Human
aagaagccuguaacacuccucu

SEQ ID NO: 3375092 - RNA, 17 nt, Human
aagaagcuguuguacau

SEQ ID NO: 3375093 - RNA, 18 nt, Human
aagaagcuguuguacauu

SEQ ID NO: 3375094 - RNA, 19 nt, Human
aagaagcuguuguacauuu

SEQ ID NO: 3375095 - RNA, 18 nt, Human
aagaagcuucuaauaaau

SEQ ID NO: 3375096 - RNA, 21 nt, Human
aagaagcuucuaauaaauuau

SEQ ID NO: 3375097 - RNA, 16 nt, Human
aagaaggaaaaugauc

SEQ ID NO: 3375098 - RNA, 13 nt, Human
aagaaaaagaaaa

SEQ ID NO: 3375099 - RNA, 13 nt, Human
aagaaaaagcaaa

SEQ ID NO: 3375100 - RNA, 11 nt, Human
aagaaaaauau

SEQ ID NO: 3375101 - RNA, 17 nt, Human
aagaaaaaugagccugg

SEQ ID NO: 3375102 - RNA, 22 nt, Human
aagaaaacaaaaccaaaaguua

SEQ ID NO: 3375103 - RNA, 13 nt, Human
aagaaaacacugu

SEQ ID NO: 3375104 - RNA, 13 nt, Human
aagaaaacaucua

SEQ ID NO: 3375105 - RNA, 18 nt, Human
aagaaaacaucuauucuc

SEQ ID NO: 3375106 - RNA, 13 nt, Human
aagaaaacaucuu

SEQ ID NO: 3375107 - RNA, 20 nt, Human
aagaaaaccaccccuuagau

SEQ ID NO: 3375108 - RNA, 12 nt, Human
aagaaaagaauc

SEQ ID NO: 3375109 - RNA, 13 nt, Human
aagaaaagaccuu

SEQ ID NO: 3375110 - RNA, 15 nt, Human
aagaaaagauaaaga

SEQ ID NO: 3375111 - RNA, 13 nt, Human
aagaaaagaugaa

SEQ ID NO: 3375112 - RNA, 22 nt, Human
aagaaaagauuuuaaucaaguu

SEQ ID NO: 3375113 - RNA, 19 nt, Human
aagaaaagggucaaacauc

SEQ ID NO: 3375114 - RNA, 22 nt, Human
aagaaaagguucuuacugcuug

SEQ ID NO: 3375115 - RNA, 15 nt, Human
aagaaaaguauuuug

SEQ ID NO: 3375116 - RNA, 16 nt, Human
aagaaaaguauuuuga

SEQ ID NO: 3375117 - RNA, 22 nt, Human
aagaaaagugcauauuuaucca

SEQ ID NO: 3375118 - RNA, 16 nt, Human
aagaaaaguuuuguaa

SEQ ID NO: 3375119 - RNA, 21 nt, Human
aagaaaauaaaaaaaagaaaa

SEQ ID NO: 3375120 - RNA, 17 nt, Human
aagaaaauacaauaaac

SEQ ID NO: 3375121 - RNA, 16 nt, Human
aagaaaauacuuaaau

SEQ ID NO: 3375122 - RNA, 13 nt, Human
aagaaaaucacuu

SEQ ID NO: 3375123 - RNA, 14 nt, Human
aagaaaauugaguu

SEQ ID NO: 3375124 - RNA, 22 nt, Human
aagaaaauuuuuguaguagcgu

SEQ ID NO: 3375125 - RNA, 14 nt, Human
aagaaacaacagaa

SEQ ID NO: 3375126 - RNA, 12 nt, Human
aagaaacacuga

SEQ ID NO: 3375127 - RNA, 14 nt, Human
aagaaacagccagc

SEQ ID NO: 3375128 - RNA, 16 nt, Human
aagaaacccgacagag

SEQ ID NO: 3375129 - RNA, 16 nt, Human
aagaaaccuacugccc

SEQ ID NO: 3375130 - RNA, 21 nt, Human
aagaaacgucuauguguacag

SEQ ID NO: 3375131 - RNA, 17 nt, Human
aagaaacuauacaucau

SEQ ID NO: 3375132 - RNA, 20 nt, Human
aagaaacugaggaauuuucu

SEQ ID NO: 3375133 - RNA, 17 nt, Human
aagaaacuuguccuucc

SEQ ID NO: 3375134 - RNA, 17 nt, Human
aagaaacuuuuguaaag

SEQ ID NO: 3375135 - RNA, 18 nt, Human
aagaaacuuuuguaaaga

SEQ ID NO: 3375136 - RNA, 14 nt, Human
aagaaacuuuuuua

SEQ ID NO: 3375137 - RNA, 14 nt, Human
aagaaagaaaauca

SEQ ID NO: 3375138 - RNA, 16 nt, Human
aagaaagaaaaucagg

SEQ ID NO: 3375139 - RNA, 22 nt, Human
aagaaagaauguuacugccuua

SEQ ID NO: 3375140 - RNA, 16 nt, Human
aagaaagacgcacuuu

SEQ ID NO: 3375141 - RNA, 20 nt, Human
aagaaagacuaucuaaaugu

SEQ ID NO: 3375142 - RNA, 22 nt, Human
aagaaagacuaucuaaauguug

SEQ ID NO: 3375143 - RNA, 13 nt, Human
aagaaagacucua

SEQ ID NO: 3375144 - RNA, 16 nt, Human
aagaaagagagaaaau

SEQ ID NO: 3375145 - RNA, 17 nt, Human
aagaaagauguauauag

SEQ ID NO: 3375146 - RNA, 14 nt, Human
aagaaagcaacuuu

SEQ ID NO: 3375147 - RNA, 19 nt, Human
aagaaagcccuuaggaaga

SEQ ID NO: 3375148 - RNA, 17 nt, Human
aagaaagcugguaaacu

SEQ ID NO: 3375149 - RNA, 16 nt, Human
aagaaaggaaaagaaa

SEQ ID NO: 3375150 - RNA, 20 nt, Human
aagaaaggcugcuguacuga

SEQ ID NO: 3375151 - RNA, 20 nt, Human
aagaaaggcuguuaaauaca

SEQ ID NO: 3375152 - RNA, 17 nt, Human
aagaaaggguucuguaa

SEQ ID NO: 3375153 - RNA, 13 nt, Human
aagaaaguccacc

SEQ ID NO: 3375154 - RNA, 23 nt, Human
aagaaagucuaucuaaugacaug

SEQ ID NO: 3375155 - RNA, 22 nt, Human
aagaaagugagcaguguuagcu

SEQ ID NO: 3375156 - RNA, 20 nt, Human
aagaaaguugcacggcugcu

SEQ ID NO: 3375157 - RNA, 17 nt, Human
aagaaauaaaccaaagg

SEQ ID NO: 3375158 - RNA, 15 nt, Human
aagaaauaaguuuuu

SEQ ID NO: 3375159 - RNA, 12 nt, Human
aagaaauaauaa

SEQ ID NO: 3375160 - RNA, 18 nt, Human
aagaaauaauaauaucca

SEQ ID NO: 3375161 - RNA, 14 nt, Human
aagaaauaauagaa

SEQ ID NO: 3375162 - RNA, 12 nt, Human
aagaaauagaau

SEQ ID NO: 3375163 - RNA, 13 nt, Human
aagaaauauaccu

SEQ ID NO: 3375164 - RNA, 12 nt, Human
aagaaauaucug

SEQ ID NO: 3375165 - RNA, 17 nt, Human
aagaaauaucugugaaa

SEQ ID NO: 3375166 - RNA, 13 nt, Human
aagaaauauguga

SEQ ID NO: 3375167 - RNA, 15 nt, Human
aagaaauaugugaga

SEQ ID NO: 3375168 - RNA, 19 nt, Human
aagaaauaugugagauuuu

SEQ ID NO: 3375169 - RNA, 23 nt, Human
aagaaaucauguccauacacuuu

SEQ ID NO: 3375170 - RNA, 13 nt, Human
aagaaaucccugu

SEQ ID NO: 3375171 - RNA, 14 nt, Human
aagaaaucccuguu

SEQ ID NO: 3375172 - RNA, 16 nt, Human
aagaaaugaaauuuua

SEQ ID NO: 3375173 - RNA, 18 nt, Human
aagaaaugaaauuuuacc

SEQ ID NO: 3375174 - RNA, 13 nt, Human
aagaaaugauguu

SEQ ID NO: 3375175 - RNA, 23 nt, Human
aagaaaugauguuggagaaggga

SEQ ID NO: 3375176 - RNA, 14 nt, Human
aagaaaugcacaau

SEQ ID NO: 3375177 - RNA, 16 nt, Human
aagaaauguaguugau

SEQ ID NO: 3375178 - RNA, 21 nt, Human
aagaaauuagggcucuaauuu

SEQ ID NO: 3375179 - RNA, 14 nt, Human
aagaaauuccugua

SEQ ID NO: 3375180 - RNA, 18 nt, Human
aagaaauuuauuacuugu

SEQ ID NO: 3375181 - RNA, 21 nt, Human
aagaaauuuccacucaggucu

SEQ ID NO: 3375182 - RNA, 16 nt, Human
aagaaauuugauuucu

SEQ ID NO: 3375183 - RNA, 21 nt, Human
aagaacaauauugacuuuguc

SEQ ID NO: 3375184 - RNA, 19 nt, Human
aagaacacacacauauaca

SEQ ID NO: 3375185 - RNA, 19 nt, Human
aagaacacccuauauuuug

SEQ ID NO: 3375186 - RNA, 16 nt, Human
aagaacacccucuaaa

SEQ ID NO: 3375187 - RNA, 12 nt, Human
aagaacauagaa

SEQ ID NO: 3375188 - RNA, 18 nt, Human
aagaacauccaaggagaa

SEQ ID NO: 3375189 - RNA, 16 nt, Human
aagaacaugcaguuug

SEQ ID NO: 3375190 - RNA, 19 nt, Human
aagaacaugcaguuugaaa

SEQ ID NO: 3375191 - RNA, 20 nt, Human
aagaacaugcaguuugaaau

SEQ ID NO: 3375192 - RNA, 17 nt, Human
aagaauugccagucuuu

SEQ ID NO: 3375193 - RNA, 15 nt, Human
aagaauuuagggaga

SEQ ID NO: 3375194 - RNA, 20 nt, Human
aagaauuugaagacuucaaa

SEQ ID NO: 3375195 - RNA, 13 nt, Human
aagaauuuuaaaa

SEQ ID NO: 3375196 - RNA, 15 nt, Human
aagaauuuuaaaaau

SEQ ID NO: 3375197 - RNA, 17 nt, Human
aagaauuuuaaaaauga

SEQ ID NO: 3375198 - RNA, 18 nt, Human
aagaauuuuaaaaaugaa

SEQ ID NO: 3375199 - RNA, 13 nt, Human
aagaauuuuuuug

SEQ ID NO: 3375200 - RNA, 20 nt, Human
aagacaaaaagcuacuuauu

SEQ ID NO: 3375201 - RNA, 23 nt, Human
aagacaaaaagcuacuuauugua

SEQ ID NO: 3375202 - RNA, 14 nt, Human
aagacaaaaauacu

SEQ ID NO: 3375203 - RNA, 22 nt, Human
aagacaaaaauacucuaauucu

SEQ ID NO: 3375204 - RNA, 14 nt, Human
aagacaaaagucug

SEQ ID NO: 3375205 - RNA, 14 nt, Human
aagacaaacugcau

SEQ ID NO: 3375206 - RNA, 15 nt, Human
aagacaaacuuugca

SEQ ID NO: 3375207 - RNA, 13 nt, Human
aagacaaauagua

SEQ ID NO: 3375208 - RNA, 20 nt, Human
aagacaaauauuccuuugca

SEQ ID NO: 3375209 - RNA, 12 nt, Human
aagacaacauua

SEQ ID NO: 3375210 - RNA, 21 nt, Human
aagacaacauuaaaacaauau

SEQ ID NO: 3375211 - RNA, 17 nt, Human
aagacaacauuguaaga

SEQ ID NO: 3375212 - RNA, 21 nt, Human
aagacaaggaaaaaauaacaa

SEQ ID NO: 3375213 - RNA, 22 nt, Human
aagacaauagcacuuaaauucc

SEQ ID NO: 3375214 - RNA, 13 nt, Human
aagacaauauaau

SEQ ID NO: 3375215 - RNA, 23 nt, Human
aagacaauggcuuacuccaggag

SEQ ID NO: 3375216 - RNA, 22 nt, Human
aagacaaugugaaaagaaaaau

SEQ ID NO: 3375217 - RNA, 12 nt, Human
aagacaauucuu

SEQ ID NO: 3375218 - RNA, 17 nt, Human
aagacaauuugauacau

SEQ ID NO: 3375219 - RNA, 19 nt, Human
aagacaauuugauacauaa

SEQ ID NO: 3375220 - RNA, 14 nt, Human
aagacaccagagca

SEQ ID NO: 3375221 - RNA, 21 nt, Human
aagacaccagagcagaugcag

SEQ ID NO: 3375222 - RNA, 23 nt, Human
aagacaccagagcagaugcagag

SEQ ID NO: 3375223 - RNA, 14 nt, Human
aagacaccugguug

SEQ ID NO: 3375224 - RNA, 14 nt, Human
aagacacugaaaua

SEQ ID NO: 3375225 - RNA, 16 nt, Human
aagacacugccugggc

SEQ ID NO: 3375226 - RNA, 16 nt, Human
aagacagaaguuugca

SEQ ID NO: 3375227 - RNA, 20 nt, Human
aagacagaugccccagagcu

SEQ ID NO: 3375228 - RNA, 15 nt, Human
aagacagcagaacug

SEQ ID NO: 3375229 - RNA, 21 nt, Human
aagacagcccgauccuccccu

SEQ ID NO: 3375230 - RNA, 18 nt, Human
aagacaggaaaguucaga

SEQ ID NO: 3375231 - RNA, 21 nt, Human
aagacaggaaaguucagaguu

SEQ ID NO: 3375232 - RNA, 14 nt, Human
aagacaggagacaa

SEQ ID NO: 3375233 - RNA, 19 nt, Human
aagacaggagagauuauuu

SEQ ID NO: 3375234 - RNA, 22 nt, Human
aagacaggaugggggcuggccu

SEQ ID NO: 3375235 - RNA, 23 nt, Human
aagacagugaaagaaaauaacaa

SEQ ID NO: 3375236 - RNA, 20 nt, Human
aagacaguguauguagaagc

SEQ ID NO: 3375237 - RNA, 21 nt, Human
aagacaguguauguagaagca

SEQ ID NO: 3375238 - RNA, 21 nt, Human
aagacauaacguuuuuccuuu

SEQ ID NO: 3375239 - RNA, 17 nt, Human
aagacauccauaaagaa

SEQ ID NO: 3375240 - RNA, 20 nt, Human
aagacaugauuuccuugaau

SEQ ID NO: 3375241 - RNA, 19 nt, Human
aagacaugcacuaugagga

SEQ ID NO: 3375242 - RNA, 13 nt, Human
aagacaugucugu

SEQ ID NO: 3375243 - RNA, 19 nt, Human
aagacaugucuguucuaca

SEQ ID NO: 3375244 - RNA, 19 nt, Human
aagacauguuguaaauuag

SEQ ID NO: 3375245 - RNA, 17 nt, Human
aagacauguuuuagaca

SEQ ID NO: 3375246 - RNA, 16 nt, Human
aagacauucaggacug

SEQ ID NO: 3375247 - RNA, 18 nt, Human
aagacauugggucuauuc

SEQ ID NO: 3375248 - RNA, 23 nt, Human
aagacauugggucuauuccagcu

SEQ ID NO: 3375249 - RNA, 17 nt, Human
aagaccaccucaaauuu

SEQ ID NO: 3375250 - RNA, 17 nt, Human
aagaccacguuucuaaa

SEQ ID NO: 3375251 - RNA, 14 nt, Human
aagaccagccuggc

SEQ ID NO: 3375252 - RNA, 16 nt, Human
aagaccccaagaggaa

SEQ ID NO: 3375253 - RNA, 13 nt, Human
aagacccuccccg

SEQ ID NO: 3375254 - RNA, 16 nt, Human
aagacccucuugccca

SEQ ID NO: 3375255 - RNA, 14 nt, Human
aagacccuggcuuu

SEQ ID NO: 3375256 - RNA, 18 nt, Human
aagaccggaagcuccugg

SEQ ID NO: 3375257 - RNA, 19 nt, Human
aagaccggaagcuccuggu

SEQ ID NO: 3375258 - RNA, 20 nt, Human
aagaccuacuguucuaaagc

SEQ ID NO: 3375259 - RNA, 17 nt, Human
aagaccuguugguucca

SEQ ID NO: 3375260 - RNA, 19 nt, Human
aagaccuguugguuccaag

SEQ ID NO: 3375261 - RNA, 21 nt, Human
aagaccuucuccaaaugagau

SEQ ID NO: 3375262 - RNA, 23 nt, Human
aagaccuugcuuaugauugcaga

SEQ ID NO: 3375263 - RNA, 23 nt, Human
aagacguguuuguguuugugugu

SEQ ID NO: 3375264 - RNA, 18 nt, Human
aagacguuuuauaagcau

SEQ ID NO: 3375265 - RNA, 12 nt, Human
aagacuaaaagu

SEQ ID NO: 3375266 - RNA, 21 nt, Human
aagacuagaaaauuagacugu

SEQ ID NO: 3375267 - RNA, 14 nt, Human
aagacuauauauau

SEQ ID NO: 3375268 - RNA, 20 nt, Human
aagacuauauauauaaaugu

SEQ ID NO: 3375269 - RNA, 22 nt, Human
aagacuaucuuacuauuucaca

SEQ ID NO: 3375270 - RNA, 18 nt, Human
aagacucaaauguucuaa

SEQ ID NO: 3375271 - RNA, 23 nt, Human
aagacucaagugggaacgacugg

SEQ ID NO: 3375272 - RNA, 12 nt, Human
aagacucauccg

SEQ ID NO: 3375273 - RNA, 17 nt, Human
aagacucauucccuaga

SEQ ID NO: 3375274 - RNA, 12 nt, Human
aagacuccagaa

SEQ ID NO: 3375275 - RNA, 19 nt, Human
aagacucuagaguccaagg

SEQ ID NO: 3375276 - RNA, 21 nt, Human
aagacucuagaguccaagguu

SEQ ID NO: 3375277 - RNA, 23 nt, Human
aagacugaguacguugugcauuu

SEQ ID NO: 3375278 - RNA, 20 nt, Human
aagacugcuguggccaggag

SEQ ID NO: 3375279 - RNA, 23 nt, Human
aagacuggaagcuaauuugcauu

SEQ ID NO: 3375280 - RNA, 15 nt, Human
aagacugguuuucug

SEQ ID NO: 3375281 - RNA, 13 nt, Human
aagacuguaauga

SEQ ID NO: 3375282 - RNA, 17 nt, Human
aagacuguacaaaguag

SEQ ID NO: 3375283 - RNA, 19 nt, Human
aagacugucuuaauuugca

SEQ ID NO: 3375284 - RNA, 12 nt, Human
aagacuguggcu

SEQ ID NO: 3375285 - RNA, 17 nt, Human
aagacuguugcucaaau

SEQ ID NO: 3375286 - RNA, 24 nt, Human
aagacuguugcucaaaucuauuca

SEQ ID NO: 3375287 - RNA, 20 nt, Human
aagacuucaguauguuguca

SEQ ID NO: 3375288 - RNA, 18 nt, Human
aagacuuccaaagaaugu

SEQ ID NO: 3375289 - RNA, 19 nt, Human
aagacuucucuuugccuca

SEQ ID NO: 3375290 - RNA, 20 nt, Human
aagacuugcauuuaaaugug

SEQ ID NO: 3375291 - RNA, 17 nt, Human
aagacuuggcaacagaa

SEQ ID NO: 3375292 - RNA, 20 nt, Human
aagacuuggcaacagaagca

SEQ ID NO: 3375293 - RNA, 23 nt, Human
aagacuugguugguaggguggga

SEQ ID NO: 3375294 - RNA, 16 nt, Human
aagacuuuggaaagag

SEQ ID NO: 3375295 - RNA, 15 nt, Human
aagacuuugguuauu

SEQ ID NO: 3375296 - RNA, 14 nt, Human
aagagaaaagaaaa

SEQ ID NO: 3375297 - RNA, 12 nt, Human
aagagaaacuuu

SEQ ID NO: 3375298 - RNA, 22 nt, Human
aagagaaacuuuauacauuagu

SEQ ID NO: 3375299 - RNA, 17 nt, Human
aagagaaaggccugcac

SEQ ID NO: 3375300 - RNA, 16 nt, Human
aagagaaccgagcaaa

SEQ ID NO: 3375301 - RNA, 13 nt, Human
aagagaagaagaa

SEQ ID NO: 3375302 - RNA, 14 nt, Human
aagagaagaagaaa

SEQ ID NO: 3375303 - RNA, 16 nt, Human
aagagaagacgaaaua

SEQ ID NO: 3375304 - RNA, 16 nt, Human
aagagaagcugcugac

SEQ ID NO: 3375305 - RNA, 18 nt, Human
aagagaagcugcugacca

SEQ ID NO: 3375306 - RNA, 20 nt, Human
aagagaauauuagcuuuacu

SEQ ID NO: 3375307 - RNA, 20 nt, Human
aagagaauauuuuaaguauu

SEQ ID NO: 3375308 - RNA, 22 nt, Human
aagagaauauuuuaaguauugc

SEQ ID NO: 3375309 - RNA, 16 nt, Human
aagagaaugaguccuu

SEQ ID NO: 3375310 - RNA, 13 nt, Human
aagagaauguaga

SEQ ID NO: 3375311 - RNA, 21 nt, Human
aagagacaaacaccucccagg

SEQ ID NO: 3375312 - RNA, 19 nt, Human
aagagacacucagaccaga

SEQ ID NO: 3375313 - RNA, 18 nt, Human
aagagacagaauguaucu

SEQ ID NO: 3375314 - RNA, 20 nt, Human
aagagacagucaccccagga

SEQ ID NO: 3375315 - RNA, 21 nt, Human
aagagacagucaccccaggac

SEQ ID NO: 3375316 - RNA, 22 nt, Human
aagagacagucaccccaggacu

SEQ ID NO: 3375317 - RNA, 14 nt, Human
aagagacagugaua

SEQ ID NO: 3375318 - RNA, 15 nt, Human
aagagacauccaaau

SEQ ID NO: 3375319 - RNA, 16 nt, Human
aagagaccuaccucag

SEQ ID NO: 3375320 - RNA, 12 nt, Human
aagagacucagc

SEQ ID NO: 3375321 - RNA, 14 nt, Human
aagagacuggagca

SEQ ID NO: 3375322 - RNA, 15 nt, Human
aagagagaaaauaaa

SEQ ID NO: 3375323 - RNA, 18 nt, Human
aagagagaaaauaaaaag

SEQ ID NO: 3375324 - RNA, 22 nt, Human
aagagagaaaauaaaaaguuaa

SEQ ID NO: 3375325 - RNA, 23 nt, Human
aagagagaaaauaaaaaguuaaa

SEQ ID NO: 3375326 - RNA, 20 nt, Human
aagagagaaagcauauugac

SEQ ID NO: 3375327 - RNA, 13 nt, Human
aagagagaaaucu

SEQ ID NO: 3375328 - RNA, 18 nt, Human
aagagagaaccuaacugu

SEQ ID NO: 3375329 - RNA, 20 nt, Human
aagagagagaaacaaacuuu

SEQ ID NO: 3375330 - RNA, 16 nt, Human
aagagagauauaucug

SEQ ID NO: 3375331 - RNA, 17 nt, Human
aagagagauauaucuga

SEQ ID NO: 3375332 - RNA, 20 nt, Human
aagagagauauaucugaaaa

SEQ ID NO: 3375333 - RNA, 22 nt, Human
aagagagccuugguucaucagu

SEQ ID NO: 3375334 - RNA, 18 nt, Human
aagagaggagaggagaga

SEQ ID NO: 3375335 - RNA, 16 nt, Human
aaaaugaaaauuguau

SEQ ID NO: 3375336 - RNA, 19 nt, Human
aaaaugaaagcaugucuca

SEQ ID NO: 3375337 - RNA, 14 nt, Human
aaaaugaaagcuac

SEQ ID NO: 3375338 - RNA, 19 nt, Human
aaaaugaaagcuacucaua

SEQ ID NO: 3375339 - RNA, 18 nt, Human
aaaaugaaaugcauauuu

SEQ ID NO: 3375340 - RNA, 14 nt, Human
aaaaugaagaauuu

SEQ ID NO: 3375341 - RNA, 12 nt, Human
aaaaugaagauu

SEQ ID NO: 3375342 - RNA, 22 nt, Human
aaaaugaauaucuauuaauaua

SEQ ID NO: 3375343 - RNA, 23 nt, Human
aaaaugaaugaggucugggcuag

SEQ ID NO: 3375344 - RNA, 14 nt, Human
aaaaugacaaucau

SEQ ID NO: 3375345 - RNA, 17 nt, Human
aaaaugacagauguuga

SEQ ID NO: 3375346 - RNA, 18 nt, Human
aaaaugacagauguugaa

SEQ ID NO: 3375347 - RNA, 15 nt, Human
aaaaugacaucuuuu

SEQ ID NO: 3375348 - RNA, 21 nt, Human
aaaaugacuaaaaauauuaua

SEQ ID NO: 3375349 - RNA, 19 nt, Human
aaaaugacuacuuagcauc

SEQ ID NO: 3375350 - RNA, 11 nt, Human
aaaaugagaaa

SEQ ID NO: 3375351 - RNA, 18 nt, Human
aaaaugagcauacaucuu

SEQ ID NO: 3375352 - RNA, 22 nt, Human
aaaaugagccgugccaaagucu

SEQ ID NO: 3375353 - RNA, 21 nt, Human
aaaaugagccuggcaagaaug

SEQ ID NO: 3375354 - RNA, 23 nt, Human
aaaaugagcucgcauuugucaau

SEQ ID NO: 3375355 - RNA, 18 nt, Human
aaaaugaggaauguauau

SEQ ID NO: 3375356 - RNA, 21 nt, Human
aaaaugaguuaccuacauuuu

SEQ ID NO: 3375357 - RNA, 23 nt, Human
aaaaugauguguacccaaacgug

SEQ ID NO: 3375358 - RNA, 19 nt, Human
aaaaugauuguaaaauagc

SEQ ID NO: 3375359 - RNA, 18 nt, Human
aaaaugcaacaacaugua

SEQ ID NO: 3375360 - RNA, 11 nt, Human
aaaaugcaaua

SEQ ID NO: 3375361 - RNA, 18 nt, Human
aaaaugcagcagggaugc

SEQ ID NO: 3375362 - RNA, 15 nt, Human
aaaaugccaaucucu

SEQ ID NO: 3375363 - RNA, 15 nt, Human
aaaaugccauaauac

SEQ ID NO: 3375364 - RNA, 17 nt, Human
aaaaugccauaauacaa

SEQ ID NO: 3375365 - RNA, 18 nt, Human
aaaaugccauaauacaaa

SEQ ID NO: 3375366 - RNA, 16 nt, Human
aaaaugccaugaauua

SEQ ID NO: 3375367 - RNA, 19 nt, Human
aaaaugccucaguguauuu

SEQ ID NO: 3375368 - RNA, 14 nt, Human
aaaaugccuuugag

SEQ ID NO: 3375369 - RNA, 16 nt, Human
aaaaugcuaauauuaa

SEQ ID NO: 3375370 - RNA, 20 nt, Human
aaaaugcucuuauuucauca

SEQ ID NO: 3375371 - RNA, 15 nt, Human
aaaaugcugaacauu

SEQ ID NO: 3375372 - RNA, 18 nt, Human
aaaaugcugaacauugca

SEQ ID NO: 3375373 - RNA, 13 nt, Human
aaaaugcuuuuua

SEQ ID NO: 3375374 - RNA, 20 nt, Human
aaaauggaagccaacacauc

SEQ ID NO: 3375375 - RNA, 21 nt, Human
aaaauggacguguuaugacuc

SEQ ID NO: 3375376 - RNA, 16 nt, Human
aaaauggagguggaaa

SEQ ID NO: 3375377 - RNA, 14 nt, Human
aaaauggauacaua

SEQ ID NO: 3375378 - RNA, 14 nt, Human
aaaaugggagaucu

SEQ ID NO: 3375379 - RNA, 17 nt, Human
aaaaugguaaaauugca

SEQ ID NO: 3375380 - RNA, 18 nt, Human
aaaaugguaucaaaauua

SEQ ID NO: 3375381 - RNA, 20 nt, Human
aaaaugguguuuucauguaa

SEQ ID NO: 3375382 - RNA, 23 nt, Human
aaaaugguguuuucauguaaaua

SEQ ID NO: 3375383 - RNA, 16 nt, Human
aaaaugguuuaaaugg

SEQ ID NO: 3375384 - RNA, 14 nt, Human
aaaauguaaagcca

SEQ ID NO: 3375385 - RNA, 15 nt, Human
aaaauguaacuguua

SEQ ID NO: 3375386 - RNA, 21 nt, Human
aaaauguaagcuguuuauuuu

SEQ ID NO: 3375387 - RNA, 14 nt, Human
aaaauguacaugua

SEQ ID NO: 3375388 - RNA, 16 nt, Human
aaaauguacauguauu

SEQ ID NO: 3375389 - RNA, 18 nt, Human
aaaauguacauguauuaa

SEQ ID NO: 3375390 - RNA, 22 nt, Human
aaaauguacauguauuaaauua

SEQ ID NO: 3375391 - RNA, 18 nt, Human
aaaauguacugagauuuu

SEQ ID NO: 3375392 - RNA, 14 nt, Human
aaaauguauauauu

SEQ ID NO: 3375393 - RNA, 20 nt, Human
aaaauguaugcauguugucu

SEQ ID NO: 3375394 - RNA, 15 nt, Human
aaaauguaugucugg

SEQ ID NO: 3375395 - RNA, 18 nt, Human
aaaauguauguguaagua

SEQ ID NO: 3375396 - RNA, 11 nt, Human
aaaauguauuu

SEQ ID NO: 3375397 - RNA, 17 nt, Human
aaaauguauuuuauguu

SEQ ID NO: 3375398 - RNA, 12 nt, Human
aaaaugucugua

SEQ ID NO: 3375399 - RNA, 17 nt, Human
aaaaugucuguaauaau

SEQ ID NO: 3375400 - RNA, 15 nt, Human
aaaaugucuucaagg

SEQ ID NO: 3375401 - RNA, 18 nt, Human
aaaaugucuuguguuacc

SEQ ID NO: 3375402 - RNA, 21 nt, Human
aaaaugucuuuccaaauuauu

SEQ ID NO: 3375403 - RNA, 15 nt, Human
aaaaugugaggaaga

SEQ ID NO: 3375404 - RNA, 18 nt, Human
aaaaugugccauuuugca

SEQ ID NO: 3375405 - RNA, 19 nt, Human
aaaaugugcuauacugcau

SEQ ID NO: 3375406 - RNA, 21 nt, Human
aaaaugugggauuauggguca

SEQ ID NO: 3375407 - RNA, 20 nt, Human
aaaauguguaauuuuguucu

SEQ ID NO: 3375408 - RNA, 16 nt, Human
aaaauguguguauucu

SEQ ID NO: 3375409 - RNA, 12 nt, Human
aaaaugugugug

SEQ ID NO: 3375410 - RNA, 14 nt, Human
aaaauguguguuuu

SEQ ID NO: 3375411 - RNA, 13 nt, Human
aaaauguguugaa

SEQ ID NO: 3375412 - RNA, 22 nt, Human
aaaauguuaucuucucaaguuc

SEQ ID NO: 3375413 - RNA, 16 nt, Human
aaaauguuauuucccu

SEQ ID NO: 3375414 - RNA, 17 nt, Human
aaaauguugaaaaguca

SEQ ID NO: 3375415 - RNA, 15 nt, Human
aaaauguuuuagcaa

SEQ ID NO: 3375416 - RNA, 17 nt, Human
aaaauguuuuguaagaa

SEQ ID NO: 3375417 - RNA, 21 nt, Human
aaaauguuuuguaagaaacca

SEQ ID NO: 3375418 - RNA, 12 nt, Human
aaaauuaaaaug

SEQ ID NO: 3375419 - RNA, 12 nt, Human
aaaauuaagaaa

SEQ ID NO: 3375420 - RNA, 20 nt, Human
aaaauuaagacaagccuggc

SEQ ID NO: 3375421 - RNA, 21 nt, Human
aaaauuaaggcaacugaacaa

SEQ ID NO: 3375422 - RNA, 12 nt, Human
cacuuuguucuu

SEQ ID NO: 3375423 - RNA, 18 nt, Human
cacuuuguucuuuaggag

SEQ ID NO: 3375424 - RNA, 15 nt, Human
cacuuuguugcaaga

SEQ ID NO: 3375425 - RNA, 21 nt, Human
cacuuuguugcaagaugugaa

SEQ ID NO: 3375426 - RNA, 20 nt, Human
cacuuuguuucguggggagg

SEQ ID NO: 3375427 - RNA, 12 nt, Human
cacuuuucaccu

SEQ ID NO: 3375428 - RNA, 18 nt, Human
cacuuuucaccuccuuca

SEQ ID NO: 3375429 - RNA, 11 nt, Human
cacuuuuccag

SEQ ID NO: 3375430 - RNA, 15 nt, Human
cacuuuuccaguauu

SEQ ID NO: 3375431 - RNA, 17 nt, Human
cacuuuuccaguauuuu

SEQ ID NO: 3375432 - RNA, 16 nt, Human
cacuuuuccucccuca

SEQ ID NO: 3375433 - RNA, 12 nt, Human
cacuuuucucca

SEQ ID NO: 3375434 - RNA, 12 nt, Human
cacuuuugcaag

SEQ ID NO: 3375435 - RNA, 12 nt, Human
cacuuuugccag

SEQ ID NO: 3375436 - RNA, 22 nt, Human
cacuuuugguuaagucuguuuu

SEQ ID NO: 3375437 - RNA, 22 nt, Human
cacuuuuguucuugguuuguaa

SEQ ID NO: 3375438 - RNA, 17 nt, Human
cacuuuuuaaaaaacuu

SEQ ID NO: 3375439 - RNA, 20 nt, Human
cacuuuuuaaaaaacuuucu

SEQ ID NO: 3375440 - RNA, 14 nt, Human
cacuuuuuaugcua

SEQ ID NO: 3375441 - RNA, 19 nt, Human
cacuuuuuauuagauaacg

SEQ ID NO: 3375442 - RNA, 20 nt, Human
cacuuuuucauuugccuauu

SEQ ID NO: 3375443 - RNA, 17 nt, Human
cacuuuuucucuuucca

SEQ ID NO: 3375444 - RNA, 20 nt, Human
cacuuuuucuuuacaaacaa

SEQ ID NO: 3375445 - RNA, 19 nt, Human
cacuuuuugaacuaagaaa

SEQ ID NO: 3375446 - RNA, 21 nt, Human
cacuuuuuuggggauaugcuu

SEQ ID NO: 3375447 - RNA, 20 nt, Human
cagaaaaaaagagugaaaaa

SEQ ID NO: 3375448 - RNA, 21 nt, Human
cagaaaaaaagagugaaaaag

SEQ ID NO: 3375449 - RNA, 12 nt, Human
cagaaaaaaggu

SEQ ID NO: 3375450 - RNA, 22 nt, Human
cagaaaaaagguucuuugugua

SEQ ID NO: 3375451 - RNA, 20 nt, Human
cagaaaaaaugucuguaaau

SEQ ID NO: 3375452 - RNA, 16 nt, Human
cagaaaaacucuggga

SEQ ID NO: 3375453 - RNA, 19 nt, Human
cagaaaaacucugggaaau

SEQ ID NO: 3375454 - RNA, 17 nt, Human
cagaaaaaggcugugcu

SEQ ID NO: 3375455 - RNA, 11 nt, Human
cagaaaacaac

SEQ ID NO: 3375456 - RNA, 19 nt, Human
cagaaaacaacaaaaaaua

SEQ ID NO: 3375457 - RNA, 10 nt, Human
cagaaaacag

SEQ ID NO: 3375458 - RNA, 16 nt, Human
cagaaaacagaaaaaa

SEQ ID NO: 3375459 - RNA, 11 nt, Human
cagaaaacauu

SEQ ID NO: 3375460 - RNA, 14 nt, Human
cagaaaaccccagc

SEQ ID NO: 3375461 - RNA, 20 nt, Human
cagaaaacccuugggccaga

SEQ ID NO: 3375462 - RNA, 19 nt, Human
cagaaaacgguuaaaacug

SEQ ID NO: 3375463 - RNA, 18 nt, Human
cagaaaacuagaauuuca

SEQ ID NO: 3375464 - RNA, 14 nt, Human
cagaaaagcaccug

SEQ ID NO: 3375465 - RNA, 16 nt, Human
cagaaaagcaccugcc

SEQ ID NO: 3375466 - RNA, 19 nt, Human
cagaaaagcaccugccgac

SEQ ID NO: 3375467 - RNA, 17 nt, Human
cagaaaagggaaguugu

SEQ ID NO: 3375468 - RNA, 22 nt, Human
cagaaaaguugaauuuuacaug

SEQ ID NO: 3375469 - RNA, 12 nt, Human
cagaaaauaagg

SEQ ID NO: 3375470 - RNA, 11 nt, Human
cagaaaauaua

SEQ ID NO: 3375471 - RNA, 16 nt, Human
cagaaaauauacugua

SEQ ID NO: 3375472 - RNA, 20 nt, Human
cagaaaauauacuguaaaga

SEQ ID NO: 3375473 - RNA, 15 nt, Human
cagaaaauauguauu

SEQ ID NO: 3375474 - RNA, 11 nt, Human
cagaaaaugag

SEQ ID NO: 3375475 - RNA, 20 nt, Human
cagaaaauggaagacagcuc

SEQ ID NO: 3375476 - RNA, 20 nt, Human
cagaaacacccucacacugg

SEQ ID NO: 3375477 - RNA, 23 nt, Human
cagaaacacccucacacugggac

SEQ ID NO: 3375478 - RNA, 13 nt, Human
cagaaacacugcc

SEQ ID NO: 3375479 - RNA, 21 nt, Human
cagaaacacugccuuuuuauu

SEQ ID NO: 3375480 - RNA, 21 nt, Human
cagaggccgcgcguccagcug

SEQ ID NO: 3375481 - RNA, 16 nt, Human
cagaggccuauaauga

SEQ ID NO: 3375482 - RNA, 20 nt, Human
cagaggccuauaaugaagcu

SEQ ID NO: 3375483 - RNA, 12 nt, Human
cagaggccuccu

SEQ ID NO: 3375484 - RNA, 14 nt, Human
cagaggccugcccg

SEQ ID NO: 3375485 - RNA, 23 nt, Human
cagaggcgcaugaauuugugaag

SEQ ID NO: 3375486 - RNA, 21 nt, Human
cagaggcucagauuguaauau

SEQ ID NO: 3375487 - RNA, 13 nt, Human
cagaggcugaggu

SEQ ID NO: 3375488 - RNA, 22 nt, Human
cagaggcugaguuuucucuuug

SEQ ID NO: 3375489 - RNA, 17 nt, Human
cagaggcuggaggcagg

SEQ ID NO: 3375490 - RNA, 18 nt, Human
cagaggcuggaggcaggg

SEQ ID NO: 3375491 - RNA, 16 nt, Human
cagaggcuggccucag

SEQ ID NO: 3375492 - RNA, 17 nt, Human
cagaggcuggccucaga

SEQ ID NO: 3375493 - RNA, 12 nt, Human
cagaggcugggu

SEQ ID NO: 3375494 - RNA, 13 nt, Human
cagaggcuggguu

SEQ ID NO: 3375495 - RNA, 14 nt, Human
cagaggcuggguuc

SEQ ID NO: 3375496 - RNA, 14 nt, Human
cagaggcuguggcu

SEQ ID NO: 3375497 - RNA, 19 nt, Human
cagagggaagaaaagagcu

SEQ ID NO: 3375498 - RNA, 19 nt, Human
cagagggacuuuguauaga

SEQ ID NO: 3375499 - RNA, 23 nt, Human
cagagggaggaaucgaggaacca

SEQ ID NO: 3375500 - RNA, 16 nt, Human
cagagggagugacaga

SEQ ID NO: 3375501 - RNA, 23 nt, Human
cagagggagugacagaggcagcc

SEQ ID NO: 3375502 - RNA, 14 nt, Human
cagagggcacucug

SEQ ID NO: 3375503 - RNA, 18 nt, Human
cagagggcagaggcugga

SEQ ID NO: 3375504 - RNA, 22 nt, Human
cagagggccugcaagggaguga

SEQ ID NO: 3375505 - RNA, 19 nt, Human
cagagggcuggaggcccag

SEQ ID NO: 3375506 - RNA, 20 nt, Human
cagagggcuggaggcccagg

SEQ ID NO: 3375507 - RNA, 16 nt, Human
cagaggggcagaggcc

SEQ ID NO: 3375508 - RNA, 17 nt, Human
cagaggggcagauggaa

SEQ ID NO: 3375509 - RNA, 20 nt, Human
cagaggggcaggcccugcac

SEQ ID NO: 3375510 - RNA, 22 nt, Human
cagaggggcaggcccugcacug

SEQ ID NO: 3375511 - RNA, 14 nt, Human
cagaggggguggcc

SEQ ID NO: 3375512 - RNA, 15 nt, Human
cagagggguaggcag

SEQ ID NO: 3375513 - RNA, 20 nt, Human
cagagggguaggcagagccu

SEQ ID NO: 3375514 - RNA, 21 nt, Human
cagagggguaggcagagccuu

SEQ ID NO: 3375515 - RNA, 20 nt, Human
cagagggguggguuccucuu

SEQ ID NO: 3375516 - RNA, 23 nt, Human
cagagggguggguuccucuuccc

SEQ ID NO: 3375517 - RNA, 17 nt, Human
cagaggguugugauuuu

SEQ ID NO: 3375518 - RNA, 18 nt, Human
cagagguaaaagugugag

SEQ ID NO: 3375519 - RNA, 22 nt, Human
cagagguaacagaacagcuuca

SEQ ID NO: 3375520 - RNA, 18 nt, Human
cagagguacccugggugu

SEQ ID NO: 3375521 - RNA, 13 nt, Human
cagagguccagcc

SEQ ID NO: 3375522 - RNA, 14 nt, Human
cagagguccagccc

SEQ ID NO: 3375523 - RNA, 17 nt, Human
cagaggucuagauuaau

SEQ ID NO: 3375524 - RNA, 20 nt, Human
cagaggucucugccggcucu

SEQ ID NO: 3375525 - RNA, 14 nt, Human
cagaggugcuucac

SEQ ID NO: 3375526 - RNA, 21 nt, Human
cagagguggccagagcuggga

SEQ ID NO: 3375527 - RNA, 17 nt, Human
cagagguugcagugugg

SEQ ID NO: 3375528 - RNA, 14 nt, Human
cagaguaagacauu

SEQ ID NO: 3375529 - RNA, 21 nt, Human
cagaguaggcuauuccugaga

SEQ ID NO: 3375530 - RNA, 23 nt, Human
cagaguaggggucugucuuuuaa

SEQ ID NO: 3375531 - RNA, 21 nt, Human
cagaguaugaacaccugggcu

SEQ ID NO: 3375532 - RNA, 14 nt, Human
cagaguauggagcu

SEQ ID NO: 3375533 - RNA, 18 nt, Human
cagaguauuuuuguauuc

SEQ ID NO: 3375534 - RNA, 20 nt, Human
cagagucagaaguuucugcc

SEQ ID NO: 3375535 - RNA, 14 nt, Human
cagagucagcagaa

SEQ ID NO: 3375536 - RNA, 16 nt, Human
cagagucagccaggac

SEQ ID NO: 3375537 - RNA, 20 nt, Human
cagaguccacggagcucgcg

SEQ ID NO: 3375538 - RNA, 16 nt, Human
cagaguccaggcccca

SEQ ID NO: 3375539 - RNA, 16 nt, Human
cagaguccccccacuc

SEQ ID NO: 3375540 - RNA, 14 nt, Human
cagagucccugccu

SEQ ID NO: 3375541 - RNA, 15 nt, Human
cagaguccuuuccaa

SEQ ID NO: 3375542 - RNA, 15 nt, Human
cagagucggaacgga

SEQ ID NO: 3375543 - RNA, 18 nt, Human
cagagucggaacggagaa

SEQ ID NO: 3375544 - RNA, 17 nt, Human
cagagucucacuguugc

SEQ ID NO: 3375545 - RNA, 21 nt, Human
cagagucucacuguugcccag

SEQ ID NO: 3375546 - RNA, 22 nt, Human
cagagucucacuguugcccagg

SEQ ID NO: 3375547 - RNA, 20 nt, Human
cagagugacauccaggagga

SEQ ID NO: 3375548 - RNA, 20 nt, Human
cagagugagacccagcccuc

SEQ ID NO: 3375549 - RNA, 16 nt, Human
cagagugagacucugu

SEQ ID NO: 3375550 - RNA, 18 nt, Human
cagagugcaagccccugc

SEQ ID NO: 3375551 - RNA, 23 nt, Human
cagagugcaagccccugcuccag

SEQ ID NO: 3375552 - RNA, 13 nt, Human
cagagugcccaga

SEQ ID NO: 3375553 - RNA, 15 nt, Human
cagagugccccaccu

SEQ ID NO: 3375554 - RNA, 16 nt, Human
cagagugccccaccug

SEQ ID NO: 3375555 - RNA, 17 nt, Human
cagaguggaauaagaca

SEQ ID NO: 3375556 - RNA, 18 nt, Human
cagaguggaauaagacag

SEQ ID NO: 3375557 - RNA, 14 nt, Human
cagaguggaaugcu

SEQ ID NO: 3375558 - RNA, 12 nt, Human
cagaguggccug

SEQ ID NO: 3375559 - RNA, 13 nt, Human
cagaguggccugg

SEQ ID NO: 3375560 - RNA, 17 nt, Human
cagaguggccuggccag

SEQ ID NO: 3375561 - RNA, 22 nt, Human
cagaguggccuggccaggagcu

SEQ ID NO: 3375562 - RNA, 15 nt, Human
cagaguggucuuucu

SEQ ID NO: 3375563 - RNA, 19 nt, Human
cagaguguagccagguccc

SEQ ID NO: 3375564 - RNA, 12 nt, Human
cagagugugcug

SEQ ID NO: 3375565 - RNA, 18 nt, Human
cagagugugcuggaggac

SEQ ID NO: 3375566 - RNA, 18 nt, Human
cagaguuacaguucugug

SEQ ID NO: 3375567 - RNA, 19 nt, Human
cagaguuacaguucugugg

SEQ ID NO: 3375568 - RNA, 12 nt, Human
cagaguuacuug

SEQ ID NO: 3375569 - RNA, 18 nt, Human
cagaguuccccaugcaga

SEQ ID NO: 3375570 - RNA, 24 nt, Human
cagaguuccccaugcagacaugag

SEQ ID NO: 3375571 - RNA, 21 nt, Human
cagaguucuauacuguaaagc

SEQ ID NO: 3375572 - RNA, 23 nt, Human
cagaguucuuuuugaaguauuua

SEQ ID NO: 3375573 - RNA, 15 nt, Human
cagaguugaagacag

SEQ ID NO: 3375574 - RNA, 19 nt, Human
cagaguuguaaauauauaa

SEQ ID NO: 3375575 - RNA, 19 nt, Human
cagaguuguuacauuuuua

SEQ ID NO: 3375576 - RNA, 19 nt, Human
cagaguuuguguguugucu

SEQ ID NO: 3375577 - RNA, 22 nt, Human
cagaguuuguguguugucuuga

SEQ ID NO: 3375578 - RNA, 21 nt, Human
cagauaaaccuagauaaagag

SEQ ID NO: 3375579 - RNA, 22 nt, Human
cagauaaagguucaugcaaacu

SEQ ID NO: 3375580 - RNA, 23 nt, Human
cagauaaauaguuuaugauucca

SEQ ID NO: 3375581 - RNA, 17 nt, Human
cagauaacaaugcagca

SEQ ID NO: 3375582 - RNA, 16 nt, Human
cagauaacauaccuuu

SEQ ID NO: 3375583 - RNA, 13 nt, Human
cagaacguggcuc

SEQ ID NO: 3375584 - RNA, 19 nt, Human
cagaacuaaacucauuuau

SEQ ID NO: 3375585 - RNA, 12 nt, Human
cagaacuaaaug

SEQ ID NO: 3375586 - RNA, 17 nt, Human
cagaacuaaauguucua

SEQ ID NO: 3375587 - RNA, 19 nt, Human
cagaacuagaauuugauua

SEQ ID NO: 3375588 - RNA, 17 nt, Human
cagaacuauguuuuugu

SEQ ID NO: 3375589 - RNA, 22 nt, Human
cagaacucaaauggggccagau

SEQ ID NO: 3375590 - RNA, 18 nt, Human
cagaacucacuggggccu

SEQ ID NO: 3375591 - RNA, 22 nt, Human
cagaacucgguguccccaccau

SEQ ID NO: 3375592 - RNA, 15 nt, Human
cagaacucugccugc

SEQ ID NO: 3375593 - RNA, 16 nt, Human
cagaacucugccugcc

SEQ ID NO: 3375594 - RNA, 17 nt, Human
cagaacucuuaaaaaug

SEQ ID NO: 3375595 - RNA, 15 nt, Human
cagaacucuuccucc

SEQ ID NO: 3375596 - RNA, 14 nt, Human
cagaacucuuucaa

SEQ ID NO: 3375597 - RNA, 16 nt, Human
cagaacugagcuccuc

SEQ ID NO: 3375598 - RNA, 17 nt, Human
cagaacugagcuccucu

SEQ ID NO: 3375599 - RNA, 20 nt, Human
cagaacugagcuccucuggg

SEQ ID NO: 3375600 - RNA, 12 nt, Human
cagaacugccau

SEQ ID NO: 3375601 - RNA, 20 nt, Human
cagaacugccauuauuuucu

SEQ ID NO: 3375602 - RNA, 13 nt, Human
cagaacugcuuua

SEQ ID NO: 3375603 - RNA, 13 nt, Human
cagaacuggacuc

SEQ ID NO: 3375604 - RNA, 15 nt, Human
cagaacuucccugau

SEQ ID NO: 3375605 - RNA, 21 nt, Human
cagaacuugaagccugcuccu

SEQ ID NO: 3375606 - RNA, 11 nt, Human
cagaagaaaga

SEQ ID NO: 3375607 - RNA, 18 nt, Human
cagaagaagagaagcugc

SEQ ID NO: 3375608 - RNA, 23 nt, Human
cagaagaagagaagcugcugacc

SEQ ID NO: 3375609 - RNA, 14 nt, Human
cagaagaaggcagc

SEQ ID NO: 3375610 - RNA, 12 nt, Human
cagaagaauauu

SEQ ID NO: 3375611 - RNA, 19 nt, Human
cagaagaauugaacccagg

SEQ ID NO: 3375612 - RNA, 21 nt, Human
cagaagaauugaacccaggag

SEQ ID NO: 3375613 - RNA, 18 nt, Human
cagaagacaaaaagacaa

SEQ ID NO: 3375614 - RNA, 15 nt, Human
cagaagacaccagag

SEQ ID NO: 3375615 - RNA, 19 nt, Human
cagaagacaccagagcaga

SEQ ID NO: 3375616 - RNA, 21 nt, Human
cagaagacacugaugggcaac

SEQ ID NO: 3375617 - RNA, 23 nt, Human
cagaagaggguguguuugaaauc

SEQ ID NO: 3375618 - RNA, 22 nt, Human
cagaagauaacuugagcaccgu

SEQ ID NO: 3375619 - RNA, 15 nt, Human
cagaagauccccuca

SEQ ID NO: 3375620 - RNA, 19 nt, Human
cagaagauccccucaggac

SEQ ID NO: 3375621 - RNA, 15 nt, Human
cagaagaugaacaga

SEQ ID NO: 3375622 - RNA, 19 nt, Human
cagaagcaacccaaauguu

SEQ ID NO: 3375623 - RNA, 20 nt, Human
cagaagcacagaauauuuuu

SEQ ID NO: 3375624 - RNA, 17 nt, Human
aaaauugaaauguaagg

SEQ ID NO: 3375625 - RNA, 21 nt, Human
aaaauugaaauguaaggcugu

SEQ ID NO: 3375626 - RNA, 19 nt, Human
aaaauugaacaaagacuac

SEQ ID NO: 3375627 - RNA, 12 nt, Human
aaaauugaaugc

SEQ ID NO: 3375628 - RNA, 13 nt, Human
aaaauugaauuua

SEQ ID NO: 3375629 - RNA, 16 nt, Human
aaaauugaauuuaaca

SEQ ID NO: 3375630 - RNA, 21 nt, Human
aaaauugaauuuaacaaugcg

SEQ ID NO: 3375631 - RNA, 14 nt, Human
aaaauugauguguu

SEQ ID NO: 3375632 - RNA, 15 nt, Human
aaaauugcaaaucuu

SEQ ID NO: 3375633 - RNA, 20 nt, Human
aaaauugcuauguuacuauu

SEQ ID NO: 3375634 - RNA, 22 nt, Human
aaaauugcuuuugagagaacau

SEQ ID NO: 3375635 - RNA, 19 nt, Human
aaaauuggggauucuuaaa

SEQ ID NO: 3375636 - RNA, 23 nt, Human
aaaauuggggauucuuaaaguug

SEQ ID NO: 3375637 - RNA, 17 nt, Human
aaaauugguuggagaau

SEQ ID NO: 3375638 - RNA, 15 nt, Human
aaaauuguaaaauug

SEQ ID NO: 3375639 - RNA, 21 nt, Human
aaaauuguauguuaaguuacu

SEQ ID NO: 3375640 - RNA, 13 nt, Human
aaaauugugauca

SEQ ID NO: 3375641 - RNA, 16 nt, Human
aaaauugugauguguc

SEQ ID NO: 3375642 - RNA, 17 nt, Human
aaaauuuaaaaguaaaa

SEQ ID NO: 3375643 - RNA, 19 nt, Human
aaaauuuaaaaguaaaaug

SEQ ID NO: 3375644 - RNA, 22 nt, Human
aaaauuuaaaggguguacuuau

SEQ ID NO: 3375645 - RNA, 23 nt, Human
aaaauuuaagcauuguuugcuua

SEQ ID NO: 3375646 - RNA, 13 nt, Human
aaaauuuagaaca

SEQ ID NO: 3375647 - RNA, 13 nt, Human
aaaauuuauuuca

SEQ ID NO: 3375648 - RNA, 18 nt, Human
aaaauuuauuuuauaaga

SEQ ID NO: 3375649 - RNA, 20 nt, Human
aaaauuuauuuuauaagaaa

SEQ ID NO: 3375650 - RNA, 20 nt, Human
aaaauuucaacaaguagcua

SEQ ID NO: 3375651 - RNA, 15 nt, Human
aaaauuucuauuaaa

SEQ ID NO: 3375652 - RNA, 15 nt, Human
aaaauuugaaccaaa

SEQ ID NO: 3375653 - RNA, 20 nt, Human
aaaauuugaaccaaaacauu

SEQ ID NO: 3375654 - RNA, 12 nt, Human
aaaauuugaagu

SEQ ID NO: 3375655 - RNA, 13 nt, Human
aaaauuugagacu

SEQ ID NO: 3375656 - RNA, 19 nt, Human
aaaauuugagacuauuuaa

SEQ ID NO: 3375657 - RNA, 16 nt, Human
aaaauuuguucuugua

SEQ ID NO: 3375658 - RNA, 22 nt, Human
aaaauuuguuuugacggaugau

SEQ ID NO: 3375659 - RNA, 12 nt, Human
aaaauuuuaagc

SEQ ID NO: 3375660 - RNA, 15 nt, Human
aaaauuuuauaagca

SEQ ID NO: 3375661 - RNA, 19 nt, Human
aaaauuuucucauuuucuu

SEQ ID NO: 3375662 - RNA, 23 nt, Human
aaaauuuugcuccccagugaagg

SEQ ID NO: 3375663 - RNA, 17 nt, Human
aaaauuuuguaauuuuc

SEQ ID NO: 3375664 - RNA, 22 nt, Human
aaaauuuuguauguuaaagaga

SEQ ID NO: 3375665 - RNA, 16 nt, Human
aaaauuuugugacauu

SEQ ID NO: 3375666 - RNA, 21 nt, Human
aaaauuuugugacauuccuuc

SEQ ID NO: 3375667 - RNA, 17 nt, Human
aaaauuuuuguuuauaa

SEQ ID NO: 3375668 - RNA, 14 nt, Human
aaaauuuuuuuaga

SEQ ID NO: 3375669 - RNA, 17 nt, Human
aaaauuuuuuuucaugu

SEQ ID NO: 3375670 - RNA, 18 nt, Human
aaaauuuuuuuucauguu

SEQ ID NO: 3375671 - RNA, 19 nt, Human
aaaauuuuuuuucauguuu

SEQ ID NO: 3375672 - RNA, 13 nt, Human
aaacaaaaaacaa

SEQ ID NO: 3375673 - RNA, 13 nt, Human
aaacaaaaacacu

SEQ ID NO: 3375674 - RNA, 12 nt, Human
aaacaaaaacau

SEQ ID NO: 3375675 - RNA, 11 nt, Human
aaacaaaaaga

SEQ ID NO: 3375676 - RNA, 12 nt, Human
aaacaaaaagaa

SEQ ID NO: 3375677 - RNA, 17 nt, Human
aaacaaaaagaacaaaa

SEQ ID NO: 3375678 - RNA, 19 nt, Human
aaacaaaaauuaaaauccu

SEQ ID NO: 3375679 - RNA, 14 nt, Human
aaacaaaacaaaac

SEQ ID NO: 3375680 - RNA, 16 nt, Human
aaacaaaacaaaacaa

SEQ ID NO: 3375681 - RNA, 12 nt, Human
aaacaaaaggca

SEQ ID NO: 3375682 - RNA, 16 nt, Human
aaacaaaauagaaagu

SEQ ID NO: 3375683 - RNA, 15 nt, Human
aaacaaaauuugacu

SEQ ID NO: 3375684 - RNA, 20 nt, Human
aaacaaacucguuuuuuaca

SEQ ID NO: 3375685 - RNA, 11 nt, Human
aaacaaagaag

SEQ ID NO: 3375686 - RNA, 18 nt, Human
aaacaaagaguucaagaa

SEQ ID NO: 3375687 - RNA, 15 nt, Human
aaacaaaguuucaga

SEQ ID NO: 3375688 - RNA, 12 nt, Human
aaacaaauaugc

SEQ ID NO: 3375689 - RNA, 14 nt, Human
aaacaaauaugcaa

SEQ ID NO: 3375690 - RNA, 15 nt, Human
aaacaacagcugaag

SEQ ID NO: 3375691 - RNA, 18 nt, Human
aaacaacauuuauaugua

SEQ ID NO: 3375692 - RNA, 21 nt, Human
aaacaacauuuugagaacaaa

SEQ ID NO: 3375693 - RNA, 17 nt, Human
aaacaacuuucucuugu

SEQ ID NO: 3375694 - RNA, 18 nt, Human
aaacaagaaaaauaaaga

SEQ ID NO: 3375695 - RNA, 15 nt, Human
aaacaagaaaguuuc

SEQ ID NO: 3375696 - RNA, 22 nt, Human
aaacaagauuuuaaagacaugu

SEQ ID NO: 3375697 - RNA, 18 nt, Human
aaacaagcauauaaaaug

SEQ ID NO: 3375698 - RNA, 17 nt, Human
aaacaaggaugaauuaa

SEQ ID NO: 3375699 - RNA, 13 nt, Human
aaacaaguauuug

SEQ ID NO: 3375700 - RNA, 23 nt, Human
aaacaaguauuuguuaauuuaga

SEQ ID NO: 3375701 - RNA, 16 nt, Human
aaacaauaaaugugca

SEQ ID NO: 3375702 - RNA, 14 nt, Human
aaacaauauuguuu

SEQ ID NO: 3375703 - RNA, 16 nt, Human
aaacaauauuuauugu

SEQ ID NO: 3375704 - RNA, 17 nt, Human
aaacaauauuuauugua

SEQ ID NO: 3375705 - RNA, 12 nt, Human
aaacaaucucuu

SEQ ID NO: 3375706 - RNA, 18 nt, Human
aaacaauggaguauucuc

SEQ ID NO: 3375707 - RNA, 13 nt, Human
aaacaauuuauuu

SEQ ID NO: 3375708 - RNA, 20 nt, Human
aaacacaaaaguuagcugag

SEQ ID NO: 3375709 - RNA, 22 nt, Human
aaacacaaaccacaacugacac

SEQ ID NO: 3375710 - RNA, 19 nt, Human
aaacacaaacgggcucagc

SEQ ID NO: 3375711 - RNA, 14 nt, Human
aaacacaacuauau

SEQ ID NO: 3375712 - RNA, 17 nt, Human
aaacacaccaggcugug

SEQ ID NO: 3375713 - RNA, 23 nt, Human
aaacacaccaggcugugggccuc

SEQ ID NO: 3375714 - RNA, 15 nt, Human
aaacacacugaggca

SEQ ID NO: 3375715 - RNA, 11 nt, Human
aaacacagcaa

SEQ ID NO: 3375716 - RNA, 12 nt, Human
aaacacagcaag

SEQ ID NO: 3375717 - RNA, 20 nt, Human
aaacacagucaaaauaauuc

SEQ ID NO: 3375718 - RNA, 16 nt, Human
aaacacaguguuuuug

SEQ ID NO: 3375719 - RNA, 20 nt, Human
aaacacaguguuuuuguaaa

SEQ ID NO: 3375720 - RNA, 19 nt, Human
aaacacauaauuaacacuu

SEQ ID NO: 3375721 - RNA, 18 nt, Human
aaacacaucuaguaguug

SEQ ID NO: 3375722 - RNA, 16 nt, Human
aaacacaucuucccua

SEQ ID NO: 3375723 - RNA, 21 nt, Human
aaacacauuaaagguacuuug

SEQ ID NO: 3375724 - RNA, 15 nt, Human
aaacacauuguuauu

SEQ ID NO: 3375725 - RNA, 16 nt, Human
aaacacauuuuucuua

SEQ ID NO: 3375726 - RNA, 19 nt, Human
aaacaccaacauaaaaaug

SEQ ID NO: 3375727 - RNA, 15 nt, Human
aaacacccucacacu

SEQ ID NO: 3375728 - RNA, 17 nt, Human
aaacaccggguuccagc

SEQ ID NO: 3375729 - RNA, 15 nt, Human
aaacaccucugcuuu

SEQ ID NO: 3375730 - RNA, 18 nt, Human
aaacaccugacagccccu

SEQ ID NO: 3375731 - RNA, 22 nt, Human
aaacaccuuccagcuccuguaa

SEQ ID NO: 3375732 - RNA, 16 nt, Human
aaacacgaaacuuguu

SEQ ID NO: 3375733 - RNA, 17 nt, Human
aaacacgaaacuuguua

SEQ ID NO: 3375734 - RNA, 13 nt, Human
aaacacuaaaugu

SEQ ID NO: 3375735 - RNA, 16 nt, Human
aaacacuaaauguuaa

SEQ ID NO: 3375736 - RNA, 21 nt, Human
aaacacuaaauguuaaagaug

SEQ ID NO: 3375737 - RNA, 23 nt, Human
aaacacuauuuuuuuuucuuuug

SEQ ID NO: 3375738 - RNA, 14 nt, Human
aaacacucagcugu

SEQ ID NO: 3375739 - RNA, 15 nt, Human
aaacacucagcuguu

SEQ ID NO: 3375740 - RNA, 16 nt, Human
aaacacuccuugcauc

SEQ ID NO: 3375741 - RNA, 20 nt, Human
aaacacucggcauuucaaau

SEQ ID NO: 3375742 - RNA, 13 nt, Human
aaacacucuugaa

SEQ ID NO: 3375743 - RNA, 13 nt, Human
aaacacugaaaaa

SEQ ID NO: 3375744 - RNA, 14 nt, Human
aaacacugcaggca

SEQ ID NO: 3375745 - RNA, 15 nt, Human
cagauaacauuugug

SEQ ID NO: 3375746 - RNA, 21 nt, Human
cagauaacuguuauuuauaau

SEQ ID NO: 3375747 - RNA, 19 nt, Human
cagauaagaaugcugguuu

SEQ ID NO: 3375748 - RNA, 20 nt, Human
cagauaagacauaucucuaa

SEQ ID NO: 3375749 - RNA, 20 nt, Human
cagauaagguaaaaugccau

SEQ ID NO: 3375750 - RNA, 19 nt, Human
cagauaaucagccucuuaa

SEQ ID NO: 3375751 - RNA, 14 nt, Human
cagauaaucagugu

SEQ ID NO: 3375752 - RNA, 15 nt, Human
cagauaaucccugua

SEQ ID NO: 3375753 - RNA, 14 nt, Human
cagauaaugugaaa

SEQ ID NO: 3375754 - RNA, 14 nt, Human
cagauacaauguau

SEQ ID NO: 3375755 - RNA, 17 nt, Human
cagauacaauguauuua

SEQ ID NO: 3375756 - RNA, 21 nt, Human
cagauacaggaaaagcugcug

SEQ ID NO: 3375757 - RNA, 17 nt, Human
cagauacauaugagugu

SEQ ID NO: 3375758 - RNA, 13 nt, Human
cagauacaucacu

SEQ ID NO: 3375759 - RNA, 22 nt, Human
cagauaccuuaucuuacaauau

SEQ ID NO: 3375760 - RNA, 21 nt, Human
cagauacggacagagaccaag

SEQ ID NO: 3375761 - RNA, 18 nt, Human
cagauacuggaaguuuug

SEQ ID NO: 3375762 - RNA, 14 nt, Human
cagauagaaagcau

SEQ ID NO: 3375763 - RNA, 21 nt, Human
cagauagagaguuguugugua

SEQ ID NO: 3375764 - RNA, 19 nt, Human
cagauagauauaugcucug

SEQ ID NO: 3375765 - RNA, 19 nt, Human
cagauaggccuucuuguga

SEQ ID NO: 3375766 - RNA, 18 nt, Human
cagauaguguagcugagg

SEQ ID NO: 3375767 - RNA, 20 nt, Human
cagauauaaauggcugguuu

SEQ ID NO: 3375768 - RNA, 18 nt, Human
cagauauauuuucuuucu

SEQ ID NO: 3375769 - RNA, 14 nt, Human
cagauauauuuuuc

SEQ ID NO: 3375770 - RNA, 22 nt, Human
auugaagccgacucuggcccug

SEQ ID NO: 3375771 - RNA, 13 nt, Human
auugaaggaaaga

SEQ ID NO: 3375772 - RNA, 20 nt, Human
auugaaggaagccaaauuua

SEQ ID NO: 3375773 - RNA, 18 nt, Human
auugaaggaucaucugaa

SEQ ID NO: 3375774 - RNA, 13 nt, Human
auugaaggccugg

SEQ ID NO: 3375775 - RNA, 19 nt, Human
auugaaggcuuaaacccau

SEQ ID NO: 3375776 - RNA, 19 nt, Human
auugaagguuuuugauagc

SEQ ID NO: 3375777 - RNA, 16 nt, Human
auugaaguaaugaauu

SEQ ID NO: 3375778 - RNA, 18 nt, Human
auugaagucagauguggu

SEQ ID NO: 3375779 - RNA, 15 nt, Human
auugaaguuucaagu

SEQ ID NO: 3375780 - RNA, 16 nt, Human
auugaaguuucaaguu

SEQ ID NO: 3375781 - RNA, 19 nt, Human
auugaauaaaguugaagcu

SEQ ID NO: 3375782 - RNA, 16 nt, Human
auugaauacuuacauu

SEQ ID NO: 3375783 - RNA, 13 nt, Human
auugaauacuuug

SEQ ID NO: 3375784 - RNA, 16 nt, Human
auugaauacuuugaau

SEQ ID NO: 3375785 - RNA, 20 nt, Human
auugaauacuuugaaugugu

SEQ ID NO: 3375786 - RNA, 13 nt, Human
auugaauauugug

SEQ ID NO: 3375787 - RNA, 20 nt, Human
auugaaucauguaguaucaa

SEQ ID NO: 3375788 - RNA, 20 nt, Human
auugaauggugcauuguaua

SEQ ID NO: 3375789 - RNA, 16 nt, Human
auugaauguuuccaac

SEQ ID NO: 3375790 - RNA, 13 nt, Human
auugaauuaucuu

SEQ ID NO: 3375791 - RNA, 13 nt, Human
auugaauuuucaa

SEQ ID NO: 3375792 - RNA, 20 nt, Human
auugaauuuucaagcaucuc

SEQ ID NO: 3375793 - RNA, 14 nt, Human
auugaauuuuuccu

SEQ ID NO: 3375794 - RNA, 13 nt, Human
cagccccacugcc

SEQ ID NO: 3375795 - RNA, 15 nt, Human
cagccccacugccag

SEQ ID NO: 3375796 - RNA, 21 nt, Human
cagccccacugccagcagcag

SEQ ID NO: 3375797 - RNA, 15 nt, Human
cagccccagagcagg

SEQ ID NO: 3375798 - RNA, 14 nt, Human
cagccccagcacca

SEQ ID NO: 3375799 - RNA, 12 nt, Human
cagccccagccc

SEQ ID NO: 3375800 - RNA, 15 nt, Human
cagccccagccugcu

SEQ ID NO: 3375801 - RNA, 17 nt, Human
cagccccagccugcuag

SEQ ID NO: 3375802 - RNA, 18 nt, Human
cagccccagccugcuagc

SEQ ID NO: 3375803 - RNA, 20 nt, Human
cagccccaucugugcauucu

SEQ ID NO: 3375804 - RNA, 16 nt, Human
cagccccauucugccu

SEQ ID NO: 3375805 - RNA, 18 nt, Human
cagccccauucugccugc

SEQ ID NO: 3375806 - RNA, 17 nt, Human
cagcccccacagugcug

SEQ ID NO: 3375807 - RNA, 18 nt, Human
cagcccccacccccaagg

SEQ ID NO: 3375808 - RNA, 17 nt, Human
cagcccccagccccucc

SEQ ID NO: 3375809 - RNA, 19 nt, Human
cagcccccagcucccaccu

SEQ ID NO: 3375810 - RNA, 14 nt, Human
cagcccccucacag

SEQ ID NO: 3375811 - RNA, 13 nt, Human
cagcccccugacc

SEQ ID NO: 3375812 - RNA, 18 nt, Human
cagcccccugaccacuca

SEQ ID NO: 3375813 - RNA, 13 nt, Human
cagcccccugguc

SEQ ID NO: 3375814 - RNA, 20 nt, Human
cagcccccuuugggcccagg

SEQ ID NO: 3375815 - RNA, 21 nt, Human
cagcccccuuugggcccaggg

SEQ ID NO: 3375816 - RNA, 16 nt, Human
cagccccgcgccuccu

SEQ ID NO: 3375817 - RNA, 18 nt, Human
cagccccgcgccuccuuc

SEQ ID NO: 3375818 - RNA, 24 nt, Human
cagccccgcguggaacucgugucu

SEQ ID NO: 3375819 - RNA, 17 nt, Human
cagccccuacugcugug

SEQ ID NO: 3375820 - RNA, 20 nt, Human
cagccccuacugcugugaac

SEQ ID NO: 3375821 - RNA, 12 nt, Human
cagccccuagaa

SEQ ID NO: 3375822 - RNA, 21 nt, Human
cagccccuagaaacccaagcu

SEQ ID NO: 3375823 - RNA, 13 nt, Human
cagccccuagccc

SEQ ID NO: 3375824 - RNA, 12 nt, Human
cagccccuagga

SEQ ID NO: 3375825 - RNA, 13 nt, Human
cagccccuaggag

SEQ ID NO: 3375826 - RNA, 15 nt, Human
cagccccuccaucug

SEQ ID NO: 3375827 - RNA, 12 nt, Human
cagccccuccuc

SEQ ID NO: 3375828 - RNA, 13 nt, Human
cagccccuccucu

SEQ ID NO: 3375829 - RNA, 19 nt, Human
cagccccuccucugccacc

SEQ ID NO: 3375830 - RNA, 13 nt, Human
cagccccucuggu

SEQ ID NO: 3375831 - RNA, 14 nt, Human
cagccccucugguc

SEQ ID NO: 3375832 - RNA, 21 nt, Human
cagccccucuggucgcuccug

SEQ ID NO: 3375833 - RNA, 23 nt, Human
cagccccucuugccccccacccc

SEQ ID NO: 3375834 - RNA, 15 nt, Human
cagccccugccccag

SEQ ID NO: 3375835 - RNA, 22 nt, Human
cagccccugccccagcccaagu

SEQ ID NO: 3375836 - RNA, 12 nt, Human
cagccccuggau

SEQ ID NO: 3375837 - RNA, 20 nt, Human
cagccccuguucuggcagag

SEQ ID NO: 3375838 - RNA, 18 nt, Human
cagccccuuagacagagg

SEQ ID NO: 3375839 - RNA, 20 nt, Human
cagccccuucucagaaucua

SEQ ID NO: 3375840 - RNA, 22 nt, Human
cagccccuucucagaaucuacc

SEQ ID NO: 3375841 - RNA, 22 nt, Human
cagccccuucugacccaugcug

SEQ ID NO: 3375842 - RNA, 23 nt, Human
cagccccuucugacccaugcugc

SEQ ID NO: 3375843 - RNA, 23 nt, Human
cagccccuuuccaaaauuuuuca

SEQ ID NO: 3375844 - RNA, 13 nt, Human
cagccccuuuccc

SEQ ID NO: 3375845 - RNA, 19 nt, Human
cagcccgauccuccccugg

SEQ ID NO: 3375846 - RNA, 14 nt, Human
cagcccgcacaccu

SEQ ID NO: 3375847 - RNA, 14 nt, Human
cagcccgcaucagc

SEQ ID NO: 3375848 - RNA, 19 nt, Human
cagcccgcaugcagcagcu

SEQ ID NO: 3375849 - RNA, 23 nt, Human
cagcccgcaugcagcagcuugcu

SEQ ID NO: 3375850 - RNA, 17 nt, Human
cagcccgcuaggcucgc

SEQ ID NO: 3375851 - RNA, 15 nt, Human
cagcccggaccuugg

SEQ ID NO: 3375852 - RNA, 20 nt, Human
cagcccggccugcucccagc

SEQ ID NO: 3375853 - RNA, 22 nt, Human
cagcccggcugguuuuguaaga

SEQ ID NO: 3375854 - RNA, 17 nt, Human
cagcccgggcucugccu

SEQ ID NO: 3375855 - RNA, 18 nt, Human
cagcccgggcucugccuc

SEQ ID NO: 3375856 - RNA, 22 nt, Human
cagcccgggcucugccucccau

SEQ ID NO: 3375857 - RNA, 17 nt, Human
cagcccguguggccccu

SEQ ID NO: 3375858 - RNA, 16 nt, Human
cagcccuaaacaucau

SEQ ID NO: 3375859 - RNA, 17 nt, Human
cagcccuaaggaucucu

SEQ ID NO: 3375860 - RNA, 12 nt, Human
cagcccuagagc

SEQ ID NO: 3375861 - RNA, 16 nt, Human
cagcccucacacaccc

SEQ ID NO: 3375862 - RNA, 14 nt, Human
cagcccucaucccg

SEQ ID NO: 3375863 - RNA, 17 nt, Human
cagcccucaucccgagc

SEQ ID NO: 3375864 - RNA, 23 nt, Human
cagcccuccaucuaaacugcccc

SEQ ID NO: 3375865 - RNA, 16 nt, Human
cagcccucccugcccc

SEQ ID NO: 3375866 - RNA, 18 nt, Human
cagcccucccugccccuc

SEQ ID NO: 3375867 - RNA, 22 nt, Human
cagcccucccugccccucccuu

SEQ ID NO: 3375868 - RNA, 17 nt, Human
cagcccuccucugcacu

SEQ ID NO: 3375869 - RNA, 18 nt, Human
cagcccuccucugcacuc

SEQ ID NO: 3375870 - RNA, 13 nt, Human
cagcccugacccu

SEQ ID NO: 3375871 - RNA, 19 nt, Human
cagcccugagaaagcccug

SEQ ID NO: 3375872 - RNA, 21 nt, Human
cagcccugaguuccuagccac

SEQ ID NO: 3375873 - RNA, 13 nt, Human
cagcccugcacca

SEQ ID NO: 3375874 - RNA, 17 nt, Human
cagcccugcaccaugcu

SEQ ID NO: 3375875 - RNA, 14 nt, Human
cagcccugcagagg

SEQ ID NO: 3375876 - RNA, 18 nt, Human
cagcccugcagagggcac

SEQ ID NO: 3375877 - RNA, 20 nt, Human
cagcccugcagagggcacag

SEQ ID NO: 3375878 - RNA, 14 nt, Human
cagcccugccugga

SEQ ID NO: 3375879 - RNA, 15 nt, Human
cagcccugccuggag

SEQ ID NO: 3375880 - RNA, 19 nt, Human
cagcccugccuggaggacc

SEQ ID NO: 3375881 - RNA, 20 nt, Human
cagcccugcugcugccugcc

SEQ ID NO: 3375882 - RNA, 13 nt, Human
cagcccugcuggg

SEQ ID NO: 3375883 - RNA, 15 nt, Human
cagcccugcugggga

SEQ ID NO: 3375884 - RNA, 20 nt, Human
cagcccugcuggggaucccc

SEQ ID NO: 3375885 - RNA, 19 nt, Human
cagcccugcuuugggcugc

SEQ ID NO: 3375886 - RNA, 21 nt, Human
cagcccugcuuugggcugccc

SEQ ID NO: 3375887 - RNA, 18 nt, Human
cagcccuggaggugccag

SEQ ID NO: 3375888 - RNA, 19 nt, Human
cagcccuggaggugccagc

SEQ ID NO: 3375889 - RNA, 14 nt, Human
cagcccuggaguca

SEQ ID NO: 3375890 - RNA, 20 nt, Human
cagcccuggagucaugccaa

SEQ ID NO: 3375891 - RNA, 18 nt, Human
cagcccuggcccaucaug

SEQ ID NO: 3375892 - RNA, 16 nt, Human
cagcccuggcucugca

SEQ ID NO: 3375893 - RNA, 13 nt, Human
cagcccuggcuga

SEQ ID NO: 3375894 - RNA, 15 nt, Human
cagcccuggcugaag

SEQ ID NO: 3375895 - RNA, 11 nt, Human
cagcccugggc

SEQ ID NO: 3375896 - RNA, 12 nt, Human
cagcccugggcc

SEQ ID NO: 3375897 - RNA, 19 nt, Human
cagcccugggccccaccac

SEQ ID NO: 3375898 - RNA, 18 nt, Human
cagcccuggggcugggcc

SEQ ID NO: 3375899 - RNA, 13 nt, Human
cagcccuggucuc

SEQ ID NO: 3375900 - RNA, 12 nt, Human
cagcccugucag

SEQ ID NO: 3375901 - RNA, 16 nt, Human
cagcccugucagugca

SEQ ID NO: 3375902 - RNA, 20 nt, Human
cagcccugucagugcagccc

SEQ ID NO: 3375903 - RNA, 21 nt, Human
cagcccugucugaaggacacu

SEQ ID NO: 3375904 - RNA, 15 nt, Human
cagcccuuagcaggg

SEQ ID NO: 3375905 - RNA, 21 nt, Human
cagcccuuagcagggaaacag

SEQ ID NO: 3375906 - RNA, 20 nt, Human
cagcccuucuuuccacagaa

SEQ ID NO: 3375907 - RNA, 20 nt, Human
cagcccuuggggguccuccu

SEQ ID NO: 3375908 - RNA, 23 nt, Human
cagcccuuggggguccuccucca

SEQ ID NO: 3375909 - RNA, 19 nt, Human
cagcccuuugggaggcuga

SEQ ID NO: 3375910 - RNA, 14 nt, Human
cagcccuuuugucu

SEQ ID NO: 3375911 - RNA, 20 nt, Human
cagccgagauagccaaggcc

SEQ ID NO: 3375912 - RNA, 21 nt, Human
cagccgagauagccaaggcca

SEQ ID NO: 3375913 - RNA, 21 nt, Human
cagccgagcaggaggccuagg

SEQ ID NO: 3375914 - RNA, 14 nt, Human
cagccgagccgggc

SEQ ID NO: 3375915 - RNA, 15 nt, Human
cagauaccucacccu

SEQ ID NO: 3375916 - RNA, 19 nt, Human
cagauaccuccaacccugc

SEQ ID NO: 3375917 - RNA, 20 nt, Human
cagauaccuccaacccugcc

SEQ ID NO: 3375918 - RNA, 18 nt, Human
cagauaccuuaucuuaca

SEQ ID NO: 3375919 - RNA, 23 nt, Human
cagauaccuuaucuuacaauauu

SEQ ID NO: 3375920 - RNA, 22 nt, Human
cagauacggacagagaccaaga

SEQ ID NO: 3375921 - RNA, 22 nt, Human
cagauacuggaaguuuugcauu

SEQ ID NO: 3375922 - RNA, 13 nt, Human
cagauacuggauu

SEQ ID NO: 3375923 - RNA, 14 nt, Human
cagauacuggauug

SEQ ID NO: 3375924 - RNA, 15 nt, Human
cagauagaaagcauu

SEQ ID NO: 3375925 - RNA, 16 nt, Human
cagauagaaucaauca

SEQ ID NO: 3375926 - RNA, 17 nt, Human
cagauaggccuucuugu

SEQ ID NO: 3375927 - RNA, 18 nt, Human
cagauaggccuucuugug

SEQ ID NO: 3375928 - RNA, 20 nt, Human
cagauauauaucauauuggu

SEQ ID NO: 3375929 - RNA, 15 nt, Human
cagauauauauucau

SEQ ID NO: 3375930 - RNA, 11 nt, Human
cagauauuuau

SEQ ID NO: 3375931 - RNA, 22 nt, Human
cagaucaccagcccggccugcu

SEQ ID NO: 3375932 - RNA, 19 nt, Human
cagaucacugaauuuauaa

SEQ ID NO: 3375933 - RNA, 15 nt, Human
cagaucacugccaca

SEQ ID NO: 3375934 - RNA, 16 nt, Human
cagaucacugccacac

SEQ ID NO: 3375935 - RNA, 15 nt, Human
cagaucagccagaag

SEQ ID NO: 3375936 - RNA, 20 nt, Human
cagaucagcuccuaacccuu

SEQ ID NO: 3375937 - RNA, 17 nt, Human
cagaucagucagagccc

SEQ ID NO: 3375938 - RNA, 19 nt, Human
cagaucauuucaaaacuca

SEQ ID NO: 3375939 - RNA, 17 nt, Human
cagauccagccuggggu

SEQ ID NO: 3375940 - RNA, 13 nt, Human
cagauccaggacu

SEQ ID NO: 3375941 - RNA, 15 nt, Human
cagauccagggacug

SEQ ID NO: 3375942 - RNA, 22 nt, Human
cagaucccagaaggaccuccug

SEQ ID NO: 3375943 - RNA, 12 nt, Human
cagaucccagcu

SEQ ID NO: 3375944 - RNA, 14 nt, Human
cagaucccagcuca

SEQ ID NO: 3375945 - RNA, 15 nt, Human
cagaucccagcucac

SEQ ID NO: 3375946 - RNA, 14 nt, Human
cagauccccaagcc

SEQ ID NO: 3375947 - RNA, 11 nt, Human
cagauccuacc

SEQ ID NO: 3375948 - RNA, 14 nt, Human
cagauccuccucau

SEQ ID NO: 3375949 - RNA, 13 nt, Human
cagauccucuugg

SEQ ID NO: 3375950 - RNA, 22 nt, Human
cagauccugaucuuaagaggcu

SEQ ID NO: 3375951 - RNA, 13 nt, Human
cagauccuuguuu

SEQ ID NO: 3375952 - RNA, 14 nt, Human
cagauccuuguuuc

SEQ ID NO: 3375953 - RNA, 16 nt, Human
cagauccuuguuucaa

SEQ ID NO: 3375954 - RNA, 19 nt, Human
cagccggccucucuggccu

SEQ ID NO: 3375955 - RNA, 20 nt, Human
cagccggccucucuggccuc

SEQ ID NO: 3375956 - RNA, 20 nt, Human
cagccggcguggcaaauaua

SEQ ID NO: 3375957 - RNA, 21 nt, Human
cagccggcguggcaaauauaa

SEQ ID NO: 3375958 - RNA, 17 nt, Human
cagccggggaagacuug

SEQ ID NO: 3375959 - RNA, 14 nt, Human
cagccgugagcaug

SEQ ID NO: 3375960 - RNA, 16 nt, Human
cagccgugaugcucag

SEQ ID NO: 3375961 - RNA, 9 nt, Human
cagccgugc

SEQ ID NO: 3375962 - RNA, 16 nt, Human
cagccgugccuucagc

SEQ ID NO: 3375963 - RNA, 18 nt, Human
cagccgugccuucagcuc

SEQ ID NO: 3375964 - RNA, 20 nt, Human
cagccgugccuucagcucua

SEQ ID NO: 3375965 - RNA, 15 nt, Human
cagccuaccaugaga

SEQ ID NO: 3375966 - RNA, 20 nt, Human
cagccuacuagggaccuggg

SEQ ID NO: 3375967 - RNA, 19 nt, Human
cagccuagcacagcagcuu

SEQ ID NO: 3375968 - RNA, 20 nt, Human
cagccuagccgaccucagcc

SEQ ID NO: 3375969 - RNA, 21 nt, Human
cagccuagccgaccucagccu

SEQ ID NO: 3375970 - RNA, 22 nt, Human
cagccuagccgaccucagccuu

SEQ ID NO: 3375971 - RNA, 20 nt, Human
cagccucaaauccaggaccc

SEQ ID NO: 3375972 - RNA, 19 nt, Human
cagccucaaccuccugggc

SEQ ID NO: 3375973 - RNA, 21 nt, Human
cagccucaaccuccugggcua

SEQ ID NO: 3375974 - RNA, 21 nt, Human
cagccucaagucacucccaag

SEQ ID NO: 3375975 - RNA, 19 nt, Human
cagccucaauaagccuugu

SEQ ID NO: 3375976 - RNA, 14 nt, Human
cagccucacagucc

SEQ ID NO: 3375977 - RNA, 15 nt, Human
cagccucacccuugc

SEQ ID NO: 3375978 - RNA, 12 nt, Human
cagccucagaga

SEQ ID NO: 3375979 - RNA, 14 nt, Human
cagccucaggacug

SEQ ID NO: 3375980 - RNA, 16 nt, Human
cagccucaggacuggg

SEQ ID NO: 3375981 - RNA, 17 nt, Human
cagccucaggacuggga

SEQ ID NO: 3375982 - RNA, 19 nt, Human
cagccucaggacugggagc

SEQ ID NO: 3375983 - RNA, 21 nt, Human
cagccucaggacugggagccc

SEQ ID NO: 3375984 - RNA, 23 nt, Human
cagccucaggacugggagccccc

SEQ ID NO: 3375985 - RNA, 22 nt, Human
cagccucagggacgacucugac

SEQ ID NO: 3375986 - RNA, 22 nt, Human
cagccuccaacacaaggcucca

SEQ ID NO: 3375987 - RNA, 14 nt, Human
cagccuccaagcuc

SEQ ID NO: 3375988 - RNA, 20 nt, Human
cagccuccaagcuccaucuc

SEQ ID NO: 3375989 - RNA, 17 nt, Human
cagccuccagccucugu

SEQ ID NO: 3375990 - RNA, 23 nt, Human
cagccucccaaagugcugggauu

SEQ ID NO: 3375991 - RNA, 16 nt, Human
cagccucccaccccca

SEQ ID NO: 3375992 - RNA, 14 nt, Human
cagccucccaucca

SEQ ID NO: 3375993 - RNA, 19 nt, Human
cagccucccauccagggcc

SEQ ID NO: 3375994 - RNA, 16 nt, Human
cagccuccccugccag

SEQ ID NO: 3375995 - RNA, 19 nt, Human
cagccuccccugccagggc

SEQ ID NO: 3375996 - RNA, 21 nt, Human
cagccucccgaauagcuggga

SEQ ID NO: 3375997 - RNA, 19 nt, Human
cagccucccgaguagcugg

SEQ ID NO: 3375998 - RNA, 21 nt, Human
cagccucccgaguagcuggga

SEQ ID NO: 3375999 - RNA, 13 nt, Human
cagccucccucug

SEQ ID NO: 3376000 - RNA, 14 nt, Human
cagccucccucuga

SEQ ID NO: 3376001 - RNA, 15 nt, Human
cagccucccucugac

SEQ ID NO: 3376002 - RNA, 16 nt, Human
cagccucccugaagcc

SEQ ID NO: 3376003 - RNA, 17 nt, Human
cagccuccgagagggag

SEQ ID NO: 3376004 - RNA, 16 nt, Human
cagccuccgcuucccu

SEQ ID NO: 3376005 - RNA, 23 nt, Human
cagccuccucaucugggggagug

SEQ ID NO: 3376006 - RNA, 13 nt, Human
cagccuccuccug

SEQ ID NO: 3376007 - RNA, 15 nt, Human
cagccuccuccugac

SEQ ID NO: 3376008 - RNA, 23 nt, Human
cagccuccucuggacggcaggcu

SEQ ID NO: 3376009 - RNA, 22 nt, Human
cagccucgaacuccugggcuca

SEQ ID NO: 3376010 - RNA, 22 nt, Human
cagccucgcaggccucccugcc

SEQ ID NO: 3376011 - RNA, 15 nt, Human
cagccucuagggacc

SEQ ID NO: 3376012 - RNA, 19 nt, Human
cagccucuagggaccccuc

SEQ ID NO: 3376013 - RNA, 22 nt, Human
cagccucucagugcccuccagc

SEQ ID NO: 3376014 - RNA, 23 nt, Human
cagccucuccacucaugugacuc

SEQ ID NO: 3376015 - RNA, 15 nt, Human
cagccucucucccag

SEQ ID NO: 3376016 - RNA, 22 nt, Human
cagccucucucccagucuaccc

SEQ ID NO: 3376017 - RNA, 23 nt, Human
cagccucucucccagucuaccca

SEQ ID NO: 3376018 - RNA, 22 nt, Human
cagccucucuuccuaucccauc

SEQ ID NO: 3376019 - RNA, 23 nt, Human
cagccucucuugguuuccuuccu

SEQ ID NO: 3376020 - RNA, 21 nt, Human
cagccucugaaguuggacagc

SEQ ID NO: 3376021 - RNA, 13 nt, Human
cagccucugaccc

SEQ ID NO: 3376022 - RNA, 13 nt, Human
cagccucuggggg

SEQ ID NO: 3376023 - RNA, 23 nt, Human
cagccucugggggguggccaggc

SEQ ID NO: 3376024 - RNA, 17 nt, Human
cagccucugucaggccu

SEQ ID NO: 3376025 - RNA, 18 nt, Human
cagccucugucaggccuu

SEQ ID NO: 3376026 - RNA, 20 nt, Human
cagccucugucaggccuuca

SEQ ID NO: 3376027 - RNA, 14 nt, Human
cagccucuguuccc

SEQ ID NO: 3376028 - RNA, 15 nt, Human
cagccucuuaaagcu

SEQ ID NO: 3376029 - RNA, 19 nt, Human
cagccucuuucccuuccag

SEQ ID NO: 3376030 - RNA, 17 nt, Human
cagccugaacagaagcu

SEQ ID NO: 3376031 - RNA, 20 nt, Human
cagccugaaccccagggcug

SEQ ID NO: 3376032 - RNA, 13 nt, Human
cagccugagaguc

SEQ ID NO: 3376033 - RNA, 19 nt, Human
cagccugagcgacagugag

SEQ ID NO: 3376034 - RNA, 22 nt, Human
cagccugagcgacagugagacu

SEQ ID NO: 3376035 - RNA, 12 nt, Human
cagccugaggcu

SEQ ID NO: 3376036 - RNA, 10 nt, Human
cagccugagu

SEQ ID NO: 3376037 - RNA, 16 nt, Human
cagccugagucuccug

SEQ ID NO: 3376038 - RNA, 20 nt, Human
cagccugagucuccugugcc

SEQ ID NO: 3376039 - RNA, 14 nt, Human
cagccugcacagug

SEQ ID NO: 3376040 - RNA, 22 nt, Human
cagccugcacagugucccccag

SEQ ID NO: 3376041 - RNA, 23 nt, Human
cagccugcacuugggggcucagc

SEQ ID NO: 3376042 - RNA, 18 nt, Human
cagccugcagacucacug

SEQ ID NO: 3376043 - RNA, 21 nt, Human
cagccugcaggaccucgugcc

SEQ ID NO: 3376044 - RNA, 12 nt, Human
cagccugccacu

SEQ ID NO: 3376045 - RNA, 17 nt, Human
cagccugccacucaggc

SEQ ID NO: 3376046 - RNA, 21 nt, Human
cagccugcccaagcccaggcc

SEQ ID NO: 3376047 - RNA, 17 nt, Human
cagccugcccucuucau

SEQ ID NO: 3376048 - RNA, 15 nt, Human
cagccugccuggcag

SEQ ID NO: 3376049 - RNA, 13 nt, Human
cagccugcgccug

SEQ ID NO: 3376050 - RNA, 16 nt, Human
cagccugcgccugcug

SEQ ID NO: 3376051 - RNA, 22 nt, Human
cagccugcgccugcugcaugcc

SEQ ID NO: 3376052 - RNA, 23 nt, Human
cagccugcgccugcugcaugccc

SEQ ID NO: 3376053 - RNA, 16 nt, Human
cagccugcguggcuga

SEQ ID NO: 3376054 - RNA, 17 nt, Human
cagccugcguggcugac

SEQ ID NO: 3376055 - RNA, 19 nt, Human
cagccugcuaauuccccag

SEQ ID NO: 3376056 - RNA, 15 nt, Human
cagccugcuccagcu

SEQ ID NO: 3376057 - RNA, 20 nt, Human
cagccuggaaaccugucuga

SEQ ID NO: 3376058 - RNA, 17 nt, Human
cagccuggacccccagc

SEQ ID NO: 3376059 - RNA, 20 nt, Human
auuguuuccucuuccaaagu

SEQ ID NO: 3376060 - RNA, 16 nt, Human
auuguuucuauacaaa

SEQ ID NO: 3376061 - RNA, 16 nt, Human
auuguuucucugaaag

SEQ ID NO: 3376062 - RNA, 15 nt, Human
auuguuucugugggc

SEQ ID NO: 3376063 - RNA, 18 nt, Human
auuguuugaaacaaagaa

SEQ ID NO: 3376064 - RNA, 19 nt, Human
auuguuugaaacaaagaag

SEQ ID NO: 3376065 - RNA, 20 nt, Human
auuguuugaaacaaagaagg

SEQ ID NO: 3376066 - RNA, 14 nt, Human
auuguuugcuuauu

SEQ ID NO: 3376067 - RNA, 15 nt, Human
auuguuugcuuauug

SEQ ID NO: 3376068 - RNA, 22 nt, Human
auuguuugcuuauuguuccaag

SEQ ID NO: 3376069 - RNA, 19 nt, Human
auuguuugguaaauguuuc

SEQ ID NO: 3376070 - RNA, 21 nt, Human
auuguuugucuuuaacuguca

SEQ ID NO: 3376071 - RNA, 14 nt, Human
auuguuuuaaaaag

SEQ ID NO: 3376072 - RNA, 13 nt, Human
auuguuuuacaau

SEQ ID NO: 3376073 - RNA, 17 nt, Human
auuguuuuacaauaguu

SEQ ID NO: 3376074 - RNA, 19 nt, Human
auuguuuuagagacuaugg

SEQ ID NO: 3376075 - RNA, 13 nt, Human
auuguuuuaucau

SEQ ID NO: 3376076 - RNA, 18 nt, Human
auuguuuucaguguacau

SEQ ID NO: 3376077 - RNA, 19 nt, Human
auuguuuucaguguacaug

SEQ ID NO: 3376078 - RNA, 15 nt, Human
auuguuuugcacuuu

SEQ ID NO: 3376079 - RNA, 13 nt, Human
auuuaaaaaauaa

SEQ ID NO: 3376080 - RNA, 17 nt, Human
auuuaaaaaauaaauaa

SEQ ID NO: 3376081 - RNA, 22 nt, Human
auuuaaaaaauaaauaaaaacu

SEQ ID NO: 3376082 - RNA, 15 nt, Human
auuuaaaaagcccaa

SEQ ID NO: 3376083 - RNA, 18 nt, Human
auuuaaaaagcccaaccu

SEQ ID NO: 3376084 - RNA, 21 nt, Human
auuuaaaaagguuuaaaacua

SEQ ID NO: 3376085 - RNA, 14 nt, Human
auuuaaaaauagaa

SEQ ID NO: 3376086 - RNA, 16 nt, Human
auuuaaaaauagaaac

SEQ ID NO: 3376087 - RNA, 17 nt, Human
auuuaaaaauagaaaca

SEQ ID NO: 3376088 - RNA, 15 nt, Human
auuuaaaaauauauu

SEQ ID NO: 3376089 - RNA, 14 nt, Human
auuuaaaaauauuu

SEQ ID NO: 3376090 - RNA, 19 nt, Human
auuuaaaaaugagugugaa

SEQ ID NO: 3376091 - RNA, 21 nt, Human
auuuaaaaaugagugugaagg

SEQ ID NO: 3376092 - RNA, 13 nt, Human
auuuaaaaauguc

SEQ ID NO: 3376093 - RNA, 11 nt, Human
auuuaaaacaa

SEQ ID NO: 3376094 - RNA, 14 nt, Human
auuuaaaacaaaca

SEQ ID NO: 3376095 - RNA, 14 nt, Human
auuuaaaacagaca

SEQ ID NO: 3376096 - RNA, 16 nt, Human
auuuaaaacagacacu

SEQ ID NO: 3376097 - RNA, 13 nt, Human
auuuaaaacaugu

SEQ ID NO: 3376098 - RNA, 21 nt, Human
auuuaaaacauuaaaauauaa

SEQ ID NO: 3376099 - RNA, 14 nt, Human
auuuaaaagagcag

SEQ ID NO: 3376100 - RNA, 17 nt, Human
auuuaaaagagcaggcc

SEQ ID NO: 3376101 - RNA, 13 nt, Human
auuuaaaagauac

SEQ ID NO: 3376102 - RNA, 14 nt, Human
auuuaaaagauaca

SEQ ID NO: 3376103 - RNA, 16 nt, Human
auuuaaaagauacagu

SEQ ID NO: 3376104 - RNA, 17 nt, Human
auuuaaaagauacaguu

SEQ ID NO: 3376105 - RNA, 16 nt, Human
auuuaaaagauucauu

SEQ ID NO: 3376106 - RNA, 18 nt, Human
auuuaaaagauucauuuu

SEQ ID NO: 3376107 - RNA, 19 nt, Human
auuuaaaagggaagucuag

SEQ ID NO: 3376108 - RNA, 21 nt, Human
auuuaaaagggaagucuagag

SEQ ID NO: 3376109 - RNA, 21 nt, Human
auuuaaaaguaaaaugucuuu

SEQ ID NO: 3376110 - RNA, 15 nt, Human
auuuaaaagugucaa

SEQ ID NO: 3376111 - RNA, 13 nt, Human
auuuaaaauagca

SEQ ID NO: 3376112 - RNA, 20 nt, Human
auuuaaaauagcaaaagaag

SEQ ID NO: 3376113 - RNA, 16 nt, Human
auuuaaaaugauuaga

SEQ ID NO: 3376114 - RNA, 19 nt, Human
auuuaaacaauaaaugugc

SEQ ID NO: 3376115 - RNA, 13 nt, Human
auuuaaacacaca

SEQ ID NO: 3376116 - RNA, 15 nt, Human
auuuaaacacacaga

SEQ ID NO: 3376117 - RNA, 18 nt, Human
auuuaaacacauuaaagg

SEQ ID NO: 3376118 - RNA, 20 nt, Human
auuuaaacagcaguguuccc

SEQ ID NO: 3376119 - RNA, 17 nt, Human
auuuaaacaggcccagc

SEQ ID NO: 3376120 - RNA, 18 nt, Human
auuuaaacccauuuuagu

SEQ ID NO: 3376121 - RNA, 18 nt, Human
auuuaaaccgcuaaaaga

SEQ ID NO: 3376122 - RNA, 24 nt, Human
auuuaaaccgcuaaaagaaacuuu

SEQ ID NO: 3376123 - RNA, 20 nt, Human
auuuaaaccuuuuauuauaa

SEQ ID NO: 3376124 - RNA, 23 nt, Human
auuuaaacucugaauuuaucuuu

SEQ ID NO: 3376125 - RNA, 23 nt, Human
auuuaaagaaauauguauucugu

SEQ ID NO: 3376126 - RNA, 16 nt, Human
auuuaaagacaaagac

SEQ ID NO: 3376127 - RNA, 13 nt, Human
auuuaaagauauu

SEQ ID NO: 3376128 - RNA, 12 nt, Human
auuuaaagcagg

SEQ ID NO: 3376129 - RNA, 15 nt, Human
auuuaaagcagguuc

SEQ ID NO: 3376130 - RNA, 19 nt, Human
auuuaaagcuuauuaaaac

SEQ ID NO: 3376131 - RNA, 19 nt, Human
auuuaaaggcuaccuuauu

SEQ ID NO: 3376132 - RNA, 22 nt, Human
auuuaaaggcuaccuuauugua

SEQ ID NO: 3376133 - RNA, 22 nt, Human
auuuaaaguuguuugugccuuu

SEQ ID NO: 3376134 - RNA, 21 nt, Human
auuuaaauacagucuuccauu

SEQ ID NO: 3376135 - RNA, 14 nt, Human
auuuaaauagauga

SEQ ID NO: 3376136 - RNA, 15 nt, Human
auuuaaauagaugac

SEQ ID NO: 3376137 - RNA, 16 nt, Human
auuuaaauagcuuuuu

SEQ ID NO: 3376138 - RNA, 15 nt, Human
auuuaaauauaauuc

SEQ ID NO: 3376139 - RNA, 22 nt, Human
auuuaaauauaauucuguaaau

SEQ ID NO: 3376140 - RNA, 20 nt, Human
auuuaaauccugaagagcau

SEQ ID NO: 3376141 - RNA, 17 nt, Human
auuuaaaugaaagaaaa

SEQ ID NO: 3376142 - RNA, 13 nt, Human
auuuaaaugccau

SEQ ID NO: 3376143 - RNA, 15 nt, Human
auuuaaauguguaca

SEQ ID NO: 3376144 - RNA, 23 nt, Human
auuuaaauguuaugacuauguaa

SEQ ID NO: 3376145 - RNA, 19 nt, Human
auuuaaauucuuuuuuaaa

SEQ ID NO: 3376146 - RNA, 16 nt, Human
auuuaaauuuaaagau

SEQ ID NO: 3376147 - RNA, 19 nt, Human
auuuaaauuuuacccuuua

SEQ ID NO: 3376148 - RNA, 20 nt, Human
auuuaacaaaaagugcuuca

SEQ ID NO: 3376149 - RNA, 16 nt, Human
auuuaacagaaaugua

SEQ ID NO: 3376150 - RNA, 17 nt, Human
auuuaacagaaauguac

SEQ ID NO: 3376151 - RNA, 17 nt, Human
auuuaacagaaauugua

SEQ ID NO: 3376152 - RNA, 20 nt, Human
auuuaacagaaauuguauau

SEQ ID NO: 3376153 - RNA, 22 nt, Human
auuuaacagaaauuguauauug

SEQ ID NO: 3376154 - RNA, 15 nt, Human
auuuaacagucauuu

SEQ ID NO: 3376155 - RNA, 17 nt, Human
auuuaacauuauuuaua

SEQ ID NO: 3376156 - RNA, 20 nt, Human
auuuaaccccccuguacaca

SEQ ID NO: 3376157 - RNA, 16 nt, Human
auuuaaccucuaaauu

SEQ ID NO: 3376158 - RNA, 18 nt, Human
auuuaaccucuaaauucu

SEQ ID NO: 3376159 - RNA, 13 nt, Human
auuuaacugacua

SEQ ID NO: 3376160 - RNA, 13 nt, Human
auuuaacuggcuu

SEQ ID NO: 3376161 - RNA, 21 nt, Human
cagccacuccccuccacucuc

SEQ ID NO: 3376162 - RNA, 18 nt, Human
cagccagaacucuguguc

SEQ ID NO: 3376163 - RNA, 14 nt, Human
cagccagacuggca

SEQ ID NO: 3376164 - RNA, 20 nt, Human
cagccagacuggcacaguuu

SEQ ID NO: 3376165 - RNA, 20 nt, Human
cagccagaguuccugcggag

SEQ ID NO: 3376166 - RNA, 17 nt, Human
cagccagauccucuugg

SEQ ID NO: 3376167 - RNA, 22 nt, Human
cagccagauggacuccagccug

SEQ ID NO: 3376168 - RNA, 13 nt, Human
cagccagcaauga

SEQ ID NO: 3376169 - RNA, 20 nt, Human
cagccagcaaugauguccag

SEQ ID NO: 3376170 - RNA, 11 nt, Human
cagccagcagc

SEQ ID NO: 3376171 - RNA, 21 nt, Human
cagccagcagccagcucucag

SEQ ID NO: 3376172 - RNA, 15 nt, Human
cagccagcaguucag

SEQ ID NO: 3376173 - RNA, 22 nt, Human
cagccagcaguucagagcugcc

SEQ ID NO: 3376174 - RNA, 17 nt, Human
cagccagcaucugggcc

SEQ ID NO: 3376175 - RNA, 12 nt, Human
cagccagccacu

SEQ ID NO: 3376176 - RNA, 18 nt, Human
cagccagcccugccugga

SEQ ID NO: 3376177 - RNA, 19 nt, Human
cagccagcccugccuggag

SEQ ID NO: 3376178 - RNA, 21 nt, Human
cagccagcccugccuggagga

SEQ ID NO: 3376179 - RNA, 22 nt, Human
cagccagcccugccuggaggac

SEQ ID NO: 3376180 - RNA, 17 nt, Human
cagccagcgccucccuc

SEQ ID NO: 3376181 - RNA, 23 nt, Human
cagccagcgccucccuccacccc

SEQ ID NO: 3376182 - RNA, 22 nt, Human
cagccagcgucggucugugccc

SEQ ID NO: 3376183 - RNA, 16 nt, Human
cagccagcucucagcc

SEQ ID NO: 3376184 - RNA, 12 nt, Human
cagccagcugcc

SEQ ID NO: 3376185 - RNA, 15 nt, Human
cagccagcugcccua

SEQ ID NO: 3376186 - RNA, 18 nt, Human
cagccaggagagcuuagg

SEQ ID NO: 3376187 - RNA, 14 nt, Human
cagccaggagcugg

SEQ ID NO: 3376188 - RNA, 22 nt, Human
cagccaggccacaagacccuug

SEQ ID NO: 3376189 - RNA, 18 nt, Human
cagccaggcucugugcug

SEQ ID NO: 3376190 - RNA, 12 nt, Human
cagccaggcugc

SEQ ID NO: 3376191 - RNA, 16 nt, Human
cagccagggagagccc

SEQ ID NO: 3376192 - RNA, 18 nt, Human
cagccagggagagcccag

SEQ ID NO: 3376193 - RNA, 19 nt, Human
cagccagggagagcccagg

SEQ ID NO: 3376194 - RNA, 22 nt, Human
cagccagggagagcccaggagc

SEQ ID NO: 3376195 - RNA, 21 nt, Human
cagccagggccugcgagggca

SEQ ID NO: 3376196 - RNA, 16 nt, Human
cagccagggcucaauc

SEQ ID NO: 3376197 - RNA, 16 nt, Human
cagccagggcugcuag

SEQ ID NO: 3376198 - RNA, 23 nt, Human
cagccaggggagcagaggggcag

SEQ ID NO: 3376199 - RNA, 13 nt, Human
cagccaggugccu

SEQ ID NO: 3376200 - RNA, 15 nt, Human
cagccaggugccuug

SEQ ID NO: 3376201 - RNA, 21 nt, Human
cagccagugaccugaggaagc

SEQ ID NO: 3376202 - RNA, 15 nt, Human
cagccaguucaaaaa

SEQ ID NO: 3376203 - RNA, 21 nt, Human
cagccauacuuaucucucugu

SEQ ID NO: 3376204 - RNA, 17 nt, Human
caggagaggagagccag

SEQ ID NO: 3376205 - RNA, 12 nt, Human
caggagaggagc

SEQ ID NO: 3376206 - RNA, 22 nt, Human
caggagaucgagaccauccugg

SEQ ID NO: 3376207 - RNA, 17 nt, Human
caggagaugcugugccc

SEQ ID NO: 3376208 - RNA, 16 nt, Human
caggagauugagaagg

SEQ ID NO: 3376209 - RNA, 22 nt, Human
caggagauugagaaggagagaa

SEQ ID NO: 3376210 - RNA, 22 nt, Human
caggagcaaauguuucugcagu

SEQ ID NO: 3376211 - RNA, 18 nt, Human
caggagcacaggcagcug

SEQ ID NO: 3376212 - RNA, 12 nt, Human
caggagcagcca

SEQ ID NO: 3376213 - RNA, 13 nt, Human
caggagcagccac

SEQ ID NO: 3376214 - RNA, 20 nt, Human
caggagcagccucagaacaa

SEQ ID NO: 3376215 - RNA, 11 nt, Human
caggagcccau

SEQ ID NO: 3376216 - RNA, 18 nt, Human
caggagccccgaggccuu

SEQ ID NO: 3376217 - RNA, 11 nt, Human
caggagcccug

SEQ ID NO: 3376218 - RNA, 14 nt, Human
caggagccuccugc

SEQ ID NO: 3376219 - RNA, 11 nt, Human
caggagccugg

SEQ ID NO: 3376220 - RNA, 16 nt, Human
caggagcgcaagauag

SEQ ID NO: 3376221 - RNA, 14 nt, Human
caggagcuccccuc

SEQ ID NO: 3376222 - RNA, 22 nt, Human
caggagcuccccuccccaacug

SEQ ID NO: 3376223 - RNA, 20 nt, Human
caggagcucuucaggccucc

SEQ ID NO: 3376224 - RNA, 23 nt, Human
caggagcuuccuguccucccagc

SEQ ID NO: 3376225 - RNA, 23 nt, Human
caggaggaaucaugucaggccug

SEQ ID NO: 3376226 - RNA, 17 nt, Human
caggaggacccagggcu

SEQ ID NO: 3376227 - RNA, 14 nt, Human
caggaggcagaagg

SEQ ID NO: 3376228 - RNA, 15 nt, Human
caggaggcaggaccu

SEQ ID NO: 3376229 - RNA, 12 nt, Human
caggaggcaggc

SEQ ID NO: 3376230 - RNA, 23 nt, Human
caggaggcaggcauggcccuggg

SEQ ID NO: 3376231 - RNA, 14 nt, Human
caggaggcaggguu

SEQ ID NO: 3376232 - RNA, 15 nt, Human
caggaggccagccuu

SEQ ID NO: 3376233 - RNA, 14 nt, Human
caggaggccccugg

SEQ ID NO: 3376234 - RNA, 16 nt, Human
caggaggccccuggcc

SEQ ID NO: 3376235 - RNA, 19 nt, Human
caggaggccccuggcccag

SEQ ID NO: 3376236 - RNA, 19 nt, Human
caggaggccggggccgggu

SEQ ID NO: 3376237 - RNA, 14 nt, Human
caggaggccuagga

SEQ ID NO: 3376238 - RNA, 13 nt, Human
caggaggcgcccu

SEQ ID NO: 3376239 - RNA, 15 nt, Human
caggaggcugaggca

SEQ ID NO: 3376240 - RNA, 13 nt, Human
caggaggcuggag

SEQ ID NO: 3376241 - RNA, 19 nt, Human
caggagggacaaaggagcc

SEQ ID NO: 3376242 - RNA, 20 nt, Human
caggagggacagucucacca

SEQ ID NO: 3376243 - RNA, 15 nt, Human
caggagggaggcagg

SEQ ID NO: 3376244 - RNA, 21 nt, Human
caggagggaggcaggggaggg

SEQ ID NO: 3376245 - RNA, 15 nt, Human
caggagggaggggga

SEQ ID NO: 3376246 - RNA, 23 nt, Human
caggagggagggggaaggcaggg

SEQ ID NO: 3376247 - RNA, 12 nt, Human
caggagggcccu

SEQ ID NO: 3376248 - RNA, 22 nt, Human
caggagggcggccuccuucuga

SEQ ID NO: 3376249 - RNA, 19 nt, Human
caggaggggaacacugccc

SEQ ID NO: 3376250 - RNA, 23 nt, Human
caggaggggggagggaagggagc

SEQ ID NO: 3376251 - RNA, 19 nt, Human
caggagggggucguggaga

SEQ ID NO: 3376252 - RNA, 20 nt, Human
caggagggucuauggggaga

SEQ ID NO: 3376253 - RNA, 20 nt, Human
caggaggugccacuggagug

SEQ ID NO: 3376254 - RNA, 19 nt, Human
caggagguggagguugcag

SEQ ID NO: 3376255 - RNA, 22 nt, Human
caggagguggcuauggccaccc

SEQ ID NO: 3376256 - RNA, 13 nt, Human
caggaguagcuga

SEQ ID NO: 3376257 - RNA, 14 nt, Human
caggaguagcugag

SEQ ID NO: 3376258 - RNA, 15 nt, Human
caggaguagugaaga

SEQ ID NO: 3376259 - RNA, 23 nt, Human
caggaguagugaagacuccagaa

SEQ ID NO: 3376260 - RNA, 19 nt, Human
caggaguccaagaccagac

SEQ ID NO: 3376261 - RNA, 14 nt, Human
caggagucccugcc

SEQ ID NO: 3376262 - RNA, 14 nt, Human
caggaguggguggg

SEQ ID NO: 3376263 - RNA, 17 nt, Human
caggaguggguugauuu

SEQ ID NO: 3376264 - RNA, 13 nt, Human
caggagugugugu

SEQ ID NO: 3376265 - RNA, 19 nt, Human
caggaguuagaggccagcc

SEQ ID NO: 3376266 - RNA, 21 nt, Human
caggaguucgagaccagccug

SEQ ID NO: 3376267 - RNA, 18 nt, Human
caggaguucgaggcugca

SEQ ID NO: 3376268 - RNA, 20 nt, Human
caggaguucugcucauucua

SEQ ID NO: 3376269 - RNA, 22 nt, Human
caggaguuuaagaccagccugg

SEQ ID NO: 3376270 - RNA, 21 nt, Human
caggaguuugaggcugcagcg

SEQ ID NO: 3376271 - RNA, 22 nt, Human
caggaguuugaggcugcagcga

SEQ ID NO: 3376272 - RNA, 16 nt, Human
caggaguuuggccaga

SEQ ID NO: 3376273 - RNA, 18 nt, Human
caggauacuggcacagag

SEQ ID NO: 3376274 - RNA, 19 nt, Human
caggauagagacuggaaca

SEQ ID NO: 3376275 - RNA, 19 nt, Human
caggaucaugguguaauaa

SEQ ID NO: 3376276 - RNA, 16 nt, Human
caggaucccaggggcc

SEQ ID NO: 3376277 - RNA, 21 nt, Human
caggaucccaggggcccaagg

SEQ ID NO: 3376278 - RNA, 22 nt, Human
caggaucccaggggcccaaggc

SEQ ID NO: 3376279 - RNA, 21 nt, Human
caggauccuauucucaccagg

SEQ ID NO: 3376280 - RNA, 20 nt, Human
caggauccucuccuuugaaa

SEQ ID NO: 3376281 - RNA, 19 nt, Human
caggaucucagaucacugc

SEQ ID NO: 3376282 - RNA, 23 nt, Human
caggaucucuuagcauuuuaauu

SEQ ID NO: 3376283 - RNA, 15 nt, Human
caggaugaacccagg

SEQ ID NO: 3376284 - RNA, 16 nt, Human
caggaugaacccagga

SEQ ID NO: 3376285 - RNA, 17 nt, Human
caggaugaacccaggac

SEQ ID NO: 3376286 - RNA, 15 nt, Human
caggaugaagcauuu

SEQ ID NO: 3376287 - RNA, 15 nt, Human
caggaugacccugcg

SEQ ID NO: 3376288 - RNA, 21 nt, Human
caggaugacgguauuaugcuu

SEQ ID NO: 3376289 - RNA, 18 nt, Human
caggaugagggaaaagaa

SEQ ID NO: 3376290 - RNA, 22 nt, Human
caggaugagggaaaagaaaaag

SEQ ID NO: 3376291 - RNA, 14 nt, Human
caggaugcccaggg

SEQ ID NO: 3376292 - RNA, 23 nt, Human
caggaugcuaacaucuaaaaaua

SEQ ID NO: 3376293 - RNA, 16 nt, Human
caggaugcuggguggc

SEQ ID NO: 3376294 - RNA, 21 nt, Human
caggauggaggggugguccug

SEQ ID NO: 3376295 - RNA, 23 nt, Human
caggauggaggggugguccugac

SEQ ID NO: 3376296 - RNA, 15 nt, Human
caggauggccuggcc

SEQ ID NO: 3376297 - RNA, 14 nt, Human
caggaugguaauuc

SEQ ID NO: 3376298 - RNA, 23 nt, Human
caggaugguucccuugaugaaga

SEQ ID NO: 3376299 - RNA, 21 nt, Human
caggauguggcuuaugagaua

SEQ ID NO: 3376300 - RNA, 20 nt, Human
caggauguguuugcuuucug

SEQ ID NO: 3376301 - RNA, 15 nt, Human
caggauucagccgga

SEQ ID NO: 3376302 - RNA, 14 nt, Human
caggauucuccuuu

SEQ ID NO: 3376303 - RNA, 13 nt, Human
caggauugaagag

SEQ ID NO: 3376304 - RNA, 18 nt, Human
caggauugcgagagaugu

SEQ ID NO: 3376305 - RNA, 20 nt, Human
caggauugcgagagaugugu

SEQ ID NO: 3376306 - RNA, 22 nt, Human
caggauugcgagagaugugugu

SEQ ID NO: 3376307 - RNA, 17 nt, Human
caggauuugcugggaga

SEQ ID NO: 3376308 - RNA, 14 nt, Human
caggcaaaauccuu

SEQ ID NO: 3376309 - RNA, 16 nt, Human
caggcaaauaaaauuc

SEQ ID NO: 3376310 - RNA, 22 nt, Human
caggcaacgcacaaaacagaaa

SEQ ID NO: 3376311 - RNA, 20 nt, Human
caggcaacugaggcagacag

SEQ ID NO: 3376312 - RNA, 22 nt, Human
caggcaacuucaguccugggag

SEQ ID NO: 3376313 - RNA, 16 nt, Human
caggcaagcaccuccu

SEQ ID NO: 3376314 - RNA, 13 nt, Human
caggcaaggcugu

SEQ ID NO: 3376315 - RNA, 18 nt, Human
caggcaagugaagaaaag

SEQ ID NO: 3376316 - RNA, 15 nt, Human
caggcaaugcuggcu

SEQ ID NO: 3376317 - RNA, 16 nt, Human
caggcaaugcuggcug

SEQ ID NO: 3376318 - RNA, 23 nt, Human
caggcacacaaggggcccuugga

SEQ ID NO: 3376319 - RNA, 13 nt, Human
caggcacacagcu

SEQ ID NO: 3376320 - RNA, 13 nt, Human
auuuauauguaug

SEQ ID NO: 3376321 - RNA, 16 nt, Human
auuuauauguaugugu

SEQ ID NO: 3376322 - RNA, 13 nt, Human
auuuauauugaua

SEQ ID NO: 3376323 - RNA, 22 nt, Human
auuuauauugauaagaucuuuu

SEQ ID NO: 3376324 - RNA, 20 nt, Human
auuuauauuguaaauauugu

SEQ ID NO: 3376325 - RNA, 13 nt, Human
auuuauauuuuug

SEQ ID NO: 3376326 - RNA, 22 nt, Human
auuuaucaaagcauagauguuu

SEQ ID NO: 3376327 - RNA, 12 nt, Human
auuuaucaaauc

SEQ ID NO: 3376328 - RNA, 17 nt, Human
auuuaucaaucaguaua

SEQ ID NO: 3376329 - RNA, 18 nt, Human
auuuaucaaucaguauaa

SEQ ID NO: 3376330 - RNA, 13 nt, Human
auuuaucauucuu

SEQ ID NO: 3376331 - RNA, 22 nt, Human
auuuauccagaaaacugugauu

SEQ ID NO: 3376332 - RNA, 15 nt, Human
auuuauccauuugua

SEQ ID NO: 3376333 - RNA, 13 nt, Human
auuuaucuaaauu

SEQ ID NO: 3376334 - RNA, 10 nt, Human
auuuaucuau

SEQ ID NO: 3376335 - RNA, 17 nt, Human
auuuaucuauuguaaga

SEQ ID NO: 3376336 - RNA, 23 nt, Human
auuuaucuauuguaagauaaaaa

SEQ ID NO: 3376337 - RNA, 19 nt, Human
auuuaucuugaaggaaaaa

SEQ ID NO: 3376338 - RNA, 19 nt, Human
auuuaucuugucucugggc

SEQ ID NO: 3376339 - RNA, 22 nt, Human
auuuaucuuuacuuuuaaacag

SEQ ID NO: 3376340 - RNA, 13 nt, Human
auuuaugaaaaga

SEQ ID NO: 3376341 - RNA, 16 nt, Human
auuuaugaagaaaaua

SEQ ID NO: 3376342 - RNA, 20 nt, Human
auuuaugaguaacuauuauu

SEQ ID NO: 3376343 - RNA, 15 nt, Human
auuuaugaguuuuug

SEQ ID NO: 3376344 - RNA, 19 nt, Human
auuuaugauuuaauaaaau

SEQ ID NO: 3376345 - RNA, 19 nt, Human
auuuaugcacuuauaaggu

SEQ ID NO: 3376346 - RNA, 16 nt, Human
auuuaugcauauuauu

SEQ ID NO: 3376347 - RNA, 15 nt, Human
auuuaugggccccug

SEQ ID NO: 3376348 - RNA, 21 nt, Human
cagccucucagugcccuccag

SEQ ID NO: 3376349 - RNA, 16 nt, Human
cagccucuccccaggu

SEQ ID NO: 3376350 - RNA, 20 nt, Human
cagccucuccccagguccag

SEQ ID NO: 3376351 - RNA, 18 nt, Human
cagccucuccccugccug

SEQ ID NO: 3376352 - RNA, 12 nt, Human
cagccucucucc

SEQ ID NO: 3376353 - RNA, 17 nt, Human
cagccucucuuccuauc

SEQ ID NO: 3376354 - RNA, 20 nt, Human
cagccucucuuccuauccca

SEQ ID NO: 3376355 - RNA, 22 nt, Human
cagccucucuugguuuccuucc

SEQ ID NO: 3376356 - RNA, 17 nt, Human
cagccucugaaaaccaa

SEQ ID NO: 3376357 - RNA, 12 nt, Human
cagccucugaag

SEQ ID NO: 3376358 - RNA, 20 nt, Human
cagccucugaccccuccuca

SEQ ID NO: 3376359 - RNA, 23 nt, Human
cagccucugaccccuccucacug

SEQ ID NO: 3376360 - RNA, 18 nt, Human
cagccucugagccccugg

SEQ ID NO: 3376361 - RNA, 13 nt, Human
cagccucuggcau

SEQ ID NO: 3376362 - RNA, 22 nt, Human
cagccucugggggguggccagg

SEQ ID NO: 3376363 - RNA, 11 nt, Human
cagccucuuaa

SEQ ID NO: 3376364 - RNA, 21 nt, Human
cagccucuuaaagcugccugu

SEQ ID NO: 3376365 - RNA, 20 nt, Human
cagccucuuucccuuccagu

SEQ ID NO: 3376366 - RNA, 16 nt, Human
cagccucuuucugucc

SEQ ID NO: 3376367 - RNA, 18 nt, Human
cagccugagcgacaguga

SEQ ID NO: 3376368 - RNA, 23 nt, Human
cagccugaggcagccacuucggc

SEQ ID NO: 3376369 - RNA, 18 nt, Human
cagccugaggcugagacu

SEQ ID NO: 3376370 - RNA, 15 nt, Human
cagccugagucuccu

SEQ ID NO: 3376371 - RNA, 22 nt, Human
cagccugagucuccugugccca

SEQ ID NO: 3376372 - RNA, 14 nt, Human
cagccugcguggcu

SEQ ID NO: 3376373 - RNA, 15 nt, Human
cagccugcguggcug

SEQ ID NO: 3376374 - RNA, 19 nt, Human
cagccugcguggcugaccc

SEQ ID NO: 3376375 - RNA, 23 nt, Human
cagccugcguggcugaccccccu

SEQ ID NO: 3376376 - RNA, 23 nt, Human
cagccugcuagcuagcucaacua

SEQ ID NO: 3376377 - RNA, 20 nt, Human
cagccugcuccuucccagga

SEQ ID NO: 3376378 - RNA, 21 nt, Human
cagccugcuccuucccaggag

SEQ ID NO: 3376379 - RNA, 22 nt, Human
cagccugcuccuucccaggagu

SEQ ID NO: 3376380 - RNA, 23 nt, Human
cagccugcuucccaccucccugc

SEQ ID NO: 3376381 - RNA, 15 nt, Human
cagccuggaccccca

SEQ ID NO: 3376382 - RNA, 16 nt, Human
cagccuggacccccag

SEQ ID NO: 3376383 - RNA, 16 nt, Human
cagccuggagaugaaa

SEQ ID NO: 3376384 - RNA, 16 nt, Human
cagccuggaugccauc

SEQ ID NO: 3376385 - RNA, 19 nt, Human
cagccuggccacgcagcca

SEQ ID NO: 3376386 - RNA, 20 nt, Human
cagccuggccacgcagccag

SEQ ID NO: 3376387 - RNA, 15 nt, Human
cagccuggcccagcu

SEQ ID NO: 3376388 - RNA, 19 nt, Human
cagccuggcccagcucccc

SEQ ID NO: 3376389 - RNA, 14 nt, Human
cagccuggccuccu

SEQ ID NO: 3376390 - RNA, 18 nt, Human
cagccuggccuccugccu

SEQ ID NO: 3376391 - RNA, 12 nt, Human
cagccuggcucc

SEQ ID NO: 3376392 - RNA, 23 nt, Human
cagccuggcucccacaggcagcu

SEQ ID NO: 3376393 - RNA, 14 nt, Human
cagccuggcuggga

SEQ ID NO: 3376394 - RNA, 15 nt, Human
cagccuggcuucugg

SEQ ID NO: 3376395 - RNA, 20 nt, Human
cagccugggaaagccccugc

SEQ ID NO: 3376396 - RNA, 23 nt, Human
cagccugggacaguuuaucauga

SEQ ID NO: 3376397 - RNA, 16 nt, Human
cagccugggaggcaca

SEQ ID NO: 3376398 - RNA, 20 nt, Human
cagccugggcaacacagcga

SEQ ID NO: 3376399 - RNA, 12 nt, Human
cagccugggccc

SEQ ID NO: 3376400 - RNA, 18 nt, Human
cagccugggcccaucucc

SEQ ID NO: 3376401 - RNA, 13 nt, Human
cagccugggccua

SEQ ID NO: 3376402 - RNA, 20 nt, Human
cagccugggccuauggagag

SEQ ID NO: 3376403 - RNA, 15 nt, Human
cagccugggcgcugg

SEQ ID NO: 3376404 - RNA, 23 nt, Human
cagccugggcgcugguccuuucu

SEQ ID NO: 3376405 - RNA, 15 nt, Human
cagccuggggccugg

SEQ ID NO: 3376406 - RNA, 19 nt, Human
cagccuggggccuggcagg

SEQ ID NO: 3376407 - RNA, 20 nt, Human
cagccuggggccuggcaggg

SEQ ID NO: 3376408 - RNA, 22 nt, Human
cagccuggggccuggcagggag

SEQ ID NO: 3376409 - RNA, 20 nt, Human
cagccuggucaacaugguga

SEQ ID NO: 3376410 - RNA, 23 nt, Human
cagccugguccaugcagggggcu

SEQ ID NO: 3376411 - RNA, 15 nt, Human
cagccuggugggccu

SEQ ID NO: 3376412 - RNA, 17 nt, Human
cagccuggugggccucc

SEQ ID NO: 3376413 - RNA, 18 nt, Human
cagccuggugggccuccu

SEQ ID NO: 3376414 - RNA, 21 nt, Human
cagccugucagauccaggagc

SEQ ID NO: 3376415 - RNA, 15 nt, Human
cagccuguccugggc

SEQ ID NO: 3376416 - RNA, 19 nt, Human
cagccuguccugggcuggu

SEQ ID NO: 3376417 - RNA, 16 nt, Human
cagccugucucuucca

SEQ ID NO: 3376418 - RNA, 17 nt, Human
cagccugucucuuccau

SEQ ID NO: 3376419 - RNA, 12 nt, Human
cagccuguggca

SEQ ID NO: 3376420 - RNA, 15 nt, Human
cagccuguggcaucu

SEQ ID NO: 3376421 - RNA, 19 nt, Human
cagccuguggcaucuuugc

SEQ ID NO: 3376422 - RNA, 20 nt, Human
cagccuguggcggugccugg

SEQ ID NO: 3376423 - RNA, 23 nt, Human
cagccugugucuuuaaaugcugc

SEQ ID NO: 3376424 - RNA, 14 nt, Human
cagccuuaauauuu

SEQ ID NO: 3376425 - RNA, 19 nt, Human
cagccuuagcucucccaac

SEQ ID NO: 3376426 - RNA, 21 nt, Human
cagccuuagcucucccaacuc

SEQ ID NO: 3376427 - RNA, 21 nt, Human
cagccuuccccuugcccaggg

SEQ ID NO: 3376428 - RNA, 15 nt, Human
cagccuuccucugca

SEQ ID NO: 3376429 - RNA, 16 nt, Human
cagccuucuuccaucc

SEQ ID NO: 3376430 - RNA, 21 nt, Human
cagccuucuuccaucccagga

SEQ ID NO: 3376431 - RNA, 14 nt, Human
cagccuucuuugcu

SEQ ID NO: 3376432 - RNA, 21 nt, Human
cagccuucuuugcuugccucu

SEQ ID NO: 3376433 - RNA, 18 nt, Human
cagccuugaacucugggc

SEQ ID NO: 3376434 - RNA, 17 nt, Human
cagccuugaccauucuc

SEQ ID NO: 3376435 - RNA, 23 nt, Human
cagccuugaccauucuccaccug

SEQ ID NO: 3376436 - RNA, 16 nt, Human
cagccuugccagagau

SEQ ID NO: 3376437 - RNA, 18 nt, Human
cagccuuucucccaggcc

SEQ ID NO: 3376438 - RNA, 18 nt, Human
cagccuuuggccuuggcu

SEQ ID NO: 3376439 - RNA, 14 nt, Human
cagccuuugggaaa

SEQ ID NO: 3376440 - RNA, 14 nt, Human
cagccuuuguuccc

SEQ ID NO: 3376441 - RNA, 15 nt, Human
cagccuuuguucccc

SEQ ID NO: 3376442 - RNA, 20 nt, Human
cagccuuuguuccccacugg

SEQ ID NO: 3376443 - RNA, 21 nt, Human
cagccuuuguuccccacugga

SEQ ID NO: 3376444 - RNA, 18 nt, Human
cagccuuuuuguuucaau

SEQ ID NO: 3376445 - RNA, 22 nt, Human
cagcgaaguagcuugcucccug

SEQ ID NO: 3376446 - RNA, 13 nt, Human
cagcgaaugacaa

SEQ ID NO: 3376447 - RNA, 20 nt, Human
cagcgaccaccccugccucc

SEQ ID NO: 3376448 - RNA, 21 nt, Human
cagcgaccaccccugccucca

SEQ ID NO: 3376449 - RNA, 17 nt, Human
cagcgaccgcccccucc

SEQ ID NO: 3376450 - RNA, 18 nt, Human
cagcgaccuuccucaucc

SEQ ID NO: 3376451 - RNA, 21 nt, Human
cagcgacuccguuggccacuc

SEQ ID NO: 3376452 - RNA, 22 nt, Human
cagcgacuccguuggccacucc

SEQ ID NO: 3376453 - RNA, 20 nt, Human
cagcgagaggcagagaaaga

SEQ ID NO: 3376454 - RNA, 20 nt, Human
cagcgagcccugguggcagu

SEQ ID NO: 3376455 - RNA, 14 nt, Human
cagcgagccugcua

SEQ ID NO: 3376456 - RNA, 17 nt, Human
cagcgaggaggcuccag

SEQ ID NO: 3376457 - RNA, 18 nt, Human
cagcgagggcagcugcua

SEQ ID NO: 3376458 - RNA, 21 nt, Human
cagcgauucccucucccaggc

SEQ ID NO: 3376459 - RNA, 13 nt, Human
cagcgcacagcug

SEQ ID NO: 3376460 - RNA, 14 nt, Human
cagcgcacagcugc

SEQ ID NO: 3376461 - RNA, 17 nt, Human
cagcgccaagcaaccug

SEQ ID NO: 3376462 - RNA, 18 nt, Human
cagcgccaagugcgugcc

SEQ ID NO: 3376463 - RNA, 14 nt, Human
cagcgccagccugu

SEQ ID NO: 3376464 - RNA, 12 nt, Human
cagcgccaggcu

SEQ ID NO: 3376465 - RNA, 21 nt, Human
cagcgccaggcugaccacagc

SEQ ID NO: 3376466 - RNA, 22 nt, Human
cagcgccaggcugaccacagca

SEQ ID NO: 3376467 - RNA, 16 nt, Human
cagcgcccgcugggcu

SEQ ID NO: 3376468 - RNA, 17 nt, Human
cagcgcccgcugggcug

SEQ ID NO: 3376469 - RNA, 14 nt, Human
cagcgcccuuccuc

SEQ ID NO: 3376470 - RNA, 16 nt, Human
cagcgcccuuccucuc

SEQ ID NO: 3376471 - RNA, 20 nt, Human
cagcgcccuuccucuccacc

SEQ ID NO: 3376472 - RNA, 23 nt, Human
cagcgccuaguggggucucccuc

SEQ ID NO: 3376473 - RNA, 12 nt, Human
cagcgccucccu

SEQ ID NO: 3376474 - RNA, 15 nt, Human
cagcgccucccucca

SEQ ID NO: 3376475 - RNA, 20 nt, Human
cagcgcggacauccccugcu

SEQ ID NO: 3376476 - RNA, 17 nt, Human
cagcgcggcccucccga

SEQ ID NO: 3376477 - RNA, 12 nt, Human
cagcgcugacgu

SEQ ID NO: 3376478 - RNA, 24 nt, Human
cagcgcuggccgggaccccgagcc

SEQ ID NO: 3376479 - RNA, 20 nt, Human
caggcacaggaugcuguguu

SEQ ID NO: 3376480 - RNA, 14 nt, Human
caggcacaggcagg

SEQ ID NO: 3376481 - RNA, 19 nt, Human
caggcacaggcagggcagg

SEQ ID NO: 3376482 - RNA, 16 nt, Human
caggcaccaaaagaag

SEQ ID NO: 3376483 - RNA, 19 nt, Human
caggcaccaaaagaaguaa

SEQ ID NO: 3376484 - RNA, 18 nt, Human
caggcacccaccaucaug

SEQ ID NO: 3376485 - RNA, 16 nt, Human
caggcacccccuggag

SEQ ID NO: 3376486 - RNA, 17 nt, Human
caggcacccccuggaga

SEQ ID NO: 3376487 - RNA, 21 nt, Human
caggcacccccuggagagaag

SEQ ID NO: 3376488 - RNA, 23 nt, Human
caggcacccuucuuuccucuucc

SEQ ID NO: 3376489 - RNA, 19 nt, Human
caggcaccuagcaauucca

SEQ ID NO: 3376490 - RNA, 15 nt, Human
caggcaccucuuccu

SEQ ID NO: 3376491 - RNA, 19 nt, Human
auuuuaugcuuuaaacauu

SEQ ID NO: 3376492 - RNA, 14 nt, Human
auuuuauggugcau

SEQ ID NO: 3376493 - RNA, 22 nt, Human
auuuuauggugccuaguauuga

SEQ ID NO: 3376494 - RNA, 23 nt, Human
auuuuaugguuauguuuuucugu

SEQ ID NO: 3376495 - RNA, 16 nt, Human
auuuuauguauguuua

SEQ ID NO: 3376496 - RNA, 14 nt, Human
auuuuauguuauau

SEQ ID NO: 3376497 - RNA, 15 nt, Human
auuuuauguuauaua

SEQ ID NO: 3376498 - RNA, 23 nt, Human
auuuuauguuauauauaaauaua

SEQ ID NO: 3376499 - RNA, 14 nt, Human
auuuuauguugaca

SEQ ID NO: 3376500 - RNA, 20 nt, Human
auuuuauuacaucuuucaca

SEQ ID NO: 3376501 - RNA, 21 nt, Human
auuuuauuacuggcguggauu

SEQ ID NO: 3376502 - RNA, 16 nt, Human
auuuuauuacuguuua

SEQ ID NO: 3376503 - RNA, 13 nt, Human
auuuuauuaugaa

SEQ ID NO: 3376504 - RNA, 15 nt, Human
auuuuauuaugaaga

SEQ ID NO: 3376505 - RNA, 22 nt, Human
auuuuauuaugaagaaggugaa

SEQ ID NO: 3376506 - RNA, 13 nt, Human
auuuuauuaugca

SEQ ID NO: 3376507 - RNA, 14 nt, Human
auuuuauuaugcau

SEQ ID NO: 3376508 - RNA, 15 nt, Human
auuuuauuaugcaug

SEQ ID NO: 3376509 - RNA, 17 nt, Human
auuuuauuaugcaugaa

SEQ ID NO: 3376510 - RNA, 13 nt, Human
auuuuauuaugua

SEQ ID NO: 3376511 - RNA, 14 nt, Human
auuuuauuauguaa

SEQ ID NO: 3376512 - RNA, 14 nt, Human
auuuuauucaaggu

SEQ ID NO: 3376513 - RNA, 16 nt, Human
auuuuauucuugauca

SEQ ID NO: 3376514 - RNA, 18 nt, Human
auuuuauucuugaucagu

SEQ ID NO: 3376515 - RNA, 14 nt, Human
auuuuauuguaaca

SEQ ID NO: 3376516 - RNA, 15 nt, Human
auuuuauuguaacag

SEQ ID NO: 3376517 - RNA, 16 nt, Human
auuuuauuguaacaga

SEQ ID NO: 3376518 - RNA, 22 nt, Human
auuuuauuguaacagacauugu

SEQ ID NO: 3376519 - RNA, 18 nt, Human
auuuuauuucaauguaau

SEQ ID NO: 3376520 - RNA, 19 nt, Human
auuuuauuucaauguaauu

SEQ ID NO: 3376521 - RNA, 21 nt, Human
auuuuauuucaauguaauuaa

SEQ ID NO: 3376522 - RNA, 17 nt, Human
auuuuauuuguuuuuca

SEQ ID NO: 3376523 - RNA, 15 nt, Human
auuuuauuuuagcag

SEQ ID NO: 3376524 - RNA, 18 nt, Human
auuuuauuuuauuaugca

SEQ ID NO: 3376525 - RNA, 23 nt, Human
auuuuauuuugaaauggaaauua

SEQ ID NO: 3376526 - RNA, 23 nt, Human
auuuuauuuugugcucauuuaag

SEQ ID NO: 3376527 - RNA, 18 nt, Human
auuuuauuuuuagaauuu

SEQ ID NO: 3376528 - RNA, 22 nt, Human
auuuucaaaagcauuaauuuuu

SEQ ID NO: 3376529 - RNA, 21 nt, Human
auuuucaacauuucaaaauga

SEQ ID NO: 3376530 - RNA, 20 nt, Human
auuuucaacgcagcccugcu

SEQ ID NO: 3376531 - RNA, 23 nt, Human
auuuucaagaaacugaggaauuu

SEQ ID NO: 3376532 - RNA, 24 nt, Human
auuuucaagaauaaucacgcuuuc

SEQ ID NO: 3376533 - RNA, 20 nt, Human
auuuucaagcagcaucuucu

SEQ ID NO: 3376534 - RNA, 20 nt, Human
auuuucaaggcccucagcau

SEQ ID NO: 3376535 - RNA, 17 nt, Human
auuuucaauagccacua

SEQ ID NO: 3376536 - RNA, 14 nt, Human
auuuucaaugugau

SEQ ID NO: 3376537 - RNA, 20 nt, Human
auuuucacaaugucaguauu

SEQ ID NO: 3376538 - RNA, 15 nt, Human
auuuucacauaaaau

SEQ ID NO: 3376539 - RNA, 19 nt, Human
auuuucacauucuuggcuu

SEQ ID NO: 3376540 - RNA, 15 nt, Human
auuuucaccccaccc

SEQ ID NO: 3376541 - RNA, 13 nt, Human
auuuucacugugu

SEQ ID NO: 3376542 - RNA, 14 nt, Human
auuuucacuuugug

SEQ ID NO: 3376543 - RNA, 12 nt, Human
auuuucagaauc

SEQ ID NO: 3376544 - RNA, 20 nt, Human
auuuucagaaucugaaugua

SEQ ID NO: 3376545 - RNA, 22 nt, Human
auuuucagaaucugaauguaau

SEQ ID NO: 3376546 - RNA, 13 nt, Human
auuuucagauuca

SEQ ID NO: 3376547 - RNA, 13 nt, Human
auuuucagauuug

SEQ ID NO: 3376548 - RNA, 15 nt, Human
auuuucagauuugca

SEQ ID NO: 3376549 - RNA, 11 nt, Human
auuuucaguau

SEQ ID NO: 3376550 - RNA, 15 nt, Human
auuuucauaacuuau

SEQ ID NO: 3376551 - RNA, 19 nt, Human
auuuucauaacuuauugcu

SEQ ID NO: 3376552 - RNA, 22 nt, Human
auuuucauaacuuauugcugau

SEQ ID NO: 3376553 - RNA, 13 nt, Human
auuuucaugacuu

SEQ ID NO: 3376554 - RNA, 17 nt, Human
auuuucauguauaugug

SEQ ID NO: 3376555 - RNA, 11 nt, Human
auuuucauguu

SEQ ID NO: 3376556 - RNA, 15 nt, Human
auuuucauuacaaug

SEQ ID NO: 3376557 - RNA, 13 nt, Human
auuuucauuuguu

SEQ ID NO: 3376558 - RNA, 17 nt, Human
auuuucauuuucugcaa

SEQ ID NO: 3376559 - RNA, 23 nt, Human
auuuucauuuucugcaagccugc

SEQ ID NO: 3376560 - RNA, 14 nt, Human
auuuuccaaagagu

SEQ ID NO: 3376561 - RNA, 19 nt, Human
auuuuccaggacuguuuca

SEQ ID NO: 3376562 - RNA, 21 nt, Human
auuuuccaggcuucugcuggg

SEQ ID NO: 3376563 - RNA, 20 nt, Human
auuuuccaucuaaaaauaua

SEQ ID NO: 3376564 - RNA, 15 nt, Human
auuuuccaugaaaau

SEQ ID NO: 3376565 - RNA, 22 nt, Human
auuuucccaauagcacuuucau

SEQ ID NO: 3376566 - RNA, 20 nt, Human
auuuucccccacuacugcag

SEQ ID NO: 3376567 - RNA, 21 nt, Human
auuuucccccacuacugcagc

SEQ ID NO: 3376568 - RNA, 21 nt, Human
auuuuccccccacucucccca

SEQ ID NO: 3376569 - RNA, 22 nt, Human
auuuucccccuuuucugcauuu

SEQ ID NO: 3376570 - RNA, 19 nt, Human
auuuucccuauuagagaag

SEQ ID NO: 3376571 - RNA, 20 nt, Human
auuuuccuauauuacgguuu

SEQ ID NO: 3376572 - RNA, 12 nt, Human
auuuuccucuga

SEQ ID NO: 3376573 - RNA, 15 nt, Human
auuuuccucuuguga

SEQ ID NO: 3376574 - RNA, 13 nt, Human
auuuuccugaaaa

SEQ ID NO: 3376575 - RNA, 14 nt, Human
auuuuccugaaaac

SEQ ID NO: 3376576 - RNA, 18 nt, Human
auuuuccuggugccaauu

SEQ ID NO: 3376577 - RNA, 22 nt, Human
auuuuccuggugccaauuucaa

SEQ ID NO: 3376578 - RNA, 22 nt, Human
auuuuccuguccucuuucagcu

SEQ ID NO: 3376579 - RNA, 19 nt, Human
auuuuccuguugucaagaa

SEQ ID NO: 3376580 - RNA, 16 nt, Human
auuuuccuugaagccg

SEQ ID NO: 3376581 - RNA, 13 nt, Human
auuuuccuuuaau

SEQ ID NO: 3376582 - RNA, 14 nt, Human
auuuuccuuuucaa

SEQ ID NO: 3376583 - RNA, 18 nt, Human
auuuuccuuuuuuauaca

SEQ ID NO: 3376584 - RNA, 21 nt, Human
auuuuccuuuuuuauacacau

SEQ ID NO: 3376585 - RNA, 15 nt, Human
auuuucguaugaaaa

SEQ ID NO: 3376586 - RNA, 18 nt, Human
auuuucguaugaaaauga

SEQ ID NO: 3376587 - RNA, 14 nt, Human
auuuucuaaaaaag

SEQ ID NO: 3376588 - RNA, 19 nt, Human
auuuucuaaaagcuuucau

SEQ ID NO: 3376589 - RNA, 16 nt, Human
auuuucuaagaaacau

SEQ ID NO: 3376590 - RNA, 18 nt, Human
auuuucuagacuuucugu

SEQ ID NO: 3376591 - RNA, 16 nt, Human
auuuucuagauacaau

SEQ ID NO: 3376592 - RNA, 19 nt, Human
auuuucuagauacaauaaa

SEQ ID NO: 3376593 - RNA, 14 nt, Human
auuuucuauaauuu

SEQ ID NO: 3376594 - RNA, 15 nt, Human
auuuucuauaauuua

SEQ ID NO: 3376595 - RNA, 16 nt, Human
auuuucuauuuuaaga

SEQ ID NO: 3376596 - RNA, 23 nt, Human
auuuucuauuuuaagacugauuu

SEQ ID NO: 3376597 - RNA, 17 nt, Human
auuuucucccaggaagc

SEQ ID NO: 3376598 - RNA, 16 nt, Human
auuuucucuguacuuu

SEQ ID NO: 3376599 - RNA, 13 nt, Human
auuuucucuuaga

SEQ ID NO: 3376600 - RNA, 16 nt, Human
auuuucugcaucucca

SEQ ID NO: 3376601 - RNA, 15 nt, Human
auuuucugcuacuuu

SEQ ID NO: 3376602 - RNA, 18 nt, Human
auuuucugguagauagaa

SEQ ID NO: 3376603 - RNA, 20 nt, Human
auuuucugucagaugagaac

SEQ ID NO: 3376604 - RNA, 11 nt, Human
auuuucugugu

SEQ ID NO: 3376605 - RNA, 12 nt, Human
auuuucugugug

SEQ ID NO: 3376606 - RNA, 17 nt, Human
auuuucuguguguuccu

SEQ ID NO: 3376607 - RNA, 15 nt, Human
auuuucuuaaccagu

SEQ ID NO: 3376608 - RNA, 19 nt, Human
auuuucuuaucuucugcaa

SEQ ID NO: 3376609 - RNA, 17 nt, Human
auuuucuucaguuggug

SEQ ID NO: 3376610 - RNA, 21 nt, Human
auuuucuuccaagcaaaggug

SEQ ID NO: 3376611 - RNA, 16 nt, Human
auuuucuucuaaguga

SEQ ID NO: 3376612 - RNA, 19 nt, Human
auuuucuuuaaaagaaugg

SEQ ID NO: 3376613 - RNA, 18 nt, Human
auuuucuuuaaugcuuuu

SEQ ID NO: 3376614 - RNA, 19 nt, Human
auuuucuuuaaugcuuuua

SEQ ID NO: 3376615 - RNA, 14 nt, Human
auuuucuuucaaaa

SEQ ID NO: 3376616 - RNA, 21 nt, Human
auuuucuuucucuacuuugag

SEQ ID NO: 3376617 - RNA, 17 nt, Human
auuuugaaaaauuccua

SEQ ID NO: 3376618 - RNA, 14 nt, Human
auuuugaaaagcuu

SEQ ID NO: 3376619 - RNA, 16 nt, Human
auuuugaaaaguaaua

SEQ ID NO: 3376620 - RNA, 20 nt, Human
auuuugaaagucuguccuug

SEQ ID NO: 3376621 - RNA, 20 nt, Human
auuuugaaaucaugaagaua

SEQ ID NO: 3376622 - RNA, 15 nt, Human
auuuugaaauguggu

SEQ ID NO: 3376623 - RNA, 20 nt, Human
auuuugaaccugaugaaaau

SEQ ID NO: 3376624 - RNA, 12 nt, Human
auuuugaagcua

SEQ ID NO: 3376625 - RNA, 18 nt, Human
auuuugaagcuaauuauu

SEQ ID NO: 3376626 - RNA, 13 nt, Human
auuuugaagugcu

SEQ ID NO: 3376627 - RNA, 15 nt, Human
auuuugaaguuuaca

SEQ ID NO: 3376628 - RNA, 17 nt, Human
auuuugaaguuuacauu

SEQ ID NO: 3376629 - RNA, 20 nt, Human
auuuugaauaaauaaaugua

SEQ ID NO: 3376630 - RNA, 18 nt, Human
auuuugaaucaauaauau

SEQ ID NO: 3376631 - RNA, 18 nt, Human
auuuugacacugaaauaa

SEQ ID NO: 3376632 - RNA, 19 nt, Human
auuuugagaacaaagauga

SEQ ID NO: 3376633 - RNA, 22 nt, Human
auuuugagaaugcugacacuuu

SEQ ID NO: 3376634 - RNA, 13 nt, Human
auuuugagaugua

SEQ ID NO: 3376635 - RNA, 17 nt, Human
auuuugagguaaagaua

SEQ ID NO: 3376636 - RNA, 16 nt, Human
caggaaaagcugcuga

SEQ ID NO: 3376637 - RNA, 18 nt, Human
caggaaaagcugcugaca

SEQ ID NO: 3376638 - RNA, 20 nt, Human
caggaaaagcugcugacagu

SEQ ID NO: 3376639 - RNA, 13 nt, Human
caggaaaaggccu

SEQ ID NO: 3376640 - RNA, 13 nt, Human
caggaaaauugaa

SEQ ID NO: 3376641 - RNA, 17 nt, Human
caggaaaauugaaugca

SEQ ID NO: 3376642 - RNA, 18 nt, Human
caggaaaccaacacccaa

SEQ ID NO: 3376643 - RNA, 20 nt, Human
caggaaacccagucgcccuu

SEQ ID NO: 3376644 - RNA, 20 nt, Human
caggaaacuccacaucugcc

SEQ ID NO: 3376645 - RNA, 21 nt, Human
caggaaacuccugugaccaca

SEQ ID NO: 3376646 - RNA, 16 nt, Human
caggaaagaagcauuu

SEQ ID NO: 3376647 - RNA, 12 nt, Human
caggaaagaaua

SEQ ID NO: 3376648 - RNA, 13 nt, Human
caggaaagaauag

SEQ ID NO: 3376649 - RNA, 19 nt, Human
caggaaagcgccuccaacc

SEQ ID NO: 3376650 - RNA, 15 nt, Human
caggaaaggaaucau

SEQ ID NO: 3376651 - RNA, 19 nt, Human
caggaaaggaaucauuucu

SEQ ID NO: 3376652 - RNA, 14 nt, Human
caggaaaggcucca

SEQ ID NO: 3376653 - RNA, 19 nt, Human
caggaaaggcuccaggagc

SEQ ID NO: 3376654 - RNA, 23 nt, Human
caggaaaggcuccaggagcagcc

SEQ ID NO: 3376655 - RNA, 17 nt, Human
caggaaagggaaggccc

SEQ ID NO: 3376656 - RNA, 22 nt, Human
caggaaaguggcaccugucugc

SEQ ID NO: 3376657 - RNA, 22 nt, Human
caggaaaguucagaguuuucug

SEQ ID NO: 3376658 - RNA, 16 nt, Human
caggaaauauauaugu

SEQ ID NO: 3376659 - RNA, 19 nt, Human
caggaaaucaaauaugcaa

SEQ ID NO: 3376660 - RNA, 21 nt, Human
caggaaaucaaauaugcaaag

SEQ ID NO: 3376661 - RNA, 13 nt, Human
caggaaaugaaaa

SEQ ID NO: 3376662 - RNA, 20 nt, Human
caggaaaugaaaaugucuug

SEQ ID NO: 3376663 - RNA, 20 nt, Human
caggaaaugcugacccaugg

SEQ ID NO: 3376664 - RNA, 21 nt, Human
caggaaaugcugacccauggg

SEQ ID NO: 3376665 - RNA, 22 nt, Human
caggaacacccgacuccucaaa

SEQ ID NO: 3376666 - RNA, 17 nt, Human
caggaaccgaggcaggg

SEQ ID NO: 3376667 - RNA, 23 nt, Human
caggaaccucgaguacugugggc

SEQ ID NO: 3376668 - RNA, 15 nt, Human
caggaacuauaaaaa

SEQ ID NO: 3376669 - RNA, 14 nt, Human
caggaacucccagc

SEQ ID NO: 3376670 - RNA, 16 nt, Human
caggaacucccagcaa

SEQ ID NO: 3376671 - RNA, 12 nt, Human
caggaacugggc

SEQ ID NO: 3376672 - RNA, 17 nt, Human
caggaagaaagaauguu

SEQ ID NO: 3376673 - RNA, 15 nt, Human
caggaagagaaggag

SEQ ID NO: 3376674 - RNA, 23 nt, Human
caggaagcaaacuaagcccccgc

SEQ ID NO: 3376675 - RNA, 14 nt, Human
caggaagcacccca

SEQ ID NO: 3376676 - RNA, 17 nt, Human
caggaagcaccccaugc

SEQ ID NO: 3376677 - RNA, 17 nt, Human
caggaagccagcaggcu

SEQ ID NO: 3376678 - RNA, 21 nt, Human
caggaagccagcaggcucuca

SEQ ID NO: 3376679 - RNA, 18 nt, Human
caggaagcccaggagccu

SEQ ID NO: 3376680 - RNA, 20 nt, Human
caggaagcccaggagccuca

SEQ ID NO: 3376681 - RNA, 13 nt, Human
caggaagccccca

SEQ ID NO: 3376682 - RNA, 23 nt, Human
caggaagccgccaguacuuguca

SEQ ID NO: 3376683 - RNA, 19 nt, Human
caggaagccugcaguccug

SEQ ID NO: 3376684 - RNA, 16 nt, Human
caggaagcucagggcc

SEQ ID NO: 3376685 - RNA, 15 nt, Human
caggaagcugcuccg

SEQ ID NO: 3376686 - RNA, 21 nt, Human
caggaagcuuuggugagaacc

SEQ ID NO: 3376687 - RNA, 23 nt, Human
caggaagcuuuggugagaaccug

SEQ ID NO: 3376688 - RNA, 16 nt, Human
caggaaggacuaugaa

SEQ ID NO: 3376689 - RNA, 19 nt, Human
caggaaggacuaugaaaag

SEQ ID NO: 3376690 - RNA, 15 nt, Human
caggaaggagagccu

SEQ ID NO: 3376691 - RNA, 15 nt, Human
caggaaggagcugcc

SEQ ID NO: 3376692 - RNA, 17 nt, Human
caggaaggagcugccug

SEQ ID NO: 3376693 - RNA, 13 nt, Human
auuuuguaaaggu

SEQ ID NO: 3376694 - RNA, 19 nt, Human
auuuuguaacuuccaugug

SEQ ID NO: 3376695 - RNA, 20 nt, Human
auuuuguaauguaucaaaua

SEQ ID NO: 3376696 - RNA, 23 nt, Human
auuuuguaauguaucaaauacau

SEQ ID NO: 3376697 - RNA, 15 nt, Human
auuuuguaauuauga

SEQ ID NO: 3376698 - RNA, 16 nt, Human
auuuuguaauuauugu

SEQ ID NO: 3376699 - RNA, 15 nt, Human
auuuuguaauuuucu

SEQ ID NO: 3376700 - RNA, 16 nt, Human
auuuuguaauuuucuu

SEQ ID NO: 3376701 - RNA, 10 nt, Human
auuuuguaug

SEQ ID NO: 3376702 - RNA, 20 nt, Human
auuuuguaugcaagcaguuu

SEQ ID NO: 3376703 - RNA, 10 nt, Human
auuuuguauu

SEQ ID NO: 3376704 - RNA, 19 nt, Human
auuuuguauuauugcuguu

SEQ ID NO: 3376705 - RNA, 22 nt, Human
auuuuguauuauugcuguugcu

SEQ ID NO: 3376706 - RNA, 16 nt, Human
auuuugucuaaaaugc

SEQ ID NO: 3376707 - RNA, 20 nt, Human
auuuugucugccccaaguuu

SEQ ID NO: 3376708 - RNA, 24 nt, Human
auuuugugaaacagacuuguauau

SEQ ID NO: 3376709 - RNA, 12 nt, Human
auuuugugaaug

SEQ ID NO: 3376710 - RNA, 15 nt, Human
auuuugugaauggau

SEQ ID NO: 3376711 - RNA, 15 nt, Human
auuuugugaguuugu

SEQ ID NO: 3376712 - RNA, 19 nt, Human
auuuugugauauggagccc

SEQ ID NO: 3376713 - RNA, 19 nt, Human
auuuugugcccccauguaa

SEQ ID NO: 3376714 - RNA, 20 nt, Human
auuuuguggcuuucuuucuu

SEQ ID NO: 3376715 - RNA, 21 nt, Human
auuuugugggaauuuaagagc

SEQ ID NO: 3376716 - RNA, 12 nt, Human
auuuuguguaaa

SEQ ID NO: 3376717 - RNA, 16 nt, Human
auuuuguguaagaaau

SEQ ID NO: 3376718 - RNA, 18 nt, Human
auuuuguguaagaaauac

SEQ ID NO: 3376719 - RNA, 14 nt, Human
auuuugugugacca

SEQ ID NO: 3376720 - RNA, 17 nt, Human
auuuugugugaccaacu

SEQ ID NO: 3376721 - RNA, 20 nt, Human
auuuugugugaccaacugug

SEQ ID NO: 3376722 - RNA, 12 nt, Human
auuuuguucaua

SEQ ID NO: 3376723 - RNA, 18 nt, Human
auuuuguucuaguuuuca

SEQ ID NO: 3376724 - RNA, 15 nt, Human
auuuuguucucuggg

SEQ ID NO: 3376725 - RNA, 18 nt, Human
auuuuguucucugggaga

SEQ ID NO: 3376726 - RNA, 21 nt, Human
auuuuguuggcauagcucugg

SEQ ID NO: 3376727 - RNA, 14 nt, Human
auuuuguuguaaaa

SEQ ID NO: 3376728 - RNA, 18 nt, Human
auuuuguuguaaaaagaa

SEQ ID NO: 3376729 - RNA, 23 nt, Human
auuuuguuguguguaugcugcuu

SEQ ID NO: 3376730 - RNA, 14 nt, Human
auuuuguuugguau

SEQ ID NO: 3376731 - RNA, 19 nt, Human
auuuuguuugguauuguau

SEQ ID NO: 3376732 - RNA, 22 nt, Human
auuuuguuugguauuguauuua

SEQ ID NO: 3376733 - RNA, 18 nt, Human
auuuuguuuugcuuuuuc

SEQ ID NO: 3376734 - RNA, 18 nt, Human
auuuuguuuuuccuucca

SEQ ID NO: 3376735 - RNA, 18 nt, Human
auuuuuaaaaaauauuuu

SEQ ID NO: 3376736 - RNA, 19 nt, Human
auuuuuaaaaaauauuuuc

SEQ ID NO: 3376737 - RNA, 13 nt, Human
auuuuuaaaaaga

SEQ ID NO: 3376738 - RNA, 13 nt, Human
auuuuuaaaagau

SEQ ID NO: 3376739 - RNA, 16 nt, Human
auuuuuaaaauauuua

SEQ ID NO: 3376740 - RNA, 14 nt, Human
auuuuuaaaaugua

SEQ ID NO: 3376741 - RNA, 13 nt, Human
auuuuuaaacaag

SEQ ID NO: 3376742 - RNA, 15 nt, Human
auuuuuaaacaagua

SEQ ID NO: 3376743 - RNA, 13 nt, Human
auuuuuaaagaaa

SEQ ID NO: 3376744 - RNA, 14 nt, Human
auuuuuaaagcaug

SEQ ID NO: 3376745 - RNA, 15 nt, Human
auuuuuaaagcaugg

SEQ ID NO: 3376746 - RNA, 15 nt, Human
auuuuuaaaggcauu

SEQ ID NO: 3376747 - RNA, 15 nt, Human
auuuuuaaauaauuu

SEQ ID NO: 3376748 - RNA, 15 nt, Human
auuuuuaaauguguu

SEQ ID NO: 3376749 - RNA, 13 nt, Human
auuuuuaaauugu

SEQ ID NO: 3376750 - RNA, 14 nt, Human
auuuuuaaauuguu

SEQ ID NO: 3376751 - RNA, 19 nt, Human
auuuuuaagauaauaauau

SEQ ID NO: 3376752 - RNA, 12 nt, Human
auuuuuaagcug

SEQ ID NO: 3376753 - RNA, 14 nt, Human
auuuuuaaggacuu

SEQ ID NO: 3376754 - RNA, 19 nt, Human
auuuuuaagugcugcauuu

SEQ ID NO: 3376755 - RNA, 11 nt, Human
auuuuuaaugg

SEQ ID NO: 3376756 - RNA, 16 nt, Human
auuuuuaauggcagca

SEQ ID NO: 3376757 - RNA, 12 nt, Human
auuuuuaauggg

SEQ ID NO: 3376758 - RNA, 15 nt, Human
auuuuuaaugggggu

SEQ ID NO: 3376759 - RNA, 14 nt, Human
auuuuuacaauaaa

SEQ ID NO: 3376760 - RNA, 19 nt, Human
auuuuuacaauguaauuau

SEQ ID NO: 3376761 - RNA, 22 nt, Human
auuuuuacagaauugcuuguuu

SEQ ID NO: 3376762 - RNA, 16 nt, Human
auuuuuacaguuauag

SEQ ID NO: 3376763 - RNA, 16 nt, Human
auuuuuacauucugaa

SEQ ID NO: 3376764 - RNA, 14 nt, Human
auuuuuacauuuaa

SEQ ID NO: 3376765 - RNA, 12 nt, Human
auuuuuaccagu

SEQ ID NO: 3376766 - RNA, 19 nt, Human
auuuuuacccuaaugucuu

SEQ ID NO: 3376767 - RNA, 19 nt, Human
auuuuuaccguuucuuccc

SEQ ID NO: 3376768 - RNA, 19 nt, Human
auuuuuagaauaagaauuu

SEQ ID NO: 3376769 - RNA, 21 nt, Human
auuuuuagaauaagaauuugc

SEQ ID NO: 3376770 - RNA, 14 nt, Human
auuuuuagacagag

SEQ ID NO: 3376771 - RNA, 21 nt, Human
auuuuuaggaaguuuucugua

SEQ ID NO: 3376772 - RNA, 22 nt, Human
auuuuuaggaaguuuucuguag

SEQ ID NO: 3376773 - RNA, 22 nt, Human
auuuuuaguagagacugguuuc

SEQ ID NO: 3376774 - RNA, 18 nt, Human
auuuuuauaacaucuuua

SEQ ID NO: 3376775 - RNA, 13 nt, Human
auuuuuauagcaa

SEQ ID NO: 3376776 - RNA, 21 nt, Human
auuuuuauagcaacaacaauu

SEQ ID NO: 3376777 - RNA, 21 nt, Human
auuuuuauauaauaucuaaag

SEQ ID NO: 3376778 - RNA, 23 nt, Human
auuuuuauauaauaucuaaaguu

SEQ ID NO: 3376779 - RNA, 17 nt, Human
auuuuuauaucaugcaa

SEQ ID NO: 3376780 - RNA, 22 nt, Human
auuuuuauaucaugcaaaauau

SEQ ID NO: 3376781 - RNA, 16 nt, Human
aucuugaggugguagu

SEQ ID NO: 3376782 - RNA, 22 nt, Human
aucuugaguauaagaaaugcau

SEQ ID NO: 3376783 - RNA, 15 nt, Human
aucuugauacauuca

SEQ ID NO: 3376784 - RNA, 21 nt, Human
aucuugaucugcucagcccug

SEQ ID NO: 3376785 - RNA, 22 nt, Human
aucuugaucugcucagcccugg

SEQ ID NO: 3376786 - RNA, 23 nt, Human
aucuugaucugcucagcccugga

SEQ ID NO: 3376787 - RNA, 21 nt, Human
aucuugcaguaucggcacugu

SEQ ID NO: 3376788 - RNA, 18 nt, Human
aucuugcauuaugcaauu

SEQ ID NO: 3376789 - RNA, 21 nt, Human
aucuugccuccaggugcagag

SEQ ID NO: 3376790 - RNA, 16 nt, Human
aucuugcgaauccaag

SEQ ID NO: 3376791 - RNA, 21 nt, Human
aucuugcgaauccaagcuccc

SEQ ID NO: 3376792 - RNA, 23 nt, Human
aucuugcuaccaguauuuagaag

SEQ ID NO: 3376793 - RNA, 17 nt, Human
aucuugcuacuaccguu

SEQ ID NO: 3376794 - RNA, 15 nt, Human
aucuugcucugcuug

SEQ ID NO: 3376795 - RNA, 14 nt, Human
aucuugcuucccua

SEQ ID NO: 3376796 - RNA, 15 nt, Human
aucuugcuucccuaa

SEQ ID NO: 3376797 - RNA, 21 nt, Human
aucuuggacugacauuuagcg

SEQ ID NO: 3376798 - RNA, 12 nt, Human
aucuuggcaggg

SEQ ID NO: 3376799 - RNA, 15 nt, Human
aucuuggcucacugc

SEQ ID NO: 3376800 - RNA, 13 nt, Human
aucuugggacugg

SEQ ID NO: 3376801 - RNA, 12 nt, Human
aucuugguaaau

SEQ ID NO: 3376802 - RNA, 18 nt, Human
aucuugguguguuaagag

SEQ ID NO: 3376803 - RNA, 20 nt, Human
aucuugguugaugccaaaaa

SEQ ID NO: 3376804 - RNA, 14 nt, Human
aucuugguuugccu

SEQ ID NO: 3376805 - RNA, 17 nt, Human
aucuugguuugccuucc

SEQ ID NO: 3376806 - RNA, 12 nt, Human
aucuugucaugu

SEQ ID NO: 3376807 - RNA, 19 nt, Human
aucuugucauguguauaaa

SEQ ID NO: 3376808 - RNA, 17 nt, Human
aucuuguccccaacacc

SEQ ID NO: 3376809 - RNA, 14 nt, Human
aucuugucucaaug

SEQ ID NO: 3376810 - RNA, 16 nt, Human
aucuugucucaaugcu

SEQ ID NO: 3376811 - RNA, 23 nt, Human
aucuugucucaaugcucauaacg

SEQ ID NO: 3376812 - RNA, 19 nt, Human
aucuugugaaaauaauuga

SEQ ID NO: 3376813 - RNA, 20 nt, Human
aucuugugaaauggccagga

SEQ ID NO: 3376814 - RNA, 18 nt, Human
aucuugugcuagaauacu

SEQ ID NO: 3376815 - RNA, 20 nt, Human
aucuugugcuagaauacuuu

SEQ ID NO: 3376816 - RNA, 22 nt, Human
aucuugugugauuaacuuauuu

SEQ ID NO: 3376817 - RNA, 12 nt, Human
aucuuuaaaaua

SEQ ID NO: 3376818 - RNA, 11 nt, Human
aucuuuaauua

SEQ ID NO: 3376819 - RNA, 18 nt, Human
aucuuuaauuaaaaccug

SEQ ID NO: 3376820 - RNA, 15 nt, Human
aucuuuagugcuuuc

SEQ ID NO: 3376821 - RNA, 12 nt, Human
aucuuucagaaa

SEQ ID NO: 3376822 - RNA, 16 nt, Human
aucuuucagaaauaua

SEQ ID NO: 3376823 - RNA, 12 nt, Human
aucuuucaggaa

SEQ ID NO: 3376824 - RNA, 20 nt, Human
aucuuucaucaaucauugua

SEQ ID NO: 3376825 - RNA, 17 nt, Human
aucuuuccauauccaua

SEQ ID NO: 3376826 - RNA, 19 nt, Human
aucuuucccuccuugguga

SEQ ID NO: 3376827 - RNA, 12 nt, Human
aucuuuccuguc

SEQ ID NO: 3376828 - RNA, 16 nt, Human
aucuuucgcacagcag

SEQ ID NO: 3376829 - RNA, 21 nt, Human
aucuuucugcacacaaauauu

SEQ ID NO: 3376830 - RNA, 19 nt, Human
aucuuucuucuauuuuauu

SEQ ID NO: 3376831 - RNA, 13 nt, Human
aucuuucuugauc

SEQ ID NO: 3376832 - RNA, 18 nt, Human
aucuuucuuuaccugaga

SEQ ID NO: 3376833 - RNA, 21 nt, Human
aucuuucuuuaccugagacca

SEQ ID NO: 3376834 - RNA, 15 nt, Human
aucuuucuuucuuag

SEQ ID NO: 3376835 - RNA, 21 nt, Human
aucuuucuuucuuagaaauuu

SEQ ID NO: 3376836 - RNA, 14 nt, Human
caagcucucuugcc

SEQ ID NO: 3376837 - RNA, 14 nt, Human
caagcucugcuccu

SEQ ID NO: 3376838 - RNA, 15 nt, Human
caagcucugcuccuc

SEQ ID NO: 3376839 - RNA, 16 nt, Human
caagcucugcuccucu

SEQ ID NO: 3376840 - RNA, 20 nt, Human
caagcugaaauuuuagaaau

SEQ ID NO: 3376841 - RNA, 19 nt, Human
caagcugaggugcccagga

SEQ ID NO: 3376842 - RNA, 21 nt, Human
caagcugaggugcccaggaga

SEQ ID NO: 3376843 - RNA, 14 nt, Human
caagcugaguuucc

SEQ ID NO: 3376844 - RNA, 16 nt, Human
caagcugaguuuccua

SEQ ID NO: 3376845 - RNA, 14 nt, Human
caagcugcacccuc

SEQ ID NO: 3376846 - RNA, 18 nt, Human
caagcugcacccucaggc

SEQ ID NO: 3376847 - RNA, 22 nt, Human
caagcugcacccucaggcaggu

SEQ ID NO: 3376848 - RNA, 13 nt, Human
caagcugccuccc

SEQ ID NO: 3376849 - RNA, 20 nt, Human
caagcugccucccuguccac

SEQ ID NO: 3376850 - RNA, 15 nt, Human
caagcugcucugagc

SEQ ID NO: 3376851 - RNA, 13 nt, Human
caagcuggaagca

SEQ ID NO: 3376852 - RNA, 14 nt, Human
caagcuggcugggg

SEQ ID NO: 3376853 - RNA, 11 nt, Human
caagcugggcc

SEQ ID NO: 3376854 - RNA, 15 nt, Human
caagcugggccccag

SEQ ID NO: 3376855 - RNA, 20 nt, Human
caagcugggccccagcccac

SEQ ID NO: 3376856 - RNA, 17 nt, Human
caagcuggucccacuca

SEQ ID NO: 3376857 - RNA, 19 nt, Human
caagcuggucccacucagu

SEQ ID NO: 3376858 - RNA, 21 nt, Human
caagcuggucccacucagucc

SEQ ID NO: 3376859 - RNA, 18 nt, Human
caagcuguccagagaaaa

SEQ ID NO: 3376860 - RNA, 18 nt, Human
caagcugugagacagugg

SEQ ID NO: 3376861 - RNA, 12 nt, Human
caagcugugcca

SEQ ID NO: 3376862 - RNA, 15 nt, Human
caagcugugccaccc

SEQ ID NO: 3376863 - RNA, 21 nt, Human
caagcugugccacccugggcu

SEQ ID NO: 3376864 - RNA, 16 nt, Human
caagcuguuuucuucu

SEQ ID NO: 3376865 - RNA, 21 nt, Human
caagcuuccauagcugcugcc

SEQ ID NO: 3376866 - RNA, 13 nt, Human
caagcuuggcagc

SEQ ID NO: 3376867 - RNA, 14 nt, Human
caagcuuggcagcc

SEQ ID NO: 3376868 - RNA, 20 nt, Human
caagcuuggcagccgagcuc

SEQ ID NO: 3376869 - RNA, 20 nt, Human
caagcuuguuaucagcuuuc

SEQ ID NO: 3376870 - RNA, 14 nt, Human
caagcuuuaaauua

SEQ ID NO: 3376871 - RNA, 16 nt, Human
caagcuuuaaauuaug

SEQ ID NO: 3376872 - RNA, 20 nt, Human
caagcuuugauuuagauuga

SEQ ID NO: 3376873 - RNA, 15 nt, Human
caagcuuuuccuaau

SEQ ID NO: 3376874 - RNA, 20 nt, Human
caaggaaaaaauaacaauga

SEQ ID NO: 3376875 - RNA, 13 nt, Human
caaggaaaaagaa

SEQ ID NO: 3376876 - RNA, 16 nt, Human
caaggaaaacugcaug

SEQ ID NO: 3376877 - RNA, 14 nt, Human
caaggaaaccacag

SEQ ID NO: 3376878 - RNA, 14 nt, Human
caaggaaaggccug

SEQ ID NO: 3376879 - RNA, 20 nt, Human
caaggaaagggggucccagu

SEQ ID NO: 3376880 - RNA, 20 nt, Human
caaggaaauacccuucuuuu

SEQ ID NO: 3376881 - RNA, 18 nt, Human
caaggaacaaaaaaacca

SEQ ID NO: 3376882 - RNA, 13 nt, Human
caaggaaggaaag

SEQ ID NO: 3376883 - RNA, 16 nt, Human
caaggaaggaaagaaa

SEQ ID NO: 3376884 - RNA, 18 nt, Human
caaggaaggaaagaaaga

SEQ ID NO: 3376885 - RNA, 23 nt, Human
caaggaaggaaagaaagaaggaa

SEQ ID NO: 3376886 - RNA, 19 nt, Human
caaggaaguagaaacaaaa

SEQ ID NO: 3376887 - RNA, 12 nt, Human
caaggaauuucu

SEQ ID NO: 3376888 - RNA, 18 nt, Human
caaggaauuucuuaacuu

SEQ ID NO: 3376889 - RNA, 11 nt, Human
caaggacaaag

SEQ ID NO: 3376890 - RNA, 17 nt, Human
caaggacaaagucucca

SEQ ID NO: 3376891 - RNA, 19 nt, Human
caaggacaaagucuccagc

SEQ ID NO: 3376892 - RNA, 23 nt, Human
caaggacaaagucuccagcccac

SEQ ID NO: 3376893 - RNA, 18 nt, Human
caaggacagccccuccuc

SEQ ID NO: 3376894 - RNA, 16 nt, Human
caaggaccaggacucc

SEQ ID NO: 3376895 - RNA, 20 nt, Human
caaggaccaggacucccucc

SEQ ID NO: 3376896 - RNA, 21 nt, Human
caaggaccaggacucccuccu

SEQ ID NO: 3376897 - RNA, 22 nt, Human
caaggacccagccugagauggu

SEQ ID NO: 3376898 - RNA, 20 nt, Human
caaggaccccucaccuugca

SEQ ID NO: 3376899 - RNA, 21 nt, Human
caaggacgcuucacaggacag

SEQ ID NO: 3376900 - RNA, 20 nt, Human
caaggacuacguuaagggaa

SEQ ID NO: 3376901 - RNA, 20 nt, Human
caaggacuaggguccugggg

SEQ ID NO: 3376902 - RNA, 21 nt, Human
caaggacuaggguccugggga

SEQ ID NO: 3376903 - RNA, 14 nt, Human
caaggacugaggga

SEQ ID NO: 3376904 - RNA, 15 nt, Human
caaggacuuuguaca

SEQ ID NO: 3376905 - RNA, 16 nt, Human
caaggacuuuguacau

SEQ ID NO: 3376906 - RNA, 14 nt, Human
caaggagaaacaga

SEQ ID NO: 3376907 - RNA, 16 nt, Human
caaggagaaacagaga

SEQ ID NO: 3376908 - RNA, 13 nt, Human
caaggagaggagg

SEQ ID NO: 3376909 - RNA, 16 nt, Human
caaggagcacaagcca

SEQ ID NO: 3376910 - RNA, 18 nt, Human
caaggagcacagguccca

SEQ ID NO: 3376911 - RNA, 13 nt, Human
caaggagcugaga

SEQ ID NO: 3376912 - RNA, 22 nt, Human
caaggagcugagaauagaagga

SEQ ID NO: 3376913 - RNA, 13 nt, Human
caaggaggaaaaa

SEQ ID NO: 3376914 - RNA, 20 nt, Human
caaggaggaaaaacagacaa

SEQ ID NO: 3376915 - RNA, 16 nt, Human
caaggaggcuggcugg

SEQ ID NO: 3376916 - RNA, 19 nt, Human
caaggaggcuggcuggggc

SEQ ID NO: 3376917 - RNA, 21 nt, Human
caaggaggcuggcuggggccu

SEQ ID NO: 3376918 - RNA, 15 nt, Human
caaggagggcacagg

SEQ ID NO: 3376919 - RNA, 19 nt, Human
caaggagggugagugcaag

SEQ ID NO: 3376920 - RNA, 23 nt, Human
caaggaggguguaauggagcauc

SEQ ID NO: 3376921 - RNA, 17 nt, Human
caaggaggucugugcca

SEQ ID NO: 3376922 - RNA, 17 nt, Human
caaggagucacugagac

SEQ ID NO: 3376923 - RNA, 16 nt, Human
caaggagucagacauu

SEQ ID NO: 3376924 - RNA, 15 nt, Human
caaggauagaugcug

SEQ ID NO: 3376925 - RNA, 20 nt, Human
caaggauagaugcuggccca

SEQ ID NO: 3376926 - RNA, 13 nt, Human
cacaagaaaugaa

SEQ ID NO: 3376927 - RNA, 23 nt, Human
cacaagaaaugaaagcagggacu

SEQ ID NO: 3376928 - RNA, 13 nt, Human
cacaagaauggau

SEQ ID NO: 3376929 - RNA, 14 nt, Human
cacaagaauggauc

SEQ ID NO: 3376930 - RNA, 11 nt, Human
cacaagacuga

SEQ ID NO: 3376931 - RNA, 20 nt, Human
cacaagacugacgccagggu

SEQ ID NO: 3376932 - RNA, 16 nt, Human
cacaagacugcacauc

SEQ ID NO: 3376933 - RNA, 22 nt, Human
cacaagauggaauuuaucaaac

SEQ ID NO: 3376934 - RNA, 17 nt, Human
cacaagauucccagaga

SEQ ID NO: 3376935 - RNA, 19 nt, Human
cacaagauucccagagaca

SEQ ID NO: 3376936 - RNA, 22 nt, Human
cacaagauucccagagacagga

SEQ ID NO: 3376937 - RNA, 21 nt, Human
cacaagcagagugcacagcug

SEQ ID NO: 3376938 - RNA, 23 nt, Human
cacaagcagagugcacagcuguc

SEQ ID NO: 3376939 - RNA, 13 nt, Human
cacaagccugagg

SEQ ID NO: 3376940 - RNA, 13 nt, Human
cacaagcuccaag

SEQ ID NO: 3376941 - RNA, 20 nt, Human
cacaagcuccaagcucccag

SEQ ID NO: 3376942 - RNA, 21 nt, Human
cacaagcuccaagcucccagg

SEQ ID NO: 3376943 - RNA, 23 nt, Human
cacaagcuccaagcucccaggca

SEQ ID NO: 3376944 - RNA, 15 nt, Human
cacaagcugccuccc

SEQ ID NO: 3376945 - RNA, 13 nt, Human
cacaagcuggaag

SEQ ID NO: 3376946 - RNA, 12 nt, Human
cacaaggacuuc

SEQ ID NO: 3376947 - RNA, 16 nt, Human
cacaaggacuuccugu

SEQ ID NO: 3376948 - RNA, 22 nt, Human
cacaaggauagaugcuggccca

SEQ ID NO: 3376949 - RNA, 18 nt, Human
cacaaggcugaccaagag

SEQ ID NO: 3376950 - RNA, 21 nt, Human
cacaaggcugaccaagagaga

SEQ ID NO: 3376951 - RNA, 20 nt, Human
cacaaggucauggccacacu

SEQ ID NO: 3376952 - RNA, 15 nt, Human
cacaaggugggcagg

SEQ ID NO: 3376953 - RNA, 13 nt, Human
cacaaguaaacau

SEQ ID NO: 3376954 - RNA, 22 nt, Human
cacaaguaagagacucagccug

SEQ ID NO: 3376955 - RNA, 21 nt, Human
cacaagugcccuccaggcuuu

SEQ ID NO: 3376956 - RNA, 21 nt, Human
cacaaguggguacccccagga

SEQ ID NO: 3376957 - RNA, 14 nt, Human
cacaagugguggua

SEQ ID NO: 3376958 - RNA, 21 nt, Human
cacaaguggugguaacccugg

SEQ ID NO: 3376959 - RNA, 16 nt, Human
cacaauaaauggcugu

SEQ ID NO: 3376960 - RNA, 20 nt, Human
cacaauaaauguauucaaau

SEQ ID NO: 3376961 - RNA, 14 nt, Human
cacaauagaauuau

SEQ ID NO: 3376962 - RNA, 22 nt, Human
cacaaucaccgaugcaaacauu

SEQ ID NO: 3376963 - RNA, 20 nt, Human
cacaauccuaacacauuauc

SEQ ID NO: 3376964 - RNA, 24 nt, Human
cacaaucucggcucacugcauccu

SEQ ID NO: 3376965 - RNA, 18 nt, Human
cacaaucuuaaggggcag

SEQ ID NO: 3376966 - RNA, 19 nt, Human
cacaaucuuaaggggcagc

SEQ ID NO: 3376967 - RNA, 22 nt, Human
cacaaugaaaugcucuccuuuc

SEQ ID NO: 3376968 - RNA, 18 nt, Human
cacaaugcaguucugagc

SEQ ID NO: 3376969 - RNA, 20 nt, Human
cacaauggcuaauucccaga

SEQ ID NO: 3376970 - RNA, 17 nt, Human
cacaaugguuuuuaaau

SEQ ID NO: 3376971 - RNA, 22 nt, Human
cacaaugguuuuuaaauuuugu

SEQ ID NO: 3376972 - RNA, 12 nt, Human
cacaaugucuug

SEQ ID NO: 3376973 - RNA, 16 nt, Human
cacaauguucuuuaua

SEQ ID NO: 3376974 - RNA, 11 nt, Human
cacaauuccau

SEQ ID NO: 3376975 - RNA, 14 nt, Human
cacaauuuuuaaug

SEQ ID NO: 3376976 - RNA, 15 nt, Human
cacaauuuuuaaugg

SEQ ID NO: 3376977 - RNA, 22 nt, Human
cacaauuuuuaauggcagcaga

SEQ ID NO: 3376978 - RNA, 13 nt, Human
cacacaaaacaac

SEQ ID NO: 3376979 - RNA, 18 nt, Human
cacacaaaccuucugccu

SEQ ID NO: 3376980 - RNA, 18 nt, Human
cacacaaagguauaauuu

SEQ ID NO: 3376981 - RNA, 18 nt, Human
cacacaaauaacaagaau

SEQ ID NO: 3376982 - RNA, 21 nt, Human
cacacaaauuaucuuaaaacu

SEQ ID NO: 3376983 - RNA, 18 nt, Human
cacacaagaagaagggca

SEQ ID NO: 3376984 - RNA, 16 nt, Human
cacacaagcccacagc

SEQ ID NO: 3376985 - RNA, 16 nt, Human
cacacaagggaaggac

SEQ ID NO: 3376986 - RNA, 20 nt, Human
cacacaaguaagagacucag

SEQ ID NO: 3376987 - RNA, 21 nt, Human
cacacaaguaagagacucagc

SEQ ID NO: 3376988 - RNA, 23 nt, Human
cacacaaguaagagacucagccu

SEQ ID NO: 3376989 - RNA, 14 nt, Human
cacacacaaaaaaa

SEQ ID NO: 3376990 - RNA, 16 nt, Human
cacacacaacagccaa

SEQ ID NO: 3376991 - RNA, 20 nt, Human
aucuuucuuuggaugggacu

SEQ ID NO: 3376992 - RNA, 21 nt, Human
aucuuucuuuugauucuuccu

SEQ ID NO: 3376993 - RNA, 17 nt, Human
aucuuugaaauuaugua

SEQ ID NO: 3376994 - RNA, 20 nt, Human
aucuuugaaauuauguaaau

SEQ ID NO: 3376995 - RNA, 15 nt, Human
aucuuugaauaugua

SEQ ID NO: 3376996 - RNA, 12 nt, Human
aucuuugaugug

SEQ ID NO: 3376997 - RNA, 15 nt, Human
aucuuugauucuccu

SEQ ID NO: 3376998 - RNA, 16 nt, Human
aucuuugauucuccuu

SEQ ID NO: 3376999 - RNA, 17 nt, Human
aucuuugauucuccuuc

SEQ ID NO: 3377000 - RNA, 18 nt, Human
aucuuugcagacaggcaa

SEQ ID NO: 3377001 - RNA, 14 nt, Human
aucuuugccacccu

SEQ ID NO: 3377002 - RNA, 23 nt, Human
aucuuuggacagaagcagcucuu

SEQ ID NO: 3377003 - RNA, 12 nt, Human
aucuuugugaag

SEQ ID NO: 3377004 - RNA, 13 nt, Human
aucuuugugaagg

SEQ ID NO: 3377005 - RNA, 17 nt, Human
aucuuugugaaggccuc

SEQ ID NO: 3377006 - RNA, 17 nt, Human
aucuuuuaaaguguuac

SEQ ID NO: 3377007 - RNA, 20 nt, Human
aucuuuuaaaguguuacuuu

SEQ ID NO: 3377008 - RNA, 22 nt, Human
aucuuuuaaaguguuacuuuuu

SEQ ID NO: 3377009 - RNA, 22 nt, Human
aucuuuuacaacugccucgaaa

SEQ ID NO: 3377010 - RNA, 11 nt, Human
aucuuuuacau

SEQ ID NO: 3377011 - RNA, 17 nt, Human
aucuuuuauguuugaau

SEQ ID NO: 3377012 - RNA, 18 nt, Human
aucuuuuauguuugaaua

SEQ ID NO: 3377013 - RNA, 13 nt, Human
aucuuuucacaaa

SEQ ID NO: 3377014 - RNA, 15 nt, Human
aucuuuucuacagca

SEQ ID NO: 3377015 - RNA, 20 nt, Human
aucuuuucuacagcaaauuu

SEQ ID NO: 3377016 - RNA, 13 nt, Human
aucuuuucuauuu

SEQ ID NO: 3377017 - RNA, 18 nt, Human
aucuuuucugaaucuucu

SEQ ID NO: 3377018 - RNA, 23 nt, Human
aucuuuucuugccucuguccccu

SEQ ID NO: 3377019 - RNA, 22 nt, Human
aucuuuucuuuagagaacugaa

SEQ ID NO: 3377020 - RNA, 13 nt, Human
aucuuuugagaac

SEQ ID NO: 3377021 - RNA, 14 nt, Human
aucuuuugggggaa

SEQ ID NO: 3377022 - RNA, 14 nt, Human
aucuuuugugagau

SEQ ID NO: 3377023 - RNA, 22 nt, Human
aucuuuuguuuccuuuuuuccc

SEQ ID NO: 3377024 - RNA, 19 nt, Human
aucuuuuuaaccucuguuc

SEQ ID NO: 3377025 - RNA, 18 nt, Human
aucuuuuuauugaugugc

SEQ ID NO: 3377026 - RNA, 22 nt, Human
aucuuuuuauugaugugcaaaa

SEQ ID NO: 3377027 - RNA, 14 nt, Human
aucuuuuucucuaa

SEQ ID NO: 3377028 - RNA, 16 nt, Human
aucuuuuuuagcauaa

SEQ ID NO: 3377029 - RNA, 14 nt, Human
aucuuuuuucaaaa

SEQ ID NO: 3377030 - RNA, 23 nt, Human
aucuuuuuuucauuuuuaaaugu

SEQ ID NO: 3377031 - RNA, 22 nt, Human
augaaaaaauauauaucaaaua

SEQ ID NO: 3377032 - RNA, 19 nt, Human
augaaaaauagugucuuug

SEQ ID NO: 3377033 - RNA, 20 nt, Human
augaaaaauagugucuuugu

SEQ ID NO: 3377034 - RNA, 17 nt, Human
augaaaaaugaaagaug

SEQ ID NO: 3377035 - RNA, 13 nt, Human
augaaaaauucuc

SEQ ID NO: 3377036 - RNA, 17 nt, Human
augaaaacaguguguaa

SEQ ID NO: 3377037 - RNA, 18 nt, Human
augaaaacguuuuauugu

SEQ ID NO: 3377038 - RNA, 14 nt, Human
augaaaacuauaca

SEQ ID NO: 3377039 - RNA, 12 nt, Human
augaaaacucau

SEQ ID NO: 3377040 - RNA, 12 nt, Human
augaaaacuuau

SEQ ID NO: 3377041 - RNA, 18 nt, Human
augaaaagacaagaaaau

SEQ ID NO: 3377042 - RNA, 19 nt, Human
augaaaagauucuucugug

SEQ ID NO: 3377043 - RNA, 15 nt, Human
augaaaagauuuaag

SEQ ID NO: 3377044 - RNA, 14 nt, Human
augaaaauaaagaa

SEQ ID NO: 3377045 - RNA, 16 nt, Human
augaaaauaaauagcu

SEQ ID NO: 3377046 - RNA, 17 nt, Human
augaaaauaaucucuga

SEQ ID NO: 3377047 - RNA, 13 nt, Human
augaaaauacaac

SEQ ID NO: 3377048 - RNA, 17 nt, Human
augaaaauacaacuuaa

SEQ ID NO: 3377049 - RNA, 14 nt, Human
augaaaauaccauu

SEQ ID NO: 3377050 - RNA, 12 nt, Human
augaaaauauuu

SEQ ID NO: 3377051 - RNA, 15 nt, Human
augaaaauccuacca

SEQ ID NO: 3377052 - RNA, 21 nt, Human
augaaaauccuaccaaccucu

SEQ ID NO: 3377053 - RNA, 12 nt, Human
augaaaauggaa

SEQ ID NO: 3377054 - RNA, 12 nt, Human
augaaaauguca

SEQ ID NO: 3377055 - RNA, 19 nt, Human
augaaaaugucagaaacca

SEQ ID NO: 3377056 - RNA, 14 nt, Human
augaaaauguccau

SEQ ID NO: 3377057 - RNA, 16 nt, Human
augaaaaugucuugug

SEQ ID NO: 3377058 - RNA, 14 nt, Human
augaaaauuguauu

SEQ ID NO: 3377059 - RNA, 16 nt, Human
augaaacaaauaauca

SEQ ID NO: 3377060 - RNA, 20 nt, Human
augaaacacucaguuguuca

SEQ ID NO: 3377061 - RNA, 18 nt, Human
augaaacagaaacaaaaa

SEQ ID NO: 3377062 - RNA, 16 nt, Human
augaaacccccacaca

SEQ ID NO: 3377063 - RNA, 17 nt, Human
augaaacccccacacac

SEQ ID NO: 3377064 - RNA, 19 nt, Human
augaaacccccacacacac

SEQ ID NO: 3377065 - RNA, 20 nt, Human
augaaacuaaagcaauagaa

SEQ ID NO: 3377066 - RNA, 21 nt, Human
augaaacuaaagcaauagaaa

SEQ ID NO: 3377067 - RNA, 19 nt, Human
augaaacuuguuucacuga

SEQ ID NO: 3377068 - RNA, 18 nt, Human
augaaagaaaacuuuuau

SEQ ID NO: 3377069 - RNA, 18 nt, Human
augaaagaauauauuuau

SEQ ID NO: 3377070 - RNA, 16 nt, Human
augaaagacuguacaa

SEQ ID NO: 3377071 - RNA, 13 nt, Human
caaguauagaaaa

SEQ ID NO: 3377072 - RNA, 21 nt, Human
caaguaugaauaaagacaccu

SEQ ID NO: 3377073 - RNA, 15 nt, Human
caaguaugugagugu

SEQ ID NO: 3377074 - RNA, 17 nt, Human
caaguauguuuuagcau

SEQ ID NO: 3377075 - RNA, 14 nt, Human
caaguauuagaaua

SEQ ID NO: 3377076 - RNA, 20 nt, Human
caaguauuagaauaccacag

SEQ ID NO: 3377077 - RNA, 12 nt, Human
caaguauuauaa

SEQ ID NO: 3377078 - RNA, 13 nt, Human
caaguauuauacc

SEQ ID NO: 3377079 - RNA, 23 nt, Human
caaguauucugccuuugcagaaa

SEQ ID NO: 3377080 - RNA, 19 nt, Human
caaguauuuguuaauuuag

SEQ ID NO: 3377081 - RNA, 11 nt, Human
caaguauuuuu

SEQ ID NO: 3377082 - RNA, 14 nt, Human
caagucaaauuaau

SEQ ID NO: 3377083 - RNA, 16 nt, Human
caagucaaauuaauaa

SEQ ID NO: 3377084 - RNA, 14 nt, Human
caagucaaucauuu

SEQ ID NO: 3377085 - RNA, 14 nt, Human
caagucacaaagga

SEQ ID NO: 3377086 - RNA, 16 nt, Human
caagucacaaaggaau

SEQ ID NO: 3377087 - RNA, 19 nt, Human
caagucacaaaggaaugga

SEQ ID NO: 3377088 - RNA, 20 nt, Human
caagucaccaaaagacacug

SEQ ID NO: 3377089 - RNA, 15 nt, Human
caagucagcuccagc

SEQ ID NO: 3377090 - RNA, 16 nt, Human
caagucagcuccagcu

SEQ ID NO: 3377091 - RNA, 19 nt, Human
caagucaggcccuuauuuu

SEQ ID NO: 3377092 - RNA, 21 nt, Human
caagucagucauucagauaug

SEQ ID NO: 3377093 - RNA, 16 nt, Human
caagucaguuucuaca

SEQ ID NO: 3377094 - RNA, 18 nt, Human
caagucauagccauaaau

SEQ ID NO: 3377095 - RNA, 13 nt, Human
caagucauggcug

SEQ ID NO: 3377096 - RNA, 17 nt, Human
caagucauuuuaacuuu

SEQ ID NO: 3377097 - RNA, 15 nt, Human
caaguccaauaagac

SEQ ID NO: 3377098 - RNA, 17 nt, Human
caaguccacaguggaac

SEQ ID NO: 3377099 - RNA, 17 nt, Human
caaguccagguccuggu

SEQ ID NO: 3377100 - RNA, 20 nt, Human
caaguccaggucgggcucag

SEQ ID NO: 3377101 - RNA, 20 nt, Human
caagucccugacucucugug

SEQ ID NO: 3377102 - RNA, 21 nt, Human
caagucccugacucucuguga

SEQ ID NO: 3377103 - RNA, 23 nt, Human
caagucccugacucucugugacc

SEQ ID NO: 3377104 - RNA, 19 nt, Human
caaguccgcagaagcccug

SEQ ID NO: 3377105 - RNA, 19 nt, Human
caaguccuggauguugugu

SEQ ID NO: 3377106 - RNA, 17 nt, Human
caaguccugugaauuuc

SEQ ID NO: 3377107 - RNA, 18 nt, Human
caaguccugugaauuucu

SEQ ID NO: 3377108 - RNA, 15 nt, Human
caaguccuuaccucu

SEQ ID NO: 3377109 - RNA, 22 nt, Human
caaguccuuaccucuuccggag

SEQ ID NO: 3377110 - RNA, 15 nt, Human
caaguccuuuuguaa

SEQ ID NO: 3377111 - RNA, 17 nt, Human
caagucggaacagcaga

SEQ ID NO: 3377112 - RNA, 16 nt, Human
caagucuacagaguga

SEQ ID NO: 3377113 - RNA, 19 nt, Human
caagucuacagagugauag

SEQ ID NO: 3377114 - RNA, 14 nt, Human
caagucuaccaauu

SEQ ID NO: 3377115 - RNA, 13 nt, Human
caagucugcagcc

SEQ ID NO: 3377116 - RNA, 14 nt, Human
caagucugugccug

SEQ ID NO: 3377117 - RNA, 16 nt, Human
caagucugugccugga

SEQ ID NO: 3377118 - RNA, 18 nt, Human
caagucugugccuggagc

SEQ ID NO: 3377119 - RNA, 19 nt, Human
caagucugugccuggagcu

SEQ ID NO: 3377120 - RNA, 22 nt, Human
caagucuuuaggucuuuguaag

SEQ ID NO: 3377121 - RNA, 19 nt, Human
caagucuuucucuuucccu

SEQ ID NO: 3377122 - RNA, 21 nt, Human
caagucuuucucuuucccugg

SEQ ID NO: 3377123 - RNA, 21 nt, Human
caagucuuugcuauugugaau

SEQ ID NO: 3377124 - RNA, 20 nt, Human
caagugaaauuauuuuggag

SEQ ID NO: 3377125 - RNA, 11 nt, Human
caagugaaggu

SEQ ID NO: 3377126 - RNA, 14 nt, Human
caagugaagguuua

SEQ ID NO: 3377127 - RNA, 19 nt, Human
caagugacuguaucugugu

SEQ ID NO: 3377128 - RNA, 21 nt, Human
caagugacuguaucuguguag

SEQ ID NO: 3377129 - RNA, 15 nt, Human
caagugagagcuggg

SEQ ID NO: 3377130 - RNA, 19 nt, Human
caagugaggugugucacaa

SEQ ID NO: 3377131 - RNA, 18 nt, Human
caagugagucucucuggg

SEQ ID NO: 3377132 - RNA, 19 nt, Human
caagugauucuccugccuc

SEQ ID NO: 3377133 - RNA, 13 nt, Human
caagugcaggcug

SEQ ID NO: 3377134 - RNA, 20 nt, Human
caagugcaggcuggcaccgc

SEQ ID NO: 3377135 - RNA, 22 nt, Human
caagugcagggccuguaauccc

SEQ ID NO: 3377136 - RNA, 16 nt, Human
caagugccaaaugcuc

SEQ ID NO: 3377137 - RNA, 22 nt, Human
caagugccacugcccgagcugg

SEQ ID NO: 3377138 - RNA, 23 nt, Human
caagugccacugcccgagcuggu

SEQ ID NO: 3377139 - RNA, 16 nt, Human
caagugccgcaaauug

SEQ ID NO: 3377140 - RNA, 16 nt, Human
caagugcugaacagug

SEQ ID NO: 3377141 - RNA, 20 nt, Human
caagugcugaacaguggagg

SEQ ID NO: 3377142 - RNA, 20 nt, Human
caagugcuggagucuccuga

SEQ ID NO: 3377143 - RNA, 21 nt, Human
caaguggagccugacagccag

SEQ ID NO: 3377144 - RNA, 17 nt, Human
caaguggcaugugcugu

SEQ ID NO: 3377145 - RNA, 22 nt, Human
caagugggaucugucacaccag

SEQ ID NO: 3377146 - RNA, 11 nt, Human
cacacacacaa

SEQ ID NO: 3377147 - RNA, 15 nt, Human
cacacacacaaaccu

SEQ ID NO: 3377148 - RNA, 12 nt, Human
cacacacacaca

SEQ ID NO: 3377149 - RNA, 14 nt, Human
cacacacacacaaa

SEQ ID NO: 3377150 - RNA, 15 nt, Human
cacacacacacacaa

SEQ ID NO: 3377151 - RNA, 13 nt, Human
cacacacacacag

SEQ ID NO: 3377152 - RNA, 16 nt, Human
cacacacacacagcca

SEQ ID NO: 3377153 - RNA, 13 nt, Human
cacacacacacau

SEQ ID NO: 3377154 - RNA, 14 nt, Human
cacacacacacauc

SEQ ID NO: 3377155 - RNA, 14 nt, Human
cacacacacagcca

SEQ ID NO: 3377156 - RNA, 13 nt, Human
cacacacacauac

SEQ ID NO: 3377157 - RNA, 15 nt, Human
cacacacacauacac

SEQ ID NO: 3377158 - RNA, 12 nt, Human
cacacacacaug

SEQ ID NO: 3377159 - RNA, 13 nt, Human
cacacacacccac

SEQ ID NO: 3377160 - RNA, 14 nt, Human
cacacacacgcacg

SEQ ID NO: 3377161 - RNA, 14 nt, Human
cacacacacucacu

SEQ ID NO: 3377162 - RNA, 13 nt, Human
cacacacagaaaa

SEQ ID NO: 3377163 - RNA, 12 nt, Human
cacacacagagg

SEQ ID NO: 3377164 - RNA, 13 nt, Human
cacacacauacac

SEQ ID NO: 3377165 - RNA, 17 nt, Human
cacacacaugcauacac

SEQ ID NO: 3377166 - RNA, 15 nt, Human
cacacaccagagccc

SEQ ID NO: 3377167 - RNA, 15 nt, Human
cacacacccugaggu

SEQ ID NO: 3377168 - RNA, 14 nt, Human
cacacaccucacca

SEQ ID NO: 3377169 - RNA, 15 nt, Human
cacacacgcacgcac

SEQ ID NO: 3377170 - RNA, 16 nt, Human
cacacacgcacgcaca

SEQ ID NO: 3377171 - RNA, 12 nt, Human
cacacacguuau

SEQ ID NO: 3377172 - RNA, 12 nt, Human
cacacacucacu

SEQ ID NO: 3377173 - RNA, 21 nt, Human
cacacacucgcccgcccacug

SEQ ID NO: 3377174 - RNA, 14 nt, Human
cacacacuuuggcu

SEQ ID NO: 3377175 - RNA, 15 nt, Human
cacacagaaaauaua

SEQ ID NO: 3377176 - RNA, 12 nt, Human
cacacagaaggg

SEQ ID NO: 3377177 - RNA, 20 nt, Human
cacacagacucauauuacug

SEQ ID NO: 3377178 - RNA, 12 nt, Human
cacacagaggaa

SEQ ID NO: 3377179 - RNA, 19 nt, Human
cacacagaggcugccucuc

SEQ ID NO: 3377180 - RNA, 15 nt, Human
cacacagaguggucu

SEQ ID NO: 3377181 - RNA, 20 nt, Human
cacacagaguggucuuucug

SEQ ID NO: 3377182 - RNA, 18 nt, Human
cacacagauuugagcuca

SEQ ID NO: 3377183 - RNA, 20 nt, Human
cacacagauuugagcucagc

SEQ ID NO: 3377184 - RNA, 19 nt, Human
cacacagcaagucaggguu

SEQ ID NO: 3377185 - RNA, 20 nt, Human
cacacagccacacacacaga

SEQ ID NO: 3377186 - RNA, 22 nt, Human
cacacagccacacacacagaaa

SEQ ID NO: 3377187 - RNA, 14 nt, Human
cacacagccaggug

SEQ ID NO: 3377188 - RNA, 15 nt, Human
cacacagccuagcac

SEQ ID NO: 3377189 - RNA, 13 nt, Human
cacacagcuccca

SEQ ID NO: 3377190 - RNA, 13 nt, Human
cacacagcucugu

SEQ ID NO: 3377191 - RNA, 15 nt, Human
cacacagcugcagag

SEQ ID NO: 3377192 - RNA, 17 nt, Human
cacacaggacccccuuc

SEQ ID NO: 3377193 - RNA, 18 nt, Human
cacacaggcauuuccugg

SEQ ID NO: 3377194 - RNA, 19 nt, Human
cacacaggcauuuccuggg

SEQ ID NO: 3377195 - RNA, 23 nt, Human
cacacaguauuacuucugcuaca

SEQ ID NO: 3377196 - RNA, 23 nt, Human
cacacagugagucgaggacaggg

SEQ ID NO: 3377197 - RNA, 18 nt, Human
cacacagugcucaaggcc

SEQ ID NO: 3377198 - RNA, 22 nt, Human
cacacauagauuaauggcacug

SEQ ID NO: 3377199 - RNA, 20 nt, Human
cacacauauauauuacaagg

SEQ ID NO: 3377200 - RNA, 21 nt, Human
cacacaucaucuguaagcugu

SEQ ID NO: 3377201 - RNA, 16 nt, Human
cacacauccaccccag

SEQ ID NO: 3377202 - RNA, 13 nt, Human
cacacaucccagc

SEQ ID NO: 3377203 - RNA, 17 nt, Human
cacacaugaaguccaag

SEQ ID NO: 3377204 - RNA, 22 nt, Human
cacacaugaaguccaagcauuu

SEQ ID NO: 3377205 - RNA, 22 nt, Human
cacacaugagcaucaggccagg

SEQ ID NO: 3377206 - RNA, 18 nt, Human
cacacaugcuucccuuuc

SEQ ID NO: 3377207 - RNA, 10 nt, Human
cacacauuuu

SEQ ID NO: 3377208 - RNA, 16 nt, Human
cacacauuuuuuaaau

SEQ ID NO: 3377209 - RNA, 18 nt, Human
cacaccaagcagcaacag

SEQ ID NO: 3377210 - RNA, 18 nt, Human
cacaccaagcugugccac

SEQ ID NO: 3377211 - RNA, 23 nt, Human
cacaccaaucuuacuuuguaaau

SEQ ID NO: 3377212 - RNA, 14 nt, Human
cacaccacuagccu

SEQ ID NO: 3377213 - RNA, 19 nt, Human
cacaccacuagccucaggg

SEQ ID NO: 3377214 - RNA, 14 nt, Human
cacaccaggauaga

SEQ ID NO: 3377215 - RNA, 22 nt, Human
cacaccaggccguccucccggg

SEQ ID NO: 3377216 - RNA, 23 nt, Human
cacaccaggccguccucccgggc

SEQ ID NO: 3377217 - RNA, 22 nt, Human
cacaaguggguacccccaggac

SEQ ID NO: 3377218 - RNA, 13 nt, Human
cacaagugguggu

SEQ ID NO: 3377219 - RNA, 20 nt, Human
cacaaguggugguaacccug

SEQ ID NO: 3377220 - RNA, 15 nt, Human
cacaaguguaaugaa

SEQ ID NO: 3377221 - RNA, 19 nt, Human
cacaauaacacuaaaauuu

SEQ ID NO: 3377222 - RNA, 16 nt, Human
cacaauaacuccuccc

SEQ ID NO: 3377223 - RNA, 17 nt, Human
cacaauaacuccuccca

SEQ ID NO: 3377224 - RNA, 13 nt, Human
cacaauaagcaaa

SEQ ID NO: 3377225 - RNA, 15 nt, Human
cacaauaauuuucua

SEQ ID NO: 3377226 - RNA, 21 nt, Human
cacaauaccuuauuuaaguaa

SEQ ID NO: 3377227 - RNA, 15 nt, Human
cacaauagaauuaua

SEQ ID NO: 3377228 - RNA, 20 nt, Human
cacaauagccgauaucagaa

SEQ ID NO: 3377229 - RNA, 23 nt, Human
cacaauccuaacacauuaucggg

SEQ ID NO: 3377230 - RNA, 22 nt, Human
cacaaucucauugaggagcauu

SEQ ID NO: 3377231 - RNA, 20 nt, Human
cacaaucucggcucacugca

SEQ ID NO: 3377232 - RNA, 23 nt, Human
cacaaucucggcucacugcaucc

SEQ ID NO: 3377233 - RNA, 19 nt, Human
cacaaucugacauucucag

SEQ ID NO: 3377234 - RNA, 22 nt, Human
cacaaugcagugccuuucuucu

SEQ ID NO: 3377235 - RNA, 18 nt, Human
cacaaugucaguauuuca

SEQ ID NO: 3377236 - RNA, 11 nt, Human
cacaaugucuu

SEQ ID NO: 3377237 - RNA, 18 nt, Human
cacaauguucuuuauaua

SEQ ID NO: 3377238 - RNA, 13 nt, Human
cacaauuuuuaau

SEQ ID NO: 3377239 - RNA, 13 nt, Human
cacacaaaaaaag

SEQ ID NO: 3377240 - RNA, 21 nt, Human
cacacaaaauguacccaguau

SEQ ID NO: 3377241 - RNA, 14 nt, Human
cacacaaagagagu

SEQ ID NO: 3377242 - RNA, 12 nt, Human
cacacaaagcag

SEQ ID NO: 3377243 - RNA, 13 nt, Human
cacacaacaaaaa

SEQ ID NO: 3377244 - RNA, 19 nt, Human
cacacaaggauagaugcug

SEQ ID NO: 3377245 - RNA, 19 nt, Human
cacacaaggggcccuugga

SEQ ID NO: 3377246 - RNA, 14 nt, Human
cacacaagugcagu

SEQ ID NO: 3377247 - RNA, 15 nt, Human
cacacacaaagagag

SEQ ID NO: 3377248 - RNA, 9 nt, Human
cacacacac

SEQ ID NO: 3377249 - RNA, 12 nt, Human
cacacacacaag

SEQ ID NO: 3377250 - RNA, 11 nt, Human
cacacacacac

SEQ ID NO: 3377251 - RNA, 14 nt, Human
cacacacacacaca

SEQ ID NO: 3377252 - RNA, 15 nt, Human
cacacacacacacac

SEQ ID NO: 3377253 - RNA, 16 nt, Human
cacacacacacacagg

SEQ ID NO: 3377254 - RNA, 14 nt, Human
cacacacacacaug

SEQ ID NO: 3377255 - RNA, 13 nt, Human
cacacacacacuc

SEQ ID NO: 3377256 - RNA, 12 nt, Human
cacacacacagc

SEQ ID NO: 3377257 - RNA, 13 nt, Human
cacacacacagcc

SEQ ID NO: 3377258 - RNA, 12 nt, Human
cacacacacaua

SEQ ID NO: 3377259 - RNA, 13 nt, Human
cacacacacaugc

SEQ ID NO: 3377260 - RNA, 15 nt, Human
cacacacacaugcau

SEQ ID NO: 3377261 - RNA, 14 nt, Human
cacacacacaugcu

SEQ ID NO: 3377262 - RNA, 13 nt, Human
cacacacacucua

SEQ ID NO: 3377263 - RNA, 11 nt, Human
cacacacagaa

SEQ ID NO: 3377264 - RNA, 14 nt, Human
cacacacagaaaau

SEQ ID NO: 3377265 - RNA, 15 nt, Human
cacacacagaaaaua

SEQ ID NO: 3377266 - RNA, 16 nt, Human
cacacacagaaaauau

SEQ ID NO: 3377267 - RNA, 23 nt, Human
cacacacagaaaauauacuguaa

SEQ ID NO: 3377268 - RNA, 14 nt, Human
cacacacagaggaa

SEQ ID NO: 3377269 - RNA, 14 nt, Human
cacacacagccaca

SEQ ID NO: 3377270 - RNA, 11 nt, Human
cacacacagcu

SEQ ID NO: 3377271 - RNA, 12 nt, Human
cacacacagcuu

SEQ ID NO: 3377272 - RNA, 12 nt, Human
cacacacaggag

SEQ ID NO: 3377273 - RNA, 13 nt, Human
cacacacaggagc

SEQ ID NO: 3377274 - RNA, 18 nt, Human
cacacacaugcauacaca

SEQ ID NO: 3377275 - RNA, 14 nt, Human
cacacaccagagcc

SEQ ID NO: 3377276 - RNA, 13 nt, Human
cacacaccccaau

SEQ ID NO: 3377277 - RNA, 18 nt, Human
cacacacccugaggucag

SEQ ID NO: 3377278 - RNA, 11 nt, Human
cacacaccugu

SEQ ID NO: 3377279 - RNA, 13 nt, Human
cacacaccuguag

SEQ ID NO: 3377280 - RNA, 19 nt, Human
cacacaccuguagucccag

SEQ ID NO: 3377281 - RNA, 18 nt, Human
cacacacgcacgcacaca

SEQ ID NO: 3377282 - RNA, 19 nt, Human
cacacacgcacgcacacac

SEQ ID NO: 3377283 - RNA, 23 nt, Human
cacacacgcacgcacacacacaa

SEQ ID NO: 3377284 - RNA, 21 nt, Human
cacacacgcgcgcgcacacac

SEQ ID NO: 3377285 - RNA, 20 nt, Human
cacacacggaggcauccuac

SEQ ID NO: 3377286 - RNA, 15 nt, Human
cacacacgugagaau

SEQ ID NO: 3377287 - RNA, 15 nt, Human
cacacacucacugcg

SEQ ID NO: 3377288 - RNA, 12 nt, Human
cacacacuuuug

SEQ ID NO: 3377289 - RNA, 17 nt, Human
cacacagaaaauauacu

SEQ ID NO: 3377290 - RNA, 20 nt, Human
cacacagaaaauauacugua

SEQ ID NO: 3377291 - RNA, 21 nt, Human
cacacagaaauauauauacau

SEQ ID NO: 3377292 - RNA, 22 nt, Human
cacacagaaauauauauacaua

SEQ ID NO: 3377293 - RNA, 22 nt, Human
cacacagaaggggacugccacc

SEQ ID NO: 3377294 - RNA, 15 nt, Human
cacacagaaugcaac

SEQ ID NO: 3377295 - RNA, 15 nt, Human
cacacagacuguugu

SEQ ID NO: 3377296 - RNA, 14 nt, Human
cacacagagugguc

SEQ ID NO: 3377297 - RNA, 18 nt, Human
cacacagauacacacaca

SEQ ID NO: 3377298 - RNA, 22 nt, Human
cacacagauuugagcucagccc

SEQ ID NO: 3377299 - RNA, 15 nt, Human
cacacagcagcaguu

SEQ ID NO: 3377300 - RNA, 12 nt, Human
cacacagccaca

SEQ ID NO: 3377301 - RNA, 18 nt, Human
cacacagcuacucucccc

SEQ ID NO: 3377302 - RNA, 14 nt, Human
cacacagcucuguc

SEQ ID NO: 3377303 - RNA, 17 nt, Human
cacacagcucuguccug

SEQ ID NO: 3377304 - RNA, 20 nt, Human
cacacagcucuguccuggga

SEQ ID NO: 3377305 - RNA, 13 nt, Human
cacacagcugccg

SEQ ID NO: 3377306 - RNA, 22 nt, Human
cacacagcuuuuaguacccacc

SEQ ID NO: 3377307 - RNA, 16 nt, Human
cacacaggcauuuccu

SEQ ID NO: 3377308 - RNA, 21 nt, Human
cacacaggcauuuccugggug

SEQ ID NO: 3377309 - RNA, 22 nt, Human
cacacaggggaggugauagcau

SEQ ID NO: 3377310 - RNA, 19 nt, Human
cacacaggggccacccggg

SEQ ID NO: 3377311 - RNA, 23 nt, Human
cacacagggucugcaaggucuuu

SEQ ID NO: 3377312 - RNA, 20 nt, Human
cacacagguggugucacugu

SEQ ID NO: 3377313 - RNA, 22 nt, Human
cacacagguggugucacugucc

SEQ ID NO: 3377314 - RNA, 17 nt, Human
cacacaguauuaaguga

SEQ ID NO: 3377315 - RNA, 13 nt, Human
cacacauaaagga

SEQ ID NO: 3377316 - RNA, 14 nt, Human
cacacaucaucugu

SEQ ID NO: 3377317 - RNA, 16 nt, Human
cacacaucccagccca

SEQ ID NO: 3377318 - RNA, 13 nt, Human
cacacaugcacac

SEQ ID NO: 3377319 - RNA, 14 nt, Human
cacacaugcauaca

SEQ ID NO: 3377320 - RNA, 15 nt, Human
cacacaugcauacac

SEQ ID NO: 3377321 - RNA, 17 nt, Human
cacacaugcauacacac

SEQ ID NO: 3377322 - RNA, 22 nt, Human
cacacauggaaacccauaggcc

SEQ ID NO: 3377323 - RNA, 18 nt, Human
cacacauggcuaauuuuu

SEQ ID NO: 3377324 - RNA, 13 nt, Human
cacacauugcugu

SEQ ID NO: 3377325 - RNA, 22 nt, Human
cacacauuucacugucugucug

SEQ ID NO: 3377326 - RNA, 11 nt, Human
cacacauuuuu

SEQ ID NO: 3377327 - RNA, 12 nt, Human
cacacauuuuuu

SEQ ID NO: 3377328 - RNA, 19 nt, Human
cacacauuuuuuaaaugca

SEQ ID NO: 3377329 - RNA, 16 nt, Human
cacaccaagcugugcc

SEQ ID NO: 3377330 - RNA, 17 nt, Human
cacaccaagcugugcca

SEQ ID NO: 3377331 - RNA, 22 nt, Human
cacaccaagcugugccacccug

SEQ ID NO: 3377332 - RNA, 23 nt, Human
cacaccaagcugugccacccugg

SEQ ID NO: 3377333 - RNA, 21 nt, Human
cacaccaaucuuacuuuguaa

SEQ ID NO: 3377334 - RNA, 15 nt, Human
cacaccagagcccac

SEQ ID NO: 3377335 - RNA, 21 nt, Human
cacaccaggcuugccugcagg

SEQ ID NO: 3377336 - RNA, 22 nt, Human
cacaccaggcuugccugcaggc

SEQ ID NO: 3377337 - RNA, 20 nt, Human
cacaccagggccagccucua

SEQ ID NO: 3377338 - RNA, 16 nt, Human
cacaccagucacauga

SEQ ID NO: 3377339 - RNA, 23 nt, Human
cacaccauaagcuacugccaucc

SEQ ID NO: 3377340 - RNA, 22 nt, Human
cacacccaaagcugagccugca

SEQ ID NO: 3377341 - RNA, 14 nt, Human
cacacccaccgucc

SEQ ID NO: 3377342 - RNA, 15 nt, Human
cacacccacucagcu

SEQ ID NO: 3377343 - RNA, 13 nt, Human
cacacccagccca

SEQ ID NO: 3377344 - RNA, 14 nt, Human
cacacccagccuca

SEQ ID NO: 3377345 - RNA, 14 nt, Human
cacacccagcuacu

SEQ ID NO: 3377346 - RNA, 16 nt, Human
cacaccccaccugcgc

SEQ ID NO: 3377347 - RNA, 17 nt, Human
cacacccucucccagga

SEQ ID NO: 3377348 - RNA, 12 nt, Human
cacacccugagg

SEQ ID NO: 3377349 - RNA, 11 nt, Human
cacacccugca

SEQ ID NO: 3377350 - RNA, 14 nt, Human
cacacccuguuuua

SEQ ID NO: 3377351 - RNA, 17 nt, Human
cacaccgggcacucaga

SEQ ID NO: 3377352 - RNA, 16 nt, Human
cacaccuaagggacau

SEQ ID NO: 3377353 - RNA, 20 nt, Human
cacaccucaguucccuuggc

SEQ ID NO: 3377354 - RNA, 22 nt, Human
cacaccucaguucccuuggccu

SEQ ID NO: 3377355 - RNA, 17 nt, Human
caccaaaguucuaauaa

SEQ ID NO: 3377356 - RNA, 22 nt, Human
caccaaaguucuaauaauuucu

SEQ ID NO: 3377357 - RNA, 16 nt, Human
caccaaaucaaaaucu

SEQ ID NO: 3377358 - RNA, 22 nt, Human
caccaaaucguagcguuuguua

SEQ ID NO: 3377359 - RNA, 13 nt, Human
caccaaaugugcu

SEQ ID NO: 3377360 - RNA, 17 nt, Human
caccaacauacucccau

SEQ ID NO: 3377361 - RNA, 21 nt, Human
caccaacauacucccaucugu

SEQ ID NO: 3377362 - RNA, 23 nt, Human
caccaacaucccauugcccuggu

SEQ ID NO: 3377363 - RNA, 20 nt, Human
caccaacccagccgcugccc

SEQ ID NO: 3377364 - RNA, 15 nt, Human
augcauugcucugga

SEQ ID NO: 3377365 - RNA, 22 nt, Human
caccaugcagugccccuagcuu

SEQ ID NO: 3377366 - RNA, 21 nt, Human
caccaugccaggcuaauuuuu

SEQ ID NO: 3377367 - RNA, 17 nt, Human
caccaugcugcugggga

SEQ ID NO: 3377368 - RNA, 12 nt, Human
caccauggccag

SEQ ID NO: 3377369 - RNA, 22 nt, Human
caccauggcuaaggcaccagcc

SEQ ID NO: 3377370 - RNA, 15 nt, Human
caccauguaaaacaa

SEQ ID NO: 3377371 - RNA, 16 nt, Human
caccauguaaaacaaa

SEQ ID NO: 3377372 - RNA, 18 nt, Human
caccauguuggccaggcu

SEQ ID NO: 3377373 - RNA, 14 nt, Human
caccauuaaaaggg

SEQ ID NO: 3377374 - RNA, 22 nt, Human
caccauuaaaagggauuaccca

SEQ ID NO: 3377375 - RNA, 16 nt, Human
caccauuauaaugaau

SEQ ID NO: 3377376 - RNA, 15 nt, Human
caccauucaggaacc

SEQ ID NO: 3377377 - RNA, 19 nt, Human
caccauugcaacaaaauac

SEQ ID NO: 3377378 - RNA, 15 nt, Human
caccauuuccccagg

SEQ ID NO: 3377379 - RNA, 20 nt, Human
caccauuuccccagggcacg

SEQ ID NO: 3377380 - RNA, 17 nt, Human
caccauuuggauccugu

SEQ ID NO: 3377381 - RNA, 19 nt, Human
caccauuuggcaucccugg

SEQ ID NO: 3377382 - RNA, 24 nt, Human
caccauuuggcaucccugggccuu

SEQ ID NO: 3377383 - RNA, 20 nt, Human
caccauuuuaagucccuguc

SEQ ID NO: 3377384 - RNA, 15 nt, Human
cacccaaaccccggg

SEQ ID NO: 3377385 - RNA, 15 nt, Human
cacccaaccccaagc

SEQ ID NO: 3377386 - RNA, 14 nt, Human
cacccaacgcucca

SEQ ID NO: 3377387 - RNA, 19 nt, Human
cacccaagagauuguuguu

SEQ ID NO: 3377388 - RNA, 16 nt, Human
cacccaagcaggaggc

SEQ ID NO: 3377389 - RNA, 13 nt, Human
cacccaagggccu

SEQ ID NO: 3377390 - RNA, 21 nt, Human
cacccaagggccuggccugag

SEQ ID NO: 3377391 - RNA, 23 nt, Human
cacccaagggccuggccugagcu

SEQ ID NO: 3377392 - RNA, 19 nt, Human
cacccaaucaagggaagaa

SEQ ID NO: 3377393 - RNA, 21 nt, Human
cacccaaucaagggaagaagg

SEQ ID NO: 3377394 - RNA, 17 nt, Human
cacccacagaaagagag

SEQ ID NO: 3377395 - RNA, 19 nt, Human
cacccacaugugacacaua

SEQ ID NO: 3377396 - RNA, 18 nt, Human
cacccaccaacccucagg

SEQ ID NO: 3377397 - RNA, 20 nt, Human
cacccaccaacccucagggc

SEQ ID NO: 3377398 - RNA, 15 nt, Human
cacccaccagggcga

SEQ ID NO: 3377399 - RNA, 22 nt, Human
cacccaccaucaugucuggcua

SEQ ID NO: 3377400 - RNA, 18 nt, Human
cacccaccucagccuccc

SEQ ID NO: 3377401 - RNA, 13 nt, Human
cacccaccucccu

SEQ ID NO: 3377402 - RNA, 13 nt, Human
cacccacucagcu

SEQ ID NO: 3377403 - RNA, 14 nt, Human
cacccacucagcuc

SEQ ID NO: 3377404 - RNA, 15 nt, Human
cacccacucagcucc

SEQ ID NO: 3377405 - RNA, 21 nt, Human
cacccacucuccucugccuca

SEQ ID NO: 3377406 - RNA, 16 nt, Human
cacccagacagcuccc

SEQ ID NO: 3377407 - RNA, 22 nt, Human
cacccagacagcucccucugcc

SEQ ID NO: 3377408 - RNA, 15 nt, Human
cacccagacauaaag

SEQ ID NO: 3377409 - RNA, 23 nt, Human
cacccagacauaaaggaaaagac

SEQ ID NO: 3377410 - RNA, 20 nt, Human
cacccagaugccccuuucug

SEQ ID NO: 3377411 - RNA, 21 nt, Human
cacccagaugggggaaagcac

SEQ ID NO: 3377412 - RNA, 13 nt, Human
cacccagcaauag

SEQ ID NO: 3377413 - RNA, 16 nt, Human
cacccagcccacuucu

SEQ ID NO: 3377414 - RNA, 17 nt, Human
cacccagcccacuucug

SEQ ID NO: 3377415 - RNA, 15 nt, Human
cacccagcccauucu

SEQ ID NO: 3377416 - RNA, 23 nt, Human
cacccagcccauucucucuccug

SEQ ID NO: 3377417 - RNA, 18 nt, Human
cacccagcccuggucuca

SEQ ID NO: 3377418 - RNA, 14 nt, Human
cacccagccucagu

SEQ ID NO: 3377419 - RNA, 11 nt, Human
cacccagccug

SEQ ID NO: 3377420 - RNA, 18 nt, Human
cacccaggaacuccugac

SEQ ID NO: 3377421 - RNA, 16 nt, Human
cacccaggagccccga

SEQ ID NO: 3377422 - RNA, 11 nt, Human
cacccaggagg

SEQ ID NO: 3377423 - RNA, 21 nt, Human
cacccaggccuauguugaucc

SEQ ID NO: 3377424 - RNA, 20 nt, Human
cacccaggcuggagugcagu

SEQ ID NO: 3377425 - RNA, 13 nt, Human
cacccaggggcag

SEQ ID NO: 3377426 - RNA, 16 nt, Human
cacccaggggcagccc

SEQ ID NO: 3377427 - RNA, 17 nt, Human
cacccagucuguucccc

SEQ ID NO: 3377428 - RNA, 17 nt, Human
cacccagugagcacucc

SEQ ID NO: 3377429 - RNA, 20 nt, Human
cacccagugagcacucccaa

SEQ ID NO: 3377430 - RNA, 16 nt, Human
cacccagugcccucuc

SEQ ID NO: 3377431 - RNA, 13 nt, Human
cacccauaucaug

SEQ ID NO: 3377432 - RNA, 14 nt, Human
cacccauccuagag

SEQ ID NO: 3377433 - RNA, 23 nt, Human
cacccauccuaucagccugucuc

SEQ ID NO: 3377434 - RNA, 14 nt, Human
cacccaugaagaca

SEQ ID NO: 3377435 - RNA, 17 nt, Human
cacccauguuucucugg

SEQ ID NO: 3377436 - RNA, 15 nt, Human
cacccauuuuuccuu

SEQ ID NO: 3377437 - RNA, 18 nt, Human
cacccauuuuuccuuuug

SEQ ID NO: 3377438 - RNA, 13 nt, Human
caccccacccucc

SEQ ID NO: 3377439 - RNA, 15 nt, Human
caccccacccucccu

SEQ ID NO: 3377440 - RNA, 12 nt, Human
caccccaccucu

SEQ ID NO: 3377441 - RNA, 15 nt, Human
caccccaccucuucc

SEQ ID NO: 3377442 - RNA, 14 nt, Human
caccccaccugcag

SEQ ID NO: 3377443 - RNA, 17 nt, Human
caccccagagccacaca

SEQ ID NO: 3377444 - RNA, 18 nt, Human
caccccagagccacacau

SEQ ID NO: 3377445 - RNA, 12 nt, Human
caccccagcccc

SEQ ID NO: 3377446 - RNA, 18 nt, Human
caccccagcugcuccccu

SEQ ID NO: 3377447 - RNA, 22 nt, Human
caccccagcugcuccccucccu

SEQ ID NO: 3377448 - RNA, 16 nt, Human
caccccagggcagcca

SEQ ID NO: 3377449 - RNA, 17 nt, Human
caccccagugcacccac

SEQ ID NO: 3377450 - RNA, 22 nt, Human
caccccauagugaccggcugcu

SEQ ID NO: 3377451 - RNA, 15 nt, Human
caccccaucccacac

SEQ ID NO: 3377452 - RNA, 12 nt, Human
caccccauccuc

SEQ ID NO: 3377453 - RNA, 12 nt, Human
caccccaugcca

SEQ ID NO: 3377454 - RNA, 15 nt, Human
caccccaugccaaag

SEQ ID NO: 3377455 - RNA, 11 nt, Human
cacccccacca

SEQ ID NO: 3377456 - RNA, 14 nt, Human
cacccccaccccuu

SEQ ID NO: 3377457 - RNA, 13 nt, Human
cacccccagcccc

SEQ ID NO: 3377458 - RNA, 19 nt, Human
cacccccagccccgacucc

SEQ ID NO: 3377459 - RNA, 23 nt, Human
cacccccagccccgacuccagcc

SEQ ID NO: 3377460 - RNA, 12 nt, Human
cacccccagccu

SEQ ID NO: 3377461 - RNA, 13 nt, Human
cacccccagccug

SEQ ID NO: 3377462 - RNA, 15 nt, Human
cacccccagccuggg

SEQ ID NO: 3377463 - RNA, 16 nt, Human
cacccccagccugggc

SEQ ID NO: 3377464 - RNA, 18 nt, Human
cacccccagccugggccu

SEQ ID NO: 3377465 - RNA, 13 nt, Human
cacccccagcuca

SEQ ID NO: 3377466 - RNA, 14 nt, Human
cacccccagcucaa

SEQ ID NO: 3377467 - RNA, 12 nt, Human
cacccccagcuu

SEQ ID NO: 3377468 - RNA, 13 nt, Human
cacccccaucucu

SEQ ID NO: 3377469 - RNA, 15 nt, Human
caccccccaagcugu

SEQ ID NO: 3377470 - RNA, 12 nt, Human
caccccccucau

SEQ ID NO: 3377471 - RNA, 14 nt, Human
cacccccgcuggag

SEQ ID NO: 3377472 - RNA, 11 nt, Human
cacccccuccc

SEQ ID NO: 3377473 - RNA, 14 nt, Human
cacccccucccacc

SEQ ID NO: 3377474 - RNA, 15 nt, Human
cacccccucccaccc

SEQ ID NO: 3377475 - RNA, 18 nt, Human
cacccccuccccagggga

SEQ ID NO: 3377476 - RNA, 16 nt, Human
cacccccuccccgccc

SEQ ID NO: 3377477 - RNA, 16 nt, Human
cacccccucccuggcc

SEQ ID NO: 3377478 - RNA, 16 nt, Human
cacccccuccugcugc

SEQ ID NO: 3377479 - RNA, 13 nt, Human
cacccccugcagc

SEQ ID NO: 3377480 - RNA, 14 nt, Human
cacccccugcagcu

SEQ ID NO: 3377481 - RNA, 17 nt, Human
cacccccuucagugccc

SEQ ID NO: 3377482 - RNA, 13 nt, Human
cacccccuucccc

SEQ ID NO: 3377483 - RNA, 22 nt, Human
cacccccuucucugcccauucc

SEQ ID NO: 3377484 - RNA, 23 nt, Human
cacccccuucucugcccauuccc

SEQ ID NO: 3377485 - RNA, 18 nt, Human
cacccccuucucugcucc

SEQ ID NO: 3377486 - RNA, 14 nt, Human
cacccccuuuccug

SEQ ID NO: 3377487 - RNA, 16 nt, Human
caccccgacuuuuguu

SEQ ID NO: 3377488 - RNA, 15 nt, Human
caccccgagggcuga

SEQ ID NO: 3377489 - RNA, 19 nt, Human
caccccggcaggcccugca

SEQ ID NO: 3377490 - RNA, 20 nt, Human
caccccggcaggcccugcag

SEQ ID NO: 3377491 - RNA, 16 nt, Human
caccccggccaccugc

SEQ ID NO: 3377492 - RNA, 17 nt, Human
caccccggggacccugu

SEQ ID NO: 3377493 - RNA, 15 nt, Human
caccccguagauucc

SEQ ID NO: 3377494 - RNA, 23 nt, Human
caccccgucugggguucagcccc

SEQ ID NO: 3377495 - RNA, 23 nt, Human
caccccuaaaagaaacccugcac

SEQ ID NO: 3377496 - RNA, 14 nt, Human
caccccuaaagaga

SEQ ID NO: 3377497 - RNA, 12 nt, Human
caccccuaccac

SEQ ID NO: 3377498 - RNA, 17 nt, Human
caccccuaccccuggcu

SEQ ID NO: 3377499 - RNA, 12 nt, Human
caccccuaggac

SEQ ID NO: 3377500 - RNA, 17 nt, Human
caccccucacucuggcc

SEQ ID NO: 3377501 - RNA, 18 nt, Human
caccccucaguugugcag

SEQ ID NO: 3377502 - RNA, 22 nt, Human
caccccuccagaacacggcuca

SEQ ID NO: 3377503 - RNA, 15 nt, Human
caccccucccuuucu

SEQ ID NO: 3377504 - RNA, 18 nt, Human
caccccucccuuucuccc

SEQ ID NO: 3377505 - RNA, 14 nt, Human
caccccuccuuccu

SEQ ID NO: 3377506 - RNA, 15 nt, Human
caccccucucugcau

SEQ ID NO: 3377507 - RNA, 14 nt, Human
caccccugccccca

SEQ ID NO: 3377508 - RNA, 15 nt, Human
caccccugcccuggg

SEQ ID NO: 3377509 - RNA, 18 nt, Human
caccccugccuccacccu

SEQ ID NO: 3377510 - RNA, 14 nt, Human
caccccugggggcu

SEQ ID NO: 3377511 - RNA, 17 nt, Human
caccgccuugcccagcc

SEQ ID NO: 3377512 - RNA, 18 nt, Human
caccgccuugcccagccu

SEQ ID NO: 3377513 - RNA, 19 nt, Human
caccgcgggugugggaaag

SEQ ID NO: 3377514 - RNA, 14 nt, Human
caccgcuccccagc

SEQ ID NO: 3377515 - RNA, 17 nt, Human
caccgcuccccagccca

SEQ ID NO: 3377516 - RNA, 22 nt, Human
caccgcugccuaaguggcugcu

SEQ ID NO: 3377517 - RNA, 21 nt, Human
caccggauccuggguggucug

SEQ ID NO: 3377518 - RNA, 22 nt, Human
caccggauccuggguggucugc

SEQ ID NO: 3377519 - RNA, 15 nt, Human
caccggcuggccugg

SEQ ID NO: 3377520 - RNA, 16 nt, Human
caccggcuggccuggc

SEQ ID NO: 3377521 - RNA, 18 nt, Human
caccgggccacagagaaa

SEQ ID NO: 3377522 - RNA, 14 nt, Human
caccgggccacucc

SEQ ID NO: 3377523 - RNA, 17 nt, Human
caccggggccucggacu

SEQ ID NO: 3377524 - RNA, 17 nt, Human
caccgguccagcuggcc

SEQ ID NO: 3377525 - RNA, 14 nt, Human
caccguacugugga

SEQ ID NO: 3377526 - RNA, 15 nt, Human
caccgucauggcuua

SEQ ID NO: 3377527 - RNA, 19 nt, Human
caccgucauggcuuaaugu

SEQ ID NO: 3377528 - RNA, 23 nt, Human
caccgucauggcuuaauguuuau

SEQ ID NO: 3377529 - RNA, 15 nt, Human
caccguccgcccugc

SEQ ID NO: 3377530 - RNA, 20 nt, Human
caccgugccuggccacgccc

SEQ ID NO: 3377531 - RNA, 18 nt, Human
caccguggaccuuccugc

SEQ ID NO: 3377532 - RNA, 19 nt, Human
cacagccaggggagcagag

SEQ ID NO: 3377533 - RNA, 19 nt, Human
cacagccaggugccuugga

SEQ ID NO: 3377534 - RNA, 17 nt, Human
cacagccaucccagccu

SEQ ID NO: 3377535 - RNA, 20 nt, Human
cacagccaucccagccuugg

SEQ ID NO: 3377536 - RNA, 17 nt, Human
cacagcccacguccugu

SEQ ID NO: 3377537 - RNA, 13 nt, Human
cacagcccagcca

SEQ ID NO: 3377538 - RNA, 14 nt, Human
cacagcccagcccg

SEQ ID NO: 3377539 - RNA, 14 nt, Human
cacagccccaucug

SEQ ID NO: 3377540 - RNA, 18 nt, Human
cacagcccgcaugcagca

SEQ ID NO: 3377541 - RNA, 21 nt, Human
cacagcccgcaugcagcagcu

SEQ ID NO: 3377542 - RNA, 18 nt, Human
cacagcccucccgccccu

SEQ ID NO: 3377543 - RNA, 10 nt, Human
cacagcccug

SEQ ID NO: 3377544 - RNA, 13 nt, Human
cacagcccuguca

SEQ ID NO: 3377545 - RNA, 16 nt, Human
cacagcccugucagca

SEQ ID NO: 3377546 - RNA, 19 nt, Human
cacagcccugucagcauga

SEQ ID NO: 3377547 - RNA, 23 nt, Human
cacagcccugucagugcagcccg

SEQ ID NO: 3377548 - RNA, 14 nt, Human
cacagccgcagccu

SEQ ID NO: 3377549 - RNA, 21 nt, Human
cacagccgcagccucccucug

SEQ ID NO: 3377550 - RNA, 19 nt, Human
cacagccggggccugccua

SEQ ID NO: 3377551 - RNA, 13 nt, Human
cacagccuagcac

SEQ ID NO: 3377552 - RNA, 21 nt, Human
cacagccuauaggccaaugca

SEQ ID NO: 3377553 - RNA, 17 nt, Human
cacagccuccccugcca

SEQ ID NO: 3377554 - RNA, 20 nt, Human
cacagccuccccugccaggg

SEQ ID NO: 3377555 - RNA, 21 nt, Human
cacagccuccccugccagggc

SEQ ID NO: 3377556 - RNA, 14 nt, Human
cacagccuccucug

SEQ ID NO: 3377557 - RNA, 15 nt, Human
cacagccuccucugu

SEQ ID NO: 3377558 - RNA, 19 nt, Human
cacagccuccucugucugc

SEQ ID NO: 3377559 - RNA, 13 nt, Human
cacagccugcacu

SEQ ID NO: 3377560 - RNA, 19 nt, Human
cacagccugggccccagcu

SEQ ID NO: 3377561 - RNA, 14 nt, Human
cacagcgccagccu

SEQ ID NO: 3377562 - RNA, 22 nt, Human
cacagcgcuggccgggaccccg

SEQ ID NO: 3377563 - RNA, 20 nt, Human
cacagcggagguguggagcc

SEQ ID NO: 3377564 - RNA, 20 nt, Human
cacagcgucccuagcaguga

SEQ ID NO: 3377565 - RNA, 22 nt, Human
cacagcguuaugugucugccac

SEQ ID NO: 3377566 - RNA, 21 nt, Human
cacagcuaacacacagcuccc

SEQ ID NO: 3377567 - RNA, 15 nt, Human
cacagcuaacaugga

SEQ ID NO: 3377568 - RNA, 15 nt, Human
cacagcucaggaggc

SEQ ID NO: 3377569 - RNA, 14 nt, Human
cacagcucccaccc

SEQ ID NO: 3377570 - RNA, 15 nt, Human
cacagcucccacccc

SEQ ID NO: 3377571 - RNA, 22 nt, Human
cacagcucccaccccacccccu

SEQ ID NO: 3377572 - RNA, 14 nt, Human
cacagcucccugcc

SEQ ID NO: 3377573 - RNA, 13 nt, Human
cacagcuccuuuu

SEQ ID NO: 3377574 - RNA, 16 nt, Human
cacagcucuguccugg

SEQ ID NO: 3377575 - RNA, 14 nt, Human
cacagcucuucucc

SEQ ID NO: 3377576 - RNA, 20 nt, Human
cacagcucuucuccaggcug

SEQ ID NO: 3377577 - RNA, 14 nt, Human
cacagcugccucuu

SEQ ID NO: 3377578 - RNA, 15 nt, Human
cacagcugccucuuc

SEQ ID NO: 3377579 - RNA, 12 nt, Human
cacagcugcugg

SEQ ID NO: 3377580 - RNA, 14 nt, Human
cacagcugcuuucu

SEQ ID NO: 3377581 - RNA, 20 nt, Human
cacagcugcuuucuguuguc

SEQ ID NO: 3377582 - RNA, 21 nt, Human
cacagcuggagcucucaaacu

SEQ ID NO: 3377583 - RNA, 14 nt, Human
cacagcuggccucc

SEQ ID NO: 3377584 - RNA, 22 nt, Human
cacagcugggguggggaccuca

SEQ ID NO: 3377585 - RNA, 23 nt, Human
cacagcugggguggggaccucag

SEQ ID NO: 3377586 - RNA, 14 nt, Human
cacagcuguagugg

SEQ ID NO: 3377587 - RNA, 17 nt, Human
cacagcuguucuucugu

SEQ ID NO: 3377588 - RNA, 19 nt, Human
cacagcuucagccaggagc

SEQ ID NO: 3377589 - RNA, 22 nt, Human
cacagcuucauuuccugugucu

SEQ ID NO: 3377590 - RNA, 16 nt, Human
cacagcuuccccucuc

SEQ ID NO: 3377591 - RNA, 23 nt, Human
cacagcuuccccucucuccuccu

SEQ ID NO: 3377592 - RNA, 21 nt, Human
cacagcuuccuguccccaucu

SEQ ID NO: 3377593 - RNA, 22 nt, Human
cacagcuuccuguccccaucug

SEQ ID NO: 3377594 - RNA, 21 nt, Human
cacagcuugaccugaggcugu

SEQ ID NO: 3377595 - RNA, 22 nt, Human
cacagcuugaccugaggcugug

SEQ ID NO: 3377596 - RNA, 12 nt, Human
cacagcuugggg

SEQ ID NO: 3377597 - RNA, 15 nt, Human
cacagcuuggggcca

SEQ ID NO: 3377598 - RNA, 18 nt, Human
cacagcuuggggccaucg

SEQ ID NO: 3377599 - RNA, 14 nt, Human
cacagcuuguuuug

SEQ ID NO: 3377600 - RNA, 16 nt, Human
cacagcuuguuuugga

SEQ ID NO: 3377601 - RNA, 12 nt, Human
cacagcuuuugc

SEQ ID NO: 3377602 - RNA, 13 nt, Human
cacagcuuuugca

SEQ ID NO: 3377603 - RNA, 14 nt, Human
cacagcuuuugcaa

SEQ ID NO: 3377604 - RNA, 23 nt, Human
cacaggaaaccaacacccaaagc

SEQ ID NO: 3377605 - RNA, 13 nt, Human
cacaggaaaccag

SEQ ID NO: 3377606 - RNA, 22 nt, Human
cacaggaagccugcaguccugg

SEQ ID NO: 3377607 - RNA, 22 nt, Human
cacaggacaugcgguagccagc

SEQ ID NO: 3377608 - RNA, 15 nt, Human
cacaggacauuucuc

SEQ ID NO: 3377609 - RNA, 15 nt, Human
cacaggagacacugu

SEQ ID NO: 3377610 - RNA, 19 nt, Human
cacaggagaggauggccca

SEQ ID NO: 3377611 - RNA, 15 nt, Human
cacaggagcuaccug

SEQ ID NO: 3377612 - RNA, 16 nt, Human
cacaggagcuaccugu

SEQ ID NO: 3377613 - RNA, 20 nt, Human
cacaggagcuaccugugugg

SEQ ID NO: 3377614 - RNA, 14 nt, Human
cacaggaggcaggc

SEQ ID NO: 3377615 - RNA, 19 nt, Human
cacaggagggagggggaag

SEQ ID NO: 3377616 - RNA, 16 nt, Human
cacaggaguguccucu

SEQ ID NO: 3377617 - RNA, 12 nt, Human
cacaggaucagu

SEQ ID NO: 3377618 - RNA, 19 nt, Human
cacaggauccuauucucac

SEQ ID NO: 3377619 - RNA, 16 nt, Human
cacaggaugaaggcaa

SEQ ID NO: 3377620 - RNA, 16 nt, Human
cacaggaugcuggccu

SEQ ID NO: 3377621 - RNA, 17 nt, Human
cacaggaugcuguguug

SEQ ID NO: 3377622 - RNA, 20 nt, Human
cacaggauggucucugccau

SEQ ID NO: 3377623 - RNA, 20 nt, Human
cacaggcaaaauccuugcuu

SEQ ID NO: 3377624 - RNA, 23 nt, Human
cacaggcaacugaggcagacagc

SEQ ID NO: 3377625 - RNA, 14 nt, Human
cacaggcagcauuu

SEQ ID NO: 3377626 - RNA, 11 nt, Human
cacaggcagcu

SEQ ID NO: 3377627 - RNA, 21 nt, Human
cacaggcagcuggaugagacu

SEQ ID NO: 3377628 - RNA, 16 nt, Human
cacaggcagcuuucua

SEQ ID NO: 3377629 - RNA, 18 nt, Human
cacaggcagcuuucuaga

SEQ ID NO: 3377630 - RNA, 12 nt, Human
cacaggcagggc

SEQ ID NO: 3377631 - RNA, 13 nt, Human
cacaggcagggca

SEQ ID NO: 3377632 - RNA, 14 nt, Human
cacaggcagggcag

SEQ ID NO: 3377633 - RNA, 20 nt, Human
cacaggcauuuccugggugg

SEQ ID NO: 3377634 - RNA, 16 nt, Human
cacaggccacccugug

SEQ ID NO: 3377635 - RNA, 20 nt, Human
cacaggcccggcuccaggcu

SEQ ID NO: 3377636 - RNA, 15 nt, Human
cacaggcccuuccuc

SEQ ID NO: 3377637 - RNA, 20 nt, Human
cacaggcccuuuccucaggc

SEQ ID NO: 3377638 - RNA, 22 nt, Human
cacaggcccuuuccucaggcaa

SEQ ID NO: 3377639 - RNA, 12 nt, Human
cacaggccuccc

SEQ ID NO: 3377640 - RNA, 13 nt, Human
cacaggccucccu

SEQ ID NO: 3377641 - RNA, 15 nt, Human
cacaggccucccugu

SEQ ID NO: 3377642 - RNA, 19 nt, Human
cacaggccugagauuucau

SEQ ID NO: 3377643 - RNA, 18 nt, Human
cacaggccuguguagcug

SEQ ID NO: 3377644 - RNA, 23 nt, Human
cacaggccuguguagcugugacc

SEQ ID NO: 3377645 - RNA, 13 nt, Human
cacaggcucaggc

SEQ ID NO: 3377646 - RNA, 16 nt, Human
cacaggcucaggcagg

SEQ ID NO: 3377647 - RNA, 14 nt, Human
cacaggcugagugc

SEQ ID NO: 3377648 - RNA, 17 nt, Human
cacaggcugagugcagg

SEQ ID NO: 3377649 - RNA, 21 nt, Human
cacaggcugagugcaggccca

SEQ ID NO: 3377650 - RNA, 22 nt, Human
cacaggcugagugcaggcccac

SEQ ID NO: 3377651 - RNA, 13 nt, Human
cacaggcugggcu

SEQ ID NO: 3377652 - RNA, 16 nt, Human
cacaggcugggcuggg

SEQ ID NO: 3377653 - RNA, 19 nt, Human
cacaggcugggcugggcac

SEQ ID NO: 3377654 - RNA, 13 nt, Human
cacagggaagugg

SEQ ID NO: 3377655 - RNA, 14 nt, Human
cacagggcagagcc

SEQ ID NO: 3377656 - RNA, 19 nt, Human
cacccguucugcuggccug

SEQ ID NO: 3377657 - RNA, 12 nt, Human
cacccuaccugu

SEQ ID NO: 3377658 - RNA, 14 nt, Human
cacccuaccuguuc

SEQ ID NO: 3377659 - RNA, 16 nt, Human
cacccuaguuucccug

SEQ ID NO: 3377660 - RNA, 15 nt, Human
cacccucacucugcc

SEQ ID NO: 3377661 - RNA, 18 nt, Human
cacccucacucugccagg

SEQ ID NO: 3377662 - RNA, 22 nt, Human
cacccucacucugccagggcag

SEQ ID NO: 3377663 - RNA, 20 nt, Human
cacccucagaugcacaugag

SEQ ID NO: 3377664 - RNA, 17 nt, Human
cacccucagcaccccuu

SEQ ID NO: 3377665 - RNA, 21 nt, Human
cacccucagcaccccuuccau

SEQ ID NO: 3377666 - RNA, 13 nt, Human
cacccucaugcug

SEQ ID NO: 3377667 - RNA, 14 nt, Human
cacccucaugcugu

SEQ ID NO: 3377668 - RNA, 13 nt, Human
cacccuccacccu

SEQ ID NO: 3377669 - RNA, 14 nt, Human
cacccuccaccucu

SEQ ID NO: 3377670 - RNA, 17 nt, Human
cacccuccaccuuccau

SEQ ID NO: 3377671 - RNA, 16 nt, Human
cacccuccagagacaa

SEQ ID NO: 3377672 - RNA, 16 nt, Human
cacccucccacccggc

SEQ ID NO: 3377673 - RNA, 14 nt, Human
cacccuccccuccc

SEQ ID NO: 3377674 - RNA, 13 nt, Human
cacccuccccucu

SEQ ID NO: 3377675 - RNA, 17 nt, Human
cacccuccccucucuug

SEQ ID NO: 3377676 - RNA, 23 nt, Human
cacccucccuccgauccuuccuc

SEQ ID NO: 3377677 - RNA, 16 nt, Human
cacccuccugucuucc

SEQ ID NO: 3377678 - RNA, 18 nt, Human
cacccuccugucuuccca

SEQ ID NO: 3377679 - RNA, 22 nt, Human
cacccuccugucuucccagggu

SEQ ID NO: 3377680 - RNA, 14 nt, Human
cacccuccuuccca

SEQ ID NO: 3377681 - RNA, 23 nt, Human
cacccuccuucccacucuucuca

SEQ ID NO: 3377682 - RNA, 12 nt, Human
cacccucugagc

SEQ ID NO: 3377683 - RNA, 12 nt, Human
cacccucuuccu

SEQ ID NO: 3377684 - RNA, 18 nt, Human
cacccugaaugguuccau

SEQ ID NO: 3377685 - RNA, 18 nt, Human
cacccugaggagucugag

SEQ ID NO: 3377686 - RNA, 12 nt, Human
cacccugagggc

SEQ ID NO: 3377687 - RNA, 13 nt, Human
cacccugcaaggc

SEQ ID NO: 3377688 - RNA, 14 nt, Human
cacccugcaaggcc

SEQ ID NO: 3377689 - RNA, 21 nt, Human
cacccugcaaggcccacagga

SEQ ID NO: 3377690 - RNA, 23 nt, Human
cacccugcaaggcccacaggagg

SEQ ID NO: 3377691 - RNA, 13 nt, Human
cacccugccugcc

SEQ ID NO: 3377692 - RNA, 19 nt, Human
cacccugccuuaucuugca

SEQ ID NO: 3377693 - RNA, 12 nt, Human
cacccugcucuc

SEQ ID NO: 3377694 - RNA, 17 nt, Human
cacccugcugcuggugc

SEQ ID NO: 3377695 - RNA, 20 nt, Human
cacccugcugcuggugcaca

SEQ ID NO: 3377696 - RNA, 11 nt, Human
cacccuggagg

SEQ ID NO: 3377697 - RNA, 21 nt, Human
cacccuggccgaguccaagcu

SEQ ID NO: 3377698 - RNA, 22 nt, Human
cacccuggccgaguccaagcug

SEQ ID NO: 3377699 - RNA, 17 nt, Human
cacccugggagacagac

SEQ ID NO: 3377700 - RNA, 12 nt, Human
cacccugggccc

SEQ ID NO: 3377701 - RNA, 23 nt, Human
cacccugggcccugggcuggaau

SEQ ID NO: 3377702 - RNA, 12 nt, Human
cacccugggcuc

SEQ ID NO: 3377703 - RNA, 15 nt, Human
cacccugggcucugu

SEQ ID NO: 3377704 - RNA, 15 nt, Human
cacccuggggagaaa

SEQ ID NO: 3377705 - RNA, 16 nt, Human
cacccuggggagaaag

SEQ ID NO: 3377706 - RNA, 14 nt, Human
cacccuggggccug

SEQ ID NO: 3377707 - RNA, 20 nt, Human
cacccuggggccuggaccug

SEQ ID NO: 3377708 - RNA, 15 nt, Human
cacccuggugggcca

SEQ ID NO: 3377709 - RNA, 16 nt, Human
cacccuggugggccaa

SEQ ID NO: 3377710 - RNA, 16 nt, Human
cacccuguacuguucu

SEQ ID NO: 3377711 - RNA, 15 nt, Human
cacccugucccccag

SEQ ID NO: 3377712 - RNA, 19 nt, Human
cacccugucccccagcucu

SEQ ID NO: 3377713 - RNA, 15 nt, Human
cacccugugaugggg

SEQ ID NO: 3377714 - RNA, 18 nt, Human
cacccuguggucuuccuc

SEQ ID NO: 3377715 - RNA, 17 nt, Human
cacccuguuccugcugc

SEQ ID NO: 3377716 - RNA, 18 nt, Human
cacccuguuuggauuuuu

SEQ ID NO: 3377717 - RNA, 19 nt, Human
cacccuucucccacucucc

SEQ ID NO: 3377718 - RNA, 23 nt, Human
cacccuucucccacucuccuagg

SEQ ID NO: 3377719 - RNA, 13 nt, Human
cacccuucuuucc

SEQ ID NO: 3377720 - RNA, 18 nt, Human
cacccuucuuuccucuuc

SEQ ID NO: 3377721 - RNA, 19 nt, Human
cacccuucuuuccucuucc

SEQ ID NO: 3377722 - RNA, 13 nt, Human
cacccuucuuuuc

SEQ ID NO: 3377723 - RNA, 15 nt, Human
cacccuucuuuucuc

SEQ ID NO: 3377724 - RNA, 19 nt, Human
cacccuucuuuucucaugu

SEQ ID NO: 3377725 - RNA, 20 nt, Human
cacccuuggagcucugaguu

SEQ ID NO: 3377726 - RNA, 22 nt, Human
cacccuuggaggcugucuucuc

SEQ ID NO: 3377727 - RNA, 12 nt, Human
cacccuuggccu

SEQ ID NO: 3377728 - RNA, 13 nt, Human
cacccuuggccug

SEQ ID NO: 3377729 - RNA, 18 nt, Human
cacccuuggccugucuca

SEQ ID NO: 3377730 - RNA, 21 nt, Human
cacccuuggccugucucaucc

SEQ ID NO: 3377731 - RNA, 19 nt, Human
cacccuuucuugacaaaac

SEQ ID NO: 3377732 - RNA, 22 nt, Human
cacccuuugcugugaggcuguc

SEQ ID NO: 3377733 - RNA, 21 nt, Human
cacccuuuuccagcuggauga

SEQ ID NO: 3377734 - RNA, 15 nt, Human
augggaaugaagcuu

SEQ ID NO: 3377735 - RNA, 20 nt, Human
augggacauuugcucaugga

SEQ ID NO: 3377736 - RNA, 13 nt, Human
augggacauuuuu

SEQ ID NO: 3377737 - RNA, 13 nt, Human
augggacugggag

SEQ ID NO: 3377738 - RNA, 16 nt, Human
augggacugggagggc

SEQ ID NO: 3377739 - RNA, 23 nt, Human
augggacuucuuuucacauucuu

SEQ ID NO: 3377740 - RNA, 19 nt, Human
augggagagaagagaaugc

SEQ ID NO: 3377741 - RNA, 15 nt, Human
augggagaguagaug

SEQ ID NO: 3377742 - RNA, 23 nt, Human
augggagagugucaaccagacag

SEQ ID NO: 3377743 - RNA, 20 nt, Human
augggagcaguccaugcaug

SEQ ID NO: 3377744 - RNA, 13 nt, Human
augggagcucaug

SEQ ID NO: 3377745 - RNA, 15 nt, Human
augggagcuccucuc

SEQ ID NO: 3377746 - RNA, 21 nt, Human
augggagcugucaagcaugua

SEQ ID NO: 3377747 - RNA, 18 nt, Human
augggaggaaagagagca

SEQ ID NO: 3377748 - RNA, 15 nt, Human
augggaggcuggagu

SEQ ID NO: 3377749 - RNA, 23 nt, Human
augggagggggcuugaagccaaa

SEQ ID NO: 3377750 - RNA, 16 nt, Human
augggagugagacaga

SEQ ID NO: 3377751 - RNA, 14 nt, Human
augggauaaaugcc

SEQ ID NO: 3377752 - RNA, 18 nt, Human
augggaugauugaagaaa

SEQ ID NO: 3377753 - RNA, 18 nt, Human
augggaugguggagggcc

SEQ ID NO: 3377754 - RNA, 21 nt, Human
augggauguaugaauacagca

SEQ ID NO: 3377755 - RNA, 14 nt, Human
augggauucuggac

SEQ ID NO: 3377756 - RNA, 17 nt, Human
augggcaaaacugaauu

SEQ ID NO: 3377757 - RNA, 19 nt, Human
augggcaacccccagccug

SEQ ID NO: 3377758 - RNA, 13 nt, Human
augggcagagcag

SEQ ID NO: 3377759 - RNA, 15 nt, Human
augggcagagcagag

SEQ ID NO: 3377760 - RNA, 14 nt, Human
augggcagagccca

SEQ ID NO: 3377761 - RNA, 13 nt, Human
augggcaggagac

SEQ ID NO: 3377762 - RNA, 13 nt, Human
augggcauggugu

SEQ ID NO: 3377763 - RNA, 13 nt, Human
augggccaccgcc

SEQ ID NO: 3377764 - RNA, 23 nt, Human
augggccacugaaaucugucaag

SEQ ID NO: 3377765 - RNA, 15 nt, Human
augggccagccccuc

SEQ ID NO: 3377766 - RNA, 18 nt, Human
augggccuccugugugug

SEQ ID NO: 3377767 - RNA, 12 nt, Human
augggccugagu

SEQ ID NO: 3377768 - RNA, 18 nt, Human
augggccugccgggcuga

SEQ ID NO: 3377769 - RNA, 20 nt, Human
augggccugccgggcugagg

SEQ ID NO: 3377770 - RNA, 22 nt, Human
augggccugccgggcugagggc

SEQ ID NO: 3377771 - RNA, 20 nt, Human
augggccuggccaccucucu

SEQ ID NO: 3377772 - RNA, 21 nt, Human
augggcgccccccccucccca

SEQ ID NO: 3377773 - RNA, 16 nt, Human
augggcuaaugaagau

SEQ ID NO: 3377774 - RNA, 20 nt, Human
augggcuucacuguauaaau

SEQ ID NO: 3377775 - RNA, 20 nt, Human
auggggaaaaaaaucaucua

SEQ ID NO: 3377776 - RNA, 23 nt, Human
auggggagaucggggccagaggc

SEQ ID NO: 3377777 - RNA, 14 nt, Human
auggggaggaggag

SEQ ID NO: 3377778 - RNA, 11 nt, Human
auggggagggg

SEQ ID NO: 3377779 - RNA, 22 nt, Human
auggggauaaaaugacuacuua

SEQ ID NO: 3377780 - RNA, 17 nt, Human
auggggaucacagagac

SEQ ID NO: 3377781 - RNA, 12 nt, Human
auggggaugcag

SEQ ID NO: 3377782 - RNA, 12 nt, Human
auggggccacag

SEQ ID NO: 3377783 - RNA, 15 nt, Human
auggggccagaucca

SEQ ID NO: 3377784 - RNA, 22 nt, Human
auggggccagauccagccuggg

SEQ ID NO: 3377785 - RNA, 20 nt, Human
auggggcccugccuccuuug

SEQ ID NO: 3377786 - RNA, 12 nt, Human
auggggccucug

SEQ ID NO: 3377787 - RNA, 19 nt, Human
auggggcugaacggggaga

SEQ ID NO: 3377788 - RNA, 22 nt, Human
auggggcugaacggggagaaaa

SEQ ID NO: 3377789 - RNA, 19 nt, Human
auggggcugacagcacuaa

SEQ ID NO: 3377790 - RNA, 24 nt, Human
auggggcugcaccggcuggccugg

SEQ ID NO: 3377791 - RNA, 21 nt, Human
augggggaaagcaaagcacag

SEQ ID NO: 3377792 - RNA, 22 nt, Human
augggggaaagcacaggugggc

SEQ ID NO: 3377793 - RNA, 18 nt, Human
augggggaacucagaucc

SEQ ID NO: 3377794 - RNA, 19 nt, Human
augggggaacucagaucca

SEQ ID NO: 3377795 - RNA, 19 nt, Human
augggggaggggggaagga

SEQ ID NO: 3377796 - RNA, 21 nt, Human
augggggagucugaagcagau

SEQ ID NO: 3377797 - RNA, 15 nt, Human
augggggcagggcug

SEQ ID NO: 3377798 - RNA, 15 nt, Human
augggggccuggauu

SEQ ID NO: 3377799 - RNA, 16 nt, Human
auggggguagcagcug

SEQ ID NO: 3377800 - RNA, 19 nt, Human
auggggguagcagcuggac

SEQ ID NO: 3377801 - RNA, 21 nt, Human
cacucugggcacacucugcca

SEQ ID NO: 3377802 - RNA, 14 nt, Human
cacucugggcucca

SEQ ID NO: 3377803 - RNA, 18 nt, Human
cacucuggucuuggaauu

SEQ ID NO: 3377804 - RNA, 17 nt, Human
cacucuguucauuccuc

SEQ ID NO: 3377805 - RNA, 18 nt, Human
cacucuguucauuccucc

SEQ ID NO: 3377806 - RNA, 22 nt, Human
cacucuguucauuccuccaggu

SEQ ID NO: 3377807 - RNA, 14 nt, Human
cacucuuaaagcaa

SEQ ID NO: 3377808 - RNA, 16 nt, Human
cacucuuaagcuuccg

SEQ ID NO: 3377809 - RNA, 22 nt, Human
cacucuuagcccaugcuguuuu

SEQ ID NO: 3377810 - RNA, 19 nt, Human
cacucuuaggcacuuuggg

SEQ ID NO: 3377811 - RNA, 19 nt, Human
cacucuuauugcccacgcu

SEQ ID NO: 3377812 - RNA, 21 nt, Human
cacucuuauugcccacgcugg

SEQ ID NO: 3377813 - RNA, 17 nt, Human
cacucuuccugcaagga

SEQ ID NO: 3377814 - RNA, 13 nt, Human
cacucuucucagc

SEQ ID NO: 3377815 - RNA, 22 nt, Human
cacucuuguggauguuuuaauu

SEQ ID NO: 3377816 - RNA, 17 nt, Human
cacucuuguucccacac

SEQ ID NO: 3377817 - RNA, 16 nt, Human
cacugaaaaaauauau

SEQ ID NO: 3377818 - RNA, 22 nt, Human
cacugaaaauaccaucaggccu

SEQ ID NO: 3377819 - RNA, 20 nt, Human
cacugaaaccuuuaagaaaa

SEQ ID NO: 3377820 - RNA, 20 nt, Human
cacugaaagcucuguugcaa

SEQ ID NO: 3377821 - RNA, 17 nt, Human
cacugaaaguuuuguaa

SEQ ID NO: 3377822 - RNA, 19 nt, Human
cacugaaaguuuuguaaaa

SEQ ID NO: 3377823 - RNA, 20 nt, Human
cacugaaaguuuuguaaaag

SEQ ID NO: 3377824 - RNA, 16 nt, Human
cacugaaauauacaca

SEQ ID NO: 3377825 - RNA, 20 nt, Human
cacugaaauauacacacagc

SEQ ID NO: 3377826 - RNA, 20 nt, Human
cacugaaccugggaaagaga

SEQ ID NO: 3377827 - RNA, 20 nt, Human
cacugaacuuugcugagccu

SEQ ID NO: 3377828 - RNA, 11 nt, Human
cacugaagacg

SEQ ID NO: 3377829 - RNA, 11 nt, Human
cacugaagagg

SEQ ID NO: 3377830 - RNA, 17 nt, Human
cacugaagcuuuuuagu

SEQ ID NO: 3377831 - RNA, 19 nt, Human
cacugaagggaaucacauc

SEQ ID NO: 3377832 - RNA, 15 nt, Human
cacugaaguuugaua

SEQ ID NO: 3377833 - RNA, 21 nt, Human
cacugaaguuugauaaauagu

SEQ ID NO: 3377834 - RNA, 22 nt, Human
cacugaaguuugauaaauagug

SEQ ID NO: 3377835 - RNA, 13 nt, Human
cacugaauauuua

SEQ ID NO: 3377836 - RNA, 14 nt, Human
cacugaauuuugga

SEQ ID NO: 3377837 - RNA, 17 nt, Human
cacugacaccuuugcag

SEQ ID NO: 3377838 - RNA, 21 nt, Human
cacugacaccuuugcaggcau

SEQ ID NO: 3377839 - RNA, 15 nt, Human
cacugacagccuccc

SEQ ID NO: 3377840 - RNA, 14 nt, Human
cacugaccagaacu

SEQ ID NO: 3377841 - RNA, 16 nt, Human
cacugaccauccacuc

SEQ ID NO: 3377842 - RNA, 22 nt, Human
cacugacccacagccucugccu

SEQ ID NO: 3377843 - RNA, 16 nt, Human
cacugacccuuccaga

SEQ ID NO: 3377844 - RNA, 18 nt, Human
cacugacccuuccagaca

SEQ ID NO: 3377845 - RNA, 21 nt, Human
cacugacccuuccagacauac

SEQ ID NO: 3377846 - RNA, 14 nt, Human
cacugacucuggaa

SEQ ID NO: 3377847 - RNA, 20 nt, Human
cacugacugggaccaggcac

SEQ ID NO: 3377848 - RNA, 15 nt, Human
cacugacuucuaagu

SEQ ID NO: 3377849 - RNA, 16 nt, Human
cacugacuucuaagua

SEQ ID NO: 3377850 - RNA, 20 nt, Human
cacugacuucuaaguaaaac

SEQ ID NO: 3377851 - RNA, 21 nt, Human
cacugacuucuaaguaaaacc

SEQ ID NO: 3377852 - RNA, 16 nt, Human
cacugagaauguaaga

SEQ ID NO: 3377853 - RNA, 14 nt, Human
cacugagacagccc

SEQ ID NO: 3377854 - RNA, 19 nt, Human
cacugagacagcccgggcu

SEQ ID NO: 3377855 - RNA, 23 nt, Human
cacugagaccccaggcuguuagg

SEQ ID NO: 3377856 - RNA, 17 nt, Human
cacugagagccuuuuug

SEQ ID NO: 3377857 - RNA, 21 nt, Human
cacugagaggacagagagaaa

SEQ ID NO: 3377858 - RNA, 23 nt, Human
cacugagauaccagcgaggaggc

SEQ ID NO: 3377859 - RNA, 13 nt, Human
cacugagcacugu

SEQ ID NO: 3377860 - RNA, 11 nt, Human
cacugagcccc

SEQ ID NO: 3377861 - RNA, 17 nt, Human
cacugagcuccaugugc

SEQ ID NO: 3377862 - RNA, 15 nt, Human
cacugagcugucaug

SEQ ID NO: 3377863 - RNA, 18 nt, Human
cacugaggcagggaaguc

SEQ ID NO: 3377864 - RNA, 19 nt, Human
cacugaggcagggaagucc

SEQ ID NO: 3377865 - RNA, 22 nt, Human
cacugaggccugagacccagga

SEQ ID NO: 3377866 - RNA, 13 nt, Human
cacugauauucag

SEQ ID NO: 3377867 - RNA, 19 nt, Human
cacugaugcugccccucau

SEQ ID NO: 3377868 - RNA, 24 nt, Human
cacugaugggcaacccccagccug

SEQ ID NO: 3377869 - RNA, 18 nt, Human
cacugauuucacaacaga

SEQ ID NO: 3377870 - RNA, 21 nt, Human
cacugauuugacauagucugg

SEQ ID NO: 3377871 - RNA, 22 nt, Human
cacugcaaaaccagguuuuguu

SEQ ID NO: 3377872 - RNA, 21 nt, Human
cacugcaaaccgccaccuccc

SEQ ID NO: 3377873 - RNA, 14 nt, Human
cacugcaaccucca

SEQ ID NO: 3377874 - RNA, 19 nt, Human
cacugcaaccuccaccucc

SEQ ID NO: 3377875 - RNA, 22 nt, Human
cacugcaaccuucgccaccugg

SEQ ID NO: 3377876 - RNA, 17 nt, Human
cacugcaacuucugccu

SEQ ID NO: 3377877 - RNA, 17 nt, Human
cacugcaagagccuugg

SEQ ID NO: 3377878 - RNA, 18 nt, Human
cacugcaagagccuuggu

SEQ ID NO: 3377879 - RNA, 20 nt, Human
cacugcaagagccuuggugu

SEQ ID NO: 3377880 - RNA, 22 nt, Human
cacugcaaguccuuuuguaaag

SEQ ID NO: 3377881 - RNA, 18 nt, Human
cacugcacacaccucaga

SEQ ID NO: 3377882 - RNA, 22 nt, Human
cacugcacacaccucagaggcu

SEQ ID NO: 3377883 - RNA, 22 nt, Human
cacugcacagagcucuccagcu

SEQ ID NO: 3377884 - RNA, 18 nt, Human
cacugcacagugcaucuc

SEQ ID NO: 3377885 - RNA, 15 nt, Human
cacugcacccccucc

SEQ ID NO: 3377886 - RNA, 20 nt, Human
cacugcacccccuccugcug

SEQ ID NO: 3377887 - RNA, 18 nt, Human
cacugcacuauagccuag

SEQ ID NO: 3377888 - RNA, 17 nt, Human
cacugcacuccagccug

SEQ ID NO: 3377889 - RNA, 13 nt, Human
cacugcacuccgg

SEQ ID NO: 3377890 - RNA, 13 nt, Human
cacugcacucuag

SEQ ID NO: 3377891 - RNA, 21 nt, Human
cacugcagaacagcuucaugu

SEQ ID NO: 3377892 - RNA, 13 nt, Human
cacugcagccuca

SEQ ID NO: 3377893 - RNA, 14 nt, Human
cacugcagccucaa

SEQ ID NO: 3377894 - RNA, 16 nt, Human
cacugcauaccaaccu

SEQ ID NO: 3377895 - RNA, 14 nt, Human
cacugcauccuccg

SEQ ID NO: 3377896 - RNA, 16 nt, Human
cacugcauccuccgcc

SEQ ID NO: 3377897 - RNA, 18 nt, Human
cacugcauuauucucuuu

SEQ ID NO: 3377898 - RNA, 18 nt, Human
cacugccacuuugcacau

SEQ ID NO: 3377899 - RNA, 20 nt, Human
cacugccacuuugcacauuu

SEQ ID NO: 3377900 - RNA, 19 nt, Human
cacugccagcagcagcagg

SEQ ID NO: 3377901 - RNA, 15 nt, Human
cacugccaggaggga

SEQ ID NO: 3377902 - RNA, 17 nt, Human
cacugccaggagggaca

SEQ ID NO: 3377903 - RNA, 12 nt, Human
cacugccaggcc

SEQ ID NO: 3377904 - RNA, 19 nt, Human
caccugcagccucccuccg

SEQ ID NO: 3377905 - RNA, 12 nt, Human
caccugcagcuc

SEQ ID NO: 3377906 - RNA, 16 nt, Human
caccugcaucuggggc

SEQ ID NO: 3377907 - RNA, 23 nt, Human
caccugccacccugggccuggca

SEQ ID NO: 3377908 - RNA, 21 nt, Human
caccugccacuaggcugggug

SEQ ID NO: 3377909 - RNA, 15 nt, Human
caccugccagccugg

SEQ ID NO: 3377910 - RNA, 16 nt, Human
caccugccagccuggc

SEQ ID NO: 3377911 - RNA, 17 nt, Human
caccugccagccuggcu

SEQ ID NO: 3377912 - RNA, 11 nt, Human
caccugccagg

SEQ ID NO: 3377913 - RNA, 12 nt, Human
caccugccaggg

SEQ ID NO: 3377914 - RNA, 13 nt, Human
caccugcccagau

SEQ ID NO: 3377915 - RNA, 15 nt, Human
caccugcccccuucu

SEQ ID NO: 3377916 - RNA, 14 nt, Human
caccugccccucaa

SEQ ID NO: 3377917 - RNA, 16 nt, Human
caccugccccucaacu

SEQ ID NO: 3377918 - RNA, 13 nt, Human
caccugcccuacc

SEQ ID NO: 3377919 - RNA, 20 nt, Human
caccugcccuaccugcccca

SEQ ID NO: 3377920 - RNA, 13 nt, Human
caccugcccugcc

SEQ ID NO: 3377921 - RNA, 16 nt, Human
caccugcccugcccug

SEQ ID NO: 3377922 - RNA, 19 nt, Human
caccugcccugcccugcca

SEQ ID NO: 3377923 - RNA, 22 nt, Human
caccugcccugcccugccaccu

SEQ ID NO: 3377924 - RNA, 22 nt, Human
caccugcccuuuuuucugccuc

SEQ ID NO: 3377925 - RNA, 21 nt, Human
caccugccgaccucguccucc

SEQ ID NO: 3377926 - RNA, 24 nt, Human
caccugccguggacuuggggucag

SEQ ID NO: 3377927 - RNA, 11 nt, Human
caccugccugc

SEQ ID NO: 3377928 - RNA, 14 nt, Human
caccugccugcguc

SEQ ID NO: 3377929 - RNA, 15 nt, Human
caccugccugcgucu

SEQ ID NO: 3377930 - RNA, 19 nt, Human
caccugccuggccggccag

SEQ ID NO: 3377931 - RNA, 22 nt, Human
caccugccuggccggccagcca

SEQ ID NO: 3377932 - RNA, 23 nt, Human
caccugccuguuaggagaagcug

SEQ ID NO: 3377933 - RNA, 19 nt, Human
caccugcucccaggccagu

SEQ ID NO: 3377934 - RNA, 22 nt, Human
caccugcugagagacccaagga

SEQ ID NO: 3377935 - RNA, 15 nt, Human
caccugcuggaguga

SEQ ID NO: 3377936 - RNA, 15 nt, Human
caccugcuggccccu

SEQ ID NO: 3377937 - RNA, 17 nt, Human
caccugcuggccccuca

SEQ ID NO: 3377938 - RNA, 18 nt, Human
caccugcuucucugccca

SEQ ID NO: 3377939 - RNA, 11 nt, Human
caccuggaccc

SEQ ID NO: 3377940 - RNA, 11 nt, Human
caccuggccac

SEQ ID NO: 3377941 - RNA, 19 nt, Human
caccuggccaccugaggug

SEQ ID NO: 3377942 - RNA, 20 nt, Human
caccuggccaccugaggugg

SEQ ID NO: 3377943 - RNA, 13 nt, Human
caccuggcccugc

SEQ ID NO: 3377944 - RNA, 15 nt, Human
caccuggcccugcuu

SEQ ID NO: 3377945 - RNA, 11 nt, Human
cagaaagaguu

SEQ ID NO: 3377946 - RNA, 22 nt, Human
cagaaagcaguugagacaagaa

SEQ ID NO: 3377947 - RNA, 22 nt, Human
cagaaagcaucccucacccauc

SEQ ID NO: 3377948 - RNA, 21 nt, Human
cagaaagccccacccaggcca

SEQ ID NO: 3377949 - RNA, 16 nt, Human
cagaaagccuaucaaa

SEQ ID NO: 3377950 - RNA, 22 nt, Human
cagaaagccugggugacauuug

SEQ ID NO: 3377951 - RNA, 18 nt, Human
cagaaagcugugaacagg

SEQ ID NO: 3377952 - RNA, 18 nt, Human
cagaaagcuuuauuuuga

SEQ ID NO: 3377953 - RNA, 19 nt, Human
cagaaaggaaaaacaaacu

SEQ ID NO: 3377954 - RNA, 20 nt, Human
cagaaaggacuccuccuuuu

SEQ ID NO: 3377955 - RNA, 16 nt, Human
cagaaaggauauuuaa

SEQ ID NO: 3377956 - RNA, 22 nt, Human
cagaaaggauauuuaagaaaau

SEQ ID NO: 3377957 - RNA, 22 nt, Human
cagaaagggagcagagaaggcc

SEQ ID NO: 3377958 - RNA, 16 nt, Human
cagaaagggagggcuc

SEQ ID NO: 3377959 - RNA, 17 nt, Human
cagaaagggagggcucu

SEQ ID NO: 3377960 - RNA, 17 nt, Human
cagaaagggcaacaaua

SEQ ID NO: 3377961 - RNA, 21 nt, Human
cagaaagguucugcccgggaa

SEQ ID NO: 3377962 - RNA, 20 nt, Human
cagaaagguuuucuucuuuu

SEQ ID NO: 3377963 - RNA, 17 nt, Human
cagaaagugccuuucag

SEQ ID NO: 3377964 - RNA, 18 nt, Human
cagaaaguggugcucagu

SEQ ID NO: 3377965 - RNA, 19 nt, Human
cagaaaguggugcucaguu

SEQ ID NO: 3377966 - RNA, 14 nt, Human
cagaaaguguaaau

SEQ ID NO: 3377967 - RNA, 22 nt, Human
cagaaagugugcuuuaugcuga

SEQ ID NO: 3377968 - RNA, 14 nt, Human
cagaaauacaauuu

SEQ ID NO: 3377969 - RNA, 21 nt, Human
cagaaauacagucuuccacaa

SEQ ID NO: 3377970 - RNA, 16 nt, Human
cagaaauacauauuuc

SEQ ID NO: 3377971 - RNA, 22 nt, Human
cagaaauaccaaaauuauuuca

SEQ ID NO: 3377972 - RNA, 13 nt, Human
cagaaauauauau

SEQ ID NO: 3377973 - RNA, 16 nt, Human
cagaaauauauauaca

SEQ ID NO: 3377974 - RNA, 21 nt, Human
cagaaauauuugugacaaaaa

SEQ ID NO: 3377975 - RNA, 20 nt, Human
cagaaaucaguaauauuuau

SEQ ID NO: 3377976 - RNA, 19 nt, Human
cagaaaucuagaagacugu

SEQ ID NO: 3377977 - RNA, 14 nt, Human
cagaaaucugagga

SEQ ID NO: 3377978 - RNA, 15 nt, Human
cagaaaucugaggaa

SEQ ID NO: 3377979 - RNA, 18 nt, Human
cagaaaugaggaggaugc

SEQ ID NO: 3377980 - RNA, 20 nt, Human
cagaaaugaggccauggacu

SEQ ID NO: 3377981 - RNA, 20 nt, Human
cagaaaugcugccugccugu

SEQ ID NO: 3377982 - RNA, 15 nt, Human
cagaaaugcugcugg

SEQ ID NO: 3377983 - RNA, 19 nt, Human
cagaaaugcugcuggccaa

SEQ ID NO: 3377984 - RNA, 15 nt, Human
cagaaauggaaagca

SEQ ID NO: 3377985 - RNA, 17 nt, Human
cagaaaugucccuuucu

SEQ ID NO: 3377986 - RNA, 21 nt, Human
cagaaaugucuaaaugcugaa

SEQ ID NO: 3377987 - RNA, 22 nt, Human
cagaaauguugagucuguacua

SEQ ID NO: 3377988 - RNA, 22 nt, Human
cagaaauucuguuuuuaaaaau

SEQ ID NO: 3377989 - RNA, 20 nt, Human
cagaaauugguaccuugcac

SEQ ID NO: 3377990 - RNA, 23 nt, Human
cagaaauugguaccuugcacaca

SEQ ID NO: 3377991 - RNA, 15 nt, Human
cagaaauuguauauu

SEQ ID NO: 3377992 - RNA, 15 nt, Human
cagaaauuuuuauuu

SEQ ID NO: 3377993 - RNA, 13 nt, Human
cagaacacuaacc

SEQ ID NO: 3377994 - RNA, 21 nt, Human
cagaacacuaaccugaccgug

SEQ ID NO: 3377995 - RNA, 21 nt, Human
cagaacagcagagguucuuuu

SEQ ID NO: 3377996 - RNA, 12 nt, Human
cagaacagccgc

SEQ ID NO: 3377997 - RNA, 20 nt, Human
cagaacagccgcuccugucu

SEQ ID NO: 3377998 - RNA, 17 nt, Human
cagaacagcuucagguu

SEQ ID NO: 3377999 - RNA, 18 nt, Human
cagaacaucauuagaaca

SEQ ID NO: 3378000 - RNA, 17 nt, Human
cagaaccaauuauuuuc

SEQ ID NO: 3378001 - RNA, 20 nt, Human
cagaaccaauuauuuucauc

SEQ ID NO: 3378002 - RNA, 21 nt, Human
cagaaccacacuugaaaccuu

SEQ ID NO: 3378003 - RNA, 20 nt, Human
cagaaccacagggcuauuuu

SEQ ID NO: 3378004 - RNA, 13 nt, Human
cagaacccagggc

SEQ ID NO: 3378005 - RNA, 23 nt, Human
cagaaccccuggcuccaggccag

SEQ ID NO: 3378006 - RNA, 18 nt, Human
cagaacccugccauggaa

SEQ ID NO: 3378007 - RNA, 15 nt, Human
cagaaccucuucccc

SEQ ID NO: 3378008 - RNA, 21 nt, Human
cagaaccuuguuauuucucag

SEQ ID NO: 3378009 - RNA, 18 nt, Human
cagaacguggcucugcug

SEQ ID NO: 3378010 - RNA, 17 nt, Human
cagaacuaaacucauuu

SEQ ID NO: 3378011 - RNA, 14 nt, Human
cagaacuaaauguu

SEQ ID NO: 3378012 - RNA, 19 nt, Human
cagaacuaccaccugacau

SEQ ID NO: 3378013 - RNA, 13 nt, Human
cagaacuacuucu

SEQ ID NO: 3378014 - RNA, 13 nt, Human
cagaacuagaauu

SEQ ID NO: 3378015 - RNA, 15 nt, Human
cagaacuagaauuug

SEQ ID NO: 3378016 - RNA, 17 nt, Human
cagaacucugccugccc

SEQ ID NO: 3378017 - RNA, 18 nt, Human
cagaacucugccugcccu

SEQ ID NO: 3378018 - RNA, 22 nt, Human
cagaacucugccugcccuuugu

SEQ ID NO: 3378019 - RNA, 13 nt, Human
cagaacucuuccu

SEQ ID NO: 3378020 - RNA, 16 nt, Human
cagaacucuuccucca

SEQ ID NO: 3378021 - RNA, 15 nt, Human
cagaacugagcuccu

SEQ ID NO: 3378022 - RNA, 23 nt, Human
cagaacugagcuccucugggcag

SEQ ID NO: 3378023 - RNA, 19 nt, Human
cagaacugcagucacugca

SEQ ID NO: 3378024 - RNA, 11 nt, Human
cagaacugcca

SEQ ID NO: 3378025 - RNA, 14 nt, Human
cagaacugccauua

SEQ ID NO: 3378026 - RNA, 22 nt, Human
cagaacugccauuauuuucugu

SEQ ID NO: 3378027 - RNA, 18 nt, Human
cagaacuggacucaggau

SEQ ID NO: 3378028 - RNA, 17 nt, Human
cagaacugugccacaau

SEQ ID NO: 3378029 - RNA, 17 nt, Human
cagaacuucagaaagac

SEQ ID NO: 3378030 - RNA, 20 nt, Human
cagaacuucagaaagacuug

SEQ ID NO: 3378031 - RNA, 20 nt, Human
cagaacuugaagccugcucc

SEQ ID NO: 3378032 - RNA, 21 nt, Human
cagaacuugacccugagcuga

SEQ ID NO: 3378033 - RNA, 14 nt, Human
cagaacuugcugcu

SEQ ID NO: 3378034 - RNA, 20 nt, Human
cagaacuugcugcugucuug

SEQ ID NO: 3378035 - RNA, 15 nt, Human
cagaagaaaggaaca

SEQ ID NO: 3378036 - RNA, 15 nt, Human
cagaagaacccuggc

SEQ ID NO: 3378037 - RNA, 20 nt, Human
cagaagaagagaagcugcug

SEQ ID NO: 3378038 - RNA, 14 nt, Human
cagaagaauauuca

SEQ ID NO: 3378039 - RNA, 17 nt, Human
cagaagaauauucagga

SEQ ID NO: 3378040 - RNA, 20 nt, Human
cagaagaauauucaggacuu

SEQ ID NO: 3378041 - RNA, 20 nt, Human
cagaagaauugaacccagga

SEQ ID NO: 3378042 - RNA, 14 nt, Human
cagaagacaccaga

SEQ ID NO: 3378043 - RNA, 16 nt, Human
cagaagacaccagagc

SEQ ID NO: 3378044 - RNA, 18 nt, Human
cagaagacaccagagcag

SEQ ID NO: 3378045 - RNA, 20 nt, Human
cagaagacaccagagcagau

SEQ ID NO: 3378046 - RNA, 16 nt, Human
cagaagagaggggaag

SEQ ID NO: 3378047 - RNA, 20 nt, Human
cagaagagaugggcuuguuu

SEQ ID NO: 3378048 - RNA, 21 nt, Human
cagaagagaugggcuuguuuu

SEQ ID NO: 3378049 - RNA, 15 nt, Human
cagaagauaacuuga

SEQ ID NO: 3378050 - RNA, 20 nt, Human
cagaagauagcuucacccca

SEQ ID NO: 3378051 - RNA, 13 nt, Human
cagaagcagcucu

SEQ ID NO: 3378052 - RNA, 16 nt, Human
cagaagcaggcuggag

SEQ ID NO: 3378053 - RNA, 23 nt, Human
cagaagcaguugagucgucauca

SEQ ID NO: 3378054 - RNA, 14 nt, Human
cagaagcauuugua

SEQ ID NO: 3378055 - RNA, 17 nt, Human
cagaagcauuuguauuu

SEQ ID NO: 3378056 - RNA, 20 nt, Human
cagaagcauuuguauuuugu

SEQ ID NO: 3378057 - RNA, 18 nt, Human
cagaagccacccaaagca

SEQ ID NO: 3378058 - RNA, 19 nt, Human
cagaagccacccaaagcag

SEQ ID NO: 3378059 - RNA, 17 nt, Human
cagaagccuauuguaaa

SEQ ID NO: 3378060 - RNA, 20 nt, Human
cagaagccucacugcaagca

SEQ ID NO: 3378061 - RNA, 19 nt, Human
cagaagccucuggcuagag

SEQ ID NO: 3378062 - RNA, 13 nt, Human
cagaagccugggg

SEQ ID NO: 3378063 - RNA, 18 nt, Human
cagaagcucccccagcaa

SEQ ID NO: 3378064 - RNA, 21 nt, Human
cagaagcucccccagcaaagc

SEQ ID NO: 3378065 - RNA, 20 nt, Human
cagaagcucuuacucuuucc

SEQ ID NO: 3378066 - RNA, 21 nt, Human
cagaagcucuuacucuuuccu

SEQ ID NO: 3378067 - RNA, 21 nt, Human
cagaagcugagcaccagggga

SEQ ID NO: 3378068 - RNA, 19 nt, Human
cagaaggaagacuucaucc

SEQ ID NO: 3378069 - RNA, 22 nt, Human
cagaaggaaggcagggaggagg

SEQ ID NO: 3378070 - RNA, 20 nt, Human
cagaaggagaaggaaggaga

SEQ ID NO: 3378071 - RNA, 13 nt, Human
cagaaggagacag

SEQ ID NO: 3378072 - RNA, 18 nt, Human
cagaaggauuuuuuaaag

SEQ ID NO: 3378073 - RNA, 20 nt, Human
cagaaggcaaaugacuuugg

SEQ ID NO: 3378074 - RNA, 14 nt, Human
cagaaggccaagag

SEQ ID NO: 3378075 - RNA, 15 nt, Human
cagaagggagaagga

SEQ ID NO: 3378076 - RNA, 19 nt, Human
cagaagggagcuagccaga

SEQ ID NO: 3378077 - RNA, 19 nt, Human
cagaagggagcuggcucca

SEQ ID NO: 3378078 - RNA, 12 nt, Human
cagaagggaggc

SEQ ID NO: 3378079 - RNA, 16 nt, Human
cagaagggagggcaga

SEQ ID NO: 3378080 - RNA, 17 nt, Human
cagaagggagggcagag

SEQ ID NO: 3378081 - RNA, 23 nt, Human
cagaagggagggcagagcuggug

SEQ ID NO: 3378082 - RNA, 15 nt, Human
cagaaggggacugcc

SEQ ID NO: 3378083 - RNA, 19 nt, Human
cagaaggggacugccaccu

SEQ ID NO: 3378084 - RNA, 20 nt, Human
cagaaggggacugccaccuc

SEQ ID NO: 3378085 - RNA, 20 nt, Human
cagaaggggaggggagacag

SEQ ID NO: 3378086 - RNA, 14 nt, Human
cagaagggggccau

SEQ ID NO: 3378087 - RNA, 18 nt, Human
cagaagggggccaugagg

SEQ ID NO: 3378088 - RNA, 15 nt, Human
cagacagcaggcagc

SEQ ID NO: 3378089 - RNA, 12 nt, Human
cagacagccugu

SEQ ID NO: 3378090 - RNA, 16 nt, Human
cagacagccuguaucu

SEQ ID NO: 3378091 - RNA, 19 nt, Human
cagacagcucccucugccu

SEQ ID NO: 3378092 - RNA, 15 nt, Human
cagacagcugccugg

SEQ ID NO: 3378093 - RNA, 16 nt, Human
cagacagcugccuggg

SEQ ID NO: 3378094 - RNA, 17 nt, Human
cagacagcugccuggga

SEQ ID NO: 3378095 - RNA, 15 nt, Human
cagacaggaccaggg

SEQ ID NO: 3378096 - RNA, 16 nt, Human
cagacaggaccaggga

SEQ ID NO: 3378097 - RNA, 24 nt, Human
cagacaggaccagggauuuccaug

SEQ ID NO: 3378098 - RNA, 13 nt, Human
cagacaggagaaa

SEQ ID NO: 3378099 - RNA, 13 nt, Human
cagacaggcaagc

SEQ ID NO: 3378100 - RNA, 20 nt, Human
cagacaggcaagcaccuccu

SEQ ID NO: 3378101 - RNA, 22 nt, Human
cagacaggcaagcaccuccugc

SEQ ID NO: 3378102 - RNA, 20 nt, Human
cagacaggcucuuagcagcu

SEQ ID NO: 3378103 - RNA, 17 nt, Human
cagacauaaaggaaaag

SEQ ID NO: 3378104 - RNA, 19 nt, Human
cagacauaaaggaaaagac

SEQ ID NO: 3378105 - RNA, 19 nt, Human
cagacauacuaaccagcag

SEQ ID NO: 3378106 - RNA, 19 nt, Human
cagacauagaauuaacaca

SEQ ID NO: 3378107 - RNA, 13 nt, Human
cagacauauuuaa

SEQ ID NO: 3378108 - RNA, 14 nt, Human
cagacauauuuaac

SEQ ID NO: 3378109 - RNA, 22 nt, Human
cagacauccaaacuaaaaggaa

SEQ ID NO: 3378110 - RNA, 23 nt, Human
cagacauccauguuuguaaaacu

SEQ ID NO: 3378111 - RNA, 17 nt, Human
cagacaucucugcaccc

SEQ ID NO: 3378112 - RNA, 20 nt, Human
cagacaucugagguuuuauu

SEQ ID NO: 3378113 - RNA, 18 nt, Human
cagacaugccacaaggac

SEQ ID NO: 3378114 - RNA, 18 nt, Human
cagacauguggugggaca

SEQ ID NO: 3378115 - RNA, 18 nt, Human
cagacauguuuuccguga

SEQ ID NO: 3378116 - RNA, 22 nt, Human
cagacauucuaauuauauuuua

SEQ ID NO: 3378117 - RNA, 21 nt, Human
cagacauucugccaggccccc

SEQ ID NO: 3378118 - RNA, 14 nt, Human
cagacauuggcacc

SEQ ID NO: 3378119 - RNA, 21 nt, Human
cagacauugucagcaaauuaa

SEQ ID NO: 3378120 - RNA, 11 nt, Human
cagacauuguu

SEQ ID NO: 3378121 - RNA, 22 nt, Human
cagacauuguuuugccaacauu

SEQ ID NO: 3378122 - RNA, 21 nt, Human
cagaccaacguuacucagggc

SEQ ID NO: 3378123 - RNA, 16 nt, Human
cagaccacaugcccca

SEQ ID NO: 3378124 - RNA, 14 nt, Human
cacugcaaccuucg

SEQ ID NO: 3378125 - RNA, 23 nt, Human
cacugcaaccuucgccaccuggg

SEQ ID NO: 3378126 - RNA, 13 nt, Human
cacugcaagagcc

SEQ ID NO: 3378127 - RNA, 16 nt, Human
cacugcaagagccuug

SEQ ID NO: 3378128 - RNA, 12 nt, Human
cacugcaagucc

SEQ ID NO: 3378129 - RNA, 19 nt, Human
cacugcaaguccuuuugua

SEQ ID NO: 3378130 - RNA, 20 nt, Human
cacugcaaguccuuuuguaa

SEQ ID NO: 3378131 - RNA, 21 nt, Human
cacugcaaguccuuuuguaaa

SEQ ID NO: 3378132 - RNA, 15 nt, Human
cacugcaauaucuuc

SEQ ID NO: 3378133 - RNA, 16 nt, Human
cacugcaauccugucu

SEQ ID NO: 3378134 - RNA, 22 nt, Human
cacugcacaauaacuccuccca

SEQ ID NO: 3378135 - RNA, 19 nt, Human
cacugcacacaccucagag

SEQ ID NO: 3378136 - RNA, 14 nt, Human
cacugcacagagcu

SEQ ID NO: 3378137 - RNA, 16 nt, Human
cacugcacagagcucu

SEQ ID NO: 3378138 - RNA, 18 nt, Human
cacugcacccccuccugc

SEQ ID NO: 3378139 - RNA, 17 nt, Human
cacugcacguuuucauc

SEQ ID NO: 3378140 - RNA, 17 nt, Human
cacugcacucaaccuua

SEQ ID NO: 3378141 - RNA, 12 nt, Human
cacugcacucca

SEQ ID NO: 3378142 - RNA, 20 nt, Human
cacugcacuccagccugggc

SEQ ID NO: 3378143 - RNA, 15 nt, Human
cacugcacuccaggc

SEQ ID NO: 3378144 - RNA, 21 nt, Human
cacugcagaagacaguauggc

SEQ ID NO: 3378145 - RNA, 12 nt, Human
cacugcagccuc

SEQ ID NO: 3378146 - RNA, 19 nt, Human
cacugcagccuccgcuucc

SEQ ID NO: 3378147 - RNA, 22 nt, Human
cacugcagccuccgcuucccug

SEQ ID NO: 3378148 - RNA, 13 nt, Human
cacugcagccucg

SEQ ID NO: 3378149 - RNA, 20 nt, Human
cacugcaggcaucacagcua

SEQ ID NO: 3378150 - RNA, 13 nt, Human
cacugcaggcccc

SEQ ID NO: 3378151 - RNA, 22 nt, Human
cacugcaugagcuuuuauacua

SEQ ID NO: 3378152 - RNA, 16 nt, Human
cacugcauguuuguga

SEQ ID NO: 3378153 - RNA, 19 nt, Human
cacugcauuauucucuuuu

SEQ ID NO: 3378154 - RNA, 20 nt, Human
cacugccacacucuccauca

SEQ ID NO: 3378155 - RNA, 22 nt, Human
cacugccacuuugcacauuuug

SEQ ID NO: 3378156 - RNA, 19 nt, Human
cacugccagagauaaacua

SEQ ID NO: 3378157 - RNA, 21 nt, Human
cacugccagcagcagcaggug

SEQ ID NO: 3378158 - RNA, 12 nt, Human
cacugccaggag

SEQ ID NO: 3378159 - RNA, 13 nt, Human
cacugccaggagg

SEQ ID NO: 3378160 - RNA, 13 nt, Human
cacugccaggcca

SEQ ID NO: 3378161 - RNA, 20 nt, Human
cacugccaggccagccuccg

SEQ ID NO: 3378162 - RNA, 20 nt, Human
cacugccaucaaacuguaaa

SEQ ID NO: 3378163 - RNA, 21 nt, Human
cacugcccaaagugcuuccaa

SEQ ID NO: 3378164 - RNA, 15 nt, Human
cacugcccacccccu

SEQ ID NO: 3378165 - RNA, 17 nt, Human
cacugcccacccccuca

SEQ ID NO: 3378166 - RNA, 18 nt, Human
cacugcccacccccucaa

SEQ ID NO: 3378167 - RNA, 19 nt, Human
cacugcccccugcugccau

SEQ ID NO: 3378168 - RNA, 21 nt, Human
cacugcccgagcuggugcauu

SEQ ID NO: 3378169 - RNA, 18 nt, Human
cacugcccucgcacggcc

SEQ ID NO: 3378170 - RNA, 12 nt, Human
cacugcccucug

SEQ ID NO: 3378171 - RNA, 15 nt, Human
cacugccuacugcau

SEQ ID NO: 3378172 - RNA, 16 nt, Human
cacugccuacugcauc

SEQ ID NO: 3378173 - RNA, 21 nt, Human
cacugccucgggaaccucacu

SEQ ID NO: 3378174 - RNA, 22 nt, Human
cacugccucgggaaccucacuc

SEQ ID NO: 3378175 - RNA, 15 nt, Human
cacugccucucacag

SEQ ID NO: 3378176 - RNA, 17 nt, Human
cacugccucucacagcu

SEQ ID NO: 3378177 - RNA, 13 nt, Human
cacugccucuccc

SEQ ID NO: 3378178 - RNA, 14 nt, Human
cacugccucucccu

SEQ ID NO: 3378179 - RNA, 19 nt, Human
cacugccucucccuggccc

SEQ ID NO: 3378180 - RNA, 15 nt, Human
cacugccucuggaau

SEQ ID NO: 3378181 - RNA, 19 nt, Human
cacugccucuuccucccuc

SEQ ID NO: 3378182 - RNA, 14 nt, Human
cacugccugccuua

SEQ ID NO: 3378183 - RNA, 21 nt, Human
cacugccugcucccauccugu

SEQ ID NO: 3378184 - RNA, 15 nt, Human
cacugccugggcuga

SEQ ID NO: 3378185 - RNA, 13 nt, Human
cacugccuguaua

SEQ ID NO: 3378186 - RNA, 15 nt, Human
cacugccuguauacu

SEQ ID NO: 3378187 - RNA, 17 nt, Human
cacugccuguauacuuu

SEQ ID NO: 3378188 - RNA, 18 nt, Human
cacugccuucgcuucuug

SEQ ID NO: 3378189 - RNA, 19 nt, Human
cacugccuucgcuucuugc

SEQ ID NO: 3378190 - RNA, 21 nt, Human
cacugccuucgcuucuugccu

SEQ ID NO: 3378191 - RNA, 20 nt, Human
cacugccuucucaacuccaa

SEQ ID NO: 3378192 - RNA, 19 nt, Human
cacugccuuuuuauuuaua

SEQ ID NO: 3378193 - RNA, 20 nt, Human
cacugcggagaaccuugugc

SEQ ID NO: 3378194 - RNA, 21 nt, Human
cacugcggagaaccuugugcc

SEQ ID NO: 3378195 - RNA, 22 nt, Human
cacugcggagaaccuugugccu

SEQ ID NO: 3378196 - RNA, 16 nt, Human
cacugcuaggugggcc

SEQ ID NO: 3378197 - RNA, 22 nt, Human
cacugcuaggugggccagcccc

SEQ ID NO: 3378198 - RNA, 23 nt, Human
cacugcuaggugggccagccccu

SEQ ID NO: 3378199 - RNA, 12 nt, Human
cacugcucccua

SEQ ID NO: 3378200 - RNA, 17 nt, Human
cacugcucccugaagcc

SEQ ID NO: 3378201 - RNA, 23 nt, Human
cacugcucccugaagccagccuu

SEQ ID NO: 3378202 - RNA, 12 nt, Human
cacugcuccugu

SEQ ID NO: 3378203 - RNA, 19 nt, Human
cacugcucuaacagcccuc

SEQ ID NO: 3378204 - RNA, 14 nt, Human
cacugcucucaccu

SEQ ID NO: 3378205 - RNA, 23 nt, Human
cacugcucuccagccugggaggc

SEQ ID NO: 3378206 - RNA, 20 nt, Human
cacugcucugaugaagagga

SEQ ID NO: 3378207 - RNA, 17 nt, Human
cacugcugcaaggccuu

SEQ ID NO: 3378208 - RNA, 22 nt, Human
cacugcugcaaggccuuucugu

SEQ ID NO: 3378209 - RNA, 13 nt, Human
cacugcugcagua

SEQ ID NO: 3378210 - RNA, 17 nt, Human
cacugcugcccagccuc

SEQ ID NO: 3378211 - RNA, 16 nt, Human
cacugcugcugccuuu

SEQ ID NO: 3378212 - RNA, 15 nt, Human
cacugcuggcugccu

SEQ ID NO: 3378213 - RNA, 19 nt, Human
cacugcuggguggcccauc

SEQ ID NO: 3378214 - RNA, 10 nt, Human
cacugcuguc

SEQ ID NO: 3378215 - RNA, 11 nt, Human
cacugcuguca

SEQ ID NO: 3378216 - RNA, 21 nt, Human
cacugcugugcugugcccaag

SEQ ID NO: 3378217 - RNA, 16 nt, Human
cacugcuuccagugag

SEQ ID NO: 3378218 - RNA, 18 nt, Human
cacugcuuccagugaggc

SEQ ID NO: 3378219 - RNA, 17 nt, Human
cacugcuugaacuaggc

SEQ ID NO: 3378220 - RNA, 20 nt, Human
cacugcuugaggaaaacaag

SEQ ID NO: 3378221 - RNA, 23 nt, Human
cacugcuugaugaagcaaggaag

SEQ ID NO: 3378222 - RNA, 13 nt, Human
cacugcuuuuccc

SEQ ID NO: 3378223 - RNA, 20 nt, Human
cacugcuuuuggucugugug

SEQ ID NO: 3378224 - RNA, 23 nt, Human
cacugcuuuuggucugugugaug

SEQ ID NO: 3378225 - RNA, 24 nt, Human
cacuggaaaggggagagccugcug

SEQ ID NO: 3378226 - RNA, 15 nt, Human
cacuggacucaccuc

SEQ ID NO: 3378227 - RNA, 16 nt, Human
cacuggagcaccaggc

SEQ ID NO: 3378228 - RNA, 21 nt, Human
cacuggagcaccaggcacgaa

SEQ ID NO: 3378229 - RNA, 23 nt, Human
cacuggagcagaaggggagaugg

SEQ ID NO: 3378230 - RNA, 13 nt, Human
cacuggagcccag

SEQ ID NO: 3378231 - RNA, 18 nt, Human
cacuggaggagagaagaa

SEQ ID NO: 3378232 - RNA, 13 nt, Human
auacggugggggu

SEQ ID NO: 3378233 - RNA, 14 nt, Human
auacguccaccaug

SEQ ID NO: 3378234 - RNA, 19 nt, Human
auacgugggcauucaaaug

SEQ ID NO: 3378235 - RNA, 13 nt, Human
auacguguagcua

SEQ ID NO: 3378236 - RNA, 18 nt, Human
auacgugucaaugugugc

SEQ ID NO: 3378237 - RNA, 21 nt, Human
auacguuucaaaaacaccccc

SEQ ID NO: 3378238 - RNA, 17 nt, Human
auacuaaaaagaagugc

SEQ ID NO: 3378239 - RNA, 12 nt, Human
auacuaaaauau

SEQ ID NO: 3378240 - RNA, 13 nt, Human
auacuaaaauaug

SEQ ID NO: 3378241 - RNA, 15 nt, Human
auacuacaucuuuaa

SEQ ID NO: 3378242 - RNA, 15 nt, Human
auacuaccuugaaaa

SEQ ID NO: 3378243 - RNA, 18 nt, Human
auacuacugaaacagauu

SEQ ID NO: 3378244 - RNA, 18 nt, Human
auacuagccagagcuccu

SEQ ID NO: 3378245 - RNA, 14 nt, Human
auacuaguugugac

SEQ ID NO: 3378246 - RNA, 14 nt, Human
auacuauaguacca

SEQ ID NO: 3378247 - RNA, 16 nt, Human
auacuaugaaauaugu

SEQ ID NO: 3378248 - RNA, 19 nt, Human
auacuauguggaugugaca

SEQ ID NO: 3378249 - RNA, 18 nt, Human
auacuauuaaacaugcug

SEQ ID NO: 3378250 - RNA, 21 nt, Human
auacuauuuaaagccuccuca

SEQ ID NO: 3378251 - RNA, 18 nt, Human
auacuauuuaagauguga

SEQ ID NO: 3378252 - RNA, 19 nt, Human
auacuauuuaagaugugaa

SEQ ID NO: 3378253 - RNA, 23 nt, Human
auacuauuuaguuuuuguaauuu

SEQ ID NO: 3378254 - RNA, 13 nt, Human
auacucagccugc

SEQ ID NO: 3378255 - RNA, 16 nt, Human
auacucagccugcugc

SEQ ID NO: 3378256 - RNA, 15 nt, Human
auacucauaauguga

SEQ ID NO: 3378257 - RNA, 18 nt, Human
auacucauccuuguauaa

SEQ ID NO: 3378258 - RNA, 12 nt, Human
auacucaugugu

SEQ ID NO: 3378259 - RNA, 13 nt, Human
auacucaugugua

SEQ ID NO: 3378260 - RNA, 15 nt, Human
auacucauguguaug

SEQ ID NO: 3378261 - RNA, 23 nt, Human
auacucauuagaauuaccauuug

SEQ ID NO: 3378262 - RNA, 16 nt, Human
auacucauuaggaugg

SEQ ID NO: 3378263 - RNA, 16 nt, Human
auacucauuucuaaaa

SEQ ID NO: 3378264 - RNA, 21 nt, Human
auacucauuucuaaaagaaua

SEQ ID NO: 3378265 - RNA, 17 nt, Human
auacucauuuuucauga

SEQ ID NO: 3378266 - RNA, 15 nt, Human
auacucuaauucuaa

SEQ ID NO: 3378267 - RNA, 20 nt, Human
auacucuagauuuuguuuug

SEQ ID NO: 3378268 - RNA, 13 nt, Human
auacucugucaga

SEQ ID NO: 3378269 - RNA, 14 nt, Human
auacucugucuccc

SEQ ID NO: 3378270 - RNA, 16 nt, Human
auacucuguuguacua

SEQ ID NO: 3378271 - RNA, 14 nt, Human
auacucuuucugua

SEQ ID NO: 3378272 - RNA, 17 nt, Human
auacucuuucuguauau

SEQ ID NO: 3378273 - RNA, 19 nt, Human
auacugaaccacuuguaga

SEQ ID NO: 3378274 - RNA, 15 nt, Human
auacugaaggaaaaa

SEQ ID NO: 3378275 - RNA, 19 nt, Human
auacugacugagaauauaa

SEQ ID NO: 3378276 - RNA, 14 nt, Human
auacugauggaauu

SEQ ID NO: 3378277 - RNA, 21 nt, Human
auacugcaaacuauuuaaaga

SEQ ID NO: 3378278 - RNA, 16 nt, Human
auacugcaagaaaaug

SEQ ID NO: 3378279 - RNA, 15 nt, Human
auuucaaaaugcuuu

SEQ ID NO: 3378280 - RNA, 16 nt, Human
auuucaaaaugcuuuu

SEQ ID NO: 3378281 - RNA, 23 nt, Human
auuucaaacagucucccuuccua

SEQ ID NO: 3378282 - RNA, 16 nt, Human
auuucaaacggccuca

SEQ ID NO: 3378283 - RNA, 18 nt, Human
auuucaaaguuuuguugu

SEQ ID NO: 3378284 - RNA, 13 nt, Human
auuucaagaaaaa

SEQ ID NO: 3378285 - RNA, 23 nt, Human
auuucaagaaguccccucuccuc

SEQ ID NO: 3378286 - RNA, 15 nt, Human
auuucaagguucuaa

SEQ ID NO: 3378287 - RNA, 13 nt, Human
auuucaauguaau

SEQ ID NO: 3378288 - RNA, 15 nt, Human
auuucaauguguaua

SEQ ID NO: 3378289 - RNA, 14 nt, Human
auuucaauucucaa

SEQ ID NO: 3378290 - RNA, 15 nt, Human
auuucaauucucaaa

SEQ ID NO: 3378291 - RNA, 13 nt, Human
auuucacaacaga

SEQ ID NO: 3378292 - RNA, 19 nt, Human
auuucacaacagccugaca

SEQ ID NO: 3378293 - RNA, 19 nt, Human
auuucacacgcuguucuaa

SEQ ID NO: 3378294 - RNA, 22 nt, Human
auuucacauuaauauuugcuga

SEQ ID NO: 3378295 - RNA, 23 nt, Human
auuucaccccaucccuccuuaag

SEQ ID NO: 3378296 - RNA, 20 nt, Human
auuucaccccucccuuucuc

SEQ ID NO: 3378297 - RNA, 16 nt, Human
auuucaccuguaaacc

SEQ ID NO: 3378298 - RNA, 19 nt, Human
auuucaccuguaaaccuga

SEQ ID NO: 3378299 - RNA, 19 nt, Human
auuucacgucauaggaagu

SEQ ID NO: 3378300 - RNA, 12 nt, Human
auuucacucucc

SEQ ID NO: 3378301 - RNA, 12 nt, Human
auuucacuggag

SEQ ID NO: 3378302 - RNA, 17 nt, Human
auuucacuggagcacaa

SEQ ID NO: 3378303 - RNA, 19 nt, Human
auuucacuggagcacaaua

SEQ ID NO: 3378304 - RNA, 13 nt, Human
auuucacugucuu

SEQ ID NO: 3378305 - RNA, 12 nt, Human
auuucacuugau

SEQ ID NO: 3378306 - RNA, 12 nt, Human
auuucacuuguc

SEQ ID NO: 3378307 - RNA, 15 nt, Human
auuucacuuuagaug

SEQ ID NO: 3378308 - RNA, 13 nt, Human
auuucagaaauac

SEQ ID NO: 3378309 - RNA, 12 nt, Human
auuucagaaguu

SEQ ID NO: 3378310 - RNA, 15 nt, Human
auuucagaaguuuaa

SEQ ID NO: 3378311 - RNA, 22 nt, Human
auuucagagaggccuuuuggaa

SEQ ID NO: 3378312 - RNA, 16 nt, Human
auuucagaugcuuuag

SEQ ID NO: 3378313 - RNA, 17 nt, Human
auuucagauguaauguu

SEQ ID NO: 3378314 - RNA, 19 nt, Human
auuucagauguaauguuuu

SEQ ID NO: 3378315 - RNA, 20 nt, Human
auuucagauguaauguuuuc

SEQ ID NO: 3378316 - RNA, 17 nt, Human
auuucagauuuugauaa

SEQ ID NO: 3378317 - RNA, 22 nt, Human
auuucagauuuugauaacuguu

SEQ ID NO: 3378318 - RNA, 15 nt, Human
auuucaggagcagcc

SEQ ID NO: 3378319 - RNA, 22 nt, Human
auuucaggaggaauacugaaca

SEQ ID NO: 3378320 - RNA, 15 nt, Human
auuucaggagggauu

SEQ ID NO: 3378321 - RNA, 19 nt, Human
auuucaggauacucuguca

SEQ ID NO: 3378322 - RNA, 19 nt, Human
auuucaggcauuggauauu

SEQ ID NO: 3378323 - RNA, 17 nt, Human
auuucaggcuccccaga

SEQ ID NO: 3378324 - RNA, 12 nt, Human
auuucagggugc

SEQ ID NO: 3378325 - RNA, 19 nt, Human
auuucaguaaaccugucug

SEQ ID NO: 3378326 - RNA, 21 nt, Human
auuucaguaagaucaagcucc

SEQ ID NO: 3378327 - RNA, 18 nt, Human
auuucaguacuucagcaa

SEQ ID NO: 3378328 - RNA, 22 nt, Human
auuucaguacuucagcaagaga

SEQ ID NO: 3378329 - RNA, 19 nt, Human
auuucaguguaaagugugu

SEQ ID NO: 3378330 - RNA, 20 nt, Human
auuucaguguaguuaauuua

SEQ ID NO: 3378331 - RNA, 16 nt, Human
auuucauaauuuguuu

SEQ ID NO: 3378332 - RNA, 21 nt, Human
auuucauaccucagaauguaa

SEQ ID NO: 3378333 - RNA, 13 nt, Human
auuucauaguuca

SEQ ID NO: 3378334 - RNA, 18 nt, Human
auuucaucauuguuucug

SEQ ID NO: 3378335 - RNA, 22 nt, Human
auuucauccuuucacuucuuuc

SEQ ID NO: 3378336 - RNA, 14 nt, Human
auuucaucuauuuc

SEQ ID NO: 3378337 - RNA, 19 nt, Human
auuucaucuauuucugaga

SEQ ID NO: 3378338 - RNA, 14 nt, Human
auuucaucuauuuu

SEQ ID NO: 3378339 - RNA, 22 nt, Human
auuucaucucauuuaagggaaa

SEQ ID NO: 3378340 - RNA, 23 nt, Human
auuucaucucauuuaagggaaaa

SEQ ID NO: 3378341 - RNA, 14 nt, Human
auuucaucugcucu

SEQ ID NO: 3378342 - RNA, 15 nt, Human
auuucaucugcucuc

SEQ ID NO: 3378343 - RNA, 18 nt, Human
auuucaucugcucuccuu

SEQ ID NO: 3378344 - RNA, 15 nt, Human
auuucaugauuagaa

SEQ ID NO: 3378345 - RNA, 18 nt, Human
auuucaugcuaucucugu

SEQ ID NO: 3378346 - RNA, 20 nt, Human
auuucauguaaaacagaaaa

SEQ ID NO: 3378347 - RNA, 18 nt, Human
auuucauguccuguguca

SEQ ID NO: 3378348 - RNA, 13 nt, Human
auuucauuccauu

SEQ ID NO: 3378349 - RNA, 19 nt, Human
auuucauugguuaauuuuu

SEQ ID NO: 3378350 - RNA, 12 nt, Human
auuucauuguau

SEQ ID NO: 3378351 - RNA, 17 nt, Human
auuucauuguaugaugu

SEQ ID NO: 3378352 - RNA, 19 nt, Human
auuucauuguaugaugugu

SEQ ID NO: 3378353 - RNA, 21 nt, Human
auuucauuguaugauguguug

SEQ ID NO: 3378354 - RNA, 21 nt, Human
auuucauuuuguaacaaauga

SEQ ID NO: 3378355 - RNA, 19 nt, Human
auuucauuuuuacccuuac

SEQ ID NO: 3378356 - RNA, 22 nt, Human
auuucauuuuuugcaucaguau

SEQ ID NO: 3378357 - RNA, 15 nt, Human
auuuccaaauaaaau

SEQ ID NO: 3378358 - RNA, 17 nt, Human
auuuccaaauucacaag

SEQ ID NO: 3378359 - RNA, 20 nt, Human
auuuccaacaccacagacac

SEQ ID NO: 3378360 - RNA, 19 nt, Human
auuuccaacucgaaucugu

SEQ ID NO: 3378361 - RNA, 20 nt, Human
auuuccaacucgaaucugug

SEQ ID NO: 3378362 - RNA, 15 nt, Human
auuuccaagagcuga

SEQ ID NO: 3378363 - RNA, 14 nt, Human
auuuccagccaggg

SEQ ID NO: 3378364 - RNA, 17 nt, Human
auuuccaguaccuuugu

SEQ ID NO: 3378365 - RNA, 20 nt, Human
auuuccagugaaaucaguua

SEQ ID NO: 3378366 - RNA, 21 nt, Human
auuuccaguguucuaugaaca

SEQ ID NO: 3378367 - RNA, 15 nt, Human
auuuccauauggauu

SEQ ID NO: 3378368 - RNA, 22 nt, Human
auuuccaugauguuuuccauga

SEQ ID NO: 3378369 - RNA, 17 nt, Human
auuuccauguaugcaua

SEQ ID NO: 3378370 - RNA, 23 nt, Human
auuuccauguccccucccagagc

SEQ ID NO: 3378371 - RNA, 15 nt, Human
auuuccauuccagaa

SEQ ID NO: 3378372 - RNA, 13 nt, Human
auuuccauugcuu

SEQ ID NO: 3378373 - RNA, 19 nt, Human
auuuccauuuacuuaagac

SEQ ID NO: 3378374 - RNA, 22 nt, Human
auuuccauuuacuuaagacuua

SEQ ID NO: 3378375 - RNA, 19 nt, Human
auuucccaaagcagugcau

SEQ ID NO: 3378376 - RNA, 18 nt, Human
auuucccaacacaaagau

SEQ ID NO: 3378377 - RNA, 14 nt, Human
auugucuuuauaug

SEQ ID NO: 3378378 - RNA, 20 nt, Human
auugucuuuugucauguggc

SEQ ID NO: 3378379 - RNA, 15 nt, Human
auugucuuuuuguau

SEQ ID NO: 3378380 - RNA, 23 nt, Human
auugugaaauaaaacuggcuuug

SEQ ID NO: 3378381 - RNA, 18 nt, Human
auugugaacauuugugau

SEQ ID NO: 3378382 - RNA, 14 nt, Human
auugugaaguacau

SEQ ID NO: 3378383 - RNA, 16 nt, Human
auugugagccaccacg

SEQ ID NO: 3378384 - RNA, 21 nt, Human
auugugaucuaucaauaguca

SEQ ID NO: 3378385 - RNA, 23 nt, Human
auugugauuagacagaacaccua

SEQ ID NO: 3378386 - RNA, 15 nt, Human
auugugauuggccug

SEQ ID NO: 3378387 - RNA, 16 nt, Human
auugugauuucccgug

SEQ ID NO: 3378388 - RNA, 12 nt, Human
auugugauuuga

SEQ ID NO: 3378389 - RNA, 16 nt, Human
auugugauuugacugu

SEQ ID NO: 3378390 - RNA, 23 nt, Human
auugugauuugacuguuuuuacc

SEQ ID NO: 3378391 - RNA, 17 nt, Human
auugugccaauauguau

SEQ ID NO: 3378392 - RNA, 18 nt, Human
auugugccaugucaaaca

SEQ ID NO: 3378393 - RNA, 21 nt, Human
auugugccaugucaaacaaau

SEQ ID NO: 3378394 - RNA, 22 nt, Human
auugugccaugucaaacaaaua

SEQ ID NO: 3378395 - RNA, 17 nt, Human
auugugcuucuccccag

SEQ ID NO: 3378396 - RNA, 18 nt, Human
auugugcuucuccccaga

SEQ ID NO: 3378397 - RNA, 21 nt, Human
auuguggauaacaaagauauc

SEQ ID NO: 3378398 - RNA, 20 nt, Human
auuguggcuccuaucugugu

SEQ ID NO: 3378399 - RNA, 18 nt, Human
auuguggcugucagcagg

SEQ ID NO: 3378400 - RNA, 20 nt, Human
auugugggucuauuucuagu

SEQ ID NO: 3378401 - RNA, 16 nt, Human
auuguggguguuaauu

SEQ ID NO: 3378402 - RNA, 21 nt, Human
auugugguaggccuuuuaaca

SEQ ID NO: 3378403 - RNA, 12 nt, Human
auuguggugcca

SEQ ID NO: 3378404 - RNA, 18 nt, Human
auuguggugugagcuuca

SEQ ID NO: 3378405 - RNA, 20 nt, Human
auugugguuauuuuuauaca

SEQ ID NO: 3378406 - RNA, 18 nt, Human
auuguguagccuuuuugu

SEQ ID NO: 3378407 - RNA, 17 nt, Human
auugugucccauucccc

SEQ ID NO: 3378408 - RNA, 23 nt, Human
auugugucucuugguccugcugc

SEQ ID NO: 3378409 - RNA, 14 nt, Human
auugugucugcagg

SEQ ID NO: 3378410 - RNA, 18 nt, Human
auugugucuuuugcauga

SEQ ID NO: 3378411 - RNA, 20 nt, Human
auugugugauauuucagaaa

SEQ ID NO: 3378412 - RNA, 13 nt, Human
auugugugauguu

SEQ ID NO: 3378413 - RNA, 19 nt, Human
auugugugugcagacuuca

SEQ ID NO: 3378414 - RNA, 19 nt, Human
auugugugugcucugcuuc

SEQ ID NO: 3378415 - RNA, 20 nt, Human
auugugugugcucugcuuca

SEQ ID NO: 3378416 - RNA, 15 nt, Human
auuguguucccauuu

SEQ ID NO: 3378417 - RNA, 13 nt, Human
auuguguugacau

SEQ ID NO: 3378418 - RNA, 18 nt, Human
auuguguugacuuuauaa

SEQ ID NO: 3378419 - RNA, 19 nt, Human
auuguguugacuuuauaaa

SEQ ID NO: 3378420 - RNA, 22 nt, Human
auuguguugacuuuauaaauuu

SEQ ID NO: 3378421 - RNA, 14 nt, Human
auuguguugugaau

SEQ ID NO: 3378422 - RNA, 19 nt, Human
auuguguuuacauuuuaug

SEQ ID NO: 3378423 - RNA, 22 nt, Human
auuguguuucuaccggagagag

SEQ ID NO: 3378424 - RNA, 13 nt, Human
auuguguuuguca

SEQ ID NO: 3378425 - RNA, 19 nt, Human
auuguguuugucauuagcc

SEQ ID NO: 3378426 - RNA, 23 nt, Human
auuguuaagucuaaauauuuccu

SEQ ID NO: 3378427 - RNA, 14 nt, Human
auuguuaauacaag

SEQ ID NO: 3378428 - RNA, 17 nt, Human
auuguuaaucucuguua

SEQ ID NO: 3378429 - RNA, 16 nt, Human
auuguuaauugcugag

SEQ ID NO: 3378430 - RNA, 14 nt, Human
auuguuaauuucag

SEQ ID NO: 3378431 - RNA, 17 nt, Human
auuguuaauuuuuccua

SEQ ID NO: 3378432 - RNA, 15 nt, Human
auuguuagauguuug

SEQ ID NO: 3378433 - RNA, 16 nt, Human
auuguuagauguuugu

SEQ ID NO: 3378434 - RNA, 12 nt, Human
auuguuaucaaa

SEQ ID NO: 3378435 - RNA, 17 nt, Human
auuguuauuuucaguga

SEQ ID NO: 3378436 - RNA, 14 nt, Human
auuguucaaacaau

SEQ ID NO: 3378437 - RNA, 16 nt, Human
auuguucaaacaauau

SEQ ID NO: 3378438 - RNA, 24 nt, Human
auuguucaaacaauaucauaucau

SEQ ID NO: 3378439 - RNA, 15 nt, Human
auuguucaauuccca

SEQ ID NO: 3378440 - RNA, 18 nt, Human
auuguucaccuuuguagc

SEQ ID NO: 3378441 - RNA, 18 nt, Human
auuguucauuuugagcug

SEQ ID NO: 3378442 - RNA, 12 nt, Human
auuguuccaaga

SEQ ID NO: 3378443 - RNA, 15 nt, Human
auuguuccaagacau

SEQ ID NO: 3378444 - RNA, 20 nt, Human
auuguuccaagacauuguca

SEQ ID NO: 3378445 - RNA, 21 nt, Human
auuguuccaagacauugucaa

SEQ ID NO: 3378446 - RNA, 22 nt, Human
auuguuccaagacauugucaau

SEQ ID NO: 3378447 - RNA, 16 nt, Human
auuguuccagagacaa

SEQ ID NO: 3378448 - RNA, 19 nt, Human
auuguucccagugacacuu

SEQ ID NO: 3378449 - RNA, 20 nt, Human
auuguuccuaaguucuuaga

SEQ ID NO: 3378450 - RNA, 23 nt, Human
auuguuccuaaguucuuagauau

SEQ ID NO: 3378451 - RNA, 20 nt, Human
auuguuccuuggagaaauga

SEQ ID NO: 3378452 - RNA, 14 nt, Human
auuguucucagaau

SEQ ID NO: 3378453 - RNA, 17 nt, Human
auuguugacaguucuga

SEQ ID NO: 3378454 - RNA, 13 nt, Human
auuugauacauaa

SEQ ID NO: 3378455 - RNA, 15 nt, Human
auuugauacauaaua

SEQ ID NO: 3378456 - RNA, 12 nt, Human
auuugauacuua

SEQ ID NO: 3378457 - RNA, 14 nt, Human
auuugauaucacag

SEQ ID NO: 3378458 - RNA, 15 nt, Human
auuugaugccaggac

SEQ ID NO: 3378459 - RNA, 14 nt, Human
auuugaugcuaaau

SEQ ID NO: 3378460 - RNA, 17 nt, Human
auuugaugcuggagagg

SEQ ID NO: 3378461 - RNA, 23 nt, Human
auuugaugcuguuugacaaaguu

SEQ ID NO: 3378462 - RNA, 13 nt, Human
auuugauguaaua

SEQ ID NO: 3378463 - RNA, 17 nt, Human
auuugauguaauacuuc

SEQ ID NO: 3378464 - RNA, 16 nt, Human
auuugauuauuuaaga

SEQ ID NO: 3378465 - RNA, 18 nt, Human
auuugauugggaugaaug

SEQ ID NO: 3378466 - RNA, 17 nt, Human
auuugauuuauuaacuu

SEQ ID NO: 3378467 - RNA, 12 nt, Human
auuugcaacauu

SEQ ID NO: 3378468 - RNA, 18 nt, Human
auuugcaagucauggcug

SEQ ID NO: 3378469 - RNA, 18 nt, Human
auuugcaauaacagcugc

SEQ ID NO: 3378470 - RNA, 19 nt, Human
auuugcaauaacagcugca

SEQ ID NO: 3378471 - RNA, 20 nt, Human
auuugcaauaacagcugcaa

SEQ ID NO: 3378472 - RNA, 21 nt, Human
auuugcaauauuccuuugggc

SEQ ID NO: 3378473 - RNA, 18 nt, Human
auuugcaaugggauguau

SEQ ID NO: 3378474 - RNA, 21 nt, Human
auuugcaaugggauguaugaa

SEQ ID NO: 3378475 - RNA, 14 nt, Human
auuugcacauuaaa

SEQ ID NO: 3378476 - RNA, 19 nt, Human
auuugcacauuaaaugacu

SEQ ID NO: 3378477 - RNA, 21 nt, Human
auuugcacauuaaaugacucu

SEQ ID NO: 3378478 - RNA, 19 nt, Human
auuugcagagacaggaccu

SEQ ID NO: 3378479 - RNA, 10 nt, Human
auuugcaguc

SEQ ID NO: 3378480 - RNA, 21 nt, Human
auuugcauaacaauuccucua

SEQ ID NO: 3378481 - RNA, 15 nt, Human
auuugcaucugaaau

SEQ ID NO: 3378482 - RNA, 19 nt, Human
auuugcauuaaauucacaa

SEQ ID NO: 3378483 - RNA, 16 nt, Human
auuugcauugaacaca

SEQ ID NO: 3378484 - RNA, 21 nt, Human
auuugcauugaacacaaacug

SEQ ID NO: 3378485 - RNA, 14 nt, Human
auuugccaaaauaa

SEQ ID NO: 3378486 - RNA, 15 nt, Human
auuugccaauaauaa

SEQ ID NO: 3378487 - RNA, 15 nt, Human
auuugccauagagua

SEQ ID NO: 3378488 - RNA, 15 nt, Human
auuugccaugggcuu

SEQ ID NO: 3378489 - RNA, 19 nt, Human
auuugcccauuuacacuuu

SEQ ID NO: 3378490 - RNA, 14 nt, Human
auuugcccucccau

SEQ ID NO: 3378491 - RNA, 12 nt, Human
auuugcccuggg

SEQ ID NO: 3378492 - RNA, 18 nt, Human
auuugcccugggaaaccc

SEQ ID NO: 3378493 - RNA, 21 nt, Human
auuugccuaauaugaugacug

SEQ ID NO: 3378494 - RNA, 21 nt, Human
auuugccugcagaguuuggau

SEQ ID NO: 3378495 - RNA, 11 nt, Human
auuugccugua

SEQ ID NO: 3378496 - RNA, 15 nt, Human
auuugccuguaacaa

SEQ ID NO: 3378497 - RNA, 14 nt, Human
auuugccuugcaga

SEQ ID NO: 3378498 - RNA, 18 nt, Human
auuugccuugcagaacug

SEQ ID NO: 3378499 - RNA, 22 nt, Human
auuugccuugcagaacugccau

SEQ ID NO: 3378500 - RNA, 14 nt, Human
auuugccuuuaaaa

SEQ ID NO: 3378501 - RNA, 13 nt, Human
auuugcuaauuuu

SEQ ID NO: 3378502 - RNA, 19 nt, Human
auuugcuaauuuuuauuaa

SEQ ID NO: 3378503 - RNA, 15 nt, Human
auuugcuacuguaca

SEQ ID NO: 3378504 - RNA, 15 nt, Human
auuugcuaucucuau

SEQ ID NO: 3378505 - RNA, 16 nt, Human
auuugcuaugagcugg

SEQ ID NO: 3378506 - RNA, 20 nt, Human
auuugcuaugagcuggggau

SEQ ID NO: 3378507 - RNA, 22 nt, Human
auuugcugacaaccauuaaagu

SEQ ID NO: 3378508 - RNA, 11 nt, Human
auuugcugcug

SEQ ID NO: 3378509 - RNA, 22 nt, Human
auuugcuuaaauauccauauua

SEQ ID NO: 3378510 - RNA, 14 nt, Human
auuugcuuuggaag

SEQ ID NO: 3378511 - RNA, 18 nt, Human
auuugcuuuuugugauau

SEQ ID NO: 3378512 - RNA, 16 nt, Human
auuuggaaacuaauaa

SEQ ID NO: 3378513 - RNA, 17 nt, Human
auuuggaaacuaauaaa

SEQ ID NO: 3378514 - RNA, 23 nt, Human
auuuggaaacuaauaaaauauuu

SEQ ID NO: 3378515 - RNA, 18 nt, Human
auuuggaaaggaaugcaa

SEQ ID NO: 3378516 - RNA, 17 nt, Human
auuuggaaauaaaguca

SEQ ID NO: 3378517 - RNA, 11 nt, Human
auuuggaaauc

SEQ ID NO: 3378518 - RNA, 21 nt, Human
auuuggaaauccuaguuuccu

SEQ ID NO: 3378519 - RNA, 21 nt, Human
auuuggaagaaaaaaaucuuc

SEQ ID NO: 3378520 - RNA, 18 nt, Human
auuuggaauuuauauaca

SEQ ID NO: 3378521 - RNA, 18 nt, Human
auuuggaccauuuuccug

SEQ ID NO: 3378522 - RNA, 18 nt, Human
auuucauauucuuucaau

SEQ ID NO: 3378523 - RNA, 14 nt, Human
auuucaucauuguu

SEQ ID NO: 3378524 - RNA, 14 nt, Human
auuucauccagaag

SEQ ID NO: 3378525 - RNA, 20 nt, Human
auuucauccuuucacuucuu

SEQ ID NO: 3378526 - RNA, 15 nt, Human
auuucaucuauuucu

SEQ ID NO: 3378527 - RNA, 17 nt, Human
auuucaugcucugcaaa

SEQ ID NO: 3378528 - RNA, 12 nt, Human
auuucauguacu

SEQ ID NO: 3378529 - RNA, 21 nt, Human
auuucauguccugugucaguu

SEQ ID NO: 3378530 - RNA, 14 nt, Human
auuucaugugucaa

SEQ ID NO: 3378531 - RNA, 22 nt, Human
auuucaugugucaacuucaaca

SEQ ID NO: 3378532 - RNA, 16 nt, Human
auuucauguuuuugau

SEQ ID NO: 3378533 - RNA, 12 nt, Human
auuucauuccau

SEQ ID NO: 3378534 - RNA, 16 nt, Human
auuucauuccauugcc

SEQ ID NO: 3378535 - RNA, 18 nt, Human
auuucauuccauugccua

SEQ ID NO: 3378536 - RNA, 21 nt, Human
auuucauucgggccccaccug

SEQ ID NO: 3378537 - RNA, 14 nt, Human
auuucauugccugu

SEQ ID NO: 3378538 - RNA, 18 nt, Human
auuucauuucaacuguuu

SEQ ID NO: 3378539 - RNA, 19 nt, Human
auuuccaacaccacagaca

SEQ ID NO: 3378540 - RNA, 22 nt, Human
auuuccaacaccacagacacac

SEQ ID NO: 3378541 - RNA, 14 nt, Human
auuuccacaccaag

SEQ ID NO: 3378542 - RNA, 18 nt, Human
auuuccagccagggcugc

SEQ ID NO: 3378543 - RNA, 14 nt, Human
auuuccagggauau

SEQ ID NO: 3378544 - RNA, 20 nt, Human
auuuccaguaccuuugucac

SEQ ID NO: 3378545 - RNA, 17 nt, Human
auuuccagucuccacca

SEQ ID NO: 3378546 - RNA, 14 nt, Human
auuuccauguaugc

SEQ ID NO: 3378547 - RNA, 20 nt, Human
auuuccauuuacuuaagacu

SEQ ID NO: 3378548 - RNA, 14 nt, Human
auuucccaaagcag

SEQ ID NO: 3378549 - RNA, 14 nt, Human
auuucccaagcugg

SEQ ID NO: 3378550 - RNA, 23 nt, Human
auuucccacaccguguaaaccaa

SEQ ID NO: 3378551 - RNA, 20 nt, Human
auuucccagcacaugaaacc

SEQ ID NO: 3378552 - RNA, 23 nt, Human
auuucccagcccucuucuucuca

SEQ ID NO: 3378553 - RNA, 13 nt, Human
auuucccaggacc

SEQ ID NO: 3378554 - RNA, 19 nt, Human
auuucccaggacccugaag

SEQ ID NO: 3378555 - RNA, 16 nt, Human
auuuccccaacagugu

SEQ ID NO: 3378556 - RNA, 18 nt, Human
auuuccccaacaguguga

SEQ ID NO: 3378557 - RNA, 19 nt, Human
auuuccccaacagugugaa

SEQ ID NO: 3378558 - RNA, 20 nt, Human
auuuccccaggggaaaauga

SEQ ID NO: 3378559 - RNA, 21 nt, Human
auuucccccaccccauuucuc

SEQ ID NO: 3378560 - RNA, 23 nt, Human
auuucccccaccccauuucucuc

SEQ ID NO: 3378561 - RNA, 16 nt, Human
auuuccccuccuuccc

SEQ ID NO: 3378562 - RNA, 22 nt, Human
auuuccccucugcacccagaac

SEQ ID NO: 3378563 - RNA, 19 nt, Human
auuucccguggccccagcc

SEQ ID NO: 3378564 - RNA, 20 nt, Human
auuucccguggccccagccu

SEQ ID NO: 3378565 - RNA, 23 nt, Human
auuucccguggccccagccuggc

SEQ ID NO: 3378566 - RNA, 21 nt, Human
auuucccuaaaauacauuuaa

SEQ ID NO: 3378567 - RNA, 16 nt, Human
auuucccuuccuuccu

SEQ ID NO: 3378568 - RNA, 20 nt, Human
auuucccuuccuuccucucc

SEQ ID NO: 3378569 - RNA, 18 nt, Human
auuucccuucuucuguca

SEQ ID NO: 3378570 - RNA, 23 nt, Human
auuucccuugaaauuuuaaacua

SEQ ID NO: 3378571 - RNA, 14 nt, Human
auuuccguaauucu

SEQ ID NO: 3378572 - RNA, 16 nt, Human
auuuccguaauucuua

SEQ ID NO: 3378573 - RNA, 17 nt, Human
auuuccuaauacuguca

SEQ ID NO: 3378574 - RNA, 19 nt, Human
auuuccuaauuuugagaaa

SEQ ID NO: 3378575 - RNA, 19 nt, Human
auuuccuacacaaaugaua

SEQ ID NO: 3378576 - RNA, 15 nt, Human
auuuccuaguucugu

SEQ ID NO: 3378577 - RNA, 20 nt, Human
auuuccuaguucuguagaaa

SEQ ID NO: 3378578 - RNA, 22 nt, Human
auuuccuaguucuguagaaaug

SEQ ID NO: 3378579 - RNA, 18 nt, Human
auuuccuaucaccuauuu

SEQ ID NO: 3378580 - RNA, 20 nt, Human
auuuccuaugauguauacug

SEQ ID NO: 3378581 - RNA, 19 nt, Human
auuuccuauuuuuggaaga

SEQ ID NO: 3378582 - RNA, 24 nt, Human
auuuccucaacguugcuccccauc

SEQ ID NO: 3378583 - RNA, 21 nt, Human
auuuccucagcuuaucucuuu

SEQ ID NO: 3378584 - RNA, 16 nt, Human
auuuccuccacaaauu

SEQ ID NO: 3378585 - RNA, 21 nt, Human
auuuccucccucugccccucc

SEQ ID NO: 3378586 - RNA, 17 nt, Human
auuuccucgcagccucu

SEQ ID NO: 3378587 - RNA, 13 nt, Human
auuuccugcccuu

SEQ ID NO: 3378588 - RNA, 20 nt, Human
auuuccugcccuuccucagu

SEQ ID NO: 3378589 - RNA, 22 nt, Human
auuuccugggagcuuuuguaga

SEQ ID NO: 3378590 - RNA, 12 nt, Human
auuuccuguguc

SEQ ID NO: 3378591 - RNA, 14 nt, Human
auuuccugugucuu

SEQ ID NO: 3378592 - RNA, 21 nt, Human
auuuccuguuggauuuguuua

SEQ ID NO: 3378593 - RNA, 23 nt, Human
auuuccuguuggauuuguuuaaa

SEQ ID NO: 3378594 - RNA, 13 nt, Human
auuuccuuuauaa

SEQ ID NO: 3378595 - RNA, 17 nt, Human
auuuccuuuaugugaau

SEQ ID NO: 3378596 - RNA, 19 nt, Human
auuuccuuuaugugaauuu

SEQ ID NO: 3378597 - RNA, 18 nt, Human
auuuccuuuuugacacug

SEQ ID NO: 3378598 - RNA, 19 nt, Human
auuucggauuuuuuccaaa

SEQ ID NO: 3378599 - RNA, 20 nt, Human
auuucgguugagaauggaaa

SEQ ID NO: 3378600 - RNA, 22 nt, Human
auuucgugggucuguuuuccuu

SEQ ID NO: 3378601 - RNA, 14 nt, Human
auuucuaaaaagau

SEQ ID NO: 3378602 - RNA, 15 nt, Human
auuucuaaauaaaag

SEQ ID NO: 3378603 - RNA, 20 nt, Human
auuucuaacucugauguaaa

SEQ ID NO: 3378604 - RNA, 21 nt, Human
auuucuaacucugauguaaau

SEQ ID NO: 3378605 - RNA, 22 nt, Human
auuucuaauuauguagcucuuu

SEQ ID NO: 3378606 - RNA, 18 nt, Human
auuucuaccauuucagag

SEQ ID NO: 3378607 - RNA, 21 nt, Human
auuucuacucucccauggcuu

SEQ ID NO: 3378608 - RNA, 20 nt, Human
auuucuacucuuaaguuucu

SEQ ID NO: 3378609 - RNA, 18 nt, Human
auuucuacuuugaaguca

SEQ ID NO: 3378610 - RNA, 23 nt, Human
auuucuagaacaucccugccagc

SEQ ID NO: 3378611 - RNA, 19 nt, Human
auuucuagccugcacuuug

SEQ ID NO: 3378612 - RNA, 18 nt, Human
auuucuagcuuuuuaauu

SEQ ID NO: 3378613 - RNA, 19 nt, Human
auuucuaggaagaauuuua

SEQ ID NO: 3378614 - RNA, 20 nt, Human
auuucuaggaagaauuuuaa

SEQ ID NO: 3378615 - RNA, 17 nt, Human
auuucuaggacugaauu

SEQ ID NO: 3378616 - RNA, 18 nt, Human
auuucuaggacugaauua

SEQ ID NO: 3378617 - RNA, 22 nt, Human
auuucuagggcugggaaacacu

SEQ ID NO: 3378618 - RNA, 16 nt, Human
auuucuaguuauuuau

SEQ ID NO: 3378619 - RNA, 14 nt, Human
auuucuauaaauag

SEQ ID NO: 3378620 - RNA, 21 nt, Human
auuucuauaaauagaugcugu

SEQ ID NO: 3378621 - RNA, 23 nt, Human
auuucuauagccaaaaauagcua

SEQ ID NO: 3378622 - RNA, 19 nt, Human
auuucuauauuuucauucu

SEQ ID NO: 3378623 - RNA, 19 nt, Human
auuucuaucuuguuccaag

SEQ ID NO: 3378624 - RNA, 15 nt, Human
auuucuaugaaauau

SEQ ID NO: 3378625 - RNA, 22 nt, Human
auuucuaugcugaguuugugcu

SEQ ID NO: 3378626 - RNA, 23 nt, Human
auuucuauucaagguggccaaau

SEQ ID NO: 3378627 - RNA, 16 nt, Human
auuucucagacuuugg

SEQ ID NO: 3378628 - RNA, 21 nt, Human
auuucucagacuuuggaaaau

SEQ ID NO: 3378629 - RNA, 14 nt, Human
auuucucaucacag

SEQ ID NO: 3378630 - RNA, 12 nt, Human
auuucuccccag

SEQ ID NO: 3378631 - RNA, 20 nt, Human
auuucuccuccaugggagaa

SEQ ID NO: 3378632 - RNA, 14 nt, Human
auuucuccucccuu

SEQ ID NO: 3378633 - RNA, 12 nt, Human
auuucuccuuuu

SEQ ID NO: 3378634 - RNA, 20 nt, Human
auuucuccuuuuguguucca

SEQ ID NO: 3378635 - RNA, 17 nt, Human
auuucucuaguaguuaa

SEQ ID NO: 3378636 - RNA, 23 nt, Human
auuucucuguuccauaguuaaag

SEQ ID NO: 3378637 - RNA, 18 nt, Human
auuucucuuacugcaaau

SEQ ID NO: 3378638 - RNA, 13 nt, Human
auuucucuuugaa

SEQ ID NO: 3378639 - RNA, 16 nt, Human
auuucucuuugaaaca

SEQ ID NO: 3378640 - RNA, 18 nt, Human
auuucugaaguggacucu

SEQ ID NO: 3378641 - RNA, 17 nt, Human
auuucugagaagguccu

SEQ ID NO: 3378642 - RNA, 23 nt, Human
auuucugaguuucauucuccugc

SEQ ID NO: 3378643 - RNA, 15 nt, Human
auuucugccuuccuu

SEQ ID NO: 3378644 - RNA, 17 nt, Human
auuucugccuuccuugc

SEQ ID NO: 3378645 - RNA, 16 nt, Human
auuucugcugaauuuu

SEQ ID NO: 3378646 - RNA, 19 nt, Human
auuucugggggaggaugua

SEQ ID NO: 3378647 - RNA, 20 nt, Human
auuucugggucuuuugcuac

SEQ ID NO: 3378648 - RNA, 11 nt, Human
auuucuguaaa

SEQ ID NO: 3378649 - RNA, 13 nt, Human
auuucugucagaa

SEQ ID NO: 3378650 - RNA, 11 nt, Human
auuucugugcc

SEQ ID NO: 3378651 - RNA, 18 nt, Human
auuucuguguccuguuuu

SEQ ID NO: 3378652 - RNA, 14 nt, Human
auuucuguuuagau

SEQ ID NO: 3378653 - RNA, 22 nt, Human
auuuuuacaagaaguuuauucu

SEQ ID NO: 3378654 - RNA, 13 nt, Human
auuuuuacaauaa

SEQ ID NO: 3378655 - RNA, 19 nt, Human
auuuuuacauggagaaaac

SEQ ID NO: 3378656 - RNA, 17 nt, Human
auuuuuacauucugaau

SEQ ID NO: 3378657 - RNA, 22 nt, Human
auuuuuacccuaaugucuucau

SEQ ID NO: 3378658 - RNA, 20 nt, Human
auuuuuaccuuuuuccuucc

SEQ ID NO: 3378659 - RNA, 24 nt, Human
auuuuuagaauaagaauuugcaua

SEQ ID NO: 3378660 - RNA, 21 nt, Human
auuuuuagauaguuagaaccu

SEQ ID NO: 3378661 - RNA, 22 nt, Human
auuuuuagaugguuacacuguu

SEQ ID NO: 3378662 - RNA, 14 nt, Human
auuuuuauaagaaa

SEQ ID NO: 3378663 - RNA, 12 nt, Human
auuuuuauaauu

SEQ ID NO: 3378664 - RNA, 21 nt, Human
auuuuuauaauuguacaaaau

SEQ ID NO: 3378665 - RNA, 20 nt, Human
auuuuuuuuucauacacuua

SEQ ID NO: 3378666 - RNA, 12 nt, Human
auuuuuuuuucc

SEQ ID NO: 3378667 - RNA, 16 nt, Human
auuuuuuuuuccuuca

SEQ ID NO: 3378668 - RNA, 23 nt, Human
auuuuuuuuuccuucagugccuu

SEQ ID NO: 3378669 - RNA, 14 nt, Human
auuuuuuuuucuaa

SEQ ID NO: 3378670 - RNA, 18 nt, Human
auuuuuuuuucuaagaga

SEQ ID NO: 3378671 - RNA, 16 nt, Human
auuuuuuuuuuaaauc

SEQ ID NO: 3378672 - RNA, 21 nt, Human
auuuuuuuuuuuaaucuacug

SEQ ID NO: 3378673 - RNA, 19 nt, Human
auuuuuuuuuuuuuuuccu

SEQ ID NO: 3378674 - RNA, 20 nt, Human
caaaaaaaaaaaaaaauuag

SEQ ID NO: 3378675 - RNA, 22 nt, Human
caaaaaaaaaaaaaagcaucua

SEQ ID NO: 3378676 - RNA, 20 nt, Human
caaaaaaaaaaaaagaagac

SEQ ID NO: 3378677 - RNA, 21 nt, Human
caaaaaaaaaaaaagaagacc

SEQ ID NO: 3378678 - RNA, 14 nt, Human
caaaaaaaaauaca

SEQ ID NO: 3378679 - RNA, 21 nt, Human
caaaaaaaaauuuuaaagacc

SEQ ID NO: 3378680 - RNA, 17 nt, Human
caaaaaaaauuuaaaaa

SEQ ID NO: 3378681 - RNA, 19 nt, Human
caaaaaaaauuuagccggg

SEQ ID NO: 3378682 - RNA, 13 nt, Human
caaaaaaaguugu

SEQ ID NO: 3378683 - RNA, 14 nt, Human
caaaaaaaguugua

SEQ ID NO: 3378684 - RNA, 16 nt, Human
caaaaaaaguuguaug

SEQ ID NO: 3378685 - RNA, 22 nt, Human
caaaaaaaguuguaugaucugu

SEQ ID NO: 3378686 - RNA, 16 nt, Human
caaaaaaauaaggugu

SEQ ID NO: 3378687 - RNA, 18 nt, Human
caaaaaaauauauuuaau

SEQ ID NO: 3378688 - RNA, 23 nt, Human
caaaaaaauauauuuaaugauaa

SEQ ID NO: 3378689 - RNA, 16 nt, Human
caaaaaaaucugcaga

SEQ ID NO: 3378690 - RNA, 21 nt, Human
caaaaaaaucugcagaaggaa

SEQ ID NO: 3378691 - RNA, 21 nt, Human
caaaaaaauuaaaauggaugc

SEQ ID NO: 3378692 - RNA, 15 nt, Human
caaaaaacucgagga

SEQ ID NO: 3378693 - RNA, 12 nt, Human
caaaaaagaaaa

SEQ ID NO: 3378694 - RNA, 19 nt, Human
caaaaaauacuuuuucuaa

SEQ ID NO: 3378695 - RNA, 23 nt, Human
caaaaaauaucuaguaauauauu

SEQ ID NO: 3378696 - RNA, 12 nt, Human
caaaaaaugagc

SEQ ID NO: 3378697 - RNA, 16 nt, Human
caaaaaaugcuugcuu

SEQ ID NO: 3378698 - RNA, 15 nt, Human
caaaaaauguuuuaa

SEQ ID NO: 3378699 - RNA, 15 nt, Human
caaaaaauuaaagca

SEQ ID NO: 3378700 - RNA, 18 nt, Human
caaaaaauuaaagcauuu

SEQ ID NO: 3378701 - RNA, 19 nt, Human
caaaaaauuaaagcauuua

SEQ ID NO: 3378702 - RNA, 13 nt, Human
caaaaacacagca

SEQ ID NO: 3378703 - RNA, 22 nt, Human
caaaaacacaguguuuuuguaa

SEQ ID NO: 3378704 - RNA, 23 nt, Human
caaaaacacaguguuuuuguaaa

SEQ ID NO: 3378705 - RNA, 14 nt, Human
caaaaacagccuca

SEQ ID NO: 3378706 - RNA, 20 nt, Human
caaaaacagguauauacuuu

SEQ ID NO: 3378707 - RNA, 20 nt, Human
caaaaaccaguauuguacaa

SEQ ID NO: 3378708 - RNA, 17 nt, Human
caaaaacgaaagcuggg

SEQ ID NO: 3378709 - RNA, 16 nt, Human
caaaaacuacacauau

SEQ ID NO: 3378710 - RNA, 22 nt, Human
caaaaacuguauugaugacagu

SEQ ID NO: 3378711 - RNA, 14 nt, Human
caaaaagaaaugac

SEQ ID NO: 3378712 - RNA, 21 nt, Human
caaaaagaacaaaaaaaucug

SEQ ID NO: 3378713 - RNA, 18 nt, Human
caaaaagaaucugcauuu

SEQ ID NO: 3378714 - RNA, 19 nt, Human
caaaaagaaucugcauuua

SEQ ID NO: 3378715 - RNA, 22 nt, Human
caaaaagaaucugcauuuagca

SEQ ID NO: 3378716 - RNA, 23 nt, Human
caaaaagaaucugcauuuagcac

SEQ ID NO: 3378717 - RNA, 14 nt, Human
caaaaagacaaaca

SEQ ID NO: 3378718 - RNA, 12 nt, Human
caaaaagcacau

SEQ ID NO: 3378719 - RNA, 13 nt, Human
caaaaaggcagga

SEQ ID NO: 3378720 - RNA, 13 nt, Human
caaaaaggcuuau

SEQ ID NO: 3378721 - RNA, 15 nt, Human
caaaaagugaaauaa

SEQ ID NO: 3378722 - RNA, 21 nt, Human
caaaaaguggggcagagccuc

SEQ ID NO: 3378723 - RNA, 11 nt, Human
caaaaaguguu

SEQ ID NO: 3378724 - RNA, 12 nt, Human
caaaaaguguuu

SEQ ID NO: 3378725 - RNA, 12 nt, Human
caaaaauaaaua

SEQ ID NO: 3378726 - RNA, 23 nt, Human
caaaaauauaaaauaugaagaca

SEQ ID NO: 3378727 - RNA, 14 nt, Human
caaaaauauuuaua

SEQ ID NO: 3378728 - RNA, 22 nt, Human
caaaaauauuuauaaaacuucu

SEQ ID NO: 3378729 - RNA, 21 nt, Human
caaaaauauuuuaugauccag

SEQ ID NO: 3378730 - RNA, 23 nt, Human
caaaaauauuuuaugauccagca

SEQ ID NO: 3378731 - RNA, 20 nt, Human
caaaaaucugaagauuguuu

SEQ ID NO: 3378732 - RNA, 19 nt, Human
caaaaaugaaagcaugucu

SEQ ID NO: 3378733 - RNA, 19 nt, Human
caaaaauguacaaaauaaa

SEQ ID NO: 3378734 - RNA, 23 nt, Human
caaaaauuaucuauuuguauaua

SEQ ID NO: 3378735 - RNA, 22 nt, Human
caaaaauuucuguaaaacaggu

SEQ ID NO: 3378736 - RNA, 11 nt, Human
caaaaauuuuu

SEQ ID NO: 3378737 - RNA, 18 nt, Human
caaaaauuuuuggauuga

SEQ ID NO: 3378738 - RNA, 10 nt, Human
caaaacaaaa

SEQ ID NO: 3378739 - RNA, 18 nt, Human
caaaacaaaaagaugucu

SEQ ID NO: 3378740 - RNA, 14 nt, Human
caaaacaaaacaaa

SEQ ID NO: 3378741 - RNA, 15 nt, Human
caaaacaaaacaaaa

SEQ ID NO: 3378742 - RNA, 14 nt, Human
caaaacaaaacuau

SEQ ID NO: 3378743 - RNA, 14 nt, Human
caaaacaaacucau

SEQ ID NO: 3378744 - RNA, 21 nt, Human
caaaacaaagcaauucuuuca

SEQ ID NO: 3378745 - RNA, 15 nt, Human
caaaacaaaggccua

SEQ ID NO: 3378746 - RNA, 16 nt, Human
caaaacaaaggccuaa

SEQ ID NO: 3378747 - RNA, 16 nt, Human
caaaacaagccuggua

SEQ ID NO: 3378748 - RNA, 14 nt, Human
caaaacaauguuua

SEQ ID NO: 3378749 - RNA, 19 nt, Human
caaaacacucggcauuuca

SEQ ID NO: 3378750 - RNA, 18 nt, Human
caaaaccaaaaguuauua

SEQ ID NO: 3378751 - RNA, 13 nt, Human
caaaaccacagcc

SEQ ID NO: 3378752 - RNA, 18 nt, Human
caaaaccacagcccuguc

SEQ ID NO: 3378753 - RNA, 22 nt, Human
caaaaccagguccaaugagcuu

SEQ ID NO: 3378754 - RNA, 23 nt, Human
caaaaccagguccaaugagcuuu

SEQ ID NO: 3378755 - RNA, 13 nt, Human
caaaacccagacc

SEQ ID NO: 3378756 - RNA, 15 nt, Human
caaaacccagaccug

SEQ ID NO: 3378757 - RNA, 14 nt, Human
caaaacccaugugg

SEQ ID NO: 3378758 - RNA, 19 nt, Human
caaaaccccacuacacagu

SEQ ID NO: 3378759 - RNA, 12 nt, Human
caaaaccgccag

SEQ ID NO: 3378760 - RNA, 14 nt, Human
caaaaccgccagcu

SEQ ID NO: 3378761 - RNA, 18 nt, Human
caaaaccugauguuaaaa

SEQ ID NO: 3378762 - RNA, 21 nt, Human
caaaaccuuuuacugguugca

SEQ ID NO: 3378763 - RNA, 16 nt, Human
caaaacgcgcagaugu

SEQ ID NO: 3378764 - RNA, 15 nt, Human
caaaacuauacuuga

SEQ ID NO: 3378765 - RNA, 17 nt, Human
caaaacuauacuugaac

SEQ ID NO: 3378766 - RNA, 18 nt, Human
caaaacuauacuugaaca

SEQ ID NO: 3378767 - RNA, 23 nt, Human
caaaacuauacuugaacaaaagg

SEQ ID NO: 3378768 - RNA, 20 nt, Human
caaaacucuccucugcugcu

SEQ ID NO: 3378769 - RNA, 15 nt, Human
caaaacuucuuguca

SEQ ID NO: 3378770 - RNA, 20 nt, Human
caaaacuugguauuuuucag

SEQ ID NO: 3378771 - RNA, 15 nt, Human
caaaacuuuuaaacu

SEQ ID NO: 3378772 - RNA, 16 nt, Human
caaaagaacuuacccc

SEQ ID NO: 3378773 - RNA, 15 nt, Human
caaaagaagaaguuu

SEQ ID NO: 3378774 - RNA, 20 nt, Human
caaaagaagaaguuucauca

SEQ ID NO: 3378775 - RNA, 16 nt, Human
caaaagaagcccccag

SEQ ID NO: 3378776 - RNA, 20 nt, Human
caaaagaagcccggcuccug

SEQ ID NO: 3378777 - RNA, 22 nt, Human
caaaagaagcccggcuccuggu

SEQ ID NO: 3378778 - RNA, 18 nt, Human
caaaagaaguaaaagcaa

SEQ ID NO: 3378779 - RNA, 22 nt, Human
caaaagaaguaacaagagugau

SEQ ID NO: 3378780 - RNA, 15 nt, Human
caaaagaaucagaaa

SEQ ID NO: 3378781 - RNA, 19 nt, Human
caaaagaauggcagaaaag

SEQ ID NO: 3378782 - RNA, 12 nt, Human
caaaagacaauu

SEQ ID NO: 3378783 - RNA, 15 nt, Human
caaaagacaauucuu

SEQ ID NO: 3378784 - RNA, 14 nt, Human
caaaagacacugca

SEQ ID NO: 3378785 - RNA, 15 nt, Human
caaaagacauguugu

SEQ ID NO: 3378786 - RNA, 15 nt, Human
caaaagagaugaaag

SEQ ID NO: 3378787 - RNA, 19 nt, Human
caaaagaugcucuucugug

SEQ ID NO: 3378788 - RNA, 18 nt, Human
caaaagaugcuucucacu

SEQ ID NO: 3378789 - RNA, 18 nt, Human
caaaagauugcugaaaaa

SEQ ID NO: 3378790 - RNA, 15 nt, Human
caaaagcaaaugaga

SEQ ID NO: 3378791 - RNA, 19 nt, Human
caaaagcauuuaucauucu

SEQ ID NO: 3378792 - RNA, 15 nt, Human
caaaagcccauucau

SEQ ID NO: 3378793 - RNA, 19 nt, Human
caaaagcccauucauucca

SEQ ID NO: 3378794 - RNA, 20 nt, Human
caaaagcccauucauuccau

SEQ ID NO: 3378795 - RNA, 22 nt, Human
caaaagcccauucauuccauuc

SEQ ID NO: 3378796 - RNA, 11 nt, Human
caaaagccucu

SEQ ID NO: 3378797 - RNA, 13 nt, Human
caaaagccucuca

SEQ ID NO: 3378798 - RNA, 23 nt, Human
caaaagcgugagcuuaaaauaca

SEQ ID NO: 3378799 - RNA, 21 nt, Human
caaaagcuauuuaaagcaucu

SEQ ID NO: 3378800 - RNA, 12 nt, Human
caaaagcugcuc

SEQ ID NO: 3378801 - RNA, 16 nt, Human
caaaagcuucaaauua

SEQ ID NO: 3378802 - RNA, 13 nt, Human
caaaagcuucccu

SEQ ID NO: 3378803 - RNA, 17 nt, Human
caaaaggaaaaagcucc

SEQ ID NO: 3378804 - RNA, 16 nt, Human
caaaaggaaagcugug

SEQ ID NO: 3378805 - RNA, 14 nt, Human
caaaaggaauagau

SEQ ID NO: 3378806 - RNA, 15 nt, Human
caaaaggcagaagca

SEQ ID NO: 3378807 - RNA, 19 nt, Human
caaaaggcaguggggcugg

SEQ ID NO: 3378808 - RNA, 19 nt, Human
caaaaggcuccauauauau

SEQ ID NO: 3378809 - RNA, 14 nt, Human
caaaagggaaaaga

SEQ ID NO: 3378810 - RNA, 20 nt, Human
aucaaucaugucagucugcu

SEQ ID NO: 3378811 - RNA, 14 nt, Human
aucaaucauuguac

SEQ ID NO: 3378812 - RNA, 15 nt, Human
aucaaucauuguaca

SEQ ID NO: 3378813 - RNA, 13 nt, Human
aucaauccugauu

SEQ ID NO: 3378814 - RNA, 14 nt, Human
aucaauccuuuauu

SEQ ID NO: 3378815 - RNA, 21 nt, Human
aucaaucuuuagaaaaggcau

SEQ ID NO: 3378816 - RNA, 15 nt, Human
aucaaugaauauuga

SEQ ID NO: 3378817 - RNA, 22 nt, Human
aucaauggcgcagugccucugg

SEQ ID NO: 3378818 - RNA, 21 nt, Human
aucaauguucacgcaacuuga

SEQ ID NO: 3378819 - RNA, 23 nt, Human
aucaauguucacgcaacuugaaa

SEQ ID NO: 3378820 - RNA, 13 nt, Human
aucaauguucauu

SEQ ID NO: 3378821 - RNA, 14 nt, Human
aucaauguucauug

SEQ ID NO: 3378822 - RNA, 18 nt, Human
aucaauguucauuguaau

SEQ ID NO: 3378823 - RNA, 13 nt, Human
aucaauuaaaugu

SEQ ID NO: 3378824 - RNA, 16 nt, Human
aucaauucauaucuau

SEQ ID NO: 3378825 - RNA, 16 nt, Human
aucaauuuaaacccau

SEQ ID NO: 3378826 - RNA, 20 nt, Human
aucaauuuguaauugcuuac

SEQ ID NO: 3378827 - RNA, 19 nt, Human
aucaauuugucauuuugaa

SEQ ID NO: 3378828 - RNA, 22 nt, Human
aucaauuuugacuuaaugugau

SEQ ID NO: 3378829 - RNA, 14 nt, Human
aucacaaaugacuu

SEQ ID NO: 3378830 - RNA, 19 nt, Human
aucacaaaugacuuuauua

SEQ ID NO: 3378831 - RNA, 19 nt, Human
aucacaaauuucacuuaua

SEQ ID NO: 3378832 - RNA, 16 nt, Human
aucacaacaagaaauu

SEQ ID NO: 3378833 - RNA, 21 nt, Human
aucacaaccaccguuacaagu

SEQ ID NO: 3378834 - RNA, 17 nt, Human
aucacaacgugcauugu

SEQ ID NO: 3378835 - RNA, 15 nt, Human
aucacaauuuuuaau

SEQ ID NO: 3378836 - RNA, 13 nt, Human
aucacacaaagca

SEQ ID NO: 3378837 - RNA, 12 nt, Human
aucacacacaug

SEQ ID NO: 3378838 - RNA, 13 nt, Human
aucacacacauug

SEQ ID NO: 3378839 - RNA, 20 nt, Human
aucacacacauugcugugaa

SEQ ID NO: 3378840 - RNA, 16 nt, Human
aucacacauguucaga

SEQ ID NO: 3378841 - RNA, 20 nt, Human
aucacaccaucgcuggcccc

SEQ ID NO: 3378842 - RNA, 16 nt, Human
aucacacuucugugag

SEQ ID NO: 3378843 - RNA, 16 nt, Human
aucacagagacauucc

SEQ ID NO: 3378844 - RNA, 14 nt, Human
aucacagcuucagc

SEQ ID NO: 3378845 - RNA, 21 nt, Human
aucacagcuucagccaggagc

SEQ ID NO: 3378846 - RNA, 22 nt, Human
aucacagcuucagccaggagcu

SEQ ID NO: 3378847 - RNA, 14 nt, Human
aucacagcuuguuu

SEQ ID NO: 3378848 - RNA, 22 nt, Human
aucacaggcugggcugggcacu

SEQ ID NO: 3378849 - RNA, 23 nt, Human
aucacaggcugggcugggcacug

SEQ ID NO: 3378850 - RNA, 12 nt, Human
aucacagggcag

SEQ ID NO: 3378851 - RNA, 15 nt, Human
aucacagggcagagc

SEQ ID NO: 3378852 - RNA, 21 nt, Human
aucacagggugggccucggcc

SEQ ID NO: 3378853 - RNA, 23 nt, Human
aucacaggguugggcccagaucu

SEQ ID NO: 3378854 - RNA, 18 nt, Human
aucacagucuaauuuuua

SEQ ID NO: 3378855 - RNA, 22 nt, Human
aucacaguuuugguugcuuuaa

SEQ ID NO: 3378856 - RNA, 17 nt, Human
aucacaguuuuuccugg

SEQ ID NO: 3378857 - RNA, 18 nt, Human
aucacaguuuuuccugga

SEQ ID NO: 3378858 - RNA, 17 nt, Human
aucacauagugaaaguu

SEQ ID NO: 3378859 - RNA, 20 nt, Human
caaauaaguguauuuugaaa

SEQ ID NO: 3378860 - RNA, 21 nt, Human
caaauaaguguauuuugaaau

SEQ ID NO: 3378861 - RNA, 13 nt, Human
caaauaaucacau

SEQ ID NO: 3378862 - RNA, 16 nt, Human
caaauaaugucucugu

SEQ ID NO: 3378863 - RNA, 23 nt, Human
caaauaaugucucugugagacuc

SEQ ID NO: 3378864 - RNA, 19 nt, Human
caaauacauuuaaaacauu

SEQ ID NO: 3378865 - RNA, 22 nt, Human
caaauacgugggcauucaaaug

SEQ ID NO: 3378866 - RNA, 23 nt, Human
caaauacucauuuuaggaaaaaa

SEQ ID NO: 3378867 - RNA, 21 nt, Human
caaauacuguguuucagaagc

SEQ ID NO: 3378868 - RNA, 18 nt, Human
caaauacuuauucauugu

SEQ ID NO: 3378869 - RNA, 21 nt, Human
caaauacuuauucauuguggu

SEQ ID NO: 3378870 - RNA, 12 nt, Human
caaauacuuuaa

SEQ ID NO: 3378871 - RNA, 21 nt, Human
caaauaggcaucaucaauaaa

SEQ ID NO: 3378872 - RNA, 20 nt, Human
caaauaggcuauuaaaaaag

SEQ ID NO: 3378873 - RNA, 21 nt, Human
caaauagugugaaauauauua

SEQ ID NO: 3378874 - RNA, 17 nt, Human
caaauauaaaacuuaca

SEQ ID NO: 3378875 - RNA, 22 nt, Human
caaauauaagaauaaaauguug

SEQ ID NO: 3378876 - RNA, 13 nt, Human
caaauauagagau

SEQ ID NO: 3378877 - RNA, 12 nt, Human
caaauauauuca

SEQ ID NO: 3378878 - RNA, 18 nt, Human
caaauauauucucuuugg

SEQ ID NO: 3378879 - RNA, 20 nt, Human
caaauauauucucuuuggug

SEQ ID NO: 3378880 - RNA, 15 nt, Human
caaauauauuguuaa

SEQ ID NO: 3378881 - RNA, 17 nt, Human
caaauaucuuguguugu

SEQ ID NO: 3378882 - RNA, 22 nt, Human
caaauaucuuguguuguccuuu

SEQ ID NO: 3378883 - RNA, 18 nt, Human
caaauaugcaaagcacug

SEQ ID NO: 3378884 - RNA, 17 nt, Human
caaauaugcuaauuugg

SEQ ID NO: 3378885 - RNA, 14 nt, Human
caaauauguccugg

SEQ ID NO: 3378886 - RNA, 13 nt, Human
caaauauuaaaaa

SEQ ID NO: 3378887 - RNA, 23 nt, Human
caaauauuaaaaagucuuuuaaa

SEQ ID NO: 3378888 - RNA, 16 nt, Human
caaauauuagauguga

SEQ ID NO: 3378889 - RNA, 18 nt, Human
caaauauucacuggcccc

SEQ ID NO: 3378890 - RNA, 13 nt, Human
caaauauucagaa

SEQ ID NO: 3378891 - RNA, 13 nt, Human
caaauauuccaga

SEQ ID NO: 3378892 - RNA, 18 nt, Human
caaauauuguugacaacu

SEQ ID NO: 3378893 - RNA, 21 nt, Human
caaauauuuagauguaauuuu

SEQ ID NO: 3378894 - RNA, 23 nt, Human
caaauauuuagauguaauuuugu

SEQ ID NO: 3378895 - RNA, 16 nt, Human
caaauauuuauuuucu

SEQ ID NO: 3378896 - RNA, 17 nt, Human
caaaucaacagaagcau

SEQ ID NO: 3378897 - RNA, 14 nt, Human
caaaucaagcuuca

SEQ ID NO: 3378898 - RNA, 16 nt, Human
caaaucaaguuuccaa

SEQ ID NO: 3378899 - RNA, 21 nt, Human
caaaucaaguuuccaagcaaa

SEQ ID NO: 3378900 - RNA, 23 nt, Human
caaaucaaguuuccaagcaaaug

SEQ ID NO: 3378901 - RNA, 17 nt, Human
caaaucaaucuguaaaa

SEQ ID NO: 3378902 - RNA, 16 nt, Human
caaaucaauuacuggu

SEQ ID NO: 3378903 - RNA, 14 nt, Human
caaaucacauauuu

SEQ ID NO: 3378904 - RNA, 20 nt, Human
caaaucaccacaaacuguaa

SEQ ID NO: 3378905 - RNA, 13 nt, Human
caaaucagcugcu

SEQ ID NO: 3378906 - RNA, 13 nt, Human
caaaucaggcuuu

SEQ ID NO: 3378907 - RNA, 23 nt, Human
caaaucagguuuucuuuuaagaa

SEQ ID NO: 3378908 - RNA, 14 nt, Human
caaaucaguuacua

SEQ ID NO: 3378909 - RNA, 20 nt, Human
caaaucaguuacuaagaaga

SEQ ID NO: 3378910 - RNA, 16 nt, Human
caaaucaguuaguuuu

SEQ ID NO: 3378911 - RNA, 13 nt, Human
caaaucauagcug

SEQ ID NO: 3378912 - RNA, 18 nt, Human
caaauccaggacccugcc

SEQ ID NO: 3378913 - RNA, 20 nt, Human
caaauccaggacccugccag

SEQ ID NO: 3378914 - RNA, 22 nt, Human
caaauccaggacccugccaggc

SEQ ID NO: 3378915 - RNA, 16 nt, Human
caaauccauccagaau

SEQ ID NO: 3378916 - RNA, 22 nt, Human
caaauccgaaccuccucuguga

SEQ ID NO: 3378917 - RNA, 17 nt, Human
caaauccgcucucuucc

SEQ ID NO: 3378918 - RNA, 22 nt, Human
caaauccgcucucuuccugccc

SEQ ID NO: 3378919 - RNA, 15 nt, Human
caaauccuaugugau

SEQ ID NO: 3378920 - RNA, 16 nt, Human
caaauccuaugugauu

SEQ ID NO: 3378921 - RNA, 21 nt, Human
caaauccuaugugauuuuaac

SEQ ID NO: 3378922 - RNA, 21 nt, Human
caaauccuuagaucuggcaug

SEQ ID NO: 3378923 - RNA, 18 nt, Human
caaauccuuccaaaaauu

SEQ ID NO: 3378924 - RNA, 19 nt, Human
caaauccuuccaaaaauua

SEQ ID NO: 3378925 - RNA, 19 nt, Human
caaauccuugaagauuuac

SEQ ID NO: 3378926 - RNA, 18 nt, Human
caaaucguagcguuuguu

SEQ ID NO: 3378927 - RNA, 21 nt, Human
caaaucguccagcgaccuucc

SEQ ID NO: 3378928 - RNA, 16 nt, Human
caaaucguuuauuuca

SEQ ID NO: 3378929 - RNA, 18 nt, Human
caaaucuaccacuguaug

SEQ ID NO: 3378930 - RNA, 13 nt, Human
caaaucuauucag

SEQ ID NO: 3378931 - RNA, 14 nt, Human
caaaucuauucaga

SEQ ID NO: 3378932 - RNA, 16 nt, Human
caaaucuauucagaca

SEQ ID NO: 3378933 - RNA, 17 nt, Human
caaaucuauuuaauuag

SEQ ID NO: 3378934 - RNA, 21 nt, Human
caaaucugccuauugcagcug

SEQ ID NO: 3378935 - RNA, 12 nt, Human
caaaucugugua

SEQ ID NO: 3378936 - RNA, 13 nt, Human
caaaucuguguau

SEQ ID NO: 3378937 - RNA, 15 nt, Human
caaaucuguguauau

SEQ ID NO: 3378938 - RNA, 16 nt, Human
caaaucuguguauauu

SEQ ID NO: 3378939 - RNA, 22 nt, Human
caaaucuugguugaugccaaaa

SEQ ID NO: 3378940 - RNA, 20 nt, Human
caaaucuuuccauauccaua

SEQ ID NO: 3378941 - RNA, 19 nt, Human
caaaucuuuuagucauuau

SEQ ID NO: 3378942 - RNA, 13 nt, Human
caaaugaaaugua

SEQ ID NO: 3378943 - RNA, 18 nt, Human
caaaugaaauguaugcau

SEQ ID NO: 3378944 - RNA, 19 nt, Human
caaaugaagacaaaacaua

SEQ ID NO: 3378945 - RNA, 15 nt, Human
caaaugacaugcacu

SEQ ID NO: 3378946 - RNA, 16 nt, Human
caaaugacaugcacug

SEQ ID NO: 3378947 - RNA, 22 nt, Human
caaaugaccagcagauucaaau

SEQ ID NO: 3378948 - RNA, 17 nt, Human
caaaugacccaaagacc

SEQ ID NO: 3378949 - RNA, 20 nt, Human
caaaugacuuuauuauuuau

SEQ ID NO: 3378950 - RNA, 13 nt, Human
caaaugagccaug

SEQ ID NO: 3378951 - RNA, 16 nt, Human
caaaugagcucugaaa

SEQ ID NO: 3378952 - RNA, 20 nt, Human
caaaugagcucugaaaucuu

SEQ ID NO: 3378953 - RNA, 20 nt, Human
caaaugaugugccugcuuca

SEQ ID NO: 3378954 - RNA, 14 nt, Human
caacaauugguaaa

SEQ ID NO: 3378955 - RNA, 16 nt, Human
caacaauuuaugaauu

SEQ ID NO: 3378956 - RNA, 13 nt, Human
caacaauuuucag

SEQ ID NO: 3378957 - RNA, 23 nt, Human
caacaauuuucagauuugcacaa

SEQ ID NO: 3378958 - RNA, 16 nt, Human
caacacaaagagaaaa

SEQ ID NO: 3378959 - RNA, 17 nt, Human
caacacaagcuggaagc

SEQ ID NO: 3378960 - RNA, 21 nt, Human
caacacaaggugggcagggag

SEQ ID NO: 3378961 - RNA, 11 nt, Human
caacacacaga

SEQ ID NO: 3378962 - RNA, 21 nt, Human
caacacacagauuugagcuca

SEQ ID NO: 3378963 - RNA, 16 nt, Human
caacacagaggaauuu

SEQ ID NO: 3378964 - RNA, 14 nt, Human
caacacagaggcag

SEQ ID NO: 3378965 - RNA, 22 nt, Human
caacacagccugggccccagcu

SEQ ID NO: 3378966 - RNA, 15 nt, Human
caacaccaagcacag

SEQ ID NO: 3378967 - RNA, 13 nt, Human
caacaccacagac

SEQ ID NO: 3378968 - RNA, 14 nt, Human
caacaccagccccu

SEQ ID NO: 3378969 - RNA, 22 nt, Human
caacaccaucacagcuuguuuu

SEQ ID NO: 3378970 - RNA, 19 nt, Human
caacaccaugauuccuuua

SEQ ID NO: 3378971 - RNA, 20 nt, Human
caacaccucugcacaagcug

SEQ ID NO: 3378972 - RNA, 18 nt, Human
caacaccucuuggggagu

SEQ ID NO: 3378973 - RNA, 23 nt, Human
caacaccuucagaggcugaggug

SEQ ID NO: 3378974 - RNA, 15 nt, Human
caacacgagcaggcu

SEQ ID NO: 3378975 - RNA, 15 nt, Human
caacacgcaccugcc

SEQ ID NO: 3378976 - RNA, 13 nt, Human
caacacugccagc

SEQ ID NO: 3378977 - RNA, 20 nt, Human
caacacugggaaacagaggc

SEQ ID NO: 3378978 - RNA, 22 nt, Human
caacacuggugugaccugaggg

SEQ ID NO: 3378979 - RNA, 23 nt, Human
caacacuggugugaccugagggc

SEQ ID NO: 3378980 - RNA, 13 nt, Human
caacacugugccc

SEQ ID NO: 3378981 - RNA, 14 nt, Human
caacacugugcccu

SEQ ID NO: 3378982 - RNA, 18 nt, Human
caacacugugcccuggug

SEQ ID NO: 3378983 - RNA, 19 nt, Human
caacacugugcccuggugg

SEQ ID NO: 3378984 - RNA, 22 nt, Human
caacacugugcccugguggaga

SEQ ID NO: 3378985 - RNA, 13 nt, Human
caacacugugggu

SEQ ID NO: 3378986 - RNA, 16 nt, Human
caacagaagcuucaga

SEQ ID NO: 3378987 - RNA, 17 nt, Human
caacagaagcuucagaa

SEQ ID NO: 3378988 - RNA, 15 nt, Human
caacagaagcuucca

SEQ ID NO: 3378989 - RNA, 13 nt, Human
caacagaaugaaa

SEQ ID NO: 3378990 - RNA, 18 nt, Human
caacagaaugaaaaauga

SEQ ID NO: 3378991 - RNA, 19 nt, Human
caacagaaugaaaaaugaa

SEQ ID NO: 3378992 - RNA, 19 nt, Human
caacagagugagacccugu

SEQ ID NO: 3378993 - RNA, 21 nt, Human
caacagaugcuuuucugucuc

SEQ ID NO: 3378994 - RNA, 15 nt, Human
caacagauuggauuu

SEQ ID NO: 3378995 - RNA, 23 nt, Human
caacagauuggauuuuauguuga

SEQ ID NO: 3378996 - RNA, 14 nt, Human
caacagauuuguga

SEQ ID NO: 3378997 - RNA, 16 nt, Human
caacagauuugugaac

SEQ ID NO: 3378998 - RNA, 17 nt, Human
caacagcaaacaggugc

SEQ ID NO: 3378999 - RNA, 12 nt, Human
caacagcacugg

SEQ ID NO: 3379000 - RNA, 22 nt, Human
caacagcacuggcucucuccag

SEQ ID NO: 3379001 - RNA, 23 nt, Human
caacagcgacauagcccaucccu

SEQ ID NO: 3379002 - RNA, 15 nt, Human
caacagcguuccuag

SEQ ID NO: 3379003 - RNA, 14 nt, Human
caacagcuacaaca

SEQ ID NO: 3379004 - RNA, 18 nt, Human
caacagcucgauccaaau

SEQ ID NO: 3379005 - RNA, 16 nt, Human
caacagcuggacccug

SEQ ID NO: 3379006 - RNA, 20 nt, Human
caacagcuggacccugacca

SEQ ID NO: 3379007 - RNA, 14 nt, Human
caacaggaacugug

SEQ ID NO: 3379008 - RNA, 15 nt, Human
caacaggagcuggga

SEQ ID NO: 3379009 - RNA, 19 nt, Human
caacaggaggacaauucau

SEQ ID NO: 3379010 - RNA, 15 nt, Human
caacaggccucaggg

SEQ ID NO: 3379011 - RNA, 12 nt, Human
caacaggcuggg

SEQ ID NO: 3379012 - RNA, 14 nt, Human
caacaggcugggcu

SEQ ID NO: 3379013 - RNA, 17 nt, Human
caacaggcugggcuuca

SEQ ID NO: 3379014 - RNA, 20 nt, Human
caacaggcuguucugcacug

SEQ ID NO: 3379015 - RNA, 23 nt, Human
caacaggcuguucugcacugaaa

SEQ ID NO: 3379016 - RNA, 24 nt, Human
caacaggcuguucugcacugaaaa

SEQ ID NO: 3379017 - RNA, 13 nt, Human
caacagguuuuau

SEQ ID NO: 3379018 - RNA, 16 nt, Human
aucacauguauguuuu

SEQ ID NO: 3379019 - RNA, 15 nt, Human
aucacauuauuugca

SEQ ID NO: 3379020 - RNA, 14 nt, Human
aucacauuucuaug

SEQ ID NO: 3379021 - RNA, 19 nt, Human
aucaccaacgucugugcca

SEQ ID NO: 3379022 - RNA, 20 nt, Human
aucaccaacgucugugccau

SEQ ID NO: 3379023 - RNA, 13 nt, Human
aucaccagacagg

SEQ ID NO: 3379024 - RNA, 15 nt, Human
aucaccagcccggcc

SEQ ID NO: 3379025 - RNA, 23 nt, Human
aucacccgcuaagagggagggag

SEQ ID NO: 3379026 - RNA, 16 nt, Human
aucacccucuuccugu

SEQ ID NO: 3379027 - RNA, 21 nt, Human
aucaccgaaaacguggcugcu

SEQ ID NO: 3379028 - RNA, 19 nt, Human
aucaccgaugcaaacauug

SEQ ID NO: 3379029 - RNA, 15 nt, Human
aucaccuagaaacuu

SEQ ID NO: 3379030 - RNA, 19 nt, Human
aucaccucagauggcagcu

SEQ ID NO: 3379031 - RNA, 22 nt, Human
aucaccucagauggcagcuuuu

SEQ ID NO: 3379032 - RNA, 15 nt, Human
aucaccucaggccag

SEQ ID NO: 3379033 - RNA, 13 nt, Human
aucaccuccccuc

SEQ ID NO: 3379034 - RNA, 20 nt, Human
aucaccucuguaauuuuuca

SEQ ID NO: 3379035 - RNA, 12 nt, Human
aucaccugccug

SEQ ID NO: 3379036 - RNA, 12 nt, Human
aucaccugucuu

SEQ ID NO: 3379037 - RNA, 21 nt, Human
aucaccugucuugccuuuuuc

SEQ ID NO: 3379038 - RNA, 17 nt, Human
aucaccuuaggcaggga

SEQ ID NO: 3379039 - RNA, 18 nt, Human
aucacgauguaaauuauu

SEQ ID NO: 3379040 - RNA, 13 nt, Human
aucacgccacugc

SEQ ID NO: 3379041 - RNA, 15 nt, Human
aucacgccacugcac

SEQ ID NO: 3379042 - RNA, 20 nt, Human
aucacgccacugcacuccag

SEQ ID NO: 3379043 - RNA, 14 nt, Human
aucacgcuuuccug

SEQ ID NO: 3379044 - RNA, 21 nt, Human
aucacguaaagcuagaaauga

SEQ ID NO: 3379045 - RNA, 13 nt, Human
aucacguguacug

SEQ ID NO: 3379046 - RNA, 17 nt, Human
aucacguuaaaguagga

SEQ ID NO: 3379047 - RNA, 21 nt, Human
aucacguuagaggaaaaauau

SEQ ID NO: 3379048 - RNA, 20 nt, Human
aucacuaauacuaauucauu

SEQ ID NO: 3379049 - RNA, 23 nt, Human
aucacuacaguauuacucuuaca

SEQ ID NO: 3379050 - RNA, 13 nt, Human
aucacuacugcag

SEQ ID NO: 3379051 - RNA, 14 nt, Human
aucacuagccuguc

SEQ ID NO: 3379052 - RNA, 12 nt, Human
aucacucaccau

SEQ ID NO: 3379053 - RNA, 15 nt, Human
aucacucauuaauua

SEQ ID NO: 3379054 - RNA, 16 nt, Human
aucacucauuaauuaa

SEQ ID NO: 3379055 - RNA, 16 nt, Human
aucacucugugucuga

SEQ ID NO: 3379056 - RNA, 21 nt, Human
aucacucuguucauuccucca

SEQ ID NO: 3379057 - RNA, 22 nt, Human
aucacugaaaccuuuaagaaaa

SEQ ID NO: 3379058 - RNA, 17 nt, Human
aucacugaacaaacuaa

SEQ ID NO: 3379059 - RNA, 20 nt, Human
aucacugaacaaacuaaagg

SEQ ID NO: 3379060 - RNA, 15 nt, Human
aucacugaguuuucc

SEQ ID NO: 3379061 - RNA, 12 nt, Human
aucacugccaca

SEQ ID NO: 3379062 - RNA, 21 nt, Human
aucacugccacacucuccauc

SEQ ID NO: 3379063 - RNA, 19 nt, Human
aucacuggagcaccaggca

SEQ ID NO: 3379064 - RNA, 17 nt, Human
aucacuggagcccagga

SEQ ID NO: 3379065 - RNA, 16 nt, Human
aucacuggcaaugaaa

SEQ ID NO: 3379066 - RNA, 19 nt, Human
aucacuguaucauuuucuu

SEQ ID NO: 3379067 - RNA, 15 nt, Human
aucacugucuuuccu

SEQ ID NO: 3379068 - RNA, 22 nt, Human
aucacugugcaguugcuguuua

SEQ ID NO: 3379069 - RNA, 14 nt, Human
aucacuguggcugu

SEQ ID NO: 3379070 - RNA, 18 nt, Human
aucacuguguauauuuga

SEQ ID NO: 3379071 - RNA, 16 nt, Human
aucacuguucaugcug

SEQ ID NO: 3379072 - RNA, 15 nt, Human
aucacuguuuagauu

SEQ ID NO: 3379073 - RNA, 16 nt, Human
aucacuguuuagauuu

SEQ ID NO: 3379074 - RNA, 18 nt, Human
aucacuuaaaacacguuu

SEQ ID NO: 3379075 - RNA, 14 nt, Human
aucacuuaaaguca

SEQ ID NO: 3379076 - RNA, 14 nt, Human
aucacuuccaugac

SEQ ID NO: 3379077 - RNA, 17 nt, Human
aucacuuguuguuuuac

SEQ ID NO: 3379078 - RNA, 20 nt, Human
aucacuuucucaguuuucau

SEQ ID NO: 3379079 - RNA, 22 nt, Human
aucacuuugagccugggaaaua

SEQ ID NO: 3379080 - RNA, 23 nt, Human
aucacuuugagccugggaaauaa

SEQ ID NO: 3379081 - RNA, 12 nt, Human
aucacuuugcuc

SEQ ID NO: 3379082 - RNA, 15 nt, Human
aucacuuuuugaacu

SEQ ID NO: 3379083 - RNA, 16 nt, Human
aucacuuuuugaacua

SEQ ID NO: 3379084 - RNA, 21 nt, Human
aucacuuuuugaacuaagaaa

SEQ ID NO: 3379085 - RNA, 22 nt, Human
aucacuuuuugaacuaagaaac

SEQ ID NO: 3379086 - RNA, 17 nt, Human
aucagaaaaauggagca

SEQ ID NO: 3379087 - RNA, 20 nt, Human
aucagaaacacccucacacu

SEQ ID NO: 3379088 - RNA, 19 nt, Human
aucagaaagcuuuauuuug

SEQ ID NO: 3379089 - RNA, 16 nt, Human
aucagaaagggagggc

SEQ ID NO: 3379090 - RNA, 17 nt, Human
aucagaaagggagggcu

SEQ ID NO: 3379091 - RNA, 19 nt, Human
aucagaaagggagggcucu

SEQ ID NO: 3379092 - RNA, 11 nt, Human
aucagaaaugu

SEQ ID NO: 3379093 - RNA, 13 nt, Human
aucagaacagcug

SEQ ID NO: 3379094 - RNA, 23 nt, Human
aucagaacucaaauggggccaga

SEQ ID NO: 3379095 - RNA, 22 nt, Human
aucagaagaccacaaaaauuga

SEQ ID NO: 3379096 - RNA, 23 nt, Human
aucagaagccuauuguaaauaca

SEQ ID NO: 3379097 - RNA, 12 nt, Human
aucagaauucuc

SEQ ID NO: 3379098 - RNA, 18 nt, Human
aucagacccuaccccacc

SEQ ID NO: 3379099 - RNA, 17 nt, Human
caaccauggacuuuaua

SEQ ID NO: 3379100 - RNA, 14 nt, Human
caaccauuccagac

SEQ ID NO: 3379101 - RNA, 22 nt, Human
caaccauuccagacugcuucca

SEQ ID NO: 3379102 - RNA, 13 nt, Human
caaccauuuaucu

SEQ ID NO: 3379103 - RNA, 16 nt, Human
caaccauuuaucuuga

SEQ ID NO: 3379104 - RNA, 17 nt, Human
caaccauuuaucuugaa

SEQ ID NO: 3379105 - RNA, 22 nt, Human
caaccauuuaucuugaaggaaa

SEQ ID NO: 3379106 - RNA, 16 nt, Human
caacccaaaccuggag

SEQ ID NO: 3379107 - RNA, 14 nt, Human
caacccaaugggcu

SEQ ID NO: 3379108 - RNA, 11 nt, Human
caacccagccg

SEQ ID NO: 3379109 - RNA, 14 nt, Human
caacccagccgcug

SEQ ID NO: 3379110 - RNA, 18 nt, Human
caacccagccgcugcccg

SEQ ID NO: 3379111 - RNA, 18 nt, Human
caaccccaaacccaagug

SEQ ID NO: 3379112 - RNA, 16 nt, Human
caaccccacccuguuu

SEQ ID NO: 3379113 - RNA, 16 nt, Human
caaccccagacacugg

SEQ ID NO: 3379114 - RNA, 15 nt, Human
caaccccagccgcuc

SEQ ID NO: 3379115 - RNA, 13 nt, Human
caaccccaggcug

SEQ ID NO: 3379116 - RNA, 14 nt, Human
caaccccaguucug

SEQ ID NO: 3379117 - RNA, 20 nt, Human
caaccccaguucugcuccuc

SEQ ID NO: 3379118 - RNA, 12 nt, Human
caacccccaccc

SEQ ID NO: 3379119 - RNA, 17 nt, Human
caacccccaccccacac

SEQ ID NO: 3379120 - RNA, 15 nt, Human
caacccccagcaccc

SEQ ID NO: 3379121 - RNA, 17 nt, Human
caacccccagccugcua

SEQ ID NO: 3379122 - RNA, 16 nt, Human
caacccccagcucccg

SEQ ID NO: 3379123 - RNA, 17 nt, Human
caaccccccaccugcca

SEQ ID NO: 3379124 - RNA, 16 nt, Human
caaccccccagcacug

SEQ ID NO: 3379125 - RNA, 21 nt, Human
caaccccuccccuccaucccu

SEQ ID NO: 3379126 - RNA, 22 nt, Human
caaccccuccccuccaucccug

SEQ ID NO: 3379127 - RNA, 12 nt, Human
caaccccuggac

SEQ ID NO: 3379128 - RNA, 12 nt, Human
caaccccugugg

SEQ ID NO: 3379129 - RNA, 22 nt, Human
caaccccuucgcuccugugucu

SEQ ID NO: 3379130 - RNA, 16 nt, Human
caacccgaggcccgca

SEQ ID NO: 3379131 - RNA, 17 nt, Human
caacccguggaggcugc

SEQ ID NO: 3379132 - RNA, 18 nt, Human
caacccuagguucccugu

SEQ ID NO: 3379133 - RNA, 22 nt, Human
caacccuagguucccuguucuu

SEQ ID NO: 3379134 - RNA, 16 nt, Human
caacccuaucuccuga

SEQ ID NO: 3379135 - RNA, 22 nt, Human
caacccuaucuccugacagaag

SEQ ID NO: 3379136 - RNA, 21 nt, Human
caacccucagggcaaagccag

SEQ ID NO: 3379137 - RNA, 22 nt, Human
caacccucagggcaaagccagg

SEQ ID NO: 3379138 - RNA, 18 nt, Human
caacccucaggggaaaac

SEQ ID NO: 3379139 - RNA, 12 nt, Human
caacccucauca

SEQ ID NO: 3379140 - RNA, 18 nt, Human
caacccucccucagcccc

SEQ ID NO: 3379141 - RNA, 19 nt, Human
caacccuccuaaaaguuca

SEQ ID NO: 3379142 - RNA, 22 nt, Human
caacccugcaaaggacuguuuu

SEQ ID NO: 3379143 - RNA, 23 nt, Human
caacccugccccugccccgucac

SEQ ID NO: 3379144 - RNA, 20 nt, Human
caacccugccgucaccacca

SEQ ID NO: 3379145 - RNA, 20 nt, Human
caacccuggggaaggagcca

SEQ ID NO: 3379146 - RNA, 21 nt, Human
caacccuggggaaggagccag

SEQ ID NO: 3379147 - RNA, 13 nt, Human
caacccuguuucc

SEQ ID NO: 3379148 - RNA, 19 nt, Human
caacccuuaccccuuagcc

SEQ ID NO: 3379149 - RNA, 22 nt, Human
caacccuuaccccuuagccucc

SEQ ID NO: 3379150 - RNA, 13 nt, Human
caacccuucccca

SEQ ID NO: 3379151 - RNA, 20 nt, Human
caacccuucuccucuuguaa

SEQ ID NO: 3379152 - RNA, 19 nt, Human
caacccuucuucauguuca

SEQ ID NO: 3379153 - RNA, 19 nt, Human
caacccuuuugucugccuc

SEQ ID NO: 3379154 - RNA, 18 nt, Human
caaccgacaggcccuggc

SEQ ID NO: 3379155 - RNA, 14 nt, Human
caaccgagaagguu

SEQ ID NO: 3379156 - RNA, 17 nt, Human
caaccgaugcuccagcc

SEQ ID NO: 3379157 - RNA, 18 nt, Human
caaccguggcccuuccug

SEQ ID NO: 3379158 - RNA, 14 nt, Human
caaccuaaccugug

SEQ ID NO: 3379159 - RNA, 17 nt, Human
caaccuaaccugugucu

SEQ ID NO: 3379160 - RNA, 19 nt, Human
caaccuaaccugugucugc

SEQ ID NO: 3379161 - RNA, 22 nt, Human
caaccuaccaccccuuccuguc

SEQ ID NO: 3379162 - RNA, 16 nt, Human
caaccuauuuugaagu

SEQ ID NO: 3379163 - RNA, 11 nt, Human
caaccucagca

SEQ ID NO: 3379164 - RNA, 14 nt, Human
caaccucagcaacc

SEQ ID NO: 3379165 - RNA, 15 nt, Human
caaccucagggcucc

SEQ ID NO: 3379166 - RNA, 20 nt, Human
caaccucagggcucccaggg

SEQ ID NO: 3379167 - RNA, 15 nt, Human
caaccucauccucuc

SEQ ID NO: 3379168 - RNA, 14 nt, Human
caaccucauugaca

SEQ ID NO: 3379169 - RNA, 17 nt, Human
caaccucccaacccaga

SEQ ID NO: 3379170 - RNA, 13 nt, Human
caaccucccucuu

SEQ ID NO: 3379171 - RNA, 15 nt, Human
caaccucccucuugu

SEQ ID NO: 3379172 - RNA, 18 nt, Human
caaccucccucuuguuuu

SEQ ID NO: 3379173 - RNA, 20 nt, Human
caaccucccucuuguuuugu

SEQ ID NO: 3379174 - RNA, 19 nt, Human
caaccuccgccucccgggu

SEQ ID NO: 3379175 - RNA, 17 nt, Human
caaccucgcuccaacuc

SEQ ID NO: 3379176 - RNA, 16 nt, Human
caaccucgcugagggc

SEQ ID NO: 3379177 - RNA, 17 nt, Human
caaccucggcuccugga

SEQ ID NO: 3379178 - RNA, 15 nt, Human
caaaaagugcuucau

SEQ ID NO: 3379179 - RNA, 17 nt, Human
caaaaaguguuuauuuu

SEQ ID NO: 3379180 - RNA, 23 nt, Human
caaaaauaaacuauaaaacaaaa

SEQ ID NO: 3379181 - RNA, 14 nt, Human
caaaaauaaauuua

SEQ ID NO: 3379182 - RNA, 22 nt, Human
caaaaauauuuuaugauccagc

SEQ ID NO: 3379183 - RNA, 14 nt, Human
caaaaaucagccag

SEQ ID NO: 3379184 - RNA, 17 nt, Human
caaaaaucagccagaca

SEQ ID NO: 3379185 - RNA, 19 nt, Human
caaaaaucucaauauuuca

SEQ ID NO: 3379186 - RNA, 17 nt, Human
caaaaaucugaagauug

SEQ ID NO: 3379187 - RNA, 21 nt, Human
caaaaaucugaagauuguuua

SEQ ID NO: 3379188 - RNA, 15 nt, Human
caaaaaugcuaauau

SEQ ID NO: 3379189 - RNA, 21 nt, Human
caaaaaugcuaauauuaaaag

SEQ ID NO: 3379190 - RNA, 21 nt, Human
caaaaauguacaaaauaaagu

SEQ ID NO: 3379191 - RNA, 11 nt, Human
caaaaauguug

SEQ ID NO: 3379192 - RNA, 14 nt, Human
caaaaauguugaac

SEQ ID NO: 3379193 - RNA, 17 nt, Human
caaaaauuagccgggca

SEQ ID NO: 3379194 - RNA, 17 nt, Human
caaaaauuaucuauagc

SEQ ID NO: 3379195 - RNA, 19 nt, Human
caaaaauuaucuauagcua

SEQ ID NO: 3379196 - RNA, 21 nt, Human
caaaaauuaucuauuuguaua

SEQ ID NO: 3379197 - RNA, 20 nt, Human
caaaaauucacaagcugccu

SEQ ID NO: 3379198 - RNA, 23 nt, Human
caaaaauucacaagcugccuccc

SEQ ID NO: 3379199 - RNA, 21 nt, Human
caaaaauuucuguaaaacagg

SEQ ID NO: 3379200 - RNA, 22 nt, Human
caaaaauuugaaccaaaacauu

SEQ ID NO: 3379201 - RNA, 20 nt, Human
caaaaauuuggaauucuguu

SEQ ID NO: 3379202 - RNA, 21 nt, Human
caaaaauuuuuggauugacag

SEQ ID NO: 3379203 - RNA, 11 nt, Human
caaaacaaaaa

SEQ ID NO: 3379204 - RNA, 17 nt, Human
caaaacaaaacaaaacu

SEQ ID NO: 3379205 - RNA, 12 nt, Human
caaaacaaaggc

SEQ ID NO: 3379206 - RNA, 16 nt, Human
caaaacaaagucuuug

SEQ ID NO: 3379207 - RNA, 15 nt, Human
caaaacaacauuuug

SEQ ID NO: 3379208 - RNA, 16 nt, Human
caaaacaauguuuaaa

SEQ ID NO: 3379209 - RNA, 18 nt, Human
caaaacaauguuuaaacc

SEQ ID NO: 3379210 - RNA, 22 nt, Human
caaaacacacgcgcgcacacac

SEQ ID NO: 3379211 - RNA, 23 nt, Human
caaaacagcguuuaagacuguaa

SEQ ID NO: 3379212 - RNA, 22 nt, Human
caaaacaugcuaccugauccca

SEQ ID NO: 3379213 - RNA, 17 nt, Human
caaaaccaaaaguuauu

SEQ ID NO: 3379214 - RNA, 15 nt, Human
caaaacccagcugca

SEQ ID NO: 3379215 - RNA, 18 nt, Human
caaaacccagcugcaccc

SEQ ID NO: 3379216 - RNA, 16 nt, Human
caaaacccaugcauuu

SEQ ID NO: 3379217 - RNA, 17 nt, Human
caaaaccgccagcucug

SEQ ID NO: 3379218 - RNA, 18 nt, Human
caaaaccgccagcucugu

SEQ ID NO: 3379219 - RNA, 20 nt, Human
caaaaccgccagcucuguuc

SEQ ID NO: 3379220 - RNA, 15 nt, Human
caaaaccuuuuacug

SEQ ID NO: 3379221 - RNA, 21 nt, Human
caaaacgguuuuacugcagcu

SEQ ID NO: 3379222 - RNA, 13 nt, Human
caaaacgucuuau

SEQ ID NO: 3379223 - RNA, 18 nt, Human
caaaacuccgcccccagc

SEQ ID NO: 3379224 - RNA, 16 nt, Human
caaaacuccugucuuu

SEQ ID NO: 3379225 - RNA, 19 nt, Human
caaaacucuacuuaaucca

SEQ ID NO: 3379226 - RNA, 22 nt, Human
caaaacucuccucugcugcugg

SEQ ID NO: 3379227 - RNA, 14 nt, Human
caaaacugcacugu

SEQ ID NO: 3379228 - RNA, 21 nt, Human
caaaacuucguuuaaugaaug

SEQ ID NO: 3379229 - RNA, 11 nt, Human
caaaacuucuu

SEQ ID NO: 3379230 - RNA, 20 nt, Human
caaaacuucuugucagacau

SEQ ID NO: 3379231 - RNA, 18 nt, Human
caaaagaaagaaaaucag

SEQ ID NO: 3379232 - RNA, 19 nt, Human
caaaagaacaagaauuucu

SEQ ID NO: 3379233 - RNA, 13 nt, Human
caaaagaagcccc

SEQ ID NO: 3379234 - RNA, 17 nt, Human
caaaagaaguaaaagca

SEQ ID NO: 3379235 - RNA, 19 nt, Human
caaaagaaguaaaagcaaa

SEQ ID NO: 3379236 - RNA, 19 nt, Human
caaaagaaguaacaagagu

SEQ ID NO: 3379237 - RNA, 13 nt, Human
caaaagacaauuc

SEQ ID NO: 3379238 - RNA, 21 nt, Human
caaaagacaauucuuuauaca

SEQ ID NO: 3379239 - RNA, 23 nt, Human
caaaagacaauucuuuauacaac

SEQ ID NO: 3379240 - RNA, 14 nt, Human
caaaagagaaaaaa

SEQ ID NO: 3379241 - RNA, 15 nt, Human
caaaagaguguaaaa

SEQ ID NO: 3379242 - RNA, 19 nt, Human
caaaagcaucuaugugaga

SEQ ID NO: 3379243 - RNA, 18 nt, Human
caaaagccuuguguauau

SEQ ID NO: 3379244 - RNA, 19 nt, Human
auccugaacugcuucucca

SEQ ID NO: 3379245 - RNA, 24 nt, Human
auccugaccagcugcuccgaggac

SEQ ID NO: 3379246 - RNA, 21 nt, Human
auccugacuauuauguuguua

SEQ ID NO: 3379247 - RNA, 15 nt, Human
auccugacucugccc

SEQ ID NO: 3379248 - RNA, 23 nt, Human
auccugacuucuaauaucauuca

SEQ ID NO: 3379249 - RNA, 12 nt, Human
auccugagccag

SEQ ID NO: 3379250 - RNA, 15 nt, Human
auccugagccagauu

SEQ ID NO: 3379251 - RNA, 17 nt, Human
auccugagccagauuuc

SEQ ID NO: 3379252 - RNA, 13 nt, Human
auccugagccccg

SEQ ID NO: 3379253 - RNA, 11 nt, Human
auccugaggcu

SEQ ID NO: 3379254 - RNA, 16 nt, Human
auccugaggcuccacu

SEQ ID NO: 3379255 - RNA, 15 nt, Human
auccugcacugacuc

SEQ ID NO: 3379256 - RNA, 20 nt, Human
auccugcagccuccuccuga

SEQ ID NO: 3379257 - RNA, 13 nt, Human
auccugccagccc

SEQ ID NO: 3379258 - RNA, 21 nt, Human
auccugccagccccacacagc

SEQ ID NO: 3379259 - RNA, 22 nt, Human
auccugcccccugaaacuuauu

SEQ ID NO: 3379260 - RNA, 12 nt, Human
auccugccugcc

SEQ ID NO: 3379261 - RNA, 22 nt, Human
auccugccuuagagccaggcac

SEQ ID NO: 3379262 - RNA, 23 nt, Human
auccugccuuagagccaggcaca

SEQ ID NO: 3379263 - RNA, 21 nt, Human
auccugccuucauggaacuca

SEQ ID NO: 3379264 - RNA, 20 nt, Human
auccuggaacaauauuuuau

SEQ ID NO: 3379265 - RNA, 19 nt, Human
auccuggaggcccaguuca

SEQ ID NO: 3379266 - RNA, 20 nt, Human
auccuggaggcccaguucac

SEQ ID NO: 3379267 - RNA, 17 nt, Human
auccuggcacccggccc

SEQ ID NO: 3379268 - RNA, 21 nt, Human
auccuggcacccggccccugc

SEQ ID NO: 3379269 - RNA, 19 nt, Human
auccuggcagcccagagac

SEQ ID NO: 3379270 - RNA, 17 nt, Human
auccuggccaacauggu

SEQ ID NO: 3379271 - RNA, 12 nt, Human
auccuggcccau

SEQ ID NO: 3379272 - RNA, 13 nt, Human
auccuggcccauc

SEQ ID NO: 3379273 - RNA, 16 nt, Human
auccuggcccaucagu

SEQ ID NO: 3379274 - RNA, 16 nt, Human
auccuggggcucccuu

SEQ ID NO: 3379275 - RNA, 20 nt, Human
auccuggggcucccuucauc

SEQ ID NO: 3379276 - RNA, 11 nt, Human
auccuggguaa

SEQ ID NO: 3379277 - RNA, 22 nt, Human
auccugguuccuaggggaauga

SEQ ID NO: 3379278 - RNA, 16 nt, Human
auccuguauucagaca

SEQ ID NO: 3379279 - RNA, 21 nt, Human
auccuguauucagacagauga

SEQ ID NO: 3379280 - RNA, 20 nt, Human
auccugucaucugagaauga

SEQ ID NO: 3379281 - RNA, 21 nt, Human
auccugucgauuagacuggac

SEQ ID NO: 3379282 - RNA, 18 nt, Human
auccugucuuucugagca

SEQ ID NO: 3379283 - RNA, 12 nt, Human
auccugugaagu

SEQ ID NO: 3379284 - RNA, 15 nt, Human
auccugugacaugua

SEQ ID NO: 3379285 - RNA, 21 nt, Human
auccugugacugucucacuua

SEQ ID NO: 3379286 - RNA, 11 nt, Human
auccugugagg

SEQ ID NO: 3379287 - RNA, 14 nt, Human
auccuguguagcau

SEQ ID NO: 3379288 - RNA, 16 nt, Human
auccuguguggagagg

SEQ ID NO: 3379289 - RNA, 18 nt, Human
auccuguguggagaggga

SEQ ID NO: 3379290 - RNA, 19 nt, Human
auccuguguggagagggaa

SEQ ID NO: 3379291 - RNA, 21 nt, Human
auccuguguggagagggaaug

SEQ ID NO: 3379292 - RNA, 22 nt, Human
auccuguguggagagggaaugu

SEQ ID NO: 3379293 - RNA, 11 nt, Human
auccugugugu

SEQ ID NO: 3379294 - RNA, 12 nt, Human
auccuguguguu

SEQ ID NO: 3379295 - RNA, 19 nt, Human
auccuguguguuaagcucu

SEQ ID NO: 3379296 - RNA, 14 nt, Human
auccuguugaaaag

SEQ ID NO: 3379297 - RNA, 15 nt, Human
auccuguugaaaagc

SEQ ID NO: 3379298 - RNA, 15 nt, Human
auccuuaaaucuuaa

SEQ ID NO: 3379299 - RNA, 22 nt, Human
auccuuaaaucuuaauguuccu

SEQ ID NO: 3379300 - RNA, 14 nt, Human
auccuuacaaauga

SEQ ID NO: 3379301 - RNA, 17 nt, Human
auccuuacaaaugauug

SEQ ID NO: 3379302 - RNA, 21 nt, Human
auccuuacaaaugauugcuuu

SEQ ID NO: 3379303 - RNA, 19 nt, Human
auccuuagagguccucugg

SEQ ID NO: 3379304 - RNA, 20 nt, Human
auccuuagagguccucugga

SEQ ID NO: 3379305 - RNA, 14 nt, Human
auccuuagaucugg

SEQ ID NO: 3379306 - RNA, 15 nt, Human
auccuuagcaacagc

SEQ ID NO: 3379307 - RNA, 15 nt, Human
auccuuaucagagcu

SEQ ID NO: 3379308 - RNA, 16 nt, Human
auccuuaucagagcua

SEQ ID NO: 3379309 - RNA, 20 nt, Human
auccuucaagaacucugggc

SEQ ID NO: 3379310 - RNA, 17 nt, Human
auccuucaucuuuuaaa

SEQ ID NO: 3379311 - RNA, 20 nt, Human
auccuuccaaaaauuauuau

SEQ ID NO: 3379312 - RNA, 23 nt, Human
auccuuccaaaaauuauuauaag

SEQ ID NO: 3379313 - RNA, 20 nt, Human
auccuuccaaagaauucuua

SEQ ID NO: 3379314 - RNA, 14 nt, Human
auccuuccauucca

SEQ ID NO: 3379315 - RNA, 12 nt, Human
auccuucccaag

SEQ ID NO: 3379316 - RNA, 22 nt, Human
auccuucccaaguaagaggcug

SEQ ID NO: 3379317 - RNA, 15 nt, Human
auccuuccuauaacu

SEQ ID NO: 3379318 - RNA, 17 nt, Human
auccuuccuauaacuug

SEQ ID NO: 3379319 - RNA, 22 nt, Human
auccuuccuauaacuugaugca

SEQ ID NO: 3379320 - RNA, 17 nt, Human
auccuuccucacaccag

SEQ ID NO: 3379321 - RNA, 11 nt, Human
auccuuccucc

SEQ ID NO: 3379322 - RNA, 13 nt, Human
auccuuccuccca

SEQ ID NO: 3379323 - RNA, 15 nt, Human
auccuuccucuccuu

SEQ ID NO: 3379324 - RNA, 16 nt, Human
auccuuccuucccacc

SEQ ID NO: 3379325 - RNA, 13 nt, Human
auccuucuaaucu

SEQ ID NO: 3379326 - RNA, 13 nt, Human
auccuucugccuu

SEQ ID NO: 3379327 - RNA, 21 nt, Human
auccuucuggcagauucaaau

SEQ ID NO: 3379328 - RNA, 15 nt, Human
auccuugaagguaua

SEQ ID NO: 3379329 - RNA, 23 nt, Human
auccuugaagguauaucuagguu

SEQ ID NO: 3379330 - RNA, 22 nt, Human
auccuugaugcaagugcaaccu

SEQ ID NO: 3379331 - RNA, 15 nt, Human
auccuuggcaccaaa

SEQ ID NO: 3379332 - RNA, 15 nt, Human
auccuugucaguugu

SEQ ID NO: 3379333 - RNA, 21 nt, Human
auccuuuaggguucugccucu

SEQ ID NO: 3379334 - RNA, 18 nt, Human
auccuuucacuucuuucc

SEQ ID NO: 3379335 - RNA, 20 nt, Human
auccuuucauauaguuagcu

SEQ ID NO: 3379336 - RNA, 19 nt, Human
auccuuuccucauuaaauu

SEQ ID NO: 3379337 - RNA, 22 nt, Human
auccuuuccucauuaaauuacc

SEQ ID NO: 3379338 - RNA, 15 nt, Human
auccuuucuauugaa

SEQ ID NO: 3379339 - RNA, 19 nt, Human
auccuuucugccucucaac

SEQ ID NO: 3379340 - RNA, 15 nt, Human
auccuuugugaaaaa

SEQ ID NO: 3379341 - RNA, 17 nt, Human
auccuuuuagucugcau

SEQ ID NO: 3379342 - RNA, 19 nt, Human
auccuuuuagucugcauau

SEQ ID NO: 3379343 - RNA, 12 nt, Human
auccuuuucucc

SEQ ID NO: 3379344 - RNA, 15 nt, Human
auccuuuucugcaga

SEQ ID NO: 3379345 - RNA, 13 nt, Human
auccuuuuguaga

SEQ ID NO: 3379346 - RNA, 13 nt, Human
auccuuuuuuaaa

SEQ ID NO: 3379347 - RNA, 20 nt, Human
aucgaaauaacaauguuaag

SEQ ID NO: 3379348 - RNA, 23 nt, Human
aucgaaauaacaauguuaaggaa

SEQ ID NO: 3379349 - RNA, 20 nt, Human
aucgaaucuacuaauuccac

SEQ ID NO: 3379350 - RNA, 14 nt, Human
aucgaccugccucg

SEQ ID NO: 3379351 - RNA, 15 nt, Human
aucgagaccauccug

SEQ ID NO: 3379352 - RNA, 16 nt, Human
aucgagaccauccugg

SEQ ID NO: 3379353 - RNA, 21 nt, Human
aucgagugagacaaaauuuua

SEQ ID NO: 3379354 - RNA, 21 nt, Human
aucgagugccgcaucucacag

SEQ ID NO: 3379355 - RNA, 22 nt, Human
aucgagugccgcaucucacagc

SEQ ID NO: 3379356 - RNA, 13 nt, Human
aucgaugcagugc

SEQ ID NO: 3379357 - RNA, 23 nt, Human
aucgaugggggagucugaagcag

SEQ ID NO: 3379358 - RNA, 20 nt, Human
aucgaugggggaugcuucau

SEQ ID NO: 3379359 - RNA, 21 nt, Human
aucgaugggggaugcuucaug

SEQ ID NO: 3379360 - RNA, 13 nt, Human
aucgauguuaugu

SEQ ID NO: 3379361 - RNA, 12 nt, Human
aucgauuggcuu

SEQ ID NO: 3379362 - RNA, 17 nt, Human
aucgcacucuggcagca

SEQ ID NO: 3379363 - RNA, 20 nt, Human
aucgcacucuggcagcaccg

SEQ ID NO: 3379364 - RNA, 19 nt, Human
aucgccagaggugcuucac

SEQ ID NO: 3379365 - RNA, 19 nt, Human
aucgcccuccacaucccug

SEQ ID NO: 3379366 - RNA, 12 nt, Human
aucgccuucccc

SEQ ID NO: 3379367 - RNA, 21 nt, Human
aucgcucguguguucuaucca

SEQ ID NO: 3379368 - RNA, 23 nt, Human
aucgcucguguguucuauccaaa

SEQ ID NO: 3379369 - RNA, 15 nt, Human
aucgcugacuucaug

SEQ ID NO: 3379370 - RNA, 21 nt, Human
aucgcugggaaaugagaugac

SEQ ID NO: 3379371 - RNA, 22 nt, Human
aucgcuguguguuaguucccaa

SEQ ID NO: 3379372 - RNA, 13 nt, Human
aucggaaaaauaa

SEQ ID NO: 3379373 - RNA, 15 nt, Human
aucggaaaaauaauc

SEQ ID NO: 3379374 - RNA, 14 nt, Human
caaaucuaccacug

SEQ ID NO: 3379375 - RNA, 22 nt, Human
caaaucuauucagacaagcaac

SEQ ID NO: 3379376 - RNA, 21 nt, Human
caaaucucaaugaagccagcu

SEQ ID NO: 3379377 - RNA, 16 nt, Human
caaaucugauggccuu

SEQ ID NO: 3379378 - RNA, 21 nt, Human
caaaucuggcuccuuuacaaa

SEQ ID NO: 3379379 - RNA, 21 nt, Human
caaaucuuaacuugaaggagu

SEQ ID NO: 3379380 - RNA, 14 nt, Human
caaaucuuaagaaa

SEQ ID NO: 3379381 - RNA, 22 nt, Human
caaaucuuccuggucgaaaguu

SEQ ID NO: 3379382 - RNA, 12 nt, Human
caaaucuugaaa

SEQ ID NO: 3379383 - RNA, 13 nt, Human
caaaucuugaaau

SEQ ID NO: 3379384 - RNA, 19 nt, Human
caaaucuugaaauuaagaa

SEQ ID NO: 3379385 - RNA, 18 nt, Human
caaaugaaauauauuuaa

SEQ ID NO: 3379386 - RNA, 22 nt, Human
caaaugaauaaugccuuuguaa

SEQ ID NO: 3379387 - RNA, 14 nt, Human
caaaugacaugcac

SEQ ID NO: 3379388 - RNA, 15 nt, Human
aucuauuuuuggagg

SEQ ID NO: 3379389 - RNA, 23 nt, Human
aucuauuuuuggcagucugaauu

SEQ ID NO: 3379390 - RNA, 15 nt, Human
aucucaaaacugcac

SEQ ID NO: 3379391 - RNA, 20 nt, Human
aucucaaaacugcacuguca

SEQ ID NO: 3379392 - RNA, 15 nt, Human
aucucaaacaauuga

SEQ ID NO: 3379393 - RNA, 14 nt, Human
aucucaaauaacua

SEQ ID NO: 3379394 - RNA, 15 nt, Human
caagguucuccaaca

SEQ ID NO: 3379395 - RNA, 21 nt, Human
caagguuggagcccagggcau

SEQ ID NO: 3379396 - RNA, 20 nt, Human
caagguuuaaagagucuaga

SEQ ID NO: 3379397 - RNA, 21 nt, Human
caagguuuaggcugguggccc

SEQ ID NO: 3379398 - RNA, 23 nt, Human
caagguuuaggcugguggcccag

SEQ ID NO: 3379399 - RNA, 24 nt, Human
caagguuuaggcugguggcccagg

SEQ ID NO: 3379400 - RNA, 13 nt, Human
caagguuuuaggu

SEQ ID NO: 3379401 - RNA, 20 nt, Human
caagguuuuagguucuaaag

SEQ ID NO: 3379402 - RNA, 21 nt, Human
caagguuuuagguucuaaagu

SEQ ID NO: 3379403 - RNA, 10 nt, Human
caaguaaaaa

SEQ ID NO: 3379404 - RNA, 22 nt, Human
caaguaagaagacaugaaccaa

SEQ ID NO: 3379405 - RNA, 20 nt, Human
caaguaagaggcuggaguug

SEQ ID NO: 3379406 - RNA, 15 nt, Human
caaguaauacaaacu

SEQ ID NO: 3379407 - RNA, 16 nt, Human
caaguaauucugcugu

SEQ ID NO: 3379408 - RNA, 19 nt, Human
caaguacaaccacacccac

SEQ ID NO: 3379409 - RNA, 13 nt, Human
caaguagaaucuc

SEQ ID NO: 3379410 - RNA, 16 nt, Human
caaguagaaucucagu

SEQ ID NO: 3379411 - RNA, 23 nt, Human
caaguagaaucucaguugauuuu

SEQ ID NO: 3379412 - RNA, 17 nt, Human
caaguagacuacuguuc

SEQ ID NO: 3379413 - RNA, 17 nt, Human
caaguagauaaauauuu

SEQ ID NO: 3379414 - RNA, 18 nt, Human
caaguagauaaauauuug

SEQ ID NO: 3379415 - RNA, 16 nt, Human
caaguagucugcucac

SEQ ID NO: 3379416 - RNA, 21 nt, Human
caaguaguucuguauuugaaa

SEQ ID NO: 3379417 - RNA, 23 nt, Human
caaguaguucuguauuugaaagu

SEQ ID NO: 3379418 - RNA, 14 nt, Human
caaguauaaacuuu

SEQ ID NO: 3379419 - RNA, 14 nt, Human
caaguauagaaaau

SEQ ID NO: 3379420 - RNA, 19 nt, Human
caaguauuacuaaauugac

SEQ ID NO: 3379421 - RNA, 23 nt, Human
caaguauuacuaaauugaccuuu

SEQ ID NO: 3379422 - RNA, 17 nt, Human
caaguauuauaccuuuu

SEQ ID NO: 3379423 - RNA, 14 nt, Human
caaguauucugccu

SEQ ID NO: 3379424 - RNA, 15 nt, Human
caaguauucugccuu

SEQ ID NO: 3379425 - RNA, 19 nt, Human
caaguauuugggaagugaa

SEQ ID NO: 3379426 - RNA, 16 nt, Human
caaguauuuguuaauu

SEQ ID NO: 3379427 - RNA, 22 nt, Human
caaguauuuguuaauuuagaaa

SEQ ID NO: 3379428 - RNA, 11 nt, Human
caaguauuuug

SEQ ID NO: 3379429 - RNA, 23 nt, Human
caagucaaaauauuuuuaaaaga

SEQ ID NO: 3379430 - RNA, 17 nt, Human
caagucaaucauuucuc

SEQ ID NO: 3379431 - RNA, 15 nt, Human
caagucagaggaugg

SEQ ID NO: 3379432 - RNA, 21 nt, Human
caagucagaggauggccagug

SEQ ID NO: 3379433 - RNA, 22 nt, Human
caagucagaggauggccagugu

SEQ ID NO: 3379434 - RNA, 23 nt, Human
caagucagaggauggccaguguc

SEQ ID NO: 3379435 - RNA, 19 nt, Human
caagucagcuuugccuucc

SEQ ID NO: 3379436 - RNA, 23 nt, Human
caagucaguccaggaugcuaaca

SEQ ID NO: 3379437 - RNA, 14 nt, Human
caagucauguaaau

SEQ ID NO: 3379438 - RNA, 17 nt, Human
caagucaugugcauuuc

SEQ ID NO: 3379439 - RNA, 12 nt, Human
caagucauuuua

SEQ ID NO: 3379440 - RNA, 22 nt, Human
caagucccaccgguugcuucug

SEQ ID NO: 3379441 - RNA, 20 nt, Human
caaguccccgucugccuggc

SEQ ID NO: 3379442 - RNA, 11 nt, Human
caagucccugu

SEQ ID NO: 3379443 - RNA, 21 nt, Human
caagucccuguuuucugagcc

SEQ ID NO: 3379444 - RNA, 14 nt, Human
caaguccucuuuuc

SEQ ID NO: 3379445 - RNA, 21 nt, Human
caaguccucuuuucugagagg

SEQ ID NO: 3379446 - RNA, 16 nt, Human
caaguccugaagaggc

SEQ ID NO: 3379447 - RNA, 19 nt, Human
caaguccugaagaggcggg

SEQ ID NO: 3379448 - RNA, 23 nt, Human
caaguccugaagaggcgggccag

SEQ ID NO: 3379449 - RNA, 18 nt, Human
caaguccugccucuuaaa

SEQ ID NO: 3379450 - RNA, 18 nt, Human
caagucggaacagcagau

SEQ ID NO: 3379451 - RNA, 15 nt, Human
caagucuacagagug

SEQ ID NO: 3379452 - RNA, 18 nt, Human
caagucuaugaugcuguu

SEQ ID NO: 3379453 - RNA, 21 nt, Human
caagucuaugaugcuguugcc

SEQ ID NO: 3379454 - RNA, 14 nt, Human
caagucuccuuccc

SEQ ID NO: 3379455 - RNA, 13 nt, Human
caagucuggaucu

SEQ ID NO: 3379456 - RNA, 18 nt, Human
caagucuggaucugggac

SEQ ID NO: 3379457 - RNA, 19 nt, Human
caagucuggaucugggacc

SEQ ID NO: 3379458 - RNA, 14 nt, Human
caagucuguuuacu

SEQ ID NO: 3379459 - RNA, 15 nt, Human
caagucuucccugau

SEQ ID NO: 3379460 - RNA, 12 nt, Human
caagugaaaaau

SEQ ID NO: 3379461 - RNA, 20 nt, Human
caagugaaauaacaaaaugg

SEQ ID NO: 3379462 - RNA, 21 nt, Human
caagugaaauaacaaaaugga

SEQ ID NO: 3379463 - RNA, 13 nt, Human
caagugaaauuau

SEQ ID NO: 3379464 - RNA, 14 nt, Human
caagugaagaaaag

SEQ ID NO: 3379465 - RNA, 13 nt, Human
caagugaaucuaa

SEQ ID NO: 3379466 - RNA, 16 nt, Human
caagugacaucucuuu

SEQ ID NO: 3379467 - RNA, 17 nt, Human
caagugacgaaaacauu

SEQ ID NO: 3379468 - RNA, 19 nt, Human
caagugagacccugucuca

SEQ ID NO: 3379469 - RNA, 14 nt, Human
caagugagagcugg

SEQ ID NO: 3379470 - RNA, 19 nt, Human
caagugagcaaaccugccc

SEQ ID NO: 3379471 - RNA, 18 nt, Human
caagugaugcuaaaaccu

SEQ ID NO: 3379472 - RNA, 17 nt, Human
caagugauucucaugcc

SEQ ID NO: 3379473 - RNA, 20 nt, Human
caagugauucucaugccuca

SEQ ID NO: 3379474 - RNA, 14 nt, Human
caagugauucuccu

SEQ ID NO: 3379475 - RNA, 20 nt, Human
caagugauucuccugccuca

SEQ ID NO: 3379476 - RNA, 21 nt, Human
caagugauucuccugccucag

SEQ ID NO: 3379477 - RNA, 22 nt, Human
caagugauucuccugccucagc

SEQ ID NO: 3379478 - RNA, 18 nt, Human
caagugauugggacagag

SEQ ID NO: 3379479 - RNA, 19 nt, Human
caagugcaugcucucugca

SEQ ID NO: 3379480 - RNA, 15 nt, Human
caagugccaaaugcu

SEQ ID NO: 3379481 - RNA, 21 nt, Human
caagugccagaggugggcagg

SEQ ID NO: 3379482 - RNA, 22 nt, Human
caagugccagaggugggcaggu

SEQ ID NO: 3379483 - RNA, 20 nt, Human
caagugccagucuugugucu

SEQ ID NO: 3379484 - RNA, 17 nt, Human
caagugccgcaaauugu

SEQ ID NO: 3379485 - RNA, 21 nt, Human
caagugcuggagucuccugag

SEQ ID NO: 3379486 - RNA, 12 nt, Human
caagugcuggca

SEQ ID NO: 3379487 - RNA, 14 nt, Human
caagugcugugcaa

SEQ ID NO: 3379488 - RNA, 12 nt, Human
caaguggaccuu

SEQ ID NO: 3379489 - RNA, 18 nt, Human
caaguggagccugacagc

SEQ ID NO: 3379490 - RNA, 18 nt, Human
caaguggcagagcuugga

SEQ ID NO: 3379491 - RNA, 17 nt, Human
caagugggaucugucac

SEQ ID NO: 3379492 - RNA, 20 nt, Human
caagugggaucugucacacc

SEQ ID NO: 3379493 - RNA, 17 nt, Human
caaguggguacccccag

SEQ ID NO: 3379494 - RNA, 20 nt, Human
caagugguagcaagaaguga

SEQ ID NO: 3379495 - RNA, 13 nt, Human
caaguggugccua

SEQ ID NO: 3379496 - RNA, 20 nt, Human
caaguggugguaacccuggu

SEQ ID NO: 3379497 - RNA, 22 nt, Human
caaguggugguaacccuggugg

SEQ ID NO: 3379498 - RNA, 22 nt, Human
caagugguuuccacaugcucug

SEQ ID NO: 3379499 - RNA, 17 nt, Human
caagugucucaguccac

SEQ ID NO: 3379500 - RNA, 15 nt, Human
caagugucuuccauc

SEQ ID NO: 3379501 - RNA, 18 nt, Human
caagugugcauauuguac

SEQ ID NO: 3379502 - RNA, 22 nt, Human
caagugugcauauuguacacuu

SEQ ID NO: 3379503 - RNA, 19 nt, Human
caagugugcuaaaaaugag

SEQ ID NO: 3379504 - RNA, 23 nt, Human
caaguguguaugugcgugugugc

SEQ ID NO: 3379505 - RNA, 20 nt, Human
caagugugugcacaugugug

SEQ ID NO: 3379506 - RNA, 22 nt, Human
caagugugugcacaugugugcg

SEQ ID NO: 3379507 - RNA, 20 nt, Human
caagugugugcaugugugcg

SEQ ID NO: 3379508 - RNA, 17 nt, Human
caagugugugugcgugu

SEQ ID NO: 3379509 - RNA, 18 nt, Human
caaguuaaagugaauaac

SEQ ID NO: 3379510 - RNA, 18 nt, Human
caaguuaagagaaacuuu

SEQ ID NO: 3379511 - RNA, 13 nt, Human
caaguuaagauuc

SEQ ID NO: 3379512 - RNA, 13 nt, Human
caaguuagcucag

SEQ ID NO: 3379513 - RNA, 15 nt, Human
caaguuauuaauuuc

SEQ ID NO: 3379514 - RNA, 21 nt, Human
caaguuauuaauuucuucaca

SEQ ID NO: 3379515 - RNA, 17 nt, Human
caaguucaaucuguuuu

SEQ ID NO: 3379516 - RNA, 23 nt, Human
caaguucacaccugcagauucua

SEQ ID NO: 3379517 - RNA, 18 nt, Human
caaguuccaaguugcuaa

SEQ ID NO: 3379518 - RNA, 22 nt, Human
caaguuccaugggauacaaccu

SEQ ID NO: 3379519 - RNA, 13 nt, Human
caaguucuaagau

SEQ ID NO: 3379520 - RNA, 15 nt, Human
caaguucuaagauuc

SEQ ID NO: 3379521 - RNA, 21 nt, Human
caaguucuaagauucuaauga

SEQ ID NO: 3379522 - RNA, 23 nt, Human
caaguucuagagaagaggcuggu

SEQ ID NO: 3379523 - RNA, 15 nt, Human
caaguugaauugagg

SEQ ID NO: 3379524 - RNA, 23 nt, Human
caaguugcgacggagagaaaaaa

SEQ ID NO: 3379525 - RNA, 15 nt, Human
caaguugcuaauaca

SEQ ID NO: 3379526 - RNA, 15 nt, Human
caaguuggagucacu

SEQ ID NO: 3379527 - RNA, 16 nt, Human
caaguugucagguuau

SEQ ID NO: 3379528 - RNA, 18 nt, Human
caaguugugcuugagcca

SEQ ID NO: 3379529 - RNA, 17 nt, Human
caaguugugcuuguuua

SEQ ID NO: 3379530 - RNA, 17 nt, Human
caaguuguggugcugac

SEQ ID NO: 3379531 - RNA, 15 nt, Human
cccucacucugccag

SEQ ID NO: 3379532 - RNA, 21 nt, Human
cccucacucugccagggcagu

SEQ ID NO: 3379533 - RNA, 20 nt, Human
cccucacuggcucuccuggc

SEQ ID NO: 3379534 - RNA, 17 nt, Human
cccucagaacccuuggc

SEQ ID NO: 3379535 - RNA, 17 nt, Human
cccucagccccucuugc

SEQ ID NO: 3379536 - RNA, 23 nt, Human
cccucagccccucuugcccccca

SEQ ID NO: 3379537 - RNA, 20 nt, Human
cccucagccucuccccugcc

SEQ ID NO: 3379538 - RNA, 19 nt, Human
cccucagcucggcucagcu

SEQ ID NO: 3379539 - RNA, 22 nt, Human
cccucaggacccucgcuggccc

SEQ ID NO: 3379540 - RNA, 13 nt, Human
cccucaggacugc

SEQ ID NO: 3379541 - RNA, 19 nt, Human
cccucaggcauaggccugg

SEQ ID NO: 3379542 - RNA, 22 nt, Human
cccucaggcauaggccugggug

SEQ ID NO: 3379543 - RNA, 21 nt, Human
cccucagggcaaagccagguc

SEQ ID NO: 3379544 - RNA, 22 nt, Human
cccucaggggaaaacuguuacc

SEQ ID NO: 3379545 - RNA, 18 nt, Human
cccucagggucccuggug

SEQ ID NO: 3379546 - RNA, 19 nt, Human
cccucagggucccuggugg

SEQ ID NO: 3379547 - RNA, 20 nt, Human
cccucagucuggcccuuccu

SEQ ID NO: 3379548 - RNA, 16 nt, Human
cccucaguugugcagc

SEQ ID NO: 3379549 - RNA, 19 nt, Human
cccucaguuucccuaucuc

SEQ ID NO: 3379550 - RNA, 13 nt, Human
cccucauagcccu

SEQ ID NO: 3379551 - RNA, 19 nt, Human
cccucauagcccucacccu

SEQ ID NO: 3379552 - RNA, 16 nt, Human
cccucaucaaggacac

SEQ ID NO: 3379553 - RNA, 17 nt, Human
cccucaucccgagcacc

SEQ ID NO: 3379554 - RNA, 20 nt, Human
cccucauccucauacccacc

SEQ ID NO: 3379555 - RNA, 22 nt, Human
cccucauccucauacccacccc

SEQ ID NO: 3379556 - RNA, 13 nt, Human
cccucaucugucc

SEQ ID NO: 3379557 - RNA, 13 nt, Human
cccucaucugucu

SEQ ID NO: 3379558 - RNA, 18 nt, Human
cccucaucuugaagggcc

SEQ ID NO: 3379559 - RNA, 14 nt, Human
cccucaucuuucuu

SEQ ID NO: 3379560 - RNA, 17 nt, Human
cccucauuacugggccu

SEQ ID NO: 3379561 - RNA, 16 nt, Human
cccucauucaggaaaa

SEQ ID NO: 3379562 - RNA, 20 nt, Human
cccuccaaauggagaagcug

SEQ ID NO: 3379563 - RNA, 21 nt, Human
cccuccaagaccuucuccuuc

SEQ ID NO: 3379564 - RNA, 14 nt, Human
cccuccacaucccu

SEQ ID NO: 3379565 - RNA, 13 nt, Human
cccuccaccccag

SEQ ID NO: 3379566 - RNA, 14 nt, Human
cccuccacccuguc

SEQ ID NO: 3379567 - RNA, 19 nt, Human
cccuccaccgcagaaggaa

SEQ ID NO: 3379568 - RNA, 21 nt, Human
cccuccaccgcagaaggaagg

SEQ ID NO: 3379569 - RNA, 12 nt, Human
cccuccacucuc

SEQ ID NO: 3379570 - RNA, 23 nt, Human
cccuccacucuccucuuccaggc

SEQ ID NO: 3379571 - RNA, 14 nt, Human
cccuccacugcccu

SEQ ID NO: 3379572 - RNA, 18 nt, Human
cccuccagcacaaacaca

SEQ ID NO: 3379573 - RNA, 23 nt, Human
cccuccagccuuuggccuuggcu

SEQ ID NO: 3379574 - RNA, 14 nt, Human
cccuccaucccugg

SEQ ID NO: 3379575 - RNA, 19 nt, Human
cccucccacacccaaagcu

SEQ ID NO: 3379576 - RNA, 12 nt, Human
cccucccacagc

SEQ ID NO: 3379577 - RNA, 14 nt, Human
cccucccaccacag

SEQ ID NO: 3379578 - RNA, 14 nt, Human
cccucccacccacc

SEQ ID NO: 3379579 - RNA, 13 nt, Human
cccucccaccccc

SEQ ID NO: 3379580 - RNA, 15 nt, Human
cccucccaccuccag

SEQ ID NO: 3379581 - RNA, 14 nt, Human
cccucccaccucug

SEQ ID NO: 3379582 - RNA, 15 nt, Human
cccucccaccucugu

SEQ ID NO: 3379583 - RNA, 10 nt, Human
cccucccaga

SEQ ID NO: 3379584 - RNA, 17 nt, Human
cccucccagagcaccug

SEQ ID NO: 3379585 - RNA, 13 nt, Human
cccucccagaggc

SEQ ID NO: 3379586 - RNA, 13 nt, Human
cccucccagcucu

SEQ ID NO: 3379587 - RNA, 20 nt, Human
cccucccagcugacaguccu

SEQ ID NO: 3379588 - RNA, 13 nt, Human
cccucccagggag

SEQ ID NO: 3379589 - RNA, 22 nt, Human
cccucccagggccagggcccug

SEQ ID NO: 3379590 - RNA, 13 nt, Human
cccucccaucugg

SEQ ID NO: 3379591 - RNA, 14 nt, Human
cccucccaucuggg

SEQ ID NO: 3379592 - RNA, 16 nt, Human
cccucccaucugggag

SEQ ID NO: 3379593 - RNA, 15 nt, Human
cccucccauuaggac

SEQ ID NO: 3379594 - RNA, 16 nt, Human
cccuccccaaaguccc

SEQ ID NO: 3379595 - RNA, 15 nt, Human
cccuccccagagcac

SEQ ID NO: 3379596 - RNA, 13 nt, Human
cccuccccaggaa

SEQ ID NO: 3379597 - RNA, 14 nt, Human
cccuccccauggag

SEQ ID NO: 3379598 - RNA, 14 nt, Human
cccucccccacugc

SEQ ID NO: 3379599 - RNA, 20 nt, Human
cccucccccccaugcacugu

SEQ ID NO: 3379600 - RNA, 14 nt, Human
cccucccccugcca

SEQ ID NO: 3379601 - RNA, 17 nt, Human
cccucccccuucuccca

SEQ ID NO: 3379602 - RNA, 15 nt, Human
cccucccccuugucc

SEQ ID NO: 3379603 - RNA, 16 nt, Human
cccuccccgcaccccc

SEQ ID NO: 3379604 - RNA, 17 nt, Human
cccuccccgcacccccc

SEQ ID NO: 3379605 - RNA, 17 nt, Human
cccuccccuccccugcu

SEQ ID NO: 3379606 - RNA, 16 nt, Human
cccuccccucucuugc

SEQ ID NO: 3379607 - RNA, 16 nt, Human
cccuccccugcccuag

SEQ ID NO: 3379608 - RNA, 21 nt, Human
cccuccccuugccugugccag

SEQ ID NO: 3379609 - RNA, 23 nt, Human
cccucccgccccuucccacucac

SEQ ID NO: 3379610 - RNA, 16 nt, Human
cccucccggcauggga

SEQ ID NO: 3379611 - RNA, 13 nt, Human
cccucccuaccuc

SEQ ID NO: 3379612 - RNA, 16 nt, Human
cccucccucagccccu

SEQ ID NO: 3379613 - RNA, 12 nt, Human
cccucccuccac

SEQ ID NO: 3379614 - RNA, 14 nt, Human
cccucccuccuucc

SEQ ID NO: 3379615 - RNA, 23 nt, Human
cccucccucuacugggagccuac

SEQ ID NO: 3379616 - RNA, 14 nt, Human
cccucccucuccag

SEQ ID NO: 3379617 - RNA, 13 nt, Human
cccucccucuuuc

SEQ ID NO: 3379618 - RNA, 12 nt, Human
cccucccugcug

SEQ ID NO: 3379619 - RNA, 13 nt, Human
cccucccugcugu

SEQ ID NO: 3379620 - RNA, 15 nt, Human
cccucccugcugucc

SEQ ID NO: 3379621 - RNA, 17 nt, Human
cccucccuggccuguuc

SEQ ID NO: 3379622 - RNA, 11 nt, Human
cccucccuguc

SEQ ID NO: 3379623 - RNA, 16 nt, Human
cccucccuucucccug

SEQ ID NO: 3379624 - RNA, 20 nt, Human
cccuccgauccuuccuccca

SEQ ID NO: 3379625 - RNA, 16 nt, Human
cccuccgccaggcgag

SEQ ID NO: 3379626 - RNA, 15 nt, Human
cccuccgcccugcca

SEQ ID NO: 3379627 - RNA, 16 nt, Human
cccuccgcccugccac

SEQ ID NO: 3379628 - RNA, 16 nt, Human
cccuccgccuccagga

SEQ ID NO: 3379629 - RNA, 18 nt, Human
cccuccggacuggugccc

SEQ ID NO: 3379630 - RNA, 18 nt, Human
cccuccuacccugcgccc

SEQ ID NO: 3379631 - RNA, 13 nt, Human
cccuccucaccuc

SEQ ID NO: 3379632 - RNA, 18 nt, Human
cccuccucaccucuggac

SEQ ID NO: 3379633 - RNA, 21 nt, Human
cccuccucacucccaccugca

SEQ ID NO: 3379634 - RNA, 14 nt, Human
cccuccuccacucu

SEQ ID NO: 3379635 - RNA, 19 nt, Human
cccuccuccagccccuguc

SEQ ID NO: 3379636 - RNA, 19 nt, Human
cccuccuccaggccugccu

SEQ ID NO: 3379637 - RNA, 23 nt, Human
cccuccuccaggccugccuccca

SEQ ID NO: 3379638 - RNA, 19 nt, Human
cccuccucccaugucacug

SEQ ID NO: 3379639 - RNA, 16 nt, Human
cccuccucccucccag

SEQ ID NO: 3379640 - RNA, 22 nt, Human
cccuccucccuucuacugcuuc

SEQ ID NO: 3379641 - RNA, 16 nt, Human
cccuccuccuggacuc

SEQ ID NO: 3379642 - RNA, 15 nt, Human
cccuccucucccauc

SEQ ID NO: 3379643 - RNA, 14 nt, Human
cccuccucugaaac

SEQ ID NO: 3379644 - RNA, 15 nt, Human
cccuccucugaaaca

SEQ ID NO: 3379645 - RNA, 21 nt, Human
cccuccucugaaacagcugcc

SEQ ID NO: 3379646 - RNA, 16 nt, Human
cccuccucugccaccu

SEQ ID NO: 3379647 - RNA, 20 nt, Human
cccuccugagggaggaccug

SEQ ID NO: 3379648 - RNA, 21 nt, Human
cccuccugagggaggaccugg

SEQ ID NO: 3379649 - RNA, 22 nt, Human
cccuccugagggaggaccuggg

SEQ ID NO: 3379650 - RNA, 12 nt, Human
cccuccugcugc

SEQ ID NO: 3379651 - RNA, 12 nt, Human
cccagcucugcg

SEQ ID NO: 3379652 - RNA, 13 nt, Human
cccagcucuggcu

SEQ ID NO: 3379653 - RNA, 12 nt, Human
cccagcucuggu

SEQ ID NO: 3379654 - RNA, 16 nt, Human
cccagcucugguccau

SEQ ID NO: 3379655 - RNA, 20 nt, Human
cccagcucuggugagucuug

SEQ ID NO: 3379656 - RNA, 17 nt, Human
cccagcugacaguccuc

SEQ ID NO: 3379657 - RNA, 19 nt, Human
cccagcugacaguccucuc

SEQ ID NO: 3379658 - RNA, 22 nt, Human
cccagcugacaguccucuccac

SEQ ID NO: 3379659 - RNA, 22 nt, Human
cccagcugcaccugccagccug

SEQ ID NO: 3379660 - RNA, 15 nt, Human
cccagcugccccucc

SEQ ID NO: 3379661 - RNA, 18 nt, Human
cccagcugcucugcccag

SEQ ID NO: 3379662 - RNA, 20 nt, Human
cccagcugcucugcccagag

SEQ ID NO: 3379663 - RNA, 11 nt, Human
cccagcuggcc

SEQ ID NO: 3379664 - RNA, 20 nt, Human
cccagcugggaggcaagagg

SEQ ID NO: 3379665 - RNA, 21 nt, Human
cccagcugggaggcaagaggg

SEQ ID NO: 3379666 - RNA, 18 nt, Human
cccagcugggcucugcca

SEQ ID NO: 3379667 - RNA, 23 nt, Human
cccagcuggggccaggcuggguc

SEQ ID NO: 3379668 - RNA, 19 nt, Human
cccagcuggugggaagcgu

SEQ ID NO: 3379669 - RNA, 16 nt, Human
cccagcugugagccuu

SEQ ID NO: 3379670 - RNA, 22 nt, Human
cccagcuucacuucugacucuu

SEQ ID NO: 3379671 - RNA, 15 nt, Human
cccagcuuccagcag

SEQ ID NO: 3379672 - RNA, 18 nt, Human
cccagcuuccagcaggag

SEQ ID NO: 3379673 - RNA, 19 nt, Human
cccagcuuccagcaggagg

SEQ ID NO: 3379674 - RNA, 22 nt, Human
cccagcuugggcagaucuccca

SEQ ID NO: 3379675 - RNA, 23 nt, Human
cccagcuugggcccagcugggcu

SEQ ID NO: 3379676 - RNA, 17 nt, Human
cccaggaaaggcuccag

SEQ ID NO: 3379677 - RNA, 13 nt, Human
caggaaccuggac

SEQ ID NO: 3379678 - RNA, 21 nt, Human
caggaaccuggaccaaagcug

SEQ ID NO: 3379679 - RNA, 19 nt, Human
caggaacuagacugccugg

SEQ ID NO: 3379680 - RNA, 17 nt, Human
caggaacucccagcaac

SEQ ID NO: 3379681 - RNA, 13 nt, Human
caggaacugggcc

SEQ ID NO: 3379682 - RNA, 14 nt, Human
caggaagaaagaau

SEQ ID NO: 3379683 - RNA, 21 nt, Human
caggaagaaaucacagaauca

SEQ ID NO: 3379684 - RNA, 22 nt, Human
caggaagacccaacacauggga

SEQ ID NO: 3379685 - RNA, 17 nt, Human
caggaagagaaggagca

SEQ ID NO: 3379686 - RNA, 14 nt, Human
caggaagagagcau

SEQ ID NO: 3379687 - RNA, 21 nt, Human
caggaagaugaaagaggaggu

SEQ ID NO: 3379688 - RNA, 15 nt, Human
caggaagcaccccau

SEQ ID NO: 3379689 - RNA, 20 nt, Human
caggaagcauucagagagca

SEQ ID NO: 3379690 - RNA, 22 nt, Human
caggaagcauucagagagcagc

SEQ ID NO: 3379691 - RNA, 18 nt, Human
caggaagccagcaggcuc

SEQ ID NO: 3379692 - RNA, 19 nt, Human
caggaagccagcaggcucu

SEQ ID NO: 3379693 - RNA, 19 nt, Human
caggaagcccaggagccuc

SEQ ID NO: 3379694 - RNA, 13 nt, Human
caggaagccugca

SEQ ID NO: 3379695 - RNA, 21 nt, Human
caggaagccugcaguccugga

SEQ ID NO: 3379696 - RNA, 14 nt, Human
caggaagccuuccc

SEQ ID NO: 3379697 - RNA, 12 nt, Human
caggaagcucag

SEQ ID NO: 3379698 - RNA, 17 nt, Human
caggaagcucagacugg

SEQ ID NO: 3379699 - RNA, 13 nt, Human
caggaagcucagg

SEQ ID NO: 3379700 - RNA, 20 nt, Human
caggaagcucagggccuggc

SEQ ID NO: 3379701 - RNA, 21 nt, Human
caggaagcucagggccuggcu

SEQ ID NO: 3379702 - RNA, 22 nt, Human
caggaagcucagggccuggcuc

SEQ ID NO: 3379703 - RNA, 13 nt, Human
caggaagcuguga

SEQ ID NO: 3379704 - RNA, 14 nt, Human
caggaagcugugag

SEQ ID NO: 3379705 - RNA, 22 nt, Human
caggaagcuuuggugagaaccu

SEQ ID NO: 3379706 - RNA, 14 nt, Human
caggaaggaaguca

SEQ ID NO: 3379707 - RNA, 14 nt, Human
caggaaggagcugc

SEQ ID NO: 3379708 - RNA, 16 nt, Human
caggaaggagcugccu

SEQ ID NO: 3379709 - RNA, 23 nt, Human
caggaaggaggagccgaccggga

SEQ ID NO: 3379710 - RNA, 15 nt, Human
caggaaggcuaaagg

SEQ ID NO: 3379711 - RNA, 21 nt, Human
caggaagggcaggaaggagag

SEQ ID NO: 3379712 - RNA, 18 nt, Human
cccugcuuugggcugccc

SEQ ID NO: 3379713 - RNA, 18 nt, Human
cccugcuuugggcuuggg

SEQ ID NO: 3379714 - RNA, 22 nt, Human
cccugcuuugggcuugggccua

SEQ ID NO: 3379715 - RNA, 22 nt, Human
cccuggaaaccuuccacccagu

SEQ ID NO: 3379716 - RNA, 17 nt, Human
cccuggaagagcccagu

SEQ ID NO: 3379717 - RNA, 18 nt, Human
cccuggaagagcccaguc

SEQ ID NO: 3379718 - RNA, 21 nt, Human
cccuggaagcagugcccaggu

SEQ ID NO: 3379719 - RNA, 22 nt, Human
cccuggaagccggcggcccaag

SEQ ID NO: 3379720 - RNA, 17 nt, Human
cccuggaccagaugcug

SEQ ID NO: 3379721 - RNA, 17 nt, Human
cccuggaccaguggucu

SEQ ID NO: 3379722 - RNA, 19 nt, Human
cccuggaccccagccucaa

SEQ ID NO: 3379723 - RNA, 14 nt, Human
cccuggacugggag

SEQ ID NO: 3379724 - RNA, 23 nt, Human
cccuggacugguggccccugccu

SEQ ID NO: 3379725 - RNA, 17 nt, Human
cccuggacuugccucug

SEQ ID NO: 3379726 - RNA, 22 nt, Human
cccuggagaccccaccagccuc

SEQ ID NO: 3379727 - RNA, 16 nt, Human
cccuggagccaacugc

SEQ ID NO: 3379728 - RNA, 19 nt, Human
cccuggagccaacugcugc

SEQ ID NO: 3379729 - RNA, 21 nt, Human
cccuggagccaacugcugcuu

SEQ ID NO: 3379730 - RNA, 13 nt, Human
cccuggagccaga

SEQ ID NO: 3379731 - RNA, 20 nt, Human
cccuggagccagacucuggu

SEQ ID NO: 3379732 - RNA, 21 nt, Human
cccuggagccagacucugguc

SEQ ID NO: 3379733 - RNA, 12 nt, Human
cccuggagccca

SEQ ID NO: 3379734 - RNA, 13 nt, Human
cccuggagguggc

SEQ ID NO: 3379735 - RNA, 18 nt, Human
cccuggagucaugccaag

SEQ ID NO: 3379736 - RNA, 20 nt, Human
cccuggaguguggcugagga

SEQ ID NO: 3379737 - RNA, 21 nt, Human
cccuggauagacgaguugauu

SEQ ID NO: 3379738 - RNA, 22 nt, Human
cccuggaucacgacgcugcaga

SEQ ID NO: 3379739 - RNA, 15 nt, Human
cccuggaucagaaca

SEQ ID NO: 3379740 - RNA, 19 nt, Human
cccuggaucagcguggccu

SEQ ID NO: 3379741 - RNA, 23 nt, Human
cccuggaucaguccuuugaucag

SEQ ID NO: 3379742 - RNA, 19 nt, Human
cccuggauccaucaggcca

SEQ ID NO: 3379743 - RNA, 20 nt, Human
cccuggauuuuuaccagucu

SEQ ID NO: 3379744 - RNA, 13 nt, Human
cccuggcagcccc

SEQ ID NO: 3379745 - RNA, 14 nt, Human
cccuggcagccccu

SEQ ID NO: 3379746 - RNA, 16 nt, Human
cccuggcagccccugu

SEQ ID NO: 3379747 - RNA, 15 nt, Human
cccuggcagcccgca

SEQ ID NO: 3379748 - RNA, 22 nt, Human
cccuggcaggaugacccugcga

SEQ ID NO: 3379749 - RNA, 14 nt, Human
cccuggcaggcagg

SEQ ID NO: 3379750 - RNA, 15 nt, Human
cccuggcaggcaggg

SEQ ID NO: 3379751 - RNA, 23 nt, Human
cccuggccaccaccccccacucu

SEQ ID NO: 3379752 - RNA, 14 nt, Human
cccuggccaucucu

SEQ ID NO: 3379753 - RNA, 15 nt, Human
cccuggccaucucug

SEQ ID NO: 3379754 - RNA, 12 nt, Human
cccuggcccccu

SEQ ID NO: 3379755 - RNA, 17 nt, Human
cccuggccccucucccu

SEQ ID NO: 3379756 - RNA, 23 nt, Human
cccuggcccucaaggccucccac

SEQ ID NO: 3379757 - RNA, 15 nt, Human
cccuggccucugugc

SEQ ID NO: 3379758 - RNA, 18 nt, Human
cccuggccucugugccuu

SEQ ID NO: 3379759 - RNA, 21 nt, Human
cccuggccuugggcccucugg

SEQ ID NO: 3379760 - RNA, 18 nt, Human
cccuggcucccacaggcc

SEQ ID NO: 3379761 - RNA, 20 nt, Human
cccuggcucccacaggcccu

SEQ ID NO: 3379762 - RNA, 12 nt, Human
cccuggcucccu

SEQ ID NO: 3379763 - RNA, 16 nt, Human
cccuggcucccuccuc

SEQ ID NO: 3379764 - RNA, 19 nt, Human
cccuggcucucagaaggua

SEQ ID NO: 3379765 - RNA, 23 nt, Human
cccuggcugaccccaaagagccu

SEQ ID NO: 3379766 - RNA, 19 nt, Human
cccuggcugcccuggcccu

SEQ ID NO: 3379767 - RNA, 15 nt, Human
cccuggcugcugccc

SEQ ID NO: 3379768 - RNA, 20 nt, Human
cccuggcugguaagggccaa

SEQ ID NO: 3379769 - RNA, 13 nt, Human
cccuggcuucugu

SEQ ID NO: 3379770 - RNA, 14 nt, Human
cccuggcuucugug

SEQ ID NO: 3379771 - RNA, 23 nt, Human
cccuggcuuguaacuccaccaac

SEQ ID NO: 3379772 - RNA, 18 nt, Human
cccugggaaggccucuug

SEQ ID NO: 3379773 - RNA, 24 nt, Human
cccugggagaaucgcuccugcagc

SEQ ID NO: 3379774 - RNA, 16 nt, Human
cccugggaggccccuu

SEQ ID NO: 3379775 - RNA, 24 nt, Human
cccugggaggcgggcgcacugccu

SEQ ID NO: 3379776 - RNA, 22 nt, Human
cccugggaggcucuggagccca

SEQ ID NO: 3379777 - RNA, 18 nt, Human
cccugggagggacaugcu

SEQ ID NO: 3379778 - RNA, 18 nt, Human
cccugggaucuggugguc

SEQ ID NO: 3379779 - RNA, 17 nt, Human
cccugggauucaggaaa

SEQ ID NO: 3379780 - RNA, 16 nt, Human
cccugggccagggucu

SEQ ID NO: 3379781 - RNA, 18 nt, Human
cccugggccccaccaccu

SEQ ID NO: 3379782 - RNA, 19 nt, Human
cccugggcccugggcugga

SEQ ID NO: 3379783 - RNA, 19 nt, Human
cccugggccugcugcugag

SEQ ID NO: 3379784 - RNA, 18 nt, Human
cccugggccuugggcucc

SEQ ID NO: 3379785 - RNA, 15 nt, Human
cccugggcucugccc

SEQ ID NO: 3379786 - RNA, 13 nt, Human
cccugggcugaga

SEQ ID NO: 3379787 - RNA, 14 nt, Human
cccugggcuggaau

SEQ ID NO: 3379788 - RNA, 17 nt, Human
cccugggcuuggccugc

SEQ ID NO: 3379789 - RNA, 20 nt, Human
cccugggcuuggccugcugu

SEQ ID NO: 3379790 - RNA, 18 nt, Human
cccuggggaaggagccag

SEQ ID NO: 3379791 - RNA, 20 nt, Human
cccuggggacagcaagggcu

SEQ ID NO: 3379792 - RNA, 15 nt, Human
cccuggggccuagac

SEQ ID NO: 3379793 - RNA, 17 nt, Human
cccuggggccuggaccu

SEQ ID NO: 3379794 - RNA, 18 nt, Human
cccuggggccuggaccug

SEQ ID NO: 3379795 - RNA, 21 nt, Human
cccuggggccuggaccugccu

SEQ ID NO: 3379796 - RNA, 17 nt, Human
cccuggggccuguacug

SEQ ID NO: 3379797 - RNA, 20 nt, Human
cccuggggccuguacugccu

SEQ ID NO: 3379798 - RNA, 20 nt, Human
cccuggggcugaucucaggg

SEQ ID NO: 3379799 - RNA, 13 nt, Human
cccuggggcuggc

SEQ ID NO: 3379800 - RNA, 21 nt, Human
cccuggggcuucuccugaccc

SEQ ID NO: 3379801 - RNA, 20 nt, Human
cccugggggaagcccuggau

SEQ ID NO: 3379802 - RNA, 18 nt, Human
cccugggugggcucugug

SEQ ID NO: 3379803 - RNA, 20 nt, Human
cccugggugggcucugugca

SEQ ID NO: 3379804 - RNA, 21 nt, Human
cccugggugggugguggggag

SEQ ID NO: 3379805 - RNA, 23 nt, Human
cccuggguguccccgcugcugug

SEQ ID NO: 3379806 - RNA, 15 nt, Human
cccugguaagaaaaa

SEQ ID NO: 3379807 - RNA, 16 nt, Human
cccugguaauagcugu

SEQ ID NO: 3379808 - RNA, 16 nt, Human
cccugguccagggaag

SEQ ID NO: 3379809 - RNA, 11 nt, Human
cccuggucccu

SEQ ID NO: 3379810 - RNA, 13 nt, Human
cccugguccuucc

SEQ ID NO: 3379811 - RNA, 16 nt, Human
cccugguccuuccagg

SEQ ID NO: 3379812 - RNA, 13 nt, Human
cccuggucucagc

SEQ ID NO: 3379813 - RNA, 13 nt, Human
cccuggugacauc

SEQ ID NO: 3379814 - RNA, 15 nt, Human
cccuggugccuggcu

SEQ ID NO: 3379815 - RNA, 18 nt, Human
cccugguggacaguccug

SEQ ID NO: 3379816 - RNA, 20 nt, Human
cccugguggcagcucaccuc

SEQ ID NO: 3379817 - RNA, 13 nt, Human
cccuggugguuca

SEQ ID NO: 3379818 - RNA, 21 nt, Human
cccugguguuucuagcacugg

SEQ ID NO: 3379819 - RNA, 14 nt, Human
cccugguucucauc

SEQ ID NO: 3379820 - RNA, 23 nt, Human
cccugguucugaugaugugccug

SEQ ID NO: 3379821 - RNA, 18 nt, Human
cccugagaucucugcagg

SEQ ID NO: 3379822 - RNA, 21 nt, Human
cccugagcaaugucugugcua

SEQ ID NO: 3379823 - RNA, 18 nt, Human
cccugagccagggucucc

SEQ ID NO: 3379824 - RNA, 19 nt, Human
cccugagccagggucucca

SEQ ID NO: 3379825 - RNA, 12 nt, Human
cccugagcccac

SEQ ID NO: 3379826 - RNA, 21 nt, Human
cccugagccccuuccuugcuc

SEQ ID NO: 3379827 - RNA, 22 nt, Human
cccugagcgccuggauuucugg

SEQ ID NO: 3379828 - RNA, 17 nt, Human
cccugagcugaggcagc

SEQ ID NO: 3379829 - RNA, 14 nt, Human
cccugagcugaggg

SEQ ID NO: 3379830 - RNA, 14 nt, Human
cccugaggagucug

SEQ ID NO: 3379831 - RNA, 16 nt, Human
cccugaggagucugag

SEQ ID NO: 3379832 - RNA, 21 nt, Human
cccugaggagucugagguccu

SEQ ID NO: 3379833 - RNA, 21 nt, Human
cccugaggaugggucagagcu

SEQ ID NO: 3379834 - RNA, 17 nt, Human
cccugaggcaggucccc

SEQ ID NO: 3379835 - RNA, 12 nt, Human
cccugaggccca

SEQ ID NO: 3379836 - RNA, 16 nt, Human
cccugaggcccagagg

SEQ ID NO: 3379837 - RNA, 12 nt, Human
cccugaggcuca

SEQ ID NO: 3379838 - RNA, 18 nt, Human
cccugaggcucagggaaa

SEQ ID NO: 3379839 - RNA, 16 nt, Human
cccugaggcuggacuc

SEQ ID NO: 3379840 - RNA, 23 nt, Human
cccugaggcuggacuccagaucu

SEQ ID NO: 3379841 - RNA, 20 nt, Human
cccugaggugaaagggagcu

SEQ ID NO: 3379842 - RNA, 21 nt, Human
cccugaggugugggggcugca

SEQ ID NO: 3379843 - RNA, 22 nt, Human
cccugaggugugggggcugcag

SEQ ID NO: 3379844 - RNA, 23 nt, Human
cccugaggugugggggcugcagc

SEQ ID NO: 3379845 - RNA, 22 nt, Human
cccugaguaaucgcuuaaagau

SEQ ID NO: 3379846 - RNA, 17 nt, Human
cccugagucaccaggaa

SEQ ID NO: 3379847 - RNA, 23 nt, Human
cccugaguggaucuccaaggacc

SEQ ID NO: 3379848 - RNA, 18 nt, Human
cccugauaacaaccugga

SEQ ID NO: 3379849 - RNA, 19 nt, Human
cccugauaacaaccuggag

SEQ ID NO: 3379850 - RNA, 14 nt, Human
cccugaucccagag

SEQ ID NO: 3379851 - RNA, 17 nt, Human
cccugaucccagagagc

SEQ ID NO: 3379852 - RNA, 20 nt, Human
cccugaucccagagagcccg

SEQ ID NO: 3379853 - RNA, 18 nt, Human
cccugaucccauuuuccu

SEQ ID NO: 3379854 - RNA, 23 nt, Human
cccugaucccuuccaccugcucu

SEQ ID NO: 3379855 - RNA, 17 nt, Human
cccugauugaccugcuc

SEQ ID NO: 3379856 - RNA, 24 nt, Human
cccugauugaccugcuccgcugcu

SEQ ID NO: 3379857 - RNA, 21 nt, Human
cccugauuuaggagaagccag

SEQ ID NO: 3379858 - RNA, 23 nt, Human
cccugauuuaggagaagccagga

SEQ ID NO: 3379859 - RNA, 18 nt, Human
cccugauuugcugggcag

SEQ ID NO: 3379860 - RNA, 23 nt, Human
cccugcaaaauuugaugccagga

SEQ ID NO: 3379861 - RNA, 18 nt, Human
cccugcaaacagaacagg

SEQ ID NO: 3379862 - RNA, 24 nt, Human
cccugcaaacagaacagggucaug

SEQ ID NO: 3379863 - RNA, 16 nt, Human
cccugcaaagcccagc

SEQ ID NO: 3379864 - RNA, 20 nt, Human
cccugcaaagcccagcuuga

SEQ ID NO: 3379865 - RNA, 15 nt, Human
cccugcaaaggacug

SEQ ID NO: 3379866 - RNA, 22 nt, Human
cccugcaaccugauugugucuc

SEQ ID NO: 3379867 - RNA, 15 nt, Human
cccugcaauaaaaug

SEQ ID NO: 3379868 - RNA, 20 nt, Human
cccugcaauguaucccuucu

SEQ ID NO: 3379869 - RNA, 23 nt, Human
cccugcaauguaucccuucucac

SEQ ID NO: 3379870 - RNA, 16 nt, Human
cccugcacaagccagg

SEQ ID NO: 3379871 - RNA, 13 nt, Human
cccugcacagcag

SEQ ID NO: 3379872 - RNA, 20 nt, Human
cccugcacagugacuucuga

SEQ ID NO: 3379873 - RNA, 13 nt, Human
cccugcacgucau

SEQ ID NO: 3379874 - RNA, 14 nt, Human
cccugcacgucaug

SEQ ID NO: 3379875 - RNA, 19 nt, Human
cccugcacuaaagccagcc

SEQ ID NO: 3379876 - RNA, 10 nt, Human
cccugcacug

SEQ ID NO: 3379877 - RNA, 23 nt, Human
cccugcacuggaguccagucucu

SEQ ID NO: 3379878 - RNA, 17 nt, Human
cccugcacuguaaaaug

SEQ ID NO: 3379879 - RNA, 19 nt, Human
cccugcacuugcagacucu

SEQ ID NO: 3379880 - RNA, 22 nt, Human
cccugcacuugcagacucuaca

SEQ ID NO: 3379881 - RNA, 19 nt, Human
cccugcagacccugcccuu

SEQ ID NO: 3379882 - RNA, 21 nt, Human
cccugcagcacggacaauaaa

SEQ ID NO: 3379883 - RNA, 22 nt, Human
cccugcagcacggacaauaaac

SEQ ID NO: 3379884 - RNA, 14 nt, Human
cccugcagcccugg

SEQ ID NO: 3379885 - RNA, 20 nt, Human
cccugcagcuuguagccagc

SEQ ID NO: 3379886 - RNA, 22 nt, Human
cccugcagcuuguagccagccg

SEQ ID NO: 3379887 - RNA, 21 nt, Human
cccugcaggaaggagcugccu

SEQ ID NO: 3379888 - RNA, 22 nt, Human
cccugcaguuccccuggaagca

SEQ ID NO: 3379889 - RNA, 12 nt, Human
cccugcaucccc

SEQ ID NO: 3379890 - RNA, 20 nt, Human
cccugcaugggccagccccu

SEQ ID NO: 3379891 - RNA, 23 nt, Human
cccugcauuggaacuggaggcag

SEQ ID NO: 3379892 - RNA, 17 nt, Human
cccugccacccugggga

SEQ ID NO: 3379893 - RNA, 18 nt, Human
cccugccacccuggggag

SEQ ID NO: 3379894 - RNA, 14 nt, Human
cccugccaccuccc

SEQ ID NO: 3379895 - RNA, 18 nt, Human
cccugccaccugucuguc

SEQ ID NO: 3379896 - RNA, 13 nt, Human
cccugccacucac

SEQ ID NO: 3379897 - RNA, 23 nt, Human
cccugccagcacccccacgcccu

SEQ ID NO: 3379898 - RNA, 13 nt, Human
cccugccagcucu

SEQ ID NO: 3379899 - RNA, 22 nt, Human
cccugccaggagcuuuggaccu

SEQ ID NO: 3379900 - RNA, 13 nt, Human
cccugccaggcac

SEQ ID NO: 3379901 - RNA, 14 nt, Human
cccugccaggcaca

SEQ ID NO: 3379902 - RNA, 20 nt, Human
cccugccaggcacaggcagg

SEQ ID NO: 3379903 - RNA, 14 nt, Human
cccugccagggcag

SEQ ID NO: 3379904 - RNA, 20 nt, Human
cccugccaucauguuuacag

SEQ ID NO: 3379905 - RNA, 13 nt, Human
cccugccaucuuc

SEQ ID NO: 3379906 - RNA, 17 nt, Human
cccugccaucuucccag

SEQ ID NO: 3379907 - RNA, 17 nt, Human
cccugcccacaccuccu

SEQ ID NO: 3379908 - RNA, 20 nt, Human
cccugcccacccucuggaga

SEQ ID NO: 3379909 - RNA, 14 nt, Human
cccugcccagauca

SEQ ID NO: 3379910 - RNA, 22 nt, Human
cccugcccagaucagccagaag

SEQ ID NO: 3379911 - RNA, 22 nt, Human
cccugcccaggccggccagccu

SEQ ID NO: 3379912 - RNA, 15 nt, Human
cccugccccacaccu

SEQ ID NO: 3379913 - RNA, 18 nt, Human
cccugcccccacuuccug

SEQ ID NO: 3379914 - RNA, 20 nt, Human
cccugcccccacuuccuguu

SEQ ID NO: 3379915 - RNA, 14 nt, Human
cccugcccccagga

SEQ ID NO: 3379916 - RNA, 17 nt, Human
ccgcuacaccacucugg

SEQ ID NO: 3379917 - RNA, 19 nt, Human
ccgcuacaccacucuggca

SEQ ID NO: 3379918 - RNA, 16 nt, Human
ccgcuaccucccuccc

SEQ ID NO: 3379919 - RNA, 20 nt, Human
ccgcuagagcagcccaaauu

SEQ ID NO: 3379920 - RNA, 15 nt, Human
ccgcuagaggccuga

SEQ ID NO: 3379921 - RNA, 16 nt, Human
ccgcuagaggccugag

SEQ ID NO: 3379922 - RNA, 17 nt, Human
ccgcuagaggccugagg

SEQ ID NO: 3379923 - RNA, 19 nt, Human
ccgcucagcccucccugcc

SEQ ID NO: 3379924 - RNA, 21 nt, Human
ccgcucagcccucccugcccc

SEQ ID NO: 3379925 - RNA, 22 nt, Human
ccgcucagcccucccugccccu

SEQ ID NO: 3379926 - RNA, 11 nt, Human
ccgcuccagag

SEQ ID NO: 3379927 - RNA, 12 nt, Human
ccgcuccagagu

SEQ ID NO: 3379928 - RNA, 20 nt, Human
ccgcuccagguaccuugacc

SEQ ID NO: 3379929 - RNA, 14 nt, Human
ccgcucccaguguc

SEQ ID NO: 3379930 - RNA, 12 nt, Human
ccgcuccccagc

SEQ ID NO: 3379931 - RNA, 18 nt, Human
ccgcucuacaucuucugc

SEQ ID NO: 3379932 - RNA, 19 nt, Human
ccgcucuacaucuucugcc

SEQ ID NO: 3379933 - RNA, 16 nt, Human
ccgcucuccugccaca

SEQ ID NO: 3379934 - RNA, 13 nt, Human
ccgcucucuuccu

SEQ ID NO: 3379935 - RNA, 16 nt, Human
ccgcucucuuccugcc

SEQ ID NO: 3379936 - RNA, 22 nt, Human
ccgcucugcaugcggcccagcc

SEQ ID NO: 3379937 - RNA, 14 nt, Human
ccgcucuggaccaa

SEQ ID NO: 3379938 - RNA, 15 nt, Human
ccgcugauucucagg

SEQ ID NO: 3379939 - RNA, 15 nt, Human
ccgcugccacccacc

SEQ ID NO: 3379940 - RNA, 24 nt, Human
ccgcugccacccaccucccugccu

SEQ ID NO: 3379941 - RNA, 16 nt, Human
ccgcugcugcugcugc

SEQ ID NO: 3379942 - RNA, 12 nt, Human
ccgcuggaggau

SEQ ID NO: 3379943 - RNA, 14 nt, Human
ccgcugggcugagc

SEQ ID NO: 3379944 - RNA, 15 nt, Human
ccgcuguaugucuua

SEQ ID NO: 3379945 - RNA, 20 nt, Human
ccgcugugagccccuggucc

SEQ ID NO: 3379946 - RNA, 15 nt, Human
ccgcuucccuauuua

SEQ ID NO: 3379947 - RNA, 23 nt, Human
ccgcuugaaaagcuaguguaccu

SEQ ID NO: 3379948 - RNA, 21 nt, Human
ccgcuugccucggcuccugcu

SEQ ID NO: 3379949 - RNA, 22 nt, Human
ccgcuugccucggcuccugcug

SEQ ID NO: 3379950 - RNA, 20 nt, Human
ccgcuuggagcuauuuucca

SEQ ID NO: 3379951 - RNA, 16 nt, Human
ccgcuuguccagcgcc

SEQ ID NO: 3379952 - RNA, 16 nt, Human
ccgcuuguggggaccc

SEQ ID NO: 3379953 - RNA, 17 nt, Human
ccgcuuguggggaccca

SEQ ID NO: 3379954 - RNA, 19 nt, Human
ccgcuuguggggacccagg

SEQ ID NO: 3379955 - RNA, 21 nt, Human
ccgcuuguggggacccaggcu

SEQ ID NO: 3379956 - RNA, 23 nt, Human
ccgcuuguggggacccaggcucc

SEQ ID NO: 3379957 - RNA, 19 nt, Human
ccgcuuucuacccagcgag

SEQ ID NO: 3379958 - RNA, 23 nt, Human
ccgcuuucuacccagcgagcccu

SEQ ID NO: 3379959 - RNA, 16 nt, Human
ccgcuuuggccugagu

SEQ ID NO: 3379960 - RNA, 17 nt, Human
ccggacacuccuagaga

SEQ ID NO: 3379961 - RNA, 16 nt, Human
ccggaccagccuggcc

SEQ ID NO: 3379962 - RNA, 13 nt, Human
ccggacuccucuc

SEQ ID NO: 3379963 - RNA, 13 nt, Human
ccggacuggugcc

SEQ ID NO: 3379964 - RNA, 23 nt, Human
caggcgggagcgguggcccuguc

SEQ ID NO: 3379965 - RNA, 18 nt, Human
caggcgugaccugccagg

SEQ ID NO: 3379966 - RNA, 13 nt, Human
caggcgugagcca

SEQ ID NO: 3379967 - RNA, 21 nt, Human
caggcgugagccaccgugccu

SEQ ID NO: 3379968 - RNA, 23 nt, Human
caggcuaauguuggcagaugcag

SEQ ID NO: 3379969 - RNA, 13 nt, Human
caggcuaauuuuu

SEQ ID NO: 3379970 - RNA, 13 nt, Human
caggcuacacuga

SEQ ID NO: 3379971 - RNA, 14 nt, Human
caggcuacuagaau

SEQ ID NO: 3379972 - RNA, 19 nt, Human
caggcuagauguauguacu

SEQ ID NO: 3379973 - RNA, 18 nt, Human
caggcuagcuggagccug

SEQ ID NO: 3379974 - RNA, 18 nt, Human
caggcuaguccggaccca

SEQ ID NO: 3379975 - RNA, 23 nt, Human
caggcuaguccggacccaccuca

SEQ ID NO: 3379976 - RNA, 17 nt, Human
caggcuauguauaaaau

SEQ ID NO: 3379977 - RNA, 18 nt, Human
caggcucaaacaaugaca

SEQ ID NO: 3379978 - RNA, 20 nt, Human
caggcucacucacagaguca

SEQ ID NO: 3379979 - RNA, 15 nt, Human
caggcucacugccag

SEQ ID NO: 3379980 - RNA, 21 nt, Human
caggcucacugccaggccagc

SEQ ID NO: 3379981 - RNA, 15 nt, Human
caggcucaggcaggg

SEQ ID NO: 3379982 - RNA, 22 nt, Human
caggcucauagggaagaccugc

SEQ ID NO: 3379983 - RNA, 24 nt, Human
caggcucccaggagccugcccagc

SEQ ID NO: 3379984 - RNA, 23 nt, Human
caggcucccagggacaccuggga

SEQ ID NO: 3379985 - RNA, 16 nt, Human
caggcuccccugagga

SEQ ID NO: 3379986 - RNA, 17 nt, Human
caggcuccgcccuuagu

SEQ ID NO: 3379987 - RNA, 18 nt, Human
caggcuccgcccuuaguc

SEQ ID NO: 3379988 - RNA, 15 nt, Human
caggcuccugccacc

SEQ ID NO: 3379989 - RNA, 20 nt, Human
caggcuccuuccugucuucc

SEQ ID NO: 3379990 - RNA, 20 nt, Human
caggcuccuuuagcgcccag

SEQ ID NO: 3379991 - RNA, 14 nt, Human
caggcucggccugc

SEQ ID NO: 3379992 - RNA, 20 nt, Human
caggcucgggcuccccagcc

SEQ ID NO: 3379993 - RNA, 14 nt, Human
caggcucucaggcc

SEQ ID NO: 3379994 - RNA, 16 nt, Human
caggcucucaggccag

SEQ ID NO: 3379995 - RNA, 17 nt, Human
caggcucucaggccagc

SEQ ID NO: 3379996 - RNA, 16 nt, Human
caggcucucugggcug

SEQ ID NO: 3379997 - RNA, 12 nt, Human
caggcucucuuu

SEQ ID NO: 3379998 - RNA, 23 nt, Human
caggcucugcccugcccuagcuc

SEQ ID NO: 3379999 - RNA, 13 nt, Human
caggcucugugcu

SEQ ID NO: 3380000 - RNA, 21 nt, Human
caggcucugugcugacccucc

SEQ ID NO: 3380001 - RNA, 15 nt, Human
caggcucuuagcagc

SEQ ID NO: 3380002 - RNA, 12 nt, Human
caggcucuucuc

SEQ ID NO: 3380003 - RNA, 15 nt, Human
caggcucuucuccuu

SEQ ID NO: 3380004 - RNA, 22 nt, Human
caggcucuucuccuuucacaac

SEQ ID NO: 3380005 - RNA, 15 nt, Human
caggcugaaaacaau

SEQ ID NO: 3380006 - RNA, 22 nt, Human
caggcugaccacagcacagcca

SEQ ID NO: 3380007 - RNA, 17 nt, Human
caggcugacguuccggg

SEQ ID NO: 3380008 - RNA, 18 nt, Human
caggcugacguuccgggc

SEQ ID NO: 3380009 - RNA, 20 nt, Human
caggcugagccacucucuuc

SEQ ID NO: 3380010 - RNA, 12 nt, Human
caggcugagccu

SEQ ID NO: 3380011 - RNA, 13 nt, Human
caggcugagccuc

SEQ ID NO: 3380012 - RNA, 15 nt, Human
caggcugagccucag

SEQ ID NO: 3380013 - RNA, 16 nt, Human
caggcugagccucagu

SEQ ID NO: 3380014 - RNA, 20 nt, Human
caggcugagugcaggcccac

SEQ ID NO: 3380015 - RNA, 21 nt, Human
caggcugagugcaggcccacc

SEQ ID NO: 3380016 - RNA, 23 nt, Human
caggcugagugcaggcccacccu

SEQ ID NO: 3380017 - RNA, 16 nt, Human
caggcugcauagaagg

SEQ ID NO: 3380018 - RNA, 16 nt, Human
caggcugccagugccu

SEQ ID NO: 3380019 - RNA, 11 nt, Human
caggcugccug

SEQ ID NO: 3380020 - RNA, 12 nt, Human
caggcugccuga

SEQ ID NO: 3380021 - RNA, 15 nt, Human
caggcugccugaguc

SEQ ID NO: 3380022 - RNA, 15 nt, Human
caggcugcggccccu

SEQ ID NO: 3380023 - RNA, 19 nt, Human
caggcugcggccccucccc

SEQ ID NO: 3380024 - RNA, 16 nt, Human
caggcugcuggaggaa

SEQ ID NO: 3380025 - RNA, 18 nt, Human
caggcugcuggcgccucu

SEQ ID NO: 3380026 - RNA, 20 nt, Human
caggcugcuggcgccucugc

SEQ ID NO: 3380027 - RNA, 22 nt, Human
caggcugcuucaaucccagccu

SEQ ID NO: 3380028 - RNA, 20 nt, Human
caggcuggaagauagcugug

SEQ ID NO: 3380029 - RNA, 20 nt, Human
caggcuggagguaaggccuu

SEQ ID NO: 3380030 - RNA, 16 nt, Human
caggcuggagugcagu

SEQ ID NO: 3380031 - RNA, 16 nt, Human
caggcuggcagcucuc

SEQ ID NO: 3380032 - RNA, 20 nt, Human
caggcuggcagcucuccagu

SEQ ID NO: 3380033 - RNA, 16 nt, Human
caggcuggccagcccc

SEQ ID NO: 3380034 - RNA, 20 nt, Human
caggcuggccagccccacag

SEQ ID NO: 3380035 - RNA, 18 nt, Human
caggcuggccaguccagg

SEQ ID NO: 3380036 - RNA, 19 nt, Human
caggcuggccaguccaggc

SEQ ID NO: 3380037 - RNA, 20 nt, Human
caggcuggcccugcccuggu

SEQ ID NO: 3380038 - RNA, 18 nt, Human
caggcuggcgcagccaag

SEQ ID NO: 3380039 - RNA, 17 nt, Human
caggcuggcgugcagug

SEQ ID NO: 3380040 - RNA, 14 nt, Human
caggcugggagagc

SEQ ID NO: 3380041 - RNA, 15 nt, Human
caggcugggagagcc

SEQ ID NO: 3380042 - RNA, 23 nt, Human
caggcugggagagccuuccaggg

SEQ ID NO: 3380043 - RNA, 11 nt, Human
caggcugggcc

SEQ ID NO: 3380044 - RNA, 18 nt, Human
caggcugggccaugucca

SEQ ID NO: 3380045 - RNA, 14 nt, Human
caggcugggcuuca

SEQ ID NO: 3380046 - RNA, 13 nt, Human
caggcuggggcug

SEQ ID NO: 3380047 - RNA, 18 nt, Human
caggcuggggcugaccuu

SEQ ID NO: 3380048 - RNA, 23 nt, Human
caggcugggugacagagcgagac

SEQ ID NO: 3380049 - RNA, 16 nt, Human
caggcuggucuaaaac

SEQ ID NO: 3380050 - RNA, 20 nt, Human
caggcuggucucgaacuccu

SEQ ID NO: 3380051 - RNA, 18 nt, Human
caggcuggugggaggggc

SEQ ID NO: 3380052 - RNA, 21 nt, Human
caggcuguaggaaaucuaguu

SEQ ID NO: 3380053 - RNA, 20 nt, Human
caggcuguaucccaugagcc

SEQ ID NO: 3380054 - RNA, 22 nt, Human
caggcuguaucccaugagccuc

SEQ ID NO: 3380055 - RNA, 14 nt, Human
caggcugugaguuu

SEQ ID NO: 3380056 - RNA, 19 nt, Human
caggcugugcgcugacaac

SEQ ID NO: 3380057 - RNA, 17 nt, Human
caggcugugggccucaa

SEQ ID NO: 3380058 - RNA, 16 nt, Human
caggcuuaauaaaaau

SEQ ID NO: 3380059 - RNA, 17 nt, Human
caggcuuagggacagga

SEQ ID NO: 3380060 - RNA, 16 nt, Human
caggcuuagucacuga

SEQ ID NO: 3380061 - RNA, 22 nt, Human
caggcuucacccugaaugguuc

SEQ ID NO: 3380062 - RNA, 14 nt, Human
caggcuuccuuggc

SEQ ID NO: 3380063 - RNA, 21 nt, Human
caggcuucugagcagcgagcc

SEQ ID NO: 3380064 - RNA, 14 nt, Human
caggcuucugcugg

SEQ ID NO: 3380065 - RNA, 15 nt, Human
caggcuugccugcag

SEQ ID NO: 3380066 - RNA, 16 nt, Human
caggcuugccugcagg

SEQ ID NO: 3380067 - RNA, 17 nt, Human
caggcuugccugcaggc

SEQ ID NO: 3380068 - RNA, 13 nt, Human
caggcuuucccac

SEQ ID NO: 3380069 - RNA, 13 nt, Human
caggcuuucuaga

SEQ ID NO: 3380070 - RNA, 23 nt, Human
caggcuuuuuuaucaugugaaau

SEQ ID NO: 3380071 - RNA, 17 nt, Human
cagggaaaagcagcucu

SEQ ID NO: 3380072 - RNA, 19 nt, Human
cagggaaaagcagcucucc

SEQ ID NO: 3380073 - RNA, 22 nt, Human
cagggaaacagcuaaugggaca

SEQ ID NO: 3380074 - RNA, 23 nt, Human
cagggaaaggcucugaaagccag

SEQ ID NO: 3380075 - RNA, 13 nt, Human
cagggaacaguau

SEQ ID NO: 3380076 - RNA, 18 nt, Human
cagggaacauggggagga

SEQ ID NO: 3380077 - RNA, 20 nt, Human
cagggaacauggggaggagg

SEQ ID NO: 3380078 - RNA, 22 nt, Human
cagggaacccugcuugcacuuu

SEQ ID NO: 3380079 - RNA, 18 nt, Human
cagggaacgugauuagug

SEQ ID NO: 3380080 - RNA, 20 nt, Human
ccguugggccccagccuucu

SEQ ID NO: 3380081 - RNA, 23 nt, Human
ccguuuccuuucauuuacugugg

SEQ ID NO: 3380082 - RNA, 15 nt, Human
ccguuucuucccugu

SEQ ID NO: 3380083 - RNA, 12 nt, Human
ccguuuucccca

SEQ ID NO: 3380084 - RNA, 19 nt, Human
ccguuuugucacuuuuucu

SEQ ID NO: 3380085 - RNA, 18 nt, Human
ccuaaaaaagauauauua

SEQ ID NO: 3380086 - RNA, 14 nt, Human
ccuaaaaacacaga

SEQ ID NO: 3380087 - RNA, 18 nt, Human
ccuaaaacaaaagcucau

SEQ ID NO: 3380088 - RNA, 20 nt, Human
ccuaaaacuggccugacuug

SEQ ID NO: 3380089 - RNA, 13 nt, Human
ccuaaaagcacuc

SEQ ID NO: 3380090 - RNA, 22 nt, Human
ccuaaaaggaaaucucacccca

SEQ ID NO: 3380091 - RNA, 23 nt, Human
ccuaaaaggaaaucucaccccau

SEQ ID NO: 3380092 - RNA, 14 nt, Human
ccuaaaaggcccag

SEQ ID NO: 3380093 - RNA, 22 nt, Human
ccuaaaaguucauaacagugcc

SEQ ID NO: 3380094 - RNA, 18 nt, Human
ccuaaaauaauugguucu

SEQ ID NO: 3380095 - RNA, 13 nt, Human
ccuaaacauauga

SEQ ID NO: 3380096 - RNA, 16 nt, Human
ccuaaaccaaaaacug

SEQ ID NO: 3380097 - RNA, 15 nt, Human
ccuaaaccccugucc

SEQ ID NO: 3380098 - RNA, 15 nt, Human
ccuaaaccuuugccc

SEQ ID NO: 3380099 - RNA, 14 nt, Human
ccuaaacuaucuuu

SEQ ID NO: 3380100 - RNA, 20 nt, Human
ccuaaagaaaaauaucuugg

SEQ ID NO: 3380101 - RNA, 14 nt, Human
ccuaaagaacaaag

SEQ ID NO: 3380102 - RNA, 15 nt, Human
ccuaaagaacaaagu

SEQ ID NO: 3380103 - RNA, 15 nt, Human
ccuaaagauuuugau

SEQ ID NO: 3380104 - RNA, 16 nt, Human
ccuaaagauuuugauc

SEQ ID NO: 3380105 - RNA, 21 nt, Human
ccuaaagugcugggauuacag

SEQ ID NO: 3380106 - RNA, 23 nt, Human
ccuaaauaaacacauagauucac

SEQ ID NO: 3380107 - RNA, 19 nt, Human
ccuaaauccauuuggaaau

SEQ ID NO: 3380108 - RNA, 14 nt, Human
cagucaccccggcc

SEQ ID NO: 3380109 - RNA, 16 nt, Human
cagucaccccggccac

SEQ ID NO: 3380110 - RNA, 19 nt, Human
cagucaccccggccaccug

SEQ ID NO: 3380111 - RNA, 22 nt, Human
cagucaccccggccaccugcgg

SEQ ID NO: 3380112 - RNA, 18 nt, Human
cagucacguggaggagca

SEQ ID NO: 3380113 - RNA, 20 nt, Human
cagucacucuagucaaugac

SEQ ID NO: 3380114 - RNA, 21 nt, Human
cagucacucuagucaaugaca

SEQ ID NO: 3380115 - RNA, 17 nt, Human
cagucacugaauuccau

SEQ ID NO: 3380116 - RNA, 14 nt, Human
cagucacuggaggu

SEQ ID NO: 3380117 - RNA, 23 nt, Human
cagucacuucggccagagcugaa

SEQ ID NO: 3380118 - RNA, 16 nt, Human
cagucagaaaacuuua

SEQ ID NO: 3380119 - RNA, 19 nt, Human
cagucagaaaacuuuaaaa

SEQ ID NO: 3380120 - RNA, 17 nt, Human
cagucagccucucuccc

SEQ ID NO: 3380121 - RNA, 15 nt, Human
cagucagcucuucau

SEQ ID NO: 3380122 - RNA, 18 nt, Human
cagucagcucuucaucug

SEQ ID NO: 3380123 - RNA, 15 nt, Human
cagucaggaaagaga

SEQ ID NO: 3380124 - RNA, 21 nt, Human
cagucaggaaaggaaucauuu

SEQ ID NO: 3380125 - RNA, 18 nt, Human
cagucaggcucucugggc

SEQ ID NO: 3380126 - RNA, 23 nt, Human
cagucagggaaggugccucugga

SEQ ID NO: 3380127 - RNA, 21 nt, Human
cagucagguaguugcaauuga

SEQ ID NO: 3380128 - RNA, 13 nt, Human
cagucaucaucag

SEQ ID NO: 3380129 - RNA, 17 nt, Human
cagucaucaucagggcc

SEQ ID NO: 3380130 - RNA, 22 nt, Human
cagucaucgaguggcccaacag

SEQ ID NO: 3380131 - RNA, 17 nt, Human
cagucaugcauaaauau

SEQ ID NO: 3380132 - RNA, 18 nt, Human
cagucaugcauaaauaug

SEQ ID NO: 3380133 - RNA, 22 nt, Human
cagucauggagaaccaccuacc

SEQ ID NO: 3380134 - RNA, 23 nt, Human
cagucauguuuuaaauguacagu

SEQ ID NO: 3380135 - RNA, 19 nt, Human
cagucauuauguuaauauu

SEQ ID NO: 3380136 - RNA, 13 nt, Human
cagucauuggcug

SEQ ID NO: 3380137 - RNA, 14 nt, Human
caguccaaaauacu

SEQ ID NO: 3380138 - RNA, 24 nt, Human
caguccaaggaaaccacagcugcu

SEQ ID NO: 3380139 - RNA, 16 nt, Human
caguccaccugagcug

SEQ ID NO: 3380140 - RNA, 23 nt, Human
caguccaccugaggaacugucuc

SEQ ID NO: 3380141 - RNA, 18 nt, Human
caguccacuucugacagc

SEQ ID NO: 3380142 - RNA, 14 nt, Human
caguccagccugga

SEQ ID NO: 3380143 - RNA, 15 nt, Human
caguccagccuggag

SEQ ID NO: 3380144 - RNA, 16 nt, Human
caguccagccuggaga

SEQ ID NO: 3380145 - RNA, 15 nt, Human
caguccaggaacaag

SEQ ID NO: 3380146 - RNA, 18 nt, Human
caguccaggcugccgugg

SEQ ID NO: 3380147 - RNA, 21 nt, Human
caguccaguccuaucugggcu

SEQ ID NO: 3380148 - RNA, 14 nt, Human
caguccauugaaag

SEQ ID NO: 3380149 - RNA, 16 nt, Human
cagucccaaauccuuc

SEQ ID NO: 3380150 - RNA, 18 nt, Human
cagucccaaauccuuccc

SEQ ID NO: 3380151 - RNA, 12 nt, Human
cagucccagcag

SEQ ID NO: 3380152 - RNA, 20 nt, Human
cagucccagcggugggaccu

SEQ ID NO: 3380153 - RNA, 19 nt, Human
cagucccaucagagagcga

SEQ ID NO: 3380154 - RNA, 12 nt, Human
caguccccaccc

SEQ ID NO: 3380155 - RNA, 14 nt, Human
caguccccaccccu

SEQ ID NO: 3380156 - RNA, 20 nt, Human
caguccccaccccugccccc

SEQ ID NO: 3380157 - RNA, 21 nt, Human
caguccccaccccugccccca

SEQ ID NO: 3380158 - RNA, 19 nt, Human
caguccccagaacucugcc

SEQ ID NO: 3380159 - RNA, 21 nt, Human
caguccccagaacucugccug

SEQ ID NO: 3380160 - RNA, 16 nt, Human
caacuauggaucagaa

SEQ ID NO: 3380161 - RNA, 21 nt, Human
caacuauuuauugacucuggg

SEQ ID NO: 3380162 - RNA, 20 nt, Human
caacuauuuuuccaaaauaa

SEQ ID NO: 3380163 - RNA, 18 nt, Human
caacucaccccagcccca

SEQ ID NO: 3380164 - RNA, 15 nt, Human
caacucacuccuuuu

SEQ ID NO: 3380165 - RNA, 18 nt, Human
caacucacuccuuuuaaa

SEQ ID NO: 3380166 - RNA, 12 nt, Human
caacucagacua

SEQ ID NO: 3380167 - RNA, 23 nt, Human
caacucagagaaaaaugcucccc

SEQ ID NO: 3380168 - RNA, 23 nt, Human
caacucagucccuaaaaacacag

SEQ ID NO: 3380169 - RNA, 17 nt, Human
caacucauauuuucaug

SEQ ID NO: 3380170 - RNA, 14 nt, Human
caacucauuccaga

SEQ ID NO: 3380171 - RNA, 16 nt, Human
caacucauuccagauc

SEQ ID NO: 3380172 - RNA, 20 nt, Human
caacuccaacauccacucuc

SEQ ID NO: 3380173 - RNA, 22 nt, Human
caacuccagcaacuucuucucc

SEQ ID NO: 3380174 - RNA, 16 nt, Human
caacuccuaguucuag

SEQ ID NO: 3380175 - RNA, 22 nt, Human
caacuccuaguucuagaaaaac

SEQ ID NO: 3380176 - RNA, 13 nt, Human
caacuccucccau

SEQ ID NO: 3380177 - RNA, 17 nt, Human
caacuccuggaagcugu

SEQ ID NO: 3380178 - RNA, 14 nt, Human
caacuccugucuaa

SEQ ID NO: 3380179 - RNA, 14 nt, Human
caacucgcuuuagg

SEQ ID NO: 3380180 - RNA, 15 nt, Human
caacucgggcucccg

SEQ ID NO: 3380181 - RNA, 19 nt, Human
caacucuccuccagaguca

SEQ ID NO: 3380182 - RNA, 13 nt, Human
caacucucuuauu

SEQ ID NO: 3380183 - RNA, 21 nt, Human
caacucugcugaggguccaga

SEQ ID NO: 3380184 - RNA, 19 nt, Human
caacucuucgaagccuugc

SEQ ID NO: 3380185 - RNA, 12 nt, Human
caacucuugauu

SEQ ID NO: 3380186 - RNA, 13 nt, Human
caacucuuuguua

SEQ ID NO: 3380187 - RNA, 14 nt, Human
caacucuuuguuau

SEQ ID NO: 3380188 - RNA, 22 nt, Human
caacugaaaagacucaguguuc

SEQ ID NO: 3380189 - RNA, 15 nt, Human
caacugaaaguguuu

SEQ ID NO: 3380190 - RNA, 19 nt, Human
caacugaaaguguuuccuu

SEQ ID NO: 3380191 - RNA, 15 nt, Human
caacugaacaaaaaa

SEQ ID NO: 3380192 - RNA, 11 nt, Human
caacugacaca

SEQ ID NO: 3380193 - RNA, 17 nt, Human
caacugaccagccucca

SEQ ID NO: 3380194 - RNA, 14 nt, Human
caacugaucuguua

SEQ ID NO: 3380195 - RNA, 19 nt, Human
caacugcaaagaaaguggg

SEQ ID NO: 3380196 - RNA, 12 nt, Human
caacugcaacuc

SEQ ID NO: 3380197 - RNA, 22 nt, Human
caacugcaagucacaaaggaau

SEQ ID NO: 3380198 - RNA, 15 nt, Human
caacugccuacucca

SEQ ID NO: 3380199 - RNA, 18 nt, Human
caacugccuacuccaaaa

SEQ ID NO: 3380200 - RNA, 21 nt, Human
caacugccucgaaacacagaa

SEQ ID NO: 3380201 - RNA, 13 nt, Human
caacugccugccu

SEQ ID NO: 3380202 - RNA, 18 nt, Human
caacugcucccaccuccu

SEQ ID NO: 3380203 - RNA, 19 nt, Human
caacugcucccaccuccug

SEQ ID NO: 3380204 - RNA, 20 nt, Human
caacugcugaugcucauggu

SEQ ID NO: 3380205 - RNA, 21 nt, Human
caacugcugaugcucaugguc

SEQ ID NO: 3380206 - RNA, 14 nt, Human
caacugcugcccca

SEQ ID NO: 3380207 - RNA, 21 nt, Human
caacugcugccccaaaggaag

SEQ ID NO: 3380208 - RNA, 14 nt, Human
caacugcugcuuuu

SEQ ID NO: 3380209 - RNA, 14 nt, Human
caacuggaagcaca

SEQ ID NO: 3380210 - RNA, 12 nt, Human
caacuggcaggc

SEQ ID NO: 3380211 - RNA, 14 nt, Human
caacuggcaggcag

SEQ ID NO: 3380212 - RNA, 19 nt, Human
caacuggcccuauuuagau

SEQ ID NO: 3380213 - RNA, 14 nt, Human
caacuggcccucuu

SEQ ID NO: 3380214 - RNA, 19 nt, Human
caacuggguccagaagaga

SEQ ID NO: 3380215 - RNA, 21 nt, Human
caacugucuauuucugcugaa

SEQ ID NO: 3380216 - RNA, 21 nt, Human
caacugucuccuaccucugcu

SEQ ID NO: 3380217 - RNA, 23 nt, Human
caacugucucgaugcaaugaaca

SEQ ID NO: 3380218 - RNA, 14 nt, Human
caacuguguagcau

SEQ ID NO: 3380219 - RNA, 15 nt, Human
caacuguguuguauu

SEQ ID NO: 3380220 - RNA, 16 nt, Human
caacuguguuguauua

SEQ ID NO: 3380221 - RNA, 18 nt, Human
caacuuacaaaaacacuu

SEQ ID NO: 3380222 - RNA, 17 nt, Human
caacuucaagugcaugc

SEQ ID NO: 3380223 - RNA, 14 nt, Human
caacuucaguccaa

SEQ ID NO: 3380224 - RNA, 15 nt, Human
caacuucucuugcuu

SEQ ID NO: 3380225 - RNA, 22 nt, Human
caacuucugccucccaugcuua

SEQ ID NO: 3380226 - RNA, 23 nt, Human
caacuugaaauuauaucuguggu

SEQ ID NO: 3380227 - RNA, 18 nt, Human
caacuugagcauguuacu

SEQ ID NO: 3380228 - RNA, 12 nt, Human
caacuugcaaaa

SEQ ID NO: 3380229 - RNA, 18 nt, Human
caacuugcaaaaucaguu

SEQ ID NO: 3380230 - RNA, 19 nt, Human
caacuugcaaaaucaguuu

SEQ ID NO: 3380231 - RNA, 14 nt, Human
caacuugcaagggc

SEQ ID NO: 3380232 - RNA, 14 nt, Human
caacuugcuuauca

SEQ ID NO: 3380233 - RNA, 16 nt, Human
caacuuggcugcagga

SEQ ID NO: 3380234 - RNA, 18 nt, Human
caacuuggcuuccuuucu

SEQ ID NO: 3380235 - RNA, 13 nt, Human
caacuuggcuuuc

SEQ ID NO: 3380236 - RNA, 20 nt, Human
caacuuguauccaggccugg

SEQ ID NO: 3380237 - RNA, 17 nt, Human
caacuugucuuuuucug

SEQ ID NO: 3380238 - RNA, 19 nt, Human
caacuugucuuuuucugga

SEQ ID NO: 3380239 - RNA, 16 nt, Human
caacuuuacuguccua

SEQ ID NO: 3380240 - RNA, 15 nt, Human
caacuuucucuugua

SEQ ID NO: 3380241 - RNA, 16 nt, Human
caacuuucuguaaacu

SEQ ID NO: 3380242 - RNA, 23 nt, Human
caacuuucuguaaacucaaaacu

SEQ ID NO: 3380243 - RNA, 12 nt, Human
caacuuugaaua

SEQ ID NO: 3380244 - RNA, 16 nt, Human
caacuuugaauaaaga

SEQ ID NO: 3380245 - RNA, 22 nt, Human
caacuuugaauaaagaauacuu

SEQ ID NO: 3380246 - RNA, 23 nt, Human
caacuuugaauaaagaauacuug

SEQ ID NO: 3380247 - RNA, 11 nt, Human
caacuuuguau

SEQ ID NO: 3380248 - RNA, 20 nt, Human
caacuuuuccuuugaauccu

SEQ ID NO: 3380249 - RNA, 21 nt, Human
caacuuuuguguaaugaaaau

SEQ ID NO: 3380250 - RNA, 21 nt, Human
caacuuuuuauugccuucuca

SEQ ID NO: 3380251 - RNA, 16 nt, Human
caagaaaaauaaagaa

SEQ ID NO: 3380252 - RNA, 21 nt, Human
caugaugacaacuacagaaaa

SEQ ID NO: 3380253 - RNA, 22 nt, Human
caugaugacuuaguacaaaguu

SEQ ID NO: 3380254 - RNA, 18 nt, Human
caugaugagcuccucuuc

SEQ ID NO: 3380255 - RNA, 14 nt, Human
caugaugcagucuc

SEQ ID NO: 3380256 - RNA, 23 nt, Human
caugaugcagucuccucuuuaaa

SEQ ID NO: 3380257 - RNA, 16 nt, Human
caugaugccucugucu

SEQ ID NO: 3380258 - RNA, 17 nt, Human
caugaugccucugucuu

SEQ ID NO: 3380259 - RNA, 16 nt, Human
caugaugcuuuuacug

SEQ ID NO: 3380260 - RNA, 19 nt, Human
caugauggagucagguuug

SEQ ID NO: 3380261 - RNA, 18 nt, Human
caugauggucacuuaaaa

SEQ ID NO: 3380262 - RNA, 13 nt, Human
caugauguuugcc

SEQ ID NO: 3380263 - RNA, 15 nt, Human
caugauguuugccca

SEQ ID NO: 3380264 - RNA, 22 nt, Human
caugauuaaccacuucagcuga

SEQ ID NO: 3380265 - RNA, 23 nt, Human
caugauuaaccacuucagcugac

SEQ ID NO: 3380266 - RNA, 16 nt, Human
caugauucaugccaau

SEQ ID NO: 3380267 - RNA, 18 nt, Human
caugauucauuuuaacau

SEQ ID NO: 3380268 - RNA, 17 nt, Human
caugauuccagccauca

SEQ ID NO: 3380269 - RNA, 22 nt, Human
caugauuccuuuaacaacaugu

SEQ ID NO: 3380270 - RNA, 21 nt, Human
caugauugguuucuaggcagu

SEQ ID NO: 3380271 - RNA, 16 nt, Human
caugauuuacagagaa

SEQ ID NO: 3380272 - RNA, 22 nt, Human
caugauuucacaaauauuaaaa

SEQ ID NO: 3380273 - RNA, 14 nt, Human
caugauuucaugua

SEQ ID NO: 3380274 - RNA, 20 nt, Human
caugauuucauguacugcau

SEQ ID NO: 3380275 - RNA, 14 nt, Human
caugauuuccuuga

SEQ ID NO: 3380276 - RNA, 24 nt, Human
caugauuuugaaaucaugaagaua

SEQ ID NO: 3380277 - RNA, 17 nt, Human
caugcaaaaagaaauga

SEQ ID NO: 3380278 - RNA, 14 nt, Human
caugcaaacucuuu

SEQ ID NO: 3380279 - RNA, 14 nt, Human
caugcaaaggcugg

SEQ ID NO: 3380280 - RNA, 16 nt, Human
caugcaaaggcuggga

SEQ ID NO: 3380281 - RNA, 20 nt, Human
caugcaaaugagcucugaaa

SEQ ID NO: 3380282 - RNA, 22 nt, Human
caugcaagcagaggaccagggc

SEQ ID NO: 3380283 - RNA, 20 nt, Human
caugcaaggggaaaaucuca

SEQ ID NO: 3380284 - RNA, 15 nt, Human
caugcaaggucauuu

SEQ ID NO: 3380285 - RNA, 16 nt, Human
caugcaaguauucuca

SEQ ID NO: 3380286 - RNA, 16 nt, Human
caugcaaugacaucuu

SEQ ID NO: 3380287 - RNA, 18 nt, Human
caugcaauuuauuaaaau

SEQ ID NO: 3380288 - RNA, 10 nt, Human
caugcacaca

SEQ ID NO: 3380289 - RNA, 14 nt, Human
caugcacaccuccc

SEQ ID NO: 3380290 - RNA, 19 nt, Human
caugcacaguauuuguaau

SEQ ID NO: 3380291 - RNA, 20 nt, Human
caugcacaguauuuguaauu

SEQ ID NO: 3380292 - RNA, 12 nt, Human
caugcaccaaac

SEQ ID NO: 3380293 - RNA, 16 nt, Human
caugcacccucauaca

SEQ ID NO: 3380294 - RNA, 16 nt, Human
caugcacgugugugca

SEQ ID NO: 3380295 - RNA, 15 nt, Human
caugcacucagcucu

SEQ ID NO: 3380296 - RNA, 17 nt, Human
caugcacugacccuucc

SEQ ID NO: 3380297 - RNA, 10 nt, Human
caugcacugu

SEQ ID NO: 3380298 - RNA, 19 nt, Human
caugcacuguucccccugu

SEQ ID NO: 3380299 - RNA, 17 nt, Human
caugcacuuaaagaagu

SEQ ID NO: 3380300 - RNA, 14 nt, Human
caugcagaaagcau

SEQ ID NO: 3380301 - RNA, 19 nt, Human
caugcagauggggcucccg

SEQ ID NO: 3380302 - RNA, 12 nt, Human
caugcagcagcu

SEQ ID NO: 3380303 - RNA, 22 nt, Human
caugcagccuaaggcuguauga

SEQ ID NO: 3380304 - RNA, 13 nt, Human
caugcaggcccuu

SEQ ID NO: 3380305 - RNA, 17 nt, Human
caugcaguuugaaauuc

SEQ ID NO: 3380306 - RNA, 21 nt, Human
caugcaguuugaaauucugaa

SEQ ID NO: 3380307 - RNA, 16 nt, Human
caugcauaaauaugca

SEQ ID NO: 3380308 - RNA, 18 nt, Human
caugcauaaauaugcagu

SEQ ID NO: 3380309 - RNA, 12 nt, Human
caugcauacaca

SEQ ID NO: 3380310 - RNA, 15 nt, Human
caugcauacacucuc

SEQ ID NO: 3380311 - RNA, 18 nt, Human
caugcauagucccagcua

SEQ ID NO: 3380312 - RNA, 21 nt, Human
caugcauauaaugaauaaauc

SEQ ID NO: 3380313 - RNA, 14 nt, Human
caugcaucaaguua

SEQ ID NO: 3380314 - RNA, 14 nt, Human
caugcaucaucuca

SEQ ID NO: 3380315 - RNA, 13 nt, Human
caugcaucuguuu

SEQ ID NO: 3380316 - RNA, 15 nt, Human
caugcaucuguuuau

SEQ ID NO: 3380317 - RNA, 16 nt, Human
caugcaucuuacugaa

SEQ ID NO: 3380318 - RNA, 17 nt, Human
caugcaucuuacugaag

SEQ ID NO: 3380319 - RNA, 19 nt, Human
caugcaugacagccucuau

SEQ ID NO: 3380320 - RNA, 17 nt, Human
caugcauggaaauuccc

SEQ ID NO: 3380321 - RNA, 14 nt, Human
caugcaugugcuug

SEQ ID NO: 3380322 - RNA, 17 nt, Human
caugcauuacugcaugc

SEQ ID NO: 3380323 - RNA, 14 nt, Human
caugcauucauaca

SEQ ID NO: 3380324 - RNA, 17 nt, Human
caugcauuguugaggug

SEQ ID NO: 3380325 - RNA, 16 nt, Human
caugccaacaagaaug

SEQ ID NO: 3380326 - RNA, 12 nt, Human
caagacaaauca

SEQ ID NO: 3380327 - RNA, 21 nt, Human
caagacaaaucaacagaagca

SEQ ID NO: 3380328 - RNA, 13 nt, Human
caagacacaguga

SEQ ID NO: 3380329 - RNA, 13 nt, Human
caagacagaugcc

SEQ ID NO: 3380330 - RNA, 14 nt, Human
caagacaugucugu

SEQ ID NO: 3380331 - RNA, 15 nt, Human
caagacaugucuguu

SEQ ID NO: 3380332 - RNA, 18 nt, Human
caagaccaaaaugacaau

SEQ ID NO: 3380333 - RNA, 15 nt, Human
caagaccaaauggaa

SEQ ID NO: 3380334 - RNA, 19 nt, Human
caagaccaccacuucgaaa

SEQ ID NO: 3380335 - RNA, 18 nt, Human
caagaccacguuucuaaa

SEQ ID NO: 3380336 - RNA, 12 nt, Human
caagaccagacu

SEQ ID NO: 3380337 - RNA, 14 nt, Human
caagacccccagca

SEQ ID NO: 3380338 - RNA, 15 nt, Human
caagacccccagcac

SEQ ID NO: 3380339 - RNA, 15 nt, Human
caagaccccugucuu

SEQ ID NO: 3380340 - RNA, 15 nt, Human
caagacccugucucu

SEQ ID NO: 3380341 - RNA, 19 nt, Human
caagacccuugugguccca

SEQ ID NO: 3380342 - RNA, 16 nt, Human
caagaccucacacaca

SEQ ID NO: 3380343 - RNA, 15 nt, Human
caagaccucagggca

SEQ ID NO: 3380344 - RNA, 17 nt, Human
caagaccucagugccuu

SEQ ID NO: 3380345 - RNA, 13 nt, Human
caagaccugacuc

SEQ ID NO: 3380346 - RNA, 13 nt, Human
caagaccuucucc

SEQ ID NO: 3380347 - RNA, 18 nt, Human
caagaccuucuccuucac

SEQ ID NO: 3380348 - RNA, 20 nt, Human
caagacgcugugcugcccug

SEQ ID NO: 3380349 - RNA, 21 nt, Human
caagacgcugugcugcccugc

SEQ ID NO: 3380350 - RNA, 22 nt, Human
caagacgcugugcugcccugcc

SEQ ID NO: 3380351 - RNA, 23 nt, Human
caagacgcugugcugcccugccc

SEQ ID NO: 3380352 - RNA, 14 nt, Human
caagacucccauga

SEQ ID NO: 3380353 - RNA, 18 nt, Human
caagacucccaugaggga

SEQ ID NO: 3380354 - RNA, 18 nt, Human
caagacucuuuggacacu

SEQ ID NO: 3380355 - RNA, 20 nt, Human
caagacugcuguggccagga

SEQ ID NO: 3380356 - RNA, 22 nt, Human
caagacuggaagguggggacag

SEQ ID NO: 3380357 - RNA, 16 nt, Human
caagacuguuagcccu

SEQ ID NO: 3380358 - RNA, 21 nt, Human
caagacuucucuuugccucaa

SEQ ID NO: 3380359 - RNA, 17 nt, Human
caagacuugaaggugcc

SEQ ID NO: 3380360 - RNA, 18 nt, Human
caagacuugaaggugccu

SEQ ID NO: 3380361 - RNA, 15 nt, Human
caagacuuggcaaca

SEQ ID NO: 3380362 - RNA, 15 nt, Human
caagacuuuucuuug

SEQ ID NO: 3380363 - RNA, 17 nt, Human
caagacuuuucuuugaa

SEQ ID NO: 3380364 - RNA, 14 nt, Human
caagagaaacuucc

SEQ ID NO: 3380365 - RNA, 20 nt, Human
caagagaaaggccugcacac

SEQ ID NO: 3380366 - RNA, 22 nt, Human
caagagaacucgcgcucaguaa

SEQ ID NO: 3380367 - RNA, 24 nt, Human
caagagaacucgcgcucaguaaac

SEQ ID NO: 3380368 - RNA, 19 nt, Human
caagagaaggggaagcacu

SEQ ID NO: 3380369 - RNA, 22 nt, Human
caagagaauugcuugaacccag

SEQ ID NO: 3380370 - RNA, 20 nt, Human
caagagagggccaugcaauu

SEQ ID NO: 3380371 - RNA, 16 nt, Human
caagagauugcuaauu

SEQ ID NO: 3380372 - RNA, 20 nt, Human
caagagauugcuaauugcug

SEQ ID NO: 3380373 - RNA, 13 nt, Human
caagagcacacuu

SEQ ID NO: 3380374 - RNA, 18 nt, Human
caagagcaucaugccucu

SEQ ID NO: 3380375 - RNA, 21 nt, Human
caagagcaucaugccucugag

SEQ ID NO: 3380376 - RNA, 13 nt, Human
caagagccacagu

SEQ ID NO: 3380377 - RNA, 13 nt, Human
caagagcccaggc

SEQ ID NO: 3380378 - RNA, 14 nt, Human
caagagcccaggcc

SEQ ID NO: 3380379 - RNA, 15 nt, Human
caagagcccaggccu

SEQ ID NO: 3380380 - RNA, 13 nt, Human
caagagcccuguc

SEQ ID NO: 3380381 - RNA, 13 nt, Human
caagagccugaga

SEQ ID NO: 3380382 - RNA, 12 nt, Human
caagagccugau

SEQ ID NO: 3380383 - RNA, 14 nt, Human
caagagccugaucu

SEQ ID NO: 3380384 - RNA, 16 nt, Human
caagagccugaucucu

SEQ ID NO: 3380385 - RNA, 20 nt, Human
caagagccugaucucuuccu

SEQ ID NO: 3380386 - RNA, 22 nt, Human
caagagccugaucucuuccugu

SEQ ID NO: 3380387 - RNA, 21 nt, Human
caagagccuugguguccaccu

SEQ ID NO: 3380388 - RNA, 22 nt, Human
caagagccuugguguccaccug

SEQ ID NO: 3380389 - RNA, 16 nt, Human
caagaggagcccccac

SEQ ID NO: 3380390 - RNA, 17 nt, Human
caagaggcaaaggaauc

SEQ ID NO: 3380391 - RNA, 19 nt, Human
caagaggcaagcugaaauu

SEQ ID NO: 3380392 - RNA, 11 nt, Human
caagaggcuga

SEQ ID NO: 3380393 - RNA, 16 nt, Human
caagaggcugcagcca

SEQ ID NO: 3380394 - RNA, 14 nt, Human
caagaggcugguuu

SEQ ID NO: 3380395 - RNA, 16 nt, Human
caagaggcugguuuug

SEQ ID NO: 3380396 - RNA, 13 nt, Human
caagagggcacug

SEQ ID NO: 3380397 - RNA, 22 nt, Human
caagaggguccuuuaguaccug

SEQ ID NO: 3380398 - RNA, 22 nt, Human
cauaaccaugugaaaaggcaaa

SEQ ID NO: 3380399 - RNA, 12 nt, Human
cauaaccugucu

SEQ ID NO: 3380400 - RNA, 18 nt, Human
cauaacguuuuuccuuua

SEQ ID NO: 3380401 - RNA, 17 nt, Human
cauaacuaaauuugaua

SEQ ID NO: 3380402 - RNA, 18 nt, Human
cauaacuaaauuugauac

SEQ ID NO: 3380403 - RNA, 21 nt, Human
cauaacuaaauuugauacuua

SEQ ID NO: 3380404 - RNA, 22 nt, Human
cauaacucuguaaaaacacuga

SEQ ID NO: 3380405 - RNA, 12 nt, Human
cauaacugccuu

SEQ ID NO: 3380406 - RNA, 23 nt, Human
cauaacugccuugaaccugugag

SEQ ID NO: 3380407 - RNA, 16 nt, Human
cauaacuuauugcuga

SEQ ID NO: 3380408 - RNA, 19 nt, Human
cauaacuuauugcugauuu

SEQ ID NO: 3380409 - RNA, 21 nt, Human
cauaagaaugaauaauaauua

SEQ ID NO: 3380410 - RNA, 23 nt, Human
cauaagaccauaacagccaacag

SEQ ID NO: 3380411 - RNA, 20 nt, Human
cauaagacccuaagccuccu

SEQ ID NO: 3380412 - RNA, 17 nt, Human
cauaagaucacugccag

SEQ ID NO: 3380413 - RNA, 17 nt, Human
cauaagccaauuuuucu

SEQ ID NO: 3380414 - RNA, 20 nt, Human
cauaagcuacugccauccug

SEQ ID NO: 3380415 - RNA, 20 nt, Human
cauaagcuauuuuucuaacu

SEQ ID NO: 3380416 - RNA, 13 nt, Human
cauaagcuuccau

SEQ ID NO: 3380417 - RNA, 22 nt, Human
cauaaggaauguagcugguuuc

SEQ ID NO: 3380418 - RNA, 18 nt, Human
cauaaggucagcucagag

SEQ ID NO: 3380419 - RNA, 18 nt, Human
cauaaguaauucaagaaa

SEQ ID NO: 3380420 - RNA, 19 nt, Human
cauaaguauuaugucucuu

SEQ ID NO: 3380421 - RNA, 17 nt, Human
cauaaguauuuggaauu

SEQ ID NO: 3380422 - RNA, 16 nt, Human
cauaagugaauuuaua

SEQ ID NO: 3380423 - RNA, 18 nt, Human
cauaagugcuauugcaga

SEQ ID NO: 3380424 - RNA, 17 nt, Human
cauaauaaaugcuucag

SEQ ID NO: 3380425 - RNA, 15 nt, Human
cauaauacugaacca

SEQ ID NO: 3380426 - RNA, 15 nt, Human
cauaauacuugcuuu

SEQ ID NO: 3380427 - RNA, 23 nt, Human
cauaauagacuucccacucuagg

SEQ ID NO: 3380428 - RNA, 15 nt, Human
cauaaucacucuaau

SEQ ID NO: 3380429 - RNA, 21 nt, Human
cauaaucuggacuccucuguc

SEQ ID NO: 3380430 - RNA, 22 nt, Human
cauaaucuucugccuucucaug

SEQ ID NO: 3380431 - RNA, 22 nt, Human
cauaaugaaaauauuuuuuaca

SEQ ID NO: 3380432 - RNA, 20 nt, Human
cauaaugcauucuucucugu

SEQ ID NO: 3380433 - RNA, 14 nt, Human
cauaaugcuacugu

SEQ ID NO: 3380434 - RNA, 19 nt, Human
cauaaugcuuaauuucuaa

SEQ ID NO: 3380435 - RNA, 17 nt, Human
cauaauguuacauuauu

SEQ ID NO: 3380436 - RNA, 18 nt, Human
cauaauguuucuggauuu

SEQ ID NO: 3380437 - RNA, 21 nt, Human
cauaauguuucuggauuucau

SEQ ID NO: 3380438 - RNA, 23 nt, Human
cauaauguuucuggauuucauac

SEQ ID NO: 3380439 - RNA, 14 nt, Human
cauaauuaaagugu

SEQ ID NO: 3380440 - RNA, 13 nt, Human
cauaauuaacacu

SEQ ID NO: 3380441 - RNA, 16 nt, Human
cauaauuagauccauu

SEQ ID NO: 3380442 - RNA, 22 nt, Human
cauaauuagauccauuaauuua

SEQ ID NO: 3380443 - RNA, 15 nt, Human
cauaauuaugacagu

SEQ ID NO: 3380444 - RNA, 17 nt, Human
cauaauuaugacaguua

SEQ ID NO: 3380445 - RNA, 14 nt, Human
cauaauucacucug

SEQ ID NO: 3380446 - RNA, 23 nt, Human
cauaauucacucugaguguuuua

SEQ ID NO: 3380447 - RNA, 11 nt, Human
cauaauuccua

SEQ ID NO: 3380448 - RNA, 18 nt, Human
cauaauuccuacagcacu

SEQ ID NO: 3380449 - RNA, 19 nt, Human
cauaauuccuacagcacua

SEQ ID NO: 3380450 - RNA, 14 nt, Human
cauaauucuuauua

SEQ ID NO: 3380451 - RNA, 18 nt, Human
cauaauugcauugacuuu

SEQ ID NO: 3380452 - RNA, 21 nt, Human
cauaauugugauuagacagaa

SEQ ID NO: 3380453 - RNA, 14 nt, Human
cauaauuuaaaaau

SEQ ID NO: 3380454 - RNA, 18 nt, Human
cauaauuuaaaaauauau

SEQ ID NO: 3380455 - RNA, 18 nt, Human
cauaauuuaguuguuucu

SEQ ID NO: 3380456 - RNA, 13 nt, Human
cauaauuuauaca

SEQ ID NO: 3380457 - RNA, 15 nt, Human
cauaauuuggaggga

SEQ ID NO: 3380458 - RNA, 15 nt, Human
cauaauuuguacaua

SEQ ID NO: 3380459 - RNA, 18 nt, Human
cauaauuuguuuccagca

SEQ ID NO: 3380460 - RNA, 14 nt, Human
cauaauuuucuuca

SEQ ID NO: 3380461 - RNA, 20 nt, Human
cauaauuuucuucaugcaau

SEQ ID NO: 3380462 - RNA, 20 nt, Human
cauacaaaugcaucuuugau

SEQ ID NO: 3380463 - RNA, 22 nt, Human
cauacaaaugcaucuuugaugu

SEQ ID NO: 3380464 - RNA, 16 nt, Human
cauacaacacaaagag

SEQ ID NO: 3380465 - RNA, 17 nt, Human
cauacaacacaaagaga

SEQ ID NO: 3380466 - RNA, 19 nt, Human
cauacaaguuuauaaagag

SEQ ID NO: 3380467 - RNA, 22 nt, Human
cauacacaagcgugucaggcug

SEQ ID NO: 3380468 - RNA, 12 nt, Human
cauacacacaca

SEQ ID NO: 3380469 - RNA, 19 nt, Human
cauacacacacacacacag

SEQ ID NO: 3380470 - RNA, 23 nt, Human
cauacacacacacacacagccac

SEQ ID NO: 3380471 - RNA, 21 nt, Human
cauacacccccucuucugagc

SEQ ID NO: 3380472 - RNA, 20 nt, Human
cauacaccuaugucauuuca

SEQ ID NO: 3380473 - RNA, 16 nt, Human
cauacacuuguauaaa

SEQ ID NO: 3380474 - RNA, 20 nt, Human
cauacacuuguauaaaugua

SEQ ID NO: 3380475 - RNA, 21 nt, Human
cauacacuuguauaaauguau

SEQ ID NO: 3380476 - RNA, 12 nt, Human
cauacagcucua

SEQ ID NO: 3380477 - RNA, 23 nt, Human
cauacaggaagguagaaauaucu

SEQ ID NO: 3380478 - RNA, 16 nt, Human
cauacagggauggugu

SEQ ID NO: 3380479 - RNA, 21 nt, Human
cauacaguuuuaugcucuuuu

SEQ ID NO: 3380480 - RNA, 22 nt, Human
cauacaguuuuaugcucuuuuu

SEQ ID NO: 3380481 - RNA, 14 nt, Human
cauacauaaaagaa

SEQ ID NO: 3380482 - RNA, 12 nt, Human
cauacauauuuu

SEQ ID NO: 3380483 - RNA, 21 nt, Human
cauacaucaguuauucauucu

SEQ ID NO: 3380484 - RNA, 22 nt, Human
cauacauuuauaauguuugcua

SEQ ID NO: 3380485 - RNA, 23 nt, Human
cauacauuuauaauguuugcuau

SEQ ID NO: 3380486 - RNA, 24 nt, Human
cauacauuuauaauguuugcuauu

SEQ ID NO: 3380487 - RNA, 18 nt, Human
cauacauuuucuaagaaa

SEQ ID NO: 3380488 - RNA, 15 nt, Human
cauaccacuuuuguu

SEQ ID NO: 3380489 - RNA, 19 nt, Human
cauaccacuuuuguucuug

SEQ ID NO: 3380490 - RNA, 23 nt, Human
cauaccagcucgcaccccccugu

SEQ ID NO: 3380491 - RNA, 11 nt, Human
cauacccaccc

SEQ ID NO: 3380492 - RNA, 18 nt, Human
cauacccacccccaccca

SEQ ID NO: 3380493 - RNA, 21 nt, Human
cauacccacccccacccaagg

SEQ ID NO: 3380494 - RNA, 13 nt, Human
cauacccccuccc

SEQ ID NO: 3380495 - RNA, 18 nt, Human
cauaccccuuacaaauga

SEQ ID NO: 3380496 - RNA, 20 nt, Human
cauacccgccuagcugcugu

SEQ ID NO: 3380497 - RNA, 19 nt, Human
cauacccugaccuggcccc

SEQ ID NO: 3380498 - RNA, 22 nt, Human
cauaccucagaauguaaaagaa

SEQ ID NO: 3380499 - RNA, 21 nt, Human
cauaccuccuauggguuguca

SEQ ID NO: 3380500 - RNA, 18 nt, Human
cauaccugcuggugcaga

SEQ ID NO: 3380501 - RNA, 13 nt, Human
cauaccuuccuuc

SEQ ID NO: 3380502 - RNA, 21 nt, Human
cauaccuuccuucccugggcu

SEQ ID NO: 3380503 - RNA, 17 nt, Human
cauacgcucagcucauc

SEQ ID NO: 3380504 - RNA, 22 nt, Human
cauacgcuuuuaaugaaaagga

SEQ ID NO: 3380505 - RNA, 23 nt, Human
cauacggucagguuuaacauuug

SEQ ID NO: 3380506 - RNA, 17 nt, Human
cauacguacacauuuua

SEQ ID NO: 3380507 - RNA, 16 nt, Human
cauacgugugcaugug

SEQ ID NO: 3380508 - RNA, 23 nt, Human
cauacuacauugaguagacacau

SEQ ID NO: 3380509 - RNA, 18 nt, Human
cauacuauuaaacaugcu

SEQ ID NO: 3380510 - RNA, 19 nt, Human
cauacucaauguuacuauc

SEQ ID NO: 3380511 - RNA, 18 nt, Human
cauacucagccugcugcc

SEQ ID NO: 3380512 - RNA, 21 nt, Human
cauacucagccugcugcccag

SEQ ID NO: 3380513 - RNA, 20 nt, Human
cauacucauuucuaaaagaa

SEQ ID NO: 3380514 - RNA, 23 nt, Human
cauacuccaucaguuagagcuga

SEQ ID NO: 3380515 - RNA, 16 nt, Human
cauacucccaucugug

SEQ ID NO: 3380516 - RNA, 20 nt, Human
cauacucccaucugugaaag

SEQ ID NO: 3380517 - RNA, 11 nt, Human
cauacucugcu

SEQ ID NO: 3380518 - RNA, 20 nt, Human
cauacugagggaccaacugg

SEQ ID NO: 3380519 - RNA, 20 nt, Human
cauacuggccucgccuggcc

SEQ ID NO: 3380520 - RNA, 22 nt, Human
cauacuggccucgccuggccug

SEQ ID NO: 3380521 - RNA, 13 nt, Human
cauacuggccugg

SEQ ID NO: 3380522 - RNA, 15 nt, Human
cauacuggccuggac

SEQ ID NO: 3380523 - RNA, 17 nt, Human
cauacuggcuucaccau

SEQ ID NO: 3380524 - RNA, 17 nt, Human
cauacugugcuggagcc

SEQ ID NO: 3380525 - RNA, 18 nt, Human
cauacuuaccuagugaaa

SEQ ID NO: 3380526 - RNA, 14 nt, Human
cauacuucaaaagu

SEQ ID NO: 3380527 - RNA, 22 nt, Human
cauacuucaaaaguauuuuccu

SEQ ID NO: 3380528 - RNA, 22 nt, Human
cauacuugaacguuuucuaauu

SEQ ID NO: 3380529 - RNA, 13 nt, Human
cauacuugaaggg

SEQ ID NO: 3380530 - RNA, 20 nt, Human
cauacuugaagggccagagc

SEQ ID NO: 3380531 - RNA, 12 nt, Human
cauacuuuauca

SEQ ID NO: 3380532 - RNA, 22 nt, Human
cauguggggagguuaaucuagg

SEQ ID NO: 3380533 - RNA, 23 nt, Human
cauguggugaugauguguauaua

SEQ ID NO: 3380534 - RNA, 21 nt, Human
cauguggugggacagggaccc

SEQ ID NO: 3380535 - RNA, 17 nt, Human
caugugguuaaugccau

SEQ ID NO: 3380536 - RNA, 23 nt, Human
caugugguuacacagugugaaua

SEQ ID NO: 3380537 - RNA, 23 nt, Human
caugugguuugguuccucucugg

SEQ ID NO: 3380538 - RNA, 23 nt, Human
cauguguaaucaauaaacgauuu

SEQ ID NO: 3380539 - RNA, 16 nt, Human
cauguguagccugugc

SEQ ID NO: 3380540 - RNA, 14 nt, Human
cauauccugagcca

SEQ ID NO: 3380541 - RNA, 13 nt, Human
cauauccugccuc

SEQ ID NO: 3380542 - RNA, 15 nt, Human
cauauccugccucag

SEQ ID NO: 3380543 - RNA, 18 nt, Human
cauaucgcugacuucaug

SEQ ID NO: 3380544 - RNA, 22 nt, Human
cauaucgcugacuucauggaau

SEQ ID NO: 3380545 - RNA, 15 nt, Human
cauaucuaguaugaa

SEQ ID NO: 3380546 - RNA, 16 nt, Human
cauuacucuuguaaga

SEQ ID NO: 3380547 - RNA, 16 nt, Human
cauuacugcaugcacu

SEQ ID NO: 3380548 - RNA, 18 nt, Human
cauuagaccaagcuuguc

SEQ ID NO: 3380549 - RNA, 16 nt, Human
cauuagacuccuccuc

SEQ ID NO: 3380550 - RNA, 19 nt, Human
cauuagagaacauccuggc

SEQ ID NO: 3380551 - RNA, 19 nt, Human
cauuagauuuuauuuuacu

SEQ ID NO: 3380552 - RNA, 21 nt, Human
cauuagauuuuauuuuacuau

SEQ ID NO: 3380553 - RNA, 18 nt, Human
cauuagcaguuugcuuug

SEQ ID NO: 3380554 - RNA, 14 nt, Human
cauuagccugagua

SEQ ID NO: 3380555 - RNA, 19 nt, Human
cauuagccugaguagaaag

SEQ ID NO: 3380556 - RNA, 23 nt, Human
cauuagccugaguagaaaggccu

SEQ ID NO: 3380557 - RNA, 19 nt, Human
cauuaggaaaaguugcuau

SEQ ID NO: 3380558 - RNA, 17 nt, Human
cauuagggggaacucua

SEQ ID NO: 3380559 - RNA, 15 nt, Human
cauuagguugugaau

SEQ ID NO: 3380560 - RNA, 16 nt, Human
cauuagguugugaaug

SEQ ID NO: 3380561 - RNA, 17 nt, Human
cauuaguaaaugucuuu

SEQ ID NO: 3380562 - RNA, 21 nt, Human
cauuaguaaaugucuuuguaa

SEQ ID NO: 3380563 - RNA, 22 nt, Human
cauuaguaaaugucuuuguaag

SEQ ID NO: 3380564 - RNA, 21 nt, Human
cauuaguacacagcaccagaa

SEQ ID NO: 3380565 - RNA, 15 nt, Human
cauuaguacuuuaua

SEQ ID NO: 3380566 - RNA, 13 nt, Human
cauuauaaaaaga

SEQ ID NO: 3380567 - RNA, 13 nt, Human
cauuauaaacgcu

SEQ ID NO: 3380568 - RNA, 16 nt, Human
cauuauaaccuuaauu

SEQ ID NO: 3380569 - RNA, 18 nt, Human
cauuauaacugaaggaga

SEQ ID NO: 3380570 - RNA, 18 nt, Human
cauuauaaucaccagggc

SEQ ID NO: 3380571 - RNA, 15 nt, Human
cauuauaaugaauuu

SEQ ID NO: 3380572 - RNA, 17 nt, Human
cauuauagaucccccag

SEQ ID NO: 3380573 - RNA, 19 nt, Human
cauuauauuucuauuuuau

SEQ ID NO: 3380574 - RNA, 13 nt, Human
cauuaucaugugu

SEQ ID NO: 3380575 - RNA, 22 nt, Human
cauuaucauguguaaucaauaa

SEQ ID NO: 3380576 - RNA, 13 nt, Human
cauuaucccugaa

SEQ ID NO: 3380577 - RNA, 16 nt, Human
cauuaucuagauacug

SEQ ID NO: 3380578 - RNA, 17 nt, Human
cauuaucuagauacugu

SEQ ID NO: 3380579 - RNA, 16 nt, Human
cauuaugagaggcaau

SEQ ID NO: 3380580 - RNA, 22 nt, Human
cauuaugagaggcaaugauugu

SEQ ID NO: 3380581 - RNA, 12 nt, Human
cauuaugagguc

SEQ ID NO: 3380582 - RNA, 15 nt, Human
cauuaugaggucaga

SEQ ID NO: 3380583 - RNA, 13 nt, Human
cauuaugauucuu

SEQ ID NO: 3380584 - RNA, 18 nt, Human
cauuaugccacuuccuuu

SEQ ID NO: 3380585 - RNA, 23 nt, Human
cauuaugccacuuccuuuuaacu

SEQ ID NO: 3380586 - RNA, 17 nt, Human
cauuauguaaaauguuu

SEQ ID NO: 3380587 - RNA, 20 nt, Human
cauuauguaaaauguuuuag

SEQ ID NO: 3380588 - RNA, 17 nt, Human
cauuauguccacugugu

SEQ ID NO: 3380589 - RNA, 17 nt, Human
cauuaugugguuuuaga

SEQ ID NO: 3380590 - RNA, 18 nt, Human
cauuaugugugcaugugu

SEQ ID NO: 3380591 - RNA, 23 nt, Human
cauuauuacuuuuccucuuagaa

SEQ ID NO: 3380592 - RNA, 16 nt, Human
cauuauuacuuuugcu

SEQ ID NO: 3380593 - RNA, 22 nt, Human
cauuauuauauaaaucaugaug

SEQ ID NO: 3380594 - RNA, 22 nt, Human
cauuauucguagauauuggaca

SEQ ID NO: 3380595 - RNA, 14 nt, Human
cauuauugcuuauu

SEQ ID NO: 3380596 - RNA, 18 nt, Human
cauuauuggaauauaauu

SEQ ID NO: 3380597 - RNA, 20 nt, Human
cauuauuggaauuaaccugg

SEQ ID NO: 3380598 - RNA, 23 nt, Human
cauuauuuauauggggaauauau

SEQ ID NO: 3380599 - RNA, 12 nt, Human
cauuauuuggau

SEQ ID NO: 3380600 - RNA, 12 nt, Human
cauuauuuguca

SEQ ID NO: 3380601 - RNA, 13 nt, Human
cauuauuugucaa

SEQ ID NO: 3380602 - RNA, 17 nt, Human
cauuauuuuauuaugaa

SEQ ID NO: 3380603 - RNA, 15 nt, Human
cauuauuuucuguca

SEQ ID NO: 3380604 - RNA, 17 nt, Human
cauuauuuucugucaga

SEQ ID NO: 3380605 - RNA, 18 nt, Human
cauuauuuucugucagau

SEQ ID NO: 3380606 - RNA, 20 nt, Human
cauuauuuuuccacuuuguu

SEQ ID NO: 3380607 - RNA, 13 nt, Human
cauucaaaaauuu

SEQ ID NO: 3380608 - RNA, 18 nt, Human
cauucaaaaguugaaauu

SEQ ID NO: 3380609 - RNA, 19 nt, Human
cauucaaaaguugaaauua

SEQ ID NO: 3380610 - RNA, 20 nt, Human
cauucaaauguauuacagug

SEQ ID NO: 3380611 - RNA, 23 nt, Human
cauucaaauuaaggguuaagaaa

SEQ ID NO: 3380612 - RNA, 21 nt, Human
cauucaauauugacauuugua

SEQ ID NO: 3380613 - RNA, 17 nt, Human
cauucacaucgcagauu

SEQ ID NO: 3380614 - RNA, 13 nt, Human
cauucacccagac

SEQ ID NO: 3380615 - RNA, 20 nt, Human
cauucacccagacagcuccc

SEQ ID NO: 3380616 - RNA, 13 nt, Human
cauucacucuucc

SEQ ID NO: 3380617 - RNA, 14 nt, Human
cauucacucuucca

SEQ ID NO: 3380618 - RNA, 11 nt, Human
cauucacuuca

SEQ ID NO: 3380619 - RNA, 18 nt, Human
cauucacuucacugugcu

SEQ ID NO: 3380620 - RNA, 13 nt, Human
cauucagaaaaaa

SEQ ID NO: 3380621 - RNA, 14 nt, Human
cauucagaaauguu

SEQ ID NO: 3380622 - RNA, 15 nt, Human
cauucagaaauguug

SEQ ID NO: 3380623 - RNA, 23 nt, Human
cauucagaaauguugagucugua

SEQ ID NO: 3380624 - RNA, 13 nt, Human
cauucagaagaaa

SEQ ID NO: 3380625 - RNA, 18 nt, Human
cauucagaagaaaaagaa

SEQ ID NO: 3380626 - RNA, 12 nt, Human
cauucagagagc

SEQ ID NO: 3380627 - RNA, 23 nt, Human
cauucagaucacugaauuuauaa

SEQ ID NO: 3380628 - RNA, 19 nt, Human
cauucagcagcaaauuuuc

SEQ ID NO: 3380629 - RNA, 17 nt, Human
cauucaggaagaugaaa

SEQ ID NO: 3380630 - RNA, 19 nt, Human
cauucaggaauucuuggag

SEQ ID NO: 3380631 - RNA, 15 nt, Human
cauucauacuuaaaa

SEQ ID NO: 3380632 - RNA, 18 nt, Human
cauucauacuuaaaaauu

SEQ ID NO: 3380633 - RNA, 13 nt, Human
cauucaucucauu

SEQ ID NO: 3380634 - RNA, 19 nt, Human
cauucauggaccacuguuu

SEQ ID NO: 3380635 - RNA, 22 nt, Human
cauucauggaccacuguuucuu

SEQ ID NO: 3380636 - RNA, 16 nt, Human
cauucauuccauucug

SEQ ID NO: 3380637 - RNA, 17 nt, Human
cauucauuccauucugg

SEQ ID NO: 3380638 - RNA, 15 nt, Human
cauucauucuuagcu

SEQ ID NO: 3380639 - RNA, 16 nt, Human
cauucauuuuuauagc

SEQ ID NO: 3380640 - RNA, 17 nt, Human
cauucauuuuuguuguu

SEQ ID NO: 3380641 - RNA, 19 nt, Human
cauuccaaaggggaccccu

SEQ ID NO: 3380642 - RNA, 12 nt, Human
cauuccaaaguu

SEQ ID NO: 3380643 - RNA, 12 nt, Human
cauuccaacaaa

SEQ ID NO: 3380644 - RNA, 16 nt, Human
cauuccaacagugagu

SEQ ID NO: 3380645 - RNA, 13 nt, Human
cauuccaagacag

SEQ ID NO: 3380646 - RNA, 14 nt, Human
cauuccaagacagu

SEQ ID NO: 3380647 - RNA, 15 nt, Human
cauuccaagacagua

SEQ ID NO: 3380648 - RNA, 17 nt, Human
cauuccaagacucuaga

SEQ ID NO: 3380649 - RNA, 22 nt, Human
cauuccaaggaguuggaaguga

SEQ ID NO: 3380650 - RNA, 13 nt, Human
cauuccacacaga

SEQ ID NO: 3380651 - RNA, 22 nt, Human
cauuccaccuucccaugcccug

SEQ ID NO: 3380652 - RNA, 13 nt, Human
cauuccagaggaa

SEQ ID NO: 3380653 - RNA, 17 nt, Human
cauuccagaucccaggc

SEQ ID NO: 3380654 - RNA, 15 nt, Human
cauuccagccccucu

SEQ ID NO: 3380655 - RNA, 18 nt, Human
cauuccagccccucuggu

SEQ ID NO: 3380656 - RNA, 22 nt, Human
cauuccagccccucuggucgcu

SEQ ID NO: 3380657 - RNA, 12 nt, Human
cauuccaggcag

SEQ ID NO: 3380658 - RNA, 18 nt, Human
cauuccaggcagccucug

SEQ ID NO: 3380659 - RNA, 21 nt, Human
cauuccaggcagccucuguca

SEQ ID NO: 3380660 - RNA, 17 nt, Human
cauuccaggcccgaagc

SEQ ID NO: 3380661 - RNA, 12 nt, Human
cauuccauccuu

SEQ ID NO: 3380662 - RNA, 14 nt, Human
cauuccauccuuga

SEQ ID NO: 3380663 - RNA, 15 nt, Human
cauuccauucuggaa

SEQ ID NO: 3380664 - RNA, 16 nt, Human
cauuccauugccuagc

SEQ ID NO: 3380665 - RNA, 17 nt, Human
cauuccccaggaggcca

SEQ ID NO: 3380666 - RNA, 18 nt, Human
cauuccccaggaggccag

SEQ ID NO: 3380667 - RNA, 13 nt, Human
cauuccccaggug

SEQ ID NO: 3380668 - RNA, 23 nt, Human
cauuccccagguggcugacccag

SEQ ID NO: 3380669 - RNA, 13 nt, Human
cauuccccauggg

SEQ ID NO: 3380670 - RNA, 19 nt, Human
cauucccucgucuuuccca

SEQ ID NO: 3380671 - RNA, 18 nt, Human
cauucccugagucaccag

SEQ ID NO: 3380672 - RNA, 20 nt, Human
cauucccuucgacagcauuu

SEQ ID NO: 3380673 - RNA, 22 nt, Human
cauuccgacaaccgaugcucca

SEQ ID NO: 3380674 - RNA, 13 nt, Human
cauuccgcagccc

SEQ ID NO: 3380675 - RNA, 16 nt, Human
cauuccuaaaaugcuu

SEQ ID NO: 3380676 - RNA, 13 nt, Human
cauuccuauuucu

SEQ ID NO: 3380677 - RNA, 17 nt, Human
cauuccucaugaaugua

SEQ ID NO: 3380678 - RNA, 19 nt, Human
cauuccucaugaauguaaa

SEQ ID NO: 3380679 - RNA, 14 nt, Human
cauuccucugcccu

SEQ ID NO: 3380680 - RNA, 13 nt, Human
cauuccugaaaga

SEQ ID NO: 3380681 - RNA, 19 nt, Human
cauuccugaaagaaacagu

SEQ ID NO: 3380682 - RNA, 14 nt, Human
cauuccugaacagg

SEQ ID NO: 3380683 - RNA, 21 nt, Human
cauuccugauaugauuuaaaa

SEQ ID NO: 3380684 - RNA, 22 nt, Human
cauuccugaugcuucuucagag

SEQ ID NO: 3380685 - RNA, 23 nt, Human
cauuccugaugcuucuucagaga

SEQ ID NO: 3380686 - RNA, 23 nt, Human
cauuucugcaucagcugcugaaa

SEQ ID NO: 3380687 - RNA, 18 nt, Human
cauuucugccuuuuguuc

SEQ ID NO: 3380688 - RNA, 24 nt, Human
cauuucugccuuuuguucauuuca

SEQ ID NO: 3380689 - RNA, 12 nt, Human
cauuucuuagac

SEQ ID NO: 3380690 - RNA, 21 nt, Human
cauuucuuccacaagagccca

SEQ ID NO: 3380691 - RNA, 17 nt, Human
cauuucuugggcccucc

SEQ ID NO: 3380692 - RNA, 13 nt, Human
cauuucuuuucug

SEQ ID NO: 3380693 - RNA, 22 nt, Human
cauuucuuuuugggagagacuu

SEQ ID NO: 3380694 - RNA, 17 nt, Human
cauuugaaaauuuugau

SEQ ID NO: 3380695 - RNA, 15 nt, Human
cauuugaaagaaagg

SEQ ID NO: 3380696 - RNA, 19 nt, Human
cauuugaaagaaaggacuc

SEQ ID NO: 3380697 - RNA, 23 nt, Human
cauuugaaaucuaugaaauauca

SEQ ID NO: 3380698 - RNA, 14 nt, Human
cauuugaaugcauu

SEQ ID NO: 3380699 - RNA, 15 nt, Human
cauuugaaugcauuu

SEQ ID NO: 3380700 - RNA, 14 nt, Human
cauuugagcagggc

SEQ ID NO: 3380701 - RNA, 17 nt, Human
cauuugagcagggcuca

SEQ ID NO: 3380702 - RNA, 18 nt, Human
cauuugagcagggcucag

SEQ ID NO: 3380703 - RNA, 17 nt, Human
cauuugaggucuguucu

SEQ ID NO: 3380704 - RNA, 16 nt, Human
cauuugauaccccugg

SEQ ID NO: 3380705 - RNA, 16 nt, Human
cauuugaugcaugucu

SEQ ID NO: 3380706 - RNA, 17 nt, Human
cauuugaugcaugucuu

SEQ ID NO: 3380707 - RNA, 22 nt, Human
cauuugaugcaugucuuuuaaa

SEQ ID NO: 3380708 - RNA, 14 nt, Human
cauuugaugcuaaa

SEQ ID NO: 3380709 - RNA, 13 nt, Human
cauuugauuugua

SEQ ID NO: 3380710 - RNA, 21 nt, Human
cauuugcaauaacagcugcaa

SEQ ID NO: 3380711 - RNA, 15 nt, Human
cauuugcacccuccg

SEQ ID NO: 3380712 - RNA, 18 nt, Human
cauuugcagaguccugca

SEQ ID NO: 3380713 - RNA, 19 nt, Human
cauuugcagaguccugcac

SEQ ID NO: 3380714 - RNA, 17 nt, Human
cauuugccaauuuuccu

SEQ ID NO: 3380715 - RNA, 14 nt, Human
cauuugccuauucc

SEQ ID NO: 3380716 - RNA, 15 nt, Human
cauuugccuauuccc

SEQ ID NO: 3380717 - RNA, 19 nt, Human
cauuugccuauucccacac

SEQ ID NO: 3380718 - RNA, 20 nt, Human
cauuugccuugcagaacugc

SEQ ID NO: 3380719 - RNA, 21 nt, Human
cauuugccuugcagaacugcc

SEQ ID NO: 3380720 - RNA, 16 nt, Human
cauuugcucauggaau

SEQ ID NO: 3380721 - RNA, 14 nt, Human
cauuugcuccuuuc

SEQ ID NO: 3380722 - RNA, 19 nt, Human
cauuugcucuuucaucucu

SEQ ID NO: 3380723 - RNA, 15 nt, Human
cauuugcuuuggaag

SEQ ID NO: 3380724 - RNA, 15 nt, Human
cauuugcuuuuugug

SEQ ID NO: 3380725 - RNA, 17 nt, Human
cauuuggaauuuuugcu

SEQ ID NO: 3380726 - RNA, 18 nt, Human
cauuuggagggccugggc

SEQ ID NO: 3380727 - RNA, 14 nt, Human
cauuuggauugggg

SEQ ID NO: 3380728 - RNA, 19 nt, Human
cauuuggcagagcuucuuc

SEQ ID NO: 3380729 - RNA, 16 nt, Human
cauuuggcaucccugg

SEQ ID NO: 3380730 - RNA, 20 nt, Human
cauuuggcaucccugggccu

SEQ ID NO: 3380731 - RNA, 18 nt, Human
cauuuggcauuuauuugu

SEQ ID NO: 3380732 - RNA, 20 nt, Human
cauuugggagacaugugaca

SEQ ID NO: 3380733 - RNA, 16 nt, Human
cauuugggcagagagg

SEQ ID NO: 3380734 - RNA, 17 nt, Human
cauuugggguagcuaga

SEQ ID NO: 3380735 - RNA, 16 nt, Human
cauuuggguaaaucau

SEQ ID NO: 3380736 - RNA, 17 nt, Human
cauuugggugguaagag

SEQ ID NO: 3380737 - RNA, 21 nt, Human
cauuugguucauuaauucuau

SEQ ID NO: 3380738 - RNA, 11 nt, Human
cauuuguaaaa

SEQ ID NO: 3380739 - RNA, 14 nt, Human
cauuuguaaauauu

SEQ ID NO: 3380740 - RNA, 16 nt, Human
cauuuguaaauauuaa

SEQ ID NO: 3380741 - RNA, 14 nt, Human
cauuuguaaaugcu

SEQ ID NO: 3380742 - RNA, 12 nt, Human
cauuuguaauaa

SEQ ID NO: 3380743 - RNA, 17 nt, Human
cauuuguaauaaaguau

SEQ ID NO: 3380744 - RNA, 14 nt, Human
cauuuguauaaaau

SEQ ID NO: 3380745 - RNA, 17 nt, Human
cauuuguauaaaauaau

SEQ ID NO: 3380746 - RNA, 20 nt, Human
cauuuguaugucaaagcuuu

SEQ ID NO: 3380747 - RNA, 15 nt, Human
cauuugucauuuuca

SEQ ID NO: 3380748 - RNA, 17 nt, Human
cauuugucauuuucauu

SEQ ID NO: 3380749 - RNA, 18 nt, Human
cauuugucauuuucauua

SEQ ID NO: 3380750 - RNA, 16 nt, Human
cauuugucucuacuuu

SEQ ID NO: 3380751 - RNA, 16 nt, Human
cauuugugaaaugaug

SEQ ID NO: 3380752 - RNA, 12 nt, Human
cauuugugaggc

SEQ ID NO: 3380753 - RNA, 15 nt, Human
cauuugugaggccca

SEQ ID NO: 3380754 - RNA, 16 nt, Human
cauuugugcguaugca

SEQ ID NO: 3380755 - RNA, 21 nt, Human
caucuucgucuucacucuuag

SEQ ID NO: 3380756 - RNA, 16 nt, Human
caucuucucacucccu

SEQ ID NO: 3380757 - RNA, 17 nt, Human
caucuucucacucccuu

SEQ ID NO: 3380758 - RNA, 17 nt, Human
caucuucucagcuccca

SEQ ID NO: 3380759 - RNA, 14 nt, Human
caucuucuccaucu

SEQ ID NO: 3380760 - RNA, 13 nt, Human
caucuucugccuu

SEQ ID NO: 3380761 - RNA, 13 nt, Human
caucuucuggagu

SEQ ID NO: 3380762 - RNA, 22 nt, Human
caucuugaauacucugcccucu

SEQ ID NO: 3380763 - RNA, 17 nt, Human
caucuugaauccuucca

SEQ ID NO: 3380764 - RNA, 15 nt, Human
caucuugaccaagca

SEQ ID NO: 3380765 - RNA, 21 nt, Human
caucuugaccaagcaggaagc

SEQ ID NO: 3380766 - RNA, 22 nt, Human
caucuugaccaagcaggaagcu

SEQ ID NO: 3380767 - RNA, 24 nt, Human
caucuugaccaagcaggaagcuca

SEQ ID NO: 3380768 - RNA, 13 nt, Human
caucuugcauuau

SEQ ID NO: 3380769 - RNA, 19 nt, Human
caucuugccuccaggugca

SEQ ID NO: 3380770 - RNA, 20 nt, Human
caucuugccuccauggugcc

SEQ ID NO: 3380771 - RNA, 16 nt, Human
caucuugcucugcuga

SEQ ID NO: 3380772 - RNA, 13 nt, Human
caucuugcuggcu

SEQ ID NO: 3380773 - RNA, 16 nt, Human
caucuuggaacugcau

SEQ ID NO: 3380774 - RNA, 16 nt, Human
caucuuggggacaucu

SEQ ID NO: 3380775 - RNA, 20 nt, Human
caucuuggggacaucucuuu

SEQ ID NO: 3380776 - RNA, 11 nt, Human
caucuuggggg

SEQ ID NO: 3380777 - RNA, 23 nt, Human
caucuugguuauuucugaaggua

SEQ ID NO: 3380778 - RNA, 22 nt, Human
caucuuucaucaaucauuguac

SEQ ID NO: 3380779 - RNA, 13 nt, Human
caucuuuccuguc

SEQ ID NO: 3380780 - RNA, 16 nt, Human
caucuuucuucuauuu

SEQ ID NO: 3380781 - RNA, 14 nt, Human
caucuuucuuugga

SEQ ID NO: 3380782 - RNA, 12 nt, Human
caucuuugaaau

SEQ ID NO: 3380783 - RNA, 18 nt, Human
caucuuugaaauuaugua

SEQ ID NO: 3380784 - RNA, 22 nt, Human
caucuuugaaauuauguaaauu

SEQ ID NO: 3380785 - RNA, 19 nt, Human
caucuuugacacucugcag

SEQ ID NO: 3380786 - RNA, 12 nt, Human
caucuuugaugu

SEQ ID NO: 3380787 - RNA, 18 nt, Human
caucuuugauguguuguu

SEQ ID NO: 3380788 - RNA, 15 nt, Human
caucuuugccuuggg

SEQ ID NO: 3380789 - RNA, 17 nt, Human
caucuuugccuugggcu

SEQ ID NO: 3380790 - RNA, 11 nt, Human
caucuuugggg

SEQ ID NO: 3380791 - RNA, 15 nt, Human
caucuuuuaaagaaa

SEQ ID NO: 3380792 - RNA, 14 nt, Human
caucuuuuaagaca

SEQ ID NO: 3380793 - RNA, 12 nt, Human
caucuuuuauuc

SEQ ID NO: 3380794 - RNA, 15 nt, Human
caucuuuuauucuuu

SEQ ID NO: 3380795 - RNA, 14 nt, Human
caucuuuuguauua

SEQ ID NO: 3380796 - RNA, 21 nt, Human
caucuuuuuaaagcuuaucca

SEQ ID NO: 3380797 - RNA, 22 nt, Human
caucuuuuuaaagcuuauccau

SEQ ID NO: 3380798 - RNA, 23 nt, Human
caucuuuuuaaagcuuauccaua

SEQ ID NO: 3380799 - RNA, 17 nt, Human
caugaaaacacauuuuu

SEQ ID NO: 3380800 - RNA, 19 nt, Human
caugaaaacacauuuuucu

SEQ ID NO: 3380801 - RNA, 13 nt, Human
caugaaaacguuu

SEQ ID NO: 3380802 - RNA, 17 nt, Human
caugaaaacguuuuauu

SEQ ID NO: 3380803 - RNA, 21 nt, Human
caugaaaacguuuuauugugu

SEQ ID NO: 3380804 - RNA, 24 nt, Human
caugaaaauaccauuuaguaagaa

SEQ ID NO: 3380805 - RNA, 21 nt, Human
caugaaaauccuaccaaccuc

SEQ ID NO: 3380806 - RNA, 22 nt, Human
caugaaaauccuaccaaccucu

SEQ ID NO: 3380807 - RNA, 15 nt, Human
caugaaaaugugugu

SEQ ID NO: 3380808 - RNA, 13 nt, Human
caugaaaauuuua

SEQ ID NO: 3380809 - RNA, 13 nt, Human
caugaaacagaaa

SEQ ID NO: 3380810 - RNA, 22 nt, Human
caugaaacuuguuucacugaaa

SEQ ID NO: 3380811 - RNA, 14 nt, Human
caugaaagauucaa

SEQ ID NO: 3380812 - RNA, 14 nt, Human
caugaaauaaaaua

SEQ ID NO: 3380813 - RNA, 15 nt, Human
caugaaaugaacaca

SEQ ID NO: 3380814 - RNA, 22 nt, Human
caugaaaugauagauuugaccu

SEQ ID NO: 3380815 - RNA, 19 nt, Human
caugaaaugcuaugucauu

SEQ ID NO: 3380816 - RNA, 13 nt, Human
caugaaaugugaa

SEQ ID NO: 3380817 - RNA, 14 nt, Human
caugaaaugugaau

SEQ ID NO: 3380818 - RNA, 18 nt, Human
caugaaauuuuuguaaau

SEQ ID NO: 3380819 - RNA, 18 nt, Human
caugaacacacugugucc

SEQ ID NO: 3380820 - RNA, 13 nt, Human
caugaacauguac

SEQ ID NO: 3380821 - RNA, 15 nt, Human
caugaacauguacug

SEQ ID NO: 3380822 - RNA, 19 nt, Human
caugaaccucaagcugcau

SEQ ID NO: 3380823 - RNA, 21 nt, Human
caugaacuucgcaucaaaaga

SEQ ID NO: 3380824 - RNA, 18 nt, Human
caugaagaauagaaacaa

SEQ ID NO: 3380825 - RNA, 12 nt, Human
caugaagacaga

SEQ ID NO: 3380826 - RNA, 15 nt, Human
caugaagacaggaca

SEQ ID NO: 3380827 - RNA, 17 nt, Human
caugaagacaggacagu

SEQ ID NO: 3380828 - RNA, 20 nt, Human
caugaagaccuuuuucugca

SEQ ID NO: 3380829 - RNA, 16 nt, Human
caugaagagaagcaau

SEQ ID NO: 3380830 - RNA, 18 nt, Human
caugaagagauuuuucau

SEQ ID NO: 3380831 - RNA, 18 nt, Human
caugaagaggaugcugug

SEQ ID NO: 3380832 - RNA, 21 nt, Human
caugauguuuuuaaaaucuua

SEQ ID NO: 3380833 - RNA, 22 nt, Human
caugauguuuuuaaaaucuuau

SEQ ID NO: 3380834 - RNA, 12 nt, Human
caugauuagcaa

SEQ ID NO: 3380835 - RNA, 21 nt, Human
caugauucaugccaauuagca

SEQ ID NO: 3380836 - RNA, 14 nt, Human
caugauucauuuua

SEQ ID NO: 3380837 - RNA, 14 nt, Human
caugauuccagcca

SEQ ID NO: 3380838 - RNA, 16 nt, Human
caugauuccagccauc

SEQ ID NO: 3380839 - RNA, 19 nt, Human
caugauuccuuccuguucu

SEQ ID NO: 3380840 - RNA, 16 nt, Human
caugauuccuuuaaca

SEQ ID NO: 3380841 - RNA, 12 nt, Human
caugauuucaca

SEQ ID NO: 3380842 - RNA, 14 nt, Human
caugauuucacaaa

SEQ ID NO: 3380843 - RNA, 16 nt, Human
caugauuucacaaaua

SEQ ID NO: 3380844 - RNA, 18 nt, Human
caugauuucacaaauauu

SEQ ID NO: 3380845 - RNA, 13 nt, Human
caugauuucaugu

SEQ ID NO: 3380846 - RNA, 16 nt, Human
caugauuucauguacu

SEQ ID NO: 3380847 - RNA, 12 nt, Human
caugauuuccuu

SEQ ID NO: 3380848 - RNA, 18 nt, Human
caugauuuccuugaaugu

SEQ ID NO: 3380849 - RNA, 21 nt, Human
caugauuuuaaguuucucugc

SEQ ID NO: 3380850 - RNA, 24 nt, Human
caugauuuuaaguuucucugcaga

SEQ ID NO: 3380851 - RNA, 16 nt, Human
caugcaaaugagcucu

SEQ ID NO: 3380852 - RNA, 16 nt, Human
caugcaaaugcuguau

SEQ ID NO: 3380853 - RNA, 23 nt, Human
caugcaagcagaggaccagggcc

SEQ ID NO: 3380854 - RNA, 12 nt, Human
caugcaagguca

SEQ ID NO: 3380855 - RNA, 15 nt, Human
caugcaauaaaauuu

SEQ ID NO: 3380856 - RNA, 18 nt, Human
caugcaauaaaauuuaaa

SEQ ID NO: 3380857 - RNA, 22 nt, Human
caugcacacaauuagauuucuc

SEQ ID NO: 3380858 - RNA, 11 nt, Human
caugcacacac

SEQ ID NO: 3380859 - RNA, 17 nt, Human
caugcacaguauuugua

SEQ ID NO: 3380860 - RNA, 22 nt, Human
caugcacaguauuuguaauuaa

SEQ ID NO: 3380861 - RNA, 20 nt, Human
caugcacccucauacacaga

SEQ ID NO: 3380862 - RNA, 20 nt, Human
caugcacugacccuuccaga

SEQ ID NO: 3380863 - RNA, 18 nt, Human
caugcacugugaaggacc

SEQ ID NO: 3380864 - RNA, 22 nt, Human
caugcacugugaaggacccuug

SEQ ID NO: 3380865 - RNA, 17 nt, Human
caugcacuuggcugcau

SEQ ID NO: 3380866 - RNA, 18 nt, Human
caugcagaaagggagcag

SEQ ID NO: 3380867 - RNA, 19 nt, Human
caugcagaacaaaugaaga

SEQ ID NO: 3380868 - RNA, 17 nt, Human
caugcagaguauuucua

SEQ ID NO: 3380869 - RNA, 14 nt, Human
caugcagcagcuug

SEQ ID NO: 3380870 - RNA, 17 nt, Human
caugcagccacugugcu

SEQ ID NO: 3380871 - RNA, 16 nt, Human
caugcagcccaugccc

SEQ ID NO: 3380872 - RNA, 19 nt, Human
caugcagcccaugcccacc

SEQ ID NO: 3380873 - RNA, 17 nt, Human
caugcagccgugaucaa

SEQ ID NO: 3380874 - RNA, 15 nt, Human
caugcagcugcaccc

SEQ ID NO: 3380875 - RNA, 22 nt, Human
caugcagguggugucgggcccu

SEQ ID NO: 3380876 - RNA, 23 nt, Human
caugcagucuaaaaugcuucagu

SEQ ID NO: 3380877 - RNA, 22 nt, Human
caugcagucugggaguggggaa

SEQ ID NO: 3380878 - RNA, 13 nt, Human
caugcaguuugaa

SEQ ID NO: 3380879 - RNA, 14 nt, Human
caugcaguuugaaa

SEQ ID NO: 3380880 - RNA, 15 nt, Human
caugcauaaauaugc

SEQ ID NO: 3380881 - RNA, 17 nt, Human
caugcauaaauaugcag

SEQ ID NO: 3380882 - RNA, 13 nt, Human
caugcauacacac

SEQ ID NO: 3380883 - RNA, 14 nt, Human
caugcauacacaca

SEQ ID NO: 3380884 - RNA, 15 nt, Human
caugcauacacacac

SEQ ID NO: 3380885 - RNA, 20 nt, Human
caugcauacuucaaaaguau

SEQ ID NO: 3380886 - RNA, 21 nt, Human
caugcauacuucaaaaguauu

SEQ ID NO: 3380887 - RNA, 20 nt, Human
caugcauagagugugaugua

SEQ ID NO: 3380888 - RNA, 16 nt, Human
caugcaucuccaccug

SEQ ID NO: 3380889 - RNA, 17 nt, Human
caugcaucuccaccugc

SEQ ID NO: 3380890 - RNA, 15 nt, Human
caugcauggaaauuc

SEQ ID NO: 3380891 - RNA, 17 nt, Human
caugcauguccuguaaa

SEQ ID NO: 3380892 - RNA, 18 nt, Human
caugcauguuaugcuuua

SEQ ID NO: 3380893 - RNA, 15 nt, Human
caugcauuacugcau

SEQ ID NO: 3380894 - RNA, 11 nt, Human
caugcauuguu

SEQ ID NO: 3380895 - RNA, 17 nt, Human
caugcauuugaggucaa

SEQ ID NO: 3380896 - RNA, 14 nt, Human
caugcauuuugcag

SEQ ID NO: 3380897 - RNA, 21 nt, Human
caugccacaaggacuuccugu

SEQ ID NO: 3380898 - RNA, 19 nt, Human
caugccacguuccacaguu

SEQ ID NO: 3380899 - RNA, 19 nt, Human
caugccaggaaccuguccu

SEQ ID NO: 3380900 - RNA, 16 nt, Human
caugccaggcuaauuu

SEQ ID NO: 3380901 - RNA, 17 nt, Human
caugccagugacacuuc

SEQ ID NO: 3380902 - RNA, 18 nt, Human
caugccauuuguacugac

SEQ ID NO: 3380903 - RNA, 23 nt, Human
caugcccacccccugcccugcac

SEQ ID NO: 3380904 - RNA, 13 nt, Human
caugccccccuca

SEQ ID NO: 3380905 - RNA, 23 nt, Human
caugccccccucaaaccuccucu

SEQ ID NO: 3380906 - RNA, 16 nt, Human
caugcccccugcagac

SEQ ID NO: 3380907 - RNA, 15 nt, Human
caugcccccuuucag

SEQ ID NO: 3380908 - RNA, 16 nt, Human
caugccccggccaccu

SEQ ID NO: 3380909 - RNA, 17 nt, Human
caugccccggccaccuc

SEQ ID NO: 3380910 - RNA, 19 nt, Human
caugccccggccaccucug

SEQ ID NO: 3380911 - RNA, 17 nt, Human
caugcccggucccaccc

SEQ ID NO: 3380912 - RNA, 14 nt, Human
caugcccucccuuc

SEQ ID NO: 3380913 - RNA, 22 nt, Human
caugcccucccuucucccugga

SEQ ID NO: 3380914 - RNA, 14 nt, Human
caugcccuccucuc

SEQ ID NO: 3380915 - RNA, 15 nt, Human
caugcccuccucucc

SEQ ID NO: 3380916 - RNA, 16 nt, Human
caugcccucucaggcc

SEQ ID NO: 3380917 - RNA, 21 nt, Human
caugcccucucaggccggcag

SEQ ID NO: 3380918 - RNA, 16 nt, Human
caugccgucugccgga

SEQ ID NO: 3380919 - RNA, 17 nt, Human
caugccuaccaauauuu

SEQ ID NO: 3380920 - RNA, 21 nt, Human
caugccuauaugagaagaaua

SEQ ID NO: 3380921 - RNA, 18 nt, Human
ccaaaauaaaacuuuuua

SEQ ID NO: 3380922 - RNA, 14 nt, Human
ccaaaauaaugucu

SEQ ID NO: 3380923 - RNA, 16 nt, Human
ccaaaauccccuucuc

SEQ ID NO: 3380924 - RNA, 23 nt, Human
ccaaaauguaggcuuaguuugug

SEQ ID NO: 3380925 - RNA, 20 nt, Human
ccaaaaugugagugguugaa

SEQ ID NO: 3380926 - RNA, 17 nt, Human
ccaaaauguugaaauau

SEQ ID NO: 3380927 - RNA, 15 nt, Human
ccaaaauuaaggugu

SEQ ID NO: 3380928 - RNA, 16 nt, Human
ccaaaauuauuucaga

SEQ ID NO: 3380929 - RNA, 20 nt, Human
ccaaaauuguuuugagcuuu

SEQ ID NO: 3380930 - RNA, 16 nt, Human
ccaaaauuuauuuuau

SEQ ID NO: 3380931 - RNA, 15 nt, Human
ccaaaauuuuaaaaa

SEQ ID NO: 3380932 - RNA, 13 nt, Human
ccaaacacacaga

SEQ ID NO: 3380933 - RNA, 15 nt, Human
ccaaacaccuuccag

SEQ ID NO: 3380934 - RNA, 19 nt, Human
ccaaacagcaaaccaagag

SEQ ID NO: 3380935 - RNA, 16 nt, Human
ccaaacaggcucagag

SEQ ID NO: 3380936 - RNA, 17 nt, Human
ccaaacagugcuguuuc

SEQ ID NO: 3380937 - RNA, 18 nt, Human
ccaaacauccuacaagac

SEQ ID NO: 3380938 - RNA, 20 nt, Human
ccaaacauccucuuccauau

SEQ ID NO: 3380939 - RNA, 22 nt, Human
ccaaacauuaauguugauuucu

SEQ ID NO: 3380940 - RNA, 17 nt, Human
ccaaaccaccagaagcc

SEQ ID NO: 3380941 - RNA, 20 nt, Human
ccaaaccaccagaagcccag

SEQ ID NO: 3380942 - RNA, 18 nt, Human
ccaaacccaaaagaaacu

SEQ ID NO: 3380943 - RNA, 16 nt, Human
ccaaacccacccuuuc

SEQ ID NO: 3380944 - RNA, 20 nt, Human
ccaaacccacccuuucuacu

SEQ ID NO: 3380945 - RNA, 13 nt, Human
ccaaacccuaggu

SEQ ID NO: 3380946 - RNA, 23 nt, Human
ccaaacccuagguucccgguccc

SEQ ID NO: 3380947 - RNA, 16 nt, Human
ccaaacccuucagugc

SEQ ID NO: 3380948 - RNA, 12 nt, Human
ccaaaccucugu

SEQ ID NO: 3380949 - RNA, 13 nt, Human
ccaaaccucuguu

SEQ ID NO: 3380950 - RNA, 14 nt, Human
ccaaaccucuguuc

SEQ ID NO: 3380951 - RNA, 13 nt, Human
ccaaaccuggaga

SEQ ID NO: 3380952 - RNA, 22 nt, Human
ccaaacgcccuuuccuccucag

SEQ ID NO: 3380953 - RNA, 13 nt, Human
ccaaacgccuccc

SEQ ID NO: 3380954 - RNA, 13 nt, Human
ccaaacucugcca

SEQ ID NO: 3380955 - RNA, 22 nt, Human
ccaaacugacucuuaagaagac

SEQ ID NO: 3380956 - RNA, 16 nt, Human
ccaaacuguucaagaa

SEQ ID NO: 3380957 - RNA, 15 nt, Human
ccaaacuucacucug

SEQ ID NO: 3380958 - RNA, 18 nt, Human
ccaaacuuggauuuuuga

SEQ ID NO: 3380959 - RNA, 12 nt, Human
ccaaagaaaguu

SEQ ID NO: 3380960 - RNA, 14 nt, Human
ccaaagaaaugaac

SEQ ID NO: 3380961 - RNA, 16 nt, Human
ccaaagaaaugaacau

SEQ ID NO: 3380962 - RNA, 17 nt, Human
ccaaagaaauguaaggg

SEQ ID NO: 3380963 - RNA, 17 nt, Human
ccaaagagacuggagca

SEQ ID NO: 3380964 - RNA, 21 nt, Human
ccaaagagacuggagcaucug

SEQ ID NO: 3380965 - RNA, 14 nt, Human
ccaaagagcacaaa

SEQ ID NO: 3380966 - RNA, 14 nt, Human
ccaaagagccugga

SEQ ID NO: 3380967 - RNA, 20 nt, Human
ccaaagagccuggagaagcu

SEQ ID NO: 3380968 - RNA, 21 nt, Human
ccaaagaggcugccccucuca

SEQ ID NO: 3380969 - RNA, 22 nt, Human
ccaaagaggcugccccucucac

SEQ ID NO: 3380970 - RNA, 23 nt, Human
ccaaagaggcugccccucucacc

SEQ ID NO: 3380971 - RNA, 22 nt, Human
ccaaagaguagaauugcauuga

SEQ ID NO: 3380972 - RNA, 15 nt, Human
ccaaagagugauagu

SEQ ID NO: 3380973 - RNA, 19 nt, Human
ccaaagauagacagguccu

SEQ ID NO: 3380974 - RNA, 14 nt, Human
ccaaagcagacagc

SEQ ID NO: 3380975 - RNA, 15 nt, Human
ccaaagcagggucug

SEQ ID NO: 3380976 - RNA, 23 nt, Human
ccaaagcagugcaugcugucccu

SEQ ID NO: 3380977 - RNA, 17 nt, Human
cauguuuccagcauucc

SEQ ID NO: 3380978 - RNA, 22 nt, Human
cauguuuccagcauucccaggu

SEQ ID NO: 3380979 - RNA, 11 nt, Human
cauguuucuuu

SEQ ID NO: 3380980 - RNA, 17 nt, Human
cauguuuggugcauaga

SEQ ID NO: 3380981 - RNA, 12 nt, Human
cauguuugugau

SEQ ID NO: 3380982 - RNA, 20 nt, Human
cauguuuuaacaaaaaccaa

SEQ ID NO: 3380983 - RNA, 23 nt, Human
cauguuuuagacaaauacucaug

SEQ ID NO: 3380984 - RNA, 16 nt, Human
cauguuuucaacugcc

SEQ ID NO: 3380985 - RNA, 14 nt, Human
cauguuuuccguga

SEQ ID NO: 3380986 - RNA, 14 nt, Human
cauguuuugauaaa

SEQ ID NO: 3380987 - RNA, 15 nt, Human
cauguuuugcaugua

SEQ ID NO: 3380988 - RNA, 17 nt, Human
cauguuuugugacuaua

SEQ ID NO: 3380989 - RNA, 23 nt, Human
cauguuuugugacuauauagaga

SEQ ID NO: 3380990 - RNA, 18 nt, Human
cauguuuuuaaagggcua

SEQ ID NO: 3380991 - RNA, 17 nt, Human
cauguuuuuguuuucuu

SEQ ID NO: 3380992 - RNA, 23 nt, Human
cauuaaaaaaaugugccuaguuu

SEQ ID NO: 3380993 - RNA, 21 nt, Human
cauuaaaaaaugaaauauuuu

SEQ ID NO: 3380994 - RNA, 13 nt, Human
cauuaaaaaugga

SEQ ID NO: 3380995 - RNA, 21 nt, Human
cauuaaaacaauauuguuucu

SEQ ID NO: 3380996 - RNA, 13 nt, Human
cauuaaaacugcu

SEQ ID NO: 3380997 - RNA, 16 nt, Human
cauuaaaacugcuuuu

SEQ ID NO: 3380998 - RNA, 17 nt, Human
cauuaaaagaaaauaaa

SEQ ID NO: 3380999 - RNA, 13 nt, Human
cauuaaaagaaua

SEQ ID NO: 3381000 - RNA, 14 nt, Human
cauuaaaauauaau

SEQ ID NO: 3381001 - RNA, 23 nt, Human
cauuaaaccaucucccuggugcu

SEQ ID NO: 3381002 - RNA, 12 nt, Human
cauuaaaccugu

SEQ ID NO: 3381003 - RNA, 13 nt, Human
cauuaaaccuguc

SEQ ID NO: 3381004 - RNA, 19 nt, Human
cauuaaacuaguguuauac

SEQ ID NO: 3381005 - RNA, 14 nt, Human
cauuaaacuuuuuu

SEQ ID NO: 3381006 - RNA, 15 nt, Human
cauuaaagaagaccu

SEQ ID NO: 3381007 - RNA, 21 nt, Human
cauuaaagccugaguuugcuu

SEQ ID NO: 3381008 - RNA, 20 nt, Human
cauuaaaggcauaaaugacu

SEQ ID NO: 3381009 - RNA, 17 nt, Human
cauuaaaggcuucucuc

SEQ ID NO: 3381010 - RNA, 17 nt, Human
cauuaaagucagaaguu

SEQ ID NO: 3381011 - RNA, 18 nt, Human
cauuaaagucagaaguuu

SEQ ID NO: 3381012 - RNA, 21 nt, Human
cauuaaagucgagcuuuucua

SEQ ID NO: 3381013 - RNA, 12 nt, Human
cauuaaaguucu

SEQ ID NO: 3381014 - RNA, 13 nt, Human
cauuaaauaaauu

SEQ ID NO: 3381015 - RNA, 18 nt, Human
cauuaaaugaauauuuug

SEQ ID NO: 3381016 - RNA, 13 nt, Human
cauuaaaugacuc

SEQ ID NO: 3381017 - RNA, 14 nt, Human
cauuaaaugacucu

SEQ ID NO: 3381018 - RNA, 14 nt, Human
cauuaaauuacaga

SEQ ID NO: 3381019 - RNA, 13 nt, Human
cauuaaauuaccu

SEQ ID NO: 3381020 - RNA, 14 nt, Human
cauuaaauucacaa

SEQ ID NO: 3381021 - RNA, 17 nt, Human
cauuaacaguuuuccau

SEQ ID NO: 3381022 - RNA, 20 nt, Human
cauuaacaguuuuccaugaa

SEQ ID NO: 3381023 - RNA, 22 nt, Human
cauuaacaguuuuccaugaaaa

SEQ ID NO: 3381024 - RNA, 23 nt, Human
cauuaacaguuuuccaugaaaac

SEQ ID NO: 3381025 - RNA, 16 nt, Human
cauuaacuaaucuauu

SEQ ID NO: 3381026 - RNA, 18 nt, Human
cauuaacuaaucuauugg

SEQ ID NO: 3381027 - RNA, 16 nt, Human
cauuaacuucucugga

SEQ ID NO: 3381028 - RNA, 14 nt, Human
cauuaagaaaauca

SEQ ID NO: 3381029 - RNA, 15 nt, Human
cauuaagcaucacaa

SEQ ID NO: 3381030 - RNA, 19 nt, Human
cauuaagcaucacaaauga

SEQ ID NO: 3381031 - RNA, 17 nt, Human
cauuaagcccucuucca

SEQ ID NO: 3381032 - RNA, 16 nt, Human
cauuaagccuuccaca

SEQ ID NO: 3381033 - RNA, 21 nt, Human
cauuaaggggaagaaugaaag

SEQ ID NO: 3381034 - RNA, 20 nt, Human
cauuaaguaaucaauaaaga

SEQ ID NO: 3381035 - RNA, 20 nt, Human
cauuaaucaguucauuagaa

SEQ ID NO: 3381036 - RNA, 16 nt, Human
cauuaaucauuucccc

SEQ ID NO: 3381037 - RNA, 17 nt, Human
cauuaaucauuucccca

SEQ ID NO: 3381038 - RNA, 12 nt, Human
cauuaaucugcc

SEQ ID NO: 3381039 - RNA, 18 nt, Human
cauuaaucugccucccuc

SEQ ID NO: 3381040 - RNA, 23 nt, Human
cauuaaugccugcuuuuuggaaa

SEQ ID NO: 3381041 - RNA, 14 nt, Human
cauuaauguguugg

SEQ ID NO: 3381042 - RNA, 20 nt, Human
cauuaauguugauuucuagu

SEQ ID NO: 3381043 - RNA, 13 nt, Human
cauuacaauggaa

SEQ ID NO: 3381044 - RNA, 15 nt, Human
cauuacagagaggag

SEQ ID NO: 3381045 - RNA, 18 nt, Human
cauuacagagaggagaaa

SEQ ID NO: 3381046 - RNA, 21 nt, Human
cauuacagagaggagaaacac

SEQ ID NO: 3381047 - RNA, 21 nt, Human
cauuacagagguauuaaaacu

SEQ ID NO: 3381048 - RNA, 14 nt, Human
cauuacagcuuaau

SEQ ID NO: 3381049 - RNA, 16 nt, Human
cauuacagcuuaauca

SEQ ID NO: 3381050 - RNA, 22 nt, Human
cauuacauuccuugauaauguu

SEQ ID NO: 3381051 - RNA, 15 nt, Human
cauuaccauguaaug

SEQ ID NO: 3381052 - RNA, 16 nt, Human
cauuacccuucccugc

SEQ ID NO: 3381053 - RNA, 21 nt, Human
cauuaccucagugagaagcca

SEQ ID NO: 3381054 - RNA, 23 nt, Human
cauuaccucuuuggaaaaggaag

SEQ ID NO: 3381055 - RNA, 18 nt, Human
cauuaccuuuuaccagcu

SEQ ID NO: 3381056 - RNA, 15 nt, Human
cauuacggcuccucu

SEQ ID NO: 3381057 - RNA, 13 nt, Human
cauuacgugagcc

SEQ ID NO: 3381058 - RNA, 17 nt, Human
cauuacuauaagaacuu

SEQ ID NO: 3381059 - RNA, 23 nt, Human
cauuacuauaagaacuuugagcu

SEQ ID NO: 3381060 - RNA, 17 nt, Human
cauuacucuuguaagau

SEQ ID NO: 3381061 - RNA, 22 nt, Human
cauuacucuuguaagauuuuga

SEQ ID NO: 3381062 - RNA, 23 nt, Human
cauuacugcaugcacuucuuaca

SEQ ID NO: 3381063 - RNA, 14 nt, Human
cauuagaaauauuu

SEQ ID NO: 3381064 - RNA, 15 nt, Human
cauuagaaauauuuu

SEQ ID NO: 3381065 - RNA, 18 nt, Human
cauuagaaauauuuuaaa

SEQ ID NO: 3381066 - RNA, 19 nt, Human
cauuagaagacaauugaca

SEQ ID NO: 3381067 - RNA, 22 nt, Human
cauuagaagauauuagucuugg

SEQ ID NO: 3381068 - RNA, 14 nt, Human
cauuagaauuauuu

SEQ ID NO: 3381069 - RNA, 19 nt, Human
cauuagaauuauuuaaaca

SEQ ID NO: 3381070 - RNA, 17 nt, Human
cauuagacuccuccucc

SEQ ID NO: 3381071 - RNA, 11 nt, Human
cauuagagcag

SEQ ID NO: 3381072 - RNA, 14 nt, Human
cauuagagcaggcg

SEQ ID NO: 3381073 - RNA, 17 nt, Human
cauuagcaaaaaaaguu

SEQ ID NO: 3381074 - RNA, 18 nt, Human
cauuagcaaaaaaaguug

SEQ ID NO: 3381075 - RNA, 19 nt, Human
cauuagcaaaaaaaguugu

SEQ ID NO: 3381076 - RNA, 20 nt, Human
cauuagcaaaaaaaguugua

SEQ ID NO: 3381077 - RNA, 20 nt, Human
cauuagcacagauuuuaauu

SEQ ID NO: 3381078 - RNA, 21 nt, Human
cauuagcacagauuuuaauug

SEQ ID NO: 3381079 - RNA, 22 nt, Human
cauuagcacagauuuuaauugu

SEQ ID NO: 3381080 - RNA, 17 nt, Human
cauuagcaguuugcuuu

SEQ ID NO: 3381081 - RNA, 14 nt, Human
cauuagccaaggau

SEQ ID NO: 3381082 - RNA, 19 nt, Human
cauuagccagauuugucuu

SEQ ID NO: 3381083 - RNA, 21 nt, Human
cauuaggaauuaaguuaucuu

SEQ ID NO: 3381084 - RNA, 19 nt, Human
cauuaggacaaucaguccc

SEQ ID NO: 3381085 - RNA, 16 nt, Human
cauuaggccagcaacg

SEQ ID NO: 3381086 - RNA, 20 nt, Human
cauuaggccagcaacgcuug

SEQ ID NO: 3381087 - RNA, 20 nt, Human
cauuagggaugccuccuuuc

SEQ ID NO: 3381088 - RNA, 14 nt, Human
cauuagguugugaa

SEQ ID NO: 3381089 - RNA, 14 nt, Human
cauuaguaaauguc

SEQ ID NO: 3381090 - RNA, 19 nt, Human
cauuaguaaaugucuuugu

SEQ ID NO: 3381091 - RNA, 21 nt, Human
cauuaguaacauaauaaauua

SEQ ID NO: 3381092 - RNA, 13 nt, Human
cauuagugggaaa

SEQ ID NO: 3381093 - RNA, 16 nt, Human
cauuaguuuugaagau

SEQ ID NO: 3381094 - RNA, 20 nt, Human
cauuauaacugaaggagaag

SEQ ID NO: 3381095 - RNA, 15 nt, Human
cauuauauugcaaug

SEQ ID NO: 3381096 - RNA, 19 nt, Human
cauuauauuuauuacugua

SEQ ID NO: 3381097 - RNA, 12 nt, Human
cauuaucaugug

SEQ ID NO: 3381098 - RNA, 15 nt, Human
cauuaucauguguaa

SEQ ID NO: 3381099 - RNA, 18 nt, Human
cauuaucauguguaauca

SEQ ID NO: 3381100 - RNA, 17 nt, Human
cauuaucgggagcagug

SEQ ID NO: 3381101 - RNA, 19 nt, Human
cauuaucuaacugugcuca

SEQ ID NO: 3381102 - RNA, 17 nt, Human
cauuaucuacuugugua

SEQ ID NO: 3381103 - RNA, 18 nt, Human
cauuaucuagauacugua

SEQ ID NO: 3381104 - RNA, 24 nt, Human
cauuaucuaguucauugaaucauu

SEQ ID NO: 3381105 - RNA, 13 nt, Human
cauuaucucaaaa

SEQ ID NO: 3381106 - RNA, 19 nt, Human
cauuaugcaauuuuuauau

SEQ ID NO: 3381107 - RNA, 16 nt, Human
cauuaugccacuuccu

SEQ ID NO: 3381108 - RNA, 20 nt, Human
cauuauguccacuguguaua

SEQ ID NO: 3381109 - RNA, 21 nt, Human
cauuauguccacuguguauag

SEQ ID NO: 3381110 - RNA, 19 nt, Human
cauuaugugugcaugugug

SEQ ID NO: 3381111 - RNA, 20 nt, Human
ccaaguaacugggauuacag

SEQ ID NO: 3381112 - RNA, 15 nt, Human
ccaaguaagaggcug

SEQ ID NO: 3381113 - RNA, 16 nt, Human
ccaaguaagaggcugg

SEQ ID NO: 3381114 - RNA, 17 nt, Human
ccaaguaagaggcugga

SEQ ID NO: 3381115 - RNA, 16 nt, Human
ccaaguaauauaaugg

SEQ ID NO: 3381116 - RNA, 15 nt, Human
ccaaguagccucucc

SEQ ID NO: 3381117 - RNA, 20 nt, Human
ccaaguagcugggauuacag

SEQ ID NO: 3381118 - RNA, 15 nt, Human
ccaaguagucugcuc

SEQ ID NO: 3381119 - RNA, 19 nt, Human
ccaagucagcccaacaggc

SEQ ID NO: 3381120 - RNA, 14 nt, Human
ccaaguccaaaugu

SEQ ID NO: 3381121 - RNA, 23 nt, Human
ccaaguccaaauguuuacaggga

SEQ ID NO: 3381122 - RNA, 20 nt, Human
caccauuccaagucuccacc

SEQ ID NO: 3381123 - RNA, 14 nt, Human
caccauuccuggaa

SEQ ID NO: 3381124 - RNA, 23 nt, Human
caccauuccuggaaaccacaguc

SEQ ID NO: 3381125 - RNA, 22 nt, Human
caccauucguacauaauacuga

SEQ ID NO: 3381126 - RNA, 13 nt, Human
caccauucugacu

SEQ ID NO: 3381127 - RNA, 13 nt, Human
caccauugaaggc

SEQ ID NO: 3381128 - RNA, 14 nt, Human
caccauugaaggcu

SEQ ID NO: 3381129 - RNA, 13 nt, Human
caccauugcugcu

SEQ ID NO: 3381130 - RNA, 17 nt, Human
caccauugcugcuccuu

SEQ ID NO: 3381131 - RNA, 21 nt, Human
caccauuuggcaucccugggc

SEQ ID NO: 3381132 - RNA, 23 nt, Human
caccauuuggcaucccugggccu

SEQ ID NO: 3381133 - RNA, 21 nt, Human
cacccaaaccggcaggugcga

SEQ ID NO: 3381134 - RNA, 22 nt, Human
cacccaaagagguauuuaucuu

SEQ ID NO: 3381135 - RNA, 12 nt, Human
cacccaaagcug

SEQ ID NO: 3381136 - RNA, 22 nt, Human
cacccaacccuaucuccugaca

SEQ ID NO: 3381137 - RNA, 20 nt, Human
cacccaagaccucagggcac

SEQ ID NO: 3381138 - RNA, 14 nt, Human
cacccaagcuuggc

SEQ ID NO: 3381139 - RNA, 14 nt, Human
cacccaagggccug

SEQ ID NO: 3381140 - RNA, 19 nt, Human
cacccaagggccuggccug

SEQ ID NO: 3381141 - RNA, 15 nt, Human
cacccacaccauaag

SEQ ID NO: 3381142 - RNA, 15 nt, Human
cacccacagaaagag

SEQ ID NO: 3381143 - RNA, 13 nt, Human
cacccacagggcu

SEQ ID NO: 3381144 - RNA, 12 nt, Human
cacccacaugug

SEQ ID NO: 3381145 - RNA, 14 nt, Human
cacccacccagcac

SEQ ID NO: 3381146 - RNA, 14 nt, Human
cacccacccuggga

SEQ ID NO: 3381147 - RNA, 20 nt, Human
cacccaccguccgcccugcu

SEQ ID NO: 3381148 - RNA, 23 nt, Human
cacccaccguccgcccugcuccu

SEQ ID NO: 3381149 - RNA, 13 nt, Human
cacccaccgugga

SEQ ID NO: 3381150 - RNA, 17 nt, Human
cacccaccucagccucc

SEQ ID NO: 3381151 - RNA, 16 nt, Human
cacccaccucccugcc

SEQ ID NO: 3381152 - RNA, 14 nt, Human
cacccagacagcuc

SEQ ID NO: 3381153 - RNA, 12 nt, Human
cacccagcccag

SEQ ID NO: 3381154 - RNA, 13 nt, Human
cacccagcccaga

SEQ ID NO: 3381155 - RNA, 22 nt, Human
cacccagcccauucucucuccu

SEQ ID NO: 3381156 - RNA, 13 nt, Human
cacccagcccugg

SEQ ID NO: 3381157 - RNA, 14 nt, Human
cacccagcccuggu

SEQ ID NO: 3381158 - RNA, 16 nt, Human
cacccagcccuggucu

SEQ ID NO: 3381159 - RNA, 19 nt, Human
cacccagcccuggucucag

SEQ ID NO: 3381160 - RNA, 22 nt, Human
cacccagccucaguccuccccu

SEQ ID NO: 3381161 - RNA, 12 nt, Human
cacccagccugg

SEQ ID NO: 3381162 - RNA, 24 nt, Human
cacccaggagccccgaggccuucu

SEQ ID NO: 3381163 - RNA, 21 nt, Human
cacccaggaggggaacacugc

SEQ ID NO: 3381164 - RNA, 20 nt, Human
cacccaggcuggagugcaau

SEQ ID NO: 3381165 - RNA, 21 nt, Human
cacccagggaacuaggaaggc

SEQ ID NO: 3381166 - RNA, 20 nt, Human
cacccagguuggagugcagu

SEQ ID NO: 3381167 - RNA, 19 nt, Human
cacccagucucugcuccac

SEQ ID NO: 3381168 - RNA, 23 nt, Human
cacccauccuaccaaugcaugca

SEQ ID NO: 3381169 - RNA, 13 nt, Human
cacccaucuguuu

SEQ ID NO: 3381170 - RNA, 18 nt, Human
cacccaucuguuuuuugu

SEQ ID NO: 3381171 - RNA, 22 nt, Human
cacccaugaagacaggacagug

SEQ ID NO: 3381172 - RNA, 19 nt, Human
cacccaugaaucaaagaca

SEQ ID NO: 3381173 - RNA, 20 nt, Human
cacccaugggcucugacaga

SEQ ID NO: 3381174 - RNA, 18 nt, Human
cacccauguuucucuggc

SEQ ID NO: 3381175 - RNA, 19 nt, Human
caccccaaagcuuuccugc

SEQ ID NO: 3381176 - RNA, 17 nt, Human
caccccaacacuuccag

SEQ ID NO: 3381177 - RNA, 22 nt, Human
caccccaaguagucugcucaca

SEQ ID NO: 3381178 - RNA, 15 nt, Human
caccccaauccuccc

SEQ ID NO: 3381179 - RNA, 11 nt, Human
caccccacacu

SEQ ID NO: 3381180 - RNA, 24 nt, Human
caccccacuuaucccucuccauaa

SEQ ID NO: 3381181 - RNA, 11 nt, Human
caccccagagc

SEQ ID NO: 3381182 - RNA, 19 nt, Human
caccccagccuaagaugaa

SEQ ID NO: 3381183 - RNA, 16 nt, Human
caccccagcugcuccc

SEQ ID NO: 3381184 - RNA, 19 nt, Human
caccccagcugcuccccuc

SEQ ID NO: 3381185 - RNA, 20 nt, Human
caccccagcugcuccccucc

SEQ ID NO: 3381186 - RNA, 17 nt, Human
caccccagggccugagc

SEQ ID NO: 3381187 - RNA, 12 nt, Human
caccccauccca

SEQ ID NO: 3381188 - RNA, 12 nt, Human
caccccaugcug

SEQ ID NO: 3381189 - RNA, 14 nt, Human
caccccaugcuggc

SEQ ID NO: 3381190 - RNA, 20 nt, Human
caccccaugcuggccuugcc

SEQ ID NO: 3381191 - RNA, 22 nt, Human
caccccaugcuguugauugcua

SEQ ID NO: 3381192 - RNA, 15 nt, Human
caccccauucccgca

SEQ ID NO: 3381193 - RNA, 12 nt, Human
cacccccacacc

SEQ ID NO: 3381194 - RNA, 15 nt, Human
cacccccaccaaggg

SEQ ID NO: 3381195 - RNA, 17 nt, Human
cacccccagccugggcc

SEQ ID NO: 3381196 - RNA, 13 nt, Human
cacccccagcugc

SEQ ID NO: 3381197 - RNA, 17 nt, Human
cacccccaucucucccu

SEQ ID NO: 3381198 - RNA, 14 nt, Human
caccccccaagcug

SEQ ID NO: 3381199 - RNA, 13 nt, Human
caccccccagaac

SEQ ID NO: 3381200 - RNA, 19 nt, Human
caccccccagaaccugucc

SEQ ID NO: 3381201 - RNA, 16 nt, Human
cacccccuccccaggg

SEQ ID NO: 3381202 - RNA, 17 nt, Human
cacccccuccccagggg

SEQ ID NO: 3381203 - RNA, 14 nt, Human
cacccccuccugcu

SEQ ID NO: 3381204 - RNA, 12 nt, Human
cacccccugcag

SEQ ID NO: 3381205 - RNA, 17 nt, Human
cacccccugcagcuugu

SEQ ID NO: 3381206 - RNA, 14 nt, Human
cacccccugcccug

SEQ ID NO: 3381207 - RNA, 16 nt, Human
cacccccugcccugca

SEQ ID NO: 3381208 - RNA, 21 nt, Human
cacccccuucagugcccacca

SEQ ID NO: 3381209 - RNA, 12 nt, Human
cacccccuuccc

SEQ ID NO: 3381210 - RNA, 13 nt, Human
cacccccuucucu

SEQ ID NO: 3381211 - RNA, 22 nt, Human
cacccccuucucugcuccacca

SEQ ID NO: 3381212 - RNA, 12 nt, Human
cacccccuuucc

SEQ ID NO: 3381213 - RNA, 22 nt, Human
caccccggcaggcccugcagug

SEQ ID NO: 3381214 - RNA, 14 nt, Human
caccccggccaccu

SEQ ID NO: 3381215 - RNA, 15 nt, Human
caccccggccaccug

SEQ ID NO: 3381216 - RNA, 17 nt, Human
caccccggccaccugcg

SEQ ID NO: 3381217 - RNA, 19 nt, Human
caccccggggacccuguga

SEQ ID NO: 3381218 - RNA, 18 nt, Human
caccccuaccccuggcug

SEQ ID NO: 3381219 - RNA, 24 nt, Human
caccccuaccccuggcuguacugc

SEQ ID NO: 3381220 - RNA, 20 nt, Human
caccccucaacaccucugca

SEQ ID NO: 3381221 - RNA, 13 nt, Human
caccccuccagga

SEQ ID NO: 3381222 - RNA, 12 nt, Human
caccccucccau

SEQ ID NO: 3381223 - RNA, 16 nt, Human
caccccucugcccuca

SEQ ID NO: 3381224 - RNA, 13 nt, Human
caccccugcacag

SEQ ID NO: 3381225 - RNA, 11 nt, Human
caccccugccc

SEQ ID NO: 3381226 - RNA, 21 nt, Human
caccccugcccccacuuccug

SEQ ID NO: 3381227 - RNA, 13 nt, Human
caccccugccucc

SEQ ID NO: 3381228 - RNA, 16 nt, Human
caccccugccuccacc

SEQ ID NO: 3381229 - RNA, 20 nt, Human
caccccugccuccacccucu

SEQ ID NO: 3381230 - RNA, 18 nt, Human
caccccugguucucaucu

SEQ ID NO: 3381231 - RNA, 20 nt, Human
caccccuguccucacugcuc

SEQ ID NO: 3381232 - RNA, 12 nt, Human
caccccugugcu

SEQ ID NO: 3381233 - RNA, 23 nt, Human
caccccugugcuccgugccucca

SEQ ID NO: 3381234 - RNA, 18 nt, Human
caccccuuccccacugcc

SEQ ID NO: 3381235 - RNA, 22 nt, Human
caccccuuccugucccaccucu

SEQ ID NO: 3381236 - RNA, 12 nt, Human
caccccuucucu

SEQ ID NO: 3381237 - RNA, 21 nt, Human
caccccuucucuccuccccaa

SEQ ID NO: 3381238 - RNA, 16 nt, Human
cacccgacuccagucc

SEQ ID NO: 3381239 - RNA, 18 nt, Human
cacccgaggcugcccacu

SEQ ID NO: 3381240 - RNA, 14 nt, Human
cacccgaugcugcu

SEQ ID NO: 3381241 - RNA, 16 nt, Human
cacccgaugcugcuuu

SEQ ID NO: 3381242 - RNA, 16 nt, Human
cacccgccuuuuauaa

SEQ ID NO: 3381243 - RNA, 13 nt, Human
cacccggccccug

SEQ ID NO: 3381244 - RNA, 14 nt, Human
cacccggccccugc

SEQ ID NO: 3381245 - RNA, 23 nt, Human
cacccgggcucagggaccacagc

SEQ ID NO: 3381246 - RNA, 18 nt, Human
cacccgugagcgccugug

SEQ ID NO: 3381247 - RNA, 23 nt, Human
cacccgugagcgccugugcacac

SEQ ID NO: 3381248 - RNA, 17 nt, Human
cacccguggagauggga

SEQ ID NO: 3381249 - RNA, 18 nt, Human
cacccguucugcuggccu

SEQ ID NO: 3381250 - RNA, 17 nt, Human
cacccuagucccuuccc

SEQ ID NO: 3381251 - RNA, 18 nt, Human
cacccucaaccucuucug

SEQ ID NO: 3381252 - RNA, 17 nt, Human
cacccucacucugccag

SEQ ID NO: 3381253 - RNA, 21 nt, Human
cacccucacucugccagggca

SEQ ID NO: 3381254 - RNA, 16 nt, Human
cacccucagcaccccu

SEQ ID NO: 3381255 - RNA, 18 nt, Human
cacccucagcaccccuuc

SEQ ID NO: 3381256 - RNA, 21 nt, Human
cacccucaugcugugugacuc

SEQ ID NO: 3381257 - RNA, 13 nt, Human
cacccuccaccuu

SEQ ID NO: 3381258 - RNA, 15 nt, Human
cacccuccacucagc

SEQ ID NO: 3381259 - RNA, 22 nt, Human
cacccucccagaccugccucuu

SEQ ID NO: 3381260 - RNA, 14 nt, Human
cacccucccagcuc

SEQ ID NO: 3381261 - RNA, 16 nt, Human
cacccucccagcucug

SEQ ID NO: 3381262 - RNA, 13 nt, Human
cacccuccccucc

SEQ ID NO: 3381263 - RNA, 15 nt, Human
cacccuccccucucu

SEQ ID NO: 3381264 - RNA, 15 nt, Human
cacccucccuggagu

SEQ ID NO: 3381265 - RNA, 11 nt, Human
cacccuccugg

SEQ ID NO: 3381266 - RNA, 19 nt, Human
cacccuccuggccucagac

SEQ ID NO: 3381267 - RNA, 17 nt, Human
cacccuccugucuuccc

SEQ ID NO: 3381268 - RNA, 12 nt, Human
caccuaugugcc

SEQ ID NO: 3381269 - RNA, 17 nt, Human
caccuaugugccaacug

SEQ ID NO: 3381270 - RNA, 15 nt, Human
caccuauuaucccag

SEQ ID NO: 3381271 - RNA, 23 nt, Human
caccucaagaagaagaggggcau

SEQ ID NO: 3381272 - RNA, 16 nt, Human
caccucaccccacuua

SEQ ID NO: 3381273 - RNA, 16 nt, Human
caccucacucagcacc

SEQ ID NO: 3381274 - RNA, 17 nt, Human
caccucacucagcacca

SEQ ID NO: 3381275 - RNA, 20 nt, Human
caccucacucagcaccacuc

SEQ ID NO: 3381276 - RNA, 21 nt, Human
caccucacucagcaccacuca

SEQ ID NO: 3381277 - RNA, 14 nt, Human
caccucacuccugu

SEQ ID NO: 3381278 - RNA, 13 nt, Human
caccucagagccc

SEQ ID NO: 3381279 - RNA, 16 nt, Human
caccucagagccccgc

SEQ ID NO: 3381280 - RNA, 13 nt, Human
caccucagauggc

SEQ ID NO: 3381281 - RNA, 17 nt, Human
caccucagauggcagcu

SEQ ID NO: 3381282 - RNA, 14 nt, Human
caccucagccuccc

SEQ ID NO: 3381283 - RNA, 16 nt, Human
caccucagccucccaa

SEQ ID NO: 3381284 - RNA, 18 nt, Human
caccucaguucccuuggc

SEQ ID NO: 3381285 - RNA, 19 nt, Human
caccucaguucccuuggcc

SEQ ID NO: 3381286 - RNA, 20 nt, Human
caccucaguucccuuggccu

SEQ ID NO: 3381287 - RNA, 12 nt, Human
caccucaugccc

SEQ ID NO: 3381288 - RNA, 17 nt, Human
cauuguauguaucuauu

SEQ ID NO: 3381289 - RNA, 23 nt, Human
cauuguauucagaguugaugguu

SEQ ID NO: 3381290 - RNA, 19 nt, Human
cauuguccaauccuauguu

SEQ ID NO: 3381291 - RNA, 13 nt, Human
cauugucccucug

SEQ ID NO: 3381292 - RNA, 19 nt, Human
cauugucccucugccccau

SEQ ID NO: 3381293 - RNA, 19 nt, Human
cauugucuccuauauauuu

SEQ ID NO: 3381294 - RNA, 21 nt, Human
cauugucuccuauauauuucu

SEQ ID NO: 3381295 - RNA, 15 nt, Human
cauugucugucugca

SEQ ID NO: 3381296 - RNA, 15 nt, Human
cauugucuuguucug

SEQ ID NO: 3381297 - RNA, 16 nt, Human
cauugucuuuauauga

SEQ ID NO: 3381298 - RNA, 14 nt, Human
cauugucuuuuuag

SEQ ID NO: 3381299 - RNA, 20 nt, Human
cauugucuuuuuagaugccc

SEQ ID NO: 3381300 - RNA, 16 nt, Human
cauugugauuggccug

SEQ ID NO: 3381301 - RNA, 17 nt, Human
cauugugcuucuuucuu

SEQ ID NO: 3381302 - RNA, 13 nt, Human
cauugugggaagg

SEQ ID NO: 3381303 - RNA, 17 nt, Human
cauugugguuauuuuua

SEQ ID NO: 3381304 - RNA, 18 nt, Human
cauugugguuauuuuuau

SEQ ID NO: 3381305 - RNA, 20 nt, Human
cauugugguuauuuuuauac

SEQ ID NO: 3381306 - RNA, 21 nt, Human
cauugugguuauuuuuauaca

SEQ ID NO: 3381307 - RNA, 23 nt, Human
cauugugguuauuuuuauacagu

SEQ ID NO: 3381308 - RNA, 14 nt, Human
cauuguguuaccug

SEQ ID NO: 3381309 - RNA, 16 nt, Human
cauuguguugacauua

SEQ ID NO: 3381310 - RNA, 18 nt, Human
cauuguuaccucuauaua

SEQ ID NO: 3381311 - RNA, 13 nt, Human
cauuguuauuuuc

SEQ ID NO: 3381312 - RNA, 19 nt, Human
cauuguuauuuucagugau

SEQ ID NO: 3381313 - RNA, 17 nt, Human
cauuguuggccaaagcc

SEQ ID NO: 3381314 - RNA, 14 nt, Human
cauuguuuaaaaau

SEQ ID NO: 3381315 - RNA, 14 nt, Human
cauuguuugcuuau

SEQ ID NO: 3381316 - RNA, 18 nt, Human
cauuguuugcuuauuguu

SEQ ID NO: 3381317 - RNA, 20 nt, Human
cauuguuugcuuauuguucc

SEQ ID NO: 3381318 - RNA, 15 nt, Human
cauuguuuggagaca

SEQ ID NO: 3381319 - RNA, 23 nt, Human
cauuguuuuaaaaagaaacaaga

SEQ ID NO: 3381320 - RNA, 14 nt, Human
cauuguuuugaaac

SEQ ID NO: 3381321 - RNA, 13 nt, Human
cauuguuuugaau

SEQ ID NO: 3381322 - RNA, 22 nt, Human
cauuguuuugaauauuacuccu

SEQ ID NO: 3381323 - RNA, 15 nt, Human
cauuuaaaaaaauca

SEQ ID NO: 3381324 - RNA, 13 nt, Human
cauuuaaaacaga

SEQ ID NO: 3381325 - RNA, 12 nt, Human
cauuuaaaacau

SEQ ID NO: 3381326 - RNA, 16 nt, Human
cauuuaaaagauacag

SEQ ID NO: 3381327 - RNA, 12 nt, Human
cauuuaaaauga

SEQ ID NO: 3381328 - RNA, 13 nt, Human
cauuuaaaaugau

SEQ ID NO: 3381329 - RNA, 15 nt, Human
cauuuaaaaugauua

SEQ ID NO: 3381330 - RNA, 15 nt, Human
cauuuaaagcauugc

SEQ ID NO: 3381331 - RNA, 17 nt, Human
cauuuaaauacagucuu

SEQ ID NO: 3381332 - RNA, 18 nt, Human
cauuuaaauacagucuuc

SEQ ID NO: 3381333 - RNA, 20 nt, Human
cauuuaaauacagucuucca

SEQ ID NO: 3381334 - RNA, 16 nt, Human
cauuuaaauaucugaa

SEQ ID NO: 3381335 - RNA, 20 nt, Human
cauuuaaauguguacaaugu

SEQ ID NO: 3381336 - RNA, 19 nt, Human
cauuuaaccccccuguaca

SEQ ID NO: 3381337 - RNA, 20 nt, Human
cauuuaaccccccuguacac

SEQ ID NO: 3381338 - RNA, 19 nt, Human
cauuuaagagacagucacc

SEQ ID NO: 3381339 - RNA, 15 nt, Human
cauuuaagggaaaaa

SEQ ID NO: 3381340 - RNA, 18 nt, Human
cauuuaagggaaaaauau

SEQ ID NO: 3381341 - RNA, 14 nt, Human
cauuuaauaauaua

SEQ ID NO: 3381342 - RNA, 20 nt, Human
cauuuaauaauauacuugug

SEQ ID NO: 3381343 - RNA, 14 nt, Human
cauuuaauaauuau

SEQ ID NO: 3381344 - RNA, 15 nt, Human
cauuuaauaauuaua

SEQ ID NO: 3381345 - RNA, 21 nt, Human
cauuuaauguagccaugggac

SEQ ID NO: 3381346 - RNA, 12 nt, Human
cauuuaauuuag

SEQ ID NO: 3381347 - RNA, 19 nt, Human
cauuuacacuuuugagacu

SEQ ID NO: 3381348 - RNA, 20 nt, Human
cauuuacauguauuauuuca

SEQ ID NO: 3381349 - RNA, 15 nt, Human
cauuuaccuuuuuga

SEQ ID NO: 3381350 - RNA, 13 nt, Human
cauuuacuaaaca

SEQ ID NO: 3381351 - RNA, 20 nt, Human
cauuuacugcauucuucuga

SEQ ID NO: 3381352 - RNA, 13 nt, Human
cauuuacuguggc

SEQ ID NO: 3381353 - RNA, 14 nt, Human
cauuuacuguggcu

SEQ ID NO: 3381354 - RNA, 17 nt, Human
cauuuacugugucuuug

SEQ ID NO: 3381355 - RNA, 14 nt, Human
cauuuacuuaagac

SEQ ID NO: 3381356 - RNA, 15 nt, Human
cauuuacuuaagacu

SEQ ID NO: 3381357 - RNA, 12 nt, Human
cauuuagaaaag

SEQ ID NO: 3381358 - RNA, 22 nt, Human
cauuuagaaaauagagcuuuua

SEQ ID NO: 3381359 - RNA, 16 nt, Human
cauuuagaagaaagau

SEQ ID NO: 3381360 - RNA, 10 nt, Human
cauuuagaau

SEQ ID NO: 3381361 - RNA, 12 nt, Human
cauuuagaaugg

SEQ ID NO: 3381362 - RNA, 19 nt, Human
cauuuagauugaaaacuuu

SEQ ID NO: 3381363 - RNA, 16 nt, Human
cauuuagcauguuguu

SEQ ID NO: 3381364 - RNA, 17 nt, Human
cauuuagccaccaucuu

SEQ ID NO: 3381365 - RNA, 17 nt, Human
cauuuagccuguccugu

SEQ ID NO: 3381366 - RNA, 17 nt, Human
cauuuaggccaugggac

SEQ ID NO: 3381367 - RNA, 20 nt, Human
cauuuagggaguauucuaau

SEQ ID NO: 3381368 - RNA, 17 nt, Human
cauuuagucaugugacc

SEQ ID NO: 3381369 - RNA, 15 nt, Human
cauuuagucucuuua

SEQ ID NO: 3381370 - RNA, 17 nt, Human
cauuuagucucuuuauu

SEQ ID NO: 3381371 - RNA, 22 nt, Human
cauuuagucucuuuauuccuag

SEQ ID NO: 3381372 - RNA, 19 nt, Human
cauuuagugaguuauuccu

SEQ ID NO: 3381373 - RNA, 14 nt, Human
cauuuaguucuuug

SEQ ID NO: 3381374 - RNA, 23 nt, Human
cauuuaguuugauuauucagugu

SEQ ID NO: 3381375 - RNA, 16 nt, Human
cauuuauaagaagaga

SEQ ID NO: 3381376 - RNA, 14 nt, Human
cauuuauaauguuu

SEQ ID NO: 3381377 - RNA, 17 nt, Human
cauuuauaauguuugcu

SEQ ID NO: 3381378 - RNA, 21 nt, Human
cauuuauaauguuugcuauug

SEQ ID NO: 3381379 - RNA, 12 nt, Human
cauuuauacaaa

SEQ ID NO: 3381380 - RNA, 15 nt, Human
cauuuauacaaauua

SEQ ID NO: 3381381 - RNA, 15 nt, Human
cauuuauacucuuuu

SEQ ID NO: 3381382 - RNA, 15 nt, Human
cauuuauauaugaaa

SEQ ID NO: 3381383 - RNA, 20 nt, Human
cauuuauauaugaaaacuau

SEQ ID NO: 3381384 - RNA, 15 nt, Human
cauuuauauauugaa

SEQ ID NO: 3381385 - RNA, 14 nt, Human
cauuuauauugaua

SEQ ID NO: 3381386 - RNA, 18 nt, Human
cauuuaucaaucaguaua

SEQ ID NO: 3381387 - RNA, 15 nt, Human
cauuuaucauucuug

SEQ ID NO: 3381388 - RNA, 20 nt, Human
cauuuaucuaaauauggacu

SEQ ID NO: 3381389 - RNA, 23 nt, Human
cauuuaucuacccaagggcagaa

SEQ ID NO: 3381390 - RNA, 14 nt, Human
cauuuaucuauaau

SEQ ID NO: 3381391 - RNA, 22 nt, Human
cauuuaucuauaauuuaccuaa

SEQ ID NO: 3381392 - RNA, 12 nt, Human
cauuuaucuuga

SEQ ID NO: 3381393 - RNA, 16 nt, Human
cauuuaugaagcaagc

SEQ ID NO: 3381394 - RNA, 23 nt, Human
cauuuaugaguaacuauuauuau

SEQ ID NO: 3381395 - RNA, 16 nt, Human
cauuuaugauuuaaua

SEQ ID NO: 3381396 - RNA, 23 nt, Human
cauuuaugauuuaauaaaauaau

SEQ ID NO: 3381397 - RNA, 20 nt, Human
cauuuauggucaacacuuaa

SEQ ID NO: 3381398 - RNA, 14 nt, Human
cauuuauucugcuc

SEQ ID NO: 3381399 - RNA, 16 nt, Human
cauuuauucugcucac

SEQ ID NO: 3381400 - RNA, 18 nt, Human
cauuuauuguuuauguaa

SEQ ID NO: 3381401 - RNA, 17 nt, Human
cauuuauuuauccagaa

SEQ ID NO: 3381402 - RNA, 15 nt, Human
cauuuauuuuaugag

SEQ ID NO: 3381403 - RNA, 16 nt, Human
cauuuauuuuaugaga

SEQ ID NO: 3381404 - RNA, 19 nt, Human
cauuuauuuuaugagaaau

SEQ ID NO: 3381405 - RNA, 18 nt, Human
cauuuauuuuucucauga

SEQ ID NO: 3381406 - RNA, 17 nt, Human
cauuuauuuuuuacauu

SEQ ID NO: 3381407 - RNA, 21 nt, Human
cauuuauuuuuuuuaaagaaa

SEQ ID NO: 3381408 - RNA, 14 nt, Human
cauuucaagaaguc

SEQ ID NO: 3381409 - RNA, 13 nt, Human
cauuucaccccuc

SEQ ID NO: 3381410 - RNA, 14 nt, Human
cauuucaccccucc

SEQ ID NO: 3381411 - RNA, 20 nt, Human
cauuucaccccucccuuucu

SEQ ID NO: 3381412 - RNA, 21 nt, Human
cauuucaccccucccuuucuc

SEQ ID NO: 3381413 - RNA, 15 nt, Human
cauuucacugucugu

SEQ ID NO: 3381414 - RNA, 17 nt, Human
cacuccagugccagcaa

SEQ ID NO: 3381415 - RNA, 15 nt, Human
cacuccauucccaac

SEQ ID NO: 3381416 - RNA, 12 nt, Human
cacucccaagcc

SEQ ID NO: 3381417 - RNA, 19 nt, Human
cacucccaagguuggagcc

SEQ ID NO: 3381418 - RNA, 17 nt, Human
cacucccacaugggccc

SEQ ID NO: 3381419 - RNA, 14 nt, Human
cacucccacuuccc

SEQ ID NO: 3381420 - RNA, 15 nt, Human
cacucccacuucccu

SEQ ID NO: 3381421 - RNA, 13 nt, Human
cacucccagugcu

SEQ ID NO: 3381422 - RNA, 14 nt, Human
cacuccccaccuuc

SEQ ID NO: 3381423 - RNA, 16 nt, Human
cacuccccagccagcc

SEQ ID NO: 3381424 - RNA, 22 nt, Human
cacuccccagccagccuggcug

SEQ ID NO: 3381425 - RNA, 18 nt, Human
cacuccccaugccacguu

SEQ ID NO: 3381426 - RNA, 18 nt, Human
cacuccccgaagucuuuu

SEQ ID NO: 3381427 - RNA, 20 nt, Human
cacuccccgccguacaguuc

SEQ ID NO: 3381428 - RNA, 16 nt, Human
cacuccccuccacucu

SEQ ID NO: 3381429 - RNA, 13 nt, Human
cacuccccugcac

SEQ ID NO: 3381430 - RNA, 17 nt, Human
cacuccccugcacugga

SEQ ID NO: 3381431 - RNA, 12 nt, Human
cacuccccugcu

SEQ ID NO: 3381432 - RNA, 13 nt, Human
cacuccccugcug

SEQ ID NO: 3381433 - RNA, 21 nt, Human
cacucccggcacuccaugcuu

SEQ ID NO: 3381434 - RNA, 20 nt, Human
cacucccuccagcacaaaca

SEQ ID NO: 3381435 - RNA, 14 nt, Human
cacucccuccauca

SEQ ID NO: 3381436 - RNA, 15 nt, Human
cacucccuccaucaa

SEQ ID NO: 3381437 - RNA, 17 nt, Human
cacucccuucuaccugc

SEQ ID NO: 3381438 - RNA, 20 nt, Human
cacucccuucuaccugccac

SEQ ID NO: 3381439 - RNA, 23 nt, Human
cacucccuucuaccugccacuca

SEQ ID NO: 3381440 - RNA, 22 nt, Human
cacucccuugcuggccccagcc

SEQ ID NO: 3381441 - RNA, 16 nt, Human
cacucccuugggcucc

SEQ ID NO: 3381442 - RNA, 18 nt, Human
cacuccggcccuccagag

SEQ ID NO: 3381443 - RNA, 20 nt, Human
cacuccggcccuccagagcc

SEQ ID NO: 3381444 - RNA, 20 nt, Human
cacuccggccugaugacaga

SEQ ID NO: 3381445 - RNA, 19 nt, Human
cacuccggugugccugcag

SEQ ID NO: 3381446 - RNA, 21 nt, Human
cacuccggugugccugcagcc

SEQ ID NO: 3381447 - RNA, 18 nt, Human
cacuccuacaccuaacuc

SEQ ID NO: 3381448 - RNA, 13 nt, Human
cacuccuaccugg

SEQ ID NO: 3381449 - RNA, 19 nt, Human
cacuccuagagaacgcagc

SEQ ID NO: 3381450 - RNA, 17 nt, Human
cacuccuaggacauguu

SEQ ID NO: 3381451 - RNA, 16 nt, Human
cacuccucagggcagc

SEQ ID NO: 3381452 - RNA, 13 nt, Human
cacuccuccuagc

SEQ ID NO: 3381453 - RNA, 18 nt, Human
cacuccuccuagccaccc

SEQ ID NO: 3381454 - RNA, 20 nt, Human
cacuccucugacucagggcu

SEQ ID NO: 3381455 - RNA, 14 nt, Human
cacuccucugcuga

SEQ ID NO: 3381456 - RNA, 21 nt, Human
cacuccucugcugaccugcug

SEQ ID NO: 3381457 - RNA, 22 nt, Human
cacuccucugcugaccugcuga

SEQ ID NO: 3381458 - RNA, 20 nt, Human
cacuccugagaccccuggcc

SEQ ID NO: 3381459 - RNA, 13 nt, Human
cacuccugcugua

SEQ ID NO: 3381460 - RNA, 10 nt, Human
cacuccuggg

SEQ ID NO: 3381461 - RNA, 19 nt, Human
cacuccuggggccucuugg

SEQ ID NO: 3381462 - RNA, 18 nt, Human
cacuccuguuacuuaccu

SEQ ID NO: 3381463 - RNA, 14 nt, Human
cacuccuucacaga

SEQ ID NO: 3381464 - RNA, 17 nt, Human
cacuccuuccugcccca

SEQ ID NO: 3381465 - RNA, 15 nt, Human
cacuccuugcaucaa

SEQ ID NO: 3381466 - RNA, 23 nt, Human
cacuccuuuagauagcagccugg

SEQ ID NO: 3381467 - RNA, 13 nt, Human
cacucgacaugaa

SEQ ID NO: 3381468 - RNA, 17 nt, Human
cacucgcccgcccacug

SEQ ID NO: 3381469 - RNA, 21 nt, Human
cacucgcuagcaguggcaggc

SEQ ID NO: 3381470 - RNA, 22 nt, Human
cacucggcggcagcauggagcu

SEQ ID NO: 3381471 - RNA, 14 nt, Human
cacucggguuucuc

SEQ ID NO: 3381472 - RNA, 20 nt, Human
cacucgugugcaacagacaa

SEQ ID NO: 3381473 - RNA, 20 nt, Human
cacucuaaaagguucaggga

SEQ ID NO: 3381474 - RNA, 18 nt, Human
cacucuaacuguauauuu

SEQ ID NO: 3381475 - RNA, 13 nt, Human
cacucuaagaugu

SEQ ID NO: 3381476 - RNA, 18 nt, Human
cacucuaagauguuauau

SEQ ID NO: 3381477 - RNA, 19 nt, Human
cacucuaagauguuauauu

SEQ ID NO: 3381478 - RNA, 15 nt, Human
cacucuacccuccca

SEQ ID NO: 3381479 - RNA, 18 nt, Human
cacucuacccucccaccc

SEQ ID NO: 3381480 - RNA, 19 nt, Human
cacucuagggcaguggagu

SEQ ID NO: 3381481 - RNA, 18 nt, Human
cacucuagucaaugacau

SEQ ID NO: 3381482 - RNA, 17 nt, Human
cacucuccauuuaauaa

SEQ ID NO: 3381483 - RNA, 12 nt, Human
cacucuccccac

SEQ ID NO: 3381484 - RNA, 11 nt, Human
cacucuccugg

SEQ ID NO: 3381485 - RNA, 12 nt, Human
cacucuccuggg

SEQ ID NO: 3381486 - RNA, 13 nt, Human
cacucuccugggc

SEQ ID NO: 3381487 - RNA, 18 nt, Human
cacucuccugggccccuc

SEQ ID NO: 3381488 - RNA, 23 nt, Human
cacucuccugggccccucccuac

SEQ ID NO: 3381489 - RNA, 14 nt, Human
cacucucucuuguu

SEQ ID NO: 3381490 - RNA, 13 nt, Human
cacucucuggaag

SEQ ID NO: 3381491 - RNA, 17 nt, Human
cacucucuucccuuucc

SEQ ID NO: 3381492 - RNA, 20 nt, Human
cacucugccagcaaagagga

SEQ ID NO: 3381493 - RNA, 14 nt, Human
cacucugccagggc

SEQ ID NO: 3381494 - RNA, 16 nt, Human
cacucugccagggcag

SEQ ID NO: 3381495 - RNA, 12 nt, Human
ccaacccugccg

SEQ ID NO: 3381496 - RNA, 16 nt, Human
ccaacccuguccuccc

SEQ ID NO: 3381497 - RNA, 12 nt, Human
ccaacccugucu

SEQ ID NO: 3381498 - RNA, 21 nt, Human
ccaacccuucuccucuuguaa

SEQ ID NO: 3381499 - RNA, 15 nt, Human
ccaacccuucuucau

SEQ ID NO: 3381500 - RNA, 13 nt, Human
ccaaccuaaccug

SEQ ID NO: 3381501 - RNA, 16 nt, Human
ccaaccuaaccugugu

SEQ ID NO: 3381502 - RNA, 14 nt, Human
ccaaccuauuuuga

SEQ ID NO: 3381503 - RNA, 12 nt, Human
ccaaccucagca

SEQ ID NO: 3381504 - RNA, 18 nt, Human
ccaaccucagggcuccca

SEQ ID NO: 3381505 - RNA, 13 nt, Human
ccaaccucuuccu

SEQ ID NO: 3381506 - RNA, 14 nt, Human
ccaaccucuuccuc

SEQ ID NO: 3381507 - RNA, 16 nt, Human
ccaaccugaccaacau

SEQ ID NO: 3381508 - RNA, 17 nt, Human
ccaaccugcaaagaucu

SEQ ID NO: 3381509 - RNA, 13 nt, Human
ccaaccugcucuc

SEQ ID NO: 3381510 - RNA, 17 nt, Human
ccaaccuguaauaaaua

SEQ ID NO: 3381511 - RNA, 19 nt, Human
ccaaccuguaauaaauaug

SEQ ID NO: 3381512 - RNA, 22 nt, Human
ccaaccuguaauaaauaugagu

SEQ ID NO: 3381513 - RNA, 23 nt, Human
ccaaccuuagauguucuaagucu

SEQ ID NO: 3381514 - RNA, 15 nt, Human
ccaaccuuucccuca

SEQ ID NO: 3381515 - RNA, 16 nt, Human
ccaaccuuucccucac

SEQ ID NO: 3381516 - RNA, 19 nt, Human
ccaaccuuucccucacccc

SEQ ID NO: 3381517 - RNA, 19 nt, Human
ccaacgaaaagcacaucca

SEQ ID NO: 3381518 - RNA, 22 nt, Human
ccaacgcgaaaccaauuccuca

SEQ ID NO: 3381519 - RNA, 22 nt, Human
ccaacggagagcgccugccccu

SEQ ID NO: 3381520 - RNA, 24 nt, Human
ccaacggcaagggaacaaguacuu

SEQ ID NO: 3381521 - RNA, 21 nt, Human
ccaacggcccugcagccagcu

SEQ ID NO: 3381522 - RNA, 15 nt, Human
ccaacgucugugcca

SEQ ID NO: 3381523 - RNA, 20 nt, Human
ccaacguggggcagcacaga

SEQ ID NO: 3381524 - RNA, 22 nt, Human
ccaacguuuggaagauccugug

SEQ ID NO: 3381525 - RNA, 23 nt, Human
ccaacguuuggaagauccuguga

SEQ ID NO: 3381526 - RNA, 20 nt, Human
ccaacuaaugccuuacucuu

SEQ ID NO: 3381527 - RNA, 23 nt, Human
ccaacuacaaccaagcucucugc

SEQ ID NO: 3381528 - RNA, 16 nt, Human
ccaacuagacauucug

SEQ ID NO: 3381529 - RNA, 15 nt, Human
ccaacuagccccugg

SEQ ID NO: 3381530 - RNA, 15 nt, Human
ccaacuauggccugu

SEQ ID NO: 3381531 - RNA, 16 nt, Human
ccaacuauggccugug

SEQ ID NO: 3381532 - RNA, 11 nt, Human
ccaacuauuua

SEQ ID NO: 3381533 - RNA, 23 nt, Human
ccaacuauuuauugacucugggu

SEQ ID NO: 3381534 - RNA, 14 nt, Human
ccaacucaccccag

SEQ ID NO: 3381535 - RNA, 17 nt, Human
ccaacucaccccagccc

SEQ ID NO: 3381536 - RNA, 21 nt, Human
ccaacucaccccagccccaaa

SEQ ID NO: 3381537 - RNA, 14 nt, Human
ccaacucagaaggg

SEQ ID NO: 3381538 - RNA, 15 nt, Human
ccaacuccagcaacu

SEQ ID NO: 3381539 - RNA, 20 nt, Human
ccaacuccaguacuggagcu

SEQ ID NO: 3381540 - RNA, 15 nt, Human
ccaacuccuaguucu

SEQ ID NO: 3381541 - RNA, 23 nt, Human
ccaacuccuaguucuagaaaaac

SEQ ID NO: 3381542 - RNA, 15 nt, Human
ccaacuccuggaagc

SEQ ID NO: 3381543 - RNA, 16 nt, Human
ccaacuccuuccagcu

SEQ ID NO: 3381544 - RNA, 21 nt, Human
ccaacucuagcuggggguggg

SEQ ID NO: 3381545 - RNA, 12 nt, Human
ccaacucuccug

SEQ ID NO: 3381546 - RNA, 23 nt, Human
ccaacugaaggcuaaaaagcaac

SEQ ID NO: 3381547 - RNA, 15 nt, Human
ccaacugaccaccuu

SEQ ID NO: 3381548 - RNA, 22 nt, Human
ccaacugagaaaacgaaacugc

SEQ ID NO: 3381549 - RNA, 14 nt, Human
ccaacugcugcuuu

SEQ ID NO: 3381550 - RNA, 15 nt, Human
ccaacuggaagcaca

SEQ ID NO: 3381551 - RNA, 11 nt, Human
ccaacuguguu

SEQ ID NO: 3381552 - RNA, 21 nt, Human
ccaacuguguuguauuaacaa

SEQ ID NO: 3381553 - RNA, 23 nt, Human
ccaacuguguuguauuaacaaaa

SEQ ID NO: 3381554 - RNA, 18 nt, Human
ccaacuucuucagagcug

SEQ ID NO: 3381555 - RNA, 19 nt, Human
ccaacuugagggcccagag

SEQ ID NO: 3381556 - RNA, 14 nt, Human
ccaacuuggcuuuc

SEQ ID NO: 3381557 - RNA, 19 nt, Human
ccaacuugguucugcuuca

SEQ ID NO: 3381558 - RNA, 22 nt, Human
ccaacuuucaagaacuuguuua

SEQ ID NO: 3381559 - RNA, 22 nt, Human
ccagcccaucuugccuccaugg

SEQ ID NO: 3381560 - RNA, 14 nt, Human
ccagcccauggaga

SEQ ID NO: 3381561 - RNA, 22 nt, Human
ccagcccauucucucuccuguc

SEQ ID NO: 3381562 - RNA, 14 nt, Human
ccagccccacacag

SEQ ID NO: 3381563 - RNA, 15 nt, Human
ccagccccacagccc

SEQ ID NO: 3381564 - RNA, 14 nt, Human
ccagccccacccag

SEQ ID NO: 3381565 - RNA, 19 nt, Human
ccagccccacugccagcag

SEQ ID NO: 3381566 - RNA, 20 nt, Human
ccagccccacugccagcagc

SEQ ID NO: 3381567 - RNA, 15 nt, Human
ccagccccagccagg

SEQ ID NO: 3381568 - RNA, 13 nt, Human
ccagccccagugc

SEQ ID NO: 3381569 - RNA, 17 nt, Human
ccagccccagugcccac

SEQ ID NO: 3381570 - RNA, 15 nt, Human
ccagccccauccucu

SEQ ID NO: 3381571 - RNA, 17 nt, Human
ccagccccauccucugu

SEQ ID NO: 3381572 - RNA, 22 nt, Human
ccagcccccuccuggugccacc

SEQ ID NO: 3381573 - RNA, 14 nt, Human
ccagccccgacucc

SEQ ID NO: 3381574 - RNA, 15 nt, Human
ccagccccgacucca

SEQ ID NO: 3381575 - RNA, 16 nt, Human
ccagccccgacuccag

SEQ ID NO: 3381576 - RNA, 17 nt, Human
ccagccccgacuccagc

SEQ ID NO: 3381577 - RNA, 18 nt, Human
ccagccccgacuccagcc

SEQ ID NO: 3381578 - RNA, 20 nt, Human
ccagccccgacuccagccag

SEQ ID NO: 3381579 - RNA, 21 nt, Human
ccagccccgacuccagccagc

SEQ ID NO: 3381580 - RNA, 22 nt, Human
ccagccccgacuccagccagcg

SEQ ID NO: 3381581 - RNA, 18 nt, Human
ccagccccggcccugggc

SEQ ID NO: 3381582 - RNA, 17 nt, Human
ccagccccggggugagu

SEQ ID NO: 3381583 - RNA, 20 nt, Human
ccagccccgguggcugggca

SEQ ID NO: 3381584 - RNA, 22 nt, Human
ccagccccuagaaacccaagcu

SEQ ID NO: 3381585 - RNA, 23 nt, Human
ccagccccuagaaacccaagcuc

SEQ ID NO: 3381586 - RNA, 16 nt, Human
ccagccccuagcccag

SEQ ID NO: 3381587 - RNA, 19 nt, Human
ccagccccuagcccaggag

SEQ ID NO: 3381588 - RNA, 11 nt, Human
ccagccccucc

SEQ ID NO: 3381589 - RNA, 12 nt, Human
ccagccccuccc

SEQ ID NO: 3381590 - RNA, 16 nt, Human
ccagccccucccccau

SEQ ID NO: 3381591 - RNA, 17 nt, Human
ccagccccucccccauc

SEQ ID NO: 3381592 - RNA, 14 nt, Human
ccagccccucuggu

SEQ ID NO: 3381593 - RNA, 18 nt, Human
ccagccccugccccagcc

SEQ ID NO: 3381594 - RNA, 20 nt, Human
ccagccccugccccagccca

SEQ ID NO: 3381595 - RNA, 11 nt, Human
ccagccccugg

SEQ ID NO: 3381596 - RNA, 13 nt, Human
ccagccccuggau

SEQ ID NO: 3381597 - RNA, 21 nt, Human
ccagccccuggaugcagccuc

SEQ ID NO: 3381598 - RNA, 13 nt, Human
ccagccccuggcc

SEQ ID NO: 3381599 - RNA, 21 nt, Human
ccagccccuggccccaggacc

SEQ ID NO: 3381600 - RNA, 21 nt, Human
ccagccccuucucagaaucua

SEQ ID NO: 3381601 - RNA, 14 nt, Human
ccagcccggccugc

SEQ ID NO: 3381602 - RNA, 15 nt, Human
ccagcccggccugcu

SEQ ID NO: 3381603 - RNA, 16 nt, Human
ccagcccgggagccua

SEQ ID NO: 3381604 - RNA, 13 nt, Human
ccagcccucaucc

SEQ ID NO: 3381605 - RNA, 14 nt, Human
ccagcccuccccau

SEQ ID NO: 3381606 - RNA, 15 nt, Human
ccagcccucccuguc

SEQ ID NO: 3381607 - RNA, 14 nt, Human
ccagcccugaguuc

SEQ ID NO: 3381608 - RNA, 13 nt, Human
ccagcccugccug

SEQ ID NO: 3381609 - RNA, 14 nt, Human
ccagcccugccugg

SEQ ID NO: 3381610 - RNA, 11 nt, Human
ccagcccugcu

SEQ ID NO: 3381611 - RNA, 14 nt, Human
ccagcccugcuggg

SEQ ID NO: 3381612 - RNA, 20 nt, Human
ccagcccugcuggggauccc

SEQ ID NO: 3381613 - RNA, 22 nt, Human
ccagcccugcuggggauccccg

SEQ ID NO: 3381614 - RNA, 14 nt, Human
ccagcccuggcuga

SEQ ID NO: 3381615 - RNA, 14 nt, Human
ccagcccuguggaa

SEQ ID NO: 3381616 - RNA, 13 nt, Human
ccagcccuguucu

SEQ ID NO: 3381617 - RNA, 15 nt, Human
ccagcccuuccucug

SEQ ID NO: 3381618 - RNA, 16 nt, Human
ccagcccuugaaguca

SEQ ID NO: 3381619 - RNA, 15 nt, Human
ccagccgacccccuc

SEQ ID NO: 3381620 - RNA, 20 nt, Human
ccagccgacccccucucccu

SEQ ID NO: 3381621 - RNA, 20 nt, Human
ccagccgagauagccaaggc

SEQ ID NO: 3381622 - RNA, 22 nt, Human
ccagccgagauagccaaggcca

SEQ ID NO: 3381623 - RNA, 23 nt, Human
ccagccgccauugccaccaggag

SEQ ID NO: 3381624 - RNA, 16 nt, Human
ccagccgcucggaggc

SEQ ID NO: 3381625 - RNA, 19 nt, Human
ccagccgcucggaggcccc

SEQ ID NO: 3381626 - RNA, 18 nt, Human
ccagccgcucuccugcca

SEQ ID NO: 3381627 - RNA, 20 nt, Human
ccagccgcucuccugccaca

SEQ ID NO: 3381628 - RNA, 22 nt, Human
ccagccgcuuggcgaugccagc

SEQ ID NO: 3381629 - RNA, 19 nt, Human
ccagccggccaauggaaac

SEQ ID NO: 3381630 - RNA, 13 nt, Human
ccagccggggccu

SEQ ID NO: 3381631 - RNA, 19 nt, Human
ccagccuaugagcauccug

SEQ ID NO: 3381632 - RNA, 22 nt, Human
ccagccuaugagcauccugagc

SEQ ID NO: 3381633 - RNA, 23 nt, Human
ccagccuaugagcauccugagcc

SEQ ID NO: 3381634 - RNA, 18 nt, Human
ccagccucaaauccagga

SEQ ID NO: 3381635 - RNA, 19 nt, Human
ccagccucaaauccaggac

SEQ ID NO: 3381636 - RNA, 17 nt, Human
ccagccucacccuugcg

SEQ ID NO: 3381637 - RNA, 16 nt, Human
ccagccucagacugga

SEQ ID NO: 3381638 - RNA, 12 nt, Human
ccagccucaguc

SEQ ID NO: 3381639 - RNA, 22 nt, Human
ccagccucaguccuccccucac

SEQ ID NO: 3381640 - RNA, 21 nt, Human
ccagccuccaagcuccaucuc

SEQ ID NO: 3381641 - RNA, 15 nt, Human
ccagccuccaugcug

SEQ ID NO: 3381642 - RNA, 16 nt, Human
ccagccuccaugcugc

SEQ ID NO: 3381643 - RNA, 11 nt, Human
ccagccucccu

SEQ ID NO: 3381644 - RNA, 21 nt, Human
ccagccucccugaagccuuug

SEQ ID NO: 3381645 - RNA, 12 nt, Human
ccagccuccucu

SEQ ID NO: 3381646 - RNA, 13 nt, Human
ccagccuccucug

SEQ ID NO: 3381647 - RNA, 14 nt, Human
ccagccuccucugg

SEQ ID NO: 3381648 - RNA, 23 nt, Human
ccagccucgcccauccccuugag

SEQ ID NO: 3381649 - RNA, 22 nt, Human
ccagccucguuggaagaggaac

SEQ ID NO: 3381650 - RNA, 22 nt, Human
ccagccucuccccugauuacac

SEQ ID NO: 3381651 - RNA, 21 nt, Human
ccagccucucuugguuuccuu

SEQ ID NO: 3381652 - RNA, 14 nt, Human
ccagccucuuuccc

SEQ ID NO: 3381653 - RNA, 13 nt, Human
ccagccugcacua

SEQ ID NO: 3381654 - RNA, 10 nt, Human
ccagccugcc

SEQ ID NO: 3381655 - RNA, 19 nt, Human
ccagccugccuggcaggcu

SEQ ID NO: 3381656 - RNA, 15 nt, Human
ccagccugcgccugc

SEQ ID NO: 3381657 - RNA, 19 nt, Human
ccagccugcgccugcugca

SEQ ID NO: 3381658 - RNA, 20 nt, Human
ccagccuggaaaccugucug

SEQ ID NO: 3381659 - RNA, 21 nt, Human
ccagccuggaaaccugucuga

SEQ ID NO: 3381660 - RNA, 19 nt, Human
ccagccuggacccccagcu

SEQ ID NO: 3381661 - RNA, 15 nt, Human
ccaagcuccaagccc

SEQ ID NO: 3381662 - RNA, 12 nt, Human
ccaagcucccag

SEQ ID NO: 3381663 - RNA, 14 nt, Human
ccaagcucccaggc

SEQ ID NO: 3381664 - RNA, 16 nt, Human
ccaagcucccaggcau

SEQ ID NO: 3381665 - RNA, 22 nt, Human
ccaagcucccaggcauucccca

SEQ ID NO: 3381666 - RNA, 22 nt, Human
ccaagcucccugccccaaauaa

SEQ ID NO: 3381667 - RNA, 22 nt, Human
ccaagcuccuccucggaaccgc

SEQ ID NO: 3381668 - RNA, 22 nt, Human
ccaagcuccuugggaggcccca

SEQ ID NO: 3381669 - RNA, 14 nt, Human
ccaagcucugcagu

SEQ ID NO: 3381670 - RNA, 12 nt, Human
ccaagcucugcu

SEQ ID NO: 3381671 - RNA, 16 nt, Human
ccaagcucugcuccuc

SEQ ID NO: 3381672 - RNA, 15 nt, Human
ccaagcugaggugcc

SEQ ID NO: 3381673 - RNA, 19 nt, Human
ccaagcugaggugcccagg

SEQ ID NO: 3381674 - RNA, 23 nt, Human
ccaagcugccuccccucuccuuc

SEQ ID NO: 3381675 - RNA, 16 nt, Human
ccaagcugggccccag

SEQ ID NO: 3381676 - RNA, 20 nt, Human
ccaagcugggccccagccca

SEQ ID NO: 3381677 - RNA, 13 nt, Human
ccaagcugugcca

SEQ ID NO: 3381678 - RNA, 15 nt, Human
ccaagcugugccacc

SEQ ID NO: 3381679 - RNA, 16 nt, Human
ccaagcugugccaccc

SEQ ID NO: 3381680 - RNA, 18 nt, Human
ccaagcugugccacccug

SEQ ID NO: 3381681 - RNA, 21 nt, Human
ccaagcugugccacccugggc

SEQ ID NO: 3381682 - RNA, 17 nt, Human
ccaagcuuccuuuguuu

SEQ ID NO: 3381683 - RNA, 17 nt, Human
ccaagcuuggcagccga

SEQ ID NO: 3381684 - RNA, 19 nt, Human
ccaaggaaaccacagcugc

SEQ ID NO: 3381685 - RNA, 23 nt, Human
ccaaggaaaccacagcugcugga

SEQ ID NO: 3381686 - RNA, 17 nt, Human
ccaaggaaacgcuaccu

SEQ ID NO: 3381687 - RNA, 22 nt, Human
ccaaggaaacgcuaccucucug

SEQ ID NO: 3381688 - RNA, 13 nt, Human
ccaaggaacaaaa

SEQ ID NO: 3381689 - RNA, 15 nt, Human
ccaaggaccccucac

SEQ ID NO: 3381690 - RNA, 20 nt, Human
ccaaggaccuccucuucccc

SEQ ID NO: 3381691 - RNA, 22 nt, Human
ccaaggaccuccucuucccccu

SEQ ID NO: 3381692 - RNA, 22 nt, Human
ccaaggacugagcacccucugg

SEQ ID NO: 3381693 - RNA, 11 nt, Human
ccaaggacugc

SEQ ID NO: 3381694 - RNA, 15 nt, Human
ccaaggacugccgac

SEQ ID NO: 3381695 - RNA, 18 nt, Human
ccaaggagaaacagagac

SEQ ID NO: 3381696 - RNA, 15 nt, Human
ccaaggagaacaaau

SEQ ID NO: 3381697 - RNA, 16 nt, Human
ccaaggagcacagguc

SEQ ID NO: 3381698 - RNA, 18 nt, Human
ccaaggagcacagguccc

SEQ ID NO: 3381699 - RNA, 17 nt, Human
ccaaggagcugagaaua

SEQ ID NO: 3381700 - RNA, 20 nt, Human
ccaaggagcugagaauagaa

SEQ ID NO: 3381701 - RNA, 16 nt, Human
ccaaggagcugcuaua

SEQ ID NO: 3381702 - RNA, 21 nt, Human
ccaaggaggaaaaacagacaa

SEQ ID NO: 3381703 - RNA, 23 nt, Human
ccaaggaggugaggagcagagca

SEQ ID NO: 3381704 - RNA, 17 nt, Human
cacuugccucuuccuug

SEQ ID NO: 3381705 - RNA, 21 nt, Human
cacuugccucuuccuugaaga

SEQ ID NO: 3381706 - RNA, 13 nt, Human
cacuugccugggu

SEQ ID NO: 3381707 - RNA, 12 nt, Human
cacuuggcagcc

SEQ ID NO: 3381708 - RNA, 18 nt, Human
cacuuggcagccuuguga

SEQ ID NO: 3381709 - RNA, 18 nt, Human
cacuuggccaagcaggga

SEQ ID NO: 3381710 - RNA, 20 nt, Human
cacuuggggcaccuugcucc

SEQ ID NO: 3381711 - RNA, 19 nt, Human
cacuugggggcucagcaag

SEQ ID NO: 3381712 - RNA, 21 nt, Human
cacuugggggcucagcaaggc

SEQ ID NO: 3381713 - RNA, 22 nt, Human
aaagaaccaaaaguuuuccuga

SEQ ID NO: 3381714 - RNA, 21 nt, Human
aaagaaccaagaaaaaggaau

SEQ ID NO: 3381715 - RNA, 18 nt, Human
aaagaaccuaacauuuau

SEQ ID NO: 3381716 - RNA, 20 nt, Human
aaagaacgcugauuuaaaga

SEQ ID NO: 3381717 - RNA, 15 nt, Human
aaagaacggaagaag

SEQ ID NO: 3381718 - RNA, 19 nt, Human
aaagaacggaagaagagau

SEQ ID NO: 3381719 - RNA, 17 nt, Human
aaagaagaaacgucuau

SEQ ID NO: 3381720 - RNA, 10 nt, Human
aaagaagaag

SEQ ID NO: 3381721 - RNA, 21 nt, Human
aaagaagacauguuuuagaca

SEQ ID NO: 3381722 - RNA, 22 nt, Human
aaagaagaccugagaauguauc

SEQ ID NO: 3381723 - RNA, 15 nt, Human
aaagaagauguugaa

SEQ ID NO: 3381724 - RNA, 13 nt, Human
aaagaagauguuu

SEQ ID NO: 3381725 - RNA, 20 nt, Human
aaagaagcccaauauuauaa

SEQ ID NO: 3381726 - RNA, 18 nt, Human
aaagaaguggggacagag

SEQ ID NO: 3381727 - RNA, 19 nt, Human
aaagaaguguccgagaacu

SEQ ID NO: 3381728 - RNA, 15 nt, Human
aaagaauacagaaag

SEQ ID NO: 3381729 - RNA, 15 nt, Human
aaagaauacuugaac

SEQ ID NO: 3381730 - RNA, 14 nt, Human
aaagaauagaaaga

SEQ ID NO: 3381731 - RNA, 14 nt, Human
aaagaauaggacuu

SEQ ID NO: 3381732 - RNA, 19 nt, Human
aaagaauaggacuuguuuu

SEQ ID NO: 3381733 - RNA, 18 nt, Human
aaagaauauauuuauuua

SEQ ID NO: 3381734 - RNA, 22 nt, Human
aaagaauauucagagaauauca

SEQ ID NO: 3381735 - RNA, 21 nt, Human
aaagaaucccuguucauugua

SEQ ID NO: 3381736 - RNA, 19 nt, Human
aaagaaucuacuauacuuu

SEQ ID NO: 3381737 - RNA, 22 nt, Human
aaagaaugagaaggagucagaa

SEQ ID NO: 3381738 - RNA, 12 nt, Human
aaagaaugggca

SEQ ID NO: 3381739 - RNA, 17 nt, Human
aaagaauguuagagcac

SEQ ID NO: 3381740 - RNA, 19 nt, Human
aaagaauucuuauacacau

SEQ ID NO: 3381741 - RNA, 21 nt, Human
aaagaauuucaauuuguucag

SEQ ID NO: 3381742 - RNA, 12 nt, Human
aaagacaauucu

SEQ ID NO: 3381743 - RNA, 19 nt, Human
aaagacaauucuuuauaca

SEQ ID NO: 3381744 - RNA, 14 nt, Human
aaagacacugcaga

SEQ ID NO: 3381745 - RNA, 19 nt, Human
aaagacacugccugggcug

SEQ ID NO: 3381746 - RNA, 22 nt, Human
aaagacagggcugauaagcuaa

SEQ ID NO: 3381747 - RNA, 13 nt, Human
aaagacagugaaa

SEQ ID NO: 3381748 - RNA, 13 nt, Human
aaagacaucuuuc

SEQ ID NO: 3381749 - RNA, 23 nt, Human
aaagacaucuuucucuuuucuaa

SEQ ID NO: 3381750 - RNA, 16 nt, Human
aaagacaugaagccac

SEQ ID NO: 3381751 - RNA, 15 nt, Human
aaagaccauuuuucc

SEQ ID NO: 3381752 - RNA, 15 nt, Human
aaagacccaggggga

SEQ ID NO: 3381753 - RNA, 19 nt, Human
aaagacccuaaaucugagg

SEQ ID NO: 3381754 - RNA, 23 nt, Human
aaagaccuuguguguauguguac

SEQ ID NO: 3381755 - RNA, 23 nt, Human
aaagacgaccagcauuuaaccaa

SEQ ID NO: 3381756 - RNA, 23 nt, Human
aaagacgcacuuuggcuuauaau

SEQ ID NO: 3381757 - RNA, 14 nt, Human
aaagacuaauuuaa

SEQ ID NO: 3381758 - RNA, 20 nt, Human
aaagacuaauuuaaaaaaua

SEQ ID NO: 3381759 - RNA, 17 nt, Human
aaagacuauucaaacag

SEQ ID NO: 3381760 - RNA, 18 nt, Human
aaagacuauucaaacagu

SEQ ID NO: 3381761 - RNA, 19 nt, Human
aaagacuauucaaacaguc

SEQ ID NO: 3381762 - RNA, 10 nt, Human
aaagacucau

SEQ ID NO: 3381763 - RNA, 17 nt, Human
aaagacucuauucucaa

SEQ ID NO: 3381764 - RNA, 15 nt, Human
aaagacucuugggag

SEQ ID NO: 3381765 - RNA, 16 nt, Human
aaagacugagcucaag

SEQ ID NO: 3381766 - RNA, 11 nt, Human
aaagacuggca

SEQ ID NO: 3381767 - RNA, 21 nt, Human
aaagacuggcuuuuauuaaug

SEQ ID NO: 3381768 - RNA, 23 nt, Human
aaagacuggcuuuuauuaaugca

SEQ ID NO: 3381769 - RNA, 17 nt, Human
aaagacugguuuucugc

SEQ ID NO: 3381770 - RNA, 12 nt, Human
aaagacuuaagc

SEQ ID NO: 3381771 - RNA, 19 nt, Human
aaagacuuccaaagaaugu

SEQ ID NO: 3381772 - RNA, 14 nt, Human
aaagacuucccuaa

SEQ ID NO: 3381773 - RNA, 18 nt, Human
aaagacuugguugguagg

SEQ ID NO: 3381774 - RNA, 19 nt, Human
aaagacuuguaauauuuuu

SEQ ID NO: 3381775 - RNA, 18 nt, Human
aaagagaaaaaaaguuug

SEQ ID NO: 3381776 - RNA, 22 nt, Human
aaagagaaaauugaauuuaaca

SEQ ID NO: 3381777 - RNA, 22 nt, Human
aaagagaaacaguugguaacuu

SEQ ID NO: 3381778 - RNA, 13 nt, Human
aaagagaagaaga

SEQ ID NO: 3381779 - RNA, 14 nt, Human
aaagagacaggcag

SEQ ID NO: 3381780 - RNA, 13 nt, Human
aaagagacaguga

SEQ ID NO: 3381781 - RNA, 15 nt, Human
aaagagacagugaua

SEQ ID NO: 3381782 - RNA, 20 nt, Human
aaagagaccacccauaucau

SEQ ID NO: 3381783 - RNA, 17 nt, Human
aaagagaccuaccucag

SEQ ID NO: 3381784 - RNA, 18 nt, Human
aaagagaccuaccucagg

SEQ ID NO: 3381785 - RNA, 20 nt, Human
aaagagaccuaccucagguu

SEQ ID NO: 3381786 - RNA, 21 nt, Human
aaagagaccuaccucagguug

SEQ ID NO: 3381787 - RNA, 18 nt, Human
aaagagagaaaaacaaau

SEQ ID NO: 3381788 - RNA, 22 nt, Human
aaagagagaaaacuuauuugag

SEQ ID NO: 3381789 - RNA, 14 nt, Human
aaagagagaaaaua

SEQ ID NO: 3381790 - RNA, 18 nt, Human
aaagagagaaaauaaaaa

SEQ ID NO: 3381791 - RNA, 21 nt, Human
aaagagagaaaauaaaaaguu

SEQ ID NO: 3381792 - RNA, 22 nt, Human
aaagagagaaaauaaaaaguua

SEQ ID NO: 3381793 - RNA, 11 nt, Human
aaagagagguu

SEQ ID NO: 3381794 - RNA, 12 nt, Human
aaagagagguua

SEQ ID NO: 3381795 - RNA, 23 nt, Human
aaagagaguuuuuaauagaacca

SEQ ID NO: 3381796 - RNA, 17 nt, Human
aaagagauaugggaaca

SEQ ID NO: 3381797 - RNA, 24 nt, Human
aaagagauccaggaagcaugagug

SEQ ID NO: 3381798 - RNA, 22 nt, Human
aaagagaugaugaaaauauuua

SEQ ID NO: 3381799 - RNA, 21 nt, Human
aaagagauuuaaacucugaau

SEQ ID NO: 3381800 - RNA, 12 nt, Human
aaagagcacuua

SEQ ID NO: 3381801 - RNA, 21 nt, Human
aaagagcacuuaagagaauau

SEQ ID NO: 3381802 - RNA, 18 nt, Human
aaagagcccuugccuccc

SEQ ID NO: 3381803 - RNA, 12 nt, Human
aaagagcugccu

SEQ ID NO: 3381804 - RNA, 22 nt, Human
aaagagcuuuaguccuagagga

SEQ ID NO: 3381805 - RNA, 14 nt, Human
aaagaggaaagaau

SEQ ID NO: 3381806 - RNA, 19 nt, Human
aaagaggacucgcuuguaa

SEQ ID NO: 3381807 - RNA, 15 nt, Human
aaagaggcacagagc

SEQ ID NO: 3381808 - RNA, 15 nt, Human
aaagaggcagcuuga

SEQ ID NO: 3381809 - RNA, 20 nt, Human
aaagaggcgucuguauauuu

SEQ ID NO: 3381810 - RNA, 20 nt, Human
aaagaggcugaaagaggcca

SEQ ID NO: 3381811 - RNA, 20 nt, Human
aaagaggcugaggccuggac

SEQ ID NO: 3381812 - RNA, 21 nt, Human
aaagaggcugaggccuggacu

SEQ ID NO: 3381813 - RNA, 23 nt, Human
aaagaggcugccccucucaccaa

SEQ ID NO: 3381814 - RNA, 19 nt, Human
aaagaggugaccccagggc

SEQ ID NO: 3381815 - RNA, 24 nt, Human
aaagaggugacugggcccugccuc

SEQ ID NO: 3381816 - RNA, 13 nt, Human
aaagaggugugca

SEQ ID NO: 3381817 - RNA, 19 nt, Human
aaagaguaaaggaaaugau

SEQ ID NO: 3381818 - RNA, 23 nt, Human
aaagaguagacauuucucuuacu

SEQ ID NO: 3381819 - RNA, 13 nt, Human
aaagagucuagau

SEQ ID NO: 3381820 - RNA, 21 nt, Human
aaagagucuagauucaaaggu

SEQ ID NO: 3381821 - RNA, 14 nt, Human
aaagagucuuucuu

SEQ ID NO: 3381822 - RNA, 16 nt, Human
aaagaguguaaaauau

SEQ ID NO: 3381823 - RNA, 13 nt, Human
aaagaguuaagaa

SEQ ID NO: 3381824 - RNA, 12 nt, Human
aaagaguuagaa

SEQ ID NO: 3381825 - RNA, 16 nt, Human
aaagaguucaagaaau

SEQ ID NO: 3381826 - RNA, 24 nt, Human
aaagaguucuggaaaagaacuguu

SEQ ID NO: 3381827 - RNA, 19 nt, Human
aaagaguuugagaccugaa

SEQ ID NO: 3381828 - RNA, 12 nt, Human
aaagauaaacac

SEQ ID NO: 3381829 - RNA, 16 nt, Human
aaagauaaacacaaga

SEQ ID NO: 3381830 - RNA, 17 nt, Human
aaagauaaacacaagau

SEQ ID NO: 3381831 - RNA, 16 nt, Human
aaagauaaauauuaua

SEQ ID NO: 3381832 - RNA, 17 nt, Human
aaagauaauauuacugu

SEQ ID NO: 3381833 - RNA, 14 nt, Human
aaagauacauuugu

SEQ ID NO: 3381834 - RNA, 16 nt, Human
aaagauacauuuguau

SEQ ID NO: 3381835 - RNA, 17 nt, Human
aaagauagacagguccu

SEQ ID NO: 3381836 - RNA, 19 nt, Human
aaagauagagucauugcug

SEQ ID NO: 3381837 - RNA, 15 nt, Human
aaagauauaagugcu

SEQ ID NO: 3381838 - RNA, 21 nt, Human
aaagauauaagugcuguauaa

SEQ ID NO: 3381839 - RNA, 12 nt, Human
aaagauauuauu

SEQ ID NO: 3381840 - RNA, 22 nt, Human
aaagauauuguucaaacaauau

SEQ ID NO: 3381841 - RNA, 16 nt, Human
aaagauauuuugcuuu

SEQ ID NO: 3381842 - RNA, 14 nt, Human
aaagaucaaaauaa

SEQ ID NO: 3381843 - RNA, 16 nt, Human
aaagaucaaaauaaaa

SEQ ID NO: 3381844 - RNA, 13 nt, Human
aaagaucccaaau

SEQ ID NO: 3381845 - RNA, 16 nt, Human
aaagaucuacaugaau

SEQ ID NO: 3381846 - RNA, 21 nt, Human
aaagaucuguccucagccuug

SEQ ID NO: 3381847 - RNA, 15 nt, Human
aaagaucuucaaaag

SEQ ID NO: 3381848 - RNA, 12 nt, Human
ccacuucugcac

SEQ ID NO: 3381849 - RNA, 18 nt, Human
ccacuucuggucaaucaa

SEQ ID NO: 3381850 - RNA, 17 nt, Human
ccacuucuguccauauu

SEQ ID NO: 3381851 - RNA, 17 nt, Human
ccacuucuuccuuucuc

SEQ ID NO: 3381852 - RNA, 19 nt, Human
ccacuucuuguuccccacu

SEQ ID NO: 3381853 - RNA, 16 nt, Human
ccacuucuuuuauaac

SEQ ID NO: 3381854 - RNA, 14 nt, Human
ccacuugaaauguu

SEQ ID NO: 3381855 - RNA, 18 nt, Human
ccacuugagugucaagcu

SEQ ID NO: 3381856 - RNA, 13 nt, Human
ccacuugccucuu

SEQ ID NO: 3381857 - RNA, 21 nt, Human
ccacuuggaggccuuucaucc

SEQ ID NO: 3381858 - RNA, 12 nt, Human
ccacuuggucug

SEQ ID NO: 3381859 - RNA, 16 nt, Human
ccacuuggucugugag

SEQ ID NO: 3381860 - RNA, 17 nt, Human
ccacuuggucugugaga

SEQ ID NO: 3381861 - RNA, 12 nt, Human
ccacuuguagau

SEQ ID NO: 3381862 - RNA, 17 nt, Human
ccacuuguagauuugau

SEQ ID NO: 3381863 - RNA, 18 nt, Human
ccacuuguagauuugauu

SEQ ID NO: 3381864 - RNA, 17 nt, Human
ccacuuguccaugugaa

SEQ ID NO: 3381865 - RNA, 17 nt, Human
ccacuuuaagagagaaa

SEQ ID NO: 3381866 - RNA, 18 nt, Human
ccacuuuacccaccuaga

SEQ ID NO: 3381867 - RNA, 19 nt, Human
ccacuuuacccaccuagaa

SEQ ID NO: 3381868 - RNA, 13 nt, Human
ccacuuucuagcc

SEQ ID NO: 3381869 - RNA, 18 nt, Human
ccacuuucuagccagagg

SEQ ID NO: 3381870 - RNA, 20 nt, Human
ccacuuucuagccagaggag

SEQ ID NO: 3381871 - RNA, 14 nt, Human
ccacuuugcacauu

SEQ ID NO: 3381872 - RNA, 15 nt, Human
ccacuuugcacauuu

SEQ ID NO: 3381873 - RNA, 16 nt, Human
ccacuuugcuguuccu

SEQ ID NO: 3381874 - RNA, 21 nt, Human
ccacuuuggucccgugcagcu

SEQ ID NO: 3381875 - RNA, 13 nt, Human
ccacuuuuugcag

SEQ ID NO: 3381876 - RNA, 16 nt, Human
ccacuuuuugcagcuu

SEQ ID NO: 3381877 - RNA, 16 nt, Human
ccagaaaaccccagca

SEQ ID NO: 3381878 - RNA, 21 nt, Human
ccagucccccaaccccagccg

SEQ ID NO: 3381879 - RNA, 14 nt, Human
ccagucccccuauc

SEQ ID NO: 3381880 - RNA, 22 nt, Human
ccaguccccgugccccgccucc

SEQ ID NO: 3381881 - RNA, 12 nt, Human
ccagucccuggg

SEQ ID NO: 3381882 - RNA, 22 nt, Human
ccagucccugggggaagcccug

SEQ ID NO: 3381883 - RNA, 23 nt, Human
ccagucccugggggaagcccugg

SEQ ID NO: 3381884 - RNA, 18 nt, Human
ccagucccuguccggaau

SEQ ID NO: 3381885 - RNA, 19 nt, Human
ccaguccuaucugggcuuc

SEQ ID NO: 3381886 - RNA, 16 nt, Human
ccaguccugcccgcca

SEQ ID NO: 3381887 - RNA, 12 nt, Human
ccaguccugcua

SEQ ID NO: 3381888 - RNA, 13 nt, Human
ccaguccugcucu

SEQ ID NO: 3381889 - RNA, 15 nt, Human
ccaguccugcucucu

SEQ ID NO: 3381890 - RNA, 12 nt, Human
ccaguccuggcc

SEQ ID NO: 3381891 - RNA, 18 nt, Human
ccagucgauaucucacuu

SEQ ID NO: 3381892 - RNA, 16 nt, Human
ccagucgcgcugccug

SEQ ID NO: 3381893 - RNA, 17 nt, Human
ccagucgcgcugccugu

SEQ ID NO: 3381894 - RNA, 20 nt, Human
ccagucuccaccaggaaccu

SEQ ID NO: 3381895 - RNA, 21 nt, Human
ccagucuccaccaggaaccuc

SEQ ID NO: 3381896 - RNA, 16 nt, Human
ccagucucucuuaaag

SEQ ID NO: 3381897 - RNA, 12 nt, Human
ccagucucuucu

SEQ ID NO: 3381898 - RNA, 12 nt, Human
ccagucugaagu

SEQ ID NO: 3381899 - RNA, 17 nt, Human
ccagucugaaguuucau

SEQ ID NO: 3381900 - RNA, 18 nt, Human
ccagucugcugcccucca

SEQ ID NO: 3381901 - RNA, 23 nt, Human
ccagucugcugcccuccaucccg

SEQ ID NO: 3381902 - RNA, 18 nt, Human
ccagucuggaaugcagug

SEQ ID NO: 3381903 - RNA, 19 nt, Human
ccagucuggaaugcagugg

SEQ ID NO: 3381904 - RNA, 20 nt, Human
ccagucuggaaugcaguggu

SEQ ID NO: 3381905 - RNA, 13 nt, Human
ccagucuguggau

SEQ ID NO: 3381906 - RNA, 22 nt, Human
ccagucuuccugacacuuuaau

SEQ ID NO: 3381907 - RNA, 12 nt, Human
ccagucuugugu

SEQ ID NO: 3381908 - RNA, 21 nt, Human
ccagucuuuaaaggcccagcc

SEQ ID NO: 3381909 - RNA, 13 nt, Human
ccagucuuuuguc

SEQ ID NO: 3381910 - RNA, 20 nt, Human
ccagugaauucuugaaggaa

SEQ ID NO: 3381911 - RNA, 16 nt, Human
ccagugacacuucaga

SEQ ID NO: 3381912 - RNA, 23 nt, Human
ccagugacacuucagagagcugg

SEQ ID NO: 3381913 - RNA, 17 nt, Human
ccagugacagacaggcu

SEQ ID NO: 3381914 - RNA, 18 nt, Human
ccagugacagucagggaa

SEQ ID NO: 3381915 - RNA, 13 nt, Human
ccagugaccucuc

SEQ ID NO: 3381916 - RNA, 19 nt, Human
ccagugaccucucucucug

SEQ ID NO: 3381917 - RNA, 18 nt, Human
ccagugaccugcugggua

SEQ ID NO: 3381918 - RNA, 20 nt, Human
ccagugaccuggaaggccca

SEQ ID NO: 3381919 - RNA, 13 nt, Human
ccagugacuccag

SEQ ID NO: 3381920 - RNA, 13 nt, Human
ccagugagacagc

SEQ ID NO: 3381921 - RNA, 18 nt, Human
ccagugagacagcucugc

SEQ ID NO: 3381922 - RNA, 13 nt, Human
ccagugagaugca

SEQ ID NO: 3381923 - RNA, 18 nt, Human
ccagugagcacucccaag

SEQ ID NO: 3381924 - RNA, 19 nt, Human
ccagugagcagccuggagc

SEQ ID NO: 3381925 - RNA, 15 nt, Human
ccagugaggcucugc

SEQ ID NO: 3381926 - RNA, 16 nt, Human
ccagugaggcucugcc

SEQ ID NO: 3381927 - RNA, 22 nt, Human
ccagugagggacgucagacuug

SEQ ID NO: 3381928 - RNA, 21 nt, Human
ccagugaugcuaaagguugua

SEQ ID NO: 3381929 - RNA, 14 nt, Human
ccagugcaacacug

SEQ ID NO: 3381930 - RNA, 14 nt, Human
ccagugcacccacu

SEQ ID NO: 3381931 - RNA, 15 nt, Human
ccagugcagaaugua

SEQ ID NO: 3381932 - RNA, 16 nt, Human
ccagugcagaauguaa

SEQ ID NO: 3381933 - RNA, 13 nt, Human
ccagugcaggcug

SEQ ID NO: 3381934 - RNA, 21 nt, Human
ccagugcaggcuggccagccg

SEQ ID NO: 3381935 - RNA, 14 nt, Human
ccagugccaaggac

SEQ ID NO: 3381936 - RNA, 19 nt, Human
ccagugcccaaagucugug

SEQ ID NO: 3381937 - RNA, 18 nt, Human
ccagugcccugagccagg

SEQ ID NO: 3381938 - RNA, 22 nt, Human
ccagugcccuggggcugaucuc

SEQ ID NO: 3381939 - RNA, 14 nt, Human
ccagugccucuccc

SEQ ID NO: 3381940 - RNA, 13 nt, Human
ccagugccugggu

SEQ ID NO: 3381941 - RNA, 18 nt, Human
ccagugccuuaccuccug

SEQ ID NO: 3381942 - RNA, 20 nt, Human
ccagugccuuaccuccugcc

SEQ ID NO: 3381943 - RNA, 15 nt, Human
ccagugcgauucugg

SEQ ID NO: 3381944 - RNA, 22 nt, Human
ccagugcugaauuucccucucu

SEQ ID NO: 3381945 - RNA, 22 nt, Human
ccagugcuguccaugcuucuca

SEQ ID NO: 3381946 - RNA, 19 nt, Human
ccagugcuuagcaaaaaau

SEQ ID NO: 3381947 - RNA, 17 nt, Human
ccagugcuuuauguugu

SEQ ID NO: 3381948 - RNA, 19 nt, Human
ccaguggaugccacagccc

SEQ ID NO: 3381949 - RNA, 16 nt, Human
ccaguggcagggcaca

SEQ ID NO: 3381950 - RNA, 15 nt, Human
ccaguggccacucag

SEQ ID NO: 3381951 - RNA, 21 nt, Human
ccaguggccacucagcuuccu

SEQ ID NO: 3381952 - RNA, 19 nt, Human
ccaguggccuuaccccugc

SEQ ID NO: 3381953 - RNA, 22 nt, Human
ccaguggccuuaccccugccuu

SEQ ID NO: 3381954 - RNA, 22 nt, Human
ccaguggcggaagugaccgcac

SEQ ID NO: 3381955 - RNA, 13 nt, Human
ccaguggcugcug

SEQ ID NO: 3381956 - RNA, 14 nt, Human
ccaguggcugcugc

SEQ ID NO: 3381957 - RNA, 17 nt, Human
ccaguggcuguucugga

SEQ ID NO: 3381958 - RNA, 11 nt, Human
ccagugggagg

SEQ ID NO: 3381959 - RNA, 13 nt, Human
ccagugggagggg

SEQ ID NO: 3381960 - RNA, 14 nt, Human
ccagugggaggggc

SEQ ID NO: 3381961 - RNA, 17 nt, Human
ccagugggaggggcagg

SEQ ID NO: 3381962 - RNA, 18 nt, Human
ccagugggaggggcaggc

SEQ ID NO: 3381963 - RNA, 22 nt, Human
ccagugggaggggcaggcugac

SEQ ID NO: 3381964 - RNA, 13 nt, Human
ccaguggggccug

SEQ ID NO: 3381965 - RNA, 18 nt, Human
ccaguggggccuguggaa

SEQ ID NO: 3381966 - RNA, 14 nt, Human
ccaguggugccuug

SEQ ID NO: 3381967 - RNA, 22 nt, Human
ccagugguuccuaauccucuag

SEQ ID NO: 3381968 - RNA, 22 nt, Human
ccagugucaaguugugcuuguu

SEQ ID NO: 3381969 - RNA, 20 nt, Human
ccagugucauuucucaucca

SEQ ID NO: 3381970 - RNA, 19 nt, Human
ccaguguccugagccccag

SEQ ID NO: 3381971 - RNA, 22 nt, Human
ccaguguccugagccccaggga

SEQ ID NO: 3381972 - RNA, 23 nt, Human
ccaguguccugagccccagggag

SEQ ID NO: 3381973 - RNA, 18 nt, Human
ccaguguccugagcucag

SEQ ID NO: 3381974 - RNA, 20 nt, Human
ccaguguccugagcucagcg

SEQ ID NO: 3381975 - RNA, 16 nt, Human
ccaguguccuuagaac

SEQ ID NO: 3381976 - RNA, 15 nt, Human
ccagugucugucccg

SEQ ID NO: 3381977 - RNA, 18 nt, Human
ccagugucugucccgggg

SEQ ID NO: 3381978 - RNA, 21 nt, Human
ccagugucugucccggggucc

SEQ ID NO: 3381979 - RNA, 15 nt, Human
ccagugucuuccugu

SEQ ID NO: 3381980 - RNA, 12 nt, Human
ccagugucuuuc

SEQ ID NO: 3381981 - RNA, 15 nt, Human
ccagugugaucccaa

SEQ ID NO: 3381982 - RNA, 22 nt, Human
ccagugugaucccaagugccag

SEQ ID NO: 3381983 - RNA, 22 nt, Human
ccagugugggaaugcggcaaga

SEQ ID NO: 3381984 - RNA, 16 nt, Human
ccaguguguggcuuuc

SEQ ID NO: 3381985 - RNA, 22 nt, Human
ccaguguguggcuuucagagcc

SEQ ID NO: 3381986 - RNA, 23 nt, Human
ccaguguguggcuuucagagccu

SEQ ID NO: 3381987 - RNA, 19 nt, Human
ccaguguugccuaaguauu

SEQ ID NO: 3381988 - RNA, 22 nt, Human
ccaguguuguggauuuaacaga

SEQ ID NO: 3381989 - RNA, 20 nt, Human
ccaguguuguuuguaaauaa

SEQ ID NO: 3381990 - RNA, 22 nt, Human
ccaguguuguuuguaaauaaga

SEQ ID NO: 3381991 - RNA, 13 nt, Human
ccaguguuuaaaa

SEQ ID NO: 3381992 - RNA, 21 nt, Human
ccaguguuugggaugaccagg

SEQ ID NO: 3381993 - RNA, 17 nt, Human
aaaggagagcuagcagc

SEQ ID NO: 3381994 - RNA, 21 nt, Human
aaaggagagcuagcagcaggg

SEQ ID NO: 3381995 - RNA, 14 nt, Human
aaaggagauaaauc

SEQ ID NO: 3381996 - RNA, 15 nt, Human
aaaggagauaaaucu

SEQ ID NO: 3381997 - RNA, 23 nt, Human
aaaggagccugugaacccaggac

SEQ ID NO: 3381998 - RNA, 14 nt, Human
aaaggaggcuggca

SEQ ID NO: 3381999 - RNA, 11 nt, Human
aaaggaguuua

SEQ ID NO: 3382000 - RNA, 15 nt, Human
aaaggaguuuauguu

SEQ ID NO: 3382001 - RNA, 19 nt, Human
aaaggauaaacuuuuagaa

SEQ ID NO: 3382002 - RNA, 14 nt, Human
aaaggauaaagaag

SEQ ID NO: 3382003 - RNA, 16 nt, Human
aaaggauacuguaaca

SEQ ID NO: 3382004 - RNA, 18 nt, Human
aaaggauacuguaacacu

SEQ ID NO: 3382005 - RNA, 15 nt, Human
aaaggauacuuauuu

SEQ ID NO: 3382006 - RNA, 21 nt, Human
aaaggauagaucaaagucaaa

SEQ ID NO: 3382007 - RNA, 21 nt, Human
aaaggauaguaagcauagaaa

SEQ ID NO: 3382008 - RNA, 18 nt, Human
aaaggauaguauuuuuau

SEQ ID NO: 3382009 - RNA, 16 nt, Human
aaaggauauuuaagaa

SEQ ID NO: 3382010 - RNA, 12 nt, Human
aaaggauauuuu

SEQ ID NO: 3382011 - RNA, 19 nt, Human
aaaggaucuuuguggccaa

SEQ ID NO: 3382012 - RNA, 20 nt, Human
aaaggaugaucaaaaauaau

SEQ ID NO: 3382013 - RNA, 14 nt, Human
aaaggcaagcacuu

SEQ ID NO: 3382014 - RNA, 17 nt, Human
aaaggcaccaucuaaua

SEQ ID NO: 3382015 - RNA, 17 nt, Human
aaaggcaccuauaaaac

SEQ ID NO: 3382016 - RNA, 14 nt, Human
aaaggcagaagcaa

SEQ ID NO: 3382017 - RNA, 19 nt, Human
aaaggcagaagcaacccaa

SEQ ID NO: 3382018 - RNA, 22 nt, Human
aaaggcagcuguugucucuucu

SEQ ID NO: 3382019 - RNA, 21 nt, Human
aaaggcaggccuauuucauca

SEQ ID NO: 3382020 - RNA, 16 nt, Human
aaaggcaguauuuugu

SEQ ID NO: 3382021 - RNA, 19 nt, Human
aaaggcaguggggcugggg

SEQ ID NO: 3382022 - RNA, 15 nt, Human
aaaggcaguuaccau

SEQ ID NO: 3382023 - RNA, 13 nt, Human
aaaggcaguuuuc

SEQ ID NO: 3382024 - RNA, 14 nt, Human
aaaggcaguuuucu

SEQ ID NO: 3382025 - RNA, 18 nt, Human
aaaggcauucucugaaga

SEQ ID NO: 3382026 - RNA, 20 nt, Human
aaaggccaaaccucuguuca

SEQ ID NO: 3382027 - RNA, 14 nt, Human
aaaggccauggaga

SEQ ID NO: 3382028 - RNA, 19 nt, Human
aaaggccauggagagcugg

SEQ ID NO: 3382029 - RNA, 20 nt, Human
aaaggcccagccaccgaagc

SEQ ID NO: 3382030 - RNA, 13 nt, Human
aaaggcccagccc

SEQ ID NO: 3382031 - RNA, 10 nt, Human
aaaggccugg

SEQ ID NO: 3382032 - RNA, 12 nt, Human
aaaggccugggg

SEQ ID NO: 3382033 - RNA, 21 nt, Human
aaaggcgcagugcuucucuac

SEQ ID NO: 3382034 - RNA, 17 nt, Human
aaaggcuaccuuauugu

SEQ ID NO: 3382035 - RNA, 19 nt, Human
aaaggcucagucucaggag

SEQ ID NO: 3382036 - RNA, 20 nt, Human
aaaggcuccaggagcagcca

SEQ ID NO: 3382037 - RNA, 17 nt, Human
aaaggcucgauuuugua

SEQ ID NO: 3382038 - RNA, 20 nt, Human
aaaggcuguauucagcaagg

SEQ ID NO: 3382039 - RNA, 15 nt, Human
aaaggcuguuaaaua

SEQ ID NO: 3382040 - RNA, 19 nt, Human
aaaggcuguuaaauacagg

SEQ ID NO: 3382041 - RNA, 16 nt, Human
aaaggcuugaagcugu

SEQ ID NO: 3382042 - RNA, 17 nt, Human
aaaggcuugaagcugug

SEQ ID NO: 3382043 - RNA, 14 nt, Human
aaagggaaacuauu

SEQ ID NO: 3382044 - RNA, 21 nt, Human
aaagggaacugaacauuccag

SEQ ID NO: 3382045 - RNA, 14 nt, Human
aaagggaauuauga

SEQ ID NO: 3382046 - RNA, 16 nt, Human
aaagggacugagaaau

SEQ ID NO: 3382047 - RNA, 22 nt, Human
aaagggacuuggaagcuccgcu

SEQ ID NO: 3382048 - RNA, 17 nt, Human
aaagggagggcucugag

SEQ ID NO: 3382049 - RNA, 17 nt, Human
aaagggagucugccagg

SEQ ID NO: 3382050 - RNA, 15 nt, Human
aaagggaguuuuuga

SEQ ID NO: 3382051 - RNA, 13 nt, Human
aaagggauauuuu

SEQ ID NO: 3382052 - RNA, 20 nt, Human
aaagggaucaucaugcagcu

SEQ ID NO: 3382053 - RNA, 20 nt, Human
aaagggauggcaagaugugg

SEQ ID NO: 3382054 - RNA, 18 nt, Human
aaagggcacagcaucugu

SEQ ID NO: 3382055 - RNA, 23 nt, Human
aaagggcccacagugacuuuugc

SEQ ID NO: 3382056 - RNA, 17 nt, Human
aaagggcccuccuuccu

SEQ ID NO: 3382057 - RNA, 19 nt, Human
aaagggcccuccuuccuaa

SEQ ID NO: 3382058 - RNA, 16 nt, Human
aaaggggacaggccuc

SEQ ID NO: 3382059 - RNA, 19 nt, Human
aaaggggaucauaaaguua

SEQ ID NO: 3382060 - RNA, 18 nt, Human
aaaggggcagaaaaacuc

SEQ ID NO: 3382061 - RNA, 18 nt, Human
aaaggggggagggggagg

SEQ ID NO: 3382062 - RNA, 21 nt, Human
aaagggguaggguuuaaagau

SEQ ID NO: 3382063 - RNA, 18 nt, Human
aaaggggucccauagagg

SEQ ID NO: 3382064 - RNA, 15 nt, Human
aaaggggugcuuuua

SEQ ID NO: 3382065 - RNA, 20 nt, Human
aaagggguuggggugacagu

SEQ ID NO: 3382066 - RNA, 22 nt, Human
aaagggucaaugcuauuuuugu

SEQ ID NO: 3382067 - RNA, 22 nt, Human
aaagggucuccgaaaugcuguc

SEQ ID NO: 3382068 - RNA, 17 nt, Human
aaagggugaaaauuauu

SEQ ID NO: 3382069 - RNA, 19 nt, Human
aaagggugaagcuauuuau

SEQ ID NO: 3382070 - RNA, 21 nt, Human
aaagggugaagcuauuuaucu

SEQ ID NO: 3382071 - RNA, 17 nt, Human
aaaggguucuguaaaau

SEQ ID NO: 3382072 - RNA, 16 nt, Human
aaagguaaugugugga

SEQ ID NO: 3382073 - RNA, 16 nt, Human
aaagguacuuugcagg

SEQ ID NO: 3382074 - RNA, 15 nt, Human
aaagguagacuuuua

SEQ ID NO: 3382075 - RNA, 13 nt, Human
aaaggucuaugca

SEQ ID NO: 3382076 - RNA, 18 nt, Human
aaaggucuuuuuaaacca

SEQ ID NO: 3382077 - RNA, 15 nt, Human
aaaggugaaggaaua

SEQ ID NO: 3382078 - RNA, 16 nt, Human
aaaggugaaggaauau

SEQ ID NO: 3382079 - RNA, 21 nt, Human
aaaggugaaggaauauauggc

SEQ ID NO: 3382080 - RNA, 24 nt, Human
aaaggugaaggaauauauggcaga

SEQ ID NO: 3382081 - RNA, 23 nt, Human
aaaggugaguuugagcugccuuc

SEQ ID NO: 3382082 - RNA, 17 nt, Human
aaaggugauaaaaucau

SEQ ID NO: 3382083 - RNA, 18 nt, Human
aaaggugauaaaaucaua

SEQ ID NO: 3382084 - RNA, 19 nt, Human
ccagccucaguccuccccu

SEQ ID NO: 3382085 - RNA, 21 nt, Human
ccagccucaguccuccccuca

SEQ ID NO: 3382086 - RNA, 15 nt, Human
ccagccucccugaag

SEQ ID NO: 3382087 - RNA, 18 nt, Human
ccagccuccgagagggag

SEQ ID NO: 3382088 - RNA, 19 nt, Human
ccagccuccgagagggaga

SEQ ID NO: 3382089 - RNA, 19 nt, Human
ccagccuccguauuucaga

SEQ ID NO: 3382090 - RNA, 16 nt, Human
ccagccuccucuggac

SEQ ID NO: 3382091 - RNA, 19 nt, Human
ccagccucguuggaagagg

SEQ ID NO: 3382092 - RNA, 17 nt, Human
ccagccucuagggaccc

SEQ ID NO: 3382093 - RNA, 12 nt, Human
ccagccucucuu

SEQ ID NO: 3382094 - RNA, 15 nt, Human
ccagccucucuuccu

SEQ ID NO: 3382095 - RNA, 21 nt, Human
ccagccucucuuccuauccca

SEQ ID NO: 3382096 - RNA, 22 nt, Human
ccagccucucuugguuuccuuc

SEQ ID NO: 3382097 - RNA, 15 nt, Human
ccagccucuggcauu

SEQ ID NO: 3382098 - RNA, 11 nt, Human
ccagccucugu

SEQ ID NO: 3382099 - RNA, 15 nt, Human
ccagccucuuucccu

SEQ ID NO: 3382100 - RNA, 18 nt, Human
ccagccugaacagaagcu

SEQ ID NO: 3382101 - RNA, 19 nt, Human
ccagccugcccaagcccag

SEQ ID NO: 3382102 - RNA, 22 nt, Human
ccagccugcccaagcccaggcc

SEQ ID NO: 3382103 - RNA, 20 nt, Human
ccagccugccuggcaggcug

SEQ ID NO: 3382104 - RNA, 21 nt, Human
ccagccugccuggcaggcugu

SEQ ID NO: 3382105 - RNA, 21 nt, Human
ccagccugcgccugcugcaug

SEQ ID NO: 3382106 - RNA, 12 nt, Human
ccagccugcuag

SEQ ID NO: 3382107 - RNA, 13 nt, Human
ccagccugcuagc

SEQ ID NO: 3382108 - RNA, 18 nt, Human
ccagccuggacccccagc

SEQ ID NO: 3382109 - RNA, 15 nt, Human
ccagccuggaugcca

SEQ ID NO: 3382110 - RNA, 10 nt, Human
ccagccuggc

SEQ ID NO: 3382111 - RNA, 16 nt, Human
ccagccuggccacgca

SEQ ID NO: 3382112 - RNA, 17 nt, Human
ccagccuggcccagcuc

SEQ ID NO: 3382113 - RNA, 18 nt, Human
ccagccuggcccagcucc

SEQ ID NO: 3382114 - RNA, 13 nt, Human
ccagccuggccuc

SEQ ID NO: 3382115 - RNA, 21 nt, Human
ccagccuggcucccacaggca

SEQ ID NO: 3382116 - RNA, 20 nt, Human
ccagccuggcugggacuggg

SEQ ID NO: 3382117 - RNA, 20 nt, Human
ccagccugggaaagccccug

SEQ ID NO: 3382118 - RNA, 20 nt, Human
ccagccugggaggcacagca

SEQ ID NO: 3382119 - RNA, 11 nt, Human
ccagccugggc

SEQ ID NO: 3382120 - RNA, 18 nt, Human
ccagccugggcaacaaag

SEQ ID NO: 3382121 - RNA, 12 nt, Human
ccagccugggcc

SEQ ID NO: 3382122 - RNA, 18 nt, Human
ccagccugggcccaucuc

SEQ ID NO: 3382123 - RNA, 13 nt, Human
ccagccugggccu

SEQ ID NO: 3382124 - RNA, 19 nt, Human
ccagccugggccuauggag

SEQ ID NO: 3382125 - RNA, 14 nt, Human
ccagccuggggccu

SEQ ID NO: 3382126 - RNA, 13 nt, Human
ccagccugggguc

SEQ ID NO: 3382127 - RNA, 13 nt, Human
ccagccuggguga

SEQ ID NO: 3382128 - RNA, 18 nt, Human
ccagccugucagauccag

SEQ ID NO: 3382129 - RNA, 19 nt, Human
ccagccugucccauggaca

SEQ ID NO: 3382130 - RNA, 14 nt, Human
ccagccuguuggac

SEQ ID NO: 3382131 - RNA, 16 nt, Human
ccagccuuccucugca

SEQ ID NO: 3382132 - RNA, 22 nt, Human
ccagccuuccucugcagcugac

SEQ ID NO: 3382133 - RNA, 22 nt, Human
ccagccuucuuccaucccagga

SEQ ID NO: 3382134 - RNA, 18 nt, Human
ccagccuucuuugcuugc

SEQ ID NO: 3382135 - RNA, 19 nt, Human
ccagccuugaccauucucc

SEQ ID NO: 3382136 - RNA, 20 nt, Human
ccagccuugagcccuggcug

SEQ ID NO: 3382137 - RNA, 15 nt, Human
ccagccuuucuccca

SEQ ID NO: 3382138 - RNA, 16 nt, Human
cagacuacuauuuucu

SEQ ID NO: 3382139 - RNA, 21 nt, Human
cagacuagauggaccugccug

SEQ ID NO: 3382140 - RNA, 19 nt, Human
cagacucacaaccugaacc

SEQ ID NO: 3382141 - RNA, 20 nt, Human
cagacucacaaccugaaccu

SEQ ID NO: 3382142 - RNA, 21 nt, Human
cagacucacaaccugaaccua

SEQ ID NO: 3382143 - RNA, 16 nt, Human
cagacucagagcucuc

SEQ ID NO: 3382144 - RNA, 17 nt, Human
cagacucagagcucucu

SEQ ID NO: 3382145 - RNA, 18 nt, Human
cagacucauacagaaggu

SEQ ID NO: 3382146 - RNA, 19 nt, Human
cagacucauacagaaggug

SEQ ID NO: 3382147 - RNA, 21 nt, Human
cagacucauacagaagguggg

SEQ ID NO: 3382148 - RNA, 13 nt, Human
cagacucauccug

SEQ ID NO: 3382149 - RNA, 23 nt, Human
cagacuccugacugucucccggg

SEQ ID NO: 3382150 - RNA, 13 nt, Human
cagacuccugagg

SEQ ID NO: 3382151 - RNA, 16 nt, Human
cagacuccugaggaca

SEQ ID NO: 3382152 - RNA, 19 nt, Human
cagacucggaaucuauuuu

SEQ ID NO: 3382153 - RNA, 23 nt, Human
cagacucggaaucuauuuucuca

SEQ ID NO: 3382154 - RNA, 14 nt, Human
cagacucuaagaaa

SEQ ID NO: 3382155 - RNA, 19 nt, Human
cagacucuacagaggccau

SEQ ID NO: 3382156 - RNA, 15 nt, Human
cagacucucagccca

SEQ ID NO: 3382157 - RNA, 17 nt, Human
cagacucucugugaacc

SEQ ID NO: 3382158 - RNA, 15 nt, Human
cagacucuuuaugcu

SEQ ID NO: 3382159 - RNA, 18 nt, Human
cagacugcacccaggagg

SEQ ID NO: 3382160 - RNA, 12 nt, Human
cagacugcaggu

SEQ ID NO: 3382161 - RNA, 18 nt, Human
cagacugcgauuuguccc

SEQ ID NO: 3382162 - RNA, 13 nt, Human
cagacugcuagug

SEQ ID NO: 3382163 - RNA, 13 nt, Human
cagacugcuggga

SEQ ID NO: 3382164 - RNA, 16 nt, Human
cagacugcugggacug

SEQ ID NO: 3382165 - RNA, 20 nt, Human
cagacugcuuccaauuuucu

SEQ ID NO: 3382166 - RNA, 13 nt, Human
cagacuggaagca

SEQ ID NO: 3382167 - RNA, 12 nt, Human
cagacuggaggg

SEQ ID NO: 3382168 - RNA, 19 nt, Human
cagacuggauaguccgucu

SEQ ID NO: 3382169 - RNA, 17 nt, Human
cagacuggcacaguuuu

SEQ ID NO: 3382170 - RNA, 18 nt, Human
cagacuggcacaguuuuc

SEQ ID NO: 3382171 - RNA, 22 nt, Human
cagacuggcacaguuuucugag

SEQ ID NO: 3382172 - RNA, 14 nt, Human
cagacuggggcauc

SEQ ID NO: 3382173 - RNA, 22 nt, Human
cagacuggggcauccugugcca

SEQ ID NO: 3382174 - RNA, 15 nt, Human
cagacuggguuucua

SEQ ID NO: 3382175 - RNA, 20 nt, Human
cagacuggguuucuagccca

SEQ ID NO: 3382176 - RNA, 12 nt, Human
cagacuguguau

SEQ ID NO: 3382177 - RNA, 16 nt, Human
cagacuguuaauuaua

SEQ ID NO: 3382178 - RNA, 14 nt, Human
cagacuuaccagga

SEQ ID NO: 3382179 - RNA, 22 nt, Human
cagacuucccacggcuccucga

SEQ ID NO: 3382180 - RNA, 14 nt, Human
cagacuucccagcu

SEQ ID NO: 3382181 - RNA, 15 nt, Human
cagacuucccagcua

SEQ ID NO: 3382182 - RNA, 21 nt, Human
cagacuucccugaauguauug

SEQ ID NO: 3382183 - RNA, 18 nt, Human
cagacuugccaugugacu

SEQ ID NO: 3382184 - RNA, 15 nt, Human
cagacuuguauauuc

SEQ ID NO: 3382185 - RNA, 16 nt, Human
cagacuuguauauucu

SEQ ID NO: 3382186 - RNA, 13 nt, Human
cagacuugucaag

SEQ ID NO: 3382187 - RNA, 19 nt, Human
cagacuuuggaaaaugcau

SEQ ID NO: 3382188 - RNA, 12 nt, Human
cagagaaaaagg

SEQ ID NO: 3382189 - RNA, 18 nt, Human
cagagaaaaaugcucccc

SEQ ID NO: 3382190 - RNA, 21 nt, Human
cagagaaagaagagacaggag

SEQ ID NO: 3382191 - RNA, 22 nt, Human
cagagaaagaagagacaggagg

SEQ ID NO: 3382192 - RNA, 15 nt, Human
cagagaaagaggaag

SEQ ID NO: 3382193 - RNA, 17 nt, Human
cagagaaagaggaagcu

SEQ ID NO: 3382194 - RNA, 15 nt, Human
cagagaaagcgcaga

SEQ ID NO: 3382195 - RNA, 16 nt, Human
cagagaaagcgcagau

SEQ ID NO: 3382196 - RNA, 23 nt, Human
cagagaaaguacuucuccacccu

SEQ ID NO: 3382197 - RNA, 16 nt, Human
cagagaaaugucuguc

SEQ ID NO: 3382198 - RNA, 16 nt, Human
cagagaacccagccca

SEQ ID NO: 3382199 - RNA, 18 nt, Human
cagagaacuaacacuauu

SEQ ID NO: 3382200 - RNA, 22 nt, Human
cagagaacuaacacuauuuuau

SEQ ID NO: 3382201 - RNA, 23 nt, Human
cagagaacuaacacuauuuuaug

SEQ ID NO: 3382202 - RNA, 14 nt, Human
cagagaagaaagaa

SEQ ID NO: 3382203 - RNA, 11 nt, Human
cagagaagcca

SEQ ID NO: 3382204 - RNA, 20 nt, Human
cagagaagccaaaagauugg

SEQ ID NO: 3382205 - RNA, 17 nt, Human
cagagaagccagcuugu

SEQ ID NO: 3382206 - RNA, 19 nt, Human
cagagaagccagcuuguuu

SEQ ID NO: 3382207 - RNA, 21 nt, Human
cagagaagccagcuuguuuac

SEQ ID NO: 3382208 - RNA, 15 nt, Human
cagagaagccccuuc

SEQ ID NO: 3382209 - RNA, 24 nt, Human
cagagaagccccuuccccauggga

SEQ ID NO: 3382210 - RNA, 14 nt, Human
cagagaagccuuca

SEQ ID NO: 3382211 - RNA, 16 nt, Human
cagagaagccuucaag

SEQ ID NO: 3382212 - RNA, 19 nt, Human
cagagaagccuucaagcuc

SEQ ID NO: 3382213 - RNA, 20 nt, Human
cagagaagccuucaagcucu

SEQ ID NO: 3382214 - RNA, 14 nt, Human
cagagaaggaaugu

SEQ ID NO: 3382215 - RNA, 14 nt, Human
cagagaaggcagga

SEQ ID NO: 3382216 - RNA, 17 nt, Human
cagagaaggcaggaaug

SEQ ID NO: 3382217 - RNA, 11 nt, Human
cagagaagggc

SEQ ID NO: 3382218 - RNA, 21 nt, Human
cagagaagggcuccugcaggc

SEQ ID NO: 3382219 - RNA, 17 nt, Human
cagagaagugacaggga

SEQ ID NO: 3382220 - RNA, 18 nt, Human
cagagaagugacagggaa

SEQ ID NO: 3382221 - RNA, 20 nt, Human
cagagaagugacagggaagc

SEQ ID NO: 3382222 - RNA, 11 nt, Human
cagagaaguuc

SEQ ID NO: 3382223 - RNA, 13 nt, Human
cagagaauuucua

SEQ ID NO: 3382224 - RNA, 22 nt, Human
cagagaauuucuaccauuucag

SEQ ID NO: 3382225 - RNA, 14 nt, Human
cagagacaacaggu

SEQ ID NO: 3382226 - RNA, 15 nt, Human
cagagacaaguaauu

SEQ ID NO: 3382227 - RNA, 15 nt, Human
cagagacacaagccu

SEQ ID NO: 3382228 - RNA, 17 nt, Human
cagagacacaagccuuc

SEQ ID NO: 3382229 - RNA, 16 nt, Human
cagagacagagaggac

SEQ ID NO: 3382230 - RNA, 12 nt, Human
cagagacagaua

SEQ ID NO: 3382231 - RNA, 17 nt, Human
cagagacauacuugaag

SEQ ID NO: 3382232 - RNA, 23 nt, Human
cagagacauacuugaagggccag

SEQ ID NO: 3382233 - RNA, 18 nt, Human
cagagaccaggcuguguc

SEQ ID NO: 3382234 - RNA, 14 nt, Human
cagagaccaucccu

SEQ ID NO: 3382235 - RNA, 19 nt, Human
cagagaccaucccugaagg

SEQ ID NO: 3382236 - RNA, 15 nt, Human
cagagacccucugcc

SEQ ID NO: 3382237 - RNA, 19 nt, Human
cagagaccguccucacccc

SEQ ID NO: 3382238 - RNA, 17 nt, Human
cagagaccucccuguuc

SEQ ID NO: 3382239 - RNA, 22 nt, Human
cagagacucagggccccagcac

SEQ ID NO: 3382240 - RNA, 15 nt, Human
cagagacuccugcag

SEQ ID NO: 3382241 - RNA, 17 nt, Human
cagagacuccugcaggc

SEQ ID NO: 3382242 - RNA, 14 nt, Human
cagagacugcugug

SEQ ID NO: 3382243 - RNA, 21 nt, Human
cagagacugucccugaaaccu

SEQ ID NO: 3382244 - RNA, 15 nt, Human
cagagacuugggaca

SEQ ID NO: 3382245 - RNA, 18 nt, Human
cagagacuugggacauug

SEQ ID NO: 3382246 - RNA, 20 nt, Human
cagagacuugggacauugcc

SEQ ID NO: 3382247 - RNA, 22 nt, Human
cagagagaagagccccacucuc

SEQ ID NO: 3382248 - RNA, 18 nt, Human
cccacccaagcuuggcag

SEQ ID NO: 3382249 - RNA, 20 nt, Human
cccacccaagggccuggccu

SEQ ID NO: 3382250 - RNA, 13 nt, Human
cccacccaggcca

SEQ ID NO: 3382251 - RNA, 17 nt, Human
cccacccaggccaggca

SEQ ID NO: 3382252 - RNA, 21 nt, Human
cccacccaggccaggcaugug

SEQ ID NO: 3382253 - RNA, 13 nt, Human
cccacccagucuc

SEQ ID NO: 3382254 - RNA, 16 nt, Human
cccacccagucucugc

SEQ ID NO: 3382255 - RNA, 18 nt, Human
cccaccccaaccugcucu

SEQ ID NO: 3382256 - RNA, 22 nt, Human
cccaccccaaccugcucuccuc

SEQ ID NO: 3382257 - RNA, 17 nt, Human
cccaccccacccccacc

SEQ ID NO: 3382258 - RNA, 16 nt, Human
cccaccccaccugcag

SEQ ID NO: 3382259 - RNA, 13 nt, Human
cccaccccauccu

SEQ ID NO: 3382260 - RNA, 15 nt, Human
cccacccccacccaa

SEQ ID NO: 3382261 - RNA, 17 nt, Human
cccacccccacccaagg

SEQ ID NO: 3382262 - RNA, 16 nt, Human
cccacccccagccccg

SEQ ID NO: 3382263 - RNA, 15 nt, Human
cccacccccucaagc

SEQ ID NO: 3382264 - RNA, 19 nt, Human
cccacccccuccccagggg

SEQ ID NO: 3382265 - RNA, 18 nt, Human
cccacccccugcccugca

SEQ ID NO: 3382266 - RNA, 22 nt, Human
cccacccccuucucugcuccac

SEQ ID NO: 3382267 - RNA, 20 nt, Human
cccaccccggggacccugug

SEQ ID NO: 3382268 - RNA, 13 nt, Human
cccaccccucccu

SEQ ID NO: 3382269 - RNA, 11 nt, Human
cccaccccugc

SEQ ID NO: 3382270 - RNA, 17 nt, Human
cccaccccuuccccacu

SEQ ID NO: 3382271 - RNA, 15 nt, Human
cccacccgaugcugc

SEQ ID NO: 3382272 - RNA, 14 nt, Human
cccacccucccugg

SEQ ID NO: 3382273 - RNA, 14 nt, Human
cccacccuccuguc

SEQ ID NO: 3382274 - RNA, 15 nt, Human
cccacccucuuccua

SEQ ID NO: 3382275 - RNA, 12 nt, Human
cccacccugcug

SEQ ID NO: 3382276 - RNA, 17 nt, Human
cccacccugcugcuggu

SEQ ID NO: 3382277 - RNA, 18 nt, Human
cccacccuguuccugcug

SEQ ID NO: 3382278 - RNA, 20 nt, Human
cccacccuguuccugcugcu

SEQ ID NO: 3382279 - RNA, 19 nt, Human
cccaccgcagacaggacca

SEQ ID NO: 3382280 - RNA, 14 nt, Human
cccaccgcaugccc

SEQ ID NO: 3382281 - RNA, 22 nt, Human
cccaccgcaugcccccucgugc

SEQ ID NO: 3382282 - RNA, 23 nt, Human
cccaccgggccacuccuuccugc

SEQ ID NO: 3382283 - RNA, 19 nt, Human
cuagugggguuuccuggca

SEQ ID NO: 3382284 - RNA, 13 nt, Human
cuaguguagaauu

SEQ ID NO: 3382285 - RNA, 18 nt, Human
cuaguguaucaaaaugcu

SEQ ID NO: 3382286 - RNA, 19 nt, Human
cuagugugguguuuccugg

SEQ ID NO: 3382287 - RNA, 22 nt, Human
cuagugugguguuuccuggcac

SEQ ID NO: 3382288 - RNA, 15 nt, Human
cuaguguucugucua

SEQ ID NO: 3382289 - RNA, 14 nt, Human
cuaguguugcuugg

SEQ ID NO: 3382290 - RNA, 22 nt, Human
cuaguguuuucaauuuuaaaca

SEQ ID NO: 3382291 - RNA, 18 nt, Human
cuaguuaaagaaaggaaa

SEQ ID NO: 3382292 - RNA, 18 nt, Human
cuaguuacugugguaugg

SEQ ID NO: 3382293 - RNA, 23 nt, Human
cuaguuauacuuauuuguauaug

SEQ ID NO: 3382294 - RNA, 20 nt, Human
cuaguuauuuacaggaacuu

SEQ ID NO: 3382295 - RNA, 13 nt, Human
cuaguuauuuauu

SEQ ID NO: 3382296 - RNA, 19 nt, Human
cuaguuauuuauucuggga

SEQ ID NO: 3382297 - RNA, 18 nt, Human
cuaguucauccaauccuc

SEQ ID NO: 3382298 - RNA, 19 nt, Human
cuaguucauccaauccuca

SEQ ID NO: 3382299 - RNA, 16 nt, Human
cuaguucaucccuucu

SEQ ID NO: 3382300 - RNA, 23 nt, Human
cuaguucaucccuucucuuccag

SEQ ID NO: 3382301 - RNA, 14 nt, Human
cuaguuccaccauc

SEQ ID NO: 3382302 - RNA, 18 nt, Human
cuaguuccccuguuuauu

SEQ ID NO: 3382303 - RNA, 21 nt, Human
cuaguuccccuguuuauucau

SEQ ID NO: 3382304 - RNA, 18 nt, Human
cuaguucccucugcucag

SEQ ID NO: 3382305 - RNA, 22 nt, Human
cuaguucccucugcucagccaa

SEQ ID NO: 3382306 - RNA, 20 nt, Human
cuaguuccugaugacccagg

SEQ ID NO: 3382307 - RNA, 22 nt, Human
cuaguuccugaugacccaggcu

SEQ ID NO: 3382308 - RNA, 15 nt, Human
cuaguucuagaaaaa

SEQ ID NO: 3382309 - RNA, 16 nt, Human
cuaguucugccaggag

SEQ ID NO: 3382310 - RNA, 17 nt, Human
cuaguucuguagaaaug

SEQ ID NO: 3382311 - RNA, 21 nt, Human
cuaguucuucaucccacucca

SEQ ID NO: 3382312 - RNA, 13 nt, Human
cuaguugaauacu

SEQ ID NO: 3382313 - RNA, 20 nt, Human
cuaguugaauacuugaacca

SEQ ID NO: 3382314 - RNA, 20 nt, Human
cuaguugccaaaucuggcuc

SEQ ID NO: 3382315 - RNA, 18 nt, Human
cuaguuggugagaaaccu

SEQ ID NO: 3382316 - RNA, 19 nt, Human
cuaguuggugagaaaccug

SEQ ID NO: 3382317 - RNA, 23 nt, Human
cuaguuguuugauucagacagcu

SEQ ID NO: 3382318 - RNA, 16 nt, Human
cuaguuuacuguuuug

SEQ ID NO: 3382319 - RNA, 18 nt, Human
cuaguuuccucuccuucg

SEQ ID NO: 3382320 - RNA, 13 nt, Human
cuaguuugauuaa

SEQ ID NO: 3382321 - RNA, 18 nt, Human
cuaguuugggaggagcag

SEQ ID NO: 3382322 - RNA, 23 nt, Human
cuaguuuuaaaaaaauaaaacau

SEQ ID NO: 3382323 - RNA, 20 nt, Human
cuaguuuuaguuuucucuua

SEQ ID NO: 3382324 - RNA, 22 nt, Human
cuaguuuucaguuuguauauac

SEQ ID NO: 3382325 - RNA, 18 nt, Human
cuaguuuucuuuccuccu

SEQ ID NO: 3382326 - RNA, 21 nt, Human
cuaguuuucuuuccuccuuuc

SEQ ID NO: 3382327 - RNA, 13 nt, Human
cuauaaaacaggu

SEQ ID NO: 3382328 - RNA, 15 nt, Human
cuauaaaagaaacac

SEQ ID NO: 3382329 - RNA, 11 nt, Human
cuauaaaauag

SEQ ID NO: 3382330 - RNA, 18 nt, Human
cuauaaaaugucuucaag

SEQ ID NO: 3382331 - RNA, 19 nt, Human
cuauaaaaugucuucaagg

SEQ ID NO: 3382332 - RNA, 23 nt, Human
cuauaaagaagaacuugcaugga

SEQ ID NO: 3382333 - RNA, 13 nt, Human
cuauaaagagaag

SEQ ID NO: 3382334 - RNA, 15 nt, Human
cuauaaagcauuuaa

SEQ ID NO: 3382335 - RNA, 16 nt, Human
cuauaaaguaaagcua

SEQ ID NO: 3382336 - RNA, 14 nt, Human
cuauaaauguugcu

SEQ ID NO: 3382337 - RNA, 20 nt, Human
cuauaacaccugccaccacu

SEQ ID NO: 3382338 - RNA, 21 nt, Human
cuauaacauauguacauaaau

SEQ ID NO: 3382339 - RNA, 23 nt, Human
cuauaaggugcucucuuucuguc

SEQ ID NO: 3382340 - RNA, 19 nt, Human
cuauaaucccagcacuuug

SEQ ID NO: 3382341 - RNA, 18 nt, Human
cuauaaucugucaaaaca

SEQ ID NO: 3382342 - RNA, 19 nt, Human
cuauaaucugucaaaacac

SEQ ID NO: 3382343 - RNA, 15 nt, Human
cuauaaugaagcuuu

SEQ ID NO: 3382344 - RNA, 19 nt, Human
cuauaaugaagcuuuauac

SEQ ID NO: 3382345 - RNA, 11 nt, Human
cuauaauguga

SEQ ID NO: 3382346 - RNA, 13 nt, Human
cuauaaugugaaa

SEQ ID NO: 3382347 - RNA, 20 nt, Human
cuauaauucccuaucuuuua

SEQ ID NO: 3382348 - RNA, 22 nt, Human
cuauaauuuaccugaagucuuu

SEQ ID NO: 3382349 - RNA, 14 nt, Human
cuauaauuuuacaa

SEQ ID NO: 3382350 - RNA, 14 nt, Human
cuauaauuuugaua

SEQ ID NO: 3382351 - RNA, 16 nt, Human
cuauaauuuugauagu

SEQ ID NO: 3382352 - RNA, 20 nt, Human
cuauacauaucuuuauuaau

SEQ ID NO: 3382353 - RNA, 22 nt, Human
cuauacauaucuuuauuaauca

SEQ ID NO: 3382354 - RNA, 16 nt, Human
cuauacaucucucccc

SEQ ID NO: 3382355 - RNA, 18 nt, Human
cuauacaucucuccccaa

SEQ ID NO: 3382356 - RNA, 19 nt, Human
cuauaccccuuacuuagca

SEQ ID NO: 3382357 - RNA, 20 nt, Human
cuauaccccuuacuuagcau

SEQ ID NO: 3382358 - RNA, 13 nt, Human
cuauaccuguguu

SEQ ID NO: 3382359 - RNA, 14 nt, Human
ccaggcuccgcccu

SEQ ID NO: 3382360 - RNA, 17 nt, Human
ccaggcuccgcccuuag

SEQ ID NO: 3382361 - RNA, 14 nt, Human
ccaggcuccucccu

SEQ ID NO: 3382362 - RNA, 16 nt, Human
ccaggcucggccugcc

SEQ ID NO: 3382363 - RNA, 20 nt, Human
ccaggcucguggacugagug

SEQ ID NO: 3382364 - RNA, 14 nt, Human
ccaggcucugugcu

SEQ ID NO: 3382365 - RNA, 16 nt, Human
ccaggcugaccacagc

SEQ ID NO: 3382366 - RNA, 19 nt, Human
ccaggcugaccacagcaca

SEQ ID NO: 3382367 - RNA, 21 nt, Human
ccaggcugaccacagcacagc

SEQ ID NO: 3382368 - RNA, 13 nt, Human
ccaggcugagccu

SEQ ID NO: 3382369 - RNA, 19 nt, Human
ccaggcugagccucagucu

SEQ ID NO: 3382370 - RNA, 21 nt, Human
ccaggcugccguccccuagag

SEQ ID NO: 3382371 - RNA, 15 nt, Human
ccaggcugccguggg

SEQ ID NO: 3382372 - RNA, 14 nt, Human
ccaggcuggcgcag

SEQ ID NO: 3382373 - RNA, 12 nt, Human
ccaggcuggcgu

SEQ ID NO: 3382374 - RNA, 19 nt, Human
ccaggcuggcgugcagugg

SEQ ID NO: 3382375 - RNA, 18 nt, Human
ccaggcugggagagccuu

SEQ ID NO: 3382376 - RNA, 23 nt, Human
ccaggcugggagagccuuccagg

SEQ ID NO: 3382377 - RNA, 20 nt, Human
ccaggcugggcaaggaggcc

SEQ ID NO: 3382378 - RNA, 16 nt, Human
ccaggcugggucgccc

SEQ ID NO: 3382379 - RNA, 24 nt, Human
ccaggcugggucgcccuggacugu

SEQ ID NO: 3382380 - RNA, 14 nt, Human
ccaggcuggucuca

SEQ ID NO: 3382381 - RNA, 19 nt, Human
ccaggcuggucucaaacuc

SEQ ID NO: 3382382 - RNA, 21 nt, Human
ccaggcuggucucgaacuccu

SEQ ID NO: 3382383 - RNA, 21 nt, Human
ccaggcugguuucgaacuccu

SEQ ID NO: 3382384 - RNA, 20 nt, Human
ccaggcugugcagcgcagcu

SEQ ID NO: 3382385 - RNA, 17 nt, Human
ccaggcugugggccuca

SEQ ID NO: 3382386 - RNA, 21 nt, Human
ccaggcugugggccucaagga

SEQ ID NO: 3382387 - RNA, 16 nt, Human
ccaggcuucacccuga

SEQ ID NO: 3382388 - RNA, 13 nt, Human
ccaggcuucugcu

SEQ ID NO: 3382389 - RNA, 20 nt, Human
ccaggcuucugcuggggccu

SEQ ID NO: 3382390 - RNA, 14 nt, Human
ccaggcuuggccuu

SEQ ID NO: 3382391 - RNA, 17 nt, Human
ccagggaagagaaagug

SEQ ID NO: 3382392 - RNA, 23 nt, Human
ccagggaagcagcagccucgccc

SEQ ID NO: 3382393 - RNA, 15 nt, Human
ccagggaauccaagc

SEQ ID NO: 3382394 - RNA, 18 nt, Human
ccagggaauccaagccuc

SEQ ID NO: 3382395 - RNA, 17 nt, Human
ccagggacaccagccag

SEQ ID NO: 3382396 - RNA, 20 nt, Human
ccagggacaccagccaggcu

SEQ ID NO: 3382397 - RNA, 22 nt, Human
ccagggacaccagccaggcucu

SEQ ID NO: 3382398 - RNA, 18 nt, Human
ccagggacaccugggaga

SEQ ID NO: 3382399 - RNA, 20 nt, Human
ccagggacaccugggagaaa

SEQ ID NO: 3382400 - RNA, 13 nt, Human
ccagggacagagg

SEQ ID NO: 3382401 - RNA, 18 nt, Human
ccagggacagaggcccca

SEQ ID NO: 3382402 - RNA, 20 nt, Human
ccagggacagaggccccagc

SEQ ID NO: 3382403 - RNA, 23 nt, Human
ccagggacagaggccccagccuc

SEQ ID NO: 3382404 - RNA, 19 nt, Human
ccagggacgaagaagagcc

SEQ ID NO: 3382405 - RNA, 20 nt, Human
ccagggacgaagaagagcca

SEQ ID NO: 3382406 - RNA, 21 nt, Human
ccagggacgaagaagagccac

SEQ ID NO: 3382407 - RNA, 23 nt, Human
ccagggacgaagaagagccacag

SEQ ID NO: 3382408 - RNA, 14 nt, Human
ccagggagaagcuc

SEQ ID NO: 3382409 - RNA, 21 nt, Human
ccagggagacagagcucacaa

SEQ ID NO: 3382410 - RNA, 16 nt, Human
ccagggagaccuggac

SEQ ID NO: 3382411 - RNA, 17 nt, Human
ccagggagaccuggaca

SEQ ID NO: 3382412 - RNA, 21 nt, Human
ccagggagaccuggacacagg

SEQ ID NO: 3382413 - RNA, 15 nt, Human
ccagggagagcccag

SEQ ID NO: 3382414 - RNA, 23 nt, Human
ccagggagcaugagaggaggcag

SEQ ID NO: 3382415 - RNA, 20 nt, Human
ccagggagcauuuuccucca

SEQ ID NO: 3382416 - RNA, 13 nt, Human
ccagggagccuuu

SEQ ID NO: 3382417 - RNA, 19 nt, Human
ccagggagcggaaagcagc

SEQ ID NO: 3382418 - RNA, 13 nt, Human
ccagggagucccc

SEQ ID NO: 3382419 - RNA, 22 nt, Human
ccagggauuuguccuuggggac

SEQ ID NO: 3382420 - RNA, 21 nt, Human
ccagggcaaggguuaaggccu

SEQ ID NO: 3382421 - RNA, 16 nt, Human
ccagggcacaggagcu

SEQ ID NO: 3382422 - RNA, 23 nt, Human
ccagggcacccuguggcccuggc

SEQ ID NO: 3382423 - RNA, 19 nt, Human
ccagggcagccagggagag

SEQ ID NO: 3382424 - RNA, 13 nt, Human
ccagggcagggcc

SEQ ID NO: 3382425 - RNA, 19 nt, Human
ccagggcaucuugcuggcu

SEQ ID NO: 3382426 - RNA, 23 nt, Human
cuauguccuaaggacacacuaau

SEQ ID NO: 3382427 - RNA, 13 nt, Human
cuaugucuuguuu

SEQ ID NO: 3382428 - RNA, 14 nt, Human
cuaugugagaccau

SEQ ID NO: 3382429 - RNA, 19 nt, Human
cuaugugauuuuaacucug

SEQ ID NO: 3382430 - RNA, 21 nt, Human
cuaugugauuuuaacucuguc

SEQ ID NO: 3382431 - RNA, 19 nt, Human
cuaugugccuuauguugaa

SEQ ID NO: 3382432 - RNA, 22 nt, Human
cuaugugccuuauguugaaaaa

SEQ ID NO: 3382433 - RNA, 18 nt, Human
cuauguggauuuuuuccu

SEQ ID NO: 3382434 - RNA, 13 nt, Human
cuauguguaaggu

SEQ ID NO: 3382435 - RNA, 22 nt, Human
cuauguguagggcgggaggaug

SEQ ID NO: 3382436 - RNA, 14 nt, Human
cuauguuaauauuu

SEQ ID NO: 3382437 - RNA, 18 nt, Human
cuauguucuaagaaguga

SEQ ID NO: 3382438 - RNA, 18 nt, Human
cuauguugcccaggcagg

SEQ ID NO: 3382439 - RNA, 15 nt, Human
cuauguuucaucuug

SEQ ID NO: 3382440 - RNA, 12 nt, Human
cuauguuuuugu

SEQ ID NO: 3382441 - RNA, 23 nt, Human
cuauuaaaaaagucuacaacaua

SEQ ID NO: 3382442 - RNA, 13 nt, Human
cuauuaaaagacu

SEQ ID NO: 3382443 - RNA, 17 nt, Human
cuauuaaaagacucauc

SEQ ID NO: 3382444 - RNA, 20 nt, Human
cuauuaaaagacucauccgu

SEQ ID NO: 3382445 - RNA, 19 nt, Human
cuauuaacaauuaauuguc

SEQ ID NO: 3382446 - RNA, 17 nt, Human
cuauuaagauuuccaag

SEQ ID NO: 3382447 - RNA, 22 nt, Human
cuauuaagcaguaaaaacuguu

SEQ ID NO: 3382448 - RNA, 17 nt, Human
cuauuaauauauguauu

SEQ ID NO: 3382449 - RNA, 21 nt, Human
cuauuaauauauguauuauuu

SEQ ID NO: 3382450 - RNA, 11 nt, Human
cuauuaauauu

SEQ ID NO: 3382451 - RNA, 22 nt, Human
cuauuaauauuuguuuaguuca

SEQ ID NO: 3382452 - RNA, 12 nt, Human
cuauuacaaaua

SEQ ID NO: 3382453 - RNA, 16 nt, Human
cuauuaccacugaaga

SEQ ID NO: 3382454 - RNA, 17 nt, Human
cuauuaccaugagaaga

SEQ ID NO: 3382455 - RNA, 20 nt, Human
cuauuagacuuuagaaauaa

SEQ ID NO: 3382456 - RNA, 16 nt, Human
cuauuagccaggauca

SEQ ID NO: 3382457 - RNA, 22 nt, Human
cuauuagccaggaucauggugu

SEQ ID NO: 3382458 - RNA, 17 nt, Human
cuauuaguguuauauga

SEQ ID NO: 3382459 - RNA, 15 nt, Human
cuauuauaauuuaau

SEQ ID NO: 3382460 - RNA, 17 nt, Human
cuauuauaauuuaaugc

SEQ ID NO: 3382461 - RNA, 16 nt, Human
cuauuauacuguauua

SEQ ID NO: 3382462 - RNA, 18 nt, Human
cuauuaucccagcugccu

SEQ ID NO: 3382463 - RNA, 22 nt, Human
cuauuaugaaugugaagccuuc

SEQ ID NO: 3382464 - RNA, 16 nt, Human
cuauuauuuuuauaau

SEQ ID NO: 3382465 - RNA, 23 nt, Human
cuauucaagguggccaaauuauu

SEQ ID NO: 3382466 - RNA, 16 nt, Human
cuauucacuaaaauua

SEQ ID NO: 3382467 - RNA, 17 nt, Human
cuauucagacaagcaac

SEQ ID NO: 3382468 - RNA, 23 nt, Human
cuauucagcacaaggaaauaaaa

SEQ ID NO: 3382469 - RNA, 23 nt, Human
cuauucagcuucguuuauuuuca

SEQ ID NO: 3382470 - RNA, 21 nt, Human
cuauucaggagaguagaacag

SEQ ID NO: 3382471 - RNA, 17 nt, Human
cuauucaguaauaacuc

SEQ ID NO: 3382472 - RNA, 17 nt, Human
cuauucaguucccagaa

SEQ ID NO: 3382473 - RNA, 15 nt, Human
cuauucaguuguguu

SEQ ID NO: 3382474 - RNA, 18 nt, Human
cuauucauuaaauguuug

SEQ ID NO: 3382475 - RNA, 15 nt, Human
cuauuccaauaaacu

SEQ ID NO: 3382476 - RNA, 17 nt, Human
cuauuccagcucauuca

SEQ ID NO: 3382477 - RNA, 16 nt, Human
cuauuccagcuguccc

SEQ ID NO: 3382478 - RNA, 20 nt, Human
cuauucccacaccuccacag

SEQ ID NO: 3382479 - RNA, 14 nt, Human
cuauuccuuucccu

SEQ ID NO: 3382480 - RNA, 17 nt, Human
cuauuccuuucccuucc

SEQ ID NO: 3382481 - RNA, 15 nt, Human
cuauucgaaugaaaa

SEQ ID NO: 3382482 - RNA, 17 nt, Human
cuauucuagccugcauu

SEQ ID NO: 3382483 - RNA, 22 nt, Human
cuauucuauaaaacucugcaug

SEQ ID NO: 3382484 - RNA, 15 nt, Human
cuauucucaccagga

SEQ ID NO: 3382485 - RNA, 14 nt, Human
cuauucucuccaaa

SEQ ID NO: 3382486 - RNA, 16 nt, Human
cuauucucuccucaga

SEQ ID NO: 3382487 - RNA, 15 nt, Human
cuauucugagaaaac

SEQ ID NO: 3382488 - RNA, 16 nt, Human
cuauucugagaaaaca

SEQ ID NO: 3382489 - RNA, 17 nt, Human
cuauucugagaaaacaa

SEQ ID NO: 3382490 - RNA, 15 nt, Human
cuauucugagaugac

SEQ ID NO: 3382491 - RNA, 16 nt, Human
cuauucugagaugacu

SEQ ID NO: 3382492 - RNA, 24 nt, Human
cuauucuguguugcauuauucauu

SEQ ID NO: 3382493 - RNA, 17 nt, Human
cuauucuugauguaaaa

SEQ ID NO: 3382494 - RNA, 18 nt, Human
cuauucuugauguaaaau

SEQ ID NO: 3382495 - RNA, 22 nt, Human
cuauucuuuaacucccauuacc

SEQ ID NO: 3382496 - RNA, 21 nt, Human
cuauucuuucgaaagaagaaa

SEQ ID NO: 3382497 - RNA, 12 nt, Human
cuauugacaaua

SEQ ID NO: 3382498 - RNA, 17 nt, Human
cuauugacaauaaaaua

SEQ ID NO: 3382499 - RNA, 16 nt, Human
cuauugagucuucaug

SEQ ID NO: 3382500 - RNA, 14 nt, Human
cuauugauacucuu

SEQ ID NO: 3382501 - RNA, 20 nt, Human
cuauugauguacagucuguc

SEQ ID NO: 3382502 - RNA, 21 nt, Human
cuauugauguacagucuguca

SEQ ID NO: 3382503 - RNA, 18 nt, Human
cuauugauuuuuacuuca

SEQ ID NO: 3382504 - RNA, 22 nt, Human
cuauugcaaagguuccaacugu

SEQ ID NO: 3382505 - RNA, 18 nt, Human
cuauugcaguuauagaaa

SEQ ID NO: 3382506 - RNA, 19 nt, Human
cuauugcauuuauauguac

SEQ ID NO: 3382507 - RNA, 14 nt, Human
cuauugccucugag

SEQ ID NO: 3382508 - RNA, 19 nt, Human
cuauugcuagagcuccucc

SEQ ID NO: 3382509 - RNA, 15 nt, Human
cuauuggguucauua

SEQ ID NO: 3382510 - RNA, 16 nt, Human
cuauuggguucauuau

SEQ ID NO: 3382511 - RNA, 14 nt, Human
cuauuguaaauaug

SEQ ID NO: 3382512 - RNA, 17 nt, Human
cuauuguaaauauguuu

SEQ ID NO: 3382513 - RNA, 15 nt, Human
cuauuguaagauaaa

SEQ ID NO: 3382514 - RNA, 16 nt, Human
cuauuguaagauaaaa

SEQ ID NO: 3382515 - RNA, 20 nt, Human
cuauuguaauauagaaaaaa

SEQ ID NO: 3382516 - RNA, 22 nt, Human
cuauuguccccuagcaaggcau

SEQ ID NO: 3382517 - RNA, 17 nt, Human
cuauugugauuugacug

SEQ ID NO: 3382518 - RNA, 16 nt, Human
cuauuguuacucuggu

SEQ ID NO: 3382519 - RNA, 20 nt, Human
cuauuguuacucugguucuu

SEQ ID NO: 3382520 - RNA, 21 nt, Human
cuauuuaaaaaaaaagucaga

SEQ ID NO: 3382521 - RNA, 16 nt, Human
cuauuuaaaacuugua

SEQ ID NO: 3382522 - RNA, 18 nt, Human
cuauuuaaacuuauaaau

SEQ ID NO: 3382523 - RNA, 18 nt, Human
ccaggguugaccccagag

SEQ ID NO: 3382524 - RNA, 16 nt, Human
ccaggguugaucacac

SEQ ID NO: 3382525 - RNA, 17 nt, Human
ccaggguuucgagaagc

SEQ ID NO: 3382526 - RNA, 23 nt, Human
ccagguaagcaggaggaggugcc

SEQ ID NO: 3382527 - RNA, 18 nt, Human
ccagguaaugagggacug

SEQ ID NO: 3382528 - RNA, 15 nt, Human
ccagguaccagcugc

SEQ ID NO: 3382529 - RNA, 19 nt, Human
ccagguaccagcugcgcuu

SEQ ID NO: 3382530 - RNA, 23 nt, Human
ccagguaccagcugcgcuugcuu

SEQ ID NO: 3382531 - RNA, 15 nt, Human
ccagguacgcacaga

SEQ ID NO: 3382532 - RNA, 16 nt, Human
ccagguacuugagaaa

SEQ ID NO: 3382533 - RNA, 14 nt, Human
ccagguagaaacuu

SEQ ID NO: 3382534 - RNA, 20 nt, Human
ccagguagaggguguguaag

SEQ ID NO: 3382535 - RNA, 20 nt, Human
ccagguagcugggauuacag

SEQ ID NO: 3382536 - RNA, 14 nt, Human
ccagguaggccaag

SEQ ID NO: 3382537 - RNA, 21 nt, Human
ccagguaggccaagguguccu

SEQ ID NO: 3382538 - RNA, 22 nt, Human
ccagguauagagaaaggucuau

SEQ ID NO: 3382539 - RNA, 19 nt, Human
ccagguauccaaaaaugug

SEQ ID NO: 3382540 - RNA, 22 nt, Human
ccagguauccaaaaauguguaa

SEQ ID NO: 3382541 - RNA, 16 nt, Human
ccagguaucuccagga

SEQ ID NO: 3382542 - RNA, 14 nt, Human
ccagguauggcucu

SEQ ID NO: 3382543 - RNA, 19 nt, Human
ccaggucaacagaaugaaa

SEQ ID NO: 3382544 - RNA, 21 nt, Human
ccaggucaacagaaugaaaaa

SEQ ID NO: 3382545 - RNA, 20 nt, Human
ccaggucacccuuugcugug

SEQ ID NO: 3382546 - RNA, 17 nt, Human
ccagguccaaugagcuu

SEQ ID NO: 3382547 - RNA, 19 nt, Human
ccagguccaaugagcuuuc

SEQ ID NO: 3382548 - RNA, 20 nt, Human
ccagguccaaugagcuuucu

SEQ ID NO: 3382549 - RNA, 13 nt, Human
ccagguccagcuc

SEQ ID NO: 3382550 - RNA, 17 nt, Human
ccagguccagcucugga

SEQ ID NO: 3382551 - RNA, 15 nt, Human
ccaggucccccugca

SEQ ID NO: 3382552 - RNA, 13 nt, Human
ccaggucccucuc

SEQ ID NO: 3382553 - RNA, 16 nt, Human
ccaggucccucucauu

SEQ ID NO: 3382554 - RNA, 19 nt, Human
ccagguccugguggggcag

SEQ ID NO: 3382555 - RNA, 17 nt, Human
ccaggucgggcucagcu

SEQ ID NO: 3382556 - RNA, 20 nt, Human
ccaggucgggcucagcucug

SEQ ID NO: 3382557 - RNA, 21 nt, Human
ccaggucgggcucagcucugg

SEQ ID NO: 3382558 - RNA, 23 nt, Human
ccaggucuaccccucccggcccu

SEQ ID NO: 3382559 - RNA, 13 nt, Human
ccaggucucccug

SEQ ID NO: 3382560 - RNA, 21 nt, Human
ccaggucuccuccaccgccau

SEQ ID NO: 3382561 - RNA, 20 nt, Human
ccaggugaaggaggcuccag

SEQ ID NO: 3382562 - RNA, 21 nt, Human
ccaggugaguccuagagcuac

SEQ ID NO: 3382563 - RNA, 18 nt, Human
ccaggugcacaagcucca

SEQ ID NO: 3382564 - RNA, 13 nt, Human
ccaggugcacaga

SEQ ID NO: 3382565 - RNA, 14 nt, Human
ccaggugcagccag

SEQ ID NO: 3382566 - RNA, 16 nt, Human
ccaggugcagccagag

SEQ ID NO: 3382567 - RNA, 22 nt, Human
ccaggugcaguggcucacgccu

SEQ ID NO: 3382568 - RNA, 13 nt, Human
ccaggugccaguu

SEQ ID NO: 3382569 - RNA, 13 nt, Human
ccaggugcccagc

SEQ ID NO: 3382570 - RNA, 20 nt, Human
cucaggaggcgcccuuggcu

SEQ ID NO: 3382571 - RNA, 15 nt, Human
cucaggaggcugagg

SEQ ID NO: 3382572 - RNA, 20 nt, Human
cucaggaggcugaggcagaa

SEQ ID NO: 3382573 - RNA, 20 nt, Human
cucaggaggcugaggcagga

SEQ ID NO: 3382574 - RNA, 23 nt, Human
cucaggaguuugagaccaaccug

SEQ ID NO: 3382575 - RNA, 12 nt, Human
cucaggauccaa

SEQ ID NO: 3382576 - RNA, 16 nt, Human
cucaggaugagggaaa

SEQ ID NO: 3382577 - RNA, 20 nt, Human
cucaggaugagggaaaagaa

SEQ ID NO: 3382578 - RNA, 22 nt, Human
cucaggaugagggaaaagaaaa

SEQ ID NO: 3382579 - RNA, 14 nt, Human
cucaggaugcccag

SEQ ID NO: 3382580 - RNA, 16 nt, Human
cucaggaugcccaggg

SEQ ID NO: 3382581 - RNA, 19 nt, Human
cucaggaugcccagggcca

SEQ ID NO: 3382582 - RNA, 19 nt, Human
cucaggauuuaaaaacugg

SEQ ID NO: 3382583 - RNA, 19 nt, Human
cucaggauuucgugggucu

SEQ ID NO: 3382584 - RNA, 18 nt, Human
cucaggcacacagcuacu

SEQ ID NO: 3382585 - RNA, 14 nt, Human
cucaggcacuagcc

SEQ ID NO: 3382586 - RNA, 15 nt, Human
cucaggcacuagccu

SEQ ID NO: 3382587 - RNA, 15 nt, Human
cucaggcagguggga

SEQ ID NO: 3382588 - RNA, 16 nt, Human
cucaggcaugccugug

SEQ ID NO: 3382589 - RNA, 17 nt, Human
cucaggcaugccugugu

SEQ ID NO: 3382590 - RNA, 18 nt, Human
cucaggcaugccugugug

SEQ ID NO: 3382591 - RNA, 19 nt, Human
cucaggccaaacucaccug

SEQ ID NO: 3382592 - RNA, 15 nt, Human
cucaggccacaccgg

SEQ ID NO: 3382593 - RNA, 16 nt, Human
cucaggccaccugccc

SEQ ID NO: 3382594 - RNA, 16 nt, Human
cucaggccagcugcuu

SEQ ID NO: 3382595 - RNA, 15 nt, Human
cucaggccaggugca

SEQ ID NO: 3382596 - RNA, 18 nt, Human
cucaggccaggugcagug

SEQ ID NO: 3382597 - RNA, 21 nt, Human
cucaggcccccaccuggcuca

SEQ ID NO: 3382598 - RNA, 20 nt, Human
cucaggccggcagccccagc

SEQ ID NO: 3382599 - RNA, 11 nt, Human
cucaggccugg

SEQ ID NO: 3382600 - RNA, 13 nt, Human
cucaggccugggg

SEQ ID NO: 3382601 - RNA, 22 nt, Human
cucaggccugggggcugggcag

SEQ ID NO: 3382602 - RNA, 20 nt, Human
cucaggcgauccaccugucu

SEQ ID NO: 3382603 - RNA, 13 nt, Human
cucaggcucucca

SEQ ID NO: 3382604 - RNA, 13 nt, Human
cucaggcucugcc

SEQ ID NO: 3382605 - RNA, 15 nt, Human
cucaggcucugcccu

SEQ ID NO: 3382606 - RNA, 13 nt, Human
cucaggcugcagc

SEQ ID NO: 3382607 - RNA, 16 nt, Human
cucaggcugcagcugg

SEQ ID NO: 3382608 - RNA, 17 nt, Human
cucaggcugcagcugga

SEQ ID NO: 3382609 - RNA, 22 nt, Human
cucaggcugcagcuggacagag

SEQ ID NO: 3382610 - RNA, 16 nt, Human
cucaggcugccugagu

SEQ ID NO: 3382611 - RNA, 11 nt, Human
cucaggcugcu

SEQ ID NO: 3382612 - RNA, 12 nt, Human
cucaggcugcug

SEQ ID NO: 3382613 - RNA, 24 nt, Human
cucaggcugcuggggccucagacg

SEQ ID NO: 3382614 - RNA, 20 nt, Human
cucaggcuguuuuugggugc

SEQ ID NO: 3382615 - RNA, 17 nt, Human
cucaggcuuccuuggca

SEQ ID NO: 3382616 - RNA, 21 nt, Human
cucaggcuuucacuauuuccu

SEQ ID NO: 3382617 - RNA, 22 nt, Human
cucagggaaaagcagcucuccc

SEQ ID NO: 3382618 - RNA, 17 nt, Human
cucagggaaaggccagu

SEQ ID NO: 3382619 - RNA, 18 nt, Human
cucagggaagcccagcuc

SEQ ID NO: 3382620 - RNA, 14 nt, Human
cucagggacagaga

SEQ ID NO: 3382621 - RNA, 14 nt, Human
cucagggacagagc

SEQ ID NO: 3382622 - RNA, 19 nt, Human
cucagggacagagccaugc

SEQ ID NO: 3382623 - RNA, 15 nt, Human
cucagggaccacagc

SEQ ID NO: 3382624 - RNA, 16 nt, Human
cucagggcaaagccag

SEQ ID NO: 3382625 - RNA, 10 nt, Human
cucagggcag

SEQ ID NO: 3382626 - RNA, 21 nt, Human
cucagggcagccucccccggc

SEQ ID NO: 3382627 - RNA, 18 nt, Human
cucagggccaggccucuc

SEQ ID NO: 3382628 - RNA, 20 nt, Human
cucagggccaugccugcccc

SEQ ID NO: 3382629 - RNA, 13 nt, Human
cucagggccccag

SEQ ID NO: 3382630 - RNA, 18 nt, Human
cucagggccccagcacua

SEQ ID NO: 3382631 - RNA, 13 nt, Human
cucagggccuggc

SEQ ID NO: 3382632 - RNA, 14 nt, Human
cucagggccugguc

SEQ ID NO: 3382633 - RNA, 19 nt, Human
cucagggcuccucccagcu

SEQ ID NO: 3382634 - RNA, 13 nt, Human
cucagggcuccug

SEQ ID NO: 3382635 - RNA, 15 nt, Human
cucagggcuccugcc

SEQ ID NO: 3382636 - RNA, 14 nt, Human
cucagggcuccuug

SEQ ID NO: 3382637 - RNA, 14 nt, Human
cucaggggcagcuc

SEQ ID NO: 3382638 - RNA, 17 nt, Human
cucaggggccugcccag

SEQ ID NO: 3382639 - RNA, 17 nt, Human
cucaggggcguguggcu

SEQ ID NO: 3382640 - RNA, 16 nt, Human
cucaggggcuguuuga

SEQ ID NO: 3382641 - RNA, 14 nt, Human
cucagggggcgccu

SEQ ID NO: 3382642 - RNA, 19 nt, Human
cucagggggcgccuguggu

SEQ ID NO: 3382643 - RNA, 16 nt, Human
cucagggucccuggug

SEQ ID NO: 3382644 - RNA, 14 nt, Human
cucagggucucugc

SEQ ID NO: 3382645 - RNA, 15 nt, Human
cucagggugcagagg

SEQ ID NO: 3382646 - RNA, 20 nt, Human
cucagguaaucgaccugccu

SEQ ID NO: 3382647 - RNA, 16 nt, Human
cucagguacagagaag

SEQ ID NO: 3382648 - RNA, 21 nt, Human
cucagguacagagaaggaaug

SEQ ID NO: 3382649 - RNA, 19 nt, Human
cucaggucagggugaggau

SEQ ID NO: 3382650 - RNA, 20 nt, Human
cucaggucagggugaggaug

SEQ ID NO: 3382651 - RNA, 19 nt, Human
cucaggugagaagcagagg

SEQ ID NO: 3382652 - RNA, 18 nt, Human
cucaggugauccacccac

SEQ ID NO: 3382653 - RNA, 19 nt, Human
cucaggugauccacccacc

SEQ ID NO: 3382654 - RNA, 20 nt, Human
cucaggugauccacccaccu

SEQ ID NO: 3382655 - RNA, 22 nt, Human
cucaggugauccacccaccuca

SEQ ID NO: 3382656 - RNA, 20 nt, Human
cucaggugauccaccugccu

SEQ ID NO: 3382657 - RNA, 21 nt, Human
cucagguggccagccuggauc

SEQ ID NO: 3382658 - RNA, 14 nt, Human
cucaggugggcccu

SEQ ID NO: 3382659 - RNA, 13 nt, Human
cucaggugggcgu

SEQ ID NO: 3382660 - RNA, 21 nt, Human
cucagguggggucacucuggc

SEQ ID NO: 3382661 - RNA, 15 nt, Human
cucaggugucccugc

SEQ ID NO: 3382662 - RNA, 19 nt, Human
cucaggugucccugcacuu

SEQ ID NO: 3382663 - RNA, 22 nt, Human
cucagguugcugguugcugugu

SEQ ID NO: 3382664 - RNA, 20 nt, Human
cucagguuugccugagggcg

SEQ ID NO: 3382665 - RNA, 20 nt, Human
cucaguaaacgggaacaugc

SEQ ID NO: 3382666 - RNA, 21 nt, Human
cucaguaaacgggaacaugcc

SEQ ID NO: 3382667 - RNA, 19 nt, Human
cucaguaagacgacaagga

SEQ ID NO: 3382668 - RNA, 13 nt, Human
cucaguaauuuag

SEQ ID NO: 3382669 - RNA, 18 nt, Human
cucaguauauuuaaacuc

SEQ ID NO: 3382670 - RNA, 17 nt, Human
cucaguaugaauuauuc

SEQ ID NO: 3382671 - RNA, 23 nt, Human
cucagucaugcauaaauaugcag

SEQ ID NO: 3382672 - RNA, 17 nt, Human
cucaguccaccugagcu

SEQ ID NO: 3382673 - RNA, 15 nt, Human
cucaguccauuuaua

SEQ ID NO: 3382674 - RNA, 12 nt, Human
cucaguccucaa

SEQ ID NO: 3382675 - RNA, 19 nt, Human
cucaguccucaaagcuuuu

SEQ ID NO: 3382676 - RNA, 16 nt, Human
cucaguccuccccuca

SEQ ID NO: 3382677 - RNA, 13 nt, Human
cuauuuaaagaaa

SEQ ID NO: 3382678 - RNA, 14 nt, Human
cuauuuaaauucuu

SEQ ID NO: 3382679 - RNA, 9 nt, Human
cuauuuaag

SEQ ID NO: 3382680 - RNA, 12 nt, Human
cuauuuaauauu

SEQ ID NO: 3382681 - RNA, 15 nt, Human
cuauuuaauauuuau

SEQ ID NO: 3382682 - RNA, 11 nt, Human
cuauuuaaugg

SEQ ID NO: 3382683 - RNA, 21 nt, Human
cuauuuaauuaggaaaaaaac

SEQ ID NO: 3382684 - RNA, 20 nt, Human
cuauuuaguuuuuguaauuu

SEQ ID NO: 3382685 - RNA, 23 nt, Human
cuauuuaguuuuuguaauuuauu

SEQ ID NO: 3382686 - RNA, 21 nt, Human
cuauuuauaauacagaaucuu

SEQ ID NO: 3382687 - RNA, 21 nt, Human
cuauuuaucuguaguaaacua

SEQ ID NO: 3382688 - RNA, 14 nt, Human
cuauuuaucuucau

SEQ ID NO: 3382689 - RNA, 13 nt, Human
cuauuuauuaaua

SEQ ID NO: 3382690 - RNA, 12 nt, Human
cuauuuauuuau

SEQ ID NO: 3382691 - RNA, 17 nt, Human
cuauuuauuuuccuaaa

SEQ ID NO: 3382692 - RNA, 21 nt, Human
cuauuuauuuuccuaaagaga

SEQ ID NO: 3382693 - RNA, 18 nt, Human
cuauuucaaaaauuugga

SEQ ID NO: 3382694 - RNA, 16 nt, Human
cuauuucacuggagca

SEQ ID NO: 3382695 - RNA, 17 nt, Human
cuauuucacuggagcac

SEQ ID NO: 3382696 - RNA, 12 nt, Human
cuauuucagaag

SEQ ID NO: 3382697 - RNA, 19 nt, Human
cuauuucagaaguuuaaau

SEQ ID NO: 3382698 - RNA, 19 nt, Human
cuauuucaguacuucagca

SEQ ID NO: 3382699 - RNA, 19 nt, Human
cuauuucaguguuaccugu

SEQ ID NO: 3382700 - RNA, 14 nt, Human
cuauuucaucacaa

SEQ ID NO: 3382701 - RNA, 23 nt, Human
cuauuucaucagaacagcuguug

SEQ ID NO: 3382702 - RNA, 17 nt, Human
cuauuucauguuuuuga

SEQ ID NO: 3382703 - RNA, 14 nt, Human
cuauuuccauucca

SEQ ID NO: 3382704 - RNA, 17 nt, Human
cuauuuccauuccagaa

SEQ ID NO: 3382705 - RNA, 15 nt, Human
cuauuucccaagcug

SEQ ID NO: 3382706 - RNA, 23 nt, Human
cuauuuccccaggggaaaaugaa

SEQ ID NO: 3382707 - RNA, 16 nt, Human
cuauuucccccuuucu

SEQ ID NO: 3382708 - RNA, 13 nt, Human
cuauuucggccuu

SEQ ID NO: 3382709 - RNA, 14 nt, Human
cuauuucuauauuu

SEQ ID NO: 3382710 - RNA, 15 nt, Human
cuauuucuaugagaa

SEQ ID NO: 3382711 - RNA, 12 nt, Human
cuauuucucuuu

SEQ ID NO: 3382712 - RNA, 14 nt, Human
cuauuucucuuucu

SEQ ID NO: 3382713 - RNA, 13 nt, Human
cuauuucugagaa

SEQ ID NO: 3382714 - RNA, 12 nt, Human
cuauuucugcug

SEQ ID NO: 3382715 - RNA, 16 nt, Human
cuauuugagacuccuc

SEQ ID NO: 3382716 - RNA, 14 nt, Human
cuccauccaaggcc

SEQ ID NO: 3382717 - RNA, 22 nt, Human
cuccaucccaacagccaugccc

SEQ ID NO: 3382718 - RNA, 15 nt, Human
cuccaucccucuaau

SEQ ID NO: 3382719 - RNA, 22 nt, Human
cuccaucccucuaaugagacug

SEQ ID NO: 3382720 - RNA, 15 nt, Human
cuccaucccuggccc

SEQ ID NO: 3382721 - RNA, 16 nt, Human
cuccauccuaccacaa

SEQ ID NO: 3382722 - RNA, 23 nt, Human
cuccauccuacccccugugccuu

SEQ ID NO: 3382723 - RNA, 19 nt, Human
cuccauccuccuccuuccu

SEQ ID NO: 3382724 - RNA, 14 nt, Human
aaauaauuuaacua

SEQ ID NO: 3382725 - RNA, 18 nt, Human
aaauaauuuaacuacccu

SEQ ID NO: 3382726 - RNA, 16 nt, Human
aaauaauuuacuguga

SEQ ID NO: 3382727 - RNA, 17 nt, Human
aaauaauuuuaaaaaug

SEQ ID NO: 3382728 - RNA, 18 nt, Human
aaauaauuuuaaacaaag

SEQ ID NO: 3382729 - RNA, 22 nt, Human
aaauaauuuuaugaacugcaug

SEQ ID NO: 3382730 - RNA, 14 nt, Human
aaauaauuuuguaa

SEQ ID NO: 3382731 - RNA, 15 nt, Human
aaauaauuuuuauau

SEQ ID NO: 3382732 - RNA, 23 nt, Human
aaauaauuuuuauauuugaaaua

SEQ ID NO: 3382733 - RNA, 15 nt, Human
aaauacaaaacuucc

SEQ ID NO: 3382734 - RNA, 12 nt, Human
aaauacaaacaa

SEQ ID NO: 3382735 - RNA, 19 nt, Human
aaauacaacuuaaauaaua

SEQ ID NO: 3382736 - RNA, 14 nt, Human
aaauacaagacugc

SEQ ID NO: 3382737 - RNA, 13 nt, Human
aaauacaauuuug

SEQ ID NO: 3382738 - RNA, 14 nt, Human
aaauacaauuuugu

SEQ ID NO: 3382739 - RNA, 22 nt, Human
aaauacaauuuuguuucuguac

SEQ ID NO: 3382740 - RNA, 20 nt, Human
aaauacaauuuuuauuucuu

SEQ ID NO: 3382741 - RNA, 17 nt, Human
aaauacacaaguaaaca

SEQ ID NO: 3382742 - RNA, 15 nt, Human
aaauacacacucaaa

SEQ ID NO: 3382743 - RNA, 12 nt, Human
aaauacacauuu

SEQ ID NO: 3382744 - RNA, 13 nt, Human
aaauacacauuug

SEQ ID NO: 3382745 - RNA, 15 nt, Human
aaauacacauuugcu

SEQ ID NO: 3382746 - RNA, 22 nt, Human
aaauacacauuugcuacuguug

SEQ ID NO: 3382747 - RNA, 17 nt, Human
aaauacagacacuaagu

SEQ ID NO: 3382748 - RNA, 17 nt, Human
aaauacagauuuugaua

SEQ ID NO: 3382749 - RNA, 23 nt, Human
aaauacagauuuugauagcaaag

SEQ ID NO: 3382750 - RNA, 22 nt, Human
aaauacagucuuccauuugcaa

SEQ ID NO: 3382751 - RNA, 15 nt, Human
aaauacauagugaaa

SEQ ID NO: 3382752 - RNA, 17 nt, Human
aaauacauagugaaaau

SEQ ID NO: 3382753 - RNA, 21 nt, Human
aaauacauaucgcugacuuca

SEQ ID NO: 3382754 - RNA, 12 nt, Human
aaauacaugaag

SEQ ID NO: 3382755 - RNA, 14 nt, Human
aaauacaugaagcu

SEQ ID NO: 3382756 - RNA, 20 nt, Human
aaauacaugaugauuucaga

SEQ ID NO: 3382757 - RNA, 13 nt, Human
aaauacaugcuaa

SEQ ID NO: 3382758 - RNA, 18 nt, Human
aaauacauucuuuuugcu

SEQ ID NO: 3382759 - RNA, 17 nt, Human
aaauacauuuaaaacau

SEQ ID NO: 3382760 - RNA, 20 nt, Human
aaauaccacaaucaccgaug

SEQ ID NO: 3382761 - RNA, 19 nt, Human
aaauaccagccaguaaaug

SEQ ID NO: 3382762 - RNA, 20 nt, Human
aaauaccagccaguaaaugg

SEQ ID NO: 3382763 - RNA, 17 nt, Human
aaauaccagugugguuu

SEQ ID NO: 3382764 - RNA, 22 nt, Human
aaauaccauuuaguaagaauac

SEQ ID NO: 3382765 - RNA, 18 nt, Human
aaauaccccaucauucau

SEQ ID NO: 3382766 - RNA, 21 nt, Human
aaauacccguuaccauauuua

SEQ ID NO: 3382767 - RNA, 21 nt, Human
aaauaccucaggaaagaauag

SEQ ID NO: 3382768 - RNA, 17 nt, Human
aaauaccucauguuuau

SEQ ID NO: 3382769 - RNA, 22 nt, Human
aaauaccucauguuuaugaaaa

SEQ ID NO: 3382770 - RNA, 21 nt, Human
aaauacgugggcauucaaaug

SEQ ID NO: 3382771 - RNA, 22 nt, Human
aaauacgugggcauucaaaugu

SEQ ID NO: 3382772 - RNA, 15 nt, Human
aaauacuacuccugu

SEQ ID NO: 3382773 - RNA, 21 nt, Human
aaauacuauuuaagaugugaa

SEQ ID NO: 3382774 - RNA, 16 nt, Human
aaauacuauuuuuacu

SEQ ID NO: 3382775 - RNA, 21 nt, Human
aaauacucauguguaugggca

SEQ ID NO: 3382776 - RNA, 18 nt, Human
aaauacucuaauucuaac

SEQ ID NO: 3382777 - RNA, 22 nt, Human
aaauacucuaauucuaaccaga

SEQ ID NO: 3382778 - RNA, 11 nt, Human
aaauacuguag

SEQ ID NO: 3382779 - RNA, 17 nt, Human
aaauacuguagauaauu

SEQ ID NO: 3382780 - RNA, 20 nt, Human
aaauacuguguuucagaagc

SEQ ID NO: 3382781 - RNA, 15 nt, Human
aaauacuuaaauguu

SEQ ID NO: 3382782 - RNA, 20 nt, Human
aaauacuuaaauguuaugua

SEQ ID NO: 3382783 - RNA, 14 nt, Human
aaauacuuagcaaa

SEQ ID NO: 3382784 - RNA, 15 nt, Human
aaauacuuauucauu

SEQ ID NO: 3382785 - RNA, 22 nt, Human
aaauacuugucaauauuuaaac

SEQ ID NO: 3382786 - RNA, 17 nt, Human
aaauacuuuuacucugc

SEQ ID NO: 3382787 - RNA, 17 nt, Human
aaauagaaaaguuauua

SEQ ID NO: 3382788 - RNA, 14 nt, Human
aaauagaaaauggu

SEQ ID NO: 3382789 - RNA, 12 nt, Human
aaauagaaauuu

SEQ ID NO: 3382790 - RNA, 14 nt, Human
aaauagaauguaaa

SEQ ID NO: 3382791 - RNA, 17 nt, Human
aaauagaauguaaaugu

SEQ ID NO: 3382792 - RNA, 19 nt, Human
aaauagaauguaaaugucu

SEQ ID NO: 3382793 - RNA, 21 nt, Human
aaauagauaagaguagaaacu

SEQ ID NO: 3382794 - RNA, 21 nt, Human
aaauagaugucuuuuauagug

SEQ ID NO: 3382795 - RNA, 16 nt, Human
aaauagcaaaagaaga

SEQ ID NO: 3382796 - RNA, 15 nt, Human
aaauagcaacaugcu

SEQ ID NO: 3382797 - RNA, 18 nt, Human
aaauagcauguauugugu

SEQ ID NO: 3382798 - RNA, 22 nt, Human
aaauagcauguauugugucuuu

SEQ ID NO: 3382799 - RNA, 23 nt, Human
aaauagccacuuaccuucaauaa

SEQ ID NO: 3382800 - RNA, 20 nt, Human
aaauagcguucuuguaauuu

SEQ ID NO: 3382801 - RNA, 21 nt, Human
aaauagcguucuuguaauuuu

SEQ ID NO: 3382802 - RNA, 19 nt, Human
aaauagcuaauaauguuaa

SEQ ID NO: 3382803 - RNA, 18 nt, Human
aaauagcuagacugguga

SEQ ID NO: 3382804 - RNA, 12 nt, Human
aaauagcuauau

SEQ ID NO: 3382805 - RNA, 15 nt, Human
aaauagcuuaugaaa

SEQ ID NO: 3382806 - RNA, 16 nt, Human
aaauagcuuaugaaaa

SEQ ID NO: 3382807 - RNA, 16 nt, Human
aaauaggaaacaagug

SEQ ID NO: 3382808 - RNA, 18 nt, Human
aaauaggagggaaaccuu

SEQ ID NO: 3382809 - RNA, 14 nt, Human
aaauaggcuuuuua

SEQ ID NO: 3382810 - RNA, 20 nt, Human
aaauaggguauauuuuccua

SEQ ID NO: 3382811 - RNA, 16 nt, Human
aaauaguaugaaaaug

SEQ ID NO: 3382812 - RNA, 15 nt, Human
aaauaguauuugcau

SEQ ID NO: 3382813 - RNA, 22 nt, Human
aaauagugacauaauauauucu

SEQ ID NO: 3382814 - RNA, 21 nt, Human
aaauagugcagaaucucauag

SEQ ID NO: 3382815 - RNA, 21 nt, Human
aaauaguguggaaauuaagaa

SEQ ID NO: 3382816 - RNA, 22 nt, Human
aaauaguuaagacaugauuucc

SEQ ID NO: 3382817 - RNA, 20 nt, Human
aaauaguugagccagcagac

SEQ ID NO: 3382818 - RNA, 20 nt, Human
aaauaguugcauagcaguau

SEQ ID NO: 3382819 - RNA, 23 nt, Human
aaauaguugcauagcaguauaug

SEQ ID NO: 3382820 - RNA, 23 nt, Human
aaauaguuguccauauuuucaca

SEQ ID NO: 3382821 - RNA, 12 nt, Human
aaauaguuuguu

SEQ ID NO: 3382822 - RNA, 12 nt, Human
aaauauaaaacu

SEQ ID NO: 3382823 - RNA, 12 nt, Human
aaauauaaaaua

SEQ ID NO: 3382824 - RNA, 13 nt, Human
aaauauaaaauau

SEQ ID NO: 3382825 - RNA, 18 nt, Human
aaauauaaaauuaugaga

SEQ ID NO: 3382826 - RNA, 23 nt, Human
aaauauaaacaaagauucaugau

SEQ ID NO: 3382827 - RNA, 13 nt, Human
aaauauaaacauc

SEQ ID NO: 3382828 - RNA, 13 nt, Human
aaauauaaagacg

SEQ ID NO: 3382829 - RNA, 19 nt, Human
aaauauaaagcaucuaaac

SEQ ID NO: 3382830 - RNA, 16 nt, Human
aaauauaacacauuuu

SEQ ID NO: 3382831 - RNA, 17 nt, Human
aaauauaacacauuuuu

SEQ ID NO: 3382832 - RNA, 14 nt, Human
aaauauaagaauaa

SEQ ID NO: 3382833 - RNA, 13 nt, Human
aaauauaauucug

SEQ ID NO: 3382834 - RNA, 14 nt, Human
aaauauaauugaca

SEQ ID NO: 3382835 - RNA, 15 nt, Human
aaauauacaaaacuu

SEQ ID NO: 3382836 - RNA, 15 nt, Human
aaauauacacacagc

SEQ ID NO: 3382837 - RNA, 16 nt, Human
aaauauacauguuuau

SEQ ID NO: 3382838 - RNA, 17 nt, Human
aaauauacauguuuaug

SEQ ID NO: 3382839 - RNA, 20 nt, Human
aaauauacauguuuauguaa

SEQ ID NO: 3382840 - RNA, 20 nt, Human
aaauauaccacucuuuaccu

SEQ ID NO: 3382841 - RNA, 23 nt, Human
aaauauacuguaaagaaagagag

SEQ ID NO: 3382842 - RNA, 18 nt, Human
aaauauacuuaaauggaa

SEQ ID NO: 3382843 - RNA, 13 nt, Human
aaauauacuuuua

SEQ ID NO: 3382844 - RNA, 17 nt, Human
aaauauagcuguacaaa

SEQ ID NO: 3382845 - RNA, 20 nt, Human
aaauauagcuguacaaauau

SEQ ID NO: 3382846 - RNA, 15 nt, Human
aaauauaggaacuua

SEQ ID NO: 3382847 - RNA, 9 nt, Human
aaauauaua

SEQ ID NO: 3382848 - RNA, 14 nt, Human
aaauauauaaauau

SEQ ID NO: 3382849 - RNA, 15 nt, Human
aaauauauaaauaua

SEQ ID NO: 3382850 - RNA, 16 nt, Human
aaauauauaaauauau

SEQ ID NO: 3382851 - RNA, 18 nt, Human
aaauauauaaauauauau

SEQ ID NO: 3382852 - RNA, 13 nt, Human
aaauauauacauu

SEQ ID NO: 3382853 - RNA, 18 nt, Human
aaauauauacgaacaaaa

SEQ ID NO: 3382854 - RNA, 12 nt, Human
aaauauauacua

SEQ ID NO: 3382855 - RNA, 15 nt, Human
aaauauauauacaua

SEQ ID NO: 3382856 - RNA, 18 nt, Human
aaauauauauacauaugu

SEQ ID NO: 3382857 - RNA, 20 nt, Human
aaauauauauauauauaaaa

SEQ ID NO: 3382858 - RNA, 14 nt, Human
aaauauauaucaaa

SEQ ID NO: 3382859 - RNA, 22 nt, Human
aaauauauaucuaucuauuuga

SEQ ID NO: 3382860 - RNA, 23 nt, Human
aaauauauauguguguguauguu

SEQ ID NO: 3382861 - RNA, 23 nt, Human
cuccccugugccagcccagaggc

SEQ ID NO: 3382862 - RNA, 12 nt, Human
cuccccuucccc

SEQ ID NO: 3382863 - RNA, 23 nt, Human
cuccccuucgcguauuucaggau

SEQ ID NO: 3382864 - RNA, 12 nt, Human
cuccccuucucu

SEQ ID NO: 3382865 - RNA, 16 nt, Human
cuccccuugagcugag

SEQ ID NO: 3382866 - RNA, 13 nt, Human
cuccccuugccag

SEQ ID NO: 3382867 - RNA, 22 nt, Human
cuccccuuucccucgcuaugug

SEQ ID NO: 3382868 - RNA, 23 nt, Human
cucccgaauagcugggacuacag

SEQ ID NO: 3382869 - RNA, 16 nt, Human
cucccgaccucaggug

SEQ ID NO: 3382870 - RNA, 12 nt, Human
cucccgagcucc

SEQ ID NO: 3382871 - RNA, 14 nt, Human
cucccgagcuccuc

SEQ ID NO: 3382872 - RNA, 15 nt, Human
cucccgaguagcugg

SEQ ID NO: 3382873 - RNA, 19 nt, Human
cucccgaguagcugggacu

SEQ ID NO: 3382874 - RNA, 20 nt, Human
cucccgaguagggaggacca

SEQ ID NO: 3382875 - RNA, 21 nt, Human
cucccgcccaaaccuuucccc

SEQ ID NO: 3382876 - RNA, 23 nt, Human
cucccgccccccacacuucccug

SEQ ID NO: 3382877 - RNA, 15 nt, Human
cucccgcuccgggcu

SEQ ID NO: 3382878 - RNA, 13 nt, Human
cucccgcugcugc

SEQ ID NO: 3382879 - RNA, 14 nt, Human
cucccgcugcugcu

SEQ ID NO: 3382880 - RNA, 17 nt, Human
cucccgcugcugcugcu

SEQ ID NO: 3382881 - RNA, 20 nt, Human
cucccggagguugggugggc

SEQ ID NO: 3382882 - RNA, 18 nt, Human
cucccggcacuccaugcu

SEQ ID NO: 3382883 - RNA, 19 nt, Human
cucccggcaugggaaagcc

SEQ ID NO: 3382884 - RNA, 19 nt, Human
cucccgggacucacuggca

SEQ ID NO: 3382885 - RNA, 22 nt, Human
cucccgggcccucccuuggaaa

SEQ ID NO: 3382886 - RNA, 17 nt, Human
cucccggguccuuggcc

SEQ ID NO: 3382887 - RNA, 15 nt, Human
cucccggugcccaag

SEQ ID NO: 3382888 - RNA, 14 nt, Human
cucccgucagggcc

SEQ ID NO: 3382889 - RNA, 16 nt, Human
cucccgucagggccca

SEQ ID NO: 3382890 - RNA, 22 nt, Human
cucccguguaggaaccugcaca

SEQ ID NO: 3382891 - RNA, 13 nt, Human
cucccuaccaccu

SEQ ID NO: 3382892 - RNA, 14 nt, Human
cucccuaccaccuc

SEQ ID NO: 3382893 - RNA, 15 nt, Human
cucccuaccaccucc

SEQ ID NO: 3382894 - RNA, 19 nt, Human
cucaggaaccgaggcaggg

SEQ ID NO: 3382895 - RNA, 15 nt, Human
cucaggaaugggcug

SEQ ID NO: 3382896 - RNA, 13 nt, Human
cucaggacacagg

SEQ ID NO: 3382897 - RNA, 16 nt, Human
cucaggacacaggccu

SEQ ID NO: 3382898 - RNA, 17 nt, Human
cucaggacacaggccug

SEQ ID NO: 3382899 - RNA, 14 nt, Human
cucaggacagaugc

SEQ ID NO: 3382900 - RNA, 21 nt, Human
cucaggaccaaagcuuucaug

SEQ ID NO: 3382901 - RNA, 12 nt, Human
cucaggaccagg

SEQ ID NO: 3382902 - RNA, 15 nt, Human
cucaggaccaggcaa

SEQ ID NO: 3382903 - RNA, 16 nt, Human
cucaggaccugggacc

SEQ ID NO: 3382904 - RNA, 15 nt, Human
cucaggacuccagcc

SEQ ID NO: 3382905 - RNA, 16 nt, Human
cucaggacuccagccc

SEQ ID NO: 3382906 - RNA, 16 nt, Human
cucaggacugcaacag

SEQ ID NO: 3382907 - RNA, 19 nt, Human
cucaggacugcaacaggcu

SEQ ID NO: 3382908 - RNA, 14 nt, Human
cucaggacugggag

SEQ ID NO: 3382909 - RNA, 23 nt, Human
cucaggacugggagcccccagcc

SEQ ID NO: 3382910 - RNA, 17 nt, Human
cucaggagcacaggcag

SEQ ID NO: 3382911 - RNA, 18 nt, Human
cucaggagcacaggcagc

SEQ ID NO: 3382912 - RNA, 16 nt, Human
cucaggagcccuggga

SEQ ID NO: 3382913 - RNA, 20 nt, Human
cucaggagcccugggaggcu

SEQ ID NO: 3382914 - RNA, 23 nt, Human
cucaggagcccugggaggcucug

SEQ ID NO: 3382915 - RNA, 24 nt, Human
cucaggagcccugggaggcucugg

SEQ ID NO: 3382916 - RNA, 21 nt, Human
cucaggagccgaagcccaggg

SEQ ID NO: 3382917 - RNA, 14 nt, Human
cucaggagccugug

SEQ ID NO: 3382918 - RNA, 16 nt, Human
cucaggaggcaggacc

SEQ ID NO: 3382919 - RNA, 17 nt, Human
cucaggaggcaggaccu

SEQ ID NO: 3382920 - RNA, 18 nt, Human
cucaggaggcaggaccuu

SEQ ID NO: 3382921 - RNA, 19 nt, Human
cucaggaggcgcccuuggc

SEQ ID NO: 3382922 - RNA, 18 nt, Human
cucaggaguuugagacca

SEQ ID NO: 3382923 - RNA, 20 nt, Human
cucaggauauccuuaucaga

SEQ ID NO: 3382924 - RNA, 22 nt, Human
cucaggauauccuuaucagagc

SEQ ID NO: 3382925 - RNA, 13 nt, Human
cucaggaucucuu

SEQ ID NO: 3382926 - RNA, 15 nt, Human
cucaggaugcccagg

SEQ ID NO: 3382927 - RNA, 15 nt, Human
cucaggcacacagcu

SEQ ID NO: 3382928 - RNA, 18 nt, Human
cucaggcacuagccuuug

SEQ ID NO: 3382929 - RNA, 23 nt, Human
cucaggcacuagccuuuggcucu

SEQ ID NO: 3382930 - RNA, 15 nt, Human
cucaggcagcucaag

SEQ ID NO: 3382931 - RNA, 18 nt, Human
cucaggcaggggccucca

SEQ ID NO: 3382932 - RNA, 18 nt, Human
cucaggcaggugggaugg

SEQ ID NO: 3382933 - RNA, 16 nt, Human
cucaggcauaggccug

SEQ ID NO: 3382934 - RNA, 17 nt, Human
cucaggcauaggccugg

SEQ ID NO: 3382935 - RNA, 20 nt, Human
cucaggcauaggccugggug

SEQ ID NO: 3382936 - RNA, 23 nt, Human
cucaggcauaggccugggugcug

SEQ ID NO: 3382937 - RNA, 19 nt, Human
cucaggccaacaagccaac

SEQ ID NO: 3382938 - RNA, 18 nt, Human
cucaggccaccugccccc

SEQ ID NO: 3382939 - RNA, 13 nt, Human
cucaggccagagc

SEQ ID NO: 3382940 - RNA, 18 nt, Human
cucaggccagagccaagg

SEQ ID NO: 3382941 - RNA, 15 nt, Human
cucaggccagcugcu

SEQ ID NO: 3382942 - RNA, 18 nt, Human
cucaggccagcugcuugg

SEQ ID NO: 3382943 - RNA, 20 nt, Human
cucaggccagcugcuugggc

SEQ ID NO: 3382944 - RNA, 20 nt, Human
cucaggcccccaccuggcuc

SEQ ID NO: 3382945 - RNA, 22 nt, Human
cucaggcccccaccuggcucac

SEQ ID NO: 3382946 - RNA, 19 nt, Human
cucaggccggcagccccag

SEQ ID NO: 3382947 - RNA, 13 nt, Human
cucaggccucugu

SEQ ID NO: 3382948 - RNA, 14 nt, Human
cucaggccuggggg

SEQ ID NO: 3382949 - RNA, 16 nt, Human
cucaggccugggggcu

SEQ ID NO: 3382950 - RNA, 21 nt, Human
cucaggccugggggcugggca

SEQ ID NO: 3382951 - RNA, 21 nt, Human
cucaggcgauccaccugucuc

SEQ ID NO: 3382952 - RNA, 17 nt, Human
cucaggcugaccacuuu

SEQ ID NO: 3382953 - RNA, 20 nt, Human
cucaggcugcagcuggacag

SEQ ID NO: 3382954 - RNA, 12 nt, Human
cucaggcugccu

SEQ ID NO: 3382955 - RNA, 13 nt, Human
cucaggcugccug

SEQ ID NO: 3382956 - RNA, 22 nt, Human
cucaggcuuucacuauuuccuu

SEQ ID NO: 3382957 - RNA, 17 nt, Human
cucagggaaaagcagcu

SEQ ID NO: 3382958 - RNA, 16 nt, Human
cucagggaagcccagc

SEQ ID NO: 3382959 - RNA, 17 nt, Human
cucagggaagcccagcu

SEQ ID NO: 3382960 - RNA, 19 nt, Human
cucagggaagcccagcucc

SEQ ID NO: 3382961 - RNA, 20 nt, Human
cucagggaagcccagcucca

SEQ ID NO: 3382962 - RNA, 20 nt, Human
cucagggacagagacaccug

SEQ ID NO: 3382963 - RNA, 22 nt, Human
cucagggacagagacaccugca

SEQ ID NO: 3382964 - RNA, 15 nt, Human
cucagggacagagcc

SEQ ID NO: 3382965 - RNA, 12 nt, Human
cucagggaccac

SEQ ID NO: 3382966 - RNA, 16 nt, Human
cucagggaccacagca

SEQ ID NO: 3382967 - RNA, 19 nt, Human
cucagggaccacagcaagg

SEQ ID NO: 3382968 - RNA, 18 nt, Human
cucagggagcagggaagg

SEQ ID NO: 3382969 - RNA, 18 nt, Human
cucagggcaaagccaggu

SEQ ID NO: 3382970 - RNA, 22 nt, Human
cucagggcaaagccaggucccu

SEQ ID NO: 3382971 - RNA, 16 nt, Human
cucagggcagccugcc

SEQ ID NO: 3382972 - RNA, 19 nt, Human
cucagggccaugcugaggc

SEQ ID NO: 3382973 - RNA, 12 nt, Human
cucagggcccca

SEQ ID NO: 3382974 - RNA, 14 nt, Human
cucagggccuggcu

SEQ ID NO: 3382975 - RNA, 15 nt, Human
cucagggccuggcuc

SEQ ID NO: 3382976 - RNA, 15 nt, Human
cucagggcucccagg

SEQ ID NO: 3382977 - RNA, 16 nt, Human
cucagggcucccaggg

SEQ ID NO: 3382978 - RNA, 17 nt, Human
cucagggcuccucccag

SEQ ID NO: 3382979 - RNA, 21 nt, Human
cucagggcuccucccagcuug

SEQ ID NO: 3382980 - RNA, 14 nt, Human
cucagggcuccugc

SEQ ID NO: 3382981 - RNA, 17 nt, Human
cucagggcuccuggguu

SEQ ID NO: 3382982 - RNA, 17 nt, Human
cucagggcuucuaguuu

SEQ ID NO: 3382983 - RNA, 13 nt, Human
cucaggggcagcu

SEQ ID NO: 3382984 - RNA, 20 nt, Human
cucaggggccagaggaacug

SEQ ID NO: 3382985 - RNA, 18 nt, Human
cucaggggcccuggagca

SEQ ID NO: 3382986 - RNA, 14 nt, Human
cucaggggcuguuu

SEQ ID NO: 3382987 - RNA, 19 nt, Human
cucaggggcuguuugagga

SEQ ID NO: 3382988 - RNA, 14 nt, Human
cucagggucccugg

SEQ ID NO: 3382989 - RNA, 17 nt, Human
cucagggucccuggugg

SEQ ID NO: 3382990 - RNA, 20 nt, Human
cucagggucccugguggcag

SEQ ID NO: 3382991 - RNA, 24 nt, Human
cucagggucccugguggcagcuca

SEQ ID NO: 3382992 - RNA, 13 nt, Human
cucagggucucug

SEQ ID NO: 3382993 - RNA, 17 nt, Human
cucagggucucugcugc

SEQ ID NO: 3382994 - RNA, 19 nt, Human
cucagggucucugcugccg

SEQ ID NO: 3382995 - RNA, 14 nt, Human
cucaggguguccca

SEQ ID NO: 3382996 - RNA, 23 nt, Human
cucagguagaagguugacacagu

SEQ ID NO: 3382997 - RNA, 20 nt, Human
cucaggucccuggggcuagg

SEQ ID NO: 3382998 - RNA, 14 nt, Human
cucaggugagaagc

SEQ ID NO: 3382999 - RNA, 20 nt, Human
cucaggugagaagcagagga

SEQ ID NO: 3383000 - RNA, 23 nt, Human
cucaggugauccacccaccucag

SEQ ID NO: 3383001 - RNA, 20 nt, Human
cucaggugaucuaccugccu

SEQ ID NO: 3383002 - RNA, 16 nt, Human
cucaggugcuggggcc

SEQ ID NO: 3383003 - RNA, 20 nt, Human
cucagguggccagccuggau

SEQ ID NO: 3383004 - RNA, 18 nt, Human
cucagguggccaugccuc

SEQ ID NO: 3383005 - RNA, 18 nt, Human
cccagccccuacugcugu

SEQ ID NO: 3383006 - RNA, 13 nt, Human
cccagccccuaga

SEQ ID NO: 3383007 - RNA, 14 nt, Human
cccagccccuagaa

SEQ ID NO: 3383008 - RNA, 19 nt, Human
cccagccccuagaaaccca

SEQ ID NO: 3383009 - RNA, 22 nt, Human
cccagccccuagaaacccaagc

SEQ ID NO: 3383010 - RNA, 17 nt, Human
cccagccccuagcccag

SEQ ID NO: 3383011 - RNA, 19 nt, Human
cccagccccuagcccagga

SEQ ID NO: 3383012 - RNA, 20 nt, Human
cccagccccuagcccaggag

SEQ ID NO: 3383013 - RNA, 11 nt, Human
cccagccccuu

SEQ ID NO: 3383014 - RNA, 16 nt, Human
cccagcccggcuccca

SEQ ID NO: 3383015 - RNA, 17 nt, Human
cccagcccuauggaugu

SEQ ID NO: 3383016 - RNA, 19 nt, Human
cccagcccucaucccgagc

SEQ ID NO: 3383017 - RNA, 23 nt, Human
cccagcccuccuuaucaaaggac

SEQ ID NO: 3383018 - RNA, 10 nt, Human
cccagcccug

SEQ ID NO: 3383019 - RNA, 13 nt, Human
cccagcccugcug

SEQ ID NO: 3383020 - RNA, 15 nt, Human
cccagcccugcuggg

SEQ ID NO: 3383021 - RNA, 14 nt, Human
cccagcccuggucu

SEQ ID NO: 3383022 - RNA, 18 nt, Human
cccagcccuggucucagc

SEQ ID NO: 3383023 - RNA, 15 nt, Human
cccagcccuguggaa

SEQ ID NO: 3383024 - RNA, 21 nt, Human
cccagcccuuugggaggcuga

SEQ ID NO: 3383025 - RNA, 19 nt, Human
cccagccgacccccucucc

SEQ ID NO: 3383026 - RNA, 17 nt, Human
cccagccggccucucug

SEQ ID NO: 3383027 - RNA, 18 nt, Human
cccagccggccucucugg

SEQ ID NO: 3383028 - RNA, 21 nt, Human
cccagccggccucucuggccu

SEQ ID NO: 3383029 - RNA, 20 nt, Human
cccagccucagcgcggcccu

SEQ ID NO: 3383030 - RNA, 16 nt, Human
cccagccucccugaag

SEQ ID NO: 3383031 - RNA, 15 nt, Human
cccagccucuuuccc

SEQ ID NO: 3383032 - RNA, 18 nt, Human
cccagccugcgccugcug

SEQ ID NO: 3383033 - RNA, 22 nt, Human
cccagccugcgccugcugcaug

SEQ ID NO: 3383034 - RNA, 19 nt, Human
cccagccuggaugccaucc

SEQ ID NO: 3383035 - RNA, 21 nt, Human
cccagccuggccacgcagcca

SEQ ID NO: 3383036 - RNA, 13 nt, Human
cccagccuggccc

SEQ ID NO: 3383037 - RNA, 15 nt, Human
cccagccuggcccag

SEQ ID NO: 3383038 - RNA, 20 nt, Human
cccagccuggcccagcuccc

SEQ ID NO: 3383039 - RNA, 23 nt, Human
cccagccugggauaggggcagag

SEQ ID NO: 3383040 - RNA, 18 nt, Human
cccagccugggccuaugg

SEQ ID NO: 3383041 - RNA, 19 nt, Human
cccagccugggccuaugga

SEQ ID NO: 3383042 - RNA, 11 nt, Human
cccagccuguc

SEQ ID NO: 3383043 - RNA, 18 nt, Human
cccagccugucagaucca

SEQ ID NO: 3383044 - RNA, 23 nt, Human
cccagccuucuuugcuugccucu

SEQ ID NO: 3383045 - RNA, 15 nt, Human
cccagcgagcccugg

SEQ ID NO: 3383046 - RNA, 18 nt, Human
cccagcgagcccuggugg

SEQ ID NO: 3383047 - RNA, 16 nt, Human
cccagcgagggcccca

SEQ ID NO: 3383048 - RNA, 23 nt, Human
cccagcgauucccucucccaggc

SEQ ID NO: 3383049 - RNA, 16 nt, Human
cccagcgcucugccuc

SEQ ID NO: 3383050 - RNA, 20 nt, Human
cccagcgugaagccagggcc

SEQ ID NO: 3383051 - RNA, 15 nt, Human
cccagcguggccucc

SEQ ID NO: 3383052 - RNA, 22 nt, Human
cccagcuacucagaagccugag

SEQ ID NO: 3383053 - RNA, 14 nt, Human
cccagcuacucagg

SEQ ID NO: 3383054 - RNA, 20 nt, Human
cccagcuacucaggaggcug

SEQ ID NO: 3383055 - RNA, 15 nt, Human
cccagcuacuuggga

SEQ ID NO: 3383056 - RNA, 20 nt, Human
cccagcuauaccugugccuc

SEQ ID NO: 3383057 - RNA, 21 nt, Human
cccagcuaugguucucucgca

SEQ ID NO: 3383058 - RNA, 13 nt, Human
cccagcucagggg

SEQ ID NO: 3383059 - RNA, 18 nt, Human
cccagcucaggggcagcu

SEQ ID NO: 3383060 - RNA, 20 nt, Human
cccagcucaggggcagcuca

SEQ ID NO: 3383061 - RNA, 15 nt, Human
cccagcuccagggcc

SEQ ID NO: 3383062 - RNA, 16 nt, Human
cccagcuccagggcca

SEQ ID NO: 3383063 - RNA, 16 nt, Human
cccagcucccaccucc

SEQ ID NO: 3383064 - RNA, 13 nt, Human
cccagcucccagg

SEQ ID NO: 3383065 - RNA, 17 nt, Human
cccagcuccggccuguc

SEQ ID NO: 3383066 - RNA, 12 nt, Human
cccagcuccuga

SEQ ID NO: 3383067 - RNA, 20 nt, Human
cccagcuccugacacugcug

SEQ ID NO: 3383068 - RNA, 22 nt, Human
cccagcuccugacacugcugga

SEQ ID NO: 3383069 - RNA, 16 nt, Human
cccagcucgcgggacc

SEQ ID NO: 3383070 - RNA, 14 nt, Human
cccagcucucccuc

SEQ ID NO: 3383071 - RNA, 15 nt, Human
cccagcucucccucu

SEQ ID NO: 3383072 - RNA, 16 nt, Human
cccagcucucccucug

SEQ ID NO: 3383073 - RNA, 17 nt, Human
cccagcucucccucugg

SEQ ID NO: 3383074 - RNA, 19 nt, Human
cccagcucucccucuggcc

SEQ ID NO: 3383075 - RNA, 12 nt, Human
cccagcucugaa

SEQ ID NO: 3383076 - RNA, 18 nt, Human
cccagcucugaggacugc

SEQ ID NO: 3383077 - RNA, 22 nt, Human
cccagcucugaggacugcacca

SEQ ID NO: 3383078 - RNA, 13 nt, Human
cccagcucugguc

SEQ ID NO: 3383079 - RNA, 14 nt, Human
cccagcucuggucc

SEQ ID NO: 3383080 - RNA, 15 nt, Human
cccagcucuggucca

SEQ ID NO: 3383081 - RNA, 18 nt, Human
cccagcucugguccauag

SEQ ID NO: 3383082 - RNA, 21 nt, Human
cccagcugacaguccucucca

SEQ ID NO: 3383083 - RNA, 12 nt, Human
cccagcugcacc

SEQ ID NO: 3383084 - RNA, 13 nt, Human
cccagcugcaccc

SEQ ID NO: 3383085 - RNA, 13 nt, Human
cccagcugcaccu

SEQ ID NO: 3383086 - RNA, 18 nt, Human
cccagcugcaccugccag

SEQ ID NO: 3383087 - RNA, 21 nt, Human
cccagcugcaccugccagccu

SEQ ID NO: 3383088 - RNA, 12 nt, Human
cccagcugcccc

SEQ ID NO: 3383089 - RNA, 21 nt, Human
cccagcugccccucccugcca

SEQ ID NO: 3383090 - RNA, 14 nt, Human
cccagcugcucccc

SEQ ID NO: 3383091 - RNA, 15 nt, Human
cccagcugcuccccu

SEQ ID NO: 3383092 - RNA, 21 nt, Human
cccagcugcuccccucccucc

SEQ ID NO: 3383093 - RNA, 12 nt, Human
cccagcugcucu

SEQ ID NO: 3383094 - RNA, 23 nt, Human
cccagcugcucugcccagagcug

SEQ ID NO: 3383095 - RNA, 17 nt, Human
cuccuguaagccaaaga

SEQ ID NO: 3383096 - RNA, 14 nt, Human
cuccuguaauuccu

SEQ ID NO: 3383097 - RNA, 18 nt, Human
cuccuguaauuccuaccu

SEQ ID NO: 3383098 - RNA, 16 nt, Human
cuccuguaccucuuga

SEQ ID NO: 3383099 - RNA, 21 nt, Human
cuccuguccucccauccccug

SEQ ID NO: 3383100 - RNA, 17 nt, Human
cuccugucuaacugcug

SEQ ID NO: 3383101 - RNA, 13 nt, Human
cuccugucugcca

SEQ ID NO: 3383102 - RNA, 14 nt, Human
cuccugucugccag

SEQ ID NO: 3383103 - RNA, 15 nt, Human
cuccugucugccagc

SEQ ID NO: 3383104 - RNA, 16 nt, Human
cuccugucugccagcc

SEQ ID NO: 3383105 - RNA, 22 nt, Human
cuccugucugccagccagcagc

SEQ ID NO: 3383106 - RNA, 23 nt, Human
cuccugucugccagccagcagcc

SEQ ID NO: 3383107 - RNA, 19 nt, Human
cuccugucuucccagggua

SEQ ID NO: 3383108 - RNA, 14 nt, Human
cuccugugcccaca

SEQ ID NO: 3383109 - RNA, 12 nt, Human
cuccugugcccu

SEQ ID NO: 3383110 - RNA, 11 nt, Human
cuccugugcua

SEQ ID NO: 3383111 - RNA, 14 nt, Human
cuccugugcucagc

SEQ ID NO: 3383112 - RNA, 16 nt, Human
cuccugugcucagccc

SEQ ID NO: 3383113 - RNA, 20 nt, Human
cuccugugcucagcccugag

SEQ ID NO: 3383114 - RNA, 13 nt, Human
cuccugugcuggg

SEQ ID NO: 3383115 - RNA, 19 nt, Human
cuccuguggccccacccug

SEQ ID NO: 3383116 - RNA, 21 nt, Human
cuccuguggccccacccuggg

SEQ ID NO: 3383117 - RNA, 16 nt, Human
cuccuguggggaaagg

SEQ ID NO: 3383118 - RNA, 13 nt, Human
cuccuguguacag

SEQ ID NO: 3383119 - RNA, 15 nt, Human
cuccuguguacugug

SEQ ID NO: 3383120 - RNA, 16 nt, Human
cuccuguguacugugu

SEQ ID NO: 3383121 - RNA, 17 nt, Human
cuccuguguacuguguc

SEQ ID NO: 3383122 - RNA, 18 nt, Human
cuccuguguagcugggau

SEQ ID NO: 3383123 - RNA, 15 nt, Human
cuccugugucuugca

SEQ ID NO: 3383124 - RNA, 16 nt, Human
cuccugugugugcgcc

SEQ ID NO: 3383125 - RNA, 19 nt, Human
cuccugugugugcgccuac

SEQ ID NO: 3383126 - RNA, 23 nt, Human
cuccugugugugcgccuacagga

SEQ ID NO: 3383127 - RNA, 14 nt, Human
cuccuguugggaga

SEQ ID NO: 3383128 - RNA, 18 nt, Human
cuccuguuuauucccauc

SEQ ID NO: 3383129 - RNA, 19 nt, Human
cuccuguuuugcacagcca

SEQ ID NO: 3383130 - RNA, 20 nt, Human
cuccuuaacacugagcuguc

SEQ ID NO: 3383131 - RNA, 13 nt, Human
cuccuuaaggcuc

SEQ ID NO: 3383132 - RNA, 14 nt, Human
cuccuuagaaaaaa

SEQ ID NO: 3383133 - RNA, 21 nt, Human
cuccuuagagacaucaaaauc

SEQ ID NO: 3383134 - RNA, 15 nt, Human
cuccuuagcugccaa

SEQ ID NO: 3383135 - RNA, 20 nt, Human
cuccuuaggguuuucucucu

SEQ ID NO: 3383136 - RNA, 16 nt, Human
cuccuuagucuucuca

SEQ ID NO: 3383137 - RNA, 17 nt, Human
cuccuuagucuucucau

SEQ ID NO: 3383138 - RNA, 19 nt, Human
cuccuuagucuucucauag

SEQ ID NO: 3383139 - RNA, 23 nt, Human
cuccuuauggguagggcucugac

SEQ ID NO: 3383140 - RNA, 19 nt, Human
cuccuuauuuggcgugacc

SEQ ID NO: 3383141 - RNA, 20 nt, Human
cuccuucaacaaggcuugcu

SEQ ID NO: 3383142 - RNA, 14 nt, Human
cuccuucagacacc

SEQ ID NO: 3383143 - RNA, 16 nt, Human
cuccuuccaccucccu

SEQ ID NO: 3383144 - RNA, 16 nt, Human
cuccuuccagcuagug

SEQ ID NO: 3383145 - RNA, 14 nt, Human
cuccuuccaguguc

SEQ ID NO: 3383146 - RNA, 17 nt, Human
cuccuucccacucuucu

SEQ ID NO: 3383147 - RNA, 13 nt, Human
cuccuucccagcu

SEQ ID NO: 3383148 - RNA, 19 nt, Human
cuccuucccucucuggaga

SEQ ID NO: 3383149 - RNA, 14 nt, Human
cuccuucccuugcu

SEQ ID NO: 3383150 - RNA, 11 nt, Human
cuccuuccugc

SEQ ID NO: 3383151 - RNA, 16 nt, Human
cccaggagcccauuug

SEQ ID NO: 3383152 - RNA, 22 nt, Human
cccaggagcccauuuggagggc

SEQ ID NO: 3383153 - RNA, 13 nt, Human
cccaggagccccg

SEQ ID NO: 3383154 - RNA, 14 nt, Human
cccaggagccccga

SEQ ID NO: 3383155 - RNA, 13 nt, Human
cccaggagcuccc

SEQ ID NO: 3383156 - RNA, 20 nt, Human
cccaggagcuccccucccca

SEQ ID NO: 3383157 - RNA, 19 nt, Human
cccaggaggacucccugcu

SEQ ID NO: 3383158 - RNA, 22 nt, Human
cccaggaggcagggaggcagcc

SEQ ID NO: 3383159 - RNA, 16 nt, Human
cccaggaggccagccu

SEQ ID NO: 3383160 - RNA, 24 nt, Human
cccaggaguucgaggcugcaguca

SEQ ID NO: 3383161 - RNA, 18 nt, Human
cccaggaguucugcucau

SEQ ID NO: 3383162 - RNA, 23 nt, Human
cccaggaguuugaggcugcagcg

SEQ ID NO: 3383163 - RNA, 15 nt, Human
cccaggaguuuggcc

SEQ ID NO: 3383164 - RNA, 20 nt, Human
cccaggaguuuggccagaag

SEQ ID NO: 3383165 - RNA, 17 nt, Human
cccaggauauauuuuau

SEQ ID NO: 3383166 - RNA, 15 nt, Human
cccaggauccccaag

SEQ ID NO: 3383167 - RNA, 12 nt, Human
cccaggcaggga

SEQ ID NO: 3383168 - RNA, 15 nt, Human
cccaggcagggccaa

SEQ ID NO: 3383169 - RNA, 13 nt, Human
cccaggccaggac

SEQ ID NO: 3383170 - RNA, 18 nt, Human
cccaggccaggacucugc

SEQ ID NO: 3383171 - RNA, 23 nt, Human
cccaggccaggacucugcagccu

SEQ ID NO: 3383172 - RNA, 18 nt, Human
cccaggccaggcuccuuc

SEQ ID NO: 3383173 - RNA, 14 nt, Human
cccaggccaguaag

SEQ ID NO: 3383174 - RNA, 14 nt, Human
cccaggccaucuuc

SEQ ID NO: 3383175 - RNA, 18 nt, Human
cccaggccaucuuccagg

SEQ ID NO: 3383176 - RNA, 22 nt, Human
cccaggccaucuuccagguggg

SEQ ID NO: 3383177 - RNA, 18 nt, Human
cccaggcccacugugccu

SEQ ID NO: 3383178 - RNA, 18 nt, Human
cccaggccccaggaagcc

SEQ ID NO: 3383179 - RNA, 14 nt, Human
cccaggccccauga

SEQ ID NO: 3383180 - RNA, 16 nt, Human
cccaggccccaugacc

SEQ ID NO: 3383181 - RNA, 20 nt, Human
cccaggccccaugaccucca

SEQ ID NO: 3383182 - RNA, 22 nt, Human
cccaggccccaugaccuccagc

SEQ ID NO: 3383183 - RNA, 11 nt, Human
cccaggccccu

SEQ ID NO: 3383184 - RNA, 16 nt, Human
cccaggccccugccac

SEQ ID NO: 3383185 - RNA, 16 nt, Human
cccaggccgcagcucu

SEQ ID NO: 3383186 - RNA, 13 nt, Human
cccaggccggcca

SEQ ID NO: 3383187 - RNA, 14 nt, Human
cccaggccuauguu

SEQ ID NO: 3383188 - RNA, 21 nt, Human
cccaggccuauguugauccau

SEQ ID NO: 3383189 - RNA, 17 nt, Human
cccaggccuccagcuca

SEQ ID NO: 3383190 - RNA, 18 nt, Human
cccaggccuccagcucag

SEQ ID NO: 3383191 - RNA, 17 nt, Human
cccaggccuccuacagc

SEQ ID NO: 3383192 - RNA, 16 nt, Human
cccaggccugccuguu

SEQ ID NO: 3383193 - RNA, 14 nt, Human
cccaggcugagccu

SEQ ID NO: 3383194 - RNA, 18 nt, Human
cccaggcugagccucagu

SEQ ID NO: 3383195 - RNA, 15 nt, Human
cccaggcugccgucc

SEQ ID NO: 3383196 - RNA, 22 nt, Human
cccaggcugccguccccuagag

SEQ ID NO: 3383197 - RNA, 20 nt, Human
cccaggcugccugagcaccu

SEQ ID NO: 3383198 - RNA, 19 nt, Human
cccaggcuggacaugcuga

SEQ ID NO: 3383199 - RNA, 21 nt, Human
cccaggcuggacaugcugacu

SEQ ID NO: 3383200 - RNA, 13 nt, Human
cccaggcuggagu

SEQ ID NO: 3383201 - RNA, 20 nt, Human
cccaggcuggagugcaauga

SEQ ID NO: 3383202 - RNA, 15 nt, Human
cccaggcuggccagc

SEQ ID NO: 3383203 - RNA, 17 nt, Human
cccaggcuggccagccc

SEQ ID NO: 3383204 - RNA, 13 nt, Human
cccaggcuggcgu

SEQ ID NO: 3383205 - RNA, 17 nt, Human
cccaggcuggcgugcag

SEQ ID NO: 3383206 - RNA, 19 nt, Human
cccaggcuggcgugcagug

SEQ ID NO: 3383207 - RNA, 12 nt, Human
cccaggcugggc

SEQ ID NO: 3383208 - RNA, 16 nt, Human
cccaggcuggucuuga

SEQ ID NO: 3383209 - RNA, 21 nt, Human
cccaggcugugcagcgcagcu

SEQ ID NO: 3383210 - RNA, 22 nt, Human
cccaggcuuagucacugagaca

SEQ ID NO: 3383211 - RNA, 15 nt, Human
cccagggaagcagca

SEQ ID NO: 3383212 - RNA, 19 nt, Human
cccagggaagcagcagccu

SEQ ID NO: 3383213 - RNA, 23 nt, Human
cccagggaagcagcagccucgcc

SEQ ID NO: 3383214 - RNA, 14 nt, Human
cccagggacaccag

SEQ ID NO: 3383215 - RNA, 15 nt, Human
cccagggacaccagc

SEQ ID NO: 3383216 - RNA, 18 nt, Human
cccagggacaccagccag

SEQ ID NO: 3383217 - RNA, 14 nt, Human
cccagggagaggcc

SEQ ID NO: 3383218 - RNA, 16 nt, Human
cccagggcacaggagc

SEQ ID NO: 3383219 - RNA, 13 nt, Human
cccagggcacgug

SEQ ID NO: 3383220 - RNA, 15 nt, Human
cccagggcagccagg

SEQ ID NO: 3383221 - RNA, 16 nt, Human
cccagggcaucuggga

SEQ ID NO: 3383222 - RNA, 18 nt, Human
cccagggccagggcccug

SEQ ID NO: 3383223 - RNA, 20 nt, Human
cccagggccagggcccugca

SEQ ID NO: 3383224 - RNA, 14 nt, Human
cccagggcccagag

SEQ ID NO: 3383225 - RNA, 15 nt, Human
cccagggcccagagc

SEQ ID NO: 3383226 - RNA, 16 nt, Human
cccagggcccagagcc

SEQ ID NO: 3383227 - RNA, 23 nt, Human
cccagggcccucggugggagcca

SEQ ID NO: 3383228 - RNA, 13 nt, Human
cccagggccugag

SEQ ID NO: 3383229 - RNA, 14 nt, Human
cccagggcucagcc

SEQ ID NO: 3383230 - RNA, 17 nt, Human
cccagggcucugcccca

SEQ ID NO: 3383231 - RNA, 18 nt, Human
cccagggcucugccccag

SEQ ID NO: 3383232 - RNA, 17 nt, Human
cccagggcugggaggaa

SEQ ID NO: 3383233 - RNA, 20 nt, Human
cccagggcugggaggaagga

SEQ ID NO: 3383234 - RNA, 17 nt, Human
cccagggcugucaucug

SEQ ID NO: 3383235 - RNA, 17 nt, Human
cccaggggaaaaugaag

SEQ ID NO: 3383236 - RNA, 19 nt, Human
cccaggggaacacugggga

SEQ ID NO: 3383237 - RNA, 15 nt, Human
cccaggggagagggu

SEQ ID NO: 3383238 - RNA, 16 nt, Human
cccaggggagcccucc

SEQ ID NO: 3383239 - RNA, 16 nt, Human
cccaggggaggcggca

SEQ ID NO: 3383240 - RNA, 23 nt, Human
cccaggggaggcggcacuccaac

SEQ ID NO: 3383241 - RNA, 18 nt, Human
cccaggggcccacaggga

SEQ ID NO: 3383242 - RNA, 23 nt, Human
cccaggggcucccuccgccccca

SEQ ID NO: 3383243 - RNA, 19 nt, Human
cccagggggcaugaccaga

SEQ ID NO: 3383244 - RNA, 18 nt, Human
cccaggggucucccuggc

SEQ ID NO: 3383245 - RNA, 21 nt, Human
cccaggggucucccuggcucc

SEQ ID NO: 3383246 - RNA, 17 nt, Human
cccaggggugcccccuc

SEQ ID NO: 3383247 - RNA, 15 nt, Human
cccaggguagcccgc

SEQ ID NO: 3383248 - RNA, 17 nt, Human
cccaggguagcccgccu

SEQ ID NO: 3383249 - RNA, 16 nt, Human
cccagggucuucccua

SEQ ID NO: 3383250 - RNA, 23 nt, Human
cccagggucuucccuaccucagg

SEQ ID NO: 3383251 - RNA, 22 nt, Human
cccaggguggacuuagaaagca

SEQ ID NO: 3383252 - RNA, 18 nt, Human
cccaggguggagugcagu

SEQ ID NO: 3383253 - RNA, 19 nt, Human
cccagggugggaagggcua

SEQ ID NO: 3383254 - RNA, 15 nt, Human
cccagguagcuggga

SEQ ID NO: 3383255 - RNA, 20 nt, Human
cccagguaggccaagguguc

SEQ ID NO: 3383256 - RNA, 20 nt, Human
cccagguaggggccccucuc

SEQ ID NO: 3383257 - RNA, 23 nt, Human
cccagguaggggccccucucagc

SEQ ID NO: 3383258 - RNA, 14 nt, Human
cccaggucauggaa

SEQ ID NO: 3383259 - RNA, 18 nt, Human
cccagguccagcucugga

SEQ ID NO: 3383260 - RNA, 23 nt, Human
cucccaucuuaacucuuugccuu

SEQ ID NO: 3383261 - RNA, 20 nt, Human
cucccaucuuuuguuacucu

SEQ ID NO: 3383262 - RNA, 13 nt, Human
cucccaugaagcc

SEQ ID NO: 3383263 - RNA, 14 nt, Human
cucccaugaagccu

SEQ ID NO: 3383264 - RNA, 17 nt, Human
cucccaugaagccuuuu

SEQ ID NO: 3383265 - RNA, 22 nt, Human
cucccaugaagccuuuugaaag

SEQ ID NO: 3383266 - RNA, 21 nt, Human
cucccaugaccauacugaggg

SEQ ID NO: 3383267 - RNA, 18 nt, Human
cucccaugagggagaugc

SEQ ID NO: 3383268 - RNA, 24 nt, Human
cucccaugagggagaugccaugag

SEQ ID NO: 3383269 - RNA, 15 nt, Human
cucccauggagcccc

SEQ ID NO: 3383270 - RNA, 18 nt, Human
cucccauggagccccagc

SEQ ID NO: 3383271 - RNA, 14 nt, Human
cucccauggcaccu

SEQ ID NO: 3383272 - RNA, 21 nt, Human
cucccauggcuuaaugcuucu

SEQ ID NO: 3383273 - RNA, 17 nt, Human
cucccaugucacugcag

SEQ ID NO: 3383274 - RNA, 12 nt, Human
cucccauuucua

SEQ ID NO: 3383275 - RNA, 21 nt, Human
cuccccaaaucaauacacuag

SEQ ID NO: 3383276 - RNA, 11 nt, Human
cuccccaaccc

SEQ ID NO: 3383277 - RNA, 15 nt, Human
cuccccaacccccaa

SEQ ID NO: 3383278 - RNA, 15 nt, Human
cuccccaacccccau

SEQ ID NO: 3383279 - RNA, 20 nt, Human
cuccccaacugaccaccuuu

SEQ ID NO: 3383280 - RNA, 18 nt, Human
cuccccacaggagcccug

SEQ ID NO: 3383281 - RNA, 19 nt, Human
cuccccaccaccccagcug

SEQ ID NO: 3383282 - RNA, 16 nt, Human
cuccccacccuccugg

SEQ ID NO: 3383283 - RNA, 15 nt, Human
cuccccaccuccagg

SEQ ID NO: 3383284 - RNA, 15 nt, Human
cuccccacgagggcu

SEQ ID NO: 3383285 - RNA, 18 nt, Human
cuccccacgagggcuggc

SEQ ID NO: 3383286 - RNA, 12 nt, Human
cuccccacgccc

SEQ ID NO: 3383287 - RNA, 15 nt, Human
cuccccacgcccucc

SEQ ID NO: 3383288 - RNA, 12 nt, Human
cuccccacucug

SEQ ID NO: 3383289 - RNA, 19 nt, Human
cuccccacucugcucugau

SEQ ID NO: 3383290 - RNA, 21 nt, Human
cuccccacucugcucugaugc

SEQ ID NO: 3383291 - RNA, 22 nt, Human
cuccccacucugcucugaugca

SEQ ID NO: 3383292 - RNA, 23 nt, Human
cuccccagaauucacgccucucc

SEQ ID NO: 3383293 - RNA, 23 nt, Human
cuccccagcaagugagagcuggg

SEQ ID NO: 3383294 - RNA, 19 nt, Human
cuccccagcagguggggag

SEQ ID NO: 3383295 - RNA, 14 nt, Human
cucccuccaccuac

SEQ ID NO: 3383296 - RNA, 17 nt, Human
cucccuccaccucccug

SEQ ID NO: 3383297 - RNA, 19 nt, Human
cucccuccaccucccugca

SEQ ID NO: 3383298 - RNA, 20 nt, Human
cucccuccaccucccugcaa

SEQ ID NO: 3383299 - RNA, 18 nt, Human
cucccucccagagcaccu

SEQ ID NO: 3383300 - RNA, 18 nt, Human
cucccucccccugccccu

SEQ ID NO: 3383301 - RNA, 16 nt, Human
cucccuccccgucuca

SEQ ID NO: 3383302 - RNA, 13 nt, Human
cucccuccccugc

SEQ ID NO: 3383303 - RNA, 18 nt, Human
cucccuccccuugccugu

SEQ ID NO: 3383304 - RNA, 15 nt, Human
cucccucccucuccg

SEQ ID NO: 3383305 - RNA, 18 nt, Human
cucccuccgggucuuccu

SEQ ID NO: 3383306 - RNA, 19 nt, Human
cucccuccgggucuuccua

SEQ ID NO: 3383307 - RNA, 15 nt, Human
cucccuccucaccuc

SEQ ID NO: 3383308 - RNA, 12 nt, Human
cucccuccucca

SEQ ID NO: 3383309 - RNA, 19 nt, Human
cucccuccuuccuucuugc

SEQ ID NO: 3383310 - RNA, 18 nt, Human
cucccucgaacccacacu

SEQ ID NO: 3383311 - RNA, 10 nt, Human
cucccucuca

SEQ ID NO: 3383312 - RNA, 18 nt, Human
cucccucucaacacccag

SEQ ID NO: 3383313 - RNA, 22 nt, Human
cucccucucacugucugagagu

SEQ ID NO: 3383314 - RNA, 22 nt, Human
cucccucucccccuuaccccac

SEQ ID NO: 3383315 - RNA, 19 nt, Human
cucccucuccgacucacac

SEQ ID NO: 3383316 - RNA, 15 nt, Human
cucccucuccugccu

SEQ ID NO: 3383317 - RNA, 23 nt, Human
cucccucugccccucccccagcc

SEQ ID NO: 3383318 - RNA, 14 nt, Human
cucccucugccggc

SEQ ID NO: 3383319 - RNA, 22 nt, Human
cucccucugccugaaccuucca

SEQ ID NO: 3383320 - RNA, 14 nt, Human
cucccucuggauca

SEQ ID NO: 3383321 - RNA, 16 nt, Human
cucccucuggaucaaa

SEQ ID NO: 3383322 - RNA, 18 nt, Human
cucccucuggcccugccu

SEQ ID NO: 3383323 - RNA, 17 nt, Human
cucccucuuguuuuguu

SEQ ID NO: 3383324 - RNA, 19 nt, Human
cucccugaaccaucccuga

SEQ ID NO: 3383325 - RNA, 17 nt, Human
cucccugaagccagccu

SEQ ID NO: 3383326 - RNA, 20 nt, Human
cucccugaaguaagcaaaga

SEQ ID NO: 3383327 - RNA, 15 nt, Human
cucccugacccugca

SEQ ID NO: 3383328 - RNA, 16 nt, Human
cucccugacccugcag

SEQ ID NO: 3383329 - RNA, 18 nt, Human
cucccugacccugcagag

SEQ ID NO: 3383330 - RNA, 21 nt, Human
cucccugacccugcagagaug

SEQ ID NO: 3383331 - RNA, 14 nt, Human
cucccugacccugu

SEQ ID NO: 3383332 - RNA, 22 nt, Human
cucccugacugggggcagacau

SEQ ID NO: 3383333 - RNA, 12 nt, Human
cucccugagaug

SEQ ID NO: 3383334 - RNA, 20 nt, Human
cucccugcaucugaccagca

SEQ ID NO: 3383335 - RNA, 23 nt, Human
cucccugcaucugaccagcagcg

SEQ ID NO: 3383336 - RNA, 19 nt, Human
cucccugccagaggggaag

SEQ ID NO: 3383337 - RNA, 18 nt, Human
cucccugccgccucaaug

SEQ ID NO: 3383338 - RNA, 19 nt, Human
cucccugccgccucaaugu

SEQ ID NO: 3383339 - RNA, 18 nt, Human
cucccugccucaggccuc

SEQ ID NO: 3383340 - RNA, 15 nt, Human
cucccugccuggccc

SEQ ID NO: 3383341 - RNA, 18 nt, Human
cucccugccuggccccca

SEQ ID NO: 3383342 - RNA, 19 nt, Human
cucccugcuguccccucuu

SEQ ID NO: 3383343 - RNA, 20 nt, Human
cucccugcuguccccucuug

SEQ ID NO: 3383344 - RNA, 18 nt, Human
cucccuggagccagacuc

SEQ ID NO: 3383345 - RNA, 21 nt, Human
cucccuggagccagacucugg

SEQ ID NO: 3383346 - RNA, 18 nt, Human
cucccuggaucagaacag

SEQ ID NO: 3383347 - RNA, 21 nt, Human
cucccuggcagcacaggaaaa

SEQ ID NO: 3383348 - RNA, 13 nt, Human
cucccuggcccuc

SEQ ID NO: 3383349 - RNA, 14 nt, Human
cucccuggcccuca

SEQ ID NO: 3383350 - RNA, 15 nt, Human
cucccuggccuguuc

SEQ ID NO: 3383351 - RNA, 19 nt, Human
cucccuggccuguucuguu

SEQ ID NO: 3383352 - RNA, 14 nt, Human
cucccuggcucccu

SEQ ID NO: 3383353 - RNA, 16 nt, Human
cucccuggcucucaga

SEQ ID NO: 3383354 - RNA, 13 nt, Human
cucccuggcugcc

SEQ ID NO: 3383355 - RNA, 14 nt, Human
cucccuggcugccc

SEQ ID NO: 3383356 - RNA, 18 nt, Human
cucccuggcugcccuggc

SEQ ID NO: 3383357 - RNA, 19 nt, Human
cucccuggcugcccuggcc

SEQ ID NO: 3383358 - RNA, 11 nt, Human
cucccuggggg

SEQ ID NO: 3383359 - RNA, 15 nt, Human
cucccuggugcuuau

SEQ ID NO: 3383360 - RNA, 18 nt, Human
cucccuggugcuuaugcu

SEQ ID NO: 3383361 - RNA, 22 nt, Human
cucccuggugcuuaugcucuua

SEQ ID NO: 3383362 - RNA, 14 nt, Human
cucccuguccaccc

SEQ ID NO: 3383363 - RNA, 14 nt, Human
cucccuguccuccu

SEQ ID NO: 3383364 - RNA, 17 nt, Human
cucccugucggccuggu

SEQ ID NO: 3383365 - RNA, 13 nt, Human
cucccuguuauuu

SEQ ID NO: 3383366 - RNA, 19 nt, Human
cucccuguugacgaagucu

SEQ ID NO: 3383367 - RNA, 22 nt, Human
cucccuguugacgaagucucuu

SEQ ID NO: 3383368 - RNA, 22 nt, Human
cucccuguuugaagccugcccu

SEQ ID NO: 3383369 - RNA, 20 nt, Human
cucccuucaaccauucccca

SEQ ID NO: 3383370 - RNA, 23 nt, Human
cucccuucaaccauuccccaugg

SEQ ID NO: 3383371 - RNA, 13 nt, Human
cucccuucagccc

SEQ ID NO: 3383372 - RNA, 18 nt, Human
cucccuucagcccccagc

SEQ ID NO: 3383373 - RNA, 15 nt, Human
cucccuucauccuuc

SEQ ID NO: 3383374 - RNA, 13 nt, Human
cucccuucccucc

SEQ ID NO: 3383375 - RNA, 16 nt, Human
cucccuucccuccucc

SEQ ID NO: 3383376 - RNA, 21 nt, Human
cucccuuccgacccucuggga

SEQ ID NO: 3383377 - RNA, 22 nt, Human
cucccuuccuaugcuguucacu

SEQ ID NO: 3383378 - RNA, 13 nt, Human
cucccuuccuccc

SEQ ID NO: 3383379 - RNA, 19 nt, Human
cucccuuccuuuucccugc

SEQ ID NO: 3383380 - RNA, 20 nt, Human
cucccuuccuuuucccugcu

SEQ ID NO: 3383381 - RNA, 21 nt, Human
cucccuucgguggaagagcuc

SEQ ID NO: 3383382 - RNA, 15 nt, Human
cucccuucuaccugc

SEQ ID NO: 3383383 - RNA, 17 nt, Human
cucccuucuacugcuuc

SEQ ID NO: 3383384 - RNA, 16 nt, Human
cucccuucucccugga

SEQ ID NO: 3383385 - RNA, 21 nt, Human
cucccuucuccuugauaacag

SEQ ID NO: 3383386 - RNA, 13 nt, Human
cucccuucugcua

SEQ ID NO: 3383387 - RNA, 16 nt, Human
cucccuucugcuacug

SEQ ID NO: 3383388 - RNA, 14 nt, Human
cucccuucuucccu

SEQ ID NO: 3383389 - RNA, 17 nt, Human
cucccuuggauuguccc

SEQ ID NO: 3383390 - RNA, 18 nt, Human
cucccuugggcucccugu

SEQ ID NO: 3383391 - RNA, 21 nt, Human
cucccuugggcucugaugaaa

SEQ ID NO: 3383392 - RNA, 23 nt, Human
cucccuugggcucugaugaaaaa

SEQ ID NO: 3383393 - RNA, 19 nt, Human
cucccuuggggccuaugca

SEQ ID NO: 3383394 - RNA, 18 nt, Human
cucccuuggguucugaua

SEQ ID NO: 3383395 - RNA, 17 nt, Human
cucccuuuccuuccuaa

SEQ ID NO: 3383396 - RNA, 20 nt, Human
cucccuuuuaauccuggcug

SEQ ID NO: 3383397 - RNA, 14 nt, Human
cucccuuuuuauau

SEQ ID NO: 3383398 - RNA, 15 nt, Human
cuccgaaaugcuguc

SEQ ID NO: 3383399 - RNA, 22 nt, Human
cuccgaacacccucgaagcgcg

SEQ ID NO: 3383400 - RNA, 22 nt, Human
cuccgacuugugcacaggcaga

SEQ ID NO: 3383401 - RNA, 14 nt, Human
cuccgagagguggg

SEQ ID NO: 3383402 - RNA, 15 nt, Human
cuccgaggacccagg

SEQ ID NO: 3383403 - RNA, 13 nt, Human
cuccgaggccagu

SEQ ID NO: 3383404 - RNA, 18 nt, Human
cuccgagugaacuggucu

SEQ ID NO: 3383405 - RNA, 23 nt, Human
cuccgagugaacuggucuuccuu

SEQ ID NO: 3383406 - RNA, 15 nt, Human
cuccgauccuuccuc

SEQ ID NO: 3383407 - RNA, 13 nt, Human
cuccgcaggacuu

SEQ ID NO: 3383408 - RNA, 15 nt, Human
cuccgcaguuccugu

SEQ ID NO: 3383409 - RNA, 12 nt, Human
cuccgccagccu

SEQ ID NO: 3383410 - RNA, 14 nt, Human
cuccgccccugagc

SEQ ID NO: 3383411 - RNA, 15 nt, Human
cuccgccccugagcc

SEQ ID NO: 3383412 - RNA, 17 nt, Human
cuccgccccugagccca

SEQ ID NO: 3383413 - RNA, 17 nt, Human
cuccgcccugccacuca

SEQ ID NO: 3383414 - RNA, 16 nt, Human
cuccgccucugcuggc

SEQ ID NO: 3383415 - RNA, 17 nt, Human
cuccgccuuaccaggag

SEQ ID NO: 3383416 - RNA, 19 nt, Human
cuccgccuucacauucccc

SEQ ID NO: 3383417 - RNA, 12 nt, Human
cuccgcugcucc

SEQ ID NO: 3383418 - RNA, 16 nt, Human
cuccgcugcuccuugg

SEQ ID NO: 3383419 - RNA, 14 nt, Human
cuccgcuucccugg

SEQ ID NO: 3383420 - RNA, 21 nt, Human
cuccgcuuucuacccagcgag

SEQ ID NO: 3383421 - RNA, 15 nt, Human
cccagguccucugau

SEQ ID NO: 3383422 - RNA, 15 nt, Human
cccaggugcagccag

SEQ ID NO: 3383423 - RNA, 23 nt, Human
cccaggugcuaggaacacuccuu

SEQ ID NO: 3383424 - RNA, 15 nt, Human
cccaggugggucccg

SEQ ID NO: 3383425 - RNA, 19 nt, Human
cccagguguuaacauucca

SEQ ID NO: 3383426 - RNA, 19 nt, Human
cccagguuggagugcagug

SEQ ID NO: 3383427 - RNA, 15 nt, Human
cccagguuggcucug

SEQ ID NO: 3383428 - RNA, 16 nt, Human
cccagguuggcucugc

SEQ ID NO: 3383429 - RNA, 20 nt, Human
cccagguuggcucugccagu

SEQ ID NO: 3383430 - RNA, 16 nt, Human
cccaguaaaauugcca

SEQ ID NO: 3383431 - RNA, 18 nt, Human
cccaguaaaauugccaua

SEQ ID NO: 3383432 - RNA, 22 nt, Human
cccaguacacaggggcuugacu

SEQ ID NO: 3383433 - RNA, 21 nt, Human
cccaguaccuccugucucugg

SEQ ID NO: 3383434 - RNA, 22 nt, Human
cccaguaccuccugucucuggc

SEQ ID NO: 3383435 - RNA, 21 nt, Human
cccagucaauuacauguuugg

SEQ ID NO: 3383436 - RNA, 13 nt, Human
cccagucagccuc

SEQ ID NO: 3383437 - RNA, 15 nt, Human
cccagucagccucuc

SEQ ID NO: 3383438 - RNA, 17 nt, Human
cccagucauucugggaa

SEQ ID NO: 3383439 - RNA, 19 nt, Human
cccaguccaaauguccucc

SEQ ID NO: 3383440 - RNA, 15 nt, Human
cccccgagcuggggg

SEQ ID NO: 3383441 - RNA, 21 nt, Human
cccccgagcugggggccauga

SEQ ID NO: 3383442 - RNA, 18 nt, Human
cccccgccccgccccaca

SEQ ID NO: 3383443 - RNA, 13 nt, Human
cccccgcuggagg

SEQ ID NO: 3383444 - RNA, 14 nt, Human
cccccggcagcagc

SEQ ID NO: 3383445 - RNA, 13 nt, Human
cccccggcccccu

SEQ ID NO: 3383446 - RNA, 18 nt, Human
cccccgggaggggcccgc

SEQ ID NO: 3383447 - RNA, 16 nt, Human
cccccggggcuggguu

SEQ ID NO: 3383448 - RNA, 24 nt, Human
cccccggguuuggcgggccaagga

SEQ ID NO: 3383449 - RNA, 22 nt, Human
cccccgucuaaccacagcuccu

SEQ ID NO: 3383450 - RNA, 16 nt, Human
cccccucaaaccuccu

SEQ ID NO: 3383451 - RNA, 19 nt, Human
cccccucaaaccuccucuu

SEQ ID NO: 3383452 - RNA, 15 nt, Human
cccccuccaauccug

SEQ ID NO: 3383453 - RNA, 16 nt, Human
cccccuccaauccugc

SEQ ID NO: 3383454 - RNA, 13 nt, Human
cccccuccccagg

SEQ ID NO: 3383455 - RNA, 18 nt, Human
cccccucccccagccacu

SEQ ID NO: 3383456 - RNA, 12 nt, Human
cccccuccugcu

SEQ ID NO: 3383457 - RNA, 16 nt, Human
cccccuccugcugcag

SEQ ID NO: 3383458 - RNA, 14 nt, Human
cccccucucccagu

SEQ ID NO: 3383459 - RNA, 15 nt, Human
cccccucucccugca

SEQ ID NO: 3383460 - RNA, 18 nt, Human
cccccucucccugcaugg

SEQ ID NO: 3383461 - RNA, 16 nt, Human
cccccucugcccugcg

SEQ ID NO: 3383462 - RNA, 12 nt, Human
cccccucugucc

SEQ ID NO: 3383463 - RNA, 16 nt, Human
cccccucugucuugug

SEQ ID NO: 3383464 - RNA, 14 nt, Human
cccccucuucccug

SEQ ID NO: 3383465 - RNA, 17 nt, Human
cccccugacaacacuca

SEQ ID NO: 3383466 - RNA, 19 nt, Human
cccccugacaacacucauu

SEQ ID NO: 3383467 - RNA, 11 nt, Human
cccccugcagc

SEQ ID NO: 3383468 - RNA, 14 nt, Human
cccccugcagcuug

SEQ ID NO: 3383469 - RNA, 16 nt, Human
cccccugccagugccu

SEQ ID NO: 3383470 - RNA, 21 nt, Human
cccccugccccccagccucug

SEQ ID NO: 3383471 - RNA, 23 nt, Human
cccccugccccuucuacacucuc

SEQ ID NO: 3383472 - RNA, 12 nt, Human
cccccugcccuc

SEQ ID NO: 3383473 - RNA, 19 nt, Human
cccccugcccucguggcca

SEQ ID NO: 3383474 - RNA, 13 nt, Human
cccccugcccugc

SEQ ID NO: 3383475 - RNA, 18 nt, Human
cccccugcuggcucuucu

SEQ ID NO: 3383476 - RNA, 13 nt, Human
cccccugggcucu

SEQ ID NO: 3383477 - RNA, 22 nt, Human
cucugucugcccuucaccccag

SEQ ID NO: 3383478 - RNA, 14 nt, Human
cucugucuguccgu

SEQ ID NO: 3383479 - RNA, 23 nt, Human
cucugucuucuuugcccacaaug

SEQ ID NO: 3383480 - RNA, 19 nt, Human
cucugucuugguagguuug

SEQ ID NO: 3383481 - RNA, 16 nt, Human
cucugucuuguguuuc

SEQ ID NO: 3383482 - RNA, 14 nt, Human
cucugugaccaaug

SEQ ID NO: 3383483 - RNA, 14 nt, Human
cucugugaccucag

SEQ ID NO: 3383484 - RNA, 13 nt, Human
cucugugagacuc

SEQ ID NO: 3383485 - RNA, 17 nt, Human
cucugugagacucgaga

SEQ ID NO: 3383486 - RNA, 16 nt, Human
cucugugccagagccu

SEQ ID NO: 3383487 - RNA, 16 nt, Human
cucugugcccaugggc

SEQ ID NO: 3383488 - RNA, 22 nt, Human
cucugugcccaugggcacugcu

SEQ ID NO: 3383489 - RNA, 22 nt, Human
cucugugccucccuccccagug

SEQ ID NO: 3383490 - RNA, 15 nt, Human
cucugugcugacccu

SEQ ID NO: 3383491 - RNA, 21 nt, Human
cucugugcugacccuccuguu

SEQ ID NO: 3383492 - RNA, 19 nt, Human
cucugugcuggccagcgag

SEQ ID NO: 3383493 - RNA, 15 nt, Human
cucugugcuguggaa

SEQ ID NO: 3383494 - RNA, 18 nt, Human
cucugugcuuugacucac

SEQ ID NO: 3383495 - RNA, 22 nt, Human
cucugugcuuuuaaaugcauaa

SEQ ID NO: 3383496 - RNA, 20 nt, Human
cucuguggcuccaggccaaa

SEQ ID NO: 3383497 - RNA, 14 nt, Human
cucugugggcugca

SEQ ID NO: 3383498 - RNA, 13 nt, Human
cucuguggugucu

SEQ ID NO: 3383499 - RNA, 13 nt, Human
cucugugucacug

SEQ ID NO: 3383500 - RNA, 23 nt, Human
cucugugucagguggggcagcuu

SEQ ID NO: 3383501 - RNA, 16 nt, Human
cucuguguccuucccu

SEQ ID NO: 3383502 - RNA, 21 nt, Human
cucugugucuaagauucuaga

SEQ ID NO: 3383503 - RNA, 22 nt, Human
cucugugucuaagauucuagau

SEQ ID NO: 3383504 - RNA, 14 nt, Human
cucugugucugaga

SEQ ID NO: 3383505 - RNA, 20 nt, Human
cucugugucugaguggcuuc

SEQ ID NO: 3383506 - RNA, 15 nt, Human
cucugugugcacaaa

SEQ ID NO: 3383507 - RNA, 17 nt, Human
cucugugugcacaaaua

SEQ ID NO: 3383508 - RNA, 19 nt, Human
cucuguguuuguuccuaca

SEQ ID NO: 3383509 - RNA, 22 nt, Human
cucuguuacccaggguggagug

SEQ ID NO: 3383510 - RNA, 19 nt, Human
cucuguuauguacuguacu

SEQ ID NO: 3383511 - RNA, 17 nt, Human
cucuguucaguguaaau

SEQ ID NO: 3383512 - RNA, 13 nt, Human
cucuguucauuuc

SEQ ID NO: 3383513 - RNA, 16 nt, Human
cucuguucauuuccuc

SEQ ID NO: 3383514 - RNA, 13 nt, Human
cucuguuccaugu

SEQ ID NO: 3383515 - RNA, 15 nt, Human
cucuguuccuggcuc

SEQ ID NO: 3383516 - RNA, 13 nt, Human
cucuguucuuccu

SEQ ID NO: 3383517 - RNA, 13 nt, Human
cucuguugacugg

SEQ ID NO: 3383518 - RNA, 21 nt, Human
cucuguugccaggcuggagug

SEQ ID NO: 3383519 - RNA, 22 nt, Human
cucuguuguccuccccuugggc

SEQ ID NO: 3383520 - RNA, 13 nt, Human
cucuguuuaugcu

SEQ ID NO: 3383521 - RNA, 15 nt, Human
cucuguuuaugcuuu

SEQ ID NO: 3383522 - RNA, 16 nt, Human
cucuguuucuccuucu

SEQ ID NO: 3383523 - RNA, 14 nt, Human
cucuguuucucuuu

SEQ ID NO: 3383524 - RNA, 16 nt, Human
cucuguuuuacaaguu

SEQ ID NO: 3383525 - RNA, 17 nt, Human
cucuuaaaaaauaaaaa

SEQ ID NO: 3383526 - RNA, 19 nt, Human
cucuuaaaaaauaaaaacu

SEQ ID NO: 3383527 - RNA, 20 nt, Human
cucuuaaagcugccuguagu

SEQ ID NO: 3383528 - RNA, 17 nt, Human
cucuuaacaauuucugu

SEQ ID NO: 3383529 - RNA, 14 nt, Human
cucuuaagccaucu

SEQ ID NO: 3383530 - RNA, 21 nt, Human
cucuuaagccaucuugguaaa

SEQ ID NO: 3383531 - RNA, 22 nt, Human
cucuuaagccaucuugguaaau

SEQ ID NO: 3383532 - RNA, 17 nt, Human
cucuuaccaguauuuaa

SEQ ID NO: 3383533 - RNA, 19 nt, Human
cucuuacccuucugugccc

SEQ ID NO: 3383534 - RNA, 23 nt, Human
cucuuacccuucugugcccagcu

SEQ ID NO: 3383535 - RNA, 16 nt, Human
cucuuacuaauguaaa

SEQ ID NO: 3383536 - RNA, 17 nt, Human
cucuuacuaauguaaaa

SEQ ID NO: 3383537 - RNA, 16 nt, Human
cucuuacucuuuccua

SEQ ID NO: 3383538 - RNA, 23 nt, Human
cucuuacuuuccuuuccccagcc

SEQ ID NO: 3383539 - RNA, 22 nt, Human
cucuuagaaaaggugauaaaau

SEQ ID NO: 3383540 - RNA, 18 nt, Human
cucuuagaagaauauugu

SEQ ID NO: 3383541 - RNA, 18 nt, Human
cucuuagacuucugcuuu

SEQ ID NO: 3383542 - RNA, 18 nt, Human
cucuuagauucuuaauuc

SEQ ID NO: 3383543 - RNA, 17 nt, Human
cucuuagcagcuuccag

SEQ ID NO: 3383544 - RNA, 17 nt, Human
cucuuaggcacuuuggg

SEQ ID NO: 3383545 - RNA, 22 nt, Human
cucuuaggcauguaggacccug

SEQ ID NO: 3383546 - RNA, 22 nt, Human
cucuuauagaauauuuauuacc

SEQ ID NO: 3383547 - RNA, 11 nt, Human
cucuuaucuca

SEQ ID NO: 3383548 - RNA, 17 nt, Human
cucuuaugcuguaccca

SEQ ID NO: 3383549 - RNA, 19 nt, Human
cucuuaugcuguacccagu

SEQ ID NO: 3383550 - RNA, 20 nt, Human
cucuuaugcuguacccaguu

SEQ ID NO: 3383551 - RNA, 22 nt, Human
cucuuauggauguccccagcag

SEQ ID NO: 3383552 - RNA, 13 nt, Human
cucuuauugccca

SEQ ID NO: 3383553 - RNA, 17 nt, Human
cucuuauugccucacuu

SEQ ID NO: 3383554 - RNA, 20 nt, Human
cucuuauugccucacuucag

SEQ ID NO: 3383555 - RNA, 14 nt, Human
cucuuauuucauca

SEQ ID NO: 3383556 - RNA, 12 nt, Human
cucuuauuugcu

SEQ ID NO: 3383557 - RNA, 15 nt, Human
cucuuauuuuacaau

SEQ ID NO: 3383558 - RNA, 17 nt, Human
cucuucaacugaccagc

SEQ ID NO: 3383559 - RNA, 20 nt, Human
cucuucaacugaccagccuc

SEQ ID NO: 3383560 - RNA, 18 nt, Human
cucuucaaggacuuucug

SEQ ID NO: 3383561 - RNA, 16 nt, Human
cucuucaccccccacu

SEQ ID NO: 3383562 - RNA, 17 nt, Human
cucuucagacucucagc

SEQ ID NO: 3383563 - RNA, 19 nt, Human
cucuucagaucucuaacuu

SEQ ID NO: 3383564 - RNA, 14 nt, Human
cucuucagaugcca

SEQ ID NO: 3383565 - RNA, 21 nt, Human
cucuucagaugccacuucuaa

SEQ ID NO: 3383566 - RNA, 14 nt, Human
cucuucaggccucc

SEQ ID NO: 3383567 - RNA, 15 nt, Human
cucuucaggccuccc

SEQ ID NO: 3383568 - RNA, 17 nt, Human
cucuucaggccucccuc

SEQ ID NO: 3383569 - RNA, 17 nt, Human
cucuucaucccauucca

SEQ ID NO: 3383570 - RNA, 19 nt, Human
cucuucaucccauuccagg

SEQ ID NO: 3383571 - RNA, 14 nt, Human
cucuucaucuaaua

SEQ ID NO: 3383572 - RNA, 16 nt, Human
cucuuccaaccauuua

SEQ ID NO: 3383573 - RNA, 13 nt, Human
cucuuccagaauc

SEQ ID NO: 3383574 - RNA, 23 nt, Human
cucuuccagucuuccugacacuu

SEQ ID NO: 3383575 - RNA, 14 nt, Human
cucuuccaguuugc

SEQ ID NO: 3383576 - RNA, 16 nt, Human
cucuuccaucaugucc

SEQ ID NO: 3383577 - RNA, 16 nt, Human
cucuuccaugcugugc

SEQ ID NO: 3383578 - RNA, 14 nt, Human
cucuuccccagacg

SEQ ID NO: 3383579 - RNA, 17 nt, Human
cucuucccccucuccca

SEQ ID NO: 3383580 - RNA, 15 nt, Human
cucuuccccuugccc

SEQ ID NO: 3383581 - RNA, 19 nt, Human
cucuuccccuugcccuugc

SEQ ID NO: 3383582 - RNA, 23 nt, Human
cucuucccgccgcccagcccacc

SEQ ID NO: 3383583 - RNA, 22 nt, Human
cucuucccugcgccugugaugc

SEQ ID NO: 3383584 - RNA, 21 nt, Human
cucuucccugguaagaaaaag

SEQ ID NO: 3383585 - RNA, 15 nt, Human
ccccucagcucggcu

SEQ ID NO: 3383586 - RNA, 19 nt, Human
ccccucaggacccucgcug

SEQ ID NO: 3383587 - RNA, 18 nt, Human
ccccucagggucccuggu

SEQ ID NO: 3383588 - RNA, 16 nt, Human
ccccucaguugugcag

SEQ ID NO: 3383589 - RNA, 17 nt, Human
ccccucaguugugcagc

SEQ ID NO: 3383590 - RNA, 17 nt, Human
ccccuccacucuuucuu

SEQ ID NO: 3383591 - RNA, 14 nt, Human
ccccuccacuguca

SEQ ID NO: 3383592 - RNA, 13 nt, Human
ccccuccagccuu

SEQ ID NO: 3383593 - RNA, 15 nt, Human
ccccuccagcuugug

SEQ ID NO: 3383594 - RNA, 16 nt, Human
ccccucccacccaccg

SEQ ID NO: 3383595 - RNA, 14 nt, Human
ccccucccaccucc

SEQ ID NO: 3383596 - RNA, 11 nt, Human
ccccucccaga

SEQ ID NO: 3383597 - RNA, 13 nt, Human
ccccucccagagg

SEQ ID NO: 3383598 - RNA, 14 nt, Human
ccccucccagcuga

SEQ ID NO: 3383599 - RNA, 12 nt, Human
ccccucccaggg

SEQ ID NO: 3383600 - RNA, 16 nt, Human
ccccucccccaacccc

SEQ ID NO: 3383601 - RNA, 18 nt, Human
ccccucccccaaccccca

SEQ ID NO: 3383602 - RNA, 14 nt, Human
ccccucccccuucu

SEQ ID NO: 3383603 - RNA, 21 nt, Human
ccccuccccggcccuaccagc

SEQ ID NO: 3383604 - RNA, 13 nt, Human
ccccuccccucca

SEQ ID NO: 3383605 - RNA, 15 nt, Human
ccccuccccugcugc

SEQ ID NO: 3383606 - RNA, 15 nt, Human
ccccucccucuccag

SEQ ID NO: 3383607 - RNA, 14 nt, Human
ccccucccugcuuc

SEQ ID NO: 3383608 - RNA, 13 nt, Human
ccccucccugggu

SEQ ID NO: 3383609 - RNA, 19 nt, Human
ccccuccgcccugccacuc

SEQ ID NO: 3383610 - RNA, 18 nt, Human
ccccuccggacuggugcc

SEQ ID NO: 3383611 - RNA, 23 nt, Human
ccccuccucacuggccaucccuc

SEQ ID NO: 3383612 - RNA, 13 nt, Human
ccccuccuccagc

SEQ ID NO: 3383613 - RNA, 22 nt, Human
ccccuccuccagccccuguccc

SEQ ID NO: 3383614 - RNA, 22 nt, Human
ccccuccuccuggacuccugca

SEQ ID NO: 3383615 - RNA, 18 nt, Human
ccccuccucucccauccc

SEQ ID NO: 3383616 - RNA, 23 nt, Human
ccccuccucugaaacagcugccu

SEQ ID NO: 3383617 - RNA, 14 nt, Human
ccccuccuucccaa

SEQ ID NO: 3383618 - RNA, 17 nt, Human
ccccuccuucccagcug

SEQ ID NO: 3383619 - RNA, 17 nt, Human
ccccuccuuccuugacc

SEQ ID NO: 3383620 - RNA, 15 nt, Human
ccccuccuugccucc

SEQ ID NO: 3383621 - RNA, 18 nt, Human
ccccucgcaacuguccac

SEQ ID NO: 3383622 - RNA, 21 nt, Human
ccccucgcuuggacggcuggg

SEQ ID NO: 3383623 - RNA, 14 nt, Human
ccccucgugccagu

SEQ ID NO: 3383624 - RNA, 13 nt, Human
ccccucucagccc

SEQ ID NO: 3383625 - RNA, 14 nt, Human
ccccucucagcccu

SEQ ID NO: 3383626 - RNA, 15 nt, Human
ccccucucccuuggg

SEQ ID NO: 3383627 - RNA, 22 nt, Human
ccccucucccuugggcucugau

SEQ ID NO: 3383628 - RNA, 14 nt, Human
ccccucuccuuccu

SEQ ID NO: 3383629 - RNA, 19 nt, Human
ccccucucugcaucugacc

SEQ ID NO: 3383630 - RNA, 17 nt, Human
ccccucugcacccagaa

SEQ ID NO: 3383631 - RNA, 12 nt, Human
ccccucugccca

SEQ ID NO: 3383632 - RNA, 13 nt, Human
ccccucugcccag

SEQ ID NO: 3383633 - RNA, 18 nt, Human
ccccucugcccagcuugg

SEQ ID NO: 3383634 - RNA, 16 nt, Human
ccccucugcugcuguc

SEQ ID NO: 3383635 - RNA, 13 nt, Human
ccccucugcuggc

SEQ ID NO: 3383636 - RNA, 16 nt, Human
ccccucuggccaggau

SEQ ID NO: 3383637 - RNA, 19 nt, Human
ccccucuggucgcuccugc

SEQ ID NO: 3383638 - RNA, 20 nt, Human
cucuucugccggcccugggg

SEQ ID NO: 3383639 - RNA, 21 nt, Human
cucuucugccggcccuggggc

SEQ ID NO: 3383640 - RNA, 14 nt, Human
cucuucugcuccac

SEQ ID NO: 3383641 - RNA, 16 nt, Human
cucuucugcuccaccc

SEQ ID NO: 3383642 - RNA, 22 nt, Human
cucuucugggagggcagcaggg

SEQ ID NO: 3383643 - RNA, 13 nt, Human
cucuucugucccu

SEQ ID NO: 3383644 - RNA, 12 nt, Human
cucuucuguguu

SEQ ID NO: 3383645 - RNA, 13 nt, Human
cucuucuguguuu

SEQ ID NO: 3383646 - RNA, 13 nt, Human
cucuucuuaaugu

SEQ ID NO: 3383647 - RNA, 24 nt, Human
cucuucuuaauguacauagugcua

SEQ ID NO: 3383648 - RNA, 18 nt, Human
cucuucuucuucagaaga

SEQ ID NO: 3383649 - RNA, 20 nt, Human
cucuucuugaaauuuuaacc

SEQ ID NO: 3383650 - RNA, 23 nt, Human
cucuucuugaacacucaugcuga

SEQ ID NO: 3383651 - RNA, 22 nt, Human
cucuucuuggggcccagugcau

SEQ ID NO: 3383652 - RNA, 12 nt, Human
cucuucuuuaga

SEQ ID NO: 3383653 - RNA, 22 nt, Human
cucuucuuuauacuguaauuua

SEQ ID NO: 3383654 - RNA, 24 nt, Human
cucuucuuuauacuguaauuuagu

SEQ ID NO: 3383655 - RNA, 19 nt, Human
cucuucuuucauuucuucu

SEQ ID NO: 3383656 - RNA, 16 nt, Human
cucuucuuuuggcuuc

SEQ ID NO: 3383657 - RNA, 19 nt, Human
cucuucuuuuggcuuccau

SEQ ID NO: 3383658 - RNA, 22 nt, Human
cucuugaaaaaugcccauuugc

SEQ ID NO: 3383659 - RNA, 15 nt, Human
cucuugaacuccuga

SEQ ID NO: 3383660 - RNA, 20 nt, Human
cucuugaagaugcugaaaca

SEQ ID NO: 3383661 - RNA, 13 nt, Human
cucuugacccugc

SEQ ID NO: 3383662 - RNA, 14 nt, Human
cucuugacccugca

SEQ ID NO: 3383663 - RNA, 15 nt, Human
cucuugacccugcac

SEQ ID NO: 3383664 - RNA, 21 nt, Human
cucuugacccugcacccuccu

SEQ ID NO: 3383665 - RNA, 16 nt, Human
cucuugacucuugccu

SEQ ID NO: 3383666 - RNA, 15 nt, Human
cucuugagcaguggc

SEQ ID NO: 3383667 - RNA, 13 nt, Human
cucuugagccugg

SEQ ID NO: 3383668 - RNA, 14 nt, Human
cucuugagccuggg

SEQ ID NO: 3383669 - RNA, 17 nt, Human
cucuugagccuugaacu

SEQ ID NO: 3383670 - RNA, 14 nt, Human
cucuugagcuggcc

SEQ ID NO: 3383671 - RNA, 15 nt, Human
cucuugagcuggccu

SEQ ID NO: 3383672 - RNA, 14 nt, Human
cucuugaggccagg

SEQ ID NO: 3383673 - RNA, 20 nt, Human
cucuugaguuguuuuuguau

SEQ ID NO: 3383674 - RNA, 22 nt, Human
cucuugaguuguuuuuguauau

SEQ ID NO: 3383675 - RNA, 21 nt, Human
cucuugauaccccccucuguc

SEQ ID NO: 3383676 - RNA, 15 nt, Human
cucuugaugccuggc

SEQ ID NO: 3383677 - RNA, 16 nt, Human
cucuugaugccuggcg

SEQ ID NO: 3383678 - RNA, 23 nt, Human
cucuugcaauccacaaucugaca

SEQ ID NO: 3383679 - RNA, 21 nt, Human
cucuugcacagucacugcucu

SEQ ID NO: 3383680 - RNA, 20 nt, Human
cucuugcaccaaauuaucuu

SEQ ID NO: 3383681 - RNA, 14 nt, Human
cucuugcacccgcc

SEQ ID NO: 3383682 - RNA, 21 nt, Human
cucuugcacccgccucucccg

SEQ ID NO: 3383683 - RNA, 14 nt, Human
cucuugcagagaag

SEQ ID NO: 3383684 - RNA, 18 nt, Human
cucuugcaggucucaacc

SEQ ID NO: 3383685 - RNA, 15 nt, Human
cucuugcccauccug

SEQ ID NO: 3383686 - RNA, 20 nt, Human
cucuugccccaacccccagc

SEQ ID NO: 3383687 - RNA, 16 nt, Human
cucuugccccccaccc

SEQ ID NO: 3383688 - RNA, 15 nt, Human
cucuugcccuucccu

SEQ ID NO: 3383689 - RNA, 20 nt, Human
cucuugcccuucccuguccc

SEQ ID NO: 3383690 - RNA, 22 nt, Human
cucuugcccuucccugucccuc

SEQ ID NO: 3383691 - RNA, 14 nt, Human
cucuugccuccugg

SEQ ID NO: 3383692 - RNA, 13 nt, Human
cucuugcugucuc

SEQ ID NO: 3383693 - RNA, 14 nt, Human
cucuugcugucucu

SEQ ID NO: 3383694 - RNA, 18 nt, Human
cucuugcugucucugcuc

SEQ ID NO: 3383695 - RNA, 14 nt, Human
cucuugcuuucuau

SEQ ID NO: 3383696 - RNA, 16 nt, Human
cucuuggaaaaaguga

SEQ ID NO: 3383697 - RNA, 19 nt, Human
cucuuggaccucugcucug

SEQ ID NO: 3383698 - RNA, 19 nt, Human
cucuuggagaagucucagc

SEQ ID NO: 3383699 - RNA, 21 nt, Human
cucuuggagaagucucagcua

SEQ ID NO: 3383700 - RNA, 19 nt, Human
cucuuggaggugucuguau

SEQ ID NO: 3383701 - RNA, 12 nt, Human
cucuuggcugga

SEQ ID NO: 3383702 - RNA, 14 nt, Human
cucuuggcuggacc

SEQ ID NO: 3383703 - RNA, 16 nt, Human
cucuuggcuggaccca

SEQ ID NO: 3383704 - RNA, 19 nt, Human
cucuuggcuggacccagcc

SEQ ID NO: 3383705 - RNA, 16 nt, Human
cucuugggcaauauuc

SEQ ID NO: 3383706 - RNA, 15 nt, Human
cucuugggcugagac

SEQ ID NO: 3383707 - RNA, 21 nt, Human
cucuuggggaguuuagggugg

SEQ ID NO: 3383708 - RNA, 19 nt, Human
cucuuggguucaagugauu

SEQ ID NO: 3383709 - RNA, 15 nt, Human
cucuugguccugcug

SEQ ID NO: 3383710 - RNA, 16 nt, Human
cucuugguccugcugc

SEQ ID NO: 3383711 - RNA, 20 nt, Human
cucuugguuuccuuccuugg

SEQ ID NO: 3383712 - RNA, 16 nt, Human
cucuuguaaagacugg

SEQ ID NO: 3383713 - RNA, 12 nt, Human
cucuuguaaaua

SEQ ID NO: 3383714 - RNA, 14 nt, Human
cucuuguaaauaaa

SEQ ID NO: 3383715 - RNA, 20 nt, Human
cucuuguaaauaaagcccug

SEQ ID NO: 3383716 - RNA, 13 nt, Human
cucuuguaagauu

SEQ ID NO: 3383717 - RNA, 15 nt, Human
cucuuguaagauuuu

SEQ ID NO: 3383718 - RNA, 20 nt, Human
cucuuguaagauuuugaaaa

SEQ ID NO: 3383719 - RNA, 23 nt, Human
cucuuguaagauuuugaaaacua

SEQ ID NO: 3383720 - RNA, 14 nt, Human
cucuugucccacgu

SEQ ID NO: 3383721 - RNA, 20 nt, Human
cucuugucuccccuguuccc

SEQ ID NO: 3383722 - RNA, 21 nt, Human
cucuugucuuccuauuucaga

SEQ ID NO: 3383723 - RNA, 19 nt, Human
cucuuguucuuacuuuccu

SEQ ID NO: 3383724 - RNA, 16 nt, Human
cucuuguugagccgug

SEQ ID NO: 3383725 - RNA, 17 nt, Human
cucuuguuuuguuuguc

SEQ ID NO: 3383726 - RNA, 21 nt, Human
cucuuguuuuuauuaauuuau

SEQ ID NO: 3383727 - RNA, 19 nt, Human
cucuuuaaaaggaaagaaa

SEQ ID NO: 3383728 - RNA, 17 nt, Human
cucuuuaaaucaagucc

SEQ ID NO: 3383729 - RNA, 23 nt, Human
cucuuuaacucaggacuccagcc

SEQ ID NO: 3383730 - RNA, 17 nt, Human
cucuuuaacuuguaaua

SEQ ID NO: 3383731 - RNA, 18 nt, Human
ccugcacuuugaugucau

SEQ ID NO: 3383732 - RNA, 19 nt, Human
ccugcacuuugaugucaug

SEQ ID NO: 3383733 - RNA, 22 nt, Human
ccugcacuuugaugucaugugu

SEQ ID NO: 3383734 - RNA, 22 nt, Human
ccugcagaaccggagagccagc

SEQ ID NO: 3383735 - RNA, 16 nt, Human
ccugcagacccugccc

SEQ ID NO: 3383736 - RNA, 16 nt, Human
ccugcagacucacugu

SEQ ID NO: 3383737 - RNA, 11 nt, Human
ccugcagagag

SEQ ID NO: 3383738 - RNA, 13 nt, Human
ccugcagagagaa

SEQ ID NO: 3383739 - RNA, 14 nt, Human
ccugcagagcugcg

SEQ ID NO: 3383740 - RNA, 19 nt, Human
ccugcagaggucugugcug

SEQ ID NO: 3383741 - RNA, 14 nt, Human
ccugcagaugccac

SEQ ID NO: 3383742 - RNA, 20 nt, Human
ccugcagaugccacccuagc

SEQ ID NO: 3383743 - RNA, 21 nt, Human
ccugcagcaaacacuccaccc

SEQ ID NO: 3383744 - RNA, 23 nt, Human
ccugcagcaggaauauaugugug

SEQ ID NO: 3383745 - RNA, 17 nt, Human
ccugcagcauggucccu

SEQ ID NO: 3383746 - RNA, 22 nt, Human
ccugcagcauggucccugccuu

SEQ ID NO: 3383747 - RNA, 13 nt, Human
ccugcagccagcu

SEQ ID NO: 3383748 - RNA, 22 nt, Human
ccugcagccccgcgccuccuuc

SEQ ID NO: 3383749 - RNA, 17 nt, Human
ccugcagccucccuccg

SEQ ID NO: 3383750 - RNA, 12 nt, Human
ccugcagcucuc

SEQ ID NO: 3383751 - RNA, 15 nt, Human
ccugcagcucucaug

SEQ ID NO: 3383752 - RNA, 18 nt, Human
ccugcagcuuguagccag

SEQ ID NO: 3383753 - RNA, 19 nt, Human
ccugcaggaaggagcugcc

SEQ ID NO: 3383754 - RNA, 20 nt, Human
ccugcaggaaggagcugccu

SEQ ID NO: 3383755 - RNA, 23 nt, Human
ccugcaggaaggagcugccugga

SEQ ID NO: 3383756 - RNA, 15 nt, Human
ccugcaggaccugcc

SEQ ID NO: 3383757 - RNA, 19 nt, Human
ccugcaggaccugccugua

SEQ ID NO: 3383758 - RNA, 22 nt, Human
ccugcaggaucucaccaggcag

SEQ ID NO: 3383759 - RNA, 12 nt, Human
ccugcaggcagc

SEQ ID NO: 3383760 - RNA, 13 nt, Human
ccugcaggcagcc

SEQ ID NO: 3383761 - RNA, 16 nt, Human
ccugcaggcagccagg

SEQ ID NO: 3383762 - RNA, 17 nt, Human
ccugcaggcagccaggc

SEQ ID NO: 3383763 - RNA, 21 nt, Human
ccugcaggcagccaggccaca

SEQ ID NO: 3383764 - RNA, 12 nt, Human
ccugcaggccag

SEQ ID NO: 3383765 - RNA, 18 nt, Human
ccugcaggccaggccagc

SEQ ID NO: 3383766 - RNA, 15 nt, Human
ccugcaggcugagcc

SEQ ID NO: 3383767 - RNA, 12 nt, Human
ccugcagggcca

SEQ ID NO: 3383768 - RNA, 20 nt, Human
ccugcaggguggugcuggga

SEQ ID NO: 3383769 - RNA, 22 nt, Human
ccugcaggguggugcugggacu

SEQ ID NO: 3383770 - RNA, 18 nt, Human
ccugcaggugcugcugcg

SEQ ID NO: 3383771 - RNA, 17 nt, Human
ccugcagguugggccau

SEQ ID NO: 3383772 - RNA, 21 nt, Human
ccugcagugggguuucgcagc

SEQ ID NO: 3383773 - RNA, 20 nt, Human
ccugcaguuaauuagcauuc

SEQ ID NO: 3383774 - RNA, 14 nt, Human
ccugcaucaucuug

SEQ ID NO: 3383775 - RNA, 23 nt, Human
ccugcauccauucuccugaggau

SEQ ID NO: 3383776 - RNA, 21 nt, Human
ccugcauccccuuggcuguga

SEQ ID NO: 3383777 - RNA, 23 nt, Human
ccugcauccccuuggcugugagg

SEQ ID NO: 3383778 - RNA, 18 nt, Human
ccugcaucugaccagcag

SEQ ID NO: 3383779 - RNA, 15 nt, Human
ccugcauggcauccu

SEQ ID NO: 3383780 - RNA, 16 nt, Human
ccugcauggcauccuc

SEQ ID NO: 3383781 - RNA, 21 nt, Human
ccugcauggcauccuccagcc

SEQ ID NO: 3383782 - RNA, 23 nt, Human
ccugcauggcauccuccagcccc

SEQ ID NO: 3383783 - RNA, 20 nt, Human
ccugcauguaaacacgccug

SEQ ID NO: 3383784 - RNA, 15 nt, Human
ccugcauucacccag

SEQ ID NO: 3383785 - RNA, 17 nt, Human
ccugcauucacccagac

SEQ ID NO: 3383786 - RNA, 22 nt, Human
ccugcauucugccgugugcccu

SEQ ID NO: 3383787 - RNA, 18 nt, Human
ccugcauucuuucuguau

SEQ ID NO: 3383788 - RNA, 20 nt, Human
ccugcauuggaacuggaggc

SEQ ID NO: 3383789 - RNA, 19 nt, Human
ccugccaauggacuaacuu

SEQ ID NO: 3383790 - RNA, 12 nt, Human
ccugccacagcc

SEQ ID NO: 3383791 - RNA, 12 nt, Human
ccugccaccagg

SEQ ID NO: 3383792 - RNA, 15 nt, Human
ccugccaccaggcca

SEQ ID NO: 3383793 - RNA, 14 nt, Human
ccugccacccagcc

SEQ ID NO: 3383794 - RNA, 13 nt, Human
ccugccacccugg

SEQ ID NO: 3383795 - RNA, 14 nt, Human
ccugccacccuggg

SEQ ID NO: 3383796 - RNA, 13 nt, Human
ccugccaccuccc

SEQ ID NO: 3383797 - RNA, 18 nt, Human
ccugccaccuccccccac

SEQ ID NO: 3383798 - RNA, 14 nt, Human
ccugccaccuccug

SEQ ID NO: 3383799 - RNA, 16 nt, Human
ccugccaccuccugcc

SEQ ID NO: 3383800 - RNA, 16 nt, Human
ccugccaccugcugcu

SEQ ID NO: 3383801 - RNA, 18 nt, Human
ccuggcccuuacuugcuu

SEQ ID NO: 3383802 - RNA, 20 nt, Human
ccuggccgcccccugccccc

SEQ ID NO: 3383803 - RNA, 21 nt, Human
ccuggccgcccccugcccccc

SEQ ID NO: 3383804 - RNA, 17 nt, Human
ccuggccgcgcuccggg

SEQ ID NO: 3383805 - RNA, 14 nt, Human
ccuggccuccaggc

SEQ ID NO: 3383806 - RNA, 19 nt, Human
ccuggccuccccugccacc

SEQ ID NO: 3383807 - RNA, 21 nt, Human
ccuggccuccggcgucagccu

SEQ ID NO: 3383808 - RNA, 17 nt, Human
ccuggccuccugccucu

SEQ ID NO: 3383809 - RNA, 16 nt, Human
ccuggccucugcacuc

SEQ ID NO: 3383810 - RNA, 16 nt, Human
ccuggccugagaguca

SEQ ID NO: 3383811 - RNA, 13 nt, Human
ccuggccugagcu

SEQ ID NO: 3383812 - RNA, 15 nt, Human
ccuggccuggcccug

SEQ ID NO: 3383813 - RNA, 13 nt, Human
ccuggccugucuc

SEQ ID NO: 3383814 - RNA, 11 nt, Human
ccuggccuguu

SEQ ID NO: 3383815 - RNA, 13 nt, Human
ccuggccuguucu

SEQ ID NO: 3383816 - RNA, 19 nt, Human
ccuggccuguucuguuuug

SEQ ID NO: 3383817 - RNA, 11 nt, Human
ccuggccuuca

SEQ ID NO: 3383818 - RNA, 18 nt, Human
ccuggccuucaguguacc

SEQ ID NO: 3383819 - RNA, 20 nt, Human
ccuggccuugggauccaggc

SEQ ID NO: 3383820 - RNA, 19 nt, Human
ccuggccuuguccucagcc

SEQ ID NO: 3383821 - RNA, 21 nt, Human
ccuggccuuguccucagccag

SEQ ID NO: 3383822 - RNA, 15 nt, Human
ccuggcgcagguggg

SEQ ID NO: 3383823 - RNA, 23 nt, Human
ccuggcgcaggugggcuggacuu

SEQ ID NO: 3383824 - RNA, 19 nt, Human
ccuggcgggaugggccacc

SEQ ID NO: 3383825 - RNA, 17 nt, Human
ccuggcuaacacgguga

SEQ ID NO: 3383826 - RNA, 23 nt, Human
ccuggcuacagggcgagacucug

SEQ ID NO: 3383827 - RNA, 16 nt, Human
ccuggcucagagccag

SEQ ID NO: 3383828 - RNA, 14 nt, Human
ccuggcuccaguga

SEQ ID NO: 3383829 - RNA, 20 nt, Human
ccuggcucccacaggcagcu

SEQ ID NO: 3383830 - RNA, 21 nt, Human
ccuggcucccacaggcagcuu

SEQ ID NO: 3383831 - RNA, 14 nt, Human
ccuggcucccagga

SEQ ID NO: 3383832 - RNA, 22 nt, Human
ccuggcucccaugaccauacug

SEQ ID NO: 3383833 - RNA, 14 nt, Human
ccuggcuccccugg

SEQ ID NO: 3383834 - RNA, 22 nt, Human
ccuggcucccucacucucagga

SEQ ID NO: 3383835 - RNA, 14 nt, Human
ccuggcucccuccu

SEQ ID NO: 3383836 - RNA, 20 nt, Human
ccuggcucccuccuccaggc

SEQ ID NO: 3383837 - RNA, 22 nt, Human
ccuggcucccuccuccaggccu

SEQ ID NO: 3383838 - RNA, 23 nt, Human
ccuggcucccuccuccaggccug

SEQ ID NO: 3383839 - RNA, 23 nt, Human
ccuggcuccugaggggcaucugc

SEQ ID NO: 3383840 - RNA, 13 nt, Human
ccuggcucucacc

SEQ ID NO: 3383841 - RNA, 17 nt, Human
ccuggcucucaccucua

SEQ ID NO: 3383842 - RNA, 15 nt, Human
ccuggcucucccagc

SEQ ID NO: 3383843 - RNA, 22 nt, Human
ccuggcucugcaaugggcacug

SEQ ID NO: 3383844 - RNA, 17 nt, Human
ccuggcucugcuguccc

SEQ ID NO: 3383845 - RNA, 23 nt, Human
ccuggcucuuucgucacccuugg

SEQ ID NO: 3383846 - RNA, 18 nt, Human
ccuggcugagccuggcug

SEQ ID NO: 3383847 - RNA, 19 nt, Human
ccuggcugagguuccucug

SEQ ID NO: 3383848 - RNA, 21 nt, Human
ccuggcugagguuccucugcc

SEQ ID NO: 3383849 - RNA, 15 nt, Human
ccuggcugcccauca

SEQ ID NO: 3383850 - RNA, 23 nt, Human
ccuggcugcccaucauguggccc

SEQ ID NO: 3383851 - RNA, 14 nt, Human
ccuggcugcccugg

SEQ ID NO: 3383852 - RNA, 15 nt, Human
ccuggcugccggcac

SEQ ID NO: 3383853 - RNA, 22 nt, Human
ccuggcugcugaucgccuuccc

SEQ ID NO: 3383854 - RNA, 18 nt, Human
ccuggcugcugcccccac

SEQ ID NO: 3383855 - RNA, 22 nt, Human
ccuggcugcugcccccaccccg

SEQ ID NO: 3383856 - RNA, 22 nt, Human
ccuggcuggagaauguggagaa

SEQ ID NO: 3383857 - RNA, 13 nt, Human
ccuggcuggcuga

SEQ ID NO: 3383858 - RNA, 18 nt, Human
ccuggcuggcugagggca

SEQ ID NO: 3383859 - RNA, 20 nt, Human
ccuggcugggacguggcuca

SEQ ID NO: 3383860 - RNA, 14 nt, Human
ccuggcuguacugc

SEQ ID NO: 3383861 - RNA, 19 nt, Human
ccuggcuguacugcucagg

SEQ ID NO: 3383862 - RNA, 23 nt, Human
ccuggcuguuuggacuuuguaua

SEQ ID NO: 3383863 - RNA, 19 nt, Human
ccuggcuucccauccccag

SEQ ID NO: 3383864 - RNA, 22 nt, Human
ccuggcuucccauccccagcga

SEQ ID NO: 3383865 - RNA, 23 nt, Human
ccuggcuucccauccccagcgau

SEQ ID NO: 3383866 - RNA, 15 nt, Human
ccuggcuuccuuacu

SEQ ID NO: 3383867 - RNA, 13 nt, Human
ccuggcuucugga

SEQ ID NO: 3383868 - RNA, 14 nt, Human
ccuggcuucuggag

SEQ ID NO: 3383869 - RNA, 20 nt, Human
ccuggcuucuggagcccuug

SEQ ID NO: 3383870 - RNA, 21 nt, Human
ccuggcuucuggagcccuugg

SEQ ID NO: 3383871 - RNA, 16 nt, Human
ccuggcuucugugggg

SEQ ID NO: 3383872 - RNA, 20 nt, Human
ccuggcuuguaacuccacca

SEQ ID NO: 3383873 - RNA, 22 nt, Human
ccuggcuuguaacuccaccaac

SEQ ID NO: 3383874 - RNA, 20 nt, Human
ccuggcuuugcccaaccuca

SEQ ID NO: 3383875 - RNA, 16 nt, Human
caugcucaucugcugg

SEQ ID NO: 3383876 - RNA, 17 nt, Human
caugcucaucugcuggu

SEQ ID NO: 3383877 - RNA, 15 nt, Human
caugcuccccugugc

SEQ ID NO: 3383878 - RNA, 14 nt, Human
caugcuccuggccc

SEQ ID NO: 3383879 - RNA, 17 nt, Human
caugcuccuggcccacu

SEQ ID NO: 3383880 - RNA, 13 nt, Human
caugcuccuuaau

SEQ ID NO: 3383881 - RNA, 15 nt, Human
caugcucucugcagc

SEQ ID NO: 3383882 - RNA, 16 nt, Human
caugcucucugcagcc

SEQ ID NO: 3383883 - RNA, 21 nt, Human
caugcucucugcagccagccc

SEQ ID NO: 3383884 - RNA, 13 nt, Human
caugcugaaggga

SEQ ID NO: 3383885 - RNA, 19 nt, Human
caugcugaggccugggccg

SEQ ID NO: 3383886 - RNA, 17 nt, Human
caugcugagucucccaa

SEQ ID NO: 3383887 - RNA, 19 nt, Human
caugcugagucucccaagg

SEQ ID NO: 3383888 - RNA, 15 nt, Human
caugcugccaauauc

SEQ ID NO: 3383889 - RNA, 19 nt, Human
caugcugccaauauccuaa

SEQ ID NO: 3383890 - RNA, 13 nt, Human
caugcugcccugu

SEQ ID NO: 3383891 - RNA, 16 nt, Human
caugcugcccugugag

SEQ ID NO: 3383892 - RNA, 23 nt, Human
caugcuggaaaauaauacugcug

SEQ ID NO: 3383893 - RNA, 20 nt, Human
caugcuggacaggucuggga

SEQ ID NO: 3383894 - RNA, 20 nt, Human
caugcugggaagacgccuga

SEQ ID NO: 3383895 - RNA, 19 nt, Human
caugcuguacauacuuuuu

SEQ ID NO: 3383896 - RNA, 17 nt, Human
caugcugucccuuacgu

SEQ ID NO: 3383897 - RNA, 19 nt, Human
caugcugucuggcacagcc

SEQ ID NO: 3383898 - RNA, 19 nt, Human
caugcugugauugugccua

SEQ ID NO: 3383899 - RNA, 20 nt, Human
caugcugugcgcccagggcu

SEQ ID NO: 3383900 - RNA, 16 nt, Human
caugcuguucaugaaa

SEQ ID NO: 3383901 - RNA, 16 nt, Human
caugcuguugauugcu

SEQ ID NO: 3383902 - RNA, 19 nt, Human
caugcuguugauugcuaaa

SEQ ID NO: 3383903 - RNA, 21 nt, Human
caugcuguugauugcuaaaug

SEQ ID NO: 3383904 - RNA, 13 nt, Human
caugcuuaaauuu

SEQ ID NO: 3383905 - RNA, 19 nt, Human
caugcuuagucacugccug

SEQ ID NO: 3383906 - RNA, 21 nt, Human
caugcuuagucacugccugca

SEQ ID NO: 3383907 - RNA, 17 nt, Human
caugcuuauuccaugac

SEQ ID NO: 3383908 - RNA, 19 nt, Human
caugcuuauuccaugacug

SEQ ID NO: 3383909 - RNA, 22 nt, Human
caugcuucaauaguucaaggaa

SEQ ID NO: 3383910 - RNA, 14 nt, Human
caugcuucaucauu

SEQ ID NO: 3383911 - RNA, 23 nt, Human
caugcuucaucauucccucucau

SEQ ID NO: 3383912 - RNA, 23 nt, Human
caugcuucaugaaaauccuacca

SEQ ID NO: 3383913 - RNA, 20 nt, Human
caugcuucccuuuccugagu

SEQ ID NO: 3383914 - RNA, 21 nt, Human
caugcuucucaucuugugaaa

SEQ ID NO: 3383915 - RNA, 23 nt, Human
caugcuucucaucuugugaaaug

SEQ ID NO: 3383916 - RNA, 17 nt, Human
caugcuugaugguuuau

SEQ ID NO: 3383917 - RNA, 18 nt, Human
caugcuuguguuucuuag

SEQ ID NO: 3383918 - RNA, 16 nt, Human
caugcuuuccauauuu

SEQ ID NO: 3383919 - RNA, 17 nt, Human
caugcuuugugaacaag

SEQ ID NO: 3383920 - RNA, 22 nt, Human
cauggaaaaaugccaucaaaug

SEQ ID NO: 3383921 - RNA, 17 nt, Human
cauggaaauauuaugca

SEQ ID NO: 3383922 - RNA, 22 nt, Human
cauggaaauauuaugcaaauuc

SEQ ID NO: 3383923 - RNA, 18 nt, Human
cauggaaauuuaaagcag

SEQ ID NO: 3383924 - RNA, 21 nt, Human
cauggaacacaaacacauugu

SEQ ID NO: 3383925 - RNA, 15 nt, Human
cauggaacacuucga

SEQ ID NO: 3383926 - RNA, 20 nt, Human
cauggaagaggcuacagggc

SEQ ID NO: 3383927 - RNA, 18 nt, Human
cauggaaugcuugaaaaa

SEQ ID NO: 3383928 - RNA, 20 nt, Human
cauggaaugcuugaaaaaug

SEQ ID NO: 3383929 - RNA, 14 nt, Human
cauggaaugguuau

SEQ ID NO: 3383930 - RNA, 17 nt, Human
cauggaaugguuauaaa

SEQ ID NO: 3383931 - RNA, 17 nt, Human
cauggacacuacaccca

SEQ ID NO: 3383932 - RNA, 19 nt, Human
cauggacacuacacccagc

SEQ ID NO: 3383933 - RNA, 14 nt, Human
cauggacaggcugg

SEQ ID NO: 3383934 - RNA, 18 nt, Human
cauggacaggcuggcucc

SEQ ID NO: 3383935 - RNA, 14 nt, Human
cauggaccacuguu

SEQ ID NO: 3383936 - RNA, 16 nt, Human
cauggaccacuguuuc

SEQ ID NO: 3383937 - RNA, 18 nt, Human
cauggaccacuguuucuu

SEQ ID NO: 3383938 - RNA, 13 nt, Human
cauggaccaugcu

SEQ ID NO: 3383939 - RNA, 20 nt, Human
cauggaccaugcugucuggc

SEQ ID NO: 3383940 - RNA, 21 nt, Human
cauggacucuacacugugaac

SEQ ID NO: 3383941 - RNA, 16 nt, Human
cauggacucuguccug

SEQ ID NO: 3383942 - RNA, 12 nt, Human
cauggacuugua

SEQ ID NO: 3383943 - RNA, 17 nt, Human
cauggacuuguauauuu

SEQ ID NO: 3383944 - RNA, 22 nt, Human
cauggacuuguauauuuguaca

SEQ ID NO: 3383945 - RNA, 11 nt, Human
cauggacuuug

SEQ ID NO: 3383946 - RNA, 13 nt, Human
cauggacuuuguu

SEQ ID NO: 3383947 - RNA, 16 nt, Human
cauggagaaacccugu

SEQ ID NO: 3383948 - RNA, 14 nt, Human
cauggagaaagcug

SEQ ID NO: 3383949 - RNA, 20 nt, Human
cauggagaaccaccuacccc

SEQ ID NO: 3383950 - RNA, 16 nt, Human
cauggagacgcauuuc

SEQ ID NO: 3383951 - RNA, 19 nt, Human
cauggagacuccugcccug

SEQ ID NO: 3383952 - RNA, 21 nt, Human
cauggagacuccugcccuguu

SEQ ID NO: 3383953 - RNA, 13 nt, Human
cauggagagcugg

SEQ ID NO: 3383954 - RNA, 16 nt, Human
cauggagagcuggagc

SEQ ID NO: 3383955 - RNA, 17 nt, Human
cauggagagcuggagcc

SEQ ID NO: 3383956 - RNA, 21 nt, Human
cauggagauagccccacagga

SEQ ID NO: 3383957 - RNA, 17 nt, Human
cauggagauucucauaa

SEQ ID NO: 3383958 - RNA, 18 nt, Human
cauggagauugaccugga

SEQ ID NO: 3383959 - RNA, 10 nt, Human
cauggagcca

SEQ ID NO: 3383960 - RNA, 18 nt, Human
cauggaggcccuccugug

SEQ ID NO: 3383961 - RNA, 15 nt, Human
cauggagguucuaag

SEQ ID NO: 3383962 - RNA, 14 nt, Human
cauggaguguguau

SEQ ID NO: 3383963 - RNA, 15 nt, Human
cauggaugagagucc

SEQ ID NO: 3383964 - RNA, 19 nt, Human
cauggaugggggaacucag

SEQ ID NO: 3383965 - RNA, 22 nt, Human
cauggauguuuuagccauuguu

SEQ ID NO: 3383966 - RNA, 13 nt, Human
cauggauuucuuu

SEQ ID NO: 3383967 - RNA, 19 nt, Human
cauggcaccaaagccacca

SEQ ID NO: 3383968 - RNA, 23 nt, Human
cauggcaccugucgcccagugcc

SEQ ID NO: 3383969 - RNA, 20 nt, Human
cauggcacucccuccagcac

SEQ ID NO: 3383970 - RNA, 22 nt, Human
cauggcacucccuccagcacaa

SEQ ID NO: 3383971 - RNA, 19 nt, Human
cauggcacuugcaucugug

SEQ ID NO: 3383972 - RNA, 21 nt, Human
cauggcagaauaaucuuuggg

SEQ ID NO: 3383973 - RNA, 17 nt, Human
cauggcagaguuugugu

SEQ ID NO: 3383974 - RNA, 18 nt, Human
cauggcagaguuugugug

SEQ ID NO: 3383975 - RNA, 20 nt, Human
cauggcagccuacucuccuu

SEQ ID NO: 3383976 - RNA, 14 nt, Human
cauggcagggggcu

SEQ ID NO: 3383977 - RNA, 19 nt, Human
cauggcauauuuuucacau

SEQ ID NO: 3383978 - RNA, 18 nt, Human
cauggcaucaccuccacc

SEQ ID NO: 3383979 - RNA, 15 nt, Human
cauggcauccaagac

SEQ ID NO: 3383980 - RNA, 16 nt, Human
cauggcauccuccagc

SEQ ID NO: 3383981 - RNA, 18 nt, Human
cauggcauccuccagccc

SEQ ID NO: 3383982 - RNA, 19 nt, Human
cauggcauccuccagcccc

SEQ ID NO: 3383983 - RNA, 21 nt, Human
cauggcaugggggccucaggg

SEQ ID NO: 3383984 - RNA, 18 nt, Human
cauggccaccuuuucagc

SEQ ID NO: 3383985 - RNA, 20 nt, Human
cauggccagcuggaggcagg

SEQ ID NO: 3383986 - RNA, 13 nt, Human
cauggccaggugg

SEQ ID NO: 3383987 - RNA, 13 nt, Human
cauggccccucug

SEQ ID NO: 3383988 - RNA, 15 nt, Human
cauggccccugugag

SEQ ID NO: 3383989 - RNA, 23 nt, Human
cauggcccucccaguaccuccug

SEQ ID NO: 3383990 - RNA, 16 nt, Human
cauggccuaugcacau

SEQ ID NO: 3383991 - RNA, 20 nt, Human
cauggccuauuauauuaaaa

SEQ ID NO: 3383992 - RNA, 21 nt, Human
cauggccuauuauauuaaaau

SEQ ID NO: 3383993 - RNA, 21 nt, Human
cauggccucuucagaucucua

SEQ ID NO: 3383994 - RNA, 16 nt, Human
cauggcuaacuggcga

SEQ ID NO: 3383995 - RNA, 17 nt, Human
cauggcuaagcuuaaaa

SEQ ID NO: 3383996 - RNA, 22 nt, Human
cauggcuaagcuuaaaaaaaac

SEQ ID NO: 3383997 - RNA, 16 nt, Human
cauggcuaaggcacca

SEQ ID NO: 3383998 - RNA, 22 nt, Human
cauggcuauaaacaauuacaug

SEQ ID NO: 3383999 - RNA, 17 nt, Human
cauggcuauuuuauauu

SEQ ID NO: 3384000 - RNA, 15 nt, Human
cauggcuccagucug

SEQ ID NO: 3384001 - RNA, 16 nt, Human
cauggcuccggccucu

SEQ ID NO: 3384002 - RNA, 21 nt, Human
cauggcucuggacucuaaaga

SEQ ID NO: 3384003 - RNA, 19 nt, Human
ccuuaauuuccuuuuugac

SEQ ID NO: 3384004 - RNA, 20 nt, Human
ccuuaauuuccuuuuugaca

SEQ ID NO: 3384005 - RNA, 22 nt, Human
ccuuaauuuccuuuuugacacu

SEQ ID NO: 3384006 - RNA, 24 nt, Human
ccuuaauuuccuuuuugacacuga

SEQ ID NO: 3384007 - RNA, 13 nt, Human
ccuuacauuugug

SEQ ID NO: 3384008 - RNA, 18 nt, Human
ccuuaccaacuuucugua

SEQ ID NO: 3384009 - RNA, 17 nt, Human
ccuuaccacugcucuga

SEQ ID NO: 3384010 - RNA, 14 nt, Human
ccuuaccagcagag

SEQ ID NO: 3384011 - RNA, 20 nt, Human
ccuuaccagcagagcaccuu

SEQ ID NO: 3384012 - RNA, 14 nt, Human
ccuuacccaucugc

SEQ ID NO: 3384013 - RNA, 19 nt, Human
ccuuacccucauguucuua

SEQ ID NO: 3384014 - RNA, 17 nt, Human
ccuuacccuccuuggga

SEQ ID NO: 3384015 - RNA, 15 nt, Human
ccuuacccuuagaau

SEQ ID NO: 3384016 - RNA, 14 nt, Human
ccuuaccucuuccg

SEQ ID NO: 3384017 - RNA, 23 nt, Human
ccuuacgaucaggcacaggucag

SEQ ID NO: 3384018 - RNA, 12 nt, Human
ccuuacuccugu

SEQ ID NO: 3384019 - RNA, 19 nt, Human
ccuucccagcucucccucu

SEQ ID NO: 3384020 - RNA, 22 nt, Human
ccuucccagcugccccucccug

SEQ ID NO: 3384021 - RNA, 14 nt, Human
ccuucccaucgcug

SEQ ID NO: 3384022 - RNA, 15 nt, Human
ccuucccaucgcugu

SEQ ID NO: 3384023 - RNA, 15 nt, Human
ccuucccaucucuuc

SEQ ID NO: 3384024 - RNA, 16 nt, Human
ccuucccauggaggga

SEQ ID NO: 3384025 - RNA, 13 nt, Human
ccuuccccagcau

SEQ ID NO: 3384026 - RNA, 13 nt, Human
ccuuccccagccu

SEQ ID NO: 3384027 - RNA, 15 nt, Human
ccuucccccagccca

SEQ ID NO: 3384028 - RNA, 16 nt, Human
ccuucccccucccagg

SEQ ID NO: 3384029 - RNA, 17 nt, Human
ccuucccccucccaggg

SEQ ID NO: 3384030 - RNA, 23 nt, Human
ccuuccccucagccacacccagg

SEQ ID NO: 3384031 - RNA, 13 nt, Human
ccuuccccuggca

SEQ ID NO: 3384032 - RNA, 20 nt, Human
ccuuccccuuauccucccug

SEQ ID NO: 3384033 - RNA, 14 nt, Human
ccuuccccuuccuu

SEQ ID NO: 3384034 - RNA, 18 nt, Human
ccuuccccuugcccaggg

SEQ ID NO: 3384035 - RNA, 20 nt, Human
ccuuccccuugcccagggcu

SEQ ID NO: 3384036 - RNA, 24 nt, Human
ccuucccucaccuuggcaccagac

SEQ ID NO: 3384037 - RNA, 11 nt, Human
ccuucccuccu

SEQ ID NO: 3384038 - RNA, 12 nt, Human
ccuucccuccuc

SEQ ID NO: 3384039 - RNA, 12 nt, Human
ccuucccucucc

SEQ ID NO: 3384040 - RNA, 14 nt, Human
ccuucccucucugg

SEQ ID NO: 3384041 - RNA, 15 nt, Human
ccuucccucucugga

SEQ ID NO: 3384042 - RNA, 12 nt, Human
ccuucccugcaa

SEQ ID NO: 3384043 - RNA, 14 nt, Human
ccuucccugggcug

SEQ ID NO: 3384044 - RNA, 15 nt, Human
ccuucccugucccuc

SEQ ID NO: 3384045 - RNA, 13 nt, Human
ccuucccugugcc

SEQ ID NO: 3384046 - RNA, 18 nt, Human
ccuucccuugccacuuug

SEQ ID NO: 3384047 - RNA, 16 nt, Human
ccuuccgacccucugg

SEQ ID NO: 3384048 - RNA, 13 nt, Human
ccuuccgccacug

SEQ ID NO: 3384049 - RNA, 16 nt, Human
ccuuccgccacugggg

SEQ ID NO: 3384050 - RNA, 16 nt, Human
ccuuccgcuuggagcu

SEQ ID NO: 3384051 - RNA, 19 nt, Human
ccuuccguaacccaacucu

SEQ ID NO: 3384052 - RNA, 23 nt, Human
ccuuccuaaauuuuccuguccuc

SEQ ID NO: 3384053 - RNA, 16 nt, Human
ccuuccuaagccugug

SEQ ID NO: 3384054 - RNA, 23 nt, Human
ccuuccuaagccuguggcugugg

SEQ ID NO: 3384055 - RNA, 19 nt, Human
ccuuccuaccacccggucc

SEQ ID NO: 3384056 - RNA, 11 nt, Human
ccuuccuauaa

SEQ ID NO: 3384057 - RNA, 22 nt, Human
ccuuccucaguuuaauccuucu

SEQ ID NO: 3384058 - RNA, 16 nt, Human
ccuuccucauccaccc

SEQ ID NO: 3384059 - RNA, 20 nt, Human
ccuuccucauccaccccauc

SEQ ID NO: 3384060 - RNA, 14 nt, Human
ccuuccuccauccu

SEQ ID NO: 3384061 - RNA, 19 nt, Human
ccuuccucgcagagaggcc

SEQ ID NO: 3384062 - RNA, 15 nt, Human
ccuuccucucuccag

SEQ ID NO: 3384063 - RNA, 15 nt, Human
ccuuccucugcagcu

SEQ ID NO: 3384064 - RNA, 18 nt, Human
ccuuccucugcagcugac

SEQ ID NO: 3384065 - RNA, 18 nt, Human
ccuuccugccaccugcug

SEQ ID NO: 3384066 - RNA, 23 nt, Human
ccuuccugccccaacuccuucca

SEQ ID NO: 3384067 - RNA, 15 nt, Human
ccuuccugcugcgca

SEQ ID NO: 3384068 - RNA, 17 nt, Human
ccuuccuggacagcugu

SEQ ID NO: 3384069 - RNA, 21 nt, Human
ccuuccuggacagcugugccu

SEQ ID NO: 3384070 - RNA, 17 nt, Human
ccuuccugggcacacgc

SEQ ID NO: 3384071 - RNA, 16 nt, Human
ccuuccugucccaccu

SEQ ID NO: 3384072 - RNA, 15 nt, Human
ccuuccuucccuggc

SEQ ID NO: 3384073 - RNA, 16 nt, Human
ccuuccuugaccagca

SEQ ID NO: 3384074 - RNA, 18 nt, Human
ccuuccuugcucugcacc

SEQ ID NO: 3384075 - RNA, 19 nt, Human
ccuuccuugcucugcaccc

SEQ ID NO: 3384076 - RNA, 20 nt, Human
ccuuccuugcuguccuaggc

SEQ ID NO: 3384077 - RNA, 17 nt, Human
ccuuccuuguagccuuu

SEQ ID NO: 3384078 - RNA, 13 nt, Human
ccuuccuuuuccc

SEQ ID NO: 3384079 - RNA, 16 nt, Human
ccuuccuuuucccugc

SEQ ID NO: 3384080 - RNA, 19 nt, Human
ccuuccuuuucccugcuuc

SEQ ID NO: 3384081 - RNA, 23 nt, Human
ccuuccuuuucccugcuuccagg

SEQ ID NO: 3384082 - RNA, 16 nt, Human
ccuucgacagcauuuu

SEQ ID NO: 3384083 - RNA, 22 nt, Human
ccuucgauacaccgggccugga

SEQ ID NO: 3384084 - RNA, 13 nt, Human
ccuucgccaccug

SEQ ID NO: 3384085 - RNA, 17 nt, Human
ccuucgcgguggaaggc

SEQ ID NO: 3384086 - RNA, 17 nt, Human
ccuucgcuucuugccuc

SEQ ID NO: 3384087 - RNA, 17 nt, Human
ccuucggccuccauccu

SEQ ID NO: 3384088 - RNA, 20 nt, Human
ccuucggccuccauccugag

SEQ ID NO: 3384089 - RNA, 15 nt, Human
ccuucggcgccuuaa

SEQ ID NO: 3384090 - RNA, 16 nt, Human
ccuucgggcugugccc

SEQ ID NO: 3384091 - RNA, 20 nt, Human
ccuucgguggaagagcucaa

SEQ ID NO: 3384092 - RNA, 17 nt, Human
ccuucgucuuucccaug

SEQ ID NO: 3384093 - RNA, 20 nt, Human
ccuucgugacaauguuuaca

SEQ ID NO: 3384094 - RNA, 17 nt, Human
ccuucguuaacugugua

SEQ ID NO: 3384095 - RNA, 20 nt, Human
ccuucguuuacuaugccugu

SEQ ID NO: 3384096 - RNA, 23 nt, Human
ccuucguuuacuaugccuguguc

SEQ ID NO: 3384097 - RNA, 13 nt, Human
ccuucuaaaggug

SEQ ID NO: 3384098 - RNA, 14 nt, Human
ccuucuaaaggugu

SEQ ID NO: 3384099 - RNA, 22 nt, Human
ccuucuaaagguguugucccuu

SEQ ID NO: 3384100 - RNA, 12 nt, Human
ccuucuaccugc

SEQ ID NO: 3384101 - RNA, 16 nt, Human
ccuucuaccugccacu

SEQ ID NO: 3384102 - RNA, 22 nt, Human
ccuucuacuuacacaucuucca

SEQ ID NO: 3384103 - RNA, 23 nt, Human
ccuucuacuuacacaucuuccac

SEQ ID NO: 3384104 - RNA, 14 nt, Human
ccuucuaggaagcu

SEQ ID NO: 3384105 - RNA, 20 nt, Human
ccuucuaggguuauugcauu

SEQ ID NO: 3384106 - RNA, 21 nt, Human
ccuucuauagcaucacuuaaa

SEQ ID NO: 3384107 - RNA, 22 nt, Human
ccuucucacauggaaugagggu

SEQ ID NO: 3384108 - RNA, 20 nt, Human
ccuucucaccagcugcaaag

SEQ ID NO: 3384109 - RNA, 21 nt, Human
ccuucucaccagcugcaaagu

SEQ ID NO: 3384110 - RNA, 22 nt, Human
ccuucucaccagcugcaaagug

SEQ ID NO: 3384111 - RNA, 14 nt, Human
ccuucucagaaucu

SEQ ID NO: 3384112 - RNA, 15 nt, Human
ccuucuccaaaugag

SEQ ID NO: 3384113 - RNA, 18 nt, Human
ccuucuccaccccagccc

SEQ ID NO: 3384114 - RNA, 13 nt, Human
ccuucuccaucca

SEQ ID NO: 3384115 - RNA, 14 nt, Human
ccuucuccaucucu

SEQ ID NO: 3384116 - RNA, 14 nt, Human
ccuucucccacucu

SEQ ID NO: 3384117 - RNA, 17 nt, Human
ccuucucccacucuccu

SEQ ID NO: 3384118 - RNA, 20 nt, Human
ccuucucccacucuccuagg

SEQ ID NO: 3384119 - RNA, 14 nt, Human
ccuucucccaugag

SEQ ID NO: 3384120 - RNA, 13 nt, Human
ccuucuccccagc

SEQ ID NO: 3384121 - RNA, 17 nt, Human
ccuucuccccagcuccc

SEQ ID NO: 3384122 - RNA, 18 nt, Human
ccuucuccccagcuccca

SEQ ID NO: 3384123 - RNA, 19 nt, Human
ccuucuccccagcucccag

SEQ ID NO: 3384124 - RNA, 20 nt, Human
ccuucuccccagcucccagg

SEQ ID NO: 3384125 - RNA, 23 nt, Human
ccuucuccccagcucccaggacc

SEQ ID NO: 3384126 - RNA, 13 nt, Human
ccuucuccccugc

SEQ ID NO: 3384127 - RNA, 24 nt, Human
ccuucuccccugcacuguaaaaug

SEQ ID NO: 3384128 - RNA, 14 nt, Human
ccuucucccuggau

SEQ ID NO: 3384129 - RNA, 21 nt, Human
ccuucuccuccccacccgccc

SEQ ID NO: 3384130 - RNA, 19 nt, Human
ccuucuccuucaccuuugu

SEQ ID NO: 3384131 - RNA, 19 nt, Human
ccuucuccuugauaacagc

SEQ ID NO: 3384132 - RNA, 20 nt, Human
ccuucuccuugauaacagcu

SEQ ID NO: 3384133 - RNA, 16 nt, Human
ccuucucucaccuccu

SEQ ID NO: 3384134 - RNA, 14 nt, Human
ccuucucucaucuc

SEQ ID NO: 3384135 - RNA, 15 nt, Human
ccuucucucaucucu

SEQ ID NO: 3384136 - RNA, 13 nt, Human
ccuucucuccagc

SEQ ID NO: 3384137 - RNA, 16 nt, Human
ccuucucuccucccca

SEQ ID NO: 3384138 - RNA, 20 nt, Human
ccuucucuccuccccaaauc

SEQ ID NO: 3384139 - RNA, 14 nt, Human
ccuucucucucccu

SEQ ID NO: 3384140 - RNA, 15 nt, Human
ccuucucugaacaca

SEQ ID NO: 3384141 - RNA, 21 nt, Human
ccuucucugaacacaggcagc

SEQ ID NO: 3384142 - RNA, 16 nt, Human
ccuucucugaaggaca

SEQ ID NO: 3384143 - RNA, 22 nt, Human
ccuucucugcccauuccccagc

SEQ ID NO: 3384144 - RNA, 16 nt, Human
ccuucucugcuccacc

SEQ ID NO: 3384145 - RNA, 20 nt, Human
ccuucucugcuccaccacau

SEQ ID NO: 3384146 - RNA, 22 nt, Human
ccuucucugcuccaccacaucc

SEQ ID NO: 3384147 - RNA, 13 nt, Human
ccuucucuguuca

SEQ ID NO: 3384148 - RNA, 13 nt, Human
ccuucucuuccag

SEQ ID NO: 3384149 - RNA, 19 nt, Human
ccuucucuuccaggcagcc

SEQ ID NO: 3384150 - RNA, 12 nt, Human
ccuucugaccca

SEQ ID NO: 3384151 - RNA, 17 nt, Human
ccuucugacccaugcug

SEQ ID NO: 3384152 - RNA, 22 nt, Human
ccuucugacccaugcugcccug

SEQ ID NO: 3384153 - RNA, 16 nt, Human
ccuucugacggcccug

SEQ ID NO: 3384154 - RNA, 17 nt, Human
ccuucugacggcccugc

SEQ ID NO: 3384155 - RNA, 19 nt, Human
ccuucugacggcccugcaa

SEQ ID NO: 3384156 - RNA, 21 nt, Human
ccuucugagcuccuguccccu

SEQ ID NO: 3384157 - RNA, 22 nt, Human
ccuucugagcuccuguccccug

SEQ ID NO: 3384158 - RNA, 19 nt, Human
ccuucugagcuggccucuc

SEQ ID NO: 3384159 - RNA, 13 nt, Human
ccuucugaugucu

SEQ ID NO: 3384160 - RNA, 22 nt, Human
ccuucugaugucucuaaagcac

SEQ ID NO: 3384161 - RNA, 12 nt, Human
ccuucugcucag

SEQ ID NO: 3384162 - RNA, 21 nt, Human
ccuucugcuggauaaaaugag

SEQ ID NO: 3384163 - RNA, 16 nt, Human
cauggcugagcugccc

SEQ ID NO: 3384164 - RNA, 22 nt, Human
ccuguccacacccagcucagca

SEQ ID NO: 3384165 - RNA, 13 nt, Human
ccuguccagagag

SEQ ID NO: 3384166 - RNA, 12 nt, Human
ccuguccagccu

SEQ ID NO: 3384167 - RNA, 13 nt, Human
ccuguccagcucc

SEQ ID NO: 3384168 - RNA, 14 nt, Human
ccuguccagcucca

SEQ ID NO: 3384169 - RNA, 15 nt, Human
ccuguccagcuccaa

SEQ ID NO: 3384170 - RNA, 19 nt, Human
ccuguccagcuccaaccug

SEQ ID NO: 3384171 - RNA, 11 nt, Human
ccugucccacc

SEQ ID NO: 3384172 - RNA, 19 nt, Human
ccugucccacccccuuccc

SEQ ID NO: 3384173 - RNA, 22 nt, Human
ccugucccacccccuuccccca

SEQ ID NO: 3384174 - RNA, 19 nt, Human
caugucaagauucagcuag

SEQ ID NO: 3384175 - RNA, 18 nt, Human
caugucaaggguucaaga

SEQ ID NO: 3384176 - RNA, 22 nt, Human
caugucaccguggaccuuccug

SEQ ID NO: 3384177 - RNA, 15 nt, Human
caugucacugugguc

SEQ ID NO: 3384178 - RNA, 16 nt, Human
caugucacuguggucc

SEQ ID NO: 3384179 - RNA, 14 nt, Human
caugucagacacag

SEQ ID NO: 3384180 - RNA, 22 nt, Human
caugucagcaaaaagcaaaauc

SEQ ID NO: 3384181 - RNA, 16 nt, Human
caugucaggccugugu

SEQ ID NO: 3384182 - RNA, 21 nt, Human
caugucaggccugugugugaa

SEQ ID NO: 3384183 - RNA, 19 nt, Human
caugucagucugcuuagaa

SEQ ID NO: 3384184 - RNA, 18 nt, Human
caugucauuucagaaguu

SEQ ID NO: 3384185 - RNA, 17 nt, Human
cauguccaaagaggcug

SEQ ID NO: 3384186 - RNA, 20 nt, Human
cauguccaaagaggcugccc

SEQ ID NO: 3384187 - RNA, 21 nt, Human
cauguccaaagaggcugcccc

SEQ ID NO: 3384188 - RNA, 21 nt, Human
cauguccagcaccuugugccu

SEQ ID NO: 3384189 - RNA, 22 nt, Human
caugucccuaccgagucucuuc

SEQ ID NO: 3384190 - RNA, 18 nt, Human
cauguccuaauucuucug

SEQ ID NO: 3384191 - RNA, 14 nt, Human
cauguccuguaaag

SEQ ID NO: 3384192 - RNA, 19 nt, Human
cauguccugugucaguuua

SEQ ID NO: 3384193 - RNA, 21 nt, Human
cauguccuuagcacagggggg

SEQ ID NO: 3384194 - RNA, 15 nt, Human
caugucgccucugca

SEQ ID NO: 3384195 - RNA, 22 nt, Human
caugucuauaaucccagcacuu

SEQ ID NO: 3384196 - RNA, 13 nt, Human
caugucuauuguc

SEQ ID NO: 3384197 - RNA, 14 nt, Human
caugucuauugucc

SEQ ID NO: 3384198 - RNA, 16 nt, Human
caugucuccuauccug

SEQ ID NO: 3384199 - RNA, 22 nt, Human
caugucuccuuuaagagcucug

SEQ ID NO: 3384200 - RNA, 17 nt, Human
caugucucucagaauuc

SEQ ID NO: 3384201 - RNA, 14 nt, Human
caugucuuaaugaa

SEQ ID NO: 3384202 - RNA, 18 nt, Human
caugucuuaaugaaguuu

SEQ ID NO: 3384203 - RNA, 23 nt, Human
caugucuuaaugaaguuugaaug

SEQ ID NO: 3384204 - RNA, 15 nt, Human
caugucuuguacaug

SEQ ID NO: 3384205 - RNA, 14 nt, Human
caugucuuuucuug

SEQ ID NO: 3384206 - RNA, 13 nt, Human
caugugaaaccuu

SEQ ID NO: 3384207 - RNA, 21 nt, Human
caugugaaaccuuuuuuaaga

SEQ ID NO: 3384208 - RNA, 13 nt, Human
caugugaagaggg

SEQ ID NO: 3384209 - RNA, 12 nt, Human
caugugacacau

SEQ ID NO: 3384210 - RNA, 14 nt, Human
caugugacacauau

SEQ ID NO: 3384211 - RNA, 16 nt, Human
caugugacacauaugc

SEQ ID NO: 3384212 - RNA, 14 nt, Human
caugugacauuuau

SEQ ID NO: 3384213 - RNA, 16 nt, Human
caugugacauuuauau

SEQ ID NO: 3384214 - RNA, 21 nt, Human
caugugacuccuaugaucuca

SEQ ID NO: 3384215 - RNA, 20 nt, Human
caugugacucuggcuuggcc

SEQ ID NO: 3384216 - RNA, 18 nt, Human
caugugagcucuuccuau

SEQ ID NO: 3384217 - RNA, 20 nt, Human
caugugagcugcugccauga

SEQ ID NO: 3384218 - RNA, 21 nt, Human
caugugagugacgaugaugua

SEQ ID NO: 3384219 - RNA, 12 nt, Human
caugugauccuu

SEQ ID NO: 3384220 - RNA, 15 nt, Human
caugugaugagagga

SEQ ID NO: 3384221 - RNA, 18 nt, Human
caugugaugagaggaaau

SEQ ID NO: 3384222 - RNA, 17 nt, Human
caugugauggacacucc

SEQ ID NO: 3384223 - RNA, 16 nt, Human
caugugcauaacaaau

SEQ ID NO: 3384224 - RNA, 23 nt, Human
caugugcauaacaaauucugaau

SEQ ID NO: 3384225 - RNA, 16 nt, Human
caugugcauaguuucu

SEQ ID NO: 3384226 - RNA, 18 nt, Human
caugugcauuauuuucca

SEQ ID NO: 3384227 - RNA, 16 nt, Human
caugugccgaaugugc

SEQ ID NO: 3384228 - RNA, 16 nt, Human
caugugccucuuuguc

SEQ ID NO: 3384229 - RNA, 15 nt, Human
caugugccugcacca

SEQ ID NO: 3384230 - RNA, 18 nt, Human
caugugcugcccuacagc

SEQ ID NO: 3384231 - RNA, 23 nt, Human
caugugcugugaccauuuauaau

SEQ ID NO: 3384232 - RNA, 15 nt, Human
caugugcuucugcca

SEQ ID NO: 3384233 - RNA, 21 nt, Human
cauguggaaaaaaaaaagaug

SEQ ID NO: 3384234 - RNA, 17 nt, Human
cauguggaaagugaauu

SEQ ID NO: 3384235 - RNA, 22 nt, Human
cauguggaaggcaagccaggcu

SEQ ID NO: 3384236 - RNA, 23 nt, Human
cauguggaaggcaagccaggcuc

SEQ ID NO: 3384237 - RNA, 18 nt, Human
cauguggagucagccucg

SEQ ID NO: 3384238 - RNA, 15 nt, Human
cauguggccccaccc

SEQ ID NO: 3384239 - RNA, 22 nt, Human
cauguggcuguagaucccaaga

SEQ ID NO: 3384240 - RNA, 21 nt, Human
cauguggcuuuuuuaaaaaag

SEQ ID NO: 3384241 - RNA, 23 nt, Human
caugugggccacacaagugcagu

SEQ ID NO: 3384242 - RNA, 13 nt, Human
caugugggcuuca

SEQ ID NO: 3384243 - RNA, 18 nt, Human
cauguggggccaggucac

SEQ ID NO: 3384244 - RNA, 14 nt, Human
cauguggugaugau

SEQ ID NO: 3384245 - RNA, 12 nt, Human
caugugguggga

SEQ ID NO: 3384246 - RNA, 16 nt, Human
caugugguuacacagu

SEQ ID NO: 3384247 - RNA, 15 nt, Human
caugugguuuauaga

SEQ ID NO: 3384248 - RNA, 20 nt, Human
caugugguuuauagagggcc

SEQ ID NO: 3384249 - RNA, 14 nt, Human
caugugguuugaaa

SEQ ID NO: 3384250 - RNA, 22 nt, Human
caugugguuugguuccucucug

SEQ ID NO: 3384251 - RNA, 17 nt, Human
cauguguaaucaauaaa

SEQ ID NO: 3384252 - RNA, 18 nt, Human
cauguguaaucaauaaac

SEQ ID NO: 3384253 - RNA, 20 nt, Human
cauguguacuuaauuucuuu

SEQ ID NO: 3384254 - RNA, 17 nt, Human
cauguguauaaaaauaa

SEQ ID NO: 3384255 - RNA, 12 nt, Human
cauguguauguu

SEQ ID NO: 3384256 - RNA, 17 nt, Human
caugugucacuugugcu

SEQ ID NO: 3384257 - RNA, 18 nt, Human
caugugucacuugugcuu

SEQ ID NO: 3384258 - RNA, 15 nt, Human
caugugucaugcaug

SEQ ID NO: 3384259 - RNA, 17 nt, Human
cauguguccaucccagc

SEQ ID NO: 3384260 - RNA, 18 nt, Human
caugugugcaacagggua

SEQ ID NO: 3384261 - RNA, 19 nt, Human
caugugugcgagugugugc

SEQ ID NO: 3384262 - RNA, 20 nt, Human
caugugugcucuucuucuuu

SEQ ID NO: 3384263 - RNA, 12 nt, Human
cauguguggaag

SEQ ID NO: 3384264 - RNA, 13 nt, Human
cauguguguauaa

SEQ ID NO: 3384265 - RNA, 17 nt, Human
cauguguguauauaugu

SEQ ID NO: 3384266 - RNA, 12 nt, Human
caugugugucca

SEQ ID NO: 3384267 - RNA, 23 nt, Human
cauguguguccacgacugucucc

SEQ ID NO: 3384268 - RNA, 13 nt, Human
caugugugugugu

SEQ ID NO: 3384269 - RNA, 14 nt, Human
cauguguugaaaaa

SEQ ID NO: 3384270 - RNA, 14 nt, Human
cauguguuuauccu

SEQ ID NO: 3384271 - RNA, 19 nt, Human
cauguguuugguucugggg

SEQ ID NO: 3384272 - RNA, 18 nt, Human
cauguguuuuauaaaauc

SEQ ID NO: 3384273 - RNA, 13 nt, Human
cauguuaauuuca

SEQ ID NO: 3384274 - RNA, 12 nt, Human
cauguuaccauc

SEQ ID NO: 3384275 - RNA, 16 nt, Human
cauguuagcccuuccu

SEQ ID NO: 3384276 - RNA, 19 nt, Human
cauguuaggaaaauuucac

SEQ ID NO: 3384277 - RNA, 16 nt, Human
cauguuaguaauaccu

SEQ ID NO: 3384278 - RNA, 18 nt, Human
cauguuaguaauaccucu

SEQ ID NO: 3384279 - RNA, 13 nt, Human
cauguuauauauu

SEQ ID NO: 3384280 - RNA, 20 nt, Human
cauguuaugauaaaaaauuu

SEQ ID NO: 3384281 - RNA, 22 nt, Human
cauguuaugauaaaaaauuuug

SEQ ID NO: 3384282 - RNA, 23 nt, Human
cauguuaugauaaaaaauuuugu

SEQ ID NO: 3384283 - RNA, 23 nt, Human
cauguuauuuguaauagauguuu

SEQ ID NO: 3384284 - RNA, 22 nt, Human
cauguucaaagccacauuauuu

SEQ ID NO: 3384285 - RNA, 16 nt, Human
cauguuccacuaaccc

SEQ ID NO: 3384286 - RNA, 13 nt, Human
cauguuccucaaa

SEQ ID NO: 3384287 - RNA, 20 nt, Human
cauguuccuucaagaucaug

SEQ ID NO: 3384288 - RNA, 13 nt, Human
cauguucugcccc

SEQ ID NO: 3384289 - RNA, 15 nt, Human
cauguucugccccca

SEQ ID NO: 3384290 - RNA, 16 nt, Human
cauguucugcccccag

SEQ ID NO: 3384291 - RNA, 17 nt, Human
cauguucugcccccagc

SEQ ID NO: 3384292 - RNA, 19 nt, Human
cauguucugcccccagccc

SEQ ID NO: 3384293 - RNA, 14 nt, Human
cauguucugucccu

SEQ ID NO: 3384294 - RNA, 18 nt, Human
cauguucugucccuugcc

SEQ ID NO: 3384295 - RNA, 16 nt, Human
cauguucuuaauucuu

SEQ ID NO: 3384296 - RNA, 18 nt, Human
cauguucuuaauucuuag

SEQ ID NO: 3384297 - RNA, 20 nt, Human
cauguugaucauguacuuuu

SEQ ID NO: 3384298 - RNA, 18 nt, Human
cauguugcacacccacuc

SEQ ID NO: 3384299 - RNA, 17 nt, Human
cauguugccccuuucuc

SEQ ID NO: 3384300 - RNA, 12 nt, Human
cauguuggccag

SEQ ID NO: 3384301 - RNA, 20 nt, Human
cauguuggccaggcugcucu

SEQ ID NO: 3384302 - RNA, 23 nt, Human
cauguuggccaggcugcucucaa

SEQ ID NO: 3384303 - RNA, 22 nt, Human
cauguuggucaaaagcuggauu

SEQ ID NO: 3384304 - RNA, 21 nt, Human
cauguugguugcacuuuguag

SEQ ID NO: 3384305 - RNA, 12 nt, Human
cauguuguaaug

SEQ ID NO: 3384306 - RNA, 21 nt, Human
cauguugugccucccugguga

SEQ ID NO: 3384307 - RNA, 14 nt, Human
cauguuuaagauuu

SEQ ID NO: 3384308 - RNA, 19 nt, Human
cauguuuacuuuucagggc

SEQ ID NO: 3384309 - RNA, 21 nt, Human
cgagagacuuguggccuggga

SEQ ID NO: 3384310 - RNA, 21 nt, Human
cgagagagcaccccucucugc

SEQ ID NO: 3384311 - RNA, 16 nt, Human
cgagagaggagccaga

SEQ ID NO: 3384312 - RNA, 12 nt, Human
cgagagcgcagc

SEQ ID NO: 3384313 - RNA, 15 nt, Human
cgagaggaggggccc

SEQ ID NO: 3384314 - RNA, 19 nt, Human
cgagaggccaaaggcuggu

SEQ ID NO: 3384315 - RNA, 22 nt, Human
cgagaggggccgaugcccagag

SEQ ID NO: 3384316 - RNA, 19 nt, Human
cgagaggugggccagucug

SEQ ID NO: 3384317 - RNA, 23 nt, Human
cgagaggugggccagucugugga

SEQ ID NO: 3384318 - RNA, 19 nt, Human
cgagaguagccgagagccu

SEQ ID NO: 3384319 - RNA, 15 nt, Human
cgagagucugucuca

SEQ ID NO: 3384320 - RNA, 17 nt, Human
cgagaucacgccacugc

SEQ ID NO: 3384321 - RNA, 19 nt, Human
cgagaucaguauuuaacua

SEQ ID NO: 3384322 - RNA, 13 nt, Human
cgagaucccaaca

SEQ ID NO: 3384323 - RNA, 21 nt, Human
cgagaucccaacacugccagc

SEQ ID NO: 3384324 - RNA, 22 nt, Human
cgagaucccaacacugccagca

SEQ ID NO: 3384325 - RNA, 21 nt, Human
cgagauuaucguuuucuuaaa

SEQ ID NO: 3384326 - RNA, 18 nt, Human
cgagcagggugcuguggg

SEQ ID NO: 3384327 - RNA, 17 nt, Human
cgagcaguccugccuca

SEQ ID NO: 3384328 - RNA, 15 nt, Human
cgagcaugucgugga

SEQ ID NO: 3384329 - RNA, 16 nt, Human
cgagccauuuguccca

SEQ ID NO: 3384330 - RNA, 19 nt, Human
cgagccauuugucccaagu

SEQ ID NO: 3384331 - RNA, 20 nt, Human
cgagccauuugucccaagug

SEQ ID NO: 3384332 - RNA, 22 nt, Human
cgagccauuugucccaagugcc

SEQ ID NO: 3384333 - RNA, 15 nt, Human
cgagcgcccagcucc

SEQ ID NO: 3384334 - RNA, 13 nt, Human
cgagcgcccugca

SEQ ID NO: 3384335 - RNA, 19 nt, Human
cgagcgcuaucuucacaua

SEQ ID NO: 3384336 - RNA, 15 nt, Human
cgagcuccagagcaa

SEQ ID NO: 3384337 - RNA, 17 nt, Human
cgagcucguguauccug

SEQ ID NO: 3384338 - RNA, 20 nt, Human
cgagcucguguauccugggg

SEQ ID NO: 3384339 - RNA, 20 nt, Human
cgagcugggggccaugagcu

SEQ ID NO: 3384340 - RNA, 15 nt, Human
cgagcuggugcauua

SEQ ID NO: 3384341 - RNA, 23 nt, Human
cgagcuggugcauuacagagagg

SEQ ID NO: 3384342 - RNA, 14 nt, Human
cgaggaaacucaga

SEQ ID NO: 3384343 - RNA, 14 nt, Human
cgaggaaccagagc

SEQ ID NO: 3384344 - RNA, 16 nt, Human
cgaggaaccagagcca

SEQ ID NO: 3384345 - RNA, 16 nt, Human
cgaggaaucugugggu

SEQ ID NO: 3384346 - RNA, 12 nt, Human
cgaggacaggga

SEQ ID NO: 3384347 - RNA, 20 nt, Human
cgaggacccagacccagugg

SEQ ID NO: 3384348 - RNA, 15 nt, Human
cgaggacccaggaaa

SEQ ID NO: 3384349 - RNA, 18 nt, Human
cgaggacuguauuuguga

SEQ ID NO: 3384350 - RNA, 19 nt, Human
cgaggacuguauuugugac

SEQ ID NO: 3384351 - RNA, 20 nt, Human
cgaggacuguauuugugacu

SEQ ID NO: 3384352 - RNA, 18 nt, Human
cgaggagggagagucucc

SEQ ID NO: 3384353 - RNA, 23 nt, Human
cgaggagggagagucucccaggg

SEQ ID NO: 3384354 - RNA, 23 nt, Human
cgaggaggugccuggagugccca

SEQ ID NO: 3384355 - RNA, 20 nt, Human
cgaggaggugucucaggcug

SEQ ID NO: 3384356 - RNA, 15 nt, Human
cgaggcagaggacag

SEQ ID NO: 3384357 - RNA, 19 nt, Human
cgaggccaguaccuuucca

SEQ ID NO: 3384358 - RNA, 21 nt, Human
cgaggcccucgggcccagccc

SEQ ID NO: 3384359 - RNA, 15 nt, Human
cgaggcccugcaugg

SEQ ID NO: 3384360 - RNA, 16 nt, Human
cgaggcuggagcuggc

SEQ ID NO: 3384361 - RNA, 17 nt, Human
cgaggcugggccaagcc

SEQ ID NO: 3384362 - RNA, 18 nt, Human
cgaggcugggccaagcca

SEQ ID NO: 3384363 - RNA, 14 nt, Human
cauucaaaaauuuc

SEQ ID NO: 3384364 - RNA, 17 nt, Human
cauucaaaaguugaaau

SEQ ID NO: 3384365 - RNA, 12 nt, Human
cauucaaauuaa

SEQ ID NO: 3384366 - RNA, 14 nt, Human
cauucaagauuccc

SEQ ID NO: 3384367 - RNA, 18 nt, Human
cauucaaguguaaaauau

SEQ ID NO: 3384368 - RNA, 19 nt, Human
cauucaaguguaaaauauu

SEQ ID NO: 3384369 - RNA, 20 nt, Human
cauucaaguguaaaauauuu

SEQ ID NO: 3384370 - RNA, 22 nt, Human
cauucacaguucuuugggccag

SEQ ID NO: 3384371 - RNA, 15 nt, Human
cauucacauuuagaa

SEQ ID NO: 3384372 - RNA, 22 nt, Human
cauucacggagauaugaagagc

SEQ ID NO: 3384373 - RNA, 15 nt, Human
cauucacuagcuuug

SEQ ID NO: 3384374 - RNA, 20 nt, Human
cauucacucuuccagaaucc

SEQ ID NO: 3384375 - RNA, 14 nt, Human
cauucacuucacug

SEQ ID NO: 3384376 - RNA, 17 nt, Human
cauucacuucacugugc

SEQ ID NO: 3384377 - RNA, 15 nt, Human
cauucacuucauaau

SEQ ID NO: 3384378 - RNA, 17 nt, Human
cauucagaagaaaaaga

SEQ ID NO: 3384379 - RNA, 21 nt, Human
cauucagauaugauucaaaug

SEQ ID NO: 3384380 - RNA, 13 nt, Human
cauucaggaaaac

SEQ ID NO: 3384381 - RNA, 20 nt, Human
cauucaggaaaacugacaga

SEQ ID NO: 3384382 - RNA, 23 nt, Human
cauucaggaaaacugacagagga

SEQ ID NO: 3384383 - RNA, 19 nt, Human
cauucagugauuacuguca

SEQ ID NO: 3384384 - RNA, 20 nt, Human
cauucagugauuacugucaa

SEQ ID NO: 3384385 - RNA, 15 nt, Human
cauucauaacuuuca

SEQ ID NO: 3384386 - RNA, 19 nt, Human
cauucauauuacaauauuu

SEQ ID NO: 3384387 - RNA, 18 nt, Human
cauucaucuuguguuuua

SEQ ID NO: 3384388 - RNA, 14 nt, Human
cauucaugccuggc

SEQ ID NO: 3384389 - RNA, 16 nt, Human
cauucaugccuggcuu

SEQ ID NO: 3384390 - RNA, 15 nt, Human
cauucauuccauucu

SEQ ID NO: 3384391 - RNA, 20 nt, Human
cauucauuuagcuaaacgga

SEQ ID NO: 3384392 - RNA, 17 nt, Human
cauucauuuuauauuga

SEQ ID NO: 3384393 - RNA, 18 nt, Human
cauucauuuuauauugaa

SEQ ID NO: 3384394 - RNA, 19 nt, Human
cauucauuuucuggguguu

SEQ ID NO: 3384395 - RNA, 11 nt, Human
cauucauuuuu

SEQ ID NO: 3384396 - RNA, 17 nt, Human
cauuccaaagcuuuauu

SEQ ID NO: 3384397 - RNA, 22 nt, Human
cauuccaacuaucucauuucca

SEQ ID NO: 3384398 - RNA, 23 nt, Human
cauuccaagacaguauacagucc

SEQ ID NO: 3384399 - RNA, 14 nt, Human
cauuccaagacucu

SEQ ID NO: 3384400 - RNA, 19 nt, Human
cauuccaggcagccucugu

SEQ ID NO: 3384401 - RNA, 12 nt, Human
cauuccaggccc

SEQ ID NO: 3384402 - RNA, 12 nt, Human
cauuccaggcuc

SEQ ID NO: 3384403 - RNA, 13 nt, Human
cauuccaggcucc

SEQ ID NO: 3384404 - RNA, 17 nt, Human
cauuccaggcuccuccc

SEQ ID NO: 3384405 - RNA, 16 nt, Human
cauuccagucaggcuc

SEQ ID NO: 3384406 - RNA, 15 nt, Human
cauuccauaaauguc

SEQ ID NO: 3384407 - RNA, 17 nt, Human
cauuccaugugcccagu

SEQ ID NO: 3384408 - RNA, 18 nt, Human
cauuccaugugcccaguu

SEQ ID NO: 3384409 - RNA, 21 nt, Human
cauuccaugugcccaguuaau

SEQ ID NO: 3384410 - RNA, 11 nt, Human
cauucccaggu

SEQ ID NO: 3384411 - RNA, 13 nt, Human
cauuccccaggag

SEQ ID NO: 3384412 - RNA, 13 nt, Human
cauucccccagug

SEQ ID NO: 3384413 - RNA, 14 nt, Human
cauucccccagugc

SEQ ID NO: 3384414 - RNA, 17 nt, Human
cauuccccgucucuggu

SEQ ID NO: 3384415 - RNA, 19 nt, Human
cauucccgcagugggagca

SEQ ID NO: 3384416 - RNA, 18 nt, Human
cauucccucgucuuuccc

SEQ ID NO: 3384417 - RNA, 11 nt, Human
cauucccugag

SEQ ID NO: 3384418 - RNA, 17 nt, Human
cauucccugagucacca

SEQ ID NO: 3384419 - RNA, 20 nt, Human
cauucccugagucaccagga

SEQ ID NO: 3384420 - RNA, 21 nt, Human
cauucccugagucaccaggaa

SEQ ID NO: 3384421 - RNA, 15 nt, Human
cauucccugggaucu

SEQ ID NO: 3384422 - RNA, 22 nt, Human
cauuccuaaagaaaaauaucuu

SEQ ID NO: 3384423 - RNA, 21 nt, Human
cauuccuaacacagcaugugu

SEQ ID NO: 3384424 - RNA, 13 nt, Human
cauuccucaccuu

SEQ ID NO: 3384425 - RNA, 16 nt, Human
cauuccucagggacag

SEQ ID NO: 3384426 - RNA, 16 nt, Human
cauuccugaagaacca

SEQ ID NO: 3384427 - RNA, 21 nt, Human
cauuccugaagaaccaguccc

SEQ ID NO: 3384428 - RNA, 16 nt, Human
cauuccugaugcuucu

SEQ ID NO: 3384429 - RNA, 14 nt, Human
cauuccugccuguc

SEQ ID NO: 3384430 - RNA, 16 nt, Human
cauuccugccugucuc

SEQ ID NO: 3384431 - RNA, 21 nt, Human
cauuccuggaaaccacagucc

SEQ ID NO: 3384432 - RNA, 16 nt, Human
cauuccuggagcccga

SEQ ID NO: 3384433 - RNA, 15 nt, Human
cauuccugguaccca

SEQ ID NO: 3384434 - RNA, 17 nt, Human
cauuccugguacccagc

SEQ ID NO: 3384435 - RNA, 18 nt, Human
cauuccuguauucacccg

SEQ ID NO: 3384436 - RNA, 22 nt, Human
cauuccuucccagaggggccug

SEQ ID NO: 3384437 - RNA, 15 nt, Human
cauuccuucuuugau

SEQ ID NO: 3384438 - RNA, 13 nt, Human
cauuccuugccug

SEQ ID NO: 3384439 - RNA, 22 nt, Human
cauucgaagauccccagacuuc

SEQ ID NO: 3384440 - RNA, 22 nt, Human
cauucgcuacuaugauuuaauu

SEQ ID NO: 3384441 - RNA, 13 nt, Human
cauucggcucccu

SEQ ID NO: 3384442 - RNA, 18 nt, Human
cauucggcucccuggagc

SEQ ID NO: 3384443 - RNA, 19 nt, Human
cauucguacauaauacuga

SEQ ID NO: 3384444 - RNA, 13 nt, Human
cauucgugaaaac

SEQ ID NO: 3384445 - RNA, 16 nt, Human
cauucuaaccuggagg

SEQ ID NO: 3384446 - RNA, 16 nt, Human
cauucuacacagagca

SEQ ID NO: 3384447 - RNA, 13 nt, Human
cauucuacuugcu

SEQ ID NO: 3384448 - RNA, 15 nt, Human
cauucuacuugcucu

SEQ ID NO: 3384449 - RNA, 18 nt, Human
cauucuacuugcucugga

SEQ ID NO: 3384450 - RNA, 21 nt, Human
cauucuacuugcucuggaccu

SEQ ID NO: 3384451 - RNA, 21 nt, Human
cauucuagagugcauauauuu

SEQ ID NO: 3384452 - RNA, 23 nt, Human
cauucuaggccuccuggcccagg

SEQ ID NO: 3384453 - RNA, 17 nt, Human
cauucuaucaagcccag

SEQ ID NO: 3384454 - RNA, 16 nt, Human
cgcacaaggcugacca

SEQ ID NO: 3384455 - RNA, 20 nt, Human
cgcacacacacacacaggag

SEQ ID NO: 3384456 - RNA, 12 nt, Human
cgcacacagcuu

SEQ ID NO: 3384457 - RNA, 22 nt, Human
cgcacacccucacucugccagg

SEQ ID NO: 3384458 - RNA, 12 nt, Human
cgcacagacagg

SEQ ID NO: 3384459 - RNA, 13 nt, Human
cgcacagacaggu

SEQ ID NO: 3384460 - RNA, 20 nt, Human
cgcacagcagccugcuuccc

SEQ ID NO: 3384461 - RNA, 17 nt, Human
cgcaccagcccagaagu

SEQ ID NO: 3384462 - RNA, 13 nt, Human
cgcacccccaccc

SEQ ID NO: 3384463 - RNA, 22 nt, Human
cgcaccccgauguggaccucua

SEQ ID NO: 3384464 - RNA, 19 nt, Human
cgcaccuaccaucagggac

SEQ ID NO: 3384465 - RNA, 16 nt, Human
cgcaccugccucagga

SEQ ID NO: 3384466 - RNA, 14 nt, Human
cgcaccuguacagu

SEQ ID NO: 3384467 - RNA, 14 nt, Human
cgcacgcacacaca

SEQ ID NO: 3384468 - RNA, 18 nt, Human
cgcacgugggucuucagg

SEQ ID NO: 3384469 - RNA, 16 nt, Human
cgcacuccaugagcac

SEQ ID NO: 3384470 - RNA, 13 nt, Human
cgcacucuggcag

SEQ ID NO: 3384471 - RNA, 12 nt, Human
cgcacuguggau

SEQ ID NO: 3384472 - RNA, 17 nt, Human
cgcacuuuccuccuggc

SEQ ID NO: 3384473 - RNA, 19 nt, Human
cgcagaacgaaccuuggcc

SEQ ID NO: 3384474 - RNA, 13 nt, Human
cgcagaaggaagg

SEQ ID NO: 3384475 - RNA, 15 nt, Human
cgcagaccuccccag

SEQ ID NO: 3384476 - RNA, 19 nt, Human
cgcagaccuccccagcccc

SEQ ID NO: 3384477 - RNA, 13 nt, Human
cgcagaccucugg

SEQ ID NO: 3384478 - RNA, 14 nt, Human
cgcagagaggccag

SEQ ID NO: 3384479 - RNA, 19 nt, Human
cgcagagcgcgccccuagc

SEQ ID NO: 3384480 - RNA, 14 nt, Human
cgcagaugauccau

SEQ ID NO: 3384481 - RNA, 19 nt, Human
cgcagaugugcagcagauu

SEQ ID NO: 3384482 - RNA, 18 nt, Human
cgcagcaggaggccaggc

SEQ ID NO: 3384483 - RNA, 18 nt, Human
cgcagcauccgaccaggu

SEQ ID NO: 3384484 - RNA, 21 nt, Human
cgcagccaaggccgaagcucu

SEQ ID NO: 3384485 - RNA, 11 nt, Human
cgcagccaccc

SEQ ID NO: 3384486 - RNA, 13 nt, Human
cgcagccacccug

SEQ ID NO: 3384487 - RNA, 14 nt, Human
cgcagccacccuga

SEQ ID NO: 3384488 - RNA, 16 nt, Human
cgcagccacccugagg

SEQ ID NO: 3384489 - RNA, 22 nt, Human
cgcagccacccugaggagucug

SEQ ID NO: 3384490 - RNA, 15 nt, Human
cgcagccaggacacc

SEQ ID NO: 3384491 - RNA, 13 nt, Human
cgcagccccaucu

SEQ ID NO: 3384492 - RNA, 18 nt, Human
cgcagccccaucugugca

SEQ ID NO: 3384493 - RNA, 18 nt, Human
cgcagcccuagagccugc

SEQ ID NO: 3384494 - RNA, 19 nt, Human
cgcagcccuagagccugcc

SEQ ID NO: 3384495 - RNA, 17 nt, Human
cgcagcccugcagaggg

SEQ ID NO: 3384496 - RNA, 23 nt, Human
cgcagcccuggcagggggcaugc

SEQ ID NO: 3384497 - RNA, 23 nt, Human
cgcagccucucagugcccuccag

SEQ ID NO: 3384498 - RNA, 11 nt, Human
cgcagccugag

SEQ ID NO: 3384499 - RNA, 12 nt, Human
cgcagccugagu

SEQ ID NO: 3384500 - RNA, 19 nt, Human
cgcagcucuugcccuuccc

SEQ ID NO: 3384501 - RNA, 23 nt, Human
cgcagcucuugcccuucccuguc

SEQ ID NO: 3384502 - RNA, 17 nt, Human
cgcaggaacucccagca

SEQ ID NO: 3384503 - RNA, 18 nt, Human
cgcaggaacucccagcaa

SEQ ID NO: 3384504 - RNA, 15 nt, Human
cgcaggaagcugcuc

SEQ ID NO: 3384505 - RNA, 22 nt, Human
cgcaggauucuuccucccuccc

SEQ ID NO: 3384506 - RNA, 19 nt, Human
cgcaggccucccugccagu

SEQ ID NO: 3384507 - RNA, 17 nt, Human
cgcaggcuggcccugcc

SEQ ID NO: 3384508 - RNA, 18 nt, Human
cgcaggcuggcccugccc

SEQ ID NO: 3384509 - RNA, 20 nt, Human
cgcaggcuggcccugcccug

SEQ ID NO: 3384510 - RNA, 22 nt, Human
cgcaggcuggcccugcccuggu

SEQ ID NO: 3384511 - RNA, 13 nt, Human
cgcaggugggcug

SEQ ID NO: 3384512 - RNA, 23 nt, Human
cgcaguccacuucugacagccuc

SEQ ID NO: 3384513 - RNA, 22 nt, Human
cgcagucgucgcacagucucuc

SEQ ID NO: 3384514 - RNA, 19 nt, Human
cgcagugcuucucuacaga

SEQ ID NO: 3384515 - RNA, 23 nt, Human
cgcagugggagcaaacugcaugc

SEQ ID NO: 3384516 - RNA, 12 nt, Human
cgcaguuuuuuu

SEQ ID NO: 3384517 - RNA, 21 nt, Human
cgcaguuuuuuuuuucuuguc

SEQ ID NO: 3384518 - RNA, 15 nt, Human
cgcauaggaccuuuc

SEQ ID NO: 3384519 - RNA, 14 nt, Human
cgcauccccugccu

SEQ ID NO: 3384520 - RNA, 16 nt, Human
cgcauccccugccucc

SEQ ID NO: 3384521 - RNA, 15 nt, Human
cgcauccuagucucu

SEQ ID NO: 3384522 - RNA, 22 nt, Human
cgcaucuaguuccccuguuuau

SEQ ID NO: 3384523 - RNA, 13 nt, Human
cgcaucuucucca

SEQ ID NO: 3384524 - RNA, 16 nt, Human
cgcaucuugccuccag

SEQ ID NO: 3384525 - RNA, 17 nt, Human
cgcaucuugccuccagg

SEQ ID NO: 3384526 - RNA, 14 nt, Human
cgcaugcagcagcu

SEQ ID NO: 3384527 - RNA, 20 nt, Human
cgcaugcccccucgugccag

SEQ ID NO: 3384528 - RNA, 22 nt, Human
cgcauggaguguguauuguucc

SEQ ID NO: 3384529 - RNA, 16 nt, Human
ccuugagcccuggcug

SEQ ID NO: 3384530 - RNA, 17 nt, Human
ccuugagcuccccaaaa

SEQ ID NO: 3384531 - RNA, 14 nt, Human
ccuugagcugagau

SEQ ID NO: 3384532 - RNA, 16 nt, Human
ccuugaggagucuugu

SEQ ID NO: 3384533 - RNA, 18 nt, Human
ccuugaggagucuugugu

SEQ ID NO: 3384534 - RNA, 11 nt, Human
ccuugagggag

SEQ ID NO: 3384535 - RNA, 15 nt, Human
ccuugagggcugcag

SEQ ID NO: 3384536 - RNA, 16 nt, Human
ccuugagggcugcagu

SEQ ID NO: 3384537 - RNA, 19 nt, Human
ccuugaguaguuuuuaucu

SEQ ID NO: 3384538 - RNA, 14 nt, Human
ccuugagugggguu

SEQ ID NO: 3384539 - RNA, 23 nt, Human
ccuugagugggguuaucucugug

SEQ ID NO: 3384540 - RNA, 22 nt, Human
ccuugaguugauucagcucugc

SEQ ID NO: 3384541 - RNA, 23 nt, Human
ccuugauaauauauuguguugac

SEQ ID NO: 3384542 - RNA, 18 nt, Human
ccuugaucagccccaccc

SEQ ID NO: 3384543 - RNA, 20 nt, Human
ccuugaucagccccacccug

SEQ ID NO: 3384544 - RNA, 13 nt, Human
ccuugaucauuuu

SEQ ID NO: 3384545 - RNA, 14 nt, Human
ccuugaugaagaag

SEQ ID NO: 3384546 - RNA, 15 nt, Human
ccuugaugauuuaau

SEQ ID NO: 3384547 - RNA, 18 nt, Human
ccuugaugcacagagaag

SEQ ID NO: 3384548 - RNA, 13 nt, Human
ccuugauuggaag

SEQ ID NO: 3384549 - RNA, 19 nt, Human
ccuugauuuaaacacacag

SEQ ID NO: 3384550 - RNA, 16 nt, Human
ccuugcaacacacaga

SEQ ID NO: 3384551 - RNA, 18 nt, Human
ccuugcaacacacagaca

SEQ ID NO: 3384552 - RNA, 15 nt, Human
ccuugcaagaaucag

SEQ ID NO: 3384553 - RNA, 24 nt, Human
ccuugcacacaucaucuguaagcu

SEQ ID NO: 3384554 - RNA, 18 nt, Human
ccuugcacacucagaagc

SEQ ID NO: 3384555 - RNA, 19 nt, Human
ccuugcacacuccccugca

SEQ ID NO: 3384556 - RNA, 14 nt, Human
ccuugcacauagua

SEQ ID NO: 3384557 - RNA, 13 nt, Human
ccuugcaccccuc

SEQ ID NO: 3384558 - RNA, 14 nt, Human
ccuugcaccccuca

SEQ ID NO: 3384559 - RNA, 15 nt, Human
ccuugcagcuaguuu

SEQ ID NO: 3384560 - RNA, 21 nt, Human
ccuugcauuuuagcuaauuua

SEQ ID NO: 3384561 - RNA, 13 nt, Human
ccuugccacccca

SEQ ID NO: 3384562 - RNA, 23 nt, Human
ccuugccaccccacccucccugg

SEQ ID NO: 3384563 - RNA, 19 nt, Human
ccuugccagcugcugagcc

SEQ ID NO: 3384564 - RNA, 23 nt, Human
ccuugccauccuaaaagccaccc

SEQ ID NO: 3384565 - RNA, 15 nt, Human
ccuugcccaccccac

SEQ ID NO: 3384566 - RNA, 19 nt, Human
ccuugcccacuccugcucu

SEQ ID NO: 3384567 - RNA, 11 nt, Human
ccuugcccaga

SEQ ID NO: 3384568 - RNA, 13 nt, Human
ccuugcccagccu

SEQ ID NO: 3384569 - RNA, 16 nt, Human
ccuugcccagccugga

SEQ ID NO: 3384570 - RNA, 15 nt, Human
ccuugcccagggcuc

SEQ ID NO: 3384571 - RNA, 16 nt, Human
ccuugcccagggcuca

SEQ ID NO: 3384572 - RNA, 22 nt, Human
ccuugcccagggcucagccugg

SEQ ID NO: 3384573 - RNA, 21 nt, Human
ccuugccccccuggccucccc

SEQ ID NO: 3384574 - RNA, 12 nt, Human
ccuugcccugac

SEQ ID NO: 3384575 - RNA, 16 nt, Human
ccuugccgucuaccug

SEQ ID NO: 3384576 - RNA, 17 nt, Human
ccuugccgucuaccuga

SEQ ID NO: 3384577 - RNA, 19 nt, Human
ccuugccucaaugccagua

SEQ ID NO: 3384578 - RNA, 22 nt, Human
ccuugccuccccauuucccauc

SEQ ID NO: 3384579 - RNA, 12 nt, Human
ccuugccuccug

SEQ ID NO: 3384580 - RNA, 15 nt, Human
ccuugccuccugugu

SEQ ID NO: 3384581 - RNA, 21 nt, Human
ccuugccugaacauccuuccu

SEQ ID NO: 3384582 - RNA, 12 nt, Human
ccuugccuggua

SEQ ID NO: 3384583 - RNA, 18 nt, Human
ccuugccuuucgaggccu

SEQ ID NO: 3384584 - RNA, 19 nt, Human
ccuugccuuucgaggccug

SEQ ID NO: 3384585 - RNA, 17 nt, Human
ccuugcggcuccucagg

SEQ ID NO: 3384586 - RNA, 20 nt, Human
ccuugcggcuccucagggac

SEQ ID NO: 3384587 - RNA, 20 nt, Human
ccuugcgguauccgccccca

SEQ ID NO: 3384588 - RNA, 23 nt, Human
ccuugcuaccacggccuccuuuc

SEQ ID NO: 3384589 - RNA, 14 nt, Human
ccuugcuacccaga

SEQ ID NO: 3384590 - RNA, 18 nt, Human
ccuugcucgcuguaaaau

SEQ ID NO: 3384591 - RNA, 22 nt, Human
ccuugcucuccccugcccugcu

SEQ ID NO: 3384592 - RNA, 17 nt, Human
ccuugcucugcaggcac

SEQ ID NO: 3384593 - RNA, 14 nt, Human
ccuugcuggcccca

SEQ ID NO: 3384594 - RNA, 21 nt, Human
ccuugcugguuuucuggaugg

SEQ ID NO: 3384595 - RNA, 13 nt, Human
ccuugcuguccug

SEQ ID NO: 3384596 - RNA, 17 nt, Human
ccuugcuguccugaucu

SEQ ID NO: 3384597 - RNA, 12 nt, Human
ccuugcuuguua

SEQ ID NO: 3384598 - RNA, 15 nt, Human
ccuugcuuuucccuc

SEQ ID NO: 3384599 - RNA, 16 nt, Human
cauuuaggggcaagca

SEQ ID NO: 3384600 - RNA, 17 nt, Human
cauuuaggggccacuuu

SEQ ID NO: 3384601 - RNA, 14 nt, Human
cauuuaguaagaau

SEQ ID NO: 3384602 - RNA, 15 nt, Human
cauuuauaauugcau

SEQ ID NO: 3384603 - RNA, 17 nt, Human
cauuuauacaaauuaga

SEQ ID NO: 3384604 - RNA, 19 nt, Human
cauuuauacaaauuagaaa

SEQ ID NO: 3384605 - RNA, 13 nt, Human
cauuuauauagau

SEQ ID NO: 3384606 - RNA, 14 nt, Human
cauuuauauaugaa

SEQ ID NO: 3384607 - RNA, 16 nt, Human
cauuuauauaugaaaa

SEQ ID NO: 3384608 - RNA, 22 nt, Human
cauuuauauauugaauuaauau

SEQ ID NO: 3384609 - RNA, 13 nt, Human
cauuuauauguac

SEQ ID NO: 3384610 - RNA, 20 nt, Human
cauuuauauugauaagaucu

SEQ ID NO: 3384611 - RNA, 20 nt, Human
cauuuaucaaucaguauaau

SEQ ID NO: 3384612 - RNA, 18 nt, Human
cauuuauccacaggaaag

SEQ ID NO: 3384613 - RNA, 14 nt, Human
cauuuaucuugaag

SEQ ID NO: 3384614 - RNA, 16 nt, Human
cauuuaucuugaagga

SEQ ID NO: 3384615 - RNA, 17 nt, Human
cauuuaucuugaaggaa

SEQ ID NO: 3384616 - RNA, 23 nt, Human
cauuuaugagcucuucauguuuc

SEQ ID NO: 3384617 - RNA, 19 nt, Human
cauuuaugaguaacuauua

SEQ ID NO: 3384618 - RNA, 15 nt, Human
cauuuaugauuuaau

SEQ ID NO: 3384619 - RNA, 17 nt, Human
cauuuaugauuuaauaa

SEQ ID NO: 3384620 - RNA, 21 nt, Human
cauuuaugauuuaauaaaaua

SEQ ID NO: 3384621 - RNA, 14 nt, Human
cauuuaugcacauu

SEQ ID NO: 3384622 - RNA, 16 nt, Human
cauuuaugguaaucau

SEQ ID NO: 3384623 - RNA, 21 nt, Human
cauuuauggucaacacuuaag

SEQ ID NO: 3384624 - RNA, 15 nt, Human
cauuuauucugcuca

SEQ ID NO: 3384625 - RNA, 23 nt, Human
cauuuauuuauccagaaaacugu

SEQ ID NO: 3384626 - RNA, 13 nt, Human
cauuuauuuguga

SEQ ID NO: 3384627 - RNA, 23 nt, Human
cauuuauuuuaugagaaauguaa

SEQ ID NO: 3384628 - RNA, 22 nt, Human
cauuuauuuuuuuuaaagaaaa

SEQ ID NO: 3384629 - RNA, 14 nt, Human
cauuucaaaaugau

SEQ ID NO: 3384630 - RNA, 14 nt, Human
cauuucaaaaugcu

SEQ ID NO: 3384631 - RNA, 15 nt, Human
cauuucaacuguuug

SEQ ID NO: 3384632 - RNA, 20 nt, Human
cauuucaauguguauaaauu

SEQ ID NO: 3384633 - RNA, 23 nt, Human
cauuucaccccucccuuucuccc

SEQ ID NO: 3384634 - RNA, 15 nt, Human
cauuucacuuauuua

SEQ ID NO: 3384635 - RNA, 17 nt, Human
cauuucagaaagccuuu

SEQ ID NO: 3384636 - RNA, 16 nt, Human
cauuucaggagcagcc

SEQ ID NO: 3384637 - RNA, 13 nt, Human
cauuucaggaggg

SEQ ID NO: 3384638 - RNA, 21 nt, Human
cauuucaguaaaccugucuga

SEQ ID NO: 3384639 - RNA, 22 nt, Human
cauuucauaauuuguuuccagc

SEQ ID NO: 3384640 - RNA, 17 nt, Human
cauuucaucauuguuuc

SEQ ID NO: 3384641 - RNA, 14 nt, Human
cauuucaucuauuu

SEQ ID NO: 3384642 - RNA, 15 nt, Human
cauuucaucuauuuc

SEQ ID NO: 3384643 - RNA, 20 nt, Human
cauuucaucuauuucugaga

SEQ ID NO: 3384644 - RNA, 14 nt, Human
cauuucaucucauu

SEQ ID NO: 3384645 - RNA, 15 nt, Human
cauuucauguauagu

SEQ ID NO: 3384646 - RNA, 16 nt, Human
cauuucauguccugug

SEQ ID NO: 3384647 - RNA, 15 nt, Human
cauuucauuccauug

SEQ ID NO: 3384648 - RNA, 18 nt, Human
cauuucauuccauugccu

SEQ ID NO: 3384649 - RNA, 12 nt, Human
cauuucauugua

SEQ ID NO: 3384650 - RNA, 13 nt, Human
cauuucauuguau

SEQ ID NO: 3384651 - RNA, 17 nt, Human
cauuuccaaaugaauga

SEQ ID NO: 3384652 - RNA, 19 nt, Human
cauuuccaacaccacagac

SEQ ID NO: 3384653 - RNA, 22 nt, Human
cauuuccaacaccacagacaca

SEQ ID NO: 3384654 - RNA, 15 nt, Human
cauuuccauguaugc

SEQ ID NO: 3384655 - RNA, 21 nt, Human
cauuuccauguccccucccag

SEQ ID NO: 3384656 - RNA, 14 nt, Human
cauuuccauugcuu

SEQ ID NO: 3384657 - RNA, 16 nt, Human
cauuuccauugcuuau

SEQ ID NO: 3384658 - RNA, 15 nt, Human
cauuucccaucugca

SEQ ID NO: 3384659 - RNA, 13 nt, Human
cauuuccccagac

SEQ ID NO: 3384660 - RNA, 16 nt, Human
cauuuccccagaccug

SEQ ID NO: 3384661 - RNA, 20 nt, Human
cauuuccccagaccugagcu

SEQ ID NO: 3384662 - RNA, 16 nt, Human
cauuuccccagggcac

SEQ ID NO: 3384663 - RNA, 16 nt, Human
cauuuccguaauucuu

SEQ ID NO: 3384664 - RNA, 19 nt, Human
cauuuccguaauucuuauu

SEQ ID NO: 3384665 - RNA, 20 nt, Human
cauuuccucagcuuaucucu

SEQ ID NO: 3384666 - RNA, 22 nt, Human
cauuuccuggguggcuacucug

SEQ ID NO: 3384667 - RNA, 17 nt, Human
cauuucgccccucauuu

SEQ ID NO: 3384668 - RNA, 21 nt, Human
cauuucgccccucauuuaucc

SEQ ID NO: 3384669 - RNA, 20 nt, Human
cauuucgugagccccaucuu

SEQ ID NO: 3384670 - RNA, 17 nt, Human
cauuucuaaaggccucu

SEQ ID NO: 3384671 - RNA, 23 nt, Human
cauuucuaauuaaccuuacuaau

SEQ ID NO: 3384672 - RNA, 20 nt, Human
cauuucuaauuauguagcuc

SEQ ID NO: 3384673 - RNA, 21 nt, Human
cauuucuaauuauguagcucu

SEQ ID NO: 3384674 - RNA, 18 nt, Human
cauuucuaauuccuguuu

SEQ ID NO: 3384675 - RNA, 20 nt, Human
cauuucuacucucccauggc

SEQ ID NO: 3384676 - RNA, 20 nt, Human
cauuucuacucuuaaguuuc

SEQ ID NO: 3384677 - RNA, 21 nt, Human
cauuucuacucuuaaguuucu

SEQ ID NO: 3384678 - RNA, 13 nt, Human
cauuucuauuuau

SEQ ID NO: 3384679 - RNA, 19 nt, Human
cauuucuauuucuccucca

SEQ ID NO: 3384680 - RNA, 12 nt, Human
cauuucucaugu

SEQ ID NO: 3384681 - RNA, 18 nt, Human
cauuucuccagauuaucu

SEQ ID NO: 3384682 - RNA, 16 nt, Human
cauuucucugggguau

SEQ ID NO: 3384683 - RNA, 18 nt, Human
cauuucucuuacugcaaa

SEQ ID NO: 3384684 - RNA, 17 nt, Human
cauuucugaauagaaau

SEQ ID NO: 3384685 - RNA, 12 nt, Human
cauuucugauuu

SEQ ID NO: 3384686 - RNA, 14 nt, Human
cauuucuguaaaua

SEQ ID NO: 3384687 - RNA, 22 nt, Human
cauuucuucagucagaaaacuu

SEQ ID NO: 3384688 - RNA, 23 nt, Human
cauuucuucagucagaaaacuuu

SEQ ID NO: 3384689 - RNA, 16 nt, Human
ccuugugggccugggc

SEQ ID NO: 3384690 - RNA, 21 nt, Human
ccuugugggccugggcuccug

SEQ ID NO: 3384691 - RNA, 16 nt, Human
ccuugugguccaaaua

SEQ ID NO: 3384692 - RNA, 17 nt, Human
ccuugugguccaaauag

SEQ ID NO: 3384693 - RNA, 20 nt, Human
ccuuguggucccaccccaca

SEQ ID NO: 3384694 - RNA, 18 nt, Human
ccuuguguauauuuguau

SEQ ID NO: 3384695 - RNA, 15 nt, Human
ccuuguguguaugug

SEQ ID NO: 3384696 - RNA, 17 nt, Human
ccuuguguguaugugua

SEQ ID NO: 3384697 - RNA, 16 nt, Human
ccuuguuacccaugaa

SEQ ID NO: 3384698 - RNA, 18 nt, Human
ccuuguuacccaugaaaa

SEQ ID NO: 3384699 - RNA, 16 nt, Human
ccuuguuacuucugag

SEQ ID NO: 3384700 - RNA, 13 nt, Human
ccuuguugcauga

SEQ ID NO: 3384701 - RNA, 18 nt, Human
ccuuguuggagccugcag

SEQ ID NO: 3384702 - RNA, 19 nt, Human
ccuuguuuacacauacccu

SEQ ID NO: 3384703 - RNA, 20 nt, Human
ccuuguuucaaacacaaaug

SEQ ID NO: 3384704 - RNA, 22 nt, Human
ccuuguuucaaacacaaaugca

SEQ ID NO: 3384705 - RNA, 11 nt, Human
ccuuguuucag

SEQ ID NO: 3384706 - RNA, 21 nt, Human
ccuuguuucucuuccuuucuu

SEQ ID NO: 3384707 - RNA, 20 nt, Human
ccuuuaaaauuuuuuuagaa

SEQ ID NO: 3384708 - RNA, 21 nt, Human
ccuuuaaagaugaacucugaa

SEQ ID NO: 3384709 - RNA, 16 nt, Human
ccuuuaacaacauguu

SEQ ID NO: 3384710 - RNA, 22 nt, Human
ccuuuaacaacauguuuccagc

SEQ ID NO: 3384711 - RNA, 20 nt, Human
ccuuuaacugacaagccauc

SEQ ID NO: 3384712 - RNA, 12 nt, Human
ccuuuaagaaaa

SEQ ID NO: 3384713 - RNA, 13 nt, Human
ccuuuaagagaaa

SEQ ID NO: 3384714 - RNA, 14 nt, Human
ccuuuaagagaaau

SEQ ID NO: 3384715 - RNA, 19 nt, Human
ccuuuaaguagauaagcag

SEQ ID NO: 3384716 - RNA, 13 nt, Human
ccuuuaaugcauc

SEQ ID NO: 3384717 - RNA, 18 nt, Human
ccuuuaauuguaaaguaa

SEQ ID NO: 3384718 - RNA, 21 nt, Human
ccuuuacacauucggcucccu

SEQ ID NO: 3384719 - RNA, 23 nt, Human
ccuuuacacauucggcucccugg

SEQ ID NO: 3384720 - RNA, 12 nt, Human
ccuuuacaugag

SEQ ID NO: 3384721 - RNA, 18 nt, Human
ccuuuacaugaggacucu

SEQ ID NO: 3384722 - RNA, 16 nt, Human
ccuuuacccucaucug

SEQ ID NO: 3384723 - RNA, 18 nt, Human
ccuuuacccucaucuguc

SEQ ID NO: 3384724 - RNA, 21 nt, Human
ccuuuacccucuuugcugcag

SEQ ID NO: 3384725 - RNA, 19 nt, Human
ccuuuacguguuuaaaaaa

SEQ ID NO: 3384726 - RNA, 18 nt, Human
ccuuuacucauagcacuu

SEQ ID NO: 3384727 - RNA, 16 nt, Human
ccuuuacugacccugg

SEQ ID NO: 3384728 - RNA, 17 nt, Human
ccuuuacugacccuggg

SEQ ID NO: 3384729 - RNA, 14 nt, Human
ccuuuacuuucccu

SEQ ID NO: 3384730 - RNA, 20 nt, Human
ccuuuacuuucccuugcuuu

SEQ ID NO: 3384731 - RNA, 12 nt, Human
ccuuuagaaaau

SEQ ID NO: 3384732 - RNA, 20 nt, Human
ccuuuagaaacucaaaaacu

SEQ ID NO: 3384733 - RNA, 22 nt, Human
ccuuuagauagcagccuggcuc

SEQ ID NO: 3384734 - RNA, 16 nt, Human
ccuuuagccccuccca

SEQ ID NO: 3384735 - RNA, 14 nt, Human
ccuuuagcgcccag

SEQ ID NO: 3384736 - RNA, 15 nt, Human
ccuuuagggcagcuu

SEQ ID NO: 3384737 - RNA, 18 nt, Human
ccuuuaggguucugccuc

SEQ ID NO: 3384738 - RNA, 19 nt, Human
ccuuuaguaccugaaaagu

SEQ ID NO: 3384739 - RNA, 18 nt, Human
ccuuuaguaucaguguuu

SEQ ID NO: 3384740 - RNA, 20 nt, Human
ccuuuaucuaccaacuuuca

SEQ ID NO: 3384741 - RNA, 12 nt, Human
ccuuuaugugaa

SEQ ID NO: 3384742 - RNA, 13 nt, Human
ccuuuaugugaau

SEQ ID NO: 3384743 - RNA, 16 nt, Human
ccuuuauuaaaaucuu

SEQ ID NO: 3384744 - RNA, 19 nt, Human
cguauguggcaaaauguua

SEQ ID NO: 3384745 - RNA, 15 nt, Human
cguauugguccagcu

SEQ ID NO: 3384746 - RNA, 16 nt, Human
cgcagcccuggcaggg

SEQ ID NO: 3384747 - RNA, 13 nt, Human
cgcagcucuugcc

SEQ ID NO: 3384748 - RNA, 13 nt, Human
cgcagcuggacuc

SEQ ID NO: 3384749 - RNA, 17 nt, Human
cgcagcuggacucugca

SEQ ID NO: 3384750 - RNA, 13 nt, Human
cgcaggaagcugc

SEQ ID NO: 3384751 - RNA, 18 nt, Human
cgcaggccucccugccag

SEQ ID NO: 3384752 - RNA, 18 nt, Human
cgcaggcgggaaaagcag

SEQ ID NO: 3384753 - RNA, 19 nt, Human
cgcaguccacuucugacag

SEQ ID NO: 3384754 - RNA, 17 nt, Human
cgcagucgucgcacagu

SEQ ID NO: 3384755 - RNA, 19 nt, Human
cgcagucgucgcacagucu

SEQ ID NO: 3384756 - RNA, 15 nt, Human
cgcagugccucuggu

SEQ ID NO: 3384757 - RNA, 15 nt, Human
cgcaguggcccugag

SEQ ID NO: 3384758 - RNA, 16 nt, Human
cgcaguguggaggcca

SEQ ID NO: 3384759 - RNA, 16 nt, Human
cgcaguguuuugcaag

SEQ ID NO: 3384760 - RNA, 20 nt, Human
cgcaguuuuuuuuuucuugu

SEQ ID NO: 3384761 - RNA, 18 nt, Human
cgcaucaaaagacaauuc

SEQ ID NO: 3384762 - RNA, 19 nt, Human
cgcauccuagucucuauca

SEQ ID NO: 3384763 - RNA, 14 nt, Human
cgcaucuucuccau

SEQ ID NO: 3384764 - RNA, 21 nt, Human
cgcaucuucuccaucuggcag

SEQ ID NO: 3384765 - RNA, 16 nt, Human
cgcaugcagcagcuug

SEQ ID NO: 3384766 - RNA, 16 nt, Human
cgcaugcggcccagga

SEQ ID NO: 3384767 - RNA, 23 nt, Human
cgcauggaguguguauuguuccc

SEQ ID NO: 3384768 - RNA, 16 nt, Human
cgcauggucacacacu

SEQ ID NO: 3384769 - RNA, 19 nt, Human
cgcauggucacacacugau

SEQ ID NO: 3384770 - RNA, 13 nt, Human
cgcauucccugag

SEQ ID NO: 3384771 - RNA, 20 nt, Human
cgcauucucauggagaaguu

SEQ ID NO: 3384772 - RNA, 18 nt, Human
cgccaaagaaugccuuga

SEQ ID NO: 3384773 - RNA, 21 nt, Human
cgccaacaacuucuccauccu

SEQ ID NO: 3384774 - RNA, 13 nt, Human
cgccaaggcuggg

SEQ ID NO: 3384775 - RNA, 21 nt, Human
cgccacagcccuuuugucucu

SEQ ID NO: 3384776 - RNA, 19 nt, Human
cgccacauccccgcuggcu

SEQ ID NO: 3384777 - RNA, 18 nt, Human
cgccacauggcuuccucc

SEQ ID NO: 3384778 - RNA, 23 nt, Human
cgccacauggcuuccuccugcgc

SEQ ID NO: 3384779 - RNA, 15 nt, Human
cgccaccauuccugg

SEQ ID NO: 3384780 - RNA, 13 nt, Human
cgccacccgcagc

SEQ ID NO: 3384781 - RNA, 20 nt, Human
cgccaccuggcauuccuucu

SEQ ID NO: 3384782 - RNA, 22 nt, Human
cgccacuacacuccagccugag

SEQ ID NO: 3384783 - RNA, 14 nt, Human
cgccacucauuuca

SEQ ID NO: 3384784 - RNA, 17 nt, Human
cgccacucauuucaucu

SEQ ID NO: 3384785 - RNA, 19 nt, Human
cgccacucauuucaucuca

SEQ ID NO: 3384786 - RNA, 15 nt, Human
cgccacuccugaacc

SEQ ID NO: 3384787 - RNA, 23 nt, Human
cgccacucgcuucccccauagcc

SEQ ID NO: 3384788 - RNA, 23 nt, Human
cgccacugcacuccagccugggc

SEQ ID NO: 3384789 - RNA, 21 nt, Human
cgccacugcacucuagccgga

SEQ ID NO: 3384790 - RNA, 19 nt, Human
cgccacuggggcucagagc

SEQ ID NO: 3384791 - RNA, 23 nt, Human
cgccacuguuuugaaucucauaa

SEQ ID NO: 3384792 - RNA, 22 nt, Human
cgccagcacagaaacagaggag

SEQ ID NO: 3384793 - RNA, 15 nt, Human
cgccagccuccucug

SEQ ID NO: 3384794 - RNA, 17 nt, Human
cgccagccuccucugga

SEQ ID NO: 3384795 - RNA, 18 nt, Human
cgccagcugaugacucaa

SEQ ID NO: 3384796 - RNA, 21 nt, Human
cgccaggauggaacacggcca

SEQ ID NO: 3384797 - RNA, 23 nt, Human
cgccaggauggcgcaggaacuca

SEQ ID NO: 3384798 - RNA, 17 nt, Human
cgccaggcugaccacag

SEQ ID NO: 3384799 - RNA, 20 nt, Human
cgccaggcugaccacagcac

SEQ ID NO: 3384800 - RNA, 21 nt, Human
cgccaggcugaccacagcaca

SEQ ID NO: 3384801 - RNA, 19 nt, Human
cgccagggaccccagaauc

SEQ ID NO: 3384802 - RNA, 23 nt, Human
cgccaggggaaaaucagccugcu

SEQ ID NO: 3384803 - RNA, 13 nt, Human
cgccaucagccca

SEQ ID NO: 3384804 - RNA, 16 nt, Human
cgccaucccagcccca

SEQ ID NO: 3384805 - RNA, 17 nt, Human
cgccaucccagccccaa

SEQ ID NO: 3384806 - RNA, 20 nt, Human
cgccaucccagccccaauga

SEQ ID NO: 3384807 - RNA, 20 nt, Human
cgccauggcuuccaaggugg

SEQ ID NO: 3384808 - RNA, 16 nt, Human
cgccauugccaccagg

SEQ ID NO: 3384809 - RNA, 20 nt, Human
cgcccaaaccuuucccccau

SEQ ID NO: 3384810 - RNA, 17 nt, Human
cgcccaaaggacgcacu

SEQ ID NO: 3384811 - RNA, 22 nt, Human
cgcccaaaggacgcacugagca

SEQ ID NO: 3384812 - RNA, 15 nt, Human
cgcccaacccuuccc

SEQ ID NO: 3384813 - RNA, 13 nt, Human
cgcccaacuccac

SEQ ID NO: 3384814 - RNA, 12 nt, Human
cgcccaaggccu

SEQ ID NO: 3384815 - RNA, 23 nt, Human
cgcccaccgcaugcccccucgug

SEQ ID NO: 3384816 - RNA, 17 nt, Human
cgcccacuguccugggc

SEQ ID NO: 3384817 - RNA, 22 nt, Human
cgcccacuguccugggcgcccu

SEQ ID NO: 3384818 - RNA, 22 nt, Human
cgcccagagacccaagcugccu

SEQ ID NO: 3384819 - RNA, 16 nt, Human
cgcccagcuccugaca

SEQ ID NO: 3384820 - RNA, 15 nt, Human
cgcccagcugcaccu

SEQ ID NO: 3384821 - RNA, 15 nt, Human
cgcccaggagacauc

SEQ ID NO: 3384822 - RNA, 17 nt, Human
cgcccaggaucagauug

SEQ ID NO: 3384823 - RNA, 20 nt, Human
cgcccaggcuggagugcaau

SEQ ID NO: 3384824 - RNA, 17 nt, Human
cgcccaggcuggccagc

SEQ ID NO: 3384825 - RNA, 18 nt, Human
cgcccagucccagcagcc

SEQ ID NO: 3384826 - RNA, 21 nt, Human
cgcccagucccagcagccagc

SEQ ID NO: 3384827 - RNA, 14 nt, Human
cgcccaguccuucc

SEQ ID NO: 3384828 - RNA, 16 nt, Human
cgcccaguccuuccac

SEQ ID NO: 3384829 - RNA, 12 nt, Human
cgcccagucugg

SEQ ID NO: 3384830 - RNA, 14 nt, Human
cgcccaucucagga

SEQ ID NO: 3384831 - RNA, 20 nt, Human
cgcccaugagagcgcagccc

SEQ ID NO: 3384832 - RNA, 22 nt, Human
cgccccaacccguggaggcugc

SEQ ID NO: 3384833 - RNA, 13 nt, Human
cgccccacccaga

SEQ ID NO: 3384834 - RNA, 12 nt, Human
cgccccagccuc

SEQ ID NO: 3384835 - RNA, 16 nt, Human
cgccccaucugcccca

SEQ ID NO: 3384836 - RNA, 19 nt, Human
cgcccccacccugagcgcc

SEQ ID NO: 3384837 - RNA, 15 nt, Human
cgcccccacugguga

SEQ ID NO: 3384838 - RNA, 18 nt, Human
cgcccccaguccccaccc

SEQ ID NO: 3384839 - RNA, 17 nt, Human
cgccccccucccagagg

SEQ ID NO: 3384840 - RNA, 20 nt, Human
cgcccccuccgcccugccac

SEQ ID NO: 3384841 - RNA, 14 nt, Human
cgcccccuccucua

SEQ ID NO: 3384842 - RNA, 13 nt, Human
cgccccgccccac

SEQ ID NO: 3384843 - RNA, 14 nt, Human
cgccccgccccaca

SEQ ID NO: 3384844 - RNA, 17 nt, Human
cgccccgccccacauuc

SEQ ID NO: 3384845 - RNA, 21 nt, Human
cgccccuagccgguuccuguc

SEQ ID NO: 3384846 - RNA, 18 nt, Human
cgccccucccacagcgcu

SEQ ID NO: 3384847 - RNA, 12 nt, Human
cgccccugagcc

SEQ ID NO: 3384848 - RNA, 19 nt, Human
cgccccugcagcacggaca

SEQ ID NO: 3384849 - RNA, 12 nt, Human
cgccccugccug

SEQ ID NO: 3384850 - RNA, 18 nt, Human
cgccccugccugccaugu

SEQ ID NO: 3384851 - RNA, 18 nt, Human
cgcccgcccacuguccug

SEQ ID NO: 3384852 - RNA, 13 nt, Human
cgcccgcugggcu

SEQ ID NO: 3384853 - RNA, 18 nt, Human
cgcccggcuaauuuuugu

SEQ ID NO: 3384854 - RNA, 13 nt, Human
cgcccgggcccag

SEQ ID NO: 3384855 - RNA, 14 nt, Human
cgcccgggcccaga

SEQ ID NO: 3384856 - RNA, 17 nt, Human
cgcccgggcccagagga

SEQ ID NO: 3384857 - RNA, 17 nt, Human
cgcccgggguggccaca

SEQ ID NO: 3384858 - RNA, 12 nt, Human
cgcccguccugc

SEQ ID NO: 3384859 - RNA, 13 nt, Human
cgcccucccaggc

SEQ ID NO: 3384860 - RNA, 16 nt, Human
cgcccuccccuccccu

SEQ ID NO: 3384861 - RNA, 14 nt, Human
cgcccucuguccug

SEQ ID NO: 3384862 - RNA, 17 nt, Human
cgcccucuguccugacu

SEQ ID NO: 3384863 - RNA, 11 nt, Human
cgcccugcaga

SEQ ID NO: 3384864 - RNA, 14 nt, Human
cgcccugccacuca

SEQ ID NO: 3384865 - RNA, 18 nt, Human
cgcccugcuccucccugg

SEQ ID NO: 3384866 - RNA, 21 nt, Human
cgcccugcuccucccuggcug

SEQ ID NO: 3384867 - RNA, 16 nt, Human
cgcccuggaagccggc

SEQ ID NO: 3384868 - RNA, 16 nt, Human
cgcccuggacugugug

SEQ ID NO: 3384869 - RNA, 15 nt, Human
cgcccuuaccuuccc

SEQ ID NO: 3384870 - RNA, 19 nt, Human
cgcccuuagucccccaacu

SEQ ID NO: 3384871 - RNA, 11 nt, Human
cgcccuuggcu

SEQ ID NO: 3384872 - RNA, 20 nt, Human
cgcccuuggcuucugugaug

SEQ ID NO: 3384873 - RNA, 14 nt, Human
cgcccuuuccuccu

SEQ ID NO: 3384874 - RNA, 20 nt, Human
cgcccuuuccuccucaggca

SEQ ID NO: 3384875 - RNA, 18 nt, Human
cgccgacuuuguaccccc

SEQ ID NO: 3384876 - RNA, 23 nt, Human
cgccgcaaaccacacuggacucc

SEQ ID NO: 3384877 - RNA, 22 nt, Human
cgccgccggaguccacucccag

SEQ ID NO: 3384878 - RNA, 21 nt, Human
cgccgccuccgggacccccag

SEQ ID NO: 3384879 - RNA, 14 nt, Human
cgccgccugguacu

SEQ ID NO: 3384880 - RNA, 20 nt, Human
cgccgccugguacucaagcc

SEQ ID NO: 3384881 - RNA, 15 nt, Human
cgccggaucugaggg

SEQ ID NO: 3384882 - RNA, 22 nt, Human
cgccggcaaaacuuuggcacug

SEQ ID NO: 3384883 - RNA, 20 nt, Human
cgccggcaauaaaagcccag

SEQ ID NO: 3384884 - RNA, 20 nt, Human
cgccggggacagaggccugc

SEQ ID NO: 3384885 - RNA, 15 nt, Human
cgccgucuccagggg

SEQ ID NO: 3384886 - RNA, 17 nt, Human
cgccgugaguucucagg

SEQ ID NO: 3384887 - RNA, 13 nt, Human
cgccguggcugcg

SEQ ID NO: 3384888 - RNA, 14 nt, Human
cgccgugggcugcg

SEQ ID NO: 3384889 - RNA, 16 nt, Human
cgcugagccaccugcc

SEQ ID NO: 3384890 - RNA, 14 nt, Human
cgcugaguggcagg

SEQ ID NO: 3384891 - RNA, 18 nt, Human
cgcugauacauaacuaaa

SEQ ID NO: 3384892 - RNA, 14 nt, Human
cgcugauucucagg

SEQ ID NO: 3384893 - RNA, 14 nt, Human
cgcugccagccuug

SEQ ID NO: 3384894 - RNA, 18 nt, Human
cgcugcccaggggagccc

SEQ ID NO: 3384895 - RNA, 19 nt, Human
cgcugcccggcgcccucug

SEQ ID NO: 3384896 - RNA, 21 nt, Human
cgcugccgcaccccagagugu

SEQ ID NO: 3384897 - RNA, 15 nt, Human
cgcugccugcccaca

SEQ ID NO: 3384898 - RNA, 19 nt, Human
cgcugcuccacgcgcuucg

SEQ ID NO: 3384899 - RNA, 12 nt, Human
cgcugcucugcc

SEQ ID NO: 3384900 - RNA, 18 nt, Human
cgcugcugcgcccugggc

SEQ ID NO: 3384901 - RNA, 20 nt, Human
cgcugcugcugcugcgcccu

SEQ ID NO: 3384902 - RNA, 19 nt, Human
cgcuggaggaugugggcag

SEQ ID NO: 3384903 - RNA, 21 nt, Human
cgcuggaggaugugggcagcu

SEQ ID NO: 3384904 - RNA, 18 nt, Human
cgcuggagugcagugagc

SEQ ID NO: 3384905 - RNA, 12 nt, Human
cgcuggcccagc

SEQ ID NO: 3384906 - RNA, 14 nt, Human
cgcuggcccagccg

SEQ ID NO: 3384907 - RNA, 16 nt, Human
cgcuggcccagccggc

SEQ ID NO: 3384908 - RNA, 21 nt, Human
cgcuggcccccacuggcugug

SEQ ID NO: 3384909 - RNA, 20 nt, Human
cgcuggccccuuugggcccu

SEQ ID NO: 3384910 - RNA, 19 nt, Human
cgcuggccgggaccccgag

SEQ ID NO: 3384911 - RNA, 23 nt, Human
ccaagugccaaagaagcagacca

SEQ ID NO: 3384912 - RNA, 16 nt, Human
ccaagugccagucuug

SEQ ID NO: 3384913 - RNA, 22 nt, Human
ccaagugccagucuugugucug

SEQ ID NO: 3384914 - RNA, 16 nt, Human
ccaaguggcucccaca

SEQ ID NO: 3384915 - RNA, 22 nt, Human
ccaaguggggugcugggaggag

SEQ ID NO: 3384916 - RNA, 23 nt, Human
ccaagugguuuccacaugcucug

SEQ ID NO: 3384917 - RNA, 21 nt, Human
ccaagugugcauauuguacac

SEQ ID NO: 3384918 - RNA, 16 nt, Human
ccaaguuaaauguaga

SEQ ID NO: 3384919 - RNA, 22 nt, Human
ccaaguuauaaaucaaugucac

SEQ ID NO: 3384920 - RNA, 19 nt, Human
ccaaguuccgucaguccaa

SEQ ID NO: 3384921 - RNA, 17 nt, Human
ccaaguugugcuugagc

SEQ ID NO: 3384922 - RNA, 22 nt, Human
ccaaguuguggugcugacaaag

SEQ ID NO: 3384923 - RNA, 12 nt, Human
ccaaguuuugug

SEQ ID NO: 3384924 - RNA, 16 nt, Human
ccaauaacacacagcu

SEQ ID NO: 3384925 - RNA, 14 nt, Human
ccaauaacauucuu

SEQ ID NO: 3384926 - RNA, 14 nt, Human
ccaauaccccaugg

SEQ ID NO: 3384927 - RNA, 19 nt, Human
ccaauagcacuuucauugc

SEQ ID NO: 3384928 - RNA, 16 nt, Human
ccaauaggaaugcuaa

SEQ ID NO: 3384929 - RNA, 19 nt, Human
ccaauaggcaaauuaauca

SEQ ID NO: 3384930 - RNA, 13 nt, Human
ccaauauccuaau

SEQ ID NO: 3384931 - RNA, 15 nt, Human
ccaauauccuaauaa

SEQ ID NO: 3384932 - RNA, 17 nt, Human
ccaauauccuaauaaaa

SEQ ID NO: 3384933 - RNA, 16 nt, Human
ccaauauguauuguaa

SEQ ID NO: 3384934 - RNA, 13 nt, Human
ccaauauuauaau

SEQ ID NO: 3384935 - RNA, 16 nt, Human
ccaauauucauagcag

SEQ ID NO: 3384936 - RNA, 21 nt, Human
ccaauauuuaaucuuuuauga

SEQ ID NO: 3384937 - RNA, 18 nt, Human
ccaauauuucucagacau

SEQ ID NO: 3384938 - RNA, 12 nt, Human
ccaauauuucug

SEQ ID NO: 3384939 - RNA, 18 nt, Human
ccaauauuucugcuuucu

SEQ ID NO: 3384940 - RNA, 22 nt, Human
ccaaucaaucuugcauguaacg

SEQ ID NO: 3384941 - RNA, 22 nt, Human
ccaaucagagaccaggcccugg

SEQ ID NO: 3384942 - RNA, 15 nt, Human
ccaaucagcacugaa

SEQ ID NO: 3384943 - RNA, 17 nt, Human
ccaaucagcacugaaaa

SEQ ID NO: 3384944 - RNA, 14 nt, Human
ccaaucauuuuaau

SEQ ID NO: 3384945 - RNA, 22 nt, Human
ccaaucauuuuaauuauuauuc

SEQ ID NO: 3384946 - RNA, 21 nt, Human
ccaauccagguacgcacagac

SEQ ID NO: 3384947 - RNA, 22 nt, Human
ccaauccagguacgcacagaca

SEQ ID NO: 3384948 - RNA, 21 nt, Human
ccaauccccuccuugggcacu

SEQ ID NO: 3384949 - RNA, 15 nt, Human
ccaaucccugauccc

SEQ ID NO: 3384950 - RNA, 16 nt, Human
ccaaucgguguguagu

SEQ ID NO: 3384951 - RNA, 18 nt, Human
ccaaucuaaccacaucaa

SEQ ID NO: 3384952 - RNA, 12 nt, Human
ccaaugaaauga

SEQ ID NO: 3384953 - RNA, 23 nt, Human
ccaaugaauaauggaaaaugcca

SEQ ID NO: 3384954 - RNA, 17 nt, Human
ccaaugagacuugccuu

SEQ ID NO: 3384955 - RNA, 21 nt, Human
ccaaugagacuugccuuccua

SEQ ID NO: 3384956 - RNA, 14 nt, Human
ccaaugagcuuucu

SEQ ID NO: 3384957 - RNA, 20 nt, Human
ccaaugagcuuucugaacag

SEQ ID NO: 3384958 - RNA, 23 nt, Human
ccaaugagcuuucugaacagcug

SEQ ID NO: 3384959 - RNA, 14 nt, Human
ccaaugcacuuugu

SEQ ID NO: 3384960 - RNA, 23 nt, Human
ccaaugcaugcagccacugugcu

SEQ ID NO: 3384961 - RNA, 13 nt, Human
ccaaugccaaaaa

SEQ ID NO: 3384962 - RNA, 18 nt, Human
ccaaugcuuuuaucaaac

SEQ ID NO: 3384963 - RNA, 15 nt, Human
ccaauggaaaccuca

SEQ ID NO: 3384964 - RNA, 18 nt, Human
ccaauggaaccuccuuuc

SEQ ID NO: 3384965 - RNA, 20 nt, Human
ccaauggaguagaccccugg

SEQ ID NO: 3384966 - RNA, 14 nt, Human
ccaaugggagcuca

SEQ ID NO: 3384967 - RNA, 17 nt, Human
ccaaugggagcucaugg

SEQ ID NO: 3384968 - RNA, 21 nt, Human
ccaauguauugauaagagggc

SEQ ID NO: 3384969 - RNA, 22 nt, Human
ccaaugucuggagaccaccagg

SEQ ID NO: 3384970 - RNA, 20 nt, Human
ccaauguuagagacuuuuuu

SEQ ID NO: 3384971 - RNA, 20 nt, Human
ccaauguucucucuucucca

SEQ ID NO: 3384972 - RNA, 12 nt, Human
ccaauguuuucc

SEQ ID NO: 3384973 - RNA, 14 nt, Human
ccaauuaguuuccu

SEQ ID NO: 3384974 - RNA, 20 nt, Human
ccaauuaguuuccuuuuuaa

SEQ ID NO: 3384975 - RNA, 17 nt, Human
ccaauuauguuaaacua

SEQ ID NO: 3384976 - RNA, 22 nt, Human
ccaauuauugauauauauuaua

SEQ ID NO: 3384977 - RNA, 21 nt, Human
ccaauucaacccuuugcccca

SEQ ID NO: 3384978 - RNA, 16 nt, Human
ccaauucagacaggca

SEQ ID NO: 3384979 - RNA, 14 nt, Human
ccaauucuccuuua

SEQ ID NO: 3384980 - RNA, 17 nt, Human
ccaauucucgagcuugg

SEQ ID NO: 3384981 - RNA, 13 nt, Human
ccaauuggaggaa

SEQ ID NO: 3384982 - RNA, 13 nt, Human
ccaauugugcugc

SEQ ID NO: 3384983 - RNA, 16 nt, Human
ccaauuucagacuccc

SEQ ID NO: 3384984 - RNA, 21 nt, Human
ccaauuuuaacuuagagcuuu

SEQ ID NO: 3384985 - RNA, 16 nt, Human
ccaauuuuaauuuagu

SEQ ID NO: 3384986 - RNA, 23 nt, Human
ccaauuuuaauuuaguaaauguu

SEQ ID NO: 3384987 - RNA, 16 nt, Human
ccaauuuuuuuuuccu

SEQ ID NO: 3384988 - RNA, 13 nt, Human
ccacaaaaacagg

SEQ ID NO: 3384989 - RNA, 14 nt, Human
ccacaaacuguaau

SEQ ID NO: 3384990 - RNA, 20 nt, Human
ccacaaagcacaguuugaac

SEQ ID NO: 3384991 - RNA, 22 nt, Human
ccacaaagccuuaucaaguguc

SEQ ID NO: 3384992 - RNA, 13 nt, Human
ccacaaccucuuc

SEQ ID NO: 3384993 - RNA, 17 nt, Human
ccacaacuauuuucaga

SEQ ID NO: 3384994 - RNA, 17 nt, Human
ccacaacugacacagga

SEQ ID NO: 3384995 - RNA, 22 nt, Human
ccacaagaaaugaaagcaggga

SEQ ID NO: 3384996 - RNA, 15 nt, Human
ccacaagaaauuuga

SEQ ID NO: 3384997 - RNA, 16 nt, Human
ccacaagaaauuugau

SEQ ID NO: 3384998 - RNA, 21 nt, Human
ccacaagaaauuugauuucua

SEQ ID NO: 3384999 - RNA, 13 nt, Human
ccacaagagccca

SEQ ID NO: 3385000 - RNA, 18 nt, Human
ccacaagagcccaggccu

SEQ ID NO: 3385001 - RNA, 24 nt, Human
ccacaagauucccagagacaggaa

SEQ ID NO: 3385002 - RNA, 17 nt, Human
ccacaaggacuuccugu

SEQ ID NO: 3385003 - RNA, 16 nt, Human
ccacaagugcccucca

SEQ ID NO: 3385004 - RNA, 20 nt, Human
ccacaagugcccuccaggcu

SEQ ID NO: 3385005 - RNA, 20 nt, Human
ccacaagugccgcaaauugu

SEQ ID NO: 3385006 - RNA, 21 nt, Human
ccacaagugccgcaaauugua

SEQ ID NO: 3385007 - RNA, 15 nt, Human
ccacaagugguggua

SEQ ID NO: 3385008 - RNA, 21 nt, Human
ccacaauaaagaucgccccca

SEQ ID NO: 3385009 - RNA, 15 nt, Human
ccacaaucaccgaug

SEQ ID NO: 3385010 - RNA, 14 nt, Human
ccacacacaacagc

SEQ ID NO: 3385011 - RNA, 22 nt, Human
ccacacacaacagccaacagcu

SEQ ID NO: 3385012 - RNA, 12 nt, Human
ccacacacacaa

SEQ ID NO: 3385013 - RNA, 14 nt, Human
ccacacacacaaaa

SEQ ID NO: 3385014 - RNA, 17 nt, Human
ccacacacacacacaug

SEQ ID NO: 3385015 - RNA, 17 nt, Human
ccacacacacagaaaau

SEQ ID NO: 3385016 - RNA, 22 nt, Human
ccacacacacagaaaauauacu

SEQ ID NO: 3385017 - RNA, 12 nt, Human
ccacacacagag

SEQ ID NO: 3385018 - RNA, 16 nt, Human
ccacacacagaggaag

SEQ ID NO: 3385019 - RNA, 18 nt, Human
ccacacacagaggaagag

SEQ ID NO: 3385020 - RNA, 19 nt, Human
ccacacacagcugggcugu

SEQ ID NO: 3385021 - RNA, 11 nt, Human
ccacacacagg

SEQ ID NO: 3385022 - RNA, 18 nt, Human
ccacacacgcaggaacuc

SEQ ID NO: 3385023 - RNA, 14 nt, Human
ccacacacucgccc

SEQ ID NO: 3385024 - RNA, 14 nt, Human
ccacacaggcuggc

SEQ ID NO: 3385025 - RNA, 22 nt, Human
ccacacagugcucaaggccagc

SEQ ID NO: 3385026 - RNA, 14 nt, Human
ccacacaugcaagg

SEQ ID NO: 3385027 - RNA, 14 nt, Human
ccacaccaagcagc

SEQ ID NO: 3385028 - RNA, 12 nt, Human
ccacaccaagcu

SEQ ID NO: 3385029 - RNA, 13 nt, Human
ccacaccaagcug

SEQ ID NO: 3385030 - RNA, 23 nt, Human
ccacaccaagcugugccacccug

SEQ ID NO: 3385031 - RNA, 13 nt, Human
ccacaccagcccc

SEQ ID NO: 3385032 - RNA, 22 nt, Human
ccacacccaauuccacucugau

SEQ ID NO: 3385033 - RNA, 19 nt, Human
cuaauuugcauuaaauuca

SEQ ID NO: 3385034 - RNA, 20 nt, Human
cuaauuuuacauguuuauaa

SEQ ID NO: 3385035 - RNA, 15 nt, Human
cuaauuuuaguauuc

SEQ ID NO: 3385036 - RNA, 17 nt, Human
cuaauuuuaguauucau

SEQ ID NO: 3385037 - RNA, 13 nt, Human
cuaauuuucucaa

SEQ ID NO: 3385038 - RNA, 15 nt, Human
cuaauuuuggaugga

SEQ ID NO: 3385039 - RNA, 17 nt, Human
cuaauuuuuaagcaaaa

SEQ ID NO: 3385040 - RNA, 21 nt, Human
cuaauuuuuauuuuugcugag

SEQ ID NO: 3385041 - RNA, 12 nt, Human
cuaauuuuucca

SEQ ID NO: 3385042 - RNA, 20 nt, Human
cuaauuuuuguaauuuuagu

SEQ ID NO: 3385043 - RNA, 18 nt, Human
cuaauuuuuguauuauuu

SEQ ID NO: 3385044 - RNA, 14 nt, Human
cuaauuuuuuguug

SEQ ID NO: 3385045 - RNA, 16 nt, Human
cuaauuuuuuguuguu

SEQ ID NO: 3385046 - RNA, 16 nt, Human
cuaauuuuuuuguauu

SEQ ID NO: 3385047 - RNA, 20 nt, Human
cuaauuuuuuuguauuuuag

SEQ ID NO: 3385048 - RNA, 23 nt, Human
cuacaaaaaauuagaaauuggcu

SEQ ID NO: 3385049 - RNA, 20 nt, Human
cuacaaaaacacagcaaggg

SEQ ID NO: 3385050 - RNA, 13 nt, Human
cuacaaaacauua

SEQ ID NO: 3385051 - RNA, 17 nt, Human
cuacaaaauuugaaauu

SEQ ID NO: 3385052 - RNA, 15 nt, Human
cuacaaacaaaauuu

SEQ ID NO: 3385053 - RNA, 19 nt, Human
cuacaaagaagacauguuu

SEQ ID NO: 3385054 - RNA, 20 nt, Human
cuacaaagaagacauguuuu

SEQ ID NO: 3385055 - RNA, 20 nt, Human
cuacaaagcacuagagaaug

SEQ ID NO: 3385056 - RNA, 15 nt, Human
cuacaaagguuuaaa

SEQ ID NO: 3385057 - RNA, 10 nt, Human
cuacaaauca

SEQ ID NO: 3385058 - RNA, 14 nt, Human
cuacaaaucaguaa

SEQ ID NO: 3385059 - RNA, 12 nt, Human
cuacaaccaauu

SEQ ID NO: 3385060 - RNA, 14 nt, Human
cuacaacuucagca

SEQ ID NO: 3385061 - RNA, 16 nt, Human
cuacaacuucagcagu

SEQ ID NO: 3385062 - RNA, 15 nt, Human
cuacaagagcagccu

SEQ ID NO: 3385063 - RNA, 17 nt, Human
cuacaagagcagccugu

SEQ ID NO: 3385064 - RNA, 21 nt, Human
cuacaagagcagccuguggca

SEQ ID NO: 3385065 - RNA, 22 nt, Human
cuacaagagcagccuguggcau

SEQ ID NO: 3385066 - RNA, 17 nt, Human
cuacaagcuaaaauuag

SEQ ID NO: 3385067 - RNA, 19 nt, Human
cuacaagcuaaaauuagau

SEQ ID NO: 3385068 - RNA, 18 nt, Human
cuacaaguauucugccuu

SEQ ID NO: 3385069 - RNA, 22 nt, Human
cuacaauauguacauuucuaag

SEQ ID NO: 3385070 - RNA, 18 nt, Human
cuacaaugugaacuuuau

SEQ ID NO: 3385071 - RNA, 16 nt, Human
cuacaauucauugugu

SEQ ID NO: 3385072 - RNA, 16 nt, Human
cuacaauuuaaagcaa

SEQ ID NO: 3385073 - RNA, 15 nt, Human
cuacaauuuucuccc

SEQ ID NO: 3385074 - RNA, 20 nt, Human
cuacaauuuucucccaggaa

SEQ ID NO: 3385075 - RNA, 23 nt, Human
cuacaauuuucucccaggaagcu

SEQ ID NO: 3385076 - RNA, 13 nt, Human
cuacacaaagcag

SEQ ID NO: 3385077 - RNA, 15 nt, Human
cuacacacugcaugu

SEQ ID NO: 3385078 - RNA, 21 nt, Human
cuacacacugcauguuuguga

SEQ ID NO: 3385079 - RNA, 15 nt, Human
cuacacaggacaggg

SEQ ID NO: 3385080 - RNA, 14 nt, Human
cuacacagggaugu

SEQ ID NO: 3385081 - RNA, 19 nt, Human
cuacacagugggaacucug

SEQ ID NO: 3385082 - RNA, 21 nt, Human
cuacacauauaaauugucuua

SEQ ID NO: 3385083 - RNA, 19 nt, Human
cuacacauuuuuaaauugu

SEQ ID NO: 3385084 - RNA, 14 nt, Human
cuacaccacacaca

SEQ ID NO: 3385085 - RNA, 19 nt, Human
cuacaccacucuggcagcc

SEQ ID NO: 3385086 - RNA, 14 nt, Human
cuacacccagcaau

SEQ ID NO: 3385087 - RNA, 16 nt, Human
cuacacccuuggacuu

SEQ ID NO: 3385088 - RNA, 20 nt, Human
cuacacccuuggacuugagg

SEQ ID NO: 3385089 - RNA, 16 nt, Human
cuacaccuauuauccc

SEQ ID NO: 3385090 - RNA, 18 nt, Human
cuacaccuauuaucccag

SEQ ID NO: 3385091 - RNA, 15 nt, Human
cuacaccuggcugag

SEQ ID NO: 3385092 - RNA, 20 nt, Human
cuacaccuugcuuuuuuacu

SEQ ID NO: 3385093 - RNA, 15 nt, Human
cuacaccuuucuccu

SEQ ID NO: 3385094 - RNA, 23 nt, Human
cuacacgguucaaaccugugaag

SEQ ID NO: 3385095 - RNA, 16 nt, Human
cuacacuccagccuga

SEQ ID NO: 3385096 - RNA, 17 nt, Human
cuacacuccagccuggg

SEQ ID NO: 3385097 - RNA, 16 nt, Human
cuacacuccagugaga

SEQ ID NO: 3385098 - RNA, 12 nt, Human
cuacacucuccu

SEQ ID NO: 3385099 - RNA, 17 nt, Human
cuacacucuccugggcc

SEQ ID NO: 3385100 - RNA, 23 nt, Human
cuacacucuccugggccccuccc

SEQ ID NO: 3385101 - RNA, 23 nt, Human
cuacacuucgcaccggagugucu

SEQ ID NO: 3385102 - RNA, 16 nt, Human
cuacagaaaaaccuug

SEQ ID NO: 3385103 - RNA, 20 nt, Human
cuacagaaaaaccuuggguu

SEQ ID NO: 3385104 - RNA, 17 nt, Human
cuacagaacuucagaaa

SEQ ID NO: 3385105 - RNA, 14 nt, Human
cuacagacauuaaa

SEQ ID NO: 3385106 - RNA, 19 nt, Human
cuacagacauuaaauaauc

SEQ ID NO: 3385107 - RNA, 22 nt, Human
cuacagaccugcuuuuugaaau

SEQ ID NO: 3385108 - RNA, 20 nt, Human
cuacagagaaaccagcuucc

SEQ ID NO: 3385109 - RNA, 22 nt, Human
cuacagagaaccuggaguuccu

SEQ ID NO: 3385110 - RNA, 17 nt, Human
cuacagagaagccuuca

SEQ ID NO: 3385111 - RNA, 20 nt, Human
cuacagagcuucccugacuc

SEQ ID NO: 3385112 - RNA, 20 nt, Human
cuacagaggccaugggccuc

SEQ ID NO: 3385113 - RNA, 22 nt, Human
cuacagaggccaugggccuccu

SEQ ID NO: 3385114 - RNA, 15 nt, Human
cuacagauagucaaa

SEQ ID NO: 3385115 - RNA, 13 nt, Human
cuacagauguccc

SEQ ID NO: 3385116 - RNA, 13 nt, Human
cuacagcaaauuu

SEQ ID NO: 3385117 - RNA, 20 nt, Human
cgguuuccagggaggggccg

SEQ ID NO: 3385118 - RNA, 22 nt, Human
cgguuucgaagucauuaaacug

SEQ ID NO: 3385119 - RNA, 16 nt, Human
cgguuucuuuuuaagu

SEQ ID NO: 3385120 - RNA, 20 nt, Human
cgguuugccauguugccaga

SEQ ID NO: 3385121 - RNA, 18 nt, Human
cgguuuuuuauuauugug

SEQ ID NO: 3385122 - RNA, 16 nt, Human
cguaaaaaugauuuca

SEQ ID NO: 3385123 - RNA, 14 nt, Human
cguaaaauuaagaa

SEQ ID NO: 3385124 - RNA, 12 nt, Human
cguaaagauuug

SEQ ID NO: 3385125 - RNA, 16 nt, Human
cguaaagcuagaaaug

SEQ ID NO: 3385126 - RNA, 17 nt, Human
cguaaagcuagaaauga

SEQ ID NO: 3385127 - RNA, 16 nt, Human
cguaaaguacuuguag

SEQ ID NO: 3385128 - RNA, 18 nt, Human
cguaaaguacuuguaguu

SEQ ID NO: 3385129 - RNA, 20 nt, Human
cguaaauacacaacacacac

SEQ ID NO: 3385130 - RNA, 12 nt, Human
cguaaccagcca

SEQ ID NO: 3385131 - RNA, 13 nt, Human
cguaaccagccag

SEQ ID NO: 3385132 - RNA, 12 nt, Human
cguaacccaacu

SEQ ID NO: 3385133 - RNA, 19 nt, Human
cguaacccaacucuccugg

SEQ ID NO: 3385134 - RNA, 15 nt, Human
cguaacuggcugugu

SEQ ID NO: 3385135 - RNA, 14 nt, Human
cguaagauuuccuu

SEQ ID NO: 3385136 - RNA, 15 nt, Human
cguaaguacagagaa

SEQ ID NO: 3385137 - RNA, 19 nt, Human
cguaaguacagagaagcca

SEQ ID NO: 3385138 - RNA, 17 nt, Human
cguaaugacuuauugug

SEQ ID NO: 3385139 - RNA, 17 nt, Human
cguaaugcgccaauaaa

SEQ ID NO: 3385140 - RNA, 21 nt, Human
cguaaugcuuagagaauguuc

SEQ ID NO: 3385141 - RNA, 16 nt, Human
cguaauuuugccaaau

SEQ ID NO: 3385142 - RNA, 20 nt, Human
cguacauaauacugaaccac

SEQ ID NO: 3385143 - RNA, 17 nt, Human
cguacauucaauguuua

SEQ ID NO: 3385144 - RNA, 14 nt, Human
cguaccccacccuc

SEQ ID NO: 3385145 - RNA, 20 nt, Human
cguacguaauaagguuuuaa

SEQ ID NO: 3385146 - RNA, 22 nt, Human
cguacuuagcagcuaucucuca

SEQ ID NO: 3385147 - RNA, 23 nt, Human
cguagaaguuuuuguacuguaaa

SEQ ID NO: 3385148 - RNA, 16 nt, Human
cguagagggugcugcc

SEQ ID NO: 3385149 - RNA, 17 nt, Human
cguagagggugcugccc

SEQ ID NO: 3385150 - RNA, 23 nt, Human
cguagauauuggacaaagaaccu

SEQ ID NO: 3385151 - RNA, 19 nt, Human
cguagaucaccagaauaaa

SEQ ID NO: 3385152 - RNA, 21 nt, Human
cguagauucccaucauacacu

SEQ ID NO: 3385153 - RNA, 19 nt, Human
cguagccagcugcucccca

SEQ ID NO: 3385154 - RNA, 19 nt, Human
cguagcuauccggacagag

SEQ ID NO: 3385155 - RNA, 16 nt, Human
cguagcugcaaaggac

SEQ ID NO: 3385156 - RNA, 17 nt, Human
cguaggcuacagagaag

SEQ ID NO: 3385157 - RNA, 14 nt, Human
cguaggggaggggu

SEQ ID NO: 3385158 - RNA, 17 nt, Human
cguaggggagggguugc

SEQ ID NO: 3385159 - RNA, 23 nt, Human
cguaggggagggguugccacagg

SEQ ID NO: 3385160 - RNA, 19 nt, Human
cguagucggcacagccugg

SEQ ID NO: 3385161 - RNA, 15 nt, Human
cguagugcagcaggg

SEQ ID NO: 3385162 - RNA, 20 nt, Human
cguaguguagauuuguuuug

SEQ ID NO: 3385163 - RNA, 13 nt, Human
cguaguucccuga

SEQ ID NO: 3385164 - RNA, 16 nt, Human
cguauaaaagccuguu

SEQ ID NO: 3385165 - RNA, 21 nt, Human
cguauaaaagccuguuuaaga

SEQ ID NO: 3385166 - RNA, 16 nt, Human
cguauagaagucuuca

SEQ ID NO: 3385167 - RNA, 12 nt, Human
cguauagcugua

SEQ ID NO: 3385168 - RNA, 15 nt, Human
cguauaggcauguaa

SEQ ID NO: 3385169 - RNA, 22 nt, Human
cguauaugucucaggucccugc

SEQ ID NO: 3385170 - RNA, 15 nt, Human
cguaucuccggcucc

SEQ ID NO: 3385171 - RNA, 18 nt, Human
cguaucuccggcucccag

SEQ ID NO: 3385172 - RNA, 15 nt, Human
cguaugucugguucu

SEQ ID NO: 3385173 - RNA, 16 nt, Human
cguaugucuguuacca

SEQ ID NO: 3385174 - RNA, 20 nt, Human
cguaugucuguuaccauguc

SEQ ID NO: 3385175 - RNA, 15 nt, Human
cguauguuauacaac

SEQ ID NO: 3385176 - RNA, 15 nt, Human
cguauuuaauagcaa

SEQ ID NO: 3385177 - RNA, 22 nt, Human
cguauuuuaaaagccacauaga

SEQ ID NO: 3385178 - RNA, 14 nt, Human
cgugccuccaccac

SEQ ID NO: 3385179 - RNA, 22 nt, Human
cgugccuccaccaccacuggcc

SEQ ID NO: 3385180 - RNA, 19 nt, Human
cgugccuccuuccaccucc

SEQ ID NO: 3385181 - RNA, 20 nt, Human
cgugccuccuuccaccuccc

SEQ ID NO: 3385182 - RNA, 16 nt, Human
cgugccuggccacgcc

SEQ ID NO: 3385183 - RNA, 15 nt, Human
cgugccuucagcucu

SEQ ID NO: 3385184 - RNA, 18 nt, Human
cgugccuucagcucuaca

SEQ ID NO: 3385185 - RNA, 19 nt, Human
cgugccuuuugcaccccuc

SEQ ID NO: 3385186 - RNA, 21 nt, Human
cgugccuuuugcaccccuccc

SEQ ID NO: 3385187 - RNA, 23 nt, Human
cgugcgcugggcacuucccugcu

SEQ ID NO: 3385188 - RNA, 13 nt, Human
cgugcuaaggacu

SEQ ID NO: 3385189 - RNA, 14 nt, Human
cgugcuaaggacuu

SEQ ID NO: 3385190 - RNA, 16 nt, Human
cgugcuaaggacuugu

SEQ ID NO: 3385191 - RNA, 15 nt, Human
cgugcuacugcacuc

SEQ ID NO: 3385192 - RNA, 19 nt, Human
cgugcucgccccagcaggu

SEQ ID NO: 3385193 - RNA, 22 nt, Human
cgugcucuuuguuuugugucuc

SEQ ID NO: 3385194 - RNA, 23 nt, Human
cgugcucuuuguuuugugucucu

SEQ ID NO: 3385195 - RNA, 15 nt, Human
cgugcugacagcugc

SEQ ID NO: 3385196 - RNA, 20 nt, Human
cgugcuuagccuccugaccu

SEQ ID NO: 3385197 - RNA, 14 nt, Human
cgugcuuccucagu

SEQ ID NO: 3385198 - RNA, 17 nt, Human
cguggaaccucugucuc

SEQ ID NO: 3385199 - RNA, 17 nt, Human
cguggacaccugcccug

SEQ ID NO: 3385200 - RNA, 18 nt, Human
cguggacaccugcccugc

SEQ ID NO: 3385201 - RNA, 19 nt, Human
cguggacaccugcccugcc

SEQ ID NO: 3385202 - RNA, 15 nt, Human
cguggaccuuccugc

SEQ ID NO: 3385203 - RNA, 15 nt, Human
cguggacugaguggg

SEQ ID NO: 3385204 - RNA, 18 nt, Human
cguggagaaucacaggcu

SEQ ID NO: 3385205 - RNA, 15 nt, Human
cguggagagcuagga

SEQ ID NO: 3385206 - RNA, 17 nt, Human
cguggagagcuggugcc

SEQ ID NO: 3385207 - RNA, 22 nt, Human
cguggagcaggcgguggggaga

SEQ ID NO: 3385208 - RNA, 20 nt, Human
cguggagcgggguaugaaga

SEQ ID NO: 3385209 - RNA, 13 nt, Human
cguggagggaggc

SEQ ID NO: 3385210 - RNA, 18 nt, Human
cguggaugcgcagugccu

SEQ ID NO: 3385211 - RNA, 19 nt, Human
cguggauuaaacuuaugaa

SEQ ID NO: 3385212 - RNA, 14 nt, Human
cguggcaaauauaa

SEQ ID NO: 3385213 - RNA, 18 nt, Human
cguggcacucgcuguaug

SEQ ID NO: 3385214 - RNA, 20 nt, Human
cguggcagauaaucagccuc

SEQ ID NO: 3385215 - RNA, 13 nt, Human
cguggcaucaccu

SEQ ID NO: 3385216 - RNA, 16 nt, Human
cguggcaucuuaaaag

SEQ ID NO: 3385217 - RNA, 20 nt, Human
cguggcauguggccuguggc

SEQ ID NO: 3385218 - RNA, 21 nt, Human
cguggcauguggccuguggcc

SEQ ID NO: 3385219 - RNA, 15 nt, Human
cguggccagcccggc

SEQ ID NO: 3385220 - RNA, 19 nt, Human
cguggccagcccggcuggu

SEQ ID NO: 3385221 - RNA, 14 nt, Human
cguggcccaaggcu

SEQ ID NO: 3385222 - RNA, 13 nt, Human
cguggccccagcc

SEQ ID NO: 3385223 - RNA, 15 nt, Human
cguggccccagccug

SEQ ID NO: 3385224 - RNA, 18 nt, Human
cguggccccagccuggcc

SEQ ID NO: 3385225 - RNA, 15 nt, Human
cguggcccuuccugg

SEQ ID NO: 3385226 - RNA, 16 nt, Human
cguggcccuuccugga

SEQ ID NO: 3385227 - RNA, 18 nt, Human
cguggcccuuccuggaca

SEQ ID NO: 3385228 - RNA, 22 nt, Human
cguggcccuuccuggacagcug

SEQ ID NO: 3385229 - RNA, 21 nt, Human
cguggccucccaaagugcugg

SEQ ID NO: 3385230 - RNA, 15 nt, Human
cguggccucuugagc

SEQ ID NO: 3385231 - RNA, 23 nt, Human
cguggccucuugagcaguggcug

SEQ ID NO: 3385232 - RNA, 20 nt, Human
cguggccuuccccagccucu

SEQ ID NO: 3385233 - RNA, 22 nt, Human
cguggcuaagaguguccuagga

SEQ ID NO: 3385234 - RNA, 15 nt, Human
cguggcucagccagc

SEQ ID NO: 3385235 - RNA, 14 nt, Human
cguggcugaccccc

SEQ ID NO: 3385236 - RNA, 17 nt, Human
cguggcugaccccccuc

SEQ ID NO: 3385237 - RNA, 18 nt, Human
cguggcugaccccccuca

SEQ ID NO: 3385238 - RNA, 19 nt, Human
cguggcugaccccccucag

SEQ ID NO: 3385239 - RNA, 19 nt, Human
cguggcugcggcacccuug

SEQ ID NO: 3385240 - RNA, 22 nt, Human
cguggcugcgugccccugcugc

SEQ ID NO: 3385241 - RNA, 15 nt, Human
cguggcugcuucaag

SEQ ID NO: 3385242 - RNA, 18 nt, Human
cguggcuucccgcucagc

SEQ ID NO: 3385243 - RNA, 21 nt, Human
cguggcuucugaugaaucuug

SEQ ID NO: 3385244 - RNA, 19 nt, Human
cgugggacggugcccaagc

SEQ ID NO: 3385245 - RNA, 20 nt, Human
cgugggacggugcccaagcc

SEQ ID NO: 3385246 - RNA, 22 nt, Human
cgugggagacaagaaaucccug

SEQ ID NO: 3385247 - RNA, 17 nt, Human
cgugggagagagacgug

SEQ ID NO: 3385248 - RNA, 23 nt, Human
cgugggauucagagaaaggcaag

SEQ ID NO: 3385249 - RNA, 16 nt, Human
cgugggcuccccucuu

SEQ ID NO: 3385250 - RNA, 11 nt, Human
cguggggaggu

SEQ ID NO: 3385251 - RNA, 12 nt, Human
cguggggcagca

SEQ ID NO: 3385252 - RNA, 16 nt, Human
cguggggcagggagcu

SEQ ID NO: 3385253 - RNA, 23 nt, Human
cguggggcagggagcugggcccg

SEQ ID NO: 3385254 - RNA, 17 nt, Human
cguggggugugcuggga

SEQ ID NO: 3385255 - RNA, 18 nt, Human
cgugggucuguuuuccuu

SEQ ID NO: 3385256 - RNA, 14 nt, Human
cguggguugcuaac

SEQ ID NO: 3385257 - RNA, 19 nt, Human
cguggguugcuaacugaac

SEQ ID NO: 3385258 - RNA, 15 nt, Human
cguggugauuuagca

SEQ ID NO: 3385259 - RNA, 22 nt, Human
cguggugauuuagcaggaagcu

SEQ ID NO: 3385260 - RNA, 18 nt, Human
cguggugcgagugcguga

SEQ ID NO: 3385261 - RNA, 14 nt, Human
cgugguggcaggca

SEQ ID NO: 3385262 - RNA, 19 nt, Human
cgugguguuauuuaaagaa

SEQ ID NO: 3385263 - RNA, 20 nt, Human
cguguaaccauggacccaau

SEQ ID NO: 3385264 - RNA, 17 nt, Human
cguguaggaaccugcac

SEQ ID NO: 3385265 - RNA, 14 nt, Human
cgugucaagcugcu

SEQ ID NO: 3385266 - RNA, 17 nt, Human
cgugucaagcugcucug

SEQ ID NO: 3385267 - RNA, 16 nt, Human
cgugucaccugugcuu

SEQ ID NO: 3385268 - RNA, 13 nt, Human
cguguccaccccc

SEQ ID NO: 3385269 - RNA, 17 nt, Human
cguguccccggccucag

SEQ ID NO: 3385270 - RNA, 18 nt, Human
cguguccccggggcccag

SEQ ID NO: 3385271 - RNA, 15 nt, Human
cgugucccucucgga

SEQ ID NO: 3385272 - RNA, 22 nt, Human
cgugucuguauuuaugugugag

SEQ ID NO: 3385273 - RNA, 20 nt, Human
cgugucuuccacuuugcaua

SEQ ID NO: 3385274 - RNA, 20 nt, Human
cgugugagugugacagggcc

SEQ ID NO: 3385275 - RNA, 18 nt, Human
cgugugcacacacaccac

SEQ ID NO: 3385276 - RNA, 15 nt, Human
cgugugccugugugc

SEQ ID NO: 3385277 - RNA, 21 nt, Human
cguguggcaauagugggcccu

SEQ ID NO: 3385278 - RNA, 18 nt, Human
cguguguagaguuaagaa

SEQ ID NO: 3385279 - RNA, 22 nt, Human
cguguguagaguuaagaagcug

SEQ ID NO: 3385280 - RNA, 19 nt, Human
cguguguagauaguaugca

SEQ ID NO: 3385281 - RNA, 19 nt, Human
ccagaacacacuccaucag

SEQ ID NO: 3385282 - RNA, 22 nt, Human
ccagaacacacuccaucagcuu

SEQ ID NO: 3385283 - RNA, 16 nt, Human
ccagaaccaauuauuu

SEQ ID NO: 3385284 - RNA, 14 nt, Human
ccagaaccccgagc

SEQ ID NO: 3385285 - RNA, 16 nt, Human
ccagaacucugccugc

SEQ ID NO: 3385286 - RNA, 19 nt, Human
ccagaacucugccugcccu

SEQ ID NO: 3385287 - RNA, 24 nt, Human
ccagaacucuuccuccaaggacag

SEQ ID NO: 3385288 - RNA, 13 nt, Human
ccagaacuucccu

SEQ ID NO: 3385289 - RNA, 14 nt, Human
ccagaacuucccug

SEQ ID NO: 3385290 - RNA, 15 nt, Human
ccagaacuucccuga

SEQ ID NO: 3385291 - RNA, 20 nt, Human
ccagaacuugacccugagcu

SEQ ID NO: 3385292 - RNA, 22 nt, Human
ccagaagaaaauagugguguga

SEQ ID NO: 3385293 - RNA, 18 nt, Human
ccagaagaaaauucuccu

SEQ ID NO: 3385294 - RNA, 18 nt, Human
ccagaagaagagaagcug

SEQ ID NO: 3385295 - RNA, 22 nt, Human
ccagaagaagagaagcugcuga

SEQ ID NO: 3385296 - RNA, 17 nt, Human
ccagaagaagauggcug

SEQ ID NO: 3385297 - RNA, 22 nt, Human
ccagaagauccccucaggacug

SEQ ID NO: 3385298 - RNA, 23 nt, Human
ccagaagaugaacagacugaccu

SEQ ID NO: 3385299 - RNA, 21 nt, Human
ccagaagaugacugaggguga

SEQ ID NO: 3385300 - RNA, 13 nt, Human
ccagaagcccaga

SEQ ID NO: 3385301 - RNA, 14 nt, Human
ccagaagcccagaa

SEQ ID NO: 3385302 - RNA, 15 nt, Human
ccagaagcccagaau

SEQ ID NO: 3385303 - RNA, 15 nt, Human
ccagaagccucuggc

SEQ ID NO: 3385304 - RNA, 20 nt, Human
ccagaagccucuggcuagag

SEQ ID NO: 3385305 - RNA, 17 nt, Human
ccagaagcucccccagc

SEQ ID NO: 3385306 - RNA, 19 nt, Human
ccagaagcucccccagcaa

SEQ ID NO: 3385307 - RNA, 23 nt, Human
ccagaaggagggggugaccuccg

SEQ ID NO: 3385308 - RNA, 18 nt, Human
ccagaagucaaggcuuag

SEQ ID NO: 3385309 - RNA, 12 nt, Human
ccagaaguguga

SEQ ID NO: 3385310 - RNA, 16 nt, Human
ccagaagugugacugg

SEQ ID NO: 3385311 - RNA, 19 nt, Human
ccagaauaaguuauugcag

SEQ ID NO: 3385312 - RNA, 14 nt, Human
ccagaaucccagcc

SEQ ID NO: 3385313 - RNA, 16 nt, Human
ccagaaugcuguacau

SEQ ID NO: 3385314 - RNA, 17 nt, Human
ccagaaugcuguacauc

SEQ ID NO: 3385315 - RNA, 22 nt, Human
ccagaaugucagauuccuuucc

SEQ ID NO: 3385316 - RNA, 20 nt, Human
ccagaauugugcaaauggaa

SEQ ID NO: 3385317 - RNA, 13 nt, Human
ccagaauuucaaa

SEQ ID NO: 3385318 - RNA, 19 nt, Human
ccagaauuucccaaagcag

SEQ ID NO: 3385319 - RNA, 17 nt, Human
ccagaauuuggaaaucc

SEQ ID NO: 3385320 - RNA, 18 nt, Human
ccagaauuuggaaauccu

SEQ ID NO: 3385321 - RNA, 14 nt, Human
ccagacacaggccc

SEQ ID NO: 3385322 - RNA, 21 nt, Human
cuacacaggggaaaagaggag

SEQ ID NO: 3385323 - RNA, 20 nt, Human
cuacacagugggaacucuga

SEQ ID NO: 3385324 - RNA, 15 nt, Human
cuacaccacacacaa

SEQ ID NO: 3385325 - RNA, 21 nt, Human
cuacaccacacacaacagcca

SEQ ID NO: 3385326 - RNA, 13 nt, Human
cuacaccacucug

SEQ ID NO: 3385327 - RNA, 14 nt, Human
cuacaccacucugg

SEQ ID NO: 3385328 - RNA, 15 nt, Human
cuacaccacucuggc

SEQ ID NO: 3385329 - RNA, 20 nt, Human
cuacaccacucuggcagcca

SEQ ID NO: 3385330 - RNA, 21 nt, Human
cuacaccacucuggcagccac

SEQ ID NO: 3385331 - RNA, 22 nt, Human
cuacaccacucuggcagccaca

SEQ ID NO: 3385332 - RNA, 11 nt, Human
cuacacccagc

SEQ ID NO: 3385333 - RNA, 12 nt, Human
cuacacccagca

SEQ ID NO: 3385334 - RNA, 16 nt, Human
cuauacccacccagaa

SEQ ID NO: 3385335 - RNA, 19 nt, Human
cuauaccugugccucggcu

SEQ ID NO: 3385336 - RNA, 19 nt, Human
cuauacgcagcgugcuuua

SEQ ID NO: 3385337 - RNA, 17 nt, Human
cuauacugcauacuuuu

SEQ ID NO: 3385338 - RNA, 15 nt, Human
cuauacuugaacaaa

SEQ ID NO: 3385339 - RNA, 22 nt, Human
cuauacuugaacaaaaggguca

SEQ ID NO: 3385340 - RNA, 13 nt, Human
cuauagaaagugu

SEQ ID NO: 3385341 - RNA, 19 nt, Human
cuauagaaaguguucuguu

SEQ ID NO: 3385342 - RNA, 19 nt, Human
cuauagacccgaggaaacu

SEQ ID NO: 3385343 - RNA, 16 nt, Human
cuauagagccuaccug

SEQ ID NO: 3385344 - RNA, 17 nt, Human
cuauagcaucacuuaaa

SEQ ID NO: 3385345 - RNA, 13 nt, Human
cuauagccaaaaa

SEQ ID NO: 3385346 - RNA, 14 nt, Human
cuauagccaaaaau

SEQ ID NO: 3385347 - RNA, 19 nt, Human
cuauagccaaaaauagcua

SEQ ID NO: 3385348 - RNA, 17 nt, Human
cuauagccuaggugaca

SEQ ID NO: 3385349 - RNA, 21 nt, Human
cuauagccuggggugggguca

SEQ ID NO: 3385350 - RNA, 23 nt, Human
cuauagcucaggaccugggaccu

SEQ ID NO: 3385351 - RNA, 16 nt, Human
cuauaggcuggagaag

SEQ ID NO: 3385352 - RNA, 18 nt, Human
cuauaggcuggagaagcu

SEQ ID NO: 3385353 - RNA, 19 nt, Human
cuauaggucauacaaucca

SEQ ID NO: 3385354 - RNA, 14 nt, Human
cuauagguccagaa

SEQ ID NO: 3385355 - RNA, 22 nt, Human
cuauaggugcuacaaaaacaca

SEQ ID NO: 3385356 - RNA, 12 nt, Human
cuauaguauuug

SEQ ID NO: 3385357 - RNA, 21 nt, Human
cuauaguccagcuuuguucuu

SEQ ID NO: 3385358 - RNA, 13 nt, Human
cuauaguuacugu

SEQ ID NO: 3385359 - RNA, 16 nt, Human
cuauaguuacuguccu

SEQ ID NO: 3385360 - RNA, 15 nt, Human
cuauaguucuagaca

SEQ ID NO: 3385361 - RNA, 19 nt, Human
cuauaguuuaaaacacauu

SEQ ID NO: 3385362 - RNA, 14 nt, Human
cuauauaaaauaac

SEQ ID NO: 3385363 - RNA, 17 nt, Human
cuauauaaaauaacuaa

SEQ ID NO: 3385364 - RNA, 22 nt, Human
cuauauaaaauaacuaaaaugu

SEQ ID NO: 3385365 - RNA, 19 nt, Human
cuauauaagacaagaacuc

SEQ ID NO: 3385366 - RNA, 16 nt, Human
cuauauacaugugugu

SEQ ID NO: 3385367 - RNA, 19 nt, Human
cuauauacauguguguaua

SEQ ID NO: 3385368 - RNA, 14 nt, Human
cuauauaccaaagc

SEQ ID NO: 3385369 - RNA, 15 nt, Human
cuauauagagauguu

SEQ ID NO: 3385370 - RNA, 19 nt, Human
cuauauagcugaucaguuu

SEQ ID NO: 3385371 - RNA, 19 nt, Human
cuauauaguaccuuugcuc

SEQ ID NO: 3385372 - RNA, 20 nt, Human
cuauauaguaccuuugcucu

SEQ ID NO: 3385373 - RNA, 19 nt, Human
cuauauauaaaacggugcu

SEQ ID NO: 3385374 - RNA, 21 nt, Human
cuauauauaauucuguacaua

SEQ ID NO: 3385375 - RNA, 18 nt, Human
cuauauauauaaauguau

SEQ ID NO: 3385376 - RNA, 13 nt, Human
cuauauauauaau

SEQ ID NO: 3385377 - RNA, 14 nt, Human
cuauauauauaugc

SEQ ID NO: 3385378 - RNA, 23 nt, Human
cuauauaugugaugaucuaccag

SEQ ID NO: 3385379 - RNA, 12 nt, Human
cuauauauuucu

SEQ ID NO: 3385380 - RNA, 14 nt, Human
cuauauauuucuau

SEQ ID NO: 3385381 - RNA, 14 nt, Human
cuauaucaugcuuu

SEQ ID NO: 3385382 - RNA, 20 nt, Human
cuauaucaugcuuuaaagug

SEQ ID NO: 3385383 - RNA, 15 nt, Human
cuauaucauuaaaag

SEQ ID NO: 3385384 - RNA, 15 nt, Human
cuauauccauguacu

SEQ ID NO: 3385385 - RNA, 17 nt, Human
cuauauccugugacugu

SEQ ID NO: 3385386 - RNA, 17 nt, Human
cuauaucuauaaacacu

SEQ ID NO: 3385387 - RNA, 19 nt, Human
cuauaucuauaaacacugu

SEQ ID NO: 3385388 - RNA, 13 nt, Human
cuauaucuauaua

SEQ ID NO: 3385389 - RNA, 15 nt, Human
cuauaucuguauaua

SEQ ID NO: 3385390 - RNA, 20 nt, Human
cuauaucuguauauaaaaua

SEQ ID NO: 3385391 - RNA, 13 nt, Human
cuauaucuguuuu

SEQ ID NO: 3385392 - RNA, 22 nt, Human
cuauaucuguuuuacugcuuuu

SEQ ID NO: 3385393 - RNA, 15 nt, Human
cuauaugaaaaacaa

SEQ ID NO: 3385394 - RNA, 23 nt, Human
cuauaugaauuuaaauauaauuc

SEQ ID NO: 3385395 - RNA, 16 nt, Human
cuauaugagaagaaua

SEQ ID NO: 3385396 - RNA, 17 nt, Human
cuauaugagaagaauag

SEQ ID NO: 3385397 - RNA, 19 nt, Human
cuauaugauuuauaguuug

SEQ ID NO: 3385398 - RNA, 17 nt, Human
cuauauggaauugcuua

SEQ ID NO: 3385399 - RNA, 10 nt, Human
cuauauguau

SEQ ID NO: 3385400 - RNA, 18 nt, Human
cuauauugauuguccuuu

SEQ ID NO: 3385401 - RNA, 19 nt, Human
cuauauugcccaggcuggu

SEQ ID NO: 3385402 - RNA, 14 nt, Human
cuauauuuaaguau

SEQ ID NO: 3385403 - RNA, 23 nt, Human
cuauauuugcuagacucuagaca

SEQ ID NO: 3385404 - RNA, 22 nt, Human
cuauauuugggccugcuccaga

SEQ ID NO: 3385405 - RNA, 14 nt, Human
cuauauuuuccuga

SEQ ID NO: 3385406 - RNA, 14 nt, Human
cuauauuuugucau

SEQ ID NO: 3385407 - RNA, 15 nt, Human
cuauauuuugucaua

SEQ ID NO: 3385408 - RNA, 21 nt, Human
cuauauuuugucauaucaaau

SEQ ID NO: 3385409 - RNA, 19 nt, Human
cuaucaacaauaaaauuuu

SEQ ID NO: 3385410 - RNA, 19 nt, Human
cuaucaaccccagacacug

SEQ ID NO: 3385411 - RNA, 21 nt, Human
cuaucaaccccagacacuggu

SEQ ID NO: 3385412 - RNA, 15 nt, Human
cuaucaagucaauca

SEQ ID NO: 3385413 - RNA, 21 nt, Human
cuaucaauagucaagaaaaau

SEQ ID NO: 3385414 - RNA, 18 nt, Human
cuaucaauauauaaauuu

SEQ ID NO: 3385415 - RNA, 16 nt, Human
cuaucacccaacgcuc

SEQ ID NO: 3385416 - RNA, 14 nt, Human
cuaucaccuccccu

SEQ ID NO: 3385417 - RNA, 17 nt, Human
cuaucacugguuugguu

SEQ ID NO: 3385418 - RNA, 13 nt, Human
cuaucagaagacc

SEQ ID NO: 3385419 - RNA, 18 nt, Human
cuaucagaguauccacug

SEQ ID NO: 3385420 - RNA, 19 nt, Human
cuaucagaguugcugcaaa

SEQ ID NO: 3385421 - RNA, 17 nt, Human
cuaucagugugcccccc

SEQ ID NO: 3385422 - RNA, 23 nt, Human
cuaucaguuuuauagcuuuauuu

SEQ ID NO: 3385423 - RNA, 16 nt, Human
cuaucauaguuaacau

SEQ ID NO: 3385424 - RNA, 16 nt, Human
cuaucauuaaaguucu

SEQ ID NO: 3385425 - RNA, 18 nt, Human
cuaucauugcuuccuccu

SEQ ID NO: 3385426 - RNA, 17 nt, Human
cuaucauuuuuguacag

SEQ ID NO: 3385427 - RNA, 23 nt, Human
cuaucauuuuuguacaguuugcu

SEQ ID NO: 3385428 - RNA, 19 nt, Human
cuauccaaacauguauuua

SEQ ID NO: 3385429 - RNA, 20 nt, Human
cuauccaaacauguauuuau

SEQ ID NO: 3385430 - RNA, 23 nt, Human
cuauccaaucaaucuugcaugua

SEQ ID NO: 3385431 - RNA, 19 nt, Human
cuauccacccagcccauuc

SEQ ID NO: 3385432 - RNA, 21 nt, Human
cuauccacugggcacaacugc

SEQ ID NO: 3385433 - RNA, 22 nt, Human
cuauccaucaugaccagcaaau

SEQ ID NO: 3385434 - RNA, 16 nt, Human
cuauccaugcaccaaa

SEQ ID NO: 3385435 - RNA, 17 nt, Human
cuauccaugcaccaaac

SEQ ID NO: 3385436 - RNA, 13 nt, Human
cuaucccauccca

SEQ ID NO: 3385437 - RNA, 16 nt, Human
cuaucccggcugcccu

SEQ ID NO: 3385438 - RNA, 14 nt, Human
cuaucccucacaca

SEQ ID NO: 3385439 - RNA, 13 nt, Human
cuauccuacccca

SEQ ID NO: 3385440 - RNA, 14 nt, Human
cuauccucacugcc

SEQ ID NO: 3385441 - RNA, 13 nt, Human
cuauccuggcucu

SEQ ID NO: 3385442 - RNA, 22 nt, Human
cuauccuggcuuugcccaaccu

SEQ ID NO: 3385443 - RNA, 11 nt, Human
cuauccuuggc

SEQ ID NO: 3385444 - RNA, 15 nt, Human
cuaucuaaugacaug

SEQ ID NO: 3385445 - RNA, 17 nt, Human
cuaucuacucuccucau

SEQ ID NO: 3385446 - RNA, 13 nt, Human
cuaucuauuugag

SEQ ID NO: 3385447 - RNA, 20 nt, Human
cuaucucacagcacacucag

SEQ ID NO: 3385448 - RNA, 14 nt, Human
cuaucucagagaua

SEQ ID NO: 3385449 - RNA, 21 nt, Human
cuaucucaucuaucucaaucc

SEQ ID NO: 3385450 - RNA, 13 nt, Human
cuaucucccccag

SEQ ID NO: 3385451 - RNA, 14 nt, Human
cuaucucccccagc

SEQ ID NO: 3385452 - RNA, 16 nt, Human
cuaucucccccagccc

SEQ ID NO: 3385453 - RNA, 20 nt, Human
cuaucucccccagccccauc

SEQ ID NO: 3385454 - RNA, 15 nt, Human
cuaucuccuagggcu

SEQ ID NO: 3385455 - RNA, 19 nt, Human
cuaucucuauuauuggaaa

SEQ ID NO: 3385456 - RNA, 17 nt, Human
cuaucucugugugcaca

SEQ ID NO: 3385457 - RNA, 21 nt, Human
cuaucucugugugcacaaaua

SEQ ID NO: 3385458 - RNA, 23 nt, Human
cuaucuggaggccuuccagcugc

SEQ ID NO: 3385459 - RNA, 24 nt, Human
cuaucuggccauauuuacuaccuu

SEQ ID NO: 3385460 - RNA, 16 nt, Human
cuaucugggcuuccug

SEQ ID NO: 3385461 - RNA, 20 nt, Human
cuaucugggcuuccuggagc

SEQ ID NO: 3385462 - RNA, 17 nt, Human
cuaucugguauuaaaug

SEQ ID NO: 3385463 - RNA, 20 nt, Human
cuaucugguauuaaaugcca

SEQ ID NO: 3385464 - RNA, 21 nt, Human
cuaucuggucaaccuccugga

SEQ ID NO: 3385465 - RNA, 16 nt, Human
cuaucuggugauuucu

SEQ ID NO: 3385466 - RNA, 17 nt, Human
cuaucuggugauuucua

SEQ ID NO: 3385467 - RNA, 23 nt, Human
cuauucaaacagucucaggaaau

SEQ ID NO: 3385468 - RNA, 17 nt, Human
cuauucacaaaauauca

SEQ ID NO: 3385469 - RNA, 16 nt, Human
cuauucacaauuauuc

SEQ ID NO: 3385470 - RNA, 14 nt, Human
cuauucagacaagc

SEQ ID NO: 3385471 - RNA, 17 nt, Human
cuauucauuaaauguuu

SEQ ID NO: 3385472 - RNA, 15 nt, Human
cuauuccaaaaaggu

SEQ ID NO: 3385473 - RNA, 12 nt, Human
cuauuccagcuc

SEQ ID NO: 3385474 - RNA, 13 nt, Human
cuauuccagcuca

SEQ ID NO: 3385475 - RNA, 19 nt, Human
cuauuccagcugucccccc

SEQ ID NO: 3385476 - RNA, 14 nt, Human
cuauuccuccuggg

SEQ ID NO: 3385477 - RNA, 13 nt, Human
cuauuccugagag

SEQ ID NO: 3385478 - RNA, 17 nt, Human
cuauuccuucuggccuu

SEQ ID NO: 3385479 - RNA, 23 nt, Human
cuauuccuucuggccuuuccucu

SEQ ID NO: 3385480 - RNA, 15 nt, Human
cuauuccuuucccuu

SEQ ID NO: 3385481 - RNA, 18 nt, Human
cuauuccuuucccuuccu

SEQ ID NO: 3385482 - RNA, 19 nt, Human
cuauuccuuucccuuccuc

SEQ ID NO: 3385483 - RNA, 20 nt, Human
cuauuccuuucccuuccucu

SEQ ID NO: 3385484 - RNA, 15 nt, Human
cuauucuagccugca

SEQ ID NO: 3385485 - RNA, 14 nt, Human
cuauucuccagcug

SEQ ID NO: 3385486 - RNA, 18 nt, Human
cuauucucuccucagacu

SEQ ID NO: 3385487 - RNA, 14 nt, Human
cuauucuugaugua

SEQ ID NO: 3385488 - RNA, 16 nt, Human
cuauucuugauguaaa

SEQ ID NO: 3385489 - RNA, 22 nt, Human
cuauucuugauguaaaaucuug

SEQ ID NO: 3385490 - RNA, 21 nt, Human
cuauucuugauuuauuugcuu

SEQ ID NO: 3385491 - RNA, 23 nt, Human
cuauucuugauuuauuugcuucu

SEQ ID NO: 3385492 - RNA, 20 nt, Human
cuauugaauucggaacuguc

SEQ ID NO: 3385493 - RNA, 16 nt, Human
cuauugacaauaaaau

SEQ ID NO: 3385494 - RNA, 14 nt, Human
cuauugacuucaau

SEQ ID NO: 3385495 - RNA, 17 nt, Human
cuauugagucuucaugu

SEQ ID NO: 3385496 - RNA, 16 nt, Human
cuauugauaauuuaga

SEQ ID NO: 3385497 - RNA, 15 nt, Human
cuauugauguacagu

SEQ ID NO: 3385498 - RNA, 23 nt, Human
cuauugauguacagucugucaug

SEQ ID NO: 3385499 - RNA, 17 nt, Human
cuauugauuuaagcuuu

SEQ ID NO: 3385500 - RNA, 13 nt, Human
cuacgccugccuc

SEQ ID NO: 3385501 - RNA, 14 nt, Human
cuacgcucuccuuu

SEQ ID NO: 3385502 - RNA, 14 nt, Human
cuacggaccaggua

SEQ ID NO: 3385503 - RNA, 14 nt, Human
cuacguauuuaaua

SEQ ID NO: 3385504 - RNA, 13 nt, Human
cuacgugugauuu

SEQ ID NO: 3385505 - RNA, 14 nt, Human
cuacgugugauuuu

SEQ ID NO: 3385506 - RNA, 18 nt, Human
cuacgugugauuuuucug

SEQ ID NO: 3385507 - RNA, 20 nt, Human
cuacguuucuuuaaccuugu

SEQ ID NO: 3385508 - RNA, 14 nt, Human
cuacuaaaaaugca

SEQ ID NO: 3385509 - RNA, 23 nt, Human
cuacuaacaaucagcuccuuccu

SEQ ID NO: 3385510 - RNA, 23 nt, Human
cuacuaagaaaauagagaugagc

SEQ ID NO: 3385511 - RNA, 20 nt, Human
cuacuaaggcuuuccuaccu

SEQ ID NO: 3385512 - RNA, 17 nt, Human
cuacuaauagaauaaag

SEQ ID NO: 3385513 - RNA, 14 nt, Human
cuacuaaugauguu

SEQ ID NO: 3385514 - RNA, 15 nt, Human
cuacuaauuccacac

SEQ ID NO: 3385515 - RNA, 18 nt, Human
cuacuacaucgcccucca

SEQ ID NO: 3385516 - RNA, 16 nt, Human
cuacuagcaaaauaaa

SEQ ID NO: 3385517 - RNA, 14 nt, Human
cuacuauaaagaga

SEQ ID NO: 3385518 - RNA, 18 nt, Human
cuacuaugccagaugccu

SEQ ID NO: 3385519 - RNA, 12 nt, Human
cuacuauuuucu

SEQ ID NO: 3385520 - RNA, 21 nt, Human
cuacucaagcggguggcucug

SEQ ID NO: 3385521 - RNA, 13 nt, Human
cuacucacucaag

SEQ ID NO: 3385522 - RNA, 14 nt, Human
cuacucacucaagu

SEQ ID NO: 3385523 - RNA, 15 nt, Human
cuacucaggaggcug

SEQ ID NO: 3385524 - RNA, 16 nt, Human
cuacucauuuuaauga

SEQ ID NO: 3385525 - RNA, 17 nt, Human
cuacucccagacaccca

SEQ ID NO: 3385526 - RNA, 13 nt, Human
cuacucccugcag

SEQ ID NO: 3385527 - RNA, 18 nt, Human
cuacucccugcagaugcc

SEQ ID NO: 3385528 - RNA, 17 nt, Human
cuacuccuaccucagcc

SEQ ID NO: 3385529 - RNA, 14 nt, Human
cuacuccucugcag

SEQ ID NO: 3385530 - RNA, 20 nt, Human
cuacuccucugcagugccuu

SEQ ID NO: 3385531 - RNA, 13 nt, Human
cuacuccugucuu

SEQ ID NO: 3385532 - RNA, 17 nt, Human
cuacuccugucuucugc

SEQ ID NO: 3385533 - RNA, 19 nt, Human
cuacuccugucuucugcuu

SEQ ID NO: 3385534 - RNA, 16 nt, Human
cuacucgaguuacaga

SEQ ID NO: 3385535 - RNA, 22 nt, Human
cuacucuagagaaguggacugg

SEQ ID NO: 3385536 - RNA, 20 nt, Human
cuacucuagggaaaaaccag

SEQ ID NO: 3385537 - RNA, 22 nt, Human
cuacucucaggaucaagaaagu

SEQ ID NO: 3385538 - RNA, 18 nt, Human
cuacucucccauggcuua

SEQ ID NO: 3385539 - RNA, 12 nt, Human
cuacucuccuca

SEQ ID NO: 3385540 - RNA, 13 nt, Human
cuacucuccucau

SEQ ID NO: 3385541 - RNA, 17 nt, Human
cuacucuccucggcccc

SEQ ID NO: 3385542 - RNA, 14 nt, Human
cuacucugugccag

SEQ ID NO: 3385543 - RNA, 19 nt, Human
cuacucugugccagagccu

SEQ ID NO: 3385544 - RNA, 12 nt, Human
cuacucuguguc

SEQ ID NO: 3385545 - RNA, 21 nt, Human
cuacucugugucagguggggc

SEQ ID NO: 3385546 - RNA, 15 nt, Human
cuacucuguuccuuc

SEQ ID NO: 3385547 - RNA, 15 nt, Human
cuacucuuaagccau

SEQ ID NO: 3385548 - RNA, 18 nt, Human
cuacucuuaagccaucuu

SEQ ID NO: 3385549 - RNA, 22 nt, Human
cuacucuuaagccaucuuggua

SEQ ID NO: 3385550 - RNA, 22 nt, Human
cuacucuuaaguuucucagcuc

SEQ ID NO: 3385551 - RNA, 14 nt, Human
cuacucuucucucu

SEQ ID NO: 3385552 - RNA, 12 nt, Human
cuacugaaacag

SEQ ID NO: 3385553 - RNA, 13 nt, Human
cuacugaagcccu

SEQ ID NO: 3385554 - RNA, 14 nt, Human
cuacugaagcccuu

SEQ ID NO: 3385555 - RNA, 14 nt, Human
cuacugacaugugg

SEQ ID NO: 3385556 - RNA, 18 nt, Human
cuacugaccagacaagcu

SEQ ID NO: 3385557 - RNA, 18 nt, Human
cuacugcaccauuuaaaa

SEQ ID NO: 3385558 - RNA, 20 nt, Human
cuacugcacuccagccuggg

SEQ ID NO: 3385559 - RNA, 23 nt, Human
cuacugcacuccagccuggggga

SEQ ID NO: 3385560 - RNA, 20 nt, Human
cuacugcagcaccuccaggc

SEQ ID NO: 3385561 - RNA, 21 nt, Human
cuacugcagcaccuccaggcc

SEQ ID NO: 3385562 - RNA, 19 nt, Human
cuacugcauuuagggagua

SEQ ID NO: 3385563 - RNA, 22 nt, Human
cuacugccaaccucgcuccaac

SEQ ID NO: 3385564 - RNA, 15 nt, Human
cuacugccauccugg

SEQ ID NO: 3385565 - RNA, 17 nt, Human
cuacugccauccuggcc

SEQ ID NO: 3385566 - RNA, 23 nt, Human
cuacugccauccuggcccagggc

SEQ ID NO: 3385567 - RNA, 21 nt, Human
cuacugcccaggcacugcaaa

SEQ ID NO: 3385568 - RNA, 15 nt, Human
cuacuggauucuuau

SEQ ID NO: 3385569 - RNA, 16 nt, Human
cuacuggggaaacugg

SEQ ID NO: 3385570 - RNA, 17 nt, Human
cuacuggguguagacug

SEQ ID NO: 3385571 - RNA, 23 nt, Human
cuacugggugucauuucauucca

SEQ ID NO: 3385572 - RNA, 17 nt, Human
cuacuguaauuuuauau

SEQ ID NO: 3385573 - RNA, 19 nt, Human
cuacuguaauuuuauauga

SEQ ID NO: 3385574 - RNA, 20 nt, Human
cuacugucaaaugaugugca

SEQ ID NO: 3385575 - RNA, 21 nt, Human
cuacugucaaaugaugugcaa

SEQ ID NO: 3385576 - RNA, 20 nt, Human
cuacugucuuuggaaaaaug

SEQ ID NO: 3385577 - RNA, 13 nt, Human
cuacugugacuga

SEQ ID NO: 3385578 - RNA, 15 nt, Human
cuacuguggaaaaau

SEQ ID NO: 3385579 - RNA, 18 nt, Human
cuacuguggaaaaauauu

SEQ ID NO: 3385580 - RNA, 21 nt, Human
cuacugugguguuuuguuuau

SEQ ID NO: 3385581 - RNA, 11 nt, Human
cuacuguguaa

SEQ ID NO: 3385582 - RNA, 15 nt, Human
cuacuguguguguga

SEQ ID NO: 3385583 - RNA, 20 nt, Human
cuacugugugugugaaugaa

SEQ ID NO: 3385584 - RNA, 23 nt, Human
cuacuguguuaugcaaaagcaag

SEQ ID NO: 3385585 - RNA, 15 nt, Human
cuacuguucuaaagc

SEQ ID NO: 3385586 - RNA, 20 nt, Human
cuacuguucuaaagcucuga

SEQ ID NO: 3385587 - RNA, 23 nt, Human
cuacuguuuuaauuuauacuggc

SEQ ID NO: 3385588 - RNA, 13 nt, Human
cuacuuaagagaa

SEQ ID NO: 3385589 - RNA, 19 nt, Human
cuacuuaauuccuuucuca

SEQ ID NO: 3385590 - RNA, 13 nt, Human
cuacuuacacauc

SEQ ID NO: 3385591 - RNA, 21 nt, Human
cuacuuaccuaccacaugcca

SEQ ID NO: 3385592 - RNA, 16 nt, Human
cuacuuagcacuucag

SEQ ID NO: 3385593 - RNA, 19 nt, Human
cuacuuagcacuucagggc

SEQ ID NO: 3385594 - RNA, 22 nt, Human
cuacuuagcauccuaagaaaua

SEQ ID NO: 3385595 - RNA, 17 nt, Human
cuacuuagcaugucccu

SEQ ID NO: 3385596 - RNA, 20 nt, Human
cuacuuccccuuccuaauuc

SEQ ID NO: 3385597 - RNA, 16 nt, Human
cuacuucccucaccca

SEQ ID NO: 3385598 - RNA, 13 nt, Human
cuacuuccuccuc

SEQ ID NO: 3385599 - RNA, 20 nt, Human
cuacuuccugugacuucagc

SEQ ID NO: 3385600 - RNA, 22 nt, Human
cuacuucuuuugcucuuagcug

SEQ ID NO: 3385601 - RNA, 17 nt, Human
cuacuugauuuuauugu

SEQ ID NO: 3385602 - RNA, 15 nt, Human
cuacuugcucuggac

SEQ ID NO: 3385603 - RNA, 17 nt, Human
cuacuugcucuggaccu

SEQ ID NO: 3385604 - RNA, 18 nt, Human
cuacuugcucuggaccug

SEQ ID NO: 3385605 - RNA, 21 nt, Human
cuacuugcucuggaccugccc

SEQ ID NO: 3385606 - RNA, 12 nt, Human
cuacuugggagg

SEQ ID NO: 3385607 - RNA, 19 nt, Human
cuacuugggaggcugagau

SEQ ID NO: 3385608 - RNA, 13 nt, Human
cuacuugguuugu

SEQ ID NO: 3385609 - RNA, 17 nt, Human
cuacuugguuuguguuc

SEQ ID NO: 3385610 - RNA, 22 nt, Human
cuacuuucugugucuauggauu

SEQ ID NO: 3385611 - RNA, 20 nt, Human
cuacuuugguuucugucugu

SEQ ID NO: 3385612 - RNA, 17 nt, Human
cucuuugauuauuugca

SEQ ID NO: 3385613 - RNA, 19 nt, Human
cucuuugauuauuugcaug

SEQ ID NO: 3385614 - RNA, 20 nt, Human
cucuuugcuuugcuuucugc

SEQ ID NO: 3385615 - RNA, 21 nt, Human
cucuuuggcgaccuccuuuca

SEQ ID NO: 3385616 - RNA, 15 nt, Human
cucuuugggaauguu

SEQ ID NO: 3385617 - RNA, 17 nt, Human
cucuuugucuaaaacaa

SEQ ID NO: 3385618 - RNA, 23 nt, Human
cucuuugucuacaccauuaugug

SEQ ID NO: 3385619 - RNA, 18 nt, Human
cucuuuguuuugugucuc

SEQ ID NO: 3385620 - RNA, 19 nt, Human
cucuuuuacccaauaagau

SEQ ID NO: 3385621 - RNA, 21 nt, Human
cucuuuuacccuggccccucu

SEQ ID NO: 3385622 - RNA, 14 nt, Human
cucuuuuaccugcu

SEQ ID NO: 3385623 - RNA, 17 nt, Human
cucuuuuaccugcugcu

SEQ ID NO: 3385624 - RNA, 18 nt, Human
cucuuuuaccugcugcuu

SEQ ID NO: 3385625 - RNA, 15 nt, Human
cucuuuuagucauuu

SEQ ID NO: 3385626 - RNA, 15 nt, Human
cucuuuuauauuugu

SEQ ID NO: 3385627 - RNA, 19 nt, Human
cucuuuuccccuuuccugu

SEQ ID NO: 3385628 - RNA, 17 nt, Human
cucuuuucuaaaagacu

SEQ ID NO: 3385629 - RNA, 15 nt, Human
cucuuuucuguacuu

SEQ ID NO: 3385630 - RNA, 18 nt, Human
cucuuuucuuuagagcau

SEQ ID NO: 3385631 - RNA, 10 nt, Human
cucuuuugua

SEQ ID NO: 3385632 - RNA, 13 nt, Human
cucuuuuuaaagu

SEQ ID NO: 3385633 - RNA, 19 nt, Human
cucuuuuuauuuaguuccu

SEQ ID NO: 3385634 - RNA, 21 nt, Human
cucuuuuugggcuccuuuuuc

SEQ ID NO: 3385635 - RNA, 15 nt, Human
cucuuuuugugaagu

SEQ ID NO: 3385636 - RNA, 13 nt, Human
cucuuuuuguuug

SEQ ID NO: 3385637 - RNA, 18 nt, Human
cucuuuuuuacucauuga

SEQ ID NO: 3385638 - RNA, 20 nt, Human
cucuuuuuuguuuguuucuu

SEQ ID NO: 3385639 - RNA, 15 nt, Human
cugaaaaaaaguuua

SEQ ID NO: 3385640 - RNA, 13 nt, Human
cugaaaaaauaua

SEQ ID NO: 3385641 - RNA, 20 nt, Human
cugaaaacauaaaaaguuaa

SEQ ID NO: 3385642 - RNA, 14 nt, Human
cugaaaacaucugg

SEQ ID NO: 3385643 - RNA, 22 nt, Human
cugaaaaccaucuggccuggcc

SEQ ID NO: 3385644 - RNA, 14 nt, Human
cugaaaacccagag

SEQ ID NO: 3385645 - RNA, 17 nt, Human
cugaaaacccagagagg

SEQ ID NO: 3385646 - RNA, 15 nt, Human
cugaaaaccucuccu

SEQ ID NO: 3385647 - RNA, 20 nt, Human
cugaaaaccucuccucaugu

SEQ ID NO: 3385648 - RNA, 15 nt, Human
cugaaaacuggaaua

SEQ ID NO: 3385649 - RNA, 11 nt, Human
cugaaaagaaa

SEQ ID NO: 3385650 - RNA, 16 nt, Human
cugaaaagaaggaaag

SEQ ID NO: 3385651 - RNA, 19 nt, Human
cugaaaagagagcagagaa

SEQ ID NO: 3385652 - RNA, 13 nt, Human
cugaaaauauaac

SEQ ID NO: 3385653 - RNA, 22 nt, Human
cugaaaauauaaccagccauug

SEQ ID NO: 3385654 - RNA, 14 nt, Human
cugaaaauguccuu

SEQ ID NO: 3385655 - RNA, 16 nt, Human
cugaaaauguccuugu

SEQ ID NO: 3385656 - RNA, 19 nt, Human
cugaaaauguccuugugau

SEQ ID NO: 3385657 - RNA, 21 nt, Human
cugaaaaugugaauaaaauua

SEQ ID NO: 3385658 - RNA, 13 nt, Human
cugaaaauguuag

SEQ ID NO: 3385659 - RNA, 17 nt, Human
cugaaaauuaacacugc

SEQ ID NO: 3385660 - RNA, 22 nt, Human
cugaaaauuccagaaaggauau

SEQ ID NO: 3385661 - RNA, 21 nt, Human
cugaaaauuggacagauugcc

SEQ ID NO: 3385662 - RNA, 19 nt, Human
cugaaacacgaaacuuguu

SEQ ID NO: 3385663 - RNA, 17 nt, Human
cugaaacagauuucaua

SEQ ID NO: 3385664 - RNA, 14 nt, Human
cugaaacagcugcc

SEQ ID NO: 3385665 - RNA, 17 nt, Human
cugaaacagcugccuua

SEQ ID NO: 3385666 - RNA, 19 nt, Human
cugaaacagcugccuuagc

SEQ ID NO: 3385667 - RNA, 22 nt, Human
cugaaacagcugccuuagcuuc

SEQ ID NO: 3385668 - RNA, 22 nt, Human
cugaaacucacacaacuaggaa

SEQ ID NO: 3385669 - RNA, 23 nt, Human
cugaaacuuauuuuuuucugauu

SEQ ID NO: 3385670 - RNA, 20 nt, Human
cugaaagaaacaguuaacuu

SEQ ID NO: 3385671 - RNA, 19 nt, Human
cugaaagaacauggacuug

SEQ ID NO: 3385672 - RNA, 14 nt, Human
cugaaagagaaaca

SEQ ID NO: 3385673 - RNA, 14 nt, Human
cugaaagaggcuga

SEQ ID NO: 3385674 - RNA, 22 nt, Human
cugaaagaggcugaggccugga

SEQ ID NO: 3385675 - RNA, 12 nt, Human
cugaaagccacg

SEQ ID NO: 3385676 - RNA, 23 nt, Human
cugaaagcccugagcuuucugcu

SEQ ID NO: 3385677 - RNA, 20 nt, Human
cugaaagccuuagggaagcu

SEQ ID NO: 3385678 - RNA, 23 nt, Human
cugaaagggacgcuacccgggaa

SEQ ID NO: 3385679 - RNA, 18 nt, Human
cugaaaguguuuccuuca

SEQ ID NO: 3385680 - RNA, 23 nt, Human
cugaaaguuuuguaaaagaaauc

SEQ ID NO: 3385681 - RNA, 22 nt, Human
cugaaauagacccacaagaggc

SEQ ID NO: 3385682 - RNA, 16 nt, Human
cugaaauaggaaacaa

SEQ ID NO: 3385683 - RNA, 14 nt, Human
cugaaauauaaagu

SEQ ID NO: 3385684 - RNA, 21 nt, Human
cugaaauaucccggggguggg

SEQ ID NO: 3385685 - RNA, 18 nt, Human
cugaaaucaauuaaaagu

SEQ ID NO: 3385686 - RNA, 16 nt, Human
cugaaaucugaagacc

SEQ ID NO: 3385687 - RNA, 21 nt, Human
cugaaaucuucccaugcauuc

SEQ ID NO: 3385688 - RNA, 19 nt, Human
cugaaaugaaacaaauaau

SEQ ID NO: 3385689 - RNA, 18 nt, Human
cugaaaugccuuacuuug

SEQ ID NO: 3385690 - RNA, 16 nt, Human
cugaaaugcugcauuu

SEQ ID NO: 3385691 - RNA, 20 nt, Human
cugaaaugcugcauuuuaau

SEQ ID NO: 3385692 - RNA, 18 nt, Human
cugaaaugucaguucuga

SEQ ID NO: 3385693 - RNA, 17 nt, Human
cugaaaugugugugaug

SEQ ID NO: 3385694 - RNA, 12 nt, Human
cugaaauuccaa

SEQ ID NO: 3385695 - RNA, 13 nt, Human
cugaaauuccaaa

SEQ ID NO: 3385696 - RNA, 18 nt, Human
cugaaauuccaaagucuc

SEQ ID NO: 3385697 - RNA, 16 nt, Human
cugaaauucuccugga

SEQ ID NO: 3385698 - RNA, 18 nt, Human
cugaaauucuccuggagg

SEQ ID NO: 3385699 - RNA, 20 nt, Human
cugaaauucuccuggagguc

SEQ ID NO: 3385700 - RNA, 14 nt, Human
cugaaauugaaaag

SEQ ID NO: 3385701 - RNA, 20 nt, Human
cugaaauugaaaaguuauuu

SEQ ID NO: 3385702 - RNA, 21 nt, Human
cugaaauugaaaaguuauuuc

SEQ ID NO: 3385703 - RNA, 14 nt, Human
cugaaauuucacca

SEQ ID NO: 3385704 - RNA, 19 nt, Human
cugaaauuuuauaugcuua

SEQ ID NO: 3385705 - RNA, 20 nt, Human
cugaaauuuuucuucuugag

SEQ ID NO: 3385706 - RNA, 13 nt, Human
cugaacaagaauu

SEQ ID NO: 3385707 - RNA, 14 nt, Human
cugaacaagaauug

SEQ ID NO: 3385708 - RNA, 16 nt, Human
cugaacaagaauugga

SEQ ID NO: 3385709 - RNA, 19 nt, Human
cugaacaauaggcuguucc

SEQ ID NO: 3385710 - RNA, 19 nt, Human
cugaacacaggcagcuuuc

SEQ ID NO: 3385711 - RNA, 14 nt, Human
cugaacacauuucu

SEQ ID NO: 3385712 - RNA, 17 nt, Human
cugaacacauuucuuuu

SEQ ID NO: 3385713 - RNA, 22 nt, Human
cugaacacauuucuuuuuaaaa

SEQ ID NO: 3385714 - RNA, 22 nt, Human
cugaacaccauagguagaaugu

SEQ ID NO: 3385715 - RNA, 19 nt, Human
cugaacaccauugaaggcu

SEQ ID NO: 3385716 - RNA, 16 nt, Human
cugaacacuuauugcu

SEQ ID NO: 3385717 - RNA, 22 nt, Human
cugaacacuuauugcuuugaaa

SEQ ID NO: 3385718 - RNA, 19 nt, Human
cugaacacuuuuguuguaa

SEQ ID NO: 3385719 - RNA, 20 nt, Human
cugaacacuuuuguuguaaa

SEQ ID NO: 3385720 - RNA, 22 nt, Human
cugaacagaugaccccugccca

SEQ ID NO: 3385721 - RNA, 24 nt, Human
cugaacagaugaccccugcccaga

SEQ ID NO: 3385722 - RNA, 20 nt, Human
cugaacaucugaguccugga

SEQ ID NO: 3385723 - RNA, 23 nt, Human
cugaacaucugaguccuggauga

SEQ ID NO: 3385724 - RNA, 15 nt, Human
cugaacauuccagag

SEQ ID NO: 3385725 - RNA, 12 nt, Human
cugaacauugga

SEQ ID NO: 3385726 - RNA, 21 nt, Human
cugaacauuuacuacaguuuu

SEQ ID NO: 3385727 - RNA, 12 nt, Human
cugaaccaugug

SEQ ID NO: 3385728 - RNA, 14 nt, Human
cugaaccccagggc

SEQ ID NO: 3385729 - RNA, 21 nt, Human
cugaaccccgucgaggggcuc

SEQ ID NO: 3385730 - RNA, 16 nt, Human
cugaaccccucccucc

SEQ ID NO: 3385731 - RNA, 15 nt, Human
cugaacccugugcug

SEQ ID NO: 3385732 - RNA, 20 nt, Human
cugaacccugugcugguguc

SEQ ID NO: 3385733 - RNA, 17 nt, Human
cugaaccugaugcugac

SEQ ID NO: 3385734 - RNA, 19 nt, Human
cugaaccugggaaagagau

SEQ ID NO: 3385735 - RNA, 14 nt, Human
cugaaccugucuuu

SEQ ID NO: 3385736 - RNA, 16 nt, Human
cugaaccuuccaucuc

SEQ ID NO: 3385737 - RNA, 18 nt, Human
cugaacguuugguucaaa

SEQ ID NO: 3385738 - RNA, 17 nt, Human
cugaacucgcuucucug

SEQ ID NO: 3385739 - RNA, 16 nt, Human
cugaacucugacaaca

SEQ ID NO: 3385740 - RNA, 17 nt, Human
cugaacucugacaacag

SEQ ID NO: 3385741 - RNA, 16 nt, Human
cugaacugggaccuuu

SEQ ID NO: 3385742 - RNA, 18 nt, Human
cugaacuugcauugugau

SEQ ID NO: 3385743 - RNA, 14 nt, Human
cugaacuuugaaga

SEQ ID NO: 3385744 - RNA, 21 nt, Human
cugaacuuugggaagccuuua

SEQ ID NO: 3385745 - RNA, 14 nt, Human
cugaagaagauggu

SEQ ID NO: 3385746 - RNA, 23 nt, Human
cugaagaagcaccaaucaugaau

SEQ ID NO: 3385747 - RNA, 16 nt, Human
cugaagaccucgagca

SEQ ID NO: 3385748 - RNA, 20 nt, Human
cugaagagcuauuauauaaa

SEQ ID NO: 3385749 - RNA, 15 nt, Human
cugaagaggaggagg

SEQ ID NO: 3385750 - RNA, 22 nt, Human
cugagccccugucuagagaggg

SEQ ID NO: 3385751 - RNA, 13 nt, Human
cugagccccuucc

SEQ ID NO: 3385752 - RNA, 14 nt, Human
cugagccccuuccu

SEQ ID NO: 3385753 - RNA, 16 nt, Human
cugagcccgggcugcc

SEQ ID NO: 3385754 - RNA, 18 nt, Human
cugagcccgggcugccug

SEQ ID NO: 3385755 - RNA, 22 nt, Human
cugagcccgggcugccugggcu

SEQ ID NO: 3385756 - RNA, 21 nt, Human
cugaggcuuuggauuugacau

SEQ ID NO: 3385757 - RNA, 22 nt, Human
cugagggaaauguuuuguaaac

SEQ ID NO: 3385758 - RNA, 16 nt, Human
cugagggaccaacugg

SEQ ID NO: 3385759 - RNA, 21 nt, Human
cugagggaccaacugggccca

SEQ ID NO: 3385760 - RNA, 13 nt, Human
cugagggaccagc

SEQ ID NO: 3385761 - RNA, 17 nt, Human
cugagggagccuggccc

SEQ ID NO: 3385762 - RNA, 20 nt, Human
cugagggagcuccaacucag

SEQ ID NO: 3385763 - RNA, 16 nt, Human
cugagggaggaccugg

SEQ ID NO: 3385764 - RNA, 17 nt, Human
cugagggaggaccuggg

SEQ ID NO: 3385765 - RNA, 15 nt, Human
cugagggaggaggcc

SEQ ID NO: 3385766 - RNA, 17 nt, Human
cugagggaggaggccac

SEQ ID NO: 3385767 - RNA, 18 nt, Human
cugagggaggaggccacc

SEQ ID NO: 3385768 - RNA, 19 nt, Human
cugagggaggaggccaccu

SEQ ID NO: 3385769 - RNA, 20 nt, Human
cugagggaggaggccaccuc

SEQ ID NO: 3385770 - RNA, 23 nt, Human
cugagggaggaggccaccucucc

SEQ ID NO: 3385771 - RNA, 13 nt, Human
cugagggcaaauc

SEQ ID NO: 3385772 - RNA, 20 nt, Human
cugagggccccucugcccag

SEQ ID NO: 3385773 - RNA, 15 nt, Human
cugagggccugcugg

SEQ ID NO: 3385774 - RNA, 16 nt, Human
cugagggcgaggggag

SEQ ID NO: 3385775 - RNA, 14 nt, Human
cugagggcuuccuu

SEQ ID NO: 3385776 - RNA, 20 nt, Human
cugagggcuuguaguucuuu

SEQ ID NO: 3385777 - RNA, 19 nt, Human
cugaggggagacagagcaa

SEQ ID NO: 3385778 - RNA, 19 nt, Human
cugaggggcaacgaagaaa

SEQ ID NO: 3385779 - RNA, 15 nt, Human
cugaggggcagccug

SEQ ID NO: 3385780 - RNA, 23 nt, Human
cugaggggcagccugccuugccc

SEQ ID NO: 3385781 - RNA, 18 nt, Human
cugaggggcaucugcccc

SEQ ID NO: 3385782 - RNA, 16 nt, Human
cugaggggggauccag

SEQ ID NO: 3385783 - RNA, 16 nt, Human
cugaggggggccgugc

SEQ ID NO: 3385784 - RNA, 21 nt, Human
cugaggggggccgugcccagg

SEQ ID NO: 3385785 - RNA, 15 nt, Human
cugaggguccccacc

SEQ ID NO: 3385786 - RNA, 19 nt, Human
cugaggguccccaccuggg

SEQ ID NO: 3385787 - RNA, 20 nt, Human
cugaggguccccaccuggga

SEQ ID NO: 3385788 - RNA, 15 nt, Human
cugaggguggagacu

SEQ ID NO: 3385789 - RNA, 20 nt, Human
cugaggguguuucuuccugc

SEQ ID NO: 3385790 - RNA, 15 nt, Human
cugaggucagggagu

SEQ ID NO: 3385791 - RNA, 22 nt, Human
cugaggucaucggcguggccca

SEQ ID NO: 3385792 - RNA, 13 nt, Human
cugagguccugag

SEQ ID NO: 3385793 - RNA, 16 nt, Human
cugagguccugagcac

SEQ ID NO: 3385794 - RNA, 19 nt, Human
cugagguccugagcacugc

SEQ ID NO: 3385795 - RNA, 20 nt, Human
cugagguccugagcacugcc

SEQ ID NO: 3385796 - RNA, 24 nt, Human
cugagguccugagcacugccagga

SEQ ID NO: 3385797 - RNA, 16 nt, Human
cugaggucucuugagg

SEQ ID NO: 3385798 - RNA, 22 nt, Human
cugaggugaugaagacagcccg

SEQ ID NO: 3385799 - RNA, 17 nt, Human
cugaggugcacugggag

SEQ ID NO: 3385800 - RNA, 15 nt, Human
cugaggugcccagga

SEQ ID NO: 3385801 - RNA, 16 nt, Human
cugaggugcccaggag

SEQ ID NO: 3385802 - RNA, 18 nt, Human
cugaggugcccaggagaa

SEQ ID NO: 3385803 - RNA, 14 nt, Human
cccuggggccugac

SEQ ID NO: 3385804 - RNA, 13 nt, Human
cccuggggccugu

SEQ ID NO: 3385805 - RNA, 23 nt, Human
cccuggggccuguacugccugcu

SEQ ID NO: 3385806 - RNA, 21 nt, Human
cccuggggcuaggcuggagcc

SEQ ID NO: 3385807 - RNA, 18 nt, Human
cccuggggcuggcuuuuc

SEQ ID NO: 3385808 - RNA, 15 nt, Human
cccuggggcuucucc

SEQ ID NO: 3385809 - RNA, 17 nt, Human
cccugggggaagcccug

SEQ ID NO: 3385810 - RNA, 18 nt, Human
cccugggggaagcccugg

SEQ ID NO: 3385811 - RNA, 23 nt, Human
cccuggguagcgggggaggguag

SEQ ID NO: 3385812 - RNA, 22 nt, Human
cccugggugggugguggggagg

SEQ ID NO: 3385813 - RNA, 23 nt, Human
cccugggugggugguggggaggg

SEQ ID NO: 3385814 - RNA, 16 nt, Human
cccuggguuagacugc

SEQ ID NO: 3385815 - RNA, 22 nt, Human
cccuggguuagacugccagcuc

SEQ ID NO: 3385816 - RNA, 18 nt, Human
cccugguccagggaagcu

SEQ ID NO: 3385817 - RNA, 21 nt, Human
cccugguccccuccuucccaa

SEQ ID NO: 3385818 - RNA, 14 nt, Human
cccuggucccuugu

SEQ ID NO: 3385819 - RNA, 17 nt, Human
cccuggucucagcagcg

SEQ ID NO: 3385820 - RNA, 20 nt, Human
cccuggucucagcagcgacc

SEQ ID NO: 3385821 - RNA, 15 nt, Human
cccuggucucugguc

SEQ ID NO: 3385822 - RNA, 21 nt, Human
cccuggugaccagcaccaucu

SEQ ID NO: 3385823 - RNA, 22 nt, Human
cccuggugagagggccgggcag

SEQ ID NO: 3385824 - RNA, 21 nt, Human
cccuggugaggaagcuccagu

SEQ ID NO: 3385825 - RNA, 16 nt, Human
cccuggugccuggcuc

SEQ ID NO: 3385826 - RNA, 14 nt, Human
cccuggugcugcca

SEQ ID NO: 3385827 - RNA, 15 nt, Human
cccuggugcugccac

SEQ ID NO: 3385828 - RNA, 17 nt, Human
cccugguggacaguccu

SEQ ID NO: 3385829 - RNA, 21 nt, Human
cccugguggacaguccuggga

SEQ ID NO: 3385830 - RNA, 23 nt, Human
cccugguggacaguccugggaga

SEQ ID NO: 3385831 - RNA, 14 nt, Human
cccugguggcagcu

SEQ ID NO: 3385832 - RNA, 16 nt, Human
cccugguggcagcuca

SEQ ID NO: 3385833 - RNA, 17 nt, Human
cccugguggcagcucac

SEQ ID NO: 3385834 - RNA, 15 nt, Human
cccugguggcagugg

SEQ ID NO: 3385835 - RNA, 22 nt, Human
cccugguggcccucuccccugc

SEQ ID NO: 3385836 - RNA, 16 nt, Human
cccuggugggccaaca

SEQ ID NO: 3385837 - RNA, 18 nt, Human
cccugguuauauucucac

SEQ ID NO: 3385838 - RNA, 22 nt, Human
cccugguuauugauguggcccu

SEQ ID NO: 3385839 - RNA, 16 nt, Human
cccugguucucaucuu

SEQ ID NO: 3385840 - RNA, 17 nt, Human
cccugguucucaucuuu

SEQ ID NO: 3385841 - RNA, 22 nt, Human
cccugguucugaugaugugccu

SEQ ID NO: 3385842 - RNA, 15 nt, Human
cccugguuucacugg

SEQ ID NO: 3385843 - RNA, 23 nt, Human
cccugguuuccugcccugggagg

SEQ ID NO: 3385844 - RNA, 22 nt, Human
cccuguaccucaucccaugaga

SEQ ID NO: 3385845 - RNA, 15 nt, Human
cccuguaggccucag

SEQ ID NO: 3385846 - RNA, 23 nt, Human
cccuguauucccaccccuggacu

SEQ ID NO: 3385847 - RNA, 15 nt, Human
cccugucaaacauua

SEQ ID NO: 3385848 - RNA, 14 nt, Human
cccugucaccaagc

SEQ ID NO: 3385849 - RNA, 19 nt, Human
cccugucaccaagcucaca

SEQ ID NO: 3385850 - RNA, 21 nt, Human
cccugucagugcagcccgugu

SEQ ID NO: 3385851 - RNA, 21 nt, Human
cccuguccaaacugccuaagc

SEQ ID NO: 3385852 - RNA, 14 nt, Human
cccugucccaugca

SEQ ID NO: 3385853 - RNA, 19 nt, Human
cccugucccaugcaggccc

SEQ ID NO: 3385854 - RNA, 13 nt, Human
cccugucccccag

SEQ ID NO: 3385855 - RNA, 15 nt, Human
cccugucccccagcu

SEQ ID NO: 3385856 - RNA, 17 nt, Human
cccugucccccagcucu

SEQ ID NO: 3385857 - RNA, 10 nt, Human
cccugucccu

SEQ ID NO: 3385858 - RNA, 12 nt, Human
cccugucccucc

SEQ ID NO: 3385859 - RNA, 13 nt, Human
cccugucccucua

SEQ ID NO: 3385860 - RNA, 14 nt, Human
cccuguccuccucg

SEQ ID NO: 3385861 - RNA, 20 nt, Human
cccuguccucucuggcuggg

SEQ ID NO: 3385862 - RNA, 23 nt, Human
cccuguccugauggucagcuccc

SEQ ID NO: 3385863 - RNA, 13 nt, Human
cccuguccugcca

SEQ ID NO: 3385864 - RNA, 13 nt, Human
cccuguccuggug

SEQ ID NO: 3385865 - RNA, 17 nt, Human
cccuguccuuagccuag

SEQ ID NO: 3385866 - RNA, 16 nt, Human
cccugucgagacacuu

SEQ ID NO: 3385867 - RNA, 20 nt, Human
cccugucgagacacuugccu

SEQ ID NO: 3385868 - RNA, 16 nt, Human
cccugucuaaugaaac

SEQ ID NO: 3385869 - RNA, 20 nt, Human
cccugucuagagagggaggc

SEQ ID NO: 3385870 - RNA, 20 nt, Human
cccugucucaaaaaaagaaa

SEQ ID NO: 3385871 - RNA, 14 nt, Human
cccugucucuacua

SEQ ID NO: 3385872 - RNA, 21 nt, Human
cccugucuguagagggcccug

SEQ ID NO: 3385873 - RNA, 16 nt, Human
cccugucuugcuguca

SEQ ID NO: 3385874 - RNA, 14 nt, Human
cccugucuuuccua

SEQ ID NO: 3385875 - RNA, 14 nt, Human
cccugugacaaaau

SEQ ID NO: 3385876 - RNA, 17 nt, Human
cccugugacauggugcc

SEQ ID NO: 3385877 - RNA, 21 nt, Human
cccugugaguacuacaguccu

SEQ ID NO: 3385878 - RNA, 18 nt, Human
cccugugauggggcccug

SEQ ID NO: 3385879 - RNA, 21 nt, Human
cccugugauggggcccugccu

SEQ ID NO: 3385880 - RNA, 21 nt, Human
cccugugcagaagggagcugg

SEQ ID NO: 3385881 - RNA, 13 nt, Human
cccugugccccca

SEQ ID NO: 3385882 - RNA, 20 nt, Human
cccugugccuaacaccagcg

SEQ ID NO: 3385883 - RNA, 22 nt, Human
cccugugccuugucacgccaga

SEQ ID NO: 3385884 - RNA, 20 nt, Human
cccugugcuccgugccucca

SEQ ID NO: 3385885 - RNA, 23 nt, Human
cccugugcugguguccugaccac

SEQ ID NO: 3385886 - RNA, 14 nt, Human
cccuguggaaggga

SEQ ID NO: 3385887 - RNA, 16 nt, Human
cccuguggagacuggg

SEQ ID NO: 3385888 - RNA, 17 nt, Human
cccuguggagcccgcac

SEQ ID NO: 3385889 - RNA, 15 nt, Human
cccuguggcccuggc

SEQ ID NO: 3385890 - RNA, 16 nt, Human
cccugugggaccccag

SEQ ID NO: 3385891 - RNA, 17 nt, Human
cccugugggaccccagg

SEQ ID NO: 3385892 - RNA, 19 nt, Human
cccugugggaccccaggcc

SEQ ID NO: 3385893 - RNA, 15 nt, Human
cccugugggccccca

SEQ ID NO: 3385894 - RNA, 18 nt, Human
cccugugggcccccaaau

SEQ ID NO: 3385895 - RNA, 16 nt, Human
cccugugucauuucaa

SEQ ID NO: 3385896 - RNA, 21 nt, Human
cccuguguccaccugugggug

SEQ ID NO: 3385897 - RNA, 15 nt, Human
cccuguguugucucu

SEQ ID NO: 3385898 - RNA, 21 nt, Human
cccuguguugucucuagagca

SEQ ID NO: 3385899 - RNA, 20 nt, Human
aaauguaccuucagaauaag

SEQ ID NO: 3385900 - RNA, 17 nt, Human
aaauguaccuucuuuca

SEQ ID NO: 3385901 - RNA, 15 nt, Human
aaauguacugagauu

SEQ ID NO: 3385902 - RNA, 16 nt, Human
aaauguagaauauuca

SEQ ID NO: 3385903 - RNA, 20 nt, Human
aaauguagaauauucagaca

SEQ ID NO: 3385904 - RNA, 19 nt, Human
aaauguagcuucagucauu

SEQ ID NO: 3385905 - RNA, 22 nt, Human
aaauguagcuucagucauuaaa

SEQ ID NO: 3385906 - RNA, 15 nt, Human
aaauguauaaauaua

SEQ ID NO: 3385907 - RNA, 17 nt, Human
aaauguauaaauauaca

SEQ ID NO: 3385908 - RNA, 19 nt, Human
aaauguauaaauauacagu

SEQ ID NO: 3385909 - RNA, 18 nt, Human
aaauguauaccuguaacu

SEQ ID NO: 3385910 - RNA, 15 nt, Human
aaauguauauacaca

SEQ ID NO: 3385911 - RNA, 18 nt, Human
aaauguauauacacauau

SEQ ID NO: 3385912 - RNA, 13 nt, Human
aaauguauauauu

SEQ ID NO: 3385913 - RNA, 16 nt, Human
aaauguauauauuuag

SEQ ID NO: 3385914 - RNA, 17 nt, Human
aaauguauauauuuagu

SEQ ID NO: 3385915 - RNA, 18 nt, Human
aaauguauauauuuagug

SEQ ID NO: 3385916 - RNA, 20 nt, Human
aaauguaucuaagaauaaua

SEQ ID NO: 3385917 - RNA, 13 nt, Human
aaauguaugcaug

SEQ ID NO: 3385918 - RNA, 20 nt, Human
aaauguaugcauguugucua

SEQ ID NO: 3385919 - RNA, 13 nt, Human
aaaugucacuuuu

SEQ ID NO: 3385920 - RNA, 15 nt, Human
aaaugucacuuuuug

SEQ ID NO: 3385921 - RNA, 15 nt, Human
aaauguccuugugau

SEQ ID NO: 3385922 - RNA, 24 nt, Human
aaaugucuaguuguaacaccauga

SEQ ID NO: 3385923 - RNA, 17 nt, Human
aaaugucucacugagca

SEQ ID NO: 3385924 - RNA, 20 nt, Human
aaaugucuguaaauauguuu

SEQ ID NO: 3385925 - RNA, 15 nt, Human
aaaugucuuaauuuu

SEQ ID NO: 3385926 - RNA, 18 nt, Human
aaaugucuuaauuuuuga

SEQ ID NO: 3385927 - RNA, 18 nt, Human
aaaugucuuauauagcag

SEQ ID NO: 3385928 - RNA, 14 nt, Human
aaaugucuuccugg

SEQ ID NO: 3385929 - RNA, 12 nt, Human
aaaugucuugcu

SEQ ID NO: 3385930 - RNA, 12 nt, Human
aaaugucuugug

SEQ ID NO: 3385931 - RNA, 14 nt, Human
aaaugucuuuaaug

SEQ ID NO: 3385932 - RNA, 19 nt, Human
aaaugucuuuaaugcaaua

SEQ ID NO: 3385933 - RNA, 21 nt, Human
aaaugucuuuccaaauuauuu

SEQ ID NO: 3385934 - RNA, 22 nt, Human
aaaugucuuuccuuuugcucuu

SEQ ID NO: 3385935 - RNA, 14 nt, Human
aaaugucuuuguaa

SEQ ID NO: 3385936 - RNA, 15 nt, Human
aaaugucuuuguaag

SEQ ID NO: 3385937 - RNA, 16 nt, Human
aaaugucuuuguaagu

SEQ ID NO: 3385938 - RNA, 21 nt, Human
aaaugucuuuguaagucagug

SEQ ID NO: 3385939 - RNA, 15 nt, Human
aaaugugaagaugca

SEQ ID NO: 3385940 - RNA, 22 nt, Human
aaaugugaauuacuaacuucua

SEQ ID NO: 3385941 - RNA, 20 nt, Human
aaaugugaauuuuuauuguu

SEQ ID NO: 3385942 - RNA, 21 nt, Human
aaaugugaauuuuuauuguug

SEQ ID NO: 3385943 - RNA, 21 nt, Human
aaaugugaugaauacuguauu

SEQ ID NO: 3385944 - RNA, 15 nt, Human
aaaugugauguucua

SEQ ID NO: 3385945 - RNA, 19 nt, Human
aaaugugauguucuaaggc

SEQ ID NO: 3385946 - RNA, 22 nt, Human
aaaugugauguucuaaggcucu

SEQ ID NO: 3385947 - RNA, 17 nt, Human
aaaugugauuuuucuga

SEQ ID NO: 3385948 - RNA, 17 nt, Human
aaaugugcaaaacagcg

SEQ ID NO: 3385949 - RNA, 11 nt, Human
aaaugugcagu

SEQ ID NO: 3385950 - RNA, 22 nt, Human
aaaugugccuauugcuagagcu

SEQ ID NO: 3385951 - RNA, 16 nt, Human
aaaugugcuuugagaa

SEQ ID NO: 3385952 - RNA, 19 nt, Human
aaaugugggauuauggguc

SEQ ID NO: 3385953 - RNA, 22 nt, Human
aaaugugguuuuccugaaauca

SEQ ID NO: 3385954 - RNA, 14 nt, Human
aaauguguguaugu

SEQ ID NO: 3385955 - RNA, 18 nt, Human
aaaugugugugaugugac

SEQ ID NO: 3385956 - RNA, 12 nt, Human
aaauguguuguu

SEQ ID NO: 3385957 - RNA, 19 nt, Human
cugcagcagcgguggccuc

SEQ ID NO: 3385958 - RNA, 13 nt, Human
cugcagcaggagu

SEQ ID NO: 3385959 - RNA, 21 nt, Human
cugcagcaggaguggugcaga

SEQ ID NO: 3385960 - RNA, 17 nt, Human
cugcagcaugaccugug

SEQ ID NO: 3385961 - RNA, 21 nt, Human
cugcagcauguugcugaggag

SEQ ID NO: 3385962 - RNA, 14 nt, Human
cugcagccagccca

SEQ ID NO: 3385963 - RNA, 15 nt, Human
cugcagccagcccag

SEQ ID NO: 3385964 - RNA, 16 nt, Human
cugcagccagcccagc

SEQ ID NO: 3385965 - RNA, 18 nt, Human
cugcagccagcccagccc

SEQ ID NO: 3385966 - RNA, 22 nt, Human
cugcagccagcccagcccagcu

SEQ ID NO: 3385967 - RNA, 22 nt, Human
cugcagccagcucacguccagg

SEQ ID NO: 3385968 - RNA, 22 nt, Human
cugcagccaggccacuggcccc

SEQ ID NO: 3385969 - RNA, 23 nt, Human
cugcagccaggccacuggccccu

SEQ ID NO: 3385970 - RNA, 12 nt, Human
cugcagcccagg

SEQ ID NO: 3385971 - RNA, 21 nt, Human
cugcagccccacccagaugcc

SEQ ID NO: 3385972 - RNA, 24 nt, Human
cugcagcccggcgccaccauccug

SEQ ID NO: 3385973 - RNA, 13 nt, Human
cugcagcccuggc

SEQ ID NO: 3385974 - RNA, 19 nt, Human
cugcagccucaaccuccug

SEQ ID NO: 3385975 - RNA, 22 nt, Human
cugcagccucaaccuccugggc

SEQ ID NO: 3385976 - RNA, 23 nt, Human
cugcagccucaaccuccugggcu

SEQ ID NO: 3385977 - RNA, 12 nt, Human
cugcagccucag

SEQ ID NO: 3385978 - RNA, 13 nt, Human
cugcagccucagg

SEQ ID NO: 3385979 - RNA, 19 nt, Human
cugcagccucaggacuggg

SEQ ID NO: 3385980 - RNA, 22 nt, Human
cugcagccucaggacugggagc

SEQ ID NO: 3385981 - RNA, 13 nt, Human
cugcagccuccuc

SEQ ID NO: 3385982 - RNA, 21 nt, Human
cugcagccucgaacuccuggg

SEQ ID NO: 3385983 - RNA, 22 nt, Human
cugcagccucgaacuccugggc

SEQ ID NO: 3385984 - RNA, 14 nt, Human
cugcagccugcagg

SEQ ID NO: 3385985 - RNA, 14 nt, Human
cugcagccuggagc

SEQ ID NO: 3385986 - RNA, 22 nt, Human
cugcagccuugaacucugggcu

SEQ ID NO: 3385987 - RNA, 20 nt, Human
cugcagccuuugccuccccg

SEQ ID NO: 3385988 - RNA, 15 nt, Human
cugcagcuaguccua

SEQ ID NO: 3385989 - RNA, 11 nt, Human
cugcagcuccc

SEQ ID NO: 3385990 - RNA, 18 nt, Human
cugcagcucccuggcuuc

SEQ ID NO: 3385991 - RNA, 19 nt, Human
cugcagcucccuggcuucu

SEQ ID NO: 3385992 - RNA, 23 nt, Human
cugcagcucccuggcuucugugg

SEQ ID NO: 3385993 - RNA, 22 nt, Human
cugcagcugccgggccugauuu

SEQ ID NO: 3385994 - RNA, 16 nt, Human
cugcagcuggacagag

SEQ ID NO: 3385995 - RNA, 17 nt, Human
cugcagcuguuuuaguu

SEQ ID NO: 3385996 - RNA, 19 nt, Human
cugcagcuuccugucaaca

SEQ ID NO: 3385997 - RNA, 22 nt, Human
cugcagcuugggagagccccug

SEQ ID NO: 3385998 - RNA, 16 nt, Human
cugcagcuuguagcca

SEQ ID NO: 3385999 - RNA, 12 nt, Human
cugcagcuuuac

SEQ ID NO: 3386000 - RNA, 12 nt, Human
cugcagcuuugu

SEQ ID NO: 3386001 - RNA, 18 nt, Human
cugcaggaaauagucacu

SEQ ID NO: 3386002 - RNA, 14 nt, Human
cugcaggaaggagc

SEQ ID NO: 3386003 - RNA, 17 nt, Human
cugcaggaccugccugu

SEQ ID NO: 3386004 - RNA, 18 nt, Human
cugcaggaccugccugua

SEQ ID NO: 3386005 - RNA, 20 nt, Human
cugcaggaucucaccaggca

SEQ ID NO: 3386006 - RNA, 20 nt, Human
cugcaggcaccuuaguggcu

SEQ ID NO: 3386007 - RNA, 12 nt, Human
cugcaggcagac

SEQ ID NO: 3386008 - RNA, 16 nt, Human
cugcaggcagccaggc

SEQ ID NO: 3386009 - RNA, 18 nt, Human
cugcaggcagccaggcca

SEQ ID NO: 3386010 - RNA, 11 nt, Human
cugcaggcagg

SEQ ID NO: 3386011 - RNA, 15 nt, Human
cugcaggcaggaaca

SEQ ID NO: 3386012 - RNA, 12 nt, Human
cugcaggcaggg

SEQ ID NO: 3386013 - RNA, 23 nt, Human
cugcaggccccgcuuguccagcg

SEQ ID NO: 3386014 - RNA, 15 nt, Human
cugcaggcccuggcc

SEQ ID NO: 3386015 - RNA, 17 nt, Human
cugcaggcccuggccuc

SEQ ID NO: 3386016 - RNA, 18 nt, Human
cugcaggcccuggccucc

SEQ ID NO: 3386017 - RNA, 21 nt, Human
cugcaggcccuggccuccccu

SEQ ID NO: 3386018 - RNA, 15 nt, Human
cugcaggcuuugcca

SEQ ID NO: 3386019 - RNA, 15 nt, Human
cugcagggacacggg

SEQ ID NO: 3386020 - RNA, 20 nt, Human
cugcagggacacgggcagcc

SEQ ID NO: 3386021 - RNA, 16 nt, Human
cugcagggccaagcac

SEQ ID NO: 3386022 - RNA, 20 nt, Human
cugcagggccauggcucagg

SEQ ID NO: 3386023 - RNA, 23 nt, Human
cugcagggccauggcucagggug

SEQ ID NO: 3386024 - RNA, 18 nt, Human
cugcagggccgccaggga

SEQ ID NO: 3386025 - RNA, 18 nt, Human
cugcagggcuuuaaaauu

SEQ ID NO: 3386026 - RNA, 12 nt, Human
cugcaggggcuc

SEQ ID NO: 3386027 - RNA, 15 nt, Human
cugcaggggcucugg

SEQ ID NO: 3386028 - RNA, 18 nt, Human
cugcaggggcucuggaga

SEQ ID NO: 3386029 - RNA, 21 nt, Human
cugcaggggcucuggagagaa

SEQ ID NO: 3386030 - RNA, 23 nt, Human
cugcagggggugugucugcucag

SEQ ID NO: 3386031 - RNA, 16 nt, Human
cugcaggguggugcug

SEQ ID NO: 3386032 - RNA, 22 nt, Human
cugcaggguggugcugggacug

SEQ ID NO: 3386033 - RNA, 23 nt, Human
cugcaggguggugcugggacuga

SEQ ID NO: 3386034 - RNA, 14 nt, Human
cugcaggucccuaa

SEQ ID NO: 3386035 - RNA, 15 nt, Human
cugcaggucccuaau

SEQ ID NO: 3386036 - RNA, 23 nt, Human
cugcaggucccuaauaaagcugu

SEQ ID NO: 3386037 - RNA, 20 nt, Human
cugcagguucuucuuccuga

SEQ ID NO: 3386038 - RNA, 17 nt, Human
cugcagguugaagccau

SEQ ID NO: 3386039 - RNA, 19 nt, Human
cugcagguugaagccaugu

SEQ ID NO: 3386040 - RNA, 21 nt, Human
cugcagguugaagccaugucu

SEQ ID NO: 3386041 - RNA, 17 nt, Human
cugcagguuggacccca

SEQ ID NO: 3386042 - RNA, 21 nt, Human
cugcagguuggaccccagaga

SEQ ID NO: 3386043 - RNA, 16 nt, Human
cugauaaagcacagcu

SEQ ID NO: 3386044 - RNA, 19 nt, Human
cugauaacuagauggugcu

SEQ ID NO: 3386045 - RNA, 20 nt, Human
cugauaacuagauggugcug

SEQ ID NO: 3386046 - RNA, 24 nt, Human
cugauaacuagauggugcugagaa

SEQ ID NO: 3386047 - RNA, 14 nt, Human
cugauaauaauuga

SEQ ID NO: 3386048 - RNA, 18 nt, Human
cugauacauaacuaaauu

SEQ ID NO: 3386049 - RNA, 15 nt, Human
cugauacccagagca

SEQ ID NO: 3386050 - RNA, 22 nt, Human
cugauagcauaugacaaauguu

SEQ ID NO: 3386051 - RNA, 17 nt, Human
cugauagccccucuccc

SEQ ID NO: 3386052 - RNA, 21 nt, Human
cugauauauguguuuuucaca

SEQ ID NO: 3386053 - RNA, 18 nt, Human
cugauaugauuuaaaaca

SEQ ID NO: 3386054 - RNA, 19 nt, Human
cugauaugauuuaaaacau

SEQ ID NO: 3386055 - RNA, 23 nt, Human
cugauauuaauuuaucagauugc

SEQ ID NO: 3386056 - RNA, 17 nt, Human
cugauauucagaauuau

SEQ ID NO: 3386057 - RNA, 20 nt, Human
cugauauucagaauuaugau

SEQ ID NO: 3386058 - RNA, 23 nt, Human
cugauauuuuaccucuuauugca

SEQ ID NO: 3386059 - RNA, 17 nt, Human
cugaucaaugacagagc

SEQ ID NO: 3386060 - RNA, 15 nt, Human
cugaucaccugcccu

SEQ ID NO: 3386061 - RNA, 16 nt, Human
cugaucagaacaaaug

SEQ ID NO: 3386062 - RNA, 17 nt, Human
cugaucagaccacggcu

SEQ ID NO: 3386063 - RNA, 19 nt, Human
cugaucaucgccagaggug

SEQ ID NO: 3386064 - RNA, 17 nt, Human
cugaucaugcauuguug

SEQ ID NO: 3386065 - RNA, 13 nt, Human
cugauccagagca

SEQ ID NO: 3386066 - RNA, 18 nt, Human
cugauccagccucucccc

SEQ ID NO: 3386067 - RNA, 12 nt, Human
cugaucccacuc

SEQ ID NO: 3386068 - RNA, 20 nt, Human
cugaucccagagagcccgag

SEQ ID NO: 3386069 - RNA, 21 nt, Human
cugaucccagagagcccgagg

SEQ ID NO: 3386070 - RNA, 21 nt, Human
cugauccuaacugaagagaca

SEQ ID NO: 3386071 - RNA, 17 nt, Human
cugauccuggaggccca

SEQ ID NO: 3386072 - RNA, 15 nt, Human
cugaucgccuucccc

SEQ ID NO: 3386073 - RNA, 19 nt, Human
cugaucgugcuaaauuuuc

SEQ ID NO: 3386074 - RNA, 13 nt, Human
cugaucucaggga

SEQ ID NO: 3386075 - RNA, 22 nt, Human
cugaucucagggaagcccagcu

SEQ ID NO: 3386076 - RNA, 20 nt, Human
cugaucuccauggcuuccuc

SEQ ID NO: 3386077 - RNA, 22 nt, Human
cugaucuccauggcuuccuccu

SEQ ID NO: 3386078 - RNA, 13 nt, Human
cugaucucuuccu

SEQ ID NO: 3386079 - RNA, 21 nt, Human
cugaucucuuccuguuuugua

SEQ ID NO: 3386080 - RNA, 20 nt, Human
cugaucugaugcaagcaaga

SEQ ID NO: 3386081 - RNA, 19 nt, Human
cugaucugcggaucucagc

SEQ ID NO: 3386082 - RNA, 13 nt, Human
cugaucugguuug

SEQ ID NO: 3386083 - RNA, 18 nt, Human
cugaucugugcuuuccag

SEQ ID NO: 3386084 - RNA, 23 nt, Human
cugaucugugcuuuccagcucac

SEQ ID NO: 3386085 - RNA, 18 nt, Human
cugaucuuaagaggcuga

SEQ ID NO: 3386086 - RNA, 14 nt, Human
cugaugaaaauaaa

SEQ ID NO: 3386087 - RNA, 16 nt, Human
cugaugaaaauaaaga

SEQ ID NO: 3386088 - RNA, 17 nt, Human
cugaugaaaauaaagaa

SEQ ID NO: 3386089 - RNA, 14 nt, Human
cugaugaaucacug

SEQ ID NO: 3386090 - RNA, 18 nt, Human
cugaugaaucacuguuuu

SEQ ID NO: 3386091 - RNA, 16 nt, Human
cugaugacaauaaagc

SEQ ID NO: 3386092 - RNA, 15 nt, Human
cugaugacagagcga

SEQ ID NO: 3386093 - RNA, 16 nt, Human
cugaugacagagcgag

SEQ ID NO: 3386094 - RNA, 14 nt, Human
cugaugacccaggc

SEQ ID NO: 3386095 - RNA, 21 nt, Human
cugaugacccccccagcuuca

SEQ ID NO: 3386096 - RNA, 19 nt, Human
cugaugaccuaaccuaagc

SEQ ID NO: 3386097 - RNA, 14 nt, Human
cugaugacucaaga

SEQ ID NO: 3386098 - RNA, 17 nt, Human
cugaugagaauacugag

SEQ ID NO: 3386099 - RNA, 23 nt, Human
cugaugagaauuuauaaauuauu

SEQ ID NO: 3386100 - RNA, 17 nt, Human
cugaugagauuuuuaaa

SEQ ID NO: 3386101 - RNA, 21 nt, Human
cugaugcaucagaaagggagg

SEQ ID NO: 3386102 - RNA, 23 nt, Human
cugaugcaucagaaagggagggc

SEQ ID NO: 3386103 - RNA, 19 nt, Human
cugaugccaaguuguuuga

SEQ ID NO: 3386104 - RNA, 18 nt, Human
cugaugccaauacuaguc

SEQ ID NO: 3386105 - RNA, 19 nt, Human
cugaugcucccuccccugc

SEQ ID NO: 3386106 - RNA, 21 nt, Human
cugaugcucccuccccugccc

SEQ ID NO: 3386107 - RNA, 22 nt, Human
cugaugcucccuccccugcccu

SEQ ID NO: 3386108 - RNA, 23 nt, Human
cugaugcucccuccccugcccug

SEQ ID NO: 3386109 - RNA, 16 nt, Human
cugaugcugagauucu

SEQ ID NO: 3386110 - RNA, 16 nt, Human
cugaugcugggcuggg

SEQ ID NO: 3386111 - RNA, 15 nt, Human
cccuucaucuccagg

SEQ ID NO: 3386112 - RNA, 21 nt, Human
cccuucauugauuuccugugu

SEQ ID NO: 3386113 - RNA, 17 nt, Human
cccuuccaccugcucug

SEQ ID NO: 3386114 - RNA, 20 nt, Human
cccuuccagaucacugccac

SEQ ID NO: 3386115 - RNA, 16 nt, Human
cccuucccacuggagg

SEQ ID NO: 3386116 - RNA, 21 nt, Human
cccuucccaugacccaggcug

SEQ ID NO: 3386117 - RNA, 11 nt, Human
cccuuccccau

SEQ ID NO: 3386118 - RNA, 15 nt, Human
cccuuccccauggga

SEQ ID NO: 3386119 - RNA, 16 nt, Human
cccuucccccagccca

SEQ ID NO: 3386120 - RNA, 21 nt, Human
cccuucccccagcccauccau

SEQ ID NO: 3386121 - RNA, 21 nt, Human
cccuuccccuacccccuccuc

SEQ ID NO: 3386122 - RNA, 13 nt, Human
cccuuccccuccu

SEQ ID NO: 3386123 - RNA, 12 nt, Human
cccuucccuccu

SEQ ID NO: 3386124 - RNA, 14 nt, Human
cccuucccuguccc

SEQ ID NO: 3386125 - RNA, 16 nt, Human
cccuucccugucccuc

SEQ ID NO: 3386126 - RNA, 14 nt, Human
cccuucccuuccac

SEQ ID NO: 3386127 - RNA, 17 nt, Human
cccuucccuuccacugc

SEQ ID NO: 3386128 - RNA, 14 nt, Human
cccuuccgacccuc

SEQ ID NO: 3386129 - RNA, 17 nt, Human
cccuuccgacccucugg

SEQ ID NO: 3386130 - RNA, 21 nt, Human
cccuuccgacccucugggaac

SEQ ID NO: 3386131 - RNA, 23 nt, Human
cccuuccgcaguguggccaggcu

SEQ ID NO: 3386132 - RNA, 15 nt, Human
cccuuccgccacugg

SEQ ID NO: 3386133 - RNA, 13 nt, Human
cccuuccuaauuc

SEQ ID NO: 3386134 - RNA, 20 nt, Human
cccuuccuacagauagucaa

SEQ ID NO: 3386135 - RNA, 15 nt, Human
cccuuccuccauccu

SEQ ID NO: 3386136 - RNA, 19 nt, Human
cccuuccuccuccaccacc

SEQ ID NO: 3386137 - RNA, 10 nt, Human
cccuuccucu

SEQ ID NO: 3386138 - RNA, 17 nt, Human
cccuuccucuccacugc

SEQ ID NO: 3386139 - RNA, 14 nt, Human
cccuuccucugcuc

SEQ ID NO: 3386140 - RNA, 15 nt, Human
cccuuccucuuucca

SEQ ID NO: 3386141 - RNA, 14 nt, Human
cccuuccuggacag

SEQ ID NO: 3386142 - RNA, 19 nt, Human
cccuuccuggacagcugug

SEQ ID NO: 3386143 - RNA, 20 nt, Human
cccuuccuggacagcugugc

SEQ ID NO: 3386144 - RNA, 22 nt, Human
cccuuccugggcacacgcugcu

SEQ ID NO: 3386145 - RNA, 14 nt, Human
cccuucuacacucu

SEQ ID NO: 3386146 - RNA, 15 nt, Human
cccuucuacacucuc

SEQ ID NO: 3386147 - RNA, 18 nt, Human
cccuucuacacucuccug

SEQ ID NO: 3386148 - RNA, 16 nt, Human
cccuucuaccuuccug

SEQ ID NO: 3386149 - RNA, 16 nt, Human
cccuucuacugcuucu

SEQ ID NO: 3386150 - RNA, 18 nt, Human
cccuucuauacccaccca

SEQ ID NO: 3386151 - RNA, 16 nt, Human
cccuucucagaaucua

SEQ ID NO: 3386152 - RNA, 23 nt, Human
cccuucucauuccaacagugagu

SEQ ID NO: 3386153 - RNA, 18 nt, Human
cccuucuccaucucucug

SEQ ID NO: 3386154 - RNA, 21 nt, Human
cccuucuccaucucucuggcc

SEQ ID NO: 3386155 - RNA, 23 nt, Human
cccuucuccaucucucuggcccu

SEQ ID NO: 3386156 - RNA, 21 nt, Human
cccuucuccauggcccugcca

SEQ ID NO: 3386157 - RNA, 18 nt, Human
cccuucuccccugcacug

SEQ ID NO: 3386158 - RNA, 18 nt, Human
cccuucuccucuuguaaa

SEQ ID NO: 3386159 - RNA, 20 nt, Human
cccuucuccucuuguaaaua

SEQ ID NO: 3386160 - RNA, 15 nt, Human
cccuucucucaucuc

SEQ ID NO: 3386161 - RNA, 19 nt, Human
cccuucucuccagccccug

SEQ ID NO: 3386162 - RNA, 21 nt, Human
cccuucucuccagccccugga

SEQ ID NO: 3386163 - RNA, 16 nt, Human
cccuucucugcuccac

SEQ ID NO: 3386164 - RNA, 17 nt, Human
cccuucucugcuccacc

SEQ ID NO: 3386165 - RNA, 23 nt, Human
cccuucucuguagggaacucugg

SEQ ID NO: 3386166 - RNA, 13 nt, Human
cccuucucuguga

SEQ ID NO: 3386167 - RNA, 15 nt, Human
cccuucucuuccagg

SEQ ID NO: 3386168 - RNA, 19 nt, Human
cccuucucuuccaggcagc

SEQ ID NO: 3386169 - RNA, 16 nt, Human
cccuucugucccucac

SEQ ID NO: 3386170 - RNA, 15 nt, Human
cccuucugugcccag

SEQ ID NO: 3386171 - RNA, 16 nt, Human
cccuucugugcccagc

SEQ ID NO: 3386172 - RNA, 12 nt, Human
cccuucuuucca

SEQ ID NO: 3386173 - RNA, 13 nt, Human
cccuucuuuccuc

SEQ ID NO: 3386174 - RNA, 22 nt, Human
cccuugaaagucaugaacacau

SEQ ID NO: 3386175 - RNA, 12 nt, Human
cccuugaacucu

SEQ ID NO: 3386176 - RNA, 21 nt, Human
cccuugacaacuggcaggcag

SEQ ID NO: 3386177 - RNA, 18 nt, Human
cccuugacaucuggaaac

SEQ ID NO: 3386178 - RNA, 19 nt, Human
cccuugagaccucagccau

SEQ ID NO: 3386179 - RNA, 20 nt, Human
cccuugagaccucagccaug

SEQ ID NO: 3386180 - RNA, 13 nt, Human
cccuugagcccuc

SEQ ID NO: 3386181 - RNA, 18 nt, Human
cccuugaggucucagccc

SEQ ID NO: 3386182 - RNA, 15 nt, Human
cccuugaugaagaag

SEQ ID NO: 3386183 - RNA, 21 nt, Human
cccuugauuuaaacacacaga

SEQ ID NO: 3386184 - RNA, 12 nt, Human
cccuugcagccg

SEQ ID NO: 3386185 - RNA, 19 nt, Human
cccuugcaguucagcacca

SEQ ID NO: 3386186 - RNA, 13 nt, Human
cccuugccacccc

SEQ ID NO: 3386187 - RNA, 23 nt, Human
aaauguuguucauuauuggaggg

SEQ ID NO: 3386188 - RNA, 17 nt, Human
aaauguuuaaacauuuu

SEQ ID NO: 3386189 - RNA, 11 nt, Human
aaauguuuaau

SEQ ID NO: 3386190 - RNA, 14 nt, Human
aaauguuuaaucau

SEQ ID NO: 3386191 - RNA, 15 nt, Human
aaauguuuaaucaua

SEQ ID NO: 3386192 - RNA, 20 nt, Human
aaauguuuggcauguaaaug

SEQ ID NO: 3386193 - RNA, 16 nt, Human
aaauguuuuaaggcuu

SEQ ID NO: 3386194 - RNA, 18 nt, Human
aaauguuuuagcaauuua

SEQ ID NO: 3386195 - RNA, 22 nt, Human
aaauguuuugcucaauagauug

SEQ ID NO: 3386196 - RNA, 13 nt, Human
aaauguuuuguaa

SEQ ID NO: 3386197 - RNA, 20 nt, Human
aaauguuuuguaaacuuuga

SEQ ID NO: 3386198 - RNA, 21 nt, Human
aaauguuuuucugccagggag

SEQ ID NO: 3386199 - RNA, 21 nt, Human
aaauguuuuuggucuuuuaua

SEQ ID NO: 3386200 - RNA, 22 nt, Human
aaauguuuuuuuuuaaagacuu

SEQ ID NO: 3386201 - RNA, 12 nt, Human
aaauuaaaaaaa

SEQ ID NO: 3386202 - RNA, 19 nt, Human
aaauuaaaaaaaaaaaacu

SEQ ID NO: 3386203 - RNA, 21 nt, Human
aaauuaaaaaaaaaaaacuuu

SEQ ID NO: 3386204 - RNA, 15 nt, Human
aaauuaaaaaaaaau

SEQ ID NO: 3386205 - RNA, 14 nt, Human
aaauuaaaaaagau

SEQ ID NO: 3386206 - RNA, 20 nt, Human
aaauuaaaaaagauaaacac

SEQ ID NO: 3386207 - RNA, 13 nt, Human
aaauuaaaaagau

SEQ ID NO: 3386208 - RNA, 18 nt, Human
aaauuaaacauaaaacaa

SEQ ID NO: 3386209 - RNA, 13 nt, Human
aaauuaaagaaaa

SEQ ID NO: 3386210 - RNA, 23 nt, Human
aaauuaaagccuuuaguaucagu

SEQ ID NO: 3386211 - RNA, 19 nt, Human
aaauuaaauauauguaugu

SEQ ID NO: 3386212 - RNA, 20 nt, Human
aaauuaaauauauguaugua

SEQ ID NO: 3386213 - RNA, 14 nt, Human
aaauuaaaugaauu

SEQ ID NO: 3386214 - RNA, 13 nt, Human
aaauuaacacugc

SEQ ID NO: 3386215 - RNA, 18 nt, Human
aaauuaacaguccuaacu

SEQ ID NO: 3386216 - RNA, 20 nt, Human
aaauuaacuggguaaugaaa

SEQ ID NO: 3386217 - RNA, 17 nt, Human
aaauuaacuugaguuuu

SEQ ID NO: 3386218 - RNA, 15 nt, Human
aaauuaagaaggcaa

SEQ ID NO: 3386219 - RNA, 16 nt, Human
aaauuaagcaaauguu

SEQ ID NO: 3386220 - RNA, 21 nt, Human
aaauuaagguguuugaaaaua

SEQ ID NO: 3386221 - RNA, 13 nt, Human
aaauuaauaaucu

SEQ ID NO: 3386222 - RNA, 11 nt, Human
aaauuaauauc

SEQ ID NO: 3386223 - RNA, 17 nt, Human
aaauuaauaucuuucug

SEQ ID NO: 3386224 - RNA, 16 nt, Human
aaauuaaucauaguca

SEQ ID NO: 3386225 - RNA, 19 nt, Human
aaauuaauuggcagcagau

SEQ ID NO: 3386226 - RNA, 16 nt, Human
aaauuaauugugugaa

SEQ ID NO: 3386227 - RNA, 12 nt, Human
aaauuacaacua

SEQ ID NO: 3386228 - RNA, 14 nt, Human
aaauuacaauuuua

SEQ ID NO: 3386229 - RNA, 22 nt, Human
aaauuacacccaaagagguauu

SEQ ID NO: 3386230 - RNA, 13 nt, Human
aaauuacauuucg

SEQ ID NO: 3386231 - RNA, 12 nt, Human
aaauuacauuug

SEQ ID NO: 3386232 - RNA, 16 nt, Human
aaauuacauuuguaau

SEQ ID NO: 3386233 - RNA, 20 nt, Human
aaauuacauuuguaauuuaa

SEQ ID NO: 3386234 - RNA, 23 nt, Human
aaauuacauuuguaauuuaaggu

SEQ ID NO: 3386235 - RNA, 15 nt, Human
aaauuacuacaaaau

SEQ ID NO: 3386236 - RNA, 20 nt, Human
aaauuacucaggaagaacac

SEQ ID NO: 3386237 - RNA, 13 nt, Human
aaauuacuguuua

SEQ ID NO: 3386238 - RNA, 23 nt, Human
aaauuacuguuuauuaaaguaca

SEQ ID NO: 3386239 - RNA, 12 nt, Human
aaauuagaaaaa

SEQ ID NO: 3386240 - RNA, 15 nt, Human
aaauuagaaaauauu

SEQ ID NO: 3386241 - RNA, 23 nt, Human
aaauuagaaaccuuaauaugugg

SEQ ID NO: 3386242 - RNA, 20 nt, Human
aaauuagaaagcaacuuauc

SEQ ID NO: 3386243 - RNA, 19 nt, Human
aaauuagauccuaagaugu

SEQ ID NO: 3386244 - RNA, 19 nt, Human
aaauuagccuaagauauac

SEQ ID NO: 3386245 - RNA, 20 nt, Human
aaauuagccuaagauauacu

SEQ ID NO: 3386246 - RNA, 19 nt, Human
aaauuagcugugugaaaua

SEQ ID NO: 3386247 - RNA, 22 nt, Human
aaauuaggaggcucaacaauaa

SEQ ID NO: 3386248 - RNA, 23 nt, Human
aaauuaggaggcucaacaauaaa

SEQ ID NO: 3386249 - RNA, 14 nt, Human
aaauuagggcaauu

SEQ ID NO: 3386250 - RNA, 18 nt, Human
aaauuagggcucuaauuu

SEQ ID NO: 3386251 - RNA, 23 nt, Human
aaauuaggguugguuccuuucca

SEQ ID NO: 3386252 - RNA, 12 nt, Human
aaauuauaagga

SEQ ID NO: 3386253 - RNA, 18 nt, Human
aaauuauaaggacugcau

SEQ ID NO: 3386254 - RNA, 15 nt, Human
aaauuauaauguauu

SEQ ID NO: 3386255 - RNA, 17 nt, Human
aaauuauaauguauuca

SEQ ID NO: 3386256 - RNA, 19 nt, Human
aaauuauaauguauucaua

SEQ ID NO: 3386257 - RNA, 18 nt, Human
aaauuauaccuguugcuu

SEQ ID NO: 3386258 - RNA, 13 nt, Human
aaauuauagaagu

SEQ ID NO: 3386259 - RNA, 20 nt, Human
aaauuauagaugggaaugaa

SEQ ID NO: 3386260 - RNA, 18 nt, Human
aaauuauagcucuaaugu

SEQ ID NO: 3386261 - RNA, 19 nt, Human
aaauuaucaagcuaauaaa

SEQ ID NO: 3386262 - RNA, 14 nt, Human
aaauuaucuauuug

SEQ ID NO: 3386263 - RNA, 20 nt, Human
aaauuaucuauuuguauaua

SEQ ID NO: 3386264 - RNA, 13 nt, Human
aaauuaugacaau

SEQ ID NO: 3386265 - RNA, 14 nt, Human
aaauuauggaaaca

SEQ ID NO: 3386266 - RNA, 13 nt, Human
aaauuauguaaug

SEQ ID NO: 3386267 - RNA, 19 nt, Human
aaauuauguauguuuacau

SEQ ID NO: 3386268 - RNA, 17 nt, Human
aaauuaugugacauuuu

SEQ ID NO: 3386269 - RNA, 20 nt, Human
aaauuaugugacauuuuaca

SEQ ID NO: 3386270 - RNA, 19 nt, Human
aaauuauguuuuuauuaag

SEQ ID NO: 3386271 - RNA, 14 nt, Human
aaauuauuaaagga

SEQ ID NO: 3386272 - RNA, 15 nt, Human
aaauuauuaaaggaa

SEQ ID NO: 3386273 - RNA, 16 nt, Human
aaauuauuaugacacc

SEQ ID NO: 3386274 - RNA, 16 nt, Human
aaauuauucaguuaag

SEQ ID NO: 3386275 - RNA, 20 nt, Human
aaauuauucaguuaagaaaa

SEQ ID NO: 3386276 - RNA, 20 nt, Human
aaauuauucuauaauuucca

SEQ ID NO: 3386277 - RNA, 12 nt, Human
aaauuauuguuu

SEQ ID NO: 3386278 - RNA, 13 nt, Human
aaauuauuuaaac

SEQ ID NO: 3386279 - RNA, 13 nt, Human
aaauuauuucuua

SEQ ID NO: 3386280 - RNA, 20 nt, Human
aaauuauuucuuaauuauua

SEQ ID NO: 3386281 - RNA, 22 nt, Human
aaauuauuucuuaauuauuaua

SEQ ID NO: 3386282 - RNA, 13 nt, Human
aaauuauuugaaa

SEQ ID NO: 3386283 - RNA, 21 nt, Human
aaauuauuuguaagauauuug

SEQ ID NO: 3386284 - RNA, 13 nt, Human
aaauuauuugugu

SEQ ID NO: 3386285 - RNA, 23 nt, Human
aaauuauuuguguaauagaaaac

SEQ ID NO: 3386286 - RNA, 15 nt, Human
aaauuauuuuaaauu

SEQ ID NO: 3386287 - RNA, 20 nt, Human
aaauuauuuuguucauacau

SEQ ID NO: 3386288 - RNA, 14 nt, Human
aaauucaaaaagug

SEQ ID NO: 3386289 - RNA, 21 nt, Human
aaauucaaagcauggacauuu

SEQ ID NO: 3386290 - RNA, 16 nt, Human
aaauucaacaaacauu

SEQ ID NO: 3386291 - RNA, 15 nt, Human
aaauucaacuuugua

SEQ ID NO: 3386292 - RNA, 14 nt, Human
aaauucaauaguaa

SEQ ID NO: 3386293 - RNA, 17 nt, Human
aaauucaauaguaauau

SEQ ID NO: 3386294 - RNA, 20 nt, Human
aaauucaauuguaaauugaa

SEQ ID NO: 3386295 - RNA, 16 nt, Human
aaauucacaagcugcc

SEQ ID NO: 3386296 - RNA, 18 nt, Human
aaauucacaaguuguguu

SEQ ID NO: 3386297 - RNA, 16 nt, Human
aaauucacuauuggcu

SEQ ID NO: 3386298 - RNA, 18 nt, Human
aaauucacuauuggcugg

SEQ ID NO: 3386299 - RNA, 21 nt, Human
aaauucauggcaugcuuaaau

SEQ ID NO: 3386300 - RNA, 16 nt, Human
aaauucauuucacauu

SEQ ID NO: 3386301 - RNA, 12 nt, Human
aaauuccaaagu

SEQ ID NO: 3386302 - RNA, 21 nt, Human
aaauuccaaagucucuaauuc

SEQ ID NO: 3386303 - RNA, 17 nt, Human
aaauuccaagugauuga

SEQ ID NO: 3386304 - RNA, 21 nt, Human
aaauuccagaaaggauauuua

SEQ ID NO: 3386305 - RNA, 13 nt, Human
aaauuccagaaug

SEQ ID NO: 3386306 - RNA, 19 nt, Human
aaauucccaaccugcucau

SEQ ID NO: 3386307 - RNA, 17 nt, Human
aaauucccguuuuguca

SEQ ID NO: 3386308 - RNA, 14 nt, Human
aaauucccuaaagc

SEQ ID NO: 3386309 - RNA, 21 nt, Human
cugcccggugggggggcagag

SEQ ID NO: 3386310 - RNA, 18 nt, Human
cugcccguaaacacgccu

SEQ ID NO: 3386311 - RNA, 21 nt, Human
cugcccgucucucucccaugg

SEQ ID NO: 3386312 - RNA, 17 nt, Human
cugcccgucuucagccu

SEQ ID NO: 3386313 - RNA, 14 nt, Human
cugcccguguacau

SEQ ID NO: 3386314 - RNA, 20 nt, Human
cugcccuaaugcgcaggcug

SEQ ID NO: 3386315 - RNA, 21 nt, Human
cugcccuaaugcgcaggcugg

SEQ ID NO: 3386316 - RNA, 17 nt, Human
cugcccuaccugcccca

SEQ ID NO: 3386317 - RNA, 19 nt, Human
cugcccuagagcacacugu

SEQ ID NO: 3386318 - RNA, 21 nt, Human
cugcccuagagcacacuguag

SEQ ID NO: 3386319 - RNA, 15 nt, Human
cugcccuagcuccac

SEQ ID NO: 3386320 - RNA, 22 nt, Human
cugcccuagcuccacacccucu

SEQ ID NO: 3386321 - RNA, 23 nt, Human
cugcccuaguuuucuuuccuccu

SEQ ID NO: 3386322 - RNA, 12 nt, Human
cugcccucaggg

SEQ ID NO: 3386323 - RNA, 19 nt, Human
cugcccucauggccccucu

SEQ ID NO: 3386324 - RNA, 12 nt, Human
cugcccuccaag

SEQ ID NO: 3386325 - RNA, 21 nt, Human
cugcccuccccagagcacugg

SEQ ID NO: 3386326 - RNA, 20 nt, Human
cugcccuccccucucugcac

SEQ ID NO: 3386327 - RNA, 17 nt, Human
cugcccucccuccuucc

SEQ ID NO: 3386328 - RNA, 16 nt, Human
cugcccucccuggagc

SEQ ID NO: 3386329 - RNA, 23 nt, Human
cugcccuccugugcucagcccug

SEQ ID NO: 3386330 - RNA, 18 nt, Human
cugcccuccuuguccacc

SEQ ID NO: 3386331 - RNA, 20 nt, Human
cugcccuccuuguccaccca

SEQ ID NO: 3386332 - RNA, 16 nt, Human
cugccucucuuguaau

SEQ ID NO: 3386333 - RNA, 15 nt, Human
cugccucugacacac

SEQ ID NO: 3386334 - RNA, 17 nt, Human
cugccucugacacacag

SEQ ID NO: 3386335 - RNA, 22 nt, Human
cugccucugacacacagcucug

SEQ ID NO: 3386336 - RNA, 15 nt, Human
cugccucugagggaa

SEQ ID NO: 3386337 - RNA, 13 nt, Human
cugccucugccac

SEQ ID NO: 3386338 - RNA, 16 nt, Human
cugccucugccacacu

SEQ ID NO: 3386339 - RNA, 21 nt, Human
cugccucugccacacucugac

SEQ ID NO: 3386340 - RNA, 12 nt, Human
cugccucugccu

SEQ ID NO: 3386341 - RNA, 14 nt, Human
cugccucugccuua

SEQ ID NO: 3386342 - RNA, 14 nt, Human
cugccucuucucua

SEQ ID NO: 3386343 - RNA, 15 nt, Human
cugccucuucucuac

SEQ ID NO: 3386344 - RNA, 16 nt, Human
cugccucuucugggag

SEQ ID NO: 3386345 - RNA, 18 nt, Human
cugccucuuucccuagga

SEQ ID NO: 3386346 - RNA, 19 nt, Human
cugccugaagucacacagu

SEQ ID NO: 3386347 - RNA, 13 nt, Human
cugccugagcacc

SEQ ID NO: 3386348 - RNA, 20 nt, Human
cugccugagcaccucccagc

SEQ ID NO: 3386349 - RNA, 23 nt, Human
cugccugagggccccucugccca

SEQ ID NO: 3386350 - RNA, 19 nt, Human
cugccugagucgugaccug

SEQ ID NO: 3386351 - RNA, 16 nt, Human
cugccugauggaccug

SEQ ID NO: 3386352 - RNA, 15 nt, Human
cugccugcaccccug

SEQ ID NO: 3386353 - RNA, 21 nt, Human
cugccugcagaggucugugcu

SEQ ID NO: 3386354 - RNA, 23 nt, Human
cugccugcagaggucugugcuga

SEQ ID NO: 3386355 - RNA, 17 nt, Human
cugccugcauaggaguu

SEQ ID NO: 3386356 - RNA, 13 nt, Human
cugccugcccaca

SEQ ID NO: 3386357 - RNA, 13 nt, Human
cugccugcccacc

SEQ ID NO: 3386358 - RNA, 14 nt, Human
cugccugcccaccc

SEQ ID NO: 3386359 - RNA, 20 nt, Human
cugccugcccaggccccugc

SEQ ID NO: 3386360 - RNA, 21 nt, Human
cugccugcccaggccccugcc

SEQ ID NO: 3386361 - RNA, 22 nt, Human
cugccugcccaggccccugcca

SEQ ID NO: 3386362 - RNA, 14 nt, Human
cugccugccccgcc

SEQ ID NO: 3386363 - RNA, 17 nt, Human
cugccugcccgcacagc

SEQ ID NO: 3386364 - RNA, 15 nt, Human
cugccugcccuggug

SEQ ID NO: 3386365 - RNA, 23 nt, Human
cugccugcccuuuguccuccugc

SEQ ID NO: 3386366 - RNA, 23 nt, Human
cugccugccgguaaacacgccug

SEQ ID NO: 3386367 - RNA, 12 nt, Human
cugccugccugu

SEQ ID NO: 3386368 - RNA, 17 nt, Human
cugccugccuuaaguga

SEQ ID NO: 3386369 - RNA, 22 nt, Human
cugccugccuuaagugaggaaa

SEQ ID NO: 3386370 - RNA, 16 nt, Human
cugccugccuuggccu

SEQ ID NO: 3386371 - RNA, 15 nt, Human
cugccugcgucuucc

SEQ ID NO: 3386372 - RNA, 18 nt, Human
cugccugcucccauccug

SEQ ID NO: 3386373 - RNA, 23 nt, Human
cugccugcuuuucacugcugcaa

SEQ ID NO: 3386374 - RNA, 23 nt, Human
cugccuggacuuggccccugcca

SEQ ID NO: 3386375 - RNA, 11 nt, Human
cugccuggagc

SEQ ID NO: 3386376 - RNA, 15 nt, Human
cugccuggagcccca

SEQ ID NO: 3386377 - RNA, 14 nt, Human
cugccuggccacug

SEQ ID NO: 3386378 - RNA, 16 nt, Human
cugccuggccacugcu

SEQ ID NO: 3386379 - RNA, 21 nt, Human
cugccuggccacugcucccua

SEQ ID NO: 3386380 - RNA, 12 nt, Human
cugccuggccag

SEQ ID NO: 3386381 - RNA, 13 nt, Human
cugccuggccagg

SEQ ID NO: 3386382 - RNA, 15 nt, Human
cugccuggccaggca

SEQ ID NO: 3386383 - RNA, 20 nt, Human
cugccuggcccccagcugug

SEQ ID NO: 3386384 - RNA, 18 nt, Human
cugccuggcccccugucc

SEQ ID NO: 3386385 - RNA, 13 nt, Human
cugccuggccccu

SEQ ID NO: 3386386 - RNA, 12 nt, Human
cugccugggcug

SEQ ID NO: 3386387 - RNA, 20 nt, Human
cugccugggcuguuggcacu

SEQ ID NO: 3386388 - RNA, 19 nt, Human
cugccugguccucacacuc

SEQ ID NO: 3386389 - RNA, 22 nt, Human
cugccuggucuccugcccccac

SEQ ID NO: 3386390 - RNA, 19 nt, Human
cugccuguaacuugagagu

SEQ ID NO: 3386391 - RNA, 17 nt, Human
cugccuguaguuaggaa

SEQ ID NO: 3386392 - RNA, 13 nt, Human
cugccuguauacu

SEQ ID NO: 3386393 - RNA, 12 nt, Human
cugccugucccc

SEQ ID NO: 3386394 - RNA, 14 nt, Human
cugccuguccccau

SEQ ID NO: 3386395 - RNA, 20 nt, Human
cugccugucccucucaggca

SEQ ID NO: 3386396 - RNA, 23 nt, Human
cugccugucccucucaggcaugc

SEQ ID NO: 3386397 - RNA, 12 nt, Human
cugccugucucc

SEQ ID NO: 3386398 - RNA, 18 nt, Human
cugccugucugccccagc

SEQ ID NO: 3386399 - RNA, 17 nt, Human
cugccugugagccaguc

SEQ ID NO: 3386400 - RNA, 14 nt, Human
cugccugugcugug

SEQ ID NO: 3386401 - RNA, 14 nt, Human
cugccuguggccau

SEQ ID NO: 3386402 - RNA, 23 nt, Human
cugccuguggcgccgucuccagg

SEQ ID NO: 3386403 - RNA, 17 nt, Human
cugccuguuauaacucu

SEQ ID NO: 3386404 - RNA, 15 nt, Human
cugccuguucagcuc

SEQ ID NO: 3386405 - RNA, 19 nt, Human
cugccuguucagcuccagc

SEQ ID NO: 3386406 - RNA, 20 nt, Human
cugccuguucagcuccagcu

SEQ ID NO: 3386407 - RNA, 23 nt, Human
cugccuguucagcuccagcucac

SEQ ID NO: 3386408 - RNA, 15 nt, Human
cugccuguucccauu

SEQ ID NO: 3386409 - RNA, 18 nt, Human
cugccuguugggccagga

SEQ ID NO: 3386410 - RNA, 20 nt, Human
cugccuguugggccaggagc

SEQ ID NO: 3386411 - RNA, 13 nt, Human
cugccuuaaguga

SEQ ID NO: 3386412 - RNA, 15 nt, Human
cugccuuagagccag

SEQ ID NO: 3386413 - RNA, 17 nt, Human
cugccuuagagccaggc

SEQ ID NO: 3386414 - RNA, 18 nt, Human
cugccuuagcuucaggaa

SEQ ID NO: 3386415 - RNA, 15 nt, Human
cugccuucaccuuca

SEQ ID NO: 3386416 - RNA, 12 nt, Human
cugccuucccua

SEQ ID NO: 3386417 - RNA, 16 nt, Human
cugccuuccuccuggg

SEQ ID NO: 3386418 - RNA, 13 nt, Human
cugccuucgcuuc

SEQ ID NO: 3386419 - RNA, 15 nt, Human
cugccuucgcuucuu

SEQ ID NO: 3386420 - RNA, 23 nt, Human
cugccuucgcuucuugccucugu

SEQ ID NO: 3386421 - RNA, 18 nt, Human
cugccuucuggccuugua

SEQ ID NO: 3386422 - RNA, 17 nt, Human
cugccuucuguccuggu

SEQ ID NO: 3386423 - RNA, 17 nt, Human
cugccuugaaaaagaca

SEQ ID NO: 3386424 - RNA, 17 nt, Human
cugccuugaaccuguga

SEQ ID NO: 3386425 - RNA, 21 nt, Human
cugccuugaagccacugaagc

SEQ ID NO: 3386426 - RNA, 12 nt, Human
cugccuugccuu

SEQ ID NO: 3386427 - RNA, 13 nt, Human
cugccuugccuuu

SEQ ID NO: 3386428 - RNA, 16 nt, Human
cugccuugcuguuggu

SEQ ID NO: 3386429 - RNA, 12 nt, Human
cugccuuuauug

SEQ ID NO: 3386430 - RNA, 15 nt, Human
cugccuuuauugugu

SEQ ID NO: 3386431 - RNA, 17 nt, Human
cugccuuuauuguguuu

SEQ ID NO: 3386432 - RNA, 24 nt, Human
cugccuuuauuguguuugucauua

SEQ ID NO: 3386433 - RNA, 22 nt, Human
cugccuuuccauccauggccag

SEQ ID NO: 3386434 - RNA, 18 nt, Human
cugccuuugauguuacag

SEQ ID NO: 3386435 - RNA, 14 nt, Human
cugccuuugccucc

SEQ ID NO: 3386436 - RNA, 21 nt, Human
cugccuuugccuccagaagca

SEQ ID NO: 3386437 - RNA, 17 nt, Human
cugccuuuuaguuccug

SEQ ID NO: 3386438 - RNA, 23 nt, Human
cugccuuuuaguuccugugcaca

SEQ ID NO: 3386439 - RNA, 20 nt, Human
cugcgaagacccucuugccc

SEQ ID NO: 3386440 - RNA, 12 nt, Human
cugcgaaguccu

SEQ ID NO: 3386441 - RNA, 14 nt, Human
cugcgaaguccuau

SEQ ID NO: 3386442 - RNA, 14 nt, Human
cugcgacccugggg

SEQ ID NO: 3386443 - RNA, 21 nt, Human
cugcgacccugggggcacagg

SEQ ID NO: 3386444 - RNA, 22 nt, Human
cugcgacccugggggcacagga

SEQ ID NO: 3386445 - RNA, 15 nt, Human
cugcgacuaaacuua

SEQ ID NO: 3386446 - RNA, 18 nt, Human
cugcgacuuucugccugg

SEQ ID NO: 3386447 - RNA, 20 nt, Human
cugcgaucuucagagcaggg

SEQ ID NO: 3386448 - RNA, 22 nt, Human
cugcgcccaccccgcucugcau

SEQ ID NO: 3386449 - RNA, 13 nt, Human
cugcgcccugggc

SEQ ID NO: 3386450 - RNA, 18 nt, Human
cugcgcccuuaccuuccc

SEQ ID NO: 3386451 - RNA, 19 nt, Human
cugcgccgccgccggaguc

SEQ ID NO: 3386452 - RNA, 20 nt, Human
cugcgccugcugcaugcccu

SEQ ID NO: 3386453 - RNA, 21 nt, Human
cugcgccuuuccuuuucgccu

SEQ ID NO: 3386454 - RNA, 13 nt, Human
cugcggaccccag

SEQ ID NO: 3386455 - RNA, 23 nt, Human
cugcggaggaaggaggacccagg

SEQ ID NO: 3386456 - RNA, 19 nt, Human
cugcggagugaagaggggc

SEQ ID NO: 3386457 - RNA, 19 nt, Human
cugcgggaugguccugggg

SEQ ID NO: 3386458 - RNA, 22 nt, Human
cugcgggaugguccuggggcuc

SEQ ID NO: 3386459 - RNA, 19 nt, Human
cugcggggcgggcacaccu

SEQ ID NO: 3386460 - RNA, 22 nt, Human
cugcgguagaugggagggaggc

SEQ ID NO: 3386461 - RNA, 17 nt, Human
cugcggucaaggccagc

SEQ ID NO: 3386462 - RNA, 23 nt, Human
cugcgguccacccaggagccccg

SEQ ID NO: 3386463 - RNA, 16 nt, Human
cugccaaccuaaaacu

SEQ ID NO: 3386464 - RNA, 23 nt, Human
cugccaaccucgcuccaacucca

SEQ ID NO: 3386465 - RNA, 19 nt, Human
cugccaacugaucuguuau

SEQ ID NO: 3386466 - RNA, 22 nt, Human
cugccaacuucuucagagcuga

SEQ ID NO: 3386467 - RNA, 14 nt, Human
cugccaagccccau

SEQ ID NO: 3386468 - RNA, 15 nt, Human
cugccaagccccauc

SEQ ID NO: 3386469 - RNA, 22 nt, Human
cugccaaggccagaguggccug

SEQ ID NO: 3386470 - RNA, 23 nt, Human
cugccaaggccagaguggccugg

SEQ ID NO: 3386471 - RNA, 17 nt, Human
cugccaauauccuaaua

SEQ ID NO: 3386472 - RNA, 20 nt, Human
cugccaauauccuaauaaaa

SEQ ID NO: 3386473 - RNA, 15 nt, Human
cugccaaugggagcu

SEQ ID NO: 3386474 - RNA, 18 nt, Human
cugccaaugggagcucau

SEQ ID NO: 3386475 - RNA, 15 nt, Human
cugccacacaaacgu

SEQ ID NO: 3386476 - RNA, 15 nt, Human
ccgucuucagccuag

SEQ ID NO: 3386477 - RNA, 19 nt, Human
ccgucuuucuuuuauacug

SEQ ID NO: 3386478 - RNA, 17 nt, Human
ccgugaaaacggagcug

SEQ ID NO: 3386479 - RNA, 17 nt, Human
ccgugaagauacuuugu

SEQ ID NO: 3386480 - RNA, 18 nt, Human
ccgugaagauacuuugua

SEQ ID NO: 3386481 - RNA, 20 nt, Human
ccgugacagacuccugagga

SEQ ID NO: 3386482 - RNA, 22 nt, Human
ccgugagcaggaaggccugggu

SEQ ID NO: 3386483 - RNA, 22 nt, Human
ccgugagccaaucccucaccuu

SEQ ID NO: 3386484 - RNA, 13 nt, Human
ccgugaggccaga

SEQ ID NO: 3386485 - RNA, 16 nt, Human
ccgugaguucucaggg

SEQ ID NO: 3386486 - RNA, 18 nt, Human
ccgugaguucucagggcu

SEQ ID NO: 3386487 - RNA, 19 nt, Human
ccgugaguucucagggcuc

SEQ ID NO: 3386488 - RNA, 20 nt, Human
ccgugccaaagucucccuuc

SEQ ID NO: 3386489 - RNA, 15 nt, Human
ccgugccccgccucc

SEQ ID NO: 3386490 - RNA, 17 nt, Human
ccgugccuccaccacca

SEQ ID NO: 3386491 - RNA, 15 nt, Human
ccgugccuucagcuc

SEQ ID NO: 3386492 - RNA, 14 nt, Human
ccgugcuaaggacu

SEQ ID NO: 3386493 - RNA, 15 nt, Human
ccgugcuaaggacuu

SEQ ID NO: 3386494 - RNA, 20 nt, Human
ccgugcugacagcugcuccu

SEQ ID NO: 3386495 - RNA, 20 nt, Human
ccgugcuuguuugcucaccu

SEQ ID NO: 3386496 - RNA, 22 nt, Human
ccgugcuuguuugcucaccugg

SEQ ID NO: 3386497 - RNA, 23 nt, Human
ccgugcuuguuugcucaccuggg

SEQ ID NO: 3386498 - RNA, 23 nt, Human
ccguggagaugggaugcuugccu

SEQ ID NO: 3386499 - RNA, 16 nt, Human
ccguggaggaggaagg

SEQ ID NO: 3386500 - RNA, 14 nt, Human
ccguggaggcugcu

SEQ ID NO: 3386501 - RNA, 22 nt, Human
ccguggauugcacguggccucu

SEQ ID NO: 3386502 - RNA, 23 nt, Human
ccguggauugcacguggccucuu

SEQ ID NO: 3386503 - RNA, 15 nt, Human
ccguggcacugcaua

SEQ ID NO: 3386504 - RNA, 20 nt, Human
ccguggccaucccugugagg

SEQ ID NO: 3386505 - RNA, 15 nt, Human
ccguggccccagccu

SEQ ID NO: 3386506 - RNA, 17 nt, Human
ccguggccccagccugg

SEQ ID NO: 3386507 - RNA, 22 nt, Human
ccguggccccagccuggcccag

SEQ ID NO: 3386508 - RNA, 16 nt, Human
ccguggcccugcccuc

SEQ ID NO: 3386509 - RNA, 19 nt, Human
ccguggcccuuccuggaca

SEQ ID NO: 3386510 - RNA, 21 nt, Human
ccguggcgcuuucugcaguuu

SEQ ID NO: 3386511 - RNA, 23 nt, Human
ccguggcuguggcauccagaguc

SEQ ID NO: 3386512 - RNA, 15 nt, Human
ccguggcuucccgcu

SEQ ID NO: 3386513 - RNA, 19 nt, Human
ccgugggccccacccucgg

SEQ ID NO: 3386514 - RNA, 15 nt, Human
ccguggggcagggag

SEQ ID NO: 3386515 - RNA, 22 nt, Human
ccguggggcagggagcugggcc

SEQ ID NO: 3386516 - RNA, 20 nt, Human
ccguggggccggggcuucug

SEQ ID NO: 3386517 - RNA, 13 nt, Human
ccguggucccuga

SEQ ID NO: 3386518 - RNA, 14 nt, Human
ccguggucccugag

SEQ ID NO: 3386519 - RNA, 16 nt, Human
ccguggucccugagga

SEQ ID NO: 3386520 - RNA, 20 nt, Human
ccgugguguuauuuaaagaa

SEQ ID NO: 3386521 - RNA, 23 nt, Human
ccgugguuugaacacgaaagaaa

SEQ ID NO: 3386522 - RNA, 17 nt, Human
ccgugucaagcugcucu

SEQ ID NO: 3386523 - RNA, 17 nt, Human
ccgugucugucuggcac

SEQ ID NO: 3386524 - RNA, 16 nt, Human
ccguguggccccuuca

SEQ ID NO: 3386525 - RNA, 21 nt, Human
ccguguguucuccgucccugc

SEQ ID NO: 3386526 - RNA, 19 nt, Human
ccguguuggucuguacuga

SEQ ID NO: 3386527 - RNA, 18 nt, Human
ccguguuugucucuucug

SEQ ID NO: 3386528 - RNA, 17 nt, Human
ccguuagcuccuguggc

SEQ ID NO: 3386529 - RNA, 18 nt, Human
ccguuagcuccuguggcc

SEQ ID NO: 3386530 - RNA, 20 nt, Human
ccguuauuauaauuguauca

SEQ ID NO: 3386531 - RNA, 15 nt, Human
ccguucaugggggag

SEQ ID NO: 3386532 - RNA, 16 nt, Human
ccguucaugggggagg

SEQ ID NO: 3386533 - RNA, 23 nt, Human
ccguucaugggggagggggcaga

SEQ ID NO: 3386534 - RNA, 21 nt, Human
ccguuccaccccaagagaacu

SEQ ID NO: 3386535 - RNA, 22 nt, Human
ccguuccaccccaagagaacuc

SEQ ID NO: 3386536 - RNA, 18 nt, Human
ccguuccugacaucacag

SEQ ID NO: 3386537 - RNA, 20 nt, Human
ccguuggggauuggggaaga

SEQ ID NO: 3386538 - RNA, 14 nt, Human
ccguugucucccug

SEQ ID NO: 3386539 - RNA, 21 nt, Human
ccguugucucccuggcccuca

SEQ ID NO: 3386540 - RNA, 23 nt, Human
ccguuucauuuagucaugugacc

SEQ ID NO: 3386541 - RNA, 19 nt, Human
ccguuuccagguguuuaua

SEQ ID NO: 3386542 - RNA, 22 nt, Human
ccguuugagaagaaaacaucua

SEQ ID NO: 3386543 - RNA, 13 nt, Human
ccguuugcuuuug

SEQ ID NO: 3386544 - RNA, 14 nt, Human
ccguuuugucacuu

SEQ ID NO: 3386545 - RNA, 14 nt, Human
ccuaaaaaagauau

SEQ ID NO: 3386546 - RNA, 13 nt, Human
ccuaaaaauuggu

SEQ ID NO: 3386547 - RNA, 17 nt, Human
ccuaaaacauaagauca

SEQ ID NO: 3386548 - RNA, 15 nt, Human
ccuaaaacuggccug

SEQ ID NO: 3386549 - RNA, 19 nt, Human
ccuaaaagaaacccugcac

SEQ ID NO: 3386550 - RNA, 23 nt, Human
ccuaaaagcaaaauaaaaacuau

SEQ ID NO: 3386551 - RNA, 17 nt, Human
ccuaaaagcacacucau

SEQ ID NO: 3386552 - RNA, 18 nt, Human
ccuaaaagcacacucauc

SEQ ID NO: 3386553 - RNA, 17 nt, Human
ccuaaaaggcccagaga

SEQ ID NO: 3386554 - RNA, 23 nt, Human
ccuaaaaguucauaacagugcca

SEQ ID NO: 3386555 - RNA, 19 nt, Human
ccuaaaauaacaguaugug

SEQ ID NO: 3386556 - RNA, 12 nt, Human
ccuaaaaucuug

SEQ ID NO: 3386557 - RNA, 16 nt, Human
ccuaaaauuauggaaa

SEQ ID NO: 3386558 - RNA, 22 nt, Human
ccuaaaauuugcccucccaucc

SEQ ID NO: 3386559 - RNA, 13 nt, Human
ccuaaaccucagu

SEQ ID NO: 3386560 - RNA, 14 nt, Human
ccuaaacuccaggg

SEQ ID NO: 3386561 - RNA, 13 nt, Human
ccuaaagagagua

SEQ ID NO: 3386562 - RNA, 23 nt, Human
ccuaaagagaguauuuuuauaca

SEQ ID NO: 3386563 - RNA, 12 nt, Human
ccuaaagagaua

SEQ ID NO: 3386564 - RNA, 15 nt, Human
ccuaaagcagccagc

SEQ ID NO: 3386565 - RNA, 13 nt, Human
ccuaaagccucaa

SEQ ID NO: 3386566 - RNA, 16 nt, Human
ccuaaagugcugggau

SEQ ID NO: 3386567 - RNA, 19 nt, Human
ccuaaauaauaaaaauaaa

SEQ ID NO: 3386568 - RNA, 16 nt, Human
ccuaaauauauuuuaa

SEQ ID NO: 3386569 - RNA, 18 nt, Human
ccuaaauauauuuuaaga

SEQ ID NO: 3386570 - RNA, 17 nt, Human
ccuaaauccauuuggaa

SEQ ID NO: 3386571 - RNA, 16 nt, Human
ccuaaauuuaaugcug

SEQ ID NO: 3386572 - RNA, 18 nt, Human
ccuaaauuuaaugcugcc

SEQ ID NO: 3386573 - RNA, 23 nt, Human
ccuaacaugguuuaaaagaaaaa

SEQ ID NO: 3386574 - RNA, 11 nt, Human
ccuaaccaagu

SEQ ID NO: 3386575 - RNA, 15 nt, Human
ccuaaccccuuccag

SEQ ID NO: 3386576 - RNA, 12 nt, Human
ccuaacccuggc

SEQ ID NO: 3386577 - RNA, 12 nt, Human
ccuaaccugccg

SEQ ID NO: 3386578 - RNA, 14 nt, Human
ccuaaccugugucu

SEQ ID NO: 3386579 - RNA, 17 nt, Human
ccuaaccugugucugcg

SEQ ID NO: 3386580 - RNA, 18 nt, Human
ccuaaccugugucugcga

SEQ ID NO: 3386581 - RNA, 15 nt, Human
ccuaacgaaguaucc

SEQ ID NO: 3386582 - RNA, 18 nt, Human
ccuaacucauacugugcu

SEQ ID NO: 3386583 - RNA, 14 nt, Human
ccuaacucuucuuu

SEQ ID NO: 3386584 - RNA, 14 nt, Human
ccuaacuguaucuu

SEQ ID NO: 3386585 - RNA, 12 nt, Human
ccuaagacaugu

SEQ ID NO: 3386586 - RNA, 15 nt, Human
ccuaagaccuggggu

SEQ ID NO: 3386587 - RNA, 23 nt, Human
ccuaagaccugggguugucagcu

SEQ ID NO: 3386588 - RNA, 15 nt, Human
ccuaagagagcaccu

SEQ ID NO: 3386589 - RNA, 13 nt, Human
ccuaagaggcugc

SEQ ID NO: 3386590 - RNA, 16 nt, Human
ccuaagaggcugcccu

SEQ ID NO: 3386591 - RNA, 19 nt, Human
ccuaagaggcugcccuccu

SEQ ID NO: 3386592 - RNA, 16 nt, Human
ccuaagaguguuuaau

SEQ ID NO: 3386593 - RNA, 21 nt, Human
ccuaagaucucgguuugccaa

SEQ ID NO: 3386594 - RNA, 19 nt, Human
ccuaagauguguucuuauu

SEQ ID NO: 3386595 - RNA, 17 nt, Human
ccuaagcagaaagugcc

SEQ ID NO: 3386596 - RNA, 20 nt, Human
ccuaagcagaaagugccuuu

SEQ ID NO: 3386597 - RNA, 23 nt, Human
ccuaagcagaaagugccuuucag

SEQ ID NO: 3386598 - RNA, 12 nt, Human
ccuaagcaucua

SEQ ID NO: 3386599 - RNA, 16 nt, Human
ccuaagcauugccugg

SEQ ID NO: 3386600 - RNA, 16 nt, Human
ccuaagccacuugaaa

SEQ ID NO: 3386601 - RNA, 14 nt, Human
ccuaagccagcugc

SEQ ID NO: 3386602 - RNA, 17 nt, Human
ccuaagccagcugcccc

SEQ ID NO: 3386603 - RNA, 16 nt, Human
ccuaaggaaccuuccu

SEQ ID NO: 3386604 - RNA, 23 nt, Human
ccuaaggacuucuuuaauuuugg

SEQ ID NO: 3386605 - RNA, 19 nt, Human
ccuaaggaucucucaggag

SEQ ID NO: 3386606 - RNA, 23 nt, Human
ccuaaggaucucucaggagcaca

SEQ ID NO: 3386607 - RNA, 24 nt, Human
ccuaaggaucucucaggagcacag

SEQ ID NO: 3386608 - RNA, 23 nt, Human
ccuaaggcaucuaucugugcuag

SEQ ID NO: 3386609 - RNA, 19 nt, Human
ccuaagggucgaaagcucu

SEQ ID NO: 3386610 - RNA, 22 nt, Human
ccuaagggucgaaagcucuaga

SEQ ID NO: 3386611 - RNA, 23 nt, Human
ccuaagggucgaaagcucuagaa

SEQ ID NO: 3386612 - RNA, 16 nt, Human
ccuaaguacuguaaua

SEQ ID NO: 3386613 - RNA, 18 nt, Human
ccuaaguacuguaauaau

SEQ ID NO: 3386614 - RNA, 16 nt, Human
ccuaaguccuuuaugu

SEQ ID NO: 3386615 - RNA, 14 nt, Human
ccuaagucucugug

SEQ ID NO: 3386616 - RNA, 17 nt, Human
cugcguccuccucaccu

SEQ ID NO: 3386617 - RNA, 19 nt, Human
cugcguccuccucaccuca

SEQ ID NO: 3386618 - RNA, 23 nt, Human
cugcgucuuccgccccugccugc

SEQ ID NO: 3386619 - RNA, 22 nt, Human
cugcgugccagucaagaagaaa

SEQ ID NO: 3386620 - RNA, 18 nt, Human
cugcucugaugcaucaga

SEQ ID NO: 3386621 - RNA, 21 nt, Human
cugcccagaucagccagaagc

SEQ ID NO: 3386622 - RNA, 23 nt, Human
cugcccagcuugggcccagcugg

SEQ ID NO: 3386623 - RNA, 20 nt, Human
cugcccaggacggggccggc

SEQ ID NO: 3386624 - RNA, 13 nt, Human
cugcccaggcccc

SEQ ID NO: 3386625 - RNA, 14 nt, Human
cugcccaggccccu

SEQ ID NO: 3386626 - RNA, 15 nt, Human
cugcccaggccccug

SEQ ID NO: 3386627 - RNA, 18 nt, Human
cugcccaggccccugcca

SEQ ID NO: 3386628 - RNA, 19 nt, Human
cugcccaggccccugccac

SEQ ID NO: 3386629 - RNA, 18 nt, Human
cugcccaggcugugcagc

SEQ ID NO: 3386630 - RNA, 17 nt, Human
cugcccaggggagcccu

SEQ ID NO: 3386631 - RNA, 13 nt, Human
cugcccaggggug

SEQ ID NO: 3386632 - RNA, 16 nt, Human
cugcccaggggugccc

SEQ ID NO: 3386633 - RNA, 17 nt, Human
cugcccaggggugcccc

SEQ ID NO: 3386634 - RNA, 22 nt, Human
cugcccaggggugcccccuccu

SEQ ID NO: 3386635 - RNA, 13 nt, Human
cugcccagucccc

SEQ ID NO: 3386636 - RNA, 19 nt, Human
cugcccagucccccaaccc

SEQ ID NO: 3386637 - RNA, 21 nt, Human
cugcccaguguuguuuguaaa

SEQ ID NO: 3386638 - RNA, 22 nt, Human
cugcccaguguuguuuguaaau

SEQ ID NO: 3386639 - RNA, 23 nt, Human
cugcccaguguuguuuguaaaua

SEQ ID NO: 3386640 - RNA, 18 nt, Human
cugcccaucgugaagaag

SEQ ID NO: 3386641 - RNA, 18 nt, Human
cugcccaucugggaaaau

SEQ ID NO: 3386642 - RNA, 20 nt, Human
cugcccaucugggaaaauac

SEQ ID NO: 3386643 - RNA, 16 nt, Human
cugcccauggacaggc

SEQ ID NO: 3386644 - RNA, 21 nt, Human
cugcccaugucgcgcucagca

SEQ ID NO: 3386645 - RNA, 23 nt, Human
cugcccauucugcccugugggac

SEQ ID NO: 3386646 - RNA, 22 nt, Human
cugccccaaauaacuucagucc

SEQ ID NO: 3386647 - RNA, 23 nt, Human
cugccccaaauaacuucaguccu

SEQ ID NO: 3386648 - RNA, 16 nt, Human
cugccccaacuccugg

SEQ ID NO: 3386649 - RNA, 21 nt, Human
cugccccaacuccuggaagcu

SEQ ID NO: 3386650 - RNA, 24 nt, Human
cugccccaacuccuuccagcuagu

SEQ ID NO: 3386651 - RNA, 16 nt, Human
cugccccacaccuccu

SEQ ID NO: 3386652 - RNA, 18 nt, Human
cugccccacaccuccucu

SEQ ID NO: 3386653 - RNA, 22 nt, Human
cugccccacaccuccucucacu

SEQ ID NO: 3386654 - RNA, 23 nt, Human
cugccccaccccuccccauuagc

SEQ ID NO: 3386655 - RNA, 13 nt, Human
cugccccagaggc

SEQ ID NO: 3386656 - RNA, 14 nt, Human
cugccccagcccag

SEQ ID NO: 3386657 - RNA, 13 nt, Human
cugccccagcucu

SEQ ID NO: 3386658 - RNA, 14 nt, Human
cugccccagcucug

SEQ ID NO: 3386659 - RNA, 15 nt, Human
cugccccagcucugg

SEQ ID NO: 3386660 - RNA, 14 nt, Human
cugccccaggccug

SEQ ID NO: 3386661 - RNA, 15 nt, Human
cugccccaggccuga

SEQ ID NO: 3386662 - RNA, 17 nt, Human
cugccccaggcugcggc

SEQ ID NO: 3386663 - RNA, 18 nt, Human
cugccccauccuccagca

SEQ ID NO: 3386664 - RNA, 21 nt, Human
cugccccauccuccagcaggg

SEQ ID NO: 3386665 - RNA, 22 nt, Human
cugccccauccuccagcaggga

SEQ ID NO: 3386666 - RNA, 17 nt, Human
cugccccaucuccccuc

SEQ ID NO: 3386667 - RNA, 21 nt, Human
cugccccauuuauccaccucc

SEQ ID NO: 3386668 - RNA, 22 nt, Human
cugccccauuuauccaccucca

SEQ ID NO: 3386669 - RNA, 14 nt, Human
cugcccccacaccu

SEQ ID NO: 3386670 - RNA, 22 nt, Human
cugcccccaccacggccacugg

SEQ ID NO: 3386671 - RNA, 22 nt, Human
cugcccccaccccauucccgca

SEQ ID NO: 3386672 - RNA, 23 nt, Human
cugcccccaccccauucccgcag

SEQ ID NO: 3386673 - RNA, 12 nt, Human
cugcccccacga

SEQ ID NO: 3386674 - RNA, 21 nt, Human
cugcccccacgagggucagga

SEQ ID NO: 3386675 - RNA, 14 nt, Human
cugcccccagagcc

SEQ ID NO: 3386676 - RNA, 23 nt, Human
cugcccccagcucuucuccccag

SEQ ID NO: 3386677 - RNA, 14 nt, Human
cugcccccaggacu

SEQ ID NO: 3386678 - RNA, 18 nt, Human
cugcccccaggacugggc

SEQ ID NO: 3386679 - RNA, 16 nt, Human
cugccccccagccucu

SEQ ID NO: 3386680 - RNA, 19 nt, Human
cugccccccccccccaucu

SEQ ID NO: 3386681 - RNA, 15 nt, Human
cugcccccgcauccc

SEQ ID NO: 3386682 - RNA, 18 nt, Human
cugcccccgcauccccug

SEQ ID NO: 3386683 - RNA, 18 nt, Human
cugcccccggcccccugg

SEQ ID NO: 3386684 - RNA, 17 nt, Human
cugcccccuccccuuca

SEQ ID NO: 3386685 - RNA, 23 nt, Human
cugcccccuccccuucacaccau

SEQ ID NO: 3386686 - RNA, 15 nt, Human
cugcccccucugccc

SEQ ID NO: 3386687 - RNA, 12 nt, Human
cugcccccugca

SEQ ID NO: 3386688 - RNA, 14 nt, Human
cugcccccugcaga

SEQ ID NO: 3386689 - RNA, 13 nt, Human
cugcccccugcug

SEQ ID NO: 3386690 - RNA, 18 nt, Human
cugcccccugcugccaug

SEQ ID NO: 3386691 - RNA, 23 nt, Human
cugcccccuucucccacacugcu

SEQ ID NO: 3386692 - RNA, 17 nt, Human
cugccccgcccagcugc

SEQ ID NO: 3386693 - RNA, 22 nt, Human
cugccccggccccucccccuga

SEQ ID NO: 3386694 - RNA, 18 nt, Human
cugccccgucaccaucuc

SEQ ID NO: 3386695 - RNA, 19 nt, Human
cugccccgucaccaucuca

SEQ ID NO: 3386696 - RNA, 22 nt, Human
cugccccgucucaugaggggcc

SEQ ID NO: 3386697 - RNA, 15 nt, Human
cugccccgugcagac

SEQ ID NO: 3386698 - RNA, 17 nt, Human
cugccccgugcagacug

SEQ ID NO: 3386699 - RNA, 19 nt, Human
cugccccgugcagacugga

SEQ ID NO: 3386700 - RNA, 22 nt, Human
cugccccgugcagacuggaggg

SEQ ID NO: 3386701 - RNA, 15 nt, Human
cugccccucaugcca

SEQ ID NO: 3386702 - RNA, 11 nt, Human
cugccccuccc

SEQ ID NO: 3386703 - RNA, 16 nt, Human
cugccccucccugcca

SEQ ID NO: 3386704 - RNA, 20 nt, Human
cugccccuccucucugcccu

SEQ ID NO: 3386705 - RNA, 16 nt, Human
cugccccucucugggc

SEQ ID NO: 3386706 - RNA, 18 nt, Human
cugccccucucugggccu

SEQ ID NO: 3386707 - RNA, 23 nt, Human
cugccccucucugggccucagag

SEQ ID NO: 3386708 - RNA, 15 nt, Human
cugccccucuuucuc

SEQ ID NO: 3386709 - RNA, 10 nt, Human
cugccccugc

SEQ ID NO: 3386710 - RNA, 14 nt, Human
cugccccugcacag

SEQ ID NO: 3386711 - RNA, 15 nt, Human
cugccccugcacagc

SEQ ID NO: 3386712 - RNA, 23 nt, Human
cugccccugcuacugccaaccuc

SEQ ID NO: 3386713 - RNA, 14 nt, Human
cugccccuggcagc

SEQ ID NO: 3386714 - RNA, 15 nt, Human
cugccccuggcagcc

SEQ ID NO: 3386715 - RNA, 17 nt, Human
cugccccuggcagcccc

SEQ ID NO: 3386716 - RNA, 18 nt, Human
cugccccuguucucuucc

SEQ ID NO: 3386717 - RNA, 21 nt, Human
cugccccuucuacacucuccu

SEQ ID NO: 3386718 - RNA, 24 nt, Human
cugccccuucuacacucuccuggg

SEQ ID NO: 3386719 - RNA, 13 nt, Human
cugcccgagcugg

SEQ ID NO: 3386720 - RNA, 21 nt, Human
cugcccgagcuggugcauuac

SEQ ID NO: 3386721 - RNA, 17 nt, Human
cugcccgcacagcagcc

SEQ ID NO: 3386722 - RNA, 17 nt, Human
cugcccgcagaccucug

SEQ ID NO: 3386723 - RNA, 18 nt, Human
cugcccgcagaccucugg

SEQ ID NO: 3386724 - RNA, 17 nt, Human
cugcccgccugcccacc

SEQ ID NO: 3386725 - RNA, 20 nt, Human
cugcccgccugcccaccugc

SEQ ID NO: 3386726 - RNA, 19 nt, Human
cugcccgcucccagugucu

SEQ ID NO: 3386727 - RNA, 13 nt, Human
cugcccggcaggg

SEQ ID NO: 3386728 - RNA, 16 nt, Human
cugcccggcgcccucu

SEQ ID NO: 3386729 - RNA, 21 nt, Human
cugcccggcgcccucuguccu

SEQ ID NO: 3386730 - RNA, 18 nt, Human
cugcccgggagcucagga

SEQ ID NO: 3386731 - RNA, 19 nt, Human
cugcccgggcgcggccagc

SEQ ID NO: 3386732 - RNA, 19 nt, Human
cugcccggggcagcugcca

SEQ ID NO: 3386733 - RNA, 21 nt, Human
cugcccggggcagcugccaga

SEQ ID NO: 3386734 - RNA, 19 nt, Human
cugcccguaaacacgccug

SEQ ID NO: 3386735 - RNA, 18 nt, Human
cugcccgucucucuccca

SEQ ID NO: 3386736 - RNA, 22 nt, Human
cugcccgucucucucccaugga

SEQ ID NO: 3386737 - RNA, 18 nt, Human
cugcccgucuucagccua

SEQ ID NO: 3386738 - RNA, 16 nt, Human
cugcccuagcuccaca

SEQ ID NO: 3386739 - RNA, 16 nt, Human
cugcccuaugggccug

SEQ ID NO: 3386740 - RNA, 20 nt, Human
cugcccuaugggccugccgg

SEQ ID NO: 3386741 - RNA, 19 nt, Human
cugcccuccaagaccuucu

SEQ ID NO: 3386742 - RNA, 22 nt, Human
cugcccuccacacccgcgcccc

SEQ ID NO: 3386743 - RNA, 22 nt, Human
cugcccuccagcucuuuccucc

SEQ ID NO: 3386744 - RNA, 14 nt, Human
cugcccuccauccc

SEQ ID NO: 3386745 - RNA, 14 nt, Human
cugcccuccccucu

SEQ ID NO: 3386746 - RNA, 18 nt, Human
cugcccucccuccuuccu

SEQ ID NO: 3386747 - RNA, 12 nt, Human
cugcccuccugu

SEQ ID NO: 3386748 - RNA, 20 nt, Human
cugcccuccugugcucagcc

SEQ ID NO: 3386749 - RNA, 21 nt, Human
cugcccuccugugcucagccc

SEQ ID NO: 3386750 - RNA, 17 nt, Human
cugcccuccuuaauuug

SEQ ID NO: 3386751 - RNA, 22 nt, Human
cugcccucguggccagcccggc

SEQ ID NO: 3386752 - RNA, 12 nt, Human
cugcccucuaga

SEQ ID NO: 3386753 - RNA, 21 nt, Human
cugcccucuccugggcagcug

SEQ ID NO: 3386754 - RNA, 13 nt, Human
cugcccucuguuc

SEQ ID NO: 3386755 - RNA, 19 nt, Human
cugcccucuguucaguaac

SEQ ID NO: 3386756 - RNA, 20 nt, Human
cugcccugcacgucauggga

SEQ ID NO: 3386757 - RNA, 13 nt, Human
cugcccugccacc

SEQ ID NO: 3386758 - RNA, 16 nt, Human
cugcccugccaccugu

SEQ ID NO: 3386759 - RNA, 20 nt, Human
cugcccugccaccugucugu

SEQ ID NO: 3386760 - RNA, 16 nt, Human
cugcccugccacuuug

SEQ ID NO: 3386761 - RNA, 16 nt, Human
cugcccugcccaccug

SEQ ID NO: 3386762 - RNA, 20 nt, Human
cugcccugcccaccuggccu

SEQ ID NO: 3386763 - RNA, 20 nt, Human
ccuccacccugucccccagc

SEQ ID NO: 3386764 - RNA, 21 nt, Human
ccuccacccugucccccagcu

SEQ ID NO: 3386765 - RNA, 24 nt, Human
ccuccacccugucccccagcucug

SEQ ID NO: 3386766 - RNA, 19 nt, Human
ccuccaccuaccacucaca

SEQ ID NO: 3386767 - RNA, 13 nt, Human
ccuccaccuccug

SEQ ID NO: 3386768 - RNA, 13 nt, Human
ccuccaccuucca

SEQ ID NO: 3386769 - RNA, 14 nt, Human
ccuccaccuuccau

SEQ ID NO: 3386770 - RNA, 18 nt, Human
ccuccacguucugcucau

SEQ ID NO: 3386771 - RNA, 12 nt, Human
ccuccacuccca

SEQ ID NO: 3386772 - RNA, 15 nt, Human
ccuccacucccacuu

SEQ ID NO: 3386773 - RNA, 18 nt, Human
ccuccacucccacuuccc

SEQ ID NO: 3386774 - RNA, 11 nt, Human
ccuccacuccu

SEQ ID NO: 3386775 - RNA, 22 nt, Human
ccuccacucucccccacccccu

SEQ ID NO: 3386776 - RNA, 15 nt, Human
ccuccacucuuucuu

SEQ ID NO: 3386777 - RNA, 20 nt, Human
ccuccacucuuucuuucaau

SEQ ID NO: 3386778 - RNA, 17 nt, Human
ccuccagaacucuuccu

SEQ ID NO: 3386779 - RNA, 20 nt, Human
ccuccagaacucuuccucca

SEQ ID NO: 3386780 - RNA, 20 nt, Human
ccuccagaagccucuggcua

SEQ ID NO: 3386781 - RNA, 17 nt, Human
ccuccagagacaacagg

SEQ ID NO: 3386782 - RNA, 13 nt, Human
ccuccagagcccc

SEQ ID NO: 3386783 - RNA, 15 nt, Human
ccuccagagccccac

SEQ ID NO: 3386784 - RNA, 20 nt, Human
ccuccagagccccacagccc

SEQ ID NO: 3386785 - RNA, 13 nt, Human
ccuccagcaggga

SEQ ID NO: 3386786 - RNA, 17 nt, Human
ccuccagccccuguccc

SEQ ID NO: 3386787 - RNA, 20 nt, Human
ccuccagcccgggagccuag

SEQ ID NO: 3386788 - RNA, 22 nt, Human
ccuccagcccgggagccuagga

SEQ ID NO: 3386789 - RNA, 23 nt, Human
ccuccagccugcccaagcccagg

SEQ ID NO: 3386790 - RNA, 18 nt, Human
ccuccagcucagcaguga

SEQ ID NO: 3386791 - RNA, 15 nt, Human
ccuccagcucuuucc

SEQ ID NO: 3386792 - RNA, 19 nt, Human
ccuccagcucuuuccuccu

SEQ ID NO: 3386793 - RNA, 15 nt, Human
ccuccagcugcacca

SEQ ID NO: 3386794 - RNA, 19 nt, Human
ccuccagcugcaccagagc

SEQ ID NO: 3386795 - RNA, 11 nt, Human
ccuccagcugu

SEQ ID NO: 3386796 - RNA, 21 nt, Human
ccuccagcuuguggagcccca

SEQ ID NO: 3386797 - RNA, 13 nt, Human
ccuccaggaagcc

SEQ ID NO: 3386798 - RNA, 15 nt, Human
ccuccaggaagccuu

SEQ ID NO: 3386799 - RNA, 12 nt, Human
ccuccaggagcu

SEQ ID NO: 3386800 - RNA, 19 nt, Human
ccuccaggagcuucuuguu

SEQ ID NO: 3386801 - RNA, 20 nt, Human
ccuccaggcccgucugucca

SEQ ID NO: 3386802 - RNA, 21 nt, Human
ccuccaggcccgucuguccau

SEQ ID NO: 3386803 - RNA, 12 nt, Human
ccuccaggccug

SEQ ID NO: 3386804 - RNA, 16 nt, Human
ccuccaggccugccuc

SEQ ID NO: 3386805 - RNA, 21 nt, Human
ccuccaggccugccucccacu

SEQ ID NO: 3386806 - RNA, 13 nt, Human
ccuccaggccugu

SEQ ID NO: 3386807 - RNA, 17 nt, Human
ccuccaggccuguugcu

SEQ ID NO: 3386808 - RNA, 15 nt, Human
ccuccagggacagca

SEQ ID NO: 3386809 - RNA, 20 nt, Human
ccuccagggccacgugccag

SEQ ID NO: 3386810 - RNA, 22 nt, Human
ccuccagggccacgugccaggc

SEQ ID NO: 3386811 - RNA, 17 nt, Human
ccuccagggcuggacug

SEQ ID NO: 3386812 - RNA, 18 nt, Human
ccuccagggcuggacuga

SEQ ID NO: 3386813 - RNA, 23 nt, Human
ccuccagggcuggacugaggccu

SEQ ID NO: 3386814 - RNA, 12 nt, Human
ccuccaggugca

SEQ ID NO: 3386815 - RNA, 19 nt, Human
cugcgucaugcuuguguua

SEQ ID NO: 3386816 - RNA, 15 nt, Human
cugcguccuccucac

SEQ ID NO: 3386817 - RNA, 24 nt, Human
cugcguccuccucaccucaugccc

SEQ ID NO: 3386818 - RNA, 18 nt, Human
cugcgucgguccuggugc

SEQ ID NO: 3386819 - RNA, 16 nt, Human
cugcgucuauccugug

SEQ ID NO: 3386820 - RNA, 18 nt, Human
cugcgucuauccugugua

SEQ ID NO: 3386821 - RNA, 14 nt, Human
cugcgucuggaggg

SEQ ID NO: 3386822 - RNA, 15 nt, Human
cugcgucuggagggg

SEQ ID NO: 3386823 - RNA, 13 nt, Human
cugcgucuguguu

SEQ ID NO: 3386824 - RNA, 19 nt, Human
cugcgugacaauaaaacau

SEQ ID NO: 3386825 - RNA, 16 nt, Human
cugcgugccccugcug

SEQ ID NO: 3386826 - RNA, 13 nt, Human
cugcguggcugac

SEQ ID NO: 3386827 - RNA, 23 nt, Human
cugcguggcugaccccccucagg

SEQ ID NO: 3386828 - RNA, 22 nt, Human
cugcgugggugugugcguguuu

SEQ ID NO: 3386829 - RNA, 16 nt, Human
cugcguguucucagag

SEQ ID NO: 3386830 - RNA, 15 nt, Human
cugcguucugcaagc

SEQ ID NO: 3386831 - RNA, 16 nt, Human
cugcguugguccagag

SEQ ID NO: 3386832 - RNA, 19 nt, Human
cugcguugguccagagcgg

SEQ ID NO: 3386833 - RNA, 20 nt, Human
cugcguuuuggaagcucuga

SEQ ID NO: 3386834 - RNA, 12 nt, Human
cugcuaaaucuc

SEQ ID NO: 3386835 - RNA, 20 nt, Human
cugcuaaaucuccuauuuuu

SEQ ID NO: 3386836 - RNA, 14 nt, Human
cugcuaaauugaug

SEQ ID NO: 3386837 - RNA, 19 nt, Human
cugcuaacggugcucaggg

SEQ ID NO: 3386838 - RNA, 17 nt, Human
cugcuaaguauuuccca

SEQ ID NO: 3386839 - RNA, 23 nt, Human
cugcuaaguauuucccagcacau

SEQ ID NO: 3386840 - RNA, 16 nt, Human
cugcuaauaaaaccca

SEQ ID NO: 3386841 - RNA, 24 nt, Human
cugcuaauauuuuccuccugagug

SEQ ID NO: 3386842 - RNA, 18 nt, Human
cugcuacaaagaagacau

SEQ ID NO: 3386843 - RNA, 19 nt, Human
cugcuacaaagaagacaug

SEQ ID NO: 3386844 - RNA, 23 nt, Human
cugcuacaaauacucuuaggaag

SEQ ID NO: 3386845 - RNA, 15 nt, Human
cugcuacaauguccu

SEQ ID NO: 3386846 - RNA, 13 nt, Human
cugcuacccuccc

SEQ ID NO: 3386847 - RNA, 18 nt, Human
cugcuacccucccugcug

SEQ ID NO: 3386848 - RNA, 19 nt, Human
cugcuacccucccugcugu

SEQ ID NO: 3386849 - RNA, 18 nt, Human
cugcuaccucccuugccu

SEQ ID NO: 3386850 - RNA, 19 nt, Human
cugcuaccucccuugccuu

SEQ ID NO: 3386851 - RNA, 21 nt, Human
cugcuacguuccuauugucau

SEQ ID NO: 3386852 - RNA, 20 nt, Human
cugcuacucaaguagcauuu

SEQ ID NO: 3386853 - RNA, 18 nt, Human
cugcuacucuguuccuuc

SEQ ID NO: 3386854 - RNA, 17 nt, Human
cugcuagaacuuuuuua

SEQ ID NO: 3386855 - RNA, 22 nt, Human
cugcuagcacuuggagccaagg

SEQ ID NO: 3386856 - RNA, 15 nt, Human
cugcuaggccagagc

SEQ ID NO: 3386857 - RNA, 18 nt, Human
cugcuaggccagagccca

SEQ ID NO: 3386858 - RNA, 18 nt, Human
cugcuaggcgagugccag

SEQ ID NO: 3386859 - RNA, 20 nt, Human
cugcuaggcgagugccagga

SEQ ID NO: 3386860 - RNA, 21 nt, Human
cugcuaggugggccagccccu

SEQ ID NO: 3386861 - RNA, 17 nt, Human
cugcuauauuuucauga

SEQ ID NO: 3386862 - RNA, 23 nt, Human
cugcuauauuuucaugacuuuuc

SEQ ID NO: 3386863 - RNA, 16 nt, Human
cugcuauccugccaaa

SEQ ID NO: 3386864 - RNA, 14 nt, Human
cugcuaugcuugaa

SEQ ID NO: 3386865 - RNA, 19 nt, Human
cugcuauuuauuuuccuaa

SEQ ID NO: 3386866 - RNA, 20 nt, Human
cugcuauuuauuuuccuaaa

SEQ ID NO: 3386867 - RNA, 21 nt, Human
cugcuauuuauuuuccuaaag

SEQ ID NO: 3386868 - RNA, 13 nt, Human
cugcuauuuuacu

SEQ ID NO: 3386869 - RNA, 18 nt, Human
cugcucacgucaaaugca

SEQ ID NO: 3386870 - RNA, 16 nt, Human
cugcucacuaccuccu

SEQ ID NO: 3386871 - RNA, 21 nt, Human
cugcucacuaccuccucaggg

SEQ ID NO: 3386872 - RNA, 17 nt, Human
cugcucagaacuugcug

SEQ ID NO: 3386873 - RNA, 12 nt, Human
cugcucagaucc

SEQ ID NO: 3386874 - RNA, 13 nt, Human
cugcucagcagcu

SEQ ID NO: 3386875 - RNA, 16 nt, Human
cugcucagccaagcuu

SEQ ID NO: 3386876 - RNA, 13 nt, Human
cugcucagcccug

SEQ ID NO: 3386877 - RNA, 14 nt, Human
cugcucagcccugc

SEQ ID NO: 3386878 - RNA, 15 nt, Human
cugcucagcccugca

SEQ ID NO: 3386879 - RNA, 18 nt, Human
cugcucagcccugcacca

SEQ ID NO: 3386880 - RNA, 13 nt, Human
cugcucaggcugc

SEQ ID NO: 3386881 - RNA, 18 nt, Human
cugcucaggcugcagcug

SEQ ID NO: 3386882 - RNA, 19 nt, Human
cugcucaggcugcagcugg

SEQ ID NO: 3386883 - RNA, 23 nt, Human
cugcucaggcugcagcuggacag

SEQ ID NO: 3386884 - RNA, 12 nt, Human
cugcucaucauu

SEQ ID NO: 3386885 - RNA, 22 nt, Human
cugcucaucauucucugucuca

SEQ ID NO: 3386886 - RNA, 22 nt, Human
cugcucauucuaaugauggccc

SEQ ID NO: 3386887 - RNA, 23 nt, Human
cugcucauucuaaugauggccca

SEQ ID NO: 3386888 - RNA, 21 nt, Human
cugcuccacaguguuggcgag

SEQ ID NO: 3386889 - RNA, 12 nt, Human
cugcuccacccu

SEQ ID NO: 3386890 - RNA, 20 nt, Human
cugcuccacccuuggccugu

SEQ ID NO: 3386891 - RNA, 21 nt, Human
cugcuccacccuuggccuguc

SEQ ID NO: 3386892 - RNA, 12 nt, Human
cugcuccacgcg

SEQ ID NO: 3386893 - RNA, 14 nt, Human
cugcuccacgcgcu

SEQ ID NO: 3386894 - RNA, 23 nt, Human
cugcuccagaauuuggaaauccu

SEQ ID NO: 3386895 - RNA, 13 nt, Human
cugcuccagaccu

SEQ ID NO: 3386896 - RNA, 19 nt, Human
cugcuccagcucuggcaug

SEQ ID NO: 3386897 - RNA, 14 nt, Human
cugcuccagcuguu

SEQ ID NO: 3386898 - RNA, 12 nt, Human
cugcuccaggga

SEQ ID NO: 3386899 - RNA, 20 nt, Human
cugcucccaaggggccugag

SEQ ID NO: 3386900 - RNA, 10 nt, Human
cugcucccac

SEQ ID NO: 3386901 - RNA, 19 nt, Human
cugcucccaccuggcucug

SEQ ID NO: 3386902 - RNA, 14 nt, Human
cugcucccauccug

SEQ ID NO: 3386903 - RNA, 20 nt, Human
cugcuccccagcagcggaac

SEQ ID NO: 3386904 - RNA, 18 nt, Human
cugcuccccagcccuggc

SEQ ID NO: 3386905 - RNA, 20 nt, Human
cugcuccccagcccuggcuc

SEQ ID NO: 3386906 - RNA, 12 nt, Human
cugcucccccac

SEQ ID NO: 3386907 - RNA, 22 nt, Human
cugcucccccacccccucccca

SEQ ID NO: 3386908 - RNA, 16 nt, Human
cugcugcuucauguuu

SEQ ID NO: 3386909 - RNA, 13 nt, Human
cugcugcuucuua

SEQ ID NO: 3386910 - RNA, 15 nt, Human
cugcuggaaacagac

SEQ ID NO: 3386911 - RNA, 13 nt, Human
cugcuggaagccc

SEQ ID NO: 3386912 - RNA, 15 nt, Human
cugcuggacaguauc

SEQ ID NO: 3386913 - RNA, 21 nt, Human
cugcuggaggccucaggugcu

SEQ ID NO: 3386914 - RNA, 21 nt, Human
cugcuggaguuucauguacaa

SEQ ID NO: 3386915 - RNA, 23 nt, Human
cugcuggaucacagcugcuuucu

SEQ ID NO: 3386916 - RNA, 15 nt, Human
cugcuggcaucaaga

SEQ ID NO: 3386917 - RNA, 12 nt, Human
cugcuggccaaa

SEQ ID NO: 3386918 - RNA, 22 nt, Human
cugcuggcccagccaaacccug

SEQ ID NO: 3386919 - RNA, 11 nt, Human
cugcuggcccc

SEQ ID NO: 3386920 - RNA, 16 nt, Human
cugcuggccccucacc

SEQ ID NO: 3386921 - RNA, 13 nt, Human
cugcuggccgccu

SEQ ID NO: 3386922 - RNA, 18 nt, Human
cugcuggccgccucaccc

SEQ ID NO: 3386923 - RNA, 20 nt, Human
cugcuggccggacacccgac

SEQ ID NO: 3386924 - RNA, 15 nt, Human
cugcuggccggagca

SEQ ID NO: 3386925 - RNA, 20 nt, Human
cugcuggccgggcacagcug

SEQ ID NO: 3386926 - RNA, 13 nt, Human
cugcuggccugga

SEQ ID NO: 3386927 - RNA, 14 nt, Human
cugcuggccuggau

SEQ ID NO: 3386928 - RNA, 16 nt, Human
cugcuggccuggaucu

SEQ ID NO: 3386929 - RNA, 16 nt, Human
cugcuggccuggccgg

SEQ ID NO: 3386930 - RNA, 15 nt, Human
cugcuggcgccucug

SEQ ID NO: 3386931 - RNA, 12 nt, Human
cugcuggcucuu

SEQ ID NO: 3386932 - RNA, 19 nt, Human
cugcugggacuggccaggu

SEQ ID NO: 3386933 - RNA, 18 nt, Human
cugcugggagguuaaaaa

SEQ ID NO: 3386934 - RNA, 15 nt, Human
cugcugggcucagug

SEQ ID NO: 3386935 - RNA, 16 nt, Human
cugcugggcucaguga

SEQ ID NO: 3386936 - RNA, 18 nt, Human
cugcugggcucagugaag

SEQ ID NO: 3386937 - RNA, 18 nt, Human
cugcugggcucuccaccu

SEQ ID NO: 3386938 - RNA, 12 nt, Human
cugcugggcugg

SEQ ID NO: 3386939 - RNA, 14 nt, Human
cugcugggcugggg

SEQ ID NO: 3386940 - RNA, 17 nt, Human
cugcuggggaagacagu

SEQ ID NO: 3386941 - RNA, 14 nt, Human
cugcuggggccugg

SEQ ID NO: 3386942 - RNA, 16 nt, Human
cugcuggggccuggga

SEQ ID NO: 3386943 - RNA, 20 nt, Human
cugcugggggcaacuggcca

SEQ ID NO: 3386944 - RNA, 12 nt, Human
cugcuggguggc

SEQ ID NO: 3386945 - RNA, 17 nt, Human
cugcuggguggcccauc

SEQ ID NO: 3386946 - RNA, 21 nt, Human
cugcuggguggcccauccccc

SEQ ID NO: 3386947 - RNA, 19 nt, Human
cugcuggguuuuccuccgg

SEQ ID NO: 3386948 - RNA, 20 nt, Human
cugcugguaauuuguaucug

SEQ ID NO: 3386949 - RNA, 18 nt, Human
cugcuggucacuucuucu

SEQ ID NO: 3386950 - RNA, 17 nt, Human
cugcuggucagcacucc

SEQ ID NO: 3386951 - RNA, 21 nt, Human
cugcugguuuuaacaacugug

SEQ ID NO: 3386952 - RNA, 17 nt, Human
cugcuguaaauuuggcu

SEQ ID NO: 3386953 - RNA, 16 nt, Human
cugcugucaccucucc

SEQ ID NO: 3386954 - RNA, 16 nt, Human
cugcugucauugcuuc

SEQ ID NO: 3386955 - RNA, 19 nt, Human
cugcugucauugcuucuuc

SEQ ID NO: 3386956 - RNA, 18 nt, Human
cugcuguccagacagccu

SEQ ID NO: 3386957 - RNA, 20 nt, Human
cugcuguccagacagccugu

SEQ ID NO: 3386958 - RNA, 21 nt, Human
cugcuguccagacagccugua

SEQ ID NO: 3386959 - RNA, 20 nt, Human
cugcuguccccucuugcccc

SEQ ID NO: 3386960 - RNA, 20 nt, Human
cugcugucuaaccugugacc

SEQ ID NO: 3386961 - RNA, 15 nt, Human
cugcugucucagccu

SEQ ID NO: 3386962 - RNA, 21 nt, Human
cugcugucuggguggcucacu

SEQ ID NO: 3386963 - RNA, 15 nt, Human
cugcugugaacccug

SEQ ID NO: 3386964 - RNA, 22 nt, Human
cugcugugaacccuggggccug

SEQ ID NO: 3386965 - RNA, 23 nt, Human
cugcugugaacccuggggccuga

SEQ ID NO: 3386966 - RNA, 16 nt, Human
cugcugugauuccacu

SEQ ID NO: 3386967 - RNA, 22 nt, Human
cugcugugauuccacuacaccu

SEQ ID NO: 3386968 - RNA, 19 nt, Human
cugcugugcugugcccaag

SEQ ID NO: 3386969 - RNA, 12 nt, Human
cugcuguggcca

SEQ ID NO: 3386970 - RNA, 15 nt, Human
cugcuguggccagga

SEQ ID NO: 3386971 - RNA, 18 nt, Human
cugcuguggccaggaggu

SEQ ID NO: 3386972 - RNA, 20 nt, Human
cugcuguuauauuucaucau

SEQ ID NO: 3386973 - RNA, 15 nt, Human
cugcuuaacuucaca

SEQ ID NO: 3386974 - RNA, 22 nt, Human
cugcuuaaucuucaaagccuuc

SEQ ID NO: 3386975 - RNA, 17 nt, Human
ccuccaggugcacaagc

SEQ ID NO: 3386976 - RNA, 21 nt, Human
ccuccaggugcacaagcucca

SEQ ID NO: 3386977 - RNA, 22 nt, Human
ccuccaggugcacaagcuccaa

SEQ ID NO: 3386978 - RNA, 15 nt, Human
ccuccaggugcagag

SEQ ID NO: 3386979 - RNA, 18 nt, Human
ccuccaggugcagaggua

SEQ ID NO: 3386980 - RNA, 12 nt, Human
ccuccagguuuu

SEQ ID NO: 3386981 - RNA, 19 nt, Human
ccuccagguuuuucaauua

SEQ ID NO: 3386982 - RNA, 19 nt, Human
ccuccauauuuucuuuaaa

SEQ ID NO: 3386983 - RNA, 16 nt, Human
ccuccaucccuggccc

SEQ ID NO: 3386984 - RNA, 19 nt, Human
ccuccauccuccuccuucc

SEQ ID NO: 3386985 - RNA, 20 nt, Human
ccuccauccuccuccuuccu

SEQ ID NO: 3386986 - RNA, 12 nt, Human
ccuccauccuga

SEQ ID NO: 3386987 - RNA, 24 nt, Human
ccuccaucucauguaucaucugga

SEQ ID NO: 3386988 - RNA, 19 nt, Human
ccuccaucuccaagaaugc

SEQ ID NO: 3386989 - RNA, 21 nt, Human
ccuccaucuccaagaaugcug

SEQ ID NO: 3386990 - RNA, 23 nt, Human
ccuccaucuccaagaaugcugaa

SEQ ID NO: 3386991 - RNA, 16 nt, Human
ccuccaugacagcgcu

SEQ ID NO: 3386992 - RNA, 19 nt, Human
ccuccaugcugccuccaga

SEQ ID NO: 3386993 - RNA, 18 nt, Human
ccuccaugggccccaggg

SEQ ID NO: 3386994 - RNA, 21 nt, Human
ccuccauuaaagucugaauca

SEQ ID NO: 3386995 - RNA, 15 nt, Human
ccucccaacucaccc

SEQ ID NO: 3386996 - RNA, 20 nt, Human
ccucccaacucaccccagcc

SEQ ID NO: 3386997 - RNA, 20 nt, Human
ccucccaagcuggcuggggu

SEQ ID NO: 3386998 - RNA, 18 nt, Human
ccucccaaggagaacaaa

SEQ ID NO: 3386999 - RNA, 19 nt, Human
ccucccaauuucagacucc

SEQ ID NO: 3387000 - RNA, 20 nt, Human
ccucccaauuucagacuccc

SEQ ID NO: 3387001 - RNA, 19 nt, Human
ccucccacacccaaagcug

SEQ ID NO: 3387002 - RNA, 22 nt, Human
ccucccacacccaaagcugagc

SEQ ID NO: 3387003 - RNA, 16 nt, Human
ccucccacacucccaa

SEQ ID NO: 3387004 - RNA, 15 nt, Human
ccucccaccacagca

SEQ ID NO: 3387005 - RNA, 20 nt, Human
ccucccacccccuucucugc

SEQ ID NO: 3387006 - RNA, 14 nt, Human
ccucccaccuccag

SEQ ID NO: 3387007 - RNA, 14 nt, Human
ccucccaccucugu

SEQ ID NO: 3387008 - RNA, 13 nt, Human
ccucccacugggg

SEQ ID NO: 3387009 - RNA, 15 nt, Human
ccucccacugggguc

SEQ ID NO: 3387010 - RNA, 12 nt, Human
ccucccacuuug

SEQ ID NO: 3387011 - RNA, 18 nt, Human
ccucccagaacacacucc

SEQ ID NO: 3387012 - RNA, 17 nt, Human
ccucccagagcaccugc

SEQ ID NO: 3387013 - RNA, 23 nt, Human
ccucccagaggagccaccaguuc

SEQ ID NO: 3387014 - RNA, 18 nt, Human
ccucccagagguccagcc

SEQ ID NO: 3387015 - RNA, 21 nt, Human
ccucccagagguccagcccau

SEQ ID NO: 3387016 - RNA, 20 nt, Human
ccucccagcccuauggaugu

SEQ ID NO: 3387017 - RNA, 13 nt, Human
ccucccagcucug

SEQ ID NO: 3387018 - RNA, 11 nt, Human
ccucccagcug

SEQ ID NO: 3387019 - RNA, 19 nt, Human
ccucccagcugacaguccu

SEQ ID NO: 3387020 - RNA, 22 nt, Human
ccucccaggacucugaccccag

SEQ ID NO: 3387021 - RNA, 14 nt, Human
ccucccaggcgccc

SEQ ID NO: 3387022 - RNA, 15 nt, Human
ccucccaggcucuca

SEQ ID NO: 3387023 - RNA, 21 nt, Human
ccucccauagauacucucuuc

SEQ ID NO: 3387024 - RNA, 21 nt, Human
ccucccaucugggaguccccu

SEQ ID NO: 3387025 - RNA, 20 nt, Human
ccuccccaaggcccccugcc

SEQ ID NO: 3387026 - RNA, 22 nt, Human
ccuccccaaggcccccugccug

SEQ ID NO: 3387027 - RNA, 23 nt, Human
ccuccccaaggcccccugccugc

SEQ ID NO: 3387028 - RNA, 16 nt, Human
ccuccccagcaggugg

SEQ ID NO: 3387029 - RNA, 12 nt, Human
ccuccccagccc

SEQ ID NO: 3387030 - RNA, 15 nt, Human
ccuccccagccccua

SEQ ID NO: 3387031 - RNA, 12 nt, Human
ccuccccagccu

SEQ ID NO: 3387032 - RNA, 14 nt, Human
ccuccccagccugc

SEQ ID NO: 3387033 - RNA, 13 nt, Human
ccuccccaggccg

SEQ ID NO: 3387034 - RNA, 14 nt, Human
ccuccccaggggag

SEQ ID NO: 3387035 - RNA, 15 nt, Human
ccuccccauuuccca

SEQ ID NO: 3387036 - RNA, 20 nt, Human
ccuccccauuucccaucugc

SEQ ID NO: 3387037 - RNA, 22 nt, Human
ccuccccauuucccaucugcac

SEQ ID NO: 3387038 - RNA, 23 nt, Human
ccuccccauuucccaucugcacc

SEQ ID NO: 3387039 - RNA, 21 nt, Human
ccucccccagccaugccagcu

SEQ ID NO: 3387040 - RNA, 14 nt, Human
ccuccccccacugc

SEQ ID NO: 3387041 - RNA, 20 nt, Human
ccuccccccacugcaggccc

SEQ ID NO: 3387042 - RNA, 15 nt, Human
ccucccccccaugca

SEQ ID NO: 3387043 - RNA, 16 nt, Human
ccucccccgccacucc

SEQ ID NO: 3387044 - RNA, 17 nt, Human
ccucccccgccacuccu

SEQ ID NO: 3387045 - RNA, 16 nt, Human
ccucccccuccuuccc

SEQ ID NO: 3387046 - RNA, 12 nt, Human
ccucccccugcc

SEQ ID NO: 3387047 - RNA, 15 nt, Human
ccucccccugccagu

SEQ ID NO: 3387048 - RNA, 18 nt, Human
ccucccccugccagugcc

SEQ ID NO: 3387049 - RNA, 20 nt, Human
ccucccccugccagugccuu

SEQ ID NO: 3387050 - RNA, 14 nt, Human
ccucccccuguccc

SEQ ID NO: 3387051 - RNA, 15 nt, Human
ccucccccuucuccc

SEQ ID NO: 3387052 - RNA, 22 nt, Human
ccucccccuucucccaccccug

SEQ ID NO: 3387053 - RNA, 21 nt, Human
cuggcaucuaauucugauucu

SEQ ID NO: 3387054 - RNA, 19 nt, Human
cuggcaucugacacaaaaa

SEQ ID NO: 3387055 - RNA, 18 nt, Human
cuggcaucuuagaccucc

SEQ ID NO: 3387056 - RNA, 23 nt, Human
cuggcaucuuugcuauggggaca

SEQ ID NO: 3387057 - RNA, 17 nt, Human
cuggcaugauccaagca

SEQ ID NO: 3387058 - RNA, 19 nt, Human
cuggcaugggaaugaaugu

SEQ ID NO: 3387059 - RNA, 20 nt, Human
cuggcauguucaaagccaca

SEQ ID NO: 3387060 - RNA, 19 nt, Human
cuggcauuagaauuauuua

SEQ ID NO: 3387061 - RNA, 21 nt, Human
cuggcauuauguccacugugu

SEQ ID NO: 3387062 - RNA, 19 nt, Human
cuggcauugucccugugcc

SEQ ID NO: 3387063 - RNA, 13 nt, Human
cuggcauuuuaua

SEQ ID NO: 3387064 - RNA, 17 nt, Human
cuggccaagcugaggug

SEQ ID NO: 3387065 - RNA, 19 nt, Human
cuggccaagcugaggugcc

SEQ ID NO: 3387066 - RNA, 16 nt, Human
cuggccaccacccccc

SEQ ID NO: 3387067 - RNA, 17 nt, Human
cuggccaccaggcuggc

SEQ ID NO: 3387068 - RNA, 22 nt, Human
cuggccaccaggcuggcgcagc

SEQ ID NO: 3387069 - RNA, 16 nt, Human
cuggccaccucucucc

SEQ ID NO: 3387070 - RNA, 18 nt, Human
cuggccaccucucuccuu

SEQ ID NO: 3387071 - RNA, 15 nt, Human
cuggccaccugaggu

SEQ ID NO: 3387072 - RNA, 20 nt, Human
cuggccaccugaggugggcc

SEQ ID NO: 3387073 - RNA, 22 nt, Human
cuggccaccugaggugggccca

SEQ ID NO: 3387074 - RNA, 18 nt, Human
cuggccagacacaggccc

SEQ ID NO: 3387075 - RNA, 16 nt, Human
cuggccagaugcacca

SEQ ID NO: 3387076 - RNA, 19 nt, Human
cuggccagaugcaccagcc

SEQ ID NO: 3387077 - RNA, 18 nt, Human
cuggccagauggcccgga

SEQ ID NO: 3387078 - RNA, 13 nt, Human
cuggccagcccca

SEQ ID NO: 3387079 - RNA, 15 nt, Human
cuggccagccccaca

SEQ ID NO: 3387080 - RNA, 22 nt, Human
cuggccagccgcucuccugcca

SEQ ID NO: 3387081 - RNA, 14 nt, Human
cuggccagccuggg

SEQ ID NO: 3387082 - RNA, 17 nt, Human
cuggccagccuggggcc

SEQ ID NO: 3387083 - RNA, 22 nt, Human
cuggccagccuggggccuggca

SEQ ID NO: 3387084 - RNA, 23 nt, Human
cuggccagcgagcgcccagcucc

SEQ ID NO: 3387085 - RNA, 13 nt, Human
cuggccaggagca

SEQ ID NO: 3387086 - RNA, 12 nt, Human
cuggccaggaug

SEQ ID NO: 3387087 - RNA, 23 nt, Human
cuggccaggauggaggggugguc

SEQ ID NO: 3387088 - RNA, 11 nt, Human
cuggccaggca

SEQ ID NO: 3387089 - RNA, 13 nt, Human
cuggccaggcaga

SEQ ID NO: 3387090 - RNA, 14 nt, Human
cuggccaggcagau

SEQ ID NO: 3387091 - RNA, 21 nt, Human
cuggccaggcagaucugugcc

SEQ ID NO: 3387092 - RNA, 22 nt, Human
cuggccaggcagaucugugccc

SEQ ID NO: 3387093 - RNA, 18 nt, Human
cuggccagggccacgcuc

SEQ ID NO: 3387094 - RNA, 16 nt, Human
cuggccaguccaggcu

SEQ ID NO: 3387095 - RNA, 17 nt, Human
cuggccaguccaggcug

SEQ ID NO: 3387096 - RNA, 19 nt, Human
cuggccaguccaggcugcc

SEQ ID NO: 3387097 - RNA, 20 nt, Human
cuggccagugcccugauccc

SEQ ID NO: 3387098 - RNA, 15 nt, Human
cuggccaguguuuaa

SEQ ID NO: 3387099 - RNA, 16 nt, Human
cuggccaucuccaccc

SEQ ID NO: 3387100 - RNA, 13 nt, Human
cuggccaucucug

SEQ ID NO: 3387101 - RNA, 22 nt, Human
cuggccaucugguuaggauggc

SEQ ID NO: 3387102 - RNA, 12 nt, Human
cuggccauggag

SEQ ID NO: 3387103 - RNA, 15 nt, Human
cuggccauggagaaa

SEQ ID NO: 3387104 - RNA, 16 nt, Human
cuggccauggagaaag

SEQ ID NO: 3387105 - RNA, 17 nt, Human
cuggccauggagaaagc

SEQ ID NO: 3387106 - RNA, 23 nt, Human
cuggccauggagaaagcugacuu

SEQ ID NO: 3387107 - RNA, 14 nt, Human
cuggccauggccug

SEQ ID NO: 3387108 - RNA, 20 nt, Human
cuggccauggccugcaaacu

SEQ ID NO: 3387109 - RNA, 22 nt, Human
cuggccauggccugcaaacugg

SEQ ID NO: 3387110 - RNA, 22 nt, Human
cuggccauuugccaauuuuccu

SEQ ID NO: 3387111 - RNA, 12 nt, Human
cuggcccagccg

SEQ ID NO: 3387112 - RNA, 13 nt, Human
cuggcccagccgg

SEQ ID NO: 3387113 - RNA, 15 nt, Human
cuggcccagccggcc

SEQ ID NO: 3387114 - RNA, 16 nt, Human
cuggcccagccggccu

SEQ ID NO: 3387115 - RNA, 20 nt, Human
cuggcccagccggccucucu

SEQ ID NO: 3387116 - RNA, 14 nt, Human
cuggcccagcggcc

SEQ ID NO: 3387117 - RNA, 17 nt, Human
cuggcccagcggccccu

SEQ ID NO: 3387118 - RNA, 15 nt, Human
cuggcccagcucccc

SEQ ID NO: 3387119 - RNA, 22 nt, Human
cuggcccagcucccccgggagg

SEQ ID NO: 3387120 - RNA, 14 nt, Human
cuggcccagggcau

SEQ ID NO: 3387121 - RNA, 20 nt, Human
cuggcccagggcaucuggga

SEQ ID NO: 3387122 - RNA, 13 nt, Human
cuggcccagggcc

SEQ ID NO: 3387123 - RNA, 22 nt, Human
cuggcccaucaggguaggcugg

SEQ ID NO: 3387124 - RNA, 16 nt, Human
cuggcccaucagugua

SEQ ID NO: 3387125 - RNA, 19 nt, Human
cuggcccauguauggccag

SEQ ID NO: 3387126 - RNA, 17 nt, Human
cuggccccacaccagcc

SEQ ID NO: 3387127 - RNA, 15 nt, Human
cuggccccagcccug

SEQ ID NO: 3387128 - RNA, 17 nt, Human
cuggccccauggucagc

SEQ ID NO: 3387129 - RNA, 22 nt, Human
cuggcccccaaccucagggcuc

SEQ ID NO: 3387130 - RNA, 14 nt, Human
cugcuuaaugaaaa

SEQ ID NO: 3387131 - RNA, 12 nt, Human
cugcuuaauuca

SEQ ID NO: 3387132 - RNA, 22 nt, Human
cugcuuacaauucccugcuguc

SEQ ID NO: 3387133 - RNA, 20 nt, Human
cugcuuagaauccaaacuug

SEQ ID NO: 3387134 - RNA, 19 nt, Human
cugcuuagcuugcaccuug

SEQ ID NO: 3387135 - RNA, 16 nt, Human
cugcuuaggagagacc

SEQ ID NO: 3387136 - RNA, 20 nt, Human
cugcuuauccguuagccgug

SEQ ID NO: 3387137 - RNA, 12 nt, Human
cugcuucaagga

SEQ ID NO: 3387138 - RNA, 21 nt, Human
cugcuucagauguggagccag

SEQ ID NO: 3387139 - RNA, 23 nt, Human
cugcuucagauguggagccaggc

SEQ ID NO: 3387140 - RNA, 13 nt, Human
cugcuucagccuc

SEQ ID NO: 3387141 - RNA, 15 nt, Human
cugcuucagcuugcu

SEQ ID NO: 3387142 - RNA, 12 nt, Human
cugcuucagugg

SEQ ID NO: 3387143 - RNA, 19 nt, Human
cugcuucaguguauggaaa

SEQ ID NO: 3387144 - RNA, 18 nt, Human
cugcuuccaccucacccc

SEQ ID NO: 3387145 - RNA, 21 nt, Human
cugcuuccagugaggcucugc

SEQ ID NO: 3387146 - RNA, 16 nt, Human
cugcuucccaccuccc

SEQ ID NO: 3387147 - RNA, 22 nt, Human
cugcuucccaccucccugccca

SEQ ID NO: 3387148 - RNA, 24 nt, Human
cugcuucccaccucccugcccagg

SEQ ID NO: 3387149 - RNA, 11 nt, Human
cugcuucccau

SEQ ID NO: 3387150 - RNA, 13 nt, Human
cugcuucccaucc

SEQ ID NO: 3387151 - RNA, 24 nt, Human
cugcuucccauccuacccucgggc

SEQ ID NO: 3387152 - RNA, 21 nt, Human
cugcuucccucugccuguccc

SEQ ID NO: 3387153 - RNA, 19 nt, Human
cugcuuccgguagggaggc

SEQ ID NO: 3387154 - RNA, 14 nt, Human
cugcuuccucagag

SEQ ID NO: 3387155 - RNA, 18 nt, Human
cugcuuccuccuggaaau

SEQ ID NO: 3387156 - RNA, 14 nt, Human
cugcuuccugcuug

SEQ ID NO: 3387157 - RNA, 15 nt, Human
cugcuuccugcuugc

SEQ ID NO: 3387158 - RNA, 16 nt, Human
cugcuuccuuucuuga

SEQ ID NO: 3387159 - RNA, 19 nt, Human
cugcuucuaccaacuggaa

SEQ ID NO: 3387160 - RNA, 22 nt, Human
cugcuucuccaaaaaucugccu

SEQ ID NO: 3387161 - RNA, 16 nt, Human
cugcuucuccaaggaa

SEQ ID NO: 3387162 - RNA, 18 nt, Human
cugcuucucccacuuggc

SEQ ID NO: 3387163 - RNA, 20 nt, Human
cugcuucucccacuuggcca

SEQ ID NO: 3387164 - RNA, 13 nt, Human
cugcuucucccag

SEQ ID NO: 3387165 - RNA, 17 nt, Human
cugcuucucugacuucu

SEQ ID NO: 3387166 - RNA, 16 nt, Human
cugcuucuuaacccca

SEQ ID NO: 3387167 - RNA, 22 nt, Human
cugcuugaauaaacaccacugg

SEQ ID NO: 3387168 - RNA, 17 nt, Human
cugcuugacaacaucug

SEQ ID NO: 3387169 - RNA, 20 nt, Human
cugcuugagaauauugaagu

SEQ ID NO: 3387170 - RNA, 12 nt, Human
cugcuugaggaa

SEQ ID NO: 3387171 - RNA, 18 nt, Human
cugcuugaugaagcaagg

SEQ ID NO: 3387172 - RNA, 21 nt, Human
cugcuugaugggauucuggac

SEQ ID NO: 3387173 - RNA, 13 nt, Human
cugcuugauuuuu

SEQ ID NO: 3387174 - RNA, 20 nt, Human
cugcuugauuuuugccucuu

SEQ ID NO: 3387175 - RNA, 13 nt, Human
cugcuugcccuaa

SEQ ID NO: 3387176 - RNA, 15 nt, Human
cugcuugcccuaagc

SEQ ID NO: 3387177 - RNA, 20 nt, Human
cugcuugccgaaacuggaag

SEQ ID NO: 3387178 - RNA, 21 nt, Human
cugcuugccgaaacuggaagu

SEQ ID NO: 3387179 - RNA, 14 nt, Human
cugcuuggcccagg

SEQ ID NO: 3387180 - RNA, 13 nt, Human
cugcuugggcuuc

SEQ ID NO: 3387181 - RNA, 18 nt, Human
cugcuugggcuucauccu

SEQ ID NO: 3387182 - RNA, 19 nt, Human
cugcuugggcuucauccuc

SEQ ID NO: 3387183 - RNA, 22 nt, Human
cugcuuggggggugaugagggc

SEQ ID NO: 3387184 - RNA, 22 nt, Human
cugcuuggguggagaagccauu

SEQ ID NO: 3387185 - RNA, 17 nt, Human
cugcuugucccugccca

SEQ ID NO: 3387186 - RNA, 19 nt, Human
cugcuugugucccuccugg

SEQ ID NO: 3387187 - RNA, 17 nt, Human
cugcuuuaaagggccug

SEQ ID NO: 3387188 - RNA, 21 nt, Human
cugcuuuaaagggccugccug

SEQ ID NO: 3387189 - RNA, 22 nt, Human
cugcuuuaaagggccugccugg

SEQ ID NO: 3387190 - RNA, 17 nt, Human
cugcuuuagacuugaaa

SEQ ID NO: 3387191 - RNA, 21 nt, Human
cugcuuucagauacuggauug

SEQ ID NO: 3387192 - RNA, 12 nt, Human
cugcuuuccaca

SEQ ID NO: 3387193 - RNA, 13 nt, Human
cugcuuucucccc

SEQ ID NO: 3387194 - RNA, 16 nt, Human
cugcuuucuguuguca

SEQ ID NO: 3387195 - RNA, 15 nt, Human
cugcuuucuuugauu

SEQ ID NO: 3387196 - RNA, 20 nt, Human
cugcuuugacugagcagacu

SEQ ID NO: 3387197 - RNA, 19 nt, Human
cugggcaccuggggagugg

SEQ ID NO: 3387198 - RNA, 12 nt, Human
cugggcacuucc

SEQ ID NO: 3387199 - RNA, 17 nt, Human
cugggcacuucccugcu

SEQ ID NO: 3387200 - RNA, 20 nt, Human
ccugaagcuaucguaaaauu

SEQ ID NO: 3387201 - RNA, 23 nt, Human
ccugaagcuaucguaaaauuaag

SEQ ID NO: 3387202 - RNA, 14 nt, Human
ccugaaggccccgc

SEQ ID NO: 3387203 - RNA, 22 nt, Human
ccugaaggccccgcccaggcuu

SEQ ID NO: 3387204 - RNA, 16 nt, Human
ccugaagucacacagu

SEQ ID NO: 3387205 - RNA, 17 nt, Human
ccugaagucacacagug

SEQ ID NO: 3387206 - RNA, 17 nt, Human
ccugaaguucaccauua

SEQ ID NO: 3387207 - RNA, 15 nt, Human
ccugaauaaagagcc

SEQ ID NO: 3387208 - RNA, 22 nt, Human
ccugaauagcucccagauuuca

SEQ ID NO: 3387209 - RNA, 14 nt, Human
ccugaaucaugagc

SEQ ID NO: 3387210 - RNA, 20 nt, Human
ccugaauccaaacuaaucca

SEQ ID NO: 3387211 - RNA, 15 nt, Human
ccugaauucuuuuuc

SEQ ID NO: 3387212 - RNA, 19 nt, Human
ccugaauuuauuauuguuc

SEQ ID NO: 3387213 - RNA, 21 nt, Human
ccugaauuuuguugcuguuuu

SEQ ID NO: 3387214 - RNA, 13 nt, Human
ccugacaaauuuu

SEQ ID NO: 3387215 - RNA, 23 nt, Human
ccugacaacacucauugaccuga

SEQ ID NO: 3387216 - RNA, 18 nt, Human
ccugacaaccacuggucu

SEQ ID NO: 3387217 - RNA, 19 nt, Human
ccugacaaccacuggucug

SEQ ID NO: 3387218 - RNA, 18 nt, Human
ccugacacaccaggcgcu

SEQ ID NO: 3387219 - RNA, 18 nt, Human
ccugacacaccugcagcc

SEQ ID NO: 3387220 - RNA, 14 nt, Human
ccugacacacuaac

SEQ ID NO: 3387221 - RNA, 14 nt, Human
ccugacaccccacu

SEQ ID NO: 3387222 - RNA, 14 nt, Human
ccugacacccuucu

SEQ ID NO: 3387223 - RNA, 22 nt, Human
ccugacacugcggggcuuggcu

SEQ ID NO: 3387224 - RNA, 14 nt, Human
ccugacacuuuaau

SEQ ID NO: 3387225 - RNA, 16 nt, Human
ccugacagaaggacuc

SEQ ID NO: 3387226 - RNA, 14 nt, Human
ccugacagaaggug

SEQ ID NO: 3387227 - RNA, 21 nt, Human
ccugacagaugucagccgagc

SEQ ID NO: 3387228 - RNA, 13 nt, Human
ccugacagccaga

SEQ ID NO: 3387229 - RNA, 20 nt, Human
ccugacagccagaacucugu

SEQ ID NO: 3387230 - RNA, 18 nt, Human
ccugacaucaaaaaaggc

SEQ ID NO: 3387231 - RNA, 14 nt, Human
ccugacaucacagc

SEQ ID NO: 3387232 - RNA, 17 nt, Human
ccugacaucacagcagc

SEQ ID NO: 3387233 - RNA, 20 nt, Human
ccugacaucacagcagccuc

SEQ ID NO: 3387234 - RNA, 17 nt, Human
ccugacauguccuucug

SEQ ID NO: 3387235 - RNA, 14 nt, Human
ccugaccacccucc

SEQ ID NO: 3387236 - RNA, 14 nt, Human
ccugaccagcugcu

SEQ ID NO: 3387237 - RNA, 15 nt, Human
ccugaccagcugcuc

SEQ ID NO: 3387238 - RNA, 23 nt, Human
ccugaccaguugcagucacucua

SEQ ID NO: 3387239 - RNA, 14 nt, Human
ccugacccaggccg

SEQ ID NO: 3387240 - RNA, 15 nt, Human
ccugacccaggccgc

SEQ ID NO: 3387241 - RNA, 20 nt, Human
ccugacccauugcuguuguc

SEQ ID NO: 3387242 - RNA, 14 nt, Human
ccugaccccugcuc

SEQ ID NO: 3387243 - RNA, 16 nt, Human
ccugaccccugcucag

SEQ ID NO: 3387244 - RNA, 18 nt, Human
ccugacccucaucuuucu

SEQ ID NO: 3387245 - RNA, 22 nt, Human
ccugacccucaucuuucuucca

SEQ ID NO: 3387246 - RNA, 17 nt, Human
ccugacccuguauauag

SEQ ID NO: 3387247 - RNA, 19 nt, Human
ccugacccuguauauagcc

SEQ ID NO: 3387248 - RNA, 16 nt, Human
ccugaccucacuguga

SEQ ID NO: 3387249 - RNA, 13 nt, Human
ccugaccucaggc

SEQ ID NO: 3387250 - RNA, 17 nt, Human
ccugaccucccagcccu

SEQ ID NO: 3387251 - RNA, 18 nt, Human
ccugaccucccagcccua

SEQ ID NO: 3387252 - RNA, 16 nt, Human
ccugaccucccccucc

SEQ ID NO: 3387253 - RNA, 13 nt, Human
ccugaccucuugc

SEQ ID NO: 3387254 - RNA, 19 nt, Human
ccugaccucuugcugucuc

SEQ ID NO: 3387255 - RNA, 23 nt, Human
ccugaccucuugcugucucugcu

SEQ ID NO: 3387256 - RNA, 14 nt, Human
ccugaccugugagc

SEQ ID NO: 3387257 - RNA, 21 nt, Human
ccugaccugugagcccagcug

SEQ ID NO: 3387258 - RNA, 17 nt, Human
ccugaccuuccuuccug

SEQ ID NO: 3387259 - RNA, 16 nt, Human
ccugacgaaacuggcc

SEQ ID NO: 3387260 - RNA, 21 nt, Human
ccugacgaaacuggccccgga

SEQ ID NO: 3387261 - RNA, 23 nt, Human
ccugacuauuauguuguuagaga

SEQ ID NO: 3387262 - RNA, 16 nt, Human
ccugacucaggcauca

SEQ ID NO: 3387263 - RNA, 16 nt, Human
ccugacucucugugac

SEQ ID NO: 3387264 - RNA, 17 nt, Human
ccugacucucugugacc

SEQ ID NO: 3387265 - RNA, 18 nt, Human
ccugacucucugugaccu

SEQ ID NO: 3387266 - RNA, 18 nt, Human
ccugacucugaaaucuga

SEQ ID NO: 3387267 - RNA, 12 nt, Human
ccugacucugcc

SEQ ID NO: 3387268 - RNA, 13 nt, Human
ccugacucugccc

SEQ ID NO: 3387269 - RNA, 16 nt, Human
ccugacucugcccccu

SEQ ID NO: 3387270 - RNA, 14 nt, Human
ccugacugcccagc

SEQ ID NO: 3387271 - RNA, 19 nt, Human
ccugacugggggcagacau

SEQ ID NO: 3387272 - RNA, 21 nt, Human
ccugacuggugcuauaggcug

SEQ ID NO: 3387273 - RNA, 13 nt, Human
ccugacugucucc

SEQ ID NO: 3387274 - RNA, 22 nt, Human
ccugacuucaggggcugcccgc

SEQ ID NO: 3387275 - RNA, 23 nt, Human
ccugacuucaggggcugcccgcu

SEQ ID NO: 3387276 - RNA, 15 nt, Human
ccugacuucuguuua

SEQ ID NO: 3387277 - RNA, 13 nt, Human
ccugacuuuucug

SEQ ID NO: 3387278 - RNA, 15 nt, Human
ccugagaaagcccug

SEQ ID NO: 3387279 - RNA, 15 nt, Human
ccugagacaaaugga

SEQ ID NO: 3387280 - RNA, 12 nt, Human
ccugagaccaca

SEQ ID NO: 3387281 - RNA, 18 nt, Human
ccugagaccacagagaga

SEQ ID NO: 3387282 - RNA, 13 nt, Human
ccugagacccagg

SEQ ID NO: 3387283 - RNA, 19 nt, Human
ccugagaccccuggccucc

SEQ ID NO: 3387284 - RNA, 20 nt, Human
ccugagagaaacugagguca

SEQ ID NO: 3387285 - RNA, 13 nt, Human
ccugagaggcagg

SEQ ID NO: 3387286 - RNA, 14 nt, Human
ccugagaggcaggc

SEQ ID NO: 3387287 - RNA, 18 nt, Human
ccugagaggcaggcauag

SEQ ID NO: 3387288 - RNA, 15 nt, Human
ccugagaggggaagc

SEQ ID NO: 3387289 - RNA, 22 nt, Human
ccugagagucagcucucugccc

SEQ ID NO: 3387290 - RNA, 23 nt, Human
ccugagagucagcucucugcccu

SEQ ID NO: 3387291 - RNA, 17 nt, Human
ccugagaucucugcagg

SEQ ID NO: 3387292 - RNA, 19 nt, Human
ccugagauggcccucuggu

SEQ ID NO: 3387293 - RNA, 20 nt, Human
ccugagauggcccucuggua

SEQ ID NO: 3387294 - RNA, 21 nt, Human
ccugagaugggcuucccaagg

SEQ ID NO: 3387295 - RNA, 17 nt, Human
ccugagauucagauguc

SEQ ID NO: 3387296 - RNA, 21 nt, Human
ccugagauuuauuaaagaaaa

SEQ ID NO: 3387297 - RNA, 23 nt, Human
ccugagauuuauuaaagaaaaaa

SEQ ID NO: 3387298 - RNA, 23 nt, Human
ccugagauuucaucugcucuccu

SEQ ID NO: 3387299 - RNA, 21 nt, Human
ccugagcaacagagugagacc

SEQ ID NO: 3387300 - RNA, 14 nt, Human
ccugagcaacucuu

SEQ ID NO: 3387301 - RNA, 23 nt, Human
ccugagcaacucuugauuaucca

SEQ ID NO: 3387302 - RNA, 20 nt, Human
ccugagcaaugucugugcua

SEQ ID NO: 3387303 - RNA, 17 nt, Human
ccugagcaccucccagc

SEQ ID NO: 3387304 - RNA, 21 nt, Human
ccugagcaccucccagccccu

SEQ ID NO: 3387305 - RNA, 18 nt, Human
ccugagcaguccuuggcc

SEQ ID NO: 3387306 - RNA, 13 nt, Human
ccugagccaagga

SEQ ID NO: 3387307 - RNA, 15 nt, Human
ccugagccagauuuc

SEQ ID NO: 3387308 - RNA, 18 nt, Human
ccugagccagauuucacu

SEQ ID NO: 3387309 - RNA, 15 nt, Human
ccugagccagggucu

SEQ ID NO: 3387310 - RNA, 15 nt, Human
ccugagcccacugug

SEQ ID NO: 3387311 - RNA, 12 nt, Human
ccugagcccagg

SEQ ID NO: 3387312 - RNA, 19 nt, Human
ccugagcccagggaggccg

SEQ ID NO: 3387313 - RNA, 21 nt, Human
ccugagccccagggagagggg

SEQ ID NO: 3387314 - RNA, 23 nt, Human
ccugagccccagggugcccagaa

SEQ ID NO: 3387315 - RNA, 15 nt, Human
ccugagcccccagcu

SEQ ID NO: 3387316 - RNA, 18 nt, Human
ccugagccccgcccucuu

SEQ ID NO: 3387317 - RNA, 22 nt, Human
ccugagccccgcccucuuccug

SEQ ID NO: 3387318 - RNA, 13 nt, Human
ccugagccccuuc

SEQ ID NO: 3387319 - RNA, 14 nt, Human
ccugagccccuucc

SEQ ID NO: 3387320 - RNA, 20 nt, Human
ccugagccccuuccuugcuc

SEQ ID NO: 3387321 - RNA, 23 nt, Human
ccugagccccuuccuugcucugc

SEQ ID NO: 3387322 - RNA, 17 nt, Human
ccugagcccuacucccu

SEQ ID NO: 3387323 - RNA, 21 nt, Human
ccugagcccuacucccugcag

SEQ ID NO: 3387324 - RNA, 15 nt, Human
ccugagccugccgag

SEQ ID NO: 3387325 - RNA, 16 nt, Human
ccugagccugccgagc

SEQ ID NO: 3387326 - RNA, 17 nt, Human
ccugagccugccgagca

SEQ ID NO: 3387327 - RNA, 12 nt, Human
ccugagccuggc

SEQ ID NO: 3387328 - RNA, 13 nt, Human
ccugagccuggcc

SEQ ID NO: 3387329 - RNA, 14 nt, Human
ccugagccuggcca

SEQ ID NO: 3387330 - RNA, 22 nt, Human
ccugagcgaguggagucugcca

SEQ ID NO: 3387331 - RNA, 23 nt, Human
ccugagcgaguggagucugccac

SEQ ID NO: 3387332 - RNA, 17 nt, Human
ccugagcgccugggucc

SEQ ID NO: 3387333 - RNA, 23 nt, Human
ccugagcgcuccugccgcagagc

SEQ ID NO: 3387334 - RNA, 21 nt, Human
ccugagcuagaagcuggagga

SEQ ID NO: 3387335 - RNA, 18 nt, Human
ccugagcuaggaagaguc

SEQ ID NO: 3387336 - RNA, 13 nt, Human
ccugagcucacuc

SEQ ID NO: 3387337 - RNA, 14 nt, Human
ccugagcucacuga

SEQ ID NO: 3387338 - RNA, 22 nt, Human
ccugagcucgguggacccaggg

SEQ ID NO: 3387339 - RNA, 14 nt, Human
ccugagcuuuaugg

SEQ ID NO: 3387340 - RNA, 16 nt, Human
ccugagcuuucugcua

SEQ ID NO: 3387341 - RNA, 17 nt, Human
cuggugggcaccaagag

SEQ ID NO: 3387342 - RNA, 22 nt, Human
cugguggggauaggccagccgc

SEQ ID NO: 3387343 - RNA, 15 nt, Human
cugguggggcagcuc

SEQ ID NO: 3387344 - RNA, 16 nt, Human
cugguggggcagcucc

SEQ ID NO: 3387345 - RNA, 22 nt, Human
cuggugggugaaagaaaucaug

SEQ ID NO: 3387346 - RNA, 18 nt, Human
cuggugggugccuaggcc

SEQ ID NO: 3387347 - RNA, 19 nt, Human
cugguggucagcccuagga

SEQ ID NO: 3387348 - RNA, 14 nt, Human
cuggugguggcucg

SEQ ID NO: 3387349 - RNA, 22 nt, Human
cuggugguggcucgggaggcga

SEQ ID NO: 3387350 - RNA, 12 nt, Human
cuggugguucac

SEQ ID NO: 3387351 - RNA, 20 nt, Human
cuggugguugcuguuuuccu

SEQ ID NO: 3387352 - RNA, 18 nt, Human
cuggugguuucacggugc

SEQ ID NO: 3387353 - RNA, 20 nt, Human
cuggugguuucacggugcca

SEQ ID NO: 3387354 - RNA, 12 nt, Human
cugggcagaagg

SEQ ID NO: 3387355 - RNA, 15 nt, Human
cugggcagaaggaag

SEQ ID NO: 3387356 - RNA, 13 nt, Human
cugggcagaggaa

SEQ ID NO: 3387357 - RNA, 18 nt, Human
cugggcagcauagcaaga

SEQ ID NO: 3387358 - RNA, 16 nt, Human
cugggcagcugccucc

SEQ ID NO: 3387359 - RNA, 19 nt, Human
cugggcagcugccuccccu

SEQ ID NO: 3387360 - RNA, 22 nt, Human
cugggcagcugccuccccuccu

SEQ ID NO: 3387361 - RNA, 21 nt, Human
cugggcagcuguuagagucca

SEQ ID NO: 3387362 - RNA, 16 nt, Human
cugggcauagaugcag

SEQ ID NO: 3387363 - RNA, 23 nt, Human
cugggcauagaugcaggugagcc

SEQ ID NO: 3387364 - RNA, 14 nt, Human
cugggcaucuguuc

SEQ ID NO: 3387365 - RNA, 17 nt, Human
cugggcaucuguucugg

SEQ ID NO: 3387366 - RNA, 18 nt, Human
cugggcaucuguucuggu

SEQ ID NO: 3387367 - RNA, 21 nt, Human
cugggcaugguaccagcccug

SEQ ID NO: 3387368 - RNA, 22 nt, Human
cugggcaugguaccagcccugg

SEQ ID NO: 3387369 - RNA, 12 nt, Human
cugggcauuuuc

SEQ ID NO: 3387370 - RNA, 20 nt, Human
cugggccaaguuccucuagu

SEQ ID NO: 3387371 - RNA, 21 nt, Human
cugggccaaguuccucuagug

SEQ ID NO: 3387372 - RNA, 22 nt, Human
cugggccaauucaauacaaaca

SEQ ID NO: 3387373 - RNA, 14 nt, Human
cugggccagaauuu

SEQ ID NO: 3387374 - RNA, 13 nt, Human
cugggccagagua

SEQ ID NO: 3387375 - RNA, 20 nt, Human
cugggccaggggagguuaca

SEQ ID NO: 3387376 - RNA, 14 nt, Human
cugggccagggucu

SEQ ID NO: 3387377 - RNA, 15 nt, Human
cugggccagggucug

SEQ ID NO: 3387378 - RNA, 20 nt, Human
cugggccagggucuguguga

SEQ ID NO: 3387379 - RNA, 18 nt, Human
cugggccauguccaaaga

SEQ ID NO: 3387380 - RNA, 19 nt, Human
cugggccauguccaaagag

SEQ ID NO: 3387381 - RNA, 19 nt, Human
cugggccauguugugccuc

SEQ ID NO: 3387382 - RNA, 20 nt, Human
cugggccauguugugccucc

SEQ ID NO: 3387383 - RNA, 19 nt, Human
cugggccauucuccacagc

SEQ ID NO: 3387384 - RNA, 14 nt, Human
cugggcccaacccu

SEQ ID NO: 3387385 - RNA, 18 nt, Human
cugggcccaacccugucu

SEQ ID NO: 3387386 - RNA, 19 nt, Human
cugggcccaacccugucug

SEQ ID NO: 3387387 - RNA, 21 nt, Human
cugggcccacccaagcaggag

SEQ ID NO: 3387388 - RNA, 18 nt, Human
cugggcccagaggcacag

SEQ ID NO: 3387389 - RNA, 19 nt, Human
cugggcccagaggcacagc

SEQ ID NO: 3387390 - RNA, 20 nt, Human
cugggcccagaggcacagcc

SEQ ID NO: 3387391 - RNA, 21 nt, Human
cugggcccagaggcacagccg

SEQ ID NO: 3387392 - RNA, 22 nt, Human
cugggcccagaggcacagccgg

SEQ ID NO: 3387393 - RNA, 18 nt, Human
cugggccccagcccaccc

SEQ ID NO: 3387394 - RNA, 13 nt, Human
cugggccccagcu

SEQ ID NO: 3387395 - RNA, 15 nt, Human
cugggccccaguugu

SEQ ID NO: 3387396 - RNA, 19 nt, Human
cugggccccccagcucagg

SEQ ID NO: 3387397 - RNA, 20 nt, Human
cugggccccucccuaccuca

SEQ ID NO: 3387398 - RNA, 20 nt, Human
cugggccccugccucucugc

SEQ ID NO: 3387399 - RNA, 21 nt, Human
cugggcccgacauggcuccgg

SEQ ID NO: 3387400 - RNA, 13 nt, Human
cugggcccucucu

SEQ ID NO: 3387401 - RNA, 14 nt, Human
cugggcccucucuu

SEQ ID NO: 3387402 - RNA, 13 nt, Human
cugggcccugggc

SEQ ID NO: 3387403 - RNA, 15 nt, Human
cugggcccugggcug

SEQ ID NO: 3387404 - RNA, 17 nt, Human
cugggcccuggggccug

SEQ ID NO: 3387405 - RNA, 20 nt, Human
cugggcccuggggccuguac

SEQ ID NO: 3387406 - RNA, 21 nt, Human
cugggccguaucuccggcucc

SEQ ID NO: 3387407 - RNA, 12 nt, Human
cugggccuaugg

SEQ ID NO: 3387408 - RNA, 16 nt, Human
cugggccuauggagag

SEQ ID NO: 3387409 - RNA, 18 nt, Human
cugggccuauggagagcc

SEQ ID NO: 3387410 - RNA, 13 nt, Human
cugggccugcaga

SEQ ID NO: 3387411 - RNA, 16 nt, Human
cugggccugccucacc

SEQ ID NO: 3387412 - RNA, 17 nt, Human
cugggccugcugcugag

SEQ ID NO: 3387413 - RNA, 18 nt, Human
cugggccugcugcugaga

SEQ ID NO: 3387414 - RNA, 22 nt, Human
cugggccugcugcugagaaccu

SEQ ID NO: 3387415 - RNA, 12 nt, Human
cugggccuggcu

SEQ ID NO: 3387416 - RNA, 20 nt, Human
cugggccuggcucccucacu

SEQ ID NO: 3387417 - RNA, 22 nt, Human
cugggccuggcucccucacucu

SEQ ID NO: 3387418 - RNA, 12 nt, Human
cugggccugggc

SEQ ID NO: 3387419 - RNA, 13 nt, Human
cugggccugggcu

SEQ ID NO: 3387420 - RNA, 14 nt, Human
cugggccuuaggaa

SEQ ID NO: 3387421 - RNA, 18 nt, Human
cugggccuuaggaagagc

SEQ ID NO: 3387422 - RNA, 14 nt, Human
cugggcgcccugga

SEQ ID NO: 3387423 - RNA, 17 nt, Human
cugggcggcugugcuuc

SEQ ID NO: 3387424 - RNA, 14 nt, Human
cugggcuauggaca

SEQ ID NO: 3387425 - RNA, 15 nt, Human
cugggcuauggacac

SEQ ID NO: 3387426 - RNA, 20 nt, Human
cugggcuauggacacagggu

SEQ ID NO: 3387427 - RNA, 13 nt, Human
cugggcucaagca

SEQ ID NO: 3387428 - RNA, 19 nt, Human
cugggcucccuucccaccu

SEQ ID NO: 3387429 - RNA, 20 nt, Human
cugggcucccuucccaccuc

SEQ ID NO: 3387430 - RNA, 14 nt, Human
cugggcuccuccag

SEQ ID NO: 3387431 - RNA, 15 nt, Human
cugggcuccuccagg

SEQ ID NO: 3387432 - RNA, 13 nt, Human
cugggcuccugga

SEQ ID NO: 3387433 - RNA, 17 nt, Human
cugggcucggaggcugc

SEQ ID NO: 3387434 - RNA, 12 nt, Human
cugggcucucca

SEQ ID NO: 3387435 - RNA, 18 nt, Human
cugggcucuccaccucag

SEQ ID NO: 3387436 - RNA, 22 nt, Human
cugggcucugcaauuccccucu

SEQ ID NO: 3387437 - RNA, 14 nt, Human
cugggcucugccac

SEQ ID NO: 3387438 - RNA, 15 nt, Human
cugggcucugccacc

SEQ ID NO: 3387439 - RNA, 13 nt, Human
cugggcucugccc

SEQ ID NO: 3387440 - RNA, 18 nt, Human
cugggcucugccccagcu

SEQ ID NO: 3387441 - RNA, 18 nt, Human
cugggcucugggagcagc

SEQ ID NO: 3387442 - RNA, 16 nt, Human
cugggcucugugggcu

SEQ ID NO: 3387443 - RNA, 15 nt, Human
cugggcugacuggga

SEQ ID NO: 3387444 - RNA, 13 nt, Human
cugggcugagccc

SEQ ID NO: 3387445 - RNA, 23 nt, Human
cugggcugagggagccuggcccc

SEQ ID NO: 3387446 - RNA, 23 nt, Human
cugggcugccaugugaagaggga

SEQ ID NO: 3387447 - RNA, 17 nt, Human
cugggcugcucucacau

SEQ ID NO: 3387448 - RNA, 20 nt, Human
cugggcuggaugagcuccca

SEQ ID NO: 3387449 - RNA, 12 nt, Human
cugggcuggcuc

SEQ ID NO: 3387450 - RNA, 16 nt, Human
cugggcuggcucccuc

SEQ ID NO: 3387451 - RNA, 20 nt, Human
cugggcuggggccugauggg

SEQ ID NO: 3387452 - RNA, 12 nt, Human
cugggcugggug

SEQ ID NO: 3387453 - RNA, 22 nt, Human
cugggcugggugcgaccccauc

SEQ ID NO: 3387454 - RNA, 22 nt, Human
cugggcuuauaucuggccucug

SEQ ID NO: 3387455 - RNA, 18 nt, Human
cugggcuucaguggcagc

SEQ ID NO: 3387456 - RNA, 21 nt, Human
cugggcuucaguggcagcugc

SEQ ID NO: 3387457 - RNA, 24 nt, Human
cugggcuucaguggcagcugcuuu

SEQ ID NO: 3387458 - RNA, 19 nt, Human
cugggcuuccuggagcaga

SEQ ID NO: 3387459 - RNA, 15 nt, Human
cugggcuuggccugc

SEQ ID NO: 3387460 - RNA, 18 nt, Human
cugggcuuggccugcugu

SEQ ID NO: 3387461 - RNA, 21 nt, Human
cugggcuuggggaccagagcu

SEQ ID NO: 3387462 - RNA, 19 nt, Human
cugggcuuggggcuuccua

SEQ ID NO: 3387463 - RNA, 21 nt, Human
cugggcuuugauuccaucucc

SEQ ID NO: 3387464 - RNA, 18 nt, Human
cuggggaaagacacugcc

SEQ ID NO: 3387465 - RNA, 22 nt, Human
cuggggaaagacacugccuggg

SEQ ID NO: 3387466 - RNA, 22 nt, Human
cuggggaaauaacagcuguggc

SEQ ID NO: 3387467 - RNA, 15 nt, Human
cuggggaaccugacc

SEQ ID NO: 3387468 - RNA, 14 nt, Human
cuggggaagacagu

SEQ ID NO: 3387469 - RNA, 13 nt, Human
cuggggaagcaaa

SEQ ID NO: 3387470 - RNA, 13 nt, Human
cuggggaaggaag

SEQ ID NO: 3387471 - RNA, 12 nt, Human
cuggggaaggag

SEQ ID NO: 3387472 - RNA, 23 nt, Human
cuggggacggggggccccaguca

SEQ ID NO: 3387473 - RNA, 19 nt, Human
cuggggacuuggccucucu

SEQ ID NO: 3387474 - RNA, 11 nt, Human
cuggggagcag

SEQ ID NO: 3387475 - RNA, 16 nt, Human
cuggggagcaggcagc

SEQ ID NO: 3387476 - RNA, 17 nt, Human
cuggggagcaggcagcc

SEQ ID NO: 3387477 - RNA, 14 nt, Human
cuggggagcggguc

SEQ ID NO: 3387478 - RNA, 20 nt, Human
cuggggagugggacagaguc

SEQ ID NO: 3387479 - RNA, 14 nt, Human
cuggggauccccgc

SEQ ID NO: 3387480 - RNA, 16 nt, Human
cuggggaugugggagg

SEQ ID NO: 3387481 - RNA, 16 nt, Human
cuggggcacaguccag

SEQ ID NO: 3387482 - RNA, 19 nt, Human
cuggggcacaguccaggaa

SEQ ID NO: 3387483 - RNA, 21 nt, Human
cuggggcacuuggcagcgcgg

SEQ ID NO: 3387484 - RNA, 18 nt, Human
cuggggcagacaauaaac

SEQ ID NO: 3387485 - RNA, 14 nt, Human
cuggggcagccucu

SEQ ID NO: 3387486 - RNA, 14 nt, Human
cugucuguguuuuu

SEQ ID NO: 3387487 - RNA, 19 nt, Human
cugucuguuguauucauug

SEQ ID NO: 3387488 - RNA, 19 nt, Human
cugucuuaaacuaaaugug

SEQ ID NO: 3387489 - RNA, 23 nt, Human
cugucuuaauuaaguaaacuaau

SEQ ID NO: 3387490 - RNA, 14 nt, Human
cugucuucaagggc

SEQ ID NO: 3387491 - RNA, 22 nt, Human
cugucuucaccugauucaacua

SEQ ID NO: 3387492 - RNA, 18 nt, Human
cugucuucaguaagccgu

SEQ ID NO: 3387493 - RNA, 12 nt, Human
cugucuucccag

SEQ ID NO: 3387494 - RNA, 15 nt, Human
cugucuucccagggu

SEQ ID NO: 3387495 - RNA, 18 nt, Human
cugucuucccaggguagc

SEQ ID NO: 3387496 - RNA, 14 nt, Human
cugucuuccugcau

SEQ ID NO: 3387497 - RNA, 12 nt, Human
cugucuuccuuu

SEQ ID NO: 3387498 - RNA, 14 nt, Human
cugucuucuggacu

SEQ ID NO: 3387499 - RNA, 19 nt, Human
cugucuucuguauauaaau

SEQ ID NO: 3387500 - RNA, 21 nt, Human
cugucuucuucaggguccuga

SEQ ID NO: 3387501 - RNA, 23 nt, Human
cugucuugccuuuuucauuauuu

SEQ ID NO: 3387502 - RNA, 13 nt, Human
cugucuuguaaua

SEQ ID NO: 3387503 - RNA, 20 nt, Human
cugucuuguaauauuuugua

SEQ ID NO: 3387504 - RNA, 22 nt, Human
cugucuuguaauauuuuguauu

SEQ ID NO: 3387505 - RNA, 22 nt, Human
cugucuuguugcggauggaugg

SEQ ID NO: 3387506 - RNA, 16 nt, Human
cugucuuuaauucugu

SEQ ID NO: 3387507 - RNA, 11 nt, Human
cugucuuuccu

SEQ ID NO: 3387508 - RNA, 14 nt, Human
cugucuuuccuaga

SEQ ID NO: 3387509 - RNA, 15 nt, Human
cugucuuucuugcuc

SEQ ID NO: 3387510 - RNA, 17 nt, Human
cugucuuucuugcuccc

SEQ ID NO: 3387511 - RNA, 14 nt, Human
cugucuuuuaaacu

SEQ ID NO: 3387512 - RNA, 21 nt, Human
cugucuuuucagguuugucau

SEQ ID NO: 3387513 - RNA, 19 nt, Human
cugugaaaaaaaaaaugcu

SEQ ID NO: 3387514 - RNA, 23 nt, Human
cugugaaacuggcacugaauuaa

SEQ ID NO: 3387515 - RNA, 22 nt, Human
cugugaaaggaaagagggaggu

SEQ ID NO: 3387516 - RNA, 23 nt, Human
cugugaaauaucaucacguaugu

SEQ ID NO: 3387517 - RNA, 20 nt, Human
cugugaacaagcuucaguaa

SEQ ID NO: 3387518 - RNA, 17 nt, Human
cugugaacccaggacaa

SEQ ID NO: 3387519 - RNA, 22 nt, Human
cugugaacccaggacaagcaug

SEQ ID NO: 3387520 - RNA, 18 nt, Human
cugugaacgauuuagaaa

SEQ ID NO: 3387521 - RNA, 22 nt, Human
cugugaacgauuuagaaagaag

SEQ ID NO: 3387522 - RNA, 15 nt, Human
cugugaacugaacuc

SEQ ID NO: 3387523 - RNA, 18 nt, Human
cugugaacuugaaauuug

SEQ ID NO: 3387524 - RNA, 15 nt, Human
cugugaacuugggga

SEQ ID NO: 3387525 - RNA, 20 nt, Human
cugugaagaucucacucugc

SEQ ID NO: 3387526 - RNA, 17 nt, Human
cugugaagugagaccuu

SEQ ID NO: 3387527 - RNA, 15 nt, Human
cugugaaugccacug

SEQ ID NO: 3387528 - RNA, 13 nt, Human
cugugaauuaagc

SEQ ID NO: 3387529 - RNA, 14 nt, Human
cugugaauucagau

SEQ ID NO: 3387530 - RNA, 19 nt, Human
cugugaauugagcugcaga

SEQ ID NO: 3387531 - RNA, 22 nt, Human
cugugacacacuacaccacaca

SEQ ID NO: 3387532 - RNA, 17 nt, Human
cugugacaggcagcaga

SEQ ID NO: 3387533 - RNA, 13 nt, Human
cugugacauguaa

SEQ ID NO: 3387534 - RNA, 15 nt, Human
cugugaccaaugucu

SEQ ID NO: 3387535 - RNA, 16 nt, Human
cugugaccaaugucuu

SEQ ID NO: 3387536 - RNA, 14 nt, Human
cugugaccauuuau

SEQ ID NO: 3387537 - RNA, 17 nt, Human
cugugaccauuuauaau

SEQ ID NO: 3387538 - RNA, 12 nt, Human
cugugacccacu

SEQ ID NO: 3387539 - RNA, 21 nt, Human
cugugacccucaauucauauu

SEQ ID NO: 3387540 - RNA, 14 nt, Human
cugugaccucaggc

SEQ ID NO: 3387541 - RNA, 23 nt, Human
cugugaccucaggcacuagccuu

SEQ ID NO: 3387542 - RNA, 17 nt, Human
cugugaccucuccccug

SEQ ID NO: 3387543 - RNA, 15 nt, Human
cugugaccugcaucu

SEQ ID NO: 3387544 - RNA, 18 nt, Human
cugugaccugcugagcuc

SEQ ID NO: 3387545 - RNA, 22 nt, Human
cugugaccugcugagcucugag

SEQ ID NO: 3387546 - RNA, 17 nt, Human
cugugacuaggaaaaaa

SEQ ID NO: 3387547 - RNA, 14 nt, Human
cugugacucuuuuu

SEQ ID NO: 3387548 - RNA, 22 nt, Human
cugugacugauguuaggcuggg

SEQ ID NO: 3387549 - RNA, 16 nt, Human
cugugacuucuccagg

SEQ ID NO: 3387550 - RNA, 21 nt, Human
cugugacuucuccaggucuca

SEQ ID NO: 3387551 - RNA, 17 nt, Human
cugugagaagguuuauu

SEQ ID NO: 3387552 - RNA, 12 nt, Human
cugugagacagu

SEQ ID NO: 3387553 - RNA, 22 nt, Human
ccugcugccauguggacuggug

SEQ ID NO: 3387554 - RNA, 22 nt, Human
ccugcugcccaaucuccaucug

SEQ ID NO: 3387555 - RNA, 22 nt, Human
ccugcugcccaggcugugcagc

SEQ ID NO: 3387556 - RNA, 13 nt, Human
ccugcugcccucc

SEQ ID NO: 3387557 - RNA, 18 nt, Human
ccugcugcccucccccuc

SEQ ID NO: 3387558 - RNA, 18 nt, Human
ccugcugccgccucccag

SEQ ID NO: 3387559 - RNA, 22 nt, Human
ccugcugccgccucccagccug

SEQ ID NO: 3387560 - RNA, 23 nt, Human
ccugcugccgccucccagccugg

SEQ ID NO: 3387561 - RNA, 13 nt, Human
ccugcugccuccc

SEQ ID NO: 3387562 - RNA, 12 nt, Human
ccugcugcuccc

SEQ ID NO: 3387563 - RNA, 18 nt, Human
ccugcugcucccucagac

SEQ ID NO: 3387564 - RNA, 16 nt, Human
ccugcugcugagaacc

SEQ ID NO: 3387565 - RNA, 17 nt, Human
ccugcugcugagaaccu

SEQ ID NO: 3387566 - RNA, 18 nt, Human
ccugcugcugccugccug

SEQ ID NO: 3387567 - RNA, 19 nt, Human
ccugcugcuggugcacagc

SEQ ID NO: 3387568 - RNA, 20 nt, Human
ccugcugcugucaccucucc

SEQ ID NO: 3387569 - RNA, 23 nt, Human
ccugcugcugucugggugcuacu

SEQ ID NO: 3387570 - RNA, 14 nt, Human
ccugcugcuucucc

SEQ ID NO: 3387571 - RNA, 16 nt, Human
ccugcugcuucuccaa

SEQ ID NO: 3387572 - RNA, 14 nt, Human
ccugcuggaggccu

SEQ ID NO: 3387573 - RNA, 18 nt, Human
ccugcuggaggccucagg

SEQ ID NO: 3387574 - RNA, 16 nt, Human
ccugcuggaucuccca

SEQ ID NO: 3387575 - RNA, 9 nt, Human
ccugcuggc

SEQ ID NO: 3387576 - RNA, 15 nt, Human
ccugcuggcacccac

SEQ ID NO: 3387577 - RNA, 14 nt, Human
ccugcuggccccuc

SEQ ID NO: 3387578 - RNA, 16 nt, Human
ccugcuggccccucac

SEQ ID NO: 3387579 - RNA, 13 nt, Human
ccugcuggccgcc

SEQ ID NO: 3387580 - RNA, 19 nt, Human
ccugcuggccgccucaccc

SEQ ID NO: 3387581 - RNA, 21 nt, Human
ccugcuggccggacacccgac

SEQ ID NO: 3387582 - RNA, 17 nt, Human
ccugcugggcucuccac

SEQ ID NO: 3387583 - RNA, 18 nt, Human
ccugcugggcucuccacc

SEQ ID NO: 3387584 - RNA, 21 nt, Human
ccugcugggcucuccaccuca

SEQ ID NO: 3387585 - RNA, 13 nt, Human
ccugcuggggauc

SEQ ID NO: 3387586 - RNA, 21 nt, Human
ccugcuggggauccccgccug

SEQ ID NO: 3387587 - RNA, 17 nt, Human
ccugcuggguaaacugu

SEQ ID NO: 3387588 - RNA, 21 nt, Human
ccugcuggguguggcgcagca

SEQ ID NO: 3387589 - RNA, 12 nt, Human
ccugcuggucaa

SEQ ID NO: 3387590 - RNA, 17 nt, Human
ccugcuggucacagccu

SEQ ID NO: 3387591 - RNA, 18 nt, Human
ccugcuggucacagccuc

SEQ ID NO: 3387592 - RNA, 20 nt, Human
ccugcugucauugcuucuuc

SEQ ID NO: 3387593 - RNA, 19 nt, Human
ccugcugugaaagaaguaa

SEQ ID NO: 3387594 - RNA, 23 nt, Human
ccugcugugauuccacuacaccu

SEQ ID NO: 3387595 - RNA, 14 nt, Human
ccugcuucaaauau

SEQ ID NO: 3387596 - RNA, 22 nt, Human
ccugcuucagauguggagccag

SEQ ID NO: 3387597 - RNA, 24 nt, Human
ccugcuucagucccuuccccaugc

SEQ ID NO: 3387598 - RNA, 14 nt, Human
ccugcuucaugcuc

SEQ ID NO: 3387599 - RNA, 17 nt, Human
ccugcuucaugcucagc

SEQ ID NO: 3387600 - RNA, 14 nt, Human
ccugcuuccaggaa

SEQ ID NO: 3387601 - RNA, 21 nt, Human
ccugcuucccaccucccugcc

SEQ ID NO: 3387602 - RNA, 17 nt, Human
ccugcuucuccagccug

SEQ ID NO: 3387603 - RNA, 15 nt, Human
ccugcuucucugccc

SEQ ID NO: 3387604 - RNA, 22 nt, Human
ccugcuugaugggauucuggac

SEQ ID NO: 3387605 - RNA, 15 nt, Human
ccugcuugccaaggc

SEQ ID NO: 3387606 - RNA, 17 nt, Human
ccugcuugccaaggcag

SEQ ID NO: 3387607 - RNA, 18 nt, Human
ccugcuugccaaggcaga

SEQ ID NO: 3387608 - RNA, 14 nt, Human
ccugcuuggcccag

SEQ ID NO: 3387609 - RNA, 23 nt, Human
ccugcuuggguggagaagccauu

SEQ ID NO: 3387610 - RNA, 15 nt, Human
ccugcuugucccugc

SEQ ID NO: 3387611 - RNA, 23 nt, Human
ccugcuuuagaauguuuuccuuc

SEQ ID NO: 3387612 - RNA, 15 nt, Human
ccugcuuucagauac

SEQ ID NO: 3387613 - RNA, 21 nt, Human
ccugcuuucagauacuggauu

SEQ ID NO: 3387614 - RNA, 15 nt, Human
ccugcuuuggcgggc

SEQ ID NO: 3387615 - RNA, 23 nt, Human
ccugcuuugggcugcccuggugc

SEQ ID NO: 3387616 - RNA, 20 nt, Human
ccugcuuuuuauggccugug

SEQ ID NO: 3387617 - RNA, 16 nt, Human
ccugcuuuuugaaaug

SEQ ID NO: 3387618 - RNA, 17 nt, Human
ccugcuuuuugaaauga

SEQ ID NO: 3387619 - RNA, 23 nt, Human
ccugcuuuuugaaaugaaauuua

SEQ ID NO: 3387620 - RNA, 12 nt, Human
ccuggaaaccac

SEQ ID NO: 3387621 - RNA, 15 nt, Human
ccuggaaaccacagu

SEQ ID NO: 3387622 - RNA, 15 nt, Human
ccuggaaaggcucag

SEQ ID NO: 3387623 - RNA, 22 nt, Human
ccuggaaauaucaguuacucag

SEQ ID NO: 3387624 - RNA, 23 nt, Human
ccuggaaaucaggguuaguauug

SEQ ID NO: 3387625 - RNA, 19 nt, Human
ccuggaacaauauuuuaug

SEQ ID NO: 3387626 - RNA, 22 nt, Human
ccuggaacaucaucaaggcacu

SEQ ID NO: 3387627 - RNA, 24 nt, Human
ccuggaacauccuuugcagggcag

SEQ ID NO: 3387628 - RNA, 18 nt, Human
ccuggaaccuugcugucc

SEQ ID NO: 3387629 - RNA, 20 nt, Human
ccuggaaccuugcuguccug

SEQ ID NO: 3387630 - RNA, 23 nt, Human
cugugcccacccuccacucuccu

SEQ ID NO: 3387631 - RNA, 19 nt, Human
cugugcccagaauacugau

SEQ ID NO: 3387632 - RNA, 17 nt, Human
cugugcccagagauggg

SEQ ID NO: 3387633 - RNA, 11 nt, Human
cugugcccagc

SEQ ID NO: 3387634 - RNA, 14 nt, Human
cugugcccagcuca

SEQ ID NO: 3387635 - RNA, 13 nt, Human
cugugcccccagg

SEQ ID NO: 3387636 - RNA, 20 nt, Human
cugugcccccaggguccugg

SEQ ID NO: 3387637 - RNA, 22 nt, Human
cugugcccccaggguccuggga

SEQ ID NO: 3387638 - RNA, 23 nt, Human
cugugcccccaggguccugggag

SEQ ID NO: 3387639 - RNA, 20 nt, Human
cugugccccuuccgccacug

SEQ ID NO: 3387640 - RNA, 23 nt, Human
cugugccccuuccgccacugggg

SEQ ID NO: 3387641 - RNA, 20 nt, Human
cugugccccuugacaacugg

SEQ ID NO: 3387642 - RNA, 14 nt, Human
cugugcccuccuga

SEQ ID NO: 3387643 - RNA, 16 nt, Human
cugugcccuccugacc

SEQ ID NO: 3387644 - RNA, 12 nt, Human
cugugcccuggu

SEQ ID NO: 3387645 - RNA, 21 nt, Human
cugugccucccuccccagugc

SEQ ID NO: 3387646 - RNA, 15 nt, Human
cugugccuccucccu

SEQ ID NO: 3387647 - RNA, 17 nt, Human
cugugccuccucccucc

SEQ ID NO: 3387648 - RNA, 18 nt, Human
cugugccuccucccuccc

SEQ ID NO: 3387649 - RNA, 21 nt, Human
cugugccuccucccucccucu

SEQ ID NO: 3387650 - RNA, 24 nt, Human
cugugccucgcuccccacucugcu

SEQ ID NO: 3387651 - RNA, 11 nt, Human
cugugccucug

SEQ ID NO: 3387652 - RNA, 12 nt, Human
cugugccucugc

SEQ ID NO: 3387653 - RNA, 13 nt, Human
cugugccucugcc

SEQ ID NO: 3387654 - RNA, 16 nt, Human
cugugccucugccugu

SEQ ID NO: 3387655 - RNA, 16 nt, Human
cugugccucugggacu

SEQ ID NO: 3387656 - RNA, 17 nt, Human
cugugccucugggacug

SEQ ID NO: 3387657 - RNA, 18 nt, Human
cugugccucugggacugg

SEQ ID NO: 3387658 - RNA, 13 nt, Human
cugugccuggagc

SEQ ID NO: 3387659 - RNA, 20 nt, Human
cugugccuugucacgccaga

SEQ ID NO: 3387660 - RNA, 21 nt, Human
cugugcgucuugguguaauuu

SEQ ID NO: 3387661 - RNA, 22 nt, Human
cugugcgucuugguguaauuug

SEQ ID NO: 3387662 - RNA, 16 nt, Human
cugugcgugaaacaca

SEQ ID NO: 3387663 - RNA, 14 nt, Human
cugugcguggggcu

SEQ ID NO: 3387664 - RNA, 22 nt, Human
cugugcguguguguguguguau

SEQ ID NO: 3387665 - RNA, 18 nt, Human
cugugcuaauaacagugc

SEQ ID NO: 3387666 - RNA, 22 nt, Human
cugugcuacugucuuuggaaaa

SEQ ID NO: 3387667 - RNA, 17 nt, Human
cugugcuacuuugccuu

SEQ ID NO: 3387668 - RNA, 15 nt, Human
cugugcuaugaauuu

SEQ ID NO: 3387669 - RNA, 16 nt, Human
cugugcuaugaauuuu

SEQ ID NO: 3387670 - RNA, 19 nt, Human
cugugcuauggugcucugu

SEQ ID NO: 3387671 - RNA, 21 nt, Human
cugugcuauggugcucugucu

SEQ ID NO: 3387672 - RNA, 17 nt, Human
cugugcucagaagggcu

SEQ ID NO: 3387673 - RNA, 13 nt, Human
cugugcucagaga

SEQ ID NO: 3387674 - RNA, 16 nt, Human
cugugcucagcccuga

SEQ ID NO: 3387675 - RNA, 15 nt, Human
cugugcucaggacuc

SEQ ID NO: 3387676 - RNA, 16 nt, Human
cugugcucaggacuca

SEQ ID NO: 3387677 - RNA, 19 nt, Human
cugugcuccauggcugcca

SEQ ID NO: 3387678 - RNA, 15 nt, Human
cugugcuccgugccu

SEQ ID NO: 3387679 - RNA, 16 nt, Human
cugugcucucaccagc

SEQ ID NO: 3387680 - RNA, 14 nt, Human
cugugcucuggaca

SEQ ID NO: 3387681 - RNA, 15 nt, Human
cugugcucuggacag

SEQ ID NO: 3387682 - RNA, 13 nt, Human
cugugcugaggcc

SEQ ID NO: 3387683 - RNA, 16 nt, Human
cugugcugaggccuua

SEQ ID NO: 3387684 - RNA, 21 nt, Human
cugugcugaggccuuaucauu

SEQ ID NO: 3387685 - RNA, 12 nt, Human
cugugcugaguc

SEQ ID NO: 3387686 - RNA, 19 nt, Human
cugugcugagucugaaggc

SEQ ID NO: 3387687 - RNA, 12 nt, Human
cugugcugcccu

SEQ ID NO: 3387688 - RNA, 13 nt, Human
cugugcugcccug

SEQ ID NO: 3387689 - RNA, 13 nt, Human
cugugcuggagcc

SEQ ID NO: 3387690 - RNA, 15 nt, Human
cugugcuggagccac

SEQ ID NO: 3387691 - RNA, 21 nt, Human
cugugcuggagccacuaacua

SEQ ID NO: 3387692 - RNA, 12 nt, Human
cugugcuggcca

SEQ ID NO: 3387693 - RNA, 14 nt, Human
cugugcugggagaa

SEQ ID NO: 3387694 - RNA, 12 nt, Human
cugugcuggugu

SEQ ID NO: 3387695 - RNA, 21 nt, Human
cugugcuguggaagcaacagg

SEQ ID NO: 3387696 - RNA, 17 nt, Human
cugugcuguuguuauga

SEQ ID NO: 3387697 - RNA, 14 nt, Human
cugugcuguuucaa

SEQ ID NO: 3387698 - RNA, 17 nt, Human
cugugcuucaauuaaua

SEQ ID NO: 3387699 - RNA, 17 nt, Human
cugugcuucgggcccuu

SEQ ID NO: 3387700 - RNA, 21 nt, Human
cugugcuucgggcccuuccca

SEQ ID NO: 3387701 - RNA, 16 nt, Human
cugugcuugaaggccc

SEQ ID NO: 3387702 - RNA, 20 nt, Human
cugugcuugaaggcccugcu

SEQ ID NO: 3387703 - RNA, 17 nt, Human
cugugcuuuccagcuca

SEQ ID NO: 3387704 - RNA, 22 nt, Human
cugugcuuuccagcucaccccc

SEQ ID NO: 3387705 - RNA, 19 nt, Human
cugugcuuucccugaacug

SEQ ID NO: 3387706 - RNA, 20 nt, Human
cugugcuuucuauuguacag

SEQ ID NO: 3387707 - RNA, 20 nt, Human
cuguggaaaguguaaagcau

SEQ ID NO: 3387708 - RNA, 18 nt, Human
cuguggaacauaaaaagg

SEQ ID NO: 3387709 - RNA, 21 nt, Human
cuguggaacauaaaaaggaca

SEQ ID NO: 3387710 - RNA, 12 nt, Human
cuguggaagcaa

SEQ ID NO: 3387711 - RNA, 18 nt, Human
cuguggaaucuggaguga

SEQ ID NO: 3387712 - RNA, 14 nt, Human
cuguggagacugcu

SEQ ID NO: 3387713 - RNA, 17 nt, Human
cuguggagacugcuccu

SEQ ID NO: 3387714 - RNA, 22 nt, Human
cuguggagacugcuccugagcc

SEQ ID NO: 3387715 - RNA, 23 nt, Human
cuguggaggaaggauuguaaaaa

SEQ ID NO: 3387716 - RNA, 17 nt, Human
cuguggaggauugcuau

SEQ ID NO: 3387717 - RNA, 14 nt, Human
cuguggaucaaauc

SEQ ID NO: 3387718 - RNA, 19 nt, Human
cuguacuccucccaggcgc

SEQ ID NO: 3387719 - RNA, 17 nt, Human
cuguacucgcuugugca

SEQ ID NO: 3387720 - RNA, 23 nt, Human
cuguacucuggggugcugccuga

SEQ ID NO: 3387721 - RNA, 21 nt, Human
cuguacugauucaauuugaug

SEQ ID NO: 3387722 - RNA, 15 nt, Human
cuguacugccugcuu

SEQ ID NO: 3387723 - RNA, 13 nt, Human
cuguacuggagag

SEQ ID NO: 3387724 - RNA, 17 nt, Human
cuguacuggagagcaac

SEQ ID NO: 3387725 - RNA, 18 nt, Human
cuguacuggagagcaaca

SEQ ID NO: 3387726 - RNA, 17 nt, Human
cuguacugugucucaug

SEQ ID NO: 3387727 - RNA, 20 nt, Human
cuguacuguuacugggcccu

SEQ ID NO: 3387728 - RNA, 16 nt, Human
cuguacuuaauaaauu

SEQ ID NO: 3387729 - RNA, 20 nt, Human
cuguacuucaaguuaaagug

SEQ ID NO: 3387730 - RNA, 17 nt, Human
cuguacuucuugaauau

SEQ ID NO: 3387731 - RNA, 14 nt, Human
cuguacuuuuuggc

SEQ ID NO: 3387732 - RNA, 13 nt, Human
cuguagaaauggu

SEQ ID NO: 3387733 - RNA, 22 nt, Human
cuguagaccuagggaggaccuu

SEQ ID NO: 3387734 - RNA, 13 nt, Human
cuguagaguggga

SEQ ID NO: 3387735 - RNA, 16 nt, Human
cuguagaguugcugag

SEQ ID NO: 3387736 - RNA, 16 nt, Human
cuguagauaauuaacc

SEQ ID NO: 3387737 - RNA, 18 nt, Human
cuguagauauguauucuu

SEQ ID NO: 3387738 - RNA, 16 nt, Human
cuguagaugauguauu

SEQ ID NO: 3387739 - RNA, 20 nt, Human
cuguagauucuguggaacaa

SEQ ID NO: 3387740 - RNA, 21 nt, Human
cuguagauugcuucuguagua

SEQ ID NO: 3387741 - RNA, 16 nt, Human
cuguagcaucuucugg

SEQ ID NO: 3387742 - RNA, 17 nt, Human
cuguagcaucuucugga

SEQ ID NO: 3387743 - RNA, 18 nt, Human
cuguagcaucuucuggag

SEQ ID NO: 3387744 - RNA, 16 nt, Human
cuguagcccacucugc

SEQ ID NO: 3387745 - RNA, 20 nt, Human
cuguagcccacucugcucgc

SEQ ID NO: 3387746 - RNA, 17 nt, Human
cuguagccccagugaca

SEQ ID NO: 3387747 - RNA, 20 nt, Human
cuguagccccagugacagcu

SEQ ID NO: 3387748 - RNA, 22 nt, Human
cuguagccuaaacuccaaacau

SEQ ID NO: 3387749 - RNA, 21 nt, Human
cuguagcuauaaugagcaugu

SEQ ID NO: 3387750 - RNA, 18 nt, Human
cuguaggaagguuaaugu

SEQ ID NO: 3387751 - RNA, 19 nt, Human
cuguaggaucuaaggcugu

SEQ ID NO: 3387752 - RNA, 12 nt, Human
cuguaggccuca

SEQ ID NO: 3387753 - RNA, 22 nt, Human
cuguaggccucaggugaaacuc

SEQ ID NO: 3387754 - RNA, 15 nt, Human
cuguagggcuggacc

SEQ ID NO: 3387755 - RNA, 15 nt, Human
cuguagguugcacac

SEQ ID NO: 3387756 - RNA, 20 nt, Human
cuguagguugcacacuuugg

SEQ ID NO: 3387757 - RNA, 20 nt, Human
cuguaguaaauaaugcuuug

SEQ ID NO: 3387758 - RNA, 22 nt, Human
cuguaguaaauaaugcuuugaa

SEQ ID NO: 3387759 - RNA, 14 nt, Human
cuguagucccagcc

SEQ ID NO: 3387760 - RNA, 22 nt, Human
cuguagucccagcuacucggga

SEQ ID NO: 3387761 - RNA, 16 nt, Human
cuguagugcuacaggg

SEQ ID NO: 3387762 - RNA, 20 nt, Human
cuguagugucacucaaggcg

SEQ ID NO: 3387763 - RNA, 16 nt, Human
cuguaguucuaagacu

SEQ ID NO: 3387764 - RNA, 20 nt, Human
cuguaguugcguggacucug

SEQ ID NO: 3387765 - RNA, 19 nt, Human
cuguauaaaaucagccaau

SEQ ID NO: 3387766 - RNA, 19 nt, Human
cuguauaaaggugugcugu

SEQ ID NO: 3387767 - RNA, 14 nt, Human
cuguauaaaugucu

SEQ ID NO: 3387768 - RNA, 14 nt, Human
cuguauaagcacug

SEQ ID NO: 3387769 - RNA, 13 nt, Human
cuguauaaguaag

SEQ ID NO: 3387770 - RNA, 15 nt, Human
cuguauaaguaagaa

SEQ ID NO: 3387771 - RNA, 21 nt, Human
cuguauaaguggaggcacuuu

SEQ ID NO: 3387772 - RNA, 22 nt, Human
cuguauaaguggaggcacuuua

SEQ ID NO: 3387773 - RNA, 15 nt, Human
cuguauaaguuauuu

SEQ ID NO: 3387774 - RNA, 22 nt, Human
cuguauaaguuauuuuuguaca

SEQ ID NO: 3387775 - RNA, 13 nt, Human
ccugucccccagc

SEQ ID NO: 3387776 - RNA, 17 nt, Human
ccugucccccagcucug

SEQ ID NO: 3387777 - RNA, 14 nt, Human
ccugucccccugac

SEQ ID NO: 3387778 - RNA, 17 nt, Human
ccuguccccucagcucc

SEQ ID NO: 3387779 - RNA, 13 nt, Human
ccuguccccugcu

SEQ ID NO: 3387780 - RNA, 18 nt, Human
ccugucccucccaccucu

SEQ ID NO: 3387781 - RNA, 15 nt, Human
ccugucccuggccau

SEQ ID NO: 3387782 - RNA, 23 nt, Human
ccugucccuucucuuaauuuaau

SEQ ID NO: 3387783 - RNA, 15 nt, Human
ccugucccuugaccu

SEQ ID NO: 3387784 - RNA, 21 nt, Human
ccuguccuaaggaaccuuccu

SEQ ID NO: 3387785 - RNA, 15 nt, Human
ccuguccucacugcu

SEQ ID NO: 3387786 - RNA, 21 nt, Human
ccuguccucacugcucccuga

SEQ ID NO: 3387787 - RNA, 15 nt, Human
ccuguccucagcuuc

SEQ ID NO: 3387788 - RNA, 17 nt, Human
ccuguccucccaucccc

SEQ ID NO: 3387789 - RNA, 21 nt, Human
ccuguccucccauccccugga

SEQ ID NO: 3387790 - RNA, 15 nt, Human
ccuguccuccucgga

SEQ ID NO: 3387791 - RNA, 16 nt, Human
ccuguccuccuggugg

SEQ ID NO: 3387792 - RNA, 17 nt, Human
ccuguccuccugguggg

SEQ ID NO: 3387793 - RNA, 16 nt, Human
ccuguccucuuucagc

SEQ ID NO: 3387794 - RNA, 18 nt, Human
ccuguccucuuucagcuc

SEQ ID NO: 3387795 - RNA, 22 nt, Human
ccuguccugauggucagcuccc

SEQ ID NO: 3387796 - RNA, 23 nt, Human
ccuguccugauggucagcucccu

SEQ ID NO: 3387797 - RNA, 17 nt, Human
ccuguccugccuaaggc

SEQ ID NO: 3387798 - RNA, 14 nt, Human
ccuguccugccugu

SEQ ID NO: 3387799 - RNA, 15 nt, Human
ccuguccugggcugg

SEQ ID NO: 3387800 - RNA, 18 nt, Human
ccugucgagacacuugcc

SEQ ID NO: 3387801 - RNA, 21 nt, Human
ccugucgaguucggcucuggg

SEQ ID NO: 3387802 - RNA, 22 nt, Human
ccugucgauuagacuggacagc

SEQ ID NO: 3387803 - RNA, 16 nt, Human
ccugucggagcccugu

SEQ ID NO: 3387804 - RNA, 17 nt, Human
ccugucggagcccuguc

SEQ ID NO: 3387805 - RNA, 14 nt, Human
ccugucuagagagg

SEQ ID NO: 3387806 - RNA, 16 nt, Human
ccugucuagucucucc

SEQ ID NO: 3387807 - RNA, 13 nt, Human
ccugucucagccu

SEQ ID NO: 3387808 - RNA, 17 nt, Human
ccugucucauccccagg

SEQ ID NO: 3387809 - RNA, 20 nt, Human
ccugucucauccccaggggu

SEQ ID NO: 3387810 - RNA, 15 nt, Human
ccugucuccccucug

SEQ ID NO: 3387811 - RNA, 18 nt, Human
ccugucuccccucugcug

SEQ ID NO: 3387812 - RNA, 17 nt, Human
ccugucucuacuaaaaa

SEQ ID NO: 3387813 - RNA, 22 nt, Human
ccugucucuuccauaugaccuc

SEQ ID NO: 3387814 - RNA, 23 nt, Human
ccugucugagacucacaggaagg

SEQ ID NO: 3387815 - RNA, 15 nt, Human
ccugucugccagcca

SEQ ID NO: 3387816 - RNA, 17 nt, Human
ccugucugccagccagc

SEQ ID NO: 3387817 - RNA, 23 nt, Human
ccugucugccagccagcagccag

SEQ ID NO: 3387818 - RNA, 15 nt, Human
ccugucugccagggc

SEQ ID NO: 3387819 - RNA, 20 nt, Human
ccugucugccccagcccaga

SEQ ID NO: 3387820 - RNA, 20 nt, Human
ccugucuguagagggcccug

SEQ ID NO: 3387821 - RNA, 22 nt, Human
ccugucugugaccugcaucuaa

SEQ ID NO: 3387822 - RNA, 17 nt, Human
ccugucuguuacacugg

SEQ ID NO: 3387823 - RNA, 17 nt, Human
ccugucuuauccuccac

SEQ ID NO: 3387824 - RNA, 16 nt, Human
ccugucuucccagggu

SEQ ID NO: 3387825 - RNA, 15 nt, Human
ccugucuuccugcau

SEQ ID NO: 3387826 - RNA, 17 nt, Human
ccugucuucugcuuugu

SEQ ID NO: 3387827 - RNA, 19 nt, Human
ccugucuugccuuuuucau

SEQ ID NO: 3387828 - RNA, 20 nt, Human
ccugucuugccuuuuucauu

SEQ ID NO: 3387829 - RNA, 16 nt, Human
ccugugaaugccacug

SEQ ID NO: 3387830 - RNA, 21 nt, Human
ccugugaaugccacugccuuc

SEQ ID NO: 3387831 - RNA, 18 nt, Human
ccugugacuucagcucug

SEQ ID NO: 3387832 - RNA, 17 nt, Human
ccugugagcccagcugg

SEQ ID NO: 3387833 - RNA, 13 nt, Human
ccugugagcugca

SEQ ID NO: 3387834 - RNA, 14 nt, Human
ccugugagcugcac

SEQ ID NO: 3387835 - RNA, 13 nt, Human
ccugugaggcagg

SEQ ID NO: 3387836 - RNA, 15 nt, Human
ccugugaguaaauau

SEQ ID NO: 3387837 - RNA, 16 nt, Human
ccugugaguaaauauu

SEQ ID NO: 3387838 - RNA, 17 nt, Human
ccugugaguaaauauug

SEQ ID NO: 3387839 - RNA, 20 nt, Human
ccugugauccacccaacccu

SEQ ID NO: 3387840 - RNA, 19 nt, Human
ccugugaucuuauuuuucu

SEQ ID NO: 3387841 - RNA, 17 nt, Human
ccugugauggggcccug

SEQ ID NO: 3387842 - RNA, 18 nt, Human
ccugugauggggcccugc

SEQ ID NO: 3387843 - RNA, 19 nt, Human
ccugugauggggcccugcc

SEQ ID NO: 3387844 - RNA, 20 nt, Human
ccugugauggggcccugccu

SEQ ID NO: 3387845 - RNA, 17 nt, Human
ccugugcaaugcauuag

SEQ ID NO: 3387846 - RNA, 12 nt, Human
ccugugcacaca

SEQ ID NO: 3387847 - RNA, 13 nt, Human
ccugugcacacac

SEQ ID NO: 3387848 - RNA, 17 nt, Human
ccugugcacacacacac

SEQ ID NO: 3387849 - RNA, 18 nt, Human
ccugugcacaccccacuc

SEQ ID NO: 3387850 - RNA, 18 nt, Human
ccugugcagccgcugagc

SEQ ID NO: 3387851 - RNA, 20 nt, Human
ccugugcagccgcugagcga

SEQ ID NO: 3387852 - RNA, 21 nt, Human
ccugugcagccgcugagcgag

SEQ ID NO: 3387853 - RNA, 14 nt, Human
ccugugcauguaug

SEQ ID NO: 3387854 - RNA, 21 nt, Human
ccugugccacccaccagggcg

SEQ ID NO: 3387855 - RNA, 15 nt, Human
ccugugccagcccag

SEQ ID NO: 3387856 - RNA, 17 nt, Human
ccugugccagcccagag

SEQ ID NO: 3387857 - RNA, 12 nt, Human
ccugugccaggu

SEQ ID NO: 3387858 - RNA, 21 nt, Human
ccugugccaggugaaggaggc

SEQ ID NO: 3387859 - RNA, 15 nt, Human
ccugugcccuuauuc

SEQ ID NO: 3387860 - RNA, 16 nt, Human
ccugugccuccucccu

SEQ ID NO: 3387861 - RNA, 18 nt, Human
ccugugcuccgugccucc

SEQ ID NO: 3387862 - RNA, 21 nt, Human
ccugugcuccgugccuccacc

SEQ ID NO: 3387863 - RNA, 22 nt, Human
ccugugcuccgugccuccacca

SEQ ID NO: 3387864 - RNA, 18 nt, Human
ccugugcugacggaagcc

SEQ ID NO: 3387865 - RNA, 23 nt, Human
ccugugcugcccgucuucagccu

SEQ ID NO: 3387866 - RNA, 24 nt, Human
ccuguggaacauaaaaaggacauc

SEQ ID NO: 3387867 - RNA, 20 nt, Human
ccuguggaaggcagagaaau

SEQ ID NO: 3387868 - RNA, 15 nt, Human
ccuguggagcccgca

SEQ ID NO: 3387869 - RNA, 15 nt, Human
ccuguggagcucagc

SEQ ID NO: 3387870 - RNA, 20 nt, Human
ccuguggaugauaaaacaca

SEQ ID NO: 3387871 - RNA, 21 nt, Human
ccuguggaugaucaauccuuu

SEQ ID NO: 3387872 - RNA, 19 nt, Human
ccuguggaugcugcugccc

SEQ ID NO: 3387873 - RNA, 18 nt, Human
ccuguggauguaaaguga

SEQ ID NO: 3387874 - RNA, 14 nt, Human
ccuguggcaggcag

SEQ ID NO: 3387875 - RNA, 18 nt, Human
ccuguggcaggcagcgcc

SEQ ID NO: 3387876 - RNA, 22 nt, Human
ccuguggcaggcagcgccaagc

SEQ ID NO: 3387877 - RNA, 18 nt, Human
ccuguggcaucuuugccu

SEQ ID NO: 3387878 - RNA, 20 nt, Human
ccuguggccaaguucuuagu

SEQ ID NO: 3387879 - RNA, 16 nt, Human
ccuguggccccacccu

SEQ ID NO: 3387880 - RNA, 17 nt, Human
ccuguggccccacccug

SEQ ID NO: 3387881 - RNA, 14 nt, Human
ccuguggcccuggc

SEQ ID NO: 3387882 - RNA, 18 nt, Human
ccuguggcccuguccugc

SEQ ID NO: 3387883 - RNA, 15 nt, Human
ccuguggcggugccu

SEQ ID NO: 3387884 - RNA, 18 nt, Human
ccuguggcugcgcuuccu

SEQ ID NO: 3387885 - RNA, 16 nt, Human
ccuguggcuguggaga

SEQ ID NO: 3387886 - RNA, 14 nt, Human
ccugugggagccuc

SEQ ID NO: 3387887 - RNA, 20 nt, Human
ccuguggggauuucucccag

SEQ ID NO: 3387888 - RNA, 22 nt, Human
ccuguggggauuucucccagcu

SEQ ID NO: 3387889 - RNA, 20 nt, Human
ccugugggggaagagcacag

SEQ ID NO: 3387890 - RNA, 21 nt, Human
ccugugggggaagagcacagc

SEQ ID NO: 3387891 - RNA, 21 nt, Human
ccuguggggucaacccuucug

SEQ ID NO: 3387892 - RNA, 19 nt, Human
ccugugguucugagauggc

SEQ ID NO: 3387893 - RNA, 20 nt, Human
ccuguguaacagcuccuugg

SEQ ID NO: 3387894 - RNA, 21 nt, Human
ccuguguaacagcuccuuggg

SEQ ID NO: 3387895 - RNA, 13 nt, Human
ccuguguagcugg

SEQ ID NO: 3387896 - RNA, 17 nt, Human
ccugugucaguuuaugu

SEQ ID NO: 3387897 - RNA, 21 nt, Human
ccugugucuugcaauggcagc

SEQ ID NO: 3387898 - RNA, 10 nt, Human
ccugugugca

SEQ ID NO: 3387899 - RNA, 16 nt, Human
ccugugugcagguucc

SEQ ID NO: 3387900 - RNA, 15 nt, Human
ccuguguggacagga

SEQ ID NO: 3387901 - RNA, 14 nt, Human
ccuguguggagagg

SEQ ID NO: 3387902 - RNA, 23 nt, Human
ccuguguggagagggaaugugaa

SEQ ID NO: 3387903 - RNA, 12 nt, Human
ccuguguggcca

SEQ ID NO: 3387904 - RNA, 15 nt, Human
ccuguguggccacuu

SEQ ID NO: 3387905 - RNA, 23 nt, Human
ccuguguggccacuucuguccau

SEQ ID NO: 3387906 - RNA, 17 nt, Human
ccugugugguacucuga

SEQ ID NO: 3387907 - RNA, 22 nt, Human
ccugugugguuuaguguaaaaa

SEQ ID NO: 3387908 - RNA, 20 nt, Human
ccuguguguccaaaacugcc

SEQ ID NO: 3387909 - RNA, 20 nt, Human
ccugugugugcgccuacagg

SEQ ID NO: 3387910 - RNA, 17 nt, Human
ccuguguuaauuuaagu

SEQ ID NO: 3387911 - RNA, 16 nt, Human
ccuguguugucucuag

SEQ ID NO: 3387912 - RNA, 20 nt, Human
ccuguguugucucuagagca

SEQ ID NO: 3387913 - RNA, 22 nt, Human
ccuguguugucucuagagcagg

SEQ ID NO: 3387914 - RNA, 15 nt, Human
ccuguuacccagaga

SEQ ID NO: 3387915 - RNA, 19 nt, Human
ccuguuaccuacuuugacu

SEQ ID NO: 3387916 - RNA, 23 nt, Human
ccuguuagacguccuccguccau

SEQ ID NO: 3387917 - RNA, 15 nt, Human
ccuguuagcagacag

SEQ ID NO: 3387918 - RNA, 18 nt, Human
ccuguuagcuccucacug

SEQ ID NO: 3387919 - RNA, 22 nt, Human
cuuagcaggagaggagagccag

SEQ ID NO: 3387920 - RNA, 14 nt, Human
cuuagcagugauuu

SEQ ID NO: 3387921 - RNA, 19 nt, Human
cuuagcauagcuuauuauu

SEQ ID NO: 3387922 - RNA, 22 nt, Human
cuuagcauagcuuauuauugaa

SEQ ID NO: 3387923 - RNA, 19 nt, Human
cuuagcauuuucugcaucu

SEQ ID NO: 3387924 - RNA, 21 nt, Human
cuuagcauuuucugcaucucc

SEQ ID NO: 3387925 - RNA, 22 nt, Human
cuuagccauuuuucaaagcaau

SEQ ID NO: 3387926 - RNA, 13 nt, Human
cuuagcccccacc

SEQ ID NO: 3387927 - RNA, 17 nt, Human
cuuagcccccacccacu

SEQ ID NO: 3387928 - RNA, 18 nt, Human
cuuagcccccacccacuu

SEQ ID NO: 3387929 - RNA, 11 nt, Human
cuuagccuccc

SEQ ID NO: 3387930 - RNA, 14 nt, Human
cuuagccuccugac

SEQ ID NO: 3387931 - RNA, 21 nt, Human
cuuagccuggaccucugacag

SEQ ID NO: 3387932 - RNA, 15 nt, Human
cuuagccuggagcac

SEQ ID NO: 3387933 - RNA, 16 nt, Human
cuuagcucaaugagca

SEQ ID NO: 3387934 - RNA, 22 nt, Human
cuuagcucaaugagcauguuua

SEQ ID NO: 3387935 - RNA, 23 nt, Human
cuuagcucauucuccuuguguua

SEQ ID NO: 3387936 - RNA, 14 nt, Human
cuuagcugagugga

SEQ ID NO: 3387937 - RNA, 14 nt, Human
cuuagcugccaagu

SEQ ID NO: 3387938 - RNA, 17 nt, Human
cuuagcugccaaguaaa

SEQ ID NO: 3387939 - RNA, 17 nt, Human
cuuagcugucugcucag

SEQ ID NO: 3387940 - RNA, 16 nt, Human
ccuguuccccagagaa

SEQ ID NO: 3387941 - RNA, 18 nt, Human
ccuguuccccucacugga

SEQ ID NO: 3387942 - RNA, 19 nt, Human
ccuguuccccucucccuuc

SEQ ID NO: 3387943 - RNA, 16 nt, Human
ccuguucuaaggggga

SEQ ID NO: 3387944 - RNA, 21 nt, Human
ccuguucuaagggggagggga

SEQ ID NO: 3387945 - RNA, 21 nt, Human
ccuguucugaacuguggggug

SEQ ID NO: 3387946 - RNA, 12 nt, Human
ccuguucuuccu

SEQ ID NO: 3387947 - RNA, 13 nt, Human
ccuguucuuccuc

SEQ ID NO: 3387948 - RNA, 21 nt, Human
ccuguugaauuuuguucucug

SEQ ID NO: 3387949 - RNA, 23 nt, Human
ccuguugacgaagucucuuuucu

SEQ ID NO: 3387950 - RNA, 16 nt, Human
ccuguugcacccagcc

SEQ ID NO: 3387951 - RNA, 17 nt, Human
ccuguugcacccagccc

SEQ ID NO: 3387952 - RNA, 19 nt, Human
ccuguugcacccagcccug

SEQ ID NO: 3387953 - RNA, 20 nt, Human
ccuguugcacccagcccugg

SEQ ID NO: 3387954 - RNA, 22 nt, Human
ccuguugcuaagccccagcaag

SEQ ID NO: 3387955 - RNA, 19 nt, Human
ccuguugcuauagagccua

SEQ ID NO: 3387956 - RNA, 17 nt, Human
ccuguugcuguguuuaa

SEQ ID NO: 3387957 - RNA, 19 nt, Human
ccuguuggacccgcucugg

SEQ ID NO: 3387958 - RNA, 16 nt, Human
ccuguugggccaggag

SEQ ID NO: 3387959 - RNA, 17 nt, Human
ccuguugggccaggagc

SEQ ID NO: 3387960 - RNA, 23 nt, Human
ccuguugggccaggagccuccug

SEQ ID NO: 3387961 - RNA, 13 nt, Human
ccuguugguucca

SEQ ID NO: 3387962 - RNA, 17 nt, Human
ccuguugguuccaagcc

SEQ ID NO: 3387963 - RNA, 21 nt, Human
ccuguugguuccaagcccugg

SEQ ID NO: 3387964 - RNA, 14 nt, Human
ccuguugugccaca

SEQ ID NO: 3387965 - RNA, 14 nt, Human
ccuguuuaaaaaac

SEQ ID NO: 3387966 - RNA, 15 nt, Human
ccuguuuaauauuua

SEQ ID NO: 3387967 - RNA, 21 nt, Human
ccuguuuaauauuuaaacagc

SEQ ID NO: 3387968 - RNA, 16 nt, Human
ccuguuucaaucacug

SEQ ID NO: 3387969 - RNA, 17 nt, Human
ccuguuucaaucacugu

SEQ ID NO: 3387970 - RNA, 18 nt, Human
ccuguuucagaggcucag

SEQ ID NO: 3387971 - RNA, 19 nt, Human
ccuguuucagaggcucaga

SEQ ID NO: 3387972 - RNA, 18 nt, Human
ccuguuugaagccugccc

SEQ ID NO: 3387973 - RNA, 19 nt, Human
ccuguuugaggaaagcaag

SEQ ID NO: 3387974 - RNA, 16 nt, Human
ccuguuuggauuuuua

SEQ ID NO: 3387975 - RNA, 15 nt, Human
ccuguuuggccucuc

SEQ ID NO: 3387976 - RNA, 16 nt, Human
ccuguuuggccucucu

SEQ ID NO: 3387977 - RNA, 18 nt, Human
ccuguuuguuucugaaag

SEQ ID NO: 3387978 - RNA, 23 nt, Human
ccuguuuucccacgaggaaucug

SEQ ID NO: 3387979 - RNA, 18 nt, Human
ccuguuuuguuggaaggu

SEQ ID NO: 3387980 - RNA, 17 nt, Human
ccuguuuuuaagcuguu

SEQ ID NO: 3387981 - RNA, 16 nt, Human
ccuguuuuucacauuu

SEQ ID NO: 3387982 - RNA, 15 nt, Human
ccuguuuuucugggu

SEQ ID NO: 3387983 - RNA, 17 nt, Human
ccuguuuuucugggugg

SEQ ID NO: 3387984 - RNA, 20 nt, Human
ccuuaaaacaucauuccuuu

SEQ ID NO: 3387985 - RNA, 13 nt, Human
ccuuaaaauggaa

SEQ ID NO: 3387986 - RNA, 16 nt, Human
ccuuaaaauuugaaac

SEQ ID NO: 3387987 - RNA, 20 nt, Human
ccuuaaacaaaaauuaaaau

SEQ ID NO: 3387988 - RNA, 20 nt, Human
ccuuaaacaguugcacagca

SEQ ID NO: 3387989 - RNA, 15 nt, Human
ccuuaaacugugugg

SEQ ID NO: 3387990 - RNA, 22 nt, Human
ccuuaaaggcaccaucuaauag

SEQ ID NO: 3387991 - RNA, 12 nt, Human
ccuuaacacuga

SEQ ID NO: 3387992 - RNA, 18 nt, Human
ccuuaacccaaggagcac

SEQ ID NO: 3387993 - RNA, 16 nt, Human
ccuuaacugcauccag

SEQ ID NO: 3387994 - RNA, 12 nt, Human
ccuuaagaauga

SEQ ID NO: 3387995 - RNA, 20 nt, Human
ccuuaagaaugaguuucuua

SEQ ID NO: 3387996 - RNA, 15 nt, Human
ccuuaagaaugccaa

SEQ ID NO: 3387997 - RNA, 14 nt, Human
ccuuaagcugcagg

SEQ ID NO: 3387998 - RNA, 15 nt, Human
ccuuaauauuucuuc

SEQ ID NO: 3387999 - RNA, 15 nt, Human
ccuuaauuuccuuuu

SEQ ID NO: 3388000 - RNA, 19 nt, Human
ccuuaauuuuuuuuucaua

SEQ ID NO: 3388001 - RNA, 22 nt, Human
ccuuacaaguuagaaaacauaa

SEQ ID NO: 3388002 - RNA, 20 nt, Human
ccuuacacaaugguuuucuu

SEQ ID NO: 3388003 - RNA, 18 nt, Human
ccuuacaccucguuaggg

SEQ ID NO: 3388004 - RNA, 14 nt, Human
ccuuacagccucug

SEQ ID NO: 3388005 - RNA, 17 nt, Human
ccuuacaguaggagccc

SEQ ID NO: 3388006 - RNA, 17 nt, Human
ccuuaccaacuuucugu

SEQ ID NO: 3388007 - RNA, 19 nt, Human
ccuuaccaacuuucuguaa

SEQ ID NO: 3388008 - RNA, 15 nt, Human
ccuuaccagcagagc

SEQ ID NO: 3388009 - RNA, 17 nt, Human
ccuuaccagcagagcac

SEQ ID NO: 3388010 - RNA, 15 nt, Human
ccuuaccccuuagcc

SEQ ID NO: 3388011 - RNA, 16 nt, Human
ccuuaccccuuagccu

SEQ ID NO: 3388012 - RNA, 13 nt, Human
ccuuaccuccugc

SEQ ID NO: 3388013 - RNA, 16 nt, Human
ccuuaccuccugccca

SEQ ID NO: 3388014 - RNA, 17 nt, Human
ccuuaccuccugcccag

SEQ ID NO: 3388015 - RNA, 18 nt, Human
ccuuaccuccugcccagg

SEQ ID NO: 3388016 - RNA, 17 nt, Human
ccuuacgaucaggcaca

SEQ ID NO: 3388017 - RNA, 16 nt, Human
ccuuacucccaggcac

SEQ ID NO: 3388018 - RNA, 21 nt, Human
ccuuacuccugugggagccuc

SEQ ID NO: 3388019 - RNA, 22 nt, Human
ccuuacuccugugggagccucg

SEQ ID NO: 3388020 - RNA, 16 nt, Human
ccuuacucuucuugaa

SEQ ID NO: 3388021 - RNA, 22 nt, Human
ccuuacucuucuugaaauuuua

SEQ ID NO: 3388022 - RNA, 13 nt, Human
ccuuacuggcuua

SEQ ID NO: 3388023 - RNA, 20 nt, Human
ccuuacuuacagcauaaggg

SEQ ID NO: 3388024 - RNA, 13 nt, Human
ccuuacuucuugc

SEQ ID NO: 3388025 - RNA, 21 nt, Human
ccuuacuuuacugccugaaua

SEQ ID NO: 3388026 - RNA, 16 nt, Human
ccuuagaaaauguguc

SEQ ID NO: 3388027 - RNA, 18 nt, Human
ccuuagaaauguaaacug

SEQ ID NO: 3388028 - RNA, 15 nt, Human
ccuuagaaccuuucu

SEQ ID NO: 3388029 - RNA, 18 nt, Human
ccuuagaagguauuaaga

SEQ ID NO: 3388030 - RNA, 18 nt, Human
ccuuagaagucacacagu

SEQ ID NO: 3388031 - RNA, 15 nt, Human
ccuuagacagaggcc

SEQ ID NO: 3388032 - RNA, 17 nt, Human
ccuuagacagaggcccu

SEQ ID NO: 3388033 - RNA, 16 nt, Human
ccuuagacagucccug

SEQ ID NO: 3388034 - RNA, 17 nt, Human
ccuuagacagucccugc

SEQ ID NO: 3388035 - RNA, 21 nt, Human
ccuuagaccaccaagccuuga

SEQ ID NO: 3388036 - RNA, 17 nt, Human
ccuuagacucuuuuccu

SEQ ID NO: 3388037 - RNA, 15 nt, Human
ccuuagagccaggca

SEQ ID NO: 3388038 - RNA, 17 nt, Human
ccuuagagguccucugg

SEQ ID NO: 3388039 - RNA, 19 nt, Human
ccuuagagguccucuggag

SEQ ID NO: 3388040 - RNA, 23 nt, Human
ccuuagauugaaguaaacugcag

SEQ ID NO: 3388041 - RNA, 16 nt, Human
ccuuagcaaauucugu

SEQ ID NO: 3388042 - RNA, 21 nt, Human
ccuuagcccccacccacuucc

SEQ ID NO: 3388043 - RNA, 13 nt, Human
ccuuagccuggac

SEQ ID NO: 3388044 - RNA, 15 nt, Human
ccuuagcugccaagc

SEQ ID NO: 3388045 - RNA, 20 nt, Human
ccuuagcugccaagccccau

SEQ ID NO: 3388046 - RNA, 14 nt, Human
ccuuagcuucuggc

SEQ ID NO: 3388047 - RNA, 15 nt, Human
ccuuaggaagagccu

SEQ ID NO: 3388048 - RNA, 19 nt, Human
ccuuaggccuaccugaugg

SEQ ID NO: 3388049 - RNA, 13 nt, Human
ccuuaggccuucc

SEQ ID NO: 3388050 - RNA, 14 nt, Human
ccuuagucuucuca

SEQ ID NO: 3388051 - RNA, 16 nt, Human
ccuuaguggcuuuuuu

SEQ ID NO: 3388052 - RNA, 16 nt, Human
ccuuauaguuugggcu

SEQ ID NO: 3388053 - RNA, 20 nt, Human
ccuuauauaugcacuuaauu

SEQ ID NO: 3388054 - RNA, 14 nt, Human
ccuuaucaaaggac

SEQ ID NO: 3388055 - RNA, 14 nt, Human
ccuuaucagagcua

SEQ ID NO: 3388056 - RNA, 14 nt, Human
ccuuaucauaaauu

SEQ ID NO: 3388057 - RNA, 17 nt, Human
ccuuauccaggacucug

SEQ ID NO: 3388058 - RNA, 16 nt, Human
ccuuauccucccugua

SEQ ID NO: 3388059 - RNA, 20 nt, Human
ccuuauccuuccucuccuuc

SEQ ID NO: 3388060 - RNA, 19 nt, Human
ccuuaucuaguguuugauu

SEQ ID NO: 3388061 - RNA, 23 nt, Human
ccuuaucuccacaaccucuuccc

SEQ ID NO: 3388062 - RNA, 19 nt, Human
ccuuaugcuucuuucaaau

SEQ ID NO: 3388063 - RNA, 17 nt, Human
ccuuauggaacacucug

SEQ ID NO: 3388064 - RNA, 16 nt, Human
cuguuuuuuuuucauu

SEQ ID NO: 3388065 - RNA, 19 nt, Human
cuuaaaaaaaaaaaaaagc

SEQ ID NO: 3388066 - RNA, 15 nt, Human
cuuaaaaaaaacuca

SEQ ID NO: 3388067 - RNA, 15 nt, Human
cuuaaaaaaaugaca

SEQ ID NO: 3388068 - RNA, 17 nt, Human
cuuaaaaaauaaaaacu

SEQ ID NO: 3388069 - RNA, 13 nt, Human
cuuaaaaaauguc

SEQ ID NO: 3388070 - RNA, 14 nt, Human
cuuaaaaacaacga

SEQ ID NO: 3388071 - RNA, 11 nt, Human
cuuaaaaagua

SEQ ID NO: 3388072 - RNA, 18 nt, Human
cuuaaaaagucugcauua

SEQ ID NO: 3388073 - RNA, 13 nt, Human
cuuaaaaaugguu

SEQ ID NO: 3388074 - RNA, 20 nt, Human
cuuaaaaaugguuuaaaugg

SEQ ID NO: 3388075 - RNA, 16 nt, Human
cuuaaaaauguaaaua

SEQ ID NO: 3388076 - RNA, 22 nt, Human
cuuaaaaauguuuuuucaugug

SEQ ID NO: 3388077 - RNA, 17 nt, Human
cuuaaaacaucauuccu

SEQ ID NO: 3388078 - RNA, 21 nt, Human
cuuaaaacuaggcauuuguaa

SEQ ID NO: 3388079 - RNA, 23 nt, Human
cuuaaaacuaggcauuuguaaau

SEQ ID NO: 3388080 - RNA, 15 nt, Human
cuuaaaacuuuucaa

SEQ ID NO: 3388081 - RNA, 17 nt, Human
cuuaaaagccaucaugu

SEQ ID NO: 3388082 - RNA, 21 nt, Human
cuuaaaagccaucauguaaau

SEQ ID NO: 3388083 - RNA, 21 nt, Human
cuuaaaagcuaucuucaugua

SEQ ID NO: 3388084 - RNA, 23 nt, Human
cuuaaaauaaacaguugugaacc

SEQ ID NO: 3388085 - RNA, 13 nt, Human
cuuaaaauaagca

SEQ ID NO: 3388086 - RNA, 20 nt, Human
cuuaaaauacgguaccuggc

SEQ ID NO: 3388087 - RNA, 18 nt, Human
cuuaaaauagaaauaagu

SEQ ID NO: 3388088 - RNA, 11 nt, Human
cuuaaaaugga

SEQ ID NO: 3388089 - RNA, 14 nt, Human
cuuaaaauggaauu

SEQ ID NO: 3388090 - RNA, 18 nt, Human
cuuaaaauggaauugaaa

SEQ ID NO: 3388091 - RNA, 13 nt, Human
cuuaaaauuugaa

SEQ ID NO: 3388092 - RNA, 19 nt, Human
cuuaaaauuugaaacauug

SEQ ID NO: 3388093 - RNA, 13 nt, Human
cuuaaacaaaaau

SEQ ID NO: 3388094 - RNA, 14 nt, Human
cuuaaacagggcau

SEQ ID NO: 3388095 - RNA, 14 nt, Human
cuuagcuucaggaa

SEQ ID NO: 3388096 - RNA, 20 nt, Human
cuuagcuuuagaaacagugc

SEQ ID NO: 3388097 - RNA, 11 nt, Human
cuuaggaagga

SEQ ID NO: 3388098 - RNA, 15 nt, Human
cuuaggagagaccga

SEQ ID NO: 3388099 - RNA, 16 nt, Human
cuuaggagcagagcuc

SEQ ID NO: 3388100 - RNA, 14 nt, Human
cuuaggaugugugc

SEQ ID NO: 3388101 - RNA, 16 nt, Human
cuuaggaugugugcau

SEQ ID NO: 3388102 - RNA, 12 nt, Human
cuuaggccuucc

SEQ ID NO: 3388103 - RNA, 20 nt, Human
cuuagggacaggaccccagc

SEQ ID NO: 3388104 - RNA, 21 nt, Human
cuuagggacagucaaaaccaa

SEQ ID NO: 3388105 - RNA, 17 nt, Human
cuuagggcacugggcug

SEQ ID NO: 3388106 - RNA, 15 nt, Human
cuuaggggaaggaga

SEQ ID NO: 3388107 - RNA, 16 nt, Human
cuuagggugaaccacu

SEQ ID NO: 3388108 - RNA, 21 nt, Human
cuuaggguuaugauuaaguaa

SEQ ID NO: 3388109 - RNA, 20 nt, Human
cuuaguaaaauuuauuucau

SEQ ID NO: 3388110 - RNA, 21 nt, Human
cuuaguaaugcuacgugugau

SEQ ID NO: 3388111 - RNA, 22 nt, Human
cuuaguaaugcuacgugugauu

SEQ ID NO: 3388112 - RNA, 23 nt, Human
cuuaguaaugcuacgugugauuu

SEQ ID NO: 3388113 - RNA, 15 nt, Human
cuuaguacaaaguuu

SEQ ID NO: 3388114 - RNA, 21 nt, Human
cuuaguagauuaaaaauuaua

SEQ ID NO: 3388115 - RNA, 13 nt, Human
cuuaguauugcaa

SEQ ID NO: 3388116 - RNA, 17 nt, Human
cuuagucaaauguaaug

SEQ ID NO: 3388117 - RNA, 19 nt, Human
cuuagucacugagacagcc

SEQ ID NO: 3388118 - RNA, 21 nt, Human
cuuagucacugagacagcccg

SEQ ID NO: 3388119 - RNA, 15 nt, Human
cuuagucacugccug

SEQ ID NO: 3388120 - RNA, 16 nt, Human
cuuagucacugccugc

SEQ ID NO: 3388121 - RNA, 17 nt, Human
cuuagucacugccugca

SEQ ID NO: 3388122 - RNA, 22 nt, Human
cuuagucccccaacucugagcc

SEQ ID NO: 3388123 - RNA, 12 nt, Human
cuuagucucagu

SEQ ID NO: 3388124 - RNA, 13 nt, Human
cuuagucucaguu

SEQ ID NO: 3388125 - RNA, 18 nt, Human
cuuagucucaguuugugu

SEQ ID NO: 3388126 - RNA, 20 nt, Human
cuuagucucaguuugugugu

SEQ ID NO: 3388127 - RNA, 15 nt, Human
cuuagucuucucaua

SEQ ID NO: 3388128 - RNA, 16 nt, Human
cuuagucuucucauag

SEQ ID NO: 3388129 - RNA, 20 nt, Human
cuuagugcggacaaguuuua

SEQ ID NO: 3388130 - RNA, 14 nt, Human
cuuagugggccagg

SEQ ID NO: 3388131 - RNA, 18 nt, Human
cuuagugggccagggcug

SEQ ID NO: 3388132 - RNA, 21 nt, Human
cuuagugggccagggcugccc

SEQ ID NO: 3388133 - RNA, 23 nt, Human
cuuagugggccagggcugcccug

SEQ ID NO: 3388134 - RNA, 20 nt, Human
cuuagugggguuuuauaucc

SEQ ID NO: 3388135 - RNA, 11 nt, Human
cuuaguguaug

SEQ ID NO: 3388136 - RNA, 13 nt, Human
cuuaguguuucug

SEQ ID NO: 3388137 - RNA, 19 nt, Human
cuuaguguuucugugcaug

SEQ ID NO: 3388138 - RNA, 22 nt, Human
cuuaguuuggauucuuauguag

SEQ ID NO: 3388139 - RNA, 18 nt, Human
cuuauaaaucauauugau

SEQ ID NO: 3388140 - RNA, 17 nt, Human
cuuauaagguguuuucu

SEQ ID NO: 3388141 - RNA, 16 nt, Human
cuuauaauacucuguu

SEQ ID NO: 3388142 - RNA, 13 nt, Human
cuuauaauuuaaa

SEQ ID NO: 3388143 - RNA, 21 nt, Human
cuuauacaauuaugaagauuu

SEQ ID NO: 3388144 - RNA, 12 nt, Human
cuuauacacauu

SEQ ID NO: 3388145 - RNA, 17 nt, Human
cuuauacgaaauaauug

SEQ ID NO: 3388146 - RNA, 18 nt, Human
cuuauacgaaauaauugu

SEQ ID NO: 3388147 - RNA, 20 nt, Human
cuuauacgaaauaauuguug

SEQ ID NO: 3388148 - RNA, 22 nt, Human
cuuauacgaaauaauuguuguu

SEQ ID NO: 3388149 - RNA, 19 nt, Human
cuuauacgcuuuucuuugu

SEQ ID NO: 3388150 - RNA, 14 nt, Human
cuuauagaauauuu

SEQ ID NO: 3388151 - RNA, 14 nt, Human
cuuauagacaacau

SEQ ID NO: 3388152 - RNA, 16 nt, Human
cuuauagccucugucu

SEQ ID NO: 3388153 - RNA, 14 nt, Human
cuuauagguguugg

SEQ ID NO: 3388154 - RNA, 23 nt, Human
cuuauagucaauguuucuuuuau

SEQ ID NO: 3388155 - RNA, 16 nt, Human
cuuauagucuaagacu

SEQ ID NO: 3388156 - RNA, 14 nt, Human
cuuauaguuacugu

SEQ ID NO: 3388157 - RNA, 18 nt, Human
cuuauaguuacuguguaa

SEQ ID NO: 3388158 - RNA, 19 nt, Human
cuuauaguuacuguguaau

SEQ ID NO: 3388159 - RNA, 14 nt, Human
cuuauaguucuagg

SEQ ID NO: 3388160 - RNA, 15 nt, Human
cuuauaguucuaggc

SEQ ID NO: 3388161 - RNA, 16 nt, Human
cuuauaguuugggcuu

SEQ ID NO: 3388162 - RNA, 20 nt, Human
cuuauaguuugggcuucagc

SEQ ID NO: 3388163 - RNA, 23 nt, Human
cuuauaguuugggcuucagccua

SEQ ID NO: 3388164 - RNA, 21 nt, Human
cuuauauagcagcaaaaauau

SEQ ID NO: 3388165 - RNA, 23 nt, Human
cuuauauaugcacuuaauuuguu

SEQ ID NO: 3388166 - RNA, 14 nt, Human
cuuauauaugugaa

SEQ ID NO: 3388167 - RNA, 20 nt, Human
cuuauaucuaaaucugucca

SEQ ID NO: 3388168 - RNA, 19 nt, Human
cuuauaucuauauuuuaca

SEQ ID NO: 3388169 - RNA, 16 nt, Human
cuuauaucuggccucu

SEQ ID NO: 3388170 - RNA, 22 nt, Human
cuuauaucuggccucugcuuuc

SEQ ID NO: 3388171 - RNA, 20 nt, Human
cuuauauuaauaguaauuug

SEQ ID NO: 3388172 - RNA, 18 nt, Human
cuuauauugaagacaauu

SEQ ID NO: 3388173 - RNA, 18 nt, Human
cuuauauuguaagaaaua

SEQ ID NO: 3388174 - RNA, 14 nt, Human
cuuauauuucccua

SEQ ID NO: 3388175 - RNA, 14 nt, Human
cuuaucaaaggaca

SEQ ID NO: 3388176 - RNA, 16 nt, Human
cuuaucaaaggacacc

SEQ ID NO: 3388177 - RNA, 16 nt, Human
cuuaucaagugucuuc

SEQ ID NO: 3388178 - RNA, 19 nt, Human
cuuaucaagugucuuccau

SEQ ID NO: 3388179 - RNA, 21 nt, Human
cuuaucaauuugucauuuuga

SEQ ID NO: 3388180 - RNA, 17 nt, Human
cuuaucaccagcugccu

SEQ ID NO: 3388181 - RNA, 18 nt, Human
cuuaucacugacacaaaa

SEQ ID NO: 3388182 - RNA, 22 nt, Human
cuuaucagcuacuuaagagaaa

SEQ ID NO: 3388183 - RNA, 21 nt, Human
cuuaucauccacauuguuuua

SEQ ID NO: 3388184 - RNA, 20 nt, Human
cuuaucaugcugucuuuaca

SEQ ID NO: 3388185 - RNA, 15 nt, Human
cuuauccagcuggug

SEQ ID NO: 3388186 - RNA, 16 nt, Human
cuuaucccugcccauu

SEQ ID NO: 3388187 - RNA, 22 nt, Human
cuuaucccugcccauuucauau

SEQ ID NO: 3388188 - RNA, 21 nt, Human
cuuauccuaaaacaaauaguu

SEQ ID NO: 3388189 - RNA, 21 nt, Human
cuuauccuagcacaugcuuca

SEQ ID NO: 3388190 - RNA, 15 nt, Human
cuuauccucccugua

SEQ ID NO: 3388191 - RNA, 19 nt, Human
cuuauccucccuguaacuu

SEQ ID NO: 3388192 - RNA, 20 nt, Human
cuuauccucccuguaacuug

SEQ ID NO: 3388193 - RNA, 15 nt, Human
cuuauccucugaucu

SEQ ID NO: 3388194 - RNA, 17 nt, Human
cuuauccugcauuguua

SEQ ID NO: 3388195 - RNA, 15 nt, Human
cuuaucuagcugcau

SEQ ID NO: 3388196 - RNA, 15 nt, Human
cuuaucucagauauu

SEQ ID NO: 3388197 - RNA, 20 nt, Human
cuuaucucagauauuugcac

SEQ ID NO: 3388198 - RNA, 20 nt, Human
cuuaucucagucaugcauaa

SEQ ID NO: 3388199 - RNA, 22 nt, Human
cuuaucucagucaugcauaaau

SEQ ID NO: 3388200 - RNA, 23 nt, Human
cuuaucucagucaugcauaaaua

SEQ ID NO: 3388201 - RNA, 12 nt, Human
cuuaucucucug

SEQ ID NO: 3388202 - RNA, 15 nt, Human
cuuaucucucugugc

SEQ ID NO: 3388203 - RNA, 21 nt, Human
cuuaucucucugugcugugga

SEQ ID NO: 3388204 - RNA, 18 nt, Human
cuuaucugagcugagcca

SEQ ID NO: 3388205 - RNA, 20 nt, Human
cuuaucugugcgugaaacac

SEQ ID NO: 3388206 - RNA, 14 nt, Human
cuuaucugugcuca

SEQ ID NO: 3388207 - RNA, 11 nt, Human
cuuaugaaaag

SEQ ID NO: 3388208 - RNA, 14 nt, Human
cuuccccugggccc

SEQ ID NO: 3388209 - RNA, 15 nt, Human
cuuccccugggcccu

SEQ ID NO: 3388210 - RNA, 13 nt, Human
cuuccccuucccu

SEQ ID NO: 3388211 - RNA, 23 nt, Human
cuuccccuugcccuugcccugac

SEQ ID NO: 3388212 - RNA, 15 nt, Human
cuucccgcucagccc

SEQ ID NO: 3388213 - RNA, 18 nt, Human
cuucccgggccagggcug

SEQ ID NO: 3388214 - RNA, 19 nt, Human
cuucccgucccauauccug

SEQ ID NO: 3388215 - RNA, 20 nt, Human
cuucccgucccauauccugc

SEQ ID NO: 3388216 - RNA, 22 nt, Human
cuucccgucccauauccugccu

SEQ ID NO: 3388217 - RNA, 17 nt, Human
cuucccuacaguugaaa

SEQ ID NO: 3388218 - RNA, 21 nt, Human
cuucccuagcuuuagacccug

SEQ ID NO: 3388219 - RNA, 19 nt, Human
cuucccuagggcugggugu

SEQ ID NO: 3388220 - RNA, 22 nt, Human
cuucccuaucuuugccacccuc

SEQ ID NO: 3388221 - RNA, 23 nt, Human
cuucccuaucuuugccacccuca

SEQ ID NO: 3388222 - RNA, 13 nt, Human
cuucccuauuuau

SEQ ID NO: 3388223 - RNA, 21 nt, Human
cuucccucaaagcuuccauuc

SEQ ID NO: 3388224 - RNA, 17 nt, Human
cuucccucaccuuggca

SEQ ID NO: 3388225 - RNA, 15 nt, Human
cuucccucaguccca

SEQ ID NO: 3388226 - RNA, 20 nt, Human
cuucccuccccucuaguuuu

SEQ ID NO: 3388227 - RNA, 16 nt, Human
cuucccucccugcugu

SEQ ID NO: 3388228 - RNA, 14 nt, Human
cuucccuccuccca

SEQ ID NO: 3388229 - RNA, 19 nt, Human
cuucccuccucccauguca

SEQ ID NO: 3388230 - RNA, 13 nt, Human
cuucccuccugcu

SEQ ID NO: 3388231 - RNA, 19 nt, Human
cuucccucugccugucccu

SEQ ID NO: 3388232 - RNA, 17 nt, Human
cuucccucuguuucucu

SEQ ID NO: 3388233 - RNA, 14 nt, Human
cuucccucuucccu

SEQ ID NO: 3388234 - RNA, 23 nt, Human
cuucccugaacuuccugcuuccu

SEQ ID NO: 3388235 - RNA, 14 nt, Human
cuucccugacucau

SEQ ID NO: 3388236 - RNA, 19 nt, Human
cuucccugauugaccugcu

SEQ ID NO: 3388237 - RNA, 21 nt, Human
cuucccugauugaccugcucc

SEQ ID NO: 3388238 - RNA, 22 nt, Human
cuucccugauugaccugcuccg

SEQ ID NO: 3388239 - RNA, 13 nt, Human
cuucccugcacua

SEQ ID NO: 3388240 - RNA, 23 nt, Human
cuucccuggaaaccuuccaccca

SEQ ID NO: 3388241 - RNA, 21 nt, Human
cuucccuggcggccccaacuc

SEQ ID NO: 3388242 - RNA, 12 nt, Human
cuucccugguuc

SEQ ID NO: 3388243 - RNA, 16 nt, Human
cuucccugucccucua

SEQ ID NO: 3388244 - RNA, 14 nt, Human
cuucccugugccuc

SEQ ID NO: 3388245 - RNA, 15 nt, Human
cuucccugugccucc

SEQ ID NO: 3388246 - RNA, 22 nt, Human
cuucccuguguaguuugugcug

SEQ ID NO: 3388247 - RNA, 20 nt, Human
cuucccuuaaaauuuauaug

SEQ ID NO: 3388248 - RNA, 22 nt, Human
cuucccuuccacugccucugcc

SEQ ID NO: 3388249 - RNA, 16 nt, Human
cuucccuucuccaucu

SEQ ID NO: 3388250 - RNA, 22 nt, Human
cuucccuucucucucucucaaa

SEQ ID NO: 3388251 - RNA, 12 nt, Human
cuucccuugcca

SEQ ID NO: 3388252 - RNA, 18 nt, Human
cuucccuugccacuuugc

SEQ ID NO: 3388253 - RNA, 19 nt, Human
cuucccuugccacuuugca

SEQ ID NO: 3388254 - RNA, 14 nt, Human
cuucccuuuccuga

SEQ ID NO: 3388255 - RNA, 13 nt, Human
cuucccuuucugc

SEQ ID NO: 3388256 - RNA, 20 nt, Human
cuucccuuuuaaacacauuu

SEQ ID NO: 3388257 - RNA, 14 nt, Human
cuucccuuuuacau

SEQ ID NO: 3388258 - RNA, 20 nt, Human
cuuccgaaaaauccucuucc

SEQ ID NO: 3388259 - RNA, 21 nt, Human
cuuccgaaaaauccucuuccu

SEQ ID NO: 3388260 - RNA, 22 nt, Human
cuuccgacccucugggaaccuc

SEQ ID NO: 3388261 - RNA, 17 nt, Human
cuuccgcaguguggcca

SEQ ID NO: 3388262 - RNA, 14 nt, Human
cuuccgccacuggg

SEQ ID NO: 3388263 - RNA, 22 nt, Human
cuuccgccacuggggcucagag

SEQ ID NO: 3388264 - RNA, 16 nt, Human
cuuccgccccugccug

SEQ ID NO: 3388265 - RNA, 17 nt, Human
cuuccgccccugccugc

SEQ ID NO: 3388266 - RNA, 20 nt, Human
cuuccgccccugccugccau

SEQ ID NO: 3388267 - RNA, 17 nt, Human
cuuccggccccuccccu

SEQ ID NO: 3388268 - RNA, 16 nt, Human
cuuccgguagggaggc

SEQ ID NO: 3388269 - RNA, 21 nt, Human
cuuccgguagggaggcagccu

SEQ ID NO: 3388270 - RNA, 23 nt, Human
cuuccgguagggaggcagccucc

SEQ ID NO: 3388271 - RNA, 14 nt, Human
cuuccgucuccccc

SEQ ID NO: 3388272 - RNA, 20 nt, Human
cuuccuaaauuuuccugucc

SEQ ID NO: 3388273 - RNA, 19 nt, Human
cuuccuaauuccacagcug

SEQ ID NO: 3388274 - RNA, 21 nt, Human
cuuccuacaagagcagccugu

SEQ ID NO: 3388275 - RNA, 23 nt, Human
cuuccuacacccuuggacuugag

SEQ ID NO: 3388276 - RNA, 19 nt, Human
cuuccuaccaagucaaacu

SEQ ID NO: 3388277 - RNA, 22 nt, Human
cuuccuacccacaccucugcca

SEQ ID NO: 3388278 - RNA, 15 nt, Human
cuuccuaccuauccc

SEQ ID NO: 3388279 - RNA, 22 nt, Human
cuuccuacucuucucucugcuc

SEQ ID NO: 3388280 - RNA, 14 nt, Human
cuuccuagccuugc

SEQ ID NO: 3388281 - RNA, 23 nt, Human
cuuccuaguuuucuccucccagg

SEQ ID NO: 3388282 - RNA, 20 nt, Human
cuuccuauaacuugaugcau

SEQ ID NO: 3388283 - RNA, 18 nt, Human
cuuccuauaugcacuuau

SEQ ID NO: 3388284 - RNA, 15 nt, Human
cuuccucacccugau

SEQ ID NO: 3388285 - RNA, 12 nt, Human
cuuccucagcca

SEQ ID NO: 3388286 - RNA, 15 nt, Human
cuuccuccacauccu

SEQ ID NO: 3388287 - RNA, 13 nt, Human
cuuauuuagagau

SEQ ID NO: 3388288 - RNA, 13 nt, Human
cuuauuuauuauu

SEQ ID NO: 3388289 - RNA, 17 nt, Human
cuuauuuauuguauucu

SEQ ID NO: 3388290 - RNA, 19 nt, Human
cuuauuuauuguauucugg

SEQ ID NO: 3388291 - RNA, 15 nt, Human
cuuauuuccucauuu

SEQ ID NO: 3388292 - RNA, 11 nt, Human
cuuauuugagu

SEQ ID NO: 3388293 - RNA, 13 nt, Human
cuuauuugaguga

SEQ ID NO: 3388294 - RNA, 16 nt, Human
cuuauuuguauauggu

SEQ ID NO: 3388295 - RNA, 18 nt, Human
cuuauuuguauuuuuccu

SEQ ID NO: 3388296 - RNA, 23 nt, Human
cuuauuuuaaaauuuuaucucuu

SEQ ID NO: 3388297 - RNA, 20 nt, Human
cuuauuuuaagcauugugag

SEQ ID NO: 3388298 - RNA, 20 nt, Human
cuuauuuuauuuccaucaug

SEQ ID NO: 3388299 - RNA, 12 nt, Human
cuuauuuucaag

SEQ ID NO: 3388300 - RNA, 16 nt, Human
cuuauuuucauguaua

SEQ ID NO: 3388301 - RNA, 18 nt, Human
cuuauuuuggagagauag

SEQ ID NO: 3388302 - RNA, 13 nt, Human
cuuauuuuuccua

SEQ ID NO: 3388303 - RNA, 16 nt, Human
cuuauuuuucuaaacg

SEQ ID NO: 3388304 - RNA, 17 nt, Human
cuuauuuuugacagugu

SEQ ID NO: 3388305 - RNA, 18 nt, Human
cuuauuuuuuucugauug

SEQ ID NO: 3388306 - RNA, 20 nt, Human
cuuauuuuuuucugauugua

SEQ ID NO: 3388307 - RNA, 17 nt, Human
cuucaaaaguauuuucc

SEQ ID NO: 3388308 - RNA, 19 nt, Human
cuucaaaauguauauauuu

SEQ ID NO: 3388309 - RNA, 20 nt, Human
cuucaaaauguauauauuua

SEQ ID NO: 3388310 - RNA, 22 nt, Human
cuucaaacagaacugcagucag

SEQ ID NO: 3388311 - RNA, 17 nt, Human
cuucaaagcaaaugucu

SEQ ID NO: 3388312 - RNA, 11 nt, Human
cuucaaagcug

SEQ ID NO: 3388313 - RNA, 18 nt, Human
cuucaaagcuugaagauc

SEQ ID NO: 3388314 - RNA, 16 nt, Human
cuucaaagucucaaug

SEQ ID NO: 3388315 - RNA, 16 nt, Human
cuucaaaguuuaauaa

SEQ ID NO: 3388316 - RNA, 15 nt, Human
cuucaaauauuuccc

SEQ ID NO: 3388317 - RNA, 16 nt, Human
cuucaaauccuuccaa

SEQ ID NO: 3388318 - RNA, 18 nt, Human
cuucaaauccuuccaaaa

SEQ ID NO: 3388319 - RNA, 17 nt, Human
cuucaaauccuugaaga

SEQ ID NO: 3388320 - RNA, 14 nt, Human
cuucaaaugaaaau

SEQ ID NO: 3388321 - RNA, 18 nt, Human
cuucaaauuaaaacagcu

SEQ ID NO: 3388322 - RNA, 19 nt, Human
cuucaaauuagaagacauu

SEQ ID NO: 3388323 - RNA, 24 nt, Human
cuucaacagacccccucuagaaau

SEQ ID NO: 3388324 - RNA, 20 nt, Human
cuucaacaucaauguucauu

SEQ ID NO: 3388325 - RNA, 13 nt, Human
cuucaacauccug

SEQ ID NO: 3388326 - RNA, 20 nt, Human
cuucaacauccugccagccc

SEQ ID NO: 3388327 - RNA, 16 nt, Human
cuucaaccccaugaga

SEQ ID NO: 3388328 - RNA, 22 nt, Human
cuucaacguuucuucacuuuug

SEQ ID NO: 3388329 - RNA, 17 nt, Human
cuucaacugaccagccu

SEQ ID NO: 3388330 - RNA, 22 nt, Human
cuucaagcauggcuauuuuaua

SEQ ID NO: 3388331 - RNA, 20 nt, Human
cuucaagcucugagggaaag

SEQ ID NO: 3388332 - RNA, 21 nt, Human
cuucaaggauccugagccaga

SEQ ID NO: 3388333 - RNA, 13 nt, Human
cuucaaggcuuca

SEQ ID NO: 3388334 - RNA, 17 nt, Human
cuucaagggcugcuuca

SEQ ID NO: 3388335 - RNA, 15 nt, Human
cuucaaggugacaga

SEQ ID NO: 3388336 - RNA, 17 nt, Human
cuucaagucugugccug

SEQ ID NO: 3388337 - RNA, 22 nt, Human
cuucaagucugugccuggagcu

SEQ ID NO: 3388338 - RNA, 23 nt, Human
cuucaagucugugccuggagcuc

SEQ ID NO: 3388339 - RNA, 17 nt, Human
cuucaaguuagcucagg

SEQ ID NO: 3388340 - RNA, 12 nt, Human
cuucaauaaagu

SEQ ID NO: 3388341 - RNA, 14 nt, Human
cuucaauaaaguau

SEQ ID NO: 3388342 - RNA, 15 nt, Human
cuucaauaaaucuuu

SEQ ID NO: 3388343 - RNA, 21 nt, Human
cuucaauaaaugguauagcaa

SEQ ID NO: 3388344 - RNA, 20 nt, Human
cuucaaucaauaacagccgc

SEQ ID NO: 3388345 - RNA, 14 nt, Human
cuucaaucccagcc

SEQ ID NO: 3388346 - RNA, 15 nt, Human
cuucaauuccugggc

SEQ ID NO: 3388347 - RNA, 19 nt, Human
cuucaauuuauugcacaaa

SEQ ID NO: 3388348 - RNA, 10 nt, Human
cuucaauuug

SEQ ID NO: 3388349 - RNA, 14 nt, Human
cuucacaaagccca

SEQ ID NO: 3388350 - RNA, 23 nt, Human
cuucacaaagcccaagggaucug

SEQ ID NO: 3388351 - RNA, 14 nt, Human
cuucacaacagauu

SEQ ID NO: 3388352 - RNA, 21 nt, Human
ccuuuguccuccugcugccag

SEQ ID NO: 3388353 - RNA, 18 nt, Human
ccuuuguccuuuuucagg

SEQ ID NO: 3388354 - RNA, 12 nt, Human
ccuuugucuuuc

SEQ ID NO: 3388355 - RNA, 15 nt, Human
ccuuugugaggaagc

SEQ ID NO: 3388356 - RNA, 13 nt, Human
ccuuugugaguca

SEQ ID NO: 3388357 - RNA, 14 nt, Human
ccuuugugugcucu

SEQ ID NO: 3388358 - RNA, 18 nt, Human
ccuuuguuacuucucuaa

SEQ ID NO: 3388359 - RNA, 14 nt, Human
ccuuuuaacauuuu

SEQ ID NO: 3388360 - RNA, 18 nt, Human
ccuuuuacauacugcugu

SEQ ID NO: 3388361 - RNA, 20 nt, Human
ccuuuuacugguugcaugga

SEQ ID NO: 3388362 - RNA, 12 nt, Human
ccuuuuacugug

SEQ ID NO: 3388363 - RNA, 22 nt, Human
ccuuuuaguuccugugcacagc

SEQ ID NO: 3388364 - RNA, 22 nt, Human
ccuuuuauguaguaauugacau

SEQ ID NO: 3388365 - RNA, 19 nt, Human
ccuuuuauuuuuuucuaau

SEQ ID NO: 3388366 - RNA, 16 nt, Human
ccuuuucacccuucua

SEQ ID NO: 3388367 - RNA, 23 nt, Human
ccuuuucagcgauguaugcagcu

SEQ ID NO: 3388368 - RNA, 11 nt, Human
ccuuuucauag

SEQ ID NO: 3388369 - RNA, 20 nt, Human
ccuuuuccagagcauuccag

SEQ ID NO: 3388370 - RNA, 18 nt, Human
ccuuuuccauuugaaaga

SEQ ID NO: 3388371 - RNA, 21 nt, Human
ccuuuuccauuugaaagaaag

SEQ ID NO: 3388372 - RNA, 12 nt, Human
ccuuuucccaac

SEQ ID NO: 3388373 - RNA, 13 nt, Human
ccuuuucccugcu

SEQ ID NO: 3388374 - RNA, 19 nt, Human
ccuuuucgccuuuccucuc

SEQ ID NO: 3388375 - RNA, 21 nt, Human
ccuuuucuauuccuucuggcc

SEQ ID NO: 3388376 - RNA, 22 nt, Human
ccuuuucuauuccuucuggccu

SEQ ID NO: 3388377 - RNA, 13 nt, Human
ccuuuucucuuca

SEQ ID NO: 3388378 - RNA, 14 nt, Human
ccuuuucugcauuu

SEQ ID NO: 3388379 - RNA, 14 nt, Human
ccuuuucuguguuu

SEQ ID NO: 3388380 - RNA, 14 nt, Human
ccuuuucuguucua

SEQ ID NO: 3388381 - RNA, 9 nt, Human
ccuuuucuu

SEQ ID NO: 3388382 - RNA, 16 nt, Human
ccuuuucuuguaucug

SEQ ID NO: 3388383 - RNA, 17 nt, Human
ccuuuucuuguuuauca

SEQ ID NO: 3388384 - RNA, 18 nt, Human
ccuuuucuuuucuacccu

SEQ ID NO: 3388385 - RNA, 22 nt, Human
ccuuuucuuuucuacccuagcc

SEQ ID NO: 3388386 - RNA, 19 nt, Human
ccuuuucuuuuguuacugu

SEQ ID NO: 3388387 - RNA, 23 nt, Human
ccuuuucuuuuguuacuguucuu

SEQ ID NO: 3388388 - RNA, 23 nt, Human
ccuuuugaacgcccccccccacc

SEQ ID NO: 3388389 - RNA, 13 nt, Human
ccuuuugacacug

SEQ ID NO: 3388390 - RNA, 18 nt, Human
ccuuuugacacugcucua

SEQ ID NO: 3388391 - RNA, 14 nt, Human
ccuuuugcaccccu

SEQ ID NO: 3388392 - RNA, 18 nt, Human
ccuuuugcaccccuccca

SEQ ID NO: 3388393 - RNA, 20 nt, Human
ccuuuugcaccccucccauu

SEQ ID NO: 3388394 - RNA, 15 nt, Human
ccuuuugcagaagag

SEQ ID NO: 3388395 - RNA, 14 nt, Human
ccuuuugcaucauu

SEQ ID NO: 3388396 - RNA, 19 nt, Human
ccuuuuggcccccgagcug

SEQ ID NO: 3388397 - RNA, 20 nt, Human
ccuuuuggcccccgagcugg

SEQ ID NO: 3388398 - RNA, 17 nt, Human
ccuuuuguagaaugaac

SEQ ID NO: 3388399 - RNA, 11 nt, Human
ccuuuuguguu

SEQ ID NO: 3388400 - RNA, 19 nt, Human
ccuuuuguugagccaggcc

SEQ ID NO: 3388401 - RNA, 19 nt, Human
ccuuuuuaauaugcuuaaa

SEQ ID NO: 3388402 - RNA, 23 nt, Human
ccuuuuuacuccccuugagcuga

SEQ ID NO: 3388403 - RNA, 12 nt, Human
ccuuuuuauaac

SEQ ID NO: 3388404 - RNA, 12 nt, Human
ccuuuuucaaug

SEQ ID NO: 3388405 - RNA, 19 nt, Human
ccuuuuucauaaauuauuu

SEQ ID NO: 3388406 - RNA, 16 nt, Human
ccuuuuuccuagccug

SEQ ID NO: 3388407 - RNA, 17 nt, Human
ccuuuuuccucuccaca

SEQ ID NO: 3388408 - RNA, 14 nt, Human
ccuuuuuccuuguc

SEQ ID NO: 3388409 - RNA, 16 nt, Human
ccuuuuucuccagcug

SEQ ID NO: 3388410 - RNA, 21 nt, Human
ccuuuuucucccucuggauca

SEQ ID NO: 3388411 - RNA, 13 nt, Human
ccuuuuucugauu

SEQ ID NO: 3388412 - RNA, 18 nt, Human
ccuuuuucugcacuauau

SEQ ID NO: 3388413 - RNA, 16 nt, Human
ccuuuuucuuuauaaa

SEQ ID NO: 3388414 - RNA, 15 nt, Human
ccuuuuugacacuga

SEQ ID NO: 3388415 - RNA, 17 nt, Human
ccuuuuuuaaaaaugca

SEQ ID NO: 3388416 - RNA, 16 nt, Human
ccuuuuuuaaauaaau

SEQ ID NO: 3388417 - RNA, 21 nt, Human
ccuuuuuuaagauuuuucuca

SEQ ID NO: 3388418 - RNA, 22 nt, Human
ccuuuuuuaggaagcaagcuua

SEQ ID NO: 3388419 - RNA, 19 nt, Human
ccuuuuuuauacauaaaca

SEQ ID NO: 3388420 - RNA, 22 nt, Human
ccuuuuuuauuuuuuuaagcug

SEQ ID NO: 3388421 - RNA, 21 nt, Human
ccuuuuuucccauaagacaau

SEQ ID NO: 3388422 - RNA, 14 nt, Human
ccuuuuuuccccag

SEQ ID NO: 3388423 - RNA, 18 nt, Human
ccuuuuuuccccagacuu

SEQ ID NO: 3388424 - RNA, 16 nt, Human
ccuuuuuuccuuucca

SEQ ID NO: 3388425 - RNA, 20 nt, Human
ccuuuuuuggcugcugaagg

SEQ ID NO: 3388426 - RNA, 17 nt, Human
ccuuuuuugucccccaa

SEQ ID NO: 3388427 - RNA, 18 nt, Human
ccuuuuuuuccaucuuua

SEQ ID NO: 3388428 - RNA, 12 nt, Human
ccuuuuuuuuga

SEQ ID NO: 3388429 - RNA, 16 nt, Human
ccuuuuuuuuuucuug

SEQ ID NO: 3388430 - RNA, 19 nt, Human
cgaaaaaauaauuauuuau

SEQ ID NO: 3388431 - RNA, 13 nt, Human
cgaaaaccaggcc

SEQ ID NO: 3388432 - RNA, 19 nt, Human
cgaaaacccccaaaccaga

SEQ ID NO: 3388433 - RNA, 13 nt, Human
cgaaaaucaaaug

SEQ ID NO: 3388434 - RNA, 12 nt, Human
cgaaaaucauug

SEQ ID NO: 3388435 - RNA, 16 nt, Human
cgaaaccaaagaagaa

SEQ ID NO: 3388436 - RNA, 18 nt, Human
cgaaaccugggauucagg

SEQ ID NO: 3388437 - RNA, 15 nt, Human
cgaaacuggaaguua

SEQ ID NO: 3388438 - RNA, 18 nt, Human
cgaaacuggaaguuauuu

SEQ ID NO: 3388439 - RNA, 19 nt, Human
cgaaacuuguuauugugaa

SEQ ID NO: 3388440 - RNA, 21 nt, Human
cgaaacuuguuauugugaaug

SEQ ID NO: 3388441 - RNA, 18 nt, Human
cgaaagaaaacucuauuu

SEQ ID NO: 3388442 - RNA, 12 nt, Human
cgaaagaaggca

SEQ ID NO: 3388443 - RNA, 19 nt, Human
cgaaagaaggcauggacuu

SEQ ID NO: 3388444 - RNA, 23 nt, Human
cgaaagaaggcauggacuucugg

SEQ ID NO: 3388445 - RNA, 23 nt, Human
cgaaagaggcacccuuccaucug

SEQ ID NO: 3388446 - RNA, 11 nt, Human
cgaaagcacac

SEQ ID NO: 3388447 - RNA, 13 nt, Human
cgaaagcucuaga

SEQ ID NO: 3388448 - RNA, 15 nt, Human
cuucagcuccaggga

SEQ ID NO: 3388449 - RNA, 19 nt, Human
cuucagcugacuuuucugu

SEQ ID NO: 3388450 - RNA, 18 nt, Human
cuucagcuucuucaucuu

SEQ ID NO: 3388451 - RNA, 22 nt, Human
cuucaggaaccucgaguacugu

SEQ ID NO: 3388452 - RNA, 16 nt, Human
cuucaggagggagcau

SEQ ID NO: 3388453 - RNA, 21 nt, Human
cuucaggcauggggggugggg

SEQ ID NO: 3388454 - RNA, 20 nt, Human
cuucaggccucccucucucu

SEQ ID NO: 3388455 - RNA, 14 nt, Human
cuucaggcucuucu

SEQ ID NO: 3388456 - RNA, 16 nt, Human
cuucaggcucuucucc

SEQ ID NO: 3388457 - RNA, 18 nt, Human
cuucaggcucuucuccuu

SEQ ID NO: 3388458 - RNA, 19 nt, Human
cuucaggcucuucuccuuu

SEQ ID NO: 3388459 - RNA, 15 nt, Human
cuucaggcugccuaa

SEQ ID NO: 3388460 - RNA, 21 nt, Human
cuucaggcuuccugcaauuuu

SEQ ID NO: 3388461 - RNA, 18 nt, Human
cuucagggagucagcugu

SEQ ID NO: 3388462 - RNA, 15 nt, Human
cuucagggagugagg

SEQ ID NO: 3388463 - RNA, 9 nt, Human
cuucagggc

SEQ ID NO: 3388464 - RNA, 22 nt, Human
cuucagggcagauuuuaguuuu

SEQ ID NO: 3388465 - RNA, 17 nt, Human
cuucagggcagggcucu

SEQ ID NO: 3388466 - RNA, 18 nt, Human
cuucagggcagggcucug

SEQ ID NO: 3388467 - RNA, 20 nt, Human
cuucagggcagggcucugau

SEQ ID NO: 3388468 - RNA, 16 nt, Human
cuucagggcagguggg

SEQ ID NO: 3388469 - RNA, 23 nt, Human
cuucaggggagucccgucaggac

SEQ ID NO: 3388470 - RNA, 17 nt, Human
cuucaggggcacuucau

SEQ ID NO: 3388471 - RNA, 14 nt, Human
cuucaggggcugcc

SEQ ID NO: 3388472 - RNA, 17 nt, Human
cuucaggggcugcccgc

SEQ ID NO: 3388473 - RNA, 23 nt, Human
cuucaggggcugcccgcucccag

SEQ ID NO: 3388474 - RNA, 15 nt, Human
cuucagggggccagg

SEQ ID NO: 3388475 - RNA, 18 nt, Human
cuucagggugaugccagg

SEQ ID NO: 3388476 - RNA, 20 nt, Human
cuucaggguucuccucuccc

SEQ ID NO: 3388477 - RNA, 21 nt, Human
cuucaggguucuccucucccc

SEQ ID NO: 3388478 - RNA, 23 nt, Human
cuucagguaaagggcaaauaaug

SEQ ID NO: 3388479 - RNA, 21 nt, Human
cuucagguuaucgaaauaaca

SEQ ID NO: 3388480 - RNA, 22 nt, Human
cuucaguaaaugugauucaccu

SEQ ID NO: 3388481 - RNA, 14 nt, Human
cuucaguaagccgu

SEQ ID NO: 3388482 - RNA, 15 nt, Human
cuucaguaagccgug

SEQ ID NO: 3388483 - RNA, 16 nt, Human
cuucagucagaaaacu

SEQ ID NO: 3388484 - RNA, 16 nt, Human
cuucagucauuaaauu

SEQ ID NO: 3388485 - RNA, 17 nt, Human
cuucagucccuucccca

SEQ ID NO: 3388486 - RNA, 23 nt, Human
cuucagucucuauaccaauaaag

SEQ ID NO: 3388487 - RNA, 11 nt, Human
cuucagugccc

SEQ ID NO: 3388488 - RNA, 17 nt, Human
cuucagugcccaccaac

SEQ ID NO: 3388489 - RNA, 13 nt, Human
cuucagugccuua

SEQ ID NO: 3388490 - RNA, 14 nt, Human
cuucagugccuuau

SEQ ID NO: 3388491 - RNA, 18 nt, Human
cuucagugccuuauggaa

SEQ ID NO: 3388492 - RNA, 18 nt, Human
cuucaguggcagcugcuu

SEQ ID NO: 3388493 - RNA, 15 nt, Human
cuucagugggagaaa

SEQ ID NO: 3388494 - RNA, 17 nt, Human
cuucaguguauggaaau

SEQ ID NO: 3388495 - RNA, 17 nt, Human
cuucaguuaugauuuuu

SEQ ID NO: 3388496 - RNA, 17 nt, Human
cuucaguuauuggugga

SEQ ID NO: 3388497 - RNA, 12 nt, Human
cgaauauugcug

SEQ ID NO: 3388498 - RNA, 18 nt, Human
cgaaucagcuauuuacug

SEQ ID NO: 3388499 - RNA, 14 nt, Human
cgaaucauuuguuc

SEQ ID NO: 3388500 - RNA, 16 nt, Human
cgaauccaagcucccu

SEQ ID NO: 3388501 - RNA, 18 nt, Human
cgaauccaagcucccugc

SEQ ID NO: 3388502 - RNA, 22 nt, Human
cgaauccaagcucccugcccca

SEQ ID NO: 3388503 - RNA, 22 nt, Human
cgaaugacaaaaucaucuuugu

SEQ ID NO: 3388504 - RNA, 15 nt, Human
cgaaugaucuuucuu

SEQ ID NO: 3388505 - RNA, 16 nt, Human
cgaaugguagucuaac

SEQ ID NO: 3388506 - RNA, 15 nt, Human
cgaaugugucuuuag

SEQ ID NO: 3388507 - RNA, 16 nt, Human
cgaauuaauagcuuuu

SEQ ID NO: 3388508 - RNA, 16 nt, Human
cgaauuucugugcccu

SEQ ID NO: 3388509 - RNA, 16 nt, Human
cgaauuuuaaaagaug

SEQ ID NO: 3388510 - RNA, 17 nt, Human
cgacaaagcugcuaaau

SEQ ID NO: 3388511 - RNA, 16 nt, Human
cgacaaaucugucugc

SEQ ID NO: 3388512 - RNA, 16 nt, Human
cgacaagcacagucag

SEQ ID NO: 3388513 - RNA, 12 nt, Human
cgacaagugcug

SEQ ID NO: 3388514 - RNA, 20 nt, Human
cgacacgugggcuccccucu

SEQ ID NO: 3388515 - RNA, 22 nt, Human
cgacagagggaagaaaagagcu

SEQ ID NO: 3388516 - RNA, 22 nt, Human
cgacaggcgagagaggagccag

SEQ ID NO: 3388517 - RNA, 16 nt, Human
cgacagugagacucug

SEQ ID NO: 3388518 - RNA, 13 nt, Human
cgacaucacuguu

SEQ ID NO: 3388519 - RNA, 14 nt, Human
cgacauugucuccc

SEQ ID NO: 3388520 - RNA, 16 nt, Human
cgaccaccccugccuc

SEQ ID NO: 3388521 - RNA, 14 nt, Human
cgaccccaucugcc

SEQ ID NO: 3388522 - RNA, 17 nt, Human
cgaccccaucugcccag

SEQ ID NO: 3388523 - RNA, 18 nt, Human
cgaccccaucugcccagg

SEQ ID NO: 3388524 - RNA, 19 nt, Human
cgaccccaucugcccagga

SEQ ID NO: 3388525 - RNA, 15 nt, Human
cgacccucugggaac

SEQ ID NO: 3388526 - RNA, 19 nt, Human
cgacccuugccgucuaccu

SEQ ID NO: 3388527 - RNA, 20 nt, Human
cgacccuugccgucuaccug

SEQ ID NO: 3388528 - RNA, 13 nt, Human
cgaccgcccccuc

SEQ ID NO: 3388529 - RNA, 13 nt, Human
cgaccucagccuu

SEQ ID NO: 3388530 - RNA, 14 nt, Human
cgaccucagccuuc

SEQ ID NO: 3388531 - RNA, 23 nt, Human
cgaccucguccucccccugccag

SEQ ID NO: 3388532 - RNA, 23 nt, Human
cgaccugauuuacaguuucaaaa

SEQ ID NO: 3388533 - RNA, 18 nt, Human
cgaccugguuuuuaaaua

SEQ ID NO: 3388534 - RNA, 11 nt, Human
cgaccuuggcc

SEQ ID NO: 3388535 - RNA, 16 nt, Human
cgaccuuggccgcacc

SEQ ID NO: 3388536 - RNA, 23 nt, Human
cgacgccacagcccagccacgga

SEQ ID NO: 3388537 - RNA, 12 nt, Human
cgacgcccaccc

SEQ ID NO: 3388538 - RNA, 14 nt, Human
cgacgcccacccaa

SEQ ID NO: 3388539 - RNA, 16 nt, Human
cgacgcuugcucuguu

SEQ ID NO: 3388540 - RNA, 17 nt, Human
cgacuagacacacaaag

SEQ ID NO: 3388541 - RNA, 21 nt, Human
cgacucacaccacuagccuca

SEQ ID NO: 3388542 - RNA, 13 nt, Human
cgacucagccuca

SEQ ID NO: 3388543 - RNA, 15 nt, Human
cgacuccagccagcg

SEQ ID NO: 3388544 - RNA, 17 nt, Human
cgacuccagccagcgcc

SEQ ID NO: 3388545 - RNA, 16 nt, Human
cgacucuggcccuggc

SEQ ID NO: 3388546 - RNA, 18 nt, Human
cgacucuggcccuggccc

SEQ ID NO: 3388547 - RNA, 16 nt, Human
cgacucugugcuggcc

SEQ ID NO: 3388548 - RNA, 22 nt, Human
cgacucugugcuggccagcgag

SEQ ID NO: 3388549 - RNA, 17 nt, Human
cgacugaaaauauuguu

SEQ ID NO: 3388550 - RNA, 14 nt, Human
cgacugcaacagga

SEQ ID NO: 3388551 - RNA, 20 nt, Human
cgacugcacagcggccccug

SEQ ID NO: 3388552 - RNA, 14 nt, Human
cgacuggccagggc

SEQ ID NO: 3388553 - RNA, 20 nt, Human
cgacuggccagggccacgcu

SEQ ID NO: 3388554 - RNA, 15 nt, Human
cgacuggguuuaugu

SEQ ID NO: 3388555 - RNA, 19 nt, Human
cgacugugaccugugggga

SEQ ID NO: 3388556 - RNA, 22 nt, Human
cgacuugaauuuucccacugca

SEQ ID NO: 3388557 - RNA, 16 nt, Human
cgacuugccaaauuua

SEQ ID NO: 3388558 - RNA, 21 nt, Human
cgacuugcuguuuuguucugu

SEQ ID NO: 3388559 - RNA, 18 nt, Human
cgacuugugcacaggcag

SEQ ID NO: 3388560 - RNA, 14 nt, Human
cgacuuucugccug

SEQ ID NO: 3388561 - RNA, 15 nt, Human
cgacuuucugccugg

SEQ ID NO: 3388562 - RNA, 17 nt, Human
cgagaaacagccugugu

SEQ ID NO: 3388563 - RNA, 19 nt, Human
cgagaaagaggcaccagga

SEQ ID NO: 3388564 - RNA, 17 nt, Human
cgagaccagccuggcca

SEQ ID NO: 3388565 - RNA, 13 nt, Human
cgagaccauccug

SEQ ID NO: 3388566 - RNA, 18 nt, Human
cgagacuugguuucaaaa

SEQ ID NO: 3388567 - RNA, 14 nt, Human
cgagagccugcucc

SEQ ID NO: 3388568 - RNA, 19 nt, Human
cgagagccugcucccccac

SEQ ID NO: 3388569 - RNA, 20 nt, Human
cgagagccugcucccccacc

SEQ ID NO: 3388570 - RNA, 21 nt, Human
cgagagccugcucccccaccc

SEQ ID NO: 3388571 - RNA, 15 nt, Human
cgagaggcagagaaa

SEQ ID NO: 3388572 - RNA, 13 nt, Human
cgagagggagaga

SEQ ID NO: 3388573 - RNA, 20 nt, Human
cgagaggggaagaguguacu

SEQ ID NO: 3388574 - RNA, 15 nt, Human
cgagaggugggccag

SEQ ID NO: 3388575 - RNA, 15 nt, Human
cgagagucuggcccu

SEQ ID NO: 3388576 - RNA, 17 nt, Human
cgagagucuggcccuag

SEQ ID NO: 3388577 - RNA, 14 nt, Human
cgagagucugucuc

SEQ ID NO: 3388578 - RNA, 16 nt, Human
cgagaucacgccacug

SEQ ID NO: 3388579 - RNA, 14 nt, Human
cgagcaaagaucaa

SEQ ID NO: 3388580 - RNA, 16 nt, Human
cgagcaaccguggccc

SEQ ID NO: 3388581 - RNA, 23 nt, Human
cgagcaaccguggcccuuccugg

SEQ ID NO: 3388582 - RNA, 20 nt, Human
cgagcaauauuuauggaugc

SEQ ID NO: 3388583 - RNA, 21 nt, Human
cgagcagacacccuuggagcu

SEQ ID NO: 3388584 - RNA, 12 nt, Human
cgagcagcugag

SEQ ID NO: 3388585 - RNA, 13 nt, Human
cgagcagcugagc

SEQ ID NO: 3388586 - RNA, 16 nt, Human
cgagcagcugagcagg

SEQ ID NO: 3388587 - RNA, 19 nt, Human
cgagcagcugagcagggcc

SEQ ID NO: 3388588 - RNA, 14 nt, Human
cgagcaggaggccu

SEQ ID NO: 3388589 - RNA, 18 nt, Human
cgagcaggcuacugucag

SEQ ID NO: 3388590 - RNA, 14 nt, Human
cgagcaucccccaa

SEQ ID NO: 3388591 - RNA, 15 nt, Human
cgagcauccuggcca

SEQ ID NO: 3388592 - RNA, 18 nt, Human
cgagccaugauguggagu

SEQ ID NO: 3388593 - RNA, 19 nt, Human
cgagccaugauguggagug

SEQ ID NO: 3388594 - RNA, 16 nt, Human
cgagcccuacuuccag

SEQ ID NO: 3388595 - RNA, 23 nt, Human
cgagcccuguggaugagcccuca

SEQ ID NO: 3388596 - RNA, 22 nt, Human
cgagcccuugcccaugcugggc

SEQ ID NO: 3388597 - RNA, 15 nt, Human
cgagccgggccuggg

SEQ ID NO: 3388598 - RNA, 18 nt, Human
cgagccggggaguuucuu

SEQ ID NO: 3388599 - RNA, 23 nt, Human
cgagccucugucacugcaggcac

SEQ ID NO: 3388600 - RNA, 19 nt, Human
cgagcgcccagcuccugac

SEQ ID NO: 3388601 - RNA, 14 nt, Human
cgagcgcccugcag

SEQ ID NO: 3388602 - RNA, 18 nt, Human
cgagcucguguauccugg

SEQ ID NO: 3388603 - RNA, 21 nt, Human
cgagcucguguauccuggggc

SEQ ID NO: 3388604 - RNA, 24 nt, Human
cgagcugggaccaguaccuggguc

SEQ ID NO: 3388605 - RNA, 16 nt, Human
cgagcugggggccaug

SEQ ID NO: 3388606 - RNA, 21 nt, Human
cgagcuggugcauuacagaga

SEQ ID NO: 3388607 - RNA, 12 nt, Human
cgagcugucccc

SEQ ID NO: 3388608 - RNA, 16 nt, Human
cuuccagaaaacaaaa

SEQ ID NO: 3388609 - RNA, 16 nt, Human
cuuccagaagugugau

SEQ ID NO: 3388610 - RNA, 15 nt, Human
cuuccagaucacugc

SEQ ID NO: 3388611 - RNA, 17 nt, Human
cuuccagaucacugcca

SEQ ID NO: 3388612 - RNA, 12 nt, Human
cuuccagauccu

SEQ ID NO: 3388613 - RNA, 22 nt, Human
cuuccagauccucucuggggcu

SEQ ID NO: 3388614 - RNA, 19 nt, Human
cuuccagauggucauccag

SEQ ID NO: 3388615 - RNA, 18 nt, Human
cuuccagcuagugaccca

SEQ ID NO: 3388616 - RNA, 12 nt, Human
cuuccagcugcu

SEQ ID NO: 3388617 - RNA, 16 nt, Human
cuuccaggaaaaagga

SEQ ID NO: 3388618 - RNA, 18 nt, Human
cuuccaggaaacuccaca

SEQ ID NO: 3388619 - RNA, 19 nt, Human
cuuccaggaaacuccacau

SEQ ID NO: 3388620 - RNA, 21 nt, Human
cuuccaggaaacuccacaucu

SEQ ID NO: 3388621 - RNA, 22 nt, Human
cuuccaggaaacuccacaucug

SEQ ID NO: 3388622 - RNA, 11 nt, Human
cuuccaggcag

SEQ ID NO: 3388623 - RNA, 16 nt, Human
cuuccaggcugggaga

SEQ ID NO: 3388624 - RNA, 24 nt, Human
cuuccaggggugggacacccugug

SEQ ID NO: 3388625 - RNA, 18 nt, Human
cuuccagguaucuccagg

SEQ ID NO: 3388626 - RNA, 19 nt, Human
cuuccagguguuacuguaa

SEQ ID NO: 3388627 - RNA, 23 nt, Human
cuuccagguucugguuagcucag

SEQ ID NO: 3388628 - RNA, 20 nt, Human
cuuccaguccaaucucaugg

SEQ ID NO: 3388629 - RNA, 20 nt, Human
cuuccagucuuccugacacu

SEQ ID NO: 3388630 - RNA, 14 nt, Human
cuuccaguuugcuu

SEQ ID NO: 3388631 - RNA, 17 nt, Human
cuuccaguuugcuuugc

SEQ ID NO: 3388632 - RNA, 16 nt, Human
cuuccauacagcucua

SEQ ID NO: 3388633 - RNA, 12 nt, Human
cuuccauaguga

SEQ ID NO: 3388634 - RNA, 22 nt, Human
cuuccaucccaaccagugccaa

SEQ ID NO: 3388635 - RNA, 14 nt, Human
cuuccaucccagga

SEQ ID NO: 3388636 - RNA, 22 nt, Human
cuuccaucccaggacaccacac

SEQ ID NO: 3388637 - RNA, 14 nt, Human
cuuccaucccuacc

SEQ ID NO: 3388638 - RNA, 15 nt, Human
cuuccaucccuaccc

SEQ ID NO: 3388639 - RNA, 16 nt, Human
cuuccaucucugacuu

SEQ ID NO: 3388640 - RNA, 13 nt, Human
cuuccaugaauuu

SEQ ID NO: 3388641 - RNA, 19 nt, Human
cuuccaugaauuuuaaaau

SEQ ID NO: 3388642 - RNA, 20 nt, Human
aacagauguuucuuuuguau

SEQ ID NO: 3388643 - RNA, 22 nt, Human
aacagauuauuuuggaaaguuu

SEQ ID NO: 3388644 - RNA, 16 nt, Human
aacagauuggauuuua

SEQ ID NO: 3388645 - RNA, 15 nt, Human
aacagauuuggaaag

SEQ ID NO: 3388646 - RNA, 13 nt, Human
aacagauuuguga

SEQ ID NO: 3388647 - RNA, 15 nt, Human
aacagauuugugaac

SEQ ID NO: 3388648 - RNA, 23 nt, Human
cuugauguugcuuagucacuuau

SEQ ID NO: 3388649 - RNA, 13 nt, Human
cuugauuaaauca

SEQ ID NO: 3388650 - RNA, 18 nt, Human
cuugauuaagauuuuaca

SEQ ID NO: 3388651 - RNA, 18 nt, Human
cuugauucacaaugaaau

SEQ ID NO: 3388652 - RNA, 15 nt, Human
cuugauucagucaca

SEQ ID NO: 3388653 - RNA, 19 nt, Human
cuugauucauaaugacuua

SEQ ID NO: 3388654 - RNA, 16 nt, Human
cuugauuugagauuuu

SEQ ID NO: 3388655 - RNA, 24 nt, Human
cuugauuugaguugauugagaaga

SEQ ID NO: 3388656 - RNA, 12 nt, Human
cuugauuuuugc

SEQ ID NO: 3388657 - RNA, 16 nt, Human
cuugcaaaauuccuga

SEQ ID NO: 3388658 - RNA, 17 nt, Human
cuugcaaaauuccugac

SEQ ID NO: 3388659 - RNA, 19 nt, Human
cuugcaacacacagacaca

SEQ ID NO: 3388660 - RNA, 20 nt, Human
cuugcaacuucaugucaacu

SEQ ID NO: 3388661 - RNA, 22 nt, Human
cuugcaagaaucagugcaaaga

SEQ ID NO: 3388662 - RNA, 17 nt, Human
cuugcaauggcagccuu

SEQ ID NO: 3388663 - RNA, 19 nt, Human
cuugcacacaucaucugua

SEQ ID NO: 3388664 - RNA, 22 nt, Human
cuugcacacuccccugcacugg

SEQ ID NO: 3388665 - RNA, 23 nt, Human
cuugcacacuccccugcacugga

SEQ ID NO: 3388666 - RNA, 14 nt, Human
cuugcacagggauu

SEQ ID NO: 3388667 - RNA, 20 nt, Human
cuugcacagggauucucaca

SEQ ID NO: 3388668 - RNA, 18 nt, Human
cuugcaccaaauuaucuu

SEQ ID NO: 3388669 - RNA, 23 nt, Human
cuugcaccccaaagcuuuccugc

SEQ ID NO: 3388670 - RNA, 16 nt, Human
cuugcaccccucacuc

SEQ ID NO: 3388671 - RNA, 12 nt, Human
cuugcaccugca

SEQ ID NO: 3388672 - RNA, 19 nt, Human
cuugcacgaccgccccagu

SEQ ID NO: 3388673 - RNA, 19 nt, Human
cuugcacgcccauguguga

SEQ ID NO: 3388674 - RNA, 17 nt, Human
cuugcacucuucuacca

SEQ ID NO: 3388675 - RNA, 18 nt, Human
cuugcacuggccuucuga

SEQ ID NO: 3388676 - RNA, 16 nt, Human
cuugcagaacugccau

SEQ ID NO: 3388677 - RNA, 17 nt, Human
cuugcagaacugccauu

SEQ ID NO: 3388678 - RNA, 18 nt, Human
cuugcagaacugccauua

SEQ ID NO: 3388679 - RNA, 13 nt, Human
cuugcagaagcug

SEQ ID NO: 3388680 - RNA, 18 nt, Human
cuugcagacucuacagag

SEQ ID NO: 3388681 - RNA, 21 nt, Human
cuugcagacucuacagaggcc

SEQ ID NO: 3388682 - RNA, 15 nt, Human
cuugcagagaagccu

SEQ ID NO: 3388683 - RNA, 19 nt, Human
cuugcagcacucacacagg

SEQ ID NO: 3388684 - RNA, 22 nt, Human
cuugcagcucuccccuucucug

SEQ ID NO: 3388685 - RNA, 14 nt, Human
cuugcaguagauuu

SEQ ID NO: 3388686 - RNA, 22 nt, Human
cuugcaguagauuuucuuuaaa

SEQ ID NO: 3388687 - RNA, 19 nt, Human
cuugcaguaucggcacugu

SEQ ID NO: 3388688 - RNA, 16 nt, Human
cuugcaguucuugagu

SEQ ID NO: 3388689 - RNA, 14 nt, Human
cuugcauacaaaca

SEQ ID NO: 3388690 - RNA, 21 nt, Human
cuugcauaguaaauguaguuc

SEQ ID NO: 3388691 - RNA, 13 nt, Human
cuugcauauuuug

SEQ ID NO: 3388692 - RNA, 23 nt, Human
cuugcaucaauuuuucuuauuuc

SEQ ID NO: 3388693 - RNA, 19 nt, Human
cuugcauccaacuccagga

SEQ ID NO: 3388694 - RNA, 18 nt, Human
cuugcaucucauugcucu

SEQ ID NO: 3388695 - RNA, 17 nt, Human
cuugcaugaggcuagug

SEQ ID NO: 3388696 - RNA, 18 nt, Human
cuugcaugguuuggagcu

SEQ ID NO: 3388697 - RNA, 22 nt, Human
cuugcaugguuuggagcugauc

SEQ ID NO: 3388698 - RNA, 10 nt, Human
cuugcauuga

SEQ ID NO: 3388699 - RNA, 18 nt, Human
cuugcauugaauauauua

SEQ ID NO: 3388700 - RNA, 14 nt, Human
cuugcauugacauu

SEQ ID NO: 3388701 - RNA, 14 nt, Human
cuugcauugcagag

SEQ ID NO: 3388702 - RNA, 20 nt, Human
cuugcauuuuagcuaauuua

SEQ ID NO: 3388703 - RNA, 20 nt, Human
cuugccaaaguacagaauuu

SEQ ID NO: 3388704 - RNA, 13 nt, Human
cuugccaaauuua

SEQ ID NO: 3388705 - RNA, 21 nt, Human
cuugccaaccuguaauaaaua

SEQ ID NO: 3388706 - RNA, 22 nt, Human
cuugccaaccuguaauaaauau

SEQ ID NO: 3388707 - RNA, 19 nt, Human
cuugccacaccccccaccc

SEQ ID NO: 3388708 - RNA, 20 nt, Human
cuugccacagcucuugagga

SEQ ID NO: 3388709 - RNA, 13 nt, Human
cuugccaccccac

SEQ ID NO: 3388710 - RNA, 18 nt, Human
cuugccaccccacccucc

SEQ ID NO: 3388711 - RNA, 17 nt, Human
cuugccacuagggcucu

SEQ ID NO: 3388712 - RNA, 17 nt, Human
cuugccacugcacucca

SEQ ID NO: 3388713 - RNA, 19 nt, Human
cuugccagaaccaaauuaa

SEQ ID NO: 3388714 - RNA, 12 nt, Human
cuugccagagau

SEQ ID NO: 3388715 - RNA, 16 nt, Human
cuugccagagauccaa

SEQ ID NO: 3388716 - RNA, 13 nt, Human
cuugccagagccg

SEQ ID NO: 3388717 - RNA, 17 nt, Human
cuugccagaugcugcag

SEQ ID NO: 3388718 - RNA, 12 nt, Human
cuugccagcugc

SEQ ID NO: 3388719 - RNA, 21 nt, Human
cuugccaucccucccuccacc

SEQ ID NO: 3388720 - RNA, 22 nt, Human
cuugcccaccccacccccaccc

SEQ ID NO: 3388721 - RNA, 23 nt, Human
cuugcccagagaugccuccaccg

SEQ ID NO: 3388722 - RNA, 20 nt, Human
cuugcccaguuucagggcua

SEQ ID NO: 3388723 - RNA, 14 nt, Human
cuugcccauccuga

SEQ ID NO: 3388724 - RNA, 17 nt, Human
cuugcccaugcugggcu

SEQ ID NO: 3388725 - RNA, 18 nt, Human
cuugccccaacccccagc

SEQ ID NO: 3388726 - RNA, 16 nt, Human
cuugccccaucacugc

SEQ ID NO: 3388727 - RNA, 14 nt, Human
cuugccccccaccc

SEQ ID NO: 3388728 - RNA, 19 nt, Human
cuugccccccaccccagcc

SEQ ID NO: 3388729 - RNA, 22 nt, Human
cuugccccccuggccuccccca

SEQ ID NO: 3388730 - RNA, 20 nt, Human
cuugcccggauucugggagg

SEQ ID NO: 3388731 - RNA, 15 nt, Human
cuugcccuagaugag

SEQ ID NO: 3388732 - RNA, 12 nt, Human
cuugcccugacc

SEQ ID NO: 3388733 - RNA, 15 nt, Human
cuugcccugaccucc

SEQ ID NO: 3388734 - RNA, 11 nt, Human
cuugcccugcu

SEQ ID NO: 3388735 - RNA, 17 nt, Human
cuugcccuucccugucc

SEQ ID NO: 3388736 - RNA, 23 nt, Human
cuugcccuucccugucccucuaa

SEQ ID NO: 3388737 - RNA, 15 nt, Human
cuugcccuugcccug

SEQ ID NO: 3388738 - RNA, 17 nt, Human
cuugcccuuucccccca

SEQ ID NO: 3388739 - RNA, 22 nt, Human
cuugcccuuuccccccauguug

SEQ ID NO: 3388740 - RNA, 17 nt, Human
cuugccgaaacuggaag

SEQ ID NO: 3388741 - RNA, 21 nt, Human
cuugccgcgucgcccucccag

SEQ ID NO: 3388742 - RNA, 18 nt, Human
cuugccgucuaccugagg

SEQ ID NO: 3388743 - RNA, 17 nt, Human
cuugccuaaauuuaaug

SEQ ID NO: 3388744 - RNA, 19 nt, Human
cuugccuagggccuggucc

SEQ ID NO: 3388745 - RNA, 18 nt, Human
cuugccucaaugccagua

SEQ ID NO: 3388746 - RNA, 13 nt, Human
cuugccucauuuu

SEQ ID NO: 3388747 - RNA, 13 nt, Human
cuugccuccaggu

SEQ ID NO: 3388748 - RNA, 19 nt, Human
cuugccuccaggugcagag

SEQ ID NO: 3388749 - RNA, 21 nt, Human
cuugccuccaggugcagaggu

SEQ ID NO: 3388750 - RNA, 17 nt, Human
cuugccuccauggugcc

SEQ ID NO: 3388751 - RNA, 22 nt, Human
cuugccuccauggugccucugg

SEQ ID NO: 3388752 - RNA, 12 nt, Human
cuugccuccugg

SEQ ID NO: 3388753 - RNA, 15 nt, Human
cuugccuccugugua

SEQ ID NO: 3388754 - RNA, 23 nt, Human
cuugccucggcuccugcugcacc

SEQ ID NO: 3388755 - RNA, 13 nt, Human
cuugccucucugu

SEQ ID NO: 3388756 - RNA, 14 nt, Human
cuugccucucuguu

SEQ ID NO: 3388757 - RNA, 14 nt, Human
cuugccucugcaca

SEQ ID NO: 3388758 - RNA, 23 nt, Human
cuugccucuguccccuucucuca

SEQ ID NO: 3388759 - RNA, 13 nt, Human
cuugccucugugc

SEQ ID NO: 3388760 - RNA, 16 nt, Human
cuugccucugugcugu

SEQ ID NO: 3388761 - RNA, 20 nt, Human
cuugccucugugcugugugu

SEQ ID NO: 3388762 - RNA, 20 nt, Human
cuugccucuuuuaccugcug

SEQ ID NO: 3388763 - RNA, 22 nt, Human
cuugccucuuuuaccugcugcu

SEQ ID NO: 3388764 - RNA, 18 nt, Human
cuugccugaacauccuuc

SEQ ID NO: 3388765 - RNA, 22 nt, Human
cuugccugaacauccuuccuuc

SEQ ID NO: 3388766 - RNA, 20 nt, Human
cuugccuggagacguggaac

SEQ ID NO: 3388767 - RNA, 11 nt, Human
cuugccugugc

SEQ ID NO: 3388768 - RNA, 18 nt, Human
cuugccugugccagguga

SEQ ID NO: 3388769 - RNA, 17 nt, Human
cuugccuuucgaggccu

SEQ ID NO: 3388770 - RNA, 18 nt, Human
cuugccuuucgaggccug

SEQ ID NO: 3388771 - RNA, 14 nt, Human
cuugcgaauaacag

SEQ ID NO: 3388772 - RNA, 16 nt, Human
cuugcgaauccaagcu

SEQ ID NO: 3388773 - RNA, 19 nt, Human
cuugcgaauccaagcuccc

SEQ ID NO: 3388774 - RNA, 20 nt, Human
cuugcgaauccaagcucccu

SEQ ID NO: 3388775 - RNA, 14 nt, Human
cuugcgcauucuca

SEQ ID NO: 3388776 - RNA, 19 nt, Human
cuugcgcuuuugcugguca

SEQ ID NO: 3388777 - RNA, 20 nt, Human
cuugcggaaucacucugucc

SEQ ID NO: 3388778 - RNA, 17 nt, Human
cuugcggcaaaaggaaa

SEQ ID NO: 3388779 - RNA, 15 nt, Human
cuugcggcuccucag

SEQ ID NO: 3388780 - RNA, 15 nt, Human
cuugcguaugucugu

SEQ ID NO: 3388781 - RNA, 16 nt, Human
cuugcuaaucaguguc

SEQ ID NO: 3388782 - RNA, 18 nt, Human
cuugcuaaucagugucuc

SEQ ID NO: 3388783 - RNA, 20 nt, Human
cuugcuaccaguauuuagaa

SEQ ID NO: 3388784 - RNA, 16 nt, Human
cuugcuaccucaaggg

SEQ ID NO: 3388785 - RNA, 17 nt, Human
cuugcuauauugcccag

SEQ ID NO: 3388786 - RNA, 13 nt, Human
cuugcuauucugu

SEQ ID NO: 3388787 - RNA, 15 nt, Human
cuugcuauucugucc

SEQ ID NO: 3388788 - RNA, 20 nt, Human
cuugcuauucugucccuagg

SEQ ID NO: 3388789 - RNA, 15 nt, Human
cuugcucccugacug

SEQ ID NO: 3388790 - RNA, 17 nt, Human
cuugcucccuucagccc

SEQ ID NO: 3388791 - RNA, 18 nt, Human
cuugcucccuucagcccc

SEQ ID NO: 3388792 - RNA, 18 nt, Human
cuugcuccuccuucugcu

SEQ ID NO: 3388793 - RNA, 16 nt, Human
cuugcucuaucucaca

SEQ ID NO: 3388794 - RNA, 18 nt, Human
cuugcucuaucucacagc

SEQ ID NO: 3388795 - RNA, 17 nt, Human
cuugcucucccucuucu

SEQ ID NO: 3388796 - RNA, 20 nt, Human
cuugcucucccucuucucaa

SEQ ID NO: 3388797 - RNA, 16 nt, Human
cuucugccuucucaug

SEQ ID NO: 3388798 - RNA, 13 nt, Human
cuucugccuuuuu

SEQ ID NO: 3388799 - RNA, 16 nt, Human
cuucugcgccucaggc

SEQ ID NO: 3388800 - RNA, 10 nt, Human
cuucugcucc

SEQ ID NO: 3388801 - RNA, 14 nt, Human
cuucugcuccaccc

SEQ ID NO: 3388802 - RNA, 23 nt, Human
cuucugcuccacccuuggccugu

SEQ ID NO: 3388803 - RNA, 11 nt, Human
cuucugcuggg

SEQ ID NO: 3388804 - RNA, 19 nt, Human
cuucugcugggcuggggcc

SEQ ID NO: 3388805 - RNA, 18 nt, Human
cuucugcuggggccuggg

SEQ ID NO: 3388806 - RNA, 18 nt, Human
cuucugcuuaggagagac

SEQ ID NO: 3388807 - RNA, 15 nt, Human
cuucugcuuuguugu

SEQ ID NO: 3388808 - RNA, 20 nt, Human
cuucugcuuuucugcccugg

SEQ ID NO: 3388809 - RNA, 23 nt, Human
cuucugcuuuucugcccuggcug

SEQ ID NO: 3388810 - RNA, 16 nt, Human
cuucuggaauuuguuc

SEQ ID NO: 3388811 - RNA, 15 nt, Human
cuucuggacaggcuc

SEQ ID NO: 3388812 - RNA, 14 nt, Human
cuucuggagcccuu

SEQ ID NO: 3388813 - RNA, 18 nt, Human
cuucuggagucuccagug

SEQ ID NO: 3388814 - RNA, 17 nt, Human
cuucuggccaggaagcu

SEQ ID NO: 3388815 - RNA, 22 nt, Human
cuucuggccaggaagcuuuggu

SEQ ID NO: 3388816 - RNA, 11 nt, Human
cuucuggccuu

SEQ ID NO: 3388817 - RNA, 21 nt, Human
cuucuggccuuuccucucucc

SEQ ID NO: 3388818 - RNA, 22 nt, Human
cuucugggaagggguuucuaac

SEQ ID NO: 3388819 - RNA, 17 nt, Human
cuucugggagcaggaac

SEQ ID NO: 3388820 - RNA, 15 nt, Human
cuucugggagggcag

SEQ ID NO: 3388821 - RNA, 22 nt, Human
cuucugggagggcagcagggcu

SEQ ID NO: 3388822 - RNA, 19 nt, Human
cuucugggcaucuguucug

SEQ ID NO: 3388823 - RNA, 20 nt, Human
cuucugggcaucuguucugg

SEQ ID NO: 3388824 - RNA, 16 nt, Human
cuucugggccugacca

SEQ ID NO: 3388825 - RNA, 21 nt, Human
cuucugggcuucaucuggcaa

SEQ ID NO: 3388826 - RNA, 22 nt, Human
cuucugggcuucaucuggcaac

SEQ ID NO: 3388827 - RNA, 19 nt, Human
cuucugggguccccagggc

SEQ ID NO: 3388828 - RNA, 16 nt, Human
cuucuggguuccuucc

SEQ ID NO: 3388829 - RNA, 15 nt, Human
cuucugguacucucc

SEQ ID NO: 3388830 - RNA, 16 nt, Human
cuucugguacucuccu

SEQ ID NO: 3388831 - RNA, 19 nt, Human
cuucugguacucuccuaga

SEQ ID NO: 3388832 - RNA, 20 nt, Human
cuucuguaauuguguggauu

SEQ ID NO: 3388833 - RNA, 21 nt, Human
cuucuguaguuuuaucacaug

SEQ ID NO: 3388834 - RNA, 16 nt, Human
cuucuguauauaaaug

SEQ ID NO: 3388835 - RNA, 16 nt, Human
cuucugucaucuaccu

SEQ ID NO: 3388836 - RNA, 15 nt, Human
cuucuguccaagcag

SEQ ID NO: 3388837 - RNA, 16 nt, Human
cuucuguccuacucug

SEQ ID NO: 3388838 - RNA, 21 nt, Human
cuucuguccuacucuguguca

SEQ ID NO: 3388839 - RNA, 16 nt, Human
cuucuguccugugagg

SEQ ID NO: 3388840 - RNA, 11 nt, Human
cuucugucucc

SEQ ID NO: 3388841 - RNA, 16 nt, Human
cuucugugaugagcug

SEQ ID NO: 3388842 - RNA, 19 nt, Human
cuucugugaugagcugauc

SEQ ID NO: 3388843 - RNA, 14 nt, Human
cuucugugcaccug

SEQ ID NO: 3388844 - RNA, 15 nt, Human
cuucugugcaccugg

SEQ ID NO: 3388845 - RNA, 18 nt, Human
cuucugugcaccugggcu

SEQ ID NO: 3388846 - RNA, 19 nt, Human
cuucugugcccagaauacu

SEQ ID NO: 3388847 - RNA, 20 nt, Human
cuucugugcccagaauacug

SEQ ID NO: 3388848 - RNA, 15 nt, Human
cuucugugcccagcu

SEQ ID NO: 3388849 - RNA, 13 nt, Human
cuucuguggcuca

SEQ ID NO: 3388850 - RNA, 21 nt, Human
cuucuguggguuucuaaagcu

SEQ ID NO: 3388851 - RNA, 17 nt, Human
cuucuguguuugaacug

SEQ ID NO: 3388852 - RNA, 15 nt, Human
cuucuguugcugccu

SEQ ID NO: 3388853 - RNA, 20 nt, Human
cuucuguugcugccucaugc

SEQ ID NO: 3388854 - RNA, 15 nt, Human
cuucuguugucaccu

SEQ ID NO: 3388855 - RNA, 16 nt, Human
cuucuguuuagucucc

SEQ ID NO: 3388856 - RNA, 14 nt, Human
cuucuguuucuagu

SEQ ID NO: 3388857 - RNA, 15 nt, Human
cuucuguuuuauaau

SEQ ID NO: 3388858 - RNA, 20 nt, Human
cuucuguuuuauaauuuugu

SEQ ID NO: 3388859 - RNA, 16 nt, Human
cuucuguuuucaaucu

SEQ ID NO: 3388860 - RNA, 19 nt, Human
cuucuguuuucaaucucgu

SEQ ID NO: 3388861 - RNA, 14 nt, Human
cuucuguuuucugu

SEQ ID NO: 3388862 - RNA, 13 nt, Human
cuucuuaaagagu

SEQ ID NO: 3388863 - RNA, 13 nt, Human
cuucuuaaauauc

SEQ ID NO: 3388864 - RNA, 20 nt, Human
cuucuuaaucuuuucacaaa

SEQ ID NO: 3388865 - RNA, 21 nt, Human
cuucuuaaucuuuucacaaau

SEQ ID NO: 3388866 - RNA, 15 nt, Human
cuucuuaauguacau

SEQ ID NO: 3388867 - RNA, 17 nt, Human
cuucuuaauuaauuuga

SEQ ID NO: 3388868 - RNA, 21 nt, Human
cuucuuacaauaauucuauga

SEQ ID NO: 3388869 - RNA, 14 nt, Human
cuucuuacaugcau

SEQ ID NO: 3388870 - RNA, 15 nt, Human
cuucuuacaugcauu

SEQ ID NO: 3388871 - RNA, 17 nt, Human
cuucuuauucucacucc

SEQ ID NO: 3388872 - RNA, 15 nt, Human
cuucuucacccagcu

SEQ ID NO: 3388873 - RNA, 16 nt, Human
cuucuucacccagcua

SEQ ID NO: 3388874 - RNA, 18 nt, Human
cuucuucagagacuccug

SEQ ID NO: 3388875 - RNA, 21 nt, Human
cuucuucagagacuccugcag

SEQ ID NO: 3388876 - RNA, 21 nt, Human
cuucuucagccaccucucuuu

SEQ ID NO: 3388877 - RNA, 16 nt, Human
cuucuucauauucuaa

SEQ ID NO: 3388878 - RNA, 16 nt, Human
cuucuucauucuauca

SEQ ID NO: 3388879 - RNA, 18 nt, Human
cuucuuccaucccaggac

SEQ ID NO: 3388880 - RNA, 21 nt, Human
cuucuuccccuucccugacug

SEQ ID NO: 3388881 - RNA, 14 nt, Human
cuucuucccucccu

SEQ ID NO: 3388882 - RNA, 15 nt, Human
cuucuucucaaagca

SEQ ID NO: 3388883 - RNA, 19 nt, Human
cuucuucugucaucuaccu

SEQ ID NO: 3388884 - RNA, 13 nt, Human
cuucuucugucca

SEQ ID NO: 3388885 - RNA, 14 nt, Human
cuucuucuucagaa

SEQ ID NO: 3388886 - RNA, 13 nt, Human
cuucuugaauaua

SEQ ID NO: 3388887 - RNA, 20 nt, Human
cuucuugcauccuuccuaua

SEQ ID NO: 3388888 - RNA, 13 nt, Human
cuucuugccucug

SEQ ID NO: 3388889 - RNA, 16 nt, Human
cuucuugccucugugc

SEQ ID NO: 3388890 - RNA, 17 nt, Human
cuucuugccucugugcu

SEQ ID NO: 3388891 - RNA, 23 nt, Human
cuucuugcugcccugccccaagu

SEQ ID NO: 3388892 - RNA, 21 nt, Human
cuucuugcuucuuucuagaaa

SEQ ID NO: 3388893 - RNA, 18 nt, Human
cuucuuggggcccagugc

SEQ ID NO: 3388894 - RNA, 23 nt, Human
cuucuuggggcccagugcauggu

SEQ ID NO: 3388895 - RNA, 23 nt, Human
cuucuuggugcuuacacaucuca

SEQ ID NO: 3388896 - RNA, 16 nt, Human
cuucuugucagacaua

SEQ ID NO: 3388897 - RNA, 18 nt, Human
cuucuugucagacauaaa

SEQ ID NO: 3388898 - RNA, 13 nt, Human
cuucuugugaagg

SEQ ID NO: 3388899 - RNA, 15 nt, Human
cuucuugugaucuug

SEQ ID NO: 3388900 - RNA, 19 nt, Human
cuucuugugaucuugcucu

SEQ ID NO: 3388901 - RNA, 16 nt, Human
cuucuuguucugagau

SEQ ID NO: 3388902 - RNA, 22 nt, Human
cuucuuguucugagauucaaua

SEQ ID NO: 3388903 - RNA, 12 nt, Human
cuucuuuaaaca

SEQ ID NO: 3388904 - RNA, 20 nt, Human
cuucuuuaaucacuuaacau

SEQ ID NO: 3388905 - RNA, 20 nt, Human
cuucuuuauacuguaauuua

SEQ ID NO: 3388906 - RNA, 17 nt, Human
cuucuuucauuucuucu

SEQ ID NO: 3388907 - RNA, 13 nt, Human
cuucuuucccuuc

SEQ ID NO: 3388908 - RNA, 18 nt, Human
cuucuuucccuuccucca

SEQ ID NO: 3388909 - RNA, 19 nt, Human
cuucuuucccuuccuccau

SEQ ID NO: 3388910 - RNA, 15 nt, Human
cuucuuuccucuucc

SEQ ID NO: 3388911 - RNA, 16 nt, Human
cuucuuucuagaaaga

SEQ ID NO: 3388912 - RNA, 23 nt, Human
cuucuuucucucagccuuacauu

SEQ ID NO: 3388913 - RNA, 14 nt, Human
cuucuuugauaaug

SEQ ID NO: 3388914 - RNA, 19 nt, Human
cuucuuugauaauguuaaa

SEQ ID NO: 3388915 - RNA, 18 nt, Human
cuucuuugcagccugggu

SEQ ID NO: 3388916 - RNA, 15 nt, Human
cuucuuugcuugccu

SEQ ID NO: 3388917 - RNA, 12 nt, Human
cuucuuuuagca

SEQ ID NO: 3388918 - RNA, 16 nt, Human
cuucuuuucacauucu

SEQ ID NO: 3388919 - RNA, 13 nt, Human
cuucuuuugauua

SEQ ID NO: 3388920 - RNA, 16 nt, Human
cuucuuuugauuaugu

SEQ ID NO: 3388921 - RNA, 13 nt, Human
cuucuuuugcucu

SEQ ID NO: 3388922 - RNA, 15 nt, Human
cuucuuuuggcuucc

SEQ ID NO: 3388923 - RNA, 22 nt, Human
cuucuuuuucuggacucuggac

SEQ ID NO: 3388924 - RNA, 16 nt, Human
cuucuuuuuuuucauu

SEQ ID NO: 3388925 - RNA, 21 nt, Human
cuugaaaaaugugcaaaacag

SEQ ID NO: 3388926 - RNA, 23 nt, Human
cuugaaaacacuguucucugccc

SEQ ID NO: 3388927 - RNA, 12 nt, Human
cuugaaaauuaa

SEQ ID NO: 3388928 - RNA, 20 nt, Human
cuugaaaauuuuauuaaaaa

SEQ ID NO: 3388929 - RNA, 16 nt, Human
cuugaaacuuugggaa

SEQ ID NO: 3388930 - RNA, 13 nt, Human
cuugaaagaaaau

SEQ ID NO: 3388931 - RNA, 19 nt, Human
cuugaaagaagaaaagguu

SEQ ID NO: 3388932 - RNA, 19 nt, Human
cuugaaauauaggaacuua

SEQ ID NO: 3388933 - RNA, 18 nt, Human
cuugaaauauccugcuug

SEQ ID NO: 3388934 - RNA, 21 nt, Human
cuugaaauuaagaaggcaaaa

SEQ ID NO: 3388935 - RNA, 19 nt, Human
cuugaaauuugaauuuugu

SEQ ID NO: 3388936 - RNA, 14 nt, Human
cuugaaauuuuaac

SEQ ID NO: 3388937 - RNA, 19 nt, Human
cuugaacaaaagggucaga

SEQ ID NO: 3388938 - RNA, 22 nt, Human
cuugaacaaaagggucagagga

SEQ ID NO: 3388939 - RNA, 23 nt, Human
cuugaacacucaugcugaaagcc

SEQ ID NO: 3388940 - RNA, 23 nt, Human
cuugaacauuaauccacauguuu

SEQ ID NO: 3388941 - RNA, 14 nt, Human
cuugaacccgggag

SEQ ID NO: 3388942 - RNA, 19 nt, Human
cuugaacguuuucuaauug

SEQ ID NO: 3388943 - RNA, 21 nt, Human
cuugaacguuuucuaauugcu

SEQ ID NO: 3388944 - RNA, 13 nt, Human
cuugaacuccuga

SEQ ID NO: 3388945 - RNA, 14 nt, Human
cuugaacuccuggc

SEQ ID NO: 3388946 - RNA, 18 nt, Human
cuugaacuccuggccuca

SEQ ID NO: 3388947 - RNA, 13 nt, Human
cgccuccaggcca

SEQ ID NO: 3388948 - RNA, 16 nt, Human
cgccuccauccaaggc

SEQ ID NO: 3388949 - RNA, 13 nt, Human
cgccucccacugg

SEQ ID NO: 3388950 - RNA, 15 nt, Human
cgccucccacugggg

SEQ ID NO: 3388951 - RNA, 14 nt, Human
cgccucccagccug

SEQ ID NO: 3388952 - RNA, 15 nt, Human
cgccucccagccugg

SEQ ID NO: 3388953 - RNA, 17 nt, Human
cgccuccccaccuccag

SEQ ID NO: 3388954 - RNA, 19 nt, Human
cgccuccccaccuccaggc

SEQ ID NO: 3388955 - RNA, 16 nt, Human
cgccuccccugcccca

SEQ ID NO: 3388956 - RNA, 14 nt, Human
cgccuccgagggac

SEQ ID NO: 3388957 - RNA, 17 nt, Human
cgccuccgggaccccca

SEQ ID NO: 3388958 - RNA, 15 nt, Human
cgccucgcccaccgc

SEQ ID NO: 3388959 - RNA, 22 nt, Human
cgccucgcccaccgcaugcccc

SEQ ID NO: 3388960 - RNA, 13 nt, Human
cgccucugcauuc

SEQ ID NO: 3388961 - RNA, 15 nt, Human
cgccucuuucaagca

SEQ ID NO: 3388962 - RNA, 16 nt, Human
cgccugacagaaacca

SEQ ID NO: 3388963 - RNA, 16 nt, Human
cgccugagcccaggga

SEQ ID NO: 3388964 - RNA, 20 nt, Human
cgccugagcccagggaggcc

SEQ ID NO: 3388965 - RNA, 16 nt, Human
cgccugagcucacucg

SEQ ID NO: 3388966 - RNA, 18 nt, Human
cgccugcaaacgcugccu

SEQ ID NO: 3388967 - RNA, 19 nt, Human
cgccugcaaacgcugccug

SEQ ID NO: 3388968 - RNA, 20 nt, Human
cgccugcaaacgcugccugc

SEQ ID NO: 3388969 - RNA, 22 nt, Human
cgccugcaaacgcugccugccg

SEQ ID NO: 3388970 - RNA, 22 nt, Human
cgccugcacuccucagggcagc

SEQ ID NO: 3388971 - RNA, 15 nt, Human
cgccugcccaccugc

SEQ ID NO: 3388972 - RNA, 20 nt, Human
cgccugcccgucucucuccc

SEQ ID NO: 3388973 - RNA, 17 nt, Human
cgccugcccucauggcc

SEQ ID NO: 3388974 - RNA, 22 nt, Human
cgccugcccucauggccccucu

SEQ ID NO: 3388975 - RNA, 13 nt, Human
cgccugcccuccc

SEQ ID NO: 3388976 - RNA, 17 nt, Human
cgccugcuugucccugc

SEQ ID NO: 3388977 - RNA, 13 nt, Human
cgccuggagcccu

SEQ ID NO: 3388978 - RNA, 15 nt, Human
cgccuggauuucugg

SEQ ID NO: 3388979 - RNA, 20 nt, Human
cgccuggauuucugguucug

SEQ ID NO: 3388980 - RNA, 11 nt, Human
cgccuggcaga

SEQ ID NO: 3388981 - RNA, 14 nt, Human
cgccuggccaggag

SEQ ID NO: 3388982 - RNA, 20 nt, Human
cgccuggguccaaugcucag

SEQ ID NO: 3388983 - RNA, 23 nt, Human
cgccuggugaugcgcaguugcug

SEQ ID NO: 3388984 - RNA, 20 nt, Human
cgccuguaaucccagcacuu

SEQ ID NO: 3388985 - RNA, 15 nt, Human
cgccuguagucccag

SEQ ID NO: 3388986 - RNA, 20 nt, Human
cgccuguaguccuagccacu

SEQ ID NO: 3388987 - RNA, 17 nt, Human
cgccugugaugcugggc

SEQ ID NO: 3388988 - RNA, 16 nt, Human
cgccugugcacacaca

SEQ ID NO: 3388989 - RNA, 15 nt, Human
cgccuguucccccgc

SEQ ID NO: 3388990 - RNA, 14 nt, Human
cgccuuaagcugau

SEQ ID NO: 3388991 - RNA, 13 nt, Human
cgccuucacagca

SEQ ID NO: 3388992 - RNA, 14 nt, Human
cgccuucacagcag

SEQ ID NO: 3388993 - RNA, 22 nt, Human
cgccuucacuccggugugccug

SEQ ID NO: 3388994 - RNA, 19 nt, Human
cgccuucccuccugcuuug

SEQ ID NO: 3388995 - RNA, 19 nt, Human
cgccuuccuugaccuuccu

SEQ ID NO: 3388996 - RNA, 15 nt, Human
cgcgacaaugcaaac

SEQ ID NO: 3388997 - RNA, 16 nt, Human
cgcgacaaugcaaacc

SEQ ID NO: 3388998 - RNA, 14 nt, Human
cgcgaccuuggccg

SEQ ID NO: 3388999 - RNA, 16 nt, Human
cgcgaucccacacagg

SEQ ID NO: 3389000 - RNA, 15 nt, Human
cgcgaucucagcuca

SEQ ID NO: 3389001 - RNA, 14 nt, Human
cgcgaugggucagg

SEQ ID NO: 3389002 - RNA, 18 nt, Human
cgcgauguggaacugcug

SEQ ID NO: 3389003 - RNA, 16 nt, Human
cgcgccacaggacccu

SEQ ID NO: 3389004 - RNA, 22 nt, Human
cgcgccacuacacuccagccug

SEQ ID NO: 3389005 - RNA, 18 nt, Human
cgcgccacucgcuucccc

SEQ ID NO: 3389006 - RNA, 22 nt, Human
cgcgccacucgcuucccccaua

SEQ ID NO: 3389007 - RNA, 16 nt, Human
cgcgccccccucccag

SEQ ID NO: 3389008 - RNA, 21 nt, Human
cgcgccccccucccagaggcg

SEQ ID NO: 3389009 - RNA, 20 nt, Human
cgcgccccgaaaggucaccu

SEQ ID NO: 3389010 - RNA, 13 nt, Human
cgcgcgcgcacac

SEQ ID NO: 3389011 - RNA, 16 nt, Human
cgcgcuugcuggccag

SEQ ID NO: 3389012 - RNA, 16 nt, Human
cgcggagccugcauuu

SEQ ID NO: 3389013 - RNA, 12 nt, Human
cgcggccagccc

SEQ ID NO: 3389014 - RNA, 14 nt, Human
cgcggccagccccg

SEQ ID NO: 3389015 - RNA, 22 nt, Human
cgcggccagccccggcccuggg

SEQ ID NO: 3389016 - RNA, 21 nt, Human
cgcggcccucaguagucccug

SEQ ID NO: 3389017 - RNA, 18 nt, Human
cgcggcggagcuggcccc

SEQ ID NO: 3389018 - RNA, 22 nt, Human
cgcggcucccggggcagggcag

SEQ ID NO: 3389019 - RNA, 11 nt, Human
cgcgugcacac

SEQ ID NO: 3389020 - RNA, 19 nt, Human
cgcgugcacacaccagagc

SEQ ID NO: 3389021 - RNA, 17 nt, Human
cgcguugaaauuguaau

SEQ ID NO: 3389022 - RNA, 17 nt, Human
cgcguuguaaaauauag

SEQ ID NO: 3389023 - RNA, 15 nt, Human
cgcuaaagagcccuu

SEQ ID NO: 3389024 - RNA, 21 nt, Human
cgcuaaagagcccuugccucc

SEQ ID NO: 3389025 - RNA, 12 nt, Human
cgcuaaggaaga

SEQ ID NO: 3389026 - RNA, 21 nt, Human
cgcuaaucccgauucacccug

SEQ ID NO: 3389027 - RNA, 23 nt, Human
cgcuacaaaacgcgcagaugugc

SEQ ID NO: 3389028 - RNA, 16 nt, Human
cgcuacaccacucugg

SEQ ID NO: 3389029 - RNA, 23 nt, Human
cgcuacaccacucuggcagccac

SEQ ID NO: 3389030 - RNA, 22 nt, Human
cgcuacauuuccgccacauccc

SEQ ID NO: 3389031 - RNA, 16 nt, Human
cgcuacccgggaaggg

SEQ ID NO: 3389032 - RNA, 17 nt, Human
cgcuacccgggaagggg

SEQ ID NO: 3389033 - RNA, 12 nt, Human
cgcuaccucccu

SEQ ID NO: 3389034 - RNA, 15 nt, Human
cgcuaccucccuccc

SEQ ID NO: 3389035 - RNA, 20 nt, Human
cgcuacuaugauuuaauuug

SEQ ID NO: 3389036 - RNA, 13 nt, Human
cgcuagaggccug

SEQ ID NO: 3389037 - RNA, 14 nt, Human
cgcuagaggccuga

SEQ ID NO: 3389038 - RNA, 17 nt, Human
cgcuagaggccugagga

SEQ ID NO: 3389039 - RNA, 15 nt, Human
cgcuagcacagcucc

SEQ ID NO: 3389040 - RNA, 20 nt, Human
cgcuauaguuacuguccugu

SEQ ID NO: 3389041 - RNA, 18 nt, Human
cgcuaucugggaagcuau

SEQ ID NO: 3389042 - RNA, 14 nt, Human
cgcuaucuucacau

SEQ ID NO: 3389043 - RNA, 14 nt, Human
cgcuauuacaaaua

SEQ ID NO: 3389044 - RNA, 23 nt, Human
cgcucagcucauccaugccucag

SEQ ID NO: 3389045 - RNA, 22 nt, Human
cgcucaugggccccucugacuc

SEQ ID NO: 3389046 - RNA, 15 nt, Human
cgcuccaacuccaac

SEQ ID NO: 3389047 - RNA, 16 nt, Human
cgcuccaacuccaaca

SEQ ID NO: 3389048 - RNA, 15 nt, Human
cgcuccagcugcccc

SEQ ID NO: 3389049 - RNA, 18 nt, Human
cgcuccagcugccccggc

SEQ ID NO: 3389050 - RNA, 11 nt, Human
cgcuccaggua

SEQ ID NO: 3389051 - RNA, 19 nt, Human
cgcucccaacacaaggugg

SEQ ID NO: 3389052 - RNA, 19 nt, Human
cgcuccccacucugcucug

SEQ ID NO: 3389053 - RNA, 16 nt, Human
cgcuccccgccuguuc

SEQ ID NO: 3389054 - RNA, 18 nt, Human
cgcuccccgccuguuccc

SEQ ID NO: 3389055 - RNA, 15 nt, Human
cgcuccuggcccagc

SEQ ID NO: 3389056 - RNA, 21 nt, Human
cgcuccugucugccagccagc

SEQ ID NO: 3389057 - RNA, 20 nt, Human
cgcuccuuuguguguguguc

SEQ ID NO: 3389058 - RNA, 22 nt, Human
cgcucgaaguugaucuccccag

SEQ ID NO: 3389059 - RNA, 20 nt, Human
cgcucggaggccccaaagga

SEQ ID NO: 3389060 - RNA, 23 nt, Human
cgcucguguguucuauccaaaca

SEQ ID NO: 3389061 - RNA, 14 nt, Human
cgcucucaguucuc

SEQ ID NO: 3389062 - RNA, 13 nt, Human
cgcucuccugcca

SEQ ID NO: 3389063 - RNA, 17 nt, Human
cgcucuccuuucuuucu

SEQ ID NO: 3389064 - RNA, 13 nt, Human
cgcucucuggccu

SEQ ID NO: 3389065 - RNA, 15 nt, Human
cgcucucuuccugcc

SEQ ID NO: 3389066 - RNA, 13 nt, Human
cgcucucuuuucu

SEQ ID NO: 3389067 - RNA, 20 nt, Human
cgcucugcaugcggcccagc

SEQ ID NO: 3389068 - RNA, 17 nt, Human
cgcucugcuggccuggc

SEQ ID NO: 3389069 - RNA, 13 nt, Human
cgcucugcugugg

SEQ ID NO: 3389070 - RNA, 22 nt, Human
cgcucuguugcccaggcuggag

SEQ ID NO: 3389071 - RNA, 13 nt, Human
cgcucuuugagaa

SEQ ID NO: 3389072 - RNA, 13 nt, Human
cgcugaauaaaug

SEQ ID NO: 3389073 - RNA, 23 nt, Human
cgcugacaaccaccgcuccccag

SEQ ID NO: 3389074 - RNA, 16 nt, Human
cgcugacuacagggcc

SEQ ID NO: 3389075 - RNA, 17 nt, Human
cgcugacuacagggccg

SEQ ID NO: 3389076 - RNA, 22 nt, Human
cuuggcccaggaguuuggccag

SEQ ID NO: 3389077 - RNA, 15 nt, Human
cuuggcccagggggc

SEQ ID NO: 3389078 - RNA, 18 nt, Human
cuuggcccagggggcuuc

SEQ ID NO: 3389079 - RNA, 22 nt, Human
cuuggccgcaccuaaagcagcc

SEQ ID NO: 3389080 - RNA, 20 nt, Human
cuuggccggcugugcucaga

SEQ ID NO: 3389081 - RNA, 22 nt, Human
cuuggccggcugugcucagaga

SEQ ID NO: 3389082 - RNA, 12 nt, Human
cuuggccucaga

SEQ ID NO: 3389083 - RNA, 13 nt, Human
cuuggccucagag

SEQ ID NO: 3389084 - RNA, 14 nt, Human
cuuggccucccaag

SEQ ID NO: 3389085 - RNA, 14 nt, Human
cuuggccucucucu

SEQ ID NO: 3389086 - RNA, 16 nt, Human
cuuggccucucucuag

SEQ ID NO: 3389087 - RNA, 16 nt, Human
cuuggccugcugugau

SEQ ID NO: 3389088 - RNA, 12 nt, Human
cuuggccugggc

SEQ ID NO: 3389089 - RNA, 17 nt, Human
cuuggccugucucaucc

SEQ ID NO: 3389090 - RNA, 14 nt, Human
cuuggcgaugccag

SEQ ID NO: 3389091 - RNA, 18 nt, Human
cuuggcgaugccagccaa

SEQ ID NO: 3389092 - RNA, 20 nt, Human
cuuggcgaugccagccaagc

SEQ ID NO: 3389093 - RNA, 12 nt, Human
cuuggcgcugcc

SEQ ID NO: 3389094 - RNA, 17 nt, Human
cuuggcgcugccccugg

SEQ ID NO: 3389095 - RNA, 23 nt, Human
cuuggcgcugccccuggcagccc

SEQ ID NO: 3389096 - RNA, 15 nt, Human
cuuggcggcagcagc

SEQ ID NO: 3389097 - RNA, 18 nt, Human
cuuggcguggagcaggcg

SEQ ID NO: 3389098 - RNA, 14 nt, Human
cuuggcucagacau

SEQ ID NO: 3389099 - RNA, 22 nt, Human
cuuggcuccaugcuccucacug

SEQ ID NO: 3389100 - RNA, 21 nt, Human
cuuggcucgaaucucugugcc

SEQ ID NO: 3389101 - RNA, 22 nt, Human
cuuggcucgaaucucugugccu

SEQ ID NO: 3389102 - RNA, 22 nt, Human
cuuggcucucaaugcuguuugg

SEQ ID NO: 3389103 - RNA, 17 nt, Human
cuugaacugagcuugga

SEQ ID NO: 3389104 - RNA, 20 nt, Human
cuugaacuggguacuugugg

SEQ ID NO: 3389105 - RNA, 14 nt, Human
cuugaacuugccuc

SEQ ID NO: 3389106 - RNA, 15 nt, Human
cuugaacuugccucu

SEQ ID NO: 3389107 - RNA, 19 nt, Human
cuugaacuuuccuggaugu

SEQ ID NO: 3389108 - RNA, 20 nt, Human
cuugaagaucguuaguaucu

SEQ ID NO: 3389109 - RNA, 19 nt, Human
cuugaagccaaagaaaaau

SEQ ID NO: 3389110 - RNA, 18 nt, Human
cuugaagccacugaagcu

SEQ ID NO: 3389111 - RNA, 19 nt, Human
cuugaagccacugaagcug

SEQ ID NO: 3389112 - RNA, 15 nt, Human
cuugaagccugcucc

SEQ ID NO: 3389113 - RNA, 15 nt, Human
cuugaaggaaaaauu

SEQ ID NO: 3389114 - RNA, 23 nt, Human
cuugaaggaucuguuuuuaaaaa

SEQ ID NO: 3389115 - RNA, 17 nt, Human
cuugaaggcccugcuga

SEQ ID NO: 3389116 - RNA, 15 nt, Human
cuugaagggcccagg

SEQ ID NO: 3389117 - RNA, 11 nt, Human
cuugaagucag

SEQ ID NO: 3389118 - RNA, 15 nt, Human
cuugaaguccuggcu

SEQ ID NO: 3389119 - RNA, 17 nt, Human
cuugaaguccuggcuuc

SEQ ID NO: 3389120 - RNA, 19 nt, Human
cuugaauaaccaucugaaa

SEQ ID NO: 3389121 - RNA, 19 nt, Human
cuugaauacucugcccucu

SEQ ID NO: 3389122 - RNA, 13 nt, Human
cuugaauaguauu

SEQ ID NO: 3389123 - RNA, 15 nt, Human
cuugaauaguauugu

SEQ ID NO: 3389124 - RNA, 17 nt, Human
cuugaauaguauugugu

SEQ ID NO: 3389125 - RNA, 18 nt, Human
cuugaauaguauuguguu

SEQ ID NO: 3389126 - RNA, 23 nt, Human
cuugaauccuuccauuccacaca

SEQ ID NO: 3389127 - RNA, 20 nt, Human
cuugaaugaugccaugagga

SEQ ID NO: 3389128 - RNA, 14 nt, Human
cuugaaugcugcca

SEQ ID NO: 3389129 - RNA, 15 nt, Human
cuugaaugcugccag

SEQ ID NO: 3389130 - RNA, 16 nt, Human
cuugaaugcugccagu

SEQ ID NO: 3389131 - RNA, 21 nt, Human
cuugaauggcaauguuuugcu

SEQ ID NO: 3389132 - RNA, 23 nt, Human
cuugaauggcaauguuuugcuuu

SEQ ID NO: 3389133 - RNA, 21 nt, Human
cuugaauguagcagccccggg

SEQ ID NO: 3389134 - RNA, 19 nt, Human
cuugaauguggcuugagaa

SEQ ID NO: 3389135 - RNA, 20 nt, Human
cuugaauguggcuugagaaa

SEQ ID NO: 3389136 - RNA, 18 nt, Human
cuugaauguggucucagg

SEQ ID NO: 3389137 - RNA, 15 nt, Human
cuugaaugugucagg

SEQ ID NO: 3389138 - RNA, 20 nt, Human
cuugaauuguaacuguucuu

SEQ ID NO: 3389139 - RNA, 22 nt, Human
cuugaauuuucccacugcaccc

SEQ ID NO: 3389140 - RNA, 20 nt, Human
cuugacaaaaccuaacuugc

SEQ ID NO: 3389141 - RNA, 18 nt, Human
cuugacaaacuucuuuca

SEQ ID NO: 3389142 - RNA, 16 nt, Human
cuugacaaagucaagc

SEQ ID NO: 3389143 - RNA, 19 nt, Human
cuugacaaagucaagccac

SEQ ID NO: 3389144 - RNA, 23 nt, Human
cuugacacauaguuuuucagucu

SEQ ID NO: 3389145 - RNA, 12 nt, Human
cuugacagcuca

SEQ ID NO: 3389146 - RNA, 20 nt, Human
cuugacaguggaacuacauu

SEQ ID NO: 3389147 - RNA, 19 nt, Human
cuugacauaauuucacuga

SEQ ID NO: 3389148 - RNA, 16 nt, Human
cuugacaucaacugca

SEQ ID NO: 3389149 - RNA, 19 nt, Human
cuugacaucuggaaaccuc

SEQ ID NO: 3389150 - RNA, 18 nt, Human
cuugaccaagcaggaagc

SEQ ID NO: 3389151 - RNA, 20 nt, Human
cuugaccagcagaucccagc

SEQ ID NO: 3389152 - RNA, 13 nt, Human
cuugaccaggcug

SEQ ID NO: 3389153 - RNA, 21 nt, Human
cuugaccauucuccaccugcc

SEQ ID NO: 3389154 - RNA, 16 nt, Human
cuugacccaucucccc

SEQ ID NO: 3389155 - RNA, 16 nt, Human
cuugacccugcacccu

SEQ ID NO: 3389156 - RNA, 17 nt, Human
cuugaccgugaggccag

SEQ ID NO: 3389157 - RNA, 20 nt, Human
cuugaccgugaggccagaga

SEQ ID NO: 3389158 - RNA, 22 nt, Human
cuugaccgugaggccagagaca

SEQ ID NO: 3389159 - RNA, 13 nt, Human
cuugaccucaggu

SEQ ID NO: 3389160 - RNA, 17 nt, Human
cuugaccugaggcugug

SEQ ID NO: 3389161 - RNA, 20 nt, Human
cuugaccugaggcugugguc

SEQ ID NO: 3389162 - RNA, 19 nt, Human
cuugaccugcauuguaaau

SEQ ID NO: 3389163 - RNA, 20 nt, Human
cuugaccugcauuguaaaua

SEQ ID NO: 3389164 - RNA, 13 nt, Human
cuugaccuuccuc

SEQ ID NO: 3389165 - RNA, 14 nt, Human
cuugaccuuccucu

SEQ ID NO: 3389166 - RNA, 17 nt, Human
cuugaccuuccucuggg

SEQ ID NO: 3389167 - RNA, 21 nt, Human
cuugaccuuccucuggggcuc

SEQ ID NO: 3389168 - RNA, 13 nt, Human
cuugaccuuugua

SEQ ID NO: 3389169 - RNA, 22 nt, Human
cuugaccuuuguacagcccaga

SEQ ID NO: 3389170 - RNA, 16 nt, Human
cuugacuauuggagga

SEQ ID NO: 3389171 - RNA, 13 nt, Human
cuugacuccuugu

SEQ ID NO: 3389172 - RNA, 22 nt, Human
cuugacuugcaauuucuaccua

SEQ ID NO: 3389173 - RNA, 20 nt, Human
cuugacuuuagucugcaaaa

SEQ ID NO: 3389174 - RNA, 19 nt, Human
cuugacuuugaacuaauga

SEQ ID NO: 3389175 - RNA, 19 nt, Human
cuugacuuugcuccucaca

SEQ ID NO: 3389176 - RNA, 13 nt, Human
cuugagaaaccuu

SEQ ID NO: 3389177 - RNA, 19 nt, Human
cuugagaacuuuauuucca

SEQ ID NO: 3389178 - RNA, 17 nt, Human
cuugagacuguuuugaa

SEQ ID NO: 3389179 - RNA, 22 nt, Human
cuugagacuguuuugaauuugg

SEQ ID NO: 3389180 - RNA, 14 nt, Human
cuugagagggugga

SEQ ID NO: 3389181 - RNA, 20 nt, Human
cuugagaguagaugguuuga

SEQ ID NO: 3389182 - RNA, 22 nt, Human
cuugagcauguuacugacagag

SEQ ID NO: 3389183 - RNA, 12 nt, Human
cuugagcccagg

SEQ ID NO: 3389184 - RNA, 21 nt, Human
cuugagcccuccccaggaauu

SEQ ID NO: 3389185 - RNA, 12 nt, Human
cuugagcccugg

SEQ ID NO: 3389186 - RNA, 20 nt, Human
cuugagccuugaacuuugac

SEQ ID NO: 3389187 - RNA, 13 nt, Human
cuugagcucagga

SEQ ID NO: 3389188 - RNA, 12 nt, Human
cuugagcucuau

SEQ ID NO: 3389189 - RNA, 13 nt, Human
cuugagcugagau

SEQ ID NO: 3389190 - RNA, 16 nt, Human
cuugagcugagaugga

SEQ ID NO: 3389191 - RNA, 17 nt, Human
cuugagcuggccucucu

SEQ ID NO: 3389192 - RNA, 18 nt, Human
cuugaggacacaugucca

SEQ ID NO: 3389193 - RNA, 14 nt, Human
cuugaggaguguga

SEQ ID NO: 3389194 - RNA, 24 nt, Human
cuugaggcuuagcuuugcucugcc

SEQ ID NO: 3389195 - RNA, 18 nt, Human
cuugagggcaagagccac

SEQ ID NO: 3389196 - RNA, 17 nt, Human
cuugagggcccagagca

SEQ ID NO: 3389197 - RNA, 18 nt, Human
cuugagggcccagagcag

SEQ ID NO: 3389198 - RNA, 15 nt, Human
cuugagggcugcagu

SEQ ID NO: 3389199 - RNA, 19 nt, Human
cuugaggggaagcuagucu

SEQ ID NO: 3389200 - RNA, 23 nt, Human
cuugaggggaagcuagucuuuug

SEQ ID NO: 3389201 - RNA, 13 nt, Human
cuugagggggaag

SEQ ID NO: 3389202 - RNA, 15 nt, Human
cuugaggucucagcc

SEQ ID NO: 3389203 - RNA, 12 nt, Human
cuugaguaaaau

SEQ ID NO: 3389204 - RNA, 21 nt, Human
cuugaguaaaauacucuuuuu

SEQ ID NO: 3389205 - RNA, 21 nt, Human
cuugagugggguuaucucugu

SEQ ID NO: 3389206 - RNA, 17 nt, Human
cuugaguucccagaugg

SEQ ID NO: 3389207 - RNA, 23 nt, Human
cuugaguuguuuuuguauauugg

SEQ ID NO: 3389208 - RNA, 16 nt, Human
cuugaguuugucgcuc

SEQ ID NO: 3389209 - RNA, 16 nt, Human
cuugauaaagggccaa

SEQ ID NO: 3389210 - RNA, 22 nt, Human
cuugauaauuuuccuuuaauau

SEQ ID NO: 3389211 - RNA, 15 nt, Human
cuugauacauucaaa

SEQ ID NO: 3389212 - RNA, 19 nt, Human
cuugauaccccccucuguc

SEQ ID NO: 3389213 - RNA, 12 nt, Human
cuugauagaaau

SEQ ID NO: 3389214 - RNA, 17 nt, Human
cuugauagaaaugccaa

SEQ ID NO: 3389215 - RNA, 23 nt, Human
cuugauagccucauuaaagcauu

SEQ ID NO: 3389216 - RNA, 17 nt, Human
cuugauauccucuuuga

SEQ ID NO: 3389217 - RNA, 23 nt, Human
cuugauauuuguauuuauucuuu

SEQ ID NO: 3389218 - RNA, 14 nt, Human
cuugauauuuucua

SEQ ID NO: 3389219 - RNA, 17 nt, Human
cuugaucaacaucuuuu

SEQ ID NO: 3389220 - RNA, 23 nt, Human
cuuguaaagacugguuuucugcc

SEQ ID NO: 3389221 - RNA, 12 nt, Human
cuuguaaauaca

SEQ ID NO: 3389222 - RNA, 15 nt, Human
cuuguaaauacacca

SEQ ID NO: 3389223 - RNA, 16 nt, Human
cuuguaaauagcucag

SEQ ID NO: 3389224 - RNA, 17 nt, Human
cuuguaacaagaaaaca

SEQ ID NO: 3389225 - RNA, 17 nt, Human
cuuguaacuaaaauaau

SEQ ID NO: 3389226 - RNA, 22 nt, Human
cuuguaacuaaaauaauuuugu

SEQ ID NO: 3389227 - RNA, 20 nt, Human
cuuguaagagcuauacaguu

SEQ ID NO: 3389228 - RNA, 16 nt, Human
cuuguaauauuuugua

SEQ ID NO: 3389229 - RNA, 22 nt, Human
cuuguaaugauauagccagaaa

SEQ ID NO: 3389230 - RNA, 13 nt, Human
cuuguaauguaac

SEQ ID NO: 3389231 - RNA, 13 nt, Human
cuuguaauucuaa

SEQ ID NO: 3389232 - RNA, 16 nt, Human
cuuguaauucuaaaug

SEQ ID NO: 3389233 - RNA, 22 nt, Human
cuuguaauuuaaacaggcccag

SEQ ID NO: 3389234 - RNA, 22 nt, Human
cuuguaauuuuuuuaauuuaca

SEQ ID NO: 3389235 - RNA, 16 nt, Human
cuuguacacucauuca

SEQ ID NO: 3389236 - RNA, 12 nt, Human
cuuguacauaau

SEQ ID NO: 3389237 - RNA, 13 nt, Human
cuuguacaugugu

SEQ ID NO: 3389238 - RNA, 23 nt, Human
cuuguaccucuggcugacuaaau

SEQ ID NO: 3389239 - RNA, 21 nt, Human
cuuguagaacucacucugggc

SEQ ID NO: 3389240 - RNA, 23 nt, Human
cuuguagaacucacucugggcug

SEQ ID NO: 3389241 - RNA, 15 nt, Human
cuuguagaauuguua

SEQ ID NO: 3389242 - RNA, 15 nt, Human
cuuguagccagccgg

SEQ ID NO: 3389243 - RNA, 18 nt, Human
cuuguagcccaggcugga

SEQ ID NO: 3389244 - RNA, 21 nt, Human
cuuguagcccuuuccaagcuu

SEQ ID NO: 3389245 - RNA, 12 nt, Human
cuuguagccuuu

SEQ ID NO: 3389246 - RNA, 23 nt, Human
cuuguagcggaugauucuucaag

SEQ ID NO: 3389247 - RNA, 14 nt, Human
cuuguagcuccucc

SEQ ID NO: 3389248 - RNA, 16 nt, Human
cuuguagcuccucccc

SEQ ID NO: 3389249 - RNA, 21 nt, Human
cuuguaggagcugagguuuca

SEQ ID NO: 3389250 - RNA, 17 nt, Human
cuuguagggaugccuuu

SEQ ID NO: 3389251 - RNA, 22 nt, Human
cuuguaggggaggggcuccuuu

SEQ ID NO: 3389252 - RNA, 23 nt, Human
cuuguaggggaggggcuccuuuc

SEQ ID NO: 3389253 - RNA, 17 nt, Human
cuuguauaaauguauau

SEQ ID NO: 3389254 - RNA, 18 nt, Human
cuuguauaaauguauaua

SEQ ID NO: 3389255 - RNA, 19 nt, Human
cuuguauaaauguauauac

SEQ ID NO: 3389256 - RNA, 21 nt, Human
cuuguauagcaugaaauaaaa

SEQ ID NO: 3389257 - RNA, 19 nt, Human
cgcuggaccuugaacuggg

SEQ ID NO: 3389258 - RNA, 20 nt, Human
cgcuggaggaugugggcagc

SEQ ID NO: 3389259 - RNA, 17 nt, Human
cgcuggagugcagugag

SEQ ID NO: 3389260 - RNA, 11 nt, Human
cgcuggcccag

SEQ ID NO: 3389261 - RNA, 23 nt, Human
cgcuggcccagccggccucucug

SEQ ID NO: 3389262 - RNA, 16 nt, Human
cgcuggcccccacugg

SEQ ID NO: 3389263 - RNA, 18 nt, Human
cgcugggcacuucccugc

SEQ ID NO: 3389264 - RNA, 19 nt, Human
cgcugggcacuucccugcu

SEQ ID NO: 3389265 - RNA, 14 nt, Human
cgcugggcugagcc

SEQ ID NO: 3389266 - RNA, 15 nt, Human
cgcugggcugagccc

SEQ ID NO: 3389267 - RNA, 17 nt, Human
cgcugggcugagccccu

SEQ ID NO: 3389268 - RNA, 20 nt, Human
cgcuggggccaguugguccc

SEQ ID NO: 3389269 - RNA, 22 nt, Human
cgcuggguccuaauuaccaguc

SEQ ID NO: 3389270 - RNA, 14 nt, Human
cgcugggugguacc

SEQ ID NO: 3389271 - RNA, 23 nt, Human
cgcugguagagauggaggaggag

SEQ ID NO: 3389272 - RNA, 17 nt, Human
cgcuguaugucuuaaaa

SEQ ID NO: 3389273 - RNA, 22 nt, Human
cgcugucagccauuccuguucc

SEQ ID NO: 3389274 - RNA, 23 nt, Human
cgcugucccuaguaaaaauacaa

SEQ ID NO: 3389275 - RNA, 15 nt, Human
cgcugucuccagacc

SEQ ID NO: 3389276 - RNA, 16 nt, Human
cgcugucuccagaccc

SEQ ID NO: 3389277 - RNA, 20 nt, Human
cgcugucuccagacccccac

SEQ ID NO: 3389278 - RNA, 16 nt, Human
cgcugugagccccugg

SEQ ID NO: 3389279 - RNA, 11 nt, Human
cgcugugcugc

SEQ ID NO: 3389280 - RNA, 14 nt, Human
cgcugugcugcccu

SEQ ID NO: 3389281 - RNA, 17 nt, Human
cgcugugcugcccugcc

SEQ ID NO: 3389282 - RNA, 18 nt, Human
cgcugugcugcccugccc

SEQ ID NO: 3389283 - RNA, 14 nt, Human
cgcugugggcaggu

SEQ ID NO: 3389284 - RNA, 20 nt, Human
cgcuuaucaacuaaugauuu

SEQ ID NO: 3389285 - RNA, 18 nt, Human
cgcuucccccauagccac

SEQ ID NO: 3389286 - RNA, 16 nt, Human
cgcuucccuccugccc

SEQ ID NO: 3389287 - RNA, 20 nt, Human
cgcuuccggcuccugugcuu

SEQ ID NO: 3389288 - RNA, 17 nt, Human
cgcuucugaaugcugcu

SEQ ID NO: 3389289 - RNA, 15 nt, Human
cgcuucugccuuuuc

SEQ ID NO: 3389290 - RNA, 11 nt, Human
cgcuugccucg

SEQ ID NO: 3389291 - RNA, 13 nt, Human
cgcuugccucggc

SEQ ID NO: 3389292 - RNA, 14 nt, Human
cgcuugccucggcu

SEQ ID NO: 3389293 - RNA, 15 nt, Human
cgcuugccucggcuc

SEQ ID NO: 3389294 - RNA, 22 nt, Human
cgcuugccucggcuccugcugc

SEQ ID NO: 3389295 - RNA, 12 nt, Human
cgcuugcucugu

SEQ ID NO: 3389296 - RNA, 18 nt, Human
cgcuugcuuuucuguauu

SEQ ID NO: 3389297 - RNA, 12 nt, Human
cgcuuggcucca

SEQ ID NO: 3389298 - RNA, 17 nt, Human
cgcuugugcagaaaaca

SEQ ID NO: 3389299 - RNA, 21 nt, Human
cgcuuguggggacccaggcuc

SEQ ID NO: 3389300 - RNA, 13 nt, Human
cgcuuuauuuucu

SEQ ID NO: 3389301 - RNA, 16 nt, Human
cgcuuucuacccagcg

SEQ ID NO: 3389302 - RNA, 22 nt, Human
cgcuuucuagcuguugagcugu

SEQ ID NO: 3389303 - RNA, 22 nt, Human
cgcuuucuggaaaagaggaguu

SEQ ID NO: 3389304 - RNA, 16 nt, Human
cgcuuugauucauagu

SEQ ID NO: 3389305 - RNA, 11 nt, Human
cgcuuuggccu

SEQ ID NO: 3389306 - RNA, 16 nt, Human
cgcuuuuccuuggcau

SEQ ID NO: 3389307 - RNA, 22 nt, Human
cgcuuuuccuuggcauuccgca

SEQ ID NO: 3389308 - RNA, 15 nt, Human
cggaaaacaugcuac

SEQ ID NO: 3389309 - RNA, 19 nt, Human
cggaaacuaguguacauuu

SEQ ID NO: 3389310 - RNA, 20 nt, Human
cggaaagcagcucaaaggca

SEQ ID NO: 3389311 - RNA, 17 nt, Human
cggaaagcccugugcuc

SEQ ID NO: 3389312 - RNA, 21 nt, Human
cggaaagguauuugggaaacu

SEQ ID NO: 3389313 - RNA, 14 nt, Human
cggaaauuaaaguu

SEQ ID NO: 3389314 - RNA, 15 nt, Human
cggaacaagccuaaa

SEQ ID NO: 3389315 - RNA, 21 nt, Human
cggaaccgcucaccuagagcc

SEQ ID NO: 3389316 - RNA, 18 nt, Human
cggaacugcaugcugcug

SEQ ID NO: 3389317 - RNA, 20 nt, Human
cggaagcagugccuuccaua

SEQ ID NO: 3389318 - RNA, 23 nt, Human
cggaagcagugccuuccauaauu

SEQ ID NO: 3389319 - RNA, 17 nt, Human
cggaagggguuccucaa

SEQ ID NO: 3389320 - RNA, 15 nt, Human
cggaaggguaaacaa

SEQ ID NO: 3389321 - RNA, 19 nt, Human
cggaaggguaaacaauaua

SEQ ID NO: 3389322 - RNA, 13 nt, Human
cggaaguuuucaa

SEQ ID NO: 3389323 - RNA, 17 nt, Human
cggaauaagagaccugu

SEQ ID NO: 3389324 - RNA, 21 nt, Human
cggaauaagagaccuguuuua

SEQ ID NO: 3389325 - RNA, 17 nt, Human
cggaauaguuggcuagg

SEQ ID NO: 3389326 - RNA, 21 nt, Human
cggaaucacucuguccuugga

SEQ ID NO: 3389327 - RNA, 21 nt, Human
cggaauccuguccucagcuuc

SEQ ID NO: 3389328 - RNA, 19 nt, Human
cggaauuuaccugauuucu

SEQ ID NO: 3389329 - RNA, 12 nt, Human
cggacaaaauau

SEQ ID NO: 3389330 - RNA, 18 nt, Human
cggacaagacccccagca

SEQ ID NO: 3389331 - RNA, 13 nt, Human
cggacaaguuuua

SEQ ID NO: 3389332 - RNA, 13 nt, Human
cggacaauaaacc

SEQ ID NO: 3389333 - RNA, 20 nt, Human
cggacaauaaaccuccgcca

SEQ ID NO: 3389334 - RNA, 12 nt, Human
cggacacccccu

SEQ ID NO: 3389335 - RNA, 15 nt, Human
cggacagccacggcc

SEQ ID NO: 3389336 - RNA, 20 nt, Human
cggacagccacggccaggcc

SEQ ID NO: 3389337 - RNA, 15 nt, Human
cggacaguggcagga

SEQ ID NO: 3389338 - RNA, 23 nt, Human
cggaccaaagggagucugccagg

SEQ ID NO: 3389339 - RNA, 13 nt, Human
cggaccagccugg

SEQ ID NO: 3389340 - RNA, 17 nt, Human
cggaccagccuggccca

SEQ ID NO: 3389341 - RNA, 21 nt, Human
cggaccuuggcagcccaggcc

SEQ ID NO: 3389342 - RNA, 16 nt, Human
cggacguuuccaucag

SEQ ID NO: 3389343 - RNA, 18 nt, Human
cggacguuuccaucaggu

SEQ ID NO: 3389344 - RNA, 17 nt, Human
cggacuuagcugggaga

SEQ ID NO: 3389345 - RNA, 20 nt, Human
cggagacggagucccaccuu

SEQ ID NO: 3389346 - RNA, 14 nt, Human
cggagacgggaccg

SEQ ID NO: 3389347 - RNA, 21 nt, Human
cggagacgugaugaagggagg

SEQ ID NO: 3389348 - RNA, 13 nt, Human
cggagagaaaaaa

SEQ ID NO: 3389349 - RNA, 16 nt, Human
cggagagaaaaaagaa

SEQ ID NO: 3389350 - RNA, 23 nt, Human
cggagagcgccugccccucccag

SEQ ID NO: 3389351 - RNA, 11 nt, Human
cggagaggaag

SEQ ID NO: 3389352 - RNA, 17 nt, Human
cggagaguacagugagc

SEQ ID NO: 3389353 - RNA, 17 nt, Human
cggagcaaacucugcug

SEQ ID NO: 3389354 - RNA, 17 nt, Human
cggagcacacuggcuca

SEQ ID NO: 3389355 - RNA, 15 nt, Human
cggagcaucccggag

SEQ ID NO: 3389356 - RNA, 22 nt, Human
cggagcaucccggaggaaaucu

SEQ ID NO: 3389357 - RNA, 18 nt, Human
cggagccacuccucugac

SEQ ID NO: 3389358 - RNA, 20 nt, Human
cggagccucauccgaggcag

SEQ ID NO: 3389359 - RNA, 17 nt, Human
cggagcuaacacuggcc

SEQ ID NO: 3389360 - RNA, 18 nt, Human
cggagcuaacacuggccc

SEQ ID NO: 3389361 - RNA, 17 nt, Human
cggagcugccccucucu

SEQ ID NO: 3389362 - RNA, 20 nt, Human
cggagcugccccucucuggg

SEQ ID NO: 3389363 - RNA, 13 nt, Human
cggagcuggcccc

SEQ ID NO: 3389364 - RNA, 14 nt, Human
cuuguguauccauu

SEQ ID NO: 3389365 - RNA, 16 nt, Human
cuuguguauccauuau

SEQ ID NO: 3389366 - RNA, 22 nt, Human
cuugugucccuccugggaucug

SEQ ID NO: 3389367 - RNA, 15 nt, Human
cuugugucuacagag

SEQ ID NO: 3389368 - RNA, 12 nt, Human
cuugugucugua

SEQ ID NO: 3389369 - RNA, 22 nt, Human
cuugugucuuuggaggugcugc

SEQ ID NO: 3389370 - RNA, 20 nt, Human
cuuguguguaugcacaugaa

SEQ ID NO: 3389371 - RNA, 21 nt, Human
cuuguguguaugcacaugaac

SEQ ID NO: 3389372 - RNA, 19 nt, Human
cuugugugugggcugugag

SEQ ID NO: 3389373 - RNA, 11 nt, Human
cuuguguguuu

SEQ ID NO: 3389374 - RNA, 20 nt, Human
cuuguguguuuauugucaaa

SEQ ID NO: 3389375 - RNA, 18 nt, Human
cuuguguguuucacuuuu

SEQ ID NO: 3389376 - RNA, 19 nt, Human
cuuguguguuucacuuuua

SEQ ID NO: 3389377 - RNA, 19 nt, Human
cuuguguguuuugagagua

SEQ ID NO: 3389378 - RNA, 19 nt, Human
cuuguguuaaguaugugua

SEQ ID NO: 3389379 - RNA, 22 nt, Human
cuuguguuuuuaacucaauauu

SEQ ID NO: 3389380 - RNA, 16 nt, Human
cuuguuaauauucuuu

SEQ ID NO: 3389381 - RNA, 14 nt, Human
cuuguuacuucuga

SEQ ID NO: 3389382 - RNA, 19 nt, Human
cuuguuaugguagaaaaau

SEQ ID NO: 3389383 - RNA, 14 nt, Human
cuuguucaggaaaa

SEQ ID NO: 3389384 - RNA, 15 nt, Human
cuuguuccaaggcca

SEQ ID NO: 3389385 - RNA, 20 nt, Human
cuuguuccagcccuauucug

SEQ ID NO: 3389386 - RNA, 13 nt, Human
cuuguuccagcuc

SEQ ID NO: 3389387 - RNA, 21 nt, Human
cuuguuccccacugacagccu

SEQ ID NO: 3389388 - RNA, 20 nt, Human
cuuguucugugaugagggga

SEQ ID NO: 3389389 - RNA, 21 nt, Human
cuuguucugugaugaggggag

SEQ ID NO: 3389390 - RNA, 12 nt, Human
cuuguucuucca

SEQ ID NO: 3389391 - RNA, 13 nt, Human
cuuguugagccgu

SEQ ID NO: 3389392 - RNA, 20 nt, Human
cuuguugccuauaagccaaa

SEQ ID NO: 3389393 - RNA, 22 nt, Human
cuuguugcuguugauguuuugu

SEQ ID NO: 3389394 - RNA, 12 nt, Human
cuuguugcuuug

SEQ ID NO: 3389395 - RNA, 15 nt, Human
cuuguugcuuuguug

SEQ ID NO: 3389396 - RNA, 18 nt, Human
cuuguuggagccugcagg

SEQ ID NO: 3389397 - RNA, 23 nt, Human
cuuguuggauuuuugucuugugu

SEQ ID NO: 3389398 - RNA, 18 nt, Human
cuuguugggauuccugac

SEQ ID NO: 3389399 - RNA, 22 nt, Human
cuuguugggauuccugacccag

SEQ ID NO: 3389400 - RNA, 22 nt, Human
cuuguugguucaccauugagac

SEQ ID NO: 3389401 - RNA, 20 nt, Human
cuuguuguugguuguuuuuu

SEQ ID NO: 3389402 - RNA, 16 nt, Human
cuuguuguuucuugcc

SEQ ID NO: 3389403 - RNA, 22 nt, Human
cuuguuuacagcacuacucugu

SEQ ID NO: 3389404 - RNA, 19 nt, Human
cuuguuuaccuuucucucu

SEQ ID NO: 3389405 - RNA, 18 nt, Human
cuuguuuaucagauacau

SEQ ID NO: 3389406 - RNA, 22 nt, Human
cuuguuuaucagauacaucacu

SEQ ID NO: 3389407 - RNA, 14 nt, Human
cuuguuuauuaaau

SEQ ID NO: 3389408 - RNA, 12 nt, Human
cuuguuuauuga

SEQ ID NO: 3389409 - RNA, 23 nt, Human
cuuguuuauugaguuuguaggua

SEQ ID NO: 3389410 - RNA, 16 nt, Human
cuuguuuauuuugugg

SEQ ID NO: 3389411 - RNA, 22 nt, Human
cuuguuucaauuccaccugcaa

SEQ ID NO: 3389412 - RNA, 15 nt, Human
cuuguuucacugaaa

SEQ ID NO: 3389413 - RNA, 13 nt, Human
cuuguuuccuugu

SEQ ID NO: 3389414 - RNA, 12 nt, Human
cuuguuucuccc

SEQ ID NO: 3389415 - RNA, 22 nt, Human
cuuguuugauuuuagcugcaga

SEQ ID NO: 3389416 - RNA, 16 nt, Human
cuuguuugcucaccug

SEQ ID NO: 3389417 - RNA, 20 nt, Human
cuuguuugcucaccuggggu

SEQ ID NO: 3389418 - RNA, 15 nt, Human
cuuguuugucuucca

SEQ ID NO: 3389419 - RNA, 22 nt, Human
cuuguuuuccagucucuuguac

SEQ ID NO: 3389420 - RNA, 14 nt, Human
cuuguuuucuugcc

SEQ ID NO: 3389421 - RNA, 22 nt, Human
cuuguuuucuuucuuuaaaugu

SEQ ID NO: 3389422 - RNA, 23 nt, Human
cuuguuuucuuucuuuaaauguu

SEQ ID NO: 3389423 - RNA, 14 nt, Human
cuuguuuugcuucc

SEQ ID NO: 3389424 - RNA, 23 nt, Human
cuuguuuugcuuccccucccccc

SEQ ID NO: 3389425 - RNA, 19 nt, Human
cuuguuuuggacuuuguua

SEQ ID NO: 3389426 - RNA, 15 nt, Human
cuuguuuuguuuguc

SEQ ID NO: 3389427 - RNA, 18 nt, Human
cuuguuuuguuugucucu

SEQ ID NO: 3389428 - RNA, 12 nt, Human
cuuguuuuuaag

SEQ ID NO: 3389429 - RNA, 14 nt, Human
cuuguuuuuguaaa

SEQ ID NO: 3389430 - RNA, 15 nt, Human
cuuguuuuuguaaag

SEQ ID NO: 3389431 - RNA, 20 nt, Human
cuuguuuuuguaaagaaaaa

SEQ ID NO: 3389432 - RNA, 23 nt, Human
cuuguuuuuguaaagaaaaauau

SEQ ID NO: 3389433 - RNA, 23 nt, Human
cuuguuuuuuguuuguuuguugc

SEQ ID NO: 3389434 - RNA, 17 nt, Human
cuuuaaaaaaaaaauug

SEQ ID NO: 3389435 - RNA, 17 nt, Human
cuuuaaaaaaauuuaag

SEQ ID NO: 3389436 - RNA, 22 nt, Human
cuuuaaaaaauuaaucugggcc

SEQ ID NO: 3389437 - RNA, 14 nt, Human
cuuuaaaaacuauu

SEQ ID NO: 3389438 - RNA, 13 nt, Human
cuuuaaaaacugu

SEQ ID NO: 3389439 - RNA, 14 nt, Human
cuuuaaaacaaaac

SEQ ID NO: 3389440 - RNA, 18 nt, Human
cuuuaaaagaugcuuuua

SEQ ID NO: 3389441 - RNA, 14 nt, Human
cuuuaaaagugauc

SEQ ID NO: 3389442 - RNA, 14 nt, Human
cuuuaaaauauugu

SEQ ID NO: 3389443 - RNA, 21 nt, Human
cuuuaaaauguaaagccaugc

SEQ ID NO: 3389444 - RNA, 12 nt, Human
cuuuaaaauucu

SEQ ID NO: 3389445 - RNA, 18 nt, Human
cuuuaaaauuuuuuuaga

SEQ ID NO: 3389446 - RNA, 22 nt, Human
cuuuaaaccuguuuuuuuuuca

SEQ ID NO: 3389447 - RNA, 19 nt, Human
cuuuaaacuacauuagguu

SEQ ID NO: 3389448 - RNA, 16 nt, Human
cuuuaaacucagggac

SEQ ID NO: 3389449 - RNA, 20 nt, Human
cuuuaaaggcccagccccua

SEQ ID NO: 3389450 - RNA, 17 nt, Human
cuuuaaaguguaauaau

SEQ ID NO: 3389451 - RNA, 14 nt, Human
cuuuaaauaauuua

SEQ ID NO: 3389452 - RNA, 15 nt, Human
cuuuaaaucugugau

SEQ ID NO: 3389453 - RNA, 18 nt, Human
cuuuccaaaccuuaucuc

SEQ ID NO: 3389454 - RNA, 16 nt, Human
cuuuccaaaguacacu

SEQ ID NO: 3389455 - RNA, 18 nt, Human
cuuuccaaaugcccagcu

SEQ ID NO: 3389456 - RNA, 20 nt, Human
cuuuccaaauuauuucuuaa

SEQ ID NO: 3389457 - RNA, 17 nt, Human
cuuuccaacguuuggaa

SEQ ID NO: 3389458 - RNA, 17 nt, Human
cuuuccaccacagccag

SEQ ID NO: 3389459 - RNA, 21 nt, Human
cuuuccaccacagccagcacc

SEQ ID NO: 3389460 - RNA, 20 nt, Human
cuuuccacccccucccuggc

SEQ ID NO: 3389461 - RNA, 23 nt, Human
cuuuccacccccucccuggccug

SEQ ID NO: 3389462 - RNA, 15 nt, Human
cuuuccaccuucuca

SEQ ID NO: 3389463 - RNA, 21 nt, Human
cuuuccacggagccacuccuc

SEQ ID NO: 3389464 - RNA, 13 nt, Human
cuuuccacucugg

SEQ ID NO: 3389465 - RNA, 15 nt, Human
cuuuccacucuggau

SEQ ID NO: 3389466 - RNA, 23 nt, Human
cuuuccacucuggauucagccuu

SEQ ID NO: 3389467 - RNA, 14 nt, Human
cuuuccacuucuuc

SEQ ID NO: 3389468 - RNA, 20 nt, Human
cuuuccacuucuuccuuucu

SEQ ID NO: 3389469 - RNA, 15 nt, Human
cuuuccaggaaggcu

SEQ ID NO: 3389470 - RNA, 13 nt, Human
cuuuccaguuaag

SEQ ID NO: 3389471 - RNA, 20 nt, Human
cuuuccauaaauccuugaug

SEQ ID NO: 3389472 - RNA, 18 nt, Human
cuuuccauccauggccag

SEQ ID NO: 3389473 - RNA, 18 nt, Human
cuuuccauguugcugcca

SEQ ID NO: 3389474 - RNA, 15 nt, Human
cuuuccauguuguug

SEQ ID NO: 3389475 - RNA, 22 nt, Human
cuuuccauuugguuuagaacau

SEQ ID NO: 3389476 - RNA, 16 nt, Human
cuuucccauggggagg

SEQ ID NO: 3389477 - RNA, 17 nt, Human
cuuucccauggggaggg

SEQ ID NO: 3389478 - RNA, 22 nt, Human
cuuuccccaccagaugcugaaa

SEQ ID NO: 3389479 - RNA, 18 nt, Human
cuuuccccauacucuguc

SEQ ID NO: 3389480 - RNA, 15 nt, Human
cuuuccccaugucuc

SEQ ID NO: 3389481 - RNA, 21 nt, Human
cuuuccccaugucucgacuca

SEQ ID NO: 3389482 - RNA, 17 nt, Human
cuuucccccuucucuua

SEQ ID NO: 3389483 - RNA, 18 nt, Human
cuuuccccuuccuuuuaa

SEQ ID NO: 3389484 - RNA, 19 nt, Human
cuuucccgggcuguccacu

SEQ ID NO: 3389485 - RNA, 17 nt, Human
cuuucccuaaagacccu

SEQ ID NO: 3389486 - RNA, 12 nt, Human
cuuucccuaagc

SEQ ID NO: 3389487 - RNA, 18 nt, Human
cuuucccuacccucuaga

SEQ ID NO: 3389488 - RNA, 11 nt, Human
cuuucccucac

SEQ ID NO: 3389489 - RNA, 18 nt, Human
cuuucccucacccccucc

SEQ ID NO: 3389490 - RNA, 19 nt, Human
cuuucccucacccccuccc

SEQ ID NO: 3389491 - RNA, 13 nt, Human
cuuucccuccuug

SEQ ID NO: 3389492 - RNA, 15 nt, Human
cuuucccuccuuggu

SEQ ID NO: 3389493 - RNA, 14 nt, Human
cuuucccuuccucc

SEQ ID NO: 3389494 - RNA, 15 nt, Human
cuuucccuuccucca

SEQ ID NO: 3389495 - RNA, 16 nt, Human
cuuucccuugcuuuuc

SEQ ID NO: 3389496 - RNA, 12 nt, Human
cuuucccuuggu

SEQ ID NO: 3389497 - RNA, 21 nt, Human
cuuuccgguguuuaagacauu

SEQ ID NO: 3389498 - RNA, 17 nt, Human
cuuuccuaaggcugcaa

SEQ ID NO: 3389499 - RNA, 20 nt, Human
cuuuccuagauggcagucac

SEQ ID NO: 3389500 - RNA, 17 nt, Human
cuuuccuccucugacuu

SEQ ID NO: 3389501 - RNA, 12 nt, Human
cuuuccuccuuu

SEQ ID NO: 3389502 - RNA, 17 nt, Human
cuuuccucucuauauuu

SEQ ID NO: 3389503 - RNA, 16 nt, Human
cuuuccucuuuggucu

SEQ ID NO: 3389504 - RNA, 16 nt, Human
cuuuccugaggcuggg

SEQ ID NO: 3389505 - RNA, 20 nt, Human
cuuuccugaggcugggcucc

SEQ ID NO: 3389506 - RNA, 22 nt, Human
cuuuccugaggcugggcucccu

SEQ ID NO: 3389507 - RNA, 22 nt, Human
cuuuccugagucccaucccugc

SEQ ID NO: 3389508 - RNA, 15 nt, Human
cuuuacgcccaucuc

SEQ ID NO: 3389509 - RNA, 18 nt, Human
cuuuacggacacccccuc

SEQ ID NO: 3389510 - RNA, 14 nt, Human
cuuuacguagugua

SEQ ID NO: 3389511 - RNA, 22 nt, Human
cuuuacuaagaugacauugcua

SEQ ID NO: 3389512 - RNA, 13 nt, Human
cuuuacuauggcc

SEQ ID NO: 3389513 - RNA, 22 nt, Human
cuuuacucccaagacuucauug

SEQ ID NO: 3389514 - RNA, 19 nt, Human
cuuuacuccucacacuuac

SEQ ID NO: 3389515 - RNA, 13 nt, Human
cuuuacugccuga

SEQ ID NO: 3389516 - RNA, 23 nt, Human
cuuuacugccugaauaaagagcc

SEQ ID NO: 3389517 - RNA, 19 nt, Human
cuuuacugucaaaauaauu

SEQ ID NO: 3389518 - RNA, 14 nt, Human
cuuuacuguuuguu

SEQ ID NO: 3389519 - RNA, 15 nt, Human
cuuuacuuagcuuau

SEQ ID NO: 3389520 - RNA, 17 nt, Human
cuuuacuuuagaagcac

SEQ ID NO: 3389521 - RNA, 15 nt, Human
cuuuagaaaaggcau

SEQ ID NO: 3389522 - RNA, 20 nt, Human
cuuuagaaacacauaauuaa

SEQ ID NO: 3389523 - RNA, 23 nt, Human
cuuuagaaacagugcaacacugg

SEQ ID NO: 3389524 - RNA, 19 nt, Human
cuuuagaaagguuuugagc

SEQ ID NO: 3389525 - RNA, 15 nt, Human
cuuuagaaauaaaug

SEQ ID NO: 3389526 - RNA, 16 nt, Human
cuuuagaaauaaaugu

SEQ ID NO: 3389527 - RNA, 14 nt, Human
cuuuagaagccugc

SEQ ID NO: 3389528 - RNA, 15 nt, Human
cuuuagaagccugca

SEQ ID NO: 3389529 - RNA, 17 nt, Human
cuuuagaagugcauuuc

SEQ ID NO: 3389530 - RNA, 15 nt, Human
cuuuagaaucccagc

SEQ ID NO: 3389531 - RNA, 18 nt, Human
cuuuagaaugagagugug

SEQ ID NO: 3389532 - RNA, 23 nt, Human
cuuuagaauguuuuccuucuacu

SEQ ID NO: 3389533 - RNA, 14 nt, Human
cuuuagacccuggg

SEQ ID NO: 3389534 - RNA, 14 nt, Human
cuuuagacuugaaa

SEQ ID NO: 3389535 - RNA, 15 nt, Human
cuuuagacuugaaaa

SEQ ID NO: 3389536 - RNA, 14 nt, Human
cuuuagagaagaug

SEQ ID NO: 3389537 - RNA, 20 nt, Human
cuuuagagaagauggauaug

SEQ ID NO: 3389538 - RNA, 22 nt, Human
cuuuagagaaguauacauaagu

SEQ ID NO: 3389539 - RNA, 19 nt, Human
cuuuagagcauugccauuc

SEQ ID NO: 3389540 - RNA, 13 nt, Human
cuuuagaguagca

SEQ ID NO: 3389541 - RNA, 13 nt, Human
cuuuagaugcuga

SEQ ID NO: 3389542 - RNA, 22 nt, Human
cuuuagccccucccaagcuggc

SEQ ID NO: 3389543 - RNA, 14 nt, Human
cuuuagcugacaga

SEQ ID NO: 3389544 - RNA, 14 nt, Human
cuuuagcuguguua

SEQ ID NO: 3389545 - RNA, 21 nt, Human
cuuuaggagggaguuaucuaa

SEQ ID NO: 3389546 - RNA, 13 nt, Human
cuuuaggcuuuca

SEQ ID NO: 3389547 - RNA, 18 nt, Human
cuuuaggcuuucagcuua

SEQ ID NO: 3389548 - RNA, 13 nt, Human
cuuuagggcagcu

SEQ ID NO: 3389549 - RNA, 14 nt, Human
cuuuagggcagcuu

SEQ ID NO: 3389550 - RNA, 15 nt, Human
cuuuagggcagcuug

SEQ ID NO: 3389551 - RNA, 15 nt, Human
cuuuaggucuuugua

SEQ ID NO: 3389552 - RNA, 13 nt, Human
cuuuagguuuuuu

SEQ ID NO: 3389553 - RNA, 19 nt, Human
cuuuaguaccugaaaagua

SEQ ID NO: 3389554 - RNA, 21 nt, Human
cuuuaguaugacgcugauaca

SEQ ID NO: 3389555 - RNA, 14 nt, Human
cuuuagucugcaaa

SEQ ID NO: 3389556 - RNA, 13 nt, Human
cuuuaguuuuugg

SEQ ID NO: 3389557 - RNA, 21 nt, Human
cuuuaguuuuugguugggaau

SEQ ID NO: 3389558 - RNA, 13 nt, Human
cuuuauaaaucca

SEQ ID NO: 3389559 - RNA, 18 nt, Human
cuuuauaaauccagugac

SEQ ID NO: 3389560 - RNA, 15 nt, Human
cuuuauaagaaagcc

SEQ ID NO: 3389561 - RNA, 16 nt, Human
cuuuauaagaaagccu

SEQ ID NO: 3389562 - RNA, 18 nt, Human
cuuuauaagaaagccuga

SEQ ID NO: 3389563 - RNA, 20 nt, Human
cuuuauacaacagugcuaaa

SEQ ID NO: 3389564 - RNA, 23 nt, Human
cuuuauacaacagugcuaaaaau

SEQ ID NO: 3389565 - RNA, 19 nt, Human
cuuuauacauuaguaaaug

SEQ ID NO: 3389566 - RNA, 20 nt, Human
cuuuauacauuaguaaaugu

SEQ ID NO: 3389567 - RNA, 22 nt, Human
cuuuauacauuaguaaaugucu

SEQ ID NO: 3389568 - RNA, 21 nt, Human
cuuuauauacaauaauggaaa

SEQ ID NO: 3389569 - RNA, 14 nt, Human
cuuuaucaaugugu

SEQ ID NO: 3389570 - RNA, 19 nt, Human
cuuuaucacauuauuugca

SEQ ID NO: 3389571 - RNA, 16 nt, Human
cuuuauccucuuuaga

SEQ ID NO: 3389572 - RNA, 18 nt, Human
cuuuaucuguucuugcua

SEQ ID NO: 3389573 - RNA, 18 nt, Human
cuuuaucuugaauaaugu

SEQ ID NO: 3389574 - RNA, 19 nt, Human
cuuuaugauaauagauucu

SEQ ID NO: 3389575 - RNA, 21 nt, Human
cuuuaugauuuucauaacuua

SEQ ID NO: 3389576 - RNA, 20 nt, Human
cuuuaugccggaugugcuuu

SEQ ID NO: 3389577 - RNA, 23 nt, Human
cuuuauguacaggaugcuuuggu

SEQ ID NO: 3389578 - RNA, 19 nt, Human
cuuuauguaguuuuuauau

SEQ ID NO: 3389579 - RNA, 12 nt, Human
cuuuaugugaau

SEQ ID NO: 3389580 - RNA, 15 nt, Human
cuuuaugugaauuuu

SEQ ID NO: 3389581 - RNA, 20 nt, Human
cuuuauguuacuacaugcac

SEQ ID NO: 3389582 - RNA, 20 nt, Human
cuuuauuaaucacuauuguu

SEQ ID NO: 3389583 - RNA, 13 nt, Human
cuuuauuaccagu

SEQ ID NO: 3389584 - RNA, 22 nt, Human
cuuuauuacccccuccuucaga

SEQ ID NO: 3389585 - RNA, 16 nt, Human
cuuuauucaaguaaaa

SEQ ID NO: 3389586 - RNA, 12 nt, Human
cuuuauuccuag

SEQ ID NO: 3389587 - RNA, 18 nt, Human
cuuuauucuugaaagaag

SEQ ID NO: 3389588 - RNA, 14 nt, Human
cuuuauugaaauuc

SEQ ID NO: 3389589 - RNA, 17 nt, Human
cuuuauugauaucucca

SEQ ID NO: 3389590 - RNA, 19 nt, Human
cuuuauugccaaaacccag

SEQ ID NO: 3389591 - RNA, 19 nt, Human
cuuuauugcuuuuuuguau

SEQ ID NO: 3389592 - RNA, 12 nt, Human
cuuuauuggaaa

SEQ ID NO: 3389593 - RNA, 20 nt, Human
cuuuauuggguaucaagaca

SEQ ID NO: 3389594 - RNA, 13 nt, Human
cuuuauugucugu

SEQ ID NO: 3389595 - RNA, 14 nt, Human
cuuuauugucugua

SEQ ID NO: 3389596 - RNA, 22 nt, Human
cuuuauuuuauauaauaaagua

SEQ ID NO: 3389597 - RNA, 13 nt, Human
cuuuauuuugugu

SEQ ID NO: 3389598 - RNA, 18 nt, Human
cuuuauuuuguguaaaaa

SEQ ID NO: 3389599 - RNA, 21 nt, Human
cuuuauuuuuuaaguauuuau

SEQ ID NO: 3389600 - RNA, 20 nt, Human
cuuuauuuuuuugaacucuu

SEQ ID NO: 3389601 - RNA, 14 nt, Human
cuuucaaaaacaug

SEQ ID NO: 3389602 - RNA, 15 nt, Human
cuuucaaaccagcuu

SEQ ID NO: 3389603 - RNA, 18 nt, Human
cuuucaaaccagcuucau

SEQ ID NO: 3389604 - RNA, 15 nt, Human
cuuucaaagaaggaa

SEQ ID NO: 3389605 - RNA, 17 nt, Human
cuuucaaagccauuuua

SEQ ID NO: 3389606 - RNA, 20 nt, Human
cuuucaaaggagaaugaauc

SEQ ID NO: 3389607 - RNA, 11 nt, Human
cuuucaaauuu

SEQ ID NO: 3389608 - RNA, 22 nt, Human
cuuucuguuccaaauucaguuu

SEQ ID NO: 3389609 - RNA, 15 nt, Human
cuuucuguuggugua

SEQ ID NO: 3389610 - RNA, 15 nt, Human
cuuucuguugucauu

SEQ ID NO: 3389611 - RNA, 21 nt, Human
cuuucuuaauauuuuuacaug

SEQ ID NO: 3389612 - RNA, 15 nt, Human
cuuucuucaaaauau

SEQ ID NO: 3389613 - RNA, 13 nt, Human
cuuucuuccaaac

SEQ ID NO: 3389614 - RNA, 22 nt, Human
cuuucuuccaaacaggcucaga

SEQ ID NO: 3389615 - RNA, 12 nt, Human
cuuucuuccucu

SEQ ID NO: 3389616 - RNA, 16 nt, Human
cuuucuuccucugcug

SEQ ID NO: 3389617 - RNA, 14 nt, Human
cuuucuucuuccca

SEQ ID NO: 3389618 - RNA, 12 nt, Human
cuuucuugacaa

SEQ ID NO: 3389619 - RNA, 22 nt, Human
cuuucuugacaaaaccuaacuu

SEQ ID NO: 3389620 - RNA, 13 nt, Human
cuuucuugcuccc

SEQ ID NO: 3389621 - RNA, 15 nt, Human
cuuucuugcucccug

SEQ ID NO: 3389622 - RNA, 17 nt, Human
cuuucuugcucccuuca

SEQ ID NO: 3389623 - RNA, 20 nt, Human
cuuucuugcucccuucagcc

SEQ ID NO: 3389624 - RNA, 16 nt, Human
cuuucuugcugguugu

SEQ ID NO: 3389625 - RNA, 14 nt, Human
cuuucuuggccagu

SEQ ID NO: 3389626 - RNA, 22 nt, Human
cuuucuugguucauaaaugaau

SEQ ID NO: 3389627 - RNA, 16 nt, Human
cuuucuuuaaauguuu

SEQ ID NO: 3389628 - RNA, 16 nt, Human
cuuucuuucuuagaaa

SEQ ID NO: 3389629 - RNA, 22 nt, Human
cuuucuuuucuggaauguaauc

SEQ ID NO: 3389630 - RNA, 16 nt, Human
cuuucuuuuucuucuu

SEQ ID NO: 3389631 - RNA, 22 nt, Human
cuuucuuuuuguagcuggggcu

SEQ ID NO: 3389632 - RNA, 23 nt, Human
cuuucuuuuuuggccaucugcuc

SEQ ID NO: 3389633 - RNA, 15 nt, Human
cuuugaaaaaaaaua

SEQ ID NO: 3389634 - RNA, 16 nt, Human
cuuugaaaauauauac

SEQ ID NO: 3389635 - RNA, 22 nt, Human
cuuugaaacaagauaacugaga

SEQ ID NO: 3389636 - RNA, 17 nt, Human
cuuugaaaccugcucug

SEQ ID NO: 3389637 - RNA, 20 nt, Human
cuuugaaaccugcucuguag

SEQ ID NO: 3389638 - RNA, 15 nt, Human
cuuugaaacuagacu

SEQ ID NO: 3389639 - RNA, 20 nt, Human
cuuugaaagguuagagaaua

SEQ ID NO: 3389640 - RNA, 15 nt, Human
cuuugaaauaccuca

SEQ ID NO: 3389641 - RNA, 18 nt, Human
cuuugaaauaccucaugu

SEQ ID NO: 3389642 - RNA, 21 nt, Human
cuuugaaauaccucauguuua

SEQ ID NO: 3389643 - RNA, 22 nt, Human
cuuugaaauguguuucuguaua

SEQ ID NO: 3389644 - RNA, 16 nt, Human
cuuugaagaaggugga

SEQ ID NO: 3389645 - RNA, 18 nt, Human
cuuugaagaggaaaauga

SEQ ID NO: 3389646 - RNA, 22 nt, Human
cuuugaagaggaaaaugaauaa

SEQ ID NO: 3389647 - RNA, 14 nt, Human
cuuugaagcaguug

SEQ ID NO: 3389648 - RNA, 17 nt, Human
cuuugaaguagcucuuu

SEQ ID NO: 3389649 - RNA, 18 nt, Human
cuuugaauaaaaaugcac

SEQ ID NO: 3389650 - RNA, 22 nt, Human
cuuugaauaaagaauacuugaa

SEQ ID NO: 3389651 - RNA, 18 nt, Human
cuuugaauaaaugucacu

SEQ ID NO: 3389652 - RNA, 19 nt, Human
cuuugaauaaaugucacuu

SEQ ID NO: 3389653 - RNA, 22 nt, Human
cguaucuccggcucccagccuc

SEQ ID NO: 3389654 - RNA, 11 nt, Human
cguaugaaaau

SEQ ID NO: 3389655 - RNA, 13 nt, Human
cguaugcauguga

SEQ ID NO: 3389656 - RNA, 15 nt, Human
cguauguaaauguau

SEQ ID NO: 3389657 - RNA, 18 nt, Human
cguaugucugguucucaa

SEQ ID NO: 3389658 - RNA, 19 nt, Human
cguaugucugguucucaau

SEQ ID NO: 3389659 - RNA, 14 nt, Human
cguauuccccuucc

SEQ ID NO: 3389660 - RNA, 18 nt, Human
cguauuccccuucccacu

SEQ ID NO: 3389661 - RNA, 21 nt, Human
cgucaaaacagauuguuugca

SEQ ID NO: 3389662 - RNA, 22 nt, Human
cgucaaaacagauuguuugcaa

SEQ ID NO: 3389663 - RNA, 11 nt, Human
cgucaacaaau

SEQ ID NO: 3389664 - RNA, 16 nt, Human
cgucaacguuguacug

SEQ ID NO: 3389665 - RNA, 20 nt, Human
cgucaacucauauuuucaug

SEQ ID NO: 3389666 - RNA, 23 nt, Human
cgucaagagugaauucccucacu

SEQ ID NO: 3389667 - RNA, 12 nt, Human
cgucaccaccac

SEQ ID NO: 3389668 - RNA, 15 nt, Human
cgucaccaccacccc

SEQ ID NO: 3389669 - RNA, 21 nt, Human
cgucaccaccaccccuaccac

SEQ ID NO: 3389670 - RNA, 14 nt, Human
cgucaccaccucuc

SEQ ID NO: 3389671 - RNA, 16 nt, Human
cgucacuaccuggcug

SEQ ID NO: 3389672 - RNA, 18 nt, Human
cgucagccuccagccucu

SEQ ID NO: 3389673 - RNA, 19 nt, Human
cgucagcuggcacugucuc

SEQ ID NO: 3389674 - RNA, 20 nt, Human
cgucagggcccaagucccug

SEQ ID NO: 3389675 - RNA, 15 nt, Human
cgucagugccuaccc

SEQ ID NO: 3389676 - RNA, 14 nt, Human
cgucagugcugugc

SEQ ID NO: 3389677 - RNA, 16 nt, Human
cgucauaacuagaacu

SEQ ID NO: 3389678 - RNA, 19 nt, Human
cgucaucacuuuucaguga

SEQ ID NO: 3389679 - RNA, 16 nt, Human
cgucaucugguccugg

SEQ ID NO: 3389680 - RNA, 14 nt, Human
cguccacagcuucc

SEQ ID NO: 3389681 - RNA, 21 nt, Human
cguccagccgccauugccacc

SEQ ID NO: 3389682 - RNA, 17 nt, Human
cguccagcugcccuucc

SEQ ID NO: 3389683 - RNA, 15 nt, Human
cgucccauauccugc

SEQ ID NO: 3389684 - RNA, 22 nt, Human
cguccccccccaaccuuucccu

SEQ ID NO: 3389685 - RNA, 22 nt, Human
cgucccccucuggcuccagcug

SEQ ID NO: 3389686 - RNA, 13 nt, Human
cgucccccugggg

SEQ ID NO: 3389687 - RNA, 13 nt, Human
cguccccuccccc

SEQ ID NO: 3389688 - RNA, 12 nt, Human
cguccgcccugc

SEQ ID NO: 3389689 - RNA, 16 nt, Human
cguccucccgggcccu

SEQ ID NO: 3389690 - RNA, 17 nt, Human
cguccuccucaccucau

SEQ ID NO: 3389691 - RNA, 21 nt, Human
cguccuccucaccucaugccc

SEQ ID NO: 3389692 - RNA, 12 nt, Human
cguccuccucug

SEQ ID NO: 3389693 - RNA, 13 nt, Human
cguccuccucugu

SEQ ID NO: 3389694 - RNA, 15 nt, Human
cguccuccucuguga

SEQ ID NO: 3389695 - RNA, 13 nt, Human
cguccugagaaag

SEQ ID NO: 3389696 - RNA, 13 nt, Human
cguccugccaccu

SEQ ID NO: 3389697 - RNA, 16 nt, Human
cguccugccaccuggg

SEQ ID NO: 3389698 - RNA, 16 nt, Human
cguccugccuguggcg

SEQ ID NO: 3389699 - RNA, 18 nt, Human
cguccugcuuuggcagug

SEQ ID NO: 3389700 - RNA, 20 nt, Human
cguccuggagguuccccagc

SEQ ID NO: 3389701 - RNA, 16 nt, Human
cguccugucagugccg

SEQ ID NO: 3389702 - RNA, 16 nt, Human
cguccuuacuccugug

SEQ ID NO: 3389703 - RNA, 22 nt, Human
cguccuuacuccugugggagcc

SEQ ID NO: 3389704 - RNA, 16 nt, Human
cgucgacguagaaccu

SEQ ID NO: 3389705 - RNA, 13 nt, Human
cgucgcacagucu

SEQ ID NO: 3389706 - RNA, 16 nt, Human
cgucgcccucccaggc

SEQ ID NO: 3389707 - RNA, 21 nt, Human
cgucggggaggcuccugccug

SEQ ID NO: 3389708 - RNA, 17 nt, Human
cgucuacagcuccccca

SEQ ID NO: 3389709 - RNA, 14 nt, Human
cgucuccaggggcu

SEQ ID NO: 3389710 - RNA, 19 nt, Human
cgucuccaggggcugcuuc

SEQ ID NO: 3389711 - RNA, 17 nt, Human
cgucucccaucuuaacu

SEQ ID NO: 3389712 - RNA, 14 nt, Human
cgucucccccgugu

SEQ ID NO: 3389713 - RNA, 14 nt, Human
cgucucucucccau

SEQ ID NO: 3389714 - RNA, 18 nt, Human
cgucucucucccauggag

SEQ ID NO: 3389715 - RNA, 20 nt, Human
cgucucuuuuacccuggccc

SEQ ID NO: 3389716 - RNA, 15 nt, Human
cgucugaagcuugac

SEQ ID NO: 3389717 - RNA, 14 nt, Human
cgucugacaggcaa

SEQ ID NO: 3389718 - RNA, 20 nt, Human
cgucugacaggcaaugcugg

SEQ ID NO: 3389719 - RNA, 21 nt, Human
cgucugacaggcaaugcuggc

SEQ ID NO: 3389720 - RNA, 15 nt, Human
cgucugacccucucc

SEQ ID NO: 3389721 - RNA, 23 nt, Human
cgucugcuaacuuggagccccag

SEQ ID NO: 3389722 - RNA, 18 nt, Human
cgucuggaggggccccug

SEQ ID NO: 3389723 - RNA, 20 nt, Human
cgucuggaggggccccugcu

SEQ ID NO: 3389724 - RNA, 15 nt, Human
cgucuguauauuuug

SEQ ID NO: 3389725 - RNA, 14 nt, Human
cgucuguccaucug

SEQ ID NO: 3389726 - RNA, 20 nt, Human
cgucugugugugaccccucc

SEQ ID NO: 3389727 - RNA, 20 nt, Human
cgucuuagcaagaaguaaaa

SEQ ID NO: 3389728 - RNA, 12 nt, Human
cgucuucauuaa

SEQ ID NO: 3389729 - RNA, 23 nt, Human
cgucuucauuaagcccucuucca

SEQ ID NO: 3389730 - RNA, 17 nt, Human
cgucuuccgccccugcc

SEQ ID NO: 3389731 - RNA, 18 nt, Human
cgucuuccgccccugccu

SEQ ID NO: 3389732 - RNA, 13 nt, Human
cgucuucuccaac

SEQ ID NO: 3389733 - RNA, 14 nt, Human
cgucuugcuuggga

SEQ ID NO: 3389734 - RNA, 18 nt, Human
cgucuuucccaaaggcau

SEQ ID NO: 3389735 - RNA, 13 nt, Human
cgucuuucuuuuu

SEQ ID NO: 3389736 - RNA, 10 nt, Human
cgucuuugca

SEQ ID NO: 3389737 - RNA, 15 nt, Human
cgugaaaacggagcu

SEQ ID NO: 3389738 - RNA, 17 nt, Human
cgugaaaacggagcuga

SEQ ID NO: 3389739 - RNA, 12 nt, Human
cgugaaacacac

SEQ ID NO: 3389740 - RNA, 20 nt, Human
cgugaaacacaccaggcugu

SEQ ID NO: 3389741 - RNA, 24 nt, Human
cgugaaacacaccaggcugugggc

SEQ ID NO: 3389742 - RNA, 22 nt, Human
cgugaaagugcauuuuuguaaa

SEQ ID NO: 3389743 - RNA, 14 nt, Human
cgugaagaagccug

SEQ ID NO: 3389744 - RNA, 19 nt, Human
cgugaagauacuuuguauu

SEQ ID NO: 3389745 - RNA, 21 nt, Human
cgugaagauacuuuguauugu

SEQ ID NO: 3389746 - RNA, 19 nt, Human
cgugaaggccgagaagcaa

SEQ ID NO: 3389747 - RNA, 14 nt, Human
cgugacaacacuug

SEQ ID NO: 3389748 - RNA, 16 nt, Human
cgugacaauguuuaca

SEQ ID NO: 3389749 - RNA, 15 nt, Human
cgugacagacuccug

SEQ ID NO: 3389750 - RNA, 16 nt, Human
cgugacagugccuggg

SEQ ID NO: 3389751 - RNA, 20 nt, Human
cgugacgcugaauaaauguc

SEQ ID NO: 3389752 - RNA, 15 nt, Human
cgugacgucugggug

SEQ ID NO: 3389753 - RNA, 13 nt, Human
cgugacucaccca

SEQ ID NO: 3389754 - RNA, 16 nt, Human
cgugacucacccaagc

SEQ ID NO: 3389755 - RNA, 17 nt, Human
cgugacucacccaagca

SEQ ID NO: 3389756 - RNA, 18 nt, Human
cgugacucacccaagcau

SEQ ID NO: 3389757 - RNA, 13 nt, Human
cgugacugcccca

SEQ ID NO: 3389758 - RNA, 17 nt, Human
cgugacugccccaacuc

SEQ ID NO: 3389759 - RNA, 23 nt, Human
cgugacugccccaacuccuggaa

SEQ ID NO: 3389760 - RNA, 14 nt, Human
cgugagaccugccc

SEQ ID NO: 3389761 - RNA, 21 nt, Human
cgugagcaggaaggccugggu

SEQ ID NO: 3389762 - RNA, 19 nt, Human
cgugagcagugugucuccu

SEQ ID NO: 3389763 - RNA, 14 nt, Human
cuuucaaauuuaga

SEQ ID NO: 3389764 - RNA, 14 nt, Human
cuuucaacucauug

SEQ ID NO: 3389765 - RNA, 14 nt, Human
cuuucaacuugcau

SEQ ID NO: 3389766 - RNA, 22 nt, Human
cuuucaagcagucgugccugug

SEQ ID NO: 3389767 - RNA, 23 nt, Human
cuuucaagcagucgugccugugu

SEQ ID NO: 3389768 - RNA, 20 nt, Human
cuuucaagucaguucuguga

SEQ ID NO: 3389769 - RNA, 14 nt, Human
cuuucaagugccuu

SEQ ID NO: 3389770 - RNA, 22 nt, Human
cuuucaauaggaaaaacugauu

SEQ ID NO: 3389771 - RNA, 20 nt, Human
cuuucaaugguuugcaagga

SEQ ID NO: 3389772 - RNA, 15 nt, Human
cuuucacaaaaaaga

SEQ ID NO: 3389773 - RNA, 14 nt, Human
cuuucacaaccuuc

SEQ ID NO: 3389774 - RNA, 16 nt, Human
cuuucacaaccuucug

SEQ ID NO: 3389775 - RNA, 14 nt, Human
cuuucacacuucca

SEQ ID NO: 3389776 - RNA, 19 nt, Human
cuuucacacuuccaccagc

SEQ ID NO: 3389777 - RNA, 15 nt, Human
cuuucacagcuccuc

SEQ ID NO: 3389778 - RNA, 13 nt, Human
cuuucacaggcag

SEQ ID NO: 3389779 - RNA, 19 nt, Human
cuuucacaggcagccagug

SEQ ID NO: 3389780 - RNA, 17 nt, Human
cuuucacaguaccaucu

SEQ ID NO: 3389781 - RNA, 22 nt, Human
cuuucacauuguuugcugcuau

SEQ ID NO: 3389782 - RNA, 24 nt, Human
cuuucacauuguuugcugcuauug

SEQ ID NO: 3389783 - RNA, 16 nt, Human
cuuucaccuuugugua

SEQ ID NO: 3389784 - RNA, 19 nt, Human
cuuucacggaaacucccga

SEQ ID NO: 3389785 - RNA, 20 nt, Human
cuuucacuaaaacacacagg

SEQ ID NO: 3389786 - RNA, 15 nt, Human
cuuucacuauaaugu

SEQ ID NO: 3389787 - RNA, 16 nt, Human
cuuucacuauuuccuu

SEQ ID NO: 3389788 - RNA, 21 nt, Human
cuuucacuauuuccuuuauaa

SEQ ID NO: 3389789 - RNA, 14 nt, Human
cuuucacuucuuuc

SEQ ID NO: 3389790 - RNA, 18 nt, Human
cuuucacuucuuucccuu

SEQ ID NO: 3389791 - RNA, 21 nt, Human
cuuucacuucuuucccuuccu

SEQ ID NO: 3389792 - RNA, 13 nt, Human
cuuucagaaaaca

SEQ ID NO: 3389793 - RNA, 23 nt, Human
cuuucagaaaacagaaaaaaaac

SEQ ID NO: 3389794 - RNA, 14 nt, Human
cuuucagaaagcuu

SEQ ID NO: 3389795 - RNA, 21 nt, Human
cuuucagaaauauaacacauu

SEQ ID NO: 3389796 - RNA, 21 nt, Human
cuuucagaagugcccuuccug

SEQ ID NO: 3389797 - RNA, 16 nt, Human
cuuucagaauauguca

SEQ ID NO: 3389798 - RNA, 15 nt, Human
cuuucagauacugga

SEQ ID NO: 3389799 - RNA, 13 nt, Human
cuuugggcccagg

SEQ ID NO: 3389800 - RNA, 14 nt, Human
cuuugggcccugca

SEQ ID NO: 3389801 - RNA, 18 nt, Human
cuuugggccucugcuucu

SEQ ID NO: 3389802 - RNA, 14 nt, Human
cuuugggcugcccu

SEQ ID NO: 3389803 - RNA, 19 nt, Human
cuuugggcugcccuggugc

SEQ ID NO: 3389804 - RNA, 16 nt, Human
cuuugggcuucagcug

SEQ ID NO: 3389805 - RNA, 18 nt, Human
cuuuggggcuaauuuaac

SEQ ID NO: 3389806 - RNA, 21 nt, Human
cuuuggggcuuuuacaccagu

SEQ ID NO: 3389807 - RNA, 23 nt, Human
cuuuggggucuacacugcaauca

SEQ ID NO: 3389808 - RNA, 21 nt, Human
cuuuggguaccuauuuucauu

SEQ ID NO: 3389809 - RNA, 21 nt, Human
cuuugguacuaauaaucuugu

SEQ ID NO: 3389810 - RNA, 15 nt, Human
cuuuggucacuuuua

SEQ ID NO: 3389811 - RNA, 18 nt, Human
cuuuggucacuuuuagau

SEQ ID NO: 3389812 - RNA, 23 nt, Human
cuuugguccuaagucccugcccc

SEQ ID NO: 3389813 - RNA, 20 nt, Human
cuuuggucuacacugugcug

SEQ ID NO: 3389814 - RNA, 15 nt, Human
cuuuggucucuugcu

SEQ ID NO: 3389815 - RNA, 19 nt, Human
cuuuggugagaaccugggu

SEQ ID NO: 3389816 - RNA, 19 nt, Human
cuuuggugccuuuccuguu

SEQ ID NO: 3389817 - RNA, 19 nt, Human
cuuugguuauauuuagcuc

SEQ ID NO: 3389818 - RNA, 19 nt, Human
cuuugguuauuuuacuuuu

SEQ ID NO: 3389819 - RNA, 14 nt, Human
cuuugguucagcua

SEQ ID NO: 3389820 - RNA, 16 nt, Human
cuuugguucuaaggac

SEQ ID NO: 3389821 - RNA, 14 nt, Human
cuuugguucuggcc

SEQ ID NO: 3389822 - RNA, 21 nt, Human
cuuugguucuggguuguuucc

SEQ ID NO: 3389823 - RNA, 19 nt, Human
cuuugguuggcagcauucc

SEQ ID NO: 3389824 - RNA, 11 nt, Human
cuuugguuuuu

SEQ ID NO: 3389825 - RNA, 17 nt, Human
cuuugguuuuuuucuuc

SEQ ID NO: 3389826 - RNA, 16 nt, Human
cuuuguaaaaaucuuu

SEQ ID NO: 3389827 - RNA, 12 nt, Human
cuuuguaaauag

SEQ ID NO: 3389828 - RNA, 17 nt, Human
cuuuguaaauucugauu

SEQ ID NO: 3389829 - RNA, 15 nt, Human
cuuuguaaauuguca

SEQ ID NO: 3389830 - RNA, 21 nt, Human
cuuuguaagaguguagaagca

SEQ ID NO: 3389831 - RNA, 21 nt, Human
cuuuguaagucaguguugaga

SEQ ID NO: 3389832 - RNA, 17 nt, Human
cuuuguaagugaaaaac

SEQ ID NO: 3389833 - RNA, 13 nt, Human
cuuuguaauggga

SEQ ID NO: 3389834 - RNA, 22 nt, Human
cuuuguacacccaugaaagaaa

SEQ ID NO: 3389835 - RNA, 19 nt, Human
cuuuguacagagugcuuuu

SEQ ID NO: 3389836 - RNA, 17 nt, Human
cuuuguacagcccagag

SEQ ID NO: 3389837 - RNA, 15 nt, Human
cuuuguaccaaaauu

SEQ ID NO: 3389838 - RNA, 12 nt, Human
cuuuguaccccc

SEQ ID NO: 3389839 - RNA, 14 nt, Human
cuuuguacccccca

SEQ ID NO: 3389840 - RNA, 21 nt, Human
cuuuguagauccuuagagguc

SEQ ID NO: 3389841 - RNA, 16 nt, Human
cuuuguagcauuuggu

SEQ ID NO: 3389842 - RNA, 20 nt, Human
cuuuguaguguuuggugcuc

SEQ ID NO: 3389843 - RNA, 11 nt, Human
cuuuguauaga

SEQ ID NO: 3389844 - RNA, 18 nt, Human
cuuuguauauuauuucua

SEQ ID NO: 3389845 - RNA, 20 nt, Human
cuuuguaugauauuccauag

SEQ ID NO: 3389846 - RNA, 16 nt, Human
cuuuguauucugucuu

SEQ ID NO: 3389847 - RNA, 16 nt, Human
cuuugucaaaaggaag

SEQ ID NO: 3389848 - RNA, 16 nt, Human
cuuugucacuguuuca

SEQ ID NO: 3389849 - RNA, 16 nt, Human
cuuuguccuccugcug

SEQ ID NO: 3389850 - RNA, 20 nt, Human
cuuugucuaacucagaauua

SEQ ID NO: 3389851 - RNA, 20 nt, Human
cuuugucuacaccauuaugu

SEQ ID NO: 3389852 - RNA, 19 nt, Human
cuuugucuccucuauccug

SEQ ID NO: 3389853 - RNA, 13 nt, Human
cuuugugagucaa

SEQ ID NO: 3389854 - RNA, 19 nt, Human
cuuugugagucaauacaua

SEQ ID NO: 3389855 - RNA, 17 nt, Human
cuuugugauuauuucac

SEQ ID NO: 3389856 - RNA, 12 nt, Human
cuuugugauuuu

SEQ ID NO: 3389857 - RNA, 19 nt, Human
cuuugugauuuuuguaauu

SEQ ID NO: 3389858 - RNA, 14 nt, Human
cuuugugcauucug

SEQ ID NO: 3389859 - RNA, 20 nt, Human
cuuuguggauucugaggccc

SEQ ID NO: 3389860 - RNA, 15 nt, Human
cuuuguggccaagga

SEQ ID NO: 3389861 - RNA, 20 nt, Human
cuuuguggccaaggagcugc

SEQ ID NO: 3389862 - RNA, 13 nt, Human
cuuuguggggcuu

SEQ ID NO: 3389863 - RNA, 16 nt, Human
cuuugugguuuuaugg

SEQ ID NO: 3389864 - RNA, 16 nt, Human
cuuuguguagcuuugc

SEQ ID NO: 3389865 - RNA, 17 nt, Human
cuuuguguagcuuugcu

SEQ ID NO: 3389866 - RNA, 15 nt, Human
cuuugugugauugaa

SEQ ID NO: 3389867 - RNA, 18 nt, Human
cuuuguguguacucacug

SEQ ID NO: 3389868 - RNA, 14 nt, Human
cuuuguguuguaau

SEQ ID NO: 3389869 - RNA, 17 nt, Human
cuuuguguuguaauucu

SEQ ID NO: 3389870 - RNA, 22 nt, Human
cuuuguguuugguuuacauuua

SEQ ID NO: 3389871 - RNA, 16 nt, Human
cuuuguuaagguccug

SEQ ID NO: 3389872 - RNA, 17 nt, Human
cuuuguuaaguucuauu

SEQ ID NO: 3389873 - RNA, 21 nt, Human
cuuuguuacacuguuauuuuc

SEQ ID NO: 3389874 - RNA, 19 nt, Human
cuuuguuacuucucuaauu

SEQ ID NO: 3389875 - RNA, 18 nt, Human
cuuuguucauagcccagu

SEQ ID NO: 3389876 - RNA, 22 nt, Human
cuuuguuccccacuggagcaga

SEQ ID NO: 3389877 - RNA, 18 nt, Human
cuuuguucuaaagaugga

SEQ ID NO: 3389878 - RNA, 23 nt, Human
cuuuguucucagcucccccuguc

SEQ ID NO: 3389879 - RNA, 14 nt, Human
cuuuguucuggcuc

SEQ ID NO: 3389880 - RNA, 18 nt, Human
cuuuguugcaagauguga

SEQ ID NO: 3389881 - RNA, 11 nt, Human
cuuuguugcac

SEQ ID NO: 3389882 - RNA, 18 nt, Human
cuuuguugugugccucua

SEQ ID NO: 3389883 - RNA, 18 nt, Human
cuuuguuucguggggagg

SEQ ID NO: 3389884 - RNA, 15 nt, Human
cuuuguuucuccccc

SEQ ID NO: 3389885 - RNA, 13 nt, Human
cuuuguuucuugu

SEQ ID NO: 3389886 - RNA, 17 nt, Human
cuuuguuucuuguuuau

SEQ ID NO: 3389887 - RNA, 20 nt, Human
cuuuguuuggauguaauuua

SEQ ID NO: 3389888 - RNA, 14 nt, Human
cuuuguuuguucuu

SEQ ID NO: 3389889 - RNA, 21 nt, Human
cuuuguuuguugucagcugaa

SEQ ID NO: 3389890 - RNA, 20 nt, Human
cuuuguuuucugacuaauua

SEQ ID NO: 3389891 - RNA, 23 nt, Human
cuuuguuuugauguuuguggccu

SEQ ID NO: 3389892 - RNA, 19 nt, Human
cuuuguuuuguuuuaagga

SEQ ID NO: 3389893 - RNA, 18 nt, Human
cuuuguuuuuuguuggag

SEQ ID NO: 3389894 - RNA, 21 nt, Human
cuuuguuuuuuuuuccugucc

SEQ ID NO: 3389895 - RNA, 19 nt, Human
cuuuuaaaaaguauugcca

SEQ ID NO: 3389896 - RNA, 13 nt, Human
cuuuuaaaaugca

SEQ ID NO: 3389897 - RNA, 19 nt, Human
cuuuuaaaaugcaauguaa

SEQ ID NO: 3389898 - RNA, 12 nt, Human
cuuuuaaacaca

SEQ ID NO: 3389899 - RNA, 13 nt, Human
cuuuuaaacacau

SEQ ID NO: 3389900 - RNA, 13 nt, Human
cuuuuaaacugug

SEQ ID NO: 3389901 - RNA, 21 nt, Human
cuuuuaaagaaaaaaauugaa

SEQ ID NO: 3389902 - RNA, 18 nt, Human
cuuuuaaagacccuccua

SEQ ID NO: 3389903 - RNA, 22 nt, Human
cuuuuaaaggggcagaaaaacu

SEQ ID NO: 3389904 - RNA, 11 nt, Human
cuuuuaaagug

SEQ ID NO: 3389905 - RNA, 16 nt, Human
cuuuuaaaguguuuca

SEQ ID NO: 3389906 - RNA, 17 nt, Human
cuuuuaaaguguuucag

SEQ ID NO: 3389907 - RNA, 16 nt, Human
cuuuuaaaguugauau

SEQ ID NO: 3389908 - RNA, 12 nt, Human
cuuuuaaauccu

SEQ ID NO: 3389909 - RNA, 19 nt, Human
cuuuuaaauccuguugaaa

SEQ ID NO: 3389910 - RNA, 20 nt, Human
cuuuuaaauccuguugaaaa

SEQ ID NO: 3389911 - RNA, 22 nt, Human
cuuuuaaaugauugaauuauau

SEQ ID NO: 3389912 - RNA, 16 nt, Human
cuuuuaaauuagaaaa

SEQ ID NO: 3389913 - RNA, 21 nt, Human
cuuuuaacaccugauguguac

SEQ ID NO: 3389914 - RNA, 18 nt, Human
cuuuuaacauuuuguucu

SEQ ID NO: 3389915 - RNA, 21 nt, Human
cuuuuaacauuuuguucuuac

SEQ ID NO: 3389916 - RNA, 15 nt, Human
cuuuuaaccaucuga

SEQ ID NO: 3389917 - RNA, 14 nt, Human
cgugagccaccucg

SEQ ID NO: 3389918 - RNA, 12 nt, Human
cgugagccaggu

SEQ ID NO: 3389919 - RNA, 16 nt, Human
cgugagccccaucuuc

SEQ ID NO: 3389920 - RNA, 14 nt, Human
cgugaggccagaga

SEQ ID NO: 3389921 - RNA, 16 nt, Human
cgugaguccuggcaug

SEQ ID NO: 3389922 - RNA, 18 nt, Human
cgugaguccuggcauggg

SEQ ID NO: 3389923 - RNA, 16 nt, Human
cgugaguucucagggc

SEQ ID NO: 3389924 - RNA, 19 nt, Human
cgugaguucucagggcucc

SEQ ID NO: 3389925 - RNA, 14 nt, Human
cgugaucaaagcca

SEQ ID NO: 3389926 - RNA, 17 nt, Human
cgugauccacccgccuc

SEQ ID NO: 3389927 - RNA, 14 nt, Human
cgugaucucagcuc

SEQ ID NO: 3389928 - RNA, 18 nt, Human
cgugauuuugcuguagaa

SEQ ID NO: 3389929 - RNA, 18 nt, Human
cgugcacacaccagagcc

SEQ ID NO: 3389930 - RNA, 19 nt, Human
cgugcacacaccagagccc

SEQ ID NO: 3389931 - RNA, 21 nt, Human
cgugcacacaccagagcccac

SEQ ID NO: 3389932 - RNA, 22 nt, Human
cgugcacacaccagagcccacc

SEQ ID NO: 3389933 - RNA, 16 nt, Human
cgugcagacuggaggg

SEQ ID NO: 3389934 - RNA, 18 nt, Human
cgugcauaccacuuuugu

SEQ ID NO: 3389935 - RNA, 13 nt, Human
cgugcaugugcac

SEQ ID NO: 3389936 - RNA, 19 nt, Human
cgugcauuagcacagauuu

SEQ ID NO: 3389937 - RNA, 22 nt, Human
cgugcauuagcacagauuuuaa

SEQ ID NO: 3389938 - RNA, 12 nt, Human
cgugcauugugc

SEQ ID NO: 3389939 - RNA, 15 nt, Human
cgugcauugugcuuc

SEQ ID NO: 3389940 - RNA, 23 nt, Human
cgugccaaguccagguccuggug

SEQ ID NO: 3389941 - RNA, 22 nt, Human
cgugccaccccgagggcugagc

SEQ ID NO: 3389942 - RNA, 13 nt, Human
cgugccaggcccg

SEQ ID NO: 3389943 - RNA, 20 nt, Human
cgugccagucgcgcugccug

SEQ ID NO: 3389944 - RNA, 15 nt, Human
cuuuuauacugacac

SEQ ID NO: 3389945 - RNA, 19 nt, Human
cuuuuauagcuauuacugu

SEQ ID NO: 3389946 - RNA, 21 nt, Human
cuuuuauaggugagaaaaaaa

SEQ ID NO: 3389947 - RNA, 20 nt, Human
cuuuuauaguggaaaaacac

SEQ ID NO: 3389948 - RNA, 21 nt, Human
cuuuuauaguggaaaaacaca

SEQ ID NO: 3389949 - RNA, 14 nt, Human
cuuuuauaucccau

SEQ ID NO: 3389950 - RNA, 14 nt, Human
cuuuuauaucugua

SEQ ID NO: 3389951 - RNA, 23 nt, Human
cuuuuauaucuguauguauuagu

SEQ ID NO: 3389952 - RNA, 14 nt, Human
cuuuuauauuugua

SEQ ID NO: 3389953 - RNA, 24 nt, Human
cuuuuaucuauucugagaaaacaa

SEQ ID NO: 3389954 - RNA, 22 nt, Human
cuuuuaucuguuuaaagcauau

SEQ ID NO: 3389955 - RNA, 16 nt, Human
cuuuuaugagcagaag

SEQ ID NO: 3389956 - RNA, 17 nt, Human
cuuuuaugauguauauu

SEQ ID NO: 3389957 - RNA, 18 nt, Human
cuuuuaugcaaaagguuu

SEQ ID NO: 3389958 - RNA, 18 nt, Human
cuuuuauguuauuuauau

SEQ ID NO: 3389959 - RNA, 16 nt, Human
cuuuuauguuugaaua

SEQ ID NO: 3389960 - RNA, 18 nt, Human
cuuuuauguuugaauaug

SEQ ID NO: 3389961 - RNA, 22 nt, Human
cuuuuauguuugaauauggaca

SEQ ID NO: 3389962 - RNA, 18 nt, Human
cuaagauucugauuuuag

SEQ ID NO: 3389963 - RNA, 19 nt, Human
cuaagauucugauuuuagg

SEQ ID NO: 3389964 - RNA, 21 nt, Human
cuaagauucuuuuaaauuaga

SEQ ID NO: 3389965 - RNA, 15 nt, Human
cuaagcaaaauguga

SEQ ID NO: 3389966 - RNA, 12 nt, Human
cuaagcaauuuc

SEQ ID NO: 3389967 - RNA, 15 nt, Human
cuaagcagaaagugc

SEQ ID NO: 3389968 - RNA, 18 nt, Human
cuaagcagaaagugccuu

SEQ ID NO: 3389969 - RNA, 16 nt, Human
cuaagcagaggagggg

SEQ ID NO: 3389970 - RNA, 23 nt, Human
cuaagcagaggaggggccgcugc

SEQ ID NO: 3389971 - RNA, 14 nt, Human
cuaagcaggcgcaa

SEQ ID NO: 3389972 - RNA, 13 nt, Human
cuaagcaucuaag

SEQ ID NO: 3389973 - RNA, 15 nt, Human
cuaagcaucuaaguu

SEQ ID NO: 3389974 - RNA, 16 nt, Human
cuaagcauugccuggc

SEQ ID NO: 3389975 - RNA, 14 nt, Human
cuaagcauuuaaaa

SEQ ID NO: 3389976 - RNA, 13 nt, Human
cuaagccagccug

SEQ ID NO: 3389977 - RNA, 18 nt, Human
cuaagccagccuggucca

SEQ ID NO: 3389978 - RNA, 15 nt, Human
cuaagccagcugccc

SEQ ID NO: 3389979 - RNA, 17 nt, Human
cuaagccccagcaagca

SEQ ID NO: 3389980 - RNA, 20 nt, Human
cuaagcccugucgagacacu

SEQ ID NO: 3389981 - RNA, 21 nt, Human
cuaagcccugucgagacacuu

SEQ ID NO: 3389982 - RNA, 14 nt, Human
cuaagccuaccugc

SEQ ID NO: 3389983 - RNA, 16 nt, Human
cuaagccuaccugcuc

SEQ ID NO: 3389984 - RNA, 17 nt, Human
cuaagccuaccugcucu

SEQ ID NO: 3389985 - RNA, 22 nt, Human
cuaagcgcacauucaugugggc

SEQ ID NO: 3389986 - RNA, 17 nt, Human
cuaagcuaggaaugaaa

SEQ ID NO: 3389987 - RNA, 22 nt, Human
cuaagcucaaggcgugaggaug

SEQ ID NO: 3389988 - RNA, 16 nt, Human
cuaagcucacguccug

SEQ ID NO: 3389989 - RNA, 19 nt, Human
cuaagcugcagcuuccugu

SEQ ID NO: 3389990 - RNA, 14 nt, Human
cuaaggaaccaaca

SEQ ID NO: 3389991 - RNA, 14 nt, Human
cuaaggaaccuucc

SEQ ID NO: 3389992 - RNA, 11 nt, Human
cuaaggacaca

SEQ ID NO: 3389993 - RNA, 14 nt, Human
cuaaggacacacua

SEQ ID NO: 3389994 - RNA, 16 nt, Human
cuaaggacacacuaau

SEQ ID NO: 3389995 - RNA, 16 nt, Human
cuaaggacauuuccca

SEQ ID NO: 3389996 - RNA, 17 nt, Human
cuaaggacauuucccag

SEQ ID NO: 3389997 - RNA, 15 nt, Human
cuaaggacuucuuua

SEQ ID NO: 3389998 - RNA, 17 nt, Human
cuaaggaggggaaaaaa

SEQ ID NO: 3389999 - RNA, 21 nt, Human
cuaaggaggggaaaaaaaugu

SEQ ID NO: 3390000 - RNA, 22 nt, Human
cuaaggaggggaaaaaaauguu

SEQ ID NO: 3390001 - RNA, 23 nt, Human
cuaaggaggggaaaaaaauguug

SEQ ID NO: 3390002 - RNA, 15 nt, Human
cuaaggaucucucag

SEQ ID NO: 3390003 - RNA, 19 nt, Human
cuaaggaugucacagggcc

SEQ ID NO: 3390004 - RNA, 20 nt, Human
cuaaggcaugugugaaacau

SEQ ID NO: 3390005 - RNA, 13 nt, Human
cuaaggccuacuu

SEQ ID NO: 3390006 - RNA, 19 nt, Human
cuaaggccuaggauucuaa

SEQ ID NO: 3390007 - RNA, 19 nt, Human
cuaaggcguggagcugccu

SEQ ID NO: 3390008 - RNA, 18 nt, Human
cuaaggcucuaugagucu

SEQ ID NO: 3390009 - RNA, 11 nt, Human
cuaaggcucug

SEQ ID NO: 3390010 - RNA, 14 nt, Human
cuaaggcucugaga

SEQ ID NO: 3390011 - RNA, 19 nt, Human
cuaaggcucugagagucua

SEQ ID NO: 3390012 - RNA, 21 nt, Human
cuaaggcucugagagucuaga

SEQ ID NO: 3390013 - RNA, 22 nt, Human
cuaaggcucugagagucuagau

SEQ ID NO: 3390014 - RNA, 16 nt, Human
cuaagggaagacauuu

SEQ ID NO: 3390015 - RNA, 19 nt, Human
cuaagggaagacauuucuu

SEQ ID NO: 3390016 - RNA, 23 nt, Human
cuaagggagagugguauuugcag

SEQ ID NO: 3390017 - RNA, 17 nt, Human
cuaagggucgaaagcuc

SEQ ID NO: 3390018 - RNA, 19 nt, Human
cuaagggucgaaagcucua

SEQ ID NO: 3390019 - RNA, 20 nt, Human
cuaagggugggugcucagaa

SEQ ID NO: 3390020 - RNA, 20 nt, Human
cuaagguccgguguucuaag

SEQ ID NO: 3390021 - RNA, 22 nt, Human
cuaagguccgguguucuaagau

SEQ ID NO: 3390022 - RNA, 12 nt, Human
cuaagguccuaa

SEQ ID NO: 3390023 - RNA, 16 nt, Human
cuaaggugugcucuga

SEQ ID NO: 3390024 - RNA, 13 nt, Human
cuaagguucuaag

SEQ ID NO: 3390025 - RNA, 17 nt, Human
cuaagguucuaaggccu

SEQ ID NO: 3390026 - RNA, 22 nt, Human
cuaaguaaaaccacagcaguug

SEQ ID NO: 3390027 - RNA, 11 nt, Human
cuaaguauuaa

SEQ ID NO: 3390028 - RNA, 13 nt, Human
cuaaguauuaaaa

SEQ ID NO: 3390029 - RNA, 20 nt, Human
cuaaguauuaaaacauugga

SEQ ID NO: 3390030 - RNA, 18 nt, Human
cuaagucccugcccccuc

SEQ ID NO: 3390031 - RNA, 14 nt, Human
cuaagucucuguga

SEQ ID NO: 3390032 - RNA, 20 nt, Human
cuaagucucuuuuuuacaaa

SEQ ID NO: 3390033 - RNA, 16 nt, Human
cuaagucuuuccauug

SEQ ID NO: 3390034 - RNA, 16 nt, Human
cuaagugaaauuucua

SEQ ID NO: 3390035 - RNA, 17 nt, Human
cuaagugacauuuguag

SEQ ID NO: 3390036 - RNA, 22 nt, Human
cuaagugauccucccaccucag

SEQ ID NO: 3390037 - RNA, 21 nt, Human
cuaagugcuuauuacauuuua

SEQ ID NO: 3390038 - RNA, 21 nt, Human
cuaagugguacuaacuuuccu

SEQ ID NO: 3390039 - RNA, 21 nt, Human
cuaaguuaauuuaaaguuguu

SEQ ID NO: 3390040 - RNA, 20 nt, Human
cuaaguuccacugagcucca

SEQ ID NO: 3390041 - RNA, 17 nt, Human
cuaaguucuuagauauc

SEQ ID NO: 3390042 - RNA, 24 nt, Human
cuaaguugggaucuaggagaggag

SEQ ID NO: 3390043 - RNA, 19 nt, Human
cuaaguuucaguugauuuu

SEQ ID NO: 3390044 - RNA, 17 nt, Human
cuaauaaaaagcuuuug

SEQ ID NO: 3390045 - RNA, 15 nt, Human
cuaauaaaaagguga

SEQ ID NO: 3390046 - RNA, 13 nt, Human
cuaauaaaacuga

SEQ ID NO: 3390047 - RNA, 15 nt, Human
cuaauaaaacugaug

SEQ ID NO: 3390048 - RNA, 16 nt, Human
cuaauaaaacugaugu

SEQ ID NO: 3390049 - RNA, 12 nt, Human
cuaauaaaauau

SEQ ID NO: 3390050 - RNA, 20 nt, Human
cuaauaaaauaucauucagc

SEQ ID NO: 3390051 - RNA, 17 nt, Human
cuaauaaaauauuuucu

SEQ ID NO: 3390052 - RNA, 18 nt, Human
cuaauaaaauauuuucug

SEQ ID NO: 3390053 - RNA, 21 nt, Human
cuaauaaaauauuuucugugu

SEQ ID NO: 3390054 - RNA, 22 nt, Human
cuaauaaaauauuuucugugug

SEQ ID NO: 3390055 - RNA, 20 nt, Human
cuaauaaaauuuaaaagucu

SEQ ID NO: 3390056 - RNA, 21 nt, Human
cuaauaaaauuuaaaagucuu

SEQ ID NO: 3390057 - RNA, 19 nt, Human
cuaauaaacuaauaauugc

SEQ ID NO: 3390058 - RNA, 13 nt, Human
cuaauaaagcugu

SEQ ID NO: 3390059 - RNA, 14 nt, Human
cuaauaaagcugug

SEQ ID NO: 3390060 - RNA, 13 nt, Human
cuaauaaauacau

SEQ ID NO: 3390061 - RNA, 15 nt, Human
cuaauaaauacauac

SEQ ID NO: 3390062 - RNA, 22 nt, Human
cuaauaagcuaguugaauacuu

SEQ ID NO: 3390063 - RNA, 12 nt, Human
cuaauaauaaau

SEQ ID NO: 3390064 - RNA, 15 nt, Human
cuaauaauaaauagu

SEQ ID NO: 3390065 - RNA, 20 nt, Human
cuaauaauaaauaguucuuc

SEQ ID NO: 3390066 - RNA, 19 nt, Human
cuaauaaugagcuauuaaa

SEQ ID NO: 3390067 - RNA, 12 nt, Human
cuaauacaccag

SEQ ID NO: 3390068 - RNA, 17 nt, Human
cuaauacauuaaagcag

SEQ ID NO: 3390069 - RNA, 13 nt, Human
cuaauaccucugu

SEQ ID NO: 3390070 - RNA, 17 nt, Human
cuaauagacuaaaugaa

SEQ ID NO: 3390071 - RNA, 20 nt, Human
cuaauagacuaaaugaaauc

SEQ ID NO: 3390072 - RNA, 23 nt, Human
cuaauagcggguuacuuucacau

SEQ ID NO: 3390073 - RNA, 15 nt, Human
cuaauauauuuuuau

SEQ ID NO: 3390074 - RNA, 23 nt, Human
cuaauaucaaaugcaguauauuu

SEQ ID NO: 3390075 - RNA, 12 nt, Human
cuaauaucagca

SEQ ID NO: 3390076 - RNA, 17 nt, Human
cuaauauccccaaauua

SEQ ID NO: 3390077 - RNA, 22 nt, Human
cuaauauccccaaauuagggca

SEQ ID NO: 3390078 - RNA, 23 nt, Human
cuaauaugauagcgggaaaagga

SEQ ID NO: 3390079 - RNA, 20 nt, Human
cuaauauggccacaguaguc

SEQ ID NO: 3390080 - RNA, 18 nt, Human
cuaauauguaacaagcca

SEQ ID NO: 3390081 - RNA, 14 nt, Human
cuaauauuaaaaau

SEQ ID NO: 3390082 - RNA, 16 nt, Human
cuaauauuaaaaauau

SEQ ID NO: 3390083 - RNA, 22 nt, Human
cuaaucacaguuuuuccuggaa

SEQ ID NO: 3390084 - RNA, 19 nt, Human
cuaaucaccauguaagcac

SEQ ID NO: 3390085 - RNA, 22 nt, Human
cuaaucagaaauuuuuaucagu

SEQ ID NO: 3390086 - RNA, 20 nt, Human
cuaaucagcauucucacucc

SEQ ID NO: 3390087 - RNA, 19 nt, Human
cuaaucagggaggucauuu

SEQ ID NO: 3390088 - RNA, 14 nt, Human
cuaaucaugaaacu

SEQ ID NO: 3390089 - RNA, 17 nt, Human
cuaauccaggcagaucc

SEQ ID NO: 3390090 - RNA, 18 nt, Human
cuaauccaggcagaucca

SEQ ID NO: 3390091 - RNA, 19 nt, Human
cuaauccaggcagauccag

SEQ ID NO: 3390092 - RNA, 15 nt, Human
cuaauccccuucucc

SEQ ID NO: 3390093 - RNA, 16 nt, Human
cuaauccccuucuccc

SEQ ID NO: 3390094 - RNA, 18 nt, Human
cuaauccccuucuccccu

SEQ ID NO: 3390095 - RNA, 22 nt, Human
cuaaucccugggcauugcuuuc

SEQ ID NO: 3390096 - RNA, 22 nt, Human
cuaauccggaaaucagcaaacu

SEQ ID NO: 3390097 - RNA, 17 nt, Human
cuaaucuaacaauggaa

SEQ ID NO: 3390098 - RNA, 14 nt, Human
cuaaucucuguaaa

SEQ ID NO: 3390099 - RNA, 20 nt, Human
cuaaucucuguaaagcuaaa

SEQ ID NO: 3390100 - RNA, 20 nt, Human
cuaaucugcuaugcuugaau

SEQ ID NO: 3390101 - RNA, 14 nt, Human
cuaaucuguagggc

SEQ ID NO: 3390102 - RNA, 18 nt, Human
cuaaucuguagggcugga

SEQ ID NO: 3390103 - RNA, 21 nt, Human
cuaaucugugcuguuucaaag

SEQ ID NO: 3390104 - RNA, 17 nt, Human
cuaaucuuauucauuuu

SEQ ID NO: 3390105 - RNA, 19 nt, Human
cuaaucuuauucauuuucu

SEQ ID NO: 3390106 - RNA, 15 nt, Human
cuaaucuucagggca

SEQ ID NO: 3390107 - RNA, 14 nt, Human
cuaaucuugugaaa

SEQ ID NO: 3390108 - RNA, 21 nt, Human
cuaaucuugugaaaauaauug

SEQ ID NO: 3390109 - RNA, 13 nt, Human
cuaaugaaaguga

SEQ ID NO: 3390110 - RNA, 18 nt, Human
cuaaugaaagugaugaca

SEQ ID NO: 3390111 - RNA, 20 nt, Human
gaaaagauacgacuuuauuu

SEQ ID NO: 3390112 - RNA, 11 nt, Human
gaaaagaugca

SEQ ID NO: 3390113 - RNA, 23 nt, Human
gaaaagauucuucuguguuuaua

SEQ ID NO: 3390114 - RNA, 17 nt, Human
gaaaagauuuuaaucaa

SEQ ID NO: 3390115 - RNA, 17 nt, Human
gaaaagcagcucucccc

SEQ ID NO: 3390116 - RNA, 10 nt, Human
gaaaagcaua

SEQ ID NO: 3390117 - RNA, 16 nt, Human
gaaaagcauuuuucaa

SEQ ID NO: 3390118 - RNA, 15 nt, Human
gaaaagccauguuua

SEQ ID NO: 3390119 - RNA, 18 nt, Human
gaaaagccauguuuaaga

SEQ ID NO: 3390120 - RNA, 19 nt, Human
gaaaagccauguuuaagau

SEQ ID NO: 3390121 - RNA, 21 nt, Human
gaaaagccuaaucacaguuuu

SEQ ID NO: 3390122 - RNA, 13 nt, Human
gaaaagccucugu

SEQ ID NO: 3390123 - RNA, 14 nt, Human
gaaaagccucugug

SEQ ID NO: 3390124 - RNA, 20 nt, Human
gaaaagccuggguuuggugu

SEQ ID NO: 3390125 - RNA, 22 nt, Human
gaaaagccuggguuugguguau

SEQ ID NO: 3390126 - RNA, 18 nt, Human
gaaaagcggacaucagcu

SEQ ID NO: 3390127 - RNA, 16 nt, Human
gaaaagcuaagagaag

SEQ ID NO: 3390128 - RNA, 19 nt, Human
gaaaagcuauuagccagga

SEQ ID NO: 3390129 - RNA, 19 nt, Human
gaaaagcugcugacagugu

SEQ ID NO: 3390130 - RNA, 14 nt, Human
gaaaagcuucuuaa

SEQ ID NO: 3390131 - RNA, 18 nt, Human
gaaaagcuucuuaauuaa

SEQ ID NO: 3390132 - RNA, 22 nt, Human
gaaaaggcacccccgucaagag

SEQ ID NO: 3390133 - RNA, 16 nt, Human
gaaaaggccaagaggu

SEQ ID NO: 3390134 - RNA, 13 nt, Human
gaaaaggccuggg

SEQ ID NO: 3390135 - RNA, 14 nt, Human
gaaaaggccugggg

SEQ ID NO: 3390136 - RNA, 18 nt, Human
gaaaagggaacaggaaaa

SEQ ID NO: 3390137 - RNA, 19 nt, Human
gaaaagggaaguugugccu

SEQ ID NO: 3390138 - RNA, 17 nt, Human
gaaaagguuuaugaaaa

SEQ ID NO: 3390139 - RNA, 18 nt, Human
gaaaagguuuuauuuugu

SEQ ID NO: 3390140 - RNA, 16 nt, Human
gaaaaguaauauuuau

SEQ ID NO: 3390141 - RNA, 23 nt, Human
gaaaaguagacaaucauuguuuu

SEQ ID NO: 3390142 - RNA, 20 nt, Human
gaaaaguauauugauaaccu

SEQ ID NO: 3390143 - RNA, 20 nt, Human
gaaaaguauguuagugcaaa

SEQ ID NO: 3390144 - RNA, 15 nt, Human
gaaaaguauguucua

SEQ ID NO: 3390145 - RNA, 14 nt, Human
gaaaaguauuuuga

SEQ ID NO: 3390146 - RNA, 17 nt, Human
gaaaaguauuuugaagu

SEQ ID NO: 3390147 - RNA, 19 nt, Human
gaaaagugcauauuuaucc

SEQ ID NO: 3390148 - RNA, 19 nt, Human
gaaaaguggcaagaccaaa

SEQ ID NO: 3390149 - RNA, 14 nt, Human
gaaaaguugaauuu

SEQ ID NO: 3390150 - RNA, 22 nt, Human
gaaaaguuuaauauuaaagcca

SEQ ID NO: 3390151 - RNA, 23 nt, Human
gaaaaguuuaauauuaaagccau

SEQ ID NO: 3390152 - RNA, 14 nt, Human
gaaaaguuuauaaa

SEQ ID NO: 3390153 - RNA, 18 nt, Human
gaaaauaaaaaaaagaaa

SEQ ID NO: 3390154 - RNA, 19 nt, Human
gaaaauaaaaaaaagaaaa

SEQ ID NO: 3390155 - RNA, 19 nt, Human
gaaaauaaaaaaagaaaaa

SEQ ID NO: 3390156 - RNA, 14 nt, Human
gaaaauaaaaaguu

SEQ ID NO: 3390157 - RNA, 17 nt, Human
gaaaauaaaaaguuaaa

SEQ ID NO: 3390158 - RNA, 12 nt, Human
gaaaauaaaauu

SEQ ID NO: 3390159 - RNA, 12 nt, Human
gaaaauaaagaa

SEQ ID NO: 3390160 - RNA, 17 nt, Human
gaaaauaacugaauuug

SEQ ID NO: 3390161 - RNA, 19 nt, Human
gaaaauaagccaugagaau

SEQ ID NO: 3390162 - RNA, 19 nt, Human
gaaaauaagugaauaauaa

SEQ ID NO: 3390163 - RNA, 18 nt, Human
gaaaauaauguaauugua

SEQ ID NO: 3390164 - RNA, 21 nt, Human
gaaaauacuuaaauguuaugu

SEQ ID NO: 3390165 - RNA, 17 nt, Human
gaaaauagaauugacau

SEQ ID NO: 3390166 - RNA, 17 nt, Human
gaaaauaggcaggaagc

SEQ ID NO: 3390167 - RNA, 13 nt, Human
gaaaauaggcuuu

SEQ ID NO: 3390168 - RNA, 19 nt, Human
gaaaauaguuuauuuuaaa

SEQ ID NO: 3390169 - RNA, 23 nt, Human
gaaaauaguuuauuuuaaaacaa

SEQ ID NO: 3390170 - RNA, 16 nt, Human
gaaaauauaaccagcc

SEQ ID NO: 3390171 - RNA, 17 nt, Human
gaaaauauacuguaaag

SEQ ID NO: 3390172 - RNA, 22 nt, Human
gaaaauaucugcucaaaacuuu

SEQ ID NO: 3390173 - RNA, 12 nt, Human
gaaaauaugcau

SEQ ID NO: 3390174 - RNA, 13 nt, Human
gaaaauauguauu

SEQ ID NO: 3390175 - RNA, 18 nt, Human
gaaaauauguauuaacac

SEQ ID NO: 3390176 - RNA, 22 nt, Human
gaaaauauuguuuuacaauagu

SEQ ID NO: 3390177 - RNA, 19 nt, Human
gaaaauauuuugaucuuca

SEQ ID NO: 3390178 - RNA, 20 nt, Human
gaaaauauuuugaucuucaa

SEQ ID NO: 3390179 - RNA, 23 nt, Human
gaaaauauuuugaucuucaacaa

SEQ ID NO: 3390180 - RNA, 17 nt, Human
gaaaauauuuugucuaa

SEQ ID NO: 3390181 - RNA, 18 nt, Human
gaaaauauuuuuuauaua

SEQ ID NO: 3390182 - RNA, 15 nt, Human
gaaaaucaaauacau

SEQ ID NO: 3390183 - RNA, 17 nt, Human
gaaaaucacuuugucua

SEQ ID NO: 3390184 - RNA, 18 nt, Human
gaaaaucacuuugucuaa

SEQ ID NO: 3390185 - RNA, 18 nt, Human
gaaaaucagccugcucca

SEQ ID NO: 3390186 - RNA, 21 nt, Human
gaaaaucaucaagaagggcug

SEQ ID NO: 3390187 - RNA, 22 nt, Human
gaaaaucaucaagaagggcugc

SEQ ID NO: 3390188 - RNA, 13 nt, Human
gaaaauccucugg

SEQ ID NO: 3390189 - RNA, 14 nt, Human
gaaaaugaaaaaca

SEQ ID NO: 3390190 - RNA, 15 nt, Human
gaaaaugaaaauuag

SEQ ID NO: 3390191 - RNA, 18 nt, Human
gaaaaugaaaauuaggau

SEQ ID NO: 3390192 - RNA, 20 nt, Human
gaaaaugaauaucuauuaau

SEQ ID NO: 3390193 - RNA, 21 nt, Human
gaaaaugaguugugaaaguuu

SEQ ID NO: 3390194 - RNA, 23 nt, Human
gaaaaugaguuuuuauggggcug

SEQ ID NO: 3390195 - RNA, 23 nt, Human
gaaaaugauguguacccaaacgu

SEQ ID NO: 3390196 - RNA, 15 nt, Human
gaaaaugcgguuaua

SEQ ID NO: 3390197 - RNA, 22 nt, Human
gaaaauggucgagaaagaggca

SEQ ID NO: 3390198 - RNA, 15 nt, Human
gaaaauguaugugua

SEQ ID NO: 3390199 - RNA, 22 nt, Human
gaaaaugucagaaaccaguuau

SEQ ID NO: 3390200 - RNA, 14 nt, Human
gaaaauguccagga

SEQ ID NO: 3390201 - RNA, 22 nt, Human
gaaaaugucuguaauaauagac

SEQ ID NO: 3390202 - RNA, 15 nt, Human
gaaaauguucuguuu

SEQ ID NO: 3390203 - RNA, 15 nt, Human
gaaaauguugagaau

SEQ ID NO: 3390204 - RNA, 20 nt, Human
gaaaauguugagaaucccaa

SEQ ID NO: 3390205 - RNA, 20 nt, Human
gaaaauuaagggccgauuua

SEQ ID NO: 3390206 - RNA, 23 nt, Human
gaaaauuaagggccgauuuaauu

SEQ ID NO: 3390207 - RNA, 16 nt, Human
gaaaauuagacuguga

SEQ ID NO: 3390208 - RNA, 23 nt, Human
gaaaauuauuuaaaccgcuaaaa

SEQ ID NO: 3390209 - RNA, 17 nt, Human
gaaaauuauuuuaaaca

SEQ ID NO: 3390210 - RNA, 20 nt, Human
gaaaauuauuuuguucauac

SEQ ID NO: 3390211 - RNA, 21 nt, Human
gaaaauuauuuuguucauaca

SEQ ID NO: 3390212 - RNA, 23 nt, Human
gaaaauuauuuuguucauacaua

SEQ ID NO: 3390213 - RNA, 17 nt, Human
gaaaauucaaaaagugu

SEQ ID NO: 3390214 - RNA, 20 nt, Human
gaaaauuccagaaaggauau

SEQ ID NO: 3390215 - RNA, 21 nt, Human
gaaaauuccuauugauuuucu

SEQ ID NO: 3390216 - RNA, 13 nt, Human
gaaaauucugugc

SEQ ID NO: 3390217 - RNA, 21 nt, Human
gaaaauugccuuucuguguuu

SEQ ID NO: 3390218 - RNA, 16 nt, Human
gaaaauugcugugccu

SEQ ID NO: 3390219 - RNA, 22 nt, Human
gaaaauugcugugccucccaaa

SEQ ID NO: 3390220 - RNA, 23 nt, Human
gaaacaaaaacacuaaaaauaaa

SEQ ID NO: 3390221 - RNA, 21 nt, Human
gaaacaaaguggaaggaaaga

SEQ ID NO: 3390222 - RNA, 23 nt, Human
gaaacaaaguggaaggaaagaug

SEQ ID NO: 3390223 - RNA, 16 nt, Human
gaaacaacauuuauau

SEQ ID NO: 3390224 - RNA, 16 nt, Human
gaaacaaccaugucau

SEQ ID NO: 3390225 - RNA, 17 nt, Human
gaaacaacucuuugaga

SEQ ID NO: 3390226 - RNA, 20 nt, Human
gaaacaacucuuugagaaac

SEQ ID NO: 3390227 - RNA, 15 nt, Human
gaaacaauaaagaga

SEQ ID NO: 3390228 - RNA, 21 nt, Human
gaaacaauacucauaauguga

SEQ ID NO: 3390229 - RNA, 17 nt, Human
gaaacacaccaggcugu

SEQ ID NO: 3390230 - RNA, 16 nt, Human
gaaacacacugaggca

SEQ ID NO: 3390231 - RNA, 16 nt, Human
cuuuugaauuguuaca

SEQ ID NO: 3390232 - RNA, 18 nt, Human
cuuuugacuuaaagcaga

SEQ ID NO: 3390233 - RNA, 18 nt, Human
cuuuugagacuuuuuggu

SEQ ID NO: 3390234 - RNA, 20 nt, Human
cuuuugagacuuuuuggugg

SEQ ID NO: 3390235 - RNA, 23 nt, Human
cuuuugagugugugugugcaugu

SEQ ID NO: 3390236 - RNA, 23 nt, Human
cuuuugauaaucaacugggcuga

SEQ ID NO: 3390237 - RNA, 13 nt, Human
cuuuugauauuaa

SEQ ID NO: 3390238 - RNA, 20 nt, Human
cuuuugcaaagaaagaaaaa

SEQ ID NO: 3390239 - RNA, 18 nt, Human
cuuuugcaacuuaauacu

SEQ ID NO: 3390240 - RNA, 18 nt, Human
cuuuugcaagguuccaca

SEQ ID NO: 3390241 - RNA, 18 nt, Human
cuuuugcaccccucccau

SEQ ID NO: 3390242 - RNA, 20 nt, Human
cuuuugcaccccucccauua

SEQ ID NO: 3390243 - RNA, 19 nt, Human
cuuuugcaccugcucucuu

SEQ ID NO: 3390244 - RNA, 13 nt, Human
cuuuugccauuga

SEQ ID NO: 3390245 - RNA, 17 nt, Human
cuuuugcccauuuugaa

SEQ ID NO: 3390246 - RNA, 22 nt, Human
cuuuugcucgaugcagacaggg

SEQ ID NO: 3390247 - RNA, 22 nt, Human
cuuuugcucuuagcugucugcu

SEQ ID NO: 3390248 - RNA, 14 nt, Human
cuuuugcuuuaauu

SEQ ID NO: 3390249 - RNA, 23 nt, Human
cuuuugcuuuuccuuuguuuuua

SEQ ID NO: 3390250 - RNA, 16 nt, Human
cuuuugcuuuugccca

SEQ ID NO: 3390251 - RNA, 18 nt, Human
cuuuuggaagguauuuaa

SEQ ID NO: 3390252 - RNA, 18 nt, Human
cuuuuggaaucuagaaga

SEQ ID NO: 3390253 - RNA, 19 nt, Human
cuuuuggauuggacaaaau

SEQ ID NO: 3390254 - RNA, 23 nt, Human
cuuuuggauuggacaaaaugacu

SEQ ID NO: 3390255 - RNA, 23 nt, Human
cuuuuggcaaugacucaaagucu

SEQ ID NO: 3390256 - RNA, 15 nt, Human
cuuuugguguguugg

SEQ ID NO: 3390257 - RNA, 17 nt, Human
cuuuugguguguuggac

SEQ ID NO: 3390258 - RNA, 19 nt, Human
cuuuugguucauuuucaga

SEQ ID NO: 3390259 - RNA, 21 nt, Human
cuuuuguaaagaaauuuacua

SEQ ID NO: 3390260 - RNA, 12 nt, Human
cuuuuguaaagu

SEQ ID NO: 3390261 - RNA, 19 nt, Human
cuuuuguaaagugaagaau

SEQ ID NO: 3390262 - RNA, 14 nt, Human
cuuuuguaaauuaa

SEQ ID NO: 3390263 - RNA, 20 nt, Human
gaaacagcuuucaagugccu

SEQ ID NO: 3390264 - RNA, 21 nt, Human
gaaacagcuuucaagugccuu

SEQ ID NO: 3390265 - RNA, 17 nt, Human
gaaacaguugcauguag

SEQ ID NO: 3390266 - RNA, 20 nt, Human
gaaacaguugcauguaguaa

SEQ ID NO: 3390267 - RNA, 17 nt, Human
gaaacauaaauaaaaug

SEQ ID NO: 3390268 - RNA, 22 nt, Human
gaaacauaaauaaaaugaccag

SEQ ID NO: 3390269 - RNA, 16 nt, Human
gaaacauugcuuuuaa

SEQ ID NO: 3390270 - RNA, 17 nt, Human
gaaacauugcuuuuaaa

SEQ ID NO: 3390271 - RNA, 14 nt, Human
gaaacauuuauauu

SEQ ID NO: 3390272 - RNA, 13 nt, Human
gaaacauuuucau

SEQ ID NO: 3390273 - RNA, 15 nt, Human
gaaaccaaagaagaa

SEQ ID NO: 3390274 - RNA, 22 nt, Human
gaaaccaauuccucauccucag

SEQ ID NO: 3390275 - RNA, 14 nt, Human
gaaaccacagcugc

SEQ ID NO: 3390276 - RNA, 15 nt, Human
gaaaccacagcugcu

SEQ ID NO: 3390277 - RNA, 19 nt, Human
gaaaccagcuuccuucaga

SEQ ID NO: 3390278 - RNA, 21 nt, Human
gaaaccagcuuccuucagaga

SEQ ID NO: 3390279 - RNA, 19 nt, Human
gaaaccaguguagccuugc

SEQ ID NO: 3390280 - RNA, 23 nt, Human
gaaaccauguagcagugagucau

SEQ ID NO: 3390281 - RNA, 14 nt, Human
gaaacccaagcucc

SEQ ID NO: 3390282 - RNA, 17 nt, Human
gaaacccaagcuccucc

SEQ ID NO: 3390283 - RNA, 15 nt, Human
gaaacccagcucugg

SEQ ID NO: 3390284 - RNA, 16 nt, Human
gaaacccauaggccca

SEQ ID NO: 3390285 - RNA, 15 nt, Human
gaaacccccacacac

SEQ ID NO: 3390286 - RNA, 23 nt, Human
gaaacccccacacacacacacau

SEQ ID NO: 3390287 - RNA, 16 nt, Human
gaaacccgacagaggg

SEQ ID NO: 3390288 - RNA, 15 nt, Human
gaaacccgaggguug

SEQ ID NO: 3390289 - RNA, 18 nt, Human
gaaacccgaggguugauu

SEQ ID NO: 3390290 - RNA, 22 nt, Human
gaaacccgucucuacuaaaaau

SEQ ID NO: 3390291 - RNA, 15 nt, Human
gaaacccuauuuccc

SEQ ID NO: 3390292 - RNA, 15 nt, Human
gaaacccugagcaga

SEQ ID NO: 3390293 - RNA, 14 nt, Human
gaaacccuggacca

SEQ ID NO: 3390294 - RNA, 21 nt, Human
gaaaccgaguagaaaauguga

SEQ ID NO: 3390295 - RNA, 21 nt, Human
gaaaccgccuaguuuacuguu

SEQ ID NO: 3390296 - RNA, 19 nt, Human
gaaaccuacugcccaggca

SEQ ID NO: 3390297 - RNA, 17 nt, Human
gaaaccuaguacugccc

SEQ ID NO: 3390298 - RNA, 17 nt, Human
gaaaccugcccugccug

SEQ ID NO: 3390299 - RNA, 20 nt, Human
gaaaccuguauaacccuguu

SEQ ID NO: 3390300 - RNA, 15 nt, Human
gaaaccuguaucuuu

SEQ ID NO: 3390301 - RNA, 13 nt, Human
gaaaccuuaauau

SEQ ID NO: 3390302 - RNA, 17 nt, Human
gaaaccuuauuguaccu

SEQ ID NO: 3390303 - RNA, 22 nt, Human
gaaaccuuauuuuuucccaaag

SEQ ID NO: 3390304 - RNA, 15 nt, Human
gaaaccuuccaccca

SEQ ID NO: 3390305 - RNA, 16 nt, Human
gaaaccuuuaagaaaa

SEQ ID NO: 3390306 - RNA, 17 nt, Human
gaaaccuuuagggcagc

SEQ ID NO: 3390307 - RNA, 21 nt, Human
gaaaccuuuagggcagcuugc

SEQ ID NO: 3390308 - RNA, 20 nt, Human
gaaaccuuuucuuguaucug

SEQ ID NO: 3390309 - RNA, 18 nt, Human
gaaaccuuuuuuaagauu

SEQ ID NO: 3390310 - RNA, 19 nt, Human
gaaaccuuuuuuaagauuu

SEQ ID NO: 3390311 - RNA, 20 nt, Human
gaaaccuuuuuuaagauuuu

SEQ ID NO: 3390312 - RNA, 21 nt, Human
gaaaccuuuuuuaagauuuuu

SEQ ID NO: 3390313 - RNA, 22 nt, Human
gaaaccuuuuuuaagauuuuuc

SEQ ID NO: 3390314 - RNA, 21 nt, Human
gaaacgagacuuuccauuaca

SEQ ID NO: 3390315 - RNA, 16 nt, Human
gaaacggaugauuucu

SEQ ID NO: 3390316 - RNA, 18 nt, Human
gaaacggaugauuucuau

SEQ ID NO: 3390317 - RNA, 19 nt, Human
gaaacuaaagcaauagaaa

SEQ ID NO: 3390318 - RNA, 22 nt, Human
gaaacuaaagcaauagaaacaa

SEQ ID NO: 3390319 - RNA, 15 nt, Human
gaaacuaacagauaa

SEQ ID NO: 3390320 - RNA, 12 nt, Human
gaaacuaauaaa

SEQ ID NO: 3390321 - RNA, 15 nt, Human
gaaacuaauaaaaua

SEQ ID NO: 3390322 - RNA, 17 nt, Human
gaaacuaauaaaauauu

SEQ ID NO: 3390323 - RNA, 18 nt, Human
gaaacuaauaaaauauuu

SEQ ID NO: 3390324 - RNA, 19 nt, Human
gaaacuaauaaaauauuuu

SEQ ID NO: 3390325 - RNA, 20 nt, Human
gaaacuaauaaaauauuuuc

SEQ ID NO: 3390326 - RNA, 23 nt, Human
gaaacuaauaaaauauuuucugu

SEQ ID NO: 3390327 - RNA, 19 nt, Human
gaaacuacugccuuuagaa

SEQ ID NO: 3390328 - RNA, 24 nt, Human
gaaacuagcuuacaugagaacaga

SEQ ID NO: 3390329 - RNA, 20 nt, Human
gaaacuaggugcauauuuau

SEQ ID NO: 3390330 - RNA, 19 nt, Human
gaaacuauauuuugucaua

SEQ ID NO: 3390331 - RNA, 20 nt, Human
gaaacuauguguuuuucuca

SEQ ID NO: 3390332 - RNA, 21 nt, Human
gaaacucacacuccccuaggg

SEQ ID NO: 3390333 - RNA, 19 nt, Human
gaaacucaccugcuggccc

SEQ ID NO: 3390334 - RNA, 23 nt, Human
gaaacucaccugcuggccccuca

SEQ ID NO: 3390335 - RNA, 22 nt, Human
gaaacucagagucggaacggag

SEQ ID NO: 3390336 - RNA, 21 nt, Human
gaaacuccaccuugcggggau

SEQ ID NO: 3390337 - RNA, 15 nt, Human
gaaacuccagaugcc

SEQ ID NO: 3390338 - RNA, 17 nt, Human
gaaacucuauggucuua

SEQ ID NO: 3390339 - RNA, 14 nt, Human
gaaacucuuaucuc

SEQ ID NO: 3390340 - RNA, 19 nt, Human
gaaacucuuuuugggcucc

SEQ ID NO: 3390341 - RNA, 14 nt, Human
gaaacugaaugcuc

SEQ ID NO: 3390342 - RNA, 16 nt, Human
gaaacugacacaugcu

SEQ ID NO: 3390343 - RNA, 18 nt, Human
gaaacugaggaauuuucu

SEQ ID NO: 3390344 - RNA, 15 nt, Human
gaaacugcagggaaa

SEQ ID NO: 3390345 - RNA, 22 nt, Human
gaaacuggaaauacuagauuug

SEQ ID NO: 3390346 - RNA, 17 nt, Human
gaaacuggcaaagcaga

SEQ ID NO: 3390347 - RNA, 21 nt, Human
gaaacuguucccaccugcugg

SEQ ID NO: 3390348 - RNA, 17 nt, Human
gaaacuguugccagaga

SEQ ID NO: 3390349 - RNA, 14 nt, Human
gaaacuuacacaca

SEQ ID NO: 3390350 - RNA, 21 nt, Human
gaaacuuauuuuuuucugauu

SEQ ID NO: 3390351 - RNA, 17 nt, Human
gaaacuucaagcaccag

SEQ ID NO: 3390352 - RNA, 23 nt, Human
gaaacuucagcgguuuauauaag

SEQ ID NO: 3390353 - RNA, 12 nt, Human
gaaacuuggcuc

SEQ ID NO: 3390354 - RNA, 21 nt, Human
gaaacuugucacuugcauguc

SEQ ID NO: 3390355 - RNA, 16 nt, Human
gaaacuuguguaaaua

SEQ ID NO: 3390356 - RNA, 20 nt, Human
gaaacuuguuauugugaaug

SEQ ID NO: 3390357 - RNA, 17 nt, Human
gaaacuuguuucacuga

SEQ ID NO: 3390358 - RNA, 19 nt, Human
gaaacuuugagaucuaaaa

SEQ ID NO: 3390359 - RNA, 11 nt, Human
gaaacuuuucu

SEQ ID NO: 3390360 - RNA, 21 nt, Human
gaaacuuuucuuaaaaaguua

SEQ ID NO: 3390361 - RNA, 16 nt, Human
gaaacuuuuguaaaga

SEQ ID NO: 3390362 - RNA, 17 nt, Human
gaaagaaaauaugcauc

SEQ ID NO: 3390363 - RNA, 15 nt, Human
gaaagaaagaaggaa

SEQ ID NO: 3390364 - RNA, 15 nt, Human
gaaagaaagaggaaa

SEQ ID NO: 3390365 - RNA, 14 nt, Human
gaaagaaaucaugu

SEQ ID NO: 3390366 - RNA, 23 nt, Human
gaaagaacauggacuuguauauu

SEQ ID NO: 3390367 - RNA, 20 nt, Human
gaaagaacuaucuucaucug

SEQ ID NO: 3390368 - RNA, 16 nt, Human
gaaagaagaaaagguu

SEQ ID NO: 3390369 - RNA, 15 nt, Human
gaaagaagagacagg

SEQ ID NO: 3390370 - RNA, 13 nt, Human
gaaagaaggaaga

SEQ ID NO: 3390371 - RNA, 16 nt, Human
gaaagaaggcaaaguc

SEQ ID NO: 3390372 - RNA, 12 nt, Human
gaaagaauagaa

SEQ ID NO: 3390373 - RNA, 14 nt, Human
gaaagaauagaaag

SEQ ID NO: 3390374 - RNA, 12 nt, Human
cuacagaaaaac

SEQ ID NO: 3390375 - RNA, 13 nt, Human
cuacagaaaaacc

SEQ ID NO: 3390376 - RNA, 23 nt, Human
cuacagaaaaaccagaggcagcu

SEQ ID NO: 3390377 - RNA, 14 nt, Human
cuacagaaaaaccu

SEQ ID NO: 3390378 - RNA, 22 nt, Human
cuacagaaaugaggaggaugcu

SEQ ID NO: 3390379 - RNA, 20 nt, Human
cuacagaacuucagaaagac

SEQ ID NO: 3390380 - RNA, 22 nt, Human
cuacagaauacuagccagagcu

SEQ ID NO: 3390381 - RNA, 17 nt, Human
cuacagacauuaaauaa

SEQ ID NO: 3390382 - RNA, 14 nt, Human
cuacagagaaacca

SEQ ID NO: 3390383 - RNA, 13 nt, Human
cuacagagaagcc

SEQ ID NO: 3390384 - RNA, 15 nt, Human
cuacagagaagccuu

SEQ ID NO: 3390385 - RNA, 22 nt, Human
cuacagagaggaaauucuccac

SEQ ID NO: 3390386 - RNA, 12 nt, Human
cuacagagcugu

SEQ ID NO: 3390387 - RNA, 13 nt, Human
cuacagagcugug

SEQ ID NO: 3390388 - RNA, 14 nt, Human
cuacagagcugugg

SEQ ID NO: 3390389 - RNA, 16 nt, Human
cuacagagcuucccug

SEQ ID NO: 3390390 - RNA, 18 nt, Human
cuacagagcuucccugac

SEQ ID NO: 3390391 - RNA, 21 nt, Human
cuacagaggaaacaauauuua

SEQ ID NO: 3390392 - RNA, 21 nt, Human
cuacagcuaaucagcauucuc

SEQ ID NO: 3390393 - RNA, 14 nt, Human
cuacagcuaugaag

SEQ ID NO: 3390394 - RNA, 16 nt, Human
cuacagcuaugaagaa

SEQ ID NO: 3390395 - RNA, 17 nt, Human
cuacagcuaugaagaaa

SEQ ID NO: 3390396 - RNA, 14 nt, Human
cuacagcuccccca

SEQ ID NO: 3390397 - RNA, 17 nt, Human
cuacagcuuucuugcuc

SEQ ID NO: 3390398 - RNA, 19 nt, Human
cuacagcuuucuugcuccc

SEQ ID NO: 3390399 - RNA, 20 nt, Human
cuacaggaagcaccccaugc

SEQ ID NO: 3390400 - RNA, 14 nt, Human
cuacaggagugagc

SEQ ID NO: 3390401 - RNA, 16 nt, Human
cuacaggagugagcac

SEQ ID NO: 3390402 - RNA, 17 nt, Human
cuacaggcagucucucu

SEQ ID NO: 3390403 - RNA, 14 nt, Human
cuacaggggccaga

SEQ ID NO: 3390404 - RNA, 11 nt, Human
cuacagguuac

SEQ ID NO: 3390405 - RNA, 14 nt, Human
cuacagguuacaac

SEQ ID NO: 3390406 - RNA, 22 nt, Human
cuacaguauuacucuuacaaga

SEQ ID NO: 3390407 - RNA, 18 nt, Human
cuacagucaggaaaggaa

SEQ ID NO: 3390408 - RNA, 13 nt, Human
cuacaguccuccc

SEQ ID NO: 3390409 - RNA, 16 nt, Human
cuacaguccucccauc

SEQ ID NO: 3390410 - RNA, 17 nt, Human
cuacaguccucccaucu

SEQ ID NO: 3390411 - RNA, 19 nt, Human
cuacaguccucccaucuca

SEQ ID NO: 3390412 - RNA, 20 nt, Human
cuacaguccucccaucucac

SEQ ID NO: 3390413 - RNA, 16 nt, Human
cuacagugguuuuaua

SEQ ID NO: 3390414 - RNA, 13 nt, Human
cuacaguguacag

SEQ ID NO: 3390415 - RNA, 20 nt, Human
cuacaguguacagucuugua

SEQ ID NO: 3390416 - RNA, 21 nt, Human
cuacaguuauguucagucaca

SEQ ID NO: 3390417 - RNA, 22 nt, Human
cuacaguugaaaaacagcugag

SEQ ID NO: 3390418 - RNA, 13 nt, Human
cuuuuguaagaca

SEQ ID NO: 3390419 - RNA, 12 nt, Human
cuuuuguacuga

SEQ ID NO: 3390420 - RNA, 23 nt, Human
cuuuuguacugaauuuuuuugua

SEQ ID NO: 3390421 - RNA, 12 nt, Human
cuuuuguauaca

SEQ ID NO: 3390422 - RNA, 19 nt, Human
cuuuuguauacauccuggg

SEQ ID NO: 3390423 - RNA, 15 nt, Human
cuuuuguauguaaau

SEQ ID NO: 3390424 - RNA, 20 nt, Human
cuuuuguauguaaaugugca

SEQ ID NO: 3390425 - RNA, 21 nt, Human
cuuuuguauguaaaugugcau

SEQ ID NO: 3390426 - RNA, 23 nt, Human
cuuuuguauguaaaugugcauuc

SEQ ID NO: 3390427 - RNA, 14 nt, Human
cuuuuguauuaaga

SEQ ID NO: 3390428 - RNA, 17 nt, Human
cuuuuguauuaagaaag

SEQ ID NO: 3390429 - RNA, 19 nt, Human
cuuuugucuacacacccug

SEQ ID NO: 3390430 - RNA, 17 nt, Human
cuuuugucuaugggacu

SEQ ID NO: 3390431 - RNA, 15 nt, Human
cuuuugucucugcaa

SEQ ID NO: 3390432 - RNA, 12 nt, Human
cuuuugugcauu

SEQ ID NO: 3390433 - RNA, 18 nt, Human
cuuuugugcauuaucuag

SEQ ID NO: 3390434 - RNA, 21 nt, Human
cuuuugugggggacuguaagu

SEQ ID NO: 3390435 - RNA, 13 nt, Human
cuuuugugucuua

SEQ ID NO: 3390436 - RNA, 14 nt, Human
cuuuuguguuccaa

SEQ ID NO: 3390437 - RNA, 18 nt, Human
cuuuuguuaaauaauaug

SEQ ID NO: 3390438 - RNA, 12 nt, Human
cuuuuguuacug

SEQ ID NO: 3390439 - RNA, 15 nt, Human
cuuuuguuacuguuc

SEQ ID NO: 3390440 - RNA, 16 nt, Human
cuuuuguuacuguucu

SEQ ID NO: 3390441 - RNA, 16 nt, Human
cuuuuguucauuucau

SEQ ID NO: 3390442 - RNA, 22 nt, Human
cuuuuguucuugguuuguaaau

SEQ ID NO: 3390443 - RNA, 12 nt, Human
cuuuuguuguug

SEQ ID NO: 3390444 - RNA, 15 nt, Human
cuuuuguuguuucuu

SEQ ID NO: 3390445 - RNA, 17 nt, Human
cuuuuguuguuucuuaa

SEQ ID NO: 3390446 - RNA, 16 nt, Human
cuuuuguuuccuuuuu

SEQ ID NO: 3390447 - RNA, 19 nt, Human
cuuuuguuuccuuuuuucc

SEQ ID NO: 3390448 - RNA, 17 nt, Human
cuuuuguuuuuugaagu

SEQ ID NO: 3390449 - RNA, 19 nt, Human
cuuuuguuuuuugaagugu

SEQ ID NO: 3390450 - RNA, 21 nt, Human
cuuuuuaaaaauuguuauuua

SEQ ID NO: 3390451 - RNA, 17 nt, Human
cuuuuuaaaacacaugu

SEQ ID NO: 3390452 - RNA, 22 nt, Human
cuuuuuaaaagguauuuugaau

SEQ ID NO: 3390453 - RNA, 17 nt, Human
cuuuuuaagcuuauuua

SEQ ID NO: 3390454 - RNA, 15 nt, Human
cuuuuuaaguaaugu

SEQ ID NO: 3390455 - RNA, 17 nt, Human
cuuuuuaauucaccaaa

SEQ ID NO: 3390456 - RNA, 23 nt, Human
cuuuuuaauuguuguuucuuucu

SEQ ID NO: 3390457 - RNA, 18 nt, Human
cuuuuuacauaacugccu

SEQ ID NO: 3390458 - RNA, 20 nt, Human
cuuuuuaccaaguuucaggu

SEQ ID NO: 3390459 - RNA, 21 nt, Human
cuuuuuaguuuacccgguuuc

SEQ ID NO: 3390460 - RNA, 11 nt, Human
cuuuuuauaaa

SEQ ID NO: 3390461 - RNA, 18 nt, Human
cuuuuuauaaaaagauaa

SEQ ID NO: 3390462 - RNA, 22 nt, Human
cuuuuuauguugccaguuuaau

SEQ ID NO: 3390463 - RNA, 14 nt, Human
cuuuuuauugaauc

SEQ ID NO: 3390464 - RNA, 19 nt, Human
cuuuuuauugaaucuauuu

SEQ ID NO: 3390465 - RNA, 11 nt, Human
cuuuuuauugc

SEQ ID NO: 3390466 - RNA, 18 nt, Human
cuuuuuauuuauauguau

SEQ ID NO: 3390467 - RNA, 13 nt, Human
cuuuuuauuucug

SEQ ID NO: 3390468 - RNA, 18 nt, Human
cuuuuuauuuuuuaauua

SEQ ID NO: 3390469 - RNA, 20 nt, Human
cuuuuucaaugaauuuuaua

SEQ ID NO: 3390470 - RNA, 15 nt, Human
cuuuuucauccccuu

SEQ ID NO: 3390471 - RNA, 16 nt, Human
cuuuuucauccccuua

SEQ ID NO: 3390472 - RNA, 12 nt, Human
cuuuuucauuau

SEQ ID NO: 3390473 - RNA, 14 nt, Human
cuuuuucauuauuu

SEQ ID NO: 3390474 - RNA, 21 nt, Human
cuuuuucauuauuuuauuaug

SEQ ID NO: 3390475 - RNA, 12 nt, Human
cuuuuucauuua

SEQ ID NO: 3390476 - RNA, 18 nt, Human
cuuuuucauuugccuauu

SEQ ID NO: 3390477 - RNA, 22 nt, Human
cuuuuuccaacucagaaauuca

SEQ ID NO: 3390478 - RNA, 23 nt, Human
cuuuuuccaacuuggcugcagga

SEQ ID NO: 3390479 - RNA, 17 nt, Human
cuuuuuccccuuucugu

SEQ ID NO: 3390480 - RNA, 18 nt, Human
cuuuuuccuagccuguuu

SEQ ID NO: 3390481 - RNA, 12 nt, Human
cuuuuucuaaug

SEQ ID NO: 3390482 - RNA, 20 nt, Human
cuuuuucuaaugaggagaga

SEQ ID NO: 3390483 - RNA, 17 nt, Human
cuuuuucucccucugga

SEQ ID NO: 3390484 - RNA, 18 nt, Human
cuuuuucugauuagcuuu

SEQ ID NO: 3390485 - RNA, 21 nt, Human
cuuuuucugauuagcuuugug

SEQ ID NO: 3390486 - RNA, 13 nt, Human
cuuuuucugcacu

SEQ ID NO: 3390487 - RNA, 12 nt, Human
cuuuuucuggac

SEQ ID NO: 3390488 - RNA, 16 nt, Human
cuuuuucuggacucug

SEQ ID NO: 3390489 - RNA, 15 nt, Human
cuuuuucuguuguaa

SEQ ID NO: 3390490 - RNA, 16 nt, Human
cuuuuucuguuguaac

SEQ ID NO: 3390491 - RNA, 17 nt, Human
cuuuuucuguuguaacu

SEQ ID NO: 3390492 - RNA, 15 nt, Human
cuuuuucuucuuccc

SEQ ID NO: 3390493 - RNA, 16 nt, Human
cuuuuucuuuauaaac

SEQ ID NO: 3390494 - RNA, 18 nt, Human
cuuuuucuuuauaaacuu

SEQ ID NO: 3390495 - RNA, 15 nt, Human
cuuuuucuuuuguaa

SEQ ID NO: 3390496 - RNA, 21 nt, Human
cuuuuucuuuuuuucuuuggu

SEQ ID NO: 3390497 - RNA, 14 nt, Human
cuuuuugaaauguc

SEQ ID NO: 3390498 - RNA, 16 nt, Human
cuuuuugaaguauuua

SEQ ID NO: 3390499 - RNA, 13 nt, Human
cuuuuugaaucuu

SEQ ID NO: 3390500 - RNA, 22 nt, Human
cuuuuugauuacaguguagcuu

SEQ ID NO: 3390501 - RNA, 12 nt, Human
cuuuuugcagcu

SEQ ID NO: 3390502 - RNA, 14 nt, Human
cuuuuugcagcuuu

SEQ ID NO: 3390503 - RNA, 16 nt, Human
cuuuuugcucuaaaau

SEQ ID NO: 3390504 - RNA, 12 nt, Human
cuuuuuggaauc

SEQ ID NO: 3390505 - RNA, 18 nt, Human
cuuuuuggaaucuuugua

SEQ ID NO: 3390506 - RNA, 20 nt, Human
cuuuuuggcauaacauaaau

SEQ ID NO: 3390507 - RNA, 22 nt, Human
cuuuuuggcauaacauaaaucu

SEQ ID NO: 3390508 - RNA, 17 nt, Human
cuuuuugguggauguaa

SEQ ID NO: 3390509 - RNA, 19 nt, Human
cuuuuugguggauguaaau

SEQ ID NO: 3390510 - RNA, 18 nt, Human
cuuuuuguaagugagugu

SEQ ID NO: 3390511 - RNA, 13 nt, Human
cuuuuuguauaaa

SEQ ID NO: 3390512 - RNA, 17 nt, Human
cuuuuuguuguaaaaca

SEQ ID NO: 3390513 - RNA, 13 nt, Human
cuuuuuuaaauaa

SEQ ID NO: 3390514 - RNA, 17 nt, Human
cuuuuuuaaauaaacuu

SEQ ID NO: 3390515 - RNA, 15 nt, Human
cuuuuuuaaauaaau

SEQ ID NO: 3390516 - RNA, 17 nt, Human
cuuuuuuaaauauuuuc

SEQ ID NO: 3390517 - RNA, 15 nt, Human
cuuuuuuaaauuaau

SEQ ID NO: 3390518 - RNA, 21 nt, Human
cuuuuuuaaauuuucuucagu

SEQ ID NO: 3390519 - RNA, 15 nt, Human
cuuuuuuauacauaa

SEQ ID NO: 3390520 - RNA, 14 nt, Human
gaaagucuguccuu

SEQ ID NO: 3390521 - RNA, 16 nt, Human
gaaagucuguccuuga

SEQ ID NO: 3390522 - RNA, 21 nt, Human
gaaagucuugugacuagugcu

SEQ ID NO: 3390523 - RNA, 19 nt, Human
gaaagugaagcaaaucaga

SEQ ID NO: 3390524 - RNA, 16 nt, Human
gaaagugaauaaaaau

SEQ ID NO: 3390525 - RNA, 17 nt, Human
gaaagugaauaaaaauu

SEQ ID NO: 3390526 - RNA, 15 nt, Human
gaaagugaauaaacu

SEQ ID NO: 3390527 - RNA, 22 nt, Human
gaaagugagcaguguuagcuua

SEQ ID NO: 3390528 - RNA, 13 nt, Human
gaaagugaggaaa

SEQ ID NO: 3390529 - RNA, 17 nt, Human
gaaagugccuuucagga

SEQ ID NO: 3390530 - RNA, 22 nt, Human
gaaagugccuuucaggaucuau

SEQ ID NO: 3390531 - RNA, 21 nt, Human
gaaagugggaggucaggaaac

SEQ ID NO: 3390532 - RNA, 17 nt, Human
gaaagugggcaaaagcu

SEQ ID NO: 3390533 - RNA, 21 nt, Human
gaaagugggugagaugcugga

SEQ ID NO: 3390534 - RNA, 23 nt, Human
gaaagugggugagaugcuggaga

SEQ ID NO: 3390535 - RNA, 19 nt, Human
gaaaguggucuuaagaaau

SEQ ID NO: 3390536 - RNA, 12 nt, Human
gaaaguguaaag

SEQ ID NO: 3390537 - RNA, 13 nt, Human
gaaaguguaaagc

SEQ ID NO: 3390538 - RNA, 14 nt, Human
gaaaguguaaagca

SEQ ID NO: 3390539 - RNA, 23 nt, Human
gaaaguguaaagcauuccaacaa

SEQ ID NO: 3390540 - RNA, 15 nt, Human
gaaaguguaaauguu

SEQ ID NO: 3390541 - RNA, 23 nt, Human
gaaaguguauuuggaaauaaagu

SEQ ID NO: 3390542 - RNA, 23 nt, Human
gaaaguguguguaguuuuacuuu

SEQ ID NO: 3390543 - RNA, 17 nt, Human
gaaaguguuauuuuuca

SEQ ID NO: 3390544 - RNA, 13 nt, Human
gaaaguguucugu

SEQ ID NO: 3390545 - RNA, 17 nt, Human
gaaaguguucuguuaca

SEQ ID NO: 3390546 - RNA, 19 nt, Human
gaaaguguucuguuacaaa

SEQ ID NO: 3390547 - RNA, 14 nt, Human
gaaaguguuuccuu

SEQ ID NO: 3390548 - RNA, 18 nt, Human
gaaaguugcacggcugcu

SEQ ID NO: 3390549 - RNA, 17 nt, Human
gaaaguuguacaugaaa

SEQ ID NO: 3390550 - RNA, 14 nt, Human
gaaaguuuacagga

SEQ ID NO: 3390551 - RNA, 16 nt, Human
gaaaguuuacaggaaa

SEQ ID NO: 3390552 - RNA, 15 nt, Human
gaaaguuuuguaaaa

SEQ ID NO: 3390553 - RNA, 17 nt, Human
gaaaguuuuguaaaaga

SEQ ID NO: 3390554 - RNA, 11 nt, Human
gaaaguuuuuu

SEQ ID NO: 3390555 - RNA, 19 nt, Human
gaaaguuuuuuuuuauuau

SEQ ID NO: 3390556 - RNA, 14 nt, Human
gaaauaaaaaaguc

SEQ ID NO: 3390557 - RNA, 17 nt, Human
gaaauaaaaaagucucu

SEQ ID NO: 3390558 - RNA, 19 nt, Human
gaaauaaaaaagucucuau

SEQ ID NO: 3390559 - RNA, 20 nt, Human
gaaauaaaaaagucucuauu

SEQ ID NO: 3390560 - RNA, 22 nt, Human
gaaauaaaaaagucucuauuua

SEQ ID NO: 3390561 - RNA, 12 nt, Human
gaaauaaaagcu

SEQ ID NO: 3390562 - RNA, 18 nt, Human
gaaauaaaaggaagccaa

SEQ ID NO: 3390563 - RNA, 19 nt, Human
gaaauaaaaggaagccaaa

SEQ ID NO: 3390564 - RNA, 21 nt, Human
gaaauaaaagugaaugaaaga

SEQ ID NO: 3390565 - RNA, 23 nt, Human
gaaauaaaagugaaugaaagauu

SEQ ID NO: 3390566 - RNA, 16 nt, Human
gaaauaaaauauaucu

SEQ ID NO: 3390567 - RNA, 21 nt, Human
gaaauaaacgucuuaaauauu

SEQ ID NO: 3390568 - RNA, 17 nt, Human
gaaauaaaggaugugau

SEQ ID NO: 3390569 - RNA, 19 nt, Human
gaaauaaagucagauggaa

SEQ ID NO: 3390570 - RNA, 14 nt, Human
gaaauaaauagcua

SEQ ID NO: 3390571 - RNA, 21 nt, Human
gaaauaaauagcuauauccau

SEQ ID NO: 3390572 - RNA, 16 nt, Human
gaaauaacaaaaugga

SEQ ID NO: 3390573 - RNA, 16 nt, Human
gaaauaacaauguuaa

SEQ ID NO: 3390574 - RNA, 14 nt, Human
gaaaaaaagcaugu

SEQ ID NO: 3390575 - RNA, 19 nt, Human
gaaaaaaauaauuuuauga

SEQ ID NO: 3390576 - RNA, 14 nt, Human
gaaaaaaauacuau

SEQ ID NO: 3390577 - RNA, 13 nt, Human
gaaaaaaauguug

SEQ ID NO: 3390578 - RNA, 21 nt, Human
gaaaaaaauguuguuuccuaa

SEQ ID NO: 3390579 - RNA, 14 nt, Human
gaaaaaaauugaaa

SEQ ID NO: 3390580 - RNA, 19 nt, Human
gaaaaaaauugaaauguaa

SEQ ID NO: 3390581 - RNA, 19 nt, Human
gaaaaaacaccuagcuuua

SEQ ID NO: 3390582 - RNA, 21 nt, Human
gaaaaaagaaguguccgagaa

SEQ ID NO: 3390583 - RNA, 13 nt, Human
gaaaaaagaaugu

SEQ ID NO: 3390584 - RNA, 16 nt, Human
gaaaaaagagaaaaga

SEQ ID NO: 3390585 - RNA, 12 nt, Human
gaaaaaagcuuu

SEQ ID NO: 3390586 - RNA, 17 nt, Human
gaaaaaaguuccuuccu

SEQ ID NO: 3390587 - RNA, 14 nt, Human
gaaaaaaguuguag

SEQ ID NO: 3390588 - RNA, 12 nt, Human
gaaaaaauauau

SEQ ID NO: 3390589 - RNA, 19 nt, Human
gaaaaaaugauguucauuu

SEQ ID NO: 3390590 - RNA, 17 nt, Human
gaaaaaaugguagcauu

SEQ ID NO: 3390591 - RNA, 19 nt, Human
gaaaaaaugguagcauuuu

SEQ ID NO: 3390592 - RNA, 15 nt, Human
gaaaaacaauaagag

SEQ ID NO: 3390593 - RNA, 20 nt, Human
gaaaaacacauggggaaaaa

SEQ ID NO: 3390594 - RNA, 13 nt, Human
gaaaaacaggcac

SEQ ID NO: 3390595 - RNA, 18 nt, Human
gaaaaacaggcacuuggc

SEQ ID NO: 3390596 - RNA, 18 nt, Human
gaaaaaccagaggcagcu

SEQ ID NO: 3390597 - RNA, 23 nt, Human
gaaaaacucugggaaauaagaga

SEQ ID NO: 3390598 - RNA, 11 nt, Human
gaaaaagaaaa

SEQ ID NO: 3390599 - RNA, 23 nt, Human
gaaaaagaacaugcaguuugaaa

SEQ ID NO: 3390600 - RNA, 14 nt, Human
gaaaaagauguaca

SEQ ID NO: 3390601 - RNA, 17 nt, Human
gaaaaagcacaagaagc

SEQ ID NO: 3390602 - RNA, 14 nt, Human
gaaaaagcauguac

SEQ ID NO: 3390603 - RNA, 22 nt, Human
gaaaaagcauguacaguguucu

SEQ ID NO: 3390604 - RNA, 21 nt, Human
gaaaaaggacaggcagaaaga

SEQ ID NO: 3390605 - RNA, 21 nt, Human
gaaaaaggagcuuaccuccca

SEQ ID NO: 3390606 - RNA, 23 nt, Human
gaaaaagugauggagcagagcaa

SEQ ID NO: 3390607 - RNA, 14 nt, Human
gaaaaaguuuguuu

SEQ ID NO: 3390608 - RNA, 17 nt, Human
gaaaaauaaacacuaca

SEQ ID NO: 3390609 - RNA, 18 nt, Human
gaaaaauaaaucuguucu

SEQ ID NO: 3390610 - RNA, 20 nt, Human
gaaaaauagugucuuuguga

SEQ ID NO: 3390611 - RNA, 16 nt, Human
gaaaaauauaaaauua

SEQ ID NO: 3390612 - RNA, 17 nt, Human
gaaaaauauaaaauuau

SEQ ID NO: 3390613 - RNA, 19 nt, Human
gaaaaauauauacuaaaca

SEQ ID NO: 3390614 - RNA, 16 nt, Human
gaaaaauauuuaaugu

SEQ ID NO: 3390615 - RNA, 20 nt, Human
gaaaaauauuuaauguugaa

SEQ ID NO: 3390616 - RNA, 18 nt, Human
gaaaaauauuuauucauu

SEQ ID NO: 3390617 - RNA, 19 nt, Human
gaaaaaucacaauuuuuaa

SEQ ID NO: 3390618 - RNA, 16 nt, Human
gaaaaaucuaagugau

SEQ ID NO: 3390619 - RNA, 11 nt, Human
gaaaaaucuug

SEQ ID NO: 3390620 - RNA, 15 nt, Human
gaaaaaugaaagaug

SEQ ID NO: 3390621 - RNA, 16 nt, Human
gaaaaaugaaagauga

SEQ ID NO: 3390622 - RNA, 18 nt, Human
gaaaaaugaaagaugauu

SEQ ID NO: 3390623 - RNA, 16 nt, Human
gaaaaaugcuuugcuu

SEQ ID NO: 3390624 - RNA, 14 nt, Human
gaaaaauguaggag

SEQ ID NO: 3390625 - RNA, 14 nt, Human
gaaaaauguuagga

SEQ ID NO: 3390626 - RNA, 11 nt, Human
gaaaaauguuu

SEQ ID NO: 3390627 - RNA, 13 nt, Human
gaaaaauguuugu

SEQ ID NO: 3390628 - RNA, 17 nt, Human
gaaaaauuauugagcca

SEQ ID NO: 3390629 - RNA, 22 nt, Human
gaaaaauucaauaguaauauaa

SEQ ID NO: 3390630 - RNA, 16 nt, Human
gaaaaauuccacucaa

SEQ ID NO: 3390631 - RNA, 19 nt, Human
gaaaaauuggggaggaggg

SEQ ID NO: 3390632 - RNA, 20 nt, Human
gaaaaauuuaagcauuguuu

SEQ ID NO: 3390633 - RNA, 22 nt, Human
gaaaaauuuaagcauuguuugc

SEQ ID NO: 3390634 - RNA, 14 nt, Human
gaaaacaacaaaaa

SEQ ID NO: 3390635 - RNA, 22 nt, Human
gaaaacaauaacgauaaaagac

SEQ ID NO: 3390636 - RNA, 18 nt, Human
gaaaacacauuuuucuua

SEQ ID NO: 3390637 - RNA, 21 nt, Human
gaaaacacuguucucugcccu

SEQ ID NO: 3390638 - RNA, 24 nt, Human
gaaaacacuguucucugcccucca

SEQ ID NO: 3390639 - RNA, 11 nt, Human
gaaaacagaaa

SEQ ID NO: 3390640 - RNA, 16 nt, Human
gaaaacagaacacuua

SEQ ID NO: 3390641 - RNA, 21 nt, Human
gaaaacagaacaucauuagaa

SEQ ID NO: 3390642 - RNA, 19 nt, Human
gaaaacaggaaaaaaacuu

SEQ ID NO: 3390643 - RNA, 22 nt, Human
gaaaacaggacuuaaaaugaca

SEQ ID NO: 3390644 - RNA, 18 nt, Human
gaaaacaggcacugcccu

SEQ ID NO: 3390645 - RNA, 19 nt, Human
gaaaacaucuccuuagaaa

SEQ ID NO: 3390646 - RNA, 14 nt, Human
gaaaacaugcuaca

SEQ ID NO: 3390647 - RNA, 19 nt, Human
gaaaacaugcuacacacug

SEQ ID NO: 3390648 - RNA, 16 nt, Human
gaaaacauguuaauga

SEQ ID NO: 3390649 - RNA, 20 nt, Human
gaaaacauguuaaugacaau

SEQ ID NO: 3390650 - RNA, 11 nt, Human
gaaaacauugu

SEQ ID NO: 3390651 - RNA, 18 nt, Human
gaaaaccaaaaugacauc

SEQ ID NO: 3390652 - RNA, 15 nt, Human
gaaaaccagcucagc

SEQ ID NO: 3390653 - RNA, 22 nt, Human
gaaaaccagcuugcgaauaaca

SEQ ID NO: 3390654 - RNA, 13 nt, Human
gaaaacccagaga

SEQ ID NO: 3390655 - RNA, 14 nt, Human
gaaaacccagagag

SEQ ID NO: 3390656 - RNA, 20 nt, Human
gaaaacccccaaaccagaua

SEQ ID NO: 3390657 - RNA, 13 nt, Human
gaaaaccucuccu

SEQ ID NO: 3390658 - RNA, 11 nt, Human
gaaaaccuuuc

SEQ ID NO: 3390659 - RNA, 17 nt, Human
gaaaacgauuuaauuua

SEQ ID NO: 3390660 - RNA, 18 nt, Human
gaaaacgauuuaauuuau

SEQ ID NO: 3390661 - RNA, 22 nt, Human
gaaaacgcucucuacucugcuu

SEQ ID NO: 3390662 - RNA, 19 nt, Human
gaaaacgucuugcuuggga

SEQ ID NO: 3390663 - RNA, 14 nt, Human
gaaaacguggcugc

SEQ ID NO: 3390664 - RNA, 22 nt, Human
gaaaacguggcugcuucaagga

SEQ ID NO: 3390665 - RNA, 15 nt, Human
gaacuggccaagcug

SEQ ID NO: 3390666 - RNA, 18 nt, Human
gaacuggccaagcugagg

SEQ ID NO: 3390667 - RNA, 12 nt, Human
gaacuggguaaa

SEQ ID NO: 3390668 - RNA, 19 nt, Human
gaacuggguaaaugcaaag

SEQ ID NO: 3390669 - RNA, 18 nt, Human
gaacuguccagagagcaa

SEQ ID NO: 3390670 - RNA, 22 nt, Human
gaacuguccagagagcaacucu

SEQ ID NO: 3390671 - RNA, 20 nt, Human
gaacugucggaggaaagaca

SEQ ID NO: 3390672 - RNA, 17 nt, Human
gaacugugccuuugagu

SEQ ID NO: 3390673 - RNA, 20 nt, Human
gaacuguuguauaaauuuau

SEQ ID NO: 3390674 - RNA, 13 nt, Human
gaacuuaaaauga

SEQ ID NO: 3390675 - RNA, 14 nt, Human
gaacuuaaauaaug

SEQ ID NO: 3390676 - RNA, 17 nt, Human
gaacuuaaauaauguga

SEQ ID NO: 3390677 - RNA, 17 nt, Human
gaacuuacauuguucaa

SEQ ID NO: 3390678 - RNA, 19 nt, Human
gaacuucaccugcaaagcu

SEQ ID NO: 3390679 - RNA, 13 nt, Human
gaacuucagaaag

SEQ ID NO: 3390680 - RNA, 17 nt, Human
gaacuucucucagacuu

SEQ ID NO: 3390681 - RNA, 15 nt, Human
gaacuugaaauuuga

SEQ ID NO: 3390682 - RNA, 15 nt, Human
gaacuugaacugauu

SEQ ID NO: 3390683 - RNA, 16 nt, Human
gaacuugaacugauuc

SEQ ID NO: 3390684 - RNA, 15 nt, Human
gaacuugacccugag

SEQ ID NO: 3390685 - RNA, 19 nt, Human
gaacuugagccugucaaga

SEQ ID NO: 3390686 - RNA, 14 nt, Human
gaacuugaggacac

SEQ ID NO: 3390687 - RNA, 18 nt, Human
gaacuugaggacacaugu

SEQ ID NO: 3390688 - RNA, 11 nt, Human
gaacuugccug

SEQ ID NO: 3390689 - RNA, 18 nt, Human
gaacuugcugcugucuug

SEQ ID NO: 3390690 - RNA, 15 nt, Human
gaacuuggaagcaca

SEQ ID NO: 3390691 - RNA, 17 nt, Human
gaacuuggaggcaccau

SEQ ID NO: 3390692 - RNA, 18 nt, Human
gaacuuggcgcugccccu

SEQ ID NO: 3390693 - RNA, 12 nt, Human
gaacuugguucc

SEQ ID NO: 3390694 - RNA, 20 nt, Human
gaacuugugucccuaaugug

SEQ ID NO: 3390695 - RNA, 23 nt, Human
gaacuuucucuucauacuuuuuu

SEQ ID NO: 3390696 - RNA, 23 nt, Human
gaacuuugaccucugcagcaaua

SEQ ID NO: 3390697 - RNA, 19 nt, Human
gaacuuugcugagccugua

SEQ ID NO: 3390698 - RNA, 14 nt, Human
gaacuuuuuguagg

SEQ ID NO: 3390699 - RNA, 15 nt, Human
gaacuuuuuuaaaua

SEQ ID NO: 3390700 - RNA, 20 nt, Human
gaacuuuuuuaaauaaacuu

SEQ ID NO: 3390701 - RNA, 14 nt, Human
gaagaaaaaaaucu

SEQ ID NO: 3390702 - RNA, 21 nt, Human
gaagaaaaaaaucuucuccag

SEQ ID NO: 3390703 - RNA, 14 nt, Human
gaagaaaaagaagc

SEQ ID NO: 3390704 - RNA, 18 nt, Human
gaagaaaacacuguuauc

SEQ ID NO: 3390705 - RNA, 14 nt, Human
gaagaaaacaucua

SEQ ID NO: 3390706 - RNA, 11 nt, Human
gaagaaaagag

SEQ ID NO: 3390707 - RNA, 14 nt, Human
gaagaaaauaauua

SEQ ID NO: 3390708 - RNA, 13 nt, Human
gaagaaaauacuu

SEQ ID NO: 3390709 - RNA, 23 nt, Human
gaagaaaauggaaccaggcuugg

SEQ ID NO: 3390710 - RNA, 16 nt, Human
gaagaaaaugguuuau

SEQ ID NO: 3390711 - RNA, 18 nt, Human
gaagaaaauugcugugcc

SEQ ID NO: 3390712 - RNA, 14 nt, Human
gaagaaacagaaga

SEQ ID NO: 3390713 - RNA, 20 nt, Human
gaagaaacagcuaugagagg

SEQ ID NO: 3390714 - RNA, 19 nt, Human
gaagaaagaacggaagaag

SEQ ID NO: 3390715 - RNA, 20 nt, Human
gaagaaagaacggaagaaga

SEQ ID NO: 3390716 - RNA, 20 nt, Human
gaagaaagaacuaucuucau

SEQ ID NO: 3390717 - RNA, 17 nt, Human
gaagaaagaggugaccc

SEQ ID NO: 3390718 - RNA, 12 nt, Human
gaagaaagaugu

SEQ ID NO: 3390719 - RNA, 12 nt, Human
gaagaaagccug

SEQ ID NO: 3390720 - RNA, 21 nt, Human
gaagaaaggccaucagagcaa

SEQ ID NO: 3390721 - RNA, 21 nt, Human
gaagaaaggguguuuuucugu

SEQ ID NO: 3390722 - RNA, 15 nt, Human
gaagaaaucacagaa

SEQ ID NO: 3390723 - RNA, 16 nt, Human
gaagaaaugaaauuuu

SEQ ID NO: 3390724 - RNA, 18 nt, Human
gaagaaauuauaaagaua

SEQ ID NO: 3390725 - RNA, 22 nt, Human
gaagaaauuauaaagauaaagc

SEQ ID NO: 3390726 - RNA, 22 nt, Human
gaagaaauuccuguagcaucuu

SEQ ID NO: 3390727 - RNA, 18 nt, Human
gaagaacacccucuaaau

SEQ ID NO: 3390728 - RNA, 17 nt, Human
gaagaacauccaaggag

SEQ ID NO: 3390729 - RNA, 22 nt, Human
gaagaacaucuuuaugguaaag

SEQ ID NO: 3390730 - RNA, 13 nt, Human
gaagaacugcagg

SEQ ID NO: 3390731 - RNA, 15 nt, Human
gaagaacugcaggcc

SEQ ID NO: 3390732 - RNA, 16 nt, Human
gaagaacuugcaugga

SEQ ID NO: 3390733 - RNA, 13 nt, Human
gaagaagaaaaaa

SEQ ID NO: 3390734 - RNA, 14 nt, Human
gaagaagaaaaaaa

SEQ ID NO: 3390735 - RNA, 14 nt, Human
gaagaagaagaaaa

SEQ ID NO: 3390736 - RNA, 16 nt, Human
gaagaagagaagcugc

SEQ ID NO: 3390737 - RNA, 22 nt, Human
gaagaagagggagagguggagc

SEQ ID NO: 3390738 - RNA, 13 nt, Human
gaagaagaugcuc

SEQ ID NO: 3390739 - RNA, 18 nt, Human
gaagaagggagaagaaag

SEQ ID NO: 3390740 - RNA, 18 nt, Human
gaagaaggggacaauggc

SEQ ID NO: 3390741 - RNA, 13 nt, Human
gaagaaguguguc

SEQ ID NO: 3390742 - RNA, 19 nt, Human
gaagaauacaaacauauuu

SEQ ID NO: 3390743 - RNA, 23 nt, Human
gaagaauacuucucauuuuuuaa

SEQ ID NO: 3390744 - RNA, 15 nt, Human
gaagaauagggccca

SEQ ID NO: 3390745 - RNA, 17 nt, Human
gaagaauauucaggacu

SEQ ID NO: 3390746 - RNA, 14 nt, Human
gaagaauauuguau

SEQ ID NO: 3390747 - RNA, 14 nt, Human
gaagaaugaacaaa

SEQ ID NO: 3390748 - RNA, 17 nt, Human
gaagaauggagaggaac

SEQ ID NO: 3390749 - RNA, 18 nt, Human
gaagaauggagaggaaca

SEQ ID NO: 3390750 - RNA, 22 nt, Human
gaagaauguuaagacuugacag

SEQ ID NO: 3390751 - RNA, 18 nt, Human
gaagaauugaaaaguuuu

SEQ ID NO: 3390752 - RNA, 22 nt, Human
gaagaauugaaaaguuuuuguu

SEQ ID NO: 3390753 - RNA, 18 nt, Human
gaagaauugaacccagga

SEQ ID NO: 3390754 - RNA, 19 nt, Human
gaagaauugaacccaggag

SEQ ID NO: 3390755 - RNA, 23 nt, Human
gaagaauugaacccaggaggugg

SEQ ID NO: 3390756 - RNA, 12 nt, Human
gaagaauuuaaa

SEQ ID NO: 3390757 - RNA, 13 nt, Human
gaagaauuugaag

SEQ ID NO: 3390758 - RNA, 14 nt, Human
gaagaauuugaaga

SEQ ID NO: 3390759 - RNA, 14 nt, Human
gaagaauuuguuau

SEQ ID NO: 3390760 - RNA, 15 nt, Human
gaagaauuuuaaaaa

SEQ ID NO: 3390761 - RNA, 20 nt, Human
gaagaauuuucagaccccag

SEQ ID NO: 3390762 - RNA, 15 nt, Human
gaagacaaaaagaca

SEQ ID NO: 3390763 - RNA, 14 nt, Human
gaagacaaaaauac

SEQ ID NO: 3390764 - RNA, 20 nt, Human
gaagacaaaaauacucuaau

SEQ ID NO: 3390765 - RNA, 12 nt, Human
gaagacaaacuu

SEQ ID NO: 3390766 - RNA, 23 nt, Human
gaagacaaugugaaaagaaaaau

SEQ ID NO: 3390767 - RNA, 14 nt, Human
gaagacaauugaca

SEQ ID NO: 3390768 - RNA, 19 nt, Human
gaagacaauuugauacaua

SEQ ID NO: 3390769 - RNA, 13 nt, Human
gaaauaguucugu

SEQ ID NO: 3390770 - RNA, 23 nt, Human
gaaauaguucugugacuaggaaa

SEQ ID NO: 3390771 - RNA, 15 nt, Human
gaaauauaaugcaaa

SEQ ID NO: 3390772 - RNA, 21 nt, Human
gaaauauacuuuuacaaguaa

SEQ ID NO: 3390773 - RNA, 18 nt, Human
gaaauauauauacauaug

SEQ ID NO: 3390774 - RNA, 19 nt, Human
gaaauauauauacauaugu

SEQ ID NO: 3390775 - RNA, 23 nt, Human
gaaauauauauguguguguaugu

SEQ ID NO: 3390776 - RNA, 13 nt, Human
gaaauauauauua

SEQ ID NO: 3390777 - RNA, 24 nt, Human
gaaauauauggucuaauguuuaag

SEQ ID NO: 3390778 - RNA, 23 nt, Human
gaaauauauuuuaccauacauuu

SEQ ID NO: 3390779 - RNA, 16 nt, Human
gaaauaucaaagucau

SEQ ID NO: 3390780 - RNA, 20 nt, Human
gaaauaucaguuacucagcc

SEQ ID NO: 3390781 - RNA, 21 nt, Human
gaaauaucaguuacucagccc

SEQ ID NO: 3390782 - RNA, 21 nt, Human
gaaauaucaucacguauguua

SEQ ID NO: 3390783 - RNA, 13 nt, Human
gaaauaucauuua

SEQ ID NO: 3390784 - RNA, 15 nt, Human
gaaauauccugcuug

SEQ ID NO: 3390785 - RNA, 16 nt, Human
gaaauaucugugaaau

SEQ ID NO: 3390786 - RNA, 20 nt, Human
gaaauaucugugaaauauca

SEQ ID NO: 3390787 - RNA, 21 nt, Human
gaaauaugugagauuuuuuau

SEQ ID NO: 3390788 - RNA, 11 nt, Human
gaaauauuaaa

SEQ ID NO: 3390789 - RNA, 13 nt, Human
gaaauauuaugca

SEQ ID NO: 3390790 - RNA, 16 nt, Human
gaaauauuauguuaaa

SEQ ID NO: 3390791 - RNA, 15 nt, Human
gaaauauuuagcaaa

SEQ ID NO: 3390792 - RNA, 15 nt, Human
gaaauauuuauuuua

SEQ ID NO: 3390793 - RNA, 16 nt, Human
gaaauauuuauuuuaa

SEQ ID NO: 3390794 - RNA, 19 nt, Human
gaaauauuuauuuuuuuaa

SEQ ID NO: 3390795 - RNA, 19 nt, Human
gaaauauuugugacaaaaa

SEQ ID NO: 3390796 - RNA, 20 nt, Human
gaaauauuuuaaaaucagcu

SEQ ID NO: 3390797 - RNA, 22 nt, Human
gaaauauuuugauaauaaauug

SEQ ID NO: 3390798 - RNA, 19 nt, Human
gaaaucaaagagagaaaau

SEQ ID NO: 3390799 - RNA, 14 nt, Human
gaaaucaaagugcu

SEQ ID NO: 3390800 - RNA, 19 nt, Human
gaaaucaaauaugcaaagc

SEQ ID NO: 3390801 - RNA, 23 nt, Human
gaaaucaaauaugcaaagcacug

SEQ ID NO: 3390802 - RNA, 23 nt, Human
gaaaucaauaauuuguggugauu

SEQ ID NO: 3390803 - RNA, 19 nt, Human
gaaaucaauaguugaauua

SEQ ID NO: 3390804 - RNA, 17 nt, Human
gaaaucaccgaaaacgu

SEQ ID NO: 3390805 - RNA, 14 nt, Human
gaaaucagccaagu

SEQ ID NO: 3390806 - RNA, 21 nt, Human
gaaaucaucggagucagccag

SEQ ID NO: 3390807 - RNA, 17 nt, Human
gaaaucauguccauaca

SEQ ID NO: 3390808 - RNA, 11 nt, Human
gaaaucauguu

SEQ ID NO: 3390809 - RNA, 15 nt, Human
gaaaucccugcucac

SEQ ID NO: 3390810 - RNA, 24 nt, Human
cuagagugacucacuaauucauua

SEQ ID NO: 3390811 - RNA, 18 nt, Human
cuagaguuuagcuggaaa

SEQ ID NO: 3390812 - RNA, 14 nt, Human
cuagauacaauaaa

SEQ ID NO: 3390813 - RNA, 15 nt, Human
cuagauacaauaaau

SEQ ID NO: 3390814 - RNA, 17 nt, Human
cuagauaccuaaaacau

SEQ ID NO: 3390815 - RNA, 15 nt, Human
cuagauacucuuauu

SEQ ID NO: 3390816 - RNA, 13 nt, Human
cuagauacuguau

SEQ ID NO: 3390817 - RNA, 12 nt, Human
cuagauaguuua

SEQ ID NO: 3390818 - RNA, 14 nt, Human
cuagauaucgacuu

SEQ ID NO: 3390819 - RNA, 21 nt, Human
cuagauaucgacuuguuuuug

SEQ ID NO: 3390820 - RNA, 17 nt, Human
cuagaucauaaggcuuc

SEQ ID NO: 3390821 - RNA, 18 nt, Human
cuagauccacacacagag

SEQ ID NO: 3390822 - RNA, 21 nt, Human
cuagauccacacacagaggaa

SEQ ID NO: 3390823 - RNA, 12 nt, Human
cuagaugaccuc

SEQ ID NO: 3390824 - RNA, 21 nt, Human
cuagaugagaauucagcugcc

SEQ ID NO: 3390825 - RNA, 22 nt, Human
cuagaugauuaaauaagauucu

SEQ ID NO: 3390826 - RNA, 20 nt, Human
cuagaugggcaugggguggg

SEQ ID NO: 3390827 - RNA, 13 nt, Human
cuagauggugcug

SEQ ID NO: 3390828 - RNA, 14 nt, Human
cuagauggugcuga

SEQ ID NO: 3390829 - RNA, 16 nt, Human
cuagauggugcugaga

SEQ ID NO: 3390830 - RNA, 14 nt, Human
cuagauguaaauuu

SEQ ID NO: 3390831 - RNA, 22 nt, Human
cuagauguuuauucuucuagag

SEQ ID NO: 3390832 - RNA, 23 nt, Human
cuagauguuuauucuucuagagu

SEQ ID NO: 3390833 - RNA, 13 nt, Human
cuagauuaccaug

SEQ ID NO: 3390834 - RNA, 14 nt, Human
cuagauucaaaggu

SEQ ID NO: 3390835 - RNA, 16 nt, Human
cuagauucaaagguuc

SEQ ID NO: 3390836 - RNA, 18 nt, Human
cuagauucaaagguucua

SEQ ID NO: 3390837 - RNA, 21 nt, Human
cuagauucaaagguucuaggu

SEQ ID NO: 3390838 - RNA, 14 nt, Human
cuagauucagggaa

SEQ ID NO: 3390839 - RNA, 21 nt, Human
cuagauugcuaaggagcugau

SEQ ID NO: 3390840 - RNA, 13 nt, Human
cuagauuuaugaa

SEQ ID NO: 3390841 - RNA, 13 nt, Human
cuagauuuucacu

SEQ ID NO: 3390842 - RNA, 13 nt, Human
cuagauuuuguuu

SEQ ID NO: 3390843 - RNA, 17 nt, Human
cuagauuuuguuuugcu

SEQ ID NO: 3390844 - RNA, 19 nt, Human
cuagcaaaagaaguaacaa

SEQ ID NO: 3390845 - RNA, 19 nt, Human
cuagcaaaauaaaacauag

SEQ ID NO: 3390846 - RNA, 15 nt, Human
cuagcacagcagcuu

SEQ ID NO: 3390847 - RNA, 14 nt, Human
cuagcacagcuccc

SEQ ID NO: 3390848 - RNA, 15 nt, Human
cuagcacaugcuuca

SEQ ID NO: 3390849 - RNA, 18 nt, Human
cuagcacaugcuucaaua

SEQ ID NO: 3390850 - RNA, 16 nt, Human
cuagcacucacaugcu

SEQ ID NO: 3390851 - RNA, 21 nt, Human
cuagcacucacaugcuggaca

SEQ ID NO: 3390852 - RNA, 13 nt, Human
cuagcacuuccuu

SEQ ID NO: 3390853 - RNA, 14 nt, Human
cuagcacuuccuug

SEQ ID NO: 3390854 - RNA, 17 nt, Human
cuagcagaaaucuagaa

SEQ ID NO: 3390855 - RNA, 23 nt, Human
cuagcagcagggagggcuucugc

SEQ ID NO: 3390856 - RNA, 17 nt, Human
cuagcaguaaaagauga

SEQ ID NO: 3390857 - RNA, 15 nt, Human
cuagcaguggcaggc

SEQ ID NO: 3390858 - RNA, 20 nt, Human
cuagcaguggcaggcagagg

SEQ ID NO: 3390859 - RNA, 21 nt, Human
cuagcaguggcaggcagaggc

SEQ ID NO: 3390860 - RNA, 19 nt, Human
cuagcauacguacacauuu

SEQ ID NO: 3390861 - RNA, 21 nt, Human
cuagcauacguacacauuuua

SEQ ID NO: 3390862 - RNA, 15 nt, Human
cuagcauauaugugu

SEQ ID NO: 3390863 - RNA, 14 nt, Human
cuagcauaucugcc

SEQ ID NO: 3390864 - RNA, 13 nt, Human
cuagcaucccuga

SEQ ID NO: 3390865 - RNA, 15 nt, Human
cuagcaugccaacaa

SEQ ID NO: 3390866 - RNA, 22 nt, Human
cuagcauuguaaaauuauuuca

SEQ ID NO: 3390867 - RNA, 17 nt, Human
cuagccaaaccucacca

SEQ ID NO: 3390868 - RNA, 21 nt, Human
cuagccaaaccucaccaacuc

SEQ ID NO: 3390869 - RNA, 15 nt, Human
cuagccaccaacucu

SEQ ID NO: 3390870 - RNA, 22 nt, Human
cuagccagacacucugcucugc

SEQ ID NO: 3390871 - RNA, 23 nt, Human
cuagccagacacucugcucugcc

SEQ ID NO: 3390872 - RNA, 12 nt, Human
cuagccagagga

SEQ ID NO: 3390873 - RNA, 13 nt, Human
cuagccagaggag

SEQ ID NO: 3390874 - RNA, 17 nt, Human
cuagccagaggagagag

SEQ ID NO: 3390875 - RNA, 20 nt, Human
cuagccagcacuuguauaua

SEQ ID NO: 3390876 - RNA, 20 nt, Human
cuagccauuccugguaccca

SEQ ID NO: 3390877 - RNA, 21 nt, Human
cuagccauuccugguacccag

SEQ ID NO: 3390878 - RNA, 13 nt, Human
cuagcccaggaga

SEQ ID NO: 3390879 - RNA, 17 nt, Human
cuagcccaggagagaga

SEQ ID NO: 3390880 - RNA, 23 nt, Human
cuagcccaggagagagaaagcca

SEQ ID NO: 3390881 - RNA, 17 nt, Human
cuagcccuccuuuuucc

SEQ ID NO: 3390882 - RNA, 18 nt, Human
cuagcccucucacauuua

SEQ ID NO: 3390883 - RNA, 13 nt, Human
cuagccgaccuca

SEQ ID NO: 3390884 - RNA, 15 nt, Human
cuagccgaccucagc

SEQ ID NO: 3390885 - RNA, 17 nt, Human
cuagccgaccucagccu

SEQ ID NO: 3390886 - RNA, 15 nt, Human
cuagccgguuccugu

SEQ ID NO: 3390887 - RNA, 22 nt, Human
cuagccuauuuaccugcaggcu

SEQ ID NO: 3390888 - RNA, 23 nt, Human
cuagccuauuuaccugcaggcug

SEQ ID NO: 3390889 - RNA, 13 nt, Human
cuagccucacgcu

SEQ ID NO: 3390890 - RNA, 20 nt, Human
cuagccucaggggucugagc

SEQ ID NO: 3390891 - RNA, 15 nt, Human
cuagccugcacuuug

SEQ ID NO: 3390892 - RNA, 19 nt, Human
cuagccugcacuuugaugu

SEQ ID NO: 3390893 - RNA, 19 nt, Human
cuagccugcauugagcuug

SEQ ID NO: 3390894 - RNA, 22 nt, Human
cuagccugugccucugggacug

SEQ ID NO: 3390895 - RNA, 22 nt, Human
cuagccuuaaucagguccucag

SEQ ID NO: 3390896 - RNA, 23 nt, Human
cuagccuuagaagucacacagua

SEQ ID NO: 3390897 - RNA, 17 nt, Human
cuagccuuauccucuga

SEQ ID NO: 3390898 - RNA, 21 nt, Human
cuagccuuauccucugaucuc

SEQ ID NO: 3390899 - RNA, 13 nt, Human
cuagccuugcuug

SEQ ID NO: 3390900 - RNA, 22 nt, Human
cuagccuuggccucuuuccuca

SEQ ID NO: 3390901 - RNA, 18 nt, Human
cuagcgaucucuccuggc

SEQ ID NO: 3390902 - RNA, 22 nt, Human
cuagcgcaguuuuuuuuuucuu

SEQ ID NO: 3390903 - RNA, 20 nt, Human
cuagcgcuaucucccugccu

SEQ ID NO: 3390904 - RNA, 16 nt, Human
cuagcguagugcagca

SEQ ID NO: 3390905 - RNA, 20 nt, Human
cuagcguagugcagcagggc

SEQ ID NO: 3390906 - RNA, 17 nt, Human
cuagcuagaaauaugau

SEQ ID NO: 3390907 - RNA, 12 nt, Human
cuagcuagcuca

SEQ ID NO: 3390908 - RNA, 18 nt, Human
cuagcuaugcuguaucug

SEQ ID NO: 3390909 - RNA, 15 nt, Human
cuagcuaugugaccu

SEQ ID NO: 3390910 - RNA, 22 nt, Human
cuagcuccacacccucucccag

SEQ ID NO: 3390911 - RNA, 14 nt, Human
cuagcucgugauug

SEQ ID NO: 3390912 - RNA, 21 nt, Human
cuagcucucuaggccucucca

SEQ ID NO: 3390913 - RNA, 20 nt, Human
cuagcucugagccaguucag

SEQ ID NO: 3390914 - RNA, 21 nt, Human
cuagcucuuguugagccgugg

SEQ ID NO: 3390915 - RNA, 18 nt, Human
cuagcugaauguuuuucu

SEQ ID NO: 3390916 - RNA, 21 nt, Human
cuagcugccuagcaagcuggc

SEQ ID NO: 3390917 - RNA, 16 nt, Human
cuagcugcuacaaaga

SEQ ID NO: 3390918 - RNA, 18 nt, Human
cuagcugcuacaaagaag

SEQ ID NO: 3390919 - RNA, 21 nt, Human
cuagcuggaauuuuuuauucu

SEQ ID NO: 3390920 - RNA, 24 nt, Human
cuagcuggaauuuuuuauucuugu

SEQ ID NO: 3390921 - RNA, 21 nt, Human
cuagcuggagaggagcccugc

SEQ ID NO: 3390922 - RNA, 13 nt, Human
cuagcuggagccu

SEQ ID NO: 3390923 - RNA, 14 nt, Human
gaagacaccagagc

SEQ ID NO: 3390924 - RNA, 17 nt, Human
gaagacaccagagcaga

SEQ ID NO: 3390925 - RNA, 23 nt, Human
gaagacaccagagcagaugcaga

SEQ ID NO: 3390926 - RNA, 16 nt, Human
gaagacagaaccacag

SEQ ID NO: 3390927 - RNA, 18 nt, Human
gaagacagaaccacaggg

SEQ ID NO: 3390928 - RNA, 21 nt, Human
gaagacagagaccuccugccu

SEQ ID NO: 3390929 - RNA, 15 nt, Human
gaagacaguggcccc

SEQ ID NO: 3390930 - RNA, 15 nt, Human
gaagacauggagacu

SEQ ID NO: 3390931 - RNA, 21 nt, Human
gaagacauggagacuccugcc

SEQ ID NO: 3390932 - RNA, 17 nt, Human
gaagacauuucuuuucu

SEQ ID NO: 3390933 - RNA, 23 nt, Human
gaagacauuucuuuucuuuuuac

SEQ ID NO: 3390934 - RNA, 14 nt, Human
gaagaccacaucca

SEQ ID NO: 3390935 - RNA, 21 nt, Human
gaagaccacauccacacacgc

SEQ ID NO: 3390936 - RNA, 14 nt, Human
gaagaccccaccca

SEQ ID NO: 3390937 - RNA, 15 nt, Human
gaagaccccacccaa

SEQ ID NO: 3390938 - RNA, 16 nt, Human
gaagaccccacccaag

SEQ ID NO: 3390939 - RNA, 22 nt, Human
gaagaccguuuaccuagaagaa

SEQ ID NO: 3390940 - RNA, 23 nt, Human
gaagaccuaaccagggccagaag

SEQ ID NO: 3390941 - RNA, 14 nt, Human
gaagaccugagaau

SEQ ID NO: 3390942 - RNA, 21 nt, Human
gaagaccuuuuucugcacuau

SEQ ID NO: 3390943 - RNA, 15 nt, Human
gaagacuccuagcug

SEQ ID NO: 3390944 - RNA, 13 nt, Human
gaagacucuacca

SEQ ID NO: 3390945 - RNA, 15 nt, Human
gaagacuggaagcua

SEQ ID NO: 3390946 - RNA, 20 nt, Human
gaagacugucagcuuccaaa

SEQ ID NO: 3390947 - RNA, 21 nt, Human
gaagacuuacagcaaauccuu

SEQ ID NO: 3390948 - RNA, 15 nt, Human
gaagacuucaucccu

SEQ ID NO: 3390949 - RNA, 15 nt, Human
gaagacuucccagcu

SEQ ID NO: 3390950 - RNA, 11 nt, Human
gaagacuuugg

SEQ ID NO: 3390951 - RNA, 13 nt, Human
gaagacuuuggaa

SEQ ID NO: 3390952 - RNA, 15 nt, Human
gaagagagagcugag

SEQ ID NO: 3390953 - RNA, 18 nt, Human
gaagagagauauaucuga

SEQ ID NO: 3390954 - RNA, 19 nt, Human
gaacagaaaacaacaaaaa

SEQ ID NO: 3390955 - RNA, 12 nt, Human
gaacagaaggau

SEQ ID NO: 3390956 - RNA, 12 nt, Human
gaacagaauguu

SEQ ID NO: 3390957 - RNA, 14 nt, Human
gaacagaauguuuu

SEQ ID NO: 3390958 - RNA, 17 nt, Human
gaacagacaacagaagu

SEQ ID NO: 3390959 - RNA, 18 nt, Human
gaacagacaacagaaguc

SEQ ID NO: 3390960 - RNA, 16 nt, Human
gaacagacuggaagca

SEQ ID NO: 3390961 - RNA, 20 nt, Human
gaacagacuggaagcacagc

SEQ ID NO: 3390962 - RNA, 20 nt, Human
gaacagagagacccuugugg

SEQ ID NO: 3390963 - RNA, 18 nt, Human
gaacagaucuccaaagcu

SEQ ID NO: 3390964 - RNA, 22 nt, Human
gaacagaucuuuuacuuuggcc

SEQ ID NO: 3390965 - RNA, 21 nt, Human
gaacagauguuucuuuuguau

SEQ ID NO: 3390966 - RNA, 17 nt, Human
gaacagauucacacugu

SEQ ID NO: 3390967 - RNA, 20 nt, Human
gaacagcauggcacucccuc

SEQ ID NO: 3390968 - RNA, 22 nt, Human
gaacagccaaaugcauggugca

SEQ ID NO: 3390969 - RNA, 23 nt, Human
gaacagccaaaugcauggugcag

SEQ ID NO: 3390970 - RNA, 21 nt, Human
gaacagcggcuggacuuggag

SEQ ID NO: 3390971 - RNA, 22 nt, Human
gaacagcuaugggagccccagg

SEQ ID NO: 3390972 - RNA, 23 nt, Human
gaacagcuaugggagccccaggg

SEQ ID NO: 3390973 - RNA, 22 nt, Human
gaacagcugguguagcuacaga

SEQ ID NO: 3390974 - RNA, 23 nt, Human
gaacagcugguguagcuacagag

SEQ ID NO: 3390975 - RNA, 24 nt, Human
gaacagcugguguagcuacagaga

SEQ ID NO: 3390976 - RNA, 15 nt, Human
gaacagcuucagguu

SEQ ID NO: 3390977 - RNA, 19 nt, Human
gaacaggcaagugaagaaa

SEQ ID NO: 3390978 - RNA, 16 nt, Human
gaacagguucacguga

SEQ ID NO: 3390979 - RNA, 21 nt, Human
gaacagguuuuuuuguuuguu

SEQ ID NO: 3390980 - RNA, 14 nt, Human
gaacaguaacugcc

SEQ ID NO: 3390981 - RNA, 18 nt, Human
gaacagugaggugcccag

SEQ ID NO: 3390982 - RNA, 16 nt, Human
gaacagugauuaccag

SEQ ID NO: 3390983 - RNA, 18 nt, Human
gaacagugcaccugggac

SEQ ID NO: 3390984 - RNA, 17 nt, Human
gaacagugugcaaggca

SEQ ID NO: 3390985 - RNA, 21 nt, Human
gaacagugugcaaggcagccg

SEQ ID NO: 3390986 - RNA, 24 nt, Human
gaacagugugcaaggcagccgugg

SEQ ID NO: 3390987 - RNA, 21 nt, Human
gaacaguguggccucuucuga

SEQ ID NO: 3390988 - RNA, 16 nt, Human
gaacaguguuucccau

SEQ ID NO: 3390989 - RNA, 20 nt, Human
gaacaguuguguuugaagca

SEQ ID NO: 3390990 - RNA, 15 nt, Human
gaacauaaaauacaa

SEQ ID NO: 3390991 - RNA, 14 nt, Human
gaacauaauucuua

SEQ ID NO: 3390992 - RNA, 15 nt, Human
gaacauacaaaugca

SEQ ID NO: 3390993 - RNA, 16 nt, Human
gaacauacuguucacu

SEQ ID NO: 3390994 - RNA, 13 nt, Human
gaacauacuucag

SEQ ID NO: 3390995 - RNA, 18 nt, Human
gaacauagacuagagaaa

SEQ ID NO: 3390996 - RNA, 21 nt, Human
gaacauagacuagagaaaccg

SEQ ID NO: 3390997 - RNA, 18 nt, Human
gaacauauuguugaaagg

SEQ ID NO: 3390998 - RNA, 19 nt, Human
gaacauccaaaaucuugau

SEQ ID NO: 3390999 - RNA, 17 nt, Human
gaacauccaaccuuccc

SEQ ID NO: 3391000 - RNA, 15 nt, Human
gaacaucccugccag

SEQ ID NO: 3391001 - RNA, 19 nt, Human
gaacauccuuugcagggca

SEQ ID NO: 3391002 - RNA, 22 nt, Human
gaacauccuuugcagggcagcc

SEQ ID NO: 3391003 - RNA, 21 nt, Human
gaacaucugaguccuggauga

SEQ ID NO: 3391004 - RNA, 22 nt, Human
gaacaucuuugacacucugcag

SEQ ID NO: 3391005 - RNA, 23 nt, Human
gaacaugaaaacagaaaacgguu

SEQ ID NO: 3391006 - RNA, 20 nt, Human
gaacaugcaguuugaaauuc

SEQ ID NO: 3391007 - RNA, 22 nt, Human
gaacaugcaguuugaaauucug

SEQ ID NO: 3391008 - RNA, 23 nt, Human
gaacaugcaguuugaaauucuga

SEQ ID NO: 3391009 - RNA, 13 nt, Human
gaacaugcccccu

SEQ ID NO: 3391010 - RNA, 17 nt, Human
gaacauggacuuguaua

SEQ ID NO: 3391011 - RNA, 19 nt, Human
gaacauggccuaagggcca

SEQ ID NO: 3391012 - RNA, 16 nt, Human
gaacauugauugcugu

SEQ ID NO: 3391013 - RNA, 15 nt, Human
gaacauugguucuuu

SEQ ID NO: 3391014 - RNA, 15 nt, Human
gaaccaaaacauucc

SEQ ID NO: 3391015 - RNA, 16 nt, Human
gaaccaaaacauuccg

SEQ ID NO: 3391016 - RNA, 21 nt, Human
gaaccaaacccacccuuucua

SEQ ID NO: 3391017 - RNA, 22 nt, Human
gaaccaaacccacccuuucuac

SEQ ID NO: 3391018 - RNA, 17 nt, Human
gaaccaaaucuggaagc

SEQ ID NO: 3391019 - RNA, 16 nt, Human
gaaccaagcuauuccu

SEQ ID NO: 3391020 - RNA, 24 nt, Human
gaaccaaguggaccuugagaccac

SEQ ID NO: 3391021 - RNA, 18 nt, Human
gaaccacaucuugcucug

SEQ ID NO: 3391022 - RNA, 21 nt, Human
gaaccaccugccuauauuuuu

SEQ ID NO: 3391023 - RNA, 15 nt, Human
gaaccacuuucuuau

SEQ ID NO: 3391024 - RNA, 13 nt, Human
gaaccaggagcug

SEQ ID NO: 3391025 - RNA, 21 nt, Human
gaaccauaguuacuguaaaau

SEQ ID NO: 3391026 - RNA, 12 nt, Human
gaaccaucagaa

SEQ ID NO: 3391027 - RNA, 20 nt, Human
gaaccaucauuauaaacgug

SEQ ID NO: 3391028 - RNA, 18 nt, Human
gaaccauggugaagugcu

SEQ ID NO: 3391029 - RNA, 21 nt, Human
gaaccaugucagcaaaaagca

SEQ ID NO: 3391030 - RNA, 23 nt, Human
gaaccaugucagcaaaaagcaaa

SEQ ID NO: 3391031 - RNA, 13 nt, Human
gaacccaaaccca

SEQ ID NO: 3391032 - RNA, 14 nt, Human
gaacccaccugcug

SEQ ID NO: 3391033 - RNA, 19 nt, Human
gaacccaccugcugagaga

SEQ ID NO: 3391034 - RNA, 19 nt, Human
gaacccagacucagacauu

SEQ ID NO: 3391035 - RNA, 12 nt, Human
gaacccaggaca

SEQ ID NO: 3391036 - RNA, 16 nt, Human
gaacccaggacaagca

SEQ ID NO: 3391037 - RNA, 17 nt, Human
gaacccagggcucugcc

SEQ ID NO: 3391038 - RNA, 18 nt, Human
gaacccagggcucugccc

SEQ ID NO: 3391039 - RNA, 20 nt, Human
gaacccagggcucugcccca

SEQ ID NO: 3391040 - RNA, 17 nt, Human
gaaccccaaggagggag

SEQ ID NO: 3391041 - RNA, 14 nt, Human
gaaccccccuccca

SEQ ID NO: 3391042 - RNA, 20 nt, Human
gaacccuaaauaauaaaaau

SEQ ID NO: 3391043 - RNA, 19 nt, Human
gaacccucuguuccuuccc

SEQ ID NO: 3391044 - RNA, 14 nt, Human
gaacccugccaugg

SEQ ID NO: 3391045 - RNA, 23 nt, Human
gaacccuggugaggaagcuccag

SEQ ID NO: 3391046 - RNA, 14 nt, Human
gaacccugugcugg

SEQ ID NO: 3391047 - RNA, 17 nt, Human
gaacccugugcuggugu

SEQ ID NO: 3391048 - RNA, 12 nt, Human
gaacccuuuguu

SEQ ID NO: 3391049 - RNA, 18 nt, Human
gaacccuuuuaaaguuga

SEQ ID NO: 3391050 - RNA, 21 nt, Human
gaaccgagcaaagaucaaaau

SEQ ID NO: 3391051 - RNA, 23 nt, Human
gaaccgagcaaagaucaaaauaa

SEQ ID NO: 3391052 - RNA, 18 nt, Human
gaaccgaggggcucagga

SEQ ID NO: 3391053 - RNA, 21 nt, Human
gaaccgaggggcucaggaaaa

SEQ ID NO: 3391054 - RNA, 20 nt, Human
gaaccgcagaagccucccca

SEQ ID NO: 3391055 - RNA, 13 nt, Human
gaaccgcaggaag

SEQ ID NO: 3391056 - RNA, 22 nt, Human
gaaccgcucaccuagagccaga

SEQ ID NO: 3391057 - RNA, 15 nt, Human
gaaccgcugaauaug

SEQ ID NO: 3391058 - RNA, 19 nt, Human
gaaccgugguaugucugcc

SEQ ID NO: 3391059 - RNA, 18 nt, Human
gaaccguuuugaagcuac

SEQ ID NO: 3391060 - RNA, 19 nt, Human
gaaccguuuugaagcuacu

SEQ ID NO: 3391061 - RNA, 12 nt, Human
gaaccuaacugu

SEQ ID NO: 3391062 - RNA, 14 nt, Human
gaaccuaauacccu

SEQ ID NO: 3391063 - RNA, 19 nt, Human
gaaccuaauucaauucaaa

SEQ ID NO: 3391064 - RNA, 18 nt, Human
gaaccuacaguuuuaacu

SEQ ID NO: 3391065 - RNA, 19 nt, Human
gaaccuacaguuuuaacug

SEQ ID NO: 3391066 - RNA, 21 nt, Human
gaaccuacaguuuuaacugug

SEQ ID NO: 3391067 - RNA, 15 nt, Human
gaaccuaccuucauu

SEQ ID NO: 3391068 - RNA, 17 nt, Human
gaaccuauuucucuuuc

SEQ ID NO: 3391069 - RNA, 17 nt, Human
gaaccucacgcaccucc

SEQ ID NO: 3391070 - RNA, 20 nt, Human
gaaccucacgcaccucccau

SEQ ID NO: 3391071 - RNA, 11 nt, Human
gaaccucacuc

SEQ ID NO: 3391072 - RNA, 16 nt, Human
gaaccucacucuugcc

SEQ ID NO: 3391073 - RNA, 20 nt, Human
gaaccucacucuugccaacc

SEQ ID NO: 3391074 - RNA, 21 nt, Human
gaaccucacucuugccaaccu

SEQ ID NO: 3391075 - RNA, 12 nt, Human
gaaccucagccu

SEQ ID NO: 3391076 - RNA, 14 nt, Human
cuagcuggcucugu

SEQ ID NO: 3391077 - RNA, 12 nt, Human
cuagcugggggu

SEQ ID NO: 3391078 - RNA, 18 nt, Human
cuagcugggggugggcca

SEQ ID NO: 3391079 - RNA, 17 nt, Human
cuagcuggugguuucac

SEQ ID NO: 3391080 - RNA, 14 nt, Human
cuagcugugcaaga

SEQ ID NO: 3391081 - RNA, 12 nt, Human
cuagcugugugc

SEQ ID NO: 3391082 - RNA, 18 nt, Human
cuagcuguugagcuguuu

SEQ ID NO: 3391083 - RNA, 15 nt, Human
cuagcuuagagccuc

SEQ ID NO: 3391084 - RNA, 19 nt, Human
cuagcuuagagccucccuc

SEQ ID NO: 3391085 - RNA, 20 nt, Human
cuagcuuagagccucccuca

SEQ ID NO: 3391086 - RNA, 22 nt, Human
cuagcuucugcuuuucugcccu

SEQ ID NO: 3391087 - RNA, 23 nt, Human
cuagcuucugcuuuucugcccug

SEQ ID NO: 3391088 - RNA, 15 nt, Human
cuagcuuuagacccu

SEQ ID NO: 3391089 - RNA, 18 nt, Human
cuagcuuuagacccuggg

SEQ ID NO: 3391090 - RNA, 23 nt, Human
cuagcuuuauauauggacauggc

SEQ ID NO: 3391091 - RNA, 15 nt, Human
cuaggaaaauaaaac

SEQ ID NO: 3391092 - RNA, 17 nt, Human
cuaggaaaauauuuuga

SEQ ID NO: 3391093 - RNA, 14 nt, Human
cuaggaaauauuua

SEQ ID NO: 3391094 - RNA, 15 nt, Human
cuaggaaauauuuau

SEQ ID NO: 3391095 - RNA, 16 nt, Human
cuaggaaauccagggu

SEQ ID NO: 3391096 - RNA, 13 nt, Human
cuaggaacacucc

SEQ ID NO: 3391097 - RNA, 23 nt, Human
gaaccugggaaagagauuuaaac

SEQ ID NO: 3391098 - RNA, 17 nt, Human
gaaccugugaguaaaua

SEQ ID NO: 3391099 - RNA, 12 nt, Human
gaaccugugucc

SEQ ID NO: 3391100 - RNA, 19 nt, Human
gaaccuuccuuccugcuug

SEQ ID NO: 3391101 - RNA, 14 nt, Human
gaaccuugcugucc

SEQ ID NO: 3391102 - RNA, 17 nt, Human
gaaccuugcuguccuga

SEQ ID NO: 3391103 - RNA, 13 nt, Human
gaaccuuggccug

SEQ ID NO: 3391104 - RNA, 17 nt, Human
gaaccuugugccuggcu

SEQ ID NO: 3391105 - RNA, 19 nt, Human
gaaccuuugugcccuauca

SEQ ID NO: 3391106 - RNA, 20 nt, Human
gaaccuuugugcccuaucac

SEQ ID NO: 3391107 - RNA, 18 nt, Human
gaacgauauguagcagaa

SEQ ID NO: 3391108 - RNA, 16 nt, Human
gaacgauccuucaaag

SEQ ID NO: 3391109 - RNA, 17 nt, Human
gaacgcagcccuagagc

SEQ ID NO: 3391110 - RNA, 12 nt, Human
gaacgcccacuu

SEQ ID NO: 3391111 - RNA, 18 nt, Human
gaacgcccccccccaccc

SEQ ID NO: 3391112 - RNA, 19 nt, Human
gaacgcccccccccacccc

SEQ ID NO: 3391113 - RNA, 20 nt, Human
gaacgcccccccccaccccu

SEQ ID NO: 3391114 - RNA, 14 nt, Human
gaacggggagaaaa

SEQ ID NO: 3391115 - RNA, 15 nt, Human
gaacgguaaauuucu

SEQ ID NO: 3391116 - RNA, 22 nt, Human
gaacgugauuagugaaaggaag

SEQ ID NO: 3391117 - RNA, 23 nt, Human
gaacguuuagcugacaaaauacu

SEQ ID NO: 3391118 - RNA, 15 nt, Human
gaacguuuucuaauu

SEQ ID NO: 3391119 - RNA, 20 nt, Human
gaacguuuucuaauugcuua

SEQ ID NO: 3391120 - RNA, 22 nt, Human
gaacuaaacuaguuuuuccuau

SEQ ID NO: 3391121 - RNA, 18 nt, Human
gaacuaagaaacuuuugu

SEQ ID NO: 3391122 - RNA, 22 nt, Human
gaacuaagaaacuuuuguaaag

SEQ ID NO: 3391123 - RNA, 23 nt, Human
gaacuaagaaacuuuuguaaaga

SEQ ID NO: 3391124 - RNA, 23 nt, Human
gaacuacaaacaaaauuucuauu

SEQ ID NO: 3391125 - RNA, 14 nt, Human
gaacuacugaggau

SEQ ID NO: 3391126 - RNA, 16 nt, Human
gaacuagagaugugca

SEQ ID NO: 3391127 - RNA, 18 nt, Human
gaacuagagguuuuauga

SEQ ID NO: 3391128 - RNA, 18 nt, Human
gaacuagccaaaccagga

SEQ ID NO: 3391129 - RNA, 13 nt, Human
gaacuagcuggaa

SEQ ID NO: 3391130 - RNA, 20 nt, Human
gaacuaggaaggcacuucug

SEQ ID NO: 3391131 - RNA, 15 nt, Human
gaacuaggcugagca

SEQ ID NO: 3391132 - RNA, 15 nt, Human
gaacuauaaagaagu

SEQ ID NO: 3391133 - RNA, 19 nt, Human
gaacuauaacaccugccac

SEQ ID NO: 3391134 - RNA, 12 nt, Human
gaacuaucuuca

SEQ ID NO: 3391135 - RNA, 16 nt, Human
gaacuaucuucaucug

SEQ ID NO: 3391136 - RNA, 15 nt, Human
gaacuaugaacuaca

SEQ ID NO: 3391137 - RNA, 17 nt, Human
gaacuauggacggugcu

SEQ ID NO: 3391138 - RNA, 13 nt, Human
gaacuauuagagc

SEQ ID NO: 3391139 - RNA, 20 nt, Human
gaacuauuccccagcagggu

SEQ ID NO: 3391140 - RNA, 15 nt, Human
gaacuauuggagggu

SEQ ID NO: 3391141 - RNA, 22 nt, Human
gaacuauuuucaaagacuuaag

SEQ ID NO: 3391142 - RNA, 19 nt, Human
gaacucaaauggggccaga

SEQ ID NO: 3391143 - RNA, 23 nt, Human
gaacucaaauggggccagaucca

SEQ ID NO: 3391144 - RNA, 16 nt, Human
gaacucaccuggggcu

SEQ ID NO: 3391145 - RNA, 15 nt, Human
gaacucacucugggc

SEQ ID NO: 3391146 - RNA, 14 nt, Human
gaacucacuggggc

SEQ ID NO: 3391147 - RNA, 13 nt, Human
gaacucagaucca

SEQ ID NO: 3391148 - RNA, 15 nt, Human
gaacucagauccagg

SEQ ID NO: 3391149 - RNA, 16 nt, Human
gaacucagauccaggg

SEQ ID NO: 3391150 - RNA, 19 nt, Human
gaacucagauccagggaca

SEQ ID NO: 3391151 - RNA, 18 nt, Human
gaacucagaucugucuga

SEQ ID NO: 3391152 - RNA, 14 nt, Human
gaacucagccaagc

SEQ ID NO: 3391153 - RNA, 16 nt, Human
gaacucagccaagcac

SEQ ID NO: 3391154 - RNA, 16 nt, Human
gaacucaucacugugg

SEQ ID NO: 3391155 - RNA, 17 nt, Human
gaacucaucacuguggc

SEQ ID NO: 3391156 - RNA, 21 nt, Human
gaacucaucuagguaaauuac

SEQ ID NO: 3391157 - RNA, 22 nt, Human
gaacucaucuagguaaauuaca

SEQ ID NO: 3391158 - RNA, 13 nt, Human
gaacucauuccug

SEQ ID NO: 3391159 - RNA, 17 nt, Human
gaacuccaggcccuccu

SEQ ID NO: 3391160 - RNA, 23 nt, Human
gaacuccaggcccuccucuccca

SEQ ID NO: 3391161 - RNA, 20 nt, Human
gaacucccaagaacagcagg

SEQ ID NO: 3391162 - RNA, 21 nt, Human
gaacucccaagaacagcaggc

SEQ ID NO: 3391163 - RNA, 19 nt, Human
gaacucccagcaacacaag

SEQ ID NO: 3391164 - RNA, 15 nt, Human
gaacuccugaccuca

SEQ ID NO: 3391165 - RNA, 17 nt, Human
gaacuccugccauaguc

SEQ ID NO: 3391166 - RNA, 11 nt, Human
gaacuccuggg

SEQ ID NO: 3391167 - RNA, 13 nt, Human
gaacuccuuggcc

SEQ ID NO: 3391168 - RNA, 21 nt, Human
gaacuccuuggccuagcccac

SEQ ID NO: 3391169 - RNA, 18 nt, Human
gaacucgcgcucaguaaa

SEQ ID NO: 3391170 - RNA, 19 nt, Human
gaacucuaucugggccugg

SEQ ID NO: 3391171 - RNA, 17 nt, Human
gaacucucuccacccua

SEQ ID NO: 3391172 - RNA, 15 nt, Human
gaacucuuagaaaug

SEQ ID NO: 3391173 - RNA, 22 nt, Human
gaacucuuccuccaaggacaga

SEQ ID NO: 3391174 - RNA, 18 nt, Human
gaacucuuucuggccugc

SEQ ID NO: 3391175 - RNA, 16 nt, Human
gaacugaaaacauaaa

SEQ ID NO: 3391176 - RNA, 19 nt, Human
gaacugaaaacauaaaaag

SEQ ID NO: 3391177 - RNA, 17 nt, Human
gaacugaaaagagagca

SEQ ID NO: 3391178 - RNA, 18 nt, Human
gaacugaaaagagagcag

SEQ ID NO: 3391179 - RNA, 21 nt, Human
gaacugaaaagagagcagaga

SEQ ID NO: 3391180 - RNA, 13 nt, Human
gaacugaaaucau

SEQ ID NO: 3391181 - RNA, 17 nt, Human
gaacugaaguuucacau

SEQ ID NO: 3391182 - RNA, 17 nt, Human
gaacugagcuccucugg

SEQ ID NO: 3391183 - RNA, 21 nt, Human
gaacugagcuccucugggcag

SEQ ID NO: 3391184 - RNA, 15 nt, Human
gaacugagcuuggaa

SEQ ID NO: 3391185 - RNA, 21 nt, Human
gaacugagcuuggaagcuucu

SEQ ID NO: 3391186 - RNA, 22 nt, Human
gaacugagcuuggaagcuucug

SEQ ID NO: 3391187 - RNA, 16 nt, Human
gaacugaugacacuga

SEQ ID NO: 3391188 - RNA, 23 nt, Human
gaacugauucacaucucauuuuu

SEQ ID NO: 3391189 - RNA, 18 nt, Human
gaacugcagaccuguccu

SEQ ID NO: 3391190 - RNA, 21 nt, Human
gaacugcagcaaucuuugaaa

SEQ ID NO: 3391191 - RNA, 16 nt, Human
gaacugcaggcccugg

SEQ ID NO: 3391192 - RNA, 21 nt, Human
gaacugcaggcccuggccucc

SEQ ID NO: 3391193 - RNA, 15 nt, Human
gaacugcauauguuu

SEQ ID NO: 3391194 - RNA, 23 nt, Human
gaacugcauggaccuaacauucg

SEQ ID NO: 3391195 - RNA, 17 nt, Human
gaacugcauguauaaau

SEQ ID NO: 3391196 - RNA, 18 nt, Human
gaacugccauuauuuucu

SEQ ID NO: 3391197 - RNA, 20 nt, Human
gaacugccauuauuuucugu

SEQ ID NO: 3391198 - RNA, 22 nt, Human
gaacugcuagucaagugcgucc

SEQ ID NO: 3391199 - RNA, 14 nt, Human
gaacugcugccacu

SEQ ID NO: 3391200 - RNA, 15 nt, Human
gaacugcugccacug

SEQ ID NO: 3391201 - RNA, 16 nt, Human
gaacugcugccacuga

SEQ ID NO: 3391202 - RNA, 20 nt, Human
gaacuggacccuguugcuaa

SEQ ID NO: 3391203 - RNA, 21 nt, Human
gaacuggacucaggaugccca

SEQ ID NO: 3391204 - RNA, 23 nt, Human
gaacuggacucaggaugcccagg

SEQ ID NO: 3391205 - RNA, 14 nt, Human
gaacuggccaagcu

SEQ ID NO: 3391206 - RNA, 16 nt, Human
gaacuggccaagcuga

SEQ ID NO: 3391207 - RNA, 16 nt, Human
gaacuggguaaaugca

SEQ ID NO: 3391208 - RNA, 20 nt, Human
gaacuggucaccaugaaacu

SEQ ID NO: 3391209 - RNA, 17 nt, Human
gaacuguccagagagca

SEQ ID NO: 3391210 - RNA, 21 nt, Human
gaacugucucucaugaaccuc

SEQ ID NO: 3391211 - RNA, 22 nt, Human
gaacugugaggguaaaggcuau

SEQ ID NO: 3391212 - RNA, 22 nt, Human
gaacugugcauagugcugggau

SEQ ID NO: 3391213 - RNA, 20 nt, Human
gaacuguguuucaaguucaa

SEQ ID NO: 3391214 - RNA, 15 nt, Human
gaacuuaaauaaaug

SEQ ID NO: 3391215 - RNA, 20 nt, Human
gaacuuaacaugcuguguaa

SEQ ID NO: 3391216 - RNA, 22 nt, Human
gaacuuaacaugcuguguaagc

SEQ ID NO: 3391217 - RNA, 20 nt, Human
gaacuucaccugcaaagcuc

SEQ ID NO: 3391218 - RNA, 23 nt, Human
gaacuucgcaucaaaagacaauu

SEQ ID NO: 3391219 - RNA, 19 nt, Human
gaacuugaagccugcuccu

SEQ ID NO: 3391220 - RNA, 12 nt, Human
gaacuugacaau

SEQ ID NO: 3391221 - RNA, 23 nt, Human
gaacuugcauugugauuggccug

SEQ ID NO: 3391222 - RNA, 12 nt, Human
gaacuugccucu

SEQ ID NO: 3391223 - RNA, 24 nt, Human
gaacuugcgagaaauucguguguu

SEQ ID NO: 3391224 - RNA, 13 nt, Human
gaacuugcugccu

SEQ ID NO: 3391225 - RNA, 14 nt, Human
gaacuugcugccuc

SEQ ID NO: 3391226 - RNA, 14 nt, Human
gaacuugcugcugu

SEQ ID NO: 3391227 - RNA, 16 nt, Human
gaacuuggcgcugccc

SEQ ID NO: 3391228 - RNA, 17 nt, Human
gaacuugggccacugug

SEQ ID NO: 3391229 - RNA, 22 nt, Human
gaacuuggggaguuaagaccug

SEQ ID NO: 3391230 - RNA, 24 nt, Human
gaagccaggaauuucccaggaccc

SEQ ID NO: 3391231 - RNA, 15 nt, Human
gaagccaggagcaaa

SEQ ID NO: 3391232 - RNA, 17 nt, Human
gaagccaucaccucaga

SEQ ID NO: 3391233 - RNA, 23 nt, Human
gaagccaugaguuccagaaagua

SEQ ID NO: 3391234 - RNA, 12 nt, Human
gaagccaugucu

SEQ ID NO: 3391235 - RNA, 16 nt, Human
gaagccauugucuucg

SEQ ID NO: 3391236 - RNA, 14 nt, Human
gaagcccaauaaac

SEQ ID NO: 3391237 - RNA, 18 nt, Human
gaagcccaauaaaccucu

SEQ ID NO: 3391238 - RNA, 19 nt, Human
gaagcccagccccuacugc

SEQ ID NO: 3391239 - RNA, 20 nt, Human
gaagcccagccccuacugcu

SEQ ID NO: 3391240 - RNA, 18 nt, Human
ucagaccgucuuccucca

SEQ ID NO: 3391241 - RNA, 21 nt, Human
ucagaccuuggaucagaugaa

SEQ ID NO: 3391242 - RNA, 18 nt, Human
ucagaccuuuuaacuccu

SEQ ID NO: 3391243 - RNA, 17 nt, Human
ucagacgccugaggaac

SEQ ID NO: 3391244 - RNA, 19 nt, Human
ucagacuaagaaauauucc

SEQ ID NO: 3391245 - RNA, 22 nt, Human
ucagacucccauuccugaagaa

SEQ ID NO: 3391246 - RNA, 18 nt, Human
ucagacucuaagaaagaa

SEQ ID NO: 3391247 - RNA, 17 nt, Human
ucagacucucagcccag

SEQ ID NO: 3391248 - RNA, 19 nt, Human
ucagacucucagcccagaa

SEQ ID NO: 3391249 - RNA, 19 nt, Human
ucagacugaacauguacac

SEQ ID NO: 3391250 - RNA, 18 nt, Human
ucagacugacaguuuaca

SEQ ID NO: 3391251 - RNA, 14 nt, Human
ucagacugcaccca

SEQ ID NO: 3391252 - RNA, 16 nt, Human
ucagacugcacccagg

SEQ ID NO: 3391253 - RNA, 14 nt, Human
ucagacugcaugua

SEQ ID NO: 3391254 - RNA, 15 nt, Human
ucagacugcugggac

SEQ ID NO: 3391255 - RNA, 21 nt, Human
ucagacugcugggacuggcca

SEQ ID NO: 3391256 - RNA, 14 nt, Human
ucagacuggcuggc

SEQ ID NO: 3391257 - RNA, 13 nt, Human
ucagacuggggca

SEQ ID NO: 3391258 - RNA, 13 nt, Human
ucagacuugucaa

SEQ ID NO: 3391259 - RNA, 13 nt, Human
ucagacuuugcuu

SEQ ID NO: 3391260 - RNA, 21 nt, Human
ucagacuuuggaaaaugcauu

SEQ ID NO: 3391261 - RNA, 15 nt, Human
ucagacuuuuguaca

SEQ ID NO: 3391262 - RNA, 16 nt, Human
ucagagaaaugucugu

SEQ ID NO: 3391263 - RNA, 12 nt, Human
ucagagaauuuc

SEQ ID NO: 3391264 - RNA, 14 nt, Human
ucagagacaaaaua

SEQ ID NO: 3391265 - RNA, 22 nt, Human
ucagagacaaaauauuucccau

SEQ ID NO: 3391266 - RNA, 15 nt, Human
ucagagacagcugau

SEQ ID NO: 3391267 - RNA, 20 nt, Human
ucagagacaggaagucuuca

SEQ ID NO: 3391268 - RNA, 16 nt, Human
ucagagaccagggcuc

SEQ ID NO: 3391269 - RNA, 17 nt, Human
ucagagacucagggccc

SEQ ID NO: 3391270 - RNA, 20 nt, Human
ucagagacucagggccccag

SEQ ID NO: 3391271 - RNA, 17 nt, Human
ucagagacuccugcagg

SEQ ID NO: 3391272 - RNA, 14 nt, Human
ucagagagaguguu

SEQ ID NO: 3391273 - RNA, 20 nt, Human
ucagagagcagugcuuuugg

SEQ ID NO: 3391274 - RNA, 22 nt, Human
ucagagaggccuuuuggaaugu

SEQ ID NO: 3391275 - RNA, 16 nt, Human
ucagagagggugggag

SEQ ID NO: 3391276 - RNA, 23 nt, Human
ucagagauguccauuuuuacaag

SEQ ID NO: 3391277 - RNA, 20 nt, Human
ucagagcagcagugaaaaca

SEQ ID NO: 3391278 - RNA, 14 nt, Human
ucagagcagggguc

SEQ ID NO: 3391279 - RNA, 21 nt, Human
ucagagcccauggcuucccug

SEQ ID NO: 3391280 - RNA, 18 nt, Human
ucagagccccuacagcau

SEQ ID NO: 3391281 - RNA, 16 nt, Human
ucagagccgugguccu

SEQ ID NO: 3391282 - RNA, 20 nt, Human
ucagagccgugguccuuugg

SEQ ID NO: 3391283 - RNA, 21 nt, Human
ucagagccuccuuucuggcuu

SEQ ID NO: 3391284 - RNA, 18 nt, Human
ucagagccugcaguuauu

SEQ ID NO: 3391285 - RNA, 17 nt, Human
ucagagccuuuccucaa

SEQ ID NO: 3391286 - RNA, 22 nt, Human
ucagagcuaaacuccuuccugg

SEQ ID NO: 3391287 - RNA, 23 nt, Human
ucagagcuaagggugggugcuca

SEQ ID NO: 3391288 - RNA, 18 nt, Human
ucagagcuacuugggcca

SEQ ID NO: 3391289 - RNA, 14 nt, Human
ucagagcugacaca

SEQ ID NO: 3391290 - RNA, 18 nt, Human
ucagagcugacacaggau

SEQ ID NO: 3391291 - RNA, 15 nt, Human
ucagagcugcccucu

SEQ ID NO: 3391292 - RNA, 18 nt, Human
ucagagcugcccucuccu

SEQ ID NO: 3391293 - RNA, 19 nt, Human
ucagagcugcccucuccug

SEQ ID NO: 3391294 - RNA, 23 nt, Human
ucagagcugcccucuccugggca

SEQ ID NO: 3391295 - RNA, 15 nt, Human
ucagagcugggaggg

SEQ ID NO: 3391296 - RNA, 18 nt, Human
ucagaggaccuguauuua

SEQ ID NO: 3391297 - RNA, 22 nt, Human
ucagaggaccuguauuuaagca

SEQ ID NO: 3391298 - RNA, 18 nt, Human
ucagaggauggccagugu

SEQ ID NO: 3391299 - RNA, 20 nt, Human
ucagaggauggccagugucu

SEQ ID NO: 3391300 - RNA, 22 nt, Human
ucagaggccccaauaccccaug

SEQ ID NO: 3391301 - RNA, 18 nt, Human
ucagaggcccucgcugcc

SEQ ID NO: 3391302 - RNA, 20 nt, Human
ucagagggcccaaauggcag

SEQ ID NO: 3391303 - RNA, 18 nt, Human
ucagagggggacugcugc

SEQ ID NO: 3391304 - RNA, 18 nt, Human
ucagagguagggcugcca

SEQ ID NO: 3391305 - RNA, 17 nt, Human
ucagagguucuuugagg

SEQ ID NO: 3391306 - RNA, 23 nt, Human
ucagagguuuaccuagagaacag

SEQ ID NO: 3391307 - RNA, 23 nt, Human
ucagagugcaagccccugcucca

SEQ ID NO: 3391308 - RNA, 19 nt, Human
ucagaguucuuuuugaagu

SEQ ID NO: 3391309 - RNA, 13 nt, Human
ucagauaacuguu

SEQ ID NO: 3391310 - RNA, 20 nt, Human
ucagauaagguaaaaugcca

SEQ ID NO: 3391311 - RNA, 23 nt, Human
ucagauaagguaaaaugccauga

SEQ ID NO: 3391312 - RNA, 14 nt, Human
ucagauacaaugua

SEQ ID NO: 3391313 - RNA, 15 nt, Human
ucagauacuggauug

SEQ ID NO: 3391314 - RNA, 16 nt, Human
ucagauacuggauugu

SEQ ID NO: 3391315 - RNA, 19 nt, Human
ucagauacuggauuguacu

SEQ ID NO: 3391316 - RNA, 20 nt, Human
ucagauauaaaagacugacc

SEQ ID NO: 3391317 - RNA, 18 nt, Human
ucagauauauaucauauu

SEQ ID NO: 3391318 - RNA, 22 nt, Human
ucagauauuuuuucagaaauau

SEQ ID NO: 3391319 - RNA, 19 nt, Human
ucagaucacugaauuuaua

SEQ ID NO: 3391320 - RNA, 16 nt, Human
ucagaucauggcaucc

SEQ ID NO: 3391321 - RNA, 20 nt, Human
ucagaucauuaucagccugu

SEQ ID NO: 3391322 - RNA, 14 nt, Human
ucagauccaggagc

SEQ ID NO: 3391323 - RNA, 15 nt, Human
ucagauccaggagcu

SEQ ID NO: 3391324 - RNA, 18 nt, Human
ucagauccaggagcucca

SEQ ID NO: 3391325 - RNA, 17 nt, Human
ucagauccuuguuucaa

SEQ ID NO: 3391326 - RNA, 20 nt, Human
ucagaucugccuaaggacuu

SEQ ID NO: 3391327 - RNA, 20 nt, Human
ucagaucuuaauauaaauuc

SEQ ID NO: 3391328 - RNA, 13 nt, Human
ucagaucuucugu

SEQ ID NO: 3391329 - RNA, 19 nt, Human
ucagaucuuucuccuugaa

SEQ ID NO: 3391330 - RNA, 15 nt, Human
ucagaugacuagaaa

SEQ ID NO: 3391331 - RNA, 13 nt, Human
ucagaugagaaca

SEQ ID NO: 3391332 - RNA, 15 nt, Human
ucagaugagaacaaa

SEQ ID NO: 3391333 - RNA, 17 nt, Human
ucagaugagaacaaagc

SEQ ID NO: 3391334 - RNA, 20 nt, Human
ucagaugagaacaaagcugu

SEQ ID NO: 3391335 - RNA, 18 nt, Human
ucagaugcacaugagcug

SEQ ID NO: 3391336 - RNA, 22 nt, Human
ucagaugcauccuuucauaaga

SEQ ID NO: 3391337 - RNA, 16 nt, Human
ucagaugccacuucua

SEQ ID NO: 3391338 - RNA, 20 nt, Human
ucagaugccacuucuaagaa

SEQ ID NO: 3391339 - RNA, 12 nt, Human
ucagaugcucaa

SEQ ID NO: 3391340 - RNA, 15 nt, Human
ucagaugcuccaaga

SEQ ID NO: 3391341 - RNA, 22 nt, Human
ucagaugcuccaagauucuaga

SEQ ID NO: 3391342 - RNA, 14 nt, Human
ucagaugcuucugg

SEQ ID NO: 3391343 - RNA, 18 nt, Human
ucagaugcuucugggaga

SEQ ID NO: 3391344 - RNA, 19 nt, Human
ucagauggaaauauuuuga

SEQ ID NO: 3391345 - RNA, 22 nt, Human
ucagauggaaccgcaggaagcu

SEQ ID NO: 3391346 - RNA, 23 nt, Human
ucagauggaaccgcaggaagcug

SEQ ID NO: 3391347 - RNA, 15 nt, Human
ucagauggcagcuuu

SEQ ID NO: 3391348 - RNA, 16 nt, Human
ucagauggcagcuuuu

SEQ ID NO: 3391349 - RNA, 17 nt, Human
ucagauggcagcuuuua

SEQ ID NO: 3391350 - RNA, 15 nt, Human
ucagaugggaagaca

SEQ ID NO: 3391351 - RNA, 13 nt, Human
ucagauguaaugu

SEQ ID NO: 3391352 - RNA, 23 nt, Human
ucagaugucccuugaugcacaga

SEQ ID NO: 3391353 - RNA, 13 nt, Human
ucagaugucuucu

SEQ ID NO: 3391354 - RNA, 17 nt, Human
ucagaugucuucugccu

SEQ ID NO: 3391355 - RNA, 19 nt, Human
ucagaugucuucugccugu

SEQ ID NO: 3391356 - RNA, 21 nt, Human
ucagaugucuucugccuguua

SEQ ID NO: 3391357 - RNA, 22 nt, Human
ucagaugucuucugccuguuau

SEQ ID NO: 3391358 - RNA, 17 nt, Human
ucagauguggagccagg

SEQ ID NO: 3391359 - RNA, 14 nt, Human
uuucaaauuguauc

SEQ ID NO: 3391360 - RNA, 20 nt, Human
uuucaaauuuagaaacuaau

SEQ ID NO: 3391361 - RNA, 23 nt, Human
uuucaaauuuagaaacuaauuga

SEQ ID NO: 3391362 - RNA, 14 nt, Human
uuucaaauuucaca

SEQ ID NO: 3391363 - RNA, 23 nt, Human
uuucaacaaguagcuaaagucug

SEQ ID NO: 3391364 - RNA, 23 nt, Human
uuucaaccccacccuguuuggau

SEQ ID NO: 3391365 - RNA, 16 nt, Human
uuucaacgcagcccug

SEQ ID NO: 3391366 - RNA, 23 nt, Human
uuucaacggaaagugcugucuua

SEQ ID NO: 3391367 - RNA, 16 nt, Human
uuucaacucauugcau

SEQ ID NO: 3391368 - RNA, 17 nt, Human
uuucaagaaacugagga

SEQ ID NO: 3391369 - RNA, 19 nt, Human
uuucaagaaacugaggaau

SEQ ID NO: 3391370 - RNA, 14 nt, Human
uuucaagaaccugg

SEQ ID NO: 3391371 - RNA, 16 nt, Human
uuucaagaaccuggaa

SEQ ID NO: 3391372 - RNA, 13 nt, Human
uuucaagaacuug

SEQ ID NO: 3391373 - RNA, 20 nt, Human
uuucaagacauuaaaucuau

SEQ ID NO: 3391374 - RNA, 18 nt, Human
uuucaagaccccugucuu

SEQ ID NO: 3391375 - RNA, 22 nt, Human
uuucaagcagucgugccugugu

SEQ ID NO: 3391376 - RNA, 20 nt, Human
uuucaaggaagguucaugua

SEQ ID NO: 3391377 - RNA, 19 nt, Human
uuucaaggaaguagaaaca

SEQ ID NO: 3391378 - RNA, 17 nt, Human
uuucaaggcacucuaga

SEQ ID NO: 3391379 - RNA, 20 nt, Human
uuucaaggcacucuagauuc

SEQ ID NO: 3391380 - RNA, 22 nt, Human
uuucaaggcacucuagauucca

SEQ ID NO: 3391381 - RNA, 19 nt, Human
uuucaagggcuuuccugug

SEQ ID NO: 3391382 - RNA, 18 nt, Human
uuucaaguacacugaauu

SEQ ID NO: 3391383 - RNA, 18 nt, Human
uuuuaacuuuguuuuauu

SEQ ID NO: 3391384 - RNA, 18 nt, Human
uuuuaagaaagaaauacu

SEQ ID NO: 3391385 - RNA, 22 nt, Human
uuuuaagaaagaaauacuguau

SEQ ID NO: 3391386 - RNA, 16 nt, Human
uuuuaagaaauguagu

SEQ ID NO: 3391387 - RNA, 13 nt, Human
uuuuaagaauauc

SEQ ID NO: 3391388 - RNA, 13 nt, Human
uuuuaagauagug

SEQ ID NO: 3391389 - RNA, 16 nt, Human
uuuuaagauaguguaa

SEQ ID NO: 3391390 - RNA, 12 nt, Human
uuuuaagauuuu

SEQ ID NO: 3391391 - RNA, 22 nt, Human
uuuuaagcauuacucuuguaag

SEQ ID NO: 3391392 - RNA, 19 nt, Human
uuuuaagccuuuguugaac

SEQ ID NO: 3391393 - RNA, 20 nt, Human
uuuuaagccuuuguugaacu

SEQ ID NO: 3391394 - RNA, 21 nt, Human
uuuuaagcugcaaaucugaug

SEQ ID NO: 3391395 - RNA, 15 nt, Human
uuuuaaggacugacu

SEQ ID NO: 3391396 - RNA, 23 nt, Human
uuuuaaggauaaaucauaaaguc

SEQ ID NO: 3391397 - RNA, 23 nt, Human
uuuuaaggguuuguggaaaauga

SEQ ID NO: 3391398 - RNA, 23 nt, Human
uuuuaaggucuuucaguacuuuu

SEQ ID NO: 3391399 - RNA, 15 nt, Human
uuuuaaguauuuagg

SEQ ID NO: 3391400 - RNA, 17 nt, Human
uuuuaaguauuuauaua

SEQ ID NO: 3391401 - RNA, 15 nt, Human
uuuuaagugcugcau

SEQ ID NO: 3391402 - RNA, 19 nt, Human
uuuuaagugcuuuguaaug

SEQ ID NO: 3391403 - RNA, 23 nt, Human
uuuuaaguuaauagauuuuuuca

SEQ ID NO: 3391404 - RNA, 22 nt, Human
uuuuaaguuacacauuuuucag

SEQ ID NO: 3391405 - RNA, 15 nt, Human
uuuuaaguucuuaug

SEQ ID NO: 3391406 - RNA, 16 nt, Human
uuuuaaguuguuugca

SEQ ID NO: 3391407 - RNA, 15 nt, Human
uuuuaaguuugcacu

SEQ ID NO: 3391408 - RNA, 14 nt, Human
uuuuaauaaacacu

SEQ ID NO: 3391409 - RNA, 15 nt, Human
uuuuaauaaacuacu

SEQ ID NO: 3391410 - RNA, 21 nt, Human
uuuuaauaaacuacucuuuga

SEQ ID NO: 3391411 - RNA, 14 nt, Human
uuuuaauauaaauu

SEQ ID NO: 3391412 - RNA, 22 nt, Human
uuuuaauauuauuacuguugau

SEQ ID NO: 3391413 - RNA, 22 nt, Human
uuuuaaucagacaaaguaauuc

SEQ ID NO: 3391414 - RNA, 12 nt, Human
uuuuaaucauga

SEQ ID NO: 3391415 - RNA, 14 nt, Human
uuuuaaucaugaaa

SEQ ID NO: 3391416 - RNA, 20 nt, Human
uuuuaauccgccaauauuag

SEQ ID NO: 3391417 - RNA, 17 nt, Human
uuuuaaucugaaauucu

SEQ ID NO: 3391418 - RNA, 15 nt, Human
uuuuaaugaaaagga

SEQ ID NO: 3391419 - RNA, 19 nt, Human
uuuuaaugaaaaggaauca

SEQ ID NO: 3391420 - RNA, 17 nt, Human
uuuuaaugauuguuuaa

SEQ ID NO: 3391421 - RNA, 18 nt, Human
uuuuaauggauuguuaau

SEQ ID NO: 3391422 - RNA, 21 nt, Human
uuuuaauggcagcagaaaacu

SEQ ID NO: 3391423 - RNA, 22 nt, Human
uuuuaauggggguagcagcugg

SEQ ID NO: 3391424 - RNA, 13 nt, Human
uuuuaaugugcug

SEQ ID NO: 3391425 - RNA, 18 nt, Human
uuuuaaugugcuguguaa

SEQ ID NO: 3391426 - RNA, 23 nt, Human
uuuuaauuauuauuuauauaugu

SEQ ID NO: 3391427 - RNA, 12 nt, Human
uuuuaauuguau

SEQ ID NO: 3391428 - RNA, 13 nt, Human
uuuuaauuguauu

SEQ ID NO: 3391429 - RNA, 22 nt, Human
uuuuaauuguauuuuuguuguu

SEQ ID NO: 3391430 - RNA, 12 nt, Human
uuuuaauuguca

SEQ ID NO: 3391431 - RNA, 14 nt, Human
uuuuaauugucaug

SEQ ID NO: 3391432 - RNA, 10 nt, Human
uuuuaauuua

SEQ ID NO: 3391433 - RNA, 14 nt, Human
uuuuaauuuaguaa

SEQ ID NO: 3391434 - RNA, 13 nt, Human
uuuuaauuugaua

SEQ ID NO: 3391435 - RNA, 21 nt, Human
uuuuaauuugguuuucacauu

SEQ ID NO: 3391436 - RNA, 23 nt, Human
uuuuacaaaggcuguauucagca

SEQ ID NO: 3391437 - RNA, 14 nt, Human
uuuuacaaauguua

SEQ ID NO: 3391438 - RNA, 22 nt, Human
uuuuacaaauguuaaaaugugu

SEQ ID NO: 3391439 - RNA, 12 nt, Human
uuuuacaaguaa

SEQ ID NO: 3391440 - RNA, 12 nt, Human
uuuuacaauaaa

SEQ ID NO: 3391441 - RNA, 15 nt, Human
uccacauuguuuuaa

SEQ ID NO: 3391442 - RNA, 16 nt, Human
uccacauuguuuuaaa

SEQ ID NO: 3391443 - RNA, 18 nt, Human
uccacauuucccccuagc

SEQ ID NO: 3391444 - RNA, 15 nt, Human
uccacauuucuaaaa

SEQ ID NO: 3391445 - RNA, 18 nt, Human
uccaccaacccaucagaa

SEQ ID NO: 3391446 - RNA, 17 nt, Human
uccaccaagaaagcagg

SEQ ID NO: 3391447 - RNA, 18 nt, Human
uccaccaagccuggucag

SEQ ID NO: 3391448 - RNA, 22 nt, Human
uccaccaagccuggucagccca

SEQ ID NO: 3391449 - RNA, 22 nt, Human
uccaccaccacuggccaccagg

SEQ ID NO: 3391450 - RNA, 16 nt, Human
uccaccaccucccuca

SEQ ID NO: 3391451 - RNA, 12 nt, Human
uccaccagcauc

SEQ ID NO: 3391452 - RNA, 15 nt, Human
uccaccaggaaccuc

SEQ ID NO: 3391453 - RNA, 19 nt, Human
uccaccaggaaccucuuca

SEQ ID NO: 3391454 - RNA, 15 nt, Human
uccaccaucaagcca

SEQ ID NO: 3391455 - RNA, 22 nt, Human
uccacccauaauccuuucugcc

SEQ ID NO: 3391456 - RNA, 18 nt, Human
uccaccccaagagaacuc

SEQ ID NO: 3391457 - RNA, 19 nt, Human
uccaccccaagagaacucg

SEQ ID NO: 3391458 - RNA, 12 nt, Human
uccaccccacuc

SEQ ID NO: 3391459 - RNA, 20 nt, Human
uccaccccagugcacccacu

SEQ ID NO: 3391460 - RNA, 12 nt, Human
uccaccccaucc

SEQ ID NO: 3391461 - RNA, 16 nt, Human
uccacccccagcugcu

SEQ ID NO: 3391462 - RNA, 22 nt, Human
uccaccccccagaaccuguccu

SEQ ID NO: 3391463 - RNA, 13 nt, Human
uccacccccuccc

SEQ ID NO: 3391464 - RNA, 19 nt, Human
uccacccccucccuggccu

SEQ ID NO: 3391465 - RNA, 21 nt, Human
uccaccccuuucuagaccaau

SEQ ID NO: 3391466 - RNA, 13 nt, Human
uccacccuccacc

SEQ ID NO: 3391467 - RNA, 18 nt, Human
uccacccuccaccuucca

SEQ ID NO: 3391468 - RNA, 14 nt, Human
uccacccugccugc

SEQ ID NO: 3391469 - RNA, 12 nt, Human
uccacccugucc

SEQ ID NO: 3391470 - RNA, 20 nt, Human
uccacccugucccccagcuc

SEQ ID NO: 3391471 - RNA, 21 nt, Human
uccacccugucccccagcucu

SEQ ID NO: 3391472 - RNA, 14 nt, Human
uccacccuuggccu

SEQ ID NO: 3391473 - RNA, 14 nt, Human
uccaccgcugccua

SEQ ID NO: 3391474 - RNA, 19 nt, Human
uccaccgcugccuaagugg

SEQ ID NO: 3391475 - RNA, 14 nt, Human
uccaccuacaugag

SEQ ID NO: 3391476 - RNA, 20 nt, Human
uccaccuaguggcuguccag

SEQ ID NO: 3391477 - RNA, 14 nt, Human
uccaccucacccca

SEQ ID NO: 3391478 - RNA, 13 nt, Human
uccaccucagccu

SEQ ID NO: 3391479 - RNA, 14 nt, Human
uccaccuccaucuu

SEQ ID NO: 3391480 - RNA, 17 nt, Human
uccaccucccugcaaua

SEQ ID NO: 3391481 - RNA, 13 nt, Human
uccaccuccuucu

SEQ ID NO: 3391482 - RNA, 15 nt, Human
uccaccugccaggga

SEQ ID NO: 3391483 - RNA, 21 nt, Human
uccaccugccagggacagagg

SEQ ID NO: 3391484 - RNA, 13 nt, Human
uccaccugcuccc

SEQ ID NO: 3391485 - RNA, 18 nt, Human
uccaccugcucccaggcc

SEQ ID NO: 3391486 - RNA, 17 nt, Human
uccaccugcucugcuga

SEQ ID NO: 3391487 - RNA, 13 nt, Human
uccaccuggcccc

SEQ ID NO: 3391488 - RNA, 20 nt, Human
uccaccugguacucccucuc

SEQ ID NO: 3391489 - RNA, 23 nt, Human
uccaccugguacucccucucagg

SEQ ID NO: 3391490 - RNA, 16 nt, Human
uccaccugucucagcc

SEQ ID NO: 3391491 - RNA, 17 nt, Human
uccaccugucucagccu

SEQ ID NO: 3391492 - RNA, 12 nt, Human
uccaccuguggg

SEQ ID NO: 3391493 - RNA, 12 nt, Human
uccaccuuccca

SEQ ID NO: 3391494 - RNA, 18 nt, Human
uccaccuucccaugcccu

SEQ ID NO: 3391495 - RNA, 19 nt, Human
uccaccuucccaugcccug

SEQ ID NO: 3391496 - RNA, 14 nt, Human
uccacgacugucuc

SEQ ID NO: 3391497 - RNA, 15 nt, Human
uccacgacugucucc

SEQ ID NO: 3391498 - RNA, 18 nt, Human
uccacgacugucuccaug

SEQ ID NO: 3391499 - RNA, 18 nt, Human
uccacgauccugccaccc

SEQ ID NO: 3391500 - RNA, 17 nt, Human
uccacgcgcuucgacuu

SEQ ID NO: 3391501 - RNA, 21 nt, Human
uccacgcgugccguggcacca

SEQ ID NO: 3391502 - RNA, 17 nt, Human
uccacgcugucuccaga

SEQ ID NO: 3391503 - RNA, 18 nt, Human
uccacgcugucuccagac

SEQ ID NO: 3391504 - RNA, 21 nt, Human
uccacgcugucuccagacccc

SEQ ID NO: 3391505 - RNA, 22 nt, Human
uccacgcugucuccagaccccc

SEQ ID NO: 3391506 - RNA, 23 nt, Human
uccacgcugucuccagaccccca

SEQ ID NO: 3391507 - RNA, 14 nt, Human
uccacggagccacu

SEQ ID NO: 3391508 - RNA, 22 nt, Human
uccacggagccacuccucugac

SEQ ID NO: 3391509 - RNA, 14 nt, Human
uccacggcucuagg

SEQ ID NO: 3391510 - RNA, 17 nt, Human
uccacguucaccccucc

SEQ ID NO: 3391511 - RNA, 19 nt, Human
uccacuaaccccgggcggg

SEQ ID NO: 3391512 - RNA, 15 nt, Human
uccacuacaccuggc

SEQ ID NO: 3391513 - RNA, 17 nt, Human
uccacuagugcaaauca

SEQ ID NO: 3391514 - RNA, 21 nt, Human
uccacucagcuguccugcagc

SEQ ID NO: 3391515 - RNA, 15 nt, Human
uccacucaguugcaa

SEQ ID NO: 3391516 - RNA, 21 nt, Human
uccacucaugugacucuuucc

SEQ ID NO: 3391517 - RNA, 15 nt, Human
uccacuccauugucg

SEQ ID NO: 3391518 - RNA, 13 nt, Human
uccacucccagug

SEQ ID NO: 3391519 - RNA, 15 nt, Human
uccacucccagugcu

SEQ ID NO: 3391520 - RNA, 18 nt, Human
uccacuccuccuagccac

SEQ ID NO: 3391521 - RNA, 14 nt, Human
uccacuccuuccug

SEQ ID NO: 3391522 - RNA, 12 nt, Human
uccacucucccc

SEQ ID NO: 3391523 - RNA, 13 nt, Human
uccacucuccccc

SEQ ID NO: 3391524 - RNA, 17 nt, Human
uccacucuccuugcuac

SEQ ID NO: 3391525 - RNA, 22 nt, Human
uccacucucucuuguucuuacu

SEQ ID NO: 3391526 - RNA, 17 nt, Human
uccacucugauagaauu

SEQ ID NO: 3391527 - RNA, 12 nt, Human
uccacucugcuu

SEQ ID NO: 3391528 - RNA, 15 nt, Human
uccacucugcuucuc

SEQ ID NO: 3391529 - RNA, 19 nt, Human
uccacucugcuucucugac

SEQ ID NO: 3391530 - RNA, 20 nt, Human
uccacucugcuucucugacu

SEQ ID NO: 3391531 - RNA, 16 nt, Human
uccacucuuucuuuca

SEQ ID NO: 3391532 - RNA, 15 nt, Human
uccacugagggcagu

SEQ ID NO: 3391533 - RNA, 15 nt, Human
uccacugcccucugu

SEQ ID NO: 3391534 - RNA, 15 nt, Human
uccacugccuucgau

SEQ ID NO: 3391535 - RNA, 17 nt, Human
uccacugggguggccug

SEQ ID NO: 3391536 - RNA, 19 nt, Human
uccacugucacccuccacc

SEQ ID NO: 3391537 - RNA, 21 nt, Human
uccacugugccaugugccagg

SEQ ID NO: 3391538 - RNA, 22 nt, Human
uccacugugccaugugccaggu

SEQ ID NO: 3391539 - RNA, 20 nt, Human
uccacuguguauagaaguag

SEQ ID NO: 3391540 - RNA, 22 nt, Human
uccacuguuuauucaacaacua

SEQ ID NO: 3391541 - RNA, 14 nt, Human
uccacuucaaugca

SEQ ID NO: 3391542 - RNA, 14 nt, Human
uccacuucugacag

SEQ ID NO: 3391543 - RNA, 15 nt, Human
uccacuucugacagc

SEQ ID NO: 3391544 - RNA, 19 nt, Human
uccacuucugacagccuca

SEQ ID NO: 3391545 - RNA, 20 nt, Human
uccacuucuuucagcagacu

SEQ ID NO: 3391546 - RNA, 14 nt, Human
uccacuuggucugu

SEQ ID NO: 3391547 - RNA, 12 nt, Human
uccacuuucagc

SEQ ID NO: 3391548 - RNA, 15 nt, Human
uccacuuucagcugu

SEQ ID NO: 3391549 - RNA, 18 nt, Human
uccacuuucagcugucuu

SEQ ID NO: 3391550 - RNA, 18 nt, Human
uccacuuucagugaaagc

SEQ ID NO: 3391551 - RNA, 21 nt, Human
uccacuuucuagccagaggag

SEQ ID NO: 3391552 - RNA, 20 nt, Human
uccacuuuguuggaaagcag

SEQ ID NO: 3391553 - RNA, 19 nt, Human
uccacuuuguuucgugggg

SEQ ID NO: 3391554 - RNA, 22 nt, Human
uccacuuuguuucguggggagg

SEQ ID NO: 3391555 - RNA, 18 nt, Human
uccacuuuuccaguauuu

SEQ ID NO: 3391556 - RNA, 24 nt, Human
uccacuuuuuaacucguuugcuga

SEQ ID NO: 3391557 - RNA, 15 nt, Human
uccagaaaacuguga

SEQ ID NO: 3391558 - RNA, 17 nt, Human
uccagaaacuuguucuu

SEQ ID NO: 3391559 - RNA, 20 nt, Human
uccagaaacuuguucuucca

SEQ ID NO: 3391560 - RNA, 23 nt, Human
uccagaaagaaaacuuguauuau

SEQ ID NO: 3391561 - RNA, 14 nt, Human
uccagaaagcccca

SEQ ID NO: 3391562 - RNA, 16 nt, Human
uccagaaagccccacc

SEQ ID NO: 3391563 - RNA, 18 nt, Human
uccagaaaggauauuuaa

SEQ ID NO: 3391564 - RNA, 20 nt, Human
uccagaaaugucccuuucuu

SEQ ID NO: 3391565 - RNA, 17 nt, Human
uccagaagaagagaagc

SEQ ID NO: 3391566 - RNA, 17 nt, Human
uccagaagccucuggcu

SEQ ID NO: 3391567 - RNA, 18 nt, Human
uccagaagccucuggcua

SEQ ID NO: 3391568 - RNA, 14 nt, Human
uccagaaggagaca

SEQ ID NO: 3391569 - RNA, 19 nt, Human
uccagaaggagacaggcag

SEQ ID NO: 3391570 - RNA, 19 nt, Human
uccagaagugugacuggcu

SEQ ID NO: 3391571 - RNA, 12 nt, Human
uccagaauaucu

SEQ ID NO: 3391572 - RNA, 12 nt, Human
uccagaaugaag

SEQ ID NO: 3391573 - RNA, 22 nt, Human
uccagaauguauagacaggaaa

SEQ ID NO: 3391574 - RNA, 16 nt, Human
uccagaauugaccuuu

SEQ ID NO: 3391575 - RNA, 22 nt, Human
uccagaauuucccaaagcagug

SEQ ID NO: 3391576 - RNA, 18 nt, Human
uccagaauuuggaaaucc

SEQ ID NO: 3391577 - RNA, 15 nt, Human
uccagacagccugua

SEQ ID NO: 3391578 - RNA, 19 nt, Human
uccagacagggaauuaggc

SEQ ID NO: 3391579 - RNA, 20 nt, Human
uccagacauacgaaacacaa

SEQ ID NO: 3391580 - RNA, 13 nt, Human
uccagacaucaug

SEQ ID NO: 3391581 - RNA, 21 nt, Human
uccagacaucaugaauuuuac

SEQ ID NO: 3391582 - RNA, 19 nt, Human
uccagacauucucgcuucc

SEQ ID NO: 3391583 - RNA, 13 nt, Human
uccagacccccac

SEQ ID NO: 3391584 - RNA, 16 nt, Human
uccagacccccagcaa

SEQ ID NO: 3391585 - RNA, 16 nt, Human
uccagaccccuggcuu

SEQ ID NO: 3391586 - RNA, 23 nt, Human
uuuuaucuccccuucacaugcau

SEQ ID NO: 3391587 - RNA, 19 nt, Human
uuuuaucugaaaucaauua

SEQ ID NO: 3391588 - RNA, 23 nt, Human
uuuuaucugaauuuuuaaacaag

SEQ ID NO: 3391589 - RNA, 13 nt, Human
uuuuaucuucuau

SEQ ID NO: 3391590 - RNA, 19 nt, Human
uuuuaucuuucgugauaaa

SEQ ID NO: 3391591 - RNA, 17 nt, Human
uuuuaucuuuucuacag

SEQ ID NO: 3391592 - RNA, 23 nt, Human
uuuuaugaagaaaaaauacauuu

SEQ ID NO: 3391593 - RNA, 13 nt, Human
uuuuaugagaaau

SEQ ID NO: 3391594 - RNA, 14 nt, Human
uuuuaugagaaaug

SEQ ID NO: 3391595 - RNA, 12 nt, Human
uuuuaugagaug

SEQ ID NO: 3391596 - RNA, 20 nt, Human
uuuuaugauacuugaaaauu

SEQ ID NO: 3391597 - RNA, 15 nt, Human
uuuuaugauccagca

SEQ ID NO: 3391598 - RNA, 13 nt, Human
uuuuaugaugacg

SEQ ID NO: 3391599 - RNA, 15 nt, Human
uuuuaugaugaugaa

SEQ ID NO: 3391600 - RNA, 13 nt, Human
uuuuaugcauguu

SEQ ID NO: 3391601 - RNA, 19 nt, Human
uuuuaugccuuuuauuucu

SEQ ID NO: 3391602 - RNA, 13 nt, Human
uuuuaugcucuuu

SEQ ID NO: 3391603 - RNA, 17 nt, Human
uuuuaugguuacuucuu

SEQ ID NO: 3391604 - RNA, 15 nt, Human
uuuuaugguuauguu

SEQ ID NO: 3391605 - RNA, 19 nt, Human
uuuuaugugaaacauguuu

SEQ ID NO: 3391606 - RNA, 15 nt, Human
uuuuauguugacauu

SEQ ID NO: 3391607 - RNA, 23 nt, Human
uuuuauguugacauuuguuuggu

SEQ ID NO: 3391608 - RNA, 14 nt, Human
uuuuauguuugaau

SEQ ID NO: 3391609 - RNA, 14 nt, Human
uuuuauuaaaacau

SEQ ID NO: 3391610 - RNA, 19 nt, Human
uuuuauuaaaauauuucag

SEQ ID NO: 3391611 - RNA, 12 nt, Human
uuuuauuaauaa

SEQ ID NO: 3391612 - RNA, 19 nt, Human
uuuuauuaauaaacauucu

SEQ ID NO: 3391613 - RNA, 22 nt, Human
uuuuauuaauaaacauucuauc

SEQ ID NO: 3391614 - RNA, 14 nt, Human
uuuuauuaaucacu

SEQ ID NO: 3391615 - RNA, 18 nt, Human
uuuuauuaaucacugugu

SEQ ID NO: 3391616 - RNA, 22 nt, Human
uuuuauuaaucacuguguauau

SEQ ID NO: 3391617 - RNA, 19 nt, Human
uuuuauuaauuuuaguuuu

SEQ ID NO: 3391618 - RNA, 12 nt, Human
uuuuauuaugaa

SEQ ID NO: 3391619 - RNA, 21 nt, Human
uuuuauuaugaaacuugugua

SEQ ID NO: 3391620 - RNA, 12 nt, Human
uuuuauuaugca

SEQ ID NO: 3391621 - RNA, 23 nt, Human
uuuuauuaugcauaacugacaaa

SEQ ID NO: 3391622 - RNA, 14 nt, Human
uuuuauuaugcauu

SEQ ID NO: 3391623 - RNA, 21 nt, Human
uuuuauuaugcuguauuuucu

SEQ ID NO: 3391624 - RNA, 12 nt, Human
uuuuauuaugua

SEQ ID NO: 3391625 - RNA, 19 nt, Human
uuuuauuauuaaugcuuug

SEQ ID NO: 3391626 - RNA, 15 nt, Human
uuuuauuauuucuau

SEQ ID NO: 3391627 - RNA, 13 nt, Human
uuuuauuauuugu

SEQ ID NO: 3391628 - RNA, 14 nt, Human
uuuuauucaaguua

SEQ ID NO: 3391629 - RNA, 18 nt, Human
uuuuauucauaagccaau

SEQ ID NO: 3391630 - RNA, 22 nt, Human
ucccaugauuucauguacugca

SEQ ID NO: 3391631 - RNA, 16 nt, Human
ucccauggagccccag

SEQ ID NO: 3391632 - RNA, 18 nt, Human
ucccauggcuuaaugcuu

SEQ ID NO: 3391633 - RNA, 15 nt, Human
ucccauguaacagaa

SEQ ID NO: 3391634 - RNA, 18 nt, Human
ucccauguaacagaaagg

SEQ ID NO: 3391635 - RNA, 21 nt, Human
ucccauguagcccccuggccu

SEQ ID NO: 3391636 - RNA, 22 nt, Human
ucccauguagcccccuggccuc

SEQ ID NO: 3391637 - RNA, 13 nt, Human
ucccauguaugga

SEQ ID NO: 3391638 - RNA, 22 nt, Human
ucccauguauuuaucucuauuu

SEQ ID NO: 3391639 - RNA, 10 nt, Human
ucccaugugg

SEQ ID NO: 3391640 - RNA, 23 nt, Human
ucccauuaggacaaucagucccc

SEQ ID NO: 3391641 - RNA, 17 nt, Human
ucccauucacucuucca

SEQ ID NO: 3391642 - RNA, 11 nt, Human
ucccauuccag

SEQ ID NO: 3391643 - RNA, 14 nt, Human
ucccauuccaggca

SEQ ID NO: 3391644 - RNA, 14 nt, Human
ucccauucccuggg

SEQ ID NO: 3391645 - RNA, 15 nt, Human
ucccauucccuggga

SEQ ID NO: 3391646 - RNA, 15 nt, Human
ucccauucuaugugu

SEQ ID NO: 3391647 - RNA, 16 nt, Human
ucccauucuccauuug

SEQ ID NO: 3391648 - RNA, 16 nt, Human
ucccauucuuggccca

SEQ ID NO: 3391649 - RNA, 19 nt, Human
ucccauugucccucugccc

SEQ ID NO: 3391650 - RNA, 21 nt, Human
ucccauugucccucugcccca

SEQ ID NO: 3391651 - RNA, 19 nt, Human
ucccauugucuucugaccu

SEQ ID NO: 3391652 - RNA, 15 nt, Human
ucccauuuagaaugg

SEQ ID NO: 3391653 - RNA, 15 nt, Human
ucccauuucucacug

SEQ ID NO: 3391654 - RNA, 14 nt, Human
ucccauuuguaauu

SEQ ID NO: 3391655 - RNA, 16 nt, Human
ucccauuugugccaga

SEQ ID NO: 3391656 - RNA, 17 nt, Human
ucccauuugugccagag

SEQ ID NO: 3391657 - RNA, 19 nt, Human
ucccauuugugccagagga

SEQ ID NO: 3391658 - RNA, 23 nt, Human
ucccauuuucagacugcuuuaaa

SEQ ID NO: 3391659 - RNA, 13 nt, Human
ucccauuuugcaa

SEQ ID NO: 3391660 - RNA, 21 nt, Human
ucccauuuugcaaaauuucca

SEQ ID NO: 3391661 - RNA, 22 nt, Human
ucccauuuugcaaaauuuccag

SEQ ID NO: 3391662 - RNA, 19 nt, Human
ucccauuuuggaaguuuuc

SEQ ID NO: 3391663 - RNA, 20 nt, Human
ucccauuuuggaaguuuuca

SEQ ID NO: 3391664 - RNA, 14 nt, Human
uccccaaaggcuuu

SEQ ID NO: 3391665 - RNA, 22 nt, Human
uccccaaaggcuuugcccugcu

SEQ ID NO: 3391666 - RNA, 19 nt, Human
uccccaaauccgaaccucc

SEQ ID NO: 3391667 - RNA, 14 nt, Human
uccccaacagugug

SEQ ID NO: 3391668 - RNA, 16 nt, Human
uccccaacagugugaa

SEQ ID NO: 3391669 - RNA, 20 nt, Human
uccccaacagugugaaguua

SEQ ID NO: 3391670 - RNA, 21 nt, Human
uccccaacagugugaaguuag

SEQ ID NO: 3391671 - RNA, 23 nt, Human
uccccaacagugugaaguuagaa

SEQ ID NO: 3391672 - RNA, 16 nt, Human
uccccaacccccaacu

SEQ ID NO: 3391673 - RNA, 22 nt, Human
uccccaacccuagguucccugu

SEQ ID NO: 3391674 - RNA, 20 nt, Human
uccccaacccugccccugcc

SEQ ID NO: 3391675 - RNA, 23 nt, Human
uccccaagauucacaccugacuc

SEQ ID NO: 3391676 - RNA, 15 nt, Human
uccccaagccuggca

SEQ ID NO: 3391677 - RNA, 19 nt, Human
uccccacagcgucccuggc

SEQ ID NO: 3391678 - RNA, 20 nt, Human
uccccacagcgucccuggcg

SEQ ID NO: 3391679 - RNA, 15 nt, Human
uccccaccaccccag

SEQ ID NO: 3391680 - RNA, 16 nt, Human
uccccaccagaugcug

SEQ ID NO: 3391681 - RNA, 21 nt, Human
uccccaccagugaaugaaagu

SEQ ID NO: 3391682 - RNA, 15 nt, Human
uccccaccaucugcu

SEQ ID NO: 3391683 - RNA, 18 nt, Human
uccccaccaucugcuguc

SEQ ID NO: 3391684 - RNA, 19 nt, Human
uccccaccaucugcugucu

SEQ ID NO: 3391685 - RNA, 13 nt, Human
uccccaccccugc

SEQ ID NO: 3391686 - RNA, 16 nt, Human
uccccaccccugcccc

SEQ ID NO: 3391687 - RNA, 18 nt, Human
uccccaccccugccccca

SEQ ID NO: 3391688 - RNA, 16 nt, Human
uccccacccuccacuc

SEQ ID NO: 3391689 - RNA, 23 nt, Human
uccccacccugaaagcccugagc

SEQ ID NO: 3391690 - RNA, 16 nt, Human
uccccaccgcagacag

SEQ ID NO: 3391691 - RNA, 22 nt, Human
uccccaccgcagacaggaccag

SEQ ID NO: 3391692 - RNA, 24 nt, Human
uccccaccgcagacaggaccaggg

SEQ ID NO: 3391693 - RNA, 20 nt, Human
uccccaccuucaauuccugg

SEQ ID NO: 3391694 - RNA, 15 nt, Human
uccccacgccacagc

SEQ ID NO: 3391695 - RNA, 16 nt, Human
uccccacgccacagcc

SEQ ID NO: 3391696 - RNA, 19 nt, Human
uccccacgcccuccccucc

SEQ ID NO: 3391697 - RNA, 19 nt, Human
uccccacugacagccuccc

SEQ ID NO: 3391698 - RNA, 18 nt, Human
uccccacugccuacugca

SEQ ID NO: 3391699 - RNA, 20 nt, Human
uccccacugccugcccaccc

SEQ ID NO: 3391700 - RNA, 15 nt, Human
uccccacuguaucua

SEQ ID NO: 3391701 - RNA, 22 nt, Human
uccccacuugagaauuacccuu

SEQ ID NO: 3391702 - RNA, 16 nt, Human
uccccagaccugagcu

SEQ ID NO: 3391703 - RNA, 12 nt, Human
uccccagagcac

SEQ ID NO: 3391704 - RNA, 19 nt, Human
uccccagauugcaacaggc

SEQ ID NO: 3391705 - RNA, 21 nt, Human
uccccagcagggucuuuucau

SEQ ID NO: 3391706 - RNA, 23 nt, Human
uccccagcagggucuuuucaucu

SEQ ID NO: 3391707 - RNA, 19 nt, Human
uccccagcagguggggagg

SEQ ID NO: 3391708 - RNA, 19 nt, Human
uccccagcaugcaccacgg

SEQ ID NO: 3391709 - RNA, 20 nt, Human
uccccagcauuccagccccu

SEQ ID NO: 3391710 - RNA, 13 nt, Human
uccccagccagcc

SEQ ID NO: 3391711 - RNA, 19 nt, Human
uccccagccagccuggcug

SEQ ID NO: 3391712 - RNA, 21 nt, Human
uccccagccagccuggcuggg

SEQ ID NO: 3391713 - RNA, 10 nt, Human
uccccagccc

SEQ ID NO: 3391714 - RNA, 13 nt, Human
uccccagcccacu

SEQ ID NO: 3391715 - RNA, 19 nt, Human
uccccagcccacuggauca

SEQ ID NO: 3391716 - RNA, 17 nt, Human
uccccagcccagagaca

SEQ ID NO: 3391717 - RNA, 23 nt, Human
uccccagcccaggguucccccag

SEQ ID NO: 3391718 - RNA, 19 nt, Human
uccuccaggccugccuccc

SEQ ID NO: 3391719 - RNA, 21 nt, Human
uccuccaggguggcagcaaca

SEQ ID NO: 3391720 - RNA, 10 nt, Human
uccuccaggu

SEQ ID NO: 3391721 - RNA, 12 nt, Human
uccuccaggugc

SEQ ID NO: 3391722 - RNA, 13 nt, Human
uccuccaggugca

SEQ ID NO: 3391723 - RNA, 18 nt, Human
uccuccaggugcacaagc

SEQ ID NO: 3391724 - RNA, 14 nt, Human
uccuccagguuuuu

SEQ ID NO: 3391725 - RNA, 20 nt, Human
uccuccagguuuuucaauua

SEQ ID NO: 3391726 - RNA, 22 nt, Human
uccuccagguuuuucaauuaaa

SEQ ID NO: 3391727 - RNA, 18 nt, Human
uccuccaguaccuugcuu

SEQ ID NO: 3391728 - RNA, 12 nt, Human
uccucccaccuc

SEQ ID NO: 3391729 - RNA, 15 nt, Human
uccucccaccucagc

SEQ ID NO: 3391730 - RNA, 22 nt, Human
uccucccagcuuguaggagcug

SEQ ID NO: 3391731 - RNA, 12 nt, Human
uccucccagggu

SEQ ID NO: 3391732 - RNA, 22 nt, Human
uccucccaggguuuuaacuuug

SEQ ID NO: 3391733 - RNA, 13 nt, Human
uccucccauguca

SEQ ID NO: 3391734 - RNA, 20 nt, Human
uccucccaugucacugcaga

SEQ ID NO: 3391735 - RNA, 14 nt, Human
uccuccccacccuc

SEQ ID NO: 3391736 - RNA, 18 nt, Human
uccuccccacccuccugg

SEQ ID NO: 3391737 - RNA, 19 nt, Human
uccuccccacccuccuggc

SEQ ID NO: 3391738 - RNA, 21 nt, Human
uccuccccacuuguccgcugg

SEQ ID NO: 3391739 - RNA, 10 nt, Human
uccuccccag

SEQ ID NO: 3391740 - RNA, 13 nt, Human
uccuccccagcag

SEQ ID NO: 3391741 - RNA, 22 nt, Human
uccuccccauuagagucagccu

SEQ ID NO: 3391742 - RNA, 14 nt, Human
uccuccccucaagg

SEQ ID NO: 3391743 - RNA, 14 nt, Human
uccuccccucacag

SEQ ID NO: 3391744 - RNA, 19 nt, Human
uccuccccucacagccucu

SEQ ID NO: 3391745 - RNA, 23 nt, Human
uccuccccucacagccucugacc

SEQ ID NO: 3391746 - RNA, 16 nt, Human
uccuccccuccuccug

SEQ ID NO: 3391747 - RNA, 14 nt, Human
uccuccccucucuu

SEQ ID NO: 3391748 - RNA, 14 nt, Human
uccuccccuggacu

SEQ ID NO: 3391749 - RNA, 15 nt, Human
uccuccccuggacuc

SEQ ID NO: 3391750 - RNA, 15 nt, Human
uccuccccuggaggg

SEQ ID NO: 3391751 - RNA, 13 nt, Human
uccuccccuuccc

SEQ ID NO: 3391752 - RNA, 15 nt, Human
uccuccccuucccug

SEQ ID NO: 3391753 - RNA, 17 nt, Human
uccuccccuucccugca

SEQ ID NO: 3391754 - RNA, 14 nt, Human
uccucccgggcccu

SEQ ID NO: 3391755 - RNA, 17 nt, Human
uccucccgggcccuccc

SEQ ID NO: 3391756 - RNA, 12 nt, Human
uccucccuccac

SEQ ID NO: 3391757 - RNA, 13 nt, Human
uccucccuccugc

SEQ ID NO: 3391758 - RNA, 19 nt, Human
uccucccucugaggcugua

SEQ ID NO: 3391759 - RNA, 20 nt, Human
uccucccugacuuuucugug

SEQ ID NO: 3391760 - RNA, 15 nt, Human
uccucccugauguac

SEQ ID NO: 3391761 - RNA, 17 nt, Human
uccucccugauguacag

SEQ ID NO: 3391762 - RNA, 22 nt, Human
uccucccugcaucugaccagca

SEQ ID NO: 3391763 - RNA, 22 nt, Human
uccucccuggcugcccuggccc

SEQ ID NO: 3391764 - RNA, 22 nt, Human
uccucccuuccuuuucccugcu

SEQ ID NO: 3391765 - RNA, 13 nt, Human
uccucccuucugc

SEQ ID NO: 3391766 - RNA, 16 nt, Human
uccucccuucugcuac

SEQ ID NO: 3391767 - RNA, 19 nt, Human
uccucccuuuccuuccuaa

SEQ ID NO: 3391768 - RNA, 19 nt, Human
uccucccuuuuuccuuguc

SEQ ID NO: 3391769 - RNA, 23 nt, Human
uccuccgagccggggaguuucuu

SEQ ID NO: 3391770 - RNA, 23 nt, Human
uccuccgguugcauacuggacuc

SEQ ID NO: 3391771 - RNA, 14 nt, Human
uccuccguccagcc

SEQ ID NO: 3391772 - RNA, 18 nt, Human
uccuccgugcuuccucag

SEQ ID NO: 3391773 - RNA, 14 nt, Human
uccuccuccaccac

SEQ ID NO: 3391774 - RNA, 15 nt, Human
uccuccuccaccacc

SEQ ID NO: 3391775 - RNA, 13 nt, Human
uccuccuccaggg

SEQ ID NO: 3391776 - RNA, 20 nt, Human
uccuccucccacccggcugc

SEQ ID NO: 3391777 - RNA, 13 nt, Human
uccuccucccugc

SEQ ID NO: 3391778 - RNA, 18 nt, Human
uccuccuccuuccuaguu

SEQ ID NO: 3391779 - RNA, 14 nt, Human
uccuccucugacuu

SEQ ID NO: 3391780 - RNA, 11 nt, Human
uccuccucugu

SEQ ID NO: 3391781 - RNA, 12 nt, Human
uccuccucugug

SEQ ID NO: 3391782 - RNA, 12 nt, Human
uccuccugcaga

SEQ ID NO: 3391783 - RNA, 20 nt, Human
uccuccugcagaccacgccc

SEQ ID NO: 3391784 - RNA, 17 nt, Human
uccuccugcccaccugu

SEQ ID NO: 3391785 - RNA, 18 nt, Human
uccuccuggaaccuugcu

SEQ ID NO: 3391786 - RNA, 21 nt, Human
uccuccuggaaccuugcuguc

SEQ ID NO: 3391787 - RNA, 14 nt, Human
uccuccugggcccu

SEQ ID NO: 3391788 - RNA, 22 nt, Human
uccuccugguggguccaggggc

SEQ ID NO: 3391789 - RNA, 13 nt, Human
uccuccuuccaug

SEQ ID NO: 3391790 - RNA, 21 nt, Human
uccuccuuuucacaguucucu

SEQ ID NO: 3391791 - RNA, 14 nt, Human
uccuccuuuuucca

SEQ ID NO: 3391792 - RNA, 20 nt, Human
uccucgaugggagggauggc

SEQ ID NO: 3391793 - RNA, 14 nt, Human
uccucgcagagagg

SEQ ID NO: 3391794 - RNA, 17 nt, Human
uccucgcagagaggcca

SEQ ID NO: 3391795 - RNA, 21 nt, Human
uccucgcagccucucagugcc

SEQ ID NO: 3391796 - RNA, 24 nt, Human
uccucgccugacaaccacuggucu

SEQ ID NO: 3391797 - RNA, 14 nt, Human
uccucggaaccgcu

SEQ ID NO: 3391798 - RNA, 19 nt, Human
uccucggaucaccgagagu

SEQ ID NO: 3391799 - RNA, 14 nt, Human
uccucggcccccuc

SEQ ID NO: 3391800 - RNA, 16 nt, Human
uccucgguacucccau

SEQ ID NO: 3391801 - RNA, 21 nt, Human
uccucguucucccugggaggc

SEQ ID NO: 3391802 - RNA, 15 nt, Human
uccucguuuguguuc

SEQ ID NO: 3391803 - RNA, 16 nt, Human
uccucuaacuuggcuc

SEQ ID NO: 3391804 - RNA, 19 nt, Human
uccucuacuaacaaucagc

SEQ ID NO: 3391805 - RNA, 19 nt, Human
uccucuacuuaaugagaua

SEQ ID NO: 3391806 - RNA, 16 nt, Human
uccucuagaagccaag

SEQ ID NO: 3391807 - RNA, 17 nt, Human
uccucuagaagccaagg

SEQ ID NO: 3391808 - RNA, 21 nt, Human
uccucuaggaggucucuaaga

SEQ ID NO: 3391809 - RNA, 20 nt, Human
uccucuauacaucucucccc

SEQ ID NO: 3391810 - RNA, 14 nt, Human
uccucuauccuggg

SEQ ID NO: 3391811 - RNA, 17 nt, Human
uccucucaccucagccu

SEQ ID NO: 3391812 - RNA, 20 nt, Human
uccucucauccuuuucuccu

SEQ ID NO: 3391813 - RNA, 13 nt, Human
uccucuccaccua

SEQ ID NO: 3391814 - RNA, 17 nt, Human
uccucuccacugccuuc

SEQ ID NO: 3391815 - RNA, 11 nt, Human
uccucuccagg

SEQ ID NO: 3391816 - RNA, 12 nt, Human
uccucuccaggc

SEQ ID NO: 3391817 - RNA, 14 nt, Human
uccucucccauccc

SEQ ID NO: 3391818 - RNA, 22 nt, Human
uccucucccaucccccugcccu

SEQ ID NO: 3391819 - RNA, 18 nt, Human
uccucucccauugucccu

SEQ ID NO: 3391820 - RNA, 20 nt, Human
uccucucccauugucccucu

SEQ ID NO: 3391821 - RNA, 12 nt, Human
uccucuccccag

SEQ ID NO: 3391822 - RNA, 23 nt, Human
uccucuccccagcccagagacau

SEQ ID NO: 3391823 - RNA, 16 nt, Human
uccucuccccuccagc

SEQ ID NO: 3391824 - RNA, 17 nt, Human
uccucuccccucuaagg

SEQ ID NO: 3391825 - RNA, 19 nt, Human
uccucuccccucuaaggcc

SEQ ID NO: 3391826 - RNA, 15 nt, Human
uccucuccuggagga

SEQ ID NO: 3391827 - RNA, 13 nt, Human
uccucuccugucu

SEQ ID NO: 3391828 - RNA, 23 nt, Human
uccucuccuuugaaaccugcucu

SEQ ID NO: 3391829 - RNA, 15 nt, Human
uccucucgcggcccu

SEQ ID NO: 3391830 - RNA, 16 nt, Human
uccucucuaaccuccu

SEQ ID NO: 3391831 - RNA, 19 nt, Human
uccucucuaaccuccuuua

SEQ ID NO: 3391832 - RNA, 21 nt, Human
uccucucuaaccuccuuuacc

SEQ ID NO: 3391833 - RNA, 14 nt, Human
uccucucuauauuu

SEQ ID NO: 3391834 - RNA, 13 nt, Human
uccucucugcccu

SEQ ID NO: 3391835 - RNA, 19 nt, Human
uccucucuggggcuguguu

SEQ ID NO: 3391836 - RNA, 17 nt, Human
uccucucuuccucuucc

SEQ ID NO: 3391837 - RNA, 17 nt, Human
uccucucuuuguucuca

SEQ ID NO: 3391838 - RNA, 20 nt, Human
uccucucuuuguucucagcu

SEQ ID NO: 3391839 - RNA, 21 nt, Human
uccucucuuuguucucagcuc

SEQ ID NO: 3391840 - RNA, 10 nt, Human
uccucugaaa

SEQ ID NO: 3391841 - RNA, 11 nt, Human
uccucugaaac

SEQ ID NO: 3391842 - RNA, 15 nt, Human
uccucugaaacagcu

SEQ ID NO: 3391843 - RNA, 21 nt, Human
uccucugaaacagcugccuua

SEQ ID NO: 3391844 - RNA, 16 nt, Human
uccucugacucagggc

SEQ ID NO: 3391845 - RNA, 17 nt, Human
uccucugacucagggcu

SEQ ID NO: 3391846 - RNA, 13 nt, Human
uccucugagccuu

SEQ ID NO: 3391847 - RNA, 15 nt, Human
uccucugauacccag

SEQ ID NO: 3391848 - RNA, 16 nt, Human
uccucugcagcugacc

SEQ ID NO: 3391849 - RNA, 17 nt, Human
uccucugcagcugaccu

SEQ ID NO: 3391850 - RNA, 20 nt, Human
uccucugcagcugaccucug

SEQ ID NO: 3391851 - RNA, 13 nt, Human
uccucugcagugc

SEQ ID NO: 3391852 - RNA, 15 nt, Human
uccucugcagugccu

SEQ ID NO: 3391853 - RNA, 15 nt, Human
uccucugccaccucc

SEQ ID NO: 3391854 - RNA, 12 nt, Human
uccucugccuca

SEQ ID NO: 3391855 - RNA, 13 nt, Human
uccucugccugcc

SEQ ID NO: 3391856 - RNA, 20 nt, Human
uccucugcucccccuuuucc

SEQ ID NO: 3391857 - RNA, 21 nt, Human
uccucugcugaccugcugacc

SEQ ID NO: 3391858 - RNA, 14 nt, Human
uccucugcugcugg

SEQ ID NO: 3391859 - RNA, 15 nt, Human
uccucugcuugccau

SEQ ID NO: 3391860 - RNA, 16 nt, Human
uccucugcuugccauc

SEQ ID NO: 3391861 - RNA, 19 nt, Human
uccucugcuugccaucccu

SEQ ID NO: 3391862 - RNA, 18 nt, Human
uccucuggacggcaggcu

SEQ ID NO: 3391863 - RNA, 20 nt, Human
uccucuggacggcaggcuca

SEQ ID NO: 3391864 - RNA, 17 nt, Human
uccucuggagccagccg

SEQ ID NO: 3391865 - RNA, 15 nt, Human
uccucuggccugugu

SEQ ID NO: 3391866 - RNA, 23 nt, Human
uccucuggcuggcuaacuggaag

SEQ ID NO: 3391867 - RNA, 22 nt, Human
uccucuggcuuggccacagcca

SEQ ID NO: 3391868 - RNA, 20 nt, Human
uccucugggcaggaccucag

SEQ ID NO: 3391869 - RNA, 17 nt, Human
uccucauguucugcuuu

SEQ ID NO: 3391870 - RNA, 15 nt, Human
uccucauucaaaggg

SEQ ID NO: 3391871 - RNA, 22 nt, Human
uccucauucccucgucuuuccc

SEQ ID NO: 3391872 - RNA, 23 nt, Human
uccucauucccucgucuuuccca

SEQ ID NO: 3391873 - RNA, 15 nt, Human
uccucauuucuccag

SEQ ID NO: 3391874 - RNA, 23 nt, Human
uccucauuugggguagcuagagg

SEQ ID NO: 3391875 - RNA, 17 nt, Human
uccuccaacaccaagca

SEQ ID NO: 3391876 - RNA, 21 nt, Human
uccuccaagacacuguggacu

SEQ ID NO: 3391877 - RNA, 12 nt, Human
uccuccaagcca

SEQ ID NO: 3391878 - RNA, 23 nt, Human
uccuccacauccuuucuaaacaa

SEQ ID NO: 3391879 - RNA, 13 nt, Human
uccuccacauuug

SEQ ID NO: 3391880 - RNA, 18 nt, Human
uccuccaccgccauggcu

SEQ ID NO: 3391881 - RNA, 20 nt, Human
uccuccaccugccguggacu

SEQ ID NO: 3391882 - RNA, 12 nt, Human
uccuccacgccu

SEQ ID NO: 3391883 - RNA, 21 nt, Human
uccuccacguucugcucauca

SEQ ID NO: 3391884 - RNA, 23 nt, Human
uccuccacucucccccacccccu

SEQ ID NO: 3391885 - RNA, 11 nt, Human
uccuccagaac

SEQ ID NO: 3391886 - RNA, 13 nt, Human
uccuccagaacuc

SEQ ID NO: 3391887 - RNA, 16 nt, Human
uccuccagaacucuuc

SEQ ID NO: 3391888 - RNA, 12 nt, Human
uccuccagcagg

SEQ ID NO: 3391889 - RNA, 18 nt, Human
uccuccagccccuguccc

SEQ ID NO: 3391890 - RNA, 15 nt, Human
uccuccaggaagccu

SEQ ID NO: 3391891 - RNA, 17 nt, Human
uccuccaggagcuucuu

SEQ ID NO: 3391892 - RNA, 19 nt, Human
uccuccaggagcuucuugu

SEQ ID NO: 3391893 - RNA, 13 nt, Human
uccuccaggccug

SEQ ID NO: 3391894 - RNA, 15 nt, Human
uccuuuucuucuaug

SEQ ID NO: 3391895 - RNA, 14 nt, Human
uccuuuucuugcuu

SEQ ID NO: 3391896 - RNA, 18 nt, Human
uccuuuucuuguuuauca

SEQ ID NO: 3391897 - RNA, 23 nt, Human
uccuuuucuuguuuaucagcagu

SEQ ID NO: 3391898 - RNA, 23 nt, Human
uccuuuucuuuuguuacuguucu

SEQ ID NO: 3391899 - RNA, 13 nt, Human
uccuuuugacacu

SEQ ID NO: 3391900 - RNA, 14 nt, Human
uccuuuugacacug

SEQ ID NO: 3391901 - RNA, 18 nt, Human
uccuuuugaccuucauuu

SEQ ID NO: 3391902 - RNA, 20 nt, Human
uccuuuugaccuucauuuca

SEQ ID NO: 3391903 - RNA, 13 nt, Human
uccuuuugcuuga

SEQ ID NO: 3391904 - RNA, 23 nt, Human
uccuuuuggagucagacagaugu

SEQ ID NO: 3391905 - RNA, 12 nt, Human
uccuuuuguaaa

SEQ ID NO: 3391906 - RNA, 13 nt, Human
uccuuuuguaaag

SEQ ID NO: 3391907 - RNA, 14 nt, Human
uccuuuuguaaagu

SEQ ID NO: 3391908 - RNA, 12 nt, Human
uccuuuuguaga

SEQ ID NO: 3391909 - RNA, 12 nt, Human
uccuuuuguguu

SEQ ID NO: 3391910 - RNA, 19 nt, Human
uccuuuuuaaccauuccaa

SEQ ID NO: 3391911 - RNA, 12 nt, Human
uccuuuuuaaua

SEQ ID NO: 3391912 - RNA, 14 nt, Human
uccuuuuuauuuau

SEQ ID NO: 3391913 - RNA, 23 nt, Human
uccuuuuuauuuauauguaugug

SEQ ID NO: 3391914 - RNA, 14 nt, Human
uccuuuuucucccu

SEQ ID NO: 3391915 - RNA, 20 nt, Human
uccuuuuucugauuagcuuu

SEQ ID NO: 3391916 - RNA, 19 nt, Human
uccuuuuucuuuauaaacu

SEQ ID NO: 3391917 - RNA, 16 nt, Human
uccuuuuugguuuuua

SEQ ID NO: 3391918 - RNA, 13 nt, Human
uccuuuuuguuau

SEQ ID NO: 3391919 - RNA, 12 nt, Human
ucgaaaaaauaa

SEQ ID NO: 3391920 - RNA, 21 nt, Human
ucgaaaagagucuuccaauua

SEQ ID NO: 3391921 - RNA, 19 nt, Human
ucgaaaauucauuucacau

SEQ ID NO: 3391922 - RNA, 19 nt, Human
ucgaaaccugggauucagg

SEQ ID NO: 3391923 - RNA, 14 nt, Human
ucgaaagcucuaga

SEQ ID NO: 3391924 - RNA, 16 nt, Human
ucgaaauaacaauguu

SEQ ID NO: 3391925 - RNA, 20 nt, Human
ucgaaauaacaauguuaagg

SEQ ID NO: 3391926 - RNA, 18 nt, Human
ucgaaccguuuugaagcu

SEQ ID NO: 3391927 - RNA, 18 nt, Human
ucgaacuucacaacuagg

SEQ ID NO: 3391928 - RNA, 23 nt, Human
ucgaagcgcgccacucgcuuccc

SEQ ID NO: 3391929 - RNA, 15 nt, Human
ucgaagcucagccca

SEQ ID NO: 3391930 - RNA, 15 nt, Human
ucgaaugaaaagaca

SEQ ID NO: 3391931 - RNA, 17 nt, Human
ucgaaugaaauuaacug

SEQ ID NO: 3391932 - RNA, 15 nt, Human
ucgaaugacacuguu

SEQ ID NO: 3391933 - RNA, 22 nt, Human
ucgaauuuuguuuucuugauuu

SEQ ID NO: 3391934 - RNA, 21 nt, Human
ucgacacgugggcuccccucu

SEQ ID NO: 3391935 - RNA, 17 nt, Human
ucgacagugaauauuca

SEQ ID NO: 3391936 - RNA, 17 nt, Human
ucgaccaauucaacccu

SEQ ID NO: 3391937 - RNA, 18 nt, Human
ucgaccugauuuacaguu

SEQ ID NO: 3391938 - RNA, 19 nt, Human
ucgaccugauuuacaguuu

SEQ ID NO: 3391939 - RNA, 22 nt, Human
ucgaccugcggcugcugugugc

SEQ ID NO: 3391940 - RNA, 22 nt, Human
ucgacgcccgaguuagccucac

SEQ ID NO: 3391941 - RNA, 17 nt, Human
ucgacugugaccugugg

SEQ ID NO: 3391942 - RNA, 14 nt, Human
ucgacuugcauuuu

SEQ ID NO: 3391943 - RNA, 12 nt, Human
ucgacuuuucuu

SEQ ID NO: 3391944 - RNA, 18 nt, Human
ucgagaaacagccugugu

SEQ ID NO: 3391945 - RNA, 21 nt, Human
ucgagaagcugcucuggaauu

SEQ ID NO: 3391946 - RNA, 16 nt, Human
ucgagaccagccuggc

SEQ ID NO: 3391947 - RNA, 18 nt, Human
ucgagaccagccuggcca

SEQ ID NO: 3391948 - RNA, 23 nt, Human
ucgagaucccaacacugccagca

SEQ ID NO: 3391949 - RNA, 20 nt, Human
ucgagauuaucguuuucuua

SEQ ID NO: 3391950 - RNA, 17 nt, Human
ucgagcagcauuuuauu

SEQ ID NO: 3391951 - RNA, 20 nt, Human
ucgagcagggugcugugggu

SEQ ID NO: 3391952 - RNA, 15 nt, Human
ucgagcaugccugga

SEQ ID NO: 3391953 - RNA, 18 nt, Human
ucgagcgcccugcagacc

SEQ ID NO: 3391954 - RNA, 18 nt, Human
ucucaugugauccuuuua

SEQ ID NO: 3391955 - RNA, 15 nt, Human
ucucauguguuugca

SEQ ID NO: 3391956 - RNA, 22 nt, Human
ucucauguugaagccacugccu

SEQ ID NO: 3391957 - RNA, 16 nt, Human
ucucauuaaaagaaua

SEQ ID NO: 3391958 - RNA, 19 nt, Human
ucucauuaauacucuuuau

SEQ ID NO: 3391959 - RNA, 14 nt, Human
ucucauuacuuguu

SEQ ID NO: 3391960 - RNA, 17 nt, Human
ucucauuccaacaguga

SEQ ID NO: 3391961 - RNA, 14 nt, Human
ucucauuccccagg

SEQ ID NO: 3391962 - RNA, 16 nt, Human
ucucauuccccaggug

SEQ ID NO: 3391963 - RNA, 13 nt, Human
ucucauucuuguu

SEQ ID NO: 3391964 - RNA, 15 nt, Human
ucucauugcuuacaa

SEQ ID NO: 3391965 - RNA, 19 nt, Human
ucucauuggacccuuccau

SEQ ID NO: 3391966 - RNA, 15 nt, Human
ucucauuuaagggaa

SEQ ID NO: 3391967 - RNA, 18 nt, Human
ucucauuuaagggaaaaa

SEQ ID NO: 3391968 - RNA, 18 nt, Human
ucucauuuagccuguccu

SEQ ID NO: 3391969 - RNA, 22 nt, Human
ucucauuuagccuguccuguca

SEQ ID NO: 3391970 - RNA, 17 nt, Human
ucucauuucaccccucc

SEQ ID NO: 3391971 - RNA, 22 nt, Human
ucucauuucaccccucccuuuc

SEQ ID NO: 3391972 - RNA, 23 nt, Human
ucucauuugguuugauuuucccu

SEQ ID NO: 3391973 - RNA, 14 nt, Human
ucucauuugucaca

SEQ ID NO: 3391974 - RNA, 16 nt, Human
ucucauuugucacaca

SEQ ID NO: 3391975 - RNA, 16 nt, Human
ucucauuuuaauguaa

SEQ ID NO: 3391976 - RNA, 19 nt, Human
ucucauuuuaauguaaaga

SEQ ID NO: 3391977 - RNA, 20 nt, Human
ucucauuuuaauguaaagau

SEQ ID NO: 3391978 - RNA, 17 nt, Human
ucucauuuuuccguaaa

SEQ ID NO: 3391979 - RNA, 23 nt, Human
ucuccaaaaaaaaaaaaaauaca

SEQ ID NO: 3391980 - RNA, 19 nt, Human
ucuccaaaaaucugccugg

SEQ ID NO: 3391981 - RNA, 12 nt, Human
ucuccaaagcuu

SEQ ID NO: 3391982 - RNA, 12 nt, Human
ucuccaaaugag

SEQ ID NO: 3391983 - RNA, 24 nt, Human
ucuccaaaugagaucuaagccuuu

SEQ ID NO: 3391984 - RNA, 17 nt, Human
ucuccaaccccccagca

SEQ ID NO: 3391985 - RNA, 18 nt, Human
ucuccaaccccccagcac

SEQ ID NO: 3391986 - RNA, 23 nt, Human
ucuccaaccccccagcacugagg

SEQ ID NO: 3391987 - RNA, 18 nt, Human
ucuccaagaaugcugaaa

SEQ ID NO: 3391988 - RNA, 19 nt, Human
ucuccaagcaggacaugga

SEQ ID NO: 3391989 - RNA, 16 nt, Human
ucuccaaggaccaggu

SEQ ID NO: 3391990 - RNA, 22 nt, Human
ucuccaagggcuucugcacccu

SEQ ID NO: 3391991 - RNA, 17 nt, Human
ucuccaagucucagugg

SEQ ID NO: 3391992 - RNA, 18 nt, Human
ucuccaauaucagugcuc

SEQ ID NO: 3391993 - RNA, 19 nt, Human
ucuccacagcaaccccagg

SEQ ID NO: 3391994 - RNA, 18 nt, Human
ucuccaccaggaaccucu

SEQ ID NO: 3391995 - RNA, 19 nt, Human
ucuccacccccagcugcuu

SEQ ID NO: 3391996 - RNA, 14 nt, Human
ucuccacccuccca

SEQ ID NO: 3391997 - RNA, 12 nt, Human
ucuccacccugc

SEQ ID NO: 3391998 - RNA, 15 nt, Human
ucuccaccuaguggc

SEQ ID NO: 3391999 - RNA, 21 nt, Human
ucuccaccuaguggcugucca

SEQ ID NO: 3392000 - RNA, 17 nt, Human
ucuccaccugccaggga

SEQ ID NO: 3392001 - RNA, 20 nt, Human
ucucggagcaucccggagga

SEQ ID NO: 3392002 - RNA, 19 nt, Human
ucucggaguaucugggaac

SEQ ID NO: 3392003 - RNA, 14 nt, Human
ucucggcucagugc

SEQ ID NO: 3392004 - RNA, 14 nt, Human
ucucggugguacca

SEQ ID NO: 3392005 - RNA, 19 nt, Human
ucucgguugaaaccuguau

SEQ ID NO: 3392006 - RNA, 24 nt, Human
ucucguauagaagucuucaugaaa

SEQ ID NO: 3392007 - RNA, 21 nt, Human
ucucguccucguuuguguucu

SEQ ID NO: 3392008 - RNA, 14 nt, Human
ucucgucucuuuua

SEQ ID NO: 3392009 - RNA, 17 nt, Human
ucucgucuuccgucucc

SEQ ID NO: 3392010 - RNA, 18 nt, Human
ucucgucuuccgucuccc

SEQ ID NO: 3392011 - RNA, 19 nt, Human
ucucgucuuccgucucccc

SEQ ID NO: 3392012 - RNA, 20 nt, Human
ucucgugagucauuuaaaug

SEQ ID NO: 3392013 - RNA, 22 nt, Human
ucucgugauugauaagaaccuu

SEQ ID NO: 3392014 - RNA, 15 nt, Human
ucucguuucaaaaac

SEQ ID NO: 3392015 - RNA, 17 nt, Human
ucucguuugugauucuu

SEQ ID NO: 3392016 - RNA, 12 nt, Human
ucucguuuuucu

SEQ ID NO: 3392017 - RNA, 13 nt, Human
ucucuaaagcacu

SEQ ID NO: 3392018 - RNA, 23 nt, Human
ucucuaaagcacuaccgauucuu

SEQ ID NO: 3392019 - RNA, 13 nt, Human
ucucuaacaaugu

SEQ ID NO: 3392020 - RNA, 17 nt, Human
ucucuaacagcucagga

SEQ ID NO: 3392021 - RNA, 18 nt, Human
ucucuaacagcucaggau

SEQ ID NO: 3392022 - RNA, 14 nt, Human
ucucuaacagugga

SEQ ID NO: 3392023 - RNA, 18 nt, Human
ucucuaacucagaaacau

SEQ ID NO: 3392024 - RNA, 20 nt, Human
ucucuaacucagaaacauca

SEQ ID NO: 3392025 - RNA, 21 nt, Human
ucucuaacucagaaacaucag

SEQ ID NO: 3392026 - RNA, 13 nt, Human
ucucuaacuuauu

SEQ ID NO: 3392027 - RNA, 15 nt, Human
ucucuaauaagaaaa

SEQ ID NO: 3392028 - RNA, 23 nt, Human
ucucuaauauccacuuguccaug

SEQ ID NO: 3392029 - RNA, 18 nt, Human
ucucuacagguuugggua

SEQ ID NO: 3392030 - RNA, 14 nt, Human
ucucuacagugcca

SEQ ID NO: 3392031 - RNA, 13 nt, Human
ucucuaccagaua

SEQ ID NO: 3392032 - RNA, 23 nt, Human
ucucuacccaucuuaaaaacaac

SEQ ID NO: 3392033 - RNA, 14 nt, Human
ucucuaccuucucc

SEQ ID NO: 3392034 - RNA, 22 nt, Human
ucucuacuaaaaauacaaacaa

SEQ ID NO: 3392035 - RNA, 21 nt, Human
ucucuacugucucaguuuaca

SEQ ID NO: 3392036 - RNA, 12 nt, Human
ucucuagccacu

SEQ ID NO: 3392037 - RNA, 16 nt, Human
ucucuagggaaggcca

SEQ ID NO: 3392038 - RNA, 21 nt, Human
ucucuagggaaggccaccugc

SEQ ID NO: 3392039 - RNA, 22 nt, Human
ucucuagggaaggccaccugca

SEQ ID NO: 3392040 - RNA, 11 nt, Human
ucucuaguagu

SEQ ID NO: 3392041 - RNA, 12 nt, Human
ucucuaguaguu

SEQ ID NO: 3392042 - RNA, 16 nt, Human
ucucuauaccaauaaa

SEQ ID NO: 3392043 - RNA, 17 nt, Human
ucucuauaccaauaaag

SEQ ID NO: 3392044 - RNA, 18 nt, Human
ucucuaucauuaaaguuc

SEQ ID NO: 3392045 - RNA, 12 nt, Human
ucucuaucauuu

SEQ ID NO: 3392046 - RNA, 14 nt, Human
ucucuaucauuuaa

SEQ ID NO: 3392047 - RNA, 18 nt, Human
ucucuauccucucuuccu

SEQ ID NO: 3392048 - RNA, 14 nt, Human
ucucuauguaucaa

SEQ ID NO: 3392049 - RNA, 16 nt, Human
ucucuauguaucaaau

SEQ ID NO: 3392050 - RNA, 17 nt, Human
ucucuauuuaauauuua

SEQ ID NO: 3392051 - RNA, 18 nt, Human
ucucuauuugaauuauuu

SEQ ID NO: 3392052 - RNA, 15 nt, Human
ucucucaaauuguca

SEQ ID NO: 3392053 - RNA, 19 nt, Human
ucucucaacaccaugauuc

SEQ ID NO: 3392054 - RNA, 22 nt, Human
ucucucaacaccaugauuccuu

SEQ ID NO: 3392055 - RNA, 16 nt, Human
ucucucaauaugcuua

SEQ ID NO: 3392056 - RNA, 15 nt, Human
ucucucacuccuuga

SEQ ID NO: 3392057 - RNA, 21 nt, Human
ucucucacuuguuuuauuuaa

SEQ ID NO: 3392058 - RNA, 17 nt, Human
ucucucagaagggaggc

SEQ ID NO: 3392059 - RNA, 17 nt, Human
ucucucagccuuacauu

SEQ ID NO: 3392060 - RNA, 15 nt, Human
ucucucaggagcaca

SEQ ID NO: 3392061 - RNA, 21 nt, Human
ucucucaggagcacaggcagc

SEQ ID NO: 3392062 - RNA, 12 nt, Human
ucucucaggcca

SEQ ID NO: 3392063 - RNA, 16 nt, Human
ucucucagggccaggc

SEQ ID NO: 3392064 - RNA, 12 nt, Human
ucucucagguga

SEQ ID NO: 3392065 - RNA, 13 nt, Human
ucucucaggugaa

SEQ ID NO: 3392066 - RNA, 15 nt, Human
ucucucauacccucc

SEQ ID NO: 3392067 - RNA, 23 nt, Human
ucucucauccuccaguaccuugc

SEQ ID NO: 3392068 - RNA, 18 nt, Human
ucucucaucuguuacaca

SEQ ID NO: 3392069 - RNA, 15 nt, Human
ucucucaugaaccuc

SEQ ID NO: 3392070 - RNA, 17 nt, Human
ucucucaugaaccucaa

SEQ ID NO: 3392071 - RNA, 22 nt, Human
ucucucaugaaccucaagcugc

SEQ ID NO: 3392072 - RNA, 16 nt, Human
ucucucauugucugug

SEQ ID NO: 3392073 - RNA, 18 nt, Human
ucucuccacuuucagcug

SEQ ID NO: 3392074 - RNA, 14 nt, Human
ucucuccagccccu

SEQ ID NO: 3392075 - RNA, 17 nt, Human
ucucuccagccccugga

SEQ ID NO: 3392076 - RNA, 19 nt, Human
ucucuccaucagaggacac

SEQ ID NO: 3392077 - RNA, 11 nt, Human
ucucuccaucu

SEQ ID NO: 3392078 - RNA, 17 nt, Human
ucucuccaucuaccuuc

SEQ ID NO: 3392079 - RNA, 19 nt, Human
ucucuccauuucacuggcu

SEQ ID NO: 3392080 - RNA, 20 nt, Human
ucucucccaggggcuggcuu

SEQ ID NO: 3392081 - RNA, 23 nt, Human
ucucucccagucuacccagagaa

SEQ ID NO: 3392082 - RNA, 15 nt, Human
ucucucccauggagc

SEQ ID NO: 3392083 - RNA, 15 nt, Human
ucucucccugccaga

SEQ ID NO: 3392084 - RNA, 22 nt, Human
ucucucccugccagaggggaag

SEQ ID NO: 3392085 - RNA, 16 nt, Human
ucucuccucagacugc

SEQ ID NO: 3392086 - RNA, 11 nt, Human
ucucuccuccu

SEQ ID NO: 3392087 - RNA, 16 nt, Human
ucucuccuggccuauc

SEQ ID NO: 3392088 - RNA, 20 nt, Human
ucucuccuguaagccaaaga

SEQ ID NO: 3392089 - RNA, 14 nt, Human
ucucuccuguaccu

SEQ ID NO: 3392090 - RNA, 17 nt, Human
ucucuccuguaccucuu

SEQ ID NO: 3392091 - RNA, 22 nt, Human
ucucuccuguaccucuugagcc

SEQ ID NO: 3392092 - RNA, 14 nt, Human
ucucuccuguccaa

SEQ ID NO: 3392093 - RNA, 13 nt, Human
ucucuccuguccu

SEQ ID NO: 3392094 - RNA, 23 nt, Human
ucucucggcuccccauguguccu

SEQ ID NO: 3392095 - RNA, 15 nt, Human
ucucucgguuccacg

SEQ ID NO: 3392096 - RNA, 23 nt, Human
ucucucgguuccacgucccccug

SEQ ID NO: 3392097 - RNA, 19 nt, Human
ucucucuacuccuaccuca

SEQ ID NO: 3392098 - RNA, 12 nt, Human
ucucucuccugu

SEQ ID NO: 3392099 - RNA, 13 nt, Human
ucucucuccuguc

SEQ ID NO: 3392100 - RNA, 14 nt, Human
ucucucucucucuc

SEQ ID NO: 3392101 - RNA, 15 nt, Human
ucucucugcagcugc

SEQ ID NO: 3392102 - RNA, 17 nt, Human
ucucucugccugugagc

SEQ ID NO: 3392103 - RNA, 12 nt, Human
ucucucuggaaa

SEQ ID NO: 3392104 - RNA, 12 nt, Human
ucucucuggccc

SEQ ID NO: 3392105 - RNA, 20 nt, Human
ucucucuggggccacacaga

SEQ ID NO: 3392106 - RNA, 17 nt, Human
ucucucugugcugugga

SEQ ID NO: 3392107 - RNA, 11 nt, Human
ucucucugugg

SEQ ID NO: 3392108 - RNA, 14 nt, Human
ucucucuuaaaguu

SEQ ID NO: 3392109 - RNA, 18 nt, Human
ucucucuucagacucuca

SEQ ID NO: 3392110 - RNA, 20 nt, Human
ucucucuucagacucucagc

SEQ ID NO: 3392111 - RNA, 15 nt, Human
ucucucuucucagag

SEQ ID NO: 3392112 - RNA, 11 nt, Human
ucucucuuucc

SEQ ID NO: 3392113 - RNA, 13 nt, Human
ucucucuuuggac

SEQ ID NO: 3392114 - RNA, 16 nt, Human
ucucucuuuggacucu

SEQ ID NO: 3392115 - RNA, 15 nt, Human
ucucugaacacaggc

SEQ ID NO: 3392116 - RNA, 17 nt, Human
ucucugaacacaggcag

SEQ ID NO: 3392117 - RNA, 18 nt, Human
ucucugaacacaggcagc

SEQ ID NO: 3392118 - RNA, 19 nt, Human
ucucugaacacaggcagcu

SEQ ID NO: 3392119 - RNA, 21 nt, Human
ucucugaacacaggcagcuuu

SEQ ID NO: 3392120 - RNA, 13 nt, Human
ucucugaagauga

SEQ ID NO: 3392121 - RNA, 22 nt, Human
ucucugaagcauguuucauguu

SEQ ID NO: 3392122 - RNA, 13 nt, Human
ucucugaagccac

SEQ ID NO: 3392123 - RNA, 15 nt, Human
ucucugaaggaggcc

SEQ ID NO: 3392124 - RNA, 18 nt, Human
ucucugaaggaggccacc

SEQ ID NO: 3392125 - RNA, 18 nt, Human
ucucugacuucugccugg

SEQ ID NO: 3392126 - RNA, 13 nt, Human
ucucugaggacac

SEQ ID NO: 3392127 - RNA, 15 nt, Human
ucucugauacagaaa

SEQ ID NO: 3392128 - RNA, 23 nt, Human
ucucugauacuuuuuugaaauca

SEQ ID NO: 3392129 - RNA, 16 nt, Human
ucucugaugcagcuua

SEQ ID NO: 3392130 - RNA, 20 nt, Human
ucucugaugugauauccacu

SEQ ID NO: 3392131 - RNA, 19 nt, Human
ucucugauuuucaaagcuu

SEQ ID NO: 3392132 - RNA, 17 nt, Human
ucucugcaaacugccuu

SEQ ID NO: 3392133 - RNA, 19 nt, Human
ucucugcaaucuucucaga

SEQ ID NO: 3392134 - RNA, 15 nt, Human
aagcauuuaucauuc

SEQ ID NO: 3392135 - RNA, 19 nt, Human
aagcauuuaucauucuugu

SEQ ID NO: 3392136 - RNA, 15 nt, Human
aagcauuugaaugca

SEQ ID NO: 3392137 - RNA, 17 nt, Human
aagcauuuuauaaaucg

SEQ ID NO: 3392138 - RNA, 19 nt, Human
aagcauuuuauaaaucgcu

SEQ ID NO: 3392139 - RNA, 18 nt, Human
aagcauuuuucaauauau

SEQ ID NO: 3392140 - RNA, 19 nt, Human
aagcauuuuucaauauauu

SEQ ID NO: 3392141 - RNA, 17 nt, Human
aagccaaaaaccuuagc

SEQ ID NO: 3392142 - RNA, 21 nt, Human
aagccaaaaaccuuagcuccc

SEQ ID NO: 3392143 - RNA, 20 nt, Human
aagccaaaauuaagguguuu

SEQ ID NO: 3392144 - RNA, 22 nt, Human
aagccaaaauuaagguguuuga

SEQ ID NO: 3392145 - RNA, 17 nt, Human
aagccaaaccucuguga

SEQ ID NO: 3392146 - RNA, 15 nt, Human
aagccaaacucugcc

SEQ ID NO: 3392147 - RNA, 12 nt, Human
aagccaaagaaa

SEQ ID NO: 3392148 - RNA, 20 nt, Human
aagccaaagaaaugaacauu

SEQ ID NO: 3392149 - RNA, 12 nt, Human
aagccaaagagu

SEQ ID NO: 3392150 - RNA, 17 nt, Human
ucuggcaaugccacagc

SEQ ID NO: 3392151 - RNA, 22 nt, Human
ucuggcacacaguaggugcuca

SEQ ID NO: 3392152 - RNA, 14 nt, Human
ucuggcacagccug

SEQ ID NO: 3392153 - RNA, 16 nt, Human
ucuggcacagccugca

SEQ ID NO: 3392154 - RNA, 15 nt, Human
ucuggcagccacacu

SEQ ID NO: 3392155 - RNA, 16 nt, Human
ucuggcagccucccau

SEQ ID NO: 3392156 - RNA, 20 nt, Human
ucuggcagggugggauggag

SEQ ID NO: 3392157 - RNA, 11 nt, Human
ucuggccaggc

SEQ ID NO: 3392158 - RNA, 14 nt, Human
ucuggcccaccagg

SEQ ID NO: 3392159 - RNA, 21 nt, Human
ucuggccccacaccagcccca

SEQ ID NO: 3392160 - RNA, 13 nt, Human
ucuggcccuagac

SEQ ID NO: 3392161 - RNA, 16 nt, Human
ucuggcccugccuucu

SEQ ID NO: 3392162 - RNA, 17 nt, Human
ucuggccuaaaaucuug

SEQ ID NO: 3392163 - RNA, 13 nt, Human
ucuggccuagucc

SEQ ID NO: 3392164 - RNA, 18 nt, Human
ucuggccucaggugggcc

SEQ ID NO: 3392165 - RNA, 17 nt, Human
ucuggccucccacagac

SEQ ID NO: 3392166 - RNA, 14 nt, Human
ucuggccucccacc

SEQ ID NO: 3392167 - RNA, 15 nt, Human
ucuggccucccaccc

SEQ ID NO: 3392168 - RNA, 13 nt, Human
ucuggccuggcca

SEQ ID NO: 3392169 - RNA, 19 nt, Human
ucuggccuggccagugccc

SEQ ID NO: 3392170 - RNA, 16 nt, Human
ucuggccuggccuggc

SEQ ID NO: 3392171 - RNA, 17 nt, Human
ucuggccuggccuggcc

SEQ ID NO: 3392172 - RNA, 18 nt, Human
ucuggccuggccuggccc

SEQ ID NO: 3392173 - RNA, 20 nt, Human
ucuggccuggccuggcccug

SEQ ID NO: 3392174 - RNA, 10 nt, Human
ucuggccuuc

SEQ ID NO: 3392175 - RNA, 23 nt, Human
ucuggccuucggccuccauccug

SEQ ID NO: 3392176 - RNA, 21 nt, Human
ucuggccuuuccucucuccug

SEQ ID NO: 3392177 - RNA, 18 nt, Human
ucuggcgacaguuuuccu

SEQ ID NO: 3392178 - RNA, 16 nt, Human
ucuggcuaaggacagg

SEQ ID NO: 3392179 - RNA, 17 nt, Human
ucuggcuaugcauuuga

SEQ ID NO: 3392180 - RNA, 19 nt, Human
ucuggcuccucaaacagua

SEQ ID NO: 3392181 - RNA, 22 nt, Human
ucuggcucuaauucacagugcu

SEQ ID NO: 3392182 - RNA, 16 nt, Human
ucuggcucuacacaua

SEQ ID NO: 3392183 - RNA, 13 nt, Human
ucuggcucugucu

SEQ ID NO: 3392184 - RNA, 17 nt, Human
ucuggcucuuccaggcu

SEQ ID NO: 3392185 - RNA, 18 nt, Human
ucuggcucuuccaggcug

SEQ ID NO: 3392186 - RNA, 15 nt, Human
ucuggcugagcccug

SEQ ID NO: 3392187 - RNA, 14 nt, Human
ucuggcugagcuga

SEQ ID NO: 3392188 - RNA, 15 nt, Human
ucuggcugagcugaa

SEQ ID NO: 3392189 - RNA, 18 nt, Human
ucuggcuuauuuuaaugu

SEQ ID NO: 3392190 - RNA, 19 nt, Human
ucuggcuucaaauauuaug

SEQ ID NO: 3392191 - RNA, 23 nt, Human
ucuggcuuccagaaaaccccagc

SEQ ID NO: 3392192 - RNA, 13 nt, Human
ucuggcuuccagg

SEQ ID NO: 3392193 - RNA, 19 nt, Human
ucuggcuucuggccaggaa

SEQ ID NO: 3392194 - RNA, 17 nt, Human
ucugggaaaauacccca

SEQ ID NO: 3392195 - RNA, 18 nt, Human
ucugggaaauaagagaga

SEQ ID NO: 3392196 - RNA, 22 nt, Human
ucugggaaaugagaaggcagcc

SEQ ID NO: 3392197 - RNA, 22 nt, Human
ucugggaaauggcuugaagcca

SEQ ID NO: 3392198 - RNA, 15 nt, Human
ucugggaaccuccca

SEQ ID NO: 3392199 - RNA, 18 nt, Human
ucugggaaccucccagag

SEQ ID NO: 3392200 - RNA, 16 nt, Human
ucugggaccucaguuu

SEQ ID NO: 3392201 - RNA, 22 nt, Human
ucugggaccugccaggcagggg

SEQ ID NO: 3392202 - RNA, 21 nt, Human
ucugggacuugguuuccccaa

SEQ ID NO: 3392203 - RNA, 22 nt, Human
ucugggagaaaaucaucaagaa

SEQ ID NO: 3392204 - RNA, 23 nt, Human
ucugggagaaaaucaucaagaag

SEQ ID NO: 3392205 - RNA, 19 nt, Human
ucugggaggaauggacaga

SEQ ID NO: 3392206 - RNA, 13 nt, Human
ucugggagggcag

SEQ ID NO: 3392207 - RNA, 19 nt, Human
ucugggagggcagcagggc

SEQ ID NO: 3392208 - RNA, 15 nt, Human
ucugggauucuacuu

SEQ ID NO: 3392209 - RNA, 18 nt, Human
ucugggcacacucugcca

SEQ ID NO: 3392210 - RNA, 18 nt, Human
ucugggcaccacaaaaua

SEQ ID NO: 3392211 - RNA, 20 nt, Human
ucugggcaccacaaaauaua

SEQ ID NO: 3392212 - RNA, 21 nt, Human
ucugggcaccacaaaauauac

SEQ ID NO: 3392213 - RNA, 20 nt, Human
ucugggcaggacucagcucc

SEQ ID NO: 3392214 - RNA, 21 nt, Human
ucugggcaggacucagcuccc

SEQ ID NO: 3392215 - RNA, 12 nt, Human
ucugggccaagu

SEQ ID NO: 3392216 - RNA, 19 nt, Human
ucugggccaaguuccucua

SEQ ID NO: 3392217 - RNA, 21 nt, Human
ucugggccauucuccacagca

SEQ ID NO: 3392218 - RNA, 19 nt, Human
ucugggccuuggccuggag

SEQ ID NO: 3392219 - RNA, 20 nt, Human
ucugggccuuggccuggagc

SEQ ID NO: 3392220 - RNA, 17 nt, Human
ucugggcuagguagaaa

SEQ ID NO: 3392221 - RNA, 21 nt, Human
ucugggcuauggacacagggu

SEQ ID NO: 3392222 - RNA, 12 nt, Human
ucugggcucuga

SEQ ID NO: 3392223 - RNA, 17 nt, Human
ucugggcugcuacccag

SEQ ID NO: 3392224 - RNA, 22 nt, Human
ucugggcugcuacccagaaauc

SEQ ID NO: 3392225 - RNA, 19 nt, Human
ucugggcuggaugagcucc

SEQ ID NO: 3392226 - RNA, 20 nt, Human
ucugggcuggaugagcuccc

SEQ ID NO: 3392227 - RNA, 22 nt, Human
ucugggcuguaacguggcacug

SEQ ID NO: 3392228 - RNA, 13 nt, Human
ucugggcuuccug

SEQ ID NO: 3392229 - RNA, 14 nt, Human
ucugggcuuccugg

SEQ ID NO: 3392230 - RNA, 22 nt, Human
ucugggcuuugauuccaucucc

SEQ ID NO: 3392231 - RNA, 23 nt, Human
ucuggggaaagacacugccuggg

SEQ ID NO: 3392232 - RNA, 13 nt, Human
ucuggggaccagc

SEQ ID NO: 3392233 - RNA, 23 nt, Human
ucuggggaccagcuuggcucagg

SEQ ID NO: 3392234 - RNA, 17 nt, Human
ucuggggagcaggcagc

SEQ ID NO: 3392235 - RNA, 22 nt, Human
ucuggggagcaggcagccagca

SEQ ID NO: 3392236 - RNA, 19 nt, Human
ucuggggagcgggucugcu

SEQ ID NO: 3392237 - RNA, 21 nt, Human
ucuggggcaggcugggccaug

SEQ ID NO: 3392238 - RNA, 16 nt, Human
ucuggggccacacaga

SEQ ID NO: 3392239 - RNA, 23 nt, Human
ucuggggccuaauaaaacugaug

SEQ ID NO: 3392240 - RNA, 15 nt, Human
ucuggggcucuggga

SEQ ID NO: 3392241 - RNA, 16 nt, Human
ucuggggcucugggau

SEQ ID NO: 3392242 - RNA, 15 nt, Human
ucugggggaguggaa

SEQ ID NO: 3392243 - RNA, 15 nt, Human
ucuuuuaccugcugc

SEQ ID NO: 3392244 - RNA, 19 nt, Human
ucuuuuauaacuaguccuu

SEQ ID NO: 3392245 - RNA, 16 nt, Human
ucuuuuauauuuguau

SEQ ID NO: 3392246 - RNA, 18 nt, Human
ucuuuuauauuuguaucg

SEQ ID NO: 3392247 - RNA, 15 nt, Human
ucuuuuaucuguuua

SEQ ID NO: 3392248 - RNA, 21 nt, Human
ucuuuuaucuguuuaaagcau

SEQ ID NO: 3392249 - RNA, 13 nt, Human
ucuuuuauguuug

SEQ ID NO: 3392250 - RNA, 21 nt, Human
ucuuuuauguuugaauaugga

SEQ ID NO: 3392251 - RNA, 12 nt, Human
ucuuuucacaaa

SEQ ID NO: 3392252 - RNA, 14 nt, Human
ucuuuucacaaaua

SEQ ID NO: 3392253 - RNA, 16 nt, Human
ucuuuucacaaauaaa

SEQ ID NO: 3392254 - RNA, 22 nt, Human
ucuuuucacauagcugucuaga

SEQ ID NO: 3392255 - RNA, 19 nt, Human
ucuuuucacauucuuauaa

SEQ ID NO: 3392256 - RNA, 23 nt, Human
ucuuuucauacauuuucuaagaa

SEQ ID NO: 3392257 - RNA, 16 nt, Human
ucuuuucauucucauu

SEQ ID NO: 3392258 - RNA, 22 nt, Human
ucuuuuccaaaauaaaacaaag

SEQ ID NO: 3392259 - RNA, 19 nt, Human
ucuuuucccacuguuuaag

SEQ ID NO: 3392260 - RNA, 19 nt, Human
ucuuuuccccuuuccuguc

SEQ ID NO: 3392261 - RNA, 13 nt, Human
ucuuuuccucgcu

SEQ ID NO: 3392262 - RNA, 16 nt, Human
ucuuuucuaaaagacu

SEQ ID NO: 3392263 - RNA, 17 nt, Human
ucuuuucuacccuagcc

SEQ ID NO: 3392264 - RNA, 14 nt, Human
ucuuuucuaguuug

SEQ ID NO: 3392265 - RNA, 15 nt, Human
ucuuuucugaaucuu

SEQ ID NO: 3392266 - RNA, 20 nt, Human
ucuuuucugaaucuucugaa

SEQ ID NO: 3392267 - RNA, 19 nt, Human
ucuuuucuggaauguaauc

SEQ ID NO: 3392268 - RNA, 17 nt, Human
ucuuuucuuacuccucc

SEQ ID NO: 3392269 - RNA, 16 nt, Human
ucuuuucuuuagagca

SEQ ID NO: 3392270 - RNA, 13 nt, Human
ucuuuucuuugua

SEQ ID NO: 3392271 - RNA, 15 nt, Human
ucuuuugaaacaaua

SEQ ID NO: 3392272 - RNA, 14 nt, Human
ucuuuugaauuguu

SEQ ID NO: 3392273 - RNA, 15 nt, Human
ucuuuugaauuguuu

SEQ ID NO: 3392274 - RNA, 20 nt, Human
ucuuuugacauguggaaagu

SEQ ID NO: 3392275 - RNA, 22 nt, Human
ucuuuugacuuaaucucauuug

SEQ ID NO: 3392276 - RNA, 17 nt, Human
ucuuuugcaugaugauc

SEQ ID NO: 3392277 - RNA, 17 nt, Human
ucuuuugcuacuaaguu

SEQ ID NO: 3392278 - RNA, 14 nt, Human
ucuuuuguaaauua

SEQ ID NO: 3392279 - RNA, 11 nt, Human
ucuuuuguaag

SEQ ID NO: 3392280 - RNA, 11 nt, Human
ucuuuuguaug

SEQ ID NO: 3392281 - RNA, 12 nt, Human
ucuuuuguauua

SEQ ID NO: 3392282 - RNA, 22 nt, Human
ucuuuuguuaaauaauauggcu

SEQ ID NO: 3392283 - RNA, 11 nt, Human
ucuuuuguuac

SEQ ID NO: 3392284 - RNA, 12 nt, Human
ucuuuuguuacu

SEQ ID NO: 3392285 - RNA, 18 nt, Human
ucuuuuguuacuguucuu

SEQ ID NO: 3392286 - RNA, 23 nt, Human
ucuuuuguuacuguucuugcugc

SEQ ID NO: 3392287 - RNA, 18 nt, Human
ucuuuuguuguuucuuaa

SEQ ID NO: 3392288 - RNA, 14 nt, Human
ucuuuuuaagcuua

SEQ ID NO: 3392289 - RNA, 15 nt, Human
ucuuuuuaaguaaug

SEQ ID NO: 3392290 - RNA, 15 nt, Human
ucuuuuuaauaaaaa

SEQ ID NO: 3392291 - RNA, 12 nt, Human
ucuuuuuauuga

SEQ ID NO: 3392292 - RNA, 13 nt, Human
ucuuuuuauugaa

SEQ ID NO: 3392293 - RNA, 14 nt, Human
ucuuuuugaaaugu

SEQ ID NO: 3392294 - RNA, 14 nt, Human
ucuuuuugaaguau

SEQ ID NO: 3392295 - RNA, 14 nt, Human
ucuuuuugaaucuu

SEQ ID NO: 3392296 - RNA, 17 nt, Human
ucuuuuugcucuaaaau

SEQ ID NO: 3392297 - RNA, 13 nt, Human
ucuuuuugcuguu

SEQ ID NO: 3392298 - RNA, 19 nt, Human
ucuuuuuuaaaugaagaaa

SEQ ID NO: 3392299 - RNA, 22 nt, Human
ucuuuuuuaaauuuucuucagu

SEQ ID NO: 3392300 - RNA, 12 nt, Human
ucuuuuuuaacc

SEQ ID NO: 3392301 - RNA, 21 nt, Human
ucuuuuuuaaccgguaagagu

SEQ ID NO: 3392302 - RNA, 17 nt, Human
ucuuuuuuaauaaacua

SEQ ID NO: 3392303 - RNA, 18 nt, Human
ucuuuuuuacaaaggcug

SEQ ID NO: 3392304 - RNA, 19 nt, Human
ucuuuuuuacucauugaaa

SEQ ID NO: 3392305 - RNA, 16 nt, Human
ucuuuuuuagcauaaa

SEQ ID NO: 3392306 - RNA, 22 nt, Human
ucuuuuuucuaaaguaaaaaca

SEQ ID NO: 3392307 - RNA, 22 nt, Human
ucuuuuuuggccaucugcuccu

SEQ ID NO: 3392308 - RNA, 15 nt, Human
ucuuuuuuucuuggc

SEQ ID NO: 3392309 - RNA, 15 nt, Human
ucuuuuuuuguauag

SEQ ID NO: 3392310 - RNA, 16 nt, Human
ucuuuuuuugugaugu

SEQ ID NO: 3392311 - RNA, 19 nt, Human
ucuuuuuuuuaaugugcug

SEQ ID NO: 3392312 - RNA, 15 nt, Human
ucuuuuuuuuuaagu

SEQ ID NO: 3392313 - RNA, 21 nt, Human
ugaaaaaaaaccugagauuua

SEQ ID NO: 3392314 - RNA, 22 nt, Human
ugaaaaaaaaccugagauuuau

SEQ ID NO: 3392315 - RNA, 16 nt, Human
ugaaaaaaaaguuuca

SEQ ID NO: 3392316 - RNA, 17 nt, Human
ugaaaaaaaguuuacaa

SEQ ID NO: 3392317 - RNA, 20 nt, Human
ugaaaaaaauuggcauuaaa

SEQ ID NO: 3392318 - RNA, 17 nt, Human
ugaaaaaagcuuuuaug

SEQ ID NO: 3392319 - RNA, 21 nt, Human
ugaaaaaaggacaauuucaaa

SEQ ID NO: 3392320 - RNA, 13 nt, Human
ugaaaaaauauau

SEQ ID NO: 3392321 - RNA, 18 nt, Human
ugaaaaaauguauaugca

SEQ ID NO: 3392322 - RNA, 17 nt, Human
ugaaaaacaacaacaca

SEQ ID NO: 3392323 - RNA, 13 nt, Human
ugaaaaacaacca

SEQ ID NO: 3392324 - RNA, 13 nt, Human
ugaaaaacugagu

SEQ ID NO: 3392325 - RNA, 23 nt, Human
ugaaaaacuggcaacauuccaag

SEQ ID NO: 3392326 - RNA, 13 nt, Human
ugaaaaagaagaa

SEQ ID NO: 3392327 - RNA, 15 nt, Human
ugaaaaagaugccaa

SEQ ID NO: 3392328 - RNA, 13 nt, Human
ugaaaaagcaugu

SEQ ID NO: 3392329 - RNA, 15 nt, Human
ugaaaaagcauguac

SEQ ID NO: 3392330 - RNA, 20 nt, Human
ugaaaaagcauguacagugu

SEQ ID NO: 3392331 - RNA, 20 nt, Human
ugaaaaagcuggauuuucuu

SEQ ID NO: 3392332 - RNA, 20 nt, Human
ugaaaaaggaggaagagaaa

SEQ ID NO: 3392333 - RNA, 22 nt, Human
ugaaaaaggaggaagagaaaaa

SEQ ID NO: 3392334 - RNA, 16 nt, Human
ugaaaaaguaaagugu

SEQ ID NO: 3392335 - RNA, 19 nt, Human
ugaaaaaguuaaugcuuaa

SEQ ID NO: 3392336 - RNA, 15 nt, Human
ugaaaaaguuuguuu

SEQ ID NO: 3392337 - RNA, 12 nt, Human
ugaaaaauauaa

SEQ ID NO: 3392338 - RNA, 17 nt, Human
ugaaaaauauaaaauua

SEQ ID NO: 3392339 - RNA, 13 nt, Human
ugaaaaaugaaag

SEQ ID NO: 3392340 - RNA, 17 nt, Human
ugaaaaaugaaagauga

SEQ ID NO: 3392341 - RNA, 18 nt, Human
ugaaaaaugaaagaugau

SEQ ID NO: 3392342 - RNA, 19 nt, Human
ugaaaaauuuaagcauugu

SEQ ID NO: 3392343 - RNA, 16 nt, Human
ugaaaacaagugcugg

SEQ ID NO: 3392344 - RNA, 18 nt, Human
ugaaaacaagugcuggca

SEQ ID NO: 3392345 - RNA, 21 nt, Human
ugaaaacaagugcuggcacca

SEQ ID NO: 3392346 - RNA, 17 nt, Human
ugaaaacacauuugcuu

SEQ ID NO: 3392347 - RNA, 14 nt, Human
ugaaaacacauuuu

SEQ ID NO: 3392348 - RNA, 19 nt, Human
ugaaaacacauuuuucuua

SEQ ID NO: 3392349 - RNA, 20 nt, Human
ugaaaacacauuuuucuuag

SEQ ID NO: 3392350 - RNA, 22 nt, Human
ugaaaacacuguucucugcccu

SEQ ID NO: 3392351 - RNA, 22 nt, Human
ugaaaacagaaauugguaccuu

SEQ ID NO: 3392352 - RNA, 14 nt, Human
ugaaaacagaaugu

SEQ ID NO: 3392353 - RNA, 17 nt, Human
ugaaaacaucuggaagg

SEQ ID NO: 3392354 - RNA, 15 nt, Human
ugaaaaccaaaauga

SEQ ID NO: 3392355 - RNA, 17 nt, Human
ugaaaaccaaaaugaca

SEQ ID NO: 3392356 - RNA, 22 nt, Human
ugaaaaccaucuggccuggccu

SEQ ID NO: 3392357 - RNA, 15 nt, Human
ugaaaaccuacauau

SEQ ID NO: 3392358 - RNA, 17 nt, Human
ugaaaacguuuuauugu

SEQ ID NO: 3392359 - RNA, 18 nt, Human
ugaaaacguuuuauugug

SEQ ID NO: 3392360 - RNA, 16 nt, Human
ugaaaacuaaguucuc

SEQ ID NO: 3392361 - RNA, 19 nt, Human
ugaaaacuacauuuuaaca

SEQ ID NO: 3392362 - RNA, 21 nt, Human
ugaaaacuacauuuuaacaug

SEQ ID NO: 3392363 - RNA, 14 nt, Human
ugaaaacuauacaa

SEQ ID NO: 3392364 - RNA, 14 nt, Human
ugaaaacuggaaua

SEQ ID NO: 3392365 - RNA, 23 nt, Human
ugaaaacuggaauaagaagcaaa

SEQ ID NO: 3392366 - RNA, 15 nt, Human
ugaaaacuucagaag

SEQ ID NO: 3392367 - RNA, 17 nt, Human
ugaaaacuuuucucaga

SEQ ID NO: 3392368 - RNA, 20 nt, Human
ugaaaagaaaaaugagccug

SEQ ID NO: 3392369 - RNA, 16 nt, Human
ugaaaagaaauaauaa

SEQ ID NO: 3392370 - RNA, 13 nt, Human
ugaaaagaauugu

SEQ ID NO: 3392371 - RNA, 16 nt, Human
ugaaaagacaagaaaa

SEQ ID NO: 3392372 - RNA, 19 nt, Human
ugaaaagacuccaaagaaa

SEQ ID NO: 3392373 - RNA, 21 nt, Human
ugaaaagagaaugaugcucaa

SEQ ID NO: 3392374 - RNA, 16 nt, Human
ugaaaagagacaggca

SEQ ID NO: 3392375 - RNA, 19 nt, Human
ugaaaagagagcagagaau

SEQ ID NO: 3392376 - RNA, 15 nt, Human
ugaagaucuaaauaa

SEQ ID NO: 3392377 - RNA, 18 nt, Human
ugaagaugcuuuuugauc

SEQ ID NO: 3392378 - RNA, 17 nt, Human
ugaagauggcauccugu

SEQ ID NO: 3392379 - RNA, 18 nt, Human
ugaagauggcauccugug

SEQ ID NO: 3392380 - RNA, 19 nt, Human
ugaagauggcauccuguga

SEQ ID NO: 3392381 - RNA, 15 nt, Human
ugaagaugggagccu

SEQ ID NO: 3392382 - RNA, 18 nt, Human
ugaagaugggggccucuu

SEQ ID NO: 3392383 - RNA, 13 nt, Human
ugaagauguuugc

SEQ ID NO: 3392384 - RNA, 15 nt, Human
ugaagauucuccugu

SEQ ID NO: 3392385 - RNA, 16 nt, Human
ugaagauuguuuaucu

SEQ ID NO: 3392386 - RNA, 17 nt, Human
ugaagauuuaccacuug

SEQ ID NO: 3392387 - RNA, 14 nt, Human
ugaagcaaacacau

SEQ ID NO: 3392388 - RNA, 15 nt, Human
ugaagcaaacaguug

SEQ ID NO: 3392389 - RNA, 20 nt, Human
ugaagcaaacaguugacaau

SEQ ID NO: 3392390 - RNA, 22 nt, Human
ugaagcaaacucuaaaauuaua

SEQ ID NO: 3392391 - RNA, 14 nt, Human
ugaagcaaaucaga

SEQ ID NO: 3392392 - RNA, 20 nt, Human
ugaagcaaaucgaaugaaau

SEQ ID NO: 3392393 - RNA, 21 nt, Human
ugaagcaaaugucaugcugcc

SEQ ID NO: 3392394 - RNA, 13 nt, Human
ugaagcaaggaag

SEQ ID NO: 3392395 - RNA, 21 nt, Human
ugaagcaaggaagauauacau

SEQ ID NO: 3392396 - RNA, 18 nt, Human
ugaagcaauggauauuug

SEQ ID NO: 3392397 - RNA, 17 nt, Human
ugaagcacagaccccuu

SEQ ID NO: 3392398 - RNA, 22 nt, Human
ugaagcacagugaucaaguuau

SEQ ID NO: 3392399 - RNA, 13 nt, Human
ugaagcagagugg

SEQ ID NO: 3392400 - RNA, 23 nt, Human
ugaagcagaugcaaagaggcaag

SEQ ID NO: 3392401 - RNA, 13 nt, Human
ugaagcagccucu

SEQ ID NO: 3392402 - RNA, 20 nt, Human
ugaagcagccucuccccagg

SEQ ID NO: 3392403 - RNA, 21 nt, Human
ugaagcaggguuucuuuucuu

SEQ ID NO: 3392404 - RNA, 14 nt, Human
ugaagcaguugugu

SEQ ID NO: 3392405 - RNA, 17 nt, Human
ugaagcauagauaauau

SEQ ID NO: 3392406 - RNA, 22 nt, Human
ugaagcauagauaauauuguuu

SEQ ID NO: 3392407 - RNA, 18 nt, Human
ugaagcauucuccccagu

SEQ ID NO: 3392408 - RNA, 15 nt, Human
ugaagcauuuuauaa

SEQ ID NO: 3392409 - RNA, 22 nt, Human
ugaagcauuuuauaaaucgcuu

SEQ ID NO: 3392410 - RNA, 14 nt, Human
ugaagccaaagaaa

SEQ ID NO: 3392411 - RNA, 14 nt, Human
ugaagccaaguggg

SEQ ID NO: 3392412 - RNA, 22 nt, Human
ugaagccacagcccaggccucc

SEQ ID NO: 3392413 - RNA, 16 nt, Human
ugaagccacugaagcu

SEQ ID NO: 3392414 - RNA, 14 nt, Human
ugaagccagccuuc

SEQ ID NO: 3392415 - RNA, 14 nt, Human
ugaagccaucuaaa

SEQ ID NO: 3392416 - RNA, 13 nt, Human
ugaagccaugucu

SEQ ID NO: 3392417 - RNA, 15 nt, Human
ugaagcccucccagg

SEQ ID NO: 3392418 - RNA, 15 nt, Human
ugaagccgacucugg

SEQ ID NO: 3392419 - RNA, 17 nt, Human
ugaagccgccaggaccg

SEQ ID NO: 3392420 - RNA, 13 nt, Human
ugaagccugcccu

SEQ ID NO: 3392421 - RNA, 21 nt, Human
ugaagcgaaacacagagaagc

SEQ ID NO: 3392422 - RNA, 15 nt, Human
ugaagcuaagauuua

SEQ ID NO: 3392423 - RNA, 13 nt, Human
ugaagcuaauuau

SEQ ID NO: 3392424 - RNA, 18 nt, Human
ugaagcuaauuauuuuaa

SEQ ID NO: 3392425 - RNA, 23 nt, Human
ugaagcuaauuauuuuaauuagg

SEQ ID NO: 3392426 - RNA, 20 nt, Human
ugaagcuaucguaaaauuaa

SEQ ID NO: 3392427 - RNA, 19 nt, Human
ugaagcuauuuaucuguag

SEQ ID NO: 3392428 - RNA, 18 nt, Human
ugaagcucaccuguugcu

SEQ ID NO: 3392429 - RNA, 13 nt, Human
ugaagcugaaaau

SEQ ID NO: 3392430 - RNA, 15 nt, Human
ugaagcugccugcuu

SEQ ID NO: 3392431 - RNA, 18 nt, Human
ugaagcuuauuaaugcua

SEQ ID NO: 3392432 - RNA, 22 nt, Human
ugaagcuuauuaaugcuaaggg

SEQ ID NO: 3392433 - RNA, 13 nt, Human
ugaagcuugugua

SEQ ID NO: 3392434 - RNA, 12 nt, Human
ugaagcuuuaua

SEQ ID NO: 3392435 - RNA, 21 nt, Human
ugaagcuuuuaugugaaacau

SEQ ID NO: 3392436 - RNA, 21 nt, Human
ugaaggaaaaacacaagcaaa

SEQ ID NO: 3392437 - RNA, 14 nt, Human
ugaaggaaaaauuc

SEQ ID NO: 3392438 - RNA, 15 nt, Human
ugaaggaaaaugaua

SEQ ID NO: 3392439 - RNA, 13 nt, Human
ugaaggaaagauu

SEQ ID NO: 3392440 - RNA, 20 nt, Human
ugaaggaacuugucucuuca

SEQ ID NO: 3392441 - RNA, 20 nt, Human
ugaaggaauaaauugcuccu

SEQ ID NO: 3392442 - RNA, 16 nt, Human
ugaaggaauacaauau

SEQ ID NO: 3392443 - RNA, 15 nt, Human
ugaaggaauauaugg

SEQ ID NO: 3392444 - RNA, 19 nt, Human
ugaaggacacuuccugccu

SEQ ID NO: 3392445 - RNA, 20 nt, Human
ugaaggacacuuccugccua

SEQ ID NO: 3392446 - RNA, 21 nt, Human
ugaaggaccuucacucuaaga

SEQ ID NO: 3392447 - RNA, 22 nt, Human
ugaaggacuaauagaaaaguau

SEQ ID NO: 3392448 - RNA, 12 nt, Human
ugaaggacugug

SEQ ID NO: 3392449 - RNA, 23 nt, Human
ugaaggacugugacaggcagcag

SEQ ID NO: 3392450 - RNA, 18 nt, Human
ugaaggacuuuggcccua

SEQ ID NO: 3392451 - RNA, 22 nt, Human
ugaaggagaggcaacauccaaa

SEQ ID NO: 3392452 - RNA, 11 nt, Human
ugaaggagccc

SEQ ID NO: 3392453 - RNA, 13 nt, Human
ugaaggaggugag

SEQ ID NO: 3392454 - RNA, 16 nt, Human
ugaaggcaaaauugca

SEQ ID NO: 3392455 - RNA, 12 nt, Human
ugaccaacugug

SEQ ID NO: 3392456 - RNA, 13 nt, Human
ugaccaacugugu

SEQ ID NO: 3392457 - RNA, 18 nt, Human
ugaccaacuguguuguau

SEQ ID NO: 3392458 - RNA, 15 nt, Human
ugaccaagaacugca

SEQ ID NO: 3392459 - RNA, 16 nt, Human
ugaccaagaacugcau

SEQ ID NO: 3392460 - RNA, 14 nt, Human
ugaccaaguauaaa

SEQ ID NO: 3392461 - RNA, 16 nt, Human
ugaccaaguuauaaau

SEQ ID NO: 3392462 - RNA, 17 nt, Human
ugaccaauauuguacag

SEQ ID NO: 3392463 - RNA, 21 nt, Human
ugaccaauauuguacaguuuu

SEQ ID NO: 3392464 - RNA, 13 nt, Human
ugaccaaugucuu

SEQ ID NO: 3392465 - RNA, 14 nt, Human
ugaccaaugucuug

SEQ ID NO: 3392466 - RNA, 15 nt, Human
ugaccaaugucuuga

SEQ ID NO: 3392467 - RNA, 15 nt, Human
ugaccaauugugcug

SEQ ID NO: 3392468 - RNA, 17 nt, Human
ugaccaauugugcugcc

SEQ ID NO: 3392469 - RNA, 19 nt, Human
ugaccaauugugcugccau

SEQ ID NO: 3392470 - RNA, 12 nt, Human
ugaccacacucc

SEQ ID NO: 3392471 - RNA, 16 nt, Human
ugaccacagcacagcc

SEQ ID NO: 3392472 - RNA, 23 nt, Human
ugaccaccaccccaacaaaccau

SEQ ID NO: 3392473 - RNA, 15 nt, Human
ugaccacccuccccu

SEQ ID NO: 3392474 - RNA, 18 nt, Human
ugaccacccuccccucuc

SEQ ID NO: 3392475 - RNA, 19 nt, Human
ugaccacccuccccucucu

SEQ ID NO: 3392476 - RNA, 20 nt, Human
ugaccacggacguuuccauc

SEQ ID NO: 3392477 - RNA, 23 nt, Human
ugaccacggacguuuccaucagg

SEQ ID NO: 3392478 - RNA, 15 nt, Human
ugaccacucugucuu

SEQ ID NO: 3392479 - RNA, 16 nt, Human
ugaccacucugucuug

SEQ ID NO: 3392480 - RNA, 16 nt, Human
ugaccacugcagaaga

SEQ ID NO: 3392481 - RNA, 16 nt, Human
ugaccacuugaggccu

SEQ ID NO: 3392482 - RNA, 14 nt, Human
ugaccagaaauggu

SEQ ID NO: 3392483 - RNA, 18 nt, Human
ugaccagcacugucucag

SEQ ID NO: 3392484 - RNA, 17 nt, Human
ugaccagcagaucccag

SEQ ID NO: 3392485 - RNA, 20 nt, Human
ugaccagcagaucccagcuc

SEQ ID NO: 3392486 - RNA, 21 nt, Human
ugaccagcagaucccagcuca

SEQ ID NO: 3392487 - RNA, 14 nt, Human
ugaccagcagcgcc

SEQ ID NO: 3392488 - RNA, 15 nt, Human
ugaccagcagcgccu

SEQ ID NO: 3392489 - RNA, 17 nt, Human
ugaccagccgugagcau

SEQ ID NO: 3392490 - RNA, 23 nt, Human
ugaccagccuccaugcugccucc

SEQ ID NO: 3392491 - RNA, 18 nt, Human
ugaccaguauaaaauuac

SEQ ID NO: 3392492 - RNA, 15 nt, Human
ugaccagucugaccc

SEQ ID NO: 3392493 - RNA, 19 nt, Human
ugaccaguggcuauggccu

SEQ ID NO: 3392494 - RNA, 17 nt, Human
ugaccaguugcagucac

SEQ ID NO: 3392495 - RNA, 18 nt, Human
ugaccaguugcagucacu

SEQ ID NO: 3392496 - RNA, 21 nt, Human
ugaccaguuuaaccugaugca

SEQ ID NO: 3392497 - RNA, 15 nt, Human
ugaccaucauuucac

SEQ ID NO: 3392498 - RNA, 15 nt, Human
ugaccaucugcuuuu

SEQ ID NO: 3392499 - RNA, 16 nt, Human
ugaccaugaaagacuu

SEQ ID NO: 3392500 - RNA, 12 nt, Human
ugaccaugcuca

SEQ ID NO: 3392501 - RNA, 19 nt, Human
ugaccaugcucaucugcug

SEQ ID NO: 3392502 - RNA, 21 nt, Human
ugaccauucuccaccugccag

SEQ ID NO: 3392503 - RNA, 14 nt, Human
ugaccauuuauaau

SEQ ID NO: 3392504 - RNA, 16 nt, Human
ugacccaaagaccaau

SEQ ID NO: 3392505 - RNA, 21 nt, Human
ugacccaaaucucuuccacaa

SEQ ID NO: 3392506 - RNA, 17 nt, Human
ugacccacaagaaauga

SEQ ID NO: 3392507 - RNA, 15 nt, Human
ugacccacagccucu

SEQ ID NO: 3392508 - RNA, 20 nt, Human
ugacccacagccucugccug

SEQ ID NO: 3392509 - RNA, 15 nt, Human
ugacccaccccugug

SEQ ID NO: 3392510 - RNA, 16 nt, Human
ugacccaccccugugc

SEQ ID NO: 3392511 - RNA, 23 nt, Human
ugacccaccccugugcuccgugc

SEQ ID NO: 3392512 - RNA, 19 nt, Human
ugacccacuucucaucaca

SEQ ID NO: 3392513 - RNA, 16 nt, Human
ugacccaggccgcagc

SEQ ID NO: 3392514 - RNA, 22 nt, Human
ugacccaggccgcagcucuugc

SEQ ID NO: 3392515 - RNA, 16 nt, Human
ugacccaggcugccug

SEQ ID NO: 3392516 - RNA, 13 nt, Human
ugacccaggcugg

SEQ ID NO: 3392517 - RNA, 14 nt, Human
ugacccagucccug

SEQ ID NO: 3392518 - RNA, 20 nt, Human
ugacccagucccugggggaa

SEQ ID NO: 3392519 - RNA, 23 nt, Human
ugacccagugcccccacugacca

SEQ ID NO: 3392520 - RNA, 12 nt, Human
ugacccaugcug

SEQ ID NO: 3392521 - RNA, 15 nt, Human
ugacccaugcugccc

SEQ ID NO: 3392522 - RNA, 16 nt, Human
ugacccaugcugcccu

SEQ ID NO: 3392523 - RNA, 20 nt, Human
ugacccaugcugcccuguga

SEQ ID NO: 3392524 - RNA, 15 nt, Human
ugacccauugcuguu

SEQ ID NO: 3392525 - RNA, 22 nt, Human
ugaccccaaacaccuuccagcu

SEQ ID NO: 3392526 - RNA, 22 nt, Human
ugaccccaaagagccuggagaa

SEQ ID NO: 3392527 - RNA, 22 nt, Human
ugaccccagcauucucaggcac

SEQ ID NO: 3392528 - RNA, 13 nt, Human
ugaccccagggca

SEQ ID NO: 3392529 - RNA, 19 nt, Human
ugaccccagggcacaggag

SEQ ID NO: 3392530 - RNA, 15 nt, Human
ugacccccccagcuu

SEQ ID NO: 3392531 - RNA, 15 nt, Human
ugaccccccucagga

SEQ ID NO: 3392532 - RNA, 20 nt, Human
ugaccccucauagcccucac

SEQ ID NO: 3392533 - RNA, 13 nt, Human
ugaccccuccuca

SEQ ID NO: 3392534 - RNA, 22 nt, Human
ugaccccuccuggggccaggcc

SEQ ID NO: 3392535 - RNA, 20 nt, Human
ugacccggaggccacaugag

SEQ ID NO: 3392536 - RNA, 21 nt, Human
ugacccggaggccacaugagu

SEQ ID NO: 3392537 - RNA, 18 nt, Human
ugacccggcacccccugc

SEQ ID NO: 3392538 - RNA, 19 nt, Human
ugacccggcacccccugca

SEQ ID NO: 3392539 - RNA, 18 nt, Human
ugacccuagcucuuuccu

SEQ ID NO: 3392540 - RNA, 21 nt, Human
ugacccuaugggucuaggaca

SEQ ID NO: 3392541 - RNA, 11 nt, Human
ugacccuccaa

SEQ ID NO: 3392542 - RNA, 12 nt, Human
ugacccucccuu

SEQ ID NO: 3392543 - RNA, 15 nt, Human
ugacccucuccaccc

SEQ ID NO: 3392544 - RNA, 18 nt, Human
ugacccucuccaccccau

SEQ ID NO: 3392545 - RNA, 21 nt, Human
ugacccugcgaaggggcccug

SEQ ID NO: 3392546 - RNA, 23 nt, Human
ugacccugcgaaggggcccuggu

SEQ ID NO: 3392547 - RNA, 17 nt, Human
ugacccuguauauagcc

SEQ ID NO: 3392548 - RNA, 19 nt, Human
ugacccuguauauagccca

SEQ ID NO: 3392549 - RNA, 20 nt, Human
ugacccuguauauagcccag

SEQ ID NO: 3392550 - RNA, 20 nt, Human
ugacccuuacagccucugac

SEQ ID NO: 3392551 - RNA, 19 nt, Human
ugacccuucccaaucagca

SEQ ID NO: 3392552 - RNA, 18 nt, Human
ugaccgacagcuuuccag

SEQ ID NO: 3392553 - RNA, 16 nt, Human
ugaccggacuuuucug

SEQ ID NO: 3392554 - RNA, 19 nt, Human
ugaccggacuuuucugcaa

SEQ ID NO: 3392555 - RNA, 13 nt, Human
ugaccgugaggcc

SEQ ID NO: 3392556 - RNA, 16 nt, Human
ugaccgugaggccaga

SEQ ID NO: 3392557 - RNA, 20 nt, Human
ugaccgugaggccagagaca

SEQ ID NO: 3392558 - RNA, 16 nt, Human
ugaccgugggcggggc

SEQ ID NO: 3392559 - RNA, 22 nt, Human
ugaccuaguuuuccaugcgugu

SEQ ID NO: 3392560 - RNA, 21 nt, Human
ugaccucaaaugaugugccug

SEQ ID NO: 3392561 - RNA, 17 nt, Human
ugaccucaaccugugau

SEQ ID NO: 3392562 - RNA, 15 nt, Human
ugaccucacagugac

SEQ ID NO: 3392563 - RNA, 18 nt, Human
ugaccucacagugacccu

SEQ ID NO: 3392564 - RNA, 18 nt, Human
ugaccucaccuaggaagu

SEQ ID NO: 3392565 - RNA, 16 nt, Human
ugaccucacucagaag

SEQ ID NO: 3392566 - RNA, 14 nt, Human
ugaccucacuguga

SEQ ID NO: 3392567 - RNA, 22 nt, Human
ugaccucagcuuugauauuuca

SEQ ID NO: 3392568 - RNA, 18 nt, Human
ugaccucaggcacuagcc

SEQ ID NO: 3392569 - RNA, 18 nt, Human
ugaccuccagcuuuccug

SEQ ID NO: 3392570 - RNA, 11 nt, Human
ugaccucccag

SEQ ID NO: 3392571 - RNA, 15 nt, Human
ugaccucccagcccu

SEQ ID NO: 3392572 - RNA, 22 nt, Human
ugaccucccagcccuauggaug

SEQ ID NO: 3392573 - RNA, 23 nt, Human
ugaccucccagcccuauggaugu

SEQ ID NO: 3392574 - RNA, 18 nt, Human
ugaccucccccuccuucc

SEQ ID NO: 3392575 - RNA, 20 nt, Human
ugaccucuagcccugcccgg

SEQ ID NO: 3392576 - RNA, 12 nt, Human
ugaccucugccu

SEQ ID NO: 3392577 - RNA, 13 nt, Human
ugaccucugccug

SEQ ID NO: 3392578 - RNA, 17 nt, Human
ugaccucuguuguccuc

SEQ ID NO: 3392579 - RNA, 18 nt, Human
ugaccucuguuguccucc

SEQ ID NO: 3392580 - RNA, 21 nt, Human
ugagacuaaucuuauucauuu

SEQ ID NO: 3392581 - RNA, 19 nt, Human
ugagacuacaagugugugc

SEQ ID NO: 3392582 - RNA, 17 nt, Human
ugagacucagugcagau

SEQ ID NO: 3392583 - RNA, 15 nt, Human
ugagacucgagaacu

SEQ ID NO: 3392584 - RNA, 22 nt, Human
ugagacucgcgacaaugcaaac

SEQ ID NO: 3392585 - RNA, 22 nt, Human
ugagacucuaggguccagugga

SEQ ID NO: 3392586 - RNA, 14 nt, Human
ugagacucugucuc

SEQ ID NO: 3392587 - RNA, 22 nt, Human
ugagacugcgggaugguccugg

SEQ ID NO: 3392588 - RNA, 13 nt, Human
ugagacugugcug

SEQ ID NO: 3392589 - RNA, 12 nt, Human
ugagacuuccaa

SEQ ID NO: 3392590 - RNA, 14 nt, Human
ugagacuugcucuc

SEQ ID NO: 3392591 - RNA, 12 nt, Human
ugagacuuuaaa

SEQ ID NO: 3392592 - RNA, 20 nt, Human
ugagacuuuaaaagcauuuu

SEQ ID NO: 3392593 - RNA, 17 nt, Human
agccuucuuuuucugga

SEQ ID NO: 3392594 - RNA, 20 nt, Human
agccuucuuuuucuggacuc

SEQ ID NO: 3392595 - RNA, 23 nt, Human
agccuucuuuuucuggacucugg

SEQ ID NO: 3392596 - RNA, 18 nt, Human
agccuugaccauucucca

SEQ ID NO: 3392597 - RNA, 21 nt, Human
agccuugaccauucuccaccu

SEQ ID NO: 3392598 - RNA, 13 nt, Human
agccuugccagag

SEQ ID NO: 3392599 - RNA, 14 nt, Human
agccuugccagaga

SEQ ID NO: 3392600 - RNA, 17 nt, Human
agccuugccagagaucc

SEQ ID NO: 3392601 - RNA, 23 nt, Human
agccuugccuaaauuuaaugcug

SEQ ID NO: 3392602 - RNA, 19 nt, Human
agccuugcggaagguucua

SEQ ID NO: 3392603 - RNA, 12 nt, Human
agccuugcuugu

SEQ ID NO: 3392604 - RNA, 19 nt, Human
agccuuggauaaugcuguu

SEQ ID NO: 3392605 - RNA, 23 nt, Human
agccuuggauaaugcuguugccu

SEQ ID NO: 3392606 - RNA, 23 nt, Human
agccuuggggauucuuccaucug

SEQ ID NO: 3392607 - RNA, 16 nt, Human
agccuugguguccacc

SEQ ID NO: 3392608 - RNA, 18 nt, Human
agccuugguguccaccug

SEQ ID NO: 3392609 - RNA, 10 nt, Human
agccuugugu

SEQ ID NO: 3392610 - RNA, 20 nt, Human
agccuuguguauauuuguau

SEQ ID NO: 3392611 - RNA, 20 nt, Human
agccuuuaguaucaguguuu

SEQ ID NO: 3392612 - RNA, 18 nt, Human
agccuuucauuuugcuuu

SEQ ID NO: 3392613 - RNA, 19 nt, Human
agccuuucauuuugcuuua

SEQ ID NO: 3392614 - RNA, 21 nt, Human
agccuuucauuuugcuuuaau

SEQ ID NO: 3392615 - RNA, 23 nt, Human
agccuuucauuuugcuuuaauuu

SEQ ID NO: 3392616 - RNA, 23 nt, Human
agccuuuccucaaaacuggaguc

SEQ ID NO: 3392617 - RNA, 23 nt, Human
agccuuucucucuuuauacagcu

SEQ ID NO: 3392618 - RNA, 15 nt, Human
agccuuucuuuugga

SEQ ID NO: 3392619 - RNA, 11 nt, Human
agccuuugaau

SEQ ID NO: 3392620 - RNA, 15 nt, Human
agccuuugccucccc

SEQ ID NO: 3392621 - RNA, 17 nt, Human
agccuuugggaaaugcu

SEQ ID NO: 3392622 - RNA, 21 nt, Human
agccuuuguuccccacuggag

SEQ ID NO: 3392623 - RNA, 23 nt, Human
agccuuuguuccccacuggagca

SEQ ID NO: 3392624 - RNA, 14 nt, Human
agcgaaacacagag

SEQ ID NO: 3392625 - RNA, 13 nt, Human
agcgaacugacau

SEQ ID NO: 3392626 - RNA, 16 nt, Human
agcgaacuugacaauu

SEQ ID NO: 3392627 - RNA, 13 nt, Human
agcgaaguagcuu

SEQ ID NO: 3392628 - RNA, 13 nt, Human
agcgaauuuuaaa

SEQ ID NO: 3392629 - RNA, 15 nt, Human
agcgaauuuuaaaag

SEQ ID NO: 3392630 - RNA, 17 nt, Human
agcgaccaccccugccu

SEQ ID NO: 3392631 - RNA, 19 nt, Human
agcgaccaccccugccucc

SEQ ID NO: 3392632 - RNA, 17 nt, Human
agcgacccauucagaga

SEQ ID NO: 3392633 - RNA, 15 nt, Human
agcgaccgcccccuc

SEQ ID NO: 3392634 - RNA, 16 nt, Human
agcgaccgcccccucc

SEQ ID NO: 3392635 - RNA, 12 nt, Human
agcgacuaaacu

SEQ ID NO: 3392636 - RNA, 16 nt, Human
agcgagagucugucuc

SEQ ID NO: 3392637 - RNA, 19 nt, Human
agcgagcaucccccaaagu

SEQ ID NO: 3392638 - RNA, 19 nt, Human
agcgagcccugguggcagu

SEQ ID NO: 3392639 - RNA, 20 nt, Human
agcgaggagaugcuccuugg

SEQ ID NO: 3392640 - RNA, 24 nt, Human
agcgaggcugagccuacagaugaa

SEQ ID NO: 3392641 - RNA, 16 nt, Human
agcgagggcagcugcu

SEQ ID NO: 3392642 - RNA, 22 nt, Human
agcgagggccccagcgugaagc

SEQ ID NO: 3392643 - RNA, 22 nt, Human
agcgaggucaacagagaaggca

SEQ ID NO: 3392644 - RNA, 22 nt, Human
agcgaguggagucugccaccca

SEQ ID NO: 3392645 - RNA, 21 nt, Human
agcgaguuguggaaagccucu

SEQ ID NO: 3392646 - RNA, 18 nt, Human
agcgauguaugcagcuau

SEQ ID NO: 3392647 - RNA, 24 nt, Human
agcgauucuccugccucagccucc

SEQ ID NO: 3392648 - RNA, 17 nt, Human
agcgauucuucugcuuc

SEQ ID NO: 3392649 - RNA, 15 nt, Human
agcgcacagcugcuc

SEQ ID NO: 3392650 - RNA, 12 nt, Human
agcgcaccugcc

SEQ ID NO: 3392651 - RNA, 14 nt, Human
agcgcaccugcccc

SEQ ID NO: 3392652 - RNA, 21 nt, Human
agcgcagcuggacucugcauc

SEQ ID NO: 3392653 - RNA, 23 nt, Human
agcgcaguuuuuuuuuucuuguc

SEQ ID NO: 3392654 - RNA, 19 nt, Human
agcgccagccucagacugg

SEQ ID NO: 3392655 - RNA, 22 nt, Human
agcgccaguguaaucccccagg

SEQ ID NO: 3392656 - RNA, 14 nt, Human
agcgcccagcuccu

SEQ ID NO: 3392657 - RNA, 16 nt, Human
agcgcccagcuccuga

SEQ ID NO: 3392658 - RNA, 22 nt, Human
agcgcccaguuggguggaugcc

SEQ ID NO: 3392659 - RNA, 16 nt, Human
agcgcccuggccccca

SEQ ID NO: 3392660 - RNA, 17 nt, Human
agcgcccuuccucucca

SEQ ID NO: 3392661 - RNA, 23 nt, Human
agcgccgugaguucucagggcuc

SEQ ID NO: 3392662 - RNA, 22 nt, Human
agcgccuaguggggucucccuc

SEQ ID NO: 3392663 - RNA, 22 nt, Human
agcgccuccauccaaggccagg

SEQ ID NO: 3392664 - RNA, 14 nt, Human
agcgccucccucca

SEQ ID NO: 3392665 - RNA, 18 nt, Human
agcgccucccuccacccc

SEQ ID NO: 3392666 - RNA, 21 nt, Human
agcgccucccuccaccccagg

SEQ ID NO: 3392667 - RNA, 12 nt, Human
agcgccugcccc

SEQ ID NO: 3392668 - RNA, 17 nt, Human
agcgcggacauccccug

SEQ ID NO: 3392669 - RNA, 19 nt, Human
agcgcggacauccccugcu

SEQ ID NO: 3392670 - RNA, 18 nt, Human
agcgcggcccucccgagu

SEQ ID NO: 3392671 - RNA, 13 nt, Human
agcgcuaucuccc

SEQ ID NO: 3392672 - RNA, 17 nt, Human
agcgcuaucucccugcc

SEQ ID NO: 3392673 - RNA, 22 nt, Human
agcgcuccugccgcagagcugg

SEQ ID NO: 3392674 - RNA, 17 nt, Human
agcgcugccgcacccca

SEQ ID NO: 3392675 - RNA, 19 nt, Human
agcgcugccgcaccccaga

SEQ ID NO: 3392676 - RNA, 22 nt, Human
agcgcuugggcgccgugcuggg

SEQ ID NO: 3392677 - RNA, 21 nt, Human
agcgcuuucuggaaaagagga

SEQ ID NO: 3392678 - RNA, 16 nt, Human
agcgcuuuuccuuggc

SEQ ID NO: 3392679 - RNA, 22 nt, Human
agcggaaaagguuuuauuuugu

SEQ ID NO: 3392680 - RNA, 14 nt, Human
agcggacaguggca

SEQ ID NO: 3392681 - RNA, 19 nt, Human
agcggacaucagcugguca

SEQ ID NO: 3392682 - RNA, 15 nt, Human
agcggaggcugugug

SEQ ID NO: 3392683 - RNA, 21 nt, Human
agcggagguugcagugagcug

SEQ ID NO: 3392684 - RNA, 14 nt, Human
agcggcagaugggg

SEQ ID NO: 3392685 - RNA, 15 nt, Human
agcggcgaccgcccu

SEQ ID NO: 3392686 - RNA, 18 nt, Human
agcggcgaccgcccuccg

SEQ ID NO: 3392687 - RNA, 17 nt, Human
agcggcucaagcccagg

SEQ ID NO: 3392688 - RNA, 14 nt, Human
agcggcuggcagcc

SEQ ID NO: 3392689 - RNA, 17 nt, Human
agcggcuggugcagggc

SEQ ID NO: 3392690 - RNA, 15 nt, Human
agcgggaggcagagu

SEQ ID NO: 3392691 - RNA, 21 nt, Human
agcgggaggcagaguuugccu

SEQ ID NO: 3392692 - RNA, 13 nt, Human
agcggggacagcu

SEQ ID NO: 3392693 - RNA, 12 nt, Human
agcgggggaggg

SEQ ID NO: 3392694 - RNA, 14 nt, Human
agcggggggagggu

SEQ ID NO: 3392695 - RNA, 13 nt, Human
agcgggucugcuc

SEQ ID NO: 3392696 - RNA, 18 nt, Human
aggugccuccaggugugc

SEQ ID NO: 3392697 - RNA, 13 nt, Human
aggugccuccuga

SEQ ID NO: 3392698 - RNA, 13 nt, Human
aggugccuggagu

SEQ ID NO: 3392699 - RNA, 18 nt, Human
aggugccugucccacccc

SEQ ID NO: 3392700 - RNA, 22 nt, Human
aggugccuucuuauucucacuc

SEQ ID NO: 3392701 - RNA, 23 nt, Human
aggugccuucuuauucucacucc

SEQ ID NO: 3392702 - RNA, 10 nt, Human
aggugccuug

SEQ ID NO: 3392703 - RNA, 19 nt, Human
aggugccuuucaaauuuag

SEQ ID NO: 3392704 - RNA, 21 nt, Human
aggugcgaaugacaguagcau

SEQ ID NO: 3392705 - RNA, 18 nt, Human
aggugcuacaaaaacaca

SEQ ID NO: 3392706 - RNA, 19 nt, Human
aggugcuacaaaaacacag

SEQ ID NO: 3392707 - RNA, 20 nt, Human
aggugcuacaaaaacacagc

SEQ ID NO: 3392708 - RNA, 21 nt, Human
aggugcuacaaaaacacagca

SEQ ID NO: 3392709 - RNA, 21 nt, Human
aggugcuacacccuuuuccag

SEQ ID NO: 3392710 - RNA, 19 nt, Human
aggugcuaggaacacuccu

SEQ ID NO: 3392711 - RNA, 16 nt, Human
aggugcucaaaaugca

SEQ ID NO: 3392712 - RNA, 17 nt, Human
aggugcucaaaaugcaa

SEQ ID NO: 3392713 - RNA, 18 nt, Human
aggugcucacaccccauu

SEQ ID NO: 3392714 - RNA, 17 nt, Human
aggugcuccccugacag

SEQ ID NO: 3392715 - RNA, 16 nt, Human
aggugcugacggccag

SEQ ID NO: 3392716 - RNA, 17 nt, Human
aggugcugacggccagg

SEQ ID NO: 3392717 - RNA, 13 nt, Human
aggugcugcuuaa

SEQ ID NO: 3392718 - RNA, 20 nt, Human
aggugcuggagcacugggcu

SEQ ID NO: 3392719 - RNA, 12 nt, Human
aggugcugggag

SEQ ID NO: 3392720 - RNA, 15 nt, Human
aggugcugggaggga

SEQ ID NO: 3392721 - RNA, 17 nt, Human
aggugcuggggccuggu

SEQ ID NO: 3392722 - RNA, 14 nt, Human
aggugcuguccaug

SEQ ID NO: 3392723 - RNA, 23 nt, Human
aggugcuguuauccauggggaag

SEQ ID NO: 3392724 - RNA, 14 nt, Human
aggugcuguuguca

SEQ ID NO: 3392725 - RNA, 21 nt, Human
aggugcuguugucauugcuuu

SEQ ID NO: 3392726 - RNA, 19 nt, Human
aggugcuuaagcagaagca

SEQ ID NO: 3392727 - RNA, 18 nt, Human
agguggaaaaacaucuga

SEQ ID NO: 3392728 - RNA, 17 nt, Human
agguggaagaagggaga

SEQ ID NO: 3392729 - RNA, 22 nt, Human
agguggaagaagggagaagaaa

SEQ ID NO: 3392730 - RNA, 13 nt, Human
agguggaagcccu

SEQ ID NO: 3392731 - RNA, 19 nt, Human
agguggaagcccuccuucc

SEQ ID NO: 3392732 - RNA, 20 nt, Human
agguggaagcccuccuucca

SEQ ID NO: 3392733 - RNA, 18 nt, Human
agguggaaggcagacagc

SEQ ID NO: 3392734 - RNA, 17 nt, Human
agguggaauuauuuuaa

SEQ ID NO: 3392735 - RNA, 16 nt, Human
agguggacuggaaggg

SEQ ID NO: 3392736 - RNA, 18 nt, Human
agguggagcaaagugagg

SEQ ID NO: 3392737 - RNA, 22 nt, Human
agguggagcguucaccagugac

SEQ ID NO: 3392738 - RNA, 14 nt, Human
agguggagggaggg

SEQ ID NO: 3392739 - RNA, 20 nt, Human
agguggagguugcagugagc

SEQ ID NO: 3392740 - RNA, 16 nt, Human
agguggaucacagagg

SEQ ID NO: 3392741 - RNA, 15 nt, Human
agguggauggcccca

SEQ ID NO: 3392742 - RNA, 18 nt, Human
agguggcaaggcugugcu

SEQ ID NO: 3392743 - RNA, 23 nt, Human
agguggcacuuuuucauuugccu

SEQ ID NO: 3392744 - RNA, 14 nt, Human
agguggcagcccug

SEQ ID NO: 3392745 - RNA, 23 nt, Human
agguggcaucagugucuuuccac

SEQ ID NO: 3392746 - RNA, 21 nt, Human
agguggccuccuugcuuguua

SEQ ID NO: 3392747 - RNA, 17 nt, Human
agguggcuauggccacc

SEQ ID NO: 3392748 - RNA, 14 nt, Human
agguggcucuccag

SEQ ID NO: 3392749 - RNA, 23 nt, Human
agguggcugacccagucccuggg

SEQ ID NO: 3392750 - RNA, 15 nt, Human
agguggcugagcccc

SEQ ID NO: 3392751 - RNA, 13 nt, Human
agguggcugccug

SEQ ID NO: 3392752 - RNA, 12 nt, Human
aggugggaggau

SEQ ID NO: 3392753 - RNA, 20 nt, Human
aggugggaggaugugaauug

SEQ ID NO: 3392754 - RNA, 17 nt, Human
aggugggauccuccagg

SEQ ID NO: 3392755 - RNA, 19 nt, Human
aggugggcacuggauuagu

SEQ ID NO: 3392756 - RNA, 13 nt, Human
aggugggcaggug

SEQ ID NO: 3392757 - RNA, 19 nt, Human
aggugggccagccccuccc

SEQ ID NO: 3392758 - RNA, 21 nt, Human
aggugggccagccccucccac

SEQ ID NO: 3392759 - RNA, 13 nt, Human
aggugggcccagg

SEQ ID NO: 3392760 - RNA, 18 nt, Human
aggugggcccaggaccag

SEQ ID NO: 3392761 - RNA, 23 nt, Human
aggugggcccaggaccagcuggg

SEQ ID NO: 3392762 - RNA, 23 nt, Human
aggugggccgcaggcgggaaaag

SEQ ID NO: 3392763 - RNA, 19 nt, Human
aggugggccuugcuaccuc

SEQ ID NO: 3392764 - RNA, 21 nt, Human
aggugggccuugcuaccucaa

SEQ ID NO: 3392765 - RNA, 18 nt, Human
aggugggcgggcagcaca

SEQ ID NO: 3392766 - RNA, 14 nt, Human
aggugggcugggcc

SEQ ID NO: 3392767 - RNA, 15 nt, Human
aggugggcuucccag

SEQ ID NO: 3392768 - RNA, 21 nt, Human
aggugggcuucccaguggcug

SEQ ID NO: 3392769 - RNA, 13 nt, Human
agguggggacagg

SEQ ID NO: 3392770 - RNA, 19 nt, Human
agguggggagacugggcug

SEQ ID NO: 3392771 - RNA, 17 nt, Human
agguggggcgaggcagg

SEQ ID NO: 3392772 - RNA, 14 nt, Human
agguggggguuggc

SEQ ID NO: 3392773 - RNA, 20 nt, Human
agguggggguuggcugggua

SEQ ID NO: 3392774 - RNA, 23 nt, Human
aggugggguauuuaccacagcag

SEQ ID NO: 3392775 - RNA, 22 nt, Human
agguggggucuuugugagagug

SEQ ID NO: 3392776 - RNA, 14 nt, Human
aggugggucccggc

SEQ ID NO: 3392777 - RNA, 15 nt, Human
aggugggugucugcg

SEQ ID NO: 3392778 - RNA, 23 nt, Human
agguggguuuucaucaagacugg

SEQ ID NO: 3392779 - RNA, 19 nt, Human
agguggguuuucuucccau

SEQ ID NO: 3392780 - RNA, 20 nt, Human
aggugguaguaaaacacaga

SEQ ID NO: 3392781 - RNA, 15 nt, Human
aggugguaugugugu

SEQ ID NO: 3392782 - RNA, 15 nt, Human
agguggucugaaugu

SEQ ID NO: 3392783 - RNA, 16 nt, Human
agguggucugaauguu

SEQ ID NO: 3392784 - RNA, 17 nt, Human
agguggucugaauguuc

SEQ ID NO: 3392785 - RNA, 19 nt, Human
agguggucugaauguucug

SEQ ID NO: 3392786 - RNA, 21 nt, Human
agguggucugaauguucugac

SEQ ID NO: 3392787 - RNA, 21 nt, Human
agguggugggcauucucucuc

SEQ ID NO: 3392788 - RNA, 17 nt, Human
agguggugucacugucc

SEQ ID NO: 3392789 - RNA, 15 nt, Human
aggugguuuuaaagg

SEQ ID NO: 3392790 - RNA, 13 nt, Human
aggugucacaugg

SEQ ID NO: 3392791 - RNA, 18 nt, Human
aggugucaggcugcuggc

SEQ ID NO: 3392792 - RNA, 15 nt, Human
aggugucauacagau

SEQ ID NO: 3392793 - RNA, 15 nt, Human
aggugucauuuccau

SEQ ID NO: 3392794 - RNA, 19 nt, Human
agguguccccagcccacug

SEQ ID NO: 3392795 - RNA, 20 nt, Human
aggugucccugcacuugcag

SEQ ID NO: 3392796 - RNA, 14 nt, Human
aggugucucaggcu

SEQ ID NO: 3392797 - RNA, 14 nt, Human
aggugucuuccucc

SEQ ID NO: 3392798 - RNA, 23 nt, Human
aggugugaaccaccacacccagc

SEQ ID NO: 3392799 - RNA, 13 nt, Human
aggugugaggagg

SEQ ID NO: 3392800 - RNA, 17 nt, Human
aggugugaggcaggaga

SEQ ID NO: 3392801 - RNA, 15 nt, Human
aggugugauuauaaa

SEQ ID NO: 3392802 - RNA, 14 nt, Human
aggugugggggcug

SEQ ID NO: 3392803 - RNA, 16 nt, Human
aggugugggggcugca

SEQ ID NO: 3392804 - RNA, 18 nt, Human
agguguuaacauuccaag

SEQ ID NO: 3392805 - RNA, 23 nt, Human
agguguuaacauuccaagacucu

SEQ ID NO: 3392806 - RNA, 15 nt, Human
agguguuacuguaau

SEQ ID NO: 3392807 - RNA, 16 nt, Human
agguguuacuguaauu

SEQ ID NO: 3392808 - RNA, 21 nt, Human
agguguugaagaaauuauaaa

SEQ ID NO: 3392809 - RNA, 12 nt, Human
agguguugccaa

SEQ ID NO: 3392810 - RNA, 17 nt, Human
agguguuggcugcacgu

SEQ ID NO: 3392811 - RNA, 15 nt, Human
agguguugucccuuc

SEQ ID NO: 3392812 - RNA, 18 nt, Human
agguguuuaaagagaggu

SEQ ID NO: 3392813 - RNA, 11 nt, Human
agguguuuaua

SEQ ID NO: 3392814 - RNA, 17 nt, Human
agguguuuauuaaaauu

SEQ ID NO: 3392815 - RNA, 21 nt, Human
agguguuuauuaaaauucuga

SEQ ID NO: 3392816 - RNA, 14 nt, Human
agguguuugaaaau

SEQ ID NO: 3392817 - RNA, 17 nt, Human
agguguuuucuguguaa

SEQ ID NO: 3392818 - RNA, 18 nt, Human
agguguuuucuguguaac

SEQ ID NO: 3392819 - RNA, 19 nt, Human
agguguuuucuguguaacc

SEQ ID NO: 3392820 - RNA, 19 nt, Human
agguguuuuuuaugaagug

SEQ ID NO: 3392821 - RNA, 21 nt, Human
agguuaaaaaaauggcaguga

SEQ ID NO: 3392822 - RNA, 13 nt, Human
agguuaaauguuu

SEQ ID NO: 3392823 - RNA, 22 nt, Human
agguuaacuauguacaauauuu

SEQ ID NO: 3392824 - RNA, 13 nt, Human
agguuaauauuua

SEQ ID NO: 3392825 - RNA, 15 nt, Human
agguuacaacagauu

SEQ ID NO: 3392826 - RNA, 16 nt, Human
agguuacaacagauuu

SEQ ID NO: 3392827 - RNA, 19 nt, Human
agguuacaacagauuugug

SEQ ID NO: 3392828 - RNA, 21 nt, Human
agguuacaagccugcacaaua

SEQ ID NO: 3392829 - RNA, 15 nt, Human
agguuaccaagaagc

SEQ ID NO: 3392830 - RNA, 23 nt, Human
agguuagaaauaaugucaaaaau

SEQ ID NO: 3392831 - RNA, 18 nt, Human
agguuagaaccuagaagg

SEQ ID NO: 3392832 - RNA, 20 nt, Human
agguuagaaccuagaagggc

SEQ ID NO: 3392833 - RNA, 19 nt, Human
agguuaggcaguauaaaga

SEQ ID NO: 3392834 - RNA, 14 nt, Human
agguuauaauuuuu

SEQ ID NO: 3392835 - RNA, 16 nt, Human
agguuauaugaauaua

SEQ ID NO: 3392836 - RNA, 17 nt, Human
agguuauaugaauauau

SEQ ID NO: 3392837 - RNA, 21 nt, Human
agguuauugcaauaaaguaua

SEQ ID NO: 3392838 - RNA, 15 nt, Human
agguuauuuauuuaa

SEQ ID NO: 3392839 - RNA, 17 nt, Human
agguucaaagauauuuu

SEQ ID NO: 3392840 - RNA, 21 nt, Human
aguacuugugaaacacagcug

SEQ ID NO: 3392841 - RNA, 24 nt, Human
aguacuugugaaacacagcuguuc

SEQ ID NO: 3392842 - RNA, 13 nt, Human
aguacuuuauaga

SEQ ID NO: 3392843 - RNA, 13 nt, Human
aguacuuugugca

SEQ ID NO: 3392844 - RNA, 15 nt, Human
aguacuuugugcauu

SEQ ID NO: 3392845 - RNA, 13 nt, Human
aguacuuuuuuaa

SEQ ID NO: 3392846 - RNA, 16 nt, Human
aguacuuuuuuaaaua

SEQ ID NO: 3392847 - RNA, 23 nt, Human
aguacuuuuuuaaauauuuucua

SEQ ID NO: 3392848 - RNA, 22 nt, Human
aguagaaaaugugacccuccaa

SEQ ID NO: 3392849 - RNA, 21 nt, Human
aguagaaagacagagcuggga

SEQ ID NO: 3392850 - RNA, 15 nt, Human
aguagaaaggccuuu

SEQ ID NO: 3392851 - RNA, 15 nt, Human
aguagaaauaaaagu

SEQ ID NO: 3392852 - RNA, 18 nt, Human
aguagaaauaauaugcau

SEQ ID NO: 3392853 - RNA, 19 nt, Human
aguagaaauaauaugcauu

SEQ ID NO: 3392854 - RNA, 11 nt, Human
aguagaacugu

SEQ ID NO: 3392855 - RNA, 14 nt, Human
aguagaacuuugua

SEQ ID NO: 3392856 - RNA, 19 nt, Human
aguagaacuuuguauaguu

SEQ ID NO: 3392857 - RNA, 21 nt, Human
aguagaaggucggaggcuugg

SEQ ID NO: 3392858 - RNA, 14 nt, Human
aguagaauugauuu

SEQ ID NO: 3392859 - RNA, 15 nt, Human
aguagacacauuuaa

SEQ ID NO: 3392860 - RNA, 12 nt, Human
aguagacauuua

SEQ ID NO: 3392861 - RNA, 14 nt, Human
aguagacauuuuaa

SEQ ID NO: 3392862 - RNA, 17 nt, Human
aguagacauuuuaacaa

SEQ ID NO: 3392863 - RNA, 20 nt, Human
aguagacauuuuaacaagaa

SEQ ID NO: 3392864 - RNA, 16 nt, Human
aguagaccccuggcug

SEQ ID NO: 3392865 - RNA, 21 nt, Human
aguagaccuuguuacuucuga

SEQ ID NO: 3392866 - RNA, 19 nt, Human
aguagacuugcuuugguca

SEQ ID NO: 3392867 - RNA, 11 nt, Human
aguagagacag

SEQ ID NO: 3392868 - RNA, 12 nt, Human
aguagagacagg

SEQ ID NO: 3392869 - RNA, 13 nt, Human
aguagagccagcu

SEQ ID NO: 3392870 - RNA, 18 nt, Human
aguagagguacuagaaug

SEQ ID NO: 3392871 - RNA, 18 nt, Human
aguagagguauaauugug

SEQ ID NO: 3392872 - RNA, 20 nt, Human
aguagagguauaauugugug

SEQ ID NO: 3392873 - RNA, 22 nt, Human
aguagagguauaauugugugau

SEQ ID NO: 3392874 - RNA, 16 nt, Human
aguagagucaucucca

SEQ ID NO: 3392875 - RNA, 20 nt, Human
aguagauaauuucagggugc

SEQ ID NO: 3392876 - RNA, 14 nt, Human
aguagauauuacuu

SEQ ID NO: 3392877 - RNA, 15 nt, Human
aguagaucaugcaua

SEQ ID NO: 3392878 - RNA, 16 nt, Human
aguagauccauuucca

SEQ ID NO: 3392879 - RNA, 23 nt, Human
aguagauccauuuccauugcuua

SEQ ID NO: 3392880 - RNA, 22 nt, Human
aguagaugcauuuggguccagg

SEQ ID NO: 3392881 - RNA, 23 nt, Human
aguagaugcauuuggguccagga

SEQ ID NO: 3392882 - RNA, 20 nt, Human
aguagauuuacagaacaaag

SEQ ID NO: 3392883 - RNA, 16 nt, Human
aguagauuuucuuuaa

SEQ ID NO: 3392884 - RNA, 17 nt, Human
aguagauuuucuuuaaa

SEQ ID NO: 3392885 - RNA, 18 nt, Human
aguagauuuucuuuaaaa

SEQ ID NO: 3392886 - RNA, 20 nt, Human
aguagauuuucuuuaaaaga

SEQ ID NO: 3392887 - RNA, 23 nt, Human
aguagauuuucuuuaaaagaaug

SEQ ID NO: 3392888 - RNA, 22 nt, Human
aguagcaaguucuagagaagag

SEQ ID NO: 3392889 - RNA, 13 nt, Human
aguagcacaggcu

SEQ ID NO: 3392890 - RNA, 18 nt, Human
aguagcacccuggauuga

SEQ ID NO: 3392891 - RNA, 13 nt, Human
aguagcaggcccg

SEQ ID NO: 3392892 - RNA, 14 nt, Human
aguagcaugagaga

SEQ ID NO: 3392893 - RNA, 19 nt, Human
aguagcauguugagccagg

SEQ ID NO: 3392894 - RNA, 14 nt, Human
aguagcauuucauu

SEQ ID NO: 3392895 - RNA, 15 nt, Human
aguagcauuucauuc

SEQ ID NO: 3392896 - RNA, 23 nt, Human
aguagccaggguguggcccugcc

SEQ ID NO: 3392897 - RNA, 15 nt, Human
aguagcccuuucugu

SEQ ID NO: 3392898 - RNA, 17 nt, Human
aguagcccuuucugugu

SEQ ID NO: 3392899 - RNA, 19 nt, Human
aguagcccuuucugugugc

SEQ ID NO: 3392900 - RNA, 20 nt, Human
aguagcccuuucugugugca

SEQ ID NO: 3392901 - RNA, 15 nt, Human
aguagccgagagccu

SEQ ID NO: 3392902 - RNA, 17 nt, Human
aguagccgagagccugc

SEQ ID NO: 3392903 - RNA, 16 nt, Human
aguagcgcuauaguua

SEQ ID NO: 3392904 - RNA, 20 nt, Human
aguagcguuuuuuaaaugua

SEQ ID NO: 3392905 - RNA, 21 nt, Human
aguagcguuuuuuaaauguau

SEQ ID NO: 3392906 - RNA, 14 nt, Human
aguagcugagcuca

SEQ ID NO: 3392907 - RNA, 19 nt, Human
aguagcugggacuacaggc

SEQ ID NO: 3392908 - RNA, 13 nt, Human
aguagcuugcucc

SEQ ID NO: 3392909 - RNA, 14 nt, Human
aguagcuugcuccc

SEQ ID NO: 3392910 - RNA, 17 nt, Human
aguagcuugcucccugu

SEQ ID NO: 3392911 - RNA, 20 nt, Human
aguagcuugggacaaaucaa

SEQ ID NO: 3392912 - RNA, 20 nt, Human
aguagcuuugcacuuuucua

SEQ ID NO: 3392913 - RNA, 16 nt, Human
aguaggaagacuuugg

SEQ ID NO: 3392914 - RNA, 22 nt, Human
aguaggacaaggugcaggcagg

SEQ ID NO: 3392915 - RNA, 23 nt, Human
aguaggacaaggugcaggcaggc

SEQ ID NO: 3392916 - RNA, 13 nt, Human
aguaggagcccag

SEQ ID NO: 3392917 - RNA, 20 nt, Human
aguaggauaugccugcucuu

SEQ ID NO: 3392918 - RNA, 17 nt, Human
aguaggcucauuuacug

SEQ ID NO: 3392919 - RNA, 19 nt, Human
aguaggggaagaauaauuu

SEQ ID NO: 3392920 - RNA, 13 nt, Human
aguagggucaggc

SEQ ID NO: 3392921 - RNA, 14 nt, Human
aguaguaaaaauua

SEQ ID NO: 3392922 - RNA, 16 nt, Human
aguaguaauagagcaa

SEQ ID NO: 3392923 - RNA, 21 nt, Human
aguaguaccaaaugcuuuaaa

SEQ ID NO: 3392924 - RNA, 17 nt, Human
aguaguacuucuucugu

SEQ ID NO: 3392925 - RNA, 21 nt, Human
aguaguacuucuucuguaaua

SEQ ID NO: 3392926 - RNA, 14 nt, Human
aguaguacuugaaa

SEQ ID NO: 3392927 - RNA, 18 nt, Human
aguagucagcuagaucau

SEQ ID NO: 3392928 - RNA, 13 nt, Human
aguagucauuuca

SEQ ID NO: 3392929 - RNA, 13 nt, Human
aguagucugcuca

SEQ ID NO: 3392930 - RNA, 14 nt, Human
aguagucugcucac

SEQ ID NO: 3392931 - RNA, 18 nt, Human
aguagugagaagaauauu

SEQ ID NO: 3392932 - RNA, 21 nt, Human
aguagugagaagaauauuguu

SEQ ID NO: 3392933 - RNA, 23 nt, Human
aguagugucacugcuuguuaugc

SEQ ID NO: 3392934 - RNA, 20 nt, Human
aguagugucuggaucaguaa

SEQ ID NO: 3392935 - RNA, 12 nt, Human
aguaguuaaaaa

SEQ ID NO: 3392936 - RNA, 14 nt, Human
aguaguuaaaaaaa

SEQ ID NO: 3392937 - RNA, 15 nt, Human
aguaguuaauucugu

SEQ ID NO: 3392938 - RNA, 16 nt, Human
aguaguuaucauguua

SEQ ID NO: 3392939 - RNA, 14 nt, Human
aguaguuccugcua

SEQ ID NO: 3392940 - RNA, 15 nt, Human
aguaguucucaaagu

SEQ ID NO: 3392941 - RNA, 16 nt, Human
aguaguucuguauuug

SEQ ID NO: 3392942 - RNA, 15 nt, Human
aguaguuugcauuuc

SEQ ID NO: 3392943 - RNA, 16 nt, Human
aguaguuugcauuuca

SEQ ID NO: 3392944 - RNA, 20 nt, Human
aguaguuugcauuucagaaa

SEQ ID NO: 3392945 - RNA, 13 nt, Human
aguauaaaaacaa

SEQ ID NO: 3392946 - RNA, 21 nt, Human
aguauaaaauacaacaaagga

SEQ ID NO: 3392947 - RNA, 22 nt, Human
aguauaaaauaguaugaaaaug

SEQ ID NO: 3392948 - RNA, 17 nt, Human
aguauaaacaaaguuac

SEQ ID NO: 3392949 - RNA, 17 nt, Human
aguauaaagaauugugg

SEQ ID NO: 3392950 - RNA, 14 nt, Human
aguauaagaaaugc

SEQ ID NO: 3392951 - RNA, 16 nt, Human
aguauaagaaaugcau

SEQ ID NO: 3392952 - RNA, 18 nt, Human
aguauaagaaaugcauau

SEQ ID NO: 3392953 - RNA, 16 nt, Human
aguauaauuaacaugu

SEQ ID NO: 3392954 - RNA, 16 nt, Human
aguauagaaaaucuuc

SEQ ID NO: 3392955 - RNA, 20 nt, Human
aguauaucccaagugcacuu

SEQ ID NO: 3392956 - RNA, 22 nt, Human
aguauaucuggacaagccaacu

SEQ ID NO: 3392957 - RNA, 14 nt, Human
aguauauuaaaaau

SEQ ID NO: 3392958 - RNA, 15 nt, Human
aguauauuaaaaaug

SEQ ID NO: 3392959 - RNA, 22 nt, Human
aguauauuaaaaaugguaaaau

SEQ ID NO: 3392960 - RNA, 16 nt, Human
aguauauuauaauaga

SEQ ID NO: 3392961 - RNA, 14 nt, Human
aguauauuuauagu

SEQ ID NO: 3392962 - RNA, 17 nt, Human
aguauauuuauauaauu

SEQ ID NO: 3392963 - RNA, 19 nt, Human
aguauauuuauauaauuau

SEQ ID NO: 3392964 - RNA, 13 nt, Human
aguaucacugucu

SEQ ID NO: 3392965 - RNA, 23 nt, Human
aguaucagagauguccauuuuua

SEQ ID NO: 3392966 - RNA, 18 nt, Human
aguaucaggucucccacg

SEQ ID NO: 3392967 - RNA, 16 nt, Human
aguaucaguguuuuaa

SEQ ID NO: 3392968 - RNA, 13 nt, Human
aguaucaugaagc

SEQ ID NO: 3392969 - RNA, 15 nt, Human
aguaucaugcccugu

SEQ ID NO: 3392970 - RNA, 19 nt, Human
aguaucaugcccugugcaa

SEQ ID NO: 3392971 - RNA, 14 nt, Human
aguauccacuuugc

SEQ ID NO: 3392972 - RNA, 21 nt, Human
aguauccaugcucuugaccuu

SEQ ID NO: 3392973 - RNA, 18 nt, Human
aguaucccacauccaacu

SEQ ID NO: 3392974 - RNA, 16 nt, Human
aguauccuccagguuu

SEQ ID NO: 3392975 - RNA, 19 nt, Human
aguauccuccagguuuuuc

SEQ ID NO: 3392976 - RNA, 22 nt, Human
aguauccuccagguuuuucaau

SEQ ID NO: 3392977 - RNA, 23 nt, Human
aguauccuccagguuuuucaauu

SEQ ID NO: 3392978 - RNA, 18 nt, Human
aguauccugcuucugaua

SEQ ID NO: 3392979 - RNA, 19 nt, Human
aguaucggcacuguacaaa

SEQ ID NO: 3392980 - RNA, 18 nt, Human
aguaucgggggcuggggc

SEQ ID NO: 3392981 - RNA, 14 nt, Human
aguaucuaaaagug

SEQ ID NO: 3392982 - RNA, 23 nt, Human
aguaucuauauauguguauguac

SEQ ID NO: 3392983 - RNA, 15 nt, Human
aguaucucagggccu

SEQ ID NO: 3392984 - RNA, 22 nt, Human
aguaucucaucaacaaagaaau

SEQ ID NO: 3392985 - RNA, 21 nt, Human
aguucugccucugauguauuu

SEQ ID NO: 3392986 - RNA, 15 nt, Human
aguucugcucauucu

SEQ ID NO: 3392987 - RNA, 18 nt, Human
aguucugcuccagacagg

SEQ ID NO: 3392988 - RNA, 12 nt, Human
aguucugcuccu

SEQ ID NO: 3392989 - RNA, 18 nt, Human
aguucugcuccucuccag

SEQ ID NO: 3392990 - RNA, 23 nt, Human
aguucuggauggugugccuucca

SEQ ID NO: 3392991 - RNA, 19 nt, Human
aguucugggugcucccuac

SEQ ID NO: 3392992 - RNA, 12 nt, Human
aguucuguagaa

SEQ ID NO: 3392993 - RNA, 15 nt, Human
aguucuguagaaaug

SEQ ID NO: 3392994 - RNA, 21 nt, Human
aguucuguagagccuucugau

SEQ ID NO: 3392995 - RNA, 13 nt, Human
aguucuguauuug

SEQ ID NO: 3392996 - RNA, 14 nt, Human
aguucuguauuuga

SEQ ID NO: 3392997 - RNA, 20 nt, Human
aguucuguauuugaaagugc

SEQ ID NO: 3392998 - RNA, 23 nt, Human
aguucuguauuugaaagugccuu

SEQ ID NO: 3392999 - RNA, 16 nt, Human
aguucuguguauuuaa

SEQ ID NO: 3393000 - RNA, 20 nt, Human
aguucuguuauauccccugc

SEQ ID NO: 3393001 - RNA, 18 nt, Human
aguucuuaacccaguguc

SEQ ID NO: 3393002 - RNA, 19 nt, Human
aguucuuacugcuuaauuc

SEQ ID NO: 3393003 - RNA, 23 nt, Human
aguucuuacugcuuaauucaaau

SEQ ID NO: 3393004 - RNA, 15 nt, Human
aguucuuagauaucu

SEQ ID NO: 3393005 - RNA, 18 nt, Human
aguucuuagauaucuuuu

SEQ ID NO: 3393006 - RNA, 21 nt, Human
aguucuuagauaucuuuuuau

SEQ ID NO: 3393007 - RNA, 16 nt, Human
aguucuuagcccucua

SEQ ID NO: 3393008 - RNA, 20 nt, Human
aguucuuaguugcuguaugu

SEQ ID NO: 3393009 - RNA, 17 nt, Human
aguucuuaugaggaggg

SEQ ID NO: 3393010 - RNA, 21 nt, Human
aguucuuaugaggaggggagg

SEQ ID NO: 3393011 - RNA, 23 nt, Human
aguucuuggucccuccagaacca

SEQ ID NO: 3393012 - RNA, 15 nt, Human
aguucuuuaaacugu

SEQ ID NO: 3393013 - RNA, 16 nt, Human
aguucuuugauucugu

SEQ ID NO: 3393014 - RNA, 18 nt, Human
aguucuuugauucuguaa

SEQ ID NO: 3393015 - RNA, 15 nt, Human
aguucuuuggauucu

SEQ ID NO: 3393016 - RNA, 17 nt, Human
aguucuuuggcugaaag

SEQ ID NO: 3393017 - RNA, 15 nt, Human
aguucuuugggccag

SEQ ID NO: 3393018 - RNA, 18 nt, Human
aguucuuugggccagaca

SEQ ID NO: 3393019 - RNA, 21 nt, Human
aguucuuuguucauagcccag

SEQ ID NO: 3393020 - RNA, 22 nt, Human
aguucuuuguucauagcccagu

SEQ ID NO: 3393021 - RNA, 18 nt, Human
aguugaaaagacuccaaa

SEQ ID NO: 3393022 - RNA, 22 nt, Human
aguugaaaaucuuauaauuuaa

SEQ ID NO: 3393023 - RNA, 17 nt, Human
aguugaaccuauuucuc

SEQ ID NO: 3393024 - RNA, 23 nt, Human
aguugaacugauaguuacuguug

SEQ ID NO: 3393025 - RNA, 14 nt, Human
aguugaagacagag

SEQ ID NO: 3393026 - RNA, 14 nt, Human
aguugaagcaaauc

SEQ ID NO: 3393027 - RNA, 17 nt, Human
aguugaagucaugcucc

SEQ ID NO: 3393028 - RNA, 19 nt, Human
aguugaauacuugaaccau

SEQ ID NO: 3393029 - RNA, 10 nt, Human
aguugaauuu

SEQ ID NO: 3393030 - RNA, 15 nt, Human
aguugaauuuuacau

SEQ ID NO: 3393031 - RNA, 13 nt, Human
aguugaauuuuuu

SEQ ID NO: 3393032 - RNA, 21 nt, Human
aguugaauuuuuuuuaacauu

SEQ ID NO: 3393033 - RNA, 23 nt, Human
aguugaauuuuuuuuaacauucc

SEQ ID NO: 3393034 - RNA, 14 nt, Human
aguugagacaagaa

SEQ ID NO: 3393035 - RNA, 15 nt, Human
aguugagccagcaga

SEQ ID NO: 3393036 - RNA, 12 nt, Human
aguugagcccca

SEQ ID NO: 3393037 - RNA, 21 nt, Human
aguugagccccaaguccugaa

SEQ ID NO: 3393038 - RNA, 17 nt, Human
aguugagcuaugacuua

SEQ ID NO: 3393039 - RNA, 18 nt, Human
aguugaggaacuguacag

SEQ ID NO: 3393040 - RNA, 11 nt, Human
aguugaggcca

SEQ ID NO: 3393041 - RNA, 21 nt, Human
aguugauaaagauuuuuuaau

SEQ ID NO: 3393042 - RNA, 23 nt, Human
aguugauagcacagacccugccc

SEQ ID NO: 3393043 - RNA, 17 nt, Human
aguugaucuggaaccca

SEQ ID NO: 3393044 - RNA, 20 nt, Human
aguugaucuggaacccagac

SEQ ID NO: 3393045 - RNA, 13 nt, Human
aguugauuagaaa

SEQ ID NO: 3393046 - RNA, 23 nt, Human
aguugauucagcucugcaagaau

SEQ ID NO: 3393047 - RNA, 23 nt, Human
aguugauuuuuuuuuuuuuuucc

SEQ ID NO: 3393048 - RNA, 19 nt, Human
aguugcaacuuuguauaaa

SEQ ID NO: 3393049 - RNA, 20 nt, Human
aguugcaauugaauuaaauu

SEQ ID NO: 3393050 - RNA, 16 nt, Human
aguugcacagcaucuc

SEQ ID NO: 3393051 - RNA, 20 nt, Human
aguugcacagcaucucagcu

SEQ ID NO: 3393052 - RNA, 16 nt, Human
aguugcacagcuauga

SEQ ID NO: 3393053 - RNA, 17 nt, Human
aguugcacagcuaugaa

SEQ ID NO: 3393054 - RNA, 17 nt, Human
aguugcacggcugcuga

SEQ ID NO: 3393055 - RNA, 18 nt, Human
aguugcagacucaguuug

SEQ ID NO: 3393056 - RNA, 14 nt, Human
aguugcagcuguuu

SEQ ID NO: 3393057 - RNA, 21 nt, Human
aguugcagcuguuuuguugac

SEQ ID NO: 3393058 - RNA, 18 nt, Human
aguugcauagcaguauau

SEQ ID NO: 3393059 - RNA, 22 nt, Human
aguugcauagguuuaauaauuu

SEQ ID NO: 3393060 - RNA, 13 nt, Human
aguugcauguagu

SEQ ID NO: 3393061 - RNA, 19 nt, Human
aguugcauguaguaacacu

SEQ ID NO: 3393062 - RNA, 21 nt, Human
aguugcauguaguaacacuaa

SEQ ID NO: 3393063 - RNA, 13 nt, Human
aguugccaagaca

SEQ ID NO: 3393064 - RNA, 19 nt, Human
aguugccaagacaaaucaa

SEQ ID NO: 3393065 - RNA, 14 nt, Human
aguugccaccaccu

SEQ ID NO: 3393066 - RNA, 22 nt, Human
aguugccaccaccucuguggca

SEQ ID NO: 3393067 - RNA, 20 nt, Human
aguugccagucaccccggcc

SEQ ID NO: 3393068 - RNA, 23 nt, Human
aguugccagucaccccggccacc

SEQ ID NO: 3393069 - RNA, 17 nt, Human
aguugccuaaauccauu

SEQ ID NO: 3393070 - RNA, 22 nt, Human
aguugccuaaauccauuuggaa

SEQ ID NO: 3393071 - RNA, 21 nt, Human
aguugcgacggagagaaaaaa

SEQ ID NO: 3393072 - RNA, 22 nt, Human
aguugcgacggagagaaaaaag

SEQ ID NO: 3393073 - RNA, 20 nt, Human
aguugcguggacucugcaca

SEQ ID NO: 3393074 - RNA, 13 nt, Human
aguugcuaaacac

SEQ ID NO: 3393075 - RNA, 16 nt, Human
aguugcuaaacacugc

SEQ ID NO: 3393076 - RNA, 23 nt, Human
aguugcuauuuuuguaaaguuuc

SEQ ID NO: 3393077 - RNA, 21 nt, Human
aguugcuccgccucugcuggc

SEQ ID NO: 3393078 - RNA, 16 nt, Human
aguugcucuaugcuuu

SEQ ID NO: 3393079 - RNA, 21 nt, Human
aguugcugcuucucccaggca

SEQ ID NO: 3393080 - RNA, 21 nt, Human
aguugcugucagucuugaccu

SEQ ID NO: 3393081 - RNA, 14 nt, Human
aguugcugucauaa

SEQ ID NO: 3393082 - RNA, 14 nt, Human
aguugcuguuuacu

SEQ ID NO: 3393083 - RNA, 15 nt, Human
aguuggaauuuacca

SEQ ID NO: 3393084 - RNA, 17 nt, Human
aguuggagucacucuua

SEQ ID NO: 3393085 - RNA, 19 nt, Human
aguuggagugaguguggcu

SEQ ID NO: 3393086 - RNA, 21 nt, Human
aguuggaguucauucauauua

SEQ ID NO: 3393087 - RNA, 23 nt, Human
aguuggaguucauucauauuaca

SEQ ID NO: 3393088 - RNA, 22 nt, Human
aguuggccauauuuaccucagc

SEQ ID NO: 3393089 - RNA, 16 nt, Human
aguuggcuaggacccc

SEQ ID NO: 3393090 - RNA, 18 nt, Human
aguuggcuaggggagcag

SEQ ID NO: 3393091 - RNA, 15 nt, Human
aguuggcuucuguuu

SEQ ID NO: 3393092 - RNA, 19 nt, Human
aguuggcuucuguuucuag

SEQ ID NO: 3393093 - RNA, 15 nt, Human
aguugggagcacugg

SEQ ID NO: 3393094 - RNA, 16 nt, Human
aguugggagcacugga

SEQ ID NO: 3393095 - RNA, 20 nt, Human
aguugggcuugcuauucugu

SEQ ID NO: 3393096 - RNA, 16 nt, Human
aguuggggcagaggag

SEQ ID NO: 3393097 - RNA, 21 nt, Human
aguugggggucagugcugccu

SEQ ID NO: 3393098 - RNA, 21 nt, Human
aguuggggucuggcagccucc

SEQ ID NO: 3393099 - RNA, 17 nt, Human
aguuggguggaugccug

SEQ ID NO: 3393100 - RNA, 16 nt, Human
aguuggguguauugug

SEQ ID NO: 3393101 - RNA, 15 nt, Human
aguuggguuuuuuaa

SEQ ID NO: 3393102 - RNA, 16 nt, Human
aguugguaacuuuugu

SEQ ID NO: 3393103 - RNA, 20 nt, Human
aguugguaacuuuugugaau

SEQ ID NO: 3393104 - RNA, 14 nt, Human
aguugguauuaaua

SEQ ID NO: 3393105 - RNA, 11 nt, Human
aguuggucccc

SEQ ID NO: 3393106 - RNA, 20 nt, Human
aguuggugagaaaccuguau

SEQ ID NO: 3393107 - RNA, 13 nt, Human
aguuguaaauaua

SEQ ID NO: 3393108 - RNA, 19 nt, Human
aguuguaacuuauauugaa

SEQ ID NO: 3393109 - RNA, 13 nt, Human
aguuguacaugaa

SEQ ID NO: 3393110 - RNA, 15 nt, Human
aguuguacaugaaau

SEQ ID NO: 3393111 - RNA, 19 nt, Human
aguuguacuuuaaaaauuu

SEQ ID NO: 3393112 - RNA, 18 nt, Human
aguuguagaauguauugu

SEQ ID NO: 3393113 - RNA, 21 nt, Human
aguuguagaauguauuguacc

SEQ ID NO: 3393114 - RNA, 14 nt, Human
aguuguagacaaag

SEQ ID NO: 3393115 - RNA, 16 nt, Human
aguuguagacaaagua

SEQ ID NO: 3393116 - RNA, 17 nt, Human
aguuguaucucuuuuga

SEQ ID NO: 3393117 - RNA, 22 nt, Human
aguuguaucucuuuugaaucca

SEQ ID NO: 3393118 - RNA, 16 nt, Human
aguugucacaucagau

SEQ ID NO: 3393119 - RNA, 11 nt, Human
aguugucucug

SEQ ID NO: 3393120 - RNA, 13 nt, Human
aguugucuugucc

SEQ ID NO: 3393121 - RNA, 17 nt, Human
aguugugaaaguuuuga

SEQ ID NO: 3393122 - RNA, 21 nt, Human
aguugugaccuuaguguuucu

SEQ ID NO: 3393123 - RNA, 21 nt, Human
aguugugcagcuuuuggucau

SEQ ID NO: 3393124 - RNA, 14 nt, Human
aguugugcuuguuu

SEQ ID NO: 3393125 - RNA, 18 nt, Human
aguuguggauuucaguuu

SEQ ID NO: 3393126 - RNA, 17 nt, Human
aguugugggugggagag

SEQ ID NO: 3393127 - RNA, 19 nt, Human
aguuguguacucuggccuc

SEQ ID NO: 3393128 - RNA, 21 nt, Human
aguuguguacucuggccucug

SEQ ID NO: 3393129 - RNA, 23 nt, Human
aguuguuaauaaaaguacauguu

SEQ ID NO: 3393130 - RNA, 22 nt, Human
aguuguuaccccaagcgcccug

SEQ ID NO: 3393131 - RNA, 18 nt, Human
aguuguuacuaacuaaac

SEQ ID NO: 3393132 - RNA, 13 nt, Human
aguuguuauuaca

SEQ ID NO: 3393133 - RNA, 17 nt, Human
aguuguuauuuauugaa

SEQ ID NO: 3393134 - RNA, 20 nt, Human
aguuguucaacuauuuuauu

SEQ ID NO: 3393135 - RNA, 21 nt, Human
aguuguucgggccaaggaccu

SEQ ID NO: 3393136 - RNA, 18 nt, Human
aguuguucuuuuuagaaa

SEQ ID NO: 3393137 - RNA, 15 nt, Human
aguuguugcccuggg

SEQ ID NO: 3393138 - RNA, 15 nt, Human
aguuguuggccuccg

SEQ ID NO: 3393139 - RNA, 22 nt, Human
aguuguuguggguucuauguuu

SEQ ID NO: 3393140 - RNA, 16 nt, Human
aguuguuguguacaga

SEQ ID NO: 3393141 - RNA, 16 nt, Human
aguuguuucauugacu

SEQ ID NO: 3393142 - RNA, 19 nt, Human
aguuguuucauugacuauc

SEQ ID NO: 3393143 - RNA, 20 nt, Human
aguuguuugauucagacagc

SEQ ID NO: 3393144 - RNA, 21 nt, Human
aguuguuugauucagacagcu

SEQ ID NO: 3393145 - RNA, 19 nt, Human
aguuguuuuuguauauugg

SEQ ID NO: 3393146 - RNA, 22 nt, Human
aguuguuuuuguauauugguuu

SEQ ID NO: 3393147 - RNA, 17 nt, Human
aguuuaaaaaucaacuu

SEQ ID NO: 3393148 - RNA, 19 nt, Human
aguuuaaaaaucaacuuuu

SEQ ID NO: 3393149 - RNA, 18 nt, Human
aguuuaaaacagaagccu

SEQ ID NO: 3393150 - RNA, 13 nt, Human
aguuuaaaacagu

SEQ ID NO: 3393151 - RNA, 20 nt, Human
aguuuaaaacaguauuuauu

SEQ ID NO: 3393152 - RNA, 22 nt, Human
aguuuaacacaaguccugugaa

SEQ ID NO: 3393153 - RNA, 14 nt, Human
aguuuaaggaauau

SEQ ID NO: 3393154 - RNA, 17 nt, Human
aguuuaauaaauuuauu

SEQ ID NO: 3393155 - RNA, 16 nt, Human
aguuuaauauuaaagc

SEQ ID NO: 3393156 - RNA, 18 nt, Human
aguuuaauauuaaagcca

SEQ ID NO: 3393157 - RNA, 19 nt, Human
aguuuaauauuaaagccau

SEQ ID NO: 3393158 - RNA, 12 nt, Human
aguuuaaugaag

SEQ ID NO: 3393159 - RNA, 23 nt, Human
aguuuaauugaaagaauguaaag

SEQ ID NO: 3393160 - RNA, 15 nt, Human
aguuuaauugacuua

SEQ ID NO: 3393161 - RNA, 13 nt, Human
aguuuacagaaaa

SEQ ID NO: 3393162 - RNA, 18 nt, Human
aguuuacagaaaaaucuu

SEQ ID NO: 3393163 - RNA, 19 nt, Human
aguuuacagaaaaaucuug

SEQ ID NO: 3393164 - RNA, 22 nt, Human
aguuuacaucauuuuuguaucu

SEQ ID NO: 3393165 - RNA, 13 nt, Human
aguuuacauugua

SEQ ID NO: 3393166 - RNA, 12 nt, Human
aguuuacauuuu

SEQ ID NO: 3393167 - RNA, 19 nt, Human
aguuuacauuuuuauuuau

SEQ ID NO: 3393168 - RNA, 21 nt, Human
aguuuacauuuuuauuuauga

SEQ ID NO: 3393169 - RNA, 22 nt, Human
aguuuacauuuuuauuuaugaa

SEQ ID NO: 3393170 - RNA, 16 nt, Human
aguuuaccaucugaaa

SEQ ID NO: 3393171 - RNA, 16 nt, Human
aguuuaccucuuuaaa

SEQ ID NO: 3393172 - RNA, 20 nt, Human
aguuuacuagcuuuucaaac

SEQ ID NO: 3393173 - RNA, 16 nt, Human
aguuuagaacagguuu

SEQ ID NO: 3393174 - RNA, 14 nt, Human
aguuuagaggaaaa

SEQ ID NO: 3393175 - RNA, 14 nt, Human
aguuuagauuucaa

SEQ ID NO: 3393176 - RNA, 16 nt, Human
aguuuagcuggaaaag

SEQ ID NO: 3393177 - RNA, 18 nt, Human
aguuuagggaacaauuug

SEQ ID NO: 3393178 - RNA, 13 nt, Human
aguuuauaaaaga

SEQ ID NO: 3393179 - RNA, 13 nt, Human
aguuuauaaaagu

SEQ ID NO: 3393180 - RNA, 15 nt, Human
aguuuauauuuaacu

SEQ ID NO: 3393181 - RNA, 18 nt, Human
aguuuauauuuaacucuc

SEQ ID NO: 3393182 - RNA, 15 nt, Human
aguuuaucaugaagc

SEQ ID NO: 3393183 - RNA, 19 nt, Human
aguuuaucaugaagccugu

SEQ ID NO: 3393184 - RNA, 15 nt, Human
aguuuaucuguucau

SEQ ID NO: 3393185 - RNA, 15 nt, Human
aguuuaugucuaaag

SEQ ID NO: 3393186 - RNA, 16 nt, Human
aguuuaugucuaaaga

SEQ ID NO: 3393187 - RNA, 17 nt, Human
aguuuaugucucaguuu

SEQ ID NO: 3393188 - RNA, 21 nt, Human
aguuuauuccagagcugccag

SEQ ID NO: 3393189 - RNA, 16 nt, Human
aguuuauucucauuug

SEQ ID NO: 3393190 - RNA, 22 nt, Human
aguuuauugacaauaauuucag

SEQ ID NO: 3393191 - RNA, 13 nt, Human
aguuuauuuguug

SEQ ID NO: 3393192 - RNA, 16 nt, Human
aguuuauuuguugaga

SEQ ID NO: 3393193 - RNA, 18 nt, Human
aguuuauuuguugagagu

SEQ ID NO: 3393194 - RNA, 23 nt, Human
aguuuauuuuaaaacaauaggau

SEQ ID NO: 3393195 - RNA, 16 nt, Human
aguuucaaaaaucuga

SEQ ID NO: 3393196 - RNA, 21 nt, Human
aguuucaaaaaucugaagauu

SEQ ID NO: 3393197 - RNA, 21 nt, Human
aguuucaaacuuacuauuuug

SEQ ID NO: 3393198 - RNA, 16 nt, Human
aguuucaauaaaguuu

SEQ ID NO: 3393199 - RNA, 21 nt, Human
aguuucaauaaaguuugaucu

SEQ ID NO: 3393200 - RNA, 22 nt, Human
aguuucaaugugauucuaaugu

SEQ ID NO: 3393201 - RNA, 17 nt, Human
aguuucacagaaaauaa

SEQ ID NO: 3393202 - RNA, 18 nt, Human
aguuucagagaaguucug

SEQ ID NO: 3393203 - RNA, 16 nt, Human
aguuucagaguucuca

SEQ ID NO: 3393204 - RNA, 23 nt, Human
aguuucagauauauaucauauug

SEQ ID NO: 3393205 - RNA, 15 nt, Human
aguuucagcuuaaaa

SEQ ID NO: 3393206 - RNA, 20 nt, Human
aguuucaggauacaugugcc

SEQ ID NO: 3393207 - RNA, 18 nt, Human
aguuucaggugacaugug

SEQ ID NO: 3393208 - RNA, 22 nt, Human
aguuucaggugacaugugaaac

SEQ ID NO: 3393209 - RNA, 20 nt, Human
aguuucaguauuagaugcac

SEQ ID NO: 3393210 - RNA, 18 nt, Human
aguuucauagcuaagaaa

SEQ ID NO: 3393211 - RNA, 21 nt, Human
aguuucauguacaagaugaag

SEQ ID NO: 3393212 - RNA, 15 nt, Human
aguuuccaaaaccag

SEQ ID NO: 3393213 - RNA, 16 nt, Human
aguuuccaaaaccaga

SEQ ID NO: 3393214 - RNA, 17 nt, Human
aguuuccaagcaaaugu

SEQ ID NO: 3393215 - RNA, 19 nt, Human
aguuuccaagcaaauguua

SEQ ID NO: 3393216 - RNA, 17 nt, Human
aguuuccagucucaaaa

SEQ ID NO: 3393217 - RNA, 16 nt, Human
aguuucccuuccucca

SEQ ID NO: 3393218 - RNA, 20 nt, Human
aguuucccuuccuccauccu

SEQ ID NO: 3393219 - RNA, 23 nt, Human
aguuuccguuuccagguguuuau

SEQ ID NO: 3393220 - RNA, 15 nt, Human
aguuuccuaaaaguu

SEQ ID NO: 3393221 - RNA, 13 nt, Human
aguuuccucaggc

SEQ ID NO: 3393222 - RNA, 23 nt, Human
aguuuccucaggcugcuggagga

SEQ ID NO: 3393223 - RNA, 19 nt, Human
aguuuccuuuucugucucu

SEQ ID NO: 3393224 - RNA, 16 nt, Human
aguuuccuuuuuaaua

SEQ ID NO: 3393225 - RNA, 15 nt, Human
aguuucguuuucaaa

SEQ ID NO: 3393226 - RNA, 17 nt, Human
aguuucuaaacuggaga

SEQ ID NO: 3393227 - RNA, 15 nt, Human
aguuucuaagauucu

SEQ ID NO: 3393228 - RNA, 16 nt, Human
aguuucuaagauucua

SEQ ID NO: 3393229 - RNA, 20 nt, Human
aguuucuaagauucuaaagg

SEQ ID NO: 3393230 - RNA, 12 nt, Human
aguuucuaaggu

SEQ ID NO: 3393231 - RNA, 21 nt, Human
aguuucuagcuagaaauauga

SEQ ID NO: 3393232 - RNA, 18 nt, Human
aguuucucagauccuugu

SEQ ID NO: 3393233 - RNA, 23 nt, Human
aguuucucagauccuuguuucaa

SEQ ID NO: 3393234 - RNA, 11 nt, Human
aguuucucagc

SEQ ID NO: 3393235 - RNA, 13 nt, Human
aguuucucagcuc

SEQ ID NO: 3393236 - RNA, 23 nt, Human
aguuucucugcagaaacuacuga

SEQ ID NO: 3393237 - RNA, 22 nt, Human
aguuucugucguuaaaaacaga

SEQ ID NO: 3393238 - RNA, 17 nt, Human
aguuucugugguuggcu

SEQ ID NO: 3393239 - RNA, 13 nt, Human
aguuucuguucug

SEQ ID NO: 3393240 - RNA, 15 nt, Human
aguuucuguucugug

SEQ ID NO: 3393241 - RNA, 18 nt, Human
aguuucuguucuguggaa

SEQ ID NO: 3393242 - RNA, 14 nt, Human
aguuucuguuugau

SEQ ID NO: 3393243 - RNA, 14 nt, Human
aguuucuuuacauu

SEQ ID NO: 3393244 - RNA, 23 nt, Human
aguuucuuuccugccuucuucuu

SEQ ID NO: 3393245 - RNA, 18 nt, Human
aguuugaaauaagcuauu

SEQ ID NO: 3393246 - RNA, 20 nt, Human
aguuugaaauucugaauuug

SEQ ID NO: 3393247 - RNA, 15 nt, Human
aguuugaaggaaaca

SEQ ID NO: 3393248 - RNA, 12 nt, Human
aguuugaauguu

SEQ ID NO: 3393249 - RNA, 14 nt, Human
aguuugaauguuaa

SEQ ID NO: 3393250 - RNA, 21 nt, Human
aguuugaauuccuaaaauuau

SEQ ID NO: 3393251 - RNA, 15 nt, Human
aguuugagcugccuu

SEQ ID NO: 3393252 - RNA, 18 nt, Human
aguuugauaaauaguguu

SEQ ID NO: 3393253 - RNA, 20 nt, Human
aguuugaucacacuauuuua

SEQ ID NO: 3393254 - RNA, 14 nt, Human
aguuugauuaaauu

SEQ ID NO: 3393255 - RNA, 22 nt, Human
aguuugauuaaauucuugcaaa

SEQ ID NO: 3393256 - RNA, 23 nt, Human
aguuugauuaaauucuugcaaag

SEQ ID NO: 3393257 - RNA, 23 nt, Human
aguuugauuauucagugucacug

SEQ ID NO: 3393258 - RNA, 17 nt, Human
aguuugcaaaaaauguu

SEQ ID NO: 3393259 - RNA, 20 nt, Human
aguuugcacucaaaucuuaa

SEQ ID NO: 3393260 - RNA, 20 nt, Human
aguuugcagaaaagcaccug

SEQ ID NO: 3393261 - RNA, 13 nt, Human
aguuugcagagua

SEQ ID NO: 3393262 - RNA, 11 nt, Human
aguuugcaguu

SEQ ID NO: 3393263 - RNA, 12 nt, Human
aguuugcccugg

SEQ ID NO: 3393264 - RNA, 22 nt, Human
aguuugccggauacaaacuggu

SEQ ID NO: 3393265 - RNA, 15 nt, Human
aguuugcuaauguuu

SEQ ID NO: 3393266 - RNA, 18 nt, Human
aguuugcuguacuagaga

SEQ ID NO: 3393267 - RNA, 15 nt, Human
aguuugcuuguuucu

SEQ ID NO: 3393268 - RNA, 16 nt, Human
aguuuggauauguaaa

SEQ ID NO: 3393269 - RNA, 18 nt, Human
aguuuggcaaacucucca

SEQ ID NO: 3393270 - RNA, 15 nt, Human
aguuuggcauuugca

SEQ ID NO: 3393271 - RNA, 19 nt, Human
aguuugggaucccugucuu

SEQ ID NO: 3393272 - RNA, 20 nt, Human
aguuugggaucccugucuuu

SEQ ID NO: 3393273 - RNA, 20 nt, Human
auaaaguauagagagaaguu

SEQ ID NO: 3393274 - RNA, 15 nt, Human
auaaaguaucaucag

SEQ ID NO: 3393275 - RNA, 17 nt, Human
auaaaguaucaugcauu

SEQ ID NO: 3393276 - RNA, 19 nt, Human
auaaaguaugguauugaaa

SEQ ID NO: 3393277 - RNA, 23 nt, Human
auaaaguauuccaccuuaaauua

SEQ ID NO: 3393278 - RNA, 12 nt, Human
auaaaguauuua

SEQ ID NO: 3393279 - RNA, 14 nt, Human
auaaaguauuuaau

SEQ ID NO: 3393280 - RNA, 15 nt, Human
auaaaguauuuaauu

SEQ ID NO: 3393281 - RNA, 22 nt, Human
auaaaguggaaguauguauauu

SEQ ID NO: 3393282 - RNA, 13 nt, Human
auaaaguguaaua

SEQ ID NO: 3393283 - RNA, 13 nt, Human
auaaaguguuuuc

SEQ ID NO: 3393284 - RNA, 15 nt, Human
auaaaguguuuucag

SEQ ID NO: 3393285 - RNA, 12 nt, Human
auaaaguuagaa

SEQ ID NO: 3393286 - RNA, 21 nt, Human
auaaaguucugaguguuuuua

SEQ ID NO: 3393287 - RNA, 22 nt, Human
auaaaguugaagcuaagauuua

SEQ ID NO: 3393288 - RNA, 13 nt, Human
auaaaguuugauc

SEQ ID NO: 3393289 - RNA, 22 nt, Human
auaaaguuuuauauauuauaug

SEQ ID NO: 3393290 - RNA, 13 nt, Human
auaaauaaaaaua

SEQ ID NO: 3393291 - RNA, 12 nt, Human
auaaauaaauau

SEQ ID NO: 3393292 - RNA, 20 nt, Human
auaaauaacccauaauugaa

SEQ ID NO: 3393293 - RNA, 19 nt, Human
auaaauaacucaauggaaa

SEQ ID NO: 3393294 - RNA, 21 nt, Human
auaaauaaucggcccacagcu

SEQ ID NO: 3393295 - RNA, 18 nt, Human
auaaauaauugaaacaau

SEQ ID NO: 3393296 - RNA, 15 nt, Human
auaaauagaaaagua

SEQ ID NO: 3393297 - RNA, 21 nt, Human
auaaauagaugcuguguauau

SEQ ID NO: 3393298 - RNA, 18 nt, Human
auaaauagcuagacuggu

SEQ ID NO: 3393299 - RNA, 15 nt, Human
auaaauauaagccuu

SEQ ID NO: 3393300 - RNA, 15 nt, Human
auaaauauauauaaa

SEQ ID NO: 3393301 - RNA, 20 nt, Human
auaaauauauauaaauauau

SEQ ID NO: 3393302 - RNA, 21 nt, Human
auaaauauauauaaauauaua

SEQ ID NO: 3393303 - RNA, 21 nt, Human
auaaauauauauauauauaaa

SEQ ID NO: 3393304 - RNA, 23 nt, Human
auaaauauauauauauauaaaau

SEQ ID NO: 3393305 - RNA, 20 nt, Human
auaaauauauauauccucug

SEQ ID NO: 3393306 - RNA, 18 nt, Human
auaaauauauuauuacuu

SEQ ID NO: 3393307 - RNA, 23 nt, Human
auaaauauauuauuacuuguaaa

SEQ ID NO: 3393308 - RNA, 12 nt, Human
auaaauaugaag

SEQ ID NO: 3393309 - RNA, 22 nt, Human
auaaauaugccucuccuuugua

SEQ ID NO: 3393310 - RNA, 22 nt, Human
auaaauaugguuaauuucaugu

SEQ ID NO: 3393311 - RNA, 18 nt, Human
auaaauauguuucacaca

SEQ ID NO: 3393312 - RNA, 20 nt, Human
auaaauauuugacuugcaug

SEQ ID NO: 3393313 - RNA, 20 nt, Human
auaaaucauauugaugaaaa

SEQ ID NO: 3393314 - RNA, 21 nt, Human
auaaaucauauugaugaaaag

SEQ ID NO: 3393315 - RNA, 15 nt, Human
auaaauccagugacc

SEQ ID NO: 3393316 - RNA, 22 nt, Human
auaaauccagugaccucucucu

SEQ ID NO: 3393317 - RNA, 16 nt, Human
auaaaucgcuuuugau

SEQ ID NO: 3393318 - RNA, 21 nt, Human
auaaaucuaaugacauucaau

SEQ ID NO: 3393319 - RNA, 15 nt, Human
auaaaucugacccag

SEQ ID NO: 3393320 - RNA, 16 nt, Human
auaaaucugacccagu

SEQ ID NO: 3393321 - RNA, 15 nt, Human
auaaaucuuuggaaa

SEQ ID NO: 3393322 - RNA, 18 nt, Human
auaaaugaagcagcuuua

SEQ ID NO: 3393323 - RNA, 17 nt, Human
auaaaugaaguuuauac

SEQ ID NO: 3393324 - RNA, 22 nt, Human
auaaaugaaguuuauacaguac

SEQ ID NO: 3393325 - RNA, 12 nt, Human
auaaaugaaugu

SEQ ID NO: 3393326 - RNA, 16 nt, Human
auaaaugaauuuuagu

SEQ ID NO: 3393327 - RNA, 17 nt, Human
auaaaugaauuuuaguu

SEQ ID NO: 3393328 - RNA, 18 nt, Human
auaaaugagcuauguauu

SEQ ID NO: 3393329 - RNA, 16 nt, Human
auaaaugauucuuagu

SEQ ID NO: 3393330 - RNA, 22 nt, Human
auaaaugcaauauguauuaaua

SEQ ID NO: 3393331 - RNA, 23 nt, Human
auaaaugcuauuuuuuauuuuac

SEQ ID NO: 3393332 - RNA, 13 nt, Human
auaaaugcuuuua

SEQ ID NO: 3393333 - RNA, 14 nt, Human
auaaauggaaauca

SEQ ID NO: 3393334 - RNA, 20 nt, Human
auaaaugguuuggugcuuuu

SEQ ID NO: 3393335 - RNA, 17 nt, Human
auaaauguauaaauaua

SEQ ID NO: 3393336 - RNA, 13 nt, Human
auaaauguauaua

SEQ ID NO: 3393337 - RNA, 15 nt, Human
auaaauguauauaca

SEQ ID NO: 3393338 - RNA, 17 nt, Human
auaaauguauauacaca

SEQ ID NO: 3393339 - RNA, 21 nt, Human
auaaauguauauacacauaua

SEQ ID NO: 3393340 - RNA, 15 nt, Human
auaaauguauugauu

SEQ ID NO: 3393341 - RNA, 22 nt, Human
auaaaugucuuuuuuuuaaugu

SEQ ID NO: 3393342 - RNA, 17 nt, Human
auaaauguguguaugug

SEQ ID NO: 3393343 - RNA, 20 nt, Human
auaaauguguguaugugugu

SEQ ID NO: 3393344 - RNA, 19 nt, Human
auaaauuaaauauauguau

SEQ ID NO: 3393345 - RNA, 13 nt, Human
auaaauuauguuu

SEQ ID NO: 3393346 - RNA, 15 nt, Human
auaaauuauguuuau

SEQ ID NO: 3393347 - RNA, 13 nt, Human
auaaauuauuguu

SEQ ID NO: 3393348 - RNA, 17 nt, Human
auaaauuauuugauuau

SEQ ID NO: 3393349 - RNA, 20 nt, Human
auaaauucaacuuuguaaaa

SEQ ID NO: 3393350 - RNA, 16 nt, Human
auaaauucagauauau

SEQ ID NO: 3393351 - RNA, 23 nt, Human
auaaauucccaacuucucuugcu

SEQ ID NO: 3393352 - RNA, 21 nt, Human
auaaauucccuggccuuucau

SEQ ID NO: 3393353 - RNA, 13 nt, Human
auaaauugaaaua

SEQ ID NO: 3393354 - RNA, 19 nt, Human
auaaauugauuuuuauaaa

SEQ ID NO: 3393355 - RNA, 17 nt, Human
auaaauugcauaaagca

SEQ ID NO: 3393356 - RNA, 13 nt, Human
auaaauugcuccu

SEQ ID NO: 3393357 - RNA, 18 nt, Human
auaaauugcuccuugaca

SEQ ID NO: 3393358 - RNA, 19 nt, Human
auaaauuguaauuguaaag

SEQ ID NO: 3393359 - RNA, 15 nt, Human
auaaauugucuuaau

SEQ ID NO: 3393360 - RNA, 17 nt, Human
auaaauugucuuuaaaa

SEQ ID NO: 3393361 - RNA, 21 nt, Human
auaaauugucuuuaaaaacug

SEQ ID NO: 3393362 - RNA, 20 nt, Human
auaaauuguuuggcuuccuc

SEQ ID NO: 3393363 - RNA, 16 nt, Human
auaaauuuacuuuaca

SEQ ID NO: 3393364 - RNA, 19 nt, Human
auaaauuuauuuacugcua

SEQ ID NO: 3393365 - RNA, 18 nt, Human
auaaauuucuauuuuuau

SEQ ID NO: 3393366 - RNA, 18 nt, Human
auaaauuugacuuuucug

SEQ ID NO: 3393367 - RNA, 22 nt, Human
auaaauuuugaaaaguaauauu

SEQ ID NO: 3393368 - RNA, 13 nt, Human
auaacaaagaacc

SEQ ID NO: 3393369 - RNA, 23 nt, Human
auaacaaagaaccuaacauuuau

SEQ ID NO: 3393370 - RNA, 15 nt, Human
auaacaaagauaucu

SEQ ID NO: 3393371 - RNA, 19 nt, Human
auaacaaagauaucuuuuc

SEQ ID NO: 3393372 - RNA, 20 nt, Human
auaacaaaggauacuuauuu

SEQ ID NO: 3393373 - RNA, 16 nt, Human
auaacaaauaaccaac

SEQ ID NO: 3393374 - RNA, 14 nt, Human
auaacaacuucaua

SEQ ID NO: 3393375 - RNA, 13 nt, Human
auaacaacuuuuu

SEQ ID NO: 3393376 - RNA, 14 nt, Human
auaacaacuuuuuu

SEQ ID NO: 3393377 - RNA, 13 nt, Human
auaacaagaaaau

SEQ ID NO: 3393378 - RNA, 17 nt, Human
auaacaagaucuuucag

SEQ ID NO: 3393379 - RNA, 19 nt, Human
auaacaagaucuuucagga

SEQ ID NO: 3393380 - RNA, 14 nt, Human
auaacaaugaaagu

SEQ ID NO: 3393381 - RNA, 19 nt, Human
auaacaaugcuguauuuua

SEQ ID NO: 3393382 - RNA, 21 nt, Human
auaacaaugcuguauuuuaaa

SEQ ID NO: 3393383 - RNA, 14 nt, Human
auaacaauguuaag

SEQ ID NO: 3393384 - RNA, 18 nt, Human
auaacaauguuaaggaaa

SEQ ID NO: 3393385 - RNA, 15 nt, Human
auaacaauuguuugg

SEQ ID NO: 3393386 - RNA, 14 nt, Human
auaacacaauauga

SEQ ID NO: 3393387 - RNA, 14 nt, Human
auaacacacagcua

SEQ ID NO: 3393388 - RNA, 23 nt, Human
auaacacauuuuuuugcaugcau

SEQ ID NO: 3393389 - RNA, 19 nt, Human
auaacaccaccauucacaa

SEQ ID NO: 3393390 - RNA, 14 nt, Human
auaacaccugccac

SEQ ID NO: 3393391 - RNA, 15 nt, Human
auaacacuaaaauuu

SEQ ID NO: 3393392 - RNA, 23 nt, Human
auaacagaaagccugggugacau

SEQ ID NO: 3393393 - RNA, 14 nt, Human
auaacagaagaaaa

SEQ ID NO: 3393394 - RNA, 17 nt, Human
auaacagaagaaaauag

SEQ ID NO: 3393395 - RNA, 19 nt, Human
auaacagauuuuuuuugga

SEQ ID NO: 3393396 - RNA, 16 nt, Human
auaacagccgcuccag

SEQ ID NO: 3393397 - RNA, 22 nt, Human
auaacagcugcaauucccugga

SEQ ID NO: 3393398 - RNA, 16 nt, Human
auaacaggguaaauua

SEQ ID NO: 3393399 - RNA, 19 nt, Human
auaacaggguaaauuauuc

SEQ ID NO: 3393400 - RNA, 23 nt, Human
auaacagguuauuuuaguuucug

SEQ ID NO: 3393401 - RNA, 12 nt, Human
auaacagugcag

SEQ ID NO: 3393402 - RNA, 18 nt, Human
auaacagugcagggcaaa

SEQ ID NO: 3393403 - RNA, 15 nt, Human
auaacagugccauug

SEQ ID NO: 3393404 - RNA, 21 nt, Human
auaacagugccauugucuuua

SEQ ID NO: 3393405 - RNA, 19 nt, Human
auaacagugugguaguuaa

SEQ ID NO: 3393406 - RNA, 17 nt, Human
auaacauaaaucuguga

SEQ ID NO: 3393407 - RNA, 15 nt, Human
auaacauaacaaaua

SEQ ID NO: 3393408 - RNA, 14 nt, Human
auaacauauaugga

SEQ ID NO: 3393409 - RNA, 14 nt, Human
auaacauaugcagu

SEQ ID NO: 3393410 - RNA, 23 nt, Human
auaacaugaaaugauagauuuga

SEQ ID NO: 3393411 - RNA, 13 nt, Human
auaacauguaauu

SEQ ID NO: 3393412 - RNA, 14 nt, Human
auaacauuaccuua

SEQ ID NO: 3393413 - RNA, 19 nt, Human
auaacauuaccuuacugug

SEQ ID NO: 3393414 - RNA, 14 nt, Human
auaaccaaaugaaa

SEQ ID NO: 3393415 - RNA, 20 nt, Human
auaaccaauguuuaaaaaag

SEQ ID NO: 3393416 - RNA, 23 nt, Human
auaaccacaaagcacaguuugaa

SEQ ID NO: 3393417 - RNA, 18 nt, Human
auaauucugaaguuauau

SEQ ID NO: 3393418 - RNA, 20 nt, Human
auaauucugaaguuauauuu

SEQ ID NO: 3393419 - RNA, 23 nt, Human
auaauucugaguuuuguguuugu

SEQ ID NO: 3393420 - RNA, 23 nt, Human
auaauucuguacauagccuauau

SEQ ID NO: 3393421 - RNA, 15 nt, Human
auaauucuguacuga

SEQ ID NO: 3393422 - RNA, 17 nt, Human
auaauucuguacugauu

SEQ ID NO: 3393423 - RNA, 14 nt, Human
auaauucuuauuuu

SEQ ID NO: 3393424 - RNA, 14 nt, Human
auaauucuuguaua

SEQ ID NO: 3393425 - RNA, 19 nt, Human
auaauucuuguauauuaug

SEQ ID NO: 3393426 - RNA, 14 nt, Human
auaauucuuugauu

SEQ ID NO: 3393427 - RNA, 22 nt, Human
auaauugacaggauuauuggaa

SEQ ID NO: 3393428 - RNA, 22 nt, Human
auaauugcauugacuuucccca

SEQ ID NO: 3393429 - RNA, 22 nt, Human
auaauugccaaaaagugaaaua

SEQ ID NO: 3393430 - RNA, 20 nt, Human
auaauugcuauuuauuuuua

SEQ ID NO: 3393431 - RNA, 16 nt, Human
auaauuggauuuccua

SEQ ID NO: 3393432 - RNA, 20 nt, Human
auaauuggauuuccuaauac

SEQ ID NO: 3393433 - RNA, 24 nt, Human
auaauuguacaaaauuaagcaaau

SEQ ID NO: 3393434 - RNA, 12 nt, Human
auaauuguauca

SEQ ID NO: 3393435 - RNA, 21 nt, Human
auaauuguaucguauagcugu

SEQ ID NO: 3393436 - RNA, 20 nt, Human
auaauugugauuagacagaa

SEQ ID NO: 3393437 - RNA, 21 nt, Human
auaauugugugauauuucaga

SEQ ID NO: 3393438 - RNA, 15 nt, Human
auaauuguuguucug

SEQ ID NO: 3393439 - RNA, 19 nt, Human
auaauuguuguucuguuaa

SEQ ID NO: 3393440 - RNA, 21 nt, Human
auaauuguuguucuguuaacu

SEQ ID NO: 3393441 - RNA, 22 nt, Human
auaauuguuguucuguuaacug

SEQ ID NO: 3393442 - RNA, 14 nt, Human
auaauuguuuuuua

SEQ ID NO: 3393443 - RNA, 18 nt, Human
auaauuguuuuuuaucuu

SEQ ID NO: 3393444 - RNA, 23 nt, Human
auaauuguuuuuuaucuuuucua

SEQ ID NO: 3393445 - RNA, 13 nt, Human
auaauuuaccuaa

SEQ ID NO: 3393446 - RNA, 16 nt, Human
auaauuuaccuaagau

SEQ ID NO: 3393447 - RNA, 13 nt, Human
auaauuuacugug

SEQ ID NO: 3393448 - RNA, 14 nt, Human
auaauuucagggug

SEQ ID NO: 3393449 - RNA, 11 nt, Human
auaauuuccca

SEQ ID NO: 3393450 - RNA, 15 nt, Human
auaauuucgagauuu

SEQ ID NO: 3393451 - RNA, 18 nt, Human
auaauuugguauccuuau

SEQ ID NO: 3393452 - RNA, 16 nt, Human
auaauuuguuuccagc

SEQ ID NO: 3393453 - RNA, 11 nt, Human
auaauuuuaaa

SEQ ID NO: 3393454 - RNA, 21 nt, Human
auaauuuuaaaaaagccuucc

SEQ ID NO: 3393455 - RNA, 17 nt, Human
auaauuuuaaaaauggu

SEQ ID NO: 3393456 - RNA, 14 nt, Human
auaauuuuaagaaa

SEQ ID NO: 3393457 - RNA, 12 nt, Human
auaauuuuacaa

SEQ ID NO: 3393458 - RNA, 12 nt, Human
auaauuuuauga

SEQ ID NO: 3393459 - RNA, 19 nt, Human
auaauuuuaugaaugucuu

SEQ ID NO: 3393460 - RNA, 14 nt, Human
auaauuuucugaaa

SEQ ID NO: 3393461 - RNA, 15 nt, Human
auaauuuucugaaag

SEQ ID NO: 3393462 - RNA, 13 nt, Human
auaauuuucuuca

SEQ ID NO: 3393463 - RNA, 23 nt, Human
auaauuuucuucaugcaaugaca

SEQ ID NO: 3393464 - RNA, 21 nt, Human
auaauuuugcauaaaauugga

SEQ ID NO: 3393465 - RNA, 23 nt, Human
auaauuuuguaauguaucaaaua

SEQ ID NO: 3393466 - RNA, 20 nt, Human
auaauuuugugaagcaaaau

SEQ ID NO: 3393467 - RNA, 18 nt, Human
auaauuuuuaaaguauau

SEQ ID NO: 3393468 - RNA, 21 nt, Human
auaauuuuuaaaguauauauu

SEQ ID NO: 3393469 - RNA, 19 nt, Human
auaauuuuuauauuuaauu

SEQ ID NO: 3393470 - RNA, 22 nt, Human
auaauuuuuauauuugaaauau

SEQ ID NO: 3393471 - RNA, 15 nt, Human
auaauuuuuuauuca

SEQ ID NO: 3393472 - RNA, 18 nt, Human
auaauuuuuuuuaaaaua

SEQ ID NO: 3393473 - RNA, 13 nt, Human
auacaaaaagaaa

SEQ ID NO: 3393474 - RNA, 23 nt, Human
auacaaaaaucagccagacaugg

SEQ ID NO: 3393475 - RNA, 15 nt, Human
auacaaaaauuugcc

SEQ ID NO: 3393476 - RNA, 13 nt, Human
auacaaaagcaug

SEQ ID NO: 3393477 - RNA, 18 nt, Human
auacaaaccuaccaaaau

SEQ ID NO: 3393478 - RNA, 19 nt, Human
auacaaaggcuuauuaauu

SEQ ID NO: 3393479 - RNA, 19 nt, Human
auacaaaguuagagaacua

SEQ ID NO: 3393480 - RNA, 17 nt, Human
auacaaauauaaaucuu

SEQ ID NO: 3393481 - RNA, 17 nt, Human
auacaaaugcaucuuug

SEQ ID NO: 3393482 - RNA, 18 nt, Human
auacaaaugcaucuuuga

SEQ ID NO: 3393483 - RNA, 19 nt, Human
auacaaaugcaucuuugau

SEQ ID NO: 3393484 - RNA, 22 nt, Human
auacaaaugcaucuuugaugug

SEQ ID NO: 3393485 - RNA, 13 nt, Human
auacaaauggauu

SEQ ID NO: 3393486 - RNA, 22 nt, Human
auacaacaaaggcaaguuaaga

SEQ ID NO: 3393487 - RNA, 23 nt, Human
auacaacaaaggcaaguuaagag

SEQ ID NO: 3393488 - RNA, 20 nt, Human
auacaacaccaaaaaauauc

SEQ ID NO: 3393489 - RNA, 21 nt, Human
auacaacaccaaaaaauaucu

SEQ ID NO: 3393490 - RNA, 14 nt, Human
auacaacagugcua

SEQ ID NO: 3393491 - RNA, 18 nt, Human
auacaacagugcuaaaaa

SEQ ID NO: 3393492 - RNA, 15 nt, Human
auacaaccucccucu

SEQ ID NO: 3393493 - RNA, 20 nt, Human
auacaaccucccucuuguuu

SEQ ID NO: 3393494 - RNA, 14 nt, Human
auacaaccugcuug

SEQ ID NO: 3393495 - RNA, 15 nt, Human
auacaagauaagcuu

SEQ ID NO: 3393496 - RNA, 15 nt, Human
auacaagauugaaaa

SEQ ID NO: 3393497 - RNA, 12 nt, Human
auacaagccaaa

SEQ ID NO: 3393498 - RNA, 12 nt, Human
auacaauaaacu

SEQ ID NO: 3393499 - RNA, 12 nt, Human
auacaauaaauu

SEQ ID NO: 3393500 - RNA, 11 nt, Human
auacaauaaug

SEQ ID NO: 3393501 - RNA, 13 nt, Human
auacaauaaugga

SEQ ID NO: 3393502 - RNA, 15 nt, Human
auacaauaauggaaa

SEQ ID NO: 3393503 - RNA, 16 nt, Human
auacaauaauggaaaa

SEQ ID NO: 3393504 - RNA, 19 nt, Human
auacaauaauggaaaaaaa

SEQ ID NO: 3393505 - RNA, 19 nt, Human
auacaauauauaaaaauau

SEQ ID NO: 3393506 - RNA, 14 nt, Human
auacaauauauagc

SEQ ID NO: 3393507 - RNA, 16 nt, Human
auacaauauauagcug

SEQ ID NO: 3393508 - RNA, 21 nt, Human
auacaaugaugcuauuugcaa

SEQ ID NO: 3393509 - RNA, 17 nt, Human
auacaaugcugugcccu

SEQ ID NO: 3393510 - RNA, 16 nt, Human
auacaauuuuguuucu

SEQ ID NO: 3393511 - RNA, 17 nt, Human
auacaauuuuguuucug

SEQ ID NO: 3393512 - RNA, 14 nt, Human
auacacacacaaag

SEQ ID NO: 3393513 - RNA, 17 nt, Human
auacacacacaaagaga

SEQ ID NO: 3393514 - RNA, 13 nt, Human
auacacacacaca

SEQ ID NO: 3393515 - RNA, 21 nt, Human
auacacacacacacacagcca

SEQ ID NO: 3393516 - RNA, 23 nt, Human
auacacacacacacacagccaca

SEQ ID NO: 3393517 - RNA, 23 nt, Human
auacacacacacgcgugcacaca

SEQ ID NO: 3393518 - RNA, 13 nt, Human
auacacacaguua

SEQ ID NO: 3393519 - RNA, 19 nt, Human
auacacacauaugucauau

SEQ ID NO: 3393520 - RNA, 17 nt, Human
auacacacucaaaucaa

SEQ ID NO: 3393521 - RNA, 23 nt, Human
auacacauauaccuauaaugugu

SEQ ID NO: 3393522 - RNA, 21 nt, Human
auacaccaccucacuccuguu

SEQ ID NO: 3393523 - RNA, 19 nt, Human
auacaccagagauaauaug

SEQ ID NO: 3393524 - RNA, 17 nt, Human
auacaccagcauuccuu

SEQ ID NO: 3393525 - RNA, 18 nt, Human
auacaccagcauuccuuu

SEQ ID NO: 3393526 - RNA, 18 nt, Human
auacaccgggccuggaga

SEQ ID NO: 3393527 - RNA, 17 nt, Human
auacacgagguaugagg

SEQ ID NO: 3393528 - RNA, 19 nt, Human
auacacuaauuccuuucua

SEQ ID NO: 3393529 - RNA, 22 nt, Human
auacacuauuugugagcaaagg

SEQ ID NO: 3393530 - RNA, 13 nt, Human
auacacuuacacu

SEQ ID NO: 3393531 - RNA, 19 nt, Human
auacacuuguauaaaugua

SEQ ID NO: 3393532 - RNA, 23 nt, Human
auacagaaagauggaugugcuuu

SEQ ID NO: 3393533 - RNA, 18 nt, Human
auacagaacucuuucaaa

SEQ ID NO: 3393534 - RNA, 20 nt, Human
auacagaaucuuguuuugaa

SEQ ID NO: 3393535 - RNA, 20 nt, Human
auacagaauugugucugcag

SEQ ID NO: 3393536 - RNA, 21 nt, Human
auacagaauugugucugcagg

SEQ ID NO: 3393537 - RNA, 20 nt, Human
auacagaccgaacuguugua

SEQ ID NO: 3393538 - RNA, 21 nt, Human
auacagaccgaacuguuguau

SEQ ID NO: 3393539 - RNA, 23 nt, Human
auacagagaagucacagggcagu

SEQ ID NO: 3393540 - RNA, 13 nt, Human
auacagauaaaug

SEQ ID NO: 3393541 - RNA, 17 nt, Human
auacagauaaaugauuc

SEQ ID NO: 3393542 - RNA, 18 nt, Human
auacagauauauuuucuu

SEQ ID NO: 3393543 - RNA, 22 nt, Human
auacagaugaaaauuugagacu

SEQ ID NO: 3393544 - RNA, 13 nt, Human
auacagcaaagga

SEQ ID NO: 3393545 - RNA, 15 nt, Human
auacagcaaaggaaa

SEQ ID NO: 3393546 - RNA, 16 nt, Human
auacagcagcaagaaa

SEQ ID NO: 3393547 - RNA, 20 nt, Human
auacagcauuacaaauugcu

SEQ ID NO: 3393548 - RNA, 11 nt, Human
auacagcucua

SEQ ID NO: 3393549 - RNA, 12 nt, Human
auacagcuuucu

SEQ ID NO: 3393550 - RNA, 13 nt, Human
auacagcuuucug

SEQ ID NO: 3393551 - RNA, 16 nt, Human
auacagcuuuuggauu

SEQ ID NO: 3393552 - RNA, 13 nt, Human
auacaggaaacag

SEQ ID NO: 3393553 - RNA, 14 nt, Human
auacaggaaacagu

SEQ ID NO: 3393554 - RNA, 16 nt, Human
auacaggaaacaguug

SEQ ID NO: 3393555 - RNA, 17 nt, Human
auacaggaaugaagccu

SEQ ID NO: 3393556 - RNA, 19 nt, Human
auacaggauuauuuugauu

SEQ ID NO: 3393557 - RNA, 20 nt, Human
auacaggcuggaaaguaagg

SEQ ID NO: 3393558 - RNA, 16 nt, Human
auacagggaugguguu

SEQ ID NO: 3393559 - RNA, 15 nt, Human
auacaggucauauua

SEQ ID NO: 3393560 - RNA, 17 nt, Human
auacaguaacuuuaugu

SEQ ID NO: 3393561 - RNA, 13 nt, Human
auauuuugauuau

SEQ ID NO: 3393562 - RNA, 19 nt, Human
auauuuugauuauuguauu

SEQ ID NO: 3393563 - RNA, 19 nt, Human
auauuuugggaaucuuuuc

SEQ ID NO: 3393564 - RNA, 13 nt, Human
auauuuuguaaau

SEQ ID NO: 3393565 - RNA, 13 nt, Human
auauuuuguauau

SEQ ID NO: 3393566 - RNA, 16 nt, Human
auauuuuguaugcaag

SEQ ID NO: 3393567 - RNA, 22 nt, Human
auauuuuguaugcaagcaguuu

SEQ ID NO: 3393568 - RNA, 18 nt, Human
auauuuugugugaaauug

SEQ ID NO: 3393569 - RNA, 14 nt, Human
auauuuuuaaaaga

SEQ ID NO: 3393570 - RNA, 13 nt, Human
auauuuuuaaaga

SEQ ID NO: 3393571 - RNA, 12 nt, Human
auauuuuuaaga

SEQ ID NO: 3393572 - RNA, 16 nt, Human
auauuuuuagacucau

SEQ ID NO: 3393573 - RNA, 18 nt, Human
auauuuuuauauuuccuu

SEQ ID NO: 3393574 - RNA, 15 nt, Human
auauuuuuaucuuua

SEQ ID NO: 3393575 - RNA, 20 nt, Human
auauuuuuaucuuuauauga

SEQ ID NO: 3393576 - RNA, 13 nt, Human
auauuuuucacau

SEQ ID NO: 3393577 - RNA, 17 nt, Human
auauuuuucauaaacaa

SEQ ID NO: 3393578 - RNA, 18 nt, Human
auauuuuucauaaacaag

SEQ ID NO: 3393579 - RNA, 13 nt, Human
auauuuuucuuaa

SEQ ID NO: 3393580 - RNA, 17 nt, Human
auauuuuucuuaaaaag

SEQ ID NO: 3393581 - RNA, 23 nt, Human
auauuuuuuaaaaaucuauauuu

SEQ ID NO: 3393582 - RNA, 17 nt, Human
auauuuuuuaaaauaag

SEQ ID NO: 3393583 - RNA, 21 nt, Human
auauuuuuuaauuuaaagcuu

SEQ ID NO: 3393584 - RNA, 15 nt, Human
auauuuuuucugaau

SEQ ID NO: 3393585 - RNA, 21 nt, Human
auauuuuuuuaaaauguuaaa

SEQ ID NO: 3393586 - RNA, 17 nt, Human
auauuuuuuuaauuuaa

SEQ ID NO: 3393587 - RNA, 14 nt, Human
auauuuuuuuccuu

SEQ ID NO: 3393588 - RNA, 16 nt, Human
auauuuuuuucuaaga

SEQ ID NO: 3393589 - RNA, 16 nt, Human
auauuuuuuucugaaa

SEQ ID NO: 3393590 - RNA, 19 nt, Human
aucaaaaaaggcaguuacc

SEQ ID NO: 3393591 - RNA, 12 nt, Human
aucaaaaaggcu

SEQ ID NO: 3393592 - RNA, 16 nt, Human
aucaaaaaggcuuaua

SEQ ID NO: 3393593 - RNA, 21 nt, Human
aucaaaaaggcuuauaaaaca

SEQ ID NO: 3393594 - RNA, 23 nt, Human
aucaaaaaggcuuauaaaacaga

SEQ ID NO: 3393595 - RNA, 13 nt, Human
aucaaaaauaaug

SEQ ID NO: 3393596 - RNA, 15 nt, Human
aucaaaacuuucuuu

SEQ ID NO: 3393597 - RNA, 13 nt, Human
aucaaaagacaau

SEQ ID NO: 3393598 - RNA, 14 nt, Human
aucaaaagacaauu

SEQ ID NO: 3393599 - RNA, 15 nt, Human
aucaaaagacaauuc

SEQ ID NO: 3393600 - RNA, 24 nt, Human
aucaaaagguuaauaaaguaauua

SEQ ID NO: 3393601 - RNA, 13 nt, Human
aucaaaagugccu

SEQ ID NO: 3393602 - RNA, 17 nt, Human
aucaaaauaaauugaaa

SEQ ID NO: 3393603 - RNA, 13 nt, Human
aucaaaaucucuc

SEQ ID NO: 3393604 - RNA, 13 nt, Human
aucaaaaugaccu

SEQ ID NO: 3393605 - RNA, 23 nt, Human
aucaaaaugaccucaccauuuuu

SEQ ID NO: 3393606 - RNA, 15 nt, Human
aucaaaaugcucuua

SEQ ID NO: 3393607 - RNA, 19 nt, Human
aucaaaaugcucuuauuuc

SEQ ID NO: 3393608 - RNA, 23 nt, Human
aucaaacaccaacauaaaaauga

SEQ ID NO: 3393609 - RNA, 15 nt, Human
aucaaacauuuucug

SEQ ID NO: 3393610 - RNA, 14 nt, Human
aucaaacauuuuga

SEQ ID NO: 3393611 - RNA, 18 nt, Human
aucaaacccuagccuugc

SEQ ID NO: 3393612 - RNA, 20 nt, Human
aucaaacccuagccuugcuu

SEQ ID NO: 3393613 - RNA, 22 nt, Human
aucaaacccuagccuugcuugu

SEQ ID NO: 3393614 - RNA, 15 nt, Human
aucaaacugaagcca

SEQ ID NO: 3393615 - RNA, 17 nt, Human
aucaaagaauaagaaaa

SEQ ID NO: 3393616 - RNA, 18 nt, Human
aucaaagagagaaaauaa

SEQ ID NO: 3393617 - RNA, 19 nt, Human
aucaaagagguuuuaaaaa

SEQ ID NO: 3393618 - RNA, 20 nt, Human
aucaaagagguuuuaaaaaa

SEQ ID NO: 3393619 - RNA, 12 nt, Human
aucaaagaugaa

SEQ ID NO: 3393620 - RNA, 15 nt, Human
aucaaagcaaugcau

SEQ ID NO: 3393621 - RNA, 18 nt, Human
aucaaagcaucuugcauu

SEQ ID NO: 3393622 - RNA, 16 nt, Human
aucaaagccacacucu

SEQ ID NO: 3393623 - RNA, 20 nt, Human
aucaaagggauaaagaaaaa

SEQ ID NO: 3393624 - RNA, 20 nt, Human
aucaaagggugaaaauuauu

SEQ ID NO: 3393625 - RNA, 18 nt, Human
aucaaaguaggcaggacc

SEQ ID NO: 3393626 - RNA, 15 nt, Human
aucaaaguucugcuu

SEQ ID NO: 3393627 - RNA, 17 nt, Human
aucaaauaaaaauucua

SEQ ID NO: 3393628 - RNA, 14 nt, Human
aucaaauaagaaau

SEQ ID NO: 3393629 - RNA, 15 nt, Human
aucaaauaagaaaua

SEQ ID NO: 3393630 - RNA, 18 nt, Human
aucaaauaaguauuuaua

SEQ ID NO: 3393631 - RNA, 19 nt, Human
aucaaauaaguauuuauaa

SEQ ID NO: 3393632 - RNA, 15 nt, Human
aucaaauacuuuaaa

SEQ ID NO: 3393633 - RNA, 21 nt, Human
aucaaauagaaccacuaugaa

SEQ ID NO: 3393634 - RNA, 22 nt, Human
aucaaauauauucagccuggcu

SEQ ID NO: 3393635 - RNA, 17 nt, Human
aucaaauaugcaaagca

SEQ ID NO: 3393636 - RNA, 13 nt, Human
aucaaauauuaga

SEQ ID NO: 3393637 - RNA, 14 nt, Human
aucaaauauuagau

SEQ ID NO: 3393638 - RNA, 16 nt, Human
aucaaauauuagaugu

SEQ ID NO: 3393639 - RNA, 18 nt, Human
aucaaauauuagauguga

SEQ ID NO: 3393640 - RNA, 19 nt, Human
aucaaauauuagaugugau

SEQ ID NO: 3393641 - RNA, 20 nt, Human
aucaaaucuaccacuguaug

SEQ ID NO: 3393642 - RNA, 17 nt, Human
aucaaaugcaguauauu

SEQ ID NO: 3393643 - RNA, 19 nt, Human
aucaaaugcaguauauuuc

SEQ ID NO: 3393644 - RNA, 18 nt, Human
aucaaaugguaucuuuug

SEQ ID NO: 3393645 - RNA, 13 nt, Human
aucaaauguaaag

SEQ ID NO: 3393646 - RNA, 14 nt, Human
aucaaauguaaagu

SEQ ID NO: 3393647 - RNA, 12 nt, Human
aucaaauguuua

SEQ ID NO: 3393648 - RNA, 21 nt, Human
aucaaauguuuaaucauauaa

SEQ ID NO: 3393649 - RNA, 17 nt, Human
aucaaauuaauugugug

SEQ ID NO: 3393650 - RNA, 17 nt, Human
aucaacaauaaaauuuu

SEQ ID NO: 3393651 - RNA, 19 nt, Human
aucaacaccuuaauaugcu

SEQ ID NO: 3393652 - RNA, 13 nt, Human
aucaacagaagca

SEQ ID NO: 3393653 - RNA, 12 nt, Human
aucaacagggca

SEQ ID NO: 3393654 - RNA, 17 nt, Human
aucaacagugagagacu

SEQ ID NO: 3393655 - RNA, 15 nt, Human
aucaacaucuuuucu

SEQ ID NO: 3393656 - RNA, 23 nt, Human
aucaaccaccuauuuuugacaug

SEQ ID NO: 3393657 - RNA, 18 nt, Human
aucaaccccagacacugg

SEQ ID NO: 3393658 - RNA, 19 nt, Human
aucaaccccagacacuggu

SEQ ID NO: 3393659 - RNA, 22 nt, Human
aucaaccccuucgcuccugugu

SEQ ID NO: 3393660 - RNA, 12 nt, Human
aucaacuaaagu

SEQ ID NO: 3393661 - RNA, 15 nt, Human
aucaacuacuauuca

SEQ ID NO: 3393662 - RNA, 14 nt, Human
aucaacucaagaau

SEQ ID NO: 3393663 - RNA, 19 nt, Human
aucaacugggcugaacacu

SEQ ID NO: 3393664 - RNA, 12 nt, Human
aucaacuuaaca

SEQ ID NO: 3393665 - RNA, 12 nt, Human
aucaacuuuuua

SEQ ID NO: 3393666 - RNA, 18 nt, Human
aucaacuuuuuauugccu

SEQ ID NO: 3393667 - RNA, 12 nt, Human
aucaagaaaguc

SEQ ID NO: 3393668 - RNA, 15 nt, Human
aucaagaaaguguug

SEQ ID NO: 3393669 - RNA, 22 nt, Human
aucaagaagggcugcaugaugu

SEQ ID NO: 3393670 - RNA, 23 nt, Human
aucaagaauggggaucacagaga

SEQ ID NO: 3393671 - RNA, 23 nt, Human
aucaagagagguuaauaaaggaa

SEQ ID NO: 3393672 - RNA, 16 nt, Human
aucaagagccuuaaaa

SEQ ID NO: 3393673 - RNA, 18 nt, Human
aucaagagccuuaaaaca

SEQ ID NO: 3393674 - RNA, 15 nt, Human
aucaagagcugcccu

SEQ ID NO: 3393675 - RNA, 19 nt, Human
aucaagagcugcccuccuu

SEQ ID NO: 3393676 - RNA, 20 nt, Human
aucaagagcugcccuccuug

SEQ ID NO: 3393677 - RNA, 17 nt, Human
aucaagaggcugagaca

SEQ ID NO: 3393678 - RNA, 18 nt, Human
aucaagauaaaggacagu

SEQ ID NO: 3393679 - RNA, 16 nt, Human
aucaagcacagaagga

SEQ ID NO: 3393680 - RNA, 14 nt, Human
aucaagcagccaag

SEQ ID NO: 3393681 - RNA, 18 nt, Human
aucaagcagguuagagaa

SEQ ID NO: 3393682 - RNA, 19 nt, Human
aucaagcaugaaaggcuuu

SEQ ID NO: 3393683 - RNA, 22 nt, Human
aucaagcuucaguuuccugguc

SEQ ID NO: 3393684 - RNA, 14 nt, Human
aucaaggcacugcc

SEQ ID NO: 3393685 - RNA, 16 nt, Human
aucaagggaagaacua

SEQ ID NO: 3393686 - RNA, 18 nt, Human
aucaagggaagaacuauu

SEQ ID NO: 3393687 - RNA, 21 nt, Human
aucaagggccuaucuuggaga

SEQ ID NO: 3393688 - RNA, 16 nt, Human
aucaagggucaggccu

SEQ ID NO: 3393689 - RNA, 17 nt, Human
aucaagggucaggccuu

SEQ ID NO: 3393690 - RNA, 19 nt, Human
aucaagguuauaauuuuuu

SEQ ID NO: 3393691 - RNA, 15 nt, Human
aucaaguauagaaaa

SEQ ID NO: 3393692 - RNA, 21 nt, Human
aucaaguauagaaaaucuuca

SEQ ID NO: 3393693 - RNA, 13 nt, Human
aucaaguauuaua

SEQ ID NO: 3393694 - RNA, 14 nt, Human
aucaaguauuauaa

SEQ ID NO: 3393695 - RNA, 18 nt, Human
aucaaguauuauaccuuu

SEQ ID NO: 3393696 - RNA, 13 nt, Human
aucaaguauuuug

SEQ ID NO: 3393697 - RNA, 13 nt, Human
aucaagucuguuu

SEQ ID NO: 3393698 - RNA, 17 nt, Human
aucaaguggcaugugcu

SEQ ID NO: 3393699 - RNA, 22 nt, Human
aucaaguuggcuucuaaucaaa

SEQ ID NO: 3393700 - RNA, 20 nt, Human
aucaaguuguaacuuauauu

SEQ ID NO: 3393701 - RNA, 22 nt, Human
aucaaguuguaacuuauauuga

SEQ ID NO: 3393702 - RNA, 23 nt, Human
aucaaguuguaacuuauauugaa

SEQ ID NO: 3393703 - RNA, 18 nt, Human
aucaaguuuccaagcaaa

SEQ ID NO: 3393704 - RNA, 21 nt, Human
aucaaguuuccaagcaaaugu

SEQ ID NO: 3393705 - RNA, 17 nt, Human
aucaaguuuuaagugaa

SEQ ID NO: 3393706 - RNA, 21 nt, Human
aucauaggcaccuuuuacugu

SEQ ID NO: 3393707 - RNA, 16 nt, Human
aucauagguauuucaa

SEQ ID NO: 3393708 - RNA, 14 nt, Human
aucauaguuaacau

SEQ ID NO: 3393709 - RNA, 15 nt, Human
aucauaguuacugug

SEQ ID NO: 3393710 - RNA, 16 nt, Human
aucauaguuacugugu

SEQ ID NO: 3393711 - RNA, 19 nt, Human
aucauaguuacuguguaaa

SEQ ID NO: 3393712 - RNA, 21 nt, Human
aucauauaaauagaauguaaa

SEQ ID NO: 3393713 - RNA, 16 nt, Human
aucauauaauaaaugu

SEQ ID NO: 3393714 - RNA, 20 nt, Human
aucauauaauaaauguacau

SEQ ID NO: 3393715 - RNA, 19 nt, Human
aucauauauaauaaauuaa

SEQ ID NO: 3393716 - RNA, 16 nt, Human
aucauaugauucugcu

SEQ ID NO: 3393717 - RNA, 19 nt, Human
aucauaugauucugcuuuu

SEQ ID NO: 3393718 - RNA, 15 nt, Human
aucauauuauacaga

SEQ ID NO: 3393719 - RNA, 16 nt, Human
aucaucaagaagggcu

SEQ ID NO: 3393720 - RNA, 13 nt, Human
aucaucaaggcac

SEQ ID NO: 3393721 - RNA, 18 nt, Human
aucaucaaggcacugccu

SEQ ID NO: 3393722 - RNA, 22 nt, Human
aucaucacguauguuauacaac

SEQ ID NO: 3393723 - RNA, 18 nt, Human
aucaucaugcagcucaac

SEQ ID NO: 3393724 - RNA, 18 nt, Human
aucaucauguguguccac

SEQ ID NO: 3393725 - RNA, 16 nt, Human
aucauccacacaugaa

SEQ ID NO: 3393726 - RNA, 16 nt, Human
aucauccacauuguuu

SEQ ID NO: 3393727 - RNA, 21 nt, Human
aucauccacugugccaugugc

SEQ ID NO: 3393728 - RNA, 14 nt, Human
aucaucccagcugc

SEQ ID NO: 3393729 - RNA, 21 nt, Human
aucaucccaucuaagcugcag

SEQ ID NO: 3393730 - RNA, 17 nt, Human
aucauccugcagacaga

SEQ ID NO: 3393731 - RNA, 16 nt, Human
aucauccuuuccagca

SEQ ID NO: 3393732 - RNA, 15 nt, Human
aucaucgaaaauuca

SEQ ID NO: 3393733 - RNA, 24 nt, Human
aucaucggagucagccaggagcug

SEQ ID NO: 3393734 - RNA, 21 nt, Human
aucaucuauugcuggcaaaga

SEQ ID NO: 3393735 - RNA, 14 nt, Human
aucaucuauuuuga

SEQ ID NO: 3393736 - RNA, 13 nt, Human
aucaucucagcuc

SEQ ID NO: 3393737 - RNA, 19 nt, Human
aucaucucagcucacugca

SEQ ID NO: 3393738 - RNA, 23 nt, Human
aucaucugaaggggcaaauucuu

SEQ ID NO: 3393739 - RNA, 18 nt, Human
aucaucuguggaacccau

SEQ ID NO: 3393740 - RNA, 16 nt, Human
aucaucugugugaaaa

SEQ ID NO: 3393741 - RNA, 14 nt, Human
aucaugaaauaugc

SEQ ID NO: 3393742 - RNA, 15 nt, Human
aucaugaagccugug

SEQ ID NO: 3393743 - RNA, 17 nt, Human
aucaugaagcguggaga

SEQ ID NO: 3393744 - RNA, 23 nt, Human
aucaugaauaacugauuaguaag

SEQ ID NO: 3393745 - RNA, 16 nt, Human
aucaugaaugcuuuua

SEQ ID NO: 3393746 - RNA, 18 nt, Human
aucaugaauguguaacac

SEQ ID NO: 3393747 - RNA, 17 nt, Human
aucaugaauuaguuuua

SEQ ID NO: 3393748 - RNA, 19 nt, Human
aucaugaauuuauugcaca

SEQ ID NO: 3393749 - RNA, 15 nt, Human
aucaugaauuuuaaa

SEQ ID NO: 3393750 - RNA, 13 nt, Human
aucaugacauguu

SEQ ID NO: 3393751 - RNA, 16 nt, Human
aucaugacauguuaua

SEQ ID NO: 3393752 - RNA, 18 nt, Human
aucaugacauguuauaua

SEQ ID NO: 3393753 - RNA, 13 nt, Human
aucaugagccugc

SEQ ID NO: 3393754 - RNA, 15 nt, Human
aucaugagccugcug

SEQ ID NO: 3393755 - RNA, 19 nt, Human
aucaugcacacaauuagau

SEQ ID NO: 3393756 - RNA, 14 nt, Human
aucaugcauuguug

SEQ ID NO: 3393757 - RNA, 19 nt, Human
aucaugccaguauuuuuaa

SEQ ID NO: 3393758 - RNA, 21 nt, Human
aucaugcccggucccaccccu

SEQ ID NO: 3393759 - RNA, 12 nt, Human
aucaugcccugu

SEQ ID NO: 3393760 - RNA, 19 nt, Human
aucaugccucugaggccag

SEQ ID NO: 3393761 - RNA, 17 nt, Human
aucaugcuuuaaagugu

SEQ ID NO: 3393762 - RNA, 18 nt, Human
aucaugcuuugaaaaauc

SEQ ID NO: 3393763 - RNA, 19 nt, Human
aucauggaaugguuauaaa

SEQ ID NO: 3393764 - RNA, 21 nt, Human
aucauggauucauuacagcuu

SEQ ID NO: 3393765 - RNA, 19 nt, Human
aucauggccagcuggaggc

SEQ ID NO: 3393766 - RNA, 21 nt, Human
aucauggcuaagcuuaaaaaa

SEQ ID NO: 3393767 - RNA, 15 nt, Human
aucauggcucacugc

SEQ ID NO: 3393768 - RNA, 18 nt, Human
aucauggcucacugcagc

SEQ ID NO: 3393769 - RNA, 16 nt, Human
aucaugguguaauaag

SEQ ID NO: 3393770 - RNA, 18 nt, Human
aucaugguguaauaagac

SEQ ID NO: 3393771 - RNA, 13 nt, Human
aucauguacauuu

SEQ ID NO: 3393772 - RNA, 17 nt, Human
aucauguacuuuuuagu

SEQ ID NO: 3393773 - RNA, 14 nt, Human
aucaugucagagca

SEQ ID NO: 3393774 - RNA, 16 nt, Human
aucaugucagucugcu

SEQ ID NO: 3393775 - RNA, 16 nt, Human
aucaugucuauugucc

SEQ ID NO: 3393776 - RNA, 17 nt, Human
aucaugucuauugucca

SEQ ID NO: 3393777 - RNA, 21 nt, Human
aucaugucuauuguccaaagu

SEQ ID NO: 3393778 - RNA, 21 nt, Human
aucaugugaacccgggacgca

SEQ ID NO: 3393779 - RNA, 13 nt, Human
aucauguguaauc

SEQ ID NO: 3393780 - RNA, 15 nt, Human
aucauguguaaucaa

SEQ ID NO: 3393781 - RNA, 20 nt, Human
aucauguguaaucaauaaac

SEQ ID NO: 3393782 - RNA, 14 nt, Human
aucauguuaguaau

SEQ ID NO: 3393783 - RNA, 17 nt, Human
aucauguuaugauaaaa

SEQ ID NO: 3393784 - RNA, 20 nt, Human
aucauguuaugauaaaaaau

SEQ ID NO: 3393785 - RNA, 11 nt, Human
aucauguuguu

SEQ ID NO: 3393786 - RNA, 23 nt, Human
aucauguuuacagaggacaguau

SEQ ID NO: 3393787 - RNA, 17 nt, Human
aucauguuuaugagaaa

SEQ ID NO: 3393788 - RNA, 12 nt, Human
aucauguuucuu

SEQ ID NO: 3393789 - RNA, 22 nt, Human
aucauuaaagccugaguuugcu

SEQ ID NO: 3393790 - RNA, 12 nt, Human
aucauuaaaguu

SEQ ID NO: 3393791 - RNA, 13 nt, Human
aucauuaaaguuc

SEQ ID NO: 3393792 - RNA, 11 nt, Human
aucauuaauac

SEQ ID NO: 3393793 - RNA, 17 nt, Human
aucauuauuuauguauu

SEQ ID NO: 3393794 - RNA, 12 nt, Human
aucauucaagug

SEQ ID NO: 3393795 - RNA, 23 nt, Human
aucauucacggagauaugaagag

SEQ ID NO: 3393796 - RNA, 17 nt, Human
aucauucacuucacugu

SEQ ID NO: 3393797 - RNA, 21 nt, Human
aucauucacuucacugugcug

SEQ ID NO: 3393798 - RNA, 12 nt, Human
aucauucagaaa

SEQ ID NO: 3393799 - RNA, 13 nt, Human
aucauucagcaac

SEQ ID NO: 3393800 - RNA, 12 nt, Human
aucauucaucuu

SEQ ID NO: 3393801 - RNA, 22 nt, Human
aucauucauucuuagcucuuaa

SEQ ID NO: 3393802 - RNA, 15 nt, Human
aucauuccuuuuuau

SEQ ID NO: 3393803 - RNA, 23 nt, Human
aucauuccuuuuuauuuauaugu

SEQ ID NO: 3393804 - RNA, 14 nt, Human
aucauucuaaagau

SEQ ID NO: 3393805 - RNA, 16 nt, Human
aucauucucugucuca

SEQ ID NO: 3393806 - RNA, 18 nt, Human
aucauucuuacuaaaaag

SEQ ID NO: 3393807 - RNA, 12 nt, Human
aucauugaaauc

SEQ ID NO: 3393808 - RNA, 18 nt, Human
aucauugauugucagcua

SEQ ID NO: 3393809 - RNA, 14 nt, Human
aucauugcugucug

SEQ ID NO: 3393810 - RNA, 19 nt, Human
aucauugcuuccuccuccc

SEQ ID NO: 3393811 - RNA, 18 nt, Human
aucauugcuuugaagcag

SEQ ID NO: 3393812 - RNA, 22 nt, Human
aucauuggauucugagagcugu

SEQ ID NO: 3393813 - RNA, 16 nt, Human
aucauuguaaacauua

SEQ ID NO: 3393814 - RNA, 22 nt, Human
aucauuguacaguuuguuuaca

SEQ ID NO: 3393815 - RNA, 14 nt, Human
aucauuguauggau

SEQ ID NO: 3393816 - RNA, 19 nt, Human
aucauuguuggacauuugg

SEQ ID NO: 3393817 - RNA, 18 nt, Human
aucauuguuuugaauauu

SEQ ID NO: 3393818 - RNA, 12 nt, Human
aucauuuaauaa

SEQ ID NO: 3393819 - RNA, 14 nt, Human
aucauuuaauaaua

SEQ ID NO: 3393820 - RNA, 19 nt, Human
aucauuuaauaauauacuu

SEQ ID NO: 3393821 - RNA, 17 nt, Human
aucauuuauuuuaagca

SEQ ID NO: 3393822 - RNA, 16 nt, Human
aucauuucacuuguca

SEQ ID NO: 3393823 - RNA, 18 nt, Human
aucauuucuauuaaauga

SEQ ID NO: 3393824 - RNA, 11 nt, Human
aucauuucugg

SEQ ID NO: 3393825 - RNA, 17 nt, Human
aucauuugaacaacuag

SEQ ID NO: 3393826 - RNA, 13 nt, Human
aucauuugcuuuu

SEQ ID NO: 3393827 - RNA, 18 nt, Human
aucauuuguuggaaugaa

SEQ ID NO: 3393828 - RNA, 13 nt, Human
aucauuuguuuaa

SEQ ID NO: 3393829 - RNA, 18 nt, Human
aucauuuguuuaaaaagg

SEQ ID NO: 3393830 - RNA, 15 nt, Human
aucauuuuaauuauu

SEQ ID NO: 3393831 - RNA, 16 nt, Human
aucauuuuagaagacu

SEQ ID NO: 3393832 - RNA, 22 nt, Human
aucauuuuagaagacucuacca

SEQ ID NO: 3393833 - RNA, 16 nt, Human
aucauuuuaggaaagg

SEQ ID NO: 3393834 - RNA, 23 nt, Human
aucauuuuaugucaagggcagcu

SEQ ID NO: 3393835 - RNA, 13 nt, Human
aucauuuuccccc

SEQ ID NO: 3393836 - RNA, 15 nt, Human
aucauuuucccccca

SEQ ID NO: 3393837 - RNA, 22 nt, Human
aucauuuucuuaucuucugcaa

SEQ ID NO: 3393838 - RNA, 14 nt, Human
aucauuuugaaauu

SEQ ID NO: 3393839 - RNA, 16 nt, Human
aucauuuuguuuucca

SEQ ID NO: 3393840 - RNA, 14 nt, Human
aucauuuuuccuuc

SEQ ID NO: 3393841 - RNA, 13 nt, Human
aucauuuuuguac

SEQ ID NO: 3393842 - RNA, 14 nt, Human
aucauuuuuguaca

SEQ ID NO: 3393843 - RNA, 21 nt, Human
aucauuuuuuauauauaugca

SEQ ID NO: 3393844 - RNA, 12 nt, Human
auccaaaagaaa

SEQ ID NO: 3393845 - RNA, 13 nt, Human
auccaaaagaagc

SEQ ID NO: 3393846 - RNA, 22 nt, Human
auccaaaagaagcccccagcua

SEQ ID NO: 3393847 - RNA, 23 nt, Human
auccaaaauguguauuucuuaua

SEQ ID NO: 3393848 - RNA, 20 nt, Human
auccaaacauguauuuaugu

SEQ ID NO: 3393849 - RNA, 10 nt, Human
auccaaagac

SEQ ID NO: 3393850 - RNA, 15 nt, Human
auccaaagcagacag

SEQ ID NO: 3393851 - RNA, 23 nt, Human
auccaaauugugcuucuccccag

SEQ ID NO: 3393852 - RNA, 15 nt, Human
aucccauaugccugg

SEQ ID NO: 3393853 - RNA, 18 nt, Human
aucccauaugccugggca

SEQ ID NO: 3393854 - RNA, 13 nt, Human
aucccaucccauc

SEQ ID NO: 3393855 - RNA, 14 nt, Human
aucccaucccaucc

SEQ ID NO: 3393856 - RNA, 19 nt, Human
aucccaucccaucccaucc

SEQ ID NO: 3393857 - RNA, 19 nt, Human
aucccaucuaagcugcagc

SEQ ID NO: 3393858 - RNA, 16 nt, Human
aucccaugaacacacu

SEQ ID NO: 3393859 - RNA, 18 nt, Human
aucccaugagccucagca

SEQ ID NO: 3393860 - RNA, 19 nt, Human
aucccauguaacagaaagg

SEQ ID NO: 3393861 - RNA, 18 nt, Human
aucccauuaaucauuucc

SEQ ID NO: 3393862 - RNA, 17 nt, Human
aucccauugcccugguu

SEQ ID NO: 3393863 - RNA, 13 nt, Human
auccccaagccug

SEQ ID NO: 3393864 - RNA, 14 nt, Human
auccccaaguguga

SEQ ID NO: 3393865 - RNA, 16 nt, Human
auccccacccugggcu

SEQ ID NO: 3393866 - RNA, 15 nt, Human
auccccaccugucuu

SEQ ID NO: 3393867 - RNA, 15 nt, Human
auccccacgccacag

SEQ ID NO: 3393868 - RNA, 18 nt, Human
auccccacgccacagccc

SEQ ID NO: 3393869 - RNA, 23 nt, Human
auccccaggggucccagccaccc

SEQ ID NO: 3393870 - RNA, 15 nt, Human
auccccauccuccag

SEQ ID NO: 3393871 - RNA, 13 nt, Human
auccccaucuccc

SEQ ID NO: 3393872 - RNA, 20 nt, Human
auccccaugccuguggcugc

SEQ ID NO: 3393873 - RNA, 17 nt, Human
aucccccagaaaagaaa

SEQ ID NO: 3393874 - RNA, 12 nt, Human
aucccccagccu

SEQ ID NO: 3393875 - RNA, 15 nt, Human
auccccccaucuugc

SEQ ID NO: 3393876 - RNA, 17 nt, Human
auccccccaucuugcuu

SEQ ID NO: 3393877 - RNA, 19 nt, Human
aucccccccaccucucccu

SEQ ID NO: 3393878 - RNA, 13 nt, Human
auccccucccagu

SEQ ID NO: 3393879 - RNA, 15 nt, Human
auccccucccuguca

SEQ ID NO: 3393880 - RNA, 19 nt, Human
auccccucccugucaaagc

SEQ ID NO: 3393881 - RNA, 14 nt, Human
auccccuccuuggg

SEQ ID NO: 3393882 - RNA, 15 nt, Human
auccccuccuugggc

SEQ ID NO: 3393883 - RNA, 14 nt, Human
auccccugagcccc

SEQ ID NO: 3393884 - RNA, 12 nt, Human
auccccugccuc

SEQ ID NO: 3393885 - RNA, 23 nt, Human
auccccuuacccuuagaauccac

SEQ ID NO: 3393886 - RNA, 14 nt, Human
aucccgaaaaucuc

SEQ ID NO: 3393887 - RNA, 22 nt, Human
aucccgaagaauggagaggaac

SEQ ID NO: 3393888 - RNA, 14 nt, Human
aucccgagcaccuc

SEQ ID NO: 3393889 - RNA, 16 nt, Human
aucccgcucuuuuccu

SEQ ID NO: 3393890 - RNA, 16 nt, Human
aucccggaggaaaucu

SEQ ID NO: 3393891 - RNA, 19 nt, Human
aucccgugcaaaacaugcu

SEQ ID NO: 3393892 - RNA, 18 nt, Human
aucccguuuuccccauga

SEQ ID NO: 3393893 - RNA, 20 nt, Human
aucccguuuuccccaugaca

SEQ ID NO: 3393894 - RNA, 12 nt, Human
aucccuacaugu

SEQ ID NO: 3393895 - RNA, 14 nt, Human
aucccuacauguau

SEQ ID NO: 3393896 - RNA, 14 nt, Human
aucccuacccccua

SEQ ID NO: 3393897 - RNA, 19 nt, Human
aucccuaccgacccagggu

SEQ ID NO: 3393898 - RNA, 14 nt, Human
aucccuagcuguga

SEQ ID NO: 3393899 - RNA, 19 nt, Human
aucccucacccauccuaga

SEQ ID NO: 3393900 - RNA, 17 nt, Human
aucccucaccuguagca

SEQ ID NO: 3393901 - RNA, 18 nt, Human
aucccucaccuucugagu

SEQ ID NO: 3393902 - RNA, 11 nt, Human
aucccucaucu

SEQ ID NO: 3393903 - RNA, 19 nt, Human
aucccucccccccaugcac

SEQ ID NO: 3393904 - RNA, 21 nt, Human
aucccucccccccaugcacug

SEQ ID NO: 3393905 - RNA, 22 nt, Human
aucccucccccccaugcacugu

SEQ ID NO: 3393906 - RNA, 18 nt, Human
aucccucccuccaccucc

SEQ ID NO: 3393907 - RNA, 20 nt, Human
aucccucccuccaccucccu

SEQ ID NO: 3393908 - RNA, 12 nt, Human
aucccuccuguu

SEQ ID NO: 3393909 - RNA, 17 nt, Human
aucccucgauauuuuua

SEQ ID NO: 3393910 - RNA, 14 nt, Human
aucccucuccuccc

SEQ ID NO: 3393911 - RNA, 15 nt, Human
aucccugaggacuga

SEQ ID NO: 3393912 - RNA, 18 nt, Human
aucccugaggacugauuu

SEQ ID NO: 3393913 - RNA, 22 nt, Human
aucccugaggacugauuucaga

SEQ ID NO: 3393914 - RNA, 18 nt, Human
aucccugaggcuggacuc

SEQ ID NO: 3393915 - RNA, 12 nt, Human
aucccugcccau

SEQ ID NO: 3393916 - RNA, 15 nt, Human
aucccugccugguca

SEQ ID NO: 3393917 - RNA, 13 nt, Human
aucccugcucacu

SEQ ID NO: 3393918 - RNA, 22 nt, Human
aucccuggcccccucccuggau

SEQ ID NO: 3393919 - RNA, 17 nt, Human
aucccugggcauugcuu

SEQ ID NO: 3393920 - RNA, 18 nt, Human
aucccugggcauugcuuu

SEQ ID NO: 3393921 - RNA, 14 nt, Human
aucccugggccugc

SEQ ID NO: 3393922 - RNA, 15 nt, Human
aucccugggccugcu

SEQ ID NO: 3393923 - RNA, 20 nt, Human
aucccugggccugcugcuga

SEQ ID NO: 3393924 - RNA, 21 nt, Human
aucccugggccugcugcugag

SEQ ID NO: 3393925 - RNA, 20 nt, Human
aucccugggccuugggcucc

SEQ ID NO: 3393926 - RNA, 16 nt, Human
aucccugucuuuccua

SEQ ID NO: 3393927 - RNA, 18 nt, Human
aucccuguuacccagaga

SEQ ID NO: 3393928 - RNA, 13 nt, Human
aucccuguucauu

SEQ ID NO: 3393929 - RNA, 16 nt, Human
aucccuguucauugua

SEQ ID NO: 3393930 - RNA, 13 nt, Human
aucccuguuuaau

SEQ ID NO: 3393931 - RNA, 14 nt, Human
aucccuguuuaaua

SEQ ID NO: 3393932 - RNA, 15 nt, Human
aucccuguuuaauau

SEQ ID NO: 3393933 - RNA, 23 nt, Human
aucccuguuuaauauuuaaacag

SEQ ID NO: 3393934 - RNA, 12 nt, Human
aucccuuaagaa

SEQ ID NO: 3393935 - RNA, 21 nt, Human
aucccuuaauauccuaaacau

SEQ ID NO: 3393936 - RNA, 14 nt, Human
aucccuuccaccug

SEQ ID NO: 3393937 - RNA, 19 nt, Human
aucccuuccuuuuagccua

SEQ ID NO: 3393938 - RNA, 14 nt, Human
aucccuucucacag

SEQ ID NO: 3393939 - RNA, 17 nt, Human
aucccuucucacagcac

SEQ ID NO: 3393940 - RNA, 14 nt, Human
aucccuuuauuacc

SEQ ID NO: 3393941 - RNA, 16 nt, Human
aucccuuucccuuggu

SEQ ID NO: 3393942 - RNA, 20 nt, Human
auccgaaccuccucugugaa

SEQ ID NO: 3393943 - RNA, 14 nt, Human
auccgccagggccc

SEQ ID NO: 3393944 - RNA, 12 nt, Human
auccgcucucuu

SEQ ID NO: 3393945 - RNA, 17 nt, Human
auccgcucucuuccugc

SEQ ID NO: 3393946 - RNA, 18 nt, Human
auccgcucucuuccugcc

SEQ ID NO: 3393947 - RNA, 20 nt, Human
auccgcucucuuccugcccc

SEQ ID NO: 3393948 - RNA, 14 nt, Human
auccggagaagcug

SEQ ID NO: 3393949 - RNA, 14 nt, Human
auccggaggagaag

SEQ ID NO: 3393950 - RNA, 20 nt, Human
auccggcccccagagcgccc

SEQ ID NO: 3393951 - RNA, 16 nt, Human
auccggggccagcucc

SEQ ID NO: 3393952 - RNA, 17 nt, Human
auccguaguucccugaa

SEQ ID NO: 3393953 - RNA, 22 nt, Human
auccgugagcagugugucuccu

SEQ ID NO: 3393954 - RNA, 13 nt, Human
auccguguugcag

SEQ ID NO: 3393955 - RNA, 18 nt, Human
auccuaaauuuacccucu

SEQ ID NO: 3393956 - RNA, 18 nt, Human
auccuaacugaagagaca

SEQ ID NO: 3393957 - RNA, 16 nt, Human
auccuaagaaauaugu

SEQ ID NO: 3393958 - RNA, 19 nt, Human
auccuaagaaauaugugag

SEQ ID NO: 3393959 - RNA, 20 nt, Human
auccuaagaaauaugugaga

SEQ ID NO: 3393960 - RNA, 22 nt, Human
auccuaagaaauaugugagauu

SEQ ID NO: 3393961 - RNA, 14 nt, Human
auccuaagacacaa

SEQ ID NO: 3393962 - RNA, 21 nt, Human
auccuaagauguguucuuauu

SEQ ID NO: 3393963 - RNA, 21 nt, Human
auccuaagcuauucaguaaua

SEQ ID NO: 3393964 - RNA, 16 nt, Human
auccuaauaaaaaggu

SEQ ID NO: 3393965 - RNA, 15 nt, Human
auccuaauuucuccu

SEQ ID NO: 3393966 - RNA, 18 nt, Human
auccuaauuucuccuccc

SEQ ID NO: 3393967 - RNA, 20 nt, Human
auccuaauuucuccucccuu

SEQ ID NO: 3393968 - RNA, 22 nt, Human
auccuacacaccuaagggacau

SEQ ID NO: 3393969 - RNA, 16 nt, Human
auccuaccaaugcaug

SEQ ID NO: 3393970 - RNA, 17 nt, Human
auccuaccaaugcaugc

SEQ ID NO: 3393971 - RNA, 16 nt, Human
auccuacccccugugc

SEQ ID NO: 3393972 - RNA, 21 nt, Human
auccuacccucgggcccaccu

SEQ ID NO: 3393973 - RNA, 16 nt, Human
auccuaccuguuuugu

SEQ ID NO: 3393974 - RNA, 14 nt, Human
auccuacuucucca

SEQ ID NO: 3393975 - RNA, 23 nt, Human
auccuagauuauaucaaaguauu

SEQ ID NO: 3393976 - RNA, 16 nt, Human
auccuagcacaugcuu

SEQ ID NO: 3393977 - RNA, 19 nt, Human
auccuagccuuauccucug

SEQ ID NO: 3393978 - RNA, 21 nt, Human
auccuagccuuauccucugau

SEQ ID NO: 3393979 - RNA, 23 nt, Human
auccuagccuuauccucugaucu

SEQ ID NO: 3393980 - RNA, 20 nt, Human
auccuagucacuaccuucau

SEQ ID NO: 3393981 - RNA, 23 nt, Human
auccuagucucuaucauuaaagu

SEQ ID NO: 3393982 - RNA, 13 nt, Human
auccuagugcuuu

SEQ ID NO: 3393983 - RNA, 15 nt, Human
auccuaguuuccucu

SEQ ID NO: 3393984 - RNA, 23 nt, Human
auccuaucagccugucucuucca

SEQ ID NO: 3393985 - RNA, 18 nt, Human
auccuauccacugggcac

SEQ ID NO: 3393986 - RNA, 21 nt, Human
auccuaucucuccaaccagau

SEQ ID NO: 3393987 - RNA, 23 nt, Human
auccuaugugauuuuaacucugu

SEQ ID NO: 3393988 - RNA, 21 nt, Human
auccuauugaaccauguuugu

SEQ ID NO: 3393989 - RNA, 15 nt, Human
auccucaaacacugc

SEQ ID NO: 3393990 - RNA, 19 nt, Human
auccucaaagaaaguguau

SEQ ID NO: 3393991 - RNA, 14 nt, Human
auccucacugggug

SEQ ID NO: 3393992 - RNA, 19 nt, Human
auccucaguuccugcagca

SEQ ID NO: 3393993 - RNA, 22 nt, Human
auccucaguuccugcagcagag

SEQ ID NO: 3393994 - RNA, 18 nt, Human
auccucauacccaccccc

SEQ ID NO: 3393995 - RNA, 23 nt, Human
auccucauacccacccccaccca

SEQ ID NO: 3393996 - RNA, 16 nt, Human
auccucauauggccca

SEQ ID NO: 3393997 - RNA, 23 nt, Human
augcacagaguuguuacauuuuu

SEQ ID NO: 3393998 - RNA, 18 nt, Human
augcacagauauacuuug

SEQ ID NO: 3393999 - RNA, 14 nt, Human
augcacagcuaaca

SEQ ID NO: 3394000 - RNA, 18 nt, Human
augcacauauggacucug

SEQ ID NO: 3394001 - RNA, 17 nt, Human
augcacauccauuccca

SEQ ID NO: 3394002 - RNA, 11 nt, Human
augcaccaaac

SEQ ID NO: 3394003 - RNA, 18 nt, Human
augcaccaccaagccaag

SEQ ID NO: 3394004 - RNA, 13 nt, Human
augcaccagcccu

SEQ ID NO: 3394005 - RNA, 14 nt, Human
augcaccauuagaa

SEQ ID NO: 3394006 - RNA, 20 nt, Human
augcacccucauacacagaa

SEQ ID NO: 3394007 - RNA, 14 nt, Human
augcaccuaaagaa

SEQ ID NO: 3394008 - RNA, 15 nt, Human
augcaccuaaagaaa

SEQ ID NO: 3394009 - RNA, 23 nt, Human
augcaccuaaagaaaaacaaacu

SEQ ID NO: 3394010 - RNA, 24 nt, Human
augcaccugaauguuagauaguua

SEQ ID NO: 3394011 - RNA, 13 nt, Human
augcaccuggaau

SEQ ID NO: 3394012 - RNA, 16 nt, Human
augcaccuggaauaua

SEQ ID NO: 3394013 - RNA, 19 nt, Human
augcaccuggaauauauaa

SEQ ID NO: 3394014 - RNA, 16 nt, Human
augcaccuugugucug

SEQ ID NO: 3394015 - RNA, 15 nt, Human
augcacggccucgcg

SEQ ID NO: 3394016 - RNA, 14 nt, Human
augcacuauguaua

SEQ ID NO: 3394017 - RNA, 21 nt, Human
augcacuguucccccugugca

SEQ ID NO: 3394018 - RNA, 20 nt, Human
augcacuucaaauucaaaua

SEQ ID NO: 3394019 - RNA, 15 nt, Human
augcacuuugcuuua

SEQ ID NO: 3394020 - RNA, 16 nt, Human
augcacuuugcuuuaa

SEQ ID NO: 3394021 - RNA, 19 nt, Human
augcacuuuguucuggcuc

SEQ ID NO: 3394022 - RNA, 20 nt, Human
augcacuuuguucuggcucu

SEQ ID NO: 3394023 - RNA, 15 nt, Human
augcagaaagcaucc

SEQ ID NO: 3394024 - RNA, 20 nt, Human
augcagaaauagacaaaaag

SEQ ID NO: 3394025 - RNA, 21 nt, Human
augcagaaauagacaaaaagu

SEQ ID NO: 3394026 - RNA, 22 nt, Human
augcagaaauagacaaaaagua

SEQ ID NO: 3394027 - RNA, 19 nt, Human
augcagaacacauuucaaa

SEQ ID NO: 3394028 - RNA, 19 nt, Human
augcagaauguugauuaca

SEQ ID NO: 3394029 - RNA, 19 nt, Human
augcagagagccauuuugu

SEQ ID NO: 3394030 - RNA, 23 nt, Human
augcagagagccauuuugugaau

SEQ ID NO: 3394031 - RNA, 21 nt, Human
augcagagcgccgugaguucu

SEQ ID NO: 3394032 - RNA, 20 nt, Human
augcagaguucagggaagau

SEQ ID NO: 3394033 - RNA, 19 nt, Human
augcagaguugacaugaga

SEQ ID NO: 3394034 - RNA, 15 nt, Human
augcagaugccagag

SEQ ID NO: 3394035 - RNA, 16 nt, Human
augcagaugccagagc

SEQ ID NO: 3394036 - RNA, 19 nt, Human
augcagcagcuugcugcac

SEQ ID NO: 3394037 - RNA, 19 nt, Human
augcagcagggaugcccug

SEQ ID NO: 3394038 - RNA, 17 nt, Human
augcagcaucuaaguaa

SEQ ID NO: 3394039 - RNA, 21 nt, Human
augcagcccaugcccaccugc

SEQ ID NO: 3394040 - RNA, 16 nt, Human
augcagccgugaucaa

SEQ ID NO: 3394041 - RNA, 21 nt, Human
augcagccuaaggcuguauga

SEQ ID NO: 3394042 - RNA, 15 nt, Human
augcagccucacagu

SEQ ID NO: 3394043 - RNA, 20 nt, Human
augcagcgaaccaauauuug

SEQ ID NO: 3394044 - RNA, 22 nt, Human
augcagcgaaccaauauuugua

SEQ ID NO: 3394045 - RNA, 13 nt, Human
augcagcgugaag

SEQ ID NO: 3394046 - RNA, 14 nt, Human
augcagcuaucugg

SEQ ID NO: 3394047 - RNA, 15 nt, Human
augcagcugcacccu

SEQ ID NO: 3394048 - RNA, 15 nt, Human
augcagcuguggcag

SEQ ID NO: 3394049 - RNA, 15 nt, Human
augcagcuuauacga

SEQ ID NO: 3394050 - RNA, 15 nt, Human
augcagcuuugcaaa

SEQ ID NO: 3394051 - RNA, 16 nt, Human
augcaggcuccccuga

SEQ ID NO: 3394052 - RNA, 17 nt, Human
augcaggcuccccugag

SEQ ID NO: 3394053 - RNA, 20 nt, Human
augcaggggcaaacaccugc

SEQ ID NO: 3394054 - RNA, 22 nt, Human
augcaggggcaaacaccugcug

SEQ ID NO: 3394055 - RNA, 17 nt, Human
augcagggggcuccugg

SEQ ID NO: 3394056 - RNA, 21 nt, Human
augcaggucgcuacuggcaua

SEQ ID NO: 3394057 - RNA, 15 nt, Human
augcaguaugguaca

SEQ ID NO: 3394058 - RNA, 22 nt, Human
augcaguaugguacauuuuuca

SEQ ID NO: 3394059 - RNA, 16 nt, Human
augcagucuccucuuu

SEQ ID NO: 3394060 - RNA, 23 nt, Human
augcagucuccucuuuaaaacaa

SEQ ID NO: 3394061 - RNA, 20 nt, Human
augcagucuguccaggcucg

SEQ ID NO: 3394062 - RNA, 13 nt, Human
augcagucuuaga

SEQ ID NO: 3394063 - RNA, 22 nt, Human
augcagugauauggcagaagac

SEQ ID NO: 3394064 - RNA, 18 nt, Human
augcagugccccuagcuu

SEQ ID NO: 3394065 - RNA, 20 nt, Human
augcagugcucgcuguugcu

SEQ ID NO: 3394066 - RNA, 16 nt, Human
augcagugcugcuuug

SEQ ID NO: 3394067 - RNA, 19 nt, Human
augcaguguagauuuuaua

SEQ ID NO: 3394068 - RNA, 20 nt, Human
augcaguuacaaauuauaau

SEQ ID NO: 3394069 - RNA, 22 nt, Human
augcaguuacaaauuauaaugu

SEQ ID NO: 3394070 - RNA, 22 nt, Human
augcaguuagcugaagaauuga

SEQ ID NO: 3394071 - RNA, 15 nt, Human
augcaguucugaaga

SEQ ID NO: 3394072 - RNA, 19 nt, Human
augcaguucugaagaagau

SEQ ID NO: 3394073 - RNA, 15 nt, Human
augcaguucugagca

SEQ ID NO: 3394074 - RNA, 11 nt, Human
augcaguuuga

SEQ ID NO: 3394075 - RNA, 15 nt, Human
augcaguuugaaauu

SEQ ID NO: 3394076 - RNA, 16 nt, Human
augcaguuugaaauuc

SEQ ID NO: 3394077 - RNA, 19 nt, Human
augcaguuugaaauucuga

SEQ ID NO: 3394078 - RNA, 21 nt, Human
augcaguuugaaauucugaau

SEQ ID NO: 3394079 - RNA, 17 nt, Human
augcaguuuuucagagu

SEQ ID NO: 3394080 - RNA, 22 nt, Human
augcaguuuuucagaguggaau

SEQ ID NO: 3394081 - RNA, 14 nt, Human
augcauacaaguuu

SEQ ID NO: 3394082 - RNA, 23 nt, Human
augcauacauacacauauauaca

SEQ ID NO: 3394083 - RNA, 21 nt, Human
augcauacuucaaaaguauuu

SEQ ID NO: 3394084 - RNA, 15 nt, Human
augcauauaaugaau

SEQ ID NO: 3394085 - RNA, 18 nt, Human
augcauauaaugaauaaa

SEQ ID NO: 3394086 - RNA, 11 nt, Human
augcauauacu

SEQ ID NO: 3394087 - RNA, 15 nt, Human
augcauauauauaug

SEQ ID NO: 3394088 - RNA, 18 nt, Human
augcauaugucacuagaa

SEQ ID NO: 3394089 - RNA, 16 nt, Human
augcauauuguauuac

SEQ ID NO: 3394090 - RNA, 12 nt, Human
augcauauuugc

SEQ ID NO: 3394091 - RNA, 16 nt, Human
augcauauuuguuuau

SEQ ID NO: 3394092 - RNA, 23 nt, Human
augcauauuuuuuuucuuuuuac

SEQ ID NO: 3394093 - RNA, 15 nt, Human
augcaucagaaaggg

SEQ ID NO: 3394094 - RNA, 23 nt, Human
augcaucauuucaggaguuacug

SEQ ID NO: 3394095 - RNA, 17 nt, Human
augcauccauuccucag

SEQ ID NO: 3394096 - RNA, 22 nt, Human
augcaucucacuggaugcaaag

SEQ ID NO: 3394097 - RNA, 19 nt, Human
augcaucuccaccugcucc

SEQ ID NO: 3394098 - RNA, 20 nt, Human
augcaucuguuuauucuaua

SEQ ID NO: 3394099 - RNA, 12 nt, Human
augcaucuuuga

SEQ ID NO: 3394100 - RNA, 15 nt, Human
augcaucuuugaugu

SEQ ID NO: 3394101 - RNA, 16 nt, Human
augcaucuuugaugug

SEQ ID NO: 3394102 - RNA, 16 nt, Human
augcaugacagccucu

SEQ ID NO: 3394103 - RNA, 17 nt, Human
augcaugcuucuucuca

SEQ ID NO: 3394104 - RNA, 20 nt, Human
augcaugcuuuccauauuuu

SEQ ID NO: 3394105 - RNA, 20 nt, Human
augcauggaaaccugaaaaa

SEQ ID NO: 3394106 - RNA, 12 nt, Human
augcauggaaau

SEQ ID NO: 3394107 - RNA, 23 nt, Human
augcauggagggcugcccuguac

SEQ ID NO: 3394108 - RNA, 21 nt, Human
augcauggcagcaggccuguu

SEQ ID NO: 3394109 - RNA, 19 nt, Human
augcauggugcaguugaca

SEQ ID NO: 3394110 - RNA, 19 nt, Human
augcauggugccccaggac

SEQ ID NO: 3394111 - RNA, 13 nt, Human
augcaugguuuca

SEQ ID NO: 3394112 - RNA, 22 nt, Human
augcaugucaaacaugagaugu

SEQ ID NO: 3394113 - RNA, 16 nt, Human
augcauguccuguaaa

SEQ ID NO: 3394114 - RNA, 17 nt, Human
augcauguccuguaaag

SEQ ID NO: 3394115 - RNA, 18 nt, Human
augcaugucuuuuaaaau

SEQ ID NO: 3394116 - RNA, 14 nt, Human
augcaugugaagaa

SEQ ID NO: 3394117 - RNA, 16 nt, Human
augcaugugaagaaag

SEQ ID NO: 3394118 - RNA, 17 nt, Human
augcauuaaaagaaaau

SEQ ID NO: 3394119 - RNA, 20 nt, Human
augcauuaaaagaaaauaaa

SEQ ID NO: 3394120 - RNA, 15 nt, Human
augcauuaaaccugu

SEQ ID NO: 3394121 - RNA, 19 nt, Human
augcauucuucucuguugu

SEQ ID NO: 3394122 - RNA, 16 nt, Human
augcauuguaguuuaa

SEQ ID NO: 3394123 - RNA, 17 nt, Human
augcauuugaggucaag

SEQ ID NO: 3394124 - RNA, 19 nt, Human
augcauuuggguccaggag

SEQ ID NO: 3394125 - RNA, 22 nt, Human
augcauuuuaaaguuaaacauu

SEQ ID NO: 3394126 - RNA, 23 nt, Human
augcauuuuauuuuagacacaaa

SEQ ID NO: 3394127 - RNA, 19 nt, Human
augcauuuuguuugguauu

SEQ ID NO: 3394128 - RNA, 22 nt, Human
augcauuuuguuugguauugua

SEQ ID NO: 3394129 - RNA, 18 nt, Human
augccaaaaaaaaauaca

SEQ ID NO: 3394130 - RNA, 21 nt, Human
augccaaagaaugaauuucaa

SEQ ID NO: 3394131 - RNA, 18 nt, Human
augccaaagaucacuugu

SEQ ID NO: 3394132 - RNA, 18 nt, Human
augccaaagcuagggugg

SEQ ID NO: 3394133 - RNA, 22 nt, Human
augccaaagcuaggguggcccu

SEQ ID NO: 3394134 - RNA, 15 nt, Human
augccaacaagaaug

SEQ ID NO: 3394135 - RNA, 16 nt, Human
augccaagcacugugc

SEQ ID NO: 3394136 - RNA, 17 nt, Human
augccaagcacugugcu

SEQ ID NO: 3394137 - RNA, 18 nt, Human
augccaagcacugugcuc

SEQ ID NO: 3394138 - RNA, 23 nt, Human
augccaauacuagucaccccaag

SEQ ID NO: 3394139 - RNA, 17 nt, Human
augccacagcccuguca

SEQ ID NO: 3394140 - RNA, 23 nt, Human
augcuuccuagaaguuacugaau

SEQ ID NO: 3394141 - RNA, 15 nt, Human
augcuuccugacaau

SEQ ID NO: 3394142 - RNA, 20 nt, Human
augcuuccugacaaucaacu

SEQ ID NO: 3394143 - RNA, 22 nt, Human
augcuuccugacaaucaacucu

SEQ ID NO: 3394144 - RNA, 21 nt, Human
augcuuccuugccugaugaca

SEQ ID NO: 3394145 - RNA, 19 nt, Human
augcuucuaaguaaauaca

SEQ ID NO: 3394146 - RNA, 21 nt, Human
augcuucuaaguaaauacaau

SEQ ID NO: 3394147 - RNA, 16 nt, Human
augcuucucacugcca

SEQ ID NO: 3394148 - RNA, 16 nt, Human
augcuucucaucuugu

SEQ ID NO: 3394149 - RNA, 20 nt, Human
augcuucucaucuugugaaa

SEQ ID NO: 3394150 - RNA, 14 nt, Human
augcuucugggaga

SEQ ID NO: 3394151 - RNA, 14 nt, Human
augcuucuucucaa

SEQ ID NO: 3394152 - RNA, 12 nt, Human
augcuugaaaaa

SEQ ID NO: 3394153 - RNA, 18 nt, Human
augcuugaugguuuaugu

SEQ ID NO: 3394154 - RNA, 16 nt, Human
augcuugcaaaaacua

SEQ ID NO: 3394155 - RNA, 19 nt, Human
augcuugcaaaaacuacaa

SEQ ID NO: 3394156 - RNA, 20 nt, Human
augcuugcggcaaaaggaaa

SEQ ID NO: 3394157 - RNA, 23 nt, Human
augcuugcggcaaaaggaaagcu

SEQ ID NO: 3394158 - RNA, 22 nt, Human
augcuugcugcugauuuaaaca

SEQ ID NO: 3394159 - RNA, 23 nt, Human
augcuugcugcugauuuaaacac

SEQ ID NO: 3394160 - RNA, 17 nt, Human
augcuuguaacaagaaa

SEQ ID NO: 3394161 - RNA, 21 nt, Human
augcuuguaacaagaaaacau

SEQ ID NO: 3394162 - RNA, 15 nt, Human
augcuuguacauaau

SEQ ID NO: 3394163 - RNA, 13 nt, Human
augcuuguguuau

SEQ ID NO: 3394164 - RNA, 15 nt, Human
augcuuguguuucuu

SEQ ID NO: 3394165 - RNA, 20 nt, Human
augcuuuaccaaacagcaaa

SEQ ID NO: 3394166 - RNA, 18 nt, Human
augcuuuauuaauguuuu

SEQ ID NO: 3394167 - RNA, 22 nt, Human
augcuuuauuaauguuuucaaa

SEQ ID NO: 3394168 - RNA, 17 nt, Human
augcuuuauuuguaaau

SEQ ID NO: 3394169 - RNA, 22 nt, Human
augcuuuccauauuuuuuuccu

SEQ ID NO: 3394170 - RNA, 22 nt, Human
augcuuucugaacucgcuucuc

SEQ ID NO: 3394171 - RNA, 22 nt, Human
augcuuugaaaaaucacuugau

SEQ ID NO: 3394172 - RNA, 16 nt, Human
augcuuugaaacagaa

SEQ ID NO: 3394173 - RNA, 21 nt, Human
augcuuugaaauugaaccuuu

SEQ ID NO: 3394174 - RNA, 15 nt, Human
augcuuugcuuuguc

SEQ ID NO: 3394175 - RNA, 21 nt, Human
augcuuuuacugaacuuucuu

SEQ ID NO: 3394176 - RNA, 22 nt, Human
augcuuuuauauuuuuuuaaaa

SEQ ID NO: 3394177 - RNA, 14 nt, Human
augcuuuucucaaa

SEQ ID NO: 3394178 - RNA, 20 nt, Human
augcuuuucugucucugccu

SEQ ID NO: 3394179 - RNA, 16 nt, Human
augcuuuuuauuucug

SEQ ID NO: 3394180 - RNA, 23 nt, Human
augcuuuuuauuucugcauaugu

SEQ ID NO: 3394181 - RNA, 19 nt, Human
auggaaaaaaaaaaaagag

SEQ ID NO: 3394182 - RNA, 21 nt, Human
auggaaaaacuugugcuauaa

SEQ ID NO: 3394183 - RNA, 14 nt, Human
auggaaaaaugcca

SEQ ID NO: 3394184 - RNA, 19 nt, Human
auggaaaacgcucucuacu

SEQ ID NO: 3394185 - RNA, 19 nt, Human
auggaaaacuguguugcca

SEQ ID NO: 3394186 - RNA, 22 nt, Human
auggaaaagucuucaagggcug

SEQ ID NO: 3394187 - RNA, 18 nt, Human
auggaaacagaggaccag

SEQ ID NO: 3394188 - RNA, 21 nt, Human
auggaaacccgaggguugauu

SEQ ID NO: 3394189 - RNA, 17 nt, Human
auggaaaccucacgcug

SEQ ID NO: 3394190 - RNA, 22 nt, Human
auggaaacuguugccagagaug

SEQ ID NO: 3394191 - RNA, 23 nt, Human
auggaaagcagaguuuucauuaa

SEQ ID NO: 3394192 - RNA, 19 nt, Human
auggaaaucagccaaguuu

SEQ ID NO: 3394193 - RNA, 18 nt, Human
auggaaaugcaaacuggg

SEQ ID NO: 3394194 - RNA, 18 nt, Human
auggaaauucugcucaga

SEQ ID NO: 3394195 - RNA, 15 nt, Human
auggaacacagaacu

SEQ ID NO: 3394196 - RNA, 16 nt, Human
auggaacacucugaga

SEQ ID NO: 3394197 - RNA, 16 nt, Human
auggaaccaggcuugg

SEQ ID NO: 3394198 - RNA, 21 nt, Human
auggaaccugacguagcugca

SEQ ID NO: 3394199 - RNA, 23 nt, Human
auggaacucagcugucuguggcu

SEQ ID NO: 3394200 - RNA, 19 nt, Human
auggaacucauuccugccu

SEQ ID NO: 3394201 - RNA, 16 nt, Human
auggaacuuagccauu

SEQ ID NO: 3394202 - RNA, 17 nt, Human
auggaagacagcucuua

SEQ ID NO: 3394203 - RNA, 15 nt, Human
auggaagacaggaaa

SEQ ID NO: 3394204 - RNA, 16 nt, Human
auggaagacaggaaag

SEQ ID NO: 3394205 - RNA, 17 nt, Human
auggaagagaaaucuca

SEQ ID NO: 3394206 - RNA, 15 nt, Human
auggaagagagaaag

SEQ ID NO: 3394207 - RNA, 17 nt, Human
auggaagauuuuaaauu

SEQ ID NO: 3394208 - RNA, 20 nt, Human
auggaagcgguggucagaag

SEQ ID NO: 3394209 - RNA, 17 nt, Human
auggaagguuuguauau

SEQ ID NO: 3394210 - RNA, 15 nt, Human
auggaaguuuuccua

SEQ ID NO: 3394211 - RNA, 13 nt, Human
auggaauaaaagg

SEQ ID NO: 3394212 - RNA, 16 nt, Human
auggaauacucuuaua

SEQ ID NO: 3394213 - RNA, 17 nt, Human
auggaaugcuguguuaa

SEQ ID NO: 3394214 - RNA, 19 nt, Human
auggaaugguuauaaaagu

SEQ ID NO: 3394215 - RNA, 14 nt, Human
auggaauugauuug

SEQ ID NO: 3394216 - RNA, 23 nt, Human
auggaauuggagcucgugggaca

SEQ ID NO: 3394217 - RNA, 21 nt, Human
auggaauuuauaauucaguau

SEQ ID NO: 3394218 - RNA, 12 nt, Human
auggaauuugua

SEQ ID NO: 3394219 - RNA, 15 nt, Human
auggaauuuuuuugu

SEQ ID NO: 3394220 - RNA, 20 nt, Human
auggacaagagguacagggu

SEQ ID NO: 3394221 - RNA, 22 nt, Human
auggacacuuugaaauguguuu

SEQ ID NO: 3394222 - RNA, 14 nt, Human
auggacacuuuuca

SEQ ID NO: 3394223 - RNA, 18 nt, Human
auggacagggcaugccac

SEQ ID NO: 3394224 - RNA, 21 nt, Human
auggacaguucacacccugca

SEQ ID NO: 3394225 - RNA, 22 nt, Human
auggacaguucacacccugcaa

SEQ ID NO: 3394226 - RNA, 13 nt, Human
auggacauccugu

SEQ ID NO: 3394227 - RNA, 22 nt, Human
auggacauccuguauaagcacu

SEQ ID NO: 3394228 - RNA, 23 nt, Human
auggacauccuguauaagcacug

SEQ ID NO: 3394229 - RNA, 14 nt, Human
auggacaugaucuu

SEQ ID NO: 3394230 - RNA, 13 nt, Human
auggacauggugg

SEQ ID NO: 3394231 - RNA, 17 nt, Human
auggacauuuagaagaa

SEQ ID NO: 3394232 - RNA, 18 nt, Human
auggaccacuguuucuug

SEQ ID NO: 3394233 - RNA, 21 nt, Human
auggaccacuguuucuugcuu

SEQ ID NO: 3394234 - RNA, 23 nt, Human
auggaccaugcugucuggcacag

SEQ ID NO: 3394235 - RNA, 21 nt, Human
auggacccaauauuuaccaga

SEQ ID NO: 3394236 - RNA, 13 nt, Human
auggaccggagag

SEQ ID NO: 3394237 - RNA, 13 nt, Human
auggaccuaacau

SEQ ID NO: 3394238 - RNA, 15 nt, Human
auggaccuucuagaa

SEQ ID NO: 3394239 - RNA, 15 nt, Human
auggacggugcucca

SEQ ID NO: 3394240 - RNA, 21 nt, Human
auggacggugcuccaggcagg

SEQ ID NO: 3394241 - RNA, 20 nt, Human
auggacguguuaugacucca

SEQ ID NO: 3394242 - RNA, 13 nt, Human
auggacuaucugu

SEQ ID NO: 3394243 - RNA, 21 nt, Human
auggacuaucugucugguggc

SEQ ID NO: 3394244 - RNA, 15 nt, Human
auggacucugcacau

SEQ ID NO: 3394245 - RNA, 15 nt, Human
auggacugguuugag

SEQ ID NO: 3394246 - RNA, 17 nt, Human
auggacuguggugacuu

SEQ ID NO: 3394247 - RNA, 23 nt, Human
auggacuuguauauuuguacaaa

SEQ ID NO: 3394248 - RNA, 11 nt, Human
auggacuuugu

SEQ ID NO: 3394249 - RNA, 12 nt, Human
auggacuuuguu

SEQ ID NO: 3394250 - RNA, 14 nt, Human
auggagaaacccug

SEQ ID NO: 3394251 - RNA, 14 nt, Human
auggagaaagcuga

SEQ ID NO: 3394252 - RNA, 23 nt, Human
auggagaaagcugacuuggcugg

SEQ ID NO: 3394253 - RNA, 15 nt, Human
auggagaaccaccua

SEQ ID NO: 3394254 - RNA, 22 nt, Human
auggagaagaaaggccaucaga

SEQ ID NO: 3394255 - RNA, 15 nt, Human
auggagaagcugcag

SEQ ID NO: 3394256 - RNA, 16 nt, Human
auggagaagcugcagg

SEQ ID NO: 3394257 - RNA, 13 nt, Human
auggagaaggaag

SEQ ID NO: 3394258 - RNA, 15 nt, Human
auggagaaggaaggc

SEQ ID NO: 3394259 - RNA, 18 nt, Human
auggagacgcauuucggu

SEQ ID NO: 3394260 - RNA, 14 nt, Human
auggagacuccugc

SEQ ID NO: 3394261 - RNA, 18 nt, Human
auggagccagcucccucu

SEQ ID NO: 3394262 - RNA, 15 nt, Human
auggagccccagccc

SEQ ID NO: 3394263 - RNA, 15 nt, Human
auggagccucuucug

SEQ ID NO: 3394264 - RNA, 20 nt, Human
auggagccuggcacaggacu

SEQ ID NO: 3394265 - RNA, 22 nt, Human
auggagcucagagagggcaggc

SEQ ID NO: 3394266 - RNA, 20 nt, Human
auggaggaagaacugaaagg

SEQ ID NO: 3394267 - RNA, 18 nt, Human
auggaggacuccaggcag

SEQ ID NO: 3394268 - RNA, 17 nt, Human
auggaggagaagaauuu

SEQ ID NO: 3394269 - RNA, 16 nt, Human
auggaggaggaggcaa

SEQ ID NO: 3394270 - RNA, 12 nt, Human
auggaggcacac

SEQ ID NO: 3394271 - RNA, 17 nt, Human
auggaggcagaauccug

SEQ ID NO: 3394272 - RNA, 12 nt, Human
auggaggccugu

SEQ ID NO: 3394273 - RNA, 17 nt, Human
auggaggggaguguugg

SEQ ID NO: 3394274 - RNA, 15 nt, Human
auggaggggcagagc

SEQ ID NO: 3394275 - RNA, 20 nt, Human
auggaggggugguccugacu

SEQ ID NO: 3394276 - RNA, 12 nt, Human
auggagguucua

SEQ ID NO: 3394277 - RNA, 17 nt, Human
auggagguucuaaggcc

SEQ ID NO: 3394278 - RNA, 24 nt, Human
auggagguuucauacucuagauuu

SEQ ID NO: 3394279 - RNA, 21 nt, Human
auggagucauuugagucucuu

SEQ ID NO: 3394280 - RNA, 18 nt, Human
auggagugcaccaaagag

SEQ ID NO: 3394281 - RNA, 19 nt, Human
auggagugcuguuuuguua

SEQ ID NO: 3394282 - RNA, 21 nt, Human
auggagugcuguuuuguuaua

SEQ ID NO: 3394283 - RNA, 13 nt, Human
auggugccucugg

SEQ ID NO: 3394284 - RNA, 14 nt, Human
auggugccugagag

SEQ ID NO: 3394285 - RNA, 18 nt, Human
auggugccugagaggcag

SEQ ID NO: 3394286 - RNA, 16 nt, Human
auggugccuucauuug

SEQ ID NO: 3394287 - RNA, 16 nt, Human
auggugcucauuucau

SEQ ID NO: 3394288 - RNA, 17 nt, Human
auggugcuuaaguucca

SEQ ID NO: 3394289 - RNA, 23 nt, Human
auggugcuuguuaaugcuuucug

SEQ ID NO: 3394290 - RNA, 16 nt, Human
augguggacccagcgg

SEQ ID NO: 3394291 - RNA, 13 nt, Human
augguggagggcc

SEQ ID NO: 3394292 - RNA, 14 nt, Human
augguggagggcca

SEQ ID NO: 3394293 - RNA, 22 nt, Human
augguggaugauccccacgcca

SEQ ID NO: 3394294 - RNA, 16 nt, Human
augguggcgcgcaccu

SEQ ID NO: 3394295 - RNA, 13 nt, Human
augguggcugggu

SEQ ID NO: 3394296 - RNA, 15 nt, Human
augguggcuucagcu

SEQ ID NO: 3394297 - RNA, 22 nt, Human
augguggcuucagcuccagccc

SEQ ID NO: 3394298 - RNA, 23 nt, Human
augguggcuucuuuucuuuguau

SEQ ID NO: 3394299 - RNA, 14 nt, Human
auggugggcuucag

SEQ ID NO: 3394300 - RNA, 16 nt, Human
auggugggcuucaggg

SEQ ID NO: 3394301 - RNA, 23 nt, Human
auggugggcuucagggcaggugg

SEQ ID NO: 3394302 - RNA, 16 nt, Human
augguggggucuccuc

SEQ ID NO: 3394303 - RNA, 12 nt, Human
augguguaauaa

SEQ ID NO: 3394304 - RNA, 14 nt, Human
augguguaauaaga

SEQ ID NO: 3394305 - RNA, 16 nt, Human
augguguaauaagaca

SEQ ID NO: 3394306 - RNA, 18 nt, Human
augguguaauaagacaua

SEQ ID NO: 3394307 - RNA, 19 nt, Human
augguguucaaaaaacuug

SEQ ID NO: 3394308 - RNA, 21 nt, Human
augguguuuucauguaaauaa

SEQ ID NO: 3394309 - RNA, 18 nt, Human
augguguuuuucuuguaa

SEQ ID NO: 3394310 - RNA, 19 nt, Human
augguguuuuucuuguaaa

SEQ ID NO: 3394311 - RNA, 13 nt, Human
augguuaaacauu

SEQ ID NO: 3394312 - RNA, 18 nt, Human
augguuaagaguccaaga

SEQ ID NO: 3394313 - RNA, 15 nt, Human
augguuacacuguua

SEQ ID NO: 3394314 - RNA, 17 nt, Human
augguuacacuguuaga

SEQ ID NO: 3394315 - RNA, 14 nt, Human
augguuauaaaagu

SEQ ID NO: 3394316 - RNA, 16 nt, Human
augguuaugaaagaau

SEQ ID NO: 3394317 - RNA, 18 nt, Human
augguuaugaaagaauau

SEQ ID NO: 3394318 - RNA, 20 nt, Human
augguucagaauuaaacuuu

SEQ ID NO: 3394319 - RNA, 16 nt, Human
augguuccaugccuga

SEQ ID NO: 3394320 - RNA, 19 nt, Human
augguuccccuguucacuc

SEQ ID NO: 3394321 - RNA, 20 nt, Human
augguucucucaacaagaaa

SEQ ID NO: 3394322 - RNA, 18 nt, Human
augguucuggcuguuuga

SEQ ID NO: 3394323 - RNA, 13 nt, Human
augguuguacaua

SEQ ID NO: 3394324 - RNA, 13 nt, Human
augguuguauuag

SEQ ID NO: 3394325 - RNA, 19 nt, Human
augguuuauuuuguauugu

SEQ ID NO: 3394326 - RNA, 14 nt, Human
augguuucagcacu

SEQ ID NO: 3394327 - RNA, 15 nt, Human
augguuucagcacua

SEQ ID NO: 3394328 - RNA, 22 nt, Human
augguuugaauauaaacacuau

SEQ ID NO: 3394329 - RNA, 23 nt, Human
augguuugacucaucuuauaugg

SEQ ID NO: 3394330 - RNA, 17 nt, Human
augguuugcaaggaagc

SEQ ID NO: 3394331 - RNA, 15 nt, Human
augguuuuaaacuuu

SEQ ID NO: 3394332 - RNA, 13 nt, Human
augguuuuaagaa

SEQ ID NO: 3394333 - RNA, 14 nt, Human
augguuuucuccaa

SEQ ID NO: 3394334 - RNA, 20 nt, Human
augguuuucuccaagagcua

SEQ ID NO: 3394335 - RNA, 15 nt, Human
augguuuugugccau

SEQ ID NO: 3394336 - RNA, 18 nt, Human
augguuuuuaaauuuugu

SEQ ID NO: 3394337 - RNA, 14 nt, Human
auguaaaaauaacc

SEQ ID NO: 3394338 - RNA, 13 nt, Human
auguaaaacaaaa

SEQ ID NO: 3394339 - RNA, 15 nt, Human
auguaaaacaaaaaa

SEQ ID NO: 3394340 - RNA, 14 nt, Human
auguaaaacauuua

SEQ ID NO: 3394341 - RNA, 15 nt, Human
auguaaaacauuuau

SEQ ID NO: 3394342 - RNA, 20 nt, Human
auguaaaacauuuauuuuga

SEQ ID NO: 3394343 - RNA, 22 nt, Human
auguaaaagaacuuacugauua

SEQ ID NO: 3394344 - RNA, 23 nt, Human
auguaaaaggccaaaccucuguu

SEQ ID NO: 3394345 - RNA, 21 nt, Human
auguaaaagguauuaaauuga

SEQ ID NO: 3394346 - RNA, 15 nt, Human
auguaaaaucuuguc

SEQ ID NO: 3394347 - RNA, 12 nt, Human
auguaaaaugau

SEQ ID NO: 3394348 - RNA, 19 nt, Human
auguaaacaaaauuuaguu

SEQ ID NO: 3394349 - RNA, 15 nt, Human
auguaaacaaaucuu

SEQ ID NO: 3394350 - RNA, 22 nt, Human
auguaaacaaaucuuuccauau

SEQ ID NO: 3394351 - RNA, 14 nt, Human
auguaaacaggaga

SEQ ID NO: 3394352 - RNA, 20 nt, Human
auguaaacauaccaacaugu

SEQ ID NO: 3394353 - RNA, 15 nt, Human
auguaaacugccaua

SEQ ID NO: 3394354 - RNA, 14 nt, Human
auguaaacugugca

SEQ ID NO: 3394355 - RNA, 17 nt, Human
auguaaagaucaauaaa

SEQ ID NO: 3394356 - RNA, 13 nt, Human
auguaaagccaug

SEQ ID NO: 3394357 - RNA, 16 nt, Human
auguaaagugauauuu

SEQ ID NO: 3394358 - RNA, 16 nt, Human
auguaaagugucagaa

SEQ ID NO: 3394359 - RNA, 14 nt, Human
auguaaauaauucu

SEQ ID NO: 3394360 - RNA, 13 nt, Human
auguaaauacugu

SEQ ID NO: 3394361 - RNA, 20 nt, Human
auguaaaucccauuauucaa

SEQ ID NO: 3394362 - RNA, 22 nt, Human
auguaaaucccauuauucaaag

SEQ ID NO: 3394363 - RNA, 13 nt, Human
auguaaaugaagu

SEQ ID NO: 3394364 - RNA, 21 nt, Human
auguaaaugcaucuguccuca

SEQ ID NO: 3394365 - RNA, 15 nt, Human
auguaaauguaaacu

SEQ ID NO: 3394366 - RNA, 21 nt, Human
auguaaaugucucacugagca

SEQ ID NO: 3394367 - RNA, 14 nt, Human
auguaaaugugcau

SEQ ID NO: 3394368 - RNA, 17 nt, Human
auguaaauugacuguac

SEQ ID NO: 3394369 - RNA, 21 nt, Human
auguaacagccaggaguguua

SEQ ID NO: 3394370 - RNA, 16 nt, Human
auguaacagucugauc

SEQ ID NO: 3394371 - RNA, 23 nt, Human
auguaacugcauugagaacugca

SEQ ID NO: 3394372 - RNA, 19 nt, Human
auguaacugccuagaaaca

SEQ ID NO: 3394373 - RNA, 15 nt, Human
auguaacugcucuug

SEQ ID NO: 3394374 - RNA, 20 nt, Human
auguaacugcucuugggcaa

SEQ ID NO: 3394375 - RNA, 21 nt, Human
auguaacuguuaccauuggaa

SEQ ID NO: 3394376 - RNA, 22 nt, Human
auguaacuguuaccauuggaaa

SEQ ID NO: 3394377 - RNA, 12 nt, Human
auguaacuugaa

SEQ ID NO: 3394378 - RNA, 16 nt, Human
auguaacuuuuguaag

SEQ ID NO: 3394379 - RNA, 18 nt, Human
auguaacuuuuguaagac

SEQ ID NO: 3394380 - RNA, 15 nt, Human
auguaagaaucauug

SEQ ID NO: 3394381 - RNA, 21 nt, Human
auguaagagcuuuacaaaaag

SEQ ID NO: 3394382 - RNA, 22 nt, Human
auguaagagcuuuacaaaaaga

SEQ ID NO: 3394383 - RNA, 15 nt, Human
auguaagauuauaga

SEQ ID NO: 3394384 - RNA, 17 nt, Human
auguaagcucuacugag

SEQ ID NO: 3394385 - RNA, 22 nt, Human
auguaagcuguuuauuuuauau

SEQ ID NO: 3394386 - RNA, 23 nt, Human
auguaaggcuguguaagauuugu

SEQ ID NO: 3394387 - RNA, 20 nt, Human
auguaagggaaacugccagc

SEQ ID NO: 3394388 - RNA, 22 nt, Human
auguaagggaaacugccagcaa

SEQ ID NO: 3394389 - RNA, 22 nt, Human
auguaagguauaucauucuaaa

SEQ ID NO: 3394390 - RNA, 16 nt, Human
auguaaguaaacgguc

SEQ ID NO: 3394391 - RNA, 14 nt, Human
auguaagugggccc

SEQ ID NO: 3394392 - RNA, 14 nt, Human
auguaauaaacuuu

SEQ ID NO: 3394393 - RNA, 15 nt, Human
auguaauaaacuuua

SEQ ID NO: 3394394 - RNA, 22 nt, Human
auguaauaagguugaacacuuu

SEQ ID NO: 3394395 - RNA, 16 nt, Human
auguaauaaugugaau

SEQ ID NO: 3394396 - RNA, 21 nt, Human
auguaauacuucuugugugua

SEQ ID NO: 3394397 - RNA, 19 nt, Human
auguaaucucucugcagcu

SEQ ID NO: 3394398 - RNA, 22 nt, Human
auguaaucucucugcagcugcc

SEQ ID NO: 3394399 - RNA, 22 nt, Human
auguaaugcgauuuuauuacug

SEQ ID NO: 3394400 - RNA, 17 nt, Human
auguaauggcaguuaua

SEQ ID NO: 3394401 - RNA, 23 nt, Human
auguaaugugugguggccucagc

SEQ ID NO: 3394402 - RNA, 18 nt, Human
auguaauguuaauguuau

SEQ ID NO: 3394403 - RNA, 15 nt, Human
auguaauugaauaaa

SEQ ID NO: 3394404 - RNA, 17 nt, Human
auguaauuguaauuuug

SEQ ID NO: 3394405 - RNA, 19 nt, Human
auguaauuguaauuuugaa

SEQ ID NO: 3394406 - RNA, 13 nt, Human
auguaauuuaaau

SEQ ID NO: 3394407 - RNA, 15 nt, Human
auguaauuuaaauga

SEQ ID NO: 3394408 - RNA, 18 nt, Human
auguaauuuguguaauaa

SEQ ID NO: 3394409 - RNA, 21 nt, Human
auguaauuuguguaauaaagu

SEQ ID NO: 3394410 - RNA, 23 nt, Human
auguaauuuuauuuuaaaauuuc

SEQ ID NO: 3394411 - RNA, 16 nt, Human
auguaauuuuguguaa

SEQ ID NO: 3394412 - RNA, 23 nt, Human
auguaauuuuguguaagaaauac

SEQ ID NO: 3394413 - RNA, 19 nt, Human
auguacaauauuuuaagca

SEQ ID NO: 3394414 - RNA, 23 nt, Human
auguacagacauauuuaacuggu

SEQ ID NO: 3394415 - RNA, 16 nt, Human
auguacagauucuuuc

SEQ ID NO: 3394416 - RNA, 18 nt, Human
auguacagauucuuucag

SEQ ID NO: 3394417 - RNA, 17 nt, Human
auguacaggaugcuuug

SEQ ID NO: 3394418 - RNA, 17 nt, Human
auguacaguguucuguu

SEQ ID NO: 3394419 - RNA, 15 nt, Human
auguacauagugcua

SEQ ID NO: 3394420 - RNA, 17 nt, Human
auguacauagugcuaac

SEQ ID NO: 3394421 - RNA, 14 nt, Human
auguacauuuggaa

SEQ ID NO: 3394422 - RNA, 15 nt, Human
auguaccauguacau

SEQ ID NO: 3394423 - RNA, 16 nt, Human
auguaccguaggcuuu

SEQ ID NO: 3394424 - RNA, 16 nt, Human
auguaccuccccugcc

SEQ ID NO: 3394425 - RNA, 19 nt, Human
auguaccuccccugccuug

SEQ ID NO: 3394426 - RNA, 22 nt, Human
auguaccuccccugccuugcug

SEQ ID NO: 3394427 - RNA, 13 nt, Human
auucaucugucua

SEQ ID NO: 3394428 - RNA, 18 nt, Human
auucaucugucuauauuu

SEQ ID NO: 3394429 - RNA, 16 nt, Human
auucaucuucuucuuu

SEQ ID NO: 3394430 - RNA, 20 nt, Human
auucauggaccacuguuucu

SEQ ID NO: 3394431 - RNA, 17 nt, Human
auucauggccuggggga

SEQ ID NO: 3394432 - RNA, 17 nt, Human
auucauguuauauuuaa

SEQ ID NO: 3394433 - RNA, 15 nt, Human
auucauguuucuuaa

SEQ ID NO: 3394434 - RNA, 16 nt, Human
auucauuagucauguu

SEQ ID NO: 3394435 - RNA, 14 nt, Human
auucauuaguuuug

SEQ ID NO: 3394436 - RNA, 15 nt, Human
auucauuaguuuuga

SEQ ID NO: 3394437 - RNA, 19 nt, Human
auucauuauuuuuccacuu

SEQ ID NO: 3394438 - RNA, 12 nt, Human
auucauuccauu

SEQ ID NO: 3394439 - RNA, 19 nt, Human
auucauuccauucuggaag

SEQ ID NO: 3394440 - RNA, 22 nt, Human
auucauucuggucucucuauua

SEQ ID NO: 3394441 - RNA, 18 nt, Human
auucauucugugaucauu

SEQ ID NO: 3394442 - RNA, 22 nt, Human
auucauucugugaucauuuauu

SEQ ID NO: 3394443 - RNA, 14 nt, Human
auucauucuuagcu

SEQ ID NO: 3394444 - RNA, 19 nt, Human
auucauucuuagcucuuaa

SEQ ID NO: 3394445 - RNA, 16 nt, Human
auucauucuuuuugaa

SEQ ID NO: 3394446 - RNA, 21 nt, Human
auucauucuuuuugaaauguc

SEQ ID NO: 3394447 - RNA, 19 nt, Human
auucauuguauaaaaauag

SEQ ID NO: 3394448 - RNA, 13 nt, Human
auucauugucucu

SEQ ID NO: 3394449 - RNA, 16 nt, Human
auucauuuaaaaugau

SEQ ID NO: 3394450 - RNA, 17 nt, Human
auucauuuaaaaugauu

SEQ ID NO: 3394451 - RNA, 11 nt, Human
auucauuucaa

SEQ ID NO: 3394452 - RNA, 12 nt, Human
auucauuucaca

SEQ ID NO: 3394453 - RNA, 20 nt, Human
auucauuucacauuaauggu

SEQ ID NO: 3394454 - RNA, 22 nt, Human
auucauuucacauuaauggucu

SEQ ID NO: 3394455 - RNA, 12 nt, Human
auucauuuccug

SEQ ID NO: 3394456 - RNA, 15 nt, Human
auucauuuccugccc

SEQ ID NO: 3394457 - RNA, 21 nt, Human
auucauuuuaacaucugagaa

SEQ ID NO: 3394458 - RNA, 16 nt, Human
auucauuuucuagaua

SEQ ID NO: 3394459 - RNA, 17 nt, Human
auuccaaaaagcacaua

SEQ ID NO: 3394460 - RNA, 14 nt, Human
auuccaaacauggu

SEQ ID NO: 3394461 - RNA, 15 nt, Human
auuccaaagcuuuau

SEQ ID NO: 3394462 - RNA, 23 nt, Human
auuccaaagcuuuauuaccagug

SEQ ID NO: 3394463 - RNA, 20 nt, Human
auuccaaaugucuuuuagaa

SEQ ID NO: 3394464 - RNA, 23 nt, Human
auuccaacaaaggguuuuaaugu

SEQ ID NO: 3394465 - RNA, 14 nt, Human
auuccaacagcuca

SEQ ID NO: 3394466 - RNA, 20 nt, Human
auuccaacagcucaagucuu

SEQ ID NO: 3394467 - RNA, 14 nt, Human
auuccaacagugag

SEQ ID NO: 3394468 - RNA, 20 nt, Human
auuccaacaguuuaaugaag

SEQ ID NO: 3394469 - RNA, 22 nt, Human
auuccaagaauagcaucuguac

SEQ ID NO: 3394470 - RNA, 23 nt, Human
auuccaagcuuccauagcugcug

SEQ ID NO: 3394471 - RNA, 12 nt, Human
auuccaauaaac

SEQ ID NO: 3394472 - RNA, 18 nt, Human
auuccaauaugaugacuc

SEQ ID NO: 3394473 - RNA, 13 nt, Human
auuccaaucuaca

SEQ ID NO: 3394474 - RNA, 17 nt, Human
auuccaccuuaaauuaa

SEQ ID NO: 3394475 - RNA, 18 nt, Human
auuccaccuuaaauuaaa

SEQ ID NO: 3394476 - RNA, 19 nt, Human
auuccaccuuaaauuaaac

SEQ ID NO: 3394477 - RNA, 20 nt, Human
auuccaccuuaaauuaaaca

SEQ ID NO: 3394478 - RNA, 16 nt, Human
auuccacuacaccugg

SEQ ID NO: 3394479 - RNA, 22 nt, Human
auuccacuacaccuggcugagg

SEQ ID NO: 3394480 - RNA, 20 nt, Human
auuccacuuauaggaauuga

SEQ ID NO: 3394481 - RNA, 12 nt, Human
auuccagaauau

SEQ ID NO: 3394482 - RNA, 15 nt, Human
auuccagaaugcugu

SEQ ID NO: 3394483 - RNA, 20 nt, Human
auuccagaaugcuguacauc

SEQ ID NO: 3394484 - RNA, 16 nt, Human
auuccagacagucaca

SEQ ID NO: 3394485 - RNA, 23 nt, Human
auuccagacagucacaaauuucu

SEQ ID NO: 3394486 - RNA, 23 nt, Human
auuccagacugcuuccaauuuuc

SEQ ID NO: 3394487 - RNA, 17 nt, Human
auuccagagcacugcuc

SEQ ID NO: 3394488 - RNA, 17 nt, Human
auuccagagcugccagu

SEQ ID NO: 3394489 - RNA, 20 nt, Human
auuccagaucugcagucacu

SEQ ID NO: 3394490 - RNA, 16 nt, Human
auuccagaucuuucag

SEQ ID NO: 3394491 - RNA, 20 nt, Human
auuccagaucuuucagaaau

SEQ ID NO: 3394492 - RNA, 13 nt, Human
auuccagccccuc

SEQ ID NO: 3394493 - RNA, 12 nt, Human
auuccaggcucc

SEQ ID NO: 3394494 - RNA, 18 nt, Human
auuccagguggcaucagu

SEQ ID NO: 3394495 - RNA, 15 nt, Human
auuccaguuuguuua

SEQ ID NO: 3394496 - RNA, 14 nt, Human
auuccauaguauau

SEQ ID NO: 3394497 - RNA, 22 nt, Human
auuccauaguauauuaaaaaug

SEQ ID NO: 3394498 - RNA, 22 nt, Human
auuccauauuagaaaacuuugu

SEQ ID NO: 3394499 - RNA, 15 nt, Human
auuccauccauaaau

SEQ ID NO: 3394500 - RNA, 18 nt, Human
auuccauccauauacuuu

SEQ ID NO: 3394501 - RNA, 11 nt, Human
auuccauccuu

SEQ ID NO: 3394502 - RNA, 12 nt, Human
auuccaugaauc

SEQ ID NO: 3394503 - RNA, 13 nt, Human
auuccaugaaugu

SEQ ID NO: 3394504 - RNA, 23 nt, Human
auuccaugaauguaucaggaaau

SEQ ID NO: 3394505 - RNA, 17 nt, Human
auuccaugacugcuugc

SEQ ID NO: 3394506 - RNA, 23 nt, Human
auuccauguuuggaagacccuug

SEQ ID NO: 3394507 - RNA, 16 nt, Human
auuccauucuggauuu

SEQ ID NO: 3394508 - RNA, 20 nt, Human
auuccauugccuagcucuuu

SEQ ID NO: 3394509 - RNA, 16 nt, Human
auuccauugguccaag

SEQ ID NO: 3394510 - RNA, 17 nt, Human
auuccauugguccaaga

SEQ ID NO: 3394511 - RNA, 15 nt, Human
auuccauugugugag

SEQ ID NO: 3394512 - RNA, 16 nt, Human
auuccauugugugagu

SEQ ID NO: 3394513 - RNA, 21 nt, Human
auuccauuugaggauuuagaa

SEQ ID NO: 3394514 - RNA, 14 nt, Human
auucccaagcucug

SEQ ID NO: 3394515 - RNA, 14 nt, Human
auucccaccaaggu

SEQ ID NO: 3394516 - RNA, 19 nt, Human
auucccagagacaggaaaa

SEQ ID NO: 3394517 - RNA, 12 nt, Human
auucccagcucu

SEQ ID NO: 3394518 - RNA, 14 nt, Human
auucccagcugucu

SEQ ID NO: 3394519 - RNA, 16 nt, Human
auucccagcugucugu

SEQ ID NO: 3394520 - RNA, 17 nt, Human
auucccagcugucugug

SEQ ID NO: 3394521 - RNA, 19 nt, Human
auucccagguaggccaagg

SEQ ID NO: 3394522 - RNA, 22 nt, Human
auucccauugaaaauguaagua

SEQ ID NO: 3394523 - RNA, 20 nt, Human
auucccauuuugcaaaauuu

SEQ ID NO: 3394524 - RNA, 20 nt, Human
auuccccagccucucuuccu

SEQ ID NO: 3394525 - RNA, 21 nt, Human
auuccccagccucucuuccua

SEQ ID NO: 3394526 - RNA, 16 nt, Human
auuccccaggaggcca

SEQ ID NO: 3394527 - RNA, 16 nt, Human
auuccccaucucaggc

SEQ ID NO: 3394528 - RNA, 15 nt, Human
auuccccauucuucc

SEQ ID NO: 3394529 - RNA, 13 nt, Human
auucccccagugc

SEQ ID NO: 3394530 - RNA, 15 nt, Human
auuccccucugcugc

SEQ ID NO: 3394531 - RNA, 22 nt, Human
auuccccucugcugcugucccu

SEQ ID NO: 3394532 - RNA, 14 nt, Human
auuccccuguguca

SEQ ID NO: 3394533 - RNA, 20 nt, Human
auucccgggugcagaauugu

SEQ ID NO: 3394534 - RNA, 17 nt, Human
auucccuagaaacuucc

SEQ ID NO: 3394535 - RNA, 20 nt, Human
auucccuagaaacuuccaaa

SEQ ID NO: 3394536 - RNA, 21 nt, Human
auucccuagaaacuuccaaau

SEQ ID NO: 3394537 - RNA, 12 nt, Human
auucccucccca

SEQ ID NO: 3394538 - RNA, 15 nt, Human
auucccucucccagg

SEQ ID NO: 3394539 - RNA, 16 nt, Human
auucccucucccaggc

SEQ ID NO: 3394540 - RNA, 16 nt, Human
auucccucucucugac

SEQ ID NO: 3394541 - RNA, 22 nt, Human
auucccucucucugacucucaa

SEQ ID NO: 3394542 - RNA, 13 nt, Human
auucccugccugg

SEQ ID NO: 3394543 - RNA, 13 nt, Human
auucccuggccuu

SEQ ID NO: 3394544 - RNA, 16 nt, Human
auucccugggaucugg

SEQ ID NO: 3394545 - RNA, 20 nt, Human
auucccuucgacagcauuuu

SEQ ID NO: 3394546 - RNA, 19 nt, Human
auucccuuguuauucaaca

SEQ ID NO: 3394547 - RNA, 18 nt, Human
auuccguugucuguggau

SEQ ID NO: 3394548 - RNA, 19 nt, Human
auuccguugucuguggaug

SEQ ID NO: 3394549 - RNA, 19 nt, Human
auuccguuuacauuuuaga

SEQ ID NO: 3394550 - RNA, 15 nt, Human
auuccuaaacuaucu

SEQ ID NO: 3394551 - RNA, 15 nt, Human
auuccuaagccacuu

SEQ ID NO: 3394552 - RNA, 15 nt, Human
auuccuacagcacua

SEQ ID NO: 3394553 - RNA, 17 nt, Human
auuccuacagcacuacu

SEQ ID NO: 3394554 - RNA, 23 nt, Human
auuccuacagcacuacugggugu

SEQ ID NO: 3394555 - RNA, 17 nt, Human
auuccuaccucccugca

SEQ ID NO: 3394556 - RNA, 15 nt, Human
auuccuagauaaaaa

SEQ ID NO: 3394557 - RNA, 17 nt, Human
auuccuauauaguuuau

SEQ ID NO: 3394558 - RNA, 21 nt, Human
auuccuauugugauuugacug

SEQ ID NO: 3394559 - RNA, 23 nt, Human
auuccuauugugauuugacuguu

SEQ ID NO: 3394560 - RNA, 21 nt, Human
auuccucaacaguguuuucag

SEQ ID NO: 3394561 - RNA, 14 nt, Human
auuccucagggaca

SEQ ID NO: 3394562 - RNA, 14 nt, Human
auuccuccugcuca

SEQ ID NO: 3394563 - RNA, 12 nt, Human
auuccuccuggg

SEQ ID NO: 3394564 - RNA, 22 nt, Human
auuccuccugggccccucaucu

SEQ ID NO: 3394565 - RNA, 12 nt, Human
auuccucuggga

SEQ ID NO: 3394566 - RNA, 13 nt, Human
auuccucuguauu

SEQ ID NO: 3394567 - RNA, 13 nt, Human
auuccucuuugcu

SEQ ID NO: 3394568 - RNA, 14 nt, Human
auuccucuuugcuu

SEQ ID NO: 3394569 - RNA, 15 nt, Human
auuccucuuugcuuu

SEQ ID NO: 3394570 - RNA, 13 nt, Human
auuccugaaagaa

SEQ ID NO: 3394571 - RNA, 21 nt, Human
auuccugacccaggccgcagc

SEQ ID NO: 3394572 - RNA, 18 nt, Human
auuccugaccuccgccau

SEQ ID NO: 3394573 - RNA, 21 nt, Human
auuccugaugcuucuucagag

SEQ ID NO: 3394574 - RNA, 18 nt, Human
auuccugcccugcuguuu

SEQ ID NO: 3394575 - RNA, 19 nt, Human
auuccugcccugcuguuua

SEQ ID NO: 3394576 - RNA, 17 nt, Human
auuccugccugucuccu

SEQ ID NO: 3394577 - RNA, 18 nt, Human
auuccuggaaaccacagu

SEQ ID NO: 3394578 - RNA, 15 nt, Human
auuccugggcacagu

SEQ ID NO: 3394579 - RNA, 15 nt, Human
auuccugguacccag

SEQ ID NO: 3394580 - RNA, 23 nt, Human
auuccuguagcaucuucuggagu

SEQ ID NO: 3394581 - RNA, 16 nt, Human
auuccuguauguuguc

SEQ ID NO: 3394582 - RNA, 17 nt, Human
auuccuguauguugucc

SEQ ID NO: 3394583 - RNA, 21 nt, Human
auuccuuagcuuagaccucag

SEQ ID NO: 3394584 - RNA, 22 nt, Human
auuccuuagcuuagaccucagc

SEQ ID NO: 3394585 - RNA, 15 nt, Human
auuccuucagauuug

SEQ ID NO: 3394586 - RNA, 15 nt, Human
auuccuucagcacuu

SEQ ID NO: 3394587 - RNA, 17 nt, Human
auuccuucagcacuuua

SEQ ID NO: 3394588 - RNA, 22 nt, Human
auuccuuccacuaacucauagu

SEQ ID NO: 3394589 - RNA, 16 nt, Human
auuccuucccagaggg

SEQ ID NO: 3394590 - RNA, 21 nt, Human
auuccuucucccaucucuucc

SEQ ID NO: 3394591 - RNA, 14 nt, Human
auuccuucucugaa

SEQ ID NO: 3394592 - RNA, 16 nt, Human
auuccuucucugaaca

SEQ ID NO: 3394593 - RNA, 16 nt, Human
auuccuucuggccuuu

SEQ ID NO: 3394594 - RNA, 18 nt, Human
auuccuucuuuuuaaaau

SEQ ID NO: 3394595 - RNA, 20 nt, Human
auuccuugauaauguugugg

SEQ ID NO: 3394596 - RNA, 20 nt, Human
auuccuugaucauuuuggga

SEQ ID NO: 3394597 - RNA, 20 nt, Human
auuccuuggcaugccuucca

SEQ ID NO: 3394598 - RNA, 13 nt, Human
auuccuuucccuu

SEQ ID NO: 3394599 - RNA, 16 nt, Human
auuccuuucccuuccu

SEQ ID NO: 3394600 - RNA, 18 nt, Human
auuccuuuccugaucacu

SEQ ID NO: 3394601 - RNA, 15 nt, Human
auuccuuucucaucc

SEQ ID NO: 3394602 - RNA, 16 nt, Human
auuccuuugaagagga

SEQ ID NO: 3394603 - RNA, 15 nt, Human
auucgaaccaggaaa

SEQ ID NO: 3394604 - RNA, 16 nt, Human
auucgaaugacacugu

SEQ ID NO: 3394605 - RNA, 18 nt, Human
auucgaccugauuuacag

SEQ ID NO: 3394606 - RNA, 20 nt, Human
auucgaccugauuuacaguu

SEQ ID NO: 3394607 - RNA, 16 nt, Human
auucgagacagaaccu

SEQ ID NO: 3394608 - RNA, 19 nt, Human
auucgaucucauucaguau

SEQ ID NO: 3394609 - RNA, 20 nt, Human
auucgcccaaagccagacag

SEQ ID NO: 3394610 - RNA, 21 nt, Human
auucgcccaaagccagacagc

SEQ ID NO: 3394611 - RNA, 19 nt, Human
auucgcccgagcuguuuau

SEQ ID NO: 3394612 - RNA, 21 nt, Human
auucgguauccccccaucuug

SEQ ID NO: 3394613 - RNA, 18 nt, Human
auucguacauaauacuga

SEQ ID NO: 3394614 - RNA, 22 nt, Human
auucguacauaauacugaacca

SEQ ID NO: 3394615 - RNA, 21 nt, Human
auucgugauuuucaagcagca

SEQ ID NO: 3394616 - RNA, 14 nt, Human
auucuaaaaccauu

SEQ ID NO: 3394617 - RNA, 20 nt, Human
auucuaaaaugauuguagua

SEQ ID NO: 3394618 - RNA, 15 nt, Human
auucuaaaaugccuu

SEQ ID NO: 3394619 - RNA, 23 nt, Human
auucuaaaaugugauguucuaag

SEQ ID NO: 3394620 - RNA, 12 nt, Human
auucuaaagaua

SEQ ID NO: 3394621 - RNA, 14 nt, Human
auucuaaagauucu

SEQ ID NO: 3394622 - RNA, 17 nt, Human
auucuaaagauucuaua

SEQ ID NO: 3394623 - RNA, 22 nt, Human
auucuaaagauucuauaguucu

SEQ ID NO: 3394624 - RNA, 14 nt, Human
auucuaaauacaug

SEQ ID NO: 3394625 - RNA, 17 nt, Human
auucuaaaugaauguuu

SEQ ID NO: 3394626 - RNA, 12 nt, Human
auucuaaccaga

SEQ ID NO: 3394627 - RNA, 17 nt, Human
auucuaaccagagcaag

SEQ ID NO: 3394628 - RNA, 20 nt, Human
auucuaaccagagcaagcuu

SEQ ID NO: 3394629 - RNA, 23 nt, Human
auucuaaccagagcaagcuuuuu

SEQ ID NO: 3394630 - RNA, 24 nt, Human
auucuaagaaauaucugugaaaua

SEQ ID NO: 3394631 - RNA, 12 nt, Human
auucuaagacuu

SEQ ID NO: 3394632 - RNA, 23 nt, Human
auucuaaugauggcccauucuac

SEQ ID NO: 3394633 - RNA, 15 nt, Human
auucuacuugcucug

SEQ ID NO: 3394634 - RNA, 18 nt, Human
auucuacuugcucuggac

SEQ ID NO: 3394635 - RNA, 13 nt, Human
auucuacuuugag

SEQ ID NO: 3394636 - RNA, 22 nt, Human
auucuagaucagaugcuccaag

SEQ ID NO: 3394637 - RNA, 15 nt, Human
auucuagcuaaugua

SEQ ID NO: 3394638 - RNA, 17 nt, Human
auucuaggaccuguguc

SEQ ID NO: 3394639 - RNA, 19 nt, Human
auucuaggccuccuggccc

SEQ ID NO: 3394640 - RNA, 12 nt, Human
auucuagugcug

SEQ ID NO: 3394641 - RNA, 15 nt, Human
auucuauaaaacucu

SEQ ID NO: 3394642 - RNA, 13 nt, Human
auucuauaguucu

SEQ ID NO: 3394643 - RNA, 14 nt, Human
auucuauaguucua

SEQ ID NO: 3394644 - RNA, 16 nt, Human
auucuauaugaauuua

SEQ ID NO: 3394645 - RNA, 23 nt, Human
auucuauaugaauuuaaauauaa

SEQ ID NO: 3394646 - RNA, 21 nt, Human
auucuaucuuuuguuuccuuu

SEQ ID NO: 3394647 - RNA, 15 nt, Human
auucuauuaaagugc

SEQ ID NO: 3394648 - RNA, 20 nt, Human
auucuauuacauuuucagug

SEQ ID NO: 3394649 - RNA, 20 nt, Human
auucuauugccuucuuugaa

SEQ ID NO: 3394650 - RNA, 20 nt, Human
auucuauuuauauguacaug

SEQ ID NO: 3394651 - RNA, 18 nt, Human
auucuauuugcugggcuu

SEQ ID NO: 3394652 - RNA, 18 nt, Human
auucuauuuuagaauaaa

SEQ ID NO: 3394653 - RNA, 18 nt, Human
auucuauuuucauuuucu

SEQ ID NO: 3394654 - RNA, 21 nt, Human
auucuauuuucauuuucugca

SEQ ID NO: 3394655 - RNA, 12 nt, Human
auucucacaaua

SEQ ID NO: 3394656 - RNA, 13 nt, Human
auucucacaauag

SEQ ID NO: 3394657 - RNA, 17 nt, Human
auucucacuccaccacc

SEQ ID NO: 3394658 - RNA, 16 nt, Human
auucucagaaaggcaa

SEQ ID NO: 3394659 - RNA, 18 nt, Human
auucucagaaucucaaau

SEQ ID NO: 3394660 - RNA, 23 nt, Human
auucucagauauuuauauuuuua

SEQ ID NO: 3394661 - RNA, 21 nt, Human
auucucagggucucugcugcc

SEQ ID NO: 3394662 - RNA, 24 nt, Human
auucucagugccaacuguggcugg

SEQ ID NO: 3394663 - RNA, 15 nt, Human
auucucaucugcacc

SEQ ID NO: 3394664 - RNA, 15 nt, Human
auucucaugccucag

SEQ ID NO: 3394665 - RNA, 12 nt, Human
auucucauuaaa

SEQ ID NO: 3394666 - RNA, 18 nt, Human
auucucauuaaaagaaua

SEQ ID NO: 3394667 - RNA, 19 nt, Human
auucucauuaaaagaauau

SEQ ID NO: 3394668 - RNA, 12 nt, Human
auucucauucuu

SEQ ID NO: 3394669 - RNA, 18 nt, Human
auucucauuugucacaca

SEQ ID NO: 3394670 - RNA, 16 nt, Human
auucuccaccugccag

SEQ ID NO: 3394671 - RNA, 18 nt, Human
auucuccaccugccaggg

SEQ ID NO: 3394672 - RNA, 21 nt, Human
auucuccaccugccagggaca

SEQ ID NO: 3394673 - RNA, 16 nt, Human
auucuccauuuguuau

SEQ ID NO: 3394674 - RNA, 22 nt, Human
auucucccagguaccagcugcg

SEQ ID NO: 3394675 - RNA, 18 nt, Human
auucuccugccucagccu

SEQ ID NO: 3394676 - RNA, 19 nt, Human
auucuccugccucagccuc

SEQ ID NO: 3394677 - RNA, 22 nt, Human
auucuccugccuguagcaguga

SEQ ID NO: 3394678 - RNA, 15 nt, Human
auucuccuggaugcu

SEQ ID NO: 3394679 - RNA, 15 nt, Human
auucuccuucagccc

SEQ ID NO: 3394680 - RNA, 16 nt, Human
auucuccuucagcccu

SEQ ID NO: 3394681 - RNA, 21 nt, Human
auucuccuuguguuacuaagu

SEQ ID NO: 3394682 - RNA, 16 nt, Human
auucuccuuuuaugug

SEQ ID NO: 3394683 - RNA, 18 nt, Human
auucuccuuuuaugugua

SEQ ID NO: 3394684 - RNA, 18 nt, Human
auucucuaguuugauuaa

SEQ ID NO: 3394685 - RNA, 19 nt, Human
auucucuaguuugauuaaa

SEQ ID NO: 3394686 - RNA, 23 nt, Human
auucucuaguuugauuaaauucu

SEQ ID NO: 3394687 - RNA, 15 nt, Human
auucucuccaaaaau

SEQ ID NO: 3394688 - RNA, 19 nt, Human
auucucuccucagacugcu

SEQ ID NO: 3394689 - RNA, 21 nt, Human
auucucuccuguaccucuuga

SEQ ID NO: 3394690 - RNA, 16 nt, Human
auucucucuccugucc

SEQ ID NO: 3394691 - RNA, 11 nt, Human
auucucugagc

SEQ ID NO: 3394692 - RNA, 13 nt, Human
auucucugagcug

SEQ ID NO: 3394693 - RNA, 11 nt, Human
auucucuguac

SEQ ID NO: 3394694 - RNA, 18 nt, Human
auucucugucucauccau

SEQ ID NO: 3394695 - RNA, 22 nt, Human
auucucugugucuaagauucua

SEQ ID NO: 3394696 - RNA, 12 nt, Human
auucucuuaucc

SEQ ID NO: 3394697 - RNA, 20 nt, Human
auucucuuggcuggcuuccu

SEQ ID NO: 3394698 - RNA, 12 nt, Human
auucucuuuuaa

SEQ ID NO: 3394699 - RNA, 16 nt, Human
auucugaacaauucuc

SEQ ID NO: 3394700 - RNA, 19 nt, Human
auucugaacuaaagugcug

SEQ ID NO: 3394701 - RNA, 22 nt, Human
auucugaacuaaagugcugcac

SEQ ID NO: 3394702 - RNA, 15 nt, Human
auucugaagcaacau

SEQ ID NO: 3394703 - RNA, 19 nt, Human
auucugaaugcuucuaagu

SEQ ID NO: 3394704 - RNA, 13 nt, Human
auucugaauguac

SEQ ID NO: 3394705 - RNA, 16 nt, Human
auucugaauuugcaaa

SEQ ID NO: 3394706 - RNA, 22 nt, Human
auucugaauuugcaaaguacug

SEQ ID NO: 3394707 - RNA, 14 nt, Human
auucugaccuuaaa

SEQ ID NO: 3394708 - RNA, 18 nt, Human
auucugaccuuaaaugca

SEQ ID NO: 3394709 - RNA, 19 nt, Human
auucugagcauacucaaca

SEQ ID NO: 3394710 - RNA, 15 nt, Human
auucugaggcccugc

SEQ ID NO: 3394711 - RNA, 23 nt, Human
auucugaguuuuguguuuguugu

SEQ ID NO: 3394712 - RNA, 20 nt, Human
auucugauucgaaugacacu

SEQ ID NO: 3394713 - RNA, 22 nt, Human
auucugauucuggcuuuaagcc

SEQ ID NO: 3394714 - RNA, 22 nt, Human
auucugcagcaugaccugugac

SEQ ID NO: 3394715 - RNA, 17 nt, Human
auucugcaguaaaucuu

SEQ ID NO: 3394716 - RNA, 17 nt, Human
auugcacguggccucuu

SEQ ID NO: 3394717 - RNA, 16 nt, Human
auugcacuccagccug

SEQ ID NO: 3394718 - RNA, 13 nt, Human
auugcacucuaaa

SEQ ID NO: 3394719 - RNA, 23 nt, Human
auugcacucuaaaagguucaggg

SEQ ID NO: 3394720 - RNA, 13 nt, Human
auugcacuuuuaa

SEQ ID NO: 3394721 - RNA, 17 nt, Human
auugcaggauggugucu

SEQ ID NO: 3394722 - RNA, 17 nt, Human
auugcagguggaacuca

SEQ ID NO: 3394723 - RNA, 14 nt, Human
auugcaguuuauca

SEQ ID NO: 3394724 - RNA, 19 nt, Human
auugcauacuauuaaacau

SEQ ID NO: 3394725 - RNA, 16 nt, Human
auugcauauaacuuau

SEQ ID NO: 3394726 - RNA, 16 nt, Human
auugcaucaaagcauc

SEQ ID NO: 3394727 - RNA, 19 nt, Human
auugcaucacuguaucauu

SEQ ID NO: 3394728 - RNA, 19 nt, Human
auugcaucucaaaauuauu

SEQ ID NO: 3394729 - RNA, 22 nt, Human
auugcaucucccagauaaugug

SEQ ID NO: 3394730 - RNA, 23 nt, Human
auugcaucucccagauaauguga

SEQ ID NO: 3394731 - RNA, 15 nt, Human
auugcaugcugcuuu

SEQ ID NO: 3394732 - RNA, 14 nt, Human
auugcauucuauug

SEQ ID NO: 3394733 - RNA, 18 nt, Human
auugcauucuauugccuu

SEQ ID NO: 3394734 - RNA, 11 nt, Human
auugcauugac

SEQ ID NO: 3394735 - RNA, 17 nt, Human
auugcauuuccugacag

SEQ ID NO: 3394736 - RNA, 16 nt, Human
auugccaaaaaggaua

SEQ ID NO: 3394737 - RNA, 17 nt, Human
auugccaaaacccagcu

SEQ ID NO: 3394738 - RNA, 13 nt, Human
auugccaaacauu

SEQ ID NO: 3394739 - RNA, 22 nt, Human
auugccaaacauuaauguugau

SEQ ID NO: 3394740 - RNA, 15 nt, Human
auugccaccaggaga

SEQ ID NO: 3394741 - RNA, 21 nt, Human
auugccaccaggagaaccacu

SEQ ID NO: 3394742 - RNA, 21 nt, Human
auugccagcugacaucuugaa

SEQ ID NO: 3394743 - RNA, 18 nt, Human
auugccauauugcacaug

SEQ ID NO: 3394744 - RNA, 22 nt, Human
auugccauauugcacaugucuu

SEQ ID NO: 3394745 - RNA, 12 nt, Human
auugccaugugg

SEQ ID NO: 3394746 - RNA, 23 nt, Human
auugccauuucuuccacaagagc

SEQ ID NO: 3394747 - RNA, 14 nt, Human
auugcccaggcugg

SEQ ID NO: 3394748 - RNA, 20 nt, Human
auugcccaggcuggucuuga

SEQ ID NO: 3394749 - RNA, 22 nt, Human
auugcccccagggcacuucaca

SEQ ID NO: 3394750 - RNA, 20 nt, Human
auugccuaagaauaaacauu

SEQ ID NO: 3394751 - RNA, 13 nt, Human
auugccuauuuca

SEQ ID NO: 3394752 - RNA, 19 nt, Human
auugccucggcuggcuccc

SEQ ID NO: 3394753 - RNA, 13 nt, Human
auugccucugaga

SEQ ID NO: 3394754 - RNA, 22 nt, Human
auugccugcggucaaggccagc

SEQ ID NO: 3394755 - RNA, 15 nt, Human
auugccuguuucuga

SEQ ID NO: 3394756 - RNA, 15 nt, Human
auugccuucucacca

SEQ ID NO: 3394757 - RNA, 18 nt, Human
auugccuucucaccagcu

SEQ ID NO: 3394758 - RNA, 20 nt, Human
auugccuucuuugaagaagg

SEQ ID NO: 3394759 - RNA, 17 nt, Human
auugccuuugaauguua

SEQ ID NO: 3394760 - RNA, 22 nt, Human
auugccuuugaauguuaauuuu

SEQ ID NO: 3394761 - RNA, 23 nt, Human
auugccuuuuccuguaucuauuu

SEQ ID NO: 3394762 - RNA, 14 nt, Human
auugcgaaucuuuu

SEQ ID NO: 3394763 - RNA, 19 nt, Human
auugcgagagauguguguu

SEQ ID NO: 3394764 - RNA, 21 nt, Human
auugcgucuuagcagugauuu

SEQ ID NO: 3394765 - RNA, 13 nt, Human
auugcguuggucu

SEQ ID NO: 3394766 - RNA, 17 nt, Human
auugcguuggucucugc

SEQ ID NO: 3394767 - RNA, 20 nt, Human
auugcguuugaccuuuuaug

SEQ ID NO: 3394768 - RNA, 21 nt, Human
auugcguuugaccuuuuaugu

SEQ ID NO: 3394769 - RNA, 18 nt, Human
auugcuaaauguaacagu

SEQ ID NO: 3394770 - RNA, 15 nt, Human
auugcuaagaugcuc

SEQ ID NO: 3394771 - RNA, 18 nt, Human
auugcuaauguugcugga

SEQ ID NO: 3394772 - RNA, 23 nt, Human
auugcuaauugcuguugaaagca

SEQ ID NO: 3394773 - RNA, 21 nt, Human
auugcuacuacuuaccuacca

SEQ ID NO: 3394774 - RNA, 15 nt, Human
auugcuacuuccugc

SEQ ID NO: 3394775 - RNA, 19 nt, Human
auugcuacuuccugccugg

SEQ ID NO: 3394776 - RNA, 14 nt, Human
auugcuagagcucc

SEQ ID NO: 3394777 - RNA, 16 nt, Human
auugcuagagcuccuc

SEQ ID NO: 3394778 - RNA, 14 nt, Human
auugcuagauaaaa

SEQ ID NO: 3394779 - RNA, 17 nt, Human
auugcuaucuauugaua

SEQ ID NO: 3394780 - RNA, 22 nt, Human
auugcuaucuggaggccuucca

SEQ ID NO: 3394781 - RNA, 15 nt, Human
auugcuauguuacua

SEQ ID NO: 3394782 - RNA, 20 nt, Human
auugcuauguuacuauuuuc

SEQ ID NO: 3394783 - RNA, 13 nt, Human
auugcucacaguu

SEQ ID NO: 3394784 - RNA, 22 nt, Human
auugcucaucucaguccucaaa

SEQ ID NO: 3394785 - RNA, 18 nt, Human
auugcucccuaagacugu

SEQ ID NO: 3394786 - RNA, 19 nt, Human
auugcucugaauaugucau

SEQ ID NO: 3394787 - RNA, 18 nt, Human
auugcugaaaaugguauu

SEQ ID NO: 3394788 - RNA, 13 nt, Human
auugcugaaauuu

SEQ ID NO: 3394789 - RNA, 12 nt, Human
auugcugacugu

SEQ ID NO: 3394790 - RNA, 22 nt, Human
auugcugagccucugcucccca

SEQ ID NO: 3394791 - RNA, 23 nt, Human
auugcugagccucugcuccccag

SEQ ID NO: 3394792 - RNA, 16 nt, Human
auugcugauggugcaa

SEQ ID NO: 3394793 - RNA, 19 nt, Human
auugcugauggugcaauga

SEQ ID NO: 3394794 - RNA, 15 nt, Human
auugcugauuuuaau

SEQ ID NO: 3394795 - RNA, 21 nt, Human
auugcugcuccuuagcugcca

SEQ ID NO: 3394796 - RNA, 22 nt, Human
auugcugcuccuuagcugccaa

SEQ ID NO: 3394797 - RNA, 19 nt, Human
auugcuggcaaagacagaa

SEQ ID NO: 3394798 - RNA, 16 nt, Human
auugcuggucuuguaa

SEQ ID NO: 3394799 - RNA, 12 nt, Human
auugcuguguau

SEQ ID NO: 3394800 - RNA, 20 nt, Human
auugcuguguccaacuccag

SEQ ID NO: 3394801 - RNA, 18 nt, Human
auugcugugugucccagg

SEQ ID NO: 3394802 - RNA, 19 nt, Human
auugcuguugaaagcaaaa

SEQ ID NO: 3394803 - RNA, 12 nt, Human
auugcuguugcu

SEQ ID NO: 3394804 - RNA, 15 nt, Human
auugcuguuguccaa

SEQ ID NO: 3394805 - RNA, 21 nt, Human
auugcuguuguccaacuauuu

SEQ ID NO: 3394806 - RNA, 21 nt, Human
auugcuuacaagccuaagaau

SEQ ID NO: 3394807 - RNA, 14 nt, Human
auugcuuacauuuu

SEQ ID NO: 3394808 - RNA, 22 nt, Human
auugcuuacauuuuuacaauaa

SEQ ID NO: 3394809 - RNA, 13 nt, Human
auugcuuaguaaa

SEQ ID NO: 3394810 - RNA, 15 nt, Human
auugcuuaguaaaau

SEQ ID NO: 3394811 - RNA, 22 nt, Human
auugcuuaguaaaauuuauuuc

SEQ ID NO: 3394812 - RNA, 10 nt, Human
auugcuucuu

SEQ ID NO: 3394813 - RNA, 23 nt, Human
auugcuugaaagaaaauaugcau

SEQ ID NO: 3394814 - RNA, 15 nt, Human
auugcuugauacuuu

SEQ ID NO: 3394815 - RNA, 16 nt, Human
auugcuuguuggauuu

SEQ ID NO: 3394816 - RNA, 16 nt, Human
auugcuuuacugucaa

SEQ ID NO: 3394817 - RNA, 11 nt, Human
auugcuuucug

SEQ ID NO: 3394818 - RNA, 15 nt, Human
auugcuuucugaaau

SEQ ID NO: 3394819 - RNA, 17 nt, Human
auugcuuucugaaauua

SEQ ID NO: 3394820 - RNA, 15 nt, Human
auugcuuugaaacua

SEQ ID NO: 3394821 - RNA, 12 nt, Human
auugcuuuuaaa

SEQ ID NO: 3394822 - RNA, 16 nt, Human
auugcuuuuaaaauuu

SEQ ID NO: 3394823 - RNA, 21 nt, Human
auugcuuuuaaaauuuuaagc

SEQ ID NO: 3394824 - RNA, 15 nt, Human
auugcuuuugugcau

SEQ ID NO: 3394825 - RNA, 16 nt, Human
auugcuuuuuuaaaua

SEQ ID NO: 3394826 - RNA, 23 nt, Human
auugcuuuuuuccaaaacaaaaa

SEQ ID NO: 3394827 - RNA, 13 nt, Human
auuggaaaaauca

SEQ ID NO: 3394828 - RNA, 14 nt, Human
auuggaaaaaucac

SEQ ID NO: 3394829 - RNA, 15 nt, Human
auuggaaaagacuaa

SEQ ID NO: 3394830 - RNA, 14 nt, Human
auuggaaacaaguc

SEQ ID NO: 3394831 - RNA, 18 nt, Human
auuggaagaaauuccugu

SEQ ID NO: 3394832 - RNA, 19 nt, Human
auuggaagaaauuccugua

SEQ ID NO: 3394833 - RNA, 16 nt, Human
auuggaagaccccacc

SEQ ID NO: 3394834 - RNA, 24 nt, Human
auuggaagagcagcaccuccucag

SEQ ID NO: 3394835 - RNA, 20 nt, Human
auuggaagcagguuaaaugu

SEQ ID NO: 3394836 - RNA, 22 nt, Human
auuggaagcagguuaaauguuu

SEQ ID NO: 3394837 - RNA, 16 nt, Human
auuggaaggagacaca

SEQ ID NO: 3394838 - RNA, 18 nt, Human
auuggaaggagacacaga

SEQ ID NO: 3394839 - RNA, 21 nt, Human
auuggaaggagacacagaugu

SEQ ID NO: 3394840 - RNA, 18 nt, Human
auuggaaucugauauacu

SEQ ID NO: 3394841 - RNA, 18 nt, Human
auuggaauguucucagau

SEQ ID NO: 3394842 - RNA, 13 nt, Human
auuggacaguugu

SEQ ID NO: 3394843 - RNA, 21 nt, Human
auuggacaguugucuagagau

SEQ ID NO: 3394844 - RNA, 15 nt, Human
auuggaccaggccau

SEQ ID NO: 3394845 - RNA, 18 nt, Human
auuggagaguaaaaacug

SEQ ID NO: 3394846 - RNA, 16 nt, Human
auuggagaugcaaaua

SEQ ID NO: 3394847 - RNA, 20 nt, Human
auuggagaugccauccucuu

SEQ ID NO: 3394848 - RNA, 17 nt, Human
auuggagccaccaugcc

SEQ ID NO: 3394849 - RNA, 22 nt, Human
auuggagggugggagagcccag

SEQ ID NO: 3394850 - RNA, 15 nt, Human
auuggauaacaccac

SEQ ID NO: 3394851 - RNA, 13 nt, Human
auuggauacagca

SEQ ID NO: 3394852 - RNA, 11 nt, Human
auuggauauuu

SEQ ID NO: 3394853 - RNA, 16 nt, Human
auuggaucaaguauua

SEQ ID NO: 3394854 - RNA, 18 nt, Human
auuggauuauucauuuaa

SEQ ID NO: 3394855 - RNA, 14 nt, Human
auuggauuauuuaa

SEQ ID NO: 3394856 - RNA, 20 nt, Human
auuggauuauuuaauaacau

SEQ ID NO: 3394857 - RNA, 19 nt, Human
auuggauucugagagcugu

SEQ ID NO: 3394858 - RNA, 22 nt, Human
auuggauucugagagcugugca

SEQ ID NO: 3394859 - RNA, 15 nt, Human
auuggauuuccuaau

SEQ ID NO: 3394860 - RNA, 22 nt, Human
auuggauuuccuaauacuguca

SEQ ID NO: 3394861 - RNA, 12 nt, Human
auuuuuaaauug

SEQ ID NO: 3394862 - RNA, 21 nt, Human
auuuuuaagcaaaauauuauu

SEQ ID NO: 3394863 - RNA, 19 nt, Human
auuuuuaauauauacuaug

SEQ ID NO: 3394864 - RNA, 18 nt, Human
auuuuuaauauguaagga

SEQ ID NO: 3394865 - RNA, 23 nt, Human
auuuuuaauggggguagcagcug

SEQ ID NO: 3394866 - RNA, 20 nt, Human
auuuuuaauguuuuuaaaua

SEQ ID NO: 3394867 - RNA, 12 nt, Human
auuuuuaauuaa

SEQ ID NO: 3394868 - RNA, 22 nt, Human
auuuuuaauuaauugggccagc

SEQ ID NO: 3394869 - RNA, 19 nt, Human
auuuuuacaagaaguuuau

SEQ ID NO: 3394870 - RNA, 20 nt, Human
auuuuuacaagaaguuuauu

SEQ ID NO: 3394871 - RNA, 16 nt, Human
auuuuuacaaguuaua

SEQ ID NO: 3394872 - RNA, 19 nt, Human
auuuuuacaauaaauaauc

SEQ ID NO: 3394873 - RNA, 16 nt, Human
auuuuuacagaauugc

SEQ ID NO: 3394874 - RNA, 21 nt, Human
auuuuuacccuaaugucuuca

SEQ ID NO: 3394875 - RNA, 21 nt, Human
auuuuuacuagaacacagaaa

SEQ ID NO: 3394876 - RNA, 15 nt, Human
auuuuuacugccacu

SEQ ID NO: 3394877 - RNA, 16 nt, Human
auuuuuagaauaagaa

SEQ ID NO: 3394878 - RNA, 22 nt, Human
auuuuuagaauaagaauuugca

SEQ ID NO: 3394879 - RNA, 16 nt, Human
auuuuuagccuguguc

SEQ ID NO: 3394880 - RNA, 16 nt, Human
auuuuuauaaauacug

SEQ ID NO: 3394881 - RNA, 17 nt, Human
auuuuuauacaaaccua

SEQ ID NO: 3394882 - RNA, 13 nt, Human
auuuuuauacagu

SEQ ID NO: 3394883 - RNA, 18 nt, Human
auuuuuauaucagccuga

SEQ ID NO: 3394884 - RNA, 20 nt, Human
auuuuuauaucagccugagu

SEQ ID NO: 3394885 - RNA, 13 nt, Human
auuuuuauaucau

SEQ ID NO: 3394886 - RNA, 15 nt, Human
auuuuuauauuuacu

SEQ ID NO: 3394887 - RNA, 14 nt, Human
auuuuuauauuucc

SEQ ID NO: 3394888 - RNA, 19 nt, Human
auuuuuauauuugaaauau

SEQ ID NO: 3394889 - RNA, 15 nt, Human
auuuuuaucaggauu

SEQ ID NO: 3394890 - RNA, 19 nt, Human
auuuuuaucuuucgugaua

SEQ ID NO: 3394891 - RNA, 17 nt, Human
auuuuuaugccaccuga

SEQ ID NO: 3394892 - RNA, 22 nt, Human
auuuuuauuaauuuuaguuuuu

SEQ ID NO: 3394893 - RNA, 15 nt, Human
auuuuuauuaugcau

SEQ ID NO: 3394894 - RNA, 19 nt, Human
auuuuuauuaugcauaacu

SEQ ID NO: 3394895 - RNA, 20 nt, Human
auuuuuauuaugcauaacug

SEQ ID NO: 3394896 - RNA, 15 nt, Human
auuuuuauucauaag

SEQ ID NO: 3394897 - RNA, 14 nt, Human
auuuuuauuuauau

SEQ ID NO: 3394898 - RNA, 16 nt, Human
auuuuuauuuaugaag

SEQ ID NO: 3394899 - RNA, 19 nt, Human
auuuuuauuucagauuuug

SEQ ID NO: 3394900 - RNA, 13 nt, Human
auuuuuauuucuu

SEQ ID NO: 3394901 - RNA, 16 nt, Human
auuuuuauuuuucuaa

SEQ ID NO: 3394902 - RNA, 19 nt, Human
auuuuuauuuuuuagugca

SEQ ID NO: 3394903 - RNA, 14 nt, Human
auuuuucaaagcaa

SEQ ID NO: 3394904 - RNA, 23 nt, Human
auuuuucaaagcaauugaaaugc

SEQ ID NO: 3394905 - RNA, 14 nt, Human
auuuuucaacuuug

SEQ ID NO: 3394906 - RNA, 22 nt, Human
auuuuucaacuuugaauaaaga

SEQ ID NO: 3394907 - RNA, 23 nt, Human
auuuuucaacuuugaauaaagaa

SEQ ID NO: 3394908 - RNA, 16 nt, Human
auuuuucaauaaagca

SEQ ID NO: 3394909 - RNA, 17 nt, Human
auuuuucaauauauuga

SEQ ID NO: 3394910 - RNA, 20 nt, Human
auuuuucagaccuuuuaacu

SEQ ID NO: 3394911 - RNA, 20 nt, Human
auuuuucagcucucuguaua

SEQ ID NO: 3394912 - RNA, 16 nt, Human
auuuuucaguuccaag

SEQ ID NO: 3394913 - RNA, 15 nt, Human
auuuuucauaaacaa

SEQ ID NO: 3394914 - RNA, 19 nt, Human
auuuuucauauugugccaa

SEQ ID NO: 3394915 - RNA, 15 nt, Human
auuuuucauccuaaa

SEQ ID NO: 3394916 - RNA, 19 nt, Human
auuuuucauugauaugaaa

SEQ ID NO: 3394917 - RNA, 22 nt, Human
auuuuucauugauaugaaaaau

SEQ ID NO: 3394918 - RNA, 15 nt, Human
auuuuuccaaaauaa

SEQ ID NO: 3394919 - RNA, 13 nt, Human
auuuuuccaacua

SEQ ID NO: 3394920 - RNA, 10 nt, Human
auuuuuccua

SEQ ID NO: 3394921 - RNA, 23 nt, Human
auuuuucggaggccccacugaug

SEQ ID NO: 3394922 - RNA, 12 nt, Human
auuuuucuaacu

SEQ ID NO: 3394923 - RNA, 15 nt, Human
auuuuucugcacuga

SEQ ID NO: 3394924 - RNA, 16 nt, Human
auuuuucugcacugag

SEQ ID NO: 3394925 - RNA, 19 nt, Human
auuuuucuggagguugaua

SEQ ID NO: 3394926 - RNA, 22 nt, Human
auuuuucuuagggaaggauaca

SEQ ID NO: 3394927 - RNA, 14 nt, Human
auuuuucuucuuga

SEQ ID NO: 3394928 - RNA, 13 nt, Human
auuuuucuuuaca

SEQ ID NO: 3394929 - RNA, 14 nt, Human
auuuuugaaaaggc

SEQ ID NO: 3394930 - RNA, 20 nt, Human
auuuuugaaacugcauuugu

SEQ ID NO: 3394931 - RNA, 15 nt, Human
auuuuugaaugugau

SEQ ID NO: 3394932 - RNA, 13 nt, Human
auuuuugacagaa

SEQ ID NO: 3394933 - RNA, 14 nt, Human
auuuuugacagaau

SEQ ID NO: 3394934 - RNA, 21 nt, Human
auuuuugauaaagccucaagg

SEQ ID NO: 3394935 - RNA, 19 nt, Human
auuuuugauacuaagcauu

SEQ ID NO: 3394936 - RNA, 19 nt, Human
auuuuugcaauaaugcagu

SEQ ID NO: 3394937 - RNA, 15 nt, Human
auuuuugccauacau

SEQ ID NO: 3394938 - RNA, 21 nt, Human
auuuuugccucuuccagucuu

SEQ ID NO: 3394939 - RNA, 15 nt, Human
auuuuugcugagacu

SEQ ID NO: 3394940 - RNA, 15 nt, Human
auuuuugcuuuuaga

SEQ ID NO: 3394941 - RNA, 18 nt, Human
auuuuugcuuuuagaaaa

SEQ ID NO: 3394942 - RNA, 17 nt, Human
auuuuuggauugacagu

SEQ ID NO: 3394943 - RNA, 21 nt, Human
auuuuuggauugacaguaacu

SEQ ID NO: 3394944 - RNA, 19 nt, Human
auuuuuggcagucugaauu

SEQ ID NO: 3394945 - RNA, 21 nt, Human
auuuuuggggggaguaaagaa

SEQ ID NO: 3394946 - RNA, 19 nt, Human
auuuuugguauuugaaaca

SEQ ID NO: 3394947 - RNA, 19 nt, Human
auuuuuggugggaauccaa

SEQ ID NO: 3394948 - RNA, 15 nt, Human
auuuuugguugaaua

SEQ ID NO: 3394949 - RNA, 19 nt, Human
auuuuugguugucaauauu

SEQ ID NO: 3394950 - RNA, 22 nt, Human
auuuuuguaagacaauccaugu

SEQ ID NO: 3394951 - RNA, 12 nt, Human
auuuuuguaauu

SEQ ID NO: 3394952 - RNA, 21 nt, Human
auuuuuguacaguuugcugua

SEQ ID NO: 3394953 - RNA, 20 nt, Human
auuuuuguacccuuccuaca

SEQ ID NO: 3394954 - RNA, 15 nt, Human
auuuuuguaguagcg

SEQ ID NO: 3394955 - RNA, 19 nt, Human
auuuuuguauucaauuaaa

SEQ ID NO: 3394956 - RNA, 23 nt, Human
auuuuugucuuauauauauuucu

SEQ ID NO: 3394957 - RNA, 14 nt, Human
auuuuugucuugug

SEQ ID NO: 3394958 - RNA, 20 nt, Human
auuuuugugaaaugaaaaca

SEQ ID NO: 3394959 - RNA, 20 nt, Human
auuuuuguuacucucuucca

SEQ ID NO: 3394960 - RNA, 21 nt, Human
auuuuuguuuucauuaucuca

SEQ ID NO: 3394961 - RNA, 15 nt, Human
auuuuuuaaaaagca

SEQ ID NO: 3394962 - RNA, 18 nt, Human
auuuuuuaaaaagcaaaa

SEQ ID NO: 3394963 - RNA, 23 nt, Human
auuuuuuaaaacaagccaagaaa

SEQ ID NO: 3394964 - RNA, 15 nt, Human
auuuuuuaaaagaga

SEQ ID NO: 3394965 - RNA, 12 nt, Human
auuuuuuaaagc

SEQ ID NO: 3394966 - RNA, 20 nt, Human
auuuuuuaaaguuacuuugu

SEQ ID NO: 3394967 - RNA, 14 nt, Human
auuuuuuaaaugca

SEQ ID NO: 3394968 - RNA, 12 nt, Human
auuuuuuaagcu

SEQ ID NO: 3394969 - RNA, 17 nt, Human
auuuuuuaaggaaacaa

SEQ ID NO: 3394970 - RNA, 14 nt, Human
auuuuuuaauaauu

SEQ ID NO: 3394971 - RNA, 12 nt, Human
auuuuuuaauua

SEQ ID NO: 3394972 - RNA, 14 nt, Human
auuuuuuaauuauu

SEQ ID NO: 3394973 - RNA, 15 nt, Human
auuuuuuaauuauug

SEQ ID NO: 3394974 - RNA, 14 nt, Human
auuuuuuaauuguu

SEQ ID NO: 3394975 - RNA, 19 nt, Human
auuuuuuacauuuuacaca

SEQ ID NO: 3394976 - RNA, 13 nt, Human
auuuuuuauacag

SEQ ID NO: 3394977 - RNA, 13 nt, Human
auuuuuuauauau

SEQ ID NO: 3394978 - RNA, 21 nt, Human
auuuuuuaucaugcauguccu

SEQ ID NO: 3394979 - RNA, 15 nt, Human
auuuuuuauucuugu

SEQ ID NO: 3394980 - RNA, 14 nt, Human
auuuuuucagaccg

SEQ ID NO: 3394981 - RNA, 15 nt, Human
auuuuuucaguauua

SEQ ID NO: 3394982 - RNA, 13 nt, Human
auuuuuucauuuc

SEQ ID NO: 3394983 - RNA, 14 nt, Human
auuuuuuccaaaau

SEQ ID NO: 3394984 - RNA, 19 nt, Human
auuuuuugaaaagcagaca

SEQ ID NO: 3394985 - RNA, 13 nt, Human
auuuuuugaaaug

SEQ ID NO: 3394986 - RNA, 14 nt, Human
auuuuuugaaaugc

SEQ ID NO: 3394987 - RNA, 23 nt, Human
auuuuuugacuuuuuuuguaugu

SEQ ID NO: 3394988 - RNA, 14 nt, Human
auuuuuuguauaau

SEQ ID NO: 3394989 - RNA, 12 nt, Human
auuuuuugugug

SEQ ID NO: 3394990 - RNA, 17 nt, Human
auuuuuuguugacauua

SEQ ID NO: 3394991 - RNA, 18 nt, Human
auuuuuuuaaaauguuaa

SEQ ID NO: 3394992 - RNA, 15 nt, Human
auuuuuuuaacuuua

SEQ ID NO: 3394993 - RNA, 18 nt, Human
auuuuuuuaagcuguaaa

SEQ ID NO: 3394994 - RNA, 17 nt, Human
auuuuuuuagaaagcau

SEQ ID NO: 3394995 - RNA, 22 nt, Human
auuuuuuucacuggaguuacau

SEQ ID NO: 3394996 - RNA, 15 nt, Human
auuuuuuuccuuaca

SEQ ID NO: 3394997 - RNA, 21 nt, Human
auuuuuuuccuuacauaaaca

SEQ ID NO: 3394998 - RNA, 13 nt, Human
auuuuuuucuaau

SEQ ID NO: 3394999 - RNA, 16 nt, Human
auuuuuuucuaccuau

SEQ ID NO: 3395000 - RNA, 17 nt, Human
auuuuuuucugaaauuu

SEQ ID NO: 3395001 - RNA, 15 nt, Human
auuuuuuucugaauu

SEQ ID NO: 3395002 - RNA, 18 nt, Human
auuuuuuuguaauugcuu

SEQ ID NO: 3395003 - RNA, 23 nt, Human
auuuuuuuguagaugaaaaagca

SEQ ID NO: 3395004 - RNA, 14 nt, Human
auuuuuuuguauga

SEQ ID NO: 3395005 - RNA, 22 nt, Human
auuuuuuuuaaaauagaaauuu

SEQ ID NO: 3395006 - RNA, 20 nt, Human
caaacaccuucuuauuauau

SEQ ID NO: 3395007 - RNA, 20 nt, Human
caaacacugcaggcaucaca

SEQ ID NO: 3395008 - RNA, 16 nt, Human
caaacagaaaacaugu

SEQ ID NO: 3395009 - RNA, 13 nt, Human
caaacagaggccg

SEQ ID NO: 3395010 - RNA, 18 nt, Human
caaacagauucuuuuaug

SEQ ID NO: 3395011 - RNA, 13 nt, Human
caaacagccacac

SEQ ID NO: 3395012 - RNA, 20 nt, Human
caaacaggaucaguuaacua

SEQ ID NO: 3395013 - RNA, 14 nt, Human
caaacaggcucaga

SEQ ID NO: 3395014 - RNA, 19 nt, Human
caaacagggccucugcgga

SEQ ID NO: 3395015 - RNA, 15 nt, Human
caaacagucucagga

SEQ ID NO: 3395016 - RNA, 17 nt, Human
caaacagucucaggaaa

SEQ ID NO: 3395017 - RNA, 15 nt, Human
caaacagugacugua

SEQ ID NO: 3395018 - RNA, 17 nt, Human
caaacauauauaacaau

SEQ ID NO: 3395019 - RNA, 21 nt, Human
caaacauauauauacuauuaa

SEQ ID NO: 3395020 - RNA, 17 nt, Human
caaacaucacucugcug

SEQ ID NO: 3395021 - RNA, 18 nt, Human
caaacaucacucugcugc

SEQ ID NO: 3395022 - RNA, 21 nt, Human
caaacaucuggaaaauaaaag

SEQ ID NO: 3395023 - RNA, 12 nt, Human
caaacaugaagu

SEQ ID NO: 3395024 - RNA, 15 nt, Human
caaacauguauuuau

SEQ ID NO: 3395025 - RNA, 18 nt, Human
caaacauguauuuaugua

SEQ ID NO: 3395026 - RNA, 17 nt, Human
caaacauuaauguugau

SEQ ID NO: 3395027 - RNA, 21 nt, Human
caaacauuaauguugauuucu

SEQ ID NO: 3395028 - RNA, 22 nt, Human
caaacauuaauguugauuucua

SEQ ID NO: 3395029 - RNA, 18 nt, Human
caaacauuaguacuuuau

SEQ ID NO: 3395030 - RNA, 19 nt, Human
caaacauuaguacuuuaua

SEQ ID NO: 3395031 - RNA, 14 nt, Human
caaacauuggaaga

SEQ ID NO: 3395032 - RNA, 23 nt, Human
caaacauuuucuggccaguguuu

SEQ ID NO: 3395033 - RNA, 21 nt, Human
caaaccaagagauugcuaauu

SEQ ID NO: 3395034 - RNA, 22 nt, Human
caaaccaagucggaacagcaga

SEQ ID NO: 3395035 - RNA, 16 nt, Human
caaaccaccagaagcc

SEQ ID NO: 3395036 - RNA, 20 nt, Human
caaaccaccagaagcccaga

SEQ ID NO: 3395037 - RNA, 19 nt, Human
caaaccacuuuuugcagcu

SEQ ID NO: 3395038 - RNA, 20 nt, Human
caaaccacuuuuugcagcuu

SEQ ID NO: 3395039 - RNA, 13 nt, Human
caaaccagaagca

SEQ ID NO: 3395040 - RNA, 14 nt, Human
caaaccaucauuga

SEQ ID NO: 3395041 - RNA, 21 nt, Human
caaaccauuuuuaaaguagaa

SEQ ID NO: 3395042 - RNA, 14 nt, Human
caaacccaaaagaa

SEQ ID NO: 3395043 - RNA, 24 nt, Human
caaacccaguguuuuaggagcaug

SEQ ID NO: 3395044 - RNA, 21 nt, Human
caaacccauuuuagagacaga

SEQ ID NO: 3395045 - RNA, 14 nt, Human
caaacccccauucu

SEQ ID NO: 3395046 - RNA, 18 nt, Human
caaacccccuuugugcug

SEQ ID NO: 3395047 - RNA, 17 nt, Human
caaacccugucaaacau

SEQ ID NO: 3395048 - RNA, 18 nt, Human
caaacccugucaaacauu

SEQ ID NO: 3395049 - RNA, 14 nt, Human
caaacccuucagug

SEQ ID NO: 3395050 - RNA, 13 nt, Human
caaaccggcaggu

SEQ ID NO: 3395051 - RNA, 13 nt, Human
caaaccuaaguug

SEQ ID NO: 3395052 - RNA, 15 nt, Human
caaaccuaccaaaau

SEQ ID NO: 3395053 - RNA, 20 nt, Human
caaaccuagccccuuagccc

SEQ ID NO: 3395054 - RNA, 23 nt, Human
caaaccucuguucaguguaaaua

SEQ ID NO: 3395055 - RNA, 14 nt, Human
caaaccugccuggg

SEQ ID NO: 3395056 - RNA, 15 nt, Human
caaaccugccugggu

SEQ ID NO: 3395057 - RNA, 20 nt, Human
caaaccuuucuauaauuuua

SEQ ID NO: 3395058 - RNA, 20 nt, Human
caaacgcccuuuccuccuca

SEQ ID NO: 3395059 - RNA, 17 nt, Human
caaacgcugccugccca

SEQ ID NO: 3395060 - RNA, 19 nt, Human
caaacguauguaaauguau

SEQ ID NO: 3395061 - RNA, 16 nt, Human
caaacuaaaagacauu

SEQ ID NO: 3395062 - RNA, 14 nt, Human
caaacuaacaggcu

SEQ ID NO: 3395063 - RNA, 21 nt, Human
caaacucaaugcuuuauuugu

SEQ ID NO: 3395064 - RNA, 17 nt, Human
caaacucaccugccccu

SEQ ID NO: 3395065 - RNA, 18 nt, Human
caaacucacugcucaaga

SEQ ID NO: 3395066 - RNA, 18 nt, Human
caaacuccaagguucccu

SEQ ID NO: 3395067 - RNA, 14 nt, Human
caaacucucugaac

SEQ ID NO: 3395068 - RNA, 17 nt, Human
caaacugaagcagccuc

SEQ ID NO: 3395069 - RNA, 23 nt, Human
caaacugaagcagccucucccca

SEQ ID NO: 3395070 - RNA, 11 nt, Human
caaacugcaau

SEQ ID NO: 3395071 - RNA, 15 nt, Human
caaacugcaauagag

SEQ ID NO: 3395072 - RNA, 19 nt, Human
caaacugcaauagagacug

SEQ ID NO: 3395073 - RNA, 23 nt, Human
caaacugccuaagcccuccgcca

SEQ ID NO: 3395074 - RNA, 12 nt, Human
caaacuggaguc

SEQ ID NO: 3395075 - RNA, 20 nt, Human
caaacuggagucuggagugg

SEQ ID NO: 3395076 - RNA, 23 nt, Human
caaacuggagucuggagugggca

SEQ ID NO: 3395077 - RNA, 19 nt, Human
caaacugggaugaaacuaa

SEQ ID NO: 3395078 - RNA, 15 nt, Human
caaacuggggccucc

SEQ ID NO: 3395079 - RNA, 17 nt, Human
caaacuggggccucccu

SEQ ID NO: 3395080 - RNA, 16 nt, Human
caaacugguauucugu

SEQ ID NO: 3395081 - RNA, 21 nt, Human
caaacugguauucuguucugg

SEQ ID NO: 3395082 - RNA, 16 nt, Human
caaacuguauaacuug

SEQ ID NO: 3395083 - RNA, 14 nt, Human
caaacugugaagca

SEQ ID NO: 3395084 - RNA, 13 nt, Human
caaacuguugauu

SEQ ID NO: 3395085 - RNA, 15 nt, Human
caaacuuacuauuuu

SEQ ID NO: 3395086 - RNA, 16 nt, Human
caaacuuacuauuuug

SEQ ID NO: 3395087 - RNA, 13 nt, Human
caaacuucuuuca

SEQ ID NO: 3395088 - RNA, 18 nt, Human
caaacuuggauacuugga

SEQ ID NO: 3395089 - RNA, 21 nt, Human
caaacuuggguagaguuuaca

SEQ ID NO: 3395090 - RNA, 21 nt, Human
caaacuuuacuauggcccugg

SEQ ID NO: 3395091 - RNA, 21 nt, Human
caaacuuuagguuuuuuuaau

SEQ ID NO: 3395092 - RNA, 23 nt, Human
caaacuuuauugauucaccuccu

SEQ ID NO: 3395093 - RNA, 12 nt, Human
caaacuuuauuu

SEQ ID NO: 3395094 - RNA, 13 nt, Human
caaacuuugcauc

SEQ ID NO: 3395095 - RNA, 17 nt, Human
caaacuuuucaaggcuu

SEQ ID NO: 3395096 - RNA, 20 nt, Human
caaacuuuucaaggcuuaua

SEQ ID NO: 3395097 - RNA, 19 nt, Human
caaacuuuuccccuguccu

SEQ ID NO: 3395098 - RNA, 14 nt, Human
caaagaaaaugaaa

SEQ ID NO: 3395099 - RNA, 19 nt, Human
caaagaaagaaaguuuaga

SEQ ID NO: 3395100 - RNA, 14 nt, Human
caaagaaaguguau

SEQ ID NO: 3395101 - RNA, 16 nt, Human
caaagaaaguguauug

SEQ ID NO: 3395102 - RNA, 18 nt, Human
caaagaaaugaacauucc

SEQ ID NO: 3395103 - RNA, 19 nt, Human
caaagaaauuuccacucag

SEQ ID NO: 3395104 - RNA, 22 nt, Human
caaagaacauguagaaaacaaa

SEQ ID NO: 3395105 - RNA, 14 nt, Human
caaagaaccaaaga

SEQ ID NO: 3395106 - RNA, 19 nt, Human
caaagaaccaaagaagaaa

SEQ ID NO: 3395107 - RNA, 14 nt, Human
caaagaagacaugu

SEQ ID NO: 3395108 - RNA, 22 nt, Human
caaagaaggcauuugcaggguc

SEQ ID NO: 3395109 - RNA, 22 nt, Human
caaagaaucaccuaauuaauuu

SEQ ID NO: 3395110 - RNA, 22 nt, Human
caaagaauguuagagcacagua

SEQ ID NO: 3395111 - RNA, 18 nt, Human
caaagaauuccaaagcaa

SEQ ID NO: 3395112 - RNA, 14 nt, Human
caaagacaaaaguc

SEQ ID NO: 3395113 - RNA, 13 nt, Human
caaagacaaauag

SEQ ID NO: 3395114 - RNA, 15 nt, Human
caaagacaaauagua

SEQ ID NO: 3395115 - RNA, 16 nt, Human
caaagacaaauaguag

SEQ ID NO: 3395116 - RNA, 21 nt, Human
caaagacaaauucuguuucuu

SEQ ID NO: 3395117 - RNA, 21 nt, Human
caaagaccaauuuuuugugug

SEQ ID NO: 3395118 - RNA, 18 nt, Human
caaagacccuggcuuuca

SEQ ID NO: 3395119 - RNA, 16 nt, Human
caaagaccuugugugu

SEQ ID NO: 3395120 - RNA, 15 nt, Human
caaagagaaaaagaa

SEQ ID NO: 3395121 - RNA, 15 nt, Human
caaagagaaaacuua

SEQ ID NO: 3395122 - RNA, 23 nt, Human
caaagagaaugcccuucuccuua

SEQ ID NO: 3395123 - RNA, 14 nt, Human
caaagagacuggag

SEQ ID NO: 3395124 - RNA, 16 nt, Human
caaagagagaaaauaa

SEQ ID NO: 3395125 - RNA, 22 nt, Human
caaagagaguuuuuaauagaac

SEQ ID NO: 3395126 - RNA, 13 nt, Human
caaagagccugga

SEQ ID NO: 3395127 - RNA, 13 nt, Human
caaagagcugccu

SEQ ID NO: 3395128 - RNA, 13 nt, Human
caaagaggcaaga

SEQ ID NO: 3395129 - RNA, 18 nt, Human
caaagaggcacagagcca

SEQ ID NO: 3395130 - RNA, 14 nt, Human
caaagagggcuucc

SEQ ID NO: 3395131 - RNA, 22 nt, Human
caaagagggcuuccucuagaag

SEQ ID NO: 3395132 - RNA, 14 nt, Human
caaagagguuuuaa

SEQ ID NO: 3395133 - RNA, 20 nt, Human
caaagagugggcugcaucug

SEQ ID NO: 3395134 - RNA, 21 nt, Human
caaagaguucaagaaauaagu

SEQ ID NO: 3395135 - RNA, 14 nt, Human
caaagauagacagg

SEQ ID NO: 3395136 - RNA, 23 nt, Human
caaagauauauacacaggauccu

SEQ ID NO: 3395137 - RNA, 17 nt, Human
caaagauaucuuuucuu

SEQ ID NO: 3395138 - RNA, 21 nt, Human
caaagauaucuuuucuuuaga

SEQ ID NO: 3395139 - RNA, 23 nt, Human
caaagauauuuugcuuugugauu

SEQ ID NO: 3395140 - RNA, 21 nt, Human
caaagaucuguccucagccuu

SEQ ID NO: 3395141 - RNA, 12 nt, Human
caaagaugaaaa

SEQ ID NO: 3395142 - RNA, 20 nt, Human
caaagaugaaugaagcaaau

SEQ ID NO: 3395143 - RNA, 13 nt, Human
caaagaugaccau

SEQ ID NO: 3395144 - RNA, 21 nt, Human
caaagaugaucaguaugaaaa

SEQ ID NO: 3395145 - RNA, 15 nt, Human
caaagaugcagccgc

SEQ ID NO: 3395146 - RNA, 11 nt, Human
caaagaugcug

SEQ ID NO: 3395147 - RNA, 16 nt, Human
caaagauggcucagag

SEQ ID NO: 3395148 - RNA, 17 nt, Human
caaagauggcucagagg

SEQ ID NO: 3395149 - RNA, 18 nt, Human
caaagauggcucagaggg

SEQ ID NO: 3395150 - RNA, 20 nt, Human
caaaugguaggcauuuccua

SEQ ID NO: 3395151 - RNA, 13 nt, Human
caaaugguaucuu

SEQ ID NO: 3395152 - RNA, 15 nt, Human
caaaugguaucuuuu

SEQ ID NO: 3395153 - RNA, 23 nt, Human
caaauggugguuguuucuuccaa

SEQ ID NO: 3395154 - RNA, 12 nt, Human
caaauguaacua

SEQ ID NO: 3395155 - RNA, 21 nt, Human
caaauguaauguggcuucugg

SEQ ID NO: 3395156 - RNA, 21 nt, Human
caaauguaauugaauaaaguu

SEQ ID NO: 3395157 - RNA, 22 nt, Human
caaauguaguauggccuguguc

SEQ ID NO: 3395158 - RNA, 19 nt, Human
caaaugucagauacaaugu

SEQ ID NO: 3395159 - RNA, 20 nt, Human
caaaugucagauacaaugua

SEQ ID NO: 3395160 - RNA, 17 nt, Human
caaaugucaugcugccu

SEQ ID NO: 3395161 - RNA, 14 nt, Human
caaaugucuauaaa

SEQ ID NO: 3395162 - RNA, 18 nt, Human
caaaugucuuccuggauu

SEQ ID NO: 3395163 - RNA, 24 nt, Human
caaaugucuuuuagaagauagaug

SEQ ID NO: 3395164 - RNA, 14 nt, Human
caaauguggcuccu

SEQ ID NO: 3395165 - RNA, 23 nt, Human
caaauguguacauggcagaguuu

SEQ ID NO: 3395166 - RNA, 18 nt, Human
caaauguuacauagugua

SEQ ID NO: 3395167 - RNA, 18 nt, Human
caaauguuuaaacauuuu

SEQ ID NO: 3395168 - RNA, 13 nt, Human
caaauguuuaauc

SEQ ID NO: 3395169 - RNA, 16 nt, Human
caaauguuuaaucaua

SEQ ID NO: 3395170 - RNA, 22 nt, Human
caaauguuuacagggagccucc

SEQ ID NO: 3395171 - RNA, 13 nt, Human
caaauguuuauuu

SEQ ID NO: 3395172 - RNA, 16 nt, Human
caaauguuuauuuaaa

SEQ ID NO: 3395173 - RNA, 14 nt, Human
caaauguuucugca

SEQ ID NO: 3395174 - RNA, 21 nt, Human
caaauuaaaaaaaaauuguau

SEQ ID NO: 3395175 - RNA, 17 nt, Human
caaauuaaaaaagauaa

SEQ ID NO: 3395176 - RNA, 19 nt, Human
caaauuaaaaaagauaaac

SEQ ID NO: 3395177 - RNA, 15 nt, Human
caaauuaaaaagauu

SEQ ID NO: 3395178 - RNA, 21 nt, Human
caaauuaaaaagauucuuuuu

SEQ ID NO: 3395179 - RNA, 23 nt, Human
caaauuaaaaagauucuuuuucu

SEQ ID NO: 3395180 - RNA, 13 nt, Human
caaauuaacuuga

SEQ ID NO: 3395181 - RNA, 16 nt, Human
caaauuaauaaucuua

SEQ ID NO: 3395182 - RNA, 20 nt, Human
caaauuaauugugugaacuu

SEQ ID NO: 3395183 - RNA, 12 nt, Human
caaauuagaaaa

SEQ ID NO: 3395184 - RNA, 18 nt, Human
caaauuagaaaauguuau

SEQ ID NO: 3395185 - RNA, 22 nt, Human
caaauuagaaaauguuauuuaa

SEQ ID NO: 3395186 - RNA, 18 nt, Human
caaauuagaagacauuua

SEQ ID NO: 3395187 - RNA, 19 nt, Human
caaauuagguuuuguacaa

SEQ ID NO: 3395188 - RNA, 20 nt, Human
caaauuagguuuuguacaau

SEQ ID NO: 3395189 - RNA, 19 nt, Human
caaauuauaaaaagccacu

SEQ ID NO: 3395190 - RNA, 13 nt, Human
caaauuauaaugu

SEQ ID NO: 3395191 - RNA, 14 nt, Human
caaauuauaaugua

SEQ ID NO: 3395192 - RNA, 15 nt, Human
caaauuauaauguau

SEQ ID NO: 3395193 - RNA, 18 nt, Human
caaauuaucaagcuaaua

SEQ ID NO: 3395194 - RNA, 22 nt, Human
caaauuaucuugauacauucaa

SEQ ID NO: 3395195 - RNA, 19 nt, Human
caaauuaugcuaagaauuu

SEQ ID NO: 3395196 - RNA, 15 nt, Human
caaauuauuaaugaa

SEQ ID NO: 3395197 - RNA, 20 nt, Human
caaauuauuuguguaauaga

SEQ ID NO: 3395198 - RNA, 14 nt, Human
caaauucaguuuca

SEQ ID NO: 3395199 - RNA, 16 nt, Human
caaauucauauucugu

SEQ ID NO: 3395200 - RNA, 17 nt, Human
caaauucauauucuuuu

SEQ ID NO: 3395201 - RNA, 16 nt, Human
caaauucgcaaacuuu

SEQ ID NO: 3395202 - RNA, 17 nt, Human
caaauugaacucuuuga

SEQ ID NO: 3395203 - RNA, 20 nt, Human
caaauugcuuuuuuccaaaa

SEQ ID NO: 3395204 - RNA, 17 nt, Human
caaauuguaagcaugca

SEQ ID NO: 3395205 - RNA, 15 nt, Human
caaauuguaauuaau

SEQ ID NO: 3395206 - RNA, 21 nt, Human
caaauuguaauuaauaauaga

SEQ ID NO: 3395207 - RNA, 18 nt, Human
caaauuguaucuagugca

SEQ ID NO: 3395208 - RNA, 19 nt, Human
caaauugucaccugcuucu

SEQ ID NO: 3395209 - RNA, 20 nt, Human
caaauugucaccugcuucuc

SEQ ID NO: 3395210 - RNA, 18 nt, Human
caaauugugcuucucccc

SEQ ID NO: 3395211 - RNA, 16 nt, Human
caaauuuacagagaca

SEQ ID NO: 3395212 - RNA, 17 nt, Human
caaauuuacagagacag

SEQ ID NO: 3395213 - RNA, 21 nt, Human
caaauuuagaaacuaauugac

SEQ ID NO: 3395214 - RNA, 13 nt, Human
caaauuuauaauu

SEQ ID NO: 3395215 - RNA, 16 nt, Human
caaauuuaucaaagca

SEQ ID NO: 3395216 - RNA, 12 nt, Human
caaauuucuaaa

SEQ ID NO: 3395217 - RNA, 14 nt, Human
caaauuucuaaauc

SEQ ID NO: 3395218 - RNA, 17 nt, Human
caaauuugucuugccuu

SEQ ID NO: 3395219 - RNA, 21 nt, Human
caaauuuugaugccaagaaag

SEQ ID NO: 3395220 - RNA, 13 nt, Human
caaauuuuggcca

SEQ ID NO: 3395221 - RNA, 19 nt, Human
caaauuuuuauuuuuuagu

SEQ ID NO: 3395222 - RNA, 23 nt, Human
caaauuuuuauuuuuuagugcau

SEQ ID NO: 3395223 - RNA, 13 nt, Human
caacaaaaaauaa

SEQ ID NO: 3395224 - RNA, 23 nt, Human
caacaaaaauuugaaccaaaaca

SEQ ID NO: 3395225 - RNA, 14 nt, Human
caacaaaagaagcc

SEQ ID NO: 3395226 - RNA, 15 nt, Human
caacaaagaaacaaa

SEQ ID NO: 3395227 - RNA, 13 nt, Human
caacaaagaaaua

SEQ ID NO: 3395228 - RNA, 19 nt, Human
caacaaaggguuuuaaugu

SEQ ID NO: 3395229 - RNA, 18 nt, Human
caacaaccucaacugccu

SEQ ID NO: 3395230 - RNA, 19 nt, Human
caacaaccucaacugccua

SEQ ID NO: 3395231 - RNA, 22 nt, Human
caacaacgcuugugaauguauu

SEQ ID NO: 3395232 - RNA, 12 nt, Human
caacaagaagaa

SEQ ID NO: 3395233 - RNA, 18 nt, Human
caacaagaagaauuugaa

SEQ ID NO: 3395234 - RNA, 19 nt, Human
caacaagaauaaaggcagc

SEQ ID NO: 3395235 - RNA, 13 nt, Human
caacaagaaugca

SEQ ID NO: 3395236 - RNA, 20 nt, Human
caacaagaaugcauugauau

SEQ ID NO: 3395237 - RNA, 16 nt, Human
caacaaggcaaaaaca

SEQ ID NO: 3395238 - RNA, 14 nt, Human
caacaagggagaga

SEQ ID NO: 3395239 - RNA, 18 nt, Human
caacaagggagagaccuc

SEQ ID NO: 3395240 - RNA, 13 nt, Human
caacaaguaacuu

SEQ ID NO: 3395241 - RNA, 14 nt, Human
caacaauaaaacau

SEQ ID NO: 3395242 - RNA, 16 nt, Human
caacaauaaaauagca

SEQ ID NO: 3395243 - RNA, 17 nt, Human
caacaauccuagugcuu

SEQ ID NO: 3395244 - RNA, 15 nt, Human
caacaauugguaaaa

SEQ ID NO: 3395245 - RNA, 19 nt, Human
caacaauugguaaaacuca

SEQ ID NO: 3395246 - RNA, 20 nt, Human
caacaauuuagaaggaaaac

SEQ ID NO: 3395247 - RNA, 17 nt, Human
caacaauuuaugaauug

SEQ ID NO: 3395248 - RNA, 21 nt, Human
caacaauuugggcuuccuguu

SEQ ID NO: 3395249 - RNA, 12 nt, Human
caacaauuuuca

SEQ ID NO: 3395250 - RNA, 15 nt, Human
caacaauuuucagau

SEQ ID NO: 3395251 - RNA, 12 nt, Human
caacacaaagag

SEQ ID NO: 3395252 - RNA, 20 nt, Human
caacacaaagagaaaaagaa

SEQ ID NO: 3395253 - RNA, 22 nt, Human
caacacaaagagaaaaagaaau

SEQ ID NO: 3395254 - RNA, 23 nt, Human
caacacaaagagaaaaagaaaug

SEQ ID NO: 3395255 - RNA, 13 nt, Human
caacacaaagauu

SEQ ID NO: 3395256 - RNA, 18 nt, Human
caacacacacaugcuucc

SEQ ID NO: 3395257 - RNA, 23 nt, Human
caacacacacaugcuucccuuuc

SEQ ID NO: 3395258 - RNA, 22 nt, Human
caacacacagauuugagcucag

SEQ ID NO: 3395259 - RNA, 15 nt, Human
caacacagccugggc

SEQ ID NO: 3395260 - RNA, 15 nt, Human
caacaccaaaaaaua

SEQ ID NO: 3395261 - RNA, 23 nt, Human
caacaccaaaaaauaucuaguaa

SEQ ID NO: 3395262 - RNA, 22 nt, Human
caacaccaagcacagcagccug

SEQ ID NO: 3395263 - RNA, 15 nt, Human
caacaccacagacac

SEQ ID NO: 3395264 - RNA, 16 nt, Human
caacaccacagacaca

SEQ ID NO: 3395265 - RNA, 17 nt, Human
caacaccacagacacac

SEQ ID NO: 3395266 - RNA, 18 nt, Human
caacaccacagacacaca

SEQ ID NO: 3395267 - RNA, 19 nt, Human
caacaccacagacacacac

SEQ ID NO: 3395268 - RNA, 20 nt, Human
caacaccacagacacacaca

SEQ ID NO: 3395269 - RNA, 16 nt, Human
caacacccauuuuucc

SEQ ID NO: 3395270 - RNA, 22 nt, Human
caacaccucugcacaagcugca

SEQ ID NO: 3395271 - RNA, 20 nt, Human
caacaccuuguuucccucuc

SEQ ID NO: 3395272 - RNA, 19 nt, Human
caacacgcaccugccucag

SEQ ID NO: 3395273 - RNA, 16 nt, Human
caacacgcaggagcac

SEQ ID NO: 3395274 - RNA, 22 nt, Human
caacacucacauuuauucugcu

SEQ ID NO: 3395275 - RNA, 18 nt, Human
caacacucauugaccuga

SEQ ID NO: 3395276 - RNA, 22 nt, Human
caacacucauugaccugaggcc

SEQ ID NO: 3395277 - RNA, 23 nt, Human
caacacugauuuccccuuuugca

SEQ ID NO: 3395278 - RNA, 15 nt, Human
caacacugugcccug

SEQ ID NO: 3395279 - RNA, 16 nt, Human
caacacugugcccugg

SEQ ID NO: 3395280 - RNA, 23 nt, Human
caacacugugcccugguggagaa

SEQ ID NO: 3395281 - RNA, 19 nt, Human
caacacuguggguguguga

SEQ ID NO: 3395282 - RNA, 15 nt, Human
caacacuucagacug

SEQ ID NO: 3395283 - RNA, 19 nt, Human
caacacuucagacugcaag

SEQ ID NO: 3395284 - RNA, 15 nt, Human
caacacuuuaauggg

SEQ ID NO: 3395285 - RNA, 10 nt, Human
caacagaaaa

SEQ ID NO: 3395286 - RNA, 15 nt, Human
caacagaacuaaaug

SEQ ID NO: 3395287 - RNA, 15 nt, Human
caacagaaugaaaaa

SEQ ID NO: 3395288 - RNA, 16 nt, Human
caacagaaugaaaaau

SEQ ID NO: 3395289 - RNA, 17 nt, Human
caacagagaaggcagga

SEQ ID NO: 3395290 - RNA, 20 nt, Human
caacagagacugaauagaua

SEQ ID NO: 3395291 - RNA, 23 nt, Human
caacagaucuggaaccucagccu

SEQ ID NO: 3395292 - RNA, 15 nt, Human
caacagaugcuuuuc

SEQ ID NO: 3395293 - RNA, 15 nt, Human
caacagauuugugaa

SEQ ID NO: 3395294 - RNA, 14 nt, Human
caauuaaacggauu

SEQ ID NO: 3395295 - RNA, 23 nt, Human
caauuaaacggauuauuuuuuca

SEQ ID NO: 3395296 - RNA, 14 nt, Human
caauuaaauguagg

SEQ ID NO: 3395297 - RNA, 15 nt, Human
caauuaaggauuuua

SEQ ID NO: 3395298 - RNA, 20 nt, Human
caauuaaggauuuuaugcuu

SEQ ID NO: 3395299 - RNA, 15 nt, Human
caauuaauaguuugu

SEQ ID NO: 3395300 - RNA, 22 nt, Human
caauuaauaguuugucuauuuu

SEQ ID NO: 3395301 - RNA, 22 nt, Human
caauuaauugcuauuguguuau

SEQ ID NO: 3395302 - RNA, 14 nt, Human
caauuaauuuuaga

SEQ ID NO: 3395303 - RNA, 12 nt, Human
caauuaauuuuu

SEQ ID NO: 3395304 - RNA, 15 nt, Human
caauuagauuucuca

SEQ ID NO: 3395305 - RNA, 19 nt, Human
caauuagccucauaguuau

SEQ ID NO: 3395306 - RNA, 16 nt, Human
caauuagcuuauguua

SEQ ID NO: 3395307 - RNA, 15 nt, Human
caauuaggaagugua

SEQ ID NO: 3395308 - RNA, 22 nt, Human
caauuaggaaguguaacagcug

SEQ ID NO: 3395309 - RNA, 23 nt, Human
caauuaggaaguguaacagcuga

SEQ ID NO: 3395310 - RNA, 16 nt, Human
caauuaggauuuugau

SEQ ID NO: 3395311 - RNA, 16 nt, Human
caauuagggccuagcc

SEQ ID NO: 3395312 - RNA, 13 nt, Human
caauuaguuuccu

SEQ ID NO: 3395313 - RNA, 18 nt, Human
caauuaguuuccuuuuua

SEQ ID NO: 3395314 - RNA, 14 nt, Human
caauuauaguuucu

SEQ ID NO: 3395315 - RNA, 15 nt, Human
caauuaugaaaauaa

SEQ ID NO: 3395316 - RNA, 15 nt, Human
caauuauugauauau

SEQ ID NO: 3395317 - RNA, 22 nt, Human
caauuauugauauauauuauaa

SEQ ID NO: 3395318 - RNA, 13 nt, Human
caauuauuuuuac

SEQ ID NO: 3395319 - RNA, 15 nt, Human
caauucaaaaaugua

SEQ ID NO: 3395320 - RNA, 12 nt, Human
caauucaaaaca

SEQ ID NO: 3395321 - RNA, 13 nt, Human
caauucaaaaguu

SEQ ID NO: 3395322 - RNA, 13 nt, Human
caauucaaagcug

SEQ ID NO: 3395323 - RNA, 22 nt, Human
caauucaauacaaacaaucucu

SEQ ID NO: 3395324 - RNA, 20 nt, Human
caauucacaucuaaccucau

SEQ ID NO: 3395325 - RNA, 23 nt, Human
caauucagacaggcaaauaaaag

SEQ ID NO: 3395326 - RNA, 14 nt, Human
caauucaugaacuu

SEQ ID NO: 3395327 - RNA, 21 nt, Human
caauucaugaacuucgcauca

SEQ ID NO: 3395328 - RNA, 19 nt, Human
caauuccaacaguuuaaug

SEQ ID NO: 3395329 - RNA, 10 nt, Human
caauuccaau

SEQ ID NO: 3395330 - RNA, 13 nt, Human
caauuccaccugc

SEQ ID NO: 3395331 - RNA, 13 nt, Human
caauuccacucug

SEQ ID NO: 3395332 - RNA, 22 nt, Human
caauuccacucugauagaauua

SEQ ID NO: 3395333 - RNA, 14 nt, Human
caauuccaucaccc

SEQ ID NO: 3395334 - RNA, 12 nt, Human
caauuccccucu

SEQ ID NO: 3395335 - RNA, 18 nt, Human
caauuccuagauaaaaag

SEQ ID NO: 3395336 - RNA, 22 nt, Human
caauuccuagauaaaaagaugg

SEQ ID NO: 3395337 - RNA, 15 nt, Human
caauuccucauccuc

SEQ ID NO: 3395338 - RNA, 18 nt, Human
caauuccucauccucaga

SEQ ID NO: 3395339 - RNA, 22 nt, Human
caauuccucauccucagaugcu

SEQ ID NO: 3395340 - RNA, 23 nt, Human
caauuccucauccucagaugcuc

SEQ ID NO: 3395341 - RNA, 15 nt, Human
caauucuccugccuu

SEQ ID NO: 3395342 - RNA, 21 nt, Human
caauucuccugccuuugccuc

SEQ ID NO: 3395343 - RNA, 17 nt, Human
caauucuuacaaacaug

SEQ ID NO: 3395344 - RNA, 22 nt, Human
caauucuucccuaucuuugcca

SEQ ID NO: 3395345 - RNA, 23 nt, Human
caauucuuuauacaacagugcua

SEQ ID NO: 3395346 - RNA, 21 nt, Human
caauugaacuuaaauaaaugu

SEQ ID NO: 3395347 - RNA, 20 nt, Human
caauugaaggaucaucugaa

SEQ ID NO: 3395348 - RNA, 17 nt, Human
caauugaaguaaacuuu

SEQ ID NO: 3395349 - RNA, 21 nt, Human
caauugaaguaaacuuuuugu

SEQ ID NO: 3395350 - RNA, 14 nt, Human
caauugacaacagu

SEQ ID NO: 3395351 - RNA, 19 nt, Human
caauugauuuuaaaccaua

SEQ ID NO: 3395352 - RNA, 18 nt, Human
caauugcugcaucuuagu

SEQ ID NO: 3395353 - RNA, 20 nt, Human
caauugcuuacucauuaaaa

SEQ ID NO: 3395354 - RNA, 18 nt, Human
caauuggaagucuaagaa

SEQ ID NO: 3395355 - RNA, 20 nt, Human
caauuggauacgacaacuug

SEQ ID NO: 3395356 - RNA, 22 nt, Human
caauugggauggcgcuaggcau

SEQ ID NO: 3395357 - RNA, 19 nt, Human
caauuguaaaacugaggca

SEQ ID NO: 3395358 - RNA, 21 nt, Human
caauugugagccaccacgucc

SEQ ID NO: 3395359 - RNA, 14 nt, Human
caauugugcugcca

SEQ ID NO: 3395360 - RNA, 21 nt, Human
caauugugggcauaaacuguu

SEQ ID NO: 3395361 - RNA, 20 nt, Human
caauuguguagccuuuuugu

SEQ ID NO: 3395362 - RNA, 14 nt, Human
caauuguugacagu

SEQ ID NO: 3395363 - RNA, 23 nt, Human
caauuguugacaguucugaagaa

SEQ ID NO: 3395364 - RNA, 20 nt, Human
caauuuaaacccauuuuagu

SEQ ID NO: 3395365 - RNA, 13 nt, Human
caauuuaaagcaa

SEQ ID NO: 3395366 - RNA, 14 nt, Human
caauuuaaauguua

SEQ ID NO: 3395367 - RNA, 13 nt, Human
caauuuacaaagu

SEQ ID NO: 3395368 - RNA, 14 nt, Human
caauuuacaaagug

SEQ ID NO: 3395369 - RNA, 15 nt, Human
caauuuacaaagugu

SEQ ID NO: 3395370 - RNA, 18 nt, Human
caauuuacaaagugugua

SEQ ID NO: 3395371 - RNA, 20 nt, Human
caauuuauaaaauagaaaua

SEQ ID NO: 3395372 - RNA, 13 nt, Human
caauuuauaccuc

SEQ ID NO: 3395373 - RNA, 21 nt, Human
caauuuauauuuaauaaaauu

SEQ ID NO: 3395374 - RNA, 14 nt, Human
caauuuauuaaaau

SEQ ID NO: 3395375 - RNA, 20 nt, Human
caauuuauuauggcacauca

SEQ ID NO: 3395376 - RNA, 17 nt, Human
caauuuauucaagaaaa

SEQ ID NO: 3395377 - RNA, 16 nt, Human
caauuuauugcacaaa

SEQ ID NO: 3395378 - RNA, 22 nt, Human
caauuuauugcacaaaauauaa

SEQ ID NO: 3395379 - RNA, 13 nt, Human
caauuuauuugaa

SEQ ID NO: 3395380 - RNA, 15 nt, Human
caauuuauuugaaug

SEQ ID NO: 3395381 - RNA, 19 nt, Human
caauuuauuuuauuuuagc

SEQ ID NO: 3395382 - RNA, 19 nt, Human
caauuucaagguucuaacc

SEQ ID NO: 3395383 - RNA, 11 nt, Human
caauuucaagu

SEQ ID NO: 3395384 - RNA, 19 nt, Human
caauuucaauuuugucugu

SEQ ID NO: 3395385 - RNA, 19 nt, Human
caauuuccuuuauauuuag

SEQ ID NO: 3395386 - RNA, 20 nt, Human
caauuuccuuuauauuuagu

SEQ ID NO: 3395387 - RNA, 12 nt, Human
caauuucucccc

SEQ ID NO: 3395388 - RNA, 13 nt, Human
caauuucucccca

SEQ ID NO: 3395389 - RNA, 14 nt, Human
caauuucuccccag

SEQ ID NO: 3395390 - RNA, 15 nt, Human
caauuucuccccagg

SEQ ID NO: 3395391 - RNA, 13 nt, Human
caauuucugaaca

SEQ ID NO: 3395392 - RNA, 22 nt, Human
caauuucuguccuucagaugga

SEQ ID NO: 3395393 - RNA, 22 nt, Human
caauuucuguguugccaagcuc

SEQ ID NO: 3395394 - RNA, 16 nt, Human
caauuugauacauaau

SEQ ID NO: 3395395 - RNA, 14 nt, Human
caauuugcacauua

SEQ ID NO: 3395396 - RNA, 19 nt, Human
caauuuggcaauuuugugg

SEQ ID NO: 3395397 - RNA, 21 nt, Human
caauuugggcuuccuguuugu

SEQ ID NO: 3395398 - RNA, 19 nt, Human
caauuuguaaaaacagcau

SEQ ID NO: 3395399 - RNA, 23 nt, Human
caauuuguaaaaacagcauugcu

SEQ ID NO: 3395400 - RNA, 23 nt, Human
caauuuguaauugcuuacauuuu

SEQ ID NO: 3395401 - RNA, 16 nt, Human
caauuuguauaaaaug

SEQ ID NO: 3395402 - RNA, 18 nt, Human
caauuugucauuuugaag

SEQ ID NO: 3395403 - RNA, 19 nt, Human
caauuuguuugugcuucua

SEQ ID NO: 3395404 - RNA, 12 nt, Human
caauuuuaaaga

SEQ ID NO: 3395405 - RNA, 22 nt, Human
caauuuuaacuuagagcuuuuu

SEQ ID NO: 3395406 - RNA, 17 nt, Human
caauuuuaaugcuauuu

SEQ ID NO: 3395407 - RNA, 19 nt, Human
caauuuuaauuuaguaaau

SEQ ID NO: 3395408 - RNA, 21 nt, Human
caauuuuaauuuaguaaaugu

SEQ ID NO: 3395409 - RNA, 14 nt, Human
caauuuucacugug

SEQ ID NO: 3395410 - RNA, 15 nt, Human
caauuuucacugugu

SEQ ID NO: 3395411 - RNA, 12 nt, Human
caauuuucagau

SEQ ID NO: 3395412 - RNA, 10 nt, Human
caauuuuccu

SEQ ID NO: 3395413 - RNA, 15 nt, Human
caauuuuccuugaag

SEQ ID NO: 3395414 - RNA, 18 nt, Human
caauuuuccuugaagccg

SEQ ID NO: 3395415 - RNA, 16 nt, Human
caauuuucuaagcaau

SEQ ID NO: 3395416 - RNA, 22 nt, Human
caauuuucuaagcaauuucuug

SEQ ID NO: 3395417 - RNA, 19 nt, Human
caauuuucuuuaaccaguc

SEQ ID NO: 3395418 - RNA, 18 nt, Human
caauuuugcaugcucgau

SEQ ID NO: 3395419 - RNA, 12 nt, Human
caauuuuguaac

SEQ ID NO: 3395420 - RNA, 14 nt, Human
caauuuuugccuuc

SEQ ID NO: 3395421 - RNA, 18 nt, Human
caauuuuugucucagaag

SEQ ID NO: 3395422 - RNA, 20 nt, Human
caauuuuuuaagugaaaaua

SEQ ID NO: 3395423 - RNA, 17 nt, Human
caauuuuuuuuauuagu

SEQ ID NO: 3395424 - RNA, 23 nt, Human
caauuuuuuuuauuaguauuguu

SEQ ID NO: 3395425 - RNA, 16 nt, Human
caauuuuuuuuuccuu

SEQ ID NO: 3395426 - RNA, 12 nt, Human
cacaaaaaugaa

SEQ ID NO: 3395427 - RNA, 20 nt, Human
cacaaaaauuugaacacugg

SEQ ID NO: 3395428 - RNA, 17 nt, Human
cacaaaaccuguccuau

SEQ ID NO: 3395429 - RNA, 20 nt, Human
cacaaaacuccgcccccagc

SEQ ID NO: 3395430 - RNA, 23 nt, Human
cacaaaacuccgcccccagccua

SEQ ID NO: 3395431 - RNA, 18 nt, Human
cacaaaaguuucucuuuu

SEQ ID NO: 3395432 - RNA, 14 nt, Human
cacaaacagaggcc

SEQ ID NO: 3395433 - RNA, 20 nt, Human
cacaaaccacaacugacaca

SEQ ID NO: 3395434 - RNA, 15 nt, Human
cacaaaccaugcaaa

SEQ ID NO: 3395435 - RNA, 17 nt, Human
cacaaaccugccugggu

SEQ ID NO: 3395436 - RNA, 13 nt, Human
cacaaacucacca

SEQ ID NO: 3395437 - RNA, 17 nt, Human
cacaaacuguaauacaa

SEQ ID NO: 3395438 - RNA, 16 nt, Human
cacaaagacccuggcu

SEQ ID NO: 3395439 - RNA, 12 nt, Human
cacacagcugcc

SEQ ID NO: 3395440 - RNA, 14 nt, Human
cacacagcugccgg

SEQ ID NO: 3395441 - RNA, 18 nt, Human
cacacaggacccccuucc

SEQ ID NO: 3395442 - RNA, 19 nt, Human
cacacaggcaacugaggca

SEQ ID NO: 3395443 - RNA, 20 nt, Human
cacacaggcaacugaggcag

SEQ ID NO: 3395444 - RNA, 17 nt, Human
cacacaggcauuuccug

SEQ ID NO: 3395445 - RNA, 20 nt, Human
cacacaggcauuuccugggu

SEQ ID NO: 3395446 - RNA, 18 nt, Human
cacacagguggugucacu

SEQ ID NO: 3395447 - RNA, 20 nt, Human
cacacaguauuacuucugcu

SEQ ID NO: 3395448 - RNA, 18 nt, Human
cacacagugagucgagga

SEQ ID NO: 3395449 - RNA, 15 nt, Human
cacacauacacacac

SEQ ID NO: 3395450 - RNA, 23 nt, Human
cacacauauaaacaucacacaca

SEQ ID NO: 3395451 - RNA, 15 nt, Human
cacacaucaucugua

SEQ ID NO: 3395452 - RNA, 12 nt, Human
cacacaucccag

SEQ ID NO: 3395453 - RNA, 14 nt, Human
cacacaucccagcc

SEQ ID NO: 3395454 - RNA, 17 nt, Human
cacacaucccagcccaa

SEQ ID NO: 3395455 - RNA, 18 nt, Human
cacacaugcauacacaca

SEQ ID NO: 3395456 - RNA, 19 nt, Human
cacacaugcauacacacac

SEQ ID NO: 3395457 - RNA, 14 nt, Human
cacacauuucacug

SEQ ID NO: 3395458 - RNA, 13 nt, Human
cacacauuugccu

SEQ ID NO: 3395459 - RNA, 18 nt, Human
cacacauuuguguaaaca

SEQ ID NO: 3395460 - RNA, 20 nt, Human
cacacauuuuuuaaaugcac

SEQ ID NO: 3395461 - RNA, 20 nt, Human
cacaccaaagggagaguucc

SEQ ID NO: 3395462 - RNA, 16 nt, Human
cacaccacaucuaagc

SEQ ID NO: 3395463 - RNA, 22 nt, Human
cacaccagagcccaccuuggcu

SEQ ID NO: 3395464 - RNA, 12 nt, Human
cacaccagccau

SEQ ID NO: 3395465 - RNA, 17 nt, Human
cacaccaggcugugggc

SEQ ID NO: 3395466 - RNA, 20 nt, Human
cacaccaggcugugggccuc

SEQ ID NO: 3395467 - RNA, 22 nt, Human
cacaccaggcugugggccucaa

SEQ ID NO: 3395468 - RNA, 18 nt, Human
cacaccagggccagccuc

SEQ ID NO: 3395469 - RNA, 15 nt, Human
cacaccauaagcuac

SEQ ID NO: 3395470 - RNA, 14 nt, Human
cacacccaaagcug

SEQ ID NO: 3395471 - RNA, 19 nt, Human
cacacccaaagcugagccu

SEQ ID NO: 3395472 - RNA, 14 nt, Human
cacacccacucagc

SEQ ID NO: 3395473 - RNA, 13 nt, Human
cacacccagccuc

SEQ ID NO: 3395474 - RNA, 16 nt, Human
cacacccagccucagu

SEQ ID NO: 3395475 - RNA, 19 nt, Human
cacacccagccucaguccu

SEQ ID NO: 3395476 - RNA, 23 nt, Human
cacacccaggcacuuaagcacaa

SEQ ID NO: 3395477 - RNA, 14 nt, Human
cacaccccaccugc

SEQ ID NO: 3395478 - RNA, 15 nt, Human
cacaccccaccugcg

SEQ ID NO: 3395479 - RNA, 19 nt, Human
cacaccccaccugcgcuuc

SEQ ID NO: 3395480 - RNA, 13 nt, Human
cacacccccaccc

SEQ ID NO: 3395481 - RNA, 22 nt, Human
cacacccugaggucagggagug

SEQ ID NO: 3395482 - RNA, 20 nt, Human
cacaccgagggcgaccccgu

SEQ ID NO: 3395483 - RNA, 23 nt, Human
cacaccuaagggacauguuuuga

SEQ ID NO: 3395484 - RNA, 15 nt, Human
cacaccuagccagcu

SEQ ID NO: 3395485 - RNA, 17 nt, Human
cacaccucaguucccuu

SEQ ID NO: 3395486 - RNA, 21 nt, Human
cacaccucaguucccuuggcc

SEQ ID NO: 3395487 - RNA, 16 nt, Human
cacaccucccugaacc

SEQ ID NO: 3395488 - RNA, 17 nt, Human
cacaccucccugaacca

SEQ ID NO: 3395489 - RNA, 16 nt, Human
cacaccuccucccacu

SEQ ID NO: 3395490 - RNA, 21 nt, Human
cacaccuccucccacugccca

SEQ ID NO: 3395491 - RNA, 23 nt, Human
cacaccuccucccacugcccacu

SEQ ID NO: 3395492 - RNA, 16 nt, Human
cacaccugacucugaa

SEQ ID NO: 3395493 - RNA, 13 nt, Human
cacaccuggcccu

SEQ ID NO: 3395494 - RNA, 17 nt, Human
cacaccuggcccugggg

SEQ ID NO: 3395495 - RNA, 16 nt, Human
cacaccuguagcacuu

SEQ ID NO: 3395496 - RNA, 19 nt, Human
cacaccuguagucccagcu

SEQ ID NO: 3395497 - RNA, 20 nt, Human
cacacgaccggggccagcac

SEQ ID NO: 3395498 - RNA, 17 nt, Human
cacacgagaaccugaag

SEQ ID NO: 3395499 - RNA, 23 nt, Human
cacacgcacacacacacacagga

SEQ ID NO: 3395500 - RNA, 13 nt, Human
cacacgcacgcac

SEQ ID NO: 3395501 - RNA, 15 nt, Human
cacacgcacgcacac

SEQ ID NO: 3395502 - RNA, 14 nt, Human
cacacgcaggaacu

SEQ ID NO: 3395503 - RNA, 21 nt, Human
cacacgcaggaacucccagca

SEQ ID NO: 3395504 - RNA, 17 nt, Human
cacacgccucccacugg

SEQ ID NO: 3395505 - RNA, 14 nt, Human
cacacgcugccuuc

SEQ ID NO: 3395506 - RNA, 18 nt, Human
cacacggaggcaucugca

SEQ ID NO: 3395507 - RNA, 20 nt, Human
cacacggaggcaucugcacc

SEQ ID NO: 3395508 - RNA, 20 nt, Human
cacacgucauuucuuagcua

SEQ ID NO: 3395509 - RNA, 16 nt, Human
cacacuacaccacaca

SEQ ID NO: 3395510 - RNA, 18 nt, Human
cacacuacaccacacaca

SEQ ID NO: 3395511 - RNA, 23 nt, Human
cacacuacaccacacacaacagc

SEQ ID NO: 3395512 - RNA, 22 nt, Human
cacacuaccgaaugugucuuua

SEQ ID NO: 3395513 - RNA, 17 nt, Human
cacacuagccucuccag

SEQ ID NO: 3395514 - RNA, 18 nt, Human
cacacuagccucuccagg

SEQ ID NO: 3395515 - RNA, 18 nt, Human
cacacuauuaccaugaga

SEQ ID NO: 3395516 - RNA, 12 nt, Human
cacacuauuuua

SEQ ID NO: 3395517 - RNA, 14 nt, Human
cacacuauuuuaga

SEQ ID NO: 3395518 - RNA, 14 nt, Human
cacacucccaaggu

SEQ ID NO: 3395519 - RNA, 17 nt, Human
cacacuccccugcacug

SEQ ID NO: 3395520 - RNA, 21 nt, Human
cacacucccgagacggcacug

SEQ ID NO: 3395521 - RNA, 17 nt, Human
cacacugaggcagggaa

SEQ ID NO: 3395522 - RNA, 18 nt, Human
cacacugaggcagggaag

SEQ ID NO: 3395523 - RNA, 17 nt, Human
cacacugcaagagccuu

SEQ ID NO: 3395524 - RNA, 18 nt, Human
cacacugcaagagccuug

SEQ ID NO: 3395525 - RNA, 20 nt, Human
cacacugcaagagccuuggu

SEQ ID NO: 3395526 - RNA, 21 nt, Human
cacacugcaagagccuuggug

SEQ ID NO: 3395527 - RNA, 12 nt, Human
cacacugcacaa

SEQ ID NO: 3395528 - RNA, 18 nt, Human
cacacugcacuguuuuca

SEQ ID NO: 3395529 - RNA, 23 nt, Human
cacacugcuaggugggccagccc

SEQ ID NO: 3395530 - RNA, 19 nt, Human
cacacuggggugccgccug

SEQ ID NO: 3395531 - RNA, 21 nt, Human
cacacugggugcccaagcuca

SEQ ID NO: 3395532 - RNA, 15 nt, Human
cacacuggugacugc

SEQ ID NO: 3395533 - RNA, 16 nt, Human
cacacugguucucaau

SEQ ID NO: 3395534 - RNA, 18 nt, Human
cacacugguucucaauga

SEQ ID NO: 3395535 - RNA, 19 nt, Human
cacacugguucucaaugaa

SEQ ID NO: 3395536 - RNA, 23 nt, Human
cacacuguagcauuacagugggu

SEQ ID NO: 3395537 - RNA, 12 nt, Human
cacacugugaca

SEQ ID NO: 3395538 - RNA, 14 nt, Human
cacacugugacaca

SEQ ID NO: 3395539 - RNA, 14 nt, Human
cacacugugcuuuc

SEQ ID NO: 3395540 - RNA, 20 nt, Human
cacacugugcuuucuauugu

SEQ ID NO: 3395541 - RNA, 22 nt, Human
cacacugugcuuucuauuguac

SEQ ID NO: 3395542 - RNA, 23 nt, Human
cacacugugcuuucuauuguaca

SEQ ID NO: 3395543 - RNA, 19 nt, Human
cacacuguguccuggugcu

SEQ ID NO: 3395544 - RNA, 20 nt, Human
cacacuguguccuggugcuc

SEQ ID NO: 3395545 - RNA, 14 nt, Human
cacacuuacuuuuu

SEQ ID NO: 3395546 - RNA, 16 nt, Human
cacacuuagcuggaga

SEQ ID NO: 3395547 - RNA, 20 nt, Human
cacacuucaggcucuucucc

SEQ ID NO: 3395548 - RNA, 22 nt, Human
cacacuucaggcucuucuccuu

SEQ ID NO: 3395549 - RNA, 15 nt, Human
cacacuuccugucca

SEQ ID NO: 3395550 - RNA, 19 nt, Human
cacacuuccuguccagaga

SEQ ID NO: 3395551 - RNA, 20 nt, Human
cacacuuccuguccagagag

SEQ ID NO: 3395552 - RNA, 23 nt, Human
cacacuuccuguccagagagaga

SEQ ID NO: 3395553 - RNA, 17 nt, Human
cacacuucucaggacac

SEQ ID NO: 3395554 - RNA, 16 nt, Human
cacacuugaaaccuuu

SEQ ID NO: 3395555 - RNA, 19 nt, Human
cacacuugagaggaugaau

SEQ ID NO: 3395556 - RNA, 22 nt, Human
cacacuugguuggguccucaca

SEQ ID NO: 3395557 - RNA, 10 nt, Human
cacacuuguc

SEQ ID NO: 3395558 - RNA, 19 nt, Human
cacacuugugugugggcug

SEQ ID NO: 3395559 - RNA, 23 nt, Human
cacacuugugugugggcugugag

SEQ ID NO: 3395560 - RNA, 12 nt, Human
cacacuuuggua

SEQ ID NO: 3395561 - RNA, 12 nt, Human
cacagaaaauau

SEQ ID NO: 3395562 - RNA, 14 nt, Human
cacagaaaauauac

SEQ ID NO: 3395563 - RNA, 18 nt, Human
cacagaaaauauacugua

SEQ ID NO: 3395564 - RNA, 20 nt, Human
cacagaaaauauacuguaaa

SEQ ID NO: 3395565 - RNA, 22 nt, Human
cacagaaaauggaagacagcuc

SEQ ID NO: 3395566 - RNA, 19 nt, Human
cacagaaaauucuucucca

SEQ ID NO: 3395567 - RNA, 13 nt, Human
cacagaaacacaa

SEQ ID NO: 3395568 - RNA, 18 nt, Human
cacagaaacacaauauuu

SEQ ID NO: 3395569 - RNA, 15 nt, Human
cacagaaacacugcc

SEQ ID NO: 3395570 - RNA, 16 nt, Human
cacagaaaccaauuuu

SEQ ID NO: 3395571 - RNA, 12 nt, Human
cacagaaaccuu

SEQ ID NO: 3395572 - RNA, 11 nt, Human
cacagaaagag

SEQ ID NO: 3395573 - RNA, 14 nt, Human
cacagaaagagagc

SEQ ID NO: 3395574 - RNA, 23 nt, Human
cacagaaauauauauacauaugu

SEQ ID NO: 3395575 - RNA, 22 nt, Human
cacagaaaugagaucaggcucu

SEQ ID NO: 3395576 - RNA, 16 nt, Human
cacagaaaugcugcug

SEQ ID NO: 3395577 - RNA, 18 nt, Human
cacagaaaugcugcuggc

SEQ ID NO: 3395578 - RNA, 21 nt, Human
cacagaaaugcugcuggccaa

SEQ ID NO: 3395579 - RNA, 13 nt, Human
cacagaacccuug

SEQ ID NO: 3395580 - RNA, 18 nt, Human
cacagaaggggacugcca

SEQ ID NO: 3395581 - RNA, 22 nt, Human
cacagaaggggacugccaccuc

SEQ ID NO: 3395582 - RNA, 22 nt, Human
cacagaaguccuguaugucugu

SEQ ID NO: 3395583 - RNA, 18 nt, Human
cacaucagcuagcaaaag

SEQ ID NO: 3395584 - RNA, 13 nt, Human
cacaucagcuugc

SEQ ID NO: 3395585 - RNA, 17 nt, Human
cacaucagucacaaguu

SEQ ID NO: 3395586 - RNA, 19 nt, Human
cacaucaucuguaagcugu

SEQ ID NO: 3395587 - RNA, 22 nt, Human
cacauccauucccaagaaaugc

SEQ ID NO: 3395588 - RNA, 13 nt, Human
cacaucccacccc

SEQ ID NO: 3395589 - RNA, 21 nt, Human
cacaucccaccccauccucca

SEQ ID NO: 3395590 - RNA, 15 nt, Human
cacaucccagcccaa

SEQ ID NO: 3395591 - RNA, 12 nt, Human
cacaucccaggc

SEQ ID NO: 3395592 - RNA, 16 nt, Human
cacaucccugggccug

SEQ ID NO: 3395593 - RNA, 18 nt, Human
cacaucccugggccugcu

SEQ ID NO: 3395594 - RNA, 21 nt, Human
cacaucccugggccugcugcu

SEQ ID NO: 3395595 - RNA, 23 nt, Human
cacauccgcgugugccugugugc

SEQ ID NO: 3395596 - RNA, 21 nt, Human
cacauccuugacuuuuuagau

SEQ ID NO: 3395597 - RNA, 15 nt, Human
cacauccuuucuaaa

SEQ ID NO: 3395598 - RNA, 14 nt, Human
cacaucuaagccug

SEQ ID NO: 3395599 - RNA, 17 nt, Human
cacaucuaagccugaag

SEQ ID NO: 3395600 - RNA, 21 nt, Human
cacaucucaacaggccucagg

SEQ ID NO: 3395601 - RNA, 22 nt, Human
cacaucuccuccauacucagga

SEQ ID NO: 3395602 - RNA, 15 nt, Human
cacaucuugcucugc

SEQ ID NO: 3395603 - RNA, 21 nt, Human
cacaucuuggcuauguaauuc

SEQ ID NO: 3395604 - RNA, 15 nt, Human
cacaucuuuaucugu

SEQ ID NO: 3395605 - RNA, 21 nt, Human
cacaugaaaccuacacacugu

SEQ ID NO: 3395606 - RNA, 15 nt, Human
cacaugaacuuagau

SEQ ID NO: 3395607 - RNA, 18 nt, Human
cacaugaagaaauacugc

SEQ ID NO: 3395608 - RNA, 20 nt, Human
cacaugaaguccaagcauuu

SEQ ID NO: 3395609 - RNA, 18 nt, Human
cacaugaauuauuacagu

SEQ ID NO: 3395610 - RNA, 15 nt, Human
cacaugagauaauau

SEQ ID NO: 3395611 - RNA, 21 nt, Human
cacaugagaucuaggugagga

SEQ ID NO: 3395612 - RNA, 19 nt, Human
cacaugauuucacaaauau

SEQ ID NO: 3395613 - RNA, 20 nt, Human
cacaugauuucacaaauauu

SEQ ID NO: 3395614 - RNA, 20 nt, Human
cacaugcaaggucauuuuuu

SEQ ID NO: 3395615 - RNA, 12 nt, Human
cacaugcacaca

SEQ ID NO: 3395616 - RNA, 13 nt, Human
cacaugcacacac

SEQ ID NO: 3395617 - RNA, 14 nt, Human
cacaugcagcugca

SEQ ID NO: 3395618 - RNA, 14 nt, Human
cacaugcauacaca

SEQ ID NO: 3395619 - RNA, 19 nt, Human
cacaugccaggggccuuug

SEQ ID NO: 3395620 - RNA, 18 nt, Human
cacaugccucucucaggc

SEQ ID NO: 3395621 - RNA, 21 nt, Human
cacaugccucucucaggccaa

SEQ ID NO: 3395622 - RNA, 9 nt, Human
cacaugcua

SEQ ID NO: 3395623 - RNA, 22 nt, Human
cacaugcucaaugacucucugg

SEQ ID NO: 3395624 - RNA, 19 nt, Human
cacaugcuggacaggucug

SEQ ID NO: 3395625 - RNA, 16 nt, Human
cacaugcuggccagcc

SEQ ID NO: 3395626 - RNA, 19 nt, Human
cacaugcuggccagccugg

SEQ ID NO: 3395627 - RNA, 14 nt, Human
cacauggaaaccca

SEQ ID NO: 3395628 - RNA, 17 nt, Human
cacauggaaugaggguu

SEQ ID NO: 3395629 - RNA, 19 nt, Human
cacauggcuuccuccugcg

SEQ ID NO: 3395630 - RNA, 23 nt, Human
cacaugggagcaguccaugcaug

SEQ ID NO: 3395631 - RNA, 18 nt, Human
cacaugggugaacacuca

SEQ ID NO: 3395632 - RNA, 22 nt, Human
cacauggugacuuuugaaaaga

SEQ ID NO: 3395633 - RNA, 14 nt, Human
cacauguauguuuu

SEQ ID NO: 3395634 - RNA, 20 nt, Human
cacaugucaccguggaccuu

SEQ ID NO: 3395635 - RNA, 13 nt, Human
cacaugucuuaau

SEQ ID NO: 3395636 - RNA, 17 nt, Human
cacaugucuuaaugaag

SEQ ID NO: 3395637 - RNA, 18 nt, Human
cacaugucuuaaugaagu

SEQ ID NO: 3395638 - RNA, 22 nt, Human
cacaugucuuaaugaaguuuga

SEQ ID NO: 3395639 - RNA, 13 nt, Human
cacaugugacaca

SEQ ID NO: 3395640 - RNA, 15 nt, Human
cacaugugacacaua

SEQ ID NO: 3395641 - RNA, 22 nt, Human
cacaugugagcaugucacuucc

SEQ ID NO: 3395642 - RNA, 14 nt, Human
cacaugugcugccc

SEQ ID NO: 3395643 - RNA, 12 nt, Human
cacauguuacug

SEQ ID NO: 3395644 - RNA, 21 nt, Human
cacauguuuagaguugcaauc

SEQ ID NO: 3395645 - RNA, 13 nt, Human
cacauguuuucaa

SEQ ID NO: 3395646 - RNA, 14 nt, Human
cacauguuuucaaa

SEQ ID NO: 3395647 - RNA, 15 nt, Human
cacauguuuucaaau

SEQ ID NO: 3395648 - RNA, 18 nt, Human
cacauguuuucaaaugga

SEQ ID NO: 3395649 - RNA, 19 nt, Human
cacauuaaaaaaugaaaua

SEQ ID NO: 3395650 - RNA, 22 nt, Human
cacauuaaaaaaugaaauauuu

SEQ ID NO: 3395651 - RNA, 16 nt, Human
cacauuaaagaagacc

SEQ ID NO: 3395652 - RNA, 17 nt, Human
cacauuaaagguacuuu

SEQ ID NO: 3395653 - RNA, 13 nt, Human
cacauuagaacuu

SEQ ID NO: 3395654 - RNA, 14 nt, Human
cacauuagaacuuc

SEQ ID NO: 3395655 - RNA, 21 nt, Human
cacauuagauuuuauuuuacu

SEQ ID NO: 3395656 - RNA, 22 nt, Human
cacauuaucgggagcagugucu

SEQ ID NO: 3395657 - RNA, 23 nt, Human
cacauuaucgggagcagugucuu

SEQ ID NO: 3395658 - RNA, 15 nt, Human
cacauuaucuucugg

SEQ ID NO: 3395659 - RNA, 13 nt, Human
cacauuauuugca

SEQ ID NO: 3395660 - RNA, 17 nt, Human
cacauucaacccuggag

SEQ ID NO: 3395661 - RNA, 20 nt, Human
cacauucaacccuggagagu

SEQ ID NO: 3395662 - RNA, 17 nt, Human
cacauucaggaagauga

SEQ ID NO: 3395663 - RNA, 11 nt, Human
cacauuccccu

SEQ ID NO: 3395664 - RNA, 16 nt, Human
cacauucggcucccug

SEQ ID NO: 3395665 - RNA, 17 nt, Human
cacauucggcucccugg

SEQ ID NO: 3395666 - RNA, 21 nt, Human
cacauucuggcucagggaggu

SEQ ID NO: 3395667 - RNA, 16 nt, Human
cacauucuuauaaaua

SEQ ID NO: 3395668 - RNA, 22 nt, Human
cacauugagcugauauaaauuc

SEQ ID NO: 3395669 - RNA, 23 nt, Human
cacauugcauucuauugccuucu

SEQ ID NO: 3395670 - RNA, 21 nt, Human
cacauuggaagagcagcaccu

SEQ ID NO: 3395671 - RNA, 18 nt, Human
cacauuggagauguuuag

SEQ ID NO: 3395672 - RNA, 18 nt, Human
cacauugggcagcgcccu

SEQ ID NO: 3395673 - RNA, 22 nt, Human
cacauugggcagcgcccuuccu

SEQ ID NO: 3395674 - RNA, 21 nt, Human
cacauuggucuaucuacuggc

SEQ ID NO: 3395675 - RNA, 20 nt, Human
cacauugguguuguacucaa

SEQ ID NO: 3395676 - RNA, 12 nt, Human
cacauugugcag

SEQ ID NO: 3395677 - RNA, 20 nt, Human
cacauugugucacaucauga

SEQ ID NO: 3395678 - RNA, 16 nt, Human
cacauuguuauuuuca

SEQ ID NO: 3395679 - RNA, 17 nt, Human
cacauuguuguuuuuuu

SEQ ID NO: 3395680 - RNA, 22 nt, Human
cacauuguuguuuuuuuaauag

SEQ ID NO: 3395681 - RNA, 12 nt, Human
cacauuguuuua

SEQ ID NO: 3395682 - RNA, 16 nt, Human
cacauuguuuuaaaaa

SEQ ID NO: 3395683 - RNA, 18 nt, Human
cacauuguuuuaaaaaga

SEQ ID NO: 3395684 - RNA, 19 nt, Human
cacauuuaagagacaguca

SEQ ID NO: 3395685 - RNA, 13 nt, Human
cacauuuaaggau

SEQ ID NO: 3395686 - RNA, 19 nt, Human
cacauuuagucucuuuauu

SEQ ID NO: 3395687 - RNA, 19 nt, Human
cacauuugcuuuuugugau

SEQ ID NO: 3395688 - RNA, 15 nt, Human
cacauuuuaaaagug

SEQ ID NO: 3395689 - RNA, 18 nt, Human
cacauuuuaguccagaga

SEQ ID NO: 3395690 - RNA, 17 nt, Human
cacauuuuauuuuauua

SEQ ID NO: 3395691 - RNA, 20 nt, Human
cacauuuuauuuuauuaugc

SEQ ID NO: 3395692 - RNA, 21 nt, Human
cacauuuuauuuuauuaugca

SEQ ID NO: 3395693 - RNA, 18 nt, Human
cacauuuuccuuuucaaa

SEQ ID NO: 3395694 - RNA, 19 nt, Human
cacauuuugguucuucuca

SEQ ID NO: 3395695 - RNA, 16 nt, Human
cacauuuuuaaauugu

SEQ ID NO: 3395696 - RNA, 21 nt, Human
cacauuuuuauaccuguuuaa

SEQ ID NO: 3395697 - RNA, 13 nt, Human
cacauuuuucuua

SEQ ID NO: 3395698 - RNA, 14 nt, Human
cacauuuuucuuag

SEQ ID NO: 3395699 - RNA, 17 nt, Human
cacauuuuuuaaaugca

SEQ ID NO: 3395700 - RNA, 14 nt, Human
caccaaaaaccuau

SEQ ID NO: 3395701 - RNA, 15 nt, Human
caccaaaagaaguaa

SEQ ID NO: 3395702 - RNA, 18 nt, Human
caccaaaauaagaaaaga

SEQ ID NO: 3395703 - RNA, 14 nt, Human
caccaaagaugcag

SEQ ID NO: 3395704 - RNA, 18 nt, Human
caccaaagaugcagccgc

SEQ ID NO: 3395705 - RNA, 14 nt, Human
caccaaagcugccc

SEQ ID NO: 3395706 - RNA, 13 nt, Human
caccaaaggccag

SEQ ID NO: 3395707 - RNA, 22 nt, Human
caccaaagggagaguuccagag

SEQ ID NO: 3395708 - RNA, 15 nt, Human
caccaaaguauuuuu

SEQ ID NO: 3395709 - RNA, 13 nt, Human
caccaaaguucua

SEQ ID NO: 3395710 - RNA, 18 nt, Human
caccaaaucaaaaucucu

SEQ ID NO: 3395711 - RNA, 21 nt, Human
caccaaaucaaaaucucucca

SEQ ID NO: 3395712 - RNA, 14 nt, Human
caccaacaucccau

SEQ ID NO: 3395713 - RNA, 17 nt, Human
caccaacaucccauugc

SEQ ID NO: 3395714 - RNA, 22 nt, Human
caccaacaucccauugcccugg

SEQ ID NO: 3395715 - RNA, 14 nt, Human
caccaacccagccg

SEQ ID NO: 3395716 - RNA, 17 nt, Human
caccaacccagccgcug

SEQ ID NO: 3395717 - RNA, 13 nt, Human
caccaacccucag

SEQ ID NO: 3395718 - RNA, 14 nt, Human
caccaacccucagg

SEQ ID NO: 3395719 - RNA, 15 nt, Human
caccaaccgacaggc

SEQ ID NO: 3395720 - RNA, 14 nt, Human
caccaacgucugug

SEQ ID NO: 3395721 - RNA, 22 nt, Human
caccaacuccuaguucuagaaa

SEQ ID NO: 3395722 - RNA, 18 nt, Human
caccaacucuugcagguc

SEQ ID NO: 3395723 - RNA, 16 nt, Human
caccaacuuacaaaaa

SEQ ID NO: 3395724 - RNA, 15 nt, Human
caccaagaaagcagg

SEQ ID NO: 3395725 - RNA, 19 nt, Human
caccaagacuugaaggugc

SEQ ID NO: 3395726 - RNA, 16 nt, Human
caccaagcacagcagc

SEQ ID NO: 3395727 - RNA, 21 nt, Human
caccaagcaggaaaugaaaau

SEQ ID NO: 3395728 - RNA, 18 nt, Human
cacuucagggcagauuuu

SEQ ID NO: 3395729 - RNA, 19 nt, Human
cacuucagggcagauuuua

SEQ ID NO: 3395730 - RNA, 23 nt, Human
cacuucagggcagauuuuaguuu

SEQ ID NO: 3395731 - RNA, 18 nt, Human
cacuucagguauaccuca

SEQ ID NO: 3395732 - RNA, 19 nt, Human
cacuucagguauaccucac

SEQ ID NO: 3395733 - RNA, 14 nt, Human
cacuucauaaucca

SEQ ID NO: 3395734 - RNA, 16 nt, Human
cacuucauugagaguu

SEQ ID NO: 3395735 - RNA, 20 nt, Human
cacuuccaccagccugcacu

SEQ ID NO: 3395736 - RNA, 12 nt, Human
cacuuccagggg

SEQ ID NO: 3395737 - RNA, 12 nt, Human
cacuuccccucc

SEQ ID NO: 3395738 - RNA, 13 nt, Human
cacuuccccuccu

SEQ ID NO: 3395739 - RNA, 15 nt, Human
cacuuccccuccuac

SEQ ID NO: 3395740 - RNA, 21 nt, Human
cacuuccccuccuaccccucc

SEQ ID NO: 3395741 - RNA, 16 nt, Human
cacuucccuacaugga

SEQ ID NO: 3395742 - RNA, 14 nt, Human
cacuucccucuguu

SEQ ID NO: 3395743 - RNA, 18 nt, Human
cacuucccucuguuucuc

SEQ ID NO: 3395744 - RNA, 13 nt, Human
cacuucccugcug

SEQ ID NO: 3395745 - RNA, 14 nt, Human
cacuucccugcugc

SEQ ID NO: 3395746 - RNA, 16 nt, Human
cacuucccugcugccu

SEQ ID NO: 3395747 - RNA, 18 nt, Human
cacuucccugcugccugu

SEQ ID NO: 3395748 - RNA, 18 nt, Human
cacuucccugcuuaaauu

SEQ ID NO: 3395749 - RNA, 17 nt, Human
cacuuccgucacauccc

SEQ ID NO: 3395750 - RNA, 23 nt, Human
cacuuccuacaagagcagccugu

SEQ ID NO: 3395751 - RNA, 14 nt, Human
cacuuccugccuaa

SEQ ID NO: 3395752 - RNA, 13 nt, Human
cacuuccugucca

SEQ ID NO: 3395753 - RNA, 17 nt, Human
cacuuccuguccagaga

SEQ ID NO: 3395754 - RNA, 23 nt, Human
cacuucggccaggucacacgacc

SEQ ID NO: 3395755 - RNA, 23 nt, Human
cacuucgggcuguguaaacacag

SEQ ID NO: 3395756 - RNA, 23 nt, Human
cacuucgugggaucugccccucc

SEQ ID NO: 3395757 - RNA, 19 nt, Human
cacuucuaagaaaagccua

SEQ ID NO: 3395758 - RNA, 21 nt, Human
cacuucuaaguugaguauauu

SEQ ID NO: 3395759 - RNA, 15 nt, Human
cacuucucaggacac

SEQ ID NO: 3395760 - RNA, 22 nt, Human
cacuucucaggacacaggccug

SEQ ID NO: 3395761 - RNA, 23 nt, Human
cacuucucuuaaacuugugaaug

SEQ ID NO: 3395762 - RNA, 13 nt, Human
cacuucugaccac

SEQ ID NO: 3395763 - RNA, 14 nt, Human
cacuucugcacuug

SEQ ID NO: 3395764 - RNA, 22 nt, Human
cacuucugugagacccccacac

SEQ ID NO: 3395765 - RNA, 16 nt, Human
cacuucuuccuuucuc

SEQ ID NO: 3395766 - RNA, 17 nt, Human
cacuucuuccuuucucu

SEQ ID NO: 3395767 - RNA, 19 nt, Human
cacuucuuccuuucucuuu

SEQ ID NO: 3395768 - RNA, 14 nt, Human
cacuucuucugucc

SEQ ID NO: 3395769 - RNA, 17 nt, Human
cacuucuuucccuuccu

SEQ ID NO: 3395770 - RNA, 22 nt, Human
cacuugaacaaaaucuguugcc

SEQ ID NO: 3395771 - RNA, 20 nt, Human
cacuugaacccgggaggcag

SEQ ID NO: 3395772 - RNA, 16 nt, Human
cacuugacaucaacug

SEQ ID NO: 3395773 - RNA, 13 nt, Human
cacuugagagaaa

SEQ ID NO: 3395774 - RNA, 13 nt, Human
cacuugagaggau

SEQ ID NO: 3395775 - RNA, 15 nt, Human
cacuugaggccugau

SEQ ID NO: 3395776 - RNA, 16 nt, Human
cacuugaggccugauc

SEQ ID NO: 3395777 - RNA, 20 nt, Human
cacuugaggccugaucugcc

SEQ ID NO: 3395778 - RNA, 18 nt, Human
cacuugaggucaggaguu

SEQ ID NO: 3395779 - RNA, 23 nt, Human
cacuugaugauacaaugaacacu

SEQ ID NO: 3395780 - RNA, 23 nt, Human
cacuugcacgcccaugugugagu

SEQ ID NO: 3395781 - RNA, 18 nt, Human
cacuugcagacucuacag

SEQ ID NO: 3395782 - RNA, 19 nt, Human
cacuugcagacucuacaga

SEQ ID NO: 3395783 - RNA, 18 nt, Human
cacuugcaguggaagaua

SEQ ID NO: 3395784 - RNA, 13 nt, Human
cacuugcaucugu

SEQ ID NO: 3395785 - RNA, 14 nt, Human
cacuugcccacacc

SEQ ID NO: 3395786 - RNA, 12 nt, Human
cacuugccuggg

SEQ ID NO: 3395787 - RNA, 22 nt, Human
cacuugcggauauucuggacug

SEQ ID NO: 3395788 - RNA, 16 nt, Human
cacuugcuggaagacg

SEQ ID NO: 3395789 - RNA, 18 nt, Human
cacuuggacucuugcucu

SEQ ID NO: 3395790 - RNA, 15 nt, Human
cacuuggcagccuug

SEQ ID NO: 3395791 - RNA, 16 nt, Human
cacuuggcagccuugu

SEQ ID NO: 3395792 - RNA, 17 nt, Human
cacuuggcaucagcugg

SEQ ID NO: 3395793 - RNA, 19 nt, Human
cacuuggcaucagcuggcg

SEQ ID NO: 3395794 - RNA, 20 nt, Human
cacuuggccaagcagggagg

SEQ ID NO: 3395795 - RNA, 22 nt, Human
cacuuggcccaaguggcagagc

SEQ ID NO: 3395796 - RNA, 18 nt, Human
cacuugggggcucagcaa

SEQ ID NO: 3395797 - RNA, 16 nt, Human
cacuugggucuucccu

SEQ ID NO: 3395798 - RNA, 20 nt, Human
cacuuggugauauguccuau

SEQ ID NO: 3395799 - RNA, 19 nt, Human
cacuugguuggguccucac

SEQ ID NO: 3395800 - RNA, 20 nt, Human
cacuugguuggguccucaca

SEQ ID NO: 3395801 - RNA, 21 nt, Human
cacuugguuggguccucacau

SEQ ID NO: 3395802 - RNA, 14 nt, Human
cacuuguagauuug

SEQ ID NO: 3395803 - RNA, 12 nt, Human
cacuuguauaaa

SEQ ID NO: 3395804 - RNA, 19 nt, Human
cacuuguauaaauguauau

SEQ ID NO: 3395805 - RNA, 20 nt, Human
cacuuguauaaauguauaua

SEQ ID NO: 3395806 - RNA, 16 nt, Human
cacuuguauauacgca

SEQ ID NO: 3395807 - RNA, 16 nt, Human
cacuugucaauaaaau

SEQ ID NO: 3395808 - RNA, 20 nt, Human
cacuugucaggagugugugu

SEQ ID NO: 3395809 - RNA, 14 nt, Human
cacuuguccagcug

SEQ ID NO: 3395810 - RNA, 16 nt, Human
cacuuguccaugugaa

SEQ ID NO: 3395811 - RNA, 20 nt, Human
cacuugucccacuaucuggg

SEQ ID NO: 3395812 - RNA, 19 nt, Human
cacuuguccuuagccugga

SEQ ID NO: 3395813 - RNA, 19 nt, Human
cacuugucucauuuuaaug

SEQ ID NO: 3395814 - RNA, 22 nt, Human
cacuugucucauuuuaauguaa

SEQ ID NO: 3395815 - RNA, 11 nt, Human
cacuugugaau

SEQ ID NO: 3395816 - RNA, 13 nt, Human
cacuugugacuuu

SEQ ID NO: 3395817 - RNA, 20 nt, Human
cacuugugacuuuugcuuua

SEQ ID NO: 3395818 - RNA, 19 nt, Human
cacuugugauuauaaaauu

SEQ ID NO: 3395819 - RNA, 20 nt, Human
cacuugugcuuugcucuugu

SEQ ID NO: 3395820 - RNA, 14 nt, Human
cacuuguguguggg

SEQ ID NO: 3395821 - RNA, 17 nt, Human
cacuugugugugggcug

SEQ ID NO: 3395822 - RNA, 19 nt, Human
cacuuguguuuugcaagcc

SEQ ID NO: 3395823 - RNA, 13 nt, Human
cacuuguuccagc

SEQ ID NO: 3395824 - RNA, 17 nt, Human
cacuuguuccagcucuu

SEQ ID NO: 3395825 - RNA, 13 nt, Human
cacuuuaaaacac

SEQ ID NO: 3395826 - RNA, 18 nt, Human
cacuuuaagagagaaauc

SEQ ID NO: 3395827 - RNA, 14 nt, Human
cacuuuacccaccu

SEQ ID NO: 3395828 - RNA, 15 nt, Human
cacuuuagaugcuga

SEQ ID NO: 3395829 - RNA, 16 nt, Human
cacuuuagaugcugau

SEQ ID NO: 3395830 - RNA, 15 nt, Human
cacuuuagggcugua

SEQ ID NO: 3395831 - RNA, 21 nt, Human
cacuuuaugccggaugugcuu

SEQ ID NO: 3395832 - RNA, 22 nt, Human
cacuuuaugccggaugugcuuu

SEQ ID NO: 3395833 - RNA, 20 nt, Human
cacuuuauugccaaaaccca

SEQ ID NO: 3395834 - RNA, 17 nt, Human
cacuuucacauagaugu

SEQ ID NO: 3395835 - RNA, 12 nt, Human
cacuuucagcug

SEQ ID NO: 3395836 - RNA, 13 nt, Human
cacuuucagcugu

SEQ ID NO: 3395837 - RNA, 14 nt, Human
cacuuucagcuguc

SEQ ID NO: 3395838 - RNA, 15 nt, Human
cacuuucagcugucu

SEQ ID NO: 3395839 - RNA, 17 nt, Human
cacuuucagcugucuuu

SEQ ID NO: 3395840 - RNA, 16 nt, Human
cacuuucauugccagu

SEQ ID NO: 3395841 - RNA, 12 nt, Human
cacuuucauuuu

SEQ ID NO: 3395842 - RNA, 13 nt, Human
cacuuuccacuuc

SEQ ID NO: 3395843 - RNA, 17 nt, Human
cacuuuccacuucuucc

SEQ ID NO: 3395844 - RNA, 22 nt, Human
cacuuuccccgugggccauggc

SEQ ID NO: 3395845 - RNA, 16 nt, Human
cacuuucuaauguuuc

SEQ ID NO: 3395846 - RNA, 13 nt, Human
cacuuucuagcca

SEQ ID NO: 3395847 - RNA, 18 nt, Human
cacuuucuagccagagga

SEQ ID NO: 3395848 - RNA, 20 nt, Human
cacuuucuagccagaggaga

SEQ ID NO: 3395849 - RNA, 11 nt, Human
cacuuucucuu

SEQ ID NO: 3395850 - RNA, 22 nt, Human
cacuuucucuucuuguuucucc

SEQ ID NO: 3395851 - RNA, 11 nt, Human
cacuuucuuau

SEQ ID NO: 3395852 - RNA, 16 nt, Human
cacuuugaaauaccuc

SEQ ID NO: 3395853 - RNA, 19 nt, Human
cacuuugaaauguguuucu

SEQ ID NO: 3395854 - RNA, 13 nt, Human
cacuuugacacuu

SEQ ID NO: 3395855 - RNA, 20 nt, Human
cacuuugaugucauguguuc

SEQ ID NO: 3395856 - RNA, 17 nt, Human
cacuuugcacagcucuc

SEQ ID NO: 3395857 - RNA, 21 nt, Human
cacuuugcacgacgcccucuc

SEQ ID NO: 3395858 - RNA, 19 nt, Human
cacuuugcacugauauauc

SEQ ID NO: 3395859 - RNA, 13 nt, Human
cacuuugccuccu

SEQ ID NO: 3395860 - RNA, 20 nt, Human
cacuuuggaaguuuguguuc

SEQ ID NO: 3395861 - RNA, 20 nt, Human
cacuuuggauuucaucagac

SEQ ID NO: 3395862 - RNA, 13 nt, Human
cacuuuggcccag

SEQ ID NO: 3395863 - RNA, 16 nt, Human
cacuuuggcccagggu

SEQ ID NO: 3395864 - RNA, 18 nt, Human
cacuuuggcuuauaauuc

SEQ ID NO: 3395865 - RNA, 12 nt, Human
cacuuuggggga

SEQ ID NO: 3395866 - RNA, 19 nt, Human
cacuuugguacauggccag

SEQ ID NO: 3395867 - RNA, 20 nt, Human
cacuuugguacauggccagu

SEQ ID NO: 3395868 - RNA, 22 nt, Human
cacuuugguaccagauaacuuu

SEQ ID NO: 3395869 - RNA, 13 nt, Human
cacuuuguucugg

SEQ ID NO: 3395870 - RNA, 14 nt, Human
cacuuuguucuggc

SEQ ID NO: 3395871 - RNA, 17 nt, Human
cacuuuuaauaaacuuu

SEQ ID NO: 3395872 - RNA, 17 nt, Human
cacuuuuaaugaacaaa

SEQ ID NO: 3395873 - RNA, 18 nt, Human
cagacacaggcccggcuc

SEQ ID NO: 3395874 - RNA, 22 nt, Human
cagacacaggcccggcuccagg

SEQ ID NO: 3395875 - RNA, 15 nt, Human
cagacacaggcccuc

SEQ ID NO: 3395876 - RNA, 17 nt, Human
cagacacauguccaaga

SEQ ID NO: 3395877 - RNA, 22 nt, Human
cagacacauguccaagaagccc

SEQ ID NO: 3395878 - RNA, 15 nt, Human
cagacacccuuggag

SEQ ID NO: 3395879 - RNA, 19 nt, Human
cagacaccuugacagggca

SEQ ID NO: 3395880 - RNA, 14 nt, Human
cagacaccuuggac

SEQ ID NO: 3395881 - RNA, 19 nt, Human
cagacacgagccaccucac

SEQ ID NO: 3395882 - RNA, 17 nt, Human
cagacacggaucugaga

SEQ ID NO: 3395883 - RNA, 18 nt, Human
cagacacuaaguuauagu

SEQ ID NO: 3395884 - RNA, 21 nt, Human
cagacacuaaguuauaguaua

SEQ ID NO: 3395885 - RNA, 12 nt, Human
cagacacucugc

SEQ ID NO: 3395886 - RNA, 13 nt, Human
cagacacucugcu

SEQ ID NO: 3395887 - RNA, 21 nt, Human
cagacacugaccauccacucu

SEQ ID NO: 3395888 - RNA, 19 nt, Human
cagacacuuuggaaguuug

SEQ ID NO: 3395889 - RNA, 21 nt, Human
cagacacuuuuuugaguggau

SEQ ID NO: 3395890 - RNA, 23 nt, Human
cagacagaagucacucaauuguu

SEQ ID NO: 3395891 - RNA, 17 nt, Human
cagacagaagucuccuc

SEQ ID NO: 3395892 - RNA, 14 nt, Human
cagacagacacaca

SEQ ID NO: 3395893 - RNA, 20 nt, Human
cagacagagaauaugucugc

SEQ ID NO: 3395894 - RNA, 21 nt, Human
cagacagagaauaugucugcu

SEQ ID NO: 3395895 - RNA, 15 nt, Human
cagacagagccagga

SEQ ID NO: 3395896 - RNA, 17 nt, Human
cagacagaucuggaaug

SEQ ID NO: 3395897 - RNA, 21 nt, Human
cagacagauggaaaagggaga

SEQ ID NO: 3395898 - RNA, 17 nt, Human
cagacagcagcucaggc

SEQ ID NO: 3395899 - RNA, 14 nt, Human
cagacagcaggcag

SEQ ID NO: 3395900 - RNA, 16 nt, Human
cagacagcaggcagcg

SEQ ID NO: 3395901 - RNA, 11 nt, Human
cagacagcucc

SEQ ID NO: 3395902 - RNA, 17 nt, Human
cagacagcucccucugc

SEQ ID NO: 3395903 - RNA, 13 nt, Human
cagacagcugccu

SEQ ID NO: 3395904 - RNA, 14 nt, Human
cagacagcugccug

SEQ ID NO: 3395905 - RNA, 15 nt, Human
cagacaggaccccug

SEQ ID NO: 3395906 - RNA, 16 nt, Human
cagacaggaccccugc

SEQ ID NO: 3395907 - RNA, 23 nt, Human
cagacaggaccccugcaguuccc

SEQ ID NO: 3395908 - RNA, 21 nt, Human
cagacaggagaaaugcaucca

SEQ ID NO: 3395909 - RNA, 12 nt, Human
cagacaggagga

SEQ ID NO: 3395910 - RNA, 20 nt, Human
cagacaggccccgugaggca

SEQ ID NO: 3395911 - RNA, 14 nt, Human
cagacaggcucuua

SEQ ID NO: 3395912 - RNA, 18 nt, Human
cagacaggcucuuagcag

SEQ ID NO: 3395913 - RNA, 18 nt, Human
cagacaggguucauugaa

SEQ ID NO: 3395914 - RNA, 16 nt, Human
cagacagguuuucaca

SEQ ID NO: 3395915 - RNA, 22 nt, Human
cagacagguuuucacauaaaug

SEQ ID NO: 3395916 - RNA, 17 nt, Human
cagacagucacaaauuu

SEQ ID NO: 3395917 - RNA, 20 nt, Human
cagacagucacaaauuucuc

SEQ ID NO: 3395918 - RNA, 11 nt, Human
cagacauaaag

SEQ ID NO: 3395919 - RNA, 22 nt, Human
cagacauaaaggaaaagacaca

SEQ ID NO: 3395920 - RNA, 17 nt, Human
cagacauacgaaacaca

SEQ ID NO: 3395921 - RNA, 17 nt, Human
cagacaugguggggucu

SEQ ID NO: 3395922 - RNA, 22 nt, Human
cagacaugguggggucuccuca

SEQ ID NO: 3395923 - RNA, 23 nt, Human
cagacaugguggggucuccucag

SEQ ID NO: 3395924 - RNA, 22 nt, Human
cagacauguggugggacaggga

SEQ ID NO: 3395925 - RNA, 22 nt, Human
cagacauguuuuccgugaaaac

SEQ ID NO: 3395926 - RNA, 16 nt, Human
cagacauucugccagg

SEQ ID NO: 3395927 - RNA, 19 nt, Human
cagacauuguuuugccaac

SEQ ID NO: 3395928 - RNA, 13 nt, Human
cagacauuuuaaa

SEQ ID NO: 3395929 - RNA, 20 nt, Human
cagaccacaaaacuuuucua

SEQ ID NO: 3395930 - RNA, 16 nt, Human
cagaccacauugcuuu

SEQ ID NO: 3395931 - RNA, 22 nt, Human
cagaccaccccgccugcccuca

SEQ ID NO: 3395932 - RNA, 23 nt, Human
cagaccacgcccguccugccugu

SEQ ID NO: 3395933 - RNA, 13 nt, Human
cagaccacggcuc

SEQ ID NO: 3395934 - RNA, 12 nt, Human
cagaccagagcu

SEQ ID NO: 3395935 - RNA, 17 nt, Human
cagaccagagcucugga

SEQ ID NO: 3395936 - RNA, 15 nt, Human
cagaccagauuaaac

SEQ ID NO: 3395937 - RNA, 12 nt, Human
cagaccccagcg

SEQ ID NO: 3395938 - RNA, 15 nt, Human
cagacccccaccccu

SEQ ID NO: 3395939 - RNA, 18 nt, Human
cagacccccaccccuucc

SEQ ID NO: 3395940 - RNA, 19 nt, Human
cagacccccaccccuuccc

SEQ ID NO: 3395941 - RNA, 22 nt, Human
cagacccccaccccuuccccac

SEQ ID NO: 3395942 - RNA, 19 nt, Human
cagaccccgacaccggcca

SEQ ID NO: 3395943 - RNA, 16 nt, Human
cagaccccucuggcca

SEQ ID NO: 3395944 - RNA, 20 nt, Human
cagaccccucuggccaggau

SEQ ID NO: 3395945 - RNA, 22 nt, Human
cagaccccucuggccaggaugg

SEQ ID NO: 3395946 - RNA, 16 nt, Human
cagaccccuggcuuuu

SEQ ID NO: 3395947 - RNA, 18 nt, Human
cagaccccuggcuuuuca

SEQ ID NO: 3395948 - RNA, 21 nt, Human
cagaccccuggcuuuucacug

SEQ ID NO: 3395949 - RNA, 22 nt, Human
cagaccccuggcuuuucacugc

SEQ ID NO: 3395950 - RNA, 16 nt, Human
cagaccccuucagcca

SEQ ID NO: 3395951 - RNA, 15 nt, Human
cagaccccuuggcca

SEQ ID NO: 3395952 - RNA, 17 nt, Human
cagacccuaccccacca

SEQ ID NO: 3395953 - RNA, 18 nt, Human
cagacccuaccccaccac

SEQ ID NO: 3395954 - RNA, 15 nt, Human
cagacccugcccugu

SEQ ID NO: 3395955 - RNA, 22 nt, Human
cagacccugcccugugggcccc

SEQ ID NO: 3395956 - RNA, 14 nt, Human
cagacccuggagga

SEQ ID NO: 3395957 - RNA, 18 nt, Human
cagacccuggaggcccca

SEQ ID NO: 3395958 - RNA, 19 nt, Human
cagacccuggaggccccaa

SEQ ID NO: 3395959 - RNA, 15 nt, Human
cagaccgucuuccuc

SEQ ID NO: 3395960 - RNA, 20 nt, Human
cagaccgucuuccuccaacc

SEQ ID NO: 3395961 - RNA, 22 nt, Human
cagaccuaggauuucaugauuu

SEQ ID NO: 3395962 - RNA, 12 nt, Human
cagaccucccca

SEQ ID NO: 3395963 - RNA, 19 nt, Human
cagaccuccccagccccua

SEQ ID NO: 3395964 - RNA, 21 nt, Human
cagaccuccccagccccuagc

SEQ ID NO: 3395965 - RNA, 20 nt, Human
cagaccugauccuggaggcc

SEQ ID NO: 3395966 - RNA, 14 nt, Human
cagaccugccuuug

SEQ ID NO: 3395967 - RNA, 13 nt, Human
cagaccugcuuuu

SEQ ID NO: 3395968 - RNA, 21 nt, Human
cagaccugcuuuuugaaauga

SEQ ID NO: 3395969 - RNA, 16 nt, Human
cagaccuggaagaaca

SEQ ID NO: 3395970 - RNA, 15 nt, Human
cagaccuggagcccc

SEQ ID NO: 3395971 - RNA, 16 nt, Human
cagaccuggagccccu

SEQ ID NO: 3395972 - RNA, 23 nt, Human
cagaccuggagccccuggguggg

SEQ ID NO: 3395973 - RNA, 13 nt, Human
cagaccuguccuc

SEQ ID NO: 3395974 - RNA, 19 nt, Human
cagaccuguuagcagacag

SEQ ID NO: 3395975 - RNA, 20 nt, Human
cagaccuguuagcagacagg

SEQ ID NO: 3395976 - RNA, 16 nt, Human
cagacgccugaggaac

SEQ ID NO: 3395977 - RNA, 13 nt, Human
cagacgccuggcu

SEQ ID NO: 3395978 - RNA, 20 nt, Human
cagacgcucauucagcaucu

SEQ ID NO: 3395979 - RNA, 15 nt, Human
cagacggcacccacc

SEQ ID NO: 3395980 - RNA, 16 nt, Human
cagacggcacccaccc

SEQ ID NO: 3395981 - RNA, 17 nt, Human
cagacgguucaccagcc

SEQ ID NO: 3395982 - RNA, 15 nt, Human
cagacgucccuccac

SEQ ID NO: 3395983 - RNA, 20 nt, Human
cagacuacuauuuucuuuuu

SEQ ID NO: 3395984 - RNA, 22 nt, Human
cagacuagaauucuagugcugc

SEQ ID NO: 3395985 - RNA, 23 nt, Human
cagacuagauggaccugccugca

SEQ ID NO: 3395986 - RNA, 21 nt, Human
cagacuagauguaguauuuuu

SEQ ID NO: 3395987 - RNA, 19 nt, Human
cagacuauuuaacuugagg

SEQ ID NO: 3395988 - RNA, 22 nt, Human
cagacuauuuuuagauuuucuu

SEQ ID NO: 3395989 - RNA, 23 nt, Human
cagacucaaaugcucagaccagc

SEQ ID NO: 3395990 - RNA, 14 nt, Human
cagacucagacauu

SEQ ID NO: 3395991 - RNA, 20 nt, Human
cagacucagagcucucucua

SEQ ID NO: 3395992 - RNA, 18 nt, Human
cagacucaguuugucaga

SEQ ID NO: 3395993 - RNA, 19 nt, Human
cagacucauccugaacagc

SEQ ID NO: 3395994 - RNA, 22 nt, Human
cagacucauccugaacagcaug

SEQ ID NO: 3395995 - RNA, 14 nt, Human
cagacuccugagga

SEQ ID NO: 3395996 - RNA, 21 nt, Human
cagacuccugaggacagcugu

SEQ ID NO: 3395997 - RNA, 17 nt, Human
cagacucuacagaggcc

SEQ ID NO: 3395998 - RNA, 18 nt, Human
cagacucuacagaggcca

SEQ ID NO: 3395999 - RNA, 21 nt, Human
cagacucuacagaggccaugg

SEQ ID NO: 3396000 - RNA, 19 nt, Human
cagacucucagcccagaag

SEQ ID NO: 3396001 - RNA, 22 nt, Human
cagacucucucugggaggccau

SEQ ID NO: 3396002 - RNA, 13 nt, Human
cagacucuugccu

SEQ ID NO: 3396003 - RNA, 18 nt, Human
cagacucuuuaugcuugc

SEQ ID NO: 3396004 - RNA, 23 nt, Human
cagacucuuuuuguaccugguga

SEQ ID NO: 3396005 - RNA, 20 nt, Human
cagacugacaaauguguauc

SEQ ID NO: 3396006 - RNA, 22 nt, Human
cagacugaccuugaugagcugu

SEQ ID NO: 3396007 - RNA, 14 nt, Human
cagacugcacccag

SEQ ID NO: 3396008 - RNA, 16 nt, Human
cagacugcacccagga

SEQ ID NO: 3396009 - RNA, 19 nt, Human
cagacugcacccaggaggg

SEQ ID NO: 3396010 - RNA, 15 nt, Human
cagacugcugggacu

SEQ ID NO: 3396011 - RNA, 16 nt, Human
cagacuggaagcacag

SEQ ID NO: 3396012 - RNA, 17 nt, Human
cagacuggaagcacagc

SEQ ID NO: 3396013 - RNA, 21 nt, Human
cagacuggccugaggagcagc

SEQ ID NO: 3396014 - RNA, 17 nt, Human
cagacuggugagcagac

SEQ ID NO: 3396015 - RNA, 23 nt, Human
cagacuguguauucauugaaguc

SEQ ID NO: 3396016 - RNA, 20 nt, Human
cagacuucccagcuaggaag

SEQ ID NO: 3396017 - RNA, 15 nt, Human
cagacuuccuugaga

SEQ ID NO: 3396018 - RNA, 14 nt, Human
cagacuucuccaga

SEQ ID NO: 3396019 - RNA, 16 nt, Human
cagacuucuccagacc

SEQ ID NO: 3396020 - RNA, 13 nt, Human
cagacuugagaac

SEQ ID NO: 3396021 - RNA, 19 nt, Human
cagacuugagaacuugaca

SEQ ID NO: 3396022 - RNA, 20 nt, Human
cagacuugccaugugacucu

SEQ ID NO: 3396023 - RNA, 23 nt, Human
cagacuuguauauucuauuuuac

SEQ ID NO: 3396024 - RNA, 15 nt, Human
cagacuuuaaagaau

SEQ ID NO: 3396025 - RNA, 21 nt, Human
cagacuuuacaugacacagcu

SEQ ID NO: 3396026 - RNA, 22 nt, Human
cagacuuuggaaaaugcauugu

SEQ ID NO: 3396027 - RNA, 17 nt, Human
cagacuuuuaaagacuu

SEQ ID NO: 3396028 - RNA, 19 nt, Human
cagacuuuuaaagacuugc

SEQ ID NO: 3396029 - RNA, 15 nt, Human
cagacuuuuguacau

SEQ ID NO: 3396030 - RNA, 17 nt, Human
cagagaaaaagggaggg

SEQ ID NO: 3396031 - RNA, 18 nt, Human
cagagaaaaagggagggg

SEQ ID NO: 3396032 - RNA, 20 nt, Human
cagagaaaaaugcuccccac

SEQ ID NO: 3396033 - RNA, 23 nt, Human
cagagaaaaaugcuccccacagc

SEQ ID NO: 3396034 - RNA, 13 nt, Human
cagagaaaccagc

SEQ ID NO: 3396035 - RNA, 15 nt, Human
cagagaaaccagcuu

SEQ ID NO: 3396036 - RNA, 13 nt, Human
cagagaaagcgca

SEQ ID NO: 3396037 - RNA, 17 nt, Human
cagagaaaggcaaggga

SEQ ID NO: 3396038 - RNA, 19 nt, Human
cagagaaaguacuucucca

SEQ ID NO: 3396039 - RNA, 14 nt, Human
cagagaaccaggcu

SEQ ID NO: 3396040 - RNA, 20 nt, Human
cagagaacuaacacuauuuu

SEQ ID NO: 3396041 - RNA, 17 nt, Human
cagagaacuaguggugg

SEQ ID NO: 3396042 - RNA, 18 nt, Human
cagagaagaaagaacgga

SEQ ID NO: 3396043 - RNA, 23 nt, Human
cagagaagagaguauuggguaga

SEQ ID NO: 3396044 - RNA, 12 nt, Human
cagagaagccag

SEQ ID NO: 3396045 - RNA, 13 nt, Human
cagagaagccagc

SEQ ID NO: 3396046 - RNA, 20 nt, Human
cagagaagccagcuuguuua

SEQ ID NO: 3396047 - RNA, 17 nt, Human
cagagaagccccuuccc

SEQ ID NO: 3396048 - RNA, 18 nt, Human
cagagaagccccuucccc

SEQ ID NO: 3396049 - RNA, 11 nt, Human
cagagaagccu

SEQ ID NO: 3396050 - RNA, 12 nt, Human
cagagaagccuu

SEQ ID NO: 3396051 - RNA, 18 nt, Human
cagagaagccuucaagcu

SEQ ID NO: 3396052 - RNA, 21 nt, Human
cagagaagccuucaagcucug

SEQ ID NO: 3396053 - RNA, 23 nt, Human
cagagaagccuucaagcucugag

SEQ ID NO: 3396054 - RNA, 19 nt, Human
cagagaagcucucgggcua

SEQ ID NO: 3396055 - RNA, 15 nt, Human
cagagaagcugggga

SEQ ID NO: 3396056 - RNA, 16 nt, Human
cagagaaggcagcagg

SEQ ID NO: 3396057 - RNA, 22 nt, Human
cagagaagggcauaaaacagcu

SEQ ID NO: 3396058 - RNA, 20 nt, Human
cagagaagggcuccugcagg

SEQ ID NO: 3396059 - RNA, 13 nt, Human
cagagaagucaca

SEQ ID NO: 3396060 - RNA, 16 nt, Human
cagagaagucacaggg

SEQ ID NO: 3396061 - RNA, 18 nt, Human
cagagaagucacagggca

SEQ ID NO: 3396062 - RNA, 20 nt, Human
cagagaagucacagggcagu

SEQ ID NO: 3396063 - RNA, 15 nt, Human
cagagaagugacagg

SEQ ID NO: 3396064 - RNA, 19 nt, Human
cagagaagugacagggaag

SEQ ID NO: 3396065 - RNA, 22 nt, Human
cagagaagugacagggaagcua

SEQ ID NO: 3396066 - RNA, 11 nt, Human
cagagaauaua

SEQ ID NO: 3396067 - RNA, 20 nt, Human
cagagaauaugucugcuccu

SEQ ID NO: 3396068 - RNA, 19 nt, Human
cagagaaucauacuuagca

SEQ ID NO: 3396069 - RNA, 19 nt, Human
cagagaaugaaagggccca

SEQ ID NO: 3396070 - RNA, 19 nt, Human
cagagaaugacagcaaaca

SEQ ID NO: 3396071 - RNA, 15 nt, Human
cagagaauucucuua

SEQ ID NO: 3396072 - RNA, 20 nt, Human
cagagacaaaauauuuccca

SEQ ID NO: 3396073 - RNA, 22 nt, Human
cagagacaaauauuucuagaca

SEQ ID NO: 3396074 - RNA, 23 nt, Human
cagagacaacagguaaaacaggg

SEQ ID NO: 3396075 - RNA, 16 nt, Human
cagagacaaggagggc

SEQ ID NO: 3396076 - RNA, 16 nt, Human
cagagacacaagccuu

SEQ ID NO: 3396077 - RNA, 15 nt, Human
cagagacaccugcac

SEQ ID NO: 3396078 - RNA, 21 nt, Human
cagagacacuguugauaaaaa

SEQ ID NO: 3396079 - RNA, 22 nt, Human
cagagacacuguugauaaaaac

SEQ ID NO: 3396080 - RNA, 23 nt, Human
cagagacacuguugauaaaaacu

SEQ ID NO: 3396081 - RNA, 10 nt, Human
cagagacaga

SEQ ID NO: 3396082 - RNA, 22 nt, Human
cagagacaggaaaauccucugg

SEQ ID NO: 3396083 - RNA, 23 nt, Human
cagagacaggcccaagagaugaa

SEQ ID NO: 3396084 - RNA, 15 nt, Human
cagagacauacuuga

SEQ ID NO: 3396085 - RNA, 19 nt, Human
cagagacauacuugaaggg

SEQ ID NO: 3396086 - RNA, 17 nt, Human
cagagacaucagcccuu

SEQ ID NO: 3396087 - RNA, 23 nt, Human
cagagacaucagcccuugggggu

SEQ ID NO: 3396088 - RNA, 16 nt, Human
cagagacaugcagaga

SEQ ID NO: 3396089 - RNA, 18 nt, Human
cagagacaugcagagauu

SEQ ID NO: 3396090 - RNA, 13 nt, Human
cagagacauuccu

SEQ ID NO: 3396091 - RNA, 15 nt, Human
cagagaccaggcugu

SEQ ID NO: 3396092 - RNA, 13 nt, Human
cagagaccauccc

SEQ ID NO: 3396093 - RNA, 16 nt, Human
cagagaccaucccuga

SEQ ID NO: 3396094 - RNA, 17 nt, Human
cagagaccaucccugaa

SEQ ID NO: 3396095 - RNA, 18 nt, Human
cagagaccaucccugaag

SEQ ID NO: 3396096 - RNA, 13 nt, Human
cagagacccagcg

SEQ ID NO: 3396097 - RNA, 20 nt, Human
cagagacccucugccaccag

SEQ ID NO: 3396098 - RNA, 13 nt, Human
cagagaccguccu

SEQ ID NO: 3396099 - RNA, 18 nt, Human
cagagaccguccucaccc

SEQ ID NO: 3396100 - RNA, 18 nt, Human
cagagaccuccugccucc

SEQ ID NO: 3396101 - RNA, 15 nt, Human
cagagaccugaagug

SEQ ID NO: 3396102 - RNA, 23 nt, Human
cagagacuccugcaggcagccag

SEQ ID NO: 3396103 - RNA, 17 nt, Human
cagagacuuuagggggu

SEQ ID NO: 3396104 - RNA, 14 nt, Human
cagagacuuuguag

SEQ ID NO: 3396105 - RNA, 20 nt, Human
cagagagaaauaagugcccu

SEQ ID NO: 3396106 - RNA, 16 nt, Human
cagagagaagagcccc

SEQ ID NO: 3396107 - RNA, 17 nt, Human
cagagagaagagcccca

SEQ ID NO: 3396108 - RNA, 21 nt, Human
cagagagaagagccccacucu

SEQ ID NO: 3396109 - RNA, 16 nt, Human
cagagagaauggcuuu

SEQ ID NO: 3396110 - RNA, 22 nt, Human
cagagagacagacuugagaacu

SEQ ID NO: 3396111 - RNA, 16 nt, Human
cagagagacccuugug

SEQ ID NO: 3396112 - RNA, 20 nt, Human
cagagagagaagugccccug

SEQ ID NO: 3396113 - RNA, 11 nt, Human
cagagagcagu

SEQ ID NO: 3396114 - RNA, 12 nt, Human
cagagagcauua

SEQ ID NO: 3396115 - RNA, 19 nt, Human
cagagaggaaauucuccac

SEQ ID NO: 3396116 - RNA, 16 nt, Human
cagagaggacgugggc

SEQ ID NO: 3396117 - RNA, 13 nt, Human
cagagaggagaaa

SEQ ID NO: 3396118 - RNA, 17 nt, Human
cagagaggagaaacaca

SEQ ID NO: 3396119 - RNA, 20 nt, Human
cagagaggagucagagagaa

SEQ ID NO: 3396120 - RNA, 16 nt, Human
cagagaggccaggugc

SEQ ID NO: 3396121 - RNA, 18 nt, Human
cagagaggccaggugcag

SEQ ID NO: 3396122 - RNA, 13 nt, Human
cagagagggcagg

SEQ ID NO: 3396123 - RNA, 18 nt, Human
cagagagggcaggcauga

SEQ ID NO: 3396124 - RNA, 22 nt, Human
cagagagggggccaccucccca

SEQ ID NO: 3396125 - RNA, 16 nt, Human
cagagagggugggagu

SEQ ID NO: 3396126 - RNA, 20 nt, Human
cagagagggugggagugggc

SEQ ID NO: 3396127 - RNA, 23 nt, Human
cagagagggugggagugggccca

SEQ ID NO: 3396128 - RNA, 12 nt, Human
cagagaguccca

SEQ ID NO: 3396129 - RNA, 23 nt, Human
cagagagucccacugccucaggu

SEQ ID NO: 3396130 - RNA, 17 nt, Human
cagagaguccucuggau

SEQ ID NO: 3396131 - RNA, 19 nt, Human
cagagaguccucuggaugg

SEQ ID NO: 3396132 - RNA, 13 nt, Human
cagagaguggcuc

SEQ ID NO: 3396133 - RNA, 15 nt, Human
cagagaguggcuccu

SEQ ID NO: 3396134 - RNA, 20 nt, Human
cagagaugcaccaccaagcc

SEQ ID NO: 3396135 - RNA, 16 nt, Human
cagagaugccuccacc

SEQ ID NO: 3396136 - RNA, 15 nt, Human
cagagaugccucccu

SEQ ID NO: 3396137 - RNA, 23 nt, Human
cagagauggagguucucucggag

SEQ ID NO: 3396138 - RNA, 16 nt, Human
cagagauucugaacua

SEQ ID NO: 3396139 - RNA, 19 nt, Human
cagagauugaacuccaaga

SEQ ID NO: 3396140 - RNA, 16 nt, Human
cagagauugcuucuca

SEQ ID NO: 3396141 - RNA, 24 nt, Human
cagagauuggguuuuuggacuucu

SEQ ID NO: 3396142 - RNA, 19 nt, Human
cagagauuucucauugacu

SEQ ID NO: 3396143 - RNA, 14 nt, Human
cagagcaaaauaau

SEQ ID NO: 3396144 - RNA, 16 nt, Human
cagagcaaagggccag

SEQ ID NO: 3396145 - RNA, 17 nt, Human
cagagcaaagggccagg

SEQ ID NO: 3396146 - RNA, 20 nt, Human
cagagcaagauccugucuuu

SEQ ID NO: 3396147 - RNA, 15 nt, Human
cagagcaagucugca

SEQ ID NO: 3396148 - RNA, 18 nt, Human
cagagcaagucugcaggu

SEQ ID NO: 3396149 - RNA, 14 nt, Human
cagagcaagugaga

SEQ ID NO: 3396150 - RNA, 20 nt, Human
cagagcaagugagacccugu

SEQ ID NO: 3396151 - RNA, 21 nt, Human
cagagcacuagguucaauucc

SEQ ID NO: 3396152 - RNA, 16 nt, Human
cagagcacuguauacc

SEQ ID NO: 3396153 - RNA, 11 nt, Human
cagagcagaga

SEQ ID NO: 3396154 - RNA, 18 nt, Human
cagagcagagaccauccc

SEQ ID NO: 3396155 - RNA, 19 nt, Human
cagagcagagaccaucccu

SEQ ID NO: 3396156 - RNA, 15 nt, Human
cagagcagaugcaga

SEQ ID NO: 3396157 - RNA, 16 nt, Human
cagagcagaugcagag

SEQ ID NO: 3396158 - RNA, 12 nt, Human
cagagcaggacc

SEQ ID NO: 3396159 - RNA, 15 nt, Human
cagagcaggaccucc

SEQ ID NO: 3396160 - RNA, 22 nt, Human
cagcugccgggccugauuuggu

SEQ ID NO: 3396161 - RNA, 9 nt, Human
cagcugccu

SEQ ID NO: 3396162 - RNA, 23 nt, Human
cagcugccuaggauucacacccc

SEQ ID NO: 3396163 - RNA, 17 nt, Human
cagcugccucacuuccu

SEQ ID NO: 3396164 - RNA, 11 nt, Human
cagcugccucc

SEQ ID NO: 3396165 - RNA, 17 nt, Human
cagcugccuccccuccu

SEQ ID NO: 3396166 - RNA, 19 nt, Human
cagcugccuccccuccucu

SEQ ID NO: 3396167 - RNA, 12 nt, Human
cagcugccucuu

SEQ ID NO: 3396168 - RNA, 13 nt, Human
cagcugccucuuc

SEQ ID NO: 3396169 - RNA, 19 nt, Human
cagcugccucuucccucuu

SEQ ID NO: 3396170 - RNA, 12 nt, Human
cagcugccugca

SEQ ID NO: 3396171 - RNA, 22 nt, Human
cagcugccuggaagagcagccc

SEQ ID NO: 3396172 - RNA, 23 nt, Human
cagcugccugggaucccucaucc

SEQ ID NO: 3396173 - RNA, 19 nt, Human
cagcugcgcuugcuuuucu

SEQ ID NO: 3396174 - RNA, 20 nt, Human
cagcugcgguccacccagga

SEQ ID NO: 3396175 - RNA, 17 nt, Human
cagcugcuccccucccu

SEQ ID NO: 3396176 - RNA, 11 nt, Human
cagcugcucug

SEQ ID NO: 3396177 - RNA, 16 nt, Human
cagcugcugagccgca

SEQ ID NO: 3396178 - RNA, 19 nt, Human
cagcugcugagccgcagag

SEQ ID NO: 3396179 - RNA, 20 nt, Human
cagcugcugagccgcagaga

SEQ ID NO: 3396180 - RNA, 23 nt, Human
cagcugcuugugucccuccuggg

SEQ ID NO: 3396181 - RNA, 22 nt, Human
cagcugcuuuguuaccuuaaaa

SEQ ID NO: 3396182 - RNA, 23 nt, Human
cagcuggacagaggggacucugg

SEQ ID NO: 3396183 - RNA, 24 nt, Human
cagcuggacagaggggacucuggg

SEQ ID NO: 3396184 - RNA, 16 nt, Human
cagcuggacccugacc

SEQ ID NO: 3396185 - RNA, 17 nt, Human
cagcuggacccugacca

SEQ ID NO: 3396186 - RNA, 15 nt, Human
cagcuggacucugca

SEQ ID NO: 3396187 - RNA, 18 nt, Human
cagcuggagaaauauggu

SEQ ID NO: 3396188 - RNA, 13 nt, Human
cagcuggaggcag

SEQ ID NO: 3396189 - RNA, 22 nt, Human
cagcuggaggcaggggcuuccu

SEQ ID NO: 3396190 - RNA, 15 nt, Human
cagcuggauuggguu

SEQ ID NO: 3396191 - RNA, 15 nt, Human
cagcuggcagcagag

SEQ ID NO: 3396192 - RNA, 18 nt, Human
cagcuggcagcagagugu

SEQ ID NO: 3396193 - RNA, 16 nt, Human
cagcuggccgggagcc

SEQ ID NO: 3396194 - RNA, 16 nt, Human
cagcuggccuuuguaa

SEQ ID NO: 3396195 - RNA, 18 nt, Human
cagcuggcucuacuuccc

SEQ ID NO: 3396196 - RNA, 19 nt, Human
cagcugggagcuggcccgu

SEQ ID NO: 3396197 - RNA, 14 nt, Human
cagcugggaggcaa

SEQ ID NO: 3396198 - RNA, 23 nt, Human
cagcugggaggcaagaggggugg

SEQ ID NO: 3396199 - RNA, 23 nt, Human
cagcugggaucacauguggacuu

SEQ ID NO: 3396200 - RNA, 20 nt, Human
cagcugggccgggacccagg

SEQ ID NO: 3396201 - RNA, 23 nt, Human
cagcugggccgggacccagggcc

SEQ ID NO: 3396202 - RNA, 16 nt, Human
cagcugggcucugcaa

SEQ ID NO: 3396203 - RNA, 17 nt, Human
cagcugggcucugcaau

SEQ ID NO: 3396204 - RNA, 16 nt, Human
cagcugggcucugcca

SEQ ID NO: 3396205 - RNA, 14 nt, Human
cagcuggggccagg

SEQ ID NO: 3396206 - RNA, 14 nt, Human
cagcugggucaggc

SEQ ID NO: 3396207 - RNA, 20 nt, Human
cagcugggucaggcagggug

SEQ ID NO: 3396208 - RNA, 16 nt, Human
cagcuggguggcacug

SEQ ID NO: 3396209 - RNA, 16 nt, Human
cagcuggguuggaaaa

SEQ ID NO: 3396210 - RNA, 17 nt, Human
cagcuggguuggaaaac

SEQ ID NO: 3396211 - RNA, 23 nt, Human
cagcuggugcccugcuuucagau

SEQ ID NO: 3396212 - RNA, 22 nt, Human
cagcuggugggaagcgucuguc

SEQ ID NO: 3396213 - RNA, 11 nt, Human
cagcuggugua

SEQ ID NO: 3396214 - RNA, 15 nt, Human
cagcugguguagcua

SEQ ID NO: 3396215 - RNA, 19 nt, Human
cagcugguguagcuacaga

SEQ ID NO: 3396216 - RNA, 18 nt, Human
cagcugguugagguuuca

SEQ ID NO: 3396217 - RNA, 18 nt, Human
cagcuguaacacagcuga

SEQ ID NO: 3396218 - RNA, 22 nt, Human
cagcuguaagaagagacuggga

SEQ ID NO: 3396219 - RNA, 16 nt, Human
cagcugucaaggcuca

SEQ ID NO: 3396220 - RNA, 14 nt, Human
cagcugucaagggc

SEQ ID NO: 3396221 - RNA, 18 nt, Human
cagcugucaucaauuaaa

SEQ ID NO: 3396222 - RNA, 17 nt, Human
cagcuguccccccacuc

SEQ ID NO: 3396223 - RNA, 16 nt, Human
cagcugucccugucac

SEQ ID NO: 3396224 - RNA, 17 nt, Human
cagcugucccugucacc

SEQ ID NO: 3396225 - RNA, 18 nt, Human
cagcugucccugucacca

SEQ ID NO: 3396226 - RNA, 22 nt, Human
cagcugucccugucaccaagcu

SEQ ID NO: 3396227 - RNA, 16 nt, Human
cagcuguccugcagca

SEQ ID NO: 3396228 - RNA, 16 nt, Human
cagcugucuuuuggag

SEQ ID NO: 3396229 - RNA, 14 nt, Human
cagcugugccucgc

SEQ ID NO: 3396230 - RNA, 18 nt, Human
cagcugugcucuggacag

SEQ ID NO: 3396231 - RNA, 14 nt, Human
cagcugugcuuaug

SEQ ID NO: 3396232 - RNA, 12 nt, Human
cagcuguggcag

SEQ ID NO: 3396233 - RNA, 23 nt, Human
cagcuguggcagaguuacaguuc

SEQ ID NO: 3396234 - RNA, 22 nt, Human
cagcuguguccaaaaccgccag

SEQ ID NO: 3396235 - RNA, 15 nt, Human
cagcuguucagcugg

SEQ ID NO: 3396236 - RNA, 20 nt, Human
cagcuguucugucccuugga

SEQ ID NO: 3396237 - RNA, 23 nt, Human
cagcuguugacucuaguacugug

SEQ ID NO: 3396238 - RNA, 22 nt, Human
cagcuguugucucuucuccuua

SEQ ID NO: 3396239 - RNA, 15 nt, Human
cagcuguuugucaua

SEQ ID NO: 3396240 - RNA, 21 nt, Human
cagcuguuuuaguuaaauuuc

SEQ ID NO: 3396241 - RNA, 15 nt, Human
cagcuuaaaguaacc

SEQ ID NO: 3396242 - RNA, 18 nt, Human
cagcuuacacaaaucuau

SEQ ID NO: 3396243 - RNA, 14 nt, Human
cagcuuagauuuca

SEQ ID NO: 3396244 - RNA, 15 nt, Human
cagcuuagauuucau

SEQ ID NO: 3396245 - RNA, 17 nt, Human
cagcuuagggcccugga

SEQ ID NO: 3396246 - RNA, 16 nt, Human
cagcuuauucacaaga

SEQ ID NO: 3396247 - RNA, 14 nt, Human
cagcuuauugucua

SEQ ID NO: 3396248 - RNA, 20 nt, Human
cagcuuauugucuagugaaa

SEQ ID NO: 3396249 - RNA, 12 nt, Human
cagcuuauuguu

SEQ ID NO: 3396250 - RNA, 14 nt, Human
cagcuucaccagag

SEQ ID NO: 3396251 - RNA, 15 nt, Human
cagcuucacuucuga

SEQ ID NO: 3396252 - RNA, 16 nt, Human
cagcuucacuucugac

SEQ ID NO: 3396253 - RNA, 13 nt, Human
cagcuucagugau

SEQ ID NO: 3396254 - RNA, 20 nt, Human
cagcuucaugccuuuguaag

SEQ ID NO: 3396255 - RNA, 15 nt, Human
cagcuucauuugugu

SEQ ID NO: 3396256 - RNA, 17 nt, Human
cagcuucauuuguguca

SEQ ID NO: 3396257 - RNA, 11 nt, Human
cagcuuccagc

SEQ ID NO: 3396258 - RNA, 12 nt, Human
cagcuuccagca

SEQ ID NO: 3396259 - RNA, 17 nt, Human
cagcuuccccaguagcu

SEQ ID NO: 3396260 - RNA, 22 nt, Human
cagcuuccccucucuccuccug

SEQ ID NO: 3396261 - RNA, 23 nt, Human
cagcuuccccucucuccuccugc

SEQ ID NO: 3396262 - RNA, 14 nt, Human
cagcuuccuaccca

SEQ ID NO: 3396263 - RNA, 22 nt, Human
cagcuuccuacccacaccucug

SEQ ID NO: 3396264 - RNA, 12 nt, Human
cagcuuccuguc

SEQ ID NO: 3396265 - RNA, 13 nt, Human
cagcuuccuucag

SEQ ID NO: 3396266 - RNA, 18 nt, Human
cagcuucuauccuugacu

SEQ ID NO: 3396267 - RNA, 19 nt, Human
cagcuucuauuagccaguc

SEQ ID NO: 3396268 - RNA, 21 nt, Human
cagcuucucauccugcaggca

SEQ ID NO: 3396269 - RNA, 14 nt, Human
cagcuucuccaggc

SEQ ID NO: 3396270 - RNA, 13 nt, Human
cagcuucugccac

SEQ ID NO: 3396271 - RNA, 20 nt, Human
cagcuucugccacuucccag

SEQ ID NO: 3396272 - RNA, 23 nt, Human
cagcuucugccacuucccaggua

SEQ ID NO: 3396273 - RNA, 20 nt, Human
cagcuucugcccccugcaga

SEQ ID NO: 3396274 - RNA, 22 nt, Human
cagcuucuuaauauaacugccu

SEQ ID NO: 3396275 - RNA, 20 nt, Human
cagcuugaccgugaggccag

SEQ ID NO: 3396276 - RNA, 19 nt, Human
cagcuugaccugaggcugu

SEQ ID NO: 3396277 - RNA, 20 nt, Human
cagcuugaccugaggcugug

SEQ ID NO: 3396278 - RNA, 14 nt, Human
cagcuugagccggg

SEQ ID NO: 3396279 - RNA, 21 nt, Human
cagcuugccagaugcugcaga

SEQ ID NO: 3396280 - RNA, 13 nt, Human
cagcuugccccgg

SEQ ID NO: 3396281 - RNA, 19 nt, Human
cagcuugcugcccuaggcu

SEQ ID NO: 3396282 - RNA, 13 nt, Human
cagcuuggcucag

SEQ ID NO: 3396283 - RNA, 18 nt, Human
cagcuugggagagccccu

SEQ ID NO: 3396284 - RNA, 23 nt, Human
cagcuugggagagccccuggggc

SEQ ID NO: 3396285 - RNA, 13 nt, Human
cagcuugggcaga

SEQ ID NO: 3396286 - RNA, 16 nt, Human
cagcuugggcccagcu

SEQ ID NO: 3396287 - RNA, 17 nt, Human
cagcuuggggccaucgg

SEQ ID NO: 3396288 - RNA, 20 nt, Human
cagcuuguaaauagcucagg

SEQ ID NO: 3396289 - RNA, 21 nt, Human
cagcuuguaaauagcucaggu

SEQ ID NO: 3396290 - RNA, 22 nt, Human
cagcuuguaaauagcucaggug

SEQ ID NO: 3396291 - RNA, 17 nt, Human
cagcuuguggagcccca

SEQ ID NO: 3396292 - RNA, 15 nt, Human
cagcuuguguuguca

SEQ ID NO: 3396293 - RNA, 17 nt, Human
cagcuuguuauuuauaa

SEQ ID NO: 3396294 - RNA, 15 nt, Human
cagcuuguuuacaug

SEQ ID NO: 3396295 - RNA, 18 nt, Human
cagcuuguuuacaugcuu

SEQ ID NO: 3396296 - RNA, 18 nt, Human
cagcuuuaaacucaggga

SEQ ID NO: 3396297 - RNA, 22 nt, Human
cagcuuuaaacucagggacaga

SEQ ID NO: 3396298 - RNA, 18 nt, Human
cagcuuuagaaucccagc

SEQ ID NO: 3396299 - RNA, 19 nt, Human
cagcuuucccugccucuca

SEQ ID NO: 3396300 - RNA, 21 nt, Human
cagcuuucuugcucccuucag

SEQ ID NO: 3396301 - RNA, 16 nt, Human
cagcuuugagaagccu

SEQ ID NO: 3396302 - RNA, 16 nt, Human
cagcuuugaucccuga

SEQ ID NO: 3396303 - RNA, 20 nt, Human
cagcuuugaucccugacauc

SEQ ID NO: 3396304 - RNA, 19 nt, Human
caggaguguccucuucccu

SEQ ID NO: 3396305 - RNA, 22 nt, Human
caggaguucaagaccagccugg

SEQ ID NO: 3396306 - RNA, 23 nt, Human
caggaguucaagaccagccuggc

SEQ ID NO: 3396307 - RNA, 23 nt, Human
caggaguucgagaccagccuggc

SEQ ID NO: 3396308 - RNA, 19 nt, Human
caggaguucgaggcugcag

SEQ ID NO: 3396309 - RNA, 21 nt, Human
caggaguucgaggcugcaguc

SEQ ID NO: 3396310 - RNA, 16 nt, Human
caggaguuggaagugu

SEQ ID NO: 3396311 - RNA, 19 nt, Human
caggaguuucguuuucaaa

SEQ ID NO: 3396312 - RNA, 21 nt, Human
caggaguuugagaccaaccug

SEQ ID NO: 3396313 - RNA, 14 nt, Human
caggaguuuggcca

SEQ ID NO: 3396314 - RNA, 18 nt, Human
caggauaaacugaaaacu

SEQ ID NO: 3396315 - RNA, 14 nt, Human
caggauacaugugc

SEQ ID NO: 3396316 - RNA, 17 nt, Human
caggauacucugucaga

SEQ ID NO: 3396317 - RNA, 18 nt, Human
caggauacucugucagau

SEQ ID NO: 3396318 - RNA, 13 nt, Human
caggauagacuuu

SEQ ID NO: 3396319 - RNA, 14 nt, Human
caggauagagacug

SEQ ID NO: 3396320 - RNA, 17 nt, Human
caggauagauaacucuu

SEQ ID NO: 3396321 - RNA, 17 nt, Human
caggauauauuuuauuu

SEQ ID NO: 3396322 - RNA, 23 nt, Human
caggauaucacauuggagucacu

SEQ ID NO: 3396323 - RNA, 21 nt, Human
caggauauccuuaucagagcu

SEQ ID NO: 3396324 - RNA, 22 nt, Human
caggauauccuuaucagagcua

SEQ ID NO: 3396325 - RNA, 17 nt, Human
caggaucaguuaacuau

SEQ ID NO: 3396326 - RNA, 21 nt, Human
caggaucaugguguaauaaga

SEQ ID NO: 3396327 - RNA, 22 nt, Human
caggaucaugguguaauaagac

SEQ ID NO: 3396328 - RNA, 17 nt, Human
caggauccaagcuaagc

SEQ ID NO: 3396329 - RNA, 19 nt, Human
caggauccuauucucacca

SEQ ID NO: 3396330 - RNA, 20 nt, Human
caggauccuauucucaccag

SEQ ID NO: 3396331 - RNA, 22 nt, Human
caggauccuauucucaccagga

SEQ ID NO: 3396332 - RNA, 19 nt, Human
caggaucuauuuuuggagg

SEQ ID NO: 3396333 - RNA, 20 nt, Human
caggaucuauuuuuggaggu

SEQ ID NO: 3396334 - RNA, 21 nt, Human
caggaucuauuuuuggagguu

SEQ ID NO: 3396335 - RNA, 17 nt, Human
caggaucucaccaggca

SEQ ID NO: 3396336 - RNA, 18 nt, Human
caggaucucaccaggcag

SEQ ID NO: 3396337 - RNA, 19 nt, Human
caggaucucaccaggcagc

SEQ ID NO: 3396338 - RNA, 22 nt, Human
caggaucucaccaggcagccuc

SEQ ID NO: 3396339 - RNA, 16 nt, Human
caggaugaccuggaua

SEQ ID NO: 3396340 - RNA, 13 nt, Human
caggaugcccagg

SEQ ID NO: 3396341 - RNA, 22 nt, Human
caggaugcccagggccacucug

SEQ ID NO: 3396342 - RNA, 24 nt, Human
caggaugcccagggccacucugcc

SEQ ID NO: 3396343 - RNA, 13 nt, Human
caggaugcuggcc

SEQ ID NO: 3396344 - RNA, 23 nt, Human
caggauggccgggcgcgguggcu

SEQ ID NO: 3396345 - RNA, 24 nt, Human
caggauggccuggccagggccugg

SEQ ID NO: 3396346 - RNA, 23 nt, Human
caggauggcgcaggaacucaaua

SEQ ID NO: 3396347 - RNA, 18 nt, Human
caggaugggggcuggccu

SEQ ID NO: 3396348 - RNA, 15 nt, Human
caggaugguaauucu

SEQ ID NO: 3396349 - RNA, 15 nt, Human
caggauguguuugcu

SEQ ID NO: 3396350 - RNA, 17 nt, Human
caggauuccucuuuucu

SEQ ID NO: 3396351 - RNA, 20 nt, Human
caggauuccucuuuucucug

SEQ ID NO: 3396352 - RNA, 22 nt, Human
caggauucucaccagcuguguc

SEQ ID NO: 3396353 - RNA, 17 nt, Human
caggauucuuccucccu

SEQ ID NO: 3396354 - RNA, 20 nt, Human
caggauucuuccucccuccc

SEQ ID NO: 3396355 - RNA, 17 nt, Human
caggauugcgagagaug

SEQ ID NO: 3396356 - RNA, 21 nt, Human
caggauugcgagagaugugug

SEQ ID NO: 3396357 - RNA, 23 nt, Human
caggauugcgagagauguguguu

SEQ ID NO: 3396358 - RNA, 14 nt, Human
caggauuggggaag

SEQ ID NO: 3396359 - RNA, 15 nt, Human
caggauuuaaaaacu

SEQ ID NO: 3396360 - RNA, 22 nt, Human
caggauuugaacucagaucugu

SEQ ID NO: 3396361 - RNA, 15 nt, Human
caggauuugcacaga

SEQ ID NO: 3396362 - RNA, 22 nt, Human
caggauuugcacagaagcacau

SEQ ID NO: 3396363 - RNA, 16 nt, Human
caggauuuuaaucuuu

SEQ ID NO: 3396364 - RNA, 21 nt, Human
caggcaaacauuuucucuuag

SEQ ID NO: 3396365 - RNA, 11 nt, Human
caggcaaauca

SEQ ID NO: 3396366 - RNA, 15 nt, Human
caggcaacugaggca

SEQ ID NO: 3396367 - RNA, 19 nt, Human
caggcaacuucaguccugg

SEQ ID NO: 3396368 - RNA, 14 nt, Human
caggcaagcaccuc

SEQ ID NO: 3396369 - RNA, 14 nt, Human
caggcaaggcugug

SEQ ID NO: 3396370 - RNA, 17 nt, Human
caggcaaggcuguggac

SEQ ID NO: 3396371 - RNA, 22 nt, Human
caggcaaggucuggccucaggu

SEQ ID NO: 3396372 - RNA, 20 nt, Human
caggcaaugcuggcuguugg

SEQ ID NO: 3396373 - RNA, 22 nt, Human
caggcaauggccuaaacuucag

SEQ ID NO: 3396374 - RNA, 14 nt, Human
caggcacaaaauga

SEQ ID NO: 3396375 - RNA, 16 nt, Human
caggcacacaccacca

SEQ ID NO: 3396376 - RNA, 15 nt, Human
caggcacacacugug

SEQ ID NO: 3396377 - RNA, 12 nt, Human
caggcacacagc

SEQ ID NO: 3396378 - RNA, 14 nt, Human
caggcacagcacag

SEQ ID NO: 3396379 - RNA, 13 nt, Human
caggcacagcuga

SEQ ID NO: 3396380 - RNA, 15 nt, Human
caggcacagcugagu

SEQ ID NO: 3396381 - RNA, 15 nt, Human
caggcacaggcaggg

SEQ ID NO: 3396382 - RNA, 18 nt, Human
caggcacaggcagggcag

SEQ ID NO: 3396383 - RNA, 14 nt, Human
caggcaccaggcag

SEQ ID NO: 3396384 - RNA, 23 nt, Human
caggcacccaccaucaugucugg

SEQ ID NO: 3396385 - RNA, 18 nt, Human
caggcacccccuggagag

SEQ ID NO: 3396386 - RNA, 13 nt, Human
caggcacccuucu

SEQ ID NO: 3396387 - RNA, 21 nt, Human
caggcacccuucuuuccucuu

SEQ ID NO: 3396388 - RNA, 15 nt, Human
caggcaccucacaga

SEQ ID NO: 3396389 - RNA, 20 nt, Human
caggcacgaacccaccugcu

SEQ ID NO: 3396390 - RNA, 21 nt, Human
caggcacgaacccaccugcug

SEQ ID NO: 3396391 - RNA, 22 nt, Human
caggcacgaacccaccugcuga

SEQ ID NO: 3396392 - RNA, 16 nt, Human
caggcacggguggucc

SEQ ID NO: 3396393 - RNA, 18 nt, Human
caggcacggguggucccc

SEQ ID NO: 3396394 - RNA, 19 nt, Human
caggcacgggugguccccg

SEQ ID NO: 3396395 - RNA, 20 nt, Human
caggcacgggugguccccgu

SEQ ID NO: 3396396 - RNA, 23 nt, Human
caggcacgggugguccccguucc

SEQ ID NO: 3396397 - RNA, 16 nt, Human
caggcacugcccuggu

SEQ ID NO: 3396398 - RNA, 17 nt, Human
caggcacugcugcccag

SEQ ID NO: 3396399 - RNA, 21 nt, Human
caggcacuuggcagccuugug

SEQ ID NO: 3396400 - RNA, 13 nt, Human
caggcagaaagag

SEQ ID NO: 3396401 - RNA, 10 nt, Human
caggcagaca

SEQ ID NO: 3396402 - RNA, 14 nt, Human
caggcagacacgga

SEQ ID NO: 3396403 - RNA, 16 nt, Human
caggcagacuacacag

SEQ ID NO: 3396404 - RNA, 23 nt, Human
caggcagagaaucauacuuagca

SEQ ID NO: 3396405 - RNA, 14 nt, Human
caggcagagcccag

SEQ ID NO: 3396406 - RNA, 15 nt, Human
caggcagaggcccag

SEQ ID NO: 3396407 - RNA, 19 nt, Human
caggcagaggcccaggcug

SEQ ID NO: 3396408 - RNA, 21 nt, Human
caggcagaggcccaggcugcc

SEQ ID NO: 3396409 - RNA, 13 nt, Human
caggcagauccag

SEQ ID NO: 3396410 - RNA, 21 nt, Human
caggcagaucugugccccaug

SEQ ID NO: 3396411 - RNA, 11 nt, Human
caggcagcaga

SEQ ID NO: 3396412 - RNA, 16 nt, Human
caggcagcagacacau

SEQ ID NO: 3396413 - RNA, 17 nt, Human
caggcagcagacacaug

SEQ ID NO: 3396414 - RNA, 17 nt, Human
caggcagccagcaucug

SEQ ID NO: 3396415 - RNA, 21 nt, Human
caggcagccagcaucugggcc

SEQ ID NO: 3396416 - RNA, 16 nt, Human
caggcagccaggccac

SEQ ID NO: 3396417 - RNA, 17 nt, Human
caggcagccaggccaca

SEQ ID NO: 3396418 - RNA, 23 nt, Human
caggcagccagugcccugagcca

SEQ ID NO: 3396419 - RNA, 13 nt, Human
caggcagccucug

SEQ ID NO: 3396420 - RNA, 14 nt, Human
caggcagccucugg

SEQ ID NO: 3396421 - RNA, 15 nt, Human
caggcagccucuggg

SEQ ID NO: 3396422 - RNA, 18 nt, Human
caggcagccucugucagg

SEQ ID NO: 3396423 - RNA, 14 nt, Human
caggcagcgccaag

SEQ ID NO: 3396424 - RNA, 21 nt, Human
caggcagcucauaagagccac

SEQ ID NO: 3396425 - RNA, 14 nt, Human
caggcagcuuucua

SEQ ID NO: 3396426 - RNA, 17 nt, Human
caggcagcuuucuagaa

SEQ ID NO: 3396427 - RNA, 18 nt, Human
caggcagcuuucuagaag

SEQ ID NO: 3396428 - RNA, 13 nt, Human
caggcaggaacaa

SEQ ID NO: 3396429 - RNA, 20 nt, Human
caggcaggaacaaacagggc

SEQ ID NO: 3396430 - RNA, 20 nt, Human
caggcaggaaggcugagagg

SEQ ID NO: 3396431 - RNA, 18 nt, Human
caggcaggaagggcagga

SEQ ID NO: 3396432 - RNA, 21 nt, Human
caggcaggccaaggccuucuc

SEQ ID NO: 3396433 - RNA, 20 nt, Human
caggcaggcuaaggcgugga

SEQ ID NO: 3396434 - RNA, 23 nt, Human
caggcaggcuaaggcguggagcu

SEQ ID NO: 3396435 - RNA, 16 nt, Human
caggcaggcucccagg

SEQ ID NO: 3396436 - RNA, 11 nt, Human
caggcagggcu

SEQ ID NO: 3396437 - RNA, 12 nt, Human
caggcagggcuc

SEQ ID NO: 3396438 - RNA, 18 nt, Human
caggcagggcucuccugg

SEQ ID NO: 3396439 - RNA, 17 nt, Human
caggcaggggcccugca

SEQ ID NO: 3396440 - RNA, 23 nt, Human
caggcaggggcccugcagcucuc

SEQ ID NO: 3396441 - RNA, 21 nt, Human
caggcagggguggggguggag

SEQ ID NO: 3396442 - RNA, 22 nt, Human
caggcagggguggggguggagg

SEQ ID NO: 3396443 - RNA, 20 nt, Human
caggcagguagccaggggga

SEQ ID NO: 3396444 - RNA, 19 nt, Human
caggcagguccaggguuug

SEQ ID NO: 3396445 - RNA, 12 nt, Human
caggcaggucuu

SEQ ID NO: 3396446 - RNA, 14 nt, Human
caggcaggugccug

SEQ ID NO: 3396447 - RNA, 21 nt, Human
cagggaaguggggagaggugg

SEQ ID NO: 3396448 - RNA, 23 nt, Human
cagggaaugccugagugccuggc

SEQ ID NO: 3396449 - RNA, 15 nt, Human
cagggacacacagcc

SEQ ID NO: 3396450 - RNA, 20 nt, Human
cagggacaccagccaggcuc

SEQ ID NO: 3396451 - RNA, 17 nt, Human
cagggacaccugggaga

SEQ ID NO: 3396452 - RNA, 21 nt, Human
cagggacacgggcagccuggc

SEQ ID NO: 3396453 - RNA, 14 nt, Human
cagggacagagaca

SEQ ID NO: 3396454 - RNA, 17 nt, Human
cagggacagagacaccu

SEQ ID NO: 3396455 - RNA, 20 nt, Human
cagggacagagacaccugca

SEQ ID NO: 3396456 - RNA, 23 nt, Human
cagggacagagacaccugcaccu

SEQ ID NO: 3396457 - RNA, 13 nt, Human
cagggacagagcc

SEQ ID NO: 3396458 - RNA, 15 nt, Human
cagggacagagccau

SEQ ID NO: 3396459 - RNA, 16 nt, Human
cagggacagagccaug

SEQ ID NO: 3396460 - RNA, 17 nt, Human
cagggacagagccaugc

SEQ ID NO: 3396461 - RNA, 12 nt, Human
cagggacaggau

SEQ ID NO: 3396462 - RNA, 15 nt, Human
cagggaccaaggacc

SEQ ID NO: 3396463 - RNA, 18 nt, Human
cagggaccaaggaccccu

SEQ ID NO: 3396464 - RNA, 19 nt, Human
cagggaccaaggaccccuc

SEQ ID NO: 3396465 - RNA, 16 nt, Human
cagggaccacacccug

SEQ ID NO: 3396466 - RNA, 17 nt, Human
cagggaccacagcaagg

SEQ ID NO: 3396467 - RNA, 20 nt, Human
cagggaccacagcaaggcac

SEQ ID NO: 3396468 - RNA, 17 nt, Human
cagggacccacggagcc

SEQ ID NO: 3396469 - RNA, 14 nt, Human
cagggaccccugcc

SEQ ID NO: 3396470 - RNA, 15 nt, Human
cagggaccccugccc

SEQ ID NO: 3396471 - RNA, 16 nt, Human
cagggaccccugcccu

SEQ ID NO: 3396472 - RNA, 21 nt, Human
cagggaccuuuggagaccauu

SEQ ID NO: 3396473 - RNA, 22 nt, Human
cagggacucaucuuucccuccu

SEQ ID NO: 3396474 - RNA, 23 nt, Human
cagggacucaucuuucccuccuu

SEQ ID NO: 3396475 - RNA, 23 nt, Human
cagggacuguuccugucucagca

SEQ ID NO: 3396476 - RNA, 21 nt, Human
cagggacuucaggaucaaguc

SEQ ID NO: 3396477 - RNA, 13 nt, Human
cagggagaagcuc

SEQ ID NO: 3396478 - RNA, 12 nt, Human
cagggagacaga

SEQ ID NO: 3396479 - RNA, 19 nt, Human
cagggagaccgagcgcuuu

SEQ ID NO: 3396480 - RNA, 20 nt, Human
cagggagaccuggacacagg

SEQ ID NO: 3396481 - RNA, 21 nt, Human
cagggagaccuggacacaggc

SEQ ID NO: 3396482 - RNA, 22 nt, Human
cagggagacgguuuccagggag

SEQ ID NO: 3396483 - RNA, 19 nt, Human
cagggagagcccaggagcu

SEQ ID NO: 3396484 - RNA, 22 nt, Human
cagggagcggaaagcagcucaa

SEQ ID NO: 3396485 - RNA, 18 nt, Human
cagggagcugcaggggca

SEQ ID NO: 3396486 - RNA, 15 nt, Human
cagggagcugggccc

SEQ ID NO: 3396487 - RNA, 16 nt, Human
cagggagcugggcccg

SEQ ID NO: 3396488 - RNA, 17 nt, Human
cagggaggaagaagcuu

SEQ ID NO: 3396489 - RNA, 17 nt, Human
cagggaggacgcucucu

SEQ ID NO: 3396490 - RNA, 18 nt, Human
cagggaggacgcucucug

SEQ ID NO: 3396491 - RNA, 23 nt, Human
cagggaggagaggggaagggcca

SEQ ID NO: 3396492 - RNA, 15 nt, Human
cagggaggaggcaga

SEQ ID NO: 3396493 - RNA, 21 nt, Human
cagggaggaggcagagaagaa

SEQ ID NO: 3396494 - RNA, 18 nt, Human
cagggaggagguggcagc

SEQ ID NO: 3396495 - RNA, 19 nt, Human
cagggaggagguggcagcc

SEQ ID NO: 3396496 - RNA, 23 nt, Human
cagggaggagguggcagcccugu

SEQ ID NO: 3396497 - RNA, 22 nt, Human
cagggaggcaccauucaggaac

SEQ ID NO: 3396498 - RNA, 16 nt, Human
cagggaggcagccgcc

SEQ ID NO: 3396499 - RNA, 21 nt, Human
cagggaggcagccgccccauc

SEQ ID NO: 3396500 - RNA, 15 nt, Human
cagggaggccgaagc

SEQ ID NO: 3396501 - RNA, 13 nt, Human
cagggaggcuggu

SEQ ID NO: 3396502 - RNA, 16 nt, Human
cagggagggccugggc

SEQ ID NO: 3396503 - RNA, 19 nt, Human
cagggaggggccggcccug

SEQ ID NO: 3396504 - RNA, 20 nt, Human
cagggaggucaggcccugga

SEQ ID NO: 3396505 - RNA, 14 nt, Human
cagggagguggcug

SEQ ID NO: 3396506 - RNA, 20 nt, Human
cagggaggugugaggcagga

SEQ ID NO: 3396507 - RNA, 22 nt, Human
cagggaggugugaggcaggaga

SEQ ID NO: 3396508 - RNA, 22 nt, Human
cagggaguccgaaagggacuug

SEQ ID NO: 3396509 - RNA, 16 nt, Human
cagggagugcuggcuc

SEQ ID NO: 3396510 - RNA, 17 nt, Human
cagggagugcuggcuca

SEQ ID NO: 3396511 - RNA, 16 nt, Human
cagggaugagcaugga

SEQ ID NO: 3396512 - RNA, 21 nt, Human
cagggaugagcauggagcugg

SEQ ID NO: 3396513 - RNA, 16 nt, Human
cagggaugcccuggag

SEQ ID NO: 3396514 - RNA, 23 nt, Human
cagggaugcccuggagguggcug

SEQ ID NO: 3396515 - RNA, 17 nt, Human
cagggauuaaccucugc

SEQ ID NO: 3396516 - RNA, 19 nt, Human
cagggauuaaccucugcac

SEQ ID NO: 3396517 - RNA, 18 nt, Human
cagggauugauuuuaaaa

SEQ ID NO: 3396518 - RNA, 23 nt, Human
cagggcaaaauauucacugggcc

SEQ ID NO: 3396519 - RNA, 22 nt, Human
cagggcaaagccaggucccucu

SEQ ID NO: 3396520 - RNA, 23 nt, Human
cagggcaaagccaggucccucuc

SEQ ID NO: 3396521 - RNA, 14 nt, Human
cagggcaaaugaca

SEQ ID NO: 3396522 - RNA, 20 nt, Human
cagggcaaaugacaugcacu

SEQ ID NO: 3396523 - RNA, 15 nt, Human
cagggcaaggccauu

SEQ ID NO: 3396524 - RNA, 21 nt, Human
cagggcaaggguuaaggccug

SEQ ID NO: 3396525 - RNA, 23 nt, Human
cagggcaaggguuaaggccugaa

SEQ ID NO: 3396526 - RNA, 18 nt, Human
cagggcaaugaugaauga

SEQ ID NO: 3396527 - RNA, 14 nt, Human
cagggcacaccggg

SEQ ID NO: 3396528 - RNA, 15 nt, Human
cagggcacaccgggc

SEQ ID NO: 3396529 - RNA, 22 nt, Human
cagggcacaccgggcacucaga

SEQ ID NO: 3396530 - RNA, 23 nt, Human
cagggcacaccgggcacucagaa

SEQ ID NO: 3396531 - RNA, 22 nt, Human
cagggcacaggagcuaccugug

SEQ ID NO: 3396532 - RNA, 18 nt, Human
cagggcaccaagcccaca

SEQ ID NO: 3396533 - RNA, 21 nt, Human
cagggcacccuguggcccugg

SEQ ID NO: 3396534 - RNA, 12 nt, Human
cagggcacgugg

SEQ ID NO: 3396535 - RNA, 11 nt, Human
cagggcacugc

SEQ ID NO: 3396536 - RNA, 17 nt, Human
cagggcacuucacagag

SEQ ID NO: 3396537 - RNA, 20 nt, Human
cagggcacuucacagagugu

SEQ ID NO: 3396538 - RNA, 12 nt, Human
cagggcagagcc

SEQ ID NO: 3396539 - RNA, 16 nt, Human
cagggcagagccggga

SEQ ID NO: 3396540 - RNA, 12 nt, Human
cagggcagccag

SEQ ID NO: 3396541 - RNA, 17 nt, Human
cagggcagccagggaga

SEQ ID NO: 3396542 - RNA, 18 nt, Human
cagggcagccagggagag

SEQ ID NO: 3396543 - RNA, 22 nt, Human
cagggcagccagggagagccca

SEQ ID NO: 3396544 - RNA, 20 nt, Human
cagggcagccgucaccccug

SEQ ID NO: 3396545 - RNA, 21 nt, Human
cagggcagccucccccggcuc

SEQ ID NO: 3396546 - RNA, 17 nt, Human
cagggcagccugccugg

SEQ ID NO: 3396547 - RNA, 14 nt, Human
cagggcagcgccag

SEQ ID NO: 3396548 - RNA, 16 nt, Human
cagggcagcgccaggc

SEQ ID NO: 3396549 - RNA, 22 nt, Human
cagggcagcgccaggcugacca

SEQ ID NO: 3396550 - RNA, 22 nt, Human
cagggcagcugggcccaacccu

SEQ ID NO: 3396551 - RNA, 20 nt, Human
cagggcaggaccagcccacg

SEQ ID NO: 3396552 - RNA, 22 nt, Human
cagggcaggaccagcccacgcu

SEQ ID NO: 3396553 - RNA, 13 nt, Human
cagggcagggcca

SEQ ID NO: 3396554 - RNA, 16 nt, Human
cagggcagggcucuga

SEQ ID NO: 3396555 - RNA, 13 nt, Human
cagggcagguggg

SEQ ID NO: 3396556 - RNA, 15 nt, Human
cagggcaguaccuga

SEQ ID NO: 3396557 - RNA, 19 nt, Human
cagggcaguaccugagggu

SEQ ID NO: 3396558 - RNA, 16 nt, Human
cagggcaucuccagga

SEQ ID NO: 3396559 - RNA, 18 nt, Human
cagggcaucuccaggaag

SEQ ID NO: 3396560 - RNA, 15 nt, Human
cagggcaucuccugu

SEQ ID NO: 3396561 - RNA, 18 nt, Human
cagggcaucucugggcug

SEQ ID NO: 3396562 - RNA, 20 nt, Human
cagggcaucucugggcugga

SEQ ID NO: 3396563 - RNA, 14 nt, Human
cagggcaucuggga

SEQ ID NO: 3396564 - RNA, 15 nt, Human
cagggcaugaaauga

SEQ ID NO: 3396565 - RNA, 19 nt, Human
cagggccaaaagcuucccu

SEQ ID NO: 3396566 - RNA, 22 nt, Human
cagggccaaacgcugagccacc

SEQ ID NO: 3396567 - RNA, 13 nt, Human
cagggccaacccu

SEQ ID NO: 3396568 - RNA, 17 nt, Human
cagggccaacuugaggg

SEQ ID NO: 3396569 - RNA, 18 nt, Human
cagggccacgugccaggc

SEQ ID NO: 3396570 - RNA, 16 nt, Human
cagggccacucugccu

SEQ ID NO: 3396571 - RNA, 14 nt, Human
cagggccagccucu

SEQ ID NO: 3396572 - RNA, 15 nt, Human
cagggccagccucua

SEQ ID NO: 3396573 - RNA, 19 nt, Human
cagggccagccucuagagc

SEQ ID NO: 3396574 - RNA, 15 nt, Human
cagggccaguggggc

SEQ ID NO: 3396575 - RNA, 16 nt, Human
cagggccaguggggcc

SEQ ID NO: 3396576 - RNA, 19 nt, Human
cagggccaguggggccugu

SEQ ID NO: 3396577 - RNA, 20 nt, Human
cagggccaguggggccugug

SEQ ID NO: 3396578 - RNA, 16 nt, Human
cagggccaugcugagg

SEQ ID NO: 3396579 - RNA, 17 nt, Human
cagggccaugcugaggc

SEQ ID NO: 3396580 - RNA, 21 nt, Human
cagggccaugcugaggccugg

SEQ ID NO: 3396581 - RNA, 18 nt, Human
cagggccauggcucaggg

SEQ ID NO: 3396582 - RNA, 20 nt, Human
cagggccaugucagacacag

SEQ ID NO: 3396583 - RNA, 13 nt, Human
cagggcccagagc

SEQ ID NO: 3396584 - RNA, 14 nt, Human
cagggcccagagcc

SEQ ID NO: 3396585 - RNA, 18 nt, Human
cagggcccagagcccagc

SEQ ID NO: 3396586 - RNA, 19 nt, Human
cagggcccagagcccagcu

SEQ ID NO: 3396587 - RNA, 17 nt, Human
cagggcccagaggcuga

SEQ ID NO: 3396588 - RNA, 22 nt, Human
cagggccccagcacuaaagcag

SEQ ID NO: 3396589 - RNA, 16 nt, Human
cagggcccccaucuca

SEQ ID NO: 3396590 - RNA, 19 nt, Human
cauauagcaaaacuuuuaa

SEQ ID NO: 3396591 - RNA, 18 nt, Human
cauauaggugauguuugc

SEQ ID NO: 3396592 - RNA, 19 nt, Human
cauauaggugauguuugcu

SEQ ID NO: 3396593 - RNA, 15 nt, Human
cauauauaacaaugc

SEQ ID NO: 3396594 - RNA, 22 nt, Human
cauauauagacagcuuugacug

SEQ ID NO: 3396595 - RNA, 14 nt, Human
cauauauauacuau

SEQ ID NO: 3396596 - RNA, 22 nt, Human
cauauauauguuuuaagaggca

SEQ ID NO: 3396597 - RNA, 12 nt, Human
cauauauauuac

SEQ ID NO: 3396598 - RNA, 13 nt, Human
cauauauauuaca

SEQ ID NO: 3396599 - RNA, 18 nt, Human
cauauauuuuuauauuua

SEQ ID NO: 3396600 - RNA, 15 nt, Human
cauauauuuuuuaaa

SEQ ID NO: 3396601 - RNA, 21 nt, Human
cauauauuuuuuaaaauaagu

SEQ ID NO: 3396602 - RNA, 23 nt, Human
cauaucaaaaaguauuaaaacua

SEQ ID NO: 3396603 - RNA, 13 nt, Human
cauaucaguugag

SEQ ID NO: 3396604 - RNA, 14 nt, Human
cauauccaaguuug

SEQ ID NO: 3396605 - RNA, 12 nt, Human
cauauccugccu

SEQ ID NO: 3396606 - RNA, 21 nt, Human
cauauccuuuuagucugcaua

SEQ ID NO: 3396607 - RNA, 18 nt, Human
cauaucuaaccagugauu

SEQ ID NO: 3396608 - RNA, 21 nt, Human
cauaucuaguaugaaauuaua

SEQ ID NO: 3396609 - RNA, 13 nt, Human
cauaucucuaauu

SEQ ID NO: 3396610 - RNA, 15 nt, Human
cauaucugccuuuau

SEQ ID NO: 3396611 - RNA, 18 nt, Human
cauaucugccuuuauugu

SEQ ID NO: 3396612 - RNA, 20 nt, Human
cauaucugccuuuauugugu

SEQ ID NO: 3396613 - RNA, 20 nt, Human
cauaucuuaauauauuucua

SEQ ID NO: 3396614 - RNA, 20 nt, Human
cauaucuugcgaauccaagc

SEQ ID NO: 3396615 - RNA, 15 nt, Human
cauaucuuuauuaau

SEQ ID NO: 3396616 - RNA, 18 nt, Human
cauaugaaaauacaacuu

SEQ ID NO: 3396617 - RNA, 21 nt, Human
cauaugaacagcuguucaguu

SEQ ID NO: 3396618 - RNA, 14 nt, Human
cauaugaacuuuca

SEQ ID NO: 3396619 - RNA, 17 nt, Human
cauaugaauuguacaga

SEQ ID NO: 3396620 - RNA, 19 nt, Human
cauaugacaaauguuucua

SEQ ID NO: 3396621 - RNA, 15 nt, Human
cauaugacuugaucu

SEQ ID NO: 3396622 - RNA, 13 nt, Human
cauaugaggaugc

SEQ ID NO: 3396623 - RNA, 15 nt, Human
cauaugaucuguuuu

SEQ ID NO: 3396624 - RNA, 15 nt, Human
cauaugauguacaug

SEQ ID NO: 3396625 - RNA, 23 nt, Human
cauaugauugugcacauacuuga

SEQ ID NO: 3396626 - RNA, 21 nt, Human
cauaugauuucacuagaaaag

SEQ ID NO: 3396627 - RNA, 21 nt, Human
cauaugcaccuugugucugua

SEQ ID NO: 3396628 - RNA, 13 nt, Human
cauaugcagaaau

SEQ ID NO: 3396629 - RNA, 14 nt, Human
cauaugcagaaaua

SEQ ID NO: 3396630 - RNA, 20 nt, Human
cauaugcagaaauagacaaa

SEQ ID NO: 3396631 - RNA, 20 nt, Human
cauaugcauauuuuuuuucu

SEQ ID NO: 3396632 - RNA, 15 nt, Human
cauaugcccacauuu

SEQ ID NO: 3396633 - RNA, 23 nt, Human
cauaugcccacauuuagucucuu

SEQ ID NO: 3396634 - RNA, 20 nt, Human
cauaugccugggcagaagga

SEQ ID NO: 3396635 - RNA, 22 nt, Human
cauaugccuuggggaggacaaa

SEQ ID NO: 3396636 - RNA, 16 nt, Human
cauaugcuaccaccag

SEQ ID NO: 3396637 - RNA, 19 nt, Human
cauaugcuaccaccagcug

SEQ ID NO: 3396638 - RNA, 23 nt, Human
cauaugcuaccaccagcuguguc

SEQ ID NO: 3396639 - RNA, 11 nt, Human
cauauggaugu

SEQ ID NO: 3396640 - RNA, 16 nt, Human
cauauggauguuacuc

SEQ ID NO: 3396641 - RNA, 23 nt, Human
cauauggauuuucuauuguuacu

SEQ ID NO: 3396642 - RNA, 16 nt, Human
cauauggcccaguguc

SEQ ID NO: 3396643 - RNA, 14 nt, Human
cauauguaaaauaa

SEQ ID NO: 3396644 - RNA, 13 nt, Human
cauauguaaacau

SEQ ID NO: 3396645 - RNA, 14 nt, Human
cauauguaaacaua

SEQ ID NO: 3396646 - RNA, 15 nt, Human
cauauguaccaugua

SEQ ID NO: 3396647 - RNA, 21 nt, Human
cauaugucacuagaauggaua

SEQ ID NO: 3396648 - RNA, 13 nt, Human
cauauguuaagca

SEQ ID NO: 3396649 - RNA, 15 nt, Human
cauauguugcucagu

SEQ ID NO: 3396650 - RNA, 22 nt, Human
cauauguuucgcugauauaugu

SEQ ID NO: 3396651 - RNA, 14 nt, Human
cauauguuugguaa

SEQ ID NO: 3396652 - RNA, 13 nt, Human
cauauuaagaaug

SEQ ID NO: 3396653 - RNA, 14 nt, Human
cauauuaauacaau

SEQ ID NO: 3396654 - RNA, 23 nt, Human
cauauuaauacaaugaugcuauu

SEQ ID NO: 3396655 - RNA, 14 nt, Human
cauauuaauauauu

SEQ ID NO: 3396656 - RNA, 15 nt, Human
cauauuacaauauuu

SEQ ID NO: 3396657 - RNA, 16 nt, Human
cauauuacaauauuug

SEQ ID NO: 3396658 - RNA, 21 nt, Human
cauauuaccacagacauacua

SEQ ID NO: 3396659 - RNA, 22 nt, Human
cauauuacuguacaugggacua

SEQ ID NO: 3396660 - RNA, 18 nt, Human
cauauuagaaaacuuugu

SEQ ID NO: 3396661 - RNA, 20 nt, Human
cauauuagaaaacuuuguua

SEQ ID NO: 3396662 - RNA, 21 nt, Human
cauauuagaaaacuuuguuag

SEQ ID NO: 3396663 - RNA, 21 nt, Human
cauauuagacuucuguuuuca

SEQ ID NO: 3396664 - RNA, 19 nt, Human
cauauuagcgacaacagau

SEQ ID NO: 3396665 - RNA, 21 nt, Human
cauauuauuuuauguugcaua

SEQ ID NO: 3396666 - RNA, 15 nt, Human
cauauucaggaagcu

SEQ ID NO: 3396667 - RNA, 20 nt, Human
cauauucaggaagcucaggg

SEQ ID NO: 3396668 - RNA, 22 nt, Human
cauauucaggaagcucagggcc

SEQ ID NO: 3396669 - RNA, 23 nt, Human
cauauucauguaaacaaaauuua

SEQ ID NO: 3396670 - RNA, 16 nt, Human
cauauuccauauuuau

SEQ ID NO: 3396671 - RNA, 18 nt, Human
cauauuccugcagccugg

SEQ ID NO: 3396672 - RNA, 15 nt, Human
cauauucuaaaacca

SEQ ID NO: 3396673 - RNA, 13 nt, Human
cauauucugucug

SEQ ID NO: 3396674 - RNA, 15 nt, Human
cauauucuguuggaa

SEQ ID NO: 3396675 - RNA, 17 nt, Human
cauauucuguuggccag

SEQ ID NO: 3396676 - RNA, 22 nt, Human
cauauucuguuggccaguguga

SEQ ID NO: 3396677 - RNA, 17 nt, Human
cauauucuuucaauucu

SEQ ID NO: 3396678 - RNA, 20 nt, Human
cauauucuuuucugcaaaau

SEQ ID NO: 3396679 - RNA, 13 nt, Human
cauauugacuuuu

SEQ ID NO: 3396680 - RNA, 14 nt, Human
cauauugaugaaaa

SEQ ID NO: 3396681 - RNA, 20 nt, Human
cauauugaugaaaagauuua

SEQ ID NO: 3396682 - RNA, 14 nt, Human
cauauugcacaugu

SEQ ID NO: 3396683 - RNA, 15 nt, Human
cauauugcacauguc

SEQ ID NO: 3396684 - RNA, 19 nt, Human
cauauugcacaugucuuaa

SEQ ID NO: 3396685 - RNA, 17 nt, Human
cauauugcugagagaaa

SEQ ID NO: 3396686 - RNA, 19 nt, Human
cauauugcuuuuucuaaug

SEQ ID NO: 3396687 - RNA, 16 nt, Human
cauauuggaaaaauca

SEQ ID NO: 3396688 - RNA, 17 nt, Human
cauauuggcauggauuu

SEQ ID NO: 3396689 - RNA, 14 nt, Human
cauauugguauuca

SEQ ID NO: 3396690 - RNA, 16 nt, Human
cauauugguauucacu

SEQ ID NO: 3396691 - RNA, 17 nt, Human
cauauuguaaaacaggu

SEQ ID NO: 3396692 - RNA, 19 nt, Human
cauauuguaaaacagguag

SEQ ID NO: 3396693 - RNA, 12 nt, Human
cauauuguacac

SEQ ID NO: 3396694 - RNA, 15 nt, Human
cauauuguacacuuu

SEQ ID NO: 3396695 - RNA, 23 nt, Human
cauauuguacacuuuuuugggga

SEQ ID NO: 3396696 - RNA, 13 nt, Human
cauauugugccaa

SEQ ID NO: 3396697 - RNA, 22 nt, Human
cauauugugccaauauguauug

SEQ ID NO: 3396698 - RNA, 15 nt, Human
cauauuuaauguuuu

SEQ ID NO: 3396699 - RNA, 20 nt, Human
cauauuuaauguuuuaaaug

SEQ ID NO: 3396700 - RNA, 21 nt, Human
cauauuuaauguuuuaaaugu

SEQ ID NO: 3396701 - RNA, 16 nt, Human
cauauuuaccucagcc

SEQ ID NO: 3396702 - RNA, 19 nt, Human
cauauuuaccucagccugg

SEQ ID NO: 3396703 - RNA, 16 nt, Human
cauauuuacuaccuua

SEQ ID NO: 3396704 - RNA, 21 nt, Human
cauauuuauccaaaaugugua

SEQ ID NO: 3396705 - RNA, 18 nt, Human
cauauuuauuuucuuuug

SEQ ID NO: 3396706 - RNA, 15 nt, Human
cauauuugcauaugu

SEQ ID NO: 3396707 - RNA, 12 nt, Human
cauauuuggaag

SEQ ID NO: 3396708 - RNA, 19 nt, Human
cauauuuguaaaaugacaa

SEQ ID NO: 3396709 - RNA, 22 nt, Human
cauauuuguauaguugcuugcc

SEQ ID NO: 3396710 - RNA, 14 nt, Human
cauauuuguggaau

SEQ ID NO: 3396711 - RNA, 18 nt, Human
cauauuuuaaacagagga

SEQ ID NO: 3396712 - RNA, 17 nt, Human
cauauuuuauuacuguu

SEQ ID NO: 3396713 - RNA, 18 nt, Human
cauauuuuauuacuguuu

SEQ ID NO: 3396714 - RNA, 13 nt, Human
cauauuuucacag

SEQ ID NO: 3396715 - RNA, 18 nt, Human
cauauuuucaccauuuga

SEQ ID NO: 3396716 - RNA, 14 nt, Human
cauauuuuucaaaa

SEQ ID NO: 3396717 - RNA, 21 nt, Human
cauauuuuucacauaucuagu

SEQ ID NO: 3396718 - RNA, 18 nt, Human
cauauuuuuuuccuuaca

SEQ ID NO: 3396719 - RNA, 21 nt, Human
caucaaaaaaggcaguuacca

SEQ ID NO: 3396720 - RNA, 12 nt, Human
caucaaaagaca

SEQ ID NO: 3396721 - RNA, 14 nt, Human
caucaaaagacaau

SEQ ID NO: 3396722 - RNA, 16 nt, Human
caucaaaagacaauuc

SEQ ID NO: 3396723 - RNA, 18 nt, Human
caucaaaagacaauucuu

SEQ ID NO: 3396724 - RNA, 22 nt, Human
caucaaaagacaauucuuuaua

SEQ ID NO: 3396725 - RNA, 13 nt, Human
caucaaaaugcuu

SEQ ID NO: 3396726 - RNA, 17 nt, Human
caucaaacucuuaguua

SEQ ID NO: 3396727 - RNA, 16 nt, Human
caucaaaguggcaaaa

SEQ ID NO: 3396728 - RNA, 13 nt, Human
caucaaauaagaa

SEQ ID NO: 3396729 - RNA, 21 nt, Human
caucaaaugaauaaugccuuu

SEQ ID NO: 3396730 - RNA, 19 nt, Human
caucaacuaaaguuguacu

SEQ ID NO: 3396731 - RNA, 23 nt, Human
caucaacuaaaguuguacuuuaa

SEQ ID NO: 3396732 - RNA, 12 nt, Human
caucaacugaau

SEQ ID NO: 3396733 - RNA, 13 nt, Human
caucaagaagggc

SEQ ID NO: 3396734 - RNA, 20 nt, Human
caucaagaagggcugcauga

SEQ ID NO: 3396735 - RNA, 22 nt, Human
caucaagaagggcugcaugaug

SEQ ID NO: 3396736 - RNA, 13 nt, Human
caucaagacugga

SEQ ID NO: 3396737 - RNA, 15 nt, Human
caucaagacuggaag

SEQ ID NO: 3396738 - RNA, 17 nt, Human
caucaagagacugaguc

SEQ ID NO: 3396739 - RNA, 21 nt, Human
caucaagcacagaaggaggag

SEQ ID NO: 3396740 - RNA, 18 nt, Human
caucaaggcacugccuga

SEQ ID NO: 3396741 - RNA, 14 nt, Human
caucaaguaauaca

SEQ ID NO: 3396742 - RNA, 22 nt, Human
caucaaguuauugacaaacucu

SEQ ID NO: 3396743 - RNA, 19 nt, Human
caucaaguugugccaaauu

SEQ ID NO: 3396744 - RNA, 21 nt, Human
caucaauccugauuccucucu

SEQ ID NO: 3396745 - RNA, 22 nt, Human
caucaauggggccagucaggcc

SEQ ID NO: 3396746 - RNA, 16 nt, Human
caucaauguucauugu

SEQ ID NO: 3396747 - RNA, 11 nt, Human
caucaauuccc

SEQ ID NO: 3396748 - RNA, 17 nt, Human
caucacaagaacacaca

SEQ ID NO: 3396749 - RNA, 15 nt, Human
caucacacacaugga

SEQ ID NO: 3396750 - RNA, 12 nt, Human
caucacagaaug

SEQ ID NO: 3396751 - RNA, 14 nt, Human
caucacagcagccu

SEQ ID NO: 3396752 - RNA, 13 nt, Human
caucacagcuugu

SEQ ID NO: 3396753 - RNA, 20 nt, Human
caucacagggcagagccggg

SEQ ID NO: 3396754 - RNA, 19 nt, Human
caucacagggugggccucg

SEQ ID NO: 3396755 - RNA, 21 nt, Human
caucacaguuuugguugcuuu

SEQ ID NO: 3396756 - RNA, 22 nt, Human
caucacaguuuugguugcuuua

SEQ ID NO: 3396757 - RNA, 13 nt, Human
caucacauuuuug

SEQ ID NO: 3396758 - RNA, 14 nt, Human
caucaccuacucac

SEQ ID NO: 3396759 - RNA, 13 nt, Human
caucaccucaggc

SEQ ID NO: 3396760 - RNA, 17 nt, Human
caucaccuuagaccacc

SEQ ID NO: 3396761 - RNA, 23 nt, Human
caucaccuuagaccaccaagccu

SEQ ID NO: 3396762 - RNA, 16 nt, Human
caucaccuuaggcagg

SEQ ID NO: 3396763 - RNA, 19 nt, Human
caucaccuuaggcagggaa

SEQ ID NO: 3396764 - RNA, 22 nt, Human
caucaccuuaggcagggaagug

SEQ ID NO: 3396765 - RNA, 16 nt, Human
caucacuauccaugca

SEQ ID NO: 3396766 - RNA, 15 nt, Human
caucacuccccucca

SEQ ID NO: 3396767 - RNA, 16 nt, Human
caucacucugcugcuu

SEQ ID NO: 3396768 - RNA, 23 nt, Human
caucacugaguuuuccauggcag

SEQ ID NO: 3396769 - RNA, 12 nt, Human
caucacuguauc

SEQ ID NO: 3396770 - RNA, 13 nt, Human
caucacuguggcu

SEQ ID NO: 3396771 - RNA, 22 nt, Human
caucacuuaacggaccaaagca

SEQ ID NO: 3396772 - RNA, 14 nt, Human
caucagaaaggaau

SEQ ID NO: 3396773 - RNA, 12 nt, Human
caucagaacagc

SEQ ID NO: 3396774 - RNA, 15 nt, Human
caucagaaggagaag

SEQ ID NO: 3396775 - RNA, 23 nt, Human
caucagaaggagaaggaaggaga

SEQ ID NO: 3396776 - RNA, 17 nt, Human
caucagagcaaauuugg

SEQ ID NO: 3396777 - RNA, 23 nt, Human
caucagauaagacauaucucuaa

SEQ ID NO: 3396778 - RNA, 19 nt, Human
caucagauggaaauauuuu

SEQ ID NO: 3396779 - RNA, 17 nt, Human
caucagcacgauuucug

SEQ ID NO: 3396780 - RNA, 21 nt, Human
caucagcacgauuucuguuua

SEQ ID NO: 3396781 - RNA, 12 nt, Human
caucagccagcu

SEQ ID NO: 3396782 - RNA, 16 nt, Human
caucagcuauucaguu

SEQ ID NO: 3396783 - RNA, 14 nt, Human
caucagcuccagcu

SEQ ID NO: 3396784 - RNA, 17 nt, Human
caucagcugcugaaaca

SEQ ID NO: 3396785 - RNA, 19 nt, Human
caucagcuguaagaagaga

SEQ ID NO: 3396786 - RNA, 23 nt, Human
caucagcuguaagaagagacugg

SEQ ID NO: 3396787 - RNA, 20 nt, Human
caucagcuugcccuguuaaa

SEQ ID NO: 3396788 - RNA, 14 nt, Human
caucaggacccugg

SEQ ID NO: 3396789 - RNA, 13 nt, Human
caucaggacucuu

SEQ ID NO: 3396790 - RNA, 13 nt, Human
caucaggaugaac

SEQ ID NO: 3396791 - RNA, 14 nt, Human
caucaggccaggcc

SEQ ID NO: 3396792 - RNA, 15 nt, Human
caucaggccaggccc

SEQ ID NO: 3396793 - RNA, 19 nt, Human
caucaggccuagaggccug

SEQ ID NO: 3396794 - RNA, 11 nt, Human
caucaggcuuu

SEQ ID NO: 3396795 - RNA, 12 nt, Human
caucagggccug

SEQ ID NO: 3396796 - RNA, 12 nt, Human
caucagggggaa

SEQ ID NO: 3396797 - RNA, 14 nt, Human
caucagggggaaga

SEQ ID NO: 3396798 - RNA, 19 nt, Human
caucagggggaagaagcag

SEQ ID NO: 3396799 - RNA, 19 nt, Human
caucaggguaggcuggagu

SEQ ID NO: 3396800 - RNA, 15 nt, Human
caucaggugaggugu

SEQ ID NO: 3396801 - RNA, 16 nt, Human
caucagguuccauccc

SEQ ID NO: 3396802 - RNA, 15 nt, Human
caucaguacuuguuu

SEQ ID NO: 3396803 - RNA, 16 nt, Human
caucaguauugaagca

SEQ ID NO: 3396804 - RNA, 22 nt, Human
caucaguauugaagcauuuuau

SEQ ID NO: 3396805 - RNA, 22 nt, Human
caucaguguacccccgcccagg

SEQ ID NO: 3396806 - RNA, 23 nt, Human
caucaguguacccccgcccaggc

SEQ ID NO: 3396807 - RNA, 24 nt, Human
caucaguguacccccgcccaggcu

SEQ ID NO: 3396808 - RNA, 22 nt, Human
caucaguuacucugaagggcau

SEQ ID NO: 3396809 - RNA, 16 nt, Human
caucaguuagagcuga

SEQ ID NO: 3396810 - RNA, 18 nt, Human
caucauaaaauaaaguau

SEQ ID NO: 3396811 - RNA, 15 nt, Human
caucauacacuuccu

SEQ ID NO: 3396812 - RNA, 16 nt, Human
caucauauuauacaga

SEQ ID NO: 3396813 - RNA, 19 nt, Human
caucaucaaggcacugccu

SEQ ID NO: 3396814 - RNA, 20 nt, Human
caucaucaaggcacugccug

SEQ ID NO: 3396815 - RNA, 14 nt, Human
caucaucagggccu

SEQ ID NO: 3396816 - RNA, 18 nt, Human
caucaucauggccagcug

SEQ ID NO: 3396817 - RNA, 24 nt, Human
caucaucauggccagcuggaggca

SEQ ID NO: 3396818 - RNA, 13 nt, Human
caucaucccagcu

SEQ ID NO: 3396819 - RNA, 15 nt, Human
caucaucccagcugc

SEQ ID NO: 3396820 - RNA, 14 nt, Human
caucaucucagcuc

SEQ ID NO: 3396821 - RNA, 13 nt, Human
caucaucugggaa

SEQ ID NO: 3396822 - RNA, 22 nt, Human
caucaucugggaacuugucaca

SEQ ID NO: 3396823 - RNA, 23 nt, Human
caucaucugggaacuugucacag

SEQ ID NO: 3396824 - RNA, 19 nt, Human
caucaucuguaagcuguuu

SEQ ID NO: 3396825 - RNA, 17 nt, Human
caucaugaccagcaaau

SEQ ID NO: 3396826 - RNA, 16 nt, Human
caucaugaguucugcu

SEQ ID NO: 3396827 - RNA, 18 nt, Human
caucaugaguucugcuga

SEQ ID NO: 3396828 - RNA, 13 nt, Human
caucaugcagcuc

SEQ ID NO: 3396829 - RNA, 12 nt, Human
caucaugcaugu

SEQ ID NO: 3396830 - RNA, 17 nt, Human
caucaugccucugaggc

SEQ ID NO: 3396831 - RNA, 21 nt, Human
caucaugcuggaaccugcaaa

SEQ ID NO: 3396832 - RNA, 13 nt, Human
caucauggccagc

SEQ ID NO: 3396833 - RNA, 22 nt, Human
caucauguccccaaaccugcaa

SEQ ID NO: 3396834 - RNA, 13 nt, Human
caucauguuuaca

SEQ ID NO: 3396835 - RNA, 10 nt, Human
caucauuaga

SEQ ID NO: 3396836 - RNA, 17 nt, Human
caucauuauaaacguga

SEQ ID NO: 3396837 - RNA, 14 nt, Human
caucauuauuuaug

SEQ ID NO: 3396838 - RNA, 17 nt, Human
caucauucacuucacug

SEQ ID NO: 3396839 - RNA, 18 nt, Human
caucauucacuucacugu

SEQ ID NO: 3396840 - RNA, 15 nt, Human
caucauuccaggccc

SEQ ID NO: 3396841 - RNA, 23 nt, Human
caucauucccucucaucucaggu

SEQ ID NO: 3396842 - RNA, 22 nt, Human
caucauuccuugagaaaaacaa

SEQ ID NO: 3396843 - RNA, 12 nt, Human
caucauucucug

SEQ ID NO: 3396844 - RNA, 14 nt, Human
caucauucucuguc

SEQ ID NO: 3396845 - RNA, 15 nt, Human
caucauucucugucu

SEQ ID NO: 3396846 - RNA, 16 nt, Human
caucauucucugucuc

SEQ ID NO: 3396847 - RNA, 21 nt, Human
caucauucucugucucaucca

SEQ ID NO: 3396848 - RNA, 13 nt, Human
caucauugaaauc

SEQ ID NO: 3396849 - RNA, 15 nt, Human
caucauugaaaucuu

SEQ ID NO: 3396850 - RNA, 20 nt, Human
caucauugaaaucuuuuugc

SEQ ID NO: 3396851 - RNA, 18 nt, Human
caucauugcugucugcag

SEQ ID NO: 3396852 - RNA, 15 nt, Human
caucauuguauauau

SEQ ID NO: 3396853 - RNA, 19 nt, Human
caucauuguauauaugugu

SEQ ID NO: 3396854 - RNA, 12 nt, Human
caucauuucaag

SEQ ID NO: 3396855 - RNA, 16 nt, Human
caucauuuugcauuca

SEQ ID NO: 3396856 - RNA, 22 nt, Human
caucauuuugcauucaaauuaa

SEQ ID NO: 3396857 - RNA, 17 nt, Human
cauccaaaaucuugauc

SEQ ID NO: 3396858 - RNA, 16 nt, Human
cauccaaagcagacag

SEQ ID NO: 3396859 - RNA, 21 nt, Human
cauccaaagcagacagcucca

SEQ ID NO: 3396860 - RNA, 16 nt, Human
cauccaacuccagcaa

SEQ ID NO: 3396861 - RNA, 17 nt, Human
cauccaacuccagcaac

SEQ ID NO: 3396862 - RNA, 17 nt, Human
cauccaagagugcgccg

SEQ ID NO: 3396863 - RNA, 22 nt, Human
cauccaaggaagggauguauuu

SEQ ID NO: 3396864 - RNA, 15 nt, Human
cauccaaguggcaua

SEQ ID NO: 3396865 - RNA, 14 nt, Human
cauccaaguggccu

SEQ ID NO: 3396866 - RNA, 14 nt, Human
cauccaaguuaaau

SEQ ID NO: 3396867 - RNA, 17 nt, Human
cauccaauaggaaugcu

SEQ ID NO: 3396868 - RNA, 13 nt, Human
cauccaauccuca

SEQ ID NO: 3396869 - RNA, 17 nt, Human
cauccaauccucacugg

SEQ ID NO: 3396870 - RNA, 19 nt, Human
cauccaauccucacugggu

SEQ ID NO: 3396871 - RNA, 21 nt, Human
cauccaauccucacugggugg

SEQ ID NO: 3396872 - RNA, 18 nt, Human
cauccacacacgcaggaa

SEQ ID NO: 3396873 - RNA, 14 nt, Human
cauccacacaugaa

SEQ ID NO: 3396874 - RNA, 17 nt, Human
cauccacaugggagccg

SEQ ID NO: 3396875 - RNA, 18 nt, Human
cauccacauuguuuuaaa

SEQ ID NO: 3396876 - RNA, 12 nt, Human
cauccaccccag

SEQ ID NO: 3396877 - RNA, 17 nt, Human
cauccaccguccccucc

SEQ ID NO: 3396878 - RNA, 15 nt, Human
cauccaccuccuucu

SEQ ID NO: 3396879 - RNA, 22 nt, Human
cauccacuagugcaaaucauag

SEQ ID NO: 3396880 - RNA, 18 nt, Human
cauccacucuacccuccc

SEQ ID NO: 3396881 - RNA, 18 nt, Human
caucucugggcuggauga

SEQ ID NO: 3396882 - RNA, 13 nt, Human
caucucuguccca

SEQ ID NO: 3396883 - RNA, 17 nt, Human
caucucuuagcuccccu

SEQ ID NO: 3396884 - RNA, 19 nt, Human
caucucuuagcuccccucc

SEQ ID NO: 3396885 - RNA, 23 nt, Human
caucucuuccuacccaaccacuc

SEQ ID NO: 3396886 - RNA, 16 nt, Human
caucugaaagccacgu

SEQ ID NO: 3396887 - RNA, 14 nt, Human
caucugaaaguaga

SEQ ID NO: 3396888 - RNA, 22 nt, Human
caucugaaggggcaaauucuuu

SEQ ID NO: 3396889 - RNA, 18 nt, Human
caucugaauuugcccugg

SEQ ID NO: 3396890 - RNA, 16 nt, Human
caucugacacaaaaaa

SEQ ID NO: 3396891 - RNA, 15 nt, Human
caucugaccagcagc

SEQ ID NO: 3396892 - RNA, 17 nt, Human
caucugaccucuaccuu

SEQ ID NO: 3396893 - RNA, 14 nt, Human
caucugagaaugaa

SEQ ID NO: 3396894 - RNA, 23 nt, Human
caucugagagaggcuaaaauguu

SEQ ID NO: 3396895 - RNA, 18 nt, Human
caucugaggcauccagca

SEQ ID NO: 3396896 - RNA, 23 nt, Human
caucugagguccugugaucuuau

SEQ ID NO: 3396897 - RNA, 21 nt, Human
caucugaguccuggaugauac

SEQ ID NO: 3396898 - RNA, 19 nt, Human
caucugauuugcauauuca

SEQ ID NO: 3396899 - RNA, 16 nt, Human
caucugcaccccuucu

SEQ ID NO: 3396900 - RNA, 22 nt, Human
caucugcaccccuucucuccuc

SEQ ID NO: 3396901 - RNA, 23 nt, Human
caucugcacccucgaugaagccc

SEQ ID NO: 3396902 - RNA, 13 nt, Human
caucugcacccuu

SEQ ID NO: 3396903 - RNA, 15 nt, Human
caucugcacccuucu

SEQ ID NO: 3396904 - RNA, 18 nt, Human
caucugcacccuucuuuu

SEQ ID NO: 3396905 - RNA, 19 nt, Human
caucugcauuuucacccca

SEQ ID NO: 3396906 - RNA, 19 nt, Human
caucugcccaacuguguag

SEQ ID NO: 3396907 - RNA, 22 nt, Human
caucugcccaacuguguagcau

SEQ ID NO: 3396908 - RNA, 11 nt, Human
caucugcccag

SEQ ID NO: 3396909 - RNA, 14 nt, Human
caucugcccaggac

SEQ ID NO: 3396910 - RNA, 22 nt, Human
caucugcccaggacggggccgg

SEQ ID NO: 3396911 - RNA, 21 nt, Human
caucugcccaggggugccccc

SEQ ID NO: 3396912 - RNA, 15 nt, Human
caucugccccucccc

SEQ ID NO: 3396913 - RNA, 16 nt, Human
caucugccccuccccc

SEQ ID NO: 3396914 - RNA, 17 nt, Human
caucugccccuccccca

SEQ ID NO: 3396915 - RNA, 18 nt, Human
caucugccccucccccaa

SEQ ID NO: 3396916 - RNA, 19 nt, Human
caucugccccucccccaac

SEQ ID NO: 3396917 - RNA, 12 nt, Human
caucugcccgcc

SEQ ID NO: 3396918 - RNA, 13 nt, Human
caucugcccgccu

SEQ ID NO: 3396919 - RNA, 22 nt, Human
caucugcccgccugcccaccug

SEQ ID NO: 3396920 - RNA, 23 nt, Human
caucugcccgccugcccaccugc

SEQ ID NO: 3396921 - RNA, 12 nt, Human
caucugcuaaua

SEQ ID NO: 3396922 - RNA, 14 nt, Human
caucugcuccugga

SEQ ID NO: 3396923 - RNA, 19 nt, Human
caucugcugguccguggga

SEQ ID NO: 3396924 - RNA, 16 nt, Human
caucugcuucaggccc

SEQ ID NO: 3396925 - RNA, 22 nt, Human
caucuggaaaauaaaaggucua

SEQ ID NO: 3396926 - RNA, 17 nt, Human
caucuggaaccaucaga

SEQ ID NO: 3396927 - RNA, 21 nt, Human
caucuggaagaucauuuugaa

SEQ ID NO: 3396928 - RNA, 23 nt, Human
caucuggauaggagccugcuggu

SEQ ID NO: 3396929 - RNA, 23 nt, Human
caucuggccguugauguuggcug

SEQ ID NO: 3396930 - RNA, 12 nt, Human
caucuggccugg

SEQ ID NO: 3396931 - RNA, 15 nt, Human
caucuggccuggcca

SEQ ID NO: 3396932 - RNA, 17 nt, Human
caucuggccuggccugg

SEQ ID NO: 3396933 - RNA, 20 nt, Human
caucuggccuuacaccucgu

SEQ ID NO: 3396934 - RNA, 14 nt, Human
caucuggcucuaau

SEQ ID NO: 3396935 - RNA, 23 nt, Human
caucuggcuuauuuuaaugugau

SEQ ID NO: 3396936 - RNA, 12 nt, Human
caucugggaaag

SEQ ID NO: 3396937 - RNA, 18 nt, Human
caucugggccuuggccug

SEQ ID NO: 3396938 - RNA, 23 nt, Human
caucugggccuuggccuggagca

SEQ ID NO: 3396939 - RNA, 17 nt, Human
caucugggcuccuccag

SEQ ID NO: 3396940 - RNA, 19 nt, Human
caucuggggagcaggcagc

SEQ ID NO: 3396941 - RNA, 23 nt, Human
caucuggggagcaggcagccagc

SEQ ID NO: 3396942 - RNA, 15 nt, Human
caucugggggagugg

SEQ ID NO: 3396943 - RNA, 20 nt, Human
caucuggguagcuguaaggc

SEQ ID NO: 3396944 - RNA, 15 nt, Human
caucuggguccuugc

SEQ ID NO: 3396945 - RNA, 20 nt, Human
caucugguagaagggaaagc

SEQ ID NO: 3396946 - RNA, 22 nt, Human
caucuguaaaucuacacacggu

SEQ ID NO: 3396947 - RNA, 16 nt, Human
caucuguaacucuaaa

SEQ ID NO: 3396948 - RNA, 17 nt, Human
caucuguaccucugccu

SEQ ID NO: 3396949 - RNA, 21 nt, Human
caucuguacuugguccaacug

SEQ ID NO: 3396950 - RNA, 19 nt, Human
caucuguauacccucuguu

SEQ ID NO: 3396951 - RNA, 20 nt, Human
caucuguauacccucuguuu

SEQ ID NO: 3396952 - RNA, 21 nt, Human
caucuguauacccucuguuuc

SEQ ID NO: 3396953 - RNA, 13 nt, Human
caucugucccccu

SEQ ID NO: 3396954 - RNA, 15 nt, Human
caucugucccccuuu

SEQ ID NO: 3396955 - RNA, 17 nt, Human
caucugucccuccggga

SEQ ID NO: 3396956 - RNA, 14 nt, Human
caucugucuaaaga

SEQ ID NO: 3396957 - RNA, 23 nt, Human
caucugucugccaaccuaaaacu

SEQ ID NO: 3396958 - RNA, 23 nt, Human
caucugucuggaggggagcucug

SEQ ID NO: 3396959 - RNA, 18 nt, Human
caucugugaaaggaaaga

SEQ ID NO: 3396960 - RNA, 14 nt, Human
caucugugauggga

SEQ ID NO: 3396961 - RNA, 17 nt, Human
caucugugcacugccca

SEQ ID NO: 3396962 - RNA, 21 nt, Human
caucugugcacugcccaugga

SEQ ID NO: 3396963 - RNA, 17 nt, Human
caucuguguuucaagug

SEQ ID NO: 3396964 - RNA, 19 nt, Human
caucuguguuucaaguggg

SEQ ID NO: 3396965 - RNA, 18 nt, Human
caucuguuacacaaagaa

SEQ ID NO: 3396966 - RNA, 16 nt, Human
caucuguuagggccuu

SEQ ID NO: 3396967 - RNA, 15 nt, Human
caucuuaacucuuug

SEQ ID NO: 3396968 - RNA, 23 nt, Human
caucuuagagcaaagagccagca

SEQ ID NO: 3396969 - RNA, 21 nt, Human
caucuuagguuggcaaaaagg

SEQ ID NO: 3396970 - RNA, 22 nt, Human
caucuuagguuggcaaaaaggc

SEQ ID NO: 3396971 - RNA, 20 nt, Human
caucuuaguauuugcauauu

SEQ ID NO: 3396972 - RNA, 21 nt, Human
caucuuaugcuaacuguagau

SEQ ID NO: 3396973 - RNA, 15 nt, Human
caucuuauucagcac

SEQ ID NO: 3396974 - RNA, 17 nt, Human
caucuucacccaggccu

SEQ ID NO: 3396975 - RNA, 18 nt, Human
caucuucacccaggccua

SEQ ID NO: 3396976 - RNA, 23 nt, Human
caucuucaguugucucugaugca

SEQ ID NO: 3396977 - RNA, 22 nt, Human
caucuuccacaggucucagaau

SEQ ID NO: 3396978 - RNA, 14 nt, Human
caucuuccaggugg

SEQ ID NO: 3396979 - RNA, 14 nt, Human
caucuucccaaccc

SEQ ID NO: 3396980 - RNA, 12 nt, Human
caucuucccagc

SEQ ID NO: 3396981 - RNA, 14 nt, Human
caucuucccagcag

SEQ ID NO: 3396982 - RNA, 14 nt, Human
caucuuccuguguc

SEQ ID NO: 3396983 - RNA, 17 nt, Human
caucuuccuguguccug

SEQ ID NO: 3396984 - RNA, 14 nt, Human
caucuucgggacca

SEQ ID NO: 3396985 - RNA, 18 nt, Human
caucuucgggaccaggau

SEQ ID NO: 3396986 - RNA, 17 nt, Human
caucuucgucuucacuc

SEQ ID NO: 3396987 - RNA, 12 nt, Human
caucuucucagc

SEQ ID NO: 3396988 - RNA, 14 nt, Human
caucuucucagcuc

SEQ ID NO: 3396989 - RNA, 17 nt, Human
caucuucugccuuaguc

SEQ ID NO: 3396990 - RNA, 22 nt, Human
caucuucuuugcagccugggug

SEQ ID NO: 3396991 - RNA, 20 nt, Human
caucuugaagggcccaggag

SEQ ID NO: 3396992 - RNA, 16 nt, Human
caucuugaauuguaag

SEQ ID NO: 3396993 - RNA, 21 nt, Human
caucuugaauuguaaggaaug

SEQ ID NO: 3396994 - RNA, 20 nt, Human
caucuugacagagccugccc

SEQ ID NO: 3396995 - RNA, 21 nt, Human
caucuugaucugcucagcccu

SEQ ID NO: 3396996 - RNA, 22 nt, Human
caucuugaucugcucagcccug

SEQ ID NO: 3396997 - RNA, 16 nt, Human
caucuugcauuaugca

SEQ ID NO: 3396998 - RNA, 13 nt, Human
caucuugccucca

SEQ ID NO: 3396999 - RNA, 16 nt, Human
caucuugccuccaggu

SEQ ID NO: 3397000 - RNA, 23 nt, Human
caucuugccuccaggugcagagg

SEQ ID NO: 3397001 - RNA, 17 nt, Human
caucuugcuaccaguau

SEQ ID NO: 3397002 - RNA, 23 nt, Human
caucuugcuaccaguauuuagaa

SEQ ID NO: 3397003 - RNA, 13 nt, Human
caucuugcucugc

SEQ ID NO: 3397004 - RNA, 20 nt, Human
caucuugcucugcugacaga

SEQ ID NO: 3397005 - RNA, 13 nt, Human
caucuugcuuccc

SEQ ID NO: 3397006 - RNA, 12 nt, Human
caucuugguaaa

SEQ ID NO: 3397007 - RNA, 14 nt, Human
caucuugguaaauu

SEQ ID NO: 3397008 - RNA, 17 nt, Human
caucuuguauacacaua

SEQ ID NO: 3397009 - RNA, 13 nt, Human
caucuugugaaau

SEQ ID NO: 3397010 - RNA, 15 nt, Human
caucuuguguuuuau

SEQ ID NO: 3397011 - RNA, 16 nt, Human
caucuuuaucuguucu

SEQ ID NO: 3397012 - RNA, 13 nt, Human
caucuuucacauu

SEQ ID NO: 3397013 - RNA, 13 nt, Human
caucuuucccucc

SEQ ID NO: 3397014 - RNA, 15 nt, Human
caucuuucccuccuu

SEQ ID NO: 3397015 - RNA, 21 nt, Human
caucuuugaaauuauguaaau

SEQ ID NO: 3397016 - RNA, 15 nt, Human
caucuuugauguguu

SEQ ID NO: 3397017 - RNA, 17 nt, Human
caucuuugcagguugcu

SEQ ID NO: 3397018 - RNA, 14 nt, Human
caucuuugccucuc

SEQ ID NO: 3397019 - RNA, 23 nt, Human
caucuuugccuugggcugcuccu

SEQ ID NO: 3397020 - RNA, 15 nt, Human
caucuuuggggaggu

SEQ ID NO: 3397021 - RNA, 16 nt, Human
caucuuuuaagacaaa

SEQ ID NO: 3397022 - RNA, 13 nt, Human
caucuuuuacauu

SEQ ID NO: 3397023 - RNA, 16 nt, Human
caucuuuucuugccuc

SEQ ID NO: 3397024 - RNA, 21 nt, Human
caucuuuucuugccucugucc

SEQ ID NO: 3397025 - RNA, 19 nt, Human
cauuuucuauaacagauau

SEQ ID NO: 3397026 - RNA, 12 nt, Human
cauuuucucuua

SEQ ID NO: 3397027 - RNA, 17 nt, Human
cauuuucugaaacuaau

SEQ ID NO: 3397028 - RNA, 20 nt, Human
cauuuucugaaacuaaugaa

SEQ ID NO: 3397029 - RNA, 11 nt, Human
cauuuucugca

SEQ ID NO: 3397030 - RNA, 14 nt, Human
cauuuucugcaucu

SEQ ID NO: 3397031 - RNA, 17 nt, Human
cauuuucugcaucucca

SEQ ID NO: 3397032 - RNA, 23 nt, Human
cauuuucuggccaguguuuaaaa

SEQ ID NO: 3397033 - RNA, 21 nt, Human
cauuuucuggguucugggugg

SEQ ID NO: 3397034 - RNA, 12 nt, Human
cauuuucugugg

SEQ ID NO: 3397035 - RNA, 23 nt, Human
cauuuucuuauugcgcugcuacc

SEQ ID NO: 3397036 - RNA, 13 nt, Human
cauuuugaagcua

SEQ ID NO: 3397037 - RNA, 16 nt, Human
cauuuugaagcuaauu

SEQ ID NO: 3397038 - RNA, 17 nt, Human
cauuuugaagcuaauua

SEQ ID NO: 3397039 - RNA, 15 nt, Human
cauuuugaaucacau

SEQ ID NO: 3397040 - RNA, 13 nt, Human
cauuuugcaaaau

SEQ ID NO: 3397041 - RNA, 15 nt, Human
cauuuugcagcagug

SEQ ID NO: 3397042 - RNA, 15 nt, Human
cauuuugccaaaauu

SEQ ID NO: 3397043 - RNA, 24 nt, Human
cauuuugcuaaaugugaaugauga

SEQ ID NO: 3397044 - RNA, 15 nt, Human
cauuuugcuucauag

SEQ ID NO: 3397045 - RNA, 20 nt, Human
cauuuuggaaguuuucagga

SEQ ID NO: 3397046 - RNA, 22 nt, Human
cauuuuggaaguuuucaggacu

SEQ ID NO: 3397047 - RNA, 22 nt, Human
cauuuuggagaguuuccugaaa

SEQ ID NO: 3397048 - RNA, 12 nt, Human
cauuuuggcgcu

SEQ ID NO: 3397049 - RNA, 22 nt, Human
cauuuuggcgcuauuacaaaua

SEQ ID NO: 3397050 - RNA, 23 nt, Human
cauuuugguaagagacagaaugu

SEQ ID NO: 3397051 - RNA, 14 nt, Human
cauuuugguacuuu

SEQ ID NO: 3397052 - RNA, 19 nt, Human
cauuuuguaacaaaugaac

SEQ ID NO: 3397053 - RNA, 12 nt, Human
cauuuuguaaua

SEQ ID NO: 3397054 - RNA, 13 nt, Human
cauuuuguaauaa

SEQ ID NO: 3397055 - RNA, 12 nt, Human
cauuuuguacca

SEQ ID NO: 3397056 - RNA, 22 nt, Human
cauuuuguaccaaccauccaau

SEQ ID NO: 3397057 - RNA, 18 nt, Human
cauuuuguauaauuguau

SEQ ID NO: 3397058 - RNA, 12 nt, Human
cauuuugugaag

SEQ ID NO: 3397059 - RNA, 17 nt, Human
cauuuugugaagcccug

SEQ ID NO: 3397060 - RNA, 20 nt, Human
cauuuugugaagcccuguug

SEQ ID NO: 3397061 - RNA, 15 nt, Human
cauuuugugaaugga

SEQ ID NO: 3397062 - RNA, 18 nt, Human
cauuuugugaauggauug

SEQ ID NO: 3397063 - RNA, 13 nt, Human
cauuuuguucuua

SEQ ID NO: 3397064 - RNA, 19 nt, Human
cauuuuguucuuacacaua

SEQ ID NO: 3397065 - RNA, 23 nt, Human
cauuuuguuguguguaugcugcu

SEQ ID NO: 3397066 - RNA, 19 nt, Human
cauuuuguuugguauugua

SEQ ID NO: 3397067 - RNA, 21 nt, Human
cauuuuguuugguauuguauu

SEQ ID NO: 3397068 - RNA, 17 nt, Human
cauuuuuaaauguguuu

SEQ ID NO: 3397069 - RNA, 20 nt, Human
cauuuuuaagugcugcauuu

SEQ ID NO: 3397070 - RNA, 14 nt, Human
cauuuuuacaaguu

SEQ ID NO: 3397071 - RNA, 15 nt, Human
cauuuuuacaauaaa

SEQ ID NO: 3397072 - RNA, 17 nt, Human
cauuuuuacaauaaaua

SEQ ID NO: 3397073 - RNA, 19 nt, Human
cauuuuuacaauguaauua

SEQ ID NO: 3397074 - RNA, 17 nt, Human
cauuuuuaguagagaca

SEQ ID NO: 3397075 - RNA, 20 nt, Human
cauuuuuauaccuguuuaaa

SEQ ID NO: 3397076 - RNA, 22 nt, Human
cauuuuuaucaggauuuccucu

SEQ ID NO: 3397077 - RNA, 17 nt, Human
cauuuuucaaagcaauu

SEQ ID NO: 3397078 - RNA, 17 nt, Human
cauuuuucaacuuugaa

SEQ ID NO: 3397079 - RNA, 21 nt, Human
cauuuuucaauauauugaacu

SEQ ID NO: 3397080 - RNA, 21 nt, Human
cauuuuucagaccuuuuaacu

SEQ ID NO: 3397081 - RNA, 20 nt, Human
cauuuuucagauauaaaaga

SEQ ID NO: 3397082 - RNA, 20 nt, Human
cauuuuucccaggcaaauaa

SEQ ID NO: 3397083 - RNA, 16 nt, Human
cauuuuuccuucccuu

SEQ ID NO: 3397084 - RNA, 14 nt, Human
cauuuuucuuccag

SEQ ID NO: 3397085 - RNA, 12 nt, Human
cauuuuuguaaa

SEQ ID NO: 3397086 - RNA, 20 nt, Human
cauuuuuguacaguuugcug

SEQ ID NO: 3397087 - RNA, 20 nt, Human
cauuuuuguauuuuguuuaa

SEQ ID NO: 3397088 - RNA, 22 nt, Human
cauuuuuguuucuaccucccag

SEQ ID NO: 3397089 - RNA, 18 nt, Human
cauuuuuuaaggaaacaa

SEQ ID NO: 3397090 - RNA, 21 nt, Human
cauuuuuuaugggcauugaca

SEQ ID NO: 3397091 - RNA, 13 nt, Human
cauuuuuucaguc

SEQ ID NO: 3397092 - RNA, 16 nt, Human
cauuuuuuccuguuug

SEQ ID NO: 3397093 - RNA, 14 nt, Human
cauuuuuugaaaug

SEQ ID NO: 3397094 - RNA, 18 nt, Human
cauuuuuugggcagcaau

SEQ ID NO: 3397095 - RNA, 17 nt, Human
cauuuuuuuaauuuauu

SEQ ID NO: 3397096 - RNA, 15 nt, Human
cauuuuuuuccaggc

SEQ ID NO: 3397097 - RNA, 18 nt, Human
cauuuuuuuccaggcugg

SEQ ID NO: 3397098 - RNA, 18 nt, Human
cauuuuuuuccuugcaaa

SEQ ID NO: 3397099 - RNA, 22 nt, Human
cauuuuuuuuaagaaaaaggau

SEQ ID NO: 3397100 - RNA, 20 nt, Human
cauuuuuuuuuuuaauuuug

SEQ ID NO: 3397101 - RNA, 19 nt, Human
ccaaaaaaaaauacaugcu

SEQ ID NO: 3397102 - RNA, 22 nt, Human
ccaaaaaagcuguauuuugaaa

SEQ ID NO: 3397103 - RNA, 22 nt, Human
ccaaaaaauucuacaacacaca

SEQ ID NO: 3397104 - RNA, 15 nt, Human
ccaaaaagaccagac

SEQ ID NO: 3397105 - RNA, 14 nt, Human
ccaaaaagcacaua

SEQ ID NO: 3397106 - RNA, 22 nt, Human
ccaaaaagguugcuguuucaca

SEQ ID NO: 3397107 - RNA, 13 nt, Human
ccaaaaauagcua

SEQ ID NO: 3397108 - RNA, 22 nt, Human
ccaaaaauuacuuaguauugca

SEQ ID NO: 3397109 - RNA, 15 nt, Human
ccaaaaccacagccc

SEQ ID NO: 3397110 - RNA, 15 nt, Human
ccaaaaccgccagcu

SEQ ID NO: 3397111 - RNA, 16 nt, Human
ccaaaaccgccagcuc

SEQ ID NO: 3397112 - RNA, 17 nt, Human
ccaaaacugagcauaag

SEQ ID NO: 3397113 - RNA, 11 nt, Human
ccaaaacugug

SEQ ID NO: 3397114 - RNA, 11 nt, Human
ccaaaagaaaa

SEQ ID NO: 3397115 - RNA, 16 nt, Human
ccaaaagaaacugaca

SEQ ID NO: 3397116 - RNA, 22 nt, Human
ccaaaagaagcccccagcuaag

SEQ ID NO: 3397117 - RNA, 18 nt, Human
ccaaaagauugcugaaaa

SEQ ID NO: 3397118 - RNA, 15 nt, Human
ccaaaagcuagacag

SEQ ID NO: 3397119 - RNA, 15 nt, Human
ccaaaagcuuuuuau

SEQ ID NO: 3397120 - RNA, 13 nt, Human
ccaaaaggaaaaa

SEQ ID NO: 3397121 - RNA, 18 nt, Human
ccaaaaggaaaaagcucc

SEQ ID NO: 3397122 - RNA, 14 nt, Human
ccaaaaggcagaag

SEQ ID NO: 3397123 - RNA, 18 nt, Human
ccaaaaguaucgggggcu

SEQ ID NO: 3397124 - RNA, 18 nt, Human
ccaaaaguggaagugaca

SEQ ID NO: 3397125 - RNA, 17 nt, Human
ccaaaaguuacauguuu

SEQ ID NO: 3397126 - RNA, 14 nt, Human
ccaaaaguuauuaa

SEQ ID NO: 3397127 - RNA, 21 nt, Human
ccaaaauaaaacuuuuuaaaa

SEQ ID NO: 3397128 - RNA, 23 nt, Human
ccaaaauaaauaaggaaaagcuu

SEQ ID NO: 3397129 - RNA, 14 nt, Human
ccaaaauaagaaaa

SEQ ID NO: 3397130 - RNA, 16 nt, Human
ccaaaaucucaagaaa

SEQ ID NO: 3397131 - RNA, 20 nt, Human
ccaaaauguuggucauuuua

SEQ ID NO: 3397132 - RNA, 14 nt, Human
ccaaaauuaaggug

SEQ ID NO: 3397133 - RNA, 21 nt, Human
ccaaaauuuauuuuauaagaa

SEQ ID NO: 3397134 - RNA, 22 nt, Human
ccaaaauuuauuuuauaagaaa

SEQ ID NO: 3397135 - RNA, 16 nt, Human
ccaaacaaauaugcaa

SEQ ID NO: 3397136 - RNA, 18 nt, Human
ccaaacacacagaagggg

SEQ ID NO: 3397137 - RNA, 14 nt, Human
ccaaacacaggcaa

SEQ ID NO: 3397138 - RNA, 22 nt, Human
ccaaacaccuuccagcuccugu

SEQ ID NO: 3397139 - RNA, 12 nt, Human
ccaaacauguau

SEQ ID NO: 3397140 - RNA, 17 nt, Human
ccaaacauguauuuaug

SEQ ID NO: 3397141 - RNA, 18 nt, Human
ccaaacauguauuuaugu

SEQ ID NO: 3397142 - RNA, 16 nt, Human
ccaaaccaccuucccu

SEQ ID NO: 3397143 - RNA, 22 nt, Human
ccaaaccacuuuuugcagcuuu

SEQ ID NO: 3397144 - RNA, 16 nt, Human
ccaaaccaggacccug

SEQ ID NO: 3397145 - RNA, 19 nt, Human
ccaaacccccauucugucc

SEQ ID NO: 3397146 - RNA, 14 nt, Human
ccaaacccugucug

SEQ ID NO: 3397147 - RNA, 18 nt, Human
ccaaaccggcaggugcga

SEQ ID NO: 3397148 - RNA, 13 nt, Human
ccaaaccucaagu

SEQ ID NO: 3397149 - RNA, 15 nt, Human
ccaaaccucaccaac

SEQ ID NO: 3397150 - RNA, 11 nt, Human
ccaaaccucug

SEQ ID NO: 3397151 - RNA, 17 nt, Human
ccaaaccucugugagca

SEQ ID NO: 3397152 - RNA, 21 nt, Human
ccaaaccucuguucaguguaa

SEQ ID NO: 3397153 - RNA, 22 nt, Human
ccaaaccugcaagggcucccca

SEQ ID NO: 3397154 - RNA, 21 nt, Human
ccaaacgcccuuuccuccuca

SEQ ID NO: 3397155 - RNA, 14 nt, Human
ccaaacuaauuuuu

SEQ ID NO: 3397156 - RNA, 20 nt, Human
ccaaacucaccugccccuca

SEQ ID NO: 3397157 - RNA, 18 nt, Human
ccaaacucuucccucucu

SEQ ID NO: 3397158 - RNA, 21 nt, Human
ccaaacugacucaacagucau

SEQ ID NO: 3397159 - RNA, 16 nt, Human
ccaaagacaaauagua

SEQ ID NO: 3397160 - RNA, 21 nt, Human
ccaaagagcacaaacauuuuu

SEQ ID NO: 3397161 - RNA, 18 nt, Human
ccaaagagccuggagaag

SEQ ID NO: 3397162 - RNA, 12 nt, Human
ccaaagagcugc

SEQ ID NO: 3397163 - RNA, 16 nt, Human
ccaaagagcugccuaa

SEQ ID NO: 3397164 - RNA, 13 nt, Human
ccaaagaggcugc

SEQ ID NO: 3397165 - RNA, 21 nt, Human
ccaaagauauauacacaggau

SEQ ID NO: 3397166 - RNA, 16 nt, Human
ccaaagaugcagccgc

SEQ ID NO: 3397167 - RNA, 18 nt, Human
ccaaagaugcagccgccu

SEQ ID NO: 3397168 - RNA, 19 nt, Human
ccaaagaugcagccgccuu

SEQ ID NO: 3397169 - RNA, 22 nt, Human
ccaaagaugcagccgccuuccu

SEQ ID NO: 3397170 - RNA, 21 nt, Human
ccaaggaaaccacagcugcug

SEQ ID NO: 3397171 - RNA, 22 nt, Human
ccaaggaaaccacagcugcugg

SEQ ID NO: 3397172 - RNA, 14 nt, Human
ccaaggaaaggcac

SEQ ID NO: 3397173 - RNA, 15 nt, Human
ccaaggaaauauauu

SEQ ID NO: 3397174 - RNA, 14 nt, Human
ccaaggaccagguu

SEQ ID NO: 3397175 - RNA, 13 nt, Human
ccaaggacugccg

SEQ ID NO: 3397176 - RNA, 15 nt, Human
ccaaggagaaacaga

SEQ ID NO: 3397177 - RNA, 19 nt, Human
ccaaggagaaacagagaca

SEQ ID NO: 3397178 - RNA, 21 nt, Human
ccaaggagaaacagagacagg

SEQ ID NO: 3397179 - RNA, 14 nt, Human
ccaaggagaugaag

SEQ ID NO: 3397180 - RNA, 23 nt, Human
ccaaggagaugaagcaaacacau

SEQ ID NO: 3397181 - RNA, 20 nt, Human
ccaaggagcacaggucccac

SEQ ID NO: 3397182 - RNA, 12 nt, Human
ccaaggagcugc

SEQ ID NO: 3397183 - RNA, 14 nt, Human
ccaaggagcugcua

SEQ ID NO: 3397184 - RNA, 13 nt, Human
ccaaggaggaaaa

SEQ ID NO: 3397185 - RNA, 12 nt, Human
ccaaggaggauu

SEQ ID NO: 3397186 - RNA, 20 nt, Human
ccaaggagggugagugcaag

SEQ ID NO: 3397187 - RNA, 18 nt, Human
ccaaggccaaaggaagca

SEQ ID NO: 3397188 - RNA, 15 nt, Human
ccaaggccagagugg

SEQ ID NO: 3397189 - RNA, 19 nt, Human
ccaaggccagaguggccug

SEQ ID NO: 3397190 - RNA, 19 nt, Human
ccaaggcccccugccugcc

SEQ ID NO: 3397191 - RNA, 13 nt, Human
ccaaggccuuccc

SEQ ID NO: 3397192 - RNA, 14 nt, Human
ccaaggcggccccu

SEQ ID NO: 3397193 - RNA, 15 nt, Human
ccaaggcggccccuc

SEQ ID NO: 3397194 - RNA, 23 nt, Human
ccaaggcguccgcgcgccagcac

SEQ ID NO: 3397195 - RNA, 16 nt, Human
ccaaggcucugagcaa

SEQ ID NO: 3397196 - RNA, 13 nt, Human
ccaaggcucuguu

SEQ ID NO: 3397197 - RNA, 14 nt, Human
ccaaggcuggggga

SEQ ID NO: 3397198 - RNA, 22 nt, Human
ccaaggcuucuccaauucugcc

SEQ ID NO: 3397199 - RNA, 16 nt, Human
ccaagggaaccugugu

SEQ ID NO: 3397200 - RNA, 13 nt, Human
ccaagggaggcug

SEQ ID NO: 3397201 - RNA, 15 nt, Human
ccaagggaggcugcu

SEQ ID NO: 3397202 - RNA, 24 nt, Human
ccaagggaguuaggcuauucacaa

SEQ ID NO: 3397203 - RNA, 20 nt, Human
ccaagggaugaaagagaagg

SEQ ID NO: 3397204 - RNA, 18 nt, Human
ccaagggauggacaucuu

SEQ ID NO: 3397205 - RNA, 18 nt, Human
ccaagggcaaaauuccca

SEQ ID NO: 3397206 - RNA, 22 nt, Human
ccaagggcaaaauucccaggga

SEQ ID NO: 3397207 - RNA, 15 nt, Human
ccaagggccuggccu

SEQ ID NO: 3397208 - RNA, 18 nt, Human
ccaagggccuggccugag

SEQ ID NO: 3397209 - RNA, 20 nt, Human
ccaagggcuucugcacccuc

SEQ ID NO: 3397210 - RNA, 23 nt, Human
ccaagggcuucugcacccuccac

SEQ ID NO: 3397211 - RNA, 21 nt, Human
ccaaggggagucaccuucccu

SEQ ID NO: 3397212 - RNA, 22 nt, Human
ccaaggggauuuuuaugucugg

SEQ ID NO: 3397213 - RNA, 16 nt, Human
ccaaggggcagucugg

SEQ ID NO: 3397214 - RNA, 14 nt, Human
ccaaggggccugag

SEQ ID NO: 3397215 - RNA, 16 nt, Human
ccaaggggcuucaggu

SEQ ID NO: 3397216 - RNA, 20 nt, Human
ccaaggguucagagacucag

SEQ ID NO: 3397217 - RNA, 16 nt, Human
ccaagguaccauccua

SEQ ID NO: 3397218 - RNA, 16 nt, Human
ccaaggucugagcacu

SEQ ID NO: 3397219 - RNA, 16 nt, Human
ccaaggucuucuuaau

SEQ ID NO: 3397220 - RNA, 15 nt, Human
ccaaggugauguugu

SEQ ID NO: 3397221 - RNA, 20 nt, Human
ccaaggugggcugagcccug

SEQ ID NO: 3397222 - RNA, 20 nt, Human
ccaagguggguagaucacga

SEQ ID NO: 3397223 - RNA, 13 nt, Human
ccaagguggucug

SEQ ID NO: 3397224 - RNA, 15 nt, Human
ccaagguggucugcu

SEQ ID NO: 3397225 - RNA, 16 nt, Human
ccaagguguccuacag

SEQ ID NO: 3397226 - RNA, 16 nt, Human
ccaagguuacuuaauu

SEQ ID NO: 3397227 - RNA, 16 nt, Human
ccaagguucccuugug

SEQ ID NO: 3397228 - RNA, 19 nt, Human
ccaagguuuaaagagucua

SEQ ID NO: 3397229 - RNA, 22 nt, Human
ccaagguuuaaagagucuagau

SEQ ID NO: 3397230 - RNA, 21 nt, Human
ccaagguuuuauaaggcugau

SEQ ID NO: 3397231 - RNA, 20 nt, Human
ccaaguagcugagacuacag

SEQ ID NO: 3397232 - RNA, 18 nt, Human
ccaaguagucugcucaca

SEQ ID NO: 3397233 - RNA, 21 nt, Human
ccaaguauagccuauggcaga

SEQ ID NO: 3397234 - RNA, 14 nt, Human
ccaaguauuuauua

SEQ ID NO: 3397235 - RNA, 13 nt, Human
ccaaguauuuugc

SEQ ID NO: 3397236 - RNA, 20 nt, Human
ccaagucaagugaaaaagga

SEQ ID NO: 3397237 - RNA, 20 nt, Human
ccaagucacacgcuuuugaa

SEQ ID NO: 3397238 - RNA, 21 nt, Human
ccaagucagcuuugccuucca

SEQ ID NO: 3397239 - RNA, 13 nt, Human
ccaaguccagauu

SEQ ID NO: 3397240 - RNA, 19 nt, Human
ccaaguccagguccuggug

SEQ ID NO: 3397241 - RNA, 12 nt, Human
ccaagucccacc

SEQ ID NO: 3397242 - RNA, 22 nt, Human
ccaagucccuguuuucugagcc

SEQ ID NO: 3397243 - RNA, 16 nt, Human
ccaaguccugaagagg

SEQ ID NO: 3397244 - RNA, 19 nt, Human
ccaagucggaacagcagau

SEQ ID NO: 3397245 - RNA, 17 nt, Human
ccaagucuacagaguga

SEQ ID NO: 3397246 - RNA, 14 nt, Human
ccaagucucagugg

SEQ ID NO: 3397247 - RNA, 18 nt, Human
ccaagugaacacuagcca

SEQ ID NO: 3397248 - RNA, 22 nt, Human
ccaagugaccuauaccuguguu

SEQ ID NO: 3397249 - RNA, 20 nt, Human
ccaagugagucucucugggc

SEQ ID NO: 3397250 - RNA, 16 nt, Human
ccaagugcacuuucua

SEQ ID NO: 3397251 - RNA, 17 nt, Human
ccaagugcacuuucuaa

SEQ ID NO: 3397252 - RNA, 17 nt, Human
ccaagugccagaggugg

SEQ ID NO: 3397253 - RNA, 21 nt, Human
ccaagugccagaggugggcag

SEQ ID NO: 3397254 - RNA, 22 nt, Human
ccaagugccagaggugggcagg

SEQ ID NO: 3397255 - RNA, 23 nt, Human
ccaaguggagccugacagccaga

SEQ ID NO: 3397256 - RNA, 13 nt, Human
ccaaguggcagag

SEQ ID NO: 3397257 - RNA, 18 nt, Human
ccaaguggcagagcuugg

SEQ ID NO: 3397258 - RNA, 16 nt, Human
ccaagugggggcagag

SEQ ID NO: 3397259 - RNA, 15 nt, Human
ccaaguggggugcug

SEQ ID NO: 3397260 - RNA, 16 nt, Human
ccaaguggggugcugg

SEQ ID NO: 3397261 - RNA, 10 nt, Human
ccaagugugc

SEQ ID NO: 3397262 - RNA, 20 nt, Human
ccaagugugcauauuguaca

SEQ ID NO: 3397263 - RNA, 15 nt, Human
ccaaguuauaaauca

SEQ ID NO: 3397264 - RNA, 20 nt, Human
ccaaguuauaaaucaauguc

SEQ ID NO: 3397265 - RNA, 14 nt, Human
ccaaguuuauauac

SEQ ID NO: 3397266 - RNA, 22 nt, Human
ccaaguuuugugaaauuuuuca

SEQ ID NO: 3397267 - RNA, 22 nt, Human
ccaauaaaagcaauuccaaccu

SEQ ID NO: 3397268 - RNA, 14 nt, Human
ccaauaacacacag

SEQ ID NO: 3397269 - RNA, 23 nt, Human
ccaauaauaaaugcccucuucuc

SEQ ID NO: 3397270 - RNA, 16 nt, Human
ccaauaccccauggac

SEQ ID NO: 3397271 - RNA, 18 nt, Human
ccaauagauuccccauug

SEQ ID NO: 3397272 - RNA, 15 nt, Human
ccaauagcugcccau

SEQ ID NO: 3397273 - RNA, 16 nt, Human
ccaauaggcaaauuaa

SEQ ID NO: 3397274 - RNA, 22 nt, Human
ccaauagggcugagcucucugu

SEQ ID NO: 3397275 - RNA, 19 nt, Human
ccaauauccuaauaaaaag

SEQ ID NO: 3397276 - RNA, 22 nt, Human
ccaauaugugauuuuuuuuccc

SEQ ID NO: 3397277 - RNA, 20 nt, Human
ccaauauucauagcagcuua

SEQ ID NO: 3397278 - RNA, 14 nt, Human
ccaauauuguacag

SEQ ID NO: 3397279 - RNA, 18 nt, Human
ccaauauuguacaguuuu

SEQ ID NO: 3397280 - RNA, 12 nt, Human
ccaauauuuaaa

SEQ ID NO: 3397281 - RNA, 22 nt, Human
ccaauauuuucuuuaaugcuuu

SEQ ID NO: 3397282 - RNA, 16 nt, Human
ccaaucaaucuugcau

SEQ ID NO: 3397283 - RNA, 15 nt, Human
ccaaucagagaccag

SEQ ID NO: 3397284 - RNA, 16 nt, Human
ccaaucagcacugaaa

SEQ ID NO: 3397285 - RNA, 22 nt, Human
ccaaucaguagcuuaagaaaaa

SEQ ID NO: 3397286 - RNA, 13 nt, Human
ccaauccagguac

SEQ ID NO: 3397287 - RNA, 23 nt, Human
ccaauccagguacgcacagacag

SEQ ID NO: 3397288 - RNA, 16 nt, Human
ccaauccccuccuugg

SEQ ID NO: 3397289 - RNA, 15 nt, Human
ccaauccucacuggg

SEQ ID NO: 3397290 - RNA, 17 nt, Human
ccaauccucacugggug

SEQ ID NO: 3397291 - RNA, 19 nt, Human
ccaaucugcaauuucuacu

SEQ ID NO: 3397292 - RNA, 17 nt, Human
ccaaucuuacuuuguaa

SEQ ID NO: 3397293 - RNA, 20 nt, Human
ccaaucuuacuuuguaaauu

SEQ ID NO: 3397294 - RNA, 23 nt, Human
ccaaugaaaaaauguauaugcac

SEQ ID NO: 3397295 - RNA, 21 nt, Human
ccaaugagacucuagggucca

SEQ ID NO: 3397296 - RNA, 21 nt, Human
ccaaugagcuuucugaacagc

SEQ ID NO: 3397297 - RNA, 15 nt, Human
ccaaugauggucacc

SEQ ID NO: 3397298 - RNA, 15 nt, Human
ccaaugcaagacgcc

SEQ ID NO: 3397299 - RNA, 20 nt, Human
ccaaugcacuuuguucuggc

SEQ ID NO: 3397300 - RNA, 12 nt, Human
ccaauggaaacc

SEQ ID NO: 3397301 - RNA, 23 nt, Human
ccaauggacuaacuugucuuugg

SEQ ID NO: 3397302 - RNA, 15 nt, Human
ccaauguacccaccg

SEQ ID NO: 3397303 - RNA, 20 nt, Human
ccaauguaggagcugccuug

SEQ ID NO: 3397304 - RNA, 14 nt, Human
ccaaugucuggaga

SEQ ID NO: 3397305 - RNA, 12 nt, Human
ccaaugucuuga

SEQ ID NO: 3397306 - RNA, 19 nt, Human
ccaauguuagagacuuuuu

SEQ ID NO: 3397307 - RNA, 23 nt, Human
ccaauguuucaagaggagccccc

SEQ ID NO: 3397308 - RNA, 13 nt, Human
ccaauuaaggauu

SEQ ID NO: 3397309 - RNA, 19 nt, Human
ccaauuaaguccuacuuua

SEQ ID NO: 3397310 - RNA, 23 nt, Human
ccaauuaggaaguguaacagcug

SEQ ID NO: 3397311 - RNA, 21 nt, Human
ccaauuaggggguaaggcccc

SEQ ID NO: 3397312 - RNA, 15 nt, Human
ccaauuaguuuccuu

SEQ ID NO: 3397313 - RNA, 22 nt, Human
ccaauuauaugagacguuuuug

SEQ ID NO: 3397314 - RNA, 14 nt, Human
ccaauuauguuaaa

SEQ ID NO: 3397315 - RNA, 15 nt, Human
ccaauuauugauaua

SEQ ID NO: 3397316 - RNA, 18 nt, Human
ccaauuauugauauauau

SEQ ID NO: 3397317 - RNA, 21 nt, Human
ccaauuauugauauauauuau

SEQ ID NO: 3397318 - RNA, 22 nt, Human
ccaauuauuugacuuuaauuua

SEQ ID NO: 3397319 - RNA, 13 nt, Human
ccaauucaauaca

SEQ ID NO: 3397320 - RNA, 24 nt, Human
ccaauuccucauccucagaugcuc

SEQ ID NO: 3397321 - RNA, 22 nt, Human
ccaauucuaucuuuuguuuccu

SEQ ID NO: 3397322 - RNA, 18 nt, Human
ccaauucuuacaaacaug

SEQ ID NO: 3397323 - RNA, 19 nt, Human
ccaauucuuacaaacaugu

SEQ ID NO: 3397324 - RNA, 14 nt, Human
ccaauugugcugcc

SEQ ID NO: 3397325 - RNA, 21 nt, Human
ccaauuucggauuuuuuccaa

SEQ ID NO: 3397326 - RNA, 22 nt, Human
ccaauuucggauuuuuuccaaa

SEQ ID NO: 3397327 - RNA, 23 nt, Human
ccaauuucggauuuuuuccaaaa

SEQ ID NO: 3397328 - RNA, 19 nt, Human
ccaauuugcacauuaaaug

SEQ ID NO: 3397329 - RNA, 13 nt, Human
ccaauuuucaaag

SEQ ID NO: 3397330 - RNA, 13 nt, Human
ccacaaaaauuga

SEQ ID NO: 3397331 - RNA, 22 nt, Human
ccacaaaggccaaacugcugga

SEQ ID NO: 3397332 - RNA, 13 nt, Human
ccacaacacacag

SEQ ID NO: 3397333 - RNA, 19 nt, Human
ccacaacaugaaaacucca

SEQ ID NO: 3397334 - RNA, 17 nt, Human
ccacaacaugaggccac

SEQ ID NO: 3397335 - RNA, 15 nt, Human
ccacaagauucccag

SEQ ID NO: 3397336 - RNA, 19 nt, Human
ccacaagauucccagagac

SEQ ID NO: 3397337 - RNA, 20 nt, Human
ccacaagauucccagagaca

SEQ ID NO: 3397338 - RNA, 21 nt, Human
ccacaagauucccagagacag

SEQ ID NO: 3397339 - RNA, 14 nt, Human
ccacaagccugagg

SEQ ID NO: 3397340 - RNA, 13 nt, Human
ccacaaggaagaa

SEQ ID NO: 3397341 - RNA, 16 nt, Human
ccacaaggaagaaauu

SEQ ID NO: 3397342 - RNA, 21 nt, Human
ccacaaggacuuccuguccag

SEQ ID NO: 3397343 - RNA, 17 nt, Human
ccacaaggcuguugcau

SEQ ID NO: 3397344 - RNA, 21 nt, Human
ccacaaguggugguaacccug

SEQ ID NO: 3397345 - RNA, 15 nt, Human
ccacaaguuaaauaa

SEQ ID NO: 3397346 - RNA, 20 nt, Human
ccacaaguuaaauaaaucau

SEQ ID NO: 3397347 - RNA, 22 nt, Human
ccacaauaaccaagauauuuuu

SEQ ID NO: 3397348 - RNA, 23 nt, Human
ccacaauccuauucucgggcuga

SEQ ID NO: 3397349 - RNA, 20 nt, Human
ccacaaucuuaaggggcagc

SEQ ID NO: 3397350 - RNA, 21 nt, Human
ccacacaacauccaaguggcc

SEQ ID NO: 3397351 - RNA, 20 nt, Human
ccacacaaggauagaugcug

SEQ ID NO: 3397352 - RNA, 15 nt, Human
ccacacaagugcagu

SEQ ID NO: 3397353 - RNA, 21 nt, Human
ccacacacaacagccaacagc

SEQ ID NO: 3397354 - RNA, 13 nt, Human
ccacacacacaaa

SEQ ID NO: 3397355 - RNA, 14 nt, Human
ccacacacacacac

SEQ ID NO: 3397356 - RNA, 13 nt, Human
ccacacacacaga

SEQ ID NO: 3397357 - RNA, 14 nt, Human
ccacacacacagaa

SEQ ID NO: 3397358 - RNA, 18 nt, Human
ccacacacacagaaaaua

SEQ ID NO: 3397359 - RNA, 23 nt, Human
ccacacacacagaaaauauacug

SEQ ID NO: 3397360 - RNA, 20 nt, Human
ccacacacagcugggcugug

SEQ ID NO: 3397361 - RNA, 12 nt, Human
ccacacacaggu

SEQ ID NO: 3397362 - RNA, 12 nt, Human
ccacacacccca

SEQ ID NO: 3397363 - RNA, 15 nt, Human
ccacacacucgcccg

SEQ ID NO: 3397364 - RNA, 19 nt, Human
ccacacagcuacagcuuuc

SEQ ID NO: 3397365 - RNA, 12 nt, Human
ccacacagcugc

SEQ ID NO: 3397366 - RNA, 23 nt, Human
ccacacagugcucaaggccagcu

SEQ ID NO: 3397367 - RNA, 23 nt, Human
ccacacaucaguaauguauucua

SEQ ID NO: 3397368 - RNA, 19 nt, Human
ccacacauuucacugucug

SEQ ID NO: 3397369 - RNA, 20 nt, Human
ccacacauuucacugucugu

SEQ ID NO: 3397370 - RNA, 15 nt, Human
ccacaccaaaccucu

SEQ ID NO: 3397371 - RNA, 14 nt, Human
ccacaccagcccca

SEQ ID NO: 3397372 - RNA, 14 nt, Human
ccacaccaggccgu

SEQ ID NO: 3397373 - RNA, 22 nt, Human
ccacaccauaagcuacugccau

SEQ ID NO: 3397374 - RNA, 12 nt, Human
ccacacccagcc

SEQ ID NO: 3397375 - RNA, 20 nt, Human
ccacacccagcccacuucug

SEQ ID NO: 3397376 - RNA, 14 nt, Human
ccacacccagccuc

SEQ ID NO: 3397377 - RNA, 19 nt, Human
ccacacccagccucagucc

SEQ ID NO: 3397378 - RNA, 16 nt, Human
ccacacccagcucagc

SEQ ID NO: 3397379 - RNA, 19 nt, Human
ccacaccccaacacuucca

SEQ ID NO: 3397380 - RNA, 15 nt, Human
ccacacccccacccc

SEQ ID NO: 3397381 - RNA, 19 nt, Human
ccacacccuguacuguucu

SEQ ID NO: 3397382 - RNA, 18 nt, Human
ccacaccguguaaaccaa

SEQ ID NO: 3397383 - RNA, 19 nt, Human
ccacaccucaguucccuug

SEQ ID NO: 3397384 - RNA, 17 nt, Human
ccacaccuccacaguuc

SEQ ID NO: 3397385 - RNA, 15 nt, Human
ccacaccuccuuccc

SEQ ID NO: 3397386 - RNA, 16 nt, Human
ccacaccucugccaga

SEQ ID NO: 3397387 - RNA, 12 nt, Human
ccacaccugagc

SEQ ID NO: 3397388 - RNA, 13 nt, Human
ccacaccugcggc

SEQ ID NO: 3397389 - RNA, 14 nt, Human
ccacaccuggcacu

SEQ ID NO: 3397390 - RNA, 14 nt, Human
ccacaccuggcccu

SEQ ID NO: 3397391 - RNA, 12 nt, Human
ccacacuccagc

SEQ ID NO: 3397392 - RNA, 17 nt, Human
ccacacuccagcuggga

SEQ ID NO: 3397393 - RNA, 15 nt, Human
ccacacucccaaggu

SEQ ID NO: 3397394 - RNA, 23 nt, Human
ccacacucccaagguuggagccc

SEQ ID NO: 3397395 - RNA, 16 nt, Human
ccacacucuccaucac

SEQ ID NO: 3397396 - RNA, 20 nt, Human
ccacacucuucuaugaccca

SEQ ID NO: 3397397 - RNA, 19 nt, Human
ccacacugauccagcccug

SEQ ID NO: 3397398 - RNA, 14 nt, Human
ccacacugcacaau

SEQ ID NO: 3397399 - RNA, 13 nt, Human
ccacacuggacuc

SEQ ID NO: 3397400 - RNA, 14 nt, Human
ccacacuggacucc

SEQ ID NO: 3397401 - RNA, 22 nt, Human
ccacacuggacuccggcccucc

SEQ ID NO: 3397402 - RNA, 13 nt, Human
ccacacugugaca

SEQ ID NO: 3397403 - RNA, 18 nt, Human
ccacacuucaaacuacuu

SEQ ID NO: 3397404 - RNA, 21 nt, Human
ccacacuucaggcucuucucc

SEQ ID NO: 3397405 - RNA, 16 nt, Human
ccacacuuccugucca

SEQ ID NO: 3397406 - RNA, 18 nt, Human
ccacacuuccuguccaga

SEQ ID NO: 3397407 - RNA, 15 nt, Human
ccacacuucucagga

SEQ ID NO: 3397408 - RNA, 17 nt, Human
ccacacuucucaggaca

SEQ ID NO: 3397409 - RNA, 21 nt, Human
ccacacuucucaggacacagg

SEQ ID NO: 3397410 - RNA, 24 nt, Human
ccacacuucucaggacacaggccu

SEQ ID NO: 3397411 - RNA, 23 nt, Human
ccacagaaaagaaaguucaugcu

SEQ ID NO: 3397412 - RNA, 13 nt, Human
ccacagaaagaga

SEQ ID NO: 3397413 - RNA, 14 nt, Human
ccacagaaagagag

SEQ ID NO: 3397414 - RNA, 15 nt, Human
ccacagaaagagagc

SEQ ID NO: 3397415 - RNA, 20 nt, Human
ccacagaagacuucccagcu

SEQ ID NO: 3397416 - RNA, 18 nt, Human
ccacagaagccaggagca

SEQ ID NO: 3397417 - RNA, 22 nt, Human
ccacagaagccaggagcaaaug

SEQ ID NO: 3397418 - RNA, 16 nt, Human
ccacagaagugcuuuc

SEQ ID NO: 3397419 - RNA, 23 nt, Human
ccacagacaaaagcgcuuuuccu

SEQ ID NO: 3397420 - RNA, 21 nt, Human
ccacagacaagguagcccugg

SEQ ID NO: 3397421 - RNA, 13 nt, Human
ccacagacacaca

SEQ ID NO: 3397422 - RNA, 15 nt, Human
ccacagacacacaca

SEQ ID NO: 3397423 - RNA, 21 nt, Human
ccacagacacacacacgcacg

SEQ ID NO: 3397424 - RNA, 17 nt, Human
ccacagagacaaggagg

SEQ ID NO: 3397425 - RNA, 18 nt, Human
ccacagagagucccacug

SEQ ID NO: 3397426 - RNA, 14 nt, Human
ccacagagcgggga

SEQ ID NO: 3397427 - RNA, 16 nt, Human
ccacagaguaagacau

SEQ ID NO: 3397428 - RNA, 17 nt, Human
ccacagaguaagacauu

SEQ ID NO: 3397429 - RNA, 16 nt, Human
ccacagaguguagcca

SEQ ID NO: 3397430 - RNA, 18 nt, Human
ccacagaugccuccaccc

SEQ ID NO: 3397431 - RNA, 20 nt, Human
ccacagcacagcucccugcc

SEQ ID NO: 3397432 - RNA, 14 nt, Human
ccacagcagcauuu

SEQ ID NO: 3397433 - RNA, 14 nt, Human
ccacagcagguccu

SEQ ID NO: 3397434 - RNA, 18 nt, Human
ccacagcaguugaaaaga

SEQ ID NO: 3397435 - RNA, 15 nt, Human
ccacagccagcaccu

SEQ ID NO: 3397436 - RNA, 18 nt, Human
ccacagccagcaccuggc

SEQ ID NO: 3397437 - RNA, 19 nt, Human
ccacagccagcaccuggca

SEQ ID NO: 3397438 - RNA, 22 nt, Human
ccacagccagcaccuggcaucg

SEQ ID NO: 3397439 - RNA, 13 nt, Human
ccacagccagggg

SEQ ID NO: 3397440 - RNA, 15 nt, Human
ccacagcccagccac

SEQ ID NO: 3397441 - RNA, 19 nt, Human
ccacagcccagccacggac

SEQ ID NO: 3397442 - RNA, 19 nt, Human
ccacagcccgcaugcagca

SEQ ID NO: 3397443 - RNA, 17 nt, Human
ccacagcccugucagca

SEQ ID NO: 3397444 - RNA, 19 nt, Human
ccacagcccugucagcaug

SEQ ID NO: 3397445 - RNA, 18 nt, Human
ccacagccgcagccuccc

SEQ ID NO: 3397446 - RNA, 16 nt, Human
ccacagccuccccugc

SEQ ID NO: 3397447 - RNA, 19 nt, Human
ccacagccuccccugccag

SEQ ID NO: 3397448 - RNA, 17 nt, Human
ccacagcgagggcagcu

SEQ ID NO: 3397449 - RNA, 19 nt, Human
ccacagcgagggcagcugc

SEQ ID NO: 3397450 - RNA, 21 nt, Human
ccacagcgagggcagcugcua

SEQ ID NO: 3397451 - RNA, 12 nt, Human
ccacagcguccc

SEQ ID NO: 3397452 - RNA, 16 nt, Human
ccacagcgucccuggc

SEQ ID NO: 3397453 - RNA, 21 nt, Human
ccacagcgucccuggcgcagg

SEQ ID NO: 3397454 - RNA, 13 nt, Human
ccacagcucccac

SEQ ID NO: 3397455 - RNA, 15 nt, Human
ccacagcucccaccc

SEQ ID NO: 3397456 - RNA, 14 nt, Human
ccacagcugcugga

SEQ ID NO: 3397457 - RNA, 14 nt, Human
ccacagcuuccugu

SEQ ID NO: 3397458 - RNA, 22 nt, Human
ccacagcuuuuuaccaaguuuc

SEQ ID NO: 3397459 - RNA, 13 nt, Human
ccaccuggccacc

SEQ ID NO: 3397460 - RNA, 15 nt, Human
ccaccuggccaccug

SEQ ID NO: 3397461 - RNA, 13 nt, Human
ccaccuggccucu

SEQ ID NO: 3397462 - RNA, 15 nt, Human
ccaccuggccucugc

SEQ ID NO: 3397463 - RNA, 16 nt, Human
ccaccuggccucugca

SEQ ID NO: 3397464 - RNA, 18 nt, Human
ccaccuggccucugcacu

SEQ ID NO: 3397465 - RNA, 12 nt, Human
ccaccuggcucu

SEQ ID NO: 3397466 - RNA, 15 nt, Human
ccaccuggggcaguc

SEQ ID NO: 3397467 - RNA, 20 nt, Human
ccaccuggggcagucaccug

SEQ ID NO: 3397468 - RNA, 21 nt, Human
ccaccugguacucccucucag

SEQ ID NO: 3397469 - RNA, 19 nt, Human
ccaccugucaaacaaagcc

SEQ ID NO: 3397470 - RNA, 13 nt, Human
ccaccugucccac

SEQ ID NO: 3397471 - RNA, 15 nt, Human
ccaccugucccaccu

SEQ ID NO: 3397472 - RNA, 15 nt, Human
ccaccugucucagcc

SEQ ID NO: 3397473 - RNA, 16 nt, Human
ccaccugucucagccu

SEQ ID NO: 3397474 - RNA, 14 nt, Human
ccaccugucugucu

SEQ ID NO: 3397475 - RNA, 14 nt, Human
ccaccugucuucaa

SEQ ID NO: 3397476 - RNA, 18 nt, Human
ccaccuuaaauuaaacaa

SEQ ID NO: 3397477 - RNA, 18 nt, Human
ccaccuucaauuccuggg

SEQ ID NO: 3397478 - RNA, 11 nt, Human
ccaccuuccca

SEQ ID NO: 3397479 - RNA, 14 nt, Human
ccaccuucccagcu

SEQ ID NO: 3397480 - RNA, 15 nt, Human
ccaccuuggcucaag

SEQ ID NO: 3397481 - RNA, 15 nt, Human
ccaccuuggcugcag

SEQ ID NO: 3397482 - RNA, 19 nt, Human
ccaccuuggcugcagggag

SEQ ID NO: 3397483 - RNA, 17 nt, Human
ccaccuuguuggagccu

SEQ ID NO: 3397484 - RNA, 19 nt, Human
ccaccuuguuggagccugc

SEQ ID NO: 3397485 - RNA, 20 nt, Human
ccaccuuguuggagccugca

SEQ ID NO: 3397486 - RNA, 23 nt, Human
ccaccuuucagauaacuguuauu

SEQ ID NO: 3397487 - RNA, 22 nt, Human
ccaccuuuggaaagcucugacc

SEQ ID NO: 3397488 - RNA, 15 nt, Human
ccacgaauuugcugg

SEQ ID NO: 3397489 - RNA, 19 nt, Human
ccacgaauuugcuggggaa

SEQ ID NO: 3397490 - RNA, 18 nt, Human
ccacgacuggccagggcc

SEQ ID NO: 3397491 - RNA, 16 nt, Human
ccacgacugucuccau

SEQ ID NO: 3397492 - RNA, 15 nt, Human
ccacgagagcgcagc

SEQ ID NO: 3397493 - RNA, 15 nt, Human
ccacgagggcuggcu

SEQ ID NO: 3397494 - RNA, 17 nt, Human
ccacgagggcuggcugg

SEQ ID NO: 3397495 - RNA, 20 nt, Human
ccacgagggcuggcuggccu

SEQ ID NO: 3397496 - RNA, 16 nt, Human
ccacgagggugccgug

SEQ ID NO: 3397497 - RNA, 17 nt, Human
ccacgauuuucuccagc

SEQ ID NO: 3397498 - RNA, 13 nt, Human
ccacgcagccagg

SEQ ID NO: 3397499 - RNA, 14 nt, Human
ccacgcagccagga

SEQ ID NO: 3397500 - RNA, 16 nt, Human
ccacgcagccaggaca

SEQ ID NO: 3397501 - RNA, 17 nt, Human
ccacgcagccaggacac

SEQ ID NO: 3397502 - RNA, 18 nt, Human
ccacgccacagcccuuuu

SEQ ID NO: 3397503 - RNA, 21 nt, Human
ccacgccacagcccuuuuguc

SEQ ID NO: 3397504 - RNA, 16 nt, Human
ccacgcccccacuggu

SEQ ID NO: 3397505 - RNA, 19 nt, Human
ccacgcccccacuggugac

SEQ ID NO: 3397506 - RNA, 13 nt, Human
ccacgcccggcua

SEQ ID NO: 3397507 - RNA, 15 nt, Human
ccacgcccguccugc

SEQ ID NO: 3397508 - RNA, 18 nt, Human
ccacgcccguccugccug

SEQ ID NO: 3397509 - RNA, 19 nt, Human
ccacgcccguccugccugu

SEQ ID NO: 3397510 - RNA, 21 nt, Human
ccacgcccguccugccugugg

SEQ ID NO: 3397511 - RNA, 23 nt, Human
ccacgcccguccugccuguggcg

SEQ ID NO: 3397512 - RNA, 23 nt, Human
ccacgcccucauuacggcuccuc

SEQ ID NO: 3397513 - RNA, 15 nt, Human
ccacgcccuccccuc

SEQ ID NO: 3397514 - RNA, 20 nt, Human
ccacgcccuccccuccccug

SEQ ID NO: 3397515 - RNA, 13 nt, Human
ccacgcuccagcu

SEQ ID NO: 3397516 - RNA, 18 nt, Human
ccacgcuggaccuugaac

SEQ ID NO: 3397517 - RNA, 16 nt, Human
ccacgcuggagugcag

SEQ ID NO: 3397518 - RNA, 20 nt, Human
ccacgcuggagugcagugag

SEQ ID NO: 3397519 - RNA, 20 nt, Human
ccacgcugucuccagacccc

SEQ ID NO: 3397520 - RNA, 22 nt, Human
ccacggaccaaagggagucugc

SEQ ID NO: 3397521 - RNA, 12 nt, Human
ccacggagccac

SEQ ID NO: 3397522 - RNA, 16 nt, Human
ccacggccacuggcca

SEQ ID NO: 3397523 - RNA, 15 nt, Human
ccacggccaggccag

SEQ ID NO: 3397524 - RNA, 18 nt, Human
ccacggccaggccagagg

SEQ ID NO: 3397525 - RNA, 23 nt, Human
ccacggccaggccagagggagug

SEQ ID NO: 3397526 - RNA, 20 nt, Human
ccacggccgcuccaggggug

SEQ ID NO: 3397527 - RNA, 20 nt, Human
ccacggcguuguaccuguag

SEQ ID NO: 3397528 - RNA, 13 nt, Human
ccacggcuaagag

SEQ ID NO: 3397529 - RNA, 18 nt, Human
ccacggcuggagcugccu

SEQ ID NO: 3397530 - RNA, 18 nt, Human
ccacgggaaguuuagaga

SEQ ID NO: 3397531 - RNA, 13 nt, Human
ccacguacugcag

SEQ ID NO: 3397532 - RNA, 16 nt, Human
ccacguccugucagug

SEQ ID NO: 3397533 - RNA, 20 nt, Human
ccacgucugcuaacuuggag

SEQ ID NO: 3397534 - RNA, 22 nt, Human
ccacguguaacugucagccggg

SEQ ID NO: 3397535 - RNA, 12 nt, Human
ccacgugucuuc

SEQ ID NO: 3397536 - RNA, 14 nt, Human
ccacguucaccccu

SEQ ID NO: 3397537 - RNA, 17 nt, Human
ccacguucaccccucca

SEQ ID NO: 3397538 - RNA, 16 nt, Human
ccacuaaaaauauugu

SEQ ID NO: 3397539 - RNA, 17 nt, Human
ccacuaaccuugccugg

SEQ ID NO: 3397540 - RNA, 22 nt, Human
ccacuaacuagagcagcccugg

SEQ ID NO: 3397541 - RNA, 18 nt, Human
ccacuaacuccugagaaa

SEQ ID NO: 3397542 - RNA, 21 nt, Human
ccacuaagaaccccucugcuu

SEQ ID NO: 3397543 - RNA, 14 nt, Human
ccacuaagcagagg

SEQ ID NO: 3397544 - RNA, 13 nt, Human
ccacuaaugcaaa

SEQ ID NO: 3397545 - RNA, 20 nt, Human
ccacuacacuccagccugag

SEQ ID NO: 3397546 - RNA, 17 nt, Human
ccacuacauucuguuaa

SEQ ID NO: 3397547 - RNA, 12 nt, Human
ccacuacugcag

SEQ ID NO: 3397548 - RNA, 13 nt, Human
ccacuacugcagc

SEQ ID NO: 3397549 - RNA, 16 nt, Human
ccacuagacucuucac

SEQ ID NO: 3397550 - RNA, 14 nt, Human
ccacuaggcugggu

SEQ ID NO: 3397551 - RNA, 15 nt, Human
ccacuaggcugggug

SEQ ID NO: 3397552 - RNA, 20 nt, Human
ccacuaggcugggugcccac

SEQ ID NO: 3397553 - RNA, 23 nt, Human
ccacuaguaaguaauuaugcacu

SEQ ID NO: 3397554 - RNA, 21 nt, Human
ccacuauggucaucuuuuucu

SEQ ID NO: 3397555 - RNA, 14 nt, Human
ccacucaaaggcca

SEQ ID NO: 3397556 - RNA, 19 nt, Human
ccacucaaaggccagaccu

SEQ ID NO: 3397557 - RNA, 20 nt, Human
ccacucaaauuaaucuuucu

SEQ ID NO: 3397558 - RNA, 12 nt, Human
ccacucaagcca

SEQ ID NO: 3397559 - RNA, 17 nt, Human
ccacucaagccaagcag

SEQ ID NO: 3397560 - RNA, 14 nt, Human
ccacucacacagcc

SEQ ID NO: 3397561 - RNA, 16 nt, Human
ccacucacacagccag

SEQ ID NO: 3397562 - RNA, 18 nt, Human
ccacucacacagccaggu

SEQ ID NO: 3397563 - RNA, 21 nt, Human
ccacucacacagccaggugcc

SEQ ID NO: 3397564 - RNA, 11 nt, Human
ccacucacccc

SEQ ID NO: 3397565 - RNA, 18 nt, Human
ccacucacuaggccccca

SEQ ID NO: 3397566 - RNA, 22 nt, Human
ccacucacuaggcccccacuug

SEQ ID NO: 3397567 - RNA, 13 nt, Human
ccacucagagaca

SEQ ID NO: 3397568 - RNA, 13 nt, Human
ccacucagccccu

SEQ ID NO: 3397569 - RNA, 14 nt, Human
ccacucagccccua

SEQ ID NO: 3397570 - RNA, 16 nt, Human
ccacucagccccuagg

SEQ ID NO: 3397571 - RNA, 17 nt, Human
ccacucagccccuagga

SEQ ID NO: 3397572 - RNA, 11 nt, Human
ccacucagcuc

SEQ ID NO: 3397573 - RNA, 20 nt, Human
ccacucaggaggcugaggca

SEQ ID NO: 3397574 - RNA, 14 nt, Human
ccacucagggguca

SEQ ID NO: 3397575 - RNA, 19 nt, Human
ccacucaugugacucuuuc

SEQ ID NO: 3397576 - RNA, 14 nt, Human
ccacucauuucauc

SEQ ID NO: 3397577 - RNA, 17 nt, Human
ccacuccagaccccugg

SEQ ID NO: 3397578 - RNA, 17 nt, Human
ccacuccaucugguaga

SEQ ID NO: 3397579 - RNA, 21 nt, Human
ccacucccacuucccugacac

SEQ ID NO: 3397580 - RNA, 22 nt, Human
ccacucccagcaucgcacucug

SEQ ID NO: 3397581 - RNA, 15 nt, Human
ccacucccaggcagc

SEQ ID NO: 3397582 - RNA, 22 nt, Human
ccacuccccuccacucucuacc

SEQ ID NO: 3397583 - RNA, 18 nt, Human
ccacucccuccuaaccua

SEQ ID NO: 3397584 - RNA, 20 nt, Human
ccacuccgagaggugggcca

SEQ ID NO: 3397585 - RNA, 12 nt, Human
ccacuccuccaa

SEQ ID NO: 3397586 - RNA, 14 nt, Human
ccacuccucugacu

SEQ ID NO: 3397587 - RNA, 15 nt, Human
ccacuccuguacacu

SEQ ID NO: 3397588 - RNA, 14 nt, Human
ccacuccuuccugc

SEQ ID NO: 3397589 - RNA, 18 nt, Human
ccacuccuuccugcccca

SEQ ID NO: 3397590 - RNA, 21 nt, Human
ccacucuaggggucaggcucc

SEQ ID NO: 3397591 - RNA, 16 nt, Human
ccacucucagaggccc

SEQ ID NO: 3397592 - RNA, 13 nt, Human
ccacucuccccac

SEQ ID NO: 3397593 - RNA, 15 nt, Human
ccacucuccccacac

SEQ ID NO: 3397594 - RNA, 13 nt, Human
ccacucuccuagg

SEQ ID NO: 3397595 - RNA, 12 nt, Human
ccacucuccuug

SEQ ID NO: 3397596 - RNA, 23 nt, Human
ccacucuccuugcuacccagaaa

SEQ ID NO: 3397597 - RNA, 17 nt, Human
ccacucucuaccagaua

SEQ ID NO: 3397598 - RNA, 21 nt, Human
ccacucucucuuguucuuacu

SEQ ID NO: 3397599 - RNA, 22 nt, Human
ccacucucucuuguucuuacuu

SEQ ID NO: 3397600 - RNA, 14 nt, Human
ccacucugcucuga

SEQ ID NO: 3397601 - RNA, 15 nt, Human
ccacucugcucugau

SEQ ID NO: 3397602 - RNA, 23 nt, Human
ccacucuggauucagccuucuuu

SEQ ID NO: 3397603 - RNA, 13 nt, Human
ccacucuggcagc

SEQ ID NO: 3397604 - RNA, 21 nt, Human
ccacucuggcagccacacuuc

SEQ ID NO: 3397605 - RNA, 21 nt, Human
ccagugggaggggcaggcuga

SEQ ID NO: 3397606 - RNA, 15 nt, Human
ccaguggggccugug

SEQ ID NO: 3397607 - RNA, 16 nt, Human
ccaguggggccugugg

SEQ ID NO: 3397608 - RNA, 15 nt, Human
ccagugguauccugu

SEQ ID NO: 3397609 - RNA, 14 nt, Human
ccaguguagccuug

SEQ ID NO: 3397610 - RNA, 23 nt, Human
ccaguguccugagcucagcgugg

SEQ ID NO: 3397611 - RNA, 21 nt, Human
ccagugucuauaaaagaaaca

SEQ ID NO: 3397612 - RNA, 13 nt, Human
ccagugucuuccu

SEQ ID NO: 3397613 - RNA, 23 nt, Human
ccagugugacaaggauugcuacu

SEQ ID NO: 3397614 - RNA, 13 nt, Human
ccagugugggcuu

SEQ ID NO: 3397615 - RNA, 17 nt, Human
ccaguguuagggaaggg

SEQ ID NO: 3397616 - RNA, 15 nt, Human
ccaguguuguuugua

SEQ ID NO: 3397617 - RNA, 17 nt, Human
ccaguguuguuuguaaa

SEQ ID NO: 3397618 - RNA, 18 nt, Human
ccaguguuguuuguaaau

SEQ ID NO: 3397619 - RNA, 21 nt, Human
ccaguguuguuuguaaauaag

SEQ ID NO: 3397620 - RNA, 21 nt, Human
ccaguuaaggaccguggcccu

SEQ ID NO: 3397621 - RNA, 22 nt, Human
ccaguuaaggaccguggcccug

SEQ ID NO: 3397622 - RNA, 21 nt, Human
ccaguuagacuaguccccggu

SEQ ID NO: 3397623 - RNA, 22 nt, Human
ccaguuagccucugcaggaugu

SEQ ID NO: 3397624 - RNA, 14 nt, Human
ccaguuauggcuau

SEQ ID NO: 3397625 - RNA, 17 nt, Human
ccaguuaugugaaugau

SEQ ID NO: 3397626 - RNA, 21 nt, Human
ccaguucaggagucccaagga

SEQ ID NO: 3397627 - RNA, 20 nt, Human
ccaguucaguaccuggagga

SEQ ID NO: 3397628 - RNA, 16 nt, Human
ccaguuccucuuuugu

SEQ ID NO: 3397629 - RNA, 20 nt, Human
ccaguucgccuggagcccuc

SEQ ID NO: 3397630 - RNA, 13 nt, Human
ccaguucugcucc

SEQ ID NO: 3397631 - RNA, 22 nt, Human
ccaguucugcuccucuccaggc

SEQ ID NO: 3397632 - RNA, 21 nt, Human
ccaguugcacuuggccucugg

SEQ ID NO: 3397633 - RNA, 22 nt, Human
ccaguuggagcagaugccuccc

SEQ ID NO: 3397634 - RNA, 19 nt, Human
ccaguugggagcacuggag

SEQ ID NO: 3397635 - RNA, 19 nt, Human
ccaguuggguggaugccug

SEQ ID NO: 3397636 - RNA, 23 nt, Human
ccaguuggguggaugccuggugg

SEQ ID NO: 3397637 - RNA, 14 nt, Human
ccaguuguccuccu

SEQ ID NO: 3397638 - RNA, 19 nt, Human
ccaguuuaaucauugccug

SEQ ID NO: 3397639 - RNA, 23 nt, Human
ccaguuuagauuucaagaaaaaa

SEQ ID NO: 3397640 - RNA, 21 nt, Human
ccaguuucagguguuuaguug

SEQ ID NO: 3397641 - RNA, 16 nt, Human
ccaguuuccuugggag

SEQ ID NO: 3397642 - RNA, 19 nt, Human
ccaguuucuaaacuggaga

SEQ ID NO: 3397643 - RNA, 20 nt, Human
ccaguuucuaaacuggagac

SEQ ID NO: 3397644 - RNA, 17 nt, Human
ccaguuugcaccugucc

SEQ ID NO: 3397645 - RNA, 13 nt, Human
ccauaaaaagcug

SEQ ID NO: 3397646 - RNA, 14 nt, Human
ccauaaaaagcuga

SEQ ID NO: 3397647 - RNA, 15 nt, Human
ccauaaccacugaag

SEQ ID NO: 3397648 - RNA, 13 nt, Human
ccauaacugaaca

SEQ ID NO: 3397649 - RNA, 17 nt, Human
ccauaagccuccauuua

SEQ ID NO: 3397650 - RNA, 21 nt, Human
ccauaagccuccauuuaguuc

SEQ ID NO: 3397651 - RNA, 18 nt, Human
ccauaagcuacugccauc

SEQ ID NO: 3397652 - RNA, 20 nt, Human
ccauaagguuucguuucugu

SEQ ID NO: 3397653 - RNA, 19 nt, Human
ccauaauaaaaggcuuuga

SEQ ID NO: 3397654 - RNA, 12 nt, Human
ccauaauacaaa

SEQ ID NO: 3397655 - RNA, 14 nt, Human
ccauaauacaaaag

SEQ ID NO: 3397656 - RNA, 14 nt, Human
ccauaaucuggacu

SEQ ID NO: 3397657 - RNA, 23 nt, Human
ccauaaugcuaauuuaaagagac

SEQ ID NO: 3397658 - RNA, 16 nt, Human
ccauaauguucugcua

SEQ ID NO: 3397659 - RNA, 17 nt, Human
ccauaauuuucuucaug

SEQ ID NO: 3397660 - RNA, 20 nt, Human
ccauacacuuuguugcaaga

SEQ ID NO: 3397661 - RNA, 13 nt, Human
ccauacagcucua

SEQ ID NO: 3397662 - RNA, 14 nt, Human
ccauacauuugugu

SEQ ID NO: 3397663 - RNA, 22 nt, Human
ccauaccacccaaugcugaugu

SEQ ID NO: 3397664 - RNA, 12 nt, Human
ccauacuaauua

SEQ ID NO: 3397665 - RNA, 13 nt, Human
ccauacuaauuau

SEQ ID NO: 3397666 - RNA, 23 nt, Human
ccauacuaauuauacccccugca

SEQ ID NO: 3397667 - RNA, 14 nt, Human
ccauacucauuucu

SEQ ID NO: 3397668 - RNA, 13 nt, Human
ccauacuggccuc

SEQ ID NO: 3397669 - RNA, 14 nt, Human
ccauacuggccucg

SEQ ID NO: 3397670 - RNA, 18 nt, Human
ccauacuggccucgccug

SEQ ID NO: 3397671 - RNA, 17 nt, Human
ccauagaaacaugacac

SEQ ID NO: 3397672 - RNA, 16 nt, Human
ccauagacaugaaagg

SEQ ID NO: 3397673 - RNA, 20 nt, Human
ccauagaguacacugccugc

SEQ ID NO: 3397674 - RNA, 18 nt, Human
ccauagauacucucuucu

SEQ ID NO: 3397675 - RNA, 16 nt, Human
ccauagaucuucugaa

SEQ ID NO: 3397676 - RNA, 17 nt, Human
ccauagaucuucugaaa

SEQ ID NO: 3397677 - RNA, 20 nt, Human
ccauagaucuucugaaauga

SEQ ID NO: 3397678 - RNA, 18 nt, Human
ccauagccaccccagaaa

SEQ ID NO: 3397679 - RNA, 16 nt, Human
ccauagcuccugcucc

SEQ ID NO: 3397680 - RNA, 19 nt, Human
ccauagcuccugcuccaca

SEQ ID NO: 3397681 - RNA, 14 nt, Human
ccauagcugcugcc

SEQ ID NO: 3397682 - RNA, 16 nt, Human
ccauaggcccacacac

SEQ ID NO: 3397683 - RNA, 17 nt, Human
ccauaggcccacacaca

SEQ ID NO: 3397684 - RNA, 19 nt, Human
ccauaggcccacacacagg

SEQ ID NO: 3397685 - RNA, 12 nt, Human
ccauaggucacc

SEQ ID NO: 3397686 - RNA, 18 nt, Human
ccauaguaacugacauga

SEQ ID NO: 3397687 - RNA, 21 nt, Human
ccauaguaacugacaugauua

SEQ ID NO: 3397688 - RNA, 22 nt, Human
ccauaguauauuaaaaauggua

SEQ ID NO: 3397689 - RNA, 21 nt, Human
ccauaguaugggacuggccuc

SEQ ID NO: 3397690 - RNA, 14 nt, Human
ccauagucccugcc

SEQ ID NO: 3397691 - RNA, 21 nt, Human
ccauaguggaucacucaccau

SEQ ID NO: 3397692 - RNA, 17 nt, Human
ccauaguuacuguaaaa

SEQ ID NO: 3397693 - RNA, 18 nt, Human
ccauaguugacaguucca

SEQ ID NO: 3397694 - RNA, 18 nt, Human
ccauaguuuggcauuugc

SEQ ID NO: 3397695 - RNA, 22 nt, Human
ccauauaaguuugaaggaaaca

SEQ ID NO: 3397696 - RNA, 23 nt, Human
ccauauaaguuugaaggaaacag

SEQ ID NO: 3397697 - RNA, 13 nt, Human
ccauauccugccu

SEQ ID NO: 3397698 - RNA, 15 nt, Human
ccauauccuggugcc

SEQ ID NO: 3397699 - RNA, 16 nt, Human
ccauaucuaaccagug

SEQ ID NO: 3397700 - RNA, 16 nt, Human
ccauaucuuaaagaaa

SEQ ID NO: 3397701 - RNA, 17 nt, Human
ccauaugaauuguacag

SEQ ID NO: 3397702 - RNA, 14 nt, Human
ccauaugcagaaau

SEQ ID NO: 3397703 - RNA, 13 nt, Human
ccauaugccuggg

SEQ ID NO: 3397704 - RNA, 19 nt, Human
ccauaugcuaccaccagcu

SEQ ID NO: 3397705 - RNA, 16 nt, Human
ccauauggauccacug

SEQ ID NO: 3397706 - RNA, 12 nt, Human
ccauaugugcuu

SEQ ID NO: 3397707 - RNA, 12 nt, Human
ccauauuaaauu

SEQ ID NO: 3397708 - RNA, 22 nt, Human
ccauauuagaaaacuuuguuag

SEQ ID NO: 3397709 - RNA, 13 nt, Human
ccauauugcacau

SEQ ID NO: 3397710 - RNA, 23 nt, Human
ccauauugcacaugucuuaauga

SEQ ID NO: 3397711 - RNA, 19 nt, Human
ccauauuuaccucagccug

SEQ ID NO: 3397712 - RNA, 12 nt, Human
ccauauuuguaa

SEQ ID NO: 3397713 - RNA, 15 nt, Human
ccauauuuguaaaau

SEQ ID NO: 3397714 - RNA, 17 nt, Human
ccauauuuguaaaauga

SEQ ID NO: 3397715 - RNA, 22 nt, Human
ccauauuuguaaaaugacaauc

SEQ ID NO: 3397716 - RNA, 19 nt, Human
ccauauuuuacuuggaaau

SEQ ID NO: 3397717 - RNA, 20 nt, Human
ccauauuuuauuacuguuua

SEQ ID NO: 3397718 - RNA, 15 nt, Human
ccauauuuuuuuccu

SEQ ID NO: 3397719 - RNA, 17 nt, Human
ccauauuuuuuuccuua

SEQ ID NO: 3397720 - RNA, 19 nt, Human
ccaucaaaaugcuuuuuau

SEQ ID NO: 3397721 - RNA, 18 nt, Human
ccaucaacaaaaauuguc

SEQ ID NO: 3397722 - RNA, 12 nt, Human
ccaucaagccac

SEQ ID NO: 3397723 - RNA, 12 nt, Human
ccaucaaguacc

SEQ ID NO: 3397724 - RNA, 18 nt, Human
ccaucaaguugcacacuc

SEQ ID NO: 3397725 - RNA, 14 nt, Human
ccaucacagcuugu

SEQ ID NO: 3397726 - RNA, 18 nt, Human
ccaucaccuuagaccacc

SEQ ID NO: 3397727 - RNA, 23 nt, Human
ccaucaccuuagaccaccaagcc

SEQ ID NO: 3397728 - RNA, 16 nt, Human
ccaucacgccugugca

SEQ ID NO: 3397729 - RNA, 18 nt, Human
ccaucacugaguuuucca

SEQ ID NO: 3397730 - RNA, 19 nt, Human
ccaucacugcgccacugcu

SEQ ID NO: 3397731 - RNA, 21 nt, Human
ccaucagcccaacgggaagca

SEQ ID NO: 3397732 - RNA, 15 nt, Human
ccaucauaggaaggg

SEQ ID NO: 3397733 - RNA, 15 nt, Human
ccaucaucccagcug

SEQ ID NO: 3397734 - RNA, 16 nt, Human
ccaucaucccagcugc

SEQ ID NO: 3397735 - RNA, 13 nt, Human
ccaucauccuacu

SEQ ID NO: 3397736 - RNA, 14 nt, Human
ccaucauccucugg

SEQ ID NO: 3397737 - RNA, 13 nt, Human
ccaucaucuccug

SEQ ID NO: 3397738 - RNA, 22 nt, Human
ccaucaugcccggucccacccc

SEQ ID NO: 3397739 - RNA, 22 nt, Human
ccaucauggggggagcacccug

SEQ ID NO: 3397740 - RNA, 14 nt, Human
ccaucaugucccca

SEQ ID NO: 3397741 - RNA, 20 nt, Human
ccaucauguuuacagaggac

SEQ ID NO: 3397742 - RNA, 17 nt, Human
ccaucauuauaaacgug

SEQ ID NO: 3397743 - RNA, 14 nt, Human
ccaucauugaaauc

SEQ ID NO: 3397744 - RNA, 16 nt, Human
ccaucauugaaaucuu

SEQ ID NO: 3397745 - RNA, 22 nt, Human
ccaucauugaaaucuuuuugcu

SEQ ID NO: 3397746 - RNA, 18 nt, Human
ccaucauugcugucugca

SEQ ID NO: 3397747 - RNA, 13 nt, Human
ccaucauuucugg

SEQ ID NO: 3397748 - RNA, 15 nt, Human
ccauccaaggccagg

SEQ ID NO: 3397749 - RNA, 19 nt, Human
ccauccaccgcugcuccac

SEQ ID NO: 3397750 - RNA, 20 nt, Human
ccaugacccaccccugugcu

SEQ ID NO: 3397751 - RNA, 16 nt, Human
ccaugacccaggcugg

SEQ ID NO: 3397752 - RNA, 18 nt, Human
ccaugacccaggcugggc

SEQ ID NO: 3397753 - RNA, 15 nt, Human
ccaugaccuccagcu

SEQ ID NO: 3397754 - RNA, 16 nt, Human
ccaugaccuuacauuu

SEQ ID NO: 3397755 - RNA, 22 nt, Human
ccaugacgcaaagagagauuuu

SEQ ID NO: 3397756 - RNA, 12 nt, Human
ccaugacugcuu

SEQ ID NO: 3397757 - RNA, 13 nt, Human
ccaugagaagagg

SEQ ID NO: 3397758 - RNA, 17 nt, Human
ccaugagaagagggccu

SEQ ID NO: 3397759 - RNA, 18 nt, Human
ccaugagaagagggccug

SEQ ID NO: 3397760 - RNA, 19 nt, Human
ccaugagaagagggccugu

SEQ ID NO: 3397761 - RNA, 23 nt, Human
ccaugagaauguuuuagcacagc

SEQ ID NO: 3397762 - RNA, 18 nt, Human
ccaugagagcgcagcccg

SEQ ID NO: 3397763 - RNA, 20 nt, Human
ccaugagauagcauuagcug

SEQ ID NO: 3397764 - RNA, 23 nt, Human
ccaugagaugauacauccaaagc

SEQ ID NO: 3397765 - RNA, 22 nt, Human
ccaugagcaccccaaggcugcg

SEQ ID NO: 3397766 - RNA, 23 nt, Human
ccaugagcuccagacccccagca

SEQ ID NO: 3397767 - RNA, 16 nt, Human
ccaugaggaacaaggc

SEQ ID NO: 3397768 - RNA, 18 nt, Human
ccaugaggaacaaggcaa

SEQ ID NO: 3397769 - RNA, 18 nt, Human
ccaugaggaguugcuguu

SEQ ID NO: 3397770 - RNA, 20 nt, Human
ccaugagggagaugccauga

SEQ ID NO: 3397771 - RNA, 16 nt, Human
ccaugaguccccuguu

SEQ ID NO: 3397772 - RNA, 20 nt, Human
ccaugaguggcauggccacc

SEQ ID NO: 3397773 - RNA, 21 nt, Human
ccaugaguggcauggccacca

SEQ ID NO: 3397774 - RNA, 19 nt, Human
ccaugaguuccagaaagua

SEQ ID NO: 3397775 - RNA, 14 nt, Human
ccaugaucccugug

SEQ ID NO: 3397776 - RNA, 17 nt, Human
ccaugaucccuguguug

SEQ ID NO: 3397777 - RNA, 14 nt, Human
ccaugauggcaaca

SEQ ID NO: 3397778 - RNA, 15 nt, Human
ccaugauggcaacag

SEQ ID NO: 3397779 - RNA, 21 nt, Human
ccaugauggcaacagaucugg

SEQ ID NO: 3397780 - RNA, 19 nt, Human
ccaugauggugcugaccuc

SEQ ID NO: 3397781 - RNA, 22 nt, Human
ccaugauggugcugaccucugg

SEQ ID NO: 3397782 - RNA, 18 nt, Human
ccaugauguuuuccauga

SEQ ID NO: 3397783 - RNA, 19 nt, Human
ccaugcaauauuuccucau

SEQ ID NO: 3397784 - RNA, 13 nt, Human
ccaugcaccaaac

SEQ ID NO: 3397785 - RNA, 17 nt, Human
ccaugcacugugaagga

SEQ ID NO: 3397786 - RNA, 14 nt, Human
ccaugcaggcccuu

SEQ ID NO: 3397787 - RNA, 13 nt, Human
ccaugcagguggu

SEQ ID NO: 3397788 - RNA, 11 nt, Human
ccaugcauuuc

SEQ ID NO: 3397789 - RNA, 20 nt, Human
ccaugccaaagcuagggugg

SEQ ID NO: 3397790 - RNA, 13 nt, Human
ccaugccacguuc

SEQ ID NO: 3397791 - RNA, 14 nt, Human
ccaugccaggaacc

SEQ ID NO: 3397792 - RNA, 21 nt, Human
ccaugcccaccugcccaucac

SEQ ID NO: 3397793 - RNA, 17 nt, Human
ccaugccgucugccgga

SEQ ID NO: 3397794 - RNA, 14 nt, Human
ccaugccucagccc

SEQ ID NO: 3397795 - RNA, 23 nt, Human
ccaugccucccccuagccauuuu

SEQ ID NO: 3397796 - RNA, 15 nt, Human
ccaugccuccucagg

SEQ ID NO: 3397797 - RNA, 12 nt, Human
ccaugccugagg

SEQ ID NO: 3397798 - RNA, 15 nt, Human
ccaugccugagggug

SEQ ID NO: 3397799 - RNA, 18 nt, Human
ccaugccuguccagccug

SEQ ID NO: 3397800 - RNA, 14 nt, Human
ccaugcgcccccuc

SEQ ID NO: 3397801 - RNA, 15 nt, Human
ccaugcgcucagggc

SEQ ID NO: 3397802 - RNA, 22 nt, Human
ccaugcuccucacugcccgcac

SEQ ID NO: 3397803 - RNA, 24 nt, Human
ccaugcuccucuuccccagacgcc

SEQ ID NO: 3397804 - RNA, 18 nt, Human
ccaugcuccuggcccacu

SEQ ID NO: 3397805 - RNA, 16 nt, Human
ccaugcugaagggacc

SEQ ID NO: 3397806 - RNA, 16 nt, Human
ccaugcugaggccugg

SEQ ID NO: 3397807 - RNA, 18 nt, Human
ccaugcugaggccugggc

SEQ ID NO: 3397808 - RNA, 19 nt, Human
ccaugcugaggccugggcc

SEQ ID NO: 3397809 - RNA, 15 nt, Human
ccaugcugcccugug

SEQ ID NO: 3397810 - RNA, 14 nt, Human
ccaugcugccucca

SEQ ID NO: 3397811 - RNA, 14 nt, Human
ccaugcugcugggg

SEQ ID NO: 3397812 - RNA, 21 nt, Human
ccaugcugcuggggaagacag

SEQ ID NO: 3397813 - RNA, 16 nt, Human
ccaugcuggagccugu

SEQ ID NO: 3397814 - RNA, 20 nt, Human
ccaugcuggagccuguguaa

SEQ ID NO: 3397815 - RNA, 21 nt, Human
ccaugcuggagccuguguaac

SEQ ID NO: 3397816 - RNA, 16 nt, Human
ccaugcugggaagacg

SEQ ID NO: 3397817 - RNA, 22 nt, Human
ccaugcugucuggcacagccug

SEQ ID NO: 3397818 - RNA, 22 nt, Human
ccaugcugugcgcccagggcug

SEQ ID NO: 3397819 - RNA, 15 nt, Human
ccaugcuugggugua

SEQ ID NO: 3397820 - RNA, 16 nt, Human
ccauggaaaaaugcca

SEQ ID NO: 3397821 - RNA, 19 nt, Human
ccauggacacuacacccag

SEQ ID NO: 3397822 - RNA, 17 nt, Human
ccauggacacuccagug

SEQ ID NO: 3397823 - RNA, 21 nt, Human
ccauggacacuccagugccag

SEQ ID NO: 3397824 - RNA, 18 nt, Human
ccauggacaggcuggcuc

SEQ ID NO: 3397825 - RNA, 22 nt, Human
ccauggacucuacacugugaac

SEQ ID NO: 3397826 - RNA, 16 nt, Human
ccauggacucuguccu

SEQ ID NO: 3397827 - RNA, 23 nt, Human
ccauggacuucacauaagcucag

SEQ ID NO: 3397828 - RNA, 14 nt, Human
ccauggacuuuaua

SEQ ID NO: 3397829 - RNA, 14 nt, Human
ccauggagaaagcu

SEQ ID NO: 3397830 - RNA, 20 nt, Human
ccauggagaaagcugacuug

SEQ ID NO: 3397831 - RNA, 15 nt, Human
ccauggagagcugga

SEQ ID NO: 3397832 - RNA, 22 nt, Human
ccauggagagcuggagccuggu

SEQ ID NO: 3397833 - RNA, 18 nt, Human
ccauggagauugaccugg

SEQ ID NO: 3397834 - RNA, 19 nt, Human
ccauggagauugaccugga

SEQ ID NO: 3397835 - RNA, 17 nt, Human
ccauggagccagcuccc

SEQ ID NO: 3397836 - RNA, 14 nt, Human
ccauggagccccag

SEQ ID NO: 3397837 - RNA, 16 nt, Human
ccauggagccccagcc

SEQ ID NO: 3397838 - RNA, 19 nt, Human
ccauggagggagggagugg

SEQ ID NO: 3397839 - RNA, 14 nt, Human
ccauggaguggcag

SEQ ID NO: 3397840 - RNA, 19 nt, Human
ccauggaguggcagcccag

SEQ ID NO: 3397841 - RNA, 16 nt, Human
ccauggauggaaaacg

SEQ ID NO: 3397842 - RNA, 23 nt, Human
ccauggcacucuauguucuaaga

SEQ ID NO: 3397843 - RNA, 13 nt, Human
ccauggcccugcc

SEQ ID NO: 3397844 - RNA, 18 nt, Human
ccauggccggcuuucagg

SEQ ID NO: 3397845 - RNA, 18 nt, Human
ccauggccugcaaacugg

SEQ ID NO: 3397846 - RNA, 19 nt, Human
ccauggcgugucccucucg

SEQ ID NO: 3397847 - RNA, 17 nt, Human
ccauggcucaggguggu

SEQ ID NO: 3397848 - RNA, 22 nt, Human
ccaugggagcugguuagaaaug

SEQ ID NO: 3397849 - RNA, 21 nt, Human
ccaugggaggccuuucccuaa

SEQ ID NO: 3397850 - RNA, 17 nt, Human
ccaugggaggcuggagu

SEQ ID NO: 3397851 - RNA, 21 nt, Human
ccaugggcacaaagggcccag

SEQ ID NO: 3397852 - RNA, 15 nt, Human
ccaugggcacugcug

SEQ ID NO: 3397853 - RNA, 17 nt, Human
ccaugggcagagcccaa

SEQ ID NO: 3397854 - RNA, 12 nt, Human
ccaugggcagga

SEQ ID NO: 3397855 - RNA, 13 nt, Human
ccaugggccuccu

SEQ ID NO: 3397856 - RNA, 15 nt, Human
ccaugggccuccugu

SEQ ID NO: 3397857 - RNA, 13 nt, Human
ccaugggcucuga

SEQ ID NO: 3397858 - RNA, 12 nt, Human
ccauggggaggg

SEQ ID NO: 3397859 - RNA, 18 nt, Human
ccauggggagggauucug

SEQ ID NO: 3397860 - RNA, 13 nt, Human
ccaugggggcagg

SEQ ID NO: 3397861 - RNA, 23 nt, Human
ccauggggucucucacagacagg

SEQ ID NO: 3397862 - RNA, 20 nt, Human
ccaugguacccccuucuggg

SEQ ID NO: 3397863 - RNA, 20 nt, Human
ccauggucggaaaacaugcu

SEQ ID NO: 3397864 - RNA, 20 nt, Human
ccauggugaugguguagccc

SEQ ID NO: 3397865 - RNA, 14 nt, Human
ccauggugcuuguu

SEQ ID NO: 3397866 - RNA, 14 nt, Human
ccaugguugagaaa

SEQ ID NO: 3397867 - RNA, 14 nt, Human
ccauguaaaacaaa

SEQ ID NO: 3397868 - RNA, 14 nt, Human
ccauguaaauacca

SEQ ID NO: 3397869 - RNA, 23 nt, Human
ccauguaaauaccagacugcagg

SEQ ID NO: 3397870 - RNA, 11 nt, Human
ccauguaacug

SEQ ID NO: 3397871 - RNA, 18 nt, Human
ccauguaacugccuagaa

SEQ ID NO: 3397872 - RNA, 23 nt, Human
ccauguaauggcaguuauauuuu

SEQ ID NO: 3397873 - RNA, 15 nt, Human
ccauguacuguaguu

SEQ ID NO: 3397874 - RNA, 16 nt, Human
ccauguacuguaguuu

SEQ ID NO: 3397875 - RNA, 18 nt, Human
ccauguagaagcugcauc

SEQ ID NO: 3397876 - RNA, 22 nt, Human
ccauguagcccccuggccucug

SEQ ID NO: 3397877 - RNA, 15 nt, Human
ccauguaugcauaau

SEQ ID NO: 3397878 - RNA, 23 nt, Human
ccauguauggaaucccacuguau

SEQ ID NO: 3397879 - RNA, 16 nt, Human
ccaugucaaacaaaua

SEQ ID NO: 3397880 - RNA, 22 nt, Human
ccaugucaagagucgcugugcc

SEQ ID NO: 3397881 - RNA, 15 nt, Human
ccaugucaagauuca

SEQ ID NO: 3397882 - RNA, 19 nt, Human
ccaugucaagauucagcua

SEQ ID NO: 3397883 - RNA, 14 nt, Human
ccauguccaaagag

SEQ ID NO: 3397884 - RNA, 17 nt, Human
ccauguccaaagaggcu

SEQ ID NO: 3397885 - RNA, 19 nt, Human
ccauguccaaagaggcugc

SEQ ID NO: 3397886 - RNA, 15 nt, Human
ccauguccccuccca

SEQ ID NO: 3397887 - RNA, 16 nt, Human
ccauguccuaugugug

SEQ ID NO: 3397888 - RNA, 17 nt, Human
ccaugucgccucugcau

SEQ ID NO: 3397889 - RNA, 19 nt, Human
ccaugucgccucugcauuc

SEQ ID NO: 3397890 - RNA, 14 nt, Human
ccaugucggccucu

SEQ ID NO: 3397891 - RNA, 16 nt, Human
ccaugucuucucccug

SEQ ID NO: 3397892 - RNA, 20 nt, Human
ccaugucuucucccuggaau

SEQ ID NO: 3397893 - RNA, 15 nt, Human
ccaugucuuucucca

SEQ ID NO: 3397894 - RNA, 22 nt, Human
cccaauuucggauuuuuuccaa

SEQ ID NO: 3397895 - RNA, 14 nt, Human
cccacaaaggagag

SEQ ID NO: 3397896 - RNA, 13 nt, Human
cccacaagccuga

SEQ ID NO: 3397897 - RNA, 21 nt, Human
cccacaagugcccuccaggcu

SEQ ID NO: 3397898 - RNA, 20 nt, Human
cccacaaguggugguaaccc

SEQ ID NO: 3397899 - RNA, 23 nt, Human
cccacaaguggugguaacccugg

SEQ ID NO: 3397900 - RNA, 22 nt, Human
cccacaaucuuaaggggcagcu

SEQ ID NO: 3397901 - RNA, 14 nt, Human
cccacacacacaca

SEQ ID NO: 3397902 - RNA, 18 nt, Human
cccacacacacacacaug

SEQ ID NO: 3397903 - RNA, 19 nt, Human
cccacacacacacacaugc

SEQ ID NO: 3397904 - RNA, 11 nt, Human
cccacacacag

SEQ ID NO: 3397905 - RNA, 13 nt, Human
cccacacacagau

SEQ ID NO: 3397906 - RNA, 13 nt, Human
cccacacacaggu

SEQ ID NO: 3397907 - RNA, 13 nt, Human
cccacacacccca

SEQ ID NO: 3397908 - RNA, 13 nt, Human
cccacacacucgc

SEQ ID NO: 3397909 - RNA, 14 nt, Human
cccacacccagcua

SEQ ID NO: 3397910 - RNA, 13 nt, Human
cccacaccucagu

SEQ ID NO: 3397911 - RNA, 18 nt, Human
cccacaccuccucucacu

SEQ ID NO: 3397912 - RNA, 16 nt, Human
cccacaccuccugggg

SEQ ID NO: 3397913 - RNA, 22 nt, Human
cccacacucagauccuccucau

SEQ ID NO: 3397914 - RNA, 16 nt, Human
cccacagaaagagagc

SEQ ID NO: 3397915 - RNA, 23 nt, Human
cccacagacaaaagcgcuuuucc

SEQ ID NO: 3397916 - RNA, 14 nt, Human
cccacagcccgcau

SEQ ID NO: 3397917 - RNA, 14 nt, Human
cccacagccucugc

SEQ ID NO: 3397918 - RNA, 13 nt, Human
cccacagcgcugg

SEQ ID NO: 3397919 - RNA, 16 nt, Human
cccacagcgcuggccg

SEQ ID NO: 3397920 - RNA, 18 nt, Human
cccacagcgucccuggcg

SEQ ID NO: 3397921 - RNA, 12 nt, Human
cccacagcuccc

SEQ ID NO: 3397922 - RNA, 14 nt, Human
cccacagcucccac

SEQ ID NO: 3397923 - RNA, 17 nt, Human
cccacagcucccacccc

SEQ ID NO: 3397924 - RNA, 20 nt, Human
cccacaggacauuucucuaa

SEQ ID NO: 3397925 - RNA, 16 nt, Human
cccacaggaggcaagc

SEQ ID NO: 3397926 - RNA, 12 nt, Human
cccacaggcagc

SEQ ID NO: 3397927 - RNA, 23 nt, Human
cccacaguauauuuuauuucaau

SEQ ID NO: 3397928 - RNA, 22 nt, Human
cccacagugacucgggcuccug

SEQ ID NO: 3397929 - RNA, 19 nt, Human
cccacauagugaugguucc

SEQ ID NO: 3397930 - RNA, 16 nt, Human
cccacaucccaggcuu

SEQ ID NO: 3397931 - RNA, 15 nt, Human
cccacaucccugggc

SEQ ID NO: 3397932 - RNA, 16 nt, Human
cccacaucccugggcc

SEQ ID NO: 3397933 - RNA, 18 nt, Human
cccacaucccugggccug

SEQ ID NO: 3397934 - RNA, 22 nt, Human
cccacauccggggccagcuccg

SEQ ID NO: 3397935 - RNA, 18 nt, Human
cccacaugccaggggccu

SEQ ID NO: 3397936 - RNA, 19 nt, Human
cccacaugugacacauaug

SEQ ID NO: 3397937 - RNA, 21 nt, Human
cccacauuugugccgacacug

SEQ ID NO: 3397938 - RNA, 22 nt, Human
cccacauuugugccgacacugu

SEQ ID NO: 3397939 - RNA, 16 nt, Human
cccaccaacccucagg

SEQ ID NO: 3397940 - RNA, 13 nt, Human
cccaccacacaac

SEQ ID NO: 3397941 - RNA, 15 nt, Human
cccaccacacauccc

SEQ ID NO: 3397942 - RNA, 17 nt, Human
cccaccacacaucccag

SEQ ID NO: 3397943 - RNA, 17 nt, Human
cccaccacacccucccu

SEQ ID NO: 3397944 - RNA, 21 nt, Human
cccaccaccuaggccacuccu

SEQ ID NO: 3397945 - RNA, 22 nt, Human
cccaccaccuaggccacuccuc

SEQ ID NO: 3397946 - RNA, 21 nt, Human
cccaccacggccacuggccau

SEQ ID NO: 3397947 - RNA, 23 nt, Human
cccaccacuaggacucugaggcu

SEQ ID NO: 3397948 - RNA, 16 nt, Human
cccaccagaugcugaa

SEQ ID NO: 3397949 - RNA, 17 nt, Human
cccaccaggcugcucag

SEQ ID NO: 3397950 - RNA, 15 nt, Human
cccaccagugccucu

SEQ ID NO: 3397951 - RNA, 16 nt, Human
cccaccauaugaauug

SEQ ID NO: 3397952 - RNA, 13 nt, Human
cccaccaucugcu

SEQ ID NO: 3397953 - RNA, 22 nt, Human
cccacccaagcuuggcagccga

SEQ ID NO: 3397954 - RNA, 15 nt, Human
cccacccaagggccu

SEQ ID NO: 3397955 - RNA, 16 nt, Human
cccacccacuucugca

SEQ ID NO: 3397956 - RNA, 21 nt, Human
cccacccagcacccagcaacu

SEQ ID NO: 3397957 - RNA, 22 nt, Human
cccacccaggaguauccucuug

SEQ ID NO: 3397958 - RNA, 15 nt, Human
cccacccaggccagg

SEQ ID NO: 3397959 - RNA, 13 nt, Human
cccaccccacacu

SEQ ID NO: 3397960 - RNA, 15 nt, Human
cccaccccagggcag

SEQ ID NO: 3397961 - RNA, 15 nt, Human
cccacccccaccccc

SEQ ID NO: 3397962 - RNA, 18 nt, Human
cccacccccacccccacc

SEQ ID NO: 3397963 - RNA, 12 nt, Human
cccacccccauc

SEQ ID NO: 3397964 - RNA, 13 nt, Human
cccaccccccuca

SEQ ID NO: 3397965 - RNA, 13 nt, Human
cccacccccucaa

SEQ ID NO: 3397966 - RNA, 13 nt, Human
cccacccccugcc

SEQ ID NO: 3397967 - RNA, 21 nt, Human
cccaccccggggacccuguga

SEQ ID NO: 3397968 - RNA, 12 nt, Human
cccaccccugcc

SEQ ID NO: 3397969 - RNA, 12 nt, Human
cccaccccuggg

SEQ ID NO: 3397970 - RNA, 15 nt, Human
cccaccccugugcuc

SEQ ID NO: 3397971 - RNA, 21 nt, Human
cccaccccugugcuccgugcc

SEQ ID NO: 3397972 - RNA, 12 nt, Human
cccaccccuucc

SEQ ID NO: 3397973 - RNA, 14 nt, Human
cccacccgaugcug

SEQ ID NO: 3397974 - RNA, 13 nt, Human
cccacccgguggg

SEQ ID NO: 3397975 - RNA, 13 nt, Human
cccacccucagca

SEQ ID NO: 3397976 - RNA, 15 nt, Human
cccacccucccugga

SEQ ID NO: 3397977 - RNA, 16 nt, Human
cccacccucccuggag

SEQ ID NO: 3397978 - RNA, 14 nt, Human
cccacccuccuggc

SEQ ID NO: 3397979 - RNA, 19 nt, Human
cccacccuccugucuuccc

SEQ ID NO: 3397980 - RNA, 20 nt, Human
cccacccugcuuggcccagg

SEQ ID NO: 3397981 - RNA, 14 nt, Human
cccacccuguuccu

SEQ ID NO: 3397982 - RNA, 15 nt, Human
cccacccuguuccug

SEQ ID NO: 3397983 - RNA, 21 nt, Human
cccacccuguuuggauuuuua

SEQ ID NO: 3397984 - RNA, 18 nt, Human
cccaccgcagacaggacc

SEQ ID NO: 3397985 - RNA, 20 nt, Human
cccaccgcaugcccccucgu

SEQ ID NO: 3397986 - RNA, 17 nt, Human
cccaccgguccagcugg

SEQ ID NO: 3397987 - RNA, 21 nt, Human
cccaccgguccagcuggccug

SEQ ID NO: 3397988 - RNA, 18 nt, Human
cccaccgguugcuucugg

SEQ ID NO: 3397989 - RNA, 20 nt, Human
cccaccgguugcuucuggga

SEQ ID NO: 3397990 - RNA, 23 nt, Human
cccaccgguugcuucugggaagg

SEQ ID NO: 3397991 - RNA, 17 nt, Human
cccaccgugggcaggga

SEQ ID NO: 3397992 - RNA, 19 nt, Human
cccaccgugggcagggagc

SEQ ID NO: 3397993 - RNA, 20 nt, Human
cccaccguugucucaugcca

SEQ ID NO: 3397994 - RNA, 13 nt, Human
cccaccucacccc

SEQ ID NO: 3397995 - RNA, 18 nt, Human
cccaccucagccucccaa

SEQ ID NO: 3397996 - RNA, 11 nt, Human
cccaccuccac

SEQ ID NO: 3397997 - RNA, 14 nt, Human
cccaccuccccacg

SEQ ID NO: 3397998 - RNA, 17 nt, Human
cccaccuccccacgccc

SEQ ID NO: 3397999 - RNA, 12 nt, Human
cccaccucccug

SEQ ID NO: 3398000 - RNA, 18 nt, Human
cccaccucccugcccagg

SEQ ID NO: 3398001 - RNA, 19 nt, Human
cccaccucccugcccaggc

SEQ ID NO: 3398002 - RNA, 15 nt, Human
cccaccucccugccu

SEQ ID NO: 3398003 - RNA, 16 nt, Human
cccaccucccugccuc

SEQ ID NO: 3398004 - RNA, 17 nt, Human
cccaccucccugccucc

SEQ ID NO: 3398005 - RNA, 13 nt, Human
cccaccuccugca

SEQ ID NO: 3398006 - RNA, 22 nt, Human
cccaccucuccccaccuuaccc

SEQ ID NO: 3398007 - RNA, 22 nt, Human
cccaccucucucacuccuugaa

SEQ ID NO: 3398008 - RNA, 12 nt, Human
cccaccucuucu

SEQ ID NO: 3398009 - RNA, 18 nt, Human
cccaccugacacaccagg

SEQ ID NO: 3398010 - RNA, 12 nt, Human
cccaccugagcu

SEQ ID NO: 3398011 - RNA, 12 nt, Human
cccaccugcagg

SEQ ID NO: 3398012 - RNA, 20 nt, Human
cccaccugcccaucacaggg

SEQ ID NO: 3398013 - RNA, 23 nt, Human
cccaccugcccaucacaggguug

SEQ ID NO: 3398014 - RNA, 13 nt, Human
cccaccugccggc

SEQ ID NO: 3398015 - RNA, 14 nt, Human
cccaccugccggcc

SEQ ID NO: 3398016 - RNA, 13 nt, Human
cccaccugcugag

SEQ ID NO: 3398017 - RNA, 16 nt, Human
cccaccuggccaccug

SEQ ID NO: 3398018 - RNA, 17 nt, Human
cccaccuggccaccuga

SEQ ID NO: 3398019 - RNA, 20 nt, Human
cccaccuggccaccugaggu

SEQ ID NO: 3398020 - RNA, 13 nt, Human
cccaccuggcccu

SEQ ID NO: 3398021 - RNA, 12 nt, Human
cccaccuggccu

SEQ ID NO: 3398022 - RNA, 13 nt, Human
cccaccugggacc

SEQ ID NO: 3398023 - RNA, 20 nt, Human
cccaccugguggccucugcc

SEQ ID NO: 3398024 - RNA, 12 nt, Human
cccaccugucuu

SEQ ID NO: 3398025 - RNA, 15 nt, Human
cccaccuuggcucaa

SEQ ID NO: 3398026 - RNA, 14 nt, Human
cccaccuuggcugc

SEQ ID NO: 3398027 - RNA, 15 nt, Human
cccaccuuggcugca

SEQ ID NO: 3398028 - RNA, 16 nt, Human
cccaccuuggcugcag

SEQ ID NO: 3398029 - RNA, 17 nt, Human
cccaccuuguuggagcc

SEQ ID NO: 3398030 - RNA, 21 nt, Human
cccaccuuguuggagccugca

SEQ ID NO: 3398031 - RNA, 22 nt, Human
cccacgauuuucuccagcucag

SEQ ID NO: 3398032 - RNA, 13 nt, Human
cccacgcccccac

SEQ ID NO: 3398033 - RNA, 14 nt, Human
cccacgcccccacu

SEQ ID NO: 3398034 - RNA, 15 nt, Human
cccacgcccccacug

SEQ ID NO: 3398035 - RNA, 17 nt, Human
cccacgcccuccccucc

SEQ ID NO: 3398036 - RNA, 16 nt, Human
cccacgccgggaacca

SEQ ID NO: 3398037 - RNA, 14 nt, Human
cccacgcuggagug

SEQ ID NO: 3398038 - RNA, 20 nt, Human
cccacggagucguggggugu

SEQ ID NO: 3398039 - RNA, 22 nt, Human
cccacguccugucagugccgcc

SEQ ID NO: 3398040 - RNA, 19 nt, Human
cccacgugucuuccacuuu

SEQ ID NO: 3398041 - RNA, 20 nt, Human
ccccuuuacccucuuugcug

SEQ ID NO: 3398042 - RNA, 19 nt, Human
ccccuuucacaggcagcca

SEQ ID NO: 3398043 - RNA, 13 nt, Human
ccccuuucccacc

SEQ ID NO: 3398044 - RNA, 14 nt, Human
ccccuuucccaccc

SEQ ID NO: 3398045 - RNA, 22 nt, Human
ccccuuuccuggacacucagac

SEQ ID NO: 3398046 - RNA, 23 nt, Human
ccccuuuccuggacacucagacc

SEQ ID NO: 3398047 - RNA, 14 nt, Human
ccccuuucuuccuc

SEQ ID NO: 3398048 - RNA, 18 nt, Human
ccccuuugcugacccucc

SEQ ID NO: 3398049 - RNA, 16 nt, Human
ccccuuugggcccagg

SEQ ID NO: 3398050 - RNA, 17 nt, Human
ccccuuugggcccaggg

SEQ ID NO: 3398051 - RNA, 20 nt, Human
ccccuuugggcccugcaugu

SEQ ID NO: 3398052 - RNA, 22 nt, Human
ccccuuuucggccccauguauc

SEQ ID NO: 3398053 - RNA, 12 nt, Human
ccccuuuugcau

SEQ ID NO: 3398054 - RNA, 19 nt, Human
ccccuuuuuacuccccuug

SEQ ID NO: 3398055 - RNA, 20 nt, Human
ccccuuuuuugucccccaac

SEQ ID NO: 3398056 - RNA, 23 nt, Human
cccgaauacaaacaccuggacuu

SEQ ID NO: 3398057 - RNA, 17 nt, Human
cccgacaccggccagug

SEQ ID NO: 3398058 - RNA, 12 nt, Human
cccgacagaggg

SEQ ID NO: 3398059 - RNA, 14 nt, Human
cccgacagccuggc

SEQ ID NO: 3398060 - RNA, 12 nt, Human
cccgacauggcu

SEQ ID NO: 3398061 - RNA, 12 nt, Human
cccgacuccagu

SEQ ID NO: 3398062 - RNA, 14 nt, Human
cccgacuccucaaa

SEQ ID NO: 3398063 - RNA, 17 nt, Human
cccgacuggggcagggu

SEQ ID NO: 3398064 - RNA, 21 nt, Human
cccgagaacauggccuaaggg

SEQ ID NO: 3398065 - RNA, 21 nt, Human
cccgagcagcugagcagggcc

SEQ ID NO: 3398066 - RNA, 17 nt, Human
cccgagcuccucuucca

SEQ ID NO: 3398067 - RNA, 12 nt, Human
cccgagcuggug

SEQ ID NO: 3398068 - RNA, 17 nt, Human
cccgaggacccagaccc

SEQ ID NO: 3398069 - RNA, 16 nt, Human
cccgaggcccugcaug

SEQ ID NO: 3398070 - RNA, 20 nt, Human
cccgagggaugaugccacac

SEQ ID NO: 3398071 - RNA, 17 nt, Human
cccgaggguugauuaag

SEQ ID NO: 3398072 - RNA, 17 nt, Human
cccgagguggcugccug

SEQ ID NO: 3398073 - RNA, 22 nt, Human
cccgagguggcugccuggagcc

SEQ ID NO: 3398074 - RNA, 14 nt, Human
cccgaguagcuggg

SEQ ID NO: 3398075 - RNA, 18 nt, Human
cccgagucugggacacaa

SEQ ID NO: 3398076 - RNA, 16 nt, Human
cccgaguuuccccaga

SEQ ID NO: 3398077 - RNA, 13 nt, Human
cccgaucuuucua

SEQ ID NO: 3398078 - RNA, 14 nt, Human
cccgaugcugcuuu

SEQ ID NO: 3398079 - RNA, 22 nt, Human
cccgaugcugcuuuccccugug

SEQ ID NO: 3398080 - RNA, 16 nt, Human
cccgauguggaccucu

SEQ ID NO: 3398081 - RNA, 16 nt, Human
cccgcaagcaccaucc

SEQ ID NO: 3398082 - RNA, 22 nt, Human
cccgcacacccucacucugcca

SEQ ID NO: 3398083 - RNA, 19 nt, Human
cccgcagaccuccccagcc

SEQ ID NO: 3398084 - RNA, 21 nt, Human
cccgcagaccuccccagcccc

SEQ ID NO: 3398085 - RNA, 23 nt, Human
cccgcagugggagcaaacugcau

SEQ ID NO: 3398086 - RNA, 22 nt, Human
cccgcagugugcacuaaggggc

SEQ ID NO: 3398087 - RNA, 14 nt, Human
cccgcauccccugc

SEQ ID NO: 3398088 - RNA, 15 nt, Human
cccgcauccccugcc

SEQ ID NO: 3398089 - RNA, 16 nt, Human
cccgcauccccugccu

SEQ ID NO: 3398090 - RNA, 17 nt, Human
cccgcauccccugccuc

SEQ ID NO: 3398091 - RNA, 19 nt, Human
cccgcauccccugccucca

SEQ ID NO: 3398092 - RNA, 19 nt, Human
cccgcaugcagcagcuugc

SEQ ID NO: 3398093 - RNA, 20 nt, Human
cccgcaugcagcagcuugcu

SEQ ID NO: 3398094 - RNA, 15 nt, Human
cccgcauuccaggcu

SEQ ID NO: 3398095 - RNA, 16 nt, Human
cccgcauuccaggcuc

SEQ ID NO: 3398096 - RNA, 23 nt, Human
cccgccaccuaucucgugggaga

SEQ ID NO: 3398097 - RNA, 18 nt, Human
cccgcccacuguccuggg

SEQ ID NO: 3398098 - RNA, 15 nt, Human
cccgcccaggcuggc

SEQ ID NO: 3398099 - RNA, 22 nt, Human
cccgcccaggcuuagucacuga

SEQ ID NO: 3398100 - RNA, 18 nt, Human
cccgccgccugguacuca

SEQ ID NO: 3398101 - RNA, 13 nt, Human
cccgccucagccu

SEQ ID NO: 3398102 - RNA, 19 nt, Human
cccgccuccaaccccucgc

SEQ ID NO: 3398103 - RNA, 11 nt, Human
cccgccugcca

SEQ ID NO: 3398104 - RNA, 16 nt, Human
cccgccugccaguccu

SEQ ID NO: 3398105 - RNA, 16 nt, Human
cccgccugcccaccug

SEQ ID NO: 3398106 - RNA, 17 nt, Human
cccgccugcccaccugc

SEQ ID NO: 3398107 - RNA, 20 nt, Human
cccgccugcccaccugccug

SEQ ID NO: 3398108 - RNA, 14 nt, Human
cccgccugcccuca

SEQ ID NO: 3398109 - RNA, 22 nt, Human
cccgccuggcagaacugagcuc

SEQ ID NO: 3398110 - RNA, 12 nt, Human
cccgccuggcca

SEQ ID NO: 3398111 - RNA, 16 nt, Human
cccgccuggccaggag

SEQ ID NO: 3398112 - RNA, 14 nt, Human
cccgccuguucccc

SEQ ID NO: 3398113 - RNA, 23 nt, Human
cccgccuuccgccccuucccuuc

SEQ ID NO: 3398114 - RNA, 15 nt, Human
cccgcgccuccuucc

SEQ ID NO: 3398115 - RNA, 13 nt, Human
cccgcuaagaggg

SEQ ID NO: 3398116 - RNA, 15 nt, Human
cccgcuaaggaagau

SEQ ID NO: 3398117 - RNA, 13 nt, Human
cccgcucagcccu

SEQ ID NO: 3398118 - RNA, 23 nt, Human
cccgcucagcccucccugccccu

SEQ ID NO: 3398119 - RNA, 12 nt, Human
cccgcucccagu

SEQ ID NO: 3398120 - RNA, 21 nt, Human
cccgcucuacaucuucugccu

SEQ ID NO: 3398121 - RNA, 22 nt, Human
cccgcucugcaugcggcccagc

SEQ ID NO: 3398122 - RNA, 12 nt, Human
cccgcucuggac

SEQ ID NO: 3398123 - RNA, 15 nt, Human
cccgcugcugcugcu

SEQ ID NO: 3398124 - RNA, 12 nt, Human
cccgcuggagga

SEQ ID NO: 3398125 - RNA, 23 nt, Human
cccgcuggaggaugugggcagcu

SEQ ID NO: 3398126 - RNA, 12 nt, Human
cccgcugggcug

SEQ ID NO: 3398127 - RNA, 15 nt, Human
cccgcuugccucggc

SEQ ID NO: 3398128 - RNA, 23 nt, Human
cccggaagccaaaccucugugag

SEQ ID NO: 3398129 - RNA, 19 nt, Human
cccggagauuggacggccu

SEQ ID NO: 3398130 - RNA, 14 nt, Human
cccggagcuggagg

SEQ ID NO: 3398131 - RNA, 14 nt, Human
cccggaggaaaucu

SEQ ID NO: 3398132 - RNA, 16 nt, Human
cccggaggaaaucugc

SEQ ID NO: 3398133 - RNA, 19 nt, Human
cccggaggcggugggccug

SEQ ID NO: 3398134 - RNA, 18 nt, Human
cccggagguugggugggc

SEQ ID NO: 3398135 - RNA, 15 nt, Human
cccggaucagagcag

SEQ ID NO: 3398136 - RNA, 20 nt, Human
cccggaucagagcaggaccu

SEQ ID NO: 3398137 - RNA, 22 nt, Human
cccggaucagagcaggaccucc

SEQ ID NO: 3398138 - RNA, 17 nt, Human
cccggcacccccugcag

SEQ ID NO: 3398139 - RNA, 19 nt, Human
cccggcacccccugcagcu

SEQ ID NO: 3398140 - RNA, 19 nt, Human
cccggcacccucuggccgc

SEQ ID NO: 3398141 - RNA, 13 nt, Human
cccggcagacgcc

SEQ ID NO: 3398142 - RNA, 16 nt, Human
cccggcaggguccuag

SEQ ID NO: 3398143 - RNA, 20 nt, Human
cccggccaccucugcggacc

SEQ ID NO: 3398144 - RNA, 19 nt, Human
cccggccauguccuuagca

SEQ ID NO: 3398145 - RNA, 14 nt, Human
cccggccccagcca

SEQ ID NO: 3398146 - RNA, 20 nt, Human
cccggccugcucccagcagc

SEQ ID NO: 3398147 - RNA, 14 nt, Human
cccggcgcgguggc

SEQ ID NO: 3398148 - RNA, 17 nt, Human
cccggcuaauuuuugua

SEQ ID NO: 3398149 - RNA, 20 nt, Human
cccggcuaauuuuuguauuu

SEQ ID NO: 3398150 - RNA, 15 nt, Human
cccggcuccaggcuc

SEQ ID NO: 3398151 - RNA, 16 nt, Human
cccggcuccaggcucc

SEQ ID NO: 3398152 - RNA, 18 nt, Human
cccggcucuacgggggcc

SEQ ID NO: 3398153 - RNA, 20 nt, Human
cccggcucuacgggggccgc

SEQ ID NO: 3398154 - RNA, 20 nt, Human
cccggcuuccuuucccaagc

SEQ ID NO: 3398155 - RNA, 12 nt, Human
cccgggaagggg

SEQ ID NO: 3398156 - RNA, 15 nt, Human
cccgggaagggggcu

SEQ ID NO: 3398157 - RNA, 18 nt, Human
cccgggacgcagcaggag

SEQ ID NO: 3398158 - RNA, 24 nt, Human
cccgggacucacuggcagccccag

SEQ ID NO: 3398159 - RNA, 12 nt, Human
cccgggagccua

SEQ ID NO: 3398160 - RNA, 13 nt, Human
cccgggaggcaga

SEQ ID NO: 3398161 - RNA, 23 nt, Human
cccgggaggcagagguugcagug

SEQ ID NO: 3398162 - RNA, 15 nt, Human
cccgggagggcggca

SEQ ID NO: 3398163 - RNA, 17 nt, Human
cccgggaggggcccgcu

SEQ ID NO: 3398164 - RNA, 21 nt, Human
cccgggcagggcucccacaga

SEQ ID NO: 3398165 - RNA, 22 nt, Human
cccgggcagggcucccacagag

SEQ ID NO: 3398166 - RNA, 14 nt, Human
cccgggccagggcu

SEQ ID NO: 3398167 - RNA, 16 nt, Human
cccgggcccagaggag

SEQ ID NO: 3398168 - RNA, 12 nt, Human
cccgggcugccu

SEQ ID NO: 3398169 - RNA, 16 nt, Human
cccgggcugccugggc

SEQ ID NO: 3398170 - RNA, 23 nt, Human
cccgggcugccugggcuguuggc

SEQ ID NO: 3398171 - RNA, 22 nt, Human
cccggggaaaggcaagguccgg

SEQ ID NO: 3398172 - RNA, 17 nt, Human
cccggggacccugugac

SEQ ID NO: 3398173 - RNA, 13 nt, Human
cccgggggugggg

SEQ ID NO: 3398174 - RNA, 20 nt, Human
cccggucccaccccucccuc

SEQ ID NO: 3398175 - RNA, 15 nt, Human
cccgguucuuccagu

SEQ ID NO: 3398176 - RNA, 18 nt, Human
cccgucaccaucucaggc

SEQ ID NO: 3398177 - RNA, 13 nt, Human
cccguccugccug

SEQ ID NO: 3398178 - RNA, 13 nt, Human
cccgucucagugu

SEQ ID NO: 3398179 - RNA, 15 nt, Human
cccgucucucuccca

SEQ ID NO: 3398180 - RNA, 20 nt, Human
cccgucugggguucagcccc

SEQ ID NO: 3398181 - RNA, 17 nt, Human
cccgucuucagccuagc

SEQ ID NO: 3398182 - RNA, 18 nt, Human
cccgucuucagccuagcc

SEQ ID NO: 3398183 - RNA, 18 nt, Human
cccgugcaaaacaugcua

SEQ ID NO: 3398184 - RNA, 15 nt, Human
cccgugcagacugga

SEQ ID NO: 3398185 - RNA, 13 nt, Human
cccguggaggcug

SEQ ID NO: 3398186 - RNA, 12 nt, Human
cccuccaccuuc

SEQ ID NO: 3398187 - RNA, 17 nt, Human
cccuccacucagcuguc

SEQ ID NO: 3398188 - RNA, 21 nt, Human
cccuccacucagcuguccugc

SEQ ID NO: 3398189 - RNA, 12 nt, Human
cccuccacuccu

SEQ ID NO: 3398190 - RNA, 19 nt, Human
cccuccagagccccacagc

SEQ ID NO: 3398191 - RNA, 16 nt, Human
cccuccagcacaaaca

SEQ ID NO: 3398192 - RNA, 22 nt, Human
cccuccaucccuggcccccucc

SEQ ID NO: 3398193 - RNA, 19 nt, Human
cccuccaucuaaacugccc

SEQ ID NO: 3398194 - RNA, 12 nt, Human
cccucccaccac

SEQ ID NO: 3398195 - RNA, 20 nt, Human
cccucccacccccagccccg

SEQ ID NO: 3398196 - RNA, 19 nt, Human
cccucccaccucugugacc

SEQ ID NO: 3398197 - RNA, 15 nt, Human
cccucccagcucuga

SEQ ID NO: 3398198 - RNA, 12 nt, Human
cccucccagcug

SEQ ID NO: 3398199 - RNA, 14 nt, Human
cccucccaggacuc

SEQ ID NO: 3398200 - RNA, 16 nt, Human
cccuccccagagcacu

SEQ ID NO: 3398201 - RNA, 12 nt, Human
cccuccccaggg

SEQ ID NO: 3398202 - RNA, 13 nt, Human
cccuccccagggg

SEQ ID NO: 3398203 - RNA, 14 nt, Human
cccuccccagggga

SEQ ID NO: 3398204 - RNA, 16 nt, Human
cccuccccaucccaug

SEQ ID NO: 3398205 - RNA, 16 nt, Human
cccucccccaaccccc

SEQ ID NO: 3398206 - RNA, 17 nt, Human
cccuccccgcccuuuuu

SEQ ID NO: 3398207 - RNA, 19 nt, Human
cccuccccggcccuaccag

SEQ ID NO: 3398208 - RNA, 22 nt, Human
cccuccccggcccuaccagcgc

SEQ ID NO: 3398209 - RNA, 16 nt, Human
cccuccccuccccugc

SEQ ID NO: 3398210 - RNA, 13 nt, Human
cccuccccugcca

SEQ ID NO: 3398211 - RNA, 14 nt, Human
cccuccccugcccu

SEQ ID NO: 3398212 - RNA, 13 nt, Human
cccuccccugcug

SEQ ID NO: 3398213 - RNA, 16 nt, Human
cccuccccugcugcag

SEQ ID NO: 3398214 - RNA, 14 nt, Human
cccuccccuugccu

SEQ ID NO: 3398215 - RNA, 14 nt, Human
cccucccgccccuu

SEQ ID NO: 3398216 - RNA, 15 nt, Human
cccucccgccccuuc

SEQ ID NO: 3398217 - RNA, 15 nt, Human
cccucccuacccuaa

SEQ ID NO: 3398218 - RNA, 13 nt, Human
cccucccucagcc

SEQ ID NO: 3398219 - RNA, 13 nt, Human
cccucccuccacc

SEQ ID NO: 3398220 - RNA, 20 nt, Human
cccucccuccaccucccugc

SEQ ID NO: 3398221 - RNA, 23 nt, Human
cccucccucuuucccucccuucc

SEQ ID NO: 3398222 - RNA, 12 nt, Human
cccucccugcca

SEQ ID NO: 3398223 - RNA, 14 nt, Human
cccucccugcuguc

SEQ ID NO: 3398224 - RNA, 17 nt, Human
cccucccugcugucccc

SEQ ID NO: 3398225 - RNA, 19 nt, Human
cccucccugcuguccccuc

SEQ ID NO: 3398226 - RNA, 14 nt, Human
cccucccugcuuca

SEQ ID NO: 3398227 - RNA, 12 nt, Human
cccucccuggag

SEQ ID NO: 3398228 - RNA, 14 nt, Human
cccucccuucaacc

SEQ ID NO: 3398229 - RNA, 19 nt, Human
cccucccuuggaaaccugc

SEQ ID NO: 3398230 - RNA, 21 nt, Human
cccuccgaccacuuccagggg

SEQ ID NO: 3398231 - RNA, 19 nt, Human
cccuccgcccugccacuca

SEQ ID NO: 3398232 - RNA, 13 nt, Human
cccuccgccucca

SEQ ID NO: 3398233 - RNA, 21 nt, Human
cccuccgccuucacuccggug

SEQ ID NO: 3398234 - RNA, 22 nt, Human
cccuccgccuucacuccggugu

SEQ ID NO: 3398235 - RNA, 19 nt, Human
cccuccgcggcgggcccug

SEQ ID NO: 3398236 - RNA, 18 nt, Human
cccuccguggcaucaccu

SEQ ID NO: 3398237 - RNA, 15 nt, Human
cccuccuaccccucc

SEQ ID NO: 3398238 - RNA, 14 nt, Human
cccuccucaccccg

SEQ ID NO: 3398239 - RNA, 12 nt, Human
cccuccucaccu

SEQ ID NO: 3398240 - RNA, 16 nt, Human
cccuccucaccucugg

SEQ ID NO: 3398241 - RNA, 17 nt, Human
cccuccucaccucugga

SEQ ID NO: 3398242 - RNA, 14 nt, Human
cccuccucacuggc

SEQ ID NO: 3398243 - RNA, 12 nt, Human
cccuccuccacu

SEQ ID NO: 3398244 - RNA, 18 nt, Human
cccuccuccagccccugu

SEQ ID NO: 3398245 - RNA, 21 nt, Human
cccuccuccagccccuguccc

SEQ ID NO: 3398246 - RNA, 12 nt, Human
cccuccucccau

SEQ ID NO: 3398247 - RNA, 18 nt, Human
cccuccuccuggacuccu

SEQ ID NO: 3398248 - RNA, 17 nt, Human
cccuccucuccaccauc

SEQ ID NO: 3398249 - RNA, 16 nt, Human
cccuccucucccaucc

SEQ ID NO: 3398250 - RNA, 17 nt, Human
cccuccucucccauccc

SEQ ID NO: 3398251 - RNA, 17 nt, Human
cccuccucugagaggcg

SEQ ID NO: 3398252 - RNA, 13 nt, Human
cccuccucugcuu

SEQ ID NO: 3398253 - RNA, 22 nt, Human
cccuccugaaccgcacagcuca

SEQ ID NO: 3398254 - RNA, 12 nt, Human
cccuccugaccc

SEQ ID NO: 3398255 - RNA, 13 nt, Human
cccuccugcugca

SEQ ID NO: 3398256 - RNA, 13 nt, Human
cccuccugcuuug

SEQ ID NO: 3398257 - RNA, 13 nt, Human
cccuccuggcucu

SEQ ID NO: 3398258 - RNA, 11 nt, Human
cccuccuggga

SEQ ID NO: 3398259 - RNA, 17 nt, Human
cccuccugggaucugcu

SEQ ID NO: 3398260 - RNA, 19 nt, Human
cccuccuggggccaggccg

SEQ ID NO: 3398261 - RNA, 19 nt, Human
cccuccuggugucacccca

SEQ ID NO: 3398262 - RNA, 16 nt, Human
cccuccugucuuccca

SEQ ID NO: 3398263 - RNA, 18 nt, Human
cccuccugucuucccagg

SEQ ID NO: 3398264 - RNA, 18 nt, Human
cccuccugugcucagccc

SEQ ID NO: 3398265 - RNA, 19 nt, Human
cccuccugugcucagcccu

SEQ ID NO: 3398266 - RNA, 20 nt, Human
cccuccugugcucagcccug

SEQ ID NO: 3398267 - RNA, 20 nt, Human
cccuccuguugggagagggc

SEQ ID NO: 3398268 - RNA, 12 nt, Human
cccuccuucaga

SEQ ID NO: 3398269 - RNA, 11 nt, Human
cccuccuucca

SEQ ID NO: 3398270 - RNA, 15 nt, Human
cccuccuucccagcu

SEQ ID NO: 3398271 - RNA, 17 nt, Human
cccuccuucccagcugc

SEQ ID NO: 3398272 - RNA, 19 nt, Human
cccuccuucccagcugccc

SEQ ID NO: 3398273 - RNA, 14 nt, Human
cccuccuuccuaaa

SEQ ID NO: 3398274 - RNA, 21 nt, Human
cccuccuuccuucuugcuucu

SEQ ID NO: 3398275 - RNA, 18 nt, Human
cccuccuuguccacccac

SEQ ID NO: 3398276 - RNA, 12 nt, Human
cccuccuugucu

SEQ ID NO: 3398277 - RNA, 14 nt, Human
cccuccuuucacca

SEQ ID NO: 3398278 - RNA, 20 nt, Human
cccuccuuucccaacacuuc

SEQ ID NO: 3398279 - RNA, 15 nt, Human
cccucgaagcgcgcc

SEQ ID NO: 3398280 - RNA, 21 nt, Human
cccucgaagcgcgccacucgc

SEQ ID NO: 3398281 - RNA, 22 nt, Human
cccucgaggcggaucuuuggac

SEQ ID NO: 3398282 - RNA, 12 nt, Human
cccucgcccagu

SEQ ID NO: 3398283 - RNA, 20 nt, Human
cccucgcccagucccagcag

SEQ ID NO: 3398284 - RNA, 23 nt, Human
cccucgccuguggagcucagccc

SEQ ID NO: 3398285 - RNA, 17 nt, Human
cccucgcuggcccccac

SEQ ID NO: 3398286 - RNA, 18 nt, Human
cccucgcuggcccccacu

SEQ ID NO: 3398287 - RNA, 20 nt, Human
cccucgcuggcccccacugg

SEQ ID NO: 3398288 - RNA, 21 nt, Human
cccucgcuuggacggcugggc

SEQ ID NO: 3398289 - RNA, 13 nt, Human
cccucggagaaga

SEQ ID NO: 3398290 - RNA, 14 nt, Human
cccucgggcccacc

SEQ ID NO: 3398291 - RNA, 19 nt, Human
cccucgggcccagccccca

SEQ ID NO: 3398292 - RNA, 22 nt, Human
cccucgggcccagcccccacag

SEQ ID NO: 3398293 - RNA, 18 nt, Human
cccucggggauguguccu

SEQ ID NO: 3398294 - RNA, 18 nt, Human
cccucgggucuccucacu

SEQ ID NO: 3398295 - RNA, 19 nt, Human
cccucgggucuccucacuc

SEQ ID NO: 3398296 - RNA, 15 nt, Human
cccucggucuucggc

SEQ ID NO: 3398297 - RNA, 13 nt, Human
cccucgucuuucc

SEQ ID NO: 3398298 - RNA, 14 nt, Human
cccucgugccaguc

SEQ ID NO: 3398299 - RNA, 23 nt, Human
cccucgugccagucgcgcugccu

SEQ ID NO: 3398300 - RNA, 17 nt, Human
cccucguggacaccugc

SEQ ID NO: 3398301 - RNA, 13 nt, Human
cccucguggccag

SEQ ID NO: 3398302 - RNA, 15 nt, Human
cccucguggccagcc

SEQ ID NO: 3398303 - RNA, 16 nt, Human
cccucguggccuuccc

SEQ ID NO: 3398304 - RNA, 23 nt, Human
cccucgugguccccaacagcgac

SEQ ID NO: 3398305 - RNA, 16 nt, Human
cccucuaaagcaauaa

SEQ ID NO: 3398306 - RNA, 19 nt, Human
cccucuaaccucgcccucu

SEQ ID NO: 3398307 - RNA, 18 nt, Human
cccucuacagagcuuccc

SEQ ID NO: 3398308 - RNA, 17 nt, Human
cccucuacugggagccu

SEQ ID NO: 3398309 - RNA, 19 nt, Human
cccucuaggcucugccuuc

SEQ ID NO: 3398310 - RNA, 23 nt, Human
cccucuaguuuuuucuuccuuuu

SEQ ID NO: 3398311 - RNA, 17 nt, Human
cccucucaacacccagu

SEQ ID NO: 3398312 - RNA, 12 nt, Human
cccucucagagc

SEQ ID NO: 3398313 - RNA, 16 nt, Human
cccucucaggcaugcc

SEQ ID NO: 3398314 - RNA, 15 nt, Human
cccucucaucucagg

SEQ ID NO: 3398315 - RNA, 16 nt, Human
cccucucaucucaggu

SEQ ID NO: 3398316 - RNA, 19 nt, Human
cccucucccacccucuucc

SEQ ID NO: 3398317 - RNA, 12 nt, Human
cccucucccagg

SEQ ID NO: 3398318 - RNA, 20 nt, Human
cccucucccaggccccauga

SEQ ID NO: 3398319 - RNA, 11 nt, Human
cccucucccug

SEQ ID NO: 3398320 - RNA, 13 nt, Human
cccucucccugca

SEQ ID NO: 3398321 - RNA, 18 nt, Human
cccucucccuucccuccu

SEQ ID NO: 3398322 - RNA, 12 nt, Human
cccucuccuggg

SEQ ID NO: 3398323 - RNA, 21 nt, Human
cccucuccugggcagcugccu

SEQ ID NO: 3398324 - RNA, 14 nt, Human
cccucuccuuccuu

SEQ ID NO: 3398325 - RNA, 15 nt, Human
cccucucucugacuc

SEQ ID NO: 3398326 - RNA, 18 nt, Human
cccucucucugacucuca

SEQ ID NO: 3398327 - RNA, 13 nt, Human
cccucucucuucu

SEQ ID NO: 3398328 - RNA, 15 nt, Human
cccucucucuucugc

SEQ ID NO: 3398329 - RNA, 18 nt, Human
cccucucucuucugcucc

SEQ ID NO: 3398330 - RNA, 23 nt, Human
cccucucucuucugcuccacccu

SEQ ID NO: 3398331 - RNA, 20 nt, Human
cccucucugcagacuuccca

SEQ ID NO: 3398332 - RNA, 15 nt, Human
cccucucugcucugc

SEQ ID NO: 3398333 - RNA, 15 nt, Human
cccuggcuaagaccc

SEQ ID NO: 3398334 - RNA, 16 nt, Human
cccuggcuccaggcca

SEQ ID NO: 3398335 - RNA, 17 nt, Human
cccuggcucccacaggc

SEQ ID NO: 3398336 - RNA, 13 nt, Human
cccuggcucccau

SEQ ID NO: 3398337 - RNA, 14 nt, Human
cccuggcucccaug

SEQ ID NO: 3398338 - RNA, 15 nt, Human
cccuggcucccuccu

SEQ ID NO: 3398339 - RNA, 13 nt, Human
cccuggcucugca

SEQ ID NO: 3398340 - RNA, 18 nt, Human
cccuggcugaaggacugu

SEQ ID NO: 3398341 - RNA, 19 nt, Human
cccuggcugaaggacugug

SEQ ID NO: 3398342 - RNA, 13 nt, Human
cccuggcugcccu

SEQ ID NO: 3398343 - RNA, 14 nt, Human
cccuggcugcccug

SEQ ID NO: 3398344 - RNA, 17 nt, Human
cccuggcugcccuggcc

SEQ ID NO: 3398345 - RNA, 20 nt, Human
cccuggcugcccuggcccug

SEQ ID NO: 3398346 - RNA, 13 nt, Human
cccuggcugcugc

SEQ ID NO: 3398347 - RNA, 23 nt, Human
cccuggcugggacguggcucagc

SEQ ID NO: 3398348 - RNA, 11 nt, Human
cccuggcuggu

SEQ ID NO: 3398349 - RNA, 23 nt, Human
cccuggcuuucauuuucucucag

SEQ ID NO: 3398350 - RNA, 21 nt, Human
cccugggaaggccucuuggag

SEQ ID NO: 3398351 - RNA, 18 nt, Human
cccugggaggcagugaug

SEQ ID NO: 3398352 - RNA, 18 nt, Human
cccugggaggcucuggag

SEQ ID NO: 3398353 - RNA, 17 nt, Human
cccugggccagggucug

SEQ ID NO: 3398354 - RNA, 14 nt, Human
cccugggccccacc

SEQ ID NO: 3398355 - RNA, 16 nt, Human
cccugggccccaccac

SEQ ID NO: 3398356 - RNA, 16 nt, Human
cccugggcccugggcu

SEQ ID NO: 3398357 - RNA, 18 nt, Human
cccugggcccugggcugg

SEQ ID NO: 3398358 - RNA, 13 nt, Human
cccugggccugcc

SEQ ID NO: 3398359 - RNA, 19 nt, Human
cccugggccugccucacca

SEQ ID NO: 3398360 - RNA, 20 nt, Human
cccugggccugcugcugaga

SEQ ID NO: 3398361 - RNA, 14 nt, Human
cccugggccuuggg

SEQ ID NO: 3398362 - RNA, 16 nt, Human
cccugggcucugcccc

SEQ ID NO: 3398363 - RNA, 13 nt, Human
cccugggcuggaa

SEQ ID NO: 3398364 - RNA, 18 nt, Human
cccugggcuuggccugcu

SEQ ID NO: 3398365 - RNA, 19 nt, Human
cccugggcuuggccugcug

SEQ ID NO: 3398366 - RNA, 17 nt, Human
cccuggggacagcaagg

SEQ ID NO: 3398367 - RNA, 13 nt, Human
cccuggggccugg

SEQ ID NO: 3398368 - RNA, 14 nt, Human
cccuggggccugga

SEQ ID NO: 3398369 - RNA, 18 nt, Human
cccuggggccuguacugc

SEQ ID NO: 3398370 - RNA, 21 nt, Human
cccuggggccuguacugccug

SEQ ID NO: 3398371 - RNA, 22 nt, Human
cccuggggccuguacugccugc

SEQ ID NO: 3398372 - RNA, 14 nt, Human
cccuggggcuggcu

SEQ ID NO: 3398373 - RNA, 16 nt, Human
cccuggggcuggcuuu

SEQ ID NO: 3398374 - RNA, 14 nt, Human
cccuggggcugggc

SEQ ID NO: 3398375 - RNA, 16 nt, Human
cccuggggcugggccc

SEQ ID NO: 3398376 - RNA, 22 nt, Human
cccuggggcugggccccccagc

SEQ ID NO: 3398377 - RNA, 19 nt, Human
cccuggggcuucuccugac

SEQ ID NO: 3398378 - RNA, 21 nt, Human
cccugggggcacaggaggcag

SEQ ID NO: 3398379 - RNA, 17 nt, Human
cccugggugggcucugu

SEQ ID NO: 3398380 - RNA, 20 nt, Human
cccuggguguccccgcugcu

SEQ ID NO: 3398381 - RNA, 22 nt, Human
cccuggguguccccgcugcugu

SEQ ID NO: 3398382 - RNA, 20 nt, Human
cccuggguuagacugccagc

SEQ ID NO: 3398383 - RNA, 23 nt, Human
cccuggguuagacugccagcucu

SEQ ID NO: 3398384 - RNA, 22 nt, Human
cccuggguucagaaaugcugcc

SEQ ID NO: 3398385 - RNA, 23 nt, Human
cccuggguucagaaaugcugccu

SEQ ID NO: 3398386 - RNA, 23 nt, Human
cccugguaauaaguacuguguac

SEQ ID NO: 3398387 - RNA, 19 nt, Human
cccugguaauagcuguaaa

SEQ ID NO: 3398388 - RNA, 14 nt, Human
cccugguccccucc

SEQ ID NO: 3398389 - RNA, 18 nt, Human
cccuggucccucugcagu

SEQ ID NO: 3398390 - RNA, 17 nt, Human
cccugguccuuccaggc

SEQ ID NO: 3398391 - RNA, 13 nt, Human
cccuggugcugcc

SEQ ID NO: 3398392 - RNA, 21 nt, Human
cccuggugcugccacacuuca

SEQ ID NO: 3398393 - RNA, 19 nt, Human
cccugguggacaguccugg

SEQ ID NO: 3398394 - RNA, 15 nt, Human
cccugguggcagcuc

SEQ ID NO: 3398395 - RNA, 22 nt, Human
cccugguggcagugggagcugc

SEQ ID NO: 3398396 - RNA, 23 nt, Human
cccuggugggccaacaaagaaca

SEQ ID NO: 3398397 - RNA, 16 nt, Human
cccuggugguugcugu

SEQ ID NO: 3398398 - RNA, 20 nt, Human
cccugguguuucuagcacug

SEQ ID NO: 3398399 - RNA, 22 nt, Human
cccugguguuucuagcacuggc

SEQ ID NO: 3398400 - RNA, 20 nt, Human
cccugguuucacuggcccaa

SEQ ID NO: 3398401 - RNA, 17 nt, Human
cccugguuuccugcccu

SEQ ID NO: 3398402 - RNA, 19 nt, Human
cccugguuuccugcccugg

SEQ ID NO: 3398403 - RNA, 11 nt, Human
cccuguaacuu

SEQ ID NO: 3398404 - RNA, 18 nt, Human
cccuguacaauauuuaaa

SEQ ID NO: 3398405 - RNA, 20 nt, Human
cccuguaccucaucccauga

SEQ ID NO: 3398406 - RNA, 14 nt, Human
cccuguaggccuca

SEQ ID NO: 3398407 - RNA, 18 nt, Human
cccuguauauagcccagc

SEQ ID NO: 3398408 - RNA, 20 nt, Human
cccuguauuuucuuucucua

SEQ ID NO: 3398409 - RNA, 22 nt, Human
cccugucaaauaucaguuaccc

SEQ ID NO: 3398410 - RNA, 15 nt, Human
cccugucagcaugaa

SEQ ID NO: 3398411 - RNA, 14 nt, Human
cccugucaggaggc

SEQ ID NO: 3398412 - RNA, 14 nt, Human
cccuguccaaacug

SEQ ID NO: 3398413 - RNA, 19 nt, Human
cccugucccacccccuucc

SEQ ID NO: 3398414 - RNA, 17 nt, Human
cccugucccaugcaggc

SEQ ID NO: 3398415 - RNA, 23 nt, Human
cccugucccaugcaggcccuuug

SEQ ID NO: 3398416 - RNA, 18 nt, Human
cccugucccccagcucug

SEQ ID NO: 3398417 - RNA, 13 nt, Human
cccuguccccuca

SEQ ID NO: 3398418 - RNA, 13 nt, Human
cccugucccuccc

SEQ ID NO: 3398419 - RNA, 15 nt, Human
cccugucccucccac

SEQ ID NO: 3398420 - RNA, 16 nt, Human
cccugucccucccacc

SEQ ID NO: 3398421 - RNA, 19 nt, Human
cccugucccucccaccucu

SEQ ID NO: 3398422 - RNA, 20 nt, Human
cccugucccucccaccucug

SEQ ID NO: 3398423 - RNA, 22 nt, Human
cccugucccucccaccucugug

SEQ ID NO: 3398424 - RNA, 24 nt, Human
cccugucccucccaccucugugac

SEQ ID NO: 3398425 - RNA, 22 nt, Human
cccuguccggaaugccacccac

SEQ ID NO: 3398426 - RNA, 13 nt, Human
cccuguccucacu

SEQ ID NO: 3398427 - RNA, 15 nt, Human
cccuguccucacugc

SEQ ID NO: 3398428 - RNA, 15 nt, Human
cccuguccuccucgg

SEQ ID NO: 3398429 - RNA, 15 nt, Human
cccuguccugccaug

SEQ ID NO: 3398430 - RNA, 15 nt, Human
cccugucgagacacu

SEQ ID NO: 3398431 - RNA, 21 nt, Human
cccugucgaguucggcucugg

SEQ ID NO: 3398432 - RNA, 17 nt, Human
cccugucgggcuuugug

SEQ ID NO: 3398433 - RNA, 21 nt, Human
cccugucgggcuuugugugaa

SEQ ID NO: 3398434 - RNA, 17 nt, Human
cccugucuagagaggga

SEQ ID NO: 3398435 - RNA, 23 nt, Human
cccugucucuacuaaaaaugcaa

SEQ ID NO: 3398436 - RNA, 20 nt, Human
cccugucuguagagggcccu

SEQ ID NO: 3398437 - RNA, 23 nt, Human
cccugucuuuccuaagaccuggg

SEQ ID NO: 3398438 - RNA, 19 nt, Human
cccugugacauggugccug

SEQ ID NO: 3398439 - RNA, 23 nt, Human
cccugugagauuuugcuuuucca

SEQ ID NO: 3398440 - RNA, 19 nt, Human
cccugugauggggcccugc

SEQ ID NO: 3398441 - RNA, 20 nt, Human
cccugugauggggcccugcc

SEQ ID NO: 3398442 - RNA, 13 nt, Human
cccugugccagcc

SEQ ID NO: 3398443 - RNA, 19 nt, Human
cccugugcccccagggucc

SEQ ID NO: 3398444 - RNA, 21 nt, Human
cccugugccuaacaccagcgu

SEQ ID NO: 3398445 - RNA, 19 nt, Human
cccugugccuccucccucc

SEQ ID NO: 3398446 - RNA, 18 nt, Human
cccugugcuccgugccuc

SEQ ID NO: 3398447 - RNA, 22 nt, Human
cccugugcuccgugccuccacc

SEQ ID NO: 3398448 - RNA, 12 nt, Human
cccugugcuggu

SEQ ID NO: 3398449 - RNA, 13 nt, Human
cccugugcuggug

SEQ ID NO: 3398450 - RNA, 16 nt, Human
cccugugcuggugucc

SEQ ID NO: 3398451 - RNA, 20 nt, Human
cccugugcugguguccugac

SEQ ID NO: 3398452 - RNA, 21 nt, Human
cccugugcugguguccugacc

SEQ ID NO: 3398453 - RNA, 16 nt, Human
cccugugggcccccaa

SEQ ID NO: 3398454 - RNA, 12 nt, Human
cccuguggggau

SEQ ID NO: 3398455 - RNA, 19 nt, Human
cccuguguauacagcccug

SEQ ID NO: 3398456 - RNA, 19 nt, Human
cccuguguccaccuguggg

SEQ ID NO: 3398457 - RNA, 16 nt, Human
cccuguguuaauuuaa

SEQ ID NO: 3398458 - RNA, 13 nt, Human
cccuguguugucu

SEQ ID NO: 3398459 - RNA, 16 nt, Human
cccuguguugucucua

SEQ ID NO: 3398460 - RNA, 19 nt, Human
cccuguucagcuacuccca

SEQ ID NO: 3398461 - RNA, 17 nt, Human
cccuguuccccagagaa

SEQ ID NO: 3398462 - RNA, 13 nt, Human
cccuguuccugcu

SEQ ID NO: 3398463 - RNA, 21 nt, Human
cccuguucuaagggggagggg

SEQ ID NO: 3398464 - RNA, 13 nt, Human
cccuguucuggca

SEQ ID NO: 3398465 - RNA, 16 nt, Human
cccuguucuuccucca

SEQ ID NO: 3398466 - RNA, 17 nt, Human
cccuguuucaaucacug

SEQ ID NO: 3398467 - RNA, 20 nt, Human
cccuguuugaagccugcccu

SEQ ID NO: 3398468 - RNA, 14 nt, Human
cccuguuuuauacu

SEQ ID NO: 3398469 - RNA, 23 nt, Human
cccuguuuucugagcccgggcug

SEQ ID NO: 3398470 - RNA, 20 nt, Human
cccuuaaacaguugcacagc

SEQ ID NO: 3398471 - RNA, 21 nt, Human
cccuuaaacaguugcacagca

SEQ ID NO: 3398472 - RNA, 20 nt, Human
cccuuaacccaaggagcaca

SEQ ID NO: 3398473 - RNA, 15 nt, Human
cccuuacacguaccu

SEQ ID NO: 3398474 - RNA, 17 nt, Human
cccuuagccucccugaa

SEQ ID NO: 3398475 - RNA, 22 nt, Human
cccuuauaguuugggcuucagc

SEQ ID NO: 3398476 - RNA, 15 nt, Human
cccuuaucaccagcu

SEQ ID NO: 3398477 - RNA, 14 nt, Human
cccuuauccaggac

SEQ ID NO: 3398478 - RNA, 14 nt, Human
cccuuauccucccu

SEQ ID NO: 3398479 - RNA, 17 nt, Human
cccuuaugacugccaag

SEQ ID NO: 3398480 - RNA, 16 nt, Human
cccuucacauuuuuua

SEQ ID NO: 3398481 - RNA, 22 nt, Human
cccuucagcccccagccccucc

SEQ ID NO: 3398482 - RNA, 20 nt, Human
cccuucaguacccucucagc

SEQ ID NO: 3398483 - RNA, 18 nt, Human
cccuucaucuccagggag

SEQ ID NO: 3398484 - RNA, 16 nt, Human
cccuucaucuggaacc

SEQ ID NO: 3398485 - RNA, 14 nt, Human
cccuucaucuuccu

SEQ ID NO: 3398486 - RNA, 16 nt, Human
cccuucaucuuccugu

SEQ ID NO: 3398487 - RNA, 15 nt, Human
cccuuccaaauaaua

SEQ ID NO: 3398488 - RNA, 17 nt, Human
cccuuccacacccccac

SEQ ID NO: 3398489 - RNA, 16 nt, Human
cccuuccaccugcucu

SEQ ID NO: 3398490 - RNA, 20 nt, Human
cccuuccacugccucugccu

SEQ ID NO: 3398491 - RNA, 13 nt, Human
cccuuccagacau

SEQ ID NO: 3398492 - RNA, 17 nt, Human
cccuuccaggccaucag

SEQ ID NO: 3398493 - RNA, 13 nt, Human
cccuuccaggggu

SEQ ID NO: 3398494 - RNA, 12 nt, Human
cccuuccaugga

SEQ ID NO: 3398495 - RNA, 18 nt, Human
cccuuccauuucugccuu

SEQ ID NO: 3398496 - RNA, 20 nt, Human
cccuuccauuucugccuuuu

SEQ ID NO: 3398497 - RNA, 18 nt, Human
cccuucccaaucagcacu

SEQ ID NO: 3398498 - RNA, 19 nt, Human
cccuucccaaucagcacug

SEQ ID NO: 3398499 - RNA, 13 nt, Human
cccuucccaccuc

SEQ ID NO: 3398500 - RNA, 18 nt, Human
cccuucccaucucuuccu

SEQ ID NO: 3398501 - RNA, 18 nt, Human
cccuuccccaugcuuccu

SEQ ID NO: 3398502 - RNA, 17 nt, Human
cccuuccccgagggaug

SEQ ID NO: 3398503 - RNA, 15 nt, Human
cccuuccccucccug

SEQ ID NO: 3398504 - RNA, 15 nt, Human
cccuuccccuuccuu

SEQ ID NO: 3398505 - RNA, 15 nt, Human
cccuucccugcaaac

SEQ ID NO: 3398506 - RNA, 16 nt, Human
cccuucccuguccuug

SEQ ID NO: 3398507 - RNA, 19 nt, Human
cccuucccuuccacugccu

SEQ ID NO: 3398508 - RNA, 17 nt, Human
cccuucccuugagcccu

SEQ ID NO: 3398509 - RNA, 16 nt, Human
cccuuccgacccucug

SEQ ID NO: 3398510 - RNA, 14 nt, Human
cccuuccuaauucc

SEQ ID NO: 3398511 - RNA, 21 nt, Human
cccuuccuaauuccacagcug

SEQ ID NO: 3398512 - RNA, 23 nt, Human
cccuuccuccuccaccaccgccc

SEQ ID NO: 3398513 - RNA, 15 nt, Human
cccuuccucuccacc

SEQ ID NO: 3398514 - RNA, 18 nt, Human
cccuuccucuccacccuc

SEQ ID NO: 3398515 - RNA, 21 nt, Human
cccuuccucuccacugccuuc

SEQ ID NO: 3398516 - RNA, 20 nt, Human
cccuuccucuugucugauuu

SEQ ID NO: 3398517 - RNA, 13 nt, Human
cccuuccuggaca

SEQ ID NO: 3398518 - RNA, 15 nt, Human
cccuuccuggacagc

SEQ ID NO: 3398519 - RNA, 18 nt, Human
cccuuccuggacagcugu

SEQ ID NO: 3398520 - RNA, 23 nt, Human
cccuuccuggacagcugugccuc

SEQ ID NO: 3398521 - RNA, 14 nt, Human
cccuuccuugcucu

SEQ ID NO: 3398522 - RNA, 17 nt, Human
cccuuccuuuucccugc

SEQ ID NO: 3398523 - RNA, 18 nt, Human
cccuuccuuuucccugcu

SEQ ID NO: 3398524 - RNA, 19 nt, Human
cccuuccuuuucccugcuu

SEQ ID NO: 3398525 - RNA, 17 nt, Human
cccuucgcguauuucag

SEQ ID NO: 3398526 - RNA, 15 nt, Human
cccuucgcuccugug

SEQ ID NO: 3398527 - RNA, 16 nt, Human
cccuucgcuccugugu

SEQ ID NO: 3398528 - RNA, 17 nt, Human
cccuucuaccugccacu

SEQ ID NO: 3398529 - RNA, 23 nt, Human
cccuucuaggguuauugcauuug

SEQ ID NO: 3398530 - RNA, 19 nt, Human
cccuucuauacccacccag

SEQ ID NO: 3398531 - RNA, 20 nt, Human
cccuucuauacccacccaga

SEQ ID NO: 3398532 - RNA, 23 nt, Human
cccuucuauuuggggcuugauga

SEQ ID NO: 3398533 - RNA, 15 nt, Human
cccuucucagaaucu

SEQ ID NO: 3398534 - RNA, 10 nt, Human
cccuucucca

SEQ ID NO: 3398535 - RNA, 15 nt, Human
cccuucucccacacu

SEQ ID NO: 3398536 - RNA, 14 nt, Human
cccuucucccugga

SEQ ID NO: 3398537 - RNA, 15 nt, Human
cccuucuccuuccaa

SEQ ID NO: 3398538 - RNA, 22 nt, Human
cccuucucuccagccccuggau

SEQ ID NO: 3398539 - RNA, 13 nt, Human
cccuucucugcuc

SEQ ID NO: 3398540 - RNA, 12 nt, Human
cccuucucugug

SEQ ID NO: 3398541 - RNA, 15 nt, Human
cccuucucuuaguua

SEQ ID NO: 3398542 - RNA, 12 nt, Human
cccuucucuucc

SEQ ID NO: 3398543 - RNA, 14 nt, Human
cccuucucuuccag

SEQ ID NO: 3398544 - RNA, 23 nt, Human
cccuucugacccaugcugcccug

SEQ ID NO: 3398545 - RNA, 23 nt, Human
cccuucugcucagcucugggcca

SEQ ID NO: 3398546 - RNA, 21 nt, Human
cccuucugggcaucuguucug

SEQ ID NO: 3398547 - RNA, 17 nt, Human
cccuucugucccucaca

SEQ ID NO: 3398548 - RNA, 14 nt, Human
cccuucugugccca

SEQ ID NO: 3398549 - RNA, 12 nt, Human
cccuucuucaug

SEQ ID NO: 3398550 - RNA, 20 nt, Human
cccuucuugcugcccugccc

SEQ ID NO: 3398551 - RNA, 11 nt, Human
cccuucuuuuu

SEQ ID NO: 3398552 - RNA, 18 nt, Human
cccuugaaacuuugggaa

SEQ ID NO: 3398553 - RNA, 21 nt, Human
cccuugaaagucaugaacaca

SEQ ID NO: 3398554 - RNA, 23 nt, Human
cccuugacgucaagucuccuucc

SEQ ID NO: 3398555 - RNA, 19 nt, Human
cccuugacuuugcuccuca

SEQ ID NO: 3398556 - RNA, 14 nt, Human
cccuugagaaaccu

SEQ ID NO: 3398557 - RNA, 22 nt, Human
cccuugagaaaccuuauuguac

SEQ ID NO: 3398558 - RNA, 15 nt, Human
cccuugagaccucag

SEQ ID NO: 3398559 - RNA, 15 nt, Human
cccuugagcccuccc

SEQ ID NO: 3398560 - RNA, 17 nt, Human
cccuugagggcugcagu

SEQ ID NO: 3398561 - RNA, 21 nt, Human
cccuugaucagccccacccug

SEQ ID NO: 3398562 - RNA, 20 nt, Human
cccuugauuuaaacacacag

SEQ ID NO: 3398563 - RNA, 16 nt, Human
cccuugccacuuugca

SEQ ID NO: 3398564 - RNA, 13 nt, Human
cccuugccagaca

SEQ ID NO: 3398565 - RNA, 20 nt, Human
cccuugccagcugcugagcc

SEQ ID NO: 3398566 - RNA, 19 nt, Human
cccuugcccagggcucagc

SEQ ID NO: 3398567 - RNA, 23 nt, Human
cccuugcccagggcucagccugg

SEQ ID NO: 3398568 - RNA, 18 nt, Human
cccuugccccccuggccu

SEQ ID NO: 3398569 - RNA, 16 nt, Human
cccuugcccuagauag

SEQ ID NO: 3398570 - RNA, 15 nt, Human
cccuugcccugaccu

SEQ ID NO: 3398571 - RNA, 13 nt, Human
cccuugccucccc

SEQ ID NO: 3398572 - RNA, 19 nt, Human
cccuugccugugccaggug

SEQ ID NO: 3398573 - RNA, 21 nt, Human
cccuugccuuucgaggccuga

SEQ ID NO: 3398574 - RNA, 15 nt, Human
cccuugcuggcccca

SEQ ID NO: 3398575 - RNA, 21 nt, Human
cccuugcuggccccagcccug

SEQ ID NO: 3398576 - RNA, 24 nt, Human
cccuugcuggccccagcccugcug

SEQ ID NO: 3398577 - RNA, 22 nt, Human
cccuuggaaaccugcccugccu

SEQ ID NO: 3398578 - RNA, 23 nt, Human
cccuuggaaaccugcccugccug

SEQ ID NO: 3398579 - RNA, 15 nt, Human
cccuuggacauuuua

SEQ ID NO: 3398580 - RNA, 12 nt, Human
cccuuggccugu

SEQ ID NO: 3398581 - RNA, 14 nt, Human
cccuuggcugugag

SEQ ID NO: 3398582 - RNA, 23 nt, Human
cccuuggcugugaggccccugga

SEQ ID NO: 3398583 - RNA, 18 nt, Human
cccuuggcuucugugaug

SEQ ID NO: 3398584 - RNA, 12 nt, Human
cccuugggccac

SEQ ID NO: 3398585 - RNA, 15 nt, Human
cccuugggccagaag

SEQ ID NO: 3398586 - RNA, 16 nt, Human
cccuugggccagaagu

SEQ ID NO: 3398587 - RNA, 15 nt, Human
cccuugggcccacac

SEQ ID NO: 3398588 - RNA, 12 nt, Human
cccuuggggguc

SEQ ID NO: 3398589 - RNA, 21 nt, Human
cccuuggggguccuccuccag

SEQ ID NO: 3398590 - RNA, 23 nt, Human
cccuuggggguccuccuccaggg

SEQ ID NO: 3398591 - RNA, 16 nt, Human
cccuuggguucugaua

SEQ ID NO: 3398592 - RNA, 17 nt, Human
cccuugguggcaagagc

SEQ ID NO: 3398593 - RNA, 22 nt, Human
cccuugguuaggcauuguggga

SEQ ID NO: 3398594 - RNA, 17 nt, Human
cccuuguagcuccuccc

SEQ ID NO: 3398595 - RNA, 23 nt, Human
cccuuguagcuccuccccuggag

SEQ ID NO: 3398596 - RNA, 15 nt, Human
cccuugucccacuca

SEQ ID NO: 3398597 - RNA, 13 nt, Human
cccuugucugaga

SEQ ID NO: 3398598 - RNA, 14 nt, Human
cccuugugguccca

SEQ ID NO: 3398599 - RNA, 23 nt, Human
cccuuuagcacguuuaaaguucu

SEQ ID NO: 3398600 - RNA, 21 nt, Human
cccuuuagccaaacccuuguc

SEQ ID NO: 3398601 - RNA, 17 nt, Human
cccuuuagcuguguuau

SEQ ID NO: 3398602 - RNA, 21 nt, Human
cccuuuauugaaaaaauaaaa

SEQ ID NO: 3398603 - RNA, 15 nt, Human
cccuuucacaggcag

SEQ ID NO: 3398604 - RNA, 19 nt, Human
cccuuucagaugucuucug

SEQ ID NO: 3398605 - RNA, 23 nt, Human
cccuuucccaccccaaccugcuc

SEQ ID NO: 3398606 - RNA, 17 nt, Human
cccuuuccuccucaggc

SEQ ID NO: 3398607 - RNA, 16 nt, Human
cccuuuccugaguccc

SEQ ID NO: 3398608 - RNA, 13 nt, Human
cccuuuccugcgg

SEQ ID NO: 3398609 - RNA, 14 nt, Human
cccuuuccuguccc

SEQ ID NO: 3398610 - RNA, 14 nt, Human
cccuuuccuuccua

SEQ ID NO: 3398611 - RNA, 14 nt, Human
cccuuucuccccug

SEQ ID NO: 3398612 - RNA, 22 nt, Human
cccuuucuccccugcccccagg

SEQ ID NO: 3398613 - RNA, 21 nt, Human
cccuuucucuuuuccccuuuc

SEQ ID NO: 3398614 - RNA, 13 nt, Human
cccuuucuuccuc

SEQ ID NO: 3398615 - RNA, 14 nt, Human
cccuuucuucuccc

SEQ ID NO: 3398616 - RNA, 21 nt, Human
cccuuucuucucccccauccu

SEQ ID NO: 3398617 - RNA, 15 nt, Human
cccuuugaagccuca

SEQ ID NO: 3398618 - RNA, 18 nt, Human
cccuuugaagccucagcu

SEQ ID NO: 3398619 - RNA, 14 nt, Human
cccuuugccuucau

SEQ ID NO: 3398620 - RNA, 13 nt, Human
cccuuugcuccac

SEQ ID NO: 3398621 - RNA, 15 nt, Human
cccuuugcugacccu

SEQ ID NO: 3398622 - RNA, 17 nt, Human
ccucguggccagcccgg

SEQ ID NO: 3398623 - RNA, 19 nt, Human
ccucguggccuuccccagc

SEQ ID NO: 3398624 - RNA, 23 nt, Human
ccucguggccuuccccagccucu

SEQ ID NO: 3398625 - RNA, 19 nt, Human
ccucgugguccccaacagc

SEQ ID NO: 3398626 - RNA, 14 nt, Human
ccucuaacagcacc

SEQ ID NO: 3398627 - RNA, 15 nt, Human
ccucuaacagcacca

SEQ ID NO: 3398628 - RNA, 21 nt, Human
ccucuaacaggggcugguggg

SEQ ID NO: 3398629 - RNA, 17 nt, Human
ccucuaaccccaggccc

SEQ ID NO: 3398630 - RNA, 19 nt, Human
ccucuaaccccaggccccg

SEQ ID NO: 3398631 - RNA, 20 nt, Human
ccucuaaccucgcccucucc

SEQ ID NO: 3398632 - RNA, 14 nt, Human
ccucuaaugagacu

SEQ ID NO: 3398633 - RNA, 15 nt, Human
ccucuaaugagacug

SEQ ID NO: 3398634 - RNA, 18 nt, Human
ccucuacagagcuucccu

SEQ ID NO: 3398635 - RNA, 11 nt, Human
ccucuacaggg

SEQ ID NO: 3398636 - RNA, 18 nt, Human
ccucuacauggacucaga

SEQ ID NO: 3398637 - RNA, 19 nt, Human
ccucuacccaaacccuagg

SEQ ID NO: 3398638 - RNA, 15 nt, Human
ccucuaccccaauuu

SEQ ID NO: 3398639 - RNA, 22 nt, Human
ccucuacugggaaggcuacuuc

SEQ ID NO: 3398640 - RNA, 19 nt, Human
ccucuagaaauuuuucaga

SEQ ID NO: 3398641 - RNA, 19 nt, Human
ccucuagaauuuuaagccu

SEQ ID NO: 3398642 - RNA, 14 nt, Human
ccucuagagcagac

SEQ ID NO: 3398643 - RNA, 21 nt, Human
ccucuagagccuucagccuua

SEQ ID NO: 3398644 - RNA, 12 nt, Human
ccucuagcugaa

SEQ ID NO: 3398645 - RNA, 16 nt, Human
ccucuaggaggucucu

SEQ ID NO: 3398646 - RNA, 16 nt, Human
ccucuaggcucugccu

SEQ ID NO: 3398647 - RNA, 17 nt, Human
ccucuaggcucugccuu

SEQ ID NO: 3398648 - RNA, 13 nt, Human
ccucuauacaucu

SEQ ID NO: 3398649 - RNA, 21 nt, Human
ccucuauacaucucuccccaa

SEQ ID NO: 3398650 - RNA, 22 nt, Human
ccucuaucauggugaaaagcuc

SEQ ID NO: 3398651 - RNA, 13 nt, Human
ccucuaucccaau

SEQ ID NO: 3398652 - RNA, 18 nt, Human
ccucuaucccggcuuugg

SEQ ID NO: 3398653 - RNA, 23 nt, Human
ccucuauugauguacagucuguc

SEQ ID NO: 3398654 - RNA, 16 nt, Human
ccucuauuuagcauga

SEQ ID NO: 3398655 - RNA, 15 nt, Human
ccucucaccucugug

SEQ ID NO: 3398656 - RNA, 14 nt, Human
ccucucacugccuc

SEQ ID NO: 3398657 - RNA, 14 nt, Human
ccucucagagcuac

SEQ ID NO: 3398658 - RNA, 22 nt, Human
ccucucagagcuacuugggcca

SEQ ID NO: 3398659 - RNA, 23 nt, Human
ccucucagagcuacuugggccau

SEQ ID NO: 3398660 - RNA, 13 nt, Human
ccucucagcucca

SEQ ID NO: 3398661 - RNA, 18 nt, Human
ccucucagcuccaggugg

SEQ ID NO: 3398662 - RNA, 15 nt, Human
ccucucaggauccaa

SEQ ID NO: 3398663 - RNA, 18 nt, Human
ccucucaggugaccaaaa

SEQ ID NO: 3398664 - RNA, 15 nt, Human
ccucucaguacuuug

SEQ ID NO: 3398665 - RNA, 23 nt, Human
ccucucaucaguguccucuugcu

SEQ ID NO: 3398666 - RNA, 15 nt, Human
ccucucaucucaggu

SEQ ID NO: 3398667 - RNA, 13 nt, Human
ccucuccacacag

SEQ ID NO: 3398668 - RNA, 17 nt, Human
ccucuccacacagugcu

SEQ ID NO: 3398669 - RNA, 15 nt, Human
ccucuccacccuccc

SEQ ID NO: 3398670 - RNA, 22 nt, Human
ccucuccacccucccagaccug

SEQ ID NO: 3398671 - RNA, 13 nt, Human
ccucuccacugcc

SEQ ID NO: 3398672 - RNA, 16 nt, Human
ccucuccacugccuuc

SEQ ID NO: 3398673 - RNA, 18 nt, Human
ccucuccacugccuucga

SEQ ID NO: 3398674 - RNA, 18 nt, Human
ccucuccagccucagccc

SEQ ID NO: 3398675 - RNA, 20 nt, Human
ccucuccagccucagccccc

SEQ ID NO: 3398676 - RNA, 22 nt, Human
ccucuccagccucagcccccug

SEQ ID NO: 3398677 - RNA, 12 nt, Human
ccucuccaggca

SEQ ID NO: 3398678 - RNA, 13 nt, Human
ccucuccaggcac

SEQ ID NO: 3398679 - RNA, 16 nt, Human
ccucuccauaacccca

SEQ ID NO: 3398680 - RNA, 18 nt, Human
ccucuccauaaccccacc

SEQ ID NO: 3398681 - RNA, 15 nt, Human
ccucucccaagucca

SEQ ID NO: 3398682 - RNA, 12 nt, Human
ccucucccagga

SEQ ID NO: 3398683 - RNA, 13 nt, Human
ccucucccaggac

SEQ ID NO: 3398684 - RNA, 19 nt, Human
ccucucccaggcaggggcc

SEQ ID NO: 3398685 - RNA, 12 nt, Human
ccucucccaguu

SEQ ID NO: 3398686 - RNA, 13 nt, Human
ccucucccaguug

SEQ ID NO: 3398687 - RNA, 18 nt, Human
ccucucccaucccccugc

SEQ ID NO: 3398688 - RNA, 19 nt, Human
ccucucccauugucccucu

SEQ ID NO: 3398689 - RNA, 13 nt, Human
ccucuccccaccc

SEQ ID NO: 3398690 - RNA, 20 nt, Human
ccucuccccagcccagagac

SEQ ID NO: 3398691 - RNA, 23 nt, Human
ccucuccccuaccacugucuucu

SEQ ID NO: 3398692 - RNA, 12 nt, Human
ccucuccccuca

SEQ ID NO: 3398693 - RNA, 13 nt, Human
ccucuccccucca

SEQ ID NO: 3398694 - RNA, 16 nt, Human
ccucuccccugccccc

SEQ ID NO: 3398695 - RNA, 22 nt, Human
ccucuccccugcccccugcagg

SEQ ID NO: 3398696 - RNA, 17 nt, Human
ccucucccucaacaagg

SEQ ID NO: 3398697 - RNA, 22 nt, Human
ccucucccucaacaagggagag

SEQ ID NO: 3398698 - RNA, 15 nt, Human
ccucucccuggcccu

SEQ ID NO: 3398699 - RNA, 19 nt, Human
ccucucccuguccccaccc

SEQ ID NO: 3398700 - RNA, 15 nt, Human
ccucucccuucccuc

SEQ ID NO: 3398701 - RNA, 17 nt, Human
ccucucccuucccuccu

SEQ ID NO: 3398702 - RNA, 13 nt, Human
ccucucccuugga

SEQ ID NO: 3398703 - RNA, 22 nt, Human
ccucucccuuggauuguccccg

SEQ ID NO: 3398704 - RNA, 13 nt, Human
ccucuccgagcug

SEQ ID NO: 3398705 - RNA, 18 nt, Human
ccucuccgccccugagcc

SEQ ID NO: 3398706 - RNA, 20 nt, Human
ccucuccgccccugagccca

SEQ ID NO: 3398707 - RNA, 23 nt, Human
ccucuccguuuauuauaaacugu

SEQ ID NO: 3398708 - RNA, 20 nt, Human
ccucuccuacucggcucugc

SEQ ID NO: 3398709 - RNA, 18 nt, Human
ccucuccucgguucaagg

SEQ ID NO: 3398710 - RNA, 11 nt, Human
ccucuccugcc

SEQ ID NO: 3398711 - RNA, 14 nt, Human
ccucuccugccuac

SEQ ID NO: 3398712 - RNA, 13 nt, Human
ccucuccuggagg

SEQ ID NO: 3398713 - RNA, 15 nt, Human
ccucuccuggaggau

SEQ ID NO: 3398714 - RNA, 21 nt, Human
ccucuccugggcagcugccuc

SEQ ID NO: 3398715 - RNA, 13 nt, Human
ccucuccuuccug

SEQ ID NO: 3398716 - RNA, 16 nt, Human
ccucucgagggcaggg

SEQ ID NO: 3398717 - RNA, 23 nt, Human
ccucucgcuccucaaccccuccc

SEQ ID NO: 3398718 - RNA, 23 nt, Human
ccucucgguugaaaccuguauaa

SEQ ID NO: 3398719 - RNA, 23 nt, Human
ccucucguaagauuuccuucuuu

SEQ ID NO: 3398720 - RNA, 16 nt, Human
ccucucuaaccuccuu

SEQ ID NO: 3398721 - RNA, 20 nt, Human
ccucucuacagucucgucuc

SEQ ID NO: 3398722 - RNA, 19 nt, Human
ccucucuauauuucggguc

SEQ ID NO: 3398723 - RNA, 20 nt, Human
ccucucuauccucucuuccu

SEQ ID NO: 3398724 - RNA, 21 nt, Human
ccucucuauccucucuuccuc

SEQ ID NO: 3398725 - RNA, 15 nt, Human
ccucucucacuccuu

SEQ ID NO: 3398726 - RNA, 17 nt, Human
ccucucucacuccuuga

SEQ ID NO: 3398727 - RNA, 12 nt, Human
ccucucucccag

SEQ ID NO: 3398728 - RNA, 17 nt, Human
ccucucucugacucuca

SEQ ID NO: 3398729 - RNA, 12 nt, Human
ccucucucuucu

SEQ ID NO: 3398730 - RNA, 18 nt, Human
ccucucucuucugcucca

SEQ ID NO: 3398731 - RNA, 19 nt, Human
ccucucucuucugcuccac

SEQ ID NO: 3398732 - RNA, 21 nt, Human
ccucucucuucugcuccaccc

SEQ ID NO: 3398733 - RNA, 12 nt, Human
ccucucugcacc

SEQ ID NO: 3398734 - RNA, 22 nt, Human
ccucucugcagacuucccagcu

SEQ ID NO: 3398735 - RNA, 18 nt, Human
ccucucugcaggucccua

SEQ ID NO: 3398736 - RNA, 21 nt, Human
ccucucugcaggucccuaaua

SEQ ID NO: 3398737 - RNA, 22 nt, Human
ccucucugcaggucccuaauaa

SEQ ID NO: 3398738 - RNA, 22 nt, Human
ccucucugccgcaauacaggaa

SEQ ID NO: 3398739 - RNA, 13 nt, Human
ccucucuggccuc

SEQ ID NO: 3398740 - RNA, 17 nt, Human
ccucucuggccucccac

SEQ ID NO: 3398741 - RNA, 10 nt, Human
ccucucuggu

SEQ ID NO: 3398742 - RNA, 11 nt, Human
ccucucuuccu

SEQ ID NO: 3398743 - RNA, 19 nt, Human
ccucucuuccuaucccauc

SEQ ID NO: 3398744 - RNA, 17 nt, Human
ccucucuucucaccuuu

SEQ ID NO: 3398745 - RNA, 17 nt, Human
ccucucuugcacccgcc

SEQ ID NO: 3398746 - RNA, 23 nt, Human
ccucucuugcacccgccucuccc

SEQ ID NO: 3398747 - RNA, 19 nt, Human
ccucucuuuguucucagcu

SEQ ID NO: 3398748 - RNA, 20 nt, Human
ccucugaaaacggcccucuu

SEQ ID NO: 3398749 - RNA, 18 nt, Human
ccucugaaaaguguguau

SEQ ID NO: 3398750 - RNA, 15 nt, Human
ccucugaaacagcug

SEQ ID NO: 3398751 - RNA, 22 nt, Human
ccucugaaacagcugccuuagc

SEQ ID NO: 3398752 - RNA, 23 nt, Human
ccucugaaacagcugccuuagcu

SEQ ID NO: 3398753 - RNA, 19 nt, Human
ccucugaaacccuggacca

SEQ ID NO: 3398754 - RNA, 18 nt, Human
ccucugaaaguuguacau

SEQ ID NO: 3398755 - RNA, 15 nt, Human
ccucugaacuugccu

SEQ ID NO: 3398756 - RNA, 14 nt, Human
ccucugacacacag

SEQ ID NO: 3398757 - RNA, 16 nt, Human
ccucugacacacagcu

SEQ ID NO: 3398758 - RNA, 17 nt, Human
ccucugacacacagcuc

SEQ ID NO: 3398759 - RNA, 19 nt, Human
ccucugacacacagcucug

SEQ ID NO: 3398760 - RNA, 21 nt, Human
ccucugacacacagcucuguc

SEQ ID NO: 3398761 - RNA, 14 nt, Human
ccucugacagcagc

SEQ ID NO: 3398762 - RNA, 15 nt, Human
ccucugacagcagca

SEQ ID NO: 3398763 - RNA, 20 nt, Human
ccucugacagcagcaucucu

SEQ ID NO: 3398764 - RNA, 17 nt, Human
ccucugaccaacaggcu

SEQ ID NO: 3398765 - RNA, 18 nt, Human
ccucugaccaacaggcug

SEQ ID NO: 3398766 - RNA, 22 nt, Human
ccucugaccccuccucacuggc

SEQ ID NO: 3398767 - RNA, 16 nt, Human
ccucugaccugcaggc

SEQ ID NO: 3398768 - RNA, 17 nt, Human
ccucugacucagggcuc

SEQ ID NO: 3398769 - RNA, 21 nt, Human
ccucugacucagggcuccugg

SEQ ID NO: 3398770 - RNA, 21 nt, Human
ccucugacucccaaagagcug

SEQ ID NO: 3398771 - RNA, 22 nt, Human
ccucugacuuaagcugccucaa

SEQ ID NO: 3398772 - RNA, 15 nt, Human
ccucugagacuccag

SEQ ID NO: 3398773 - RNA, 19 nt, Human
ccucugagacuccagaccu

SEQ ID NO: 3398774 - RNA, 12 nt, Human
ccucugagccuu

SEQ ID NO: 3398775 - RNA, 18 nt, Human
ccucugaggccagccugg

SEQ ID NO: 3398776 - RNA, 22 nt, Human
ccucugaggccagccuggccuc

SEQ ID NO: 3398777 - RNA, 13 nt, Human
ccucugaggcuga

SEQ ID NO: 3398778 - RNA, 17 nt, Human
ccucugaggcuguagga

SEQ ID NO: 3398779 - RNA, 21 nt, Human
ccucugagggaaagcccagaa

SEQ ID NO: 3398780 - RNA, 19 nt, Human
ccucugagucaccaucuua

SEQ ID NO: 3398781 - RNA, 17 nt, Human
ccucugcacaagcugca

SEQ ID NO: 3398782 - RNA, 16 nt, Human
ccucugcacccagaac

SEQ ID NO: 3398783 - RNA, 17 nt, Human
ccucugcacuccccugc

SEQ ID NO: 3398784 - RNA, 17 nt, Human
ccucugcagucucuaua

SEQ ID NO: 3398785 - RNA, 17 nt, Human
ccucugcagugccuugg

SEQ ID NO: 3398786 - RNA, 19 nt, Human
ccucugcauccucuggagc

SEQ ID NO: 3398787 - RNA, 13 nt, Human
ccucugccaccuc

SEQ ID NO: 3398788 - RNA, 16 nt, Human
ccucugccaccucccc

SEQ ID NO: 3398789 - RNA, 23 nt, Human
ccucugccagaagauccccucag

SEQ ID NO: 3398790 - RNA, 13 nt, Human
ccucugcccacuc

SEQ ID NO: 3398791 - RNA, 17 nt, Human
ccucugcccacucccug

SEQ ID NO: 3398792 - RNA, 20 nt, Human
ccucugcccacucccugcaa

SEQ ID NO: 3398793 - RNA, 11 nt, Human
ccucugcccag

SEQ ID NO: 3398794 - RNA, 14 nt, Human
ccucugcccagcuu

SEQ ID NO: 3398795 - RNA, 20 nt, Human
ccucugcccagcuugggccc

SEQ ID NO: 3398796 - RNA, 20 nt, Human
ccucugccccucccccagcc

SEQ ID NO: 3398797 - RNA, 22 nt, Human
ccucugcccgggagcucaggaa

SEQ ID NO: 3398798 - RNA, 13 nt, Human
ccucugcccugcg

SEQ ID NO: 3398799 - RNA, 12 nt, Human
ccucugccggcu

SEQ ID NO: 3398800 - RNA, 21 nt, Human
ccucugccucugacacacagc

SEQ ID NO: 3398801 - RNA, 19 nt, Human
ccucugccugaaccuucca

SEQ ID NO: 3398802 - RNA, 21 nt, Human
ccucugccugaaccuuccauc

SEQ ID NO: 3398803 - RNA, 11 nt, Human
ccucugccugc

SEQ ID NO: 3398804 - RNA, 12 nt, Human
ccucugccugcc

SEQ ID NO: 3398805 - RNA, 15 nt, Human
ccucugccugucccu

SEQ ID NO: 3398806 - RNA, 16 nt, Human
ccucugccugucccuc

SEQ ID NO: 3398807 - RNA, 17 nt, Human
ccucugccugucccucu

SEQ ID NO: 3398808 - RNA, 22 nt, Human
ccucugccugucccucucaggc

SEQ ID NO: 3398809 - RNA, 20 nt, Human
ccucugccugugcacggcca

SEQ ID NO: 3398810 - RNA, 18 nt, Human
ccucugccuuagaggagc

SEQ ID NO: 3398811 - RNA, 13 nt, Human
ccucugcggaccc

SEQ ID NO: 3398812 - RNA, 16 nt, Human
ccucugcggaccccag

SEQ ID NO: 3398813 - RNA, 17 nt, Human
ccucugcggaccccagc

SEQ ID NO: 3398814 - RNA, 18 nt, Human
ccucugcucaccgcccau

SEQ ID NO: 3398815 - RNA, 15 nt, Human
ccucugcucagccaa

SEQ ID NO: 3398816 - RNA, 14 nt, Human
ccucugcugcuggc

SEQ ID NO: 3398817 - RNA, 17 nt, Human
ccucugcugcuggcugg

SEQ ID NO: 3398818 - RNA, 19 nt, Human
ccucugcugcugucccucc

SEQ ID NO: 3398819 - RNA, 19 nt, Human
ccucugcuggccgggcaca

SEQ ID NO: 3398820 - RNA, 15 nt, Human
ccucugcuucucacg

SEQ ID NO: 3398821 - RNA, 20 nt, Human
ccucugcuugccaucccucc

SEQ ID NO: 3398822 - RNA, 21 nt, Human
ccucugcuugccaucccuccc

SEQ ID NO: 3398823 - RNA, 22 nt, Human
ccucugcuuucuccuuuaauug

SEQ ID NO: 3398824 - RNA, 14 nt, Human
ccucuggacuggcu

SEQ ID NO: 3398825 - RNA, 16 nt, Human
ccucuggacuggcuag

SEQ ID NO: 3398826 - RNA, 16 nt, Human
ccucuggagccagccg

SEQ ID NO: 3398827 - RNA, 17 nt, Human
ccucuggagcccuaacc

SEQ ID NO: 3398828 - RNA, 15 nt, Human
ccucuggaggccucu

SEQ ID NO: 3398829 - RNA, 18 nt, Human
ccucuggaggccucuggg

SEQ ID NO: 3398830 - RNA, 22 nt, Human
ccucuggagggguguggcuccu

SEQ ID NO: 3398831 - RNA, 13 nt, Human
ccucuggaguggc

SEQ ID NO: 3398832 - RNA, 14 nt, Human
ccucuggaguggcc

SEQ ID NO: 3398833 - RNA, 15 nt, Human
ccucuggaguggcca

SEQ ID NO: 3398834 - RNA, 21 nt, Human
ccucuggauggcaccagaggc

SEQ ID NO: 3398835 - RNA, 21 nt, Human
ccucuggcauuagaauuauuu

SEQ ID NO: 3398836 - RNA, 12 nt, Human
ccucuggcccug

SEQ ID NO: 3398837 - RNA, 13 nt, Human
ccucuggcccugc

SEQ ID NO: 3398838 - RNA, 18 nt, Human
ccucuggcccugccuucu

SEQ ID NO: 3398839 - RNA, 23 nt, Human
ccucuggcuagaggccagcccca

SEQ ID NO: 3398840 - RNA, 17 nt, Human
ccucuggcuccagcugg

SEQ ID NO: 3398841 - RNA, 23 nt, Human
ccucuggcuggcuaacuggaagc

SEQ ID NO: 3398842 - RNA, 22 nt, Human
ccucuggcuugggcagggucug

SEQ ID NO: 3398843 - RNA, 23 nt, Human
ccucugggaaccucccagagguc

SEQ ID NO: 3398844 - RNA, 17 nt, Human
ccucugggccuccucua

SEQ ID NO: 3398845 - RNA, 10 nt, Human
ccucugggcu

SEQ ID NO: 3398846 - RNA, 12 nt, Human
ccucugggcucu

SEQ ID NO: 3398847 - RNA, 18 nt, Human
ccucuggggcucuagggu

SEQ ID NO: 3398848 - RNA, 20 nt, Human
ccucuggucgcuccugccca

SEQ ID NO: 3398849 - RNA, 16 nt, Human
ccucuggucugggugc

SEQ ID NO: 3398850 - RNA, 19 nt, Human
ccucugguucuucauuuau

SEQ ID NO: 3398851 - RNA, 24 nt, Human
ccucugguuugccgguggugcagg

SEQ ID NO: 3398852 - RNA, 18 nt, Human
ccucugguuuggggcgag

SEQ ID NO: 3398853 - RNA, 16 nt, Human
ccucuguacagagccc

SEQ ID NO: 3398854 - RNA, 17 nt, Human
ccucugucacugcaggc

SEQ ID NO: 3398855 - RNA, 18 nt, Human
ccucugucaggccuucag

SEQ ID NO: 3398856 - RNA, 14 nt, Human
ccucugucauuugu

SEQ ID NO: 3398857 - RNA, 15 nt, Human
ccucugucauuuguu

SEQ ID NO: 3398858 - RNA, 19 nt, Human
ccucuguccaggcacugag

SEQ ID NO: 3398859 - RNA, 20 nt, Human
ccucuguccaggcacugaga

SEQ ID NO: 3398860 - RNA, 21 nt, Human
ccucuguccaggcacugagau

SEQ ID NO: 3398861 - RNA, 15 nt, Human
ccucuguccagggcc

SEQ ID NO: 3398862 - RNA, 20 nt, Human
ccucuguccagggcccugag

SEQ ID NO: 3398863 - RNA, 14 nt, Human
ccucuguccccuuc

SEQ ID NO: 3398864 - RNA, 18 nt, Human
ccucuguccccuucucuc

SEQ ID NO: 3398865 - RNA, 22 nt, Human
ccucuguccccuucucucaucu

SEQ ID NO: 3398866 - RNA, 22 nt, Human
ccucuguccugacuucaggggc

SEQ ID NO: 3398867 - RNA, 17 nt, Human
ccucugucuagcaugcc

SEQ ID NO: 3398868 - RNA, 12 nt, Human
ccucugucucau

SEQ ID NO: 3398869 - RNA, 14 nt, Human
ccucugucucaucc

SEQ ID NO: 3398870 - RNA, 24 nt, Human
ccucugucucauccuccuggaacc

SEQ ID NO: 3398871 - RNA, 23 nt, Human
ccucugucucgagcgcccugcag

SEQ ID NO: 3398872 - RNA, 14 nt, Human
ccucugucugcccu

SEQ ID NO: 3398873 - RNA, 15 nt, Human
ccucugucuucugga

SEQ ID NO: 3398874 - RNA, 18 nt, Human
ccucugugaccaaugucu

SEQ ID NO: 3398875 - RNA, 21 nt, Human
ccucugugaccaaugucuuga

SEQ ID NO: 3398876 - RNA, 16 nt, Human
ccucugugaccucagg

SEQ ID NO: 3398877 - RNA, 23 nt, Human
ccucugugaggaaagcacacagu

SEQ ID NO: 3398878 - RNA, 21 nt, Human
ccucugugccuucuuuugauu

SEQ ID NO: 3398879 - RNA, 16 nt, Human
ccucuguggugucugc

SEQ ID NO: 3398880 - RNA, 17 nt, Human
ccucuguggugucugcc

SEQ ID NO: 3398881 - RNA, 18 nt, Human
ccucuguguauuugcuuu

SEQ ID NO: 3398882 - RNA, 18 nt, Human
ccucugugucacuggcug

SEQ ID NO: 3398883 - RNA, 20 nt, Human
ccucuguguccuucccugca

SEQ ID NO: 3398884 - RNA, 22 nt, Human
ccucuguucaguguaaauaguu

SEQ ID NO: 3398885 - RNA, 16 nt, Human
ccucuguuugacaaac

SEQ ID NO: 3398886 - RNA, 17 nt, Human
ccucuuaaaaaauaaaa

SEQ ID NO: 3398887 - RNA, 20 nt, Human
ccucuuaaagcugccuguag

SEQ ID NO: 3398888 - RNA, 17 nt, Human
ccucuuaaauaaaccuu

SEQ ID NO: 3398889 - RNA, 18 nt, Human
ccucuuaaauaaaccuuu

SEQ ID NO: 3398890 - RNA, 20 nt, Human
ccucuuaccaguauuuaacu

SEQ ID NO: 3398891 - RNA, 14 nt, Human
ccucuuagaaaaac

SEQ ID NO: 3398892 - RNA, 17 nt, Human
ccucuuagaaaaaccac

SEQ ID NO: 3398893 - RNA, 21 nt, Human
ccucuuagaagaauauuguau

SEQ ID NO: 3398894 - RNA, 23 nt, Human
ccucuuagaagaauauuguauug

SEQ ID NO: 3398895 - RNA, 16 nt, Human
ccucuuaugggcuggg

SEQ ID NO: 3398896 - RNA, 17 nt, Human
ccucuucaccccccacu

SEQ ID NO: 3398897 - RNA, 14 nt, Human
ccucuucacucccc

SEQ ID NO: 3398898 - RNA, 18 nt, Human
ccucuucauggauggggg

SEQ ID NO: 3398899 - RNA, 21 nt, Human
ccucuuccccuugcccuugcc

SEQ ID NO: 3398900 - RNA, 20 nt, Human
ccucuuccggagauguagca

SEQ ID NO: 3398901 - RNA, 20 nt, Human
ccucuuccuacccugccucc

SEQ ID NO: 3398902 - RNA, 15 nt, Human
ccucuuccuacuggu

SEQ ID NO: 3398903 - RNA, 16 nt, Human
ccucuuccucccucau

SEQ ID NO: 3398904 - RNA, 13 nt, Human
ccucuuccuccug

SEQ ID NO: 3398905 - RNA, 16 nt, Human
ccucuuccuccugaca

SEQ ID NO: 3398906 - RNA, 14 nt, Human
ccucuuccucugag

SEQ ID NO: 3398907 - RNA, 15 nt, Human
ccucuuccucugagg

SEQ ID NO: 3398908 - RNA, 15 nt, Human
ccucuuccucuugac

SEQ ID NO: 3398909 - RNA, 16 nt, Human
ccucuuccucuugacc

SEQ ID NO: 3398910 - RNA, 17 nt, Human
ccucuuccucuugaccc

SEQ ID NO: 3398911 - RNA, 18 nt, Human
ccugcaaaaugagacccu

SEQ ID NO: 3398912 - RNA, 22 nt, Human
ccugcaaaauuugaugccagga

SEQ ID NO: 3398913 - RNA, 14 nt, Human
ccugcaaaauuuua

SEQ ID NO: 3398914 - RNA, 18 nt, Human
ccugcaaacagaacaggg

SEQ ID NO: 3398915 - RNA, 21 nt, Human
ccugcaaacagaacaggguca

SEQ ID NO: 3398916 - RNA, 15 nt, Human
ccugcaaacgcugcc

SEQ ID NO: 3398917 - RNA, 16 nt, Human
ccugcaaacgcugccu

SEQ ID NO: 3398918 - RNA, 20 nt, Human
ccugcaaacugggaaccccu

SEQ ID NO: 3398919 - RNA, 17 nt, Human
ccugcaaagcccagcuu

SEQ ID NO: 3398920 - RNA, 16 nt, Human
ccugcaaccugauugu

SEQ ID NO: 3398921 - RNA, 17 nt, Human
ccugcaagggcucccca

SEQ ID NO: 3398922 - RNA, 13 nt, Human
ccugcaaucccag

SEQ ID NO: 3398923 - RNA, 19 nt, Human
ccugcaauguaucccuucu

SEQ ID NO: 3398924 - RNA, 19 nt, Human
ccugcaauuucauaugcug

SEQ ID NO: 3398925 - RNA, 23 nt, Human
ccugcacaaagcccuuccauguc

SEQ ID NO: 3398926 - RNA, 20 nt, Human
ccugcacaauaaaaauguuu

SEQ ID NO: 3398927 - RNA, 10 nt, Human
ccugcacaca

SEQ ID NO: 3398928 - RNA, 11 nt, Human
ccugcacacaa

SEQ ID NO: 3398929 - RNA, 21 nt, Human
ccugcacacgcuccuuccucu

SEQ ID NO: 3398930 - RNA, 17 nt, Human
ccugcacagcaggcugc

SEQ ID NO: 3398931 - RNA, 20 nt, Human
ccugcacagcaggcugccag

SEQ ID NO: 3398932 - RNA, 17 nt, Human
ccugcacagugacuucu

SEQ ID NO: 3398933 - RNA, 18 nt, Human
ccugcacagugacuucug

SEQ ID NO: 3398934 - RNA, 22 nt, Human
ccugcacagugacuucugagau

SEQ ID NO: 3398935 - RNA, 19 nt, Human
ccugcaccaugcugcuggg

SEQ ID NO: 3398936 - RNA, 21 nt, Human
ccugcacggugaauggcuuug

SEQ ID NO: 3398937 - RNA, 20 nt, Human
ccugcacugacccacagccu

SEQ ID NO: 3398938 - RNA, 15 nt, Human
ccugcacugacucug

SEQ ID NO: 3398939 - RNA, 15 nt, Human
ccugcacuggagucc

SEQ ID NO: 3398940 - RNA, 23 nt, Human
ccugcacuggaguccagucucuu

SEQ ID NO: 3398941 - RNA, 14 nt, Human
ccugcacuggggag

SEQ ID NO: 3398942 - RNA, 12 nt, Human
ccugcacuguaa

SEQ ID NO: 3398943 - RNA, 13 nt, Human
ccugcacuguccu

SEQ ID NO: 3398944 - RNA, 15 nt, Human
ccugcacuguccugc

SEQ ID NO: 3398945 - RNA, 17 nt, Human
ccugcacuguccugcuc

SEQ ID NO: 3398946 - RNA, 23 nt, Human
ccugcacuguccugcuccacagu

SEQ ID NO: 3398947 - RNA, 17 nt, Human
ccugcacuuacuugcuu

SEQ ID NO: 3398948 - RNA, 19 nt, Human
ccugcacuugcagacucua

SEQ ID NO: 3398949 - RNA, 18 nt, Human
ccugcacuugggggcuca

SEQ ID NO: 3398950 - RNA, 20 nt, Human
ccugcacuugggggcucagc

SEQ ID NO: 3398951 - RNA, 23 nt, Human
ccugcagaaccggagagccagcu

SEQ ID NO: 3398952 - RNA, 22 nt, Human
ccugcagaaguaagccucauca

SEQ ID NO: 3398953 - RNA, 15 nt, Human
ccugcagacccugcc

SEQ ID NO: 3398954 - RNA, 17 nt, Human
ccugcagacccugcccu

SEQ ID NO: 3398955 - RNA, 12 nt, Human
ccugcagagggc

SEQ ID NO: 3398956 - RNA, 14 nt, Human
ccugcagagggcac

SEQ ID NO: 3398957 - RNA, 20 nt, Human
ccugcagaggucugugcuga

SEQ ID NO: 3398958 - RNA, 21 nt, Human
ccugcagaugccacccuagcc

SEQ ID NO: 3398959 - RNA, 18 nt, Human
ccugcagcaaacacucca

SEQ ID NO: 3398960 - RNA, 14 nt, Human
ccugcagcagagcc

SEQ ID NO: 3398961 - RNA, 15 nt, Human
ccugcagcagagccu

SEQ ID NO: 3398962 - RNA, 16 nt, Human
ccugcagcaugguccc

SEQ ID NO: 3398963 - RNA, 13 nt, Human
ccugcagcccugg

SEQ ID NO: 3398964 - RNA, 17 nt, Human
ccugcagcccuggccca

SEQ ID NO: 3398965 - RNA, 12 nt, Human
ccugcagccucc

SEQ ID NO: 3398966 - RNA, 14 nt, Human
ccugcagccucccu

SEQ ID NO: 3398967 - RNA, 15 nt, Human
ccugcagccuccucc

SEQ ID NO: 3398968 - RNA, 19 nt, Human
ccugcagccuccuccugac

SEQ ID NO: 3398969 - RNA, 19 nt, Human
ccugcagccugcaggaccu

SEQ ID NO: 3398970 - RNA, 12 nt, Human
ccugcagccugg

SEQ ID NO: 3398971 - RNA, 10 nt, Human
ccugcagcuc

SEQ ID NO: 3398972 - RNA, 17 nt, Human
ccugcagcuuguagcca

SEQ ID NO: 3398973 - RNA, 19 nt, Human
ccugcagcuuguagccagc

SEQ ID NO: 3398974 - RNA, 22 nt, Human
ccugcaggaaggagcugccugg

SEQ ID NO: 3398975 - RNA, 17 nt, Human
ccugcaggaccucgugc

SEQ ID NO: 3398976 - RNA, 17 nt, Human
ccugcaggaccugccug

SEQ ID NO: 3398977 - RNA, 18 nt, Human
ccugcaggaccugccugu

SEQ ID NO: 3398978 - RNA, 15 nt, Human
ccugcaggcagccag

SEQ ID NO: 3398979 - RNA, 19 nt, Human
ccugcaggcagccaggcca

SEQ ID NO: 3398980 - RNA, 23 nt, Human
ccugcaggcagccaggccacaag

SEQ ID NO: 3398981 - RNA, 22 nt, Human
ccugcaggcaggaacaaacagg

SEQ ID NO: 3398982 - RNA, 23 nt, Human
ccugcaggcaggaacaaacaggg

SEQ ID NO: 3398983 - RNA, 16 nt, Human
ccugcaggccaagagc

SEQ ID NO: 3398984 - RNA, 16 nt, Human
ccugcaggccaggcca

SEQ ID NO: 3398985 - RNA, 15 nt, Human
ccugcagggccaagc

SEQ ID NO: 3398986 - RNA, 19 nt, Human
ccugcagggccauggcuca

SEQ ID NO: 3398987 - RNA, 20 nt, Human
ccugcagggccauggcucag

SEQ ID NO: 3398988 - RNA, 13 nt, Human
ccugcagggcugc

SEQ ID NO: 3398989 - RNA, 21 nt, Human
ccugcaggguggugcugggac

SEQ ID NO: 3398990 - RNA, 17 nt, Human
ccugcaggugcugcugc

SEQ ID NO: 3398991 - RNA, 16 nt, Human
ccugcagguugggcca

SEQ ID NO: 3398992 - RNA, 15 nt, Human
ccugcagucacagcu

SEQ ID NO: 3398993 - RNA, 22 nt, Human
ccugcagucuggcugagcccug

SEQ ID NO: 3398994 - RNA, 19 nt, Human
ccugcaguguucgcuuggc

SEQ ID NO: 3398995 - RNA, 20 nt, Human
ccugcaguguucgcuuggcu

SEQ ID NO: 3398996 - RNA, 23 nt, Human
ccugcaucccaggaugcugggug

SEQ ID NO: 3398997 - RNA, 14 nt, Human
ccugcaucuggggc

SEQ ID NO: 3398998 - RNA, 19 nt, Human
ccugcauggcauccuccag

SEQ ID NO: 3398999 - RNA, 22 nt, Human
ccugcauguaaacacgccugca

SEQ ID NO: 3399000 - RNA, 23 nt, Human
ccugcauguaaacacgccugcaa

SEQ ID NO: 3399001 - RNA, 16 nt, Human
ccugcauucacccaga

SEQ ID NO: 3399002 - RNA, 19 nt, Human
ccugcauucacccagacag

SEQ ID NO: 3399003 - RNA, 12 nt, Human
ccugcauucuuu

SEQ ID NO: 3399004 - RNA, 18 nt, Human
ccugcauuggaacuggag

SEQ ID NO: 3399005 - RNA, 19 nt, Human
ccugcauuggaacuggagg

SEQ ID NO: 3399006 - RNA, 21 nt, Human
ccugcauuggaacuggaggca

SEQ ID NO: 3399007 - RNA, 13 nt, Human
ccugcauuuccuc

SEQ ID NO: 3399008 - RNA, 16 nt, Human
ccugcauuucugaguu

SEQ ID NO: 3399009 - RNA, 23 nt, Human
ccugcauuugugaaaugauggug

SEQ ID NO: 3399010 - RNA, 19 nt, Human
ccugccacauuagaacuuc

SEQ ID NO: 3399011 - RNA, 19 nt, Human
ccugccaccacgcccggcu

SEQ ID NO: 3399012 - RNA, 16 nt, Human
ccugccaccacuauaa

SEQ ID NO: 3399013 - RNA, 13 nt, Human
ccugccaccaggc

SEQ ID NO: 3399014 - RNA, 14 nt, Human
ccugccaccaggcc

SEQ ID NO: 3399015 - RNA, 18 nt, Human
ccugccacccagccccag

SEQ ID NO: 3399016 - RNA, 15 nt, Human
ccugccacccugggc

SEQ ID NO: 3399017 - RNA, 21 nt, Human
ccugccacccugggccuggca

SEQ ID NO: 3399018 - RNA, 22 nt, Human
ccugccacccuggggagaaagu

SEQ ID NO: 3399019 - RNA, 13 nt, Human
ccugccacccugu

SEQ ID NO: 3399020 - RNA, 16 nt, Human
ccugccacccuguagc

SEQ ID NO: 3399021 - RNA, 14 nt, Human
ccugccaccucccu

SEQ ID NO: 3399022 - RNA, 19 nt, Human
ccugccaccuccugccuca

SEQ ID NO: 3399023 - RNA, 15 nt, Human
ccugccaccugucug

SEQ ID NO: 3399024 - RNA, 21 nt, Human
ccugccacgaauuucugugcc

SEQ ID NO: 3399025 - RNA, 16 nt, Human
ccugccacucacacag

SEQ ID NO: 3399026 - RNA, 20 nt, Human
ccugccacucacacagccag

SEQ ID NO: 3399027 - RNA, 16 nt, Human
ccugccacucacuagg

SEQ ID NO: 3399028 - RNA, 18 nt, Human
ccugccacucacuaggcc

SEQ ID NO: 3399029 - RNA, 21 nt, Human
ccugccacucacuaggccccc

SEQ ID NO: 3399030 - RNA, 22 nt, Human
ccugccacucacuaggccccca

SEQ ID NO: 3399031 - RNA, 13 nt, Human
ccugccagccugg

SEQ ID NO: 3399032 - RNA, 16 nt, Human
ccugccagccuggcuu

SEQ ID NO: 3399033 - RNA, 13 nt, Human
ccugccagcugca

SEQ ID NO: 3399034 - RNA, 13 nt, Human
ccugccaggaagc

SEQ ID NO: 3399035 - RNA, 14 nt, Human
ccugccaggcacag

SEQ ID NO: 3399036 - RNA, 13 nt, Human
ccugccaggcagg

SEQ ID NO: 3399037 - RNA, 12 nt, Human
ccugccaggcau

SEQ ID NO: 3399038 - RNA, 16 nt, Human
ccugccaggcauggug

SEQ ID NO: 3399039 - RNA, 11 nt, Human
ccugccaggga

SEQ ID NO: 3399040 - RNA, 15 nt, Human
ccugccagggacaga

SEQ ID NO: 3399041 - RNA, 12 nt, Human
ccugccaguccu

SEQ ID NO: 3399042 - RNA, 14 nt, Human
ccugccaguccuag

SEQ ID NO: 3399043 - RNA, 13 nt, Human
ccugccagugccu

SEQ ID NO: 3399044 - RNA, 17 nt, Human
ccugccagugccuuacc

SEQ ID NO: 3399045 - RNA, 14 nt, Human
ccugccaucuuccc

SEQ ID NO: 3399046 - RNA, 17 nt, Human
ccugccaucuucccagc

SEQ ID NO: 3399047 - RNA, 15 nt, Human
ccugccaugccagga

SEQ ID NO: 3399048 - RNA, 23 nt, Human
ccugccauguaccuccccugccu

SEQ ID NO: 3399049 - RNA, 17 nt, Human
ccugccauuugcacccu

SEQ ID NO: 3399050 - RNA, 18 nt, Human
ccugcccacaccuccugg

SEQ ID NO: 3399051 - RNA, 12 nt, Human
ccugcccacccg

SEQ ID NO: 3399052 - RNA, 13 nt, Human
ccugcccaccugc

SEQ ID NO: 3399053 - RNA, 15 nt, Human
ccugcccaccugccu

SEQ ID NO: 3399054 - RNA, 16 nt, Human
ccugcccaccugccug

SEQ ID NO: 3399055 - RNA, 17 nt, Human
ccugcccaccugccugg

SEQ ID NO: 3399056 - RNA, 15 nt, Human
ccuugcgcuguugcg

SEQ ID NO: 3399057 - RNA, 21 nt, Human
ccuugcgcuuuugcuggucac

SEQ ID NO: 3399058 - RNA, 19 nt, Human
ccuugcggcuccucaggga

SEQ ID NO: 3399059 - RNA, 14 nt, Human
ccuugcuaccucaa

SEQ ID NO: 3399060 - RNA, 13 nt, Human
ccuugcucucccu

SEQ ID NO: 3399061 - RNA, 13 nt, Human
ccuugcucugcac

SEQ ID NO: 3399062 - RNA, 17 nt, Human
ccuugcuggaaaaccca

SEQ ID NO: 3399063 - RNA, 17 nt, Human
ccuugcuggccccagcc

SEQ ID NO: 3399064 - RNA, 20 nt, Human
ccuugcuggccccagcccug

SEQ ID NO: 3399065 - RNA, 20 nt, Human
ccuugcuguaugcugaucau

SEQ ID NO: 3399066 - RNA, 16 nt, Human
ccuugcuguccuaggc

SEQ ID NO: 3399067 - RNA, 16 nt, Human
ccuugcuguccugauc

SEQ ID NO: 3399068 - RNA, 12 nt, Human
ccuugcugugaa

SEQ ID NO: 3399069 - RNA, 19 nt, Human
ccuugcuguuuguccugag

SEQ ID NO: 3399070 - RNA, 21 nt, Human
ccuugcuguuuguccugagau

SEQ ID NO: 3399071 - RNA, 16 nt, Human
ccuugcuuaccucuca

SEQ ID NO: 3399072 - RNA, 17 nt, Human
ccuugcuuaccucucag

SEQ ID NO: 3399073 - RNA, 18 nt, Human
ccuugcuuaugacaucac

SEQ ID NO: 3399074 - RNA, 22 nt, Human
ccuugcuugcugccuucuggau

SEQ ID NO: 3399075 - RNA, 22 nt, Human
ccuugcuuggcugcuuggccuu

SEQ ID NO: 3399076 - RNA, 14 nt, Human
ccuugcuuguuaca

SEQ ID NO: 3399077 - RNA, 13 nt, Human
ccuugcuuuugcu

SEQ ID NO: 3399078 - RNA, 16 nt, Human
ccuugcuuuugcuucu

SEQ ID NO: 3399079 - RNA, 17 nt, Human
ccuugcuuuugcuucua

SEQ ID NO: 3399080 - RNA, 20 nt, Human
ccuuggaaaccugcccugcc

SEQ ID NO: 3399081 - RNA, 23 nt, Human
ccuuggaaaccugcccugccuga

SEQ ID NO: 3399082 - RNA, 16 nt, Human
ccuuggacauccuccu

SEQ ID NO: 3399083 - RNA, 16 nt, Human
ccuuggacauuuuaug

SEQ ID NO: 3399084 - RNA, 21 nt, Human
ccuuggacauuuuaugucuuu

SEQ ID NO: 3399085 - RNA, 15 nt, Human
ccuuggacucauuuu

SEQ ID NO: 3399086 - RNA, 16 nt, Human
ccuuggagagacacag

SEQ ID NO: 3399087 - RNA, 17 nt, Human
ccuuggagagacacagc

SEQ ID NO: 3399088 - RNA, 18 nt, Human
ccuuggaggcugucuucu

SEQ ID NO: 3399089 - RNA, 23 nt, Human
ccuuggagggucccaagcugggc

SEQ ID NO: 3399090 - RNA, 18 nt, Human
ccuuggauaaugcuguug

SEQ ID NO: 3399091 - RNA, 23 nt, Human
ccuuggauaaugcuguugccuca

SEQ ID NO: 3399092 - RNA, 20 nt, Human
ccuuggcaccaaagaugcag

SEQ ID NO: 3399093 - RNA, 23 nt, Human
ccuuggcaccagacacccaggac

SEQ ID NO: 3399094 - RNA, 17 nt, Human
ccuuggcaugccuucca

SEQ ID NO: 3399095 - RNA, 15 nt, Human
ccuuggccaugcaga

SEQ ID NO: 3399096 - RNA, 23 nt, Human
ccuuggccuagcccacccugcug

SEQ ID NO: 3399097 - RNA, 14 nt, Human
ccuuggccucagaa

SEQ ID NO: 3399098 - RNA, 16 nt, Human
ccuuggccucuuuccu

SEQ ID NO: 3399099 - RNA, 12 nt, Human
ccuuggccugga

SEQ ID NO: 3399100 - RNA, 14 nt, Human
ccuuggccuggagc

SEQ ID NO: 3399101 - RNA, 21 nt, Human
ccuuggccuggagcacaaaga

SEQ ID NO: 3399102 - RNA, 22 nt, Human
ccuuggccugucucauccccag

SEQ ID NO: 3399103 - RNA, 15 nt, Human
ccuuggcucagacau

SEQ ID NO: 3399104 - RNA, 19 nt, Human
ccuuggcucccauucacuc

SEQ ID NO: 3399105 - RNA, 16 nt, Human
ccuuggcugcagggag

SEQ ID NO: 3399106 - RNA, 13 nt, Human
ccuuggcuggugc

SEQ ID NO: 3399107 - RNA, 14 nt, Human
ccuuggcuggugca

SEQ ID NO: 3399108 - RNA, 17 nt, Human
ccuuggcuuaccugacc

SEQ ID NO: 3399109 - RNA, 20 nt, Human
ccuuggcuucaggggagucc

SEQ ID NO: 3399110 - RNA, 16 nt, Human
ccuuggcuugcccacg

SEQ ID NO: 3399111 - RNA, 18 nt, Human
ccuuggcuugcccacgug

SEQ ID NO: 3399112 - RNA, 17 nt, Human
ccuugggaggaagcaga

SEQ ID NO: 3399113 - RNA, 19 nt, Human
ccuugggaggaagcagaau

SEQ ID NO: 3399114 - RNA, 21 nt, Human
ccuugggaggaagcagaauaa

SEQ ID NO: 3399115 - RNA, 22 nt, Human
ccuugggaggaagcagaauaaa

SEQ ID NO: 3399116 - RNA, 19 nt, Human
ccuugggaggccccacugg

SEQ ID NO: 3399117 - RNA, 17 nt, Human
ccuugggcccucugguu

SEQ ID NO: 3399118 - RNA, 14 nt, Human
ccuugggcccuuug

SEQ ID NO: 3399119 - RNA, 17 nt, Human
ccuugggcggcugagag

SEQ ID NO: 3399120 - RNA, 23 nt, Human
ccuuggggaauuuccucuauuga

SEQ ID NO: 3399121 - RNA, 14 nt, Human
ccuuggggagcagg

SEQ ID NO: 3399122 - RNA, 18 nt, Human
ccuuggggauucuuccau

SEQ ID NO: 3399123 - RNA, 22 nt, Human
ccuuggggauucuuccaucuga

SEQ ID NO: 3399124 - RNA, 15 nt, Human
ccuuggggcaggcag

SEQ ID NO: 3399125 - RNA, 20 nt, Human
ccuuggggguccuccuccag

SEQ ID NO: 3399126 - RNA, 14 nt, Human
ccuuggucuaacuu

SEQ ID NO: 3399127 - RNA, 23 nt, Human
ccuuggucuaacuuuugugugaa

SEQ ID NO: 3399128 - RNA, 17 nt, Human
ccuuggucuuuguaucu

SEQ ID NO: 3399129 - RNA, 17 nt, Human
ccuuggugccucuugua

SEQ ID NO: 3399130 - RNA, 16 nt, Human
ccuugguguccaccug

SEQ ID NO: 3399131 - RNA, 17 nt, Human
ccuugguguccaccugg

SEQ ID NO: 3399132 - RNA, 19 nt, Human
ccuuggugucgggcaugac

SEQ ID NO: 3399133 - RNA, 20 nt, Human
ccuuggugucgggcaugaca

SEQ ID NO: 3399134 - RNA, 22 nt, Human
ccuuggugucgggcaugacacg

SEQ ID NO: 3399135 - RNA, 21 nt, Human
ccuugguuaggcauuguggga

SEQ ID NO: 3399136 - RNA, 12 nt, Human
ccuugguuccug

SEQ ID NO: 3399137 - RNA, 17 nt, Human
ccuugguuccuggggca

SEQ ID NO: 3399138 - RNA, 22 nt, Human
ccuugguucuugaggggaccag

SEQ ID NO: 3399139 - RNA, 14 nt, Human
ccuuguccacccac

SEQ ID NO: 3399140 - RNA, 16 nt, Human
ccuuguccacccaccu

SEQ ID NO: 3399141 - RNA, 15 nt, Human
ccuuguccccacacu

SEQ ID NO: 3399142 - RNA, 14 nt, Human
ccuuguccccauga

SEQ ID NO: 3399143 - RNA, 15 nt, Human
ccuugucggccccac

SEQ ID NO: 3399144 - RNA, 19 nt, Human
ccuugucuccuacuccuga

SEQ ID NO: 3399145 - RNA, 19 nt, Human
ccuugucuuauucccuucc

SEQ ID NO: 3399146 - RNA, 17 nt, Human
ccuugugaccuucucua

SEQ ID NO: 3399147 - RNA, 22 nt, Human
ccuugugaugucauacagagaa

SEQ ID NO: 3399148 - RNA, 23 nt, Human
ccuugugauguggcaauaaauuu

SEQ ID NO: 3399149 - RNA, 16 nt, Human
ccuugugccuggcuca

SEQ ID NO: 3399150 - RNA, 13 nt, Human
ccuugugccuggg

SEQ ID NO: 3399151 - RNA, 16 nt, Human
ccuuguggcagaggau

SEQ ID NO: 3399152 - RNA, 12 nt, Human
ccuuguggcuuc

SEQ ID NO: 3399153 - RNA, 15 nt, Human
ccuugugggccuggg

SEQ ID NO: 3399154 - RNA, 15 nt, Human
ccuuguguauauuug

SEQ ID NO: 3399155 - RNA, 15 nt, Human
ccuuguuacuucuga

SEQ ID NO: 3399156 - RNA, 18 nt, Human
ccuuguuacuucugaggu

SEQ ID NO: 3399157 - RNA, 15 nt, Human
ccuuguucacacucu

SEQ ID NO: 3399158 - RNA, 13 nt, Human
ccuuguuccaguu

SEQ ID NO: 3399159 - RNA, 11 nt, Human
ccuuguucugu

SEQ ID NO: 3399160 - RNA, 19 nt, Human
ccuuguuggagccugcagg

SEQ ID NO: 3399161 - RNA, 17 nt, Human
ccuuguuguuucuugcc

SEQ ID NO: 3399162 - RNA, 13 nt, Human
ccuuguuuaaugg

SEQ ID NO: 3399163 - RNA, 22 nt, Human
ccuuguuuaucagauacaucac

SEQ ID NO: 3399164 - RNA, 16 nt, Human
ccuuguuuggggcagg

SEQ ID NO: 3399165 - RNA, 17 nt, Human
ccuuguuuggggcagga

SEQ ID NO: 3399166 - RNA, 20 nt, Human
ccuuguuuugugacauuuuu

SEQ ID NO: 3399167 - RNA, 18 nt, Human
ccuuuaaagaaacauggu

SEQ ID NO: 3399168 - RNA, 19 nt, Human
ccuuuaacugacaagccau

SEQ ID NO: 3399169 - RNA, 14 nt, Human
ccuuuaccccaucc

SEQ ID NO: 3399170 - RNA, 15 nt, Human
ccuuuaccccauccc

SEQ ID NO: 3399171 - RNA, 15 nt, Human
ccuuuacguguuuaa

SEQ ID NO: 3399172 - RNA, 15 nt, Human
ccuuuacuugaccuc

SEQ ID NO: 3399173 - RNA, 23 nt, Human
ccuuuacuuucccuugcuuuucc

SEQ ID NO: 3399174 - RNA, 21 nt, Human
ccuuuagauagcagccuggcu

SEQ ID NO: 3399175 - RNA, 18 nt, Human
ccuuuagcacguuuaaag

SEQ ID NO: 3399176 - RNA, 21 nt, Human
ccuuuagcacguuuaaaguuc

SEQ ID NO: 3399177 - RNA, 14 nt, Human
ccuuuagcuguguu

SEQ ID NO: 3399178 - RNA, 20 nt, Human
ccuuuagggcagcuugcccc

SEQ ID NO: 3399179 - RNA, 13 nt, Human
ccuuuagguucuu

SEQ ID NO: 3399180 - RNA, 17 nt, Human
ccuuuaguaucaguguu

SEQ ID NO: 3399181 - RNA, 15 nt, Human
ccuuuaguuauaaag

SEQ ID NO: 3399182 - RNA, 22 nt, Human
ccuuuauaaugaggaugauuau

SEQ ID NO: 3399183 - RNA, 19 nt, Human
ccuuuauguggaaaacaga

SEQ ID NO: 3399184 - RNA, 14 nt, Human
ccuuuauuaaaauc

SEQ ID NO: 3399185 - RNA, 12 nt, Human
ccuuuauugugu

SEQ ID NO: 3399186 - RNA, 16 nt, Human
ccuuucaaagccauuu

SEQ ID NO: 3399187 - RNA, 15 nt, Human
ccuuucaauaggaaa

SEQ ID NO: 3399188 - RNA, 19 nt, Human
ccuuucaccccagggccug

SEQ ID NO: 3399189 - RNA, 15 nt, Human
ccuuucacuucuuuc

SEQ ID NO: 3399190 - RNA, 20 nt, Human
ccuuucagaugucuucugcc

SEQ ID NO: 3399191 - RNA, 16 nt, Human
ccuuucagcccacguc

SEQ ID NO: 3399192 - RNA, 14 nt, Human
ccuuucaggaucua

SEQ ID NO: 3399193 - RNA, 17 nt, Human
ccuuucaggaucuauuu

SEQ ID NO: 3399194 - RNA, 16 nt, Human
ccuuucauuuacugug

SEQ ID NO: 3399195 - RNA, 15 nt, Human
ccuuucauuuugcuu

SEQ ID NO: 3399196 - RNA, 14 nt, Human
ccuuuccccagcau

SEQ ID NO: 3399197 - RNA, 16 nt, Human
ccuuuccccagcauca

SEQ ID NO: 3399198 - RNA, 23 nt, Human
ccuuuccccagcaucacucccca

SEQ ID NO: 3399199 - RNA, 15 nt, Human
ccuuuccccagccca

SEQ ID NO: 3399200 - RNA, 16 nt, Human
ccuuuccccagcccag

SEQ ID NO: 3399201 - RNA, 18 nt, Human
ccuuucccccuucucuua

SEQ ID NO: 3399202 - RNA, 12 nt, Human
ccuuucccgggc

SEQ ID NO: 3399203 - RNA, 13 nt, Human
ccuuucccgggcu

SEQ ID NO: 3399204 - RNA, 12 nt, Human
ccuuucccucca

SEQ ID NO: 3399205 - RNA, 15 nt, Human
ccuuucccuuccucu

SEQ ID NO: 3399206 - RNA, 15 nt, Human
ccuuuccuccucuga

SEQ ID NO: 3399207 - RNA, 16 nt, Human
ccuuuccuuccauccc

SEQ ID NO: 3399208 - RNA, 18 nt, Human
ccuuuccuuccaucccua

SEQ ID NO: 3399209 - RNA, 13 nt, Human
ccuuuccuuccuu

SEQ ID NO: 3399210 - RNA, 18 nt, Human
ccuuucgaggccugaagc

SEQ ID NO: 3399211 - RNA, 19 nt, Human
ccuuucgcccacagucuga

SEQ ID NO: 3399212 - RNA, 16 nt, Human
ccuuucuacuuccaag

SEQ ID NO: 3399213 - RNA, 14 nt, Human
ccuuucuagagcac

SEQ ID NO: 3399214 - RNA, 10 nt, Human
ccuuucucac

SEQ ID NO: 3399215 - RNA, 14 nt, Human
ccuuucuccagcca

SEQ ID NO: 3399216 - RNA, 16 nt, Human
ccuuucuccagccagc

SEQ ID NO: 3399217 - RNA, 20 nt, Human
ccuuucuccagccagcaaug

SEQ ID NO: 3399218 - RNA, 22 nt, Human
ccuuucuccagccagcaaugau

SEQ ID NO: 3399219 - RNA, 12 nt, Human
ccuuucucuuuc

SEQ ID NO: 3399220 - RNA, 16 nt, Human
ccuuucucuuucguua

SEQ ID NO: 3399221 - RNA, 21 nt, Human
ccuuucucuuucucucuuccc

SEQ ID NO: 3399222 - RNA, 20 nt, Human
ccuuucucuuuuccccuuuc

SEQ ID NO: 3399223 - RNA, 22 nt, Human
ccuuucucuuuuccccuuuccu

SEQ ID NO: 3399224 - RNA, 11 nt, Human
ccuuucugugu

SEQ ID NO: 3399225 - RNA, 12 nt, Human
ccuuucuguguu

SEQ ID NO: 3399226 - RNA, 11 nt, Human
ccuuucuuccg

SEQ ID NO: 3399227 - RNA, 12 nt, Human
ccuuucuuccgg

SEQ ID NO: 3399228 - RNA, 13 nt, Human
ccuuucuuccuca

SEQ ID NO: 3399229 - RNA, 12 nt, Human
ccuuucuucucc

SEQ ID NO: 3399230 - RNA, 16 nt, Human
ccuuucuuuuucuucu

SEQ ID NO: 3399231 - RNA, 12 nt, Human
ccuuugaagagg

SEQ ID NO: 3399232 - RNA, 16 nt, Human
ccuuugaauccucucu

SEQ ID NO: 3399233 - RNA, 16 nt, Human
ccuuugaccugccucc

SEQ ID NO: 3399234 - RNA, 23 nt, Human
ccuuugacgccaucccagcccca

SEQ ID NO: 3399235 - RNA, 15 nt, Human
ccuuugagacaguuu

SEQ ID NO: 3399236 - RNA, 17 nt, Human
ccuuugagacaguuucu

SEQ ID NO: 3399237 - RNA, 22 nt, Human
ccuuugagugcaguccugauca

SEQ ID NO: 3399238 - RNA, 22 nt, Human
ccuuugaguuuccucaggcugc

SEQ ID NO: 3399239 - RNA, 14 nt, Human
ccuuugcacaggau

SEQ ID NO: 3399240 - RNA, 14 nt, Human
ccuuugcacugagg

SEQ ID NO: 3399241 - RNA, 16 nt, Human
ccuuugcacugagggc

SEQ ID NO: 3399242 - RNA, 19 nt, Human
ccuuugcacugagggccac

SEQ ID NO: 3399243 - RNA, 14 nt, Human
ccuuugcagggcag

SEQ ID NO: 3399244 - RNA, 16 nt, Human
ccuuugcagggcagcc

SEQ ID NO: 3399245 - RNA, 21 nt, Human
ccuuugccaccaacuggcccu

SEQ ID NO: 3399246 - RNA, 13 nt, Human
ccuuugccaggug

SEQ ID NO: 3399247 - RNA, 19 nt, Human
ccuuugcugaggccuccag

SEQ ID NO: 3399248 - RNA, 18 nt, Human
ccuuugcugucccauagu

SEQ ID NO: 3399249 - RNA, 17 nt, Human
ccuuugcugugaggcug

SEQ ID NO: 3399250 - RNA, 16 nt, Human
ccuuugcuugaaagaa

SEQ ID NO: 3399251 - RNA, 20 nt, Human
ccuuuggagaugcugagggu

SEQ ID NO: 3399252 - RNA, 19 nt, Human
ccuuuggaugaccagaaca

SEQ ID NO: 3399253 - RNA, 18 nt, Human
ccuuuggcaggugcagcc

SEQ ID NO: 3399254 - RNA, 16 nt, Human
ccuuuggcucuggaga

SEQ ID NO: 3399255 - RNA, 14 nt, Human
ccuuugggcccagg

SEQ ID NO: 3399256 - RNA, 16 nt, Human
ccuuugggcccaggga

SEQ ID NO: 3399257 - RNA, 17 nt, Human
ccuuugggcccagggac

SEQ ID NO: 3399258 - RNA, 17 nt, Human
ccuuugggcccugcaug

SEQ ID NO: 3399259 - RNA, 18 nt, Human
ccuuugggcccugcaugu

SEQ ID NO: 3399260 - RNA, 19 nt, Human
ccuuugggcuucagcugcc

SEQ ID NO: 3399261 - RNA, 18 nt, Human
ccuuuggggggggcccgc

SEQ ID NO: 3399262 - RNA, 12 nt, Human
ccuuuggggguu

SEQ ID NO: 3399263 - RNA, 20 nt, Human
ccuuugguucuggccagaau

SEQ ID NO: 3399264 - RNA, 23 nt, Human
ccuuuguaaauugucagaugcug

SEQ ID NO: 3399265 - RNA, 14 nt, Human
ccuuuguaagugca

SEQ ID NO: 3399266 - RNA, 16 nt, Human
ccuuuguaagugcagg

SEQ ID NO: 3399267 - RNA, 14 nt, Human
ccuuuguaaguuau

SEQ ID NO: 3399268 - RNA, 15 nt, Human
ccuuuguaaguuauu

SEQ ID NO: 3399269 - RNA, 15 nt, Human
ccuuuguauucucuc

SEQ ID NO: 3399270 - RNA, 22 nt, Human
ccuuuguauucucuccuguacc

SEQ ID NO: 3399271 - RNA, 22 nt, Human
ccuuuguauucugucuucaucc

SEQ ID NO: 3399272 - RNA, 14 nt, Human
ccuuugucccagaa

SEQ ID NO: 3399273 - RNA, 16 nt, Human
ccuuuguccuccugcu

SEQ ID NO: 3399274 - RNA, 13 nt, Human
ccuuugugaaaaa

SEQ ID NO: 3399275 - RNA, 22 nt, Human
ccuuugugguuuuauggagacc

SEQ ID NO: 3399276 - RNA, 19 nt, Human
ccuuuguguguacucacug

SEQ ID NO: 3399277 - RNA, 20 nt, Human
ccuuuguguguacucacuga

SEQ ID NO: 3399278 - RNA, 13 nt, Human
ccuuuguguuucu

SEQ ID NO: 3399279 - RNA, 18 nt, Human
ccuuuguuccccacugga

SEQ ID NO: 3399280 - RNA, 14 nt, Human
ccuuuguucccggc

SEQ ID NO: 3399281 - RNA, 23 nt, Human
ccuuuguuggagucaaaaagaac

SEQ ID NO: 3399282 - RNA, 13 nt, Human
ccuuuguuucuug

SEQ ID NO: 3399283 - RNA, 14 nt, Human
ccuuuguuucuugu

SEQ ID NO: 3399284 - RNA, 20 nt, Human
ccuuuguuuuuaugaagaaa

SEQ ID NO: 3399285 - RNA, 12 nt, Human
ccuuuuaaagaa

SEQ ID NO: 3399286 - RNA, 13 nt, Human
ccuuuuaacauuu

SEQ ID NO: 3399287 - RNA, 15 nt, Human
ccuuuuaacauuuug

SEQ ID NO: 3399288 - RNA, 16 nt, Human
ccuuuuaguuccugug

SEQ ID NO: 3399289 - RNA, 21 nt, Human
ccuuuuauaaaccucuaauuu

SEQ ID NO: 3399290 - RNA, 22 nt, Human
ccuuuuauaggugagaaaaaaa

SEQ ID NO: 3399291 - RNA, 15 nt, Human
ccuuuuauguuauuu

SEQ ID NO: 3399292 - RNA, 23 nt, Human
ccuuuuauuauaagucuuacaua

SEQ ID NO: 3399293 - RNA, 15 nt, Human
ccuuuuauugacaca

SEQ ID NO: 3399294 - RNA, 18 nt, Human
ccuuuuauuucuucacca

SEQ ID NO: 3399295 - RNA, 17 nt, Human
ccuuuucagcuucugcu

SEQ ID NO: 3399296 - RNA, 12 nt, Human
ccuuuucagggc

SEQ ID NO: 3399297 - RNA, 13 nt, Human
ccuuuucagggcu

SEQ ID NO: 3399298 - RNA, 18 nt, Human
ccuuuucagggcuggcuc

SEQ ID NO: 3399299 - RNA, 19 nt, Human
ccuuuucauaggucugaaa

SEQ ID NO: 3399300 - RNA, 16 nt, Human
ccuuuucaugauuuua

SEQ ID NO: 3399301 - RNA, 23 nt, Human
ccuuuucccaaaauguugaaaua

SEQ ID NO: 3399302 - RNA, 14 nt, Human
ccuuuucccugcuu

SEQ ID NO: 3399303 - RNA, 19 nt, Human
ccuuuucccugcuuccagg

SEQ ID NO: 3399304 - RNA, 12 nt, Human
ccuuuucuauuc

SEQ ID NO: 3399305 - RNA, 15 nt, Human
ccuuuucuccuaucu

SEQ ID NO: 3399306 - RNA, 12 nt, Human
ccuuuucugacc

SEQ ID NO: 3399307 - RNA, 13 nt, Human
ccuuuucugacca

SEQ ID NO: 3399308 - RNA, 18 nt, Human
ccuuuucugaccaaagag

SEQ ID NO: 3399309 - RNA, 22 nt, Human
ccuuuucugcauuuugcuauug

SEQ ID NO: 3399310 - RNA, 12 nt, Human
ccuuuucuuguu

SEQ ID NO: 3399311 - RNA, 21 nt, Human
ccuuuucuuguuuaucagcag

SEQ ID NO: 3399312 - RNA, 19 nt, Human
ccuuuucuuuguucaagau

SEQ ID NO: 3399313 - RNA, 13 nt, Human
ccuuuucuuuugu

SEQ ID NO: 3399314 - RNA, 16 nt, Human
ccuuuucuuuuguuac

SEQ ID NO: 3399315 - RNA, 17 nt, Human
ccuuuucuuuuguuacu

SEQ ID NO: 3399316 - RNA, 18 nt, Human
ccuuuucuuuuguuacug

SEQ ID NO: 3399317 - RNA, 20 nt, Human
ccuuuucuuuuguuacuguu

SEQ ID NO: 3399318 - RNA, 21 nt, Human
ccuuuugaaauuaaccucuca

SEQ ID NO: 3399319 - RNA, 23 nt, Human
ccuuuugaaguaguuuguauaac

SEQ ID NO: 3399320 - RNA, 15 nt, Human
ccuuuugacacugcu

SEQ ID NO: 3399321 - RNA, 16 nt, Human
ccuuuugaggagcccc

SEQ ID NO: 3399322 - RNA, 12 nt, Human
ccuuuugcaccc

SEQ ID NO: 3399323 - RNA, 16 nt, Human
ccuuuugcaccccucc

SEQ ID NO: 3399324 - RNA, 20 nt, Human
ccuuuugcaccugcucucuu

SEQ ID NO: 3399325 - RNA, 15 nt, Human
ccuuuugcaggcucc

SEQ ID NO: 3399326 - RNA, 13 nt, Human
ccuuuugcauucu

SEQ ID NO: 3399327 - RNA, 12 nt, Human
ccuuuuggggga

SEQ ID NO: 3399328 - RNA, 15 nt, Human
ccuuuuggguuucug

SEQ ID NO: 3399329 - RNA, 23 nt, Human
ccuuuuguauacauccuggguaa

SEQ ID NO: 3399330 - RNA, 12 nt, Human
ccuuuugucucu

SEQ ID NO: 3399331 - RNA, 13 nt, Human
ccuuuuguuuucu

SEQ ID NO: 3399332 - RNA, 18 nt, Human
ccuuuuuauuuauaugua

SEQ ID NO: 3399333 - RNA, 20 nt, Human
ccuuuuuauuuauauguaug

SEQ ID NO: 3399334 - RNA, 16 nt, Human
ccuuuuucaauaacug

SEQ ID NO: 3399335 - RNA, 15 nt, Human
ccuuuuucauuauuu

SEQ ID NO: 3399336 - RNA, 19 nt, Human
ccuuuuuccuagccuguuu

SEQ ID NO: 3399337 - RNA, 13 nt, Human
ccuuuuuccucuc

SEQ ID NO: 3399338 - RNA, 15 nt, Human
ccuuuuuccucucca

SEQ ID NO: 3399339 - RNA, 16 nt, Human
ccuuuuuccucuccac

SEQ ID NO: 3399340 - RNA, 13 nt, Human
ccuuuuuccuugu

SEQ ID NO: 3399341 - RNA, 17 nt, Human
ccuuuuuccuugucccc

SEQ ID NO: 3399342 - RNA, 21 nt, Human
ccuuuuucugcacuauaugca

SEQ ID NO: 3399343 - RNA, 20 nt, Human
ccuuuuucuuuauaaacuuu

SEQ ID NO: 3399344 - RNA, 12 nt, Human
ccuuuuugaagu

SEQ ID NO: 3399345 - RNA, 13 nt, Human
ccuuuuugaagug

SEQ ID NO: 3399346 - RNA, 22 nt, Human
ccuuuuugaaguguaggcagac

SEQ ID NO: 3399347 - RNA, 14 nt, Human
ccuuuuugacacug

SEQ ID NO: 3399348 - RNA, 19 nt, Human
cgcagaccucuggauuagg

SEQ ID NO: 3399349 - RNA, 14 nt, Human
cgcagagcuggccg

SEQ ID NO: 3399350 - RNA, 19 nt, Human
cgcagagggaauuuuuccc

SEQ ID NO: 3399351 - RNA, 20 nt, Human
cgcagaugugcagcagauug

SEQ ID NO: 3399352 - RNA, 17 nt, Human
cgcagcaggaggccagg

SEQ ID NO: 3399353 - RNA, 19 nt, Human
cgcagcauauucaggaagc

SEQ ID NO: 3399354 - RNA, 12 nt, Human
cgcagccacccu

SEQ ID NO: 3399355 - RNA, 12 nt, Human
cgcagccccauc

SEQ ID NO: 3399356 - RNA, 10 nt, Human
cgcagcccug

SEQ ID NO: 3399357 - RNA, 15 nt, Human
cgcagcccugcagag

SEQ ID NO: 3399358 - RNA, 19 nt, Human
cgcagcccugcagagggca

SEQ ID NO: 3399359 - RNA, 24 nt, Human
cgcagcccugcuuugggcugcccu

SEQ ID NO: 3399360 - RNA, 17 nt, Human
cgcagcucuugcccuuc

SEQ ID NO: 3399361 - RNA, 18 nt, Human
cgcagcucuugcccuucc

SEQ ID NO: 3399362 - RNA, 20 nt, Human
cgcagcucuugcccuucccu

SEQ ID NO: 3399363 - RNA, 12 nt, Human
cgcaggaagcug

SEQ ID NO: 3399364 - RNA, 17 nt, Human
cgcaggauucagccgga

SEQ ID NO: 3399365 - RNA, 13 nt, Human
cgcaggcuggccc

SEQ ID NO: 3399366 - RNA, 19 nt, Human
cgcaggcuggcccugcccu

SEQ ID NO: 3399367 - RNA, 16 nt, Human
cgcagggguugcagug

SEQ ID NO: 3399368 - RNA, 18 nt, Human
cgcaggugcacaggggga

SEQ ID NO: 3399369 - RNA, 17 nt, Human
cgcagucaggggcagcu

SEQ ID NO: 3399370 - RNA, 22 nt, Human
cgcaguccacuucugacagccu

SEQ ID NO: 3399371 - RNA, 16 nt, Human
cgcagucgucgcacag

SEQ ID NO: 3399372 - RNA, 17 nt, Human
cgcagugugcacuaagg

SEQ ID NO: 3399373 - RNA, 22 nt, Human
cgcagugugcacuaaggggccc

SEQ ID NO: 3399374 - RNA, 15 nt, Human
cgcaguguuugugug

SEQ ID NO: 3399375 - RNA, 16 nt, Human
cgcauaggccugcuuu

SEQ ID NO: 3399376 - RNA, 14 nt, Human
cgcaucaaaagaca

SEQ ID NO: 3399377 - RNA, 15 nt, Human
cgcaucaaaagacaa

SEQ ID NO: 3399378 - RNA, 22 nt, Human
cgcaucaaaagacaauucuuua

SEQ ID NO: 3399379 - RNA, 13 nt, Human
cgcaucagacaga

SEQ ID NO: 3399380 - RNA, 15 nt, Human
cgcaucagcugcuca

SEQ ID NO: 3399381 - RNA, 14 nt, Human
cgcauccagcaaga

SEQ ID NO: 3399382 - RNA, 16 nt, Human
cgcauccuagucucua

SEQ ID NO: 3399383 - RNA, 19 nt, Human
cgcaucuucccaaccccuu

SEQ ID NO: 3399384 - RNA, 15 nt, Human
cgcaucuucuccauc

SEQ ID NO: 3399385 - RNA, 16 nt, Human
cgcaucuucuccaucu

SEQ ID NO: 3399386 - RNA, 19 nt, Human
cgcaucuugccuccaggug

SEQ ID NO: 3399387 - RNA, 13 nt, Human
cgcaugcccccuc

SEQ ID NO: 3399388 - RNA, 15 nt, Human
cgcaugcccucaauc

SEQ ID NO: 3399389 - RNA, 14 nt, Human
cgcaugcggcccag

SEQ ID NO: 3399390 - RNA, 18 nt, Human
cgcauggaguguguauug

SEQ ID NO: 3399391 - RNA, 15 nt, Human
cgcauuccaggcucc

SEQ ID NO: 3399392 - RNA, 18 nt, Human
cgcauucuaaccuggagg

SEQ ID NO: 3399393 - RNA, 19 nt, Human
cgccaaauaaugucucugu

SEQ ID NO: 3399394 - RNA, 23 nt, Human
cgccaaggcugggggaagaagcu

SEQ ID NO: 3399395 - RNA, 21 nt, Human
cgccaagguagccaucccaug

SEQ ID NO: 3399396 - RNA, 23 nt, Human
cgccaauaaaccaaugaacgaag

SEQ ID NO: 3399397 - RNA, 17 nt, Human
cgccacagcccuuuugu

SEQ ID NO: 3399398 - RNA, 23 nt, Human
cgccacauccccgcuggcugggg

SEQ ID NO: 3399399 - RNA, 15 nt, Human
cgccaccacacccaa

SEQ ID NO: 3399400 - RNA, 11 nt, Human
cgccaccauuc

SEQ ID NO: 3399401 - RNA, 17 nt, Human
cgccaccccuccuuccu

SEQ ID NO: 3399402 - RNA, 18 nt, Human
cgccaccgccacccgcag

SEQ ID NO: 3399403 - RNA, 21 nt, Human
cgccaccuggcauuccuucug

SEQ ID NO: 3399404 - RNA, 21 nt, Human
cgccacugcacuccagccugg

SEQ ID NO: 3399405 - RNA, 17 nt, Human
cgccacuggggcucaga

SEQ ID NO: 3399406 - RNA, 18 nt, Human
cgccagauggggccucug

SEQ ID NO: 3399407 - RNA, 16 nt, Human
cgccagccuccucugg

SEQ ID NO: 3399408 - RNA, 18 nt, Human
cgccagccuccucuggac

SEQ ID NO: 3399409 - RNA, 22 nt, Human
cgccagcucaccccaucauccc

SEQ ID NO: 3399410 - RNA, 20 nt, Human
cgccagcucccgccagccgc

SEQ ID NO: 3399411 - RNA, 15 nt, Human
cgccagcugaugacu

SEQ ID NO: 3399412 - RNA, 17 nt, Human
cgccagcugaugacuca

SEQ ID NO: 3399413 - RNA, 20 nt, Human
cgccagcugaugacucaaga

SEQ ID NO: 3399414 - RNA, 18 nt, Human
cgccaggaccgccaaaga

SEQ ID NO: 3399415 - RNA, 23 nt, Human
cgccaggauggaacacggccaca

SEQ ID NO: 3399416 - RNA, 16 nt, Human
cgccaggcugaccaca

SEQ ID NO: 3399417 - RNA, 16 nt, Human
cgccagggaccccaga

SEQ ID NO: 3399418 - RNA, 11 nt, Human
cgccagggccc

SEQ ID NO: 3399419 - RNA, 15 nt, Human
cgccaguacuuguca

SEQ ID NO: 3399420 - RNA, 21 nt, Human
cgccaguguaaucccccagga

SEQ ID NO: 3399421 - RNA, 22 nt, Human
cgccaguguaaucccccaggag

SEQ ID NO: 3399422 - RNA, 14 nt, Human
cgccaucccagccc

SEQ ID NO: 3399423 - RNA, 23 nt, Human
cgccaugugauggacacuccagg

SEQ ID NO: 3399424 - RNA, 20 nt, Human
cgcccaaaggacgcacugag

SEQ ID NO: 3399425 - RNA, 14 nt, Human
cgcccaacccuucc

SEQ ID NO: 3399426 - RNA, 17 nt, Human
cgcccaaggccuucccc

SEQ ID NO: 3399427 - RNA, 21 nt, Human
cgcccacaggaagccugcagu

SEQ ID NO: 3399428 - RNA, 18 nt, Human
cgcccaccccgcucugca

SEQ ID NO: 3399429 - RNA, 19 nt, Human
cgcccaccccgcucugcau

SEQ ID NO: 3399430 - RNA, 16 nt, Human
cgcccaccgcaugccc

SEQ ID NO: 3399431 - RNA, 17 nt, Human
cgcccaccgcaugcccc

SEQ ID NO: 3399432 - RNA, 18 nt, Human
cgcccaccgcaugccccc

SEQ ID NO: 3399433 - RNA, 11 nt, Human
cgcccaccucc

SEQ ID NO: 3399434 - RNA, 12 nt, Human
cgcccaccuccc

SEQ ID NO: 3399435 - RNA, 14 nt, Human
cgcccacuguccug

SEQ ID NO: 3399436 - RNA, 20 nt, Human
cgcccacuguccugggcgcc

SEQ ID NO: 3399437 - RNA, 13 nt, Human
cgcccagcuccug

SEQ ID NO: 3399438 - RNA, 19 nt, Human
cgcccaggcuggagugcaa

SEQ ID NO: 3399439 - RNA, 20 nt, Human
cgcccaggcuggagugcagu

SEQ ID NO: 3399440 - RNA, 16 nt, Human
cgcccaggcuggccag

SEQ ID NO: 3399441 - RNA, 20 nt, Human
cgcccaggcuggccagcccc

SEQ ID NO: 3399442 - RNA, 15 nt, Human
cgcccagucccagca

SEQ ID NO: 3399443 - RNA, 19 nt, Human
cgcccagugcccuggggcu

SEQ ID NO: 3399444 - RNA, 22 nt, Human
cgcccaguuggguggaugccug

SEQ ID NO: 3399445 - RNA, 19 nt, Human
cgcccaugagagcgcagcc

SEQ ID NO: 3399446 - RNA, 21 nt, Human
cgcccaugagagcgcagcccg

SEQ ID NO: 3399447 - RNA, 18 nt, Human
cgcccaugcacuggggac

SEQ ID NO: 3399448 - RNA, 21 nt, Human
cgccccaaaguaaaagaaacc

SEQ ID NO: 3399449 - RNA, 22 nt, Human
cgcccccaguccccaccccugc

SEQ ID NO: 3399450 - RNA, 13 nt, Human
cgcccccagugug

SEQ ID NO: 3399451 - RNA, 21 nt, Human
cgccccccacacuucccuggc

SEQ ID NO: 3399452 - RNA, 15 nt, Human
cgccccccucccaga

SEQ ID NO: 3399453 - RNA, 19 nt, Human
cgcccccuccgcccugcca

SEQ ID NO: 3399454 - RNA, 12 nt, Human
cgcccccugccc

SEQ ID NO: 3399455 - RNA, 15 nt, Human
cgcccccugcccucc

SEQ ID NO: 3399456 - RNA, 18 nt, Human
cgcccccugucucucagg

SEQ ID NO: 3399457 - RNA, 21 nt, Human
cgccccucauuuaucccucaa

SEQ ID NO: 3399458 - RNA, 19 nt, Human
cgccccucccacagcgcug

SEQ ID NO: 3399459 - RNA, 21 nt, Human
cgccccucccacagcgcuggc

SEQ ID NO: 3399460 - RNA, 14 nt, Human
cgccccugccaccu

SEQ ID NO: 3399461 - RNA, 15 nt, Human
cgccccugccugcca

SEQ ID NO: 3399462 - RNA, 15 nt, Human
cgcccgagcuguuua

SEQ ID NO: 3399463 - RNA, 16 nt, Human
cgcccgcccacugucc

SEQ ID NO: 3399464 - RNA, 19 nt, Human
cgcccgcccacuguccugg

SEQ ID NO: 3399465 - RNA, 14 nt, Human
cgcccgccccugca

SEQ ID NO: 3399466 - RNA, 13 nt, Human
cgcccgcgcccgc

SEQ ID NO: 3399467 - RNA, 12 nt, Human
cgcccgcgcccu

SEQ ID NO: 3399468 - RNA, 14 nt, Human
cgcccguccugccu

SEQ ID NO: 3399469 - RNA, 17 nt, Human
cgcccguccugccugug

SEQ ID NO: 3399470 - RNA, 23 nt, Human
cgcccgucugugugugaccccuc

SEQ ID NO: 3399471 - RNA, 23 nt, Human
cgcccuaggccuggcauggcacc

SEQ ID NO: 3399472 - RNA, 19 nt, Human
cgcccucauuacggcuccu

SEQ ID NO: 3399473 - RNA, 14 nt, Human
cgcccuccccuccc

SEQ ID NO: 3399474 - RNA, 16 nt, Human
cgcccuccuuucugug

SEQ ID NO: 3399475 - RNA, 20 nt, Human
cgcccucuccuuuguucccg

SEQ ID NO: 3399476 - RNA, 13 nt, Human
cgcccucuucccc

SEQ ID NO: 3399477 - RNA, 15 nt, Human
cgcccucuuccugac

SEQ ID NO: 3399478 - RNA, 15 nt, Human
cgcccugcagacccu

SEQ ID NO: 3399479 - RNA, 16 nt, Human
cgcccugcagacccug

SEQ ID NO: 3399480 - RNA, 20 nt, Human
cgcccugcagacccugcccu

SEQ ID NO: 3399481 - RNA, 21 nt, Human
cgcccugcagacccugcccuu

SEQ ID NO: 3399482 - RNA, 11 nt, Human
cgcccugccac

SEQ ID NO: 3399483 - RNA, 12 nt, Human
cgcccugccacu

SEQ ID NO: 3399484 - RNA, 17 nt, Human
cgcccugcuccucccug

SEQ ID NO: 3399485 - RNA, 12 nt, Human
cgcccuggaagc

SEQ ID NO: 3399486 - RNA, 16 nt, Human
cgcccuggcaggcagg

SEQ ID NO: 3399487 - RNA, 14 nt, Human
cgcccuggccccca

SEQ ID NO: 3399488 - RNA, 21 nt, Human
cgcccugggcucgucuuugca

SEQ ID NO: 3399489 - RNA, 19 nt, Human
cgcccuuacuucuugcccu

SEQ ID NO: 3399490 - RNA, 12 nt, Human
cgcccuuccucu

SEQ ID NO: 3399491 - RNA, 17 nt, Human
cgcccuuggcuucugug

SEQ ID NO: 3399492 - RNA, 14 nt, Human
cgcccuuuuccccu

SEQ ID NO: 3399493 - RNA, 15 nt, Human
cggauaguugcuauu

SEQ ID NO: 3399494 - RNA, 17 nt, Human
cggauaguugcuauuuu

SEQ ID NO: 3399495 - RNA, 20 nt, Human
cggauaguugcuauuuuugu

SEQ ID NO: 3399496 - RNA, 18 nt, Human
cggaucaccgagaguagc

SEQ ID NO: 3399497 - RNA, 23 nt, Human
cggaucaccgagaguagccgaga

SEQ ID NO: 3399498 - RNA, 22 nt, Human
cggaucagagcaggaccucccu

SEQ ID NO: 3399499 - RNA, 18 nt, Human
cggauccagggaggcugg

SEQ ID NO: 3399500 - RNA, 14 nt, Human
cggauccccuuccu

SEQ ID NO: 3399501 - RNA, 17 nt, Human
cggauccuaagcaucua

SEQ ID NO: 3399502 - RNA, 15 nt, Human
cggaucuguugcaaa

SEQ ID NO: 3399503 - RNA, 13 nt, Human
cggaugauuucua

SEQ ID NO: 3399504 - RNA, 13 nt, Human
cggaugcugcuuc

SEQ ID NO: 3399505 - RNA, 13 nt, Human
cggaugugcuuuu

SEQ ID NO: 3399506 - RNA, 18 nt, Human
cggauuauuuuuucagac

SEQ ID NO: 3399507 - RNA, 19 nt, Human
cggauuauuuuuucagacc

SEQ ID NO: 3399508 - RNA, 15 nt, Human
cggauugcaaagcaa

SEQ ID NO: 3399509 - RNA, 23 nt, Human
cggauuggcuuguguguuucacu

SEQ ID NO: 3399510 - RNA, 16 nt, Human
cggauuuuuuccaaaa

SEQ ID NO: 3399511 - RNA, 17 nt, Human
cggauuuuuuccaaaau

SEQ ID NO: 3399512 - RNA, 12 nt, Human
cggcaacaucaa

SEQ ID NO: 3399513 - RNA, 20 nt, Human
cggcaaccccaguucugcuc

SEQ ID NO: 3399514 - RNA, 23 nt, Human
cggcaaccccaguucugcuccuc

SEQ ID NO: 3399515 - RNA, 21 nt, Human
cggcacagggucugcucuuuc

SEQ ID NO: 3399516 - RNA, 20 nt, Human
cggcacccacaagugccacu

SEQ ID NO: 3399517 - RNA, 15 nt, Human
cggcacccacccagc

SEQ ID NO: 3399518 - RNA, 16 nt, Human
cggcacccucuggccg

SEQ ID NO: 3399519 - RNA, 13 nt, Human
cggcaccugggcc

SEQ ID NO: 3399520 - RNA, 22 nt, Human
cggcaccugggcccuggggccu

SEQ ID NO: 3399521 - RNA, 23 nt, Human
cggcaccugggcccuggggccug

SEQ ID NO: 3399522 - RNA, 22 nt, Human
cggcagaaaggaaaaccugaag

SEQ ID NO: 3399523 - RNA, 13 nt, Human
cggcagcagcccc

SEQ ID NO: 3399524 - RNA, 20 nt, Human
cggcagcuucugcccccugc

SEQ ID NO: 3399525 - RNA, 22 nt, Human
cggcagcuucugcccccugcag

SEQ ID NO: 3399526 - RNA, 20 nt, Human
cggcaggcucacugccaggc

SEQ ID NO: 3399527 - RNA, 23 nt, Human
cggcaggcucacugccaggccag

SEQ ID NO: 3399528 - RNA, 17 nt, Human
cggcagguucacaggcg

SEQ ID NO: 3399529 - RNA, 21 nt, Human
cggcaguauugaagcucguga

SEQ ID NO: 3399530 - RNA, 23 nt, Human
cggcaugagacucagugcagaug

SEQ ID NO: 3399531 - RNA, 21 nt, Human
cggcauggacaauggaccgga

SEQ ID NO: 3399532 - RNA, 13 nt, Human
cggcauggcuggg

SEQ ID NO: 3399533 - RNA, 14 nt, Human
cggcauggcuggga

SEQ ID NO: 3399534 - RNA, 21 nt, Human
cggcaugggaaagccaccucu

SEQ ID NO: 3399535 - RNA, 23 nt, Human
cggcauugguucccuuugcucca

SEQ ID NO: 3399536 - RNA, 16 nt, Human
cggccacacagcugcc

SEQ ID NO: 3399537 - RNA, 14 nt, Human
cggccaccucugcg

SEQ ID NO: 3399538 - RNA, 11 nt, Human
cggccaccugc

SEQ ID NO: 3399539 - RNA, 10 nt, Human
cggccagcca

SEQ ID NO: 3399540 - RNA, 11 nt, Human
cggccaggcca

SEQ ID NO: 3399541 - RNA, 22 nt, Human
cggccaugaccacuuuccccgu

SEQ ID NO: 3399542 - RNA, 15 nt, Human
cggcccaagcccgac

SEQ ID NO: 3399543 - RNA, 17 nt, Human
cggcccacaauuaauuu

SEQ ID NO: 3399544 - RNA, 12 nt, Human
cggcccacagcu

SEQ ID NO: 3399545 - RNA, 22 nt, Human
cggcccacagcucccaccccac

SEQ ID NO: 3399546 - RNA, 20 nt, Human
cggcccauccccaggcaccu

SEQ ID NO: 3399547 - RNA, 21 nt, Human
cggccccaccagugccucucc

SEQ ID NO: 3399548 - RNA, 16 nt, Human
cggccccagccagagu

SEQ ID NO: 3399549 - RNA, 22 nt, Human
cggccccagccagaguuccugc

SEQ ID NO: 3399550 - RNA, 19 nt, Human
cggccccagcuucucagcu

SEQ ID NO: 3399551 - RNA, 20 nt, Human
cggcccccgcgcgcgucccc

SEQ ID NO: 3399552 - RNA, 15 nt, Human
cggcccccuggucuc

SEQ ID NO: 3399553 - RNA, 16 nt, Human
cggcccgaucuuucua

SEQ ID NO: 3399554 - RNA, 21 nt, Human
cggcccuaccagcgcccgcug

SEQ ID NO: 3399555 - RNA, 14 nt, Human
cggcccuaugcaug

SEQ ID NO: 3399556 - RNA, 20 nt, Human
cggcccuccuacccugcgcc

SEQ ID NO: 3399557 - RNA, 23 nt, Human
cggcccuccuacccugcgcccag

SEQ ID NO: 3399558 - RNA, 22 nt, Human
cggcccugcaauguaucccuuc

SEQ ID NO: 3399559 - RNA, 18 nt, Human
cggcccugggcucggagg

SEQ ID NO: 3399560 - RNA, 15 nt, Human
cggccgcuccaccag

SEQ ID NO: 3399561 - RNA, 23 nt, Human
cggccggccagccccuggcccca

SEQ ID NO: 3399562 - RNA, 18 nt, Human
cggccuaugacuugggca

SEQ ID NO: 3399563 - RNA, 14 nt, Human
cggccucagcaccc

SEQ ID NO: 3399564 - RNA, 14 nt, Human
cggccucccaaagu

SEQ ID NO: 3399565 - RNA, 15 nt, Human
cggccucccaaagug

SEQ ID NO: 3399566 - RNA, 12 nt, Human
cggccuccuucu

SEQ ID NO: 3399567 - RNA, 20 nt, Human
cggccuccuucugagcuccu

SEQ ID NO: 3399568 - RNA, 22 nt, Human
cggccuccuucugagcuccugu

SEQ ID NO: 3399569 - RNA, 15 nt, Human
cggccucuaacccca

SEQ ID NO: 3399570 - RNA, 19 nt, Human
cggccucuaaccccaggcc

SEQ ID NO: 3399571 - RNA, 20 nt, Human
cggccucuaaccccaggccc

SEQ ID NO: 3399572 - RNA, 15 nt, Human
cggccucucuggccu

SEQ ID NO: 3399573 - RNA, 20 nt, Human
cggccucucuggccucccac

SEQ ID NO: 3399574 - RNA, 17 nt, Human
cggccucugccuuugca

SEQ ID NO: 3399575 - RNA, 16 nt, Human
cggccugaugcucccu

SEQ ID NO: 3399576 - RNA, 17 nt, Human
cggccugaugcucccuc

SEQ ID NO: 3399577 - RNA, 15 nt, Human
cggccugccaggagg

SEQ ID NO: 3399578 - RNA, 20 nt, Human
cggccugcccccaccccauu

SEQ ID NO: 3399579 - RNA, 15 nt, Human
cggccugcucccagc

SEQ ID NO: 3399580 - RNA, 13 nt, Human
cggccuggcuccu

SEQ ID NO: 3399581 - RNA, 13 nt, Human
cggccuuucccac

SEQ ID NO: 3399582 - RNA, 15 nt, Human
cggcgcccccagugu

SEQ ID NO: 3399583 - RNA, 17 nt, Human
cggcgcccccagugugc

SEQ ID NO: 3399584 - RNA, 17 nt, Human
cggcgcccucuguccug

SEQ ID NO: 3399585 - RNA, 16 nt, Human
cggcgccuggccucca

SEQ ID NO: 3399586 - RNA, 17 nt, Human
cggcgccuggccuccag

SEQ ID NO: 3399587 - RNA, 22 nt, Human
cggcgcgcucuucgcgcccgcc

SEQ ID NO: 3399588 - RNA, 20 nt, Human
cggcgcgguggcucacgccu

SEQ ID NO: 3399589 - RNA, 19 nt, Human
cggcggagcuggccccgcc

SEQ ID NO: 3399590 - RNA, 15 nt, Human
cggcggccucagagu

SEQ ID NO: 3399591 - RNA, 15 nt, Human
cggcgucagccucca

SEQ ID NO: 3399592 - RNA, 16 nt, Human
cggcgucagccuccag

SEQ ID NO: 3399593 - RNA, 19 nt, Human
cggcgucagccuccagccu

SEQ ID NO: 3399594 - RNA, 20 nt, Human
cggcgucagccuccagccuc

SEQ ID NO: 3399595 - RNA, 22 nt, Human
cggcguggcccaaggcuggcag

SEQ ID NO: 3399596 - RNA, 12 nt, Human
cggcuacucagc

SEQ ID NO: 3399597 - RNA, 20 nt, Human
cggcuacucagcagcccucc

SEQ ID NO: 3399598 - RNA, 17 nt, Human
cggcucacugcagccuc

SEQ ID NO: 3399599 - RNA, 18 nt, Human
cggcucacugcagccuca

SEQ ID NO: 3399600 - RNA, 12 nt, Human
cggcuccaggcu

SEQ ID NO: 3399601 - RNA, 15 nt, Human
cggcucccagccuca

SEQ ID NO: 3399602 - RNA, 19 nt, Human
cggcucccagccucagcgc

SEQ ID NO: 3399603 - RNA, 21 nt, Human
cggcucccggggcagggcagc

SEQ ID NO: 3399604 - RNA, 22 nt, Human
cggcucccggggcagggcagcc

SEQ ID NO: 3399605 - RNA, 14 nt, Human
cggcucccuggagc

SEQ ID NO: 3399606 - RNA, 15 nt, Human
cggcuccugcugcac

SEQ ID NO: 3399607 - RNA, 17 nt, Human
cggcuccugcugcacca

SEQ ID NO: 3399608 - RNA, 13 nt, Human
cggcuccugguca

SEQ ID NO: 3399609 - RNA, 16 nt, Human
cggcucucaccuggcc

SEQ ID NO: 3399610 - RNA, 18 nt, Human
cggcucucaccuggcccu

SEQ ID NO: 3399611 - RNA, 14 nt, Human
cggcucugucccca

SEQ ID NO: 3399612 - RNA, 17 nt, Human
cggcucuguccccagcc

SEQ ID NO: 3399613 - RNA, 20 nt, Human
cggcucugugggugaugggg

SEQ ID NO: 3399614 - RNA, 18 nt, Human
cggcucuuuccuugcuca

SEQ ID NO: 3399615 - RNA, 16 nt, Human
cggcugagagccccag

SEQ ID NO: 3399616 - RNA, 20 nt, Human
cggcugagucaugaucuccc

SEQ ID NO: 3399617 - RNA, 22 nt, Human
cggcugagucaugaucucccug

SEQ ID NO: 3399618 - RNA, 11 nt, Human
cggcugcugag

SEQ ID NO: 3399619 - RNA, 20 nt, Human
cggcuggccauggagaaagc

SEQ ID NO: 3399620 - RNA, 21 nt, Human
cggcuggccauggagaaagcu

SEQ ID NO: 3399621 - RNA, 13 nt, Human
cggcuggccuggc

SEQ ID NO: 3399622 - RNA, 15 nt, Human
cggcuggccuggccc

SEQ ID NO: 3399623 - RNA, 18 nt, Human
cggcuggccuggccccuc

SEQ ID NO: 3399624 - RNA, 22 nt, Human
cggcuggccuggccccucaggg

SEQ ID NO: 3399625 - RNA, 23 nt, Human
cggcuggccuggccccucagggu

SEQ ID NO: 3399626 - RNA, 15 nt, Human
cggcuggcuccccug

SEQ ID NO: 3399627 - RNA, 16 nt, Human
cggcuggcuccccugc

SEQ ID NO: 3399628 - RNA, 19 nt, Human
cggcuggcuccccugcagc

SEQ ID NO: 3399629 - RNA, 18 nt, Human
cggcugggaggagggcag

SEQ ID NO: 3399630 - RNA, 14 nt, Human
cggcugggucugug

SEQ ID NO: 3399631 - RNA, 17 nt, Human
cggcugguuuuguaaga

SEQ ID NO: 3399632 - RNA, 22 nt, Human
cggcugguuuuguaagaugcug

SEQ ID NO: 3399633 - RNA, 16 nt, Human
cggcugucucagacuc

SEQ ID NO: 3399634 - RNA, 16 nt, Human
cggcugugcucagaga

SEQ ID NO: 3399635 - RNA, 13 nt, Human
cggcugugugugc

SEQ ID NO: 3399636 - RNA, 15 nt, Human
cgggaaaaagcccac

SEQ ID NO: 3399637 - RNA, 13 nt, Human
cuaccaucucccu

SEQ ID NO: 3399638 - RNA, 12 nt, Human
cuaccauuucag

SEQ ID NO: 3399639 - RNA, 16 nt, Human
cuacccaaacccuagg

SEQ ID NO: 3399640 - RNA, 16 nt, Human
cuacccacaccucugc

SEQ ID NO: 3399641 - RNA, 19 nt, Human
cuacccacaccucugccag

SEQ ID NO: 3399642 - RNA, 18 nt, Human
cuacccagagaagccccu

SEQ ID NO: 3399643 - RNA, 21 nt, Human
cuacccagagauugcuucuca

SEQ ID NO: 3399644 - RNA, 12 nt, Human
cuacccagccca

SEQ ID NO: 3399645 - RNA, 19 nt, Human
cuacccagcgagcccuggu

SEQ ID NO: 3399646 - RNA, 18 nt, Human
cuacccagcguggccucc

SEQ ID NO: 3399647 - RNA, 11 nt, Human
cuacccagggc

SEQ ID NO: 3399648 - RNA, 16 nt, Human
cuacccagggccugca

SEQ ID NO: 3399649 - RNA, 12 nt, Human
cuacccaggugc

SEQ ID NO: 3399650 - RNA, 23 nt, Human
cuacccaucgguguccauuuaua

SEQ ID NO: 3399651 - RNA, 12 nt, Human
cuaccccacacc

SEQ ID NO: 3399652 - RNA, 21 nt, Human
cuaccccacaccaggccgucc

SEQ ID NO: 3399653 - RNA, 13 nt, Human
cuaccccaccacg

SEQ ID NO: 3399654 - RNA, 14 nt, Human
cuaccccaccacga

SEQ ID NO: 3399655 - RNA, 19 nt, Human
cuacccccagcugugcuua

SEQ ID NO: 3399656 - RNA, 17 nt, Human
cuacccccuccucucug

SEQ ID NO: 3399657 - RNA, 20 nt, Human
cuaccccgcagacaccuugg

SEQ ID NO: 3399658 - RNA, 20 nt, Human
cuaccccugaucugacaucc

SEQ ID NO: 3399659 - RNA, 13 nt, Human
cuaccccuggcug

SEQ ID NO: 3399660 - RNA, 14 nt, Human
cuaccccuggcugu

SEQ ID NO: 3399661 - RNA, 21 nt, Human
cuacccgggaagggggcuggg

SEQ ID NO: 3399662 - RNA, 12 nt, Human
cuacccucccac

SEQ ID NO: 3399663 - RNA, 13 nt, Human
cuacccucccacc

SEQ ID NO: 3399664 - RNA, 19 nt, Human
cuacccucccacccccuuc

SEQ ID NO: 3399665 - RNA, 14 nt, Human
cuacccucccugcu

SEQ ID NO: 3399666 - RNA, 15 nt, Human
cuacccucccugcug

SEQ ID NO: 3399667 - RNA, 16 nt, Human
cuacccucccugcugu

SEQ ID NO: 3399668 - RNA, 23 nt, Human
cuacccucccugcuguccccucu

SEQ ID NO: 3399669 - RNA, 17 nt, Human
cuacccuccguuuuucu

SEQ ID NO: 3399670 - RNA, 15 nt, Human
cuacccucgggccca

SEQ ID NO: 3399671 - RNA, 16 nt, Human
cuacccucgggcccac

SEQ ID NO: 3399672 - RNA, 22 nt, Human
cuacccucgggcccaccuggcc

SEQ ID NO: 3399673 - RNA, 13 nt, Human
cuacccucuagag

SEQ ID NO: 3399674 - RNA, 17 nt, Human
cuacccugagcugaggc

SEQ ID NO: 3399675 - RNA, 14 nt, Human
cuacccugcauggc

SEQ ID NO: 3399676 - RNA, 19 nt, Human
cuacccuuuuucuccagcu

SEQ ID NO: 3399677 - RNA, 18 nt, Human
cuaccgaaaccuugccuu

SEQ ID NO: 3399678 - RNA, 21 nt, Human
cuaccgagucucuucuccacu

SEQ ID NO: 3399679 - RNA, 15 nt, Human
cuaccgcucuuggga

SEQ ID NO: 3399680 - RNA, 15 nt, Human
cuaccucaaccugua

SEQ ID NO: 3399681 - RNA, 17 nt, Human
cuaccucacuggggucc

SEQ ID NO: 3399682 - RNA, 13 nt, Human
cuaccucaggcag

SEQ ID NO: 3399683 - RNA, 18 nt, Human
cuaccucaggcagcucaa

SEQ ID NO: 3399684 - RNA, 12 nt, Human
cuaccucagguu

SEQ ID NO: 3399685 - RNA, 11 nt, Human
cuaccucccuc

SEQ ID NO: 3399686 - RNA, 15 nt, Human
cuaccucccuugccu

SEQ ID NO: 3399687 - RNA, 18 nt, Human
cuaccucuccagccucag

SEQ ID NO: 3399688 - RNA, 14 nt, Human
cuaccucucugucc

SEQ ID NO: 3399689 - RNA, 20 nt, Human
cuaccucucugucccuugcu

SEQ ID NO: 3399690 - RNA, 20 nt, Human
cuaccugacacucccuuggg

SEQ ID NO: 3399691 - RNA, 19 nt, Human
cuaccugaggggccucuua

SEQ ID NO: 3399692 - RNA, 16 nt, Human
cuaccugaucccacuc

SEQ ID NO: 3399693 - RNA, 17 nt, Human
cuaccugaucccacucc

SEQ ID NO: 3399694 - RNA, 14 nt, Human
cuaccugcccucaa

SEQ ID NO: 3399695 - RNA, 19 nt, Human
cuaccugcucagcccugca

SEQ ID NO: 3399696 - RNA, 14 nt, Human
cuaccuguaacuuu

SEQ ID NO: 3399697 - RNA, 12 nt, Human
cuaccugugccu

SEQ ID NO: 3399698 - RNA, 11 nt, Human
cuaccugugug

SEQ ID NO: 3399699 - RNA, 15 nt, Human
cuaccuucaaagcug

SEQ ID NO: 3399700 - RNA, 13 nt, Human
cuaccuucucccc

SEQ ID NO: 3399701 - RNA, 12 nt, Human
cuaccuucugua

SEQ ID NO: 3399702 - RNA, 14 nt, Human
cuaccuucuguagu

SEQ ID NO: 3399703 - RNA, 15 nt, Human
cuaccuucuguaguu

SEQ ID NO: 3399704 - RNA, 14 nt, Human
cuaccuugccccaa

SEQ ID NO: 3399705 - RNA, 19 nt, Human
cuaccuugcuuuugcuucu

SEQ ID NO: 3399706 - RNA, 14 nt, Human
cuaccuuuucucuu

SEQ ID NO: 3399707 - RNA, 21 nt, Human
cuacgcucuccuuucuuucua

SEQ ID NO: 3399708 - RNA, 19 nt, Human
cuacguuccuauugucauu

SEQ ID NO: 3399709 - RNA, 21 nt, Human
cuacguuuacucacagccagc

SEQ ID NO: 3399710 - RNA, 19 nt, Human
cuacuaaaaauacaaacaa

SEQ ID NO: 3399711 - RNA, 18 nt, Human
cuacuaauagaauaaagg

SEQ ID NO: 3399712 - RNA, 17 nt, Human
cuacuaccuguaaugac

SEQ ID NO: 3399713 - RNA, 16 nt, Human
cuacucaaagcaaaag

SEQ ID NO: 3399714 - RNA, 20 nt, Human
cuacucaagaggcugaggca

SEQ ID NO: 3399715 - RNA, 18 nt, Human
cuacucaaguagcauuua

SEQ ID NO: 3399716 - RNA, 15 nt, Human
cuacucacacaggca

SEQ ID NO: 3399717 - RNA, 23 nt, Human
cuacucacacaggcauuuccugg

SEQ ID NO: 3399718 - RNA, 17 nt, Human
cuacucacagucucuuu

SEQ ID NO: 3399719 - RNA, 14 nt, Human
cuacucacuuuucc

SEQ ID NO: 3399720 - RNA, 15 nt, Human
cuacucacuuuuccc

SEQ ID NO: 3399721 - RNA, 19 nt, Human
cuacucacuuuucccacuc

SEQ ID NO: 3399722 - RNA, 21 nt, Human
cuacucacuuuucccacucca

SEQ ID NO: 3399723 - RNA, 16 nt, Human
cuacucagaagccuga

SEQ ID NO: 3399724 - RNA, 18 nt, Human
cuacucagcagcccuccu

SEQ ID NO: 3399725 - RNA, 20 nt, Human
cuacucagcagcccuccuca

SEQ ID NO: 3399726 - RNA, 22 nt, Human
cuacucagcagcccuccucacc

SEQ ID NO: 3399727 - RNA, 11 nt, Human
cuacucagcau

SEQ ID NO: 3399728 - RNA, 20 nt, Human
cuacucaggaggcugaggca

SEQ ID NO: 3399729 - RNA, 23 nt, Human
cuacucaggaggcugaggcagaa

SEQ ID NO: 3399730 - RNA, 21 nt, Human
cuacucauacuuaagcaaaag

SEQ ID NO: 3399731 - RNA, 12 nt, Human
cuacucauuuua

SEQ ID NO: 3399732 - RNA, 14 nt, Human
cuacucccugcaga

SEQ ID NO: 3399733 - RNA, 17 nt, Human
cuacucccugcagaugc

SEQ ID NO: 3399734 - RNA, 22 nt, Human
cuacucccugcagaugccaccc

SEQ ID NO: 3399735 - RNA, 21 nt, Human
cuacuccucugcagugccuug

SEQ ID NO: 3399736 - RNA, 18 nt, Human
cuacuccuguaauuccua

SEQ ID NO: 3399737 - RNA, 20 nt, Human
cuacuccugucuucugcuuu

SEQ ID NO: 3399738 - RNA, 16 nt, Human
cuacucgggaagcuga

SEQ ID NO: 3399739 - RNA, 23 nt, Human
cuacucucacacugguucucaau

SEQ ID NO: 3399740 - RNA, 21 nt, Human
cuacucuccccacgagggcug

SEQ ID NO: 3399741 - RNA, 22 nt, Human
cuacucuccccacgagggcugg

SEQ ID NO: 3399742 - RNA, 17 nt, Human
cuacucuccucaucucu

SEQ ID NO: 3399743 - RNA, 13 nt, Human
cuacucugugcca

SEQ ID NO: 3399744 - RNA, 17 nt, Human
cuacucugugccagagc

SEQ ID NO: 3399745 - RNA, 20 nt, Human
cuacucugugccagagccug

SEQ ID NO: 3399746 - RNA, 21 nt, Human
cuacucugugccagagccugg

SEQ ID NO: 3399747 - RNA, 22 nt, Human
cuacucugugccagagccuggg

SEQ ID NO: 3399748 - RNA, 13 nt, Human
cuacucuguguca

SEQ ID NO: 3399749 - RNA, 16 nt, Human
cuacucugugucaggu

SEQ ID NO: 3399750 - RNA, 16 nt, Human
cuacucuuaagccauc

SEQ ID NO: 3399751 - RNA, 13 nt, Human
cuacugaaacaga

SEQ ID NO: 3399752 - RNA, 15 nt, Human
cuacugacauguggg

SEQ ID NO: 3399753 - RNA, 14 nt, Human
cuacugaggugcua

SEQ ID NO: 3399754 - RNA, 14 nt, Human
cuacugccaaccuc

SEQ ID NO: 3399755 - RNA, 23 nt, Human
cuacugccaaccucgcuccaacu

SEQ ID NO: 3399756 - RNA, 14 nt, Human
cuacugccauccug

SEQ ID NO: 3399757 - RNA, 21 nt, Human
cuacugccgucagugcugugc

SEQ ID NO: 3399758 - RNA, 14 nt, Human
cuacuggauucuua

SEQ ID NO: 3399759 - RNA, 16 nt, Human
cuacugggugucauuu

SEQ ID NO: 3399760 - RNA, 18 nt, Human
cuacugggugucauuuca

SEQ ID NO: 3399761 - RNA, 19 nt, Human
cuacugguccucuuaacug

SEQ ID NO: 3399762 - RNA, 13 nt, Human
cuacuggucucuc

SEQ ID NO: 3399763 - RNA, 15 nt, Human
cuacuggucucucua

SEQ ID NO: 3399764 - RNA, 20 nt, Human
cuacuggucucucuaugccu

SEQ ID NO: 3399765 - RNA, 21 nt, Human
cuacuguaaggcaaucauggu

SEQ ID NO: 3399766 - RNA, 16 nt, Human
cuacuguaauuuuaua

SEQ ID NO: 3399767 - RNA, 18 nt, Human
cuacugucaaaugaugug

SEQ ID NO: 3399768 - RNA, 19 nt, Human
cuacuguccuacccacccu

SEQ ID NO: 3399769 - RNA, 20 nt, Human
cuacugucucacugaaacau

SEQ ID NO: 3399770 - RNA, 17 nt, Human
cuacugucuuuggaaaa

SEQ ID NO: 3399771 - RNA, 22 nt, Human
cuacuguggaaaaauauuuaag

SEQ ID NO: 3399772 - RNA, 17 nt, Human
cuacugugugugugaau

SEQ ID NO: 3399773 - RNA, 15 nt, Human
cuacuguguuccugg

SEQ ID NO: 3399774 - RNA, 20 nt, Human
cuacuguguuccuggcaaua

SEQ ID NO: 3399775 - RNA, 23 nt, Human
cuacuguucagcuuuuauuccug

SEQ ID NO: 3399776 - RNA, 14 nt, Human
cuacuguucuaaag

SEQ ID NO: 3399777 - RNA, 22 nt, Human
cuacuguuguaagaauucugau

SEQ ID NO: 3399778 - RNA, 22 nt, Human
cuacuuacaugcauuacugcau

SEQ ID NO: 3399779 - RNA, 20 nt, Human
cuacuuacccaggugggucc

SEQ ID NO: 3399780 - RNA, 20 nt, Human
cuacuuagcauccuaagaaa

SEQ ID NO: 3399781 - RNA, 19 nt, Human
cuacuuaugaaaugugcac

SEQ ID NO: 3399782 - RNA, 20 nt, Human
cuaggcucagagaugugcac

SEQ ID NO: 3399783 - RNA, 13 nt, Human
cuaggcuccuuca

SEQ ID NO: 3399784 - RNA, 18 nt, Human
cuaggcucgccuucccuc

SEQ ID NO: 3399785 - RNA, 20 nt, Human
cuaggcucgccuucccuccu

SEQ ID NO: 3399786 - RNA, 17 nt, Human
cuaggcuggagcccagg

SEQ ID NO: 3399787 - RNA, 20 nt, Human
cuaggcuggagcccagggag

SEQ ID NO: 3399788 - RNA, 11 nt, Human
cuaggcugggg

SEQ ID NO: 3399789 - RNA, 13 nt, Human
cuaggcugggugc

SEQ ID NO: 3399790 - RNA, 21 nt, Human
cuaggcugggugcccacagcc

SEQ ID NO: 3399791 - RNA, 21 nt, Human
cuaggcuucagcauauuuaua

SEQ ID NO: 3399792 - RNA, 16 nt, Human
cuagggaaggccaccu

SEQ ID NO: 3399793 - RNA, 18 nt, Human
cuagggaaggccaccugc

SEQ ID NO: 3399794 - RNA, 18 nt, Human
cuagggaccuggggaagc

SEQ ID NO: 3399795 - RNA, 14 nt, Human
cuagggagccaugu

SEQ ID NO: 3399796 - RNA, 14 nt, Human
cuagggaggaccuu

SEQ ID NO: 3399797 - RNA, 23 nt, Human
cuagggaggaccuuaucugugcg

SEQ ID NO: 3399798 - RNA, 22 nt, Human
cuagggaggcauggucugcccu

SEQ ID NO: 3399799 - RNA, 13 nt, Human
cuagggaucccuc

SEQ ID NO: 3399800 - RNA, 17 nt, Human
cuagggaucccucaucu

SEQ ID NO: 3399801 - RNA, 19 nt, Human
cuagggauguucuggcccu

SEQ ID NO: 3399802 - RNA, 17 nt, Human
cuagggccaagcccagc

SEQ ID NO: 3399803 - RNA, 15 nt, Human
cuagggccacugaag

SEQ ID NO: 3399804 - RNA, 20 nt, Human
cuagggcugggaaacacucc

SEQ ID NO: 3399805 - RNA, 14 nt, Human
cuagggcugggugu

SEQ ID NO: 3399806 - RNA, 19 nt, Human
cuaggggacacuucccucu

SEQ ID NO: 3399807 - RNA, 14 nt, Human
cuagggggaaguga

SEQ ID NO: 3399808 - RNA, 15 nt, Human
cuaggggucacugua

SEQ ID NO: 3399809 - RNA, 18 nt, Human
cuaggggucaggcuccau

SEQ ID NO: 3399810 - RNA, 21 nt, Human
cuaggguacauggugcuggga

SEQ ID NO: 3399811 - RNA, 15 nt, Human
cuaggguccugggga

SEQ ID NO: 3399812 - RNA, 17 nt, Human
cuaggguggcccuugca

SEQ ID NO: 3399813 - RNA, 15 nt, Human
cuagguagaaaaagg

SEQ ID NO: 3399814 - RNA, 17 nt, Human
cuagguagaaaaagggu

SEQ ID NO: 3399815 - RNA, 19 nt, Human
cuagguagcccccucuucc

SEQ ID NO: 3399816 - RNA, 22 nt, Human
cuaggucaaggccugucccugg

SEQ ID NO: 3399817 - RNA, 13 nt, Human
cuaggucuccagu

SEQ ID NO: 3399818 - RNA, 24 nt, Human
cuaggugacagagugagacucugu

SEQ ID NO: 3399819 - RNA, 18 nt, Human
cuaggugcccuuggaggc

SEQ ID NO: 3399820 - RNA, 23 nt, Human
cuagguggcaaggcugugcuccc

SEQ ID NO: 3399821 - RNA, 17 nt, Human
cuaggugggccagcccc

SEQ ID NO: 3399822 - RNA, 14 nt, Human
cuagguguuuuguu

SEQ ID NO: 3399823 - RNA, 20 nt, Human
cuagguucccggucccgagu

SEQ ID NO: 3399824 - RNA, 16 nt, Human
cuagguucccuguucu

SEQ ID NO: 3399825 - RNA, 15 nt, Human
cuagguuuaacucag

SEQ ID NO: 3399826 - RNA, 16 nt, Human
cuagguuuaacucaga

SEQ ID NO: 3399827 - RNA, 13 nt, Human
cuagguuucaaag

SEQ ID NO: 3399828 - RNA, 16 nt, Human
cuaguaaaaauacaaa

SEQ ID NO: 3399829 - RNA, 13 nt, Human
cuaguaagaagac

SEQ ID NO: 3399830 - RNA, 18 nt, Human
cuaguaagugccuuccau

SEQ ID NO: 3399831 - RNA, 12 nt, Human
cuaguaauauau

SEQ ID NO: 3399832 - RNA, 16 nt, Human
cuaguaauuggaaagg

SEQ ID NO: 3399833 - RNA, 12 nt, Human
cuaguacaaauu

SEQ ID NO: 3399834 - RNA, 13 nt, Human
cuaguacacuuuu

SEQ ID NO: 3399835 - RNA, 15 nt, Human
cuaguacacuuuuau

SEQ ID NO: 3399836 - RNA, 15 nt, Human
cuaguacuagaaacu

SEQ ID NO: 3399837 - RNA, 14 nt, Human
cuaguacugugaau

SEQ ID NO: 3399838 - RNA, 20 nt, Human
cuaguagggguaccacugaa

SEQ ID NO: 3399839 - RNA, 16 nt, Human
cuaguaguucucuugg

SEQ ID NO: 3399840 - RNA, 16 nt, Human
cuaguaugaaauuaua

SEQ ID NO: 3399841 - RNA, 15 nt, Human
cuaguauugacaaaa

SEQ ID NO: 3399842 - RNA, 18 nt, Human
cuaguauugacaaaaugu

SEQ ID NO: 3399843 - RNA, 19 nt, Human
cuaguauugacaaaauguu

SEQ ID NO: 3399844 - RNA, 12 nt, Human
cuaguauuugaa

SEQ ID NO: 3399845 - RNA, 21 nt, Human
cuagucaacaguacccugguu

SEQ ID NO: 3399846 - RNA, 15 nt, Human
cuagucaagcuccuc

SEQ ID NO: 3399847 - RNA, 19 nt, Human
cuagucaagcuccuccucc

SEQ ID NO: 3399848 - RNA, 22 nt, Human
cuagucaagcuccuccucccug

SEQ ID NO: 3399849 - RNA, 16 nt, Human
cuagucaaucaagucu

SEQ ID NO: 3399850 - RNA, 20 nt, Human
cuagucaaucaagucuguuu

SEQ ID NO: 3399851 - RNA, 18 nt, Human
cuagucaaugacaugaau

SEQ ID NO: 3399852 - RNA, 20 nt, Human
cuagucaaugacaugaauuu

SEQ ID NO: 3399853 - RNA, 21 nt, Human
cuagucacgcaugcaguguug

SEQ ID NO: 3399854 - RNA, 15 nt, Human
cuagucccuuccccu

SEQ ID NO: 3399855 - RNA, 12 nt, Human
cuaguccuuguu

SEQ ID NO: 3399856 - RNA, 21 nt, Human
cuagucuccuuugcacugagg

SEQ ID NO: 3399857 - RNA, 21 nt, Human
cuagucucuaucauuaaaguu

SEQ ID NO: 3399858 - RNA, 14 nt, Human
cuagucugugugcu

SEQ ID NO: 3399859 - RNA, 13 nt, Human
cuagucuuaagaa

SEQ ID NO: 3399860 - RNA, 13 nt, Human
cuagucuuuugcu

SEQ ID NO: 3399861 - RNA, 14 nt, Human
cuagucuuuugcuu

SEQ ID NO: 3399862 - RNA, 16 nt, Human
cuagucuuuugcuuuu

SEQ ID NO: 3399863 - RNA, 20 nt, Human
cuagugaaacucguuaauuu

SEQ ID NO: 3399864 - RNA, 12 nt, Human
cuagugaaacuu

SEQ ID NO: 3399865 - RNA, 16 nt, Human
cuagugaaacuuuucu

SEQ ID NO: 3399866 - RNA, 19 nt, Human
cuagugaaagaggcagcuu

SEQ ID NO: 3399867 - RNA, 17 nt, Human
cuagugaaggcuucucu

SEQ ID NO: 3399868 - RNA, 21 nt, Human
cuagugaaggcuucucucugu

SEQ ID NO: 3399869 - RNA, 19 nt, Human
cuagugaauguaggcuggc

SEQ ID NO: 3399870 - RNA, 16 nt, Human
cuagugacccacaugc

SEQ ID NO: 3399871 - RNA, 19 nt, Human
cuagugacccacaugccau

SEQ ID NO: 3399872 - RNA, 19 nt, Human
cuagugaccccuucccugu

SEQ ID NO: 3399873 - RNA, 18 nt, Human
cuagugacccggaggcca

SEQ ID NO: 3399874 - RNA, 14 nt, Human
cuagugagcugggc

SEQ ID NO: 3399875 - RNA, 17 nt, Human
cuagugagcugggcaug

SEQ ID NO: 3399876 - RNA, 23 nt, Human
cuagugauuucuggggccccacc

SEQ ID NO: 3399877 - RNA, 13 nt, Human
cuagugcaaauca

SEQ ID NO: 3399878 - RNA, 13 nt, Human
cuagugcagcuga

SEQ ID NO: 3399879 - RNA, 14 nt, Human
cuagugcagcugaa

SEQ ID NO: 3399880 - RNA, 20 nt, Human
cuagugcagcugauuuuaac

SEQ ID NO: 3399881 - RNA, 21 nt, Human
cuagugcagcugauuuuaaca

SEQ ID NO: 3399882 - RNA, 22 nt, Human
cuagugcagcugauuuuaacaa

SEQ ID NO: 3399883 - RNA, 23 nt, Human
cuagugcccuccacagccgcagc

SEQ ID NO: 3399884 - RNA, 12 nt, Human
cuagugcugaag

SEQ ID NO: 3399885 - RNA, 12 nt, Human
cuagugcugcug

SEQ ID NO: 3399886 - RNA, 17 nt, Human
cuagugcugugaaaaaa

SEQ ID NO: 3399887 - RNA, 22 nt, Human
cuagugcugugaaaaaaaaaau

SEQ ID NO: 3399888 - RNA, 21 nt, Human
cuagugcuuuccuuuuuuaaa

SEQ ID NO: 3399889 - RNA, 19 nt, Human
cuaguggcuguccagugcc

SEQ ID NO: 3399890 - RNA, 22 nt, Human
cuagugggacagcccagagccu

SEQ ID NO: 3399891 - RNA, 17 nt, Human
cuagugggguuuccugg

SEQ ID NO: 3399892 - RNA, 18 nt, Human
cuagugggguuuccuggc

SEQ ID NO: 3399893 - RNA, 17 nt, Human
cuaguggucuuuguaag

SEQ ID NO: 3399894 - RNA, 18 nt, Human
cuaguggucuuuguaaga

SEQ ID NO: 3399895 - RNA, 22 nt, Human
cuaguggucuuuguaagagugu

SEQ ID NO: 3399896 - RNA, 21 nt, Human
cuaguguaccuccucucagug

SEQ ID NO: 3399897 - RNA, 23 nt, Human
cuaguguaccuccucucaguguu

SEQ ID NO: 3399898 - RNA, 15 nt, Human
cuaguguaucaaaau

SEQ ID NO: 3399899 - RNA, 21 nt, Human
cuagugugguguuuccuggca

SEQ ID NO: 3399900 - RNA, 15 nt, Human
cuaguguuugauugu

SEQ ID NO: 3399901 - RNA, 16 nt, Human
cuaguuauacuuauuu

SEQ ID NO: 3399902 - RNA, 22 nt, Human
cuaguuauuacccagaguuuuu

SEQ ID NO: 3399903 - RNA, 20 nt, Human
cuaguucagacacuuuggaa

SEQ ID NO: 3399904 - RNA, 22 nt, Human
cuaguucauccaauccucacug

SEQ ID NO: 3399905 - RNA, 17 nt, Human
cuaguucaucccuucuc

SEQ ID NO: 3399906 - RNA, 19 nt, Human
cuaguucaucccuucucuu

SEQ ID NO: 3399907 - RNA, 18 nt, Human
cuaguuccaccaucaagc

SEQ ID NO: 3399908 - RNA, 20 nt, Human
cuaguuccaccaucaagcca

SEQ ID NO: 3399909 - RNA, 16 nt, Human
cuaguuccccuguuua

SEQ ID NO: 3399910 - RNA, 16 nt, Human
cuaguucuaacaguga

SEQ ID NO: 3399911 - RNA, 14 nt, Human
cuaguucuguagaa

SEQ ID NO: 3399912 - RNA, 15 nt, Human
cuaguucuguagaaa

SEQ ID NO: 3399913 - RNA, 16 nt, Human
cuaguucuguagaaau

SEQ ID NO: 3399914 - RNA, 15 nt, Human
cuaguugaauacuug

SEQ ID NO: 3399915 - RNA, 15 nt, Human
cuaguugaggaguuu

SEQ ID NO: 3399916 - RNA, 23 nt, Human
cuaguugaucagcuuauugucua

SEQ ID NO: 3399917 - RNA, 15 nt, Human
cuaguuguuaucaau

SEQ ID NO: 3399918 - RNA, 22 nt, Human
cuaguuguuugauucagacagc

SEQ ID NO: 3399919 - RNA, 17 nt, Human
cuaguuugauuaaauuc

SEQ ID NO: 3399920 - RNA, 20 nt, Human
cuaguuugauuaaauucuug

SEQ ID NO: 3399921 - RNA, 19 nt, Human
cuaguuuucaguuuguaua

SEQ ID NO: 3399922 - RNA, 16 nt, Human
cuaguuuucuccuccc

SEQ ID NO: 3399923 - RNA, 19 nt, Human
cuaguuuucuccucccagg

SEQ ID NO: 3399924 - RNA, 20 nt, Human
cuaguuuucuccucccagga

SEQ ID NO: 3399925 - RNA, 13 nt, Human
cuaguuuuguuua

SEQ ID NO: 3399926 - RNA, 15 nt, Human
cuauaaaacucugca

SEQ ID NO: 3399927 - RNA, 22 nt, Human
cuauuauuuucacuguagaaug

SEQ ID NO: 3399928 - RNA, 18 nt, Human
cuauuauuuuuauaauug

SEQ ID NO: 3399929 - RNA, 19 nt, Human
cuauuauuuuuauaauugu

SEQ ID NO: 3399930 - RNA, 16 nt, Human
cuauucaaacagucuc

SEQ ID NO: 3399931 - RNA, 22 nt, Human
cuauucaagaggaaaugucaca

SEQ ID NO: 3399932 - RNA, 23 nt, Human
cuauucaagaggaaaugucacag

SEQ ID NO: 3399933 - RNA, 11 nt, Human
cuauucacaac

SEQ ID NO: 3399934 - RNA, 17 nt, Human
cuauucacaauuauucc

SEQ ID NO: 3399935 - RNA, 15 nt, Human
cuauucagacaagca

SEQ ID NO: 3399936 - RNA, 14 nt, Human
cuauucaguugugu

SEQ ID NO: 3399937 - RNA, 19 nt, Human
cuauucccacaccuccaca

SEQ ID NO: 3399938 - RNA, 22 nt, Human
cuauucccacaccuccacaguu

SEQ ID NO: 3399939 - RNA, 17 nt, Human
cuauuccccagcagggu

SEQ ID NO: 3399940 - RNA, 14 nt, Human
cuauuccugaacua

SEQ ID NO: 3399941 - RNA, 17 nt, Human
cuauuccugagagcugc

SEQ ID NO: 3399942 - RNA, 16 nt, Human
cuauuccuucuggccu

SEQ ID NO: 3399943 - RNA, 22 nt, Human
cuauuccuuucccuuccucuuc

SEQ ID NO: 3399944 - RNA, 14 nt, Human
cuauucuauugcag

SEQ ID NO: 3399945 - RNA, 19 nt, Human
cuauucucaaaguuuccua

SEQ ID NO: 3399946 - RNA, 21 nt, Human
cuauucucaaaguuuccuaau

SEQ ID NO: 3399947 - RNA, 16 nt, Human
cuauucucaccaggaa

SEQ ID NO: 3399948 - RNA, 15 nt, Human
cuauucuccagcuga

SEQ ID NO: 3399949 - RNA, 19 nt, Human
cuauucucuccucagacug

SEQ ID NO: 3399950 - RNA, 18 nt, Human
cuauucugagaugacuau

SEQ ID NO: 3399951 - RNA, 18 nt, Human
cuauucugccacuccuga

SEQ ID NO: 3399952 - RNA, 12 nt, Human
cuauucuguccc

SEQ ID NO: 3399953 - RNA, 15 nt, Human
cuauucugucccuag

SEQ ID NO: 3399954 - RNA, 16 nt, Human
cuauucugucccuagg

SEQ ID NO: 3399955 - RNA, 20 nt, Human
cuauucugucccuagguguu

SEQ ID NO: 3399956 - RNA, 19 nt, Human
cuauucuguguugcauuau

SEQ ID NO: 3399957 - RNA, 19 nt, Human
cuauucuugauguaaaauc

SEQ ID NO: 3399958 - RNA, 16 nt, Human
cuauugacaagucauu

SEQ ID NO: 3399959 - RNA, 15 nt, Human
cuauugacaauaaaa

SEQ ID NO: 3399960 - RNA, 13 nt, Human
cuauugacuucaa

SEQ ID NO: 3399961 - RNA, 19 nt, Human
cuauugauguacagucugu

SEQ ID NO: 3399962 - RNA, 17 nt, Human
cuauugcauuuauaugu

SEQ ID NO: 3399963 - RNA, 15 nt, Human
cuauugccaaccagu

SEQ ID NO: 3399964 - RNA, 19 nt, Human
cuauugccuucuuugaaga

SEQ ID NO: 3399965 - RNA, 20 nt, Human
cuauugccuucuuugaagaa

SEQ ID NO: 3399966 - RNA, 18 nt, Human
cuauugcuagagcuccuc

SEQ ID NO: 3399967 - RNA, 16 nt, Human
cuauugcugcuugagg

SEQ ID NO: 3399968 - RNA, 16 nt, Human
cuauuggaaaaaccac

SEQ ID NO: 3399969 - RNA, 21 nt, Human
cuauuggaggaucaguuuuuu

SEQ ID NO: 3399970 - RNA, 11 nt, Human
cuauugguaaa

SEQ ID NO: 3399971 - RNA, 12 nt, Human
cuauuguaagau

SEQ ID NO: 3399972 - RNA, 18 nt, Human
cuauuguaagauaaaaaa

SEQ ID NO: 3399973 - RNA, 12 nt, Human
cuauuguacaga

SEQ ID NO: 3399974 - RNA, 14 nt, Human
cuauugucauuaaa

SEQ ID NO: 3399975 - RNA, 14 nt, Human
cuauugugauuuga

SEQ ID NO: 3399976 - RNA, 20 nt, Human
cuauugugauuugacuguuu

SEQ ID NO: 3399977 - RNA, 23 nt, Human
cuauugugauuugacuguuuuua

SEQ ID NO: 3399978 - RNA, 22 nt, Human
cuauugugcaauguaaauauuu

SEQ ID NO: 3399979 - RNA, 20 nt, Human
cuauuuaaacuuauaaauca

SEQ ID NO: 3399980 - RNA, 15 nt, Human
cuauuuaaagccucc

SEQ ID NO: 3399981 - RNA, 10 nt, Human
cuauuuaaga

SEQ ID NO: 3399982 - RNA, 11 nt, Human
cuauuuaagau

SEQ ID NO: 3399983 - RNA, 15 nt, Human
cuauuuagacaugua

SEQ ID NO: 3399984 - RNA, 23 nt, Human
cuauuuagcaugacaagccccag

SEQ ID NO: 3399985 - RNA, 22 nt, Human
cuauuuaguuuuuguaauuuau

SEQ ID NO: 3399986 - RNA, 19 nt, Human
cuauuuaucuguguuuuug

SEQ ID NO: 3399987 - RNA, 22 nt, Human
cuauuuaucuguguuuuugaaa

SEQ ID NO: 3399988 - RNA, 11 nt, Human
cuauuuaugaa

SEQ ID NO: 3399989 - RNA, 14 nt, Human
cuauuuaugccuug

SEQ ID NO: 3399990 - RNA, 21 nt, Human
cuauuuaugccuugaugauuu

SEQ ID NO: 3399991 - RNA, 14 nt, Human
cuauuuauuaauau

SEQ ID NO: 3399992 - RNA, 15 nt, Human
cuauuuauuaauauu

SEQ ID NO: 3399993 - RNA, 20 nt, Human
cuauuuauuaauauuuaaca

SEQ ID NO: 3399994 - RNA, 16 nt, Human
cuauuuauuuacaaau

SEQ ID NO: 3399995 - RNA, 14 nt, Human
cuauuuauuuacug

SEQ ID NO: 3399996 - RNA, 18 nt, Human
cuauuucaacuucaggaa

SEQ ID NO: 3399997 - RNA, 13 nt, Human
cuauuucacugga

SEQ ID NO: 3399998 - RNA, 15 nt, Human
cuauuucacuggagc

SEQ ID NO: 3399999 - RNA, 14 nt, Human
cuauuucaguacuu

SEQ ID NO: 3400000 - RNA, 21 nt, Human
cuauuucaguguuaccugugu

SEQ ID NO: 3400001 - RNA, 15 nt, Human
cuauuucauguuuuu

SEQ ID NO: 3400002 - RNA, 17 nt, Human
cuauuucccaagcugga

SEQ ID NO: 3400003 - RNA, 12 nt, Human
cuauuucuaguu

SEQ ID NO: 3400004 - RNA, 20 nt, Human
cuauuucuauauuuucauuc

SEQ ID NO: 3400005 - RNA, 17 nt, Human
cuauuucucuuucuuua

SEQ ID NO: 3400006 - RNA, 23 nt, Human
cuauuucugagaagguccuuaau

SEQ ID NO: 3400007 - RNA, 13 nt, Human
cuauuucugcuga

SEQ ID NO: 3400008 - RNA, 21 nt, Human
cuauuucugggucuuuugcua

SEQ ID NO: 3400009 - RNA, 16 nt, Human
cuauuucuuaaacacu

SEQ ID NO: 3400010 - RNA, 18 nt, Human
cuauuucuuaaacacuug

SEQ ID NO: 3400011 - RNA, 21 nt, Human
cuauuucuuuauauuuaucca

SEQ ID NO: 3400012 - RNA, 11 nt, Human
cuauuugcaau

SEQ ID NO: 3400013 - RNA, 21 nt, Human
cuauuugcaauuccugcuccu

SEQ ID NO: 3400014 - RNA, 19 nt, Human
cuauuugcuuauuuaauaa

SEQ ID NO: 3400015 - RNA, 21 nt, Human
cuauuuguaaaucugccacaa

SEQ ID NO: 3400016 - RNA, 20 nt, Human
cuauuuuaaaauaaauuagu

SEQ ID NO: 3400017 - RNA, 23 nt, Human
cuauuuuaagacugauuuuaaua

SEQ ID NO: 3400018 - RNA, 18 nt, Human
cuauuuuaauaaacacuc

SEQ ID NO: 3400019 - RNA, 14 nt, Human
cuauuuuacugucu

SEQ ID NO: 3400020 - RNA, 16 nt, Human
cuauuuucagaaucug

SEQ ID NO: 3400021 - RNA, 12 nt, Human
cuauuuucagau

SEQ ID NO: 3400022 - RNA, 16 nt, Human
cuauuuucauuuucug

SEQ ID NO: 3400023 - RNA, 19 nt, Human
cuauuuuccaggcuucugc

SEQ ID NO: 3400024 - RNA, 15 nt, Human
cuauuuucuaaagac

SEQ ID NO: 3400025 - RNA, 14 nt, Human
cuauuuucuacaau

SEQ ID NO: 3400026 - RNA, 13 nt, Human
cuauuuucucuga

SEQ ID NO: 3400027 - RNA, 14 nt, Human
cuauuuugaugcag

SEQ ID NO: 3400028 - RNA, 21 nt, Human
cuauuuugaugcagcauuuga

SEQ ID NO: 3400029 - RNA, 17 nt, Human
cuauuuuggauuguaua

SEQ ID NO: 3400030 - RNA, 12 nt, Human
cuauuuuguaaa

SEQ ID NO: 3400031 - RNA, 12 nt, Human
cuauuuuuacug

SEQ ID NO: 3400032 - RNA, 17 nt, Human
cuauuuuuacugccacu

SEQ ID NO: 3400033 - RNA, 14 nt, Human
cuauuuuuaucuga

SEQ ID NO: 3400034 - RNA, 20 nt, Human
cuauuuuucucuccuguccu

SEQ ID NO: 3400035 - RNA, 20 nt, Human
cuauuuuuggagguuuauua

SEQ ID NO: 3400036 - RNA, 21 nt, Human
cuauuuuuggcagucugaauu

SEQ ID NO: 3400037 - RNA, 15 nt, Human
cuauuuuuguaaacu

SEQ ID NO: 3400038 - RNA, 12 nt, Human
cuauuuuuguag

SEQ ID NO: 3400039 - RNA, 13 nt, Human
cuauuuuuguaga

SEQ ID NO: 3400040 - RNA, 22 nt, Human
cuauuuuugucuuauauauauu

SEQ ID NO: 3400041 - RNA, 21 nt, Human
cuauuuuuuuaaaaucacuaa

SEQ ID NO: 3400042 - RNA, 18 nt, Human
cuauuuuuuuuuuuuugu

SEQ ID NO: 3400043 - RNA, 21 nt, Human
cucaaaaaaaaaaaaaugcac

SEQ ID NO: 3400044 - RNA, 18 nt, Human
cucaaaaaaagaaaaaga

SEQ ID NO: 3400045 - RNA, 17 nt, Human
cucaaaacugcacuguc

SEQ ID NO: 3400046 - RNA, 20 nt, Human
cucaaaacuuaacauauuua

SEQ ID NO: 3400047 - RNA, 12 nt, Human
cucaaaagaacu

SEQ ID NO: 3400048 - RNA, 12 nt, Human
cucaaaagcauu

SEQ ID NO: 3400049 - RNA, 22 nt, Human
cucaaaagcauuuaucauucuu

SEQ ID NO: 3400050 - RNA, 18 nt, Human
cucaaaagcugggcaggu

SEQ ID NO: 3400051 - RNA, 13 nt, Human
cucaaaaugucua

SEQ ID NO: 3400052 - RNA, 11 nt, Human
cucaaaauuau

SEQ ID NO: 3400053 - RNA, 20 nt, Human
cucaaacaaugacaaagcag

SEQ ID NO: 3400054 - RNA, 13 nt, Human
cucaaacaauuga

SEQ ID NO: 3400055 - RNA, 18 nt, Human
cucaaaccaaaucacuga

SEQ ID NO: 3400056 - RNA, 18 nt, Human
cucaaaccuguuuaaaua

SEQ ID NO: 3400057 - RNA, 21 nt, Human
cucaaaccuguuuaaauauuu

SEQ ID NO: 3400058 - RNA, 12 nt, Human
cucaaacuauga

SEQ ID NO: 3400059 - RNA, 14 nt, Human
cucaaacuccugac

SEQ ID NO: 3400060 - RNA, 19 nt, Human
cucaaacugaggaauuuca

SEQ ID NO: 3400061 - RNA, 16 nt, Human
cucaaacuucuggcuc

SEQ ID NO: 3400062 - RNA, 12 nt, Human
cucaaagcaaaa

SEQ ID NO: 3400063 - RNA, 15 nt, Human
cucaaagcaaaagug

SEQ ID NO: 3400064 - RNA, 22 nt, Human
cucaaagcacuguugagaagga

SEQ ID NO: 3400065 - RNA, 22 nt, Human
cucaaaggccagguugcuaaga

SEQ ID NO: 3400066 - RNA, 18 nt, Human
cucaaagguuuggaagga

SEQ ID NO: 3400067 - RNA, 17 nt, Human
cucaaaguuaaccuacc

SEQ ID NO: 3400068 - RNA, 21 nt, Human
cucaaaguuugacaggaaccu

SEQ ID NO: 3400069 - RNA, 15 nt, Human
cucaaaguuuugaaa

SEQ ID NO: 3400070 - RNA, 21 nt, Human
cucaaauaauauuuuuuuccu

SEQ ID NO: 3400071 - RNA, 18 nt, Human
cucaaauacacauuugcu

SEQ ID NO: 3400072 - RNA, 20 nt, Human
cucaaauaggcuauuaaaaa

SEQ ID NO: 3400073 - RNA, 18 nt, Human
cucccgaguagcugggac

SEQ ID NO: 3400074 - RNA, 20 nt, Human
cucccgaguagcugggacua

SEQ ID NO: 3400075 - RNA, 22 nt, Human
cucccgaguagcugggauuaca

SEQ ID NO: 3400076 - RNA, 21 nt, Human
cucccgccagacuguuagaaa

SEQ ID NO: 3400077 - RNA, 16 nt, Human
cucccgccuccaaccc

SEQ ID NO: 3400078 - RNA, 19 nt, Human
cucccggagguuggguggg

SEQ ID NO: 3400079 - RNA, 15 nt, Human
cucccggcccugccu

SEQ ID NO: 3400080 - RNA, 12 nt, Human
cucccggcgugg

SEQ ID NO: 3400081 - RNA, 21 nt, Human
cucccgggacucacuggcagc

SEQ ID NO: 3400082 - RNA, 15 nt, Human
cucccgggacucugc

SEQ ID NO: 3400083 - RNA, 15 nt, Human
cucccgggcccuccc

SEQ ID NO: 3400084 - RNA, 20 nt, Human
cucccgggcccucccuugga

SEQ ID NO: 3400085 - RNA, 21 nt, Human
cucccgucagggcccaagucc

SEQ ID NO: 3400086 - RNA, 21 nt, Human
cucccguguaucuggacacug

SEQ ID NO: 3400087 - RNA, 13 nt, Human
cucccuacccuaa

SEQ ID NO: 3400088 - RNA, 11 nt, Human
cucccuaccuc

SEQ ID NO: 3400089 - RNA, 18 nt, Human
cucccuaccucaaccugu

SEQ ID NO: 3400090 - RNA, 22 nt, Human
cucccuaccucaaccuguaaau

SEQ ID NO: 3400091 - RNA, 21 nt, Human
cucccuagccagcacuuguau

SEQ ID NO: 3400092 - RNA, 17 nt, Human
cucccuauuuuuuuucu

SEQ ID NO: 3400093 - RNA, 20 nt, Human
cucccuauuuuuuuucuguu

SEQ ID NO: 3400094 - RNA, 17 nt, Human
cucccucaauucccccu

SEQ ID NO: 3400095 - RNA, 19 nt, Human
cucccucacccccuccuuc

SEQ ID NO: 3400096 - RNA, 15 nt, Human
cucccucacccugag

SEQ ID NO: 3400097 - RNA, 18 nt, Human
cucccucacccugagccc

SEQ ID NO: 3400098 - RNA, 15 nt, Human
cucccucacucucag

SEQ ID NO: 3400099 - RNA, 12 nt, Human
cucccucagccc

SEQ ID NO: 3400100 - RNA, 13 nt, Human
cucccucagcccc

SEQ ID NO: 3400101 - RNA, 16 nt, Human
cucccucagccccucu

SEQ ID NO: 3400102 - RNA, 18 nt, Human
cucccucagccccucuug

SEQ ID NO: 3400103 - RNA, 14 nt, Human
cucccucagugccc

SEQ ID NO: 3400104 - RNA, 23 nt, Human
cucccucaucaaggacacgggcc

SEQ ID NO: 3400105 - RNA, 22 nt, Human
cucccucauuucaggagcagcc

SEQ ID NO: 3400106 - RNA, 15 nt, Human
cucccuccaccccag

SEQ ID NO: 3400107 - RNA, 18 nt, Human
cucccuccaccccaggac

SEQ ID NO: 3400108 - RNA, 19 nt, Human
cucccuccaccccaggacg

SEQ ID NO: 3400109 - RNA, 14 nt, Human
cucccuccagcaca

SEQ ID NO: 3400110 - RNA, 15 nt, Human
cucccuccagcacaa

SEQ ID NO: 3400111 - RNA, 12 nt, Human
cucccucccaca

SEQ ID NO: 3400112 - RNA, 11 nt, Human
cucccucccag

SEQ ID NO: 3400113 - RNA, 14 nt, Human
cucccucccaggac

SEQ ID NO: 3400114 - RNA, 18 nt, Human
cucccuccccugcccugg

SEQ ID NO: 3400115 - RNA, 23 nt, Human
cucccuccccugcccugguccag

SEQ ID NO: 3400116 - RNA, 17 nt, Human
cucccuccccuugccug

SEQ ID NO: 3400117 - RNA, 15 nt, Human
cucccuccgccccca

SEQ ID NO: 3400118 - RNA, 17 nt, Human
cucccuccggcuugacc

SEQ ID NO: 3400119 - RNA, 20 nt, Human
cucccuccgggucuuccuac

SEQ ID NO: 3400120 - RNA, 19 nt, Human
cucccuccuaaccuagaga

SEQ ID NO: 3400121 - RNA, 19 nt, Human
cucccuccucaccucugga

SEQ ID NO: 3400122 - RNA, 14 nt, Human
cucccuccuccagg

SEQ ID NO: 3400123 - RNA, 15 nt, Human
cucccuccuccaggc

SEQ ID NO: 3400124 - RNA, 13 nt, Human
cucccuccucugc

SEQ ID NO: 3400125 - RNA, 20 nt, Human
cucccucgaacccacacugc

SEQ ID NO: 3400126 - RNA, 20 nt, Human
cucccucuacugggagccua

SEQ ID NO: 3400127 - RNA, 20 nt, Human
cucccucuaggcucugccuu

SEQ ID NO: 3400128 - RNA, 14 nt, Human
cucccucuauuuau

SEQ ID NO: 3400129 - RNA, 16 nt, Human
cucccucucacugucu

SEQ ID NO: 3400130 - RNA, 11 nt, Human
cucccucuccg

SEQ ID NO: 3400131 - RNA, 20 nt, Human
cucccucucucuucugcucc

SEQ ID NO: 3400132 - RNA, 17 nt, Human
cucccucugaccugcag

SEQ ID NO: 3400133 - RNA, 17 nt, Human
cucccucugaggcugua

SEQ ID NO: 3400134 - RNA, 14 nt, Human
cucccucuggcccu

SEQ ID NO: 3400135 - RNA, 17 nt, Human
cucccucuggcccugcc

SEQ ID NO: 3400136 - RNA, 19 nt, Human
cucccucuggcccugccuu

SEQ ID NO: 3400137 - RNA, 20 nt, Human
cucccucuggcccugccuuc

SEQ ID NO: 3400138 - RNA, 14 nt, Human
cucccucugguccc

SEQ ID NO: 3400139 - RNA, 20 nt, Human
cucccucuucucaagugccu

SEQ ID NO: 3400140 - RNA, 13 nt, Human
cucccucuucuuu

SEQ ID NO: 3400141 - RNA, 11 nt, Human
cucccucuugu

SEQ ID NO: 3400142 - RNA, 21 nt, Human
cucccugaaaauguuuuucug

SEQ ID NO: 3400143 - RNA, 13 nt, Human
cucccugaagcca

SEQ ID NO: 3400144 - RNA, 18 nt, Human
cucccugaagccagccuu

SEQ ID NO: 3400145 - RNA, 12 nt, Human
cucccugacccu

SEQ ID NO: 3400146 - RNA, 16 nt, Human
cucccugacuuuucug

SEQ ID NO: 3400147 - RNA, 15 nt, Human
cucccugauguacag

SEQ ID NO: 3400148 - RNA, 19 nt, Human
cucccugcacaagccaggg

SEQ ID NO: 3400149 - RNA, 16 nt, Human
cucccugcagaugcca

SEQ ID NO: 3400150 - RNA, 22 nt, Human
cucccugcaucugaccagcagc

SEQ ID NO: 3400151 - RNA, 14 nt, Human
cucccugcauggca

SEQ ID NO: 3400152 - RNA, 22 nt, Human
cucccugcauggcauccuccag

SEQ ID NO: 3400153 - RNA, 13 nt, Human
cucccugccagag

SEQ ID NO: 3400154 - RNA, 14 nt, Human
cucccugcccaggc

SEQ ID NO: 3400155 - RNA, 15 nt, Human
cucccugccccaaau

SEQ ID NO: 3400156 - RNA, 13 nt, Human
cucccugccccuc

SEQ ID NO: 3400157 - RNA, 21 nt, Human
cucccugccccucccuucaac

SEQ ID NO: 3400158 - RNA, 15 nt, Human
cucccugccuccagg

SEQ ID NO: 3400159 - RNA, 12 nt, Human
cucccugccugg

SEQ ID NO: 3400160 - RNA, 13 nt, Human
cucccugccuggc

SEQ ID NO: 3400161 - RNA, 18 nt, Human
cucccugcuguccccucu

SEQ ID NO: 3400162 - RNA, 11 nt, Human
cucccuggagu

SEQ ID NO: 3400163 - RNA, 12 nt, Human
cucccuggagug

SEQ ID NO: 3400164 - RNA, 16 nt, Human
cucccuggccuguucu

SEQ ID NO: 3400165 - RNA, 12 nt, Human
cucccuggcucc

SEQ ID NO: 3400166 - RNA, 15 nt, Human
cucccuggcucccau

SEQ ID NO: 3400167 - RNA, 15 nt, Human
cucccuggcucucag

SEQ ID NO: 3400168 - RNA, 18 nt, Human
cucccuggcucucagaag

SEQ ID NO: 3400169 - RNA, 15 nt, Human
cucccuggcugcccu

SEQ ID NO: 3400170 - RNA, 15 nt, Human
cucccuggcuucugu

SEQ ID NO: 3400171 - RNA, 18 nt, Human
cucccuggcuucuguggg

SEQ ID NO: 3400172 - RNA, 12 nt, Human
cucccuggugcu

SEQ ID NO: 3400173 - RNA, 13 nt, Human
cucccuggugcuu

SEQ ID NO: 3400174 - RNA, 18 nt, Human
cucccugguucugaugau

SEQ ID NO: 3400175 - RNA, 18 nt, Human
cucccuguacaguguuac

SEQ ID NO: 3400176 - RNA, 15 nt, Human
cucccuguccuccuc

SEQ ID NO: 3400177 - RNA, 13 nt, Human
cucccugugcccc

SEQ ID NO: 3400178 - RNA, 13 nt, Human
cucccugugucca

SEQ ID NO: 3400179 - RNA, 21 nt, Human
cucccuguguccaccuguggg

SEQ ID NO: 3400180 - RNA, 16 nt, Human
cucccuguuccccaga

SEQ ID NO: 3400181 - RNA, 17 nt, Human
cucccuguuccccagag

SEQ ID NO: 3400182 - RNA, 17 nt, Human
cucccuguucuugggua

SEQ ID NO: 3400183 - RNA, 17 nt, Human
cucccuuagcucccugu

SEQ ID NO: 3400184 - RNA, 19 nt, Human
cucccuucaaccauucccc

SEQ ID NO: 3400185 - RNA, 16 nt, Human
cucccuucagccccca

SEQ ID NO: 3400186 - RNA, 15 nt, Human
cucccuucccaccuc

SEQ ID NO: 3400187 - RNA, 17 nt, Human
cucccuucccauaagcu

SEQ ID NO: 3400188 - RNA, 14 nt, Human
cucccuucccuccu

SEQ ID NO: 3400189 - RNA, 19 nt, Human
cucccuuccgacccucugg

SEQ ID NO: 3400190 - RNA, 20 nt, Human
cucccuuccgacccucuggg

SEQ ID NO: 3400191 - RNA, 10 nt, Human
cucccuuccu

SEQ ID NO: 3400192 - RNA, 14 nt, Human
cucccuuccuccca

SEQ ID NO: 3400193 - RNA, 17 nt, Human
cucccuucgguggaaga

SEQ ID NO: 3400194 - RNA, 14 nt, Human
cucccuucucccug

SEQ ID NO: 3400195 - RNA, 17 nt, Human
cucccuucucccuggau

SEQ ID NO: 3400196 - RNA, 21 nt, Human
cucccuucucuacacucuugu

SEQ ID NO: 3400197 - RNA, 14 nt, Human
cucccuucugcuac

SEQ ID NO: 3400198 - RNA, 21 nt, Human
cucccuugccuuucgaggccu

SEQ ID NO: 3400199 - RNA, 14 nt, Human
cucccuugcuggcc

SEQ ID NO: 3400200 - RNA, 17 nt, Human
cucccuugcuggcccca

SEQ ID NO: 3400201 - RNA, 18 nt, Human
cucccuugcuggccccag

SEQ ID NO: 3400202 - RNA, 19 nt, Human
cucccuuggaaaccugccc

SEQ ID NO: 3400203 - RNA, 21 nt, Human
cucccuuggaaaccugcccug

SEQ ID NO: 3400204 - RNA, 16 nt, Human
cucccuugggcucuga

SEQ ID NO: 3400205 - RNA, 20 nt, Human
cucccuugggcucugaugaa

SEQ ID NO: 3400206 - RNA, 21 nt, Human
cucccuugguggcaagagccc

SEQ ID NO: 3400207 - RNA, 13 nt, Human
cucccuuucaaca

SEQ ID NO: 3400208 - RNA, 15 nt, Human
cucccuuucacuaaa

SEQ ID NO: 3400209 - RNA, 15 nt, Human
cucccuuucccuucu

SEQ ID NO: 3400210 - RNA, 19 nt, Human
cucccuuucuaucguucuc

SEQ ID NO: 3400211 - RNA, 14 nt, Human
cucccuuucucccc

SEQ ID NO: 3400212 - RNA, 17 nt, Human
cucccuuucuucccuac

SEQ ID NO: 3400213 - RNA, 14 nt, Human
cucccuuugaaaug

SEQ ID NO: 3400214 - RNA, 16 nt, Human
cuccgagagggagaga

SEQ ID NO: 3400215 - RNA, 17 nt, Human
cuccgagaggugggcca

SEQ ID NO: 3400216 - RNA, 19 nt, Human
cuccgagugaacuggucuu

SEQ ID NO: 3400217 - RNA, 22 nt, Human
cuccgcaggacuuccccggagg

SEQ ID NO: 3400218 - RNA, 14 nt, Human
cuccgccagccucc

SEQ ID NO: 3400219 - RNA, 15 nt, Human
cuccgccagccuccu

SEQ ID NO: 3400220 - RNA, 21 nt, Human
cuccucgagggcagggacuuu

SEQ ID NO: 3400221 - RNA, 19 nt, Human
cuccucggaaccgcucacc

SEQ ID NO: 3400222 - RNA, 20 nt, Human
cuccucggcccccuccaucg

SEQ ID NO: 3400223 - RNA, 15 nt, Human
cuccucggcuggcug

SEQ ID NO: 3400224 - RNA, 20 nt, Human
cuccucgugaaagugcauuu

SEQ ID NO: 3400225 - RNA, 19 nt, Human
cuccucguuccuuucuccu

SEQ ID NO: 3400226 - RNA, 18 nt, Human
cuccucuagcuguggggg

SEQ ID NO: 3400227 - RNA, 17 nt, Human
cuccucuauccugggcu

SEQ ID NO: 3400228 - RNA, 14 nt, Human
cuccucucacuccc

SEQ ID NO: 3400229 - RNA, 22 nt, Human
cuccucucacuccccagccugg

SEQ ID NO: 3400230 - RNA, 13 nt, Human
cuccucucagccc

SEQ ID NO: 3400231 - RNA, 15 nt, Human
cuccucucaguguuu

SEQ ID NO: 3400232 - RNA, 13 nt, Human
cuccucuccacca

SEQ ID NO: 3400233 - RNA, 13 nt, Human
cuccucuccaggc

SEQ ID NO: 3400234 - RNA, 15 nt, Human
cuccucuccaggcac

SEQ ID NO: 3400235 - RNA, 23 nt, Human
cuccucucccaucccccugcccu

SEQ ID NO: 3400236 - RNA, 21 nt, Human
cuccucucccauugucccucu

SEQ ID NO: 3400237 - RNA, 13 nt, Human
cuccucuccccag

SEQ ID NO: 3400238 - RNA, 22 nt, Human
cuccucuccccagcaagugaga

SEQ ID NO: 3400239 - RNA, 15 nt, Human
cuccucuccccagcc

SEQ ID NO: 3400240 - RNA, 19 nt, Human
cuccucuccccagcccaga

SEQ ID NO: 3400241 - RNA, 21 nt, Human
cuccucuccccagcccagaga

SEQ ID NO: 3400242 - RNA, 14 nt, Human
cuccucuccccucu

SEQ ID NO: 3400243 - RNA, 15 nt, Human
cuccucuccccucua

SEQ ID NO: 3400244 - RNA, 21 nt, Human
cuccucuccugacaauacugu

SEQ ID NO: 3400245 - RNA, 13 nt, Human
cuccucuccugga

SEQ ID NO: 3400246 - RNA, 15 nt, Human
cuccucuccuggagg

SEQ ID NO: 3400247 - RNA, 18 nt, Human
cuccucucuaaccuccuu

SEQ ID NO: 3400248 - RNA, 13 nt, Human
cuccucugaaaca

SEQ ID NO: 3400249 - RNA, 15 nt, Human
cuccucugaaacagc

SEQ ID NO: 3400250 - RNA, 22 nt, Human
cuccucugaaacagcugccuua

SEQ ID NO: 3400251 - RNA, 13 nt, Human
cuccucugacuca

SEQ ID NO: 3400252 - RNA, 11 nt, Human
cuccucugcca

SEQ ID NO: 3400253 - RNA, 24 nt, Human
cuccucugcccgggagcucaggaa

SEQ ID NO: 3400254 - RNA, 12 nt, Human
cuccucugcuga

SEQ ID NO: 3400255 - RNA, 20 nt, Human
cuccucugcugaccugcuga

SEQ ID NO: 3400256 - RNA, 21 nt, Human
cuccucugcugaccugcugac

SEQ ID NO: 3400257 - RNA, 13 nt, Human
cuccucugcugcu

SEQ ID NO: 3400258 - RNA, 12 nt, Human
cuccucugcuug

SEQ ID NO: 3400259 - RNA, 20 nt, Human
cuccucugcuugccaucccu

SEQ ID NO: 3400260 - RNA, 22 nt, Human
cuccucugcuugccaucccucc

SEQ ID NO: 3400261 - RNA, 21 nt, Human
cuccucuggacggcaggcuca

SEQ ID NO: 3400262 - RNA, 18 nt, Human
cuccucuguccagggccc

SEQ ID NO: 3400263 - RNA, 13 nt, Human
cuccucugucccu

SEQ ID NO: 3400264 - RNA, 16 nt, Human
cuccucugucugcccu

SEQ ID NO: 3400265 - RNA, 23 nt, Human
cuccucugugaccaaugucuuga

SEQ ID NO: 3400266 - RNA, 18 nt, Human
cuccucuguggugucugc

SEQ ID NO: 3400267 - RNA, 19 nt, Human
cuccucuguggugucugcc

SEQ ID NO: 3400268 - RNA, 20 nt, Human
cuccucuucaccccggcagg

SEQ ID NO: 3400269 - RNA, 22 nt, Human
cuccucuucaccccggcaggcc

SEQ ID NO: 3400270 - RNA, 13 nt, Human
cuccucuucccca

SEQ ID NO: 3400271 - RNA, 19 nt, Human
cuccucuucccccuuccaa

SEQ ID NO: 3400272 - RNA, 14 nt, Human
cuccucuuguaaau

SEQ ID NO: 3400273 - RNA, 21 nt, Human
cuccucuuguaaauaaagccc

SEQ ID NO: 3400274 - RNA, 19 nt, Human
cuccucuuuaaaacaaaac

SEQ ID NO: 3400275 - RNA, 15 nt, Human
cuccucuuuccucuc

SEQ ID NO: 3400276 - RNA, 12 nt, Human
cuccucuuucuc

SEQ ID NO: 3400277 - RNA, 14 nt, Human
cuccucuuucucuc

SEQ ID NO: 3400278 - RNA, 15 nt, Human
cuccucuuucucucc

SEQ ID NO: 3400279 - RNA, 20 nt, Human
cuccucuuuguuuuguuuua

SEQ ID NO: 3400280 - RNA, 22 nt, Human
cuccugaaaagguuuaugaaaa

SEQ ID NO: 3400281 - RNA, 18 nt, Human
cuccugaaccgcacagcu

SEQ ID NO: 3400282 - RNA, 17 nt, Human
cuccugacacccuucuc

SEQ ID NO: 3400283 - RNA, 22 nt, Human
cuccugacacccuucucccacu

SEQ ID NO: 3400284 - RNA, 18 nt, Human
cuccugacagaaggugcc

SEQ ID NO: 3400285 - RNA, 12 nt, Human
cuccugaccagu

SEQ ID NO: 3400286 - RNA, 16 nt, Human
cuccugacccaguccc

SEQ ID NO: 3400287 - RNA, 23 nt, Human
cuccugacccaguccccgugccc

SEQ ID NO: 3400288 - RNA, 16 nt, Human
cuccugaccucaggca

SEQ ID NO: 3400289 - RNA, 16 nt, Human
cuccugaccugucacc

SEQ ID NO: 3400290 - RNA, 15 nt, Human
cuccugacuguaaca

SEQ ID NO: 3400291 - RNA, 20 nt, Human
cuccugagaaaaaagguucc

SEQ ID NO: 3400292 - RNA, 16 nt, Human
cuccugagaaauguua

SEQ ID NO: 3400293 - RNA, 23 nt, Human
cuccugagaccccuggccuccgg

SEQ ID NO: 3400294 - RNA, 11 nt, Human
cuccugagccc

SEQ ID NO: 3400295 - RNA, 14 nt, Human
cuccugagccccca

SEQ ID NO: 3400296 - RNA, 18 nt, Human
cuccugaggacagcuguc

SEQ ID NO: 3400297 - RNA, 19 nt, Human
cuccugaggauguguccca

SEQ ID NO: 3400298 - RNA, 20 nt, Human
cuccugaggggcaucugccc

SEQ ID NO: 3400299 - RNA, 21 nt, Human
cuccugaggggcaucugcccc

SEQ ID NO: 3400300 - RNA, 22 nt, Human
cuccugaggggcaucugccccu

SEQ ID NO: 3400301 - RNA, 16 nt, Human
cuccugagugcuugcu

SEQ ID NO: 3400302 - RNA, 17 nt, Human
cuccugcacuuacuugc

SEQ ID NO: 3400303 - RNA, 18 nt, Human
cuccugcacuuacuugcu

SEQ ID NO: 3400304 - RNA, 14 nt, Human
cuccugcagaccac

SEQ ID NO: 3400305 - RNA, 19 nt, Human
cuccugcagcauggucccu

SEQ ID NO: 3400306 - RNA, 11 nt, Human
cuccugcaggc

SEQ ID NO: 3400307 - RNA, 15 nt, Human
cuccugcaggcagcc

SEQ ID NO: 3400308 - RNA, 17 nt, Human
cuccugcaggcagccag

SEQ ID NO: 3400309 - RNA, 14 nt, Human
cuccugccaaggag

SEQ ID NO: 3400310 - RNA, 13 nt, Human
cuccugccacauu

SEQ ID NO: 3400311 - RNA, 11 nt, Human
cuccugccacc

SEQ ID NO: 3400312 - RNA, 21 nt, Human
cuccugccaccacgcccggcu

SEQ ID NO: 3400313 - RNA, 18 nt, Human
cuccugccaguguggaac

SEQ ID NO: 3400314 - RNA, 12 nt, Human
cuccugcccagg

SEQ ID NO: 3400315 - RNA, 16 nt, Human
cuccugcccaggagag

SEQ ID NO: 3400316 - RNA, 17 nt, Human
cuccugcccaggagagc

SEQ ID NO: 3400317 - RNA, 22 nt, Human
cuccugcccaggagagccagcc

SEQ ID NO: 3400318 - RNA, 13 nt, Human
cuccugcccaguc

SEQ ID NO: 3400319 - RNA, 17 nt, Human
cuccugcccccacaccu

SEQ ID NO: 3400320 - RNA, 20 nt, Human
cuccugcccccacaccuggc

SEQ ID NO: 3400321 - RNA, 21 nt, Human
cuccugcccgcagaccucugg

SEQ ID NO: 3400322 - RNA, 19 nt, Human
cuccugcccgccacacaga

SEQ ID NO: 3400323 - RNA, 12 nt, Human
cuccugcccugu

SEQ ID NO: 3400324 - RNA, 13 nt, Human
cuccugcccuguu

SEQ ID NO: 3400325 - RNA, 15 nt, Human
cuccugccgacuccu

SEQ ID NO: 3400326 - RNA, 23 nt, Human
cuccugccuagcugccuagcaag

SEQ ID NO: 3400327 - RNA, 12 nt, Human
cuccugccucag

SEQ ID NO: 3400328 - RNA, 14 nt, Human
cuccugccucagcc

SEQ ID NO: 3400329 - RNA, 21 nt, Human
cuccugccucgaacuggcugc

SEQ ID NO: 3400330 - RNA, 17 nt, Human
cuccugccugccccucu

SEQ ID NO: 3400331 - RNA, 18 nt, Human
cuccugccugugcuguga

SEQ ID NO: 3400332 - RNA, 16 nt, Human
cuccugccuuccuccu

SEQ ID NO: 3400333 - RNA, 14 nt, Human
cuccugccuugaaa

SEQ ID NO: 3400334 - RNA, 12 nt, Human
cuccugccuuug

SEQ ID NO: 3400335 - RNA, 16 nt, Human
cuccugccuuugccuc

SEQ ID NO: 3400336 - RNA, 17 nt, Human
cuccugcgcgcaugugc

SEQ ID NO: 3400337 - RNA, 18 nt, Human
cuccugcuacucuguucc

SEQ ID NO: 3400338 - RNA, 15 nt, Human
cuccugcucugcucg

SEQ ID NO: 3400339 - RNA, 21 nt, Human
cuccugcugcaccaacccagc

SEQ ID NO: 3400340 - RNA, 18 nt, Human
cuccuggacauuuuuuca

SEQ ID NO: 3400341 - RNA, 15 nt, Human
cuccuggaguugcau

SEQ ID NO: 3400342 - RNA, 14 nt, Human
cuccuggcccagcc

SEQ ID NO: 3400343 - RNA, 14 nt, Human
cuccuggcuuccca

SEQ ID NO: 3400344 - RNA, 17 nt, Human
cuccugggaucugcucg

SEQ ID NO: 3400345 - RNA, 15 nt, Human
cuccugggcagcugc

SEQ ID NO: 3400346 - RNA, 16 nt, Human
cuccugggcagcugcc

SEQ ID NO: 3400347 - RNA, 22 nt, Human
cuccugggccccucccuaccuc

SEQ ID NO: 3400348 - RNA, 12 nt, Human
cuccugggcccu

SEQ ID NO: 3400349 - RNA, 14 nt, Human
cuccugggcucaag

SEQ ID NO: 3400350 - RNA, 15 nt, Human
cuccugggcucaagc

SEQ ID NO: 3400351 - RNA, 14 nt, Human
cuccuggggccagg

SEQ ID NO: 3400352 - RNA, 15 nt, Human
cuccuggggccaggc

SEQ ID NO: 3400353 - RNA, 13 nt, Human
cuccuggggcgcg

SEQ ID NO: 3400354 - RNA, 22 nt, Human
cuccuggggcgcgugaggcccg

SEQ ID NO: 3400355 - RNA, 23 nt, Human
cuccuggggcgcgugaggcccgu

SEQ ID NO: 3400356 - RNA, 16 nt, Human
cuccuggggcguccag

SEQ ID NO: 3400357 - RNA, 14 nt, Human
cuccuggggguucu

SEQ ID NO: 3400358 - RNA, 22 nt, Human
cuccuggggguucuuucuuccu

SEQ ID NO: 3400359 - RNA, 15 nt, Human
cuccuggguugagcu

SEQ ID NO: 3400360 - RNA, 21 nt, Human
cuccuggguuuuguauucucu

SEQ ID NO: 3400361 - RNA, 22 nt, Human
cuccugguauggguuucuccca

SEQ ID NO: 3400362 - RNA, 17 nt, Human
cuccuggucaccuagga

SEQ ID NO: 3400363 - RNA, 20 nt, Human
cuccuggugucaccccagag

SEQ ID NO: 3400364 - RNA, 14 nt, Human
cuccuguccccugc

SEQ ID NO: 3400365 - RNA, 15 nt, Human
cuccuguccccugcu

SEQ ID NO: 3400366 - RNA, 16 nt, Human
cucuacagaggccaug

SEQ ID NO: 3400367 - RNA, 21 nt, Human
cucuacagcuaaucagcauuc

SEQ ID NO: 3400368 - RNA, 20 nt, Human
cucuaccagugcaggcuggc

SEQ ID NO: 3400369 - RNA, 17 nt, Human
cucuacccaaacccuag

SEQ ID NO: 3400370 - RNA, 18 nt, Human
cucuacccaaacccuagg

SEQ ID NO: 3400371 - RNA, 14 nt, Human
cucuacccagccca

SEQ ID NO: 3400372 - RNA, 14 nt, Human
cucuacccagggcc

SEQ ID NO: 3400373 - RNA, 18 nt, Human
cucuacccagggccugca

SEQ ID NO: 3400374 - RNA, 16 nt, Human
cucuacccauauuaca

SEQ ID NO: 3400375 - RNA, 17 nt, Human
cucuacccucccacccc

SEQ ID NO: 3400376 - RNA, 22 nt, Human
cucuacccucccacccccuucu

SEQ ID NO: 3400377 - RNA, 22 nt, Human
cucuaccugacacucccuuggg

SEQ ID NO: 3400378 - RNA, 16 nt, Human
cucuacuaaaaaugca

SEQ ID NO: 3400379 - RNA, 21 nt, Human
cucuacuaacaaucagcuccu

SEQ ID NO: 3400380 - RNA, 16 nt, Human
cucuacuccuaccuca

SEQ ID NO: 3400381 - RNA, 12 nt, Human
cucuacucugcu

SEQ ID NO: 3400382 - RNA, 13 nt, Human
cucuacucugcuu

SEQ ID NO: 3400383 - RNA, 20 nt, Human
cucuacugaaugucauugaa

SEQ ID NO: 3400384 - RNA, 18 nt, Human
cucuacugggagccuacc

SEQ ID NO: 3400385 - RNA, 13 nt, Human
cucuacuguguaa

SEQ ID NO: 3400386 - RNA, 18 nt, Human
cucuacuuaauccaaugg

SEQ ID NO: 3400387 - RNA, 17 nt, Human
cucuacuuagcaugucc

SEQ ID NO: 3400388 - RNA, 19 nt, Human
cucuacuuagcaugucccu

SEQ ID NO: 3400389 - RNA, 17 nt, Human
cucuacuuuccaggcua

SEQ ID NO: 3400390 - RNA, 22 nt, Human
cucuagaaaggggauuacaguu

SEQ ID NO: 3400391 - RNA, 12 nt, Human
cucuagaaauuu

SEQ ID NO: 3400392 - RNA, 18 nt, Human
cucuagaagccaagggaa

SEQ ID NO: 3400393 - RNA, 21 nt, Human
cucuagagaaauaagaucuuu

SEQ ID NO: 3400394 - RNA, 18 nt, Human
cucuagagaaguggacug

SEQ ID NO: 3400395 - RNA, 15 nt, Human
cucuagaguccaagg

SEQ ID NO: 3400396 - RNA, 23 nt, Human
cucuagaugagcugggccggagg

SEQ ID NO: 3400397 - RNA, 17 nt, Human
cucuagauuuuguuuug

SEQ ID NO: 3400398 - RNA, 19 nt, Human
cucuagauuuuguuuugcu

SEQ ID NO: 3400399 - RNA, 14 nt, Human
cucuagccugggca

SEQ ID NO: 3400400 - RNA, 12 nt, Human
cucuagcugaau

SEQ ID NO: 3400401 - RNA, 20 nt, Human
cucuagcugggggugggcca

SEQ ID NO: 3400402 - RNA, 17 nt, Human
cucuaggccucuccagu

SEQ ID NO: 3400403 - RNA, 12 nt, Human
cucuaggcucug

SEQ ID NO: 3400404 - RNA, 15 nt, Human
cucuaggcucugccu

SEQ ID NO: 3400405 - RNA, 14 nt, Human
cucuaggcugggga

SEQ ID NO: 3400406 - RNA, 23 nt, Human
cucuagggaaggccaccugcagg

SEQ ID NO: 3400407 - RNA, 14 nt, Human
cucuagggaccccu

SEQ ID NO: 3400408 - RNA, 18 nt, Human
cucuagggaccccuccuc

SEQ ID NO: 3400409 - RNA, 20 nt, Human
cucuagggaccccuccuccc

SEQ ID NO: 3400410 - RNA, 21 nt, Human
cucuaggguacauggugcugg

SEQ ID NO: 3400411 - RNA, 14 nt, Human
cucuaggguugcug

SEQ ID NO: 3400412 - RNA, 23 nt, Human
cucuagguacgaugacaguguuc

SEQ ID NO: 3400413 - RNA, 22 nt, Human
cucuaggugcccuuggaggcca

SEQ ID NO: 3400414 - RNA, 15 nt, Human
cucuaguauuccaga

SEQ ID NO: 3400415 - RNA, 18 nt, Human
cucuagucaaugacauga

SEQ ID NO: 3400416 - RNA, 22 nt, Human
cucuagucaaugacaugaauuu

SEQ ID NO: 3400417 - RNA, 14 nt, Human
cucuagugcccucc

SEQ ID NO: 3400418 - RNA, 14 nt, Human
cucuagugccuucu

SEQ ID NO: 3400419 - RNA, 17 nt, Human
cucuagugcgguuuacu

SEQ ID NO: 3400420 - RNA, 14 nt, Human
cucuagugcuguga

SEQ ID NO: 3400421 - RNA, 16 nt, Human
cucuagugcugugaaa

SEQ ID NO: 3400422 - RNA, 17 nt, Human
cucuagugcugugaaaa

SEQ ID NO: 3400423 - RNA, 18 nt, Human
cucuagugcugugaaaaa

SEQ ID NO: 3400424 - RNA, 20 nt, Human
cucuagugcugugaaaaaaa

SEQ ID NO: 3400425 - RNA, 23 nt, Human
cucuagugggacagcccagagcc

SEQ ID NO: 3400426 - RNA, 19 nt, Human
cucuaguuugauuaaauuc

SEQ ID NO: 3400427 - RNA, 20 nt, Human
cucuaguuugauuaaauucu

SEQ ID NO: 3400428 - RNA, 16 nt, Human
cucuauaaggcagccu

SEQ ID NO: 3400429 - RNA, 15 nt, Human
cucuauaccaauaaa

SEQ ID NO: 3400430 - RNA, 16 nt, Human
cucuauaccaauaaag

SEQ ID NO: 3400431 - RNA, 17 nt, Human
cucuauaccaauaaagu

SEQ ID NO: 3400432 - RNA, 18 nt, Human
cucuauaccaauaaagug

SEQ ID NO: 3400433 - RNA, 18 nt, Human
cucuauacugcccugagu

SEQ ID NO: 3400434 - RNA, 21 nt, Human
cucuauacugcccugaguugg

SEQ ID NO: 3400435 - RNA, 21 nt, Human
cucuauauaccaaagcacauu

SEQ ID NO: 3400436 - RNA, 19 nt, Human
cucuauauuuagauuguua

SEQ ID NO: 3400437 - RNA, 15 nt, Human
cucuaucaccaagga

SEQ ID NO: 3400438 - RNA, 21 nt, Human
cucuaucauggugaaaagcuc

SEQ ID NO: 3400439 - RNA, 15 nt, Human
cucuaucauuaaagu

SEQ ID NO: 3400440 - RNA, 16 nt, Human
cucuaucauuaaaguu

SEQ ID NO: 3400441 - RNA, 18 nt, Human
cucuaucauuaaaguucu

SEQ ID NO: 3400442 - RNA, 14 nt, Human
cucuaucauuuaau

SEQ ID NO: 3400443 - RNA, 15 nt, Human
cucuaucauuuaaua

SEQ ID NO: 3400444 - RNA, 14 nt, Human
cucuaucucacagc

SEQ ID NO: 3400445 - RNA, 18 nt, Human
cucuaucucacagcacac

SEQ ID NO: 3400446 - RNA, 14 nt, Human
cucuaucugggccu

SEQ ID NO: 3400447 - RNA, 20 nt, Human
cucuaugaacucuguuuucu

SEQ ID NO: 3400448 - RNA, 14 nt, Human
cucuaugagucuag

SEQ ID NO: 3400449 - RNA, 15 nt, Human
cucuaugagucuaga

SEQ ID NO: 3400450 - RNA, 19 nt, Human
cucuaugccccaaauauag

SEQ ID NO: 3400451 - RNA, 19 nt, Human
cucuauggggcauccucuu

SEQ ID NO: 3400452 - RNA, 20 nt, Human
cucuauguuuacaaauggac

SEQ ID NO: 3400453 - RNA, 14 nt, Human
cucuauuaaaaugc

SEQ ID NO: 3400454 - RNA, 20 nt, Human
cucuauuaagauuuccaagu

SEQ ID NO: 3400455 - RNA, 15 nt, Human
cucuauuaugaaugu

SEQ ID NO: 3400456 - RNA, 22 nt, Human
cucuauuaugaaugugaagccu

SEQ ID NO: 3400457 - RNA, 21 nt, Human
cucuauucucaaaguuuccua

SEQ ID NO: 3400458 - RNA, 23 nt, Human
cucuauugauguacagucuguca

SEQ ID NO: 3400459 - RNA, 10 nt, Human
cucuauuuaa

SEQ ID NO: 3400460 - RNA, 15 nt, Human
cucuauuuaaauucu

SEQ ID NO: 3400461 - RNA, 16 nt, Human
cucuauuuaaauucuu

SEQ ID NO: 3400462 - RNA, 23 nt, Human
cucuauuuagaugcauauuacug

SEQ ID NO: 3400463 - RNA, 13 nt, Human
cucuauuuagcau

SEQ ID NO: 3400464 - RNA, 15 nt, Human
cucuauuucauuuuu

SEQ ID NO: 3400465 - RNA, 22 nt, Human
cucuauuucccccuuucuuccu

SEQ ID NO: 3400466 - RNA, 14 nt, Human
cucuauuugagaau

SEQ ID NO: 3400467 - RNA, 23 nt, Human
cucucaaaacuugguauuuuuca

SEQ ID NO: 3400468 - RNA, 23 nt, Human
cucucaaaagagaaaaacaaaac

SEQ ID NO: 3400469 - RNA, 23 nt, Human
cucucaaacuaaaagacauuugu

SEQ ID NO: 3400470 - RNA, 15 nt, Human
cucucaacaccauga

SEQ ID NO: 3400471 - RNA, 17 nt, Human
cucucaauaaaauuaua

SEQ ID NO: 3400472 - RNA, 10 nt, Human
cucucaauau

SEQ ID NO: 3400473 - RNA, 19 nt, Human
cucucaaugcuguuugggu

SEQ ID NO: 3400474 - RNA, 19 nt, Human
cucucaauuuuugguugaa

SEQ ID NO: 3400475 - RNA, 17 nt, Human
cucucacagacaggacc

SEQ ID NO: 3400476 - RNA, 23 nt, Human
cucucaccauuuggauccugugu

SEQ ID NO: 3400477 - RNA, 12 nt, Human
cucucaccuccu

SEQ ID NO: 3400478 - RNA, 16 nt, Human
cucucaccuguacucu

SEQ ID NO: 3400479 - RNA, 15 nt, Human
cucucacucccuccc

SEQ ID NO: 3400480 - RNA, 15 nt, Human
cucucacuccuugaa

SEQ ID NO: 3400481 - RNA, 14 nt, Human
cucucacugccucc

SEQ ID NO: 3400482 - RNA, 15 nt, Human
cucucacuguguccc

SEQ ID NO: 3400483 - RNA, 14 nt, Human
cucucagaagggag

SEQ ID NO: 3400484 - RNA, 20 nt, Human
cucucagagcuacuugggcc

SEQ ID NO: 3400485 - RNA, 22 nt, Human
cucucagagcuacuugggccau

SEQ ID NO: 3400486 - RNA, 11 nt, Human
cucucagccaa

SEQ ID NO: 3400487 - RNA, 14 nt, Human
cucucagcccagaa

SEQ ID NO: 3400488 - RNA, 21 nt, Human
cucucagccccugauccugug

SEQ ID NO: 3400489 - RNA, 19 nt, Human
cucucagccuuacauuugu

SEQ ID NO: 3400490 - RNA, 19 nt, Human
cucucaggaaaugcugacc

SEQ ID NO: 3400491 - RNA, 20 nt, Human
cucucaggaaaugcugaccc

SEQ ID NO: 3400492 - RNA, 13 nt, Human
cucucaggagcac

SEQ ID NO: 3400493 - RNA, 17 nt, Human
cucucaggagcacaggc

SEQ ID NO: 3400494 - RNA, 19 nt, Human
cucucaggagcacaggcag

SEQ ID NO: 3400495 - RNA, 14 nt, Human
cucucaggauccaa

SEQ ID NO: 3400496 - RNA, 19 nt, Human
cucucaggcaugccugugu

SEQ ID NO: 3400497 - RNA, 20 nt, Human
cucucaggccaaacucaccu

SEQ ID NO: 3400498 - RNA, 19 nt, Human
cucucagggccaggccucu

SEQ ID NO: 3400499 - RNA, 15 nt, Human
cucucaggugaccaa

SEQ ID NO: 3400500 - RNA, 19 nt, Human
cucucaguacuuuggaggc

SEQ ID NO: 3400501 - RNA, 20 nt, Human
cucucagugcccuccagccc

SEQ ID NO: 3400502 - RNA, 13 nt, Human
cucucaguguuuu

SEQ ID NO: 3400503 - RNA, 18 nt, Human
cucucaguguuuuggacu

SEQ ID NO: 3400504 - RNA, 21 nt, Human
cucucaguuccgauuucccag

SEQ ID NO: 3400505 - RNA, 19 nt, Human
cucucaguugcagcccugc

SEQ ID NO: 3400506 - RNA, 12 nt, Human
cucucaguuuuu

SEQ ID NO: 3400507 - RNA, 15 nt, Human
cucucauacccuccc

SEQ ID NO: 3400508 - RNA, 22 nt, Human
cucucauauauagacagcuuug

SEQ ID NO: 3400509 - RNA, 19 nt, Human
cucucauccuuuucuccua

SEQ ID NO: 3400510 - RNA, 13 nt, Human
cucucaucucagg

SEQ ID NO: 3400511 - RNA, 12 nt, Human
cucucucaggcc

SEQ ID NO: 3400512 - RNA, 21 nt, Human
cucucucauacccucccuccc

SEQ ID NO: 3400513 - RNA, 12 nt, Human
cucucuccagga

SEQ ID NO: 3400514 - RNA, 12 nt, Human
cucucucccucu

SEQ ID NO: 3400515 - RNA, 13 nt, Human
cucucucccuuuu

SEQ ID NO: 3400516 - RNA, 19 nt, Human
cucucuccuguccaaccua

SEQ ID NO: 3400517 - RNA, 15 nt, Human
cucucucucuccccu

SEQ ID NO: 3400518 - RNA, 15 nt, Human
cucucucucuuuccu

SEQ ID NO: 3400519 - RNA, 17 nt, Human
cucucugaaggaggcca

SEQ ID NO: 3400520 - RNA, 20 nt, Human
cucucugaaggaggccaccu

SEQ ID NO: 3400521 - RNA, 17 nt, Human
cucucugaguauuuccu

SEQ ID NO: 3400522 - RNA, 18 nt, Human
cucucugaguccuggccc

SEQ ID NO: 3400523 - RNA, 21 nt, Human
cucucugcagccagcccagcc

SEQ ID NO: 3400524 - RNA, 13 nt, Human
cucucugcagcug

SEQ ID NO: 3400525 - RNA, 16 nt, Human
cucucugcagcugccg

SEQ ID NO: 3400526 - RNA, 13 nt, Human
cucucugcagguc

SEQ ID NO: 3400527 - RNA, 14 nt, Human
cucucugcaggucc

SEQ ID NO: 3400528 - RNA, 22 nt, Human
cucucugcaggucccuaauaaa

SEQ ID NO: 3400529 - RNA, 12 nt, Human
cucucugcccua

SEQ ID NO: 3400530 - RNA, 14 nt, Human
cucucugcccugug

SEQ ID NO: 3400531 - RNA, 16 nt, Human
cucucugcccugugua

SEQ ID NO: 3400532 - RNA, 14 nt, Human
cucucugccuguga

SEQ ID NO: 3400533 - RNA, 15 nt, Human
cucucugccugugag

SEQ ID NO: 3400534 - RNA, 22 nt, Human
cucucugccugugagccagucu

SEQ ID NO: 3400535 - RNA, 14 nt, Human
cucucugcucugcg

SEQ ID NO: 3400536 - RNA, 16 nt, Human
cucucuggaaaggagg

SEQ ID NO: 3400537 - RNA, 11 nt, Human
cucucuggccu

SEQ ID NO: 3400538 - RNA, 19 nt, Human
cucucuggccucccacccg

SEQ ID NO: 3400539 - RNA, 12 nt, Human
cucucuggccuu

SEQ ID NO: 3400540 - RNA, 13 nt, Human
cucucuggccuuc

SEQ ID NO: 3400541 - RNA, 17 nt, Human
cucucuggccuucggcc

SEQ ID NO: 3400542 - RNA, 22 nt, Human
cucucuggccuucggccuccau

SEQ ID NO: 3400543 - RNA, 15 nt, Human
cucucuggcugggga

SEQ ID NO: 3400544 - RNA, 17 nt, Human
cucucugggcugacugg

SEQ ID NO: 3400545 - RNA, 18 nt, Human
cucucuggggccacacag

SEQ ID NO: 3400546 - RNA, 17 nt, Human
cucucuggggcuguguu

SEQ ID NO: 3400547 - RNA, 13 nt, Human
cucucuguauaaa

SEQ ID NO: 3400548 - RNA, 15 nt, Human
cucucuguauaaaca

SEQ ID NO: 3400549 - RNA, 20 nt, Human
cucucuguauaaacauuaaa

SEQ ID NO: 3400550 - RNA, 16 nt, Human
cucucugugucugaga

SEQ ID NO: 3400551 - RNA, 18 nt, Human
cucucuuacccuucugug

SEQ ID NO: 3400552 - RNA, 22 nt, Human
cucucuuacccuucugugccca

SEQ ID NO: 3400553 - RNA, 23 nt, Human
cucucuuacccuucugugcccag

SEQ ID NO: 3400554 - RNA, 19 nt, Human
cucucuuauagaauauuua

SEQ ID NO: 3400555 - RNA, 21 nt, Human
cucucuuauagaauauuuauu

SEQ ID NO: 3400556 - RNA, 22 nt, Human
cucucuucccuuuccccagcau

SEQ ID NO: 3400557 - RNA, 23 nt, Human
cucucuucccuuuccccagcauc

SEQ ID NO: 3400558 - RNA, 21 nt, Human
cucucuuccuaucccauccca

SEQ ID NO: 3400559 - RNA, 21 nt, Human
cucucuuccugccccucuuuc

SEQ ID NO: 3400560 - RNA, 20 nt, Human
cucucuugauuaagaucuca

SEQ ID NO: 3400561 - RNA, 15 nt, Human
cucucuuuccuucuu

SEQ ID NO: 3400562 - RNA, 15 nt, Human
cucucuuuggacucu

SEQ ID NO: 3400563 - RNA, 16 nt, Human
cucucuuuggacucuc

SEQ ID NO: 3400564 - RNA, 19 nt, Human
cucucuuuguucucagcuc

SEQ ID NO: 3400565 - RNA, 22 nt, Human
cucucuuuguucucagcucccc

SEQ ID NO: 3400566 - RNA, 13 nt, Human
cucucuuuuccug

SEQ ID NO: 3400567 - RNA, 14 nt, Human
cucucuuuucugua

SEQ ID NO: 3400568 - RNA, 17 nt, Human
cucugaaaacggcccuc

SEQ ID NO: 3400569 - RNA, 13 nt, Human
cucugaaacagcu

SEQ ID NO: 3400570 - RNA, 16 nt, Human
cucugaaacagcugcc

SEQ ID NO: 3400571 - RNA, 12 nt, Human
cucugaaaccag

SEQ ID NO: 3400572 - RNA, 17 nt, Human
cucugaaaccaguguua

SEQ ID NO: 3400573 - RNA, 16 nt, Human
cucugaaagagaaaca

SEQ ID NO: 3400574 - RNA, 18 nt, Human
cucugaaaguuguacaug

SEQ ID NO: 3400575 - RNA, 22 nt, Human
cucugaaaguuguacaugaaau

SEQ ID NO: 3400576 - RNA, 11 nt, Human
cucugaaauac

SEQ ID NO: 3400577 - RNA, 15 nt, Human
cucugaacacaggca

SEQ ID NO: 3400578 - RNA, 19 nt, Human
cucugaacacaggcagcuu

SEQ ID NO: 3400579 - RNA, 20 nt, Human
cucugaacacaggcagcuuu

SEQ ID NO: 3400580 - RNA, 12 nt, Human
cucugaacacau

SEQ ID NO: 3400581 - RNA, 19 nt, Human
cucugaacuucagcuagag

SEQ ID NO: 3400582 - RNA, 14 nt, Human
cucugaacuuugga

SEQ ID NO: 3400583 - RNA, 19 nt, Human
cucugaagaacucucugga

SEQ ID NO: 3400584 - RNA, 18 nt, Human
cucugaagaugaucauuu

SEQ ID NO: 3400585 - RNA, 18 nt, Human
cucugaagcaaggcggug

SEQ ID NO: 3400586 - RNA, 18 nt, Human
cucugaagcgugauuuua

SEQ ID NO: 3400587 - RNA, 17 nt, Human
cucugaaggaggccacc

SEQ ID NO: 3400588 - RNA, 23 nt, Human
cucugaagggcaucaugcaucuu

SEQ ID NO: 3400589 - RNA, 17 nt, Human
cucugaaguuggacagc

SEQ ID NO: 3400590 - RNA, 17 nt, Human
cucugaaugccccauaa

SEQ ID NO: 3400591 - RNA, 19 nt, Human
cucugaauuugagauacaa

SEQ ID NO: 3400592 - RNA, 16 nt, Human
cucugacaacagacuu

SEQ ID NO: 3400593 - RNA, 20 nt, Human
cucugacaagggcugaccug

SEQ ID NO: 3400594 - RNA, 14 nt, Human
cucugacacacagc

SEQ ID NO: 3400595 - RNA, 15 nt, Human
cucugacacacagcu

SEQ ID NO: 3400596 - RNA, 19 nt, Human
cucugacacacagcucugu

SEQ ID NO: 3400597 - RNA, 23 nt, Human
cucugacagaagaaccccagggu

SEQ ID NO: 3400598 - RNA, 13 nt, Human
cucugacagcagc

SEQ ID NO: 3400599 - RNA, 20 nt, Human
cucugaccccagcauucuca

SEQ ID NO: 3400600 - RNA, 12 nt, Human
cucugaccccuc

SEQ ID NO: 3400601 - RNA, 13 nt, Human
cucugaccccucc

SEQ ID NO: 3400602 - RNA, 14 nt, Human
cucugaccccuccu

SEQ ID NO: 3400603 - RNA, 16 nt, Human
cucugaccccuccuca

SEQ ID NO: 3400604 - RNA, 21 nt, Human
cucugaccccuccucacuggc

SEQ ID NO: 3400605 - RNA, 23 nt, Human
cucugaccuacucgagggacuua

SEQ ID NO: 3400606 - RNA, 17 nt, Human
cucugaccucuuggcca

SEQ ID NO: 3400607 - RNA, 14 nt, Human
cucugaccugcacu

SEQ ID NO: 3400608 - RNA, 14 nt, Human
cucugaccugcagg

SEQ ID NO: 3400609 - RNA, 15 nt, Human
cucugaccugcaggc

SEQ ID NO: 3400610 - RNA, 14 nt, Human
cucugacucagggc

SEQ ID NO: 3400611 - RNA, 21 nt, Human
cucugacucagggcuccuggg

SEQ ID NO: 3400612 - RNA, 18 nt, Human
cucugacucccaaagagc

SEQ ID NO: 3400613 - RNA, 22 nt, Human
cucugacucccaaagagcugcc

SEQ ID NO: 3400614 - RNA, 18 nt, Human
cucugacucucaaaucuu

SEQ ID NO: 3400615 - RNA, 16 nt, Human
cucugacuucugccug

SEQ ID NO: 3400616 - RNA, 15 nt, Human
cucugagaagaggag

SEQ ID NO: 3400617 - RNA, 16 nt, Human
cucugagaagaggagc

SEQ ID NO: 3400618 - RNA, 19 nt, Human
cucugagaauuccaaggag

SEQ ID NO: 3400619 - RNA, 21 nt, Human
cucugagaauuccaaggaguu

SEQ ID NO: 3400620 - RNA, 20 nt, Human
cucugagaauuguugagaua

SEQ ID NO: 3400621 - RNA, 23 nt, Human
cucugagaauuguugagauacuu

SEQ ID NO: 3400622 - RNA, 17 nt, Human
cucugagaggcccugga

SEQ ID NO: 3400623 - RNA, 15 nt, Human
cucugagagucuaga

SEQ ID NO: 3400624 - RNA, 17 nt, Human
cucugagagucuagauu

SEQ ID NO: 3400625 - RNA, 22 nt, Human
cucugagagucuagauucucug

SEQ ID NO: 3400626 - RNA, 22 nt, Human
cucugagaucuaaggaugucac

SEQ ID NO: 3400627 - RNA, 16 nt, Human
cucugagccacagugg

SEQ ID NO: 3400628 - RNA, 18 nt, Human
cucugagccacaguggga

SEQ ID NO: 3400629 - RNA, 13 nt, Human
cucugagcccaug

SEQ ID NO: 3400630 - RNA, 21 nt, Human
cucugagcccauguucugccc

SEQ ID NO: 3400631 - RNA, 15 nt, Human
cucugagccuuggga

SEQ ID NO: 3400632 - RNA, 15 nt, Human
cucugagcugucaac

SEQ ID NO: 3400633 - RNA, 17 nt, Human
cucugagcuuugcaugu

SEQ ID NO: 3400634 - RNA, 14 nt, Human
cucugaggacacua

SEQ ID NO: 3400635 - RNA, 13 nt, Human
cucugaggccagc

SEQ ID NO: 3400636 - RNA, 19 nt, Human
cucugaggccagccuggcc

SEQ ID NO: 3400637 - RNA, 20 nt, Human
cucugaggcucuuucugggc

SEQ ID NO: 3400638 - RNA, 13 nt, Human
cucugaggcugua

SEQ ID NO: 3400639 - RNA, 18 nt, Human
cucugaggcuuccagaga

SEQ ID NO: 3400640 - RNA, 15 nt, Human
cucugaggugccugu

SEQ ID NO: 3400641 - RNA, 16 nt, Human
cucugaguccuggccc

SEQ ID NO: 3400642 - RNA, 19 nt, Human
cucugaguguuuuaugaga

SEQ ID NO: 3400643 - RNA, 19 nt, Human
cucugaguuccggcaccag

SEQ ID NO: 3400644 - RNA, 21 nt, Human
cucugaguuccggcaccagua

SEQ ID NO: 3400645 - RNA, 17 nt, Human
cucugaguuuaccauuu

SEQ ID NO: 3400646 - RNA, 20 nt, Human
cucugaguuuaccauuugua

SEQ ID NO: 3400647 - RNA, 15 nt, Human
cucugauacagaaaa

SEQ ID NO: 3400648 - RNA, 20 nt, Human
cucugauacuuuuuugaaau

SEQ ID NO: 3400649 - RNA, 22 nt, Human
cucugauacuuuuuugaaauca

SEQ ID NO: 3400650 - RNA, 17 nt, Human
cucugauaugggacuga

SEQ ID NO: 3400651 - RNA, 21 nt, Human
cucugauaugggacugagccu

SEQ ID NO: 3400652 - RNA, 23 nt, Human
cucugauauuccaugaauguauc

SEQ ID NO: 3400653 - RNA, 21 nt, Human
cucugaucccucuacagagcu

SEQ ID NO: 3400654 - RNA, 14 nt, Human
cucugaugaaaaau

SEQ ID NO: 3400655 - RNA, 23 nt, Human
cucugaugaaaaauugcugacug

SEQ ID NO: 3400656 - RNA, 21 nt, Human
cugagggcaguucgcagccac

SEQ ID NO: 3400657 - RNA, 15 nt, Human
cugagggccacacua

SEQ ID NO: 3400658 - RNA, 16 nt, Human
cugagggccacacuau

SEQ ID NO: 3400659 - RNA, 18 nt, Human
cugagggccccucugccc

SEQ ID NO: 3400660 - RNA, 21 nt, Human
cugagggccccucugcccagc

SEQ ID NO: 3400661 - RNA, 19 nt, Human
cugagggccugcuggaggc

SEQ ID NO: 3400662 - RNA, 17 nt, Human
cugagggcuuguaguuc

SEQ ID NO: 3400663 - RNA, 22 nt, Human
cugaggggaggaucacuggagc

SEQ ID NO: 3400664 - RNA, 18 nt, Human
cugaggggcagccugccu

SEQ ID NO: 3400665 - RNA, 17 nt, Human
cugaggggcaucugccc

SEQ ID NO: 3400666 - RNA, 19 nt, Human
cugaggggcaucugccccu

SEQ ID NO: 3400667 - RNA, 18 nt, Human
cugagggggccuggaugc

SEQ ID NO: 3400668 - RNA, 16 nt, Human
cugagggucugggcgg

SEQ ID NO: 3400669 - RNA, 14 nt, Human
cugagggucuguag

SEQ ID NO: 3400670 - RNA, 16 nt, Human
cugagggucuguaggu

SEQ ID NO: 3400671 - RNA, 19 nt, Human
cugaggguguuucuuccug

SEQ ID NO: 3400672 - RNA, 14 nt, Human
cugagguccugagc

SEQ ID NO: 3400673 - RNA, 21 nt, Human
cugagguccugagcacugcca

SEQ ID NO: 3400674 - RNA, 19 nt, Human
cugaggucucuugagggag

SEQ ID NO: 3400675 - RNA, 13 nt, Human
cugaggucuggcu

SEQ ID NO: 3400676 - RNA, 13 nt, Human
cugaggugcccag

SEQ ID NO: 3400677 - RNA, 14 nt, Human
cugaggugcccagg

SEQ ID NO: 3400678 - RNA, 17 nt, Human
cugaggugcccaggaga

SEQ ID NO: 3400679 - RNA, 17 nt, Human
cugaggugccuguccca

SEQ ID NO: 3400680 - RNA, 21 nt, Human
cugaggugggagauguggaaa

SEQ ID NO: 3400681 - RNA, 14 nt, Human
cugaggugggccca

SEQ ID NO: 3400682 - RNA, 14 nt, Human
cugagguguggggg

SEQ ID NO: 3400683 - RNA, 19 nt, Human
cugaggugugggggcugca

SEQ ID NO: 3400684 - RNA, 16 nt, Human
cugagguuccucugcc

SEQ ID NO: 3400685 - RNA, 21 nt, Human
cugagguuccucugccugccc

SEQ ID NO: 3400686 - RNA, 17 nt, Human
cugaguaccccugcuuu

SEQ ID NO: 3400687 - RNA, 19 nt, Human
cugaguacuccacacugca

SEQ ID NO: 3400688 - RNA, 14 nt, Human
cugaguagaaaggc

SEQ ID NO: 3400689 - RNA, 17 nt, Human
cugaguagcucuccuga

SEQ ID NO: 3400690 - RNA, 19 nt, Human
cugaguagcucuccugacu

SEQ ID NO: 3400691 - RNA, 14 nt, Human
cugaguagcuggga

SEQ ID NO: 3400692 - RNA, 18 nt, Human
cugaguauguggaaggca

SEQ ID NO: 3400693 - RNA, 21 nt, Human
cugaguauuaaaauguaugca

SEQ ID NO: 3400694 - RNA, 14 nt, Human
cugagucagagcca

SEQ ID NO: 3400695 - RNA, 18 nt, Human
cugagucagagccauguc

SEQ ID NO: 3400696 - RNA, 16 nt, Human
cugagucagggcccag

SEQ ID NO: 3400697 - RNA, 17 nt, Human
cugagucaucuguuagg

SEQ ID NO: 3400698 - RNA, 19 nt, Human
cugagucaugaucucccug

SEQ ID NO: 3400699 - RNA, 22 nt, Human
cugagucaugaucucccugccg

SEQ ID NO: 3400700 - RNA, 21 nt, Human
cugaguccaagaggguccuuu

SEQ ID NO: 3400701 - RNA, 16 nt, Human
cugagucccaggagcu

SEQ ID NO: 3400702 - RNA, 15 nt, Human
cugaguccuggccca

SEQ ID NO: 3400703 - RNA, 15 nt, Human
cugaguccuuaaaca

SEQ ID NO: 3400704 - RNA, 21 nt, Human
cugaguccuuaaacagggcau

SEQ ID NO: 3400705 - RNA, 21 nt, Human
cugagucguacagaaagcugc

SEQ ID NO: 3400706 - RNA, 17 nt, Human
cugagucgugaccugcu

SEQ ID NO: 3400707 - RNA, 20 nt, Human
cugagucgugaccugcuagg

SEQ ID NO: 3400708 - RNA, 21 nt, Human
cugagucgugaccugcuaggc

SEQ ID NO: 3400709 - RNA, 16 nt, Human
cugagucugaaggcug

SEQ ID NO: 3400710 - RNA, 21 nt, Human
cugagucugcuauauuuucau

SEQ ID NO: 3400711 - RNA, 21 nt, Human
cugagugaaaaaucuguggaa

SEQ ID NO: 3400712 - RNA, 17 nt, Human
cugagugaaccuguaua

SEQ ID NO: 3400713 - RNA, 15 nt, Human
cugagugagagggga

SEQ ID NO: 3400714 - RNA, 20 nt, Human
cugagugagaggggaggcca

SEQ ID NO: 3400715 - RNA, 19 nt, Human
cugagugcagccguuugag

SEQ ID NO: 3400716 - RNA, 17 nt, Human
cugagugcaggcccacc

SEQ ID NO: 3400717 - RNA, 14 nt, Human
cugagugccuggcc

SEQ ID NO: 3400718 - RNA, 13 nt, Human
cugagugccuucu

SEQ ID NO: 3400719 - RNA, 14 nt, Human
cugagugccuuuug

SEQ ID NO: 3400720 - RNA, 16 nt, Human
cugaguggcaggggac

SEQ ID NO: 3400721 - RNA, 21 nt, Human
cugaguggcuucacuccugcu

SEQ ID NO: 3400722 - RNA, 13 nt, Human
cugaguuaugaug

SEQ ID NO: 3400723 - RNA, 19 nt, Human
cugaguuccggcaccagua

SEQ ID NO: 3400724 - RNA, 16 nt, Human
cugaguuccuagccac

SEQ ID NO: 3400725 - RNA, 16 nt, Human
cugaguuccugcaugc

SEQ ID NO: 3400726 - RNA, 19 nt, Human
cugaguucuggucaaagaa

SEQ ID NO: 3400727 - RNA, 17 nt, Human
cugaguugaagagggga

SEQ ID NO: 3400728 - RNA, 20 nt, Human
cugaguugccaagacaaauc

SEQ ID NO: 3400729 - RNA, 15 nt, Human
cugaguugcuuuuca

SEQ ID NO: 3400730 - RNA, 16 nt, Human
cugaguuguuacccca

SEQ ID NO: 3400731 - RNA, 17 nt, Human
cugaguuguuaccccaa

SEQ ID NO: 3400732 - RNA, 19 nt, Human
cugaguuuaccauuuguaa

SEQ ID NO: 3400733 - RNA, 22 nt, Human
cugaguuuaccauuuguaauaa

SEQ ID NO: 3400734 - RNA, 19 nt, Human
cugaguuucauucuccugc

SEQ ID NO: 3400735 - RNA, 21 nt, Human
cugaguuucauucuccugccu

SEQ ID NO: 3400736 - RNA, 13 nt, Human
cugaguuuuacca

SEQ ID NO: 3400737 - RNA, 21 nt, Human
cugaguuuucucuuugugggg

SEQ ID NO: 3400738 - RNA, 14 nt, Human
cugaguuuuguguu

SEQ ID NO: 3400739 - RNA, 20 nt, Human
cugaguuuuguguuuguugu

SEQ ID NO: 3400740 - RNA, 21 nt, Human
cugaguuuuguguuuguugua

SEQ ID NO: 3400741 - RNA, 22 nt, Human
cugaguuuuuaaaaauggacaa

SEQ ID NO: 3400742 - RNA, 23 nt, Human
cugauaaaaccauguagaaaauu

SEQ ID NO: 3400743 - RNA, 18 nt, Human
cugauaaaagauggccau

SEQ ID NO: 3400744 - RNA, 14 nt, Human
cugauaaagaaaga

SEQ ID NO: 3400745 - RNA, 13 nt, Human
cugauaaagauga

SEQ ID NO: 3400746 - RNA, 21 nt, Human
cugauaaagaugagugagcau

SEQ ID NO: 3400747 - RNA, 16 nt, Human
cugauaacaaccugga

SEQ ID NO: 3400748 - RNA, 22 nt, Human
cugauaacaaccuggagaccag

SEQ ID NO: 3400749 - RNA, 18 nt, Human
cugauaacuagauggugc

SEQ ID NO: 3400750 - RNA, 15 nt, Human
cugauaauuccagug

SEQ ID NO: 3400751 - RNA, 15 nt, Human
cugauaauuuuaaau

SEQ ID NO: 3400752 - RNA, 19 nt, Human
cugauacauaacuaaauuu

SEQ ID NO: 3400753 - RNA, 14 nt, Human
cugauacccagagc

SEQ ID NO: 3400754 - RNA, 15 nt, Human
cugauacuuuuuuga

SEQ ID NO: 3400755 - RNA, 15 nt, Human
cugauagcucuuugg

SEQ ID NO: 3400756 - RNA, 22 nt, Human
cugauagcucuuuggcagucua

SEQ ID NO: 3400757 - RNA, 17 nt, Human
cugauaggccaaguuug

SEQ ID NO: 3400758 - RNA, 18 nt, Human
cugauaguuacuguugug

SEQ ID NO: 3400759 - RNA, 14 nt, Human
cugauauaaauucu

SEQ ID NO: 3400760 - RNA, 22 nt, Human
cugauauagaucacauaacaga

SEQ ID NO: 3400761 - RNA, 22 nt, Human
cugauauauguguuuuucacau

SEQ ID NO: 3400762 - RNA, 21 nt, Human
cugauaugauuuaaaacaugu

SEQ ID NO: 3400763 - RNA, 22 nt, Human
cugauaugauuuaaaacaugua

SEQ ID NO: 3400764 - RNA, 15 nt, Human
cugauaugggacuga

SEQ ID NO: 3400765 - RNA, 13 nt, Human
cugauauguuugu

SEQ ID NO: 3400766 - RNA, 20 nt, Human
cugauauucaaauggacaaa

SEQ ID NO: 3400767 - RNA, 18 nt, Human
cugauauuccaugaaugu

SEQ ID NO: 3400768 - RNA, 22 nt, Human
cugauauugccgcacuagggga

SEQ ID NO: 3400769 - RNA, 22 nt, Human
cugauauuucccuccccugggg

SEQ ID NO: 3400770 - RNA, 14 nt, Human
cugauauuuucucu

SEQ ID NO: 3400771 - RNA, 18 nt, Human
cugauauuuucucuagga

SEQ ID NO: 3400772 - RNA, 14 nt, Human
cugaucaaugacag

SEQ ID NO: 3400773 - RNA, 15 nt, Human
cugaucaaugacaga

SEQ ID NO: 3400774 - RNA, 14 nt, Human
cugaucagagccgu

SEQ ID NO: 3400775 - RNA, 13 nt, Human
cugaucagucuaa

SEQ ID NO: 3400776 - RNA, 22 nt, Human
cugaucagugggccuccaagga

SEQ ID NO: 3400777 - RNA, 15 nt, Human
cugaucaugcauugu

SEQ ID NO: 3400778 - RNA, 21 nt, Human
cugauccagagcacagaucug

SEQ ID NO: 3400779 - RNA, 20 nt, Human
cugauccagcccugaguucc

SEQ ID NO: 3400780 - RNA, 15 nt, Human
cugaucccucuacag

SEQ ID NO: 3400781 - RNA, 20 nt, Human
cugaucccugaucccuucca

SEQ ID NO: 3400782 - RNA, 21 nt, Human
cugauccuaguuccaccauca

SEQ ID NO: 3400783 - RNA, 14 nt, Human
cugaucgcuucucc

SEQ ID NO: 3400784 - RNA, 22 nt, Human
cugaucgugacgcugaauaaau

SEQ ID NO: 3400785 - RNA, 15 nt, Human
cugaucgugcuaaau

SEQ ID NO: 3400786 - RNA, 17 nt, Human
cugaucgugcuaaauuu

SEQ ID NO: 3400787 - RNA, 12 nt, Human
cugaucucaggg

SEQ ID NO: 3400788 - RNA, 21 nt, Human
cugaucucagggaagcccagc

SEQ ID NO: 3400789 - RNA, 14 nt, Human
cugaucucucguga

SEQ ID NO: 3400790 - RNA, 14 nt, Human
cugaucucuuccug

SEQ ID NO: 3400791 - RNA, 16 nt, Human
cugaucucuuccuguu

SEQ ID NO: 3400792 - RNA, 21 nt, Human
cugaucugcccaucgugaaga

SEQ ID NO: 3400793 - RNA, 13 nt, Human
cugaucugugcuu

SEQ ID NO: 3400794 - RNA, 17 nt, Human
cugaucugugcuuucca

SEQ ID NO: 3400795 - RNA, 13 nt, Human
cugaucuguuaua

SEQ ID NO: 3400796 - RNA, 18 nt, Human
cugaucuuuguauauuac

SEQ ID NO: 3400797 - RNA, 12 nt, Human
cugaugaaaaua

SEQ ID NO: 3400798 - RNA, 16 nt, Human
cugaugaaucacuguu

SEQ ID NO: 3400799 - RNA, 11 nt, Human
cugaugacaau

SEQ ID NO: 3400800 - RNA, 14 nt, Human
cugcagccagcuca

SEQ ID NO: 3400801 - RNA, 15 nt, Human
cugcagccaggccac

SEQ ID NO: 3400802 - RNA, 16 nt, Human
cugcagcccagggacc

SEQ ID NO: 3400803 - RNA, 20 nt, Human
cugcagccucaaccuccugg

SEQ ID NO: 3400804 - RNA, 14 nt, Human
cugcagccucagga

SEQ ID NO: 3400805 - RNA, 19 nt, Human
cugcagccuccgcuucccu

SEQ ID NO: 3400806 - RNA, 23 nt, Human
cugcagccucgaacuccugggcu

SEQ ID NO: 3400807 - RNA, 17 nt, Human
cugcagccuugaacucu

SEQ ID NO: 3400808 - RNA, 21 nt, Human
cugcagcuaguccuagugaac

SEQ ID NO: 3400809 - RNA, 19 nt, Human
cugcagcucccucaaagag

SEQ ID NO: 3400810 - RNA, 23 nt, Human
cugcagcucccucaaagaggcag

SEQ ID NO: 3400811 - RNA, 15 nt, Human
cugcagcucccuggc

SEQ ID NO: 3400812 - RNA, 17 nt, Human
cugcagcucucaugcug

SEQ ID NO: 3400813 - RNA, 14 nt, Human
cugcagcugaccuc

SEQ ID NO: 3400814 - RNA, 11 nt, Human
cugcagcugcc

SEQ ID NO: 3400815 - RNA, 13 nt, Human
cugcagcugccgg

SEQ ID NO: 3400816 - RNA, 13 nt, Human
cugcagcuuccug

SEQ ID NO: 3400817 - RNA, 12 nt, Human
cugcagcuuggg

SEQ ID NO: 3400818 - RNA, 11 nt, Human
cugcagcuugu

SEQ ID NO: 3400819 - RNA, 20 nt, Human
cugcagcuuguagccagccg

SEQ ID NO: 3400820 - RNA, 22 nt, Human
cugcagcuuguagccagccggg

SEQ ID NO: 3400821 - RNA, 14 nt, Human
cugcagcuuuacau

SEQ ID NO: 3400822 - RNA, 16 nt, Human
cugcaggaaggagcug

SEQ ID NO: 3400823 - RNA, 19 nt, Human
cugcaggaaggagcugccu

SEQ ID NO: 3400824 - RNA, 14 nt, Human
cugcaggaaucuuu

SEQ ID NO: 3400825 - RNA, 14 nt, Human
cugcaggaccugcc

SEQ ID NO: 3400826 - RNA, 21 nt, Human
cugcaggaccugccuguagcc

SEQ ID NO: 3400827 - RNA, 19 nt, Human
cugcaggacuugagaagac

SEQ ID NO: 3400828 - RNA, 16 nt, Human
cugcaggaguuaaaaa

SEQ ID NO: 3400829 - RNA, 19 nt, Human
cugcaggauucucaccagc

SEQ ID NO: 3400830 - RNA, 20 nt, Human
cugcaggauucucaccagcu

SEQ ID NO: 3400831 - RNA, 21 nt, Human
cugcaggauugauuaugcaga

SEQ ID NO: 3400832 - RNA, 17 nt, Human
cugcaggcagccaggcc

SEQ ID NO: 3400833 - RNA, 19 nt, Human
cugcaggcagccaggccac

SEQ ID NO: 3400834 - RNA, 20 nt, Human
cugcaggcagccaggccaca

SEQ ID NO: 3400835 - RNA, 22 nt, Human
cugcaggcaggaacaaacaggg

SEQ ID NO: 3400836 - RNA, 15 nt, Human
cugcaggccaagagc

SEQ ID NO: 3400837 - RNA, 22 nt, Human
cugcaggccccgcuuguccagc

SEQ ID NO: 3400838 - RNA, 13 nt, Human
cugcaggcccugg

SEQ ID NO: 3400839 - RNA, 16 nt, Human
cugcaggcugagccac

SEQ ID NO: 3400840 - RNA, 23 nt, Human
cugcaggcuuaauaaaaaugaca

SEQ ID NO: 3400841 - RNA, 23 nt, Human
cugcagggaaaauuauuugcaua

SEQ ID NO: 3400842 - RNA, 15 nt, Human
cugcagggacugcca

SEQ ID NO: 3400843 - RNA, 22 nt, Human
cugcagggaguccgaaagggac

SEQ ID NO: 3400844 - RNA, 11 nt, Human
cugcagggcca

SEQ ID NO: 3400845 - RNA, 13 nt, Human
cugcagggccagg

SEQ ID NO: 3400846 - RNA, 21 nt, Human
cugcagggccauggcucaggg

SEQ ID NO: 3400847 - RNA, 14 nt, Human
cugcaggggcucug

SEQ ID NO: 3400848 - RNA, 20 nt, Human
cugcagggggugugucugcu

SEQ ID NO: 3400849 - RNA, 20 nt, Human
cugcaggguggugcugggac

SEQ ID NO: 3400850 - RNA, 11 nt, Human
cugcagguccc

SEQ ID NO: 3400851 - RNA, 12 nt, Human
cugcaggucccu

SEQ ID NO: 3400852 - RNA, 13 nt, Human
cugcaggucccua

SEQ ID NO: 3400853 - RNA, 16 nt, Human
cugcaggucccuaaua

SEQ ID NO: 3400854 - RNA, 17 nt, Human
cugcaggucccuaauaa

SEQ ID NO: 3400855 - RNA, 22 nt, Human
cugcaggucccuaauaaagcug

SEQ ID NO: 3400856 - RNA, 21 nt, Human
cugcagguucuucuuccugaa

SEQ ID NO: 3400857 - RNA, 16 nt, Human
cugcagguuggacccc

SEQ ID NO: 3400858 - RNA, 18 nt, Human
cugcagguuggaccccag

SEQ ID NO: 3400859 - RNA, 14 nt, Human
cugcaguaaaucuu

SEQ ID NO: 3400860 - RNA, 13 nt, Human
cugcagucacagc

SEQ ID NO: 3400861 - RNA, 22 nt, Human
cugcagucacuucgugggaucu

SEQ ID NO: 3400862 - RNA, 22 nt, Human
cugcagucaucuugaccaagca

SEQ ID NO: 3400863 - RNA, 23 nt, Human
cugcaguccguguggauccaaug

SEQ ID NO: 3400864 - RNA, 19 nt, Human
cugcaguccuccgguugca

SEQ ID NO: 3400865 - RNA, 23 nt, Human
cugcagucucuauaccaauaaag

SEQ ID NO: 3400866 - RNA, 14 nt, Human
cugcagugugcccc

SEQ ID NO: 3400867 - RNA, 20 nt, Human
cugcaguguucgcuuggcuc

SEQ ID NO: 3400868 - RNA, 22 nt, Human
cugcaguguucgcuuggcucca

SEQ ID NO: 3400869 - RNA, 13 nt, Human
cugcaguuaauua

SEQ ID NO: 3400870 - RNA, 16 nt, Human
cugcaguuaauuagca

SEQ ID NO: 3400871 - RNA, 21 nt, Human
cugcaguuccccuggaagcag

SEQ ID NO: 3400872 - RNA, 21 nt, Human
cugcaguucgacucugugcug

SEQ ID NO: 3400873 - RNA, 17 nt, Human
cugcaguugccagucac

SEQ ID NO: 3400874 - RNA, 19 nt, Human
cugcaguugccagucaccc

SEQ ID NO: 3400875 - RNA, 22 nt, Human
cugcaguugccagucaccccgg

SEQ ID NO: 3400876 - RNA, 21 nt, Human
cugcaguuugagacaggagac

SEQ ID NO: 3400877 - RNA, 15 nt, Human
cugcaguuuugcuau

SEQ ID NO: 3400878 - RNA, 20 nt, Human
cugcaguuuuuuuccuucaa

SEQ ID NO: 3400879 - RNA, 23 nt, Human
cugcaguuuuuuuccuucaagaa

SEQ ID NO: 3400880 - RNA, 22 nt, Human
cugcauaaaaaggucuuuaaaa

SEQ ID NO: 3400881 - RNA, 23 nt, Human
cugcauaauucugaaguuauauu

SEQ ID NO: 3400882 - RNA, 17 nt, Human
cugcauacccgggcagg

SEQ ID NO: 3400883 - RNA, 16 nt, Human
cugcauagaaggagga

SEQ ID NO: 3400884 - RNA, 20 nt, Human
cugcauagaaggaggagagg

SEQ ID NO: 3400885 - RNA, 14 nt, Human
cugcauaucuucau

SEQ ID NO: 3400886 - RNA, 14 nt, Human
cugcauauguugaa

SEQ ID NO: 3400887 - RNA, 20 nt, Human
cugcaucaagaugugacaug

SEQ ID NO: 3400888 - RNA, 18 nt, Human
cugcaucaucuguagaua

SEQ ID NO: 3400889 - RNA, 21 nt, Human
cugcauccagagauucauuuu

SEQ ID NO: 3400890 - RNA, 13 nt, Human
cugcauccagccu

SEQ ID NO: 3400891 - RNA, 19 nt, Human
cugcauccauucuccugag

SEQ ID NO: 3400892 - RNA, 17 nt, Human
cugcaucccagcaccug

SEQ ID NO: 3400893 - RNA, 18 nt, Human
cugcaucccagcaccugc

SEQ ID NO: 3400894 - RNA, 16 nt, Human
cugcauccccuuggcu

SEQ ID NO: 3400895 - RNA, 19 nt, Human
cugcauccguaguucccug

SEQ ID NO: 3400896 - RNA, 16 nt, Human
cugcauccucuggagc

SEQ ID NO: 3400897 - RNA, 17 nt, Human
cugcaucuaagcccaug

SEQ ID NO: 3400898 - RNA, 17 nt, Human
cugcaucuacucaggcc

SEQ ID NO: 3400899 - RNA, 17 nt, Human
cugcaucuacucccaag

SEQ ID NO: 3400900 - RNA, 19 nt, Human
cugcaucugaccagcagcg

SEQ ID NO: 3400901 - RNA, 22 nt, Human
cugcaucugaccagcagcgccu

SEQ ID NO: 3400902 - RNA, 14 nt, Human
cugcaucuggggcc

SEQ ID NO: 3400903 - RNA, 18 nt, Human
cugcaucuugguuauuuc

SEQ ID NO: 3400904 - RNA, 17 nt, Human
cugcaucuuuagugcuu

SEQ ID NO: 3400905 - RNA, 13 nt, Human
cugcaugauguuu

SEQ ID NO: 3400906 - RNA, 15 nt, Human
cugcaugauguuugc

SEQ ID NO: 3400907 - RNA, 12 nt, Human
cugcaugcccag

SEQ ID NO: 3400908 - RNA, 15 nt, Human
cugcaugcccucuca

SEQ ID NO: 3400909 - RNA, 17 nt, Human
cugcaugcccucucagg

SEQ ID NO: 3400910 - RNA, 18 nt, Human
cugcaugcccucucaggc

SEQ ID NO: 3400911 - RNA, 21 nt, Human
cugcaugcccucucaggccgg

SEQ ID NO: 3400912 - RNA, 17 nt, Human
cugcaugcggcccagcc

SEQ ID NO: 3400913 - RNA, 18 nt, Human
cugcaugcgggcuuccuc

SEQ ID NO: 3400914 - RNA, 15 nt, Human
cugcaugcugcugga

SEQ ID NO: 3400915 - RNA, 21 nt, Human
cugcaugcuggguucugcaca

SEQ ID NO: 3400916 - RNA, 12 nt, Human
cugcauggaccu

SEQ ID NO: 3400917 - RNA, 13 nt, Human
cugcauggaccua

SEQ ID NO: 3400918 - RNA, 18 nt, Human
cugcauggaccuaacauu

SEQ ID NO: 3400919 - RNA, 22 nt, Human
cugcauggaccuaacauucgau

SEQ ID NO: 3400920 - RNA, 14 nt, Human
cugcauggcagggg

SEQ ID NO: 3400921 - RNA, 16 nt, Human
cugcauggcauccucc

SEQ ID NO: 3400922 - RNA, 17 nt, Human
cugcaugggccagcccc

SEQ ID NO: 3400923 - RNA, 19 nt, Human
cugcaugggccagccccuc

SEQ ID NO: 3400924 - RNA, 17 nt, Human
cugcaugguaauuuaua

SEQ ID NO: 3400925 - RNA, 21 nt, Human
cugcauguaaacacgccugca

SEQ ID NO: 3400926 - RNA, 13 nt, Human
cugcauguuacau

SEQ ID NO: 3400927 - RNA, 15 nt, Human
cugcauguuaccauc

SEQ ID NO: 3400928 - RNA, 15 nt, Human
cugcauguuugugau

SEQ ID NO: 3400929 - RNA, 12 nt, Human
cugcauuagaaa

SEQ ID NO: 3400930 - RNA, 15 nt, Human
cugcauuagaaauua

SEQ ID NO: 3400931 - RNA, 18 nt, Human
cugcauuauucucuuuua

SEQ ID NO: 3400932 - RNA, 19 nt, Human
cugcauucugccgugugcc

SEQ ID NO: 3400933 - RNA, 22 nt, Human
cugcauucuucugagcacuguu

SEQ ID NO: 3400934 - RNA, 22 nt, Human
cugcauugaaaagagcugaagg

SEQ ID NO: 3400935 - RNA, 17 nt, Human
cugcauugagaacugca

SEQ ID NO: 3400936 - RNA, 23 nt, Human
cugcauugccugcggucaaggcc

SEQ ID NO: 3400937 - RNA, 17 nt, Human
cugcauugcuagauaaa

SEQ ID NO: 3400938 - RNA, 16 nt, Human
cugcauuggaacugga

SEQ ID NO: 3400939 - RNA, 19 nt, Human
cugcauuggaacuggaggc

SEQ ID NO: 3400940 - RNA, 13 nt, Human
cugcauuuagcac

SEQ ID NO: 3400941 - RNA, 15 nt, Human
cugcauuuagcacaa

SEQ ID NO: 3400942 - RNA, 17 nt, Human
cugcauuuccucgcagc

SEQ ID NO: 3400943 - RNA, 13 nt, Human
cugcauuucugag

SEQ ID NO: 3400944 - RNA, 15 nt, Human
cugcccaucacaggg

SEQ ID NO: 3400945 - RNA, 19 nt, Human
cugcccauccugccccuga

SEQ ID NO: 3400946 - RNA, 22 nt, Human
cugcccaucgugaagaagccug

SEQ ID NO: 3400947 - RNA, 18 nt, Human
cugcccaugccaccgcuu

SEQ ID NO: 3400948 - RNA, 20 nt, Human
cugcccauggacaggcuggc

SEQ ID NO: 3400949 - RNA, 22 nt, Human
cugcccaugucgcgcucagcau

SEQ ID NO: 3400950 - RNA, 22 nt, Human
cugcccauuucgugagccccau

SEQ ID NO: 3400951 - RNA, 21 nt, Human
cugccccaaacaaauaugcaa

SEQ ID NO: 3400952 - RNA, 19 nt, Human
cugccccaaaggaagcuuu

SEQ ID NO: 3400953 - RNA, 12 nt, Human
cugccccaacuc

SEQ ID NO: 3400954 - RNA, 18 nt, Human
cugccccaacuccuggaa

SEQ ID NO: 3400955 - RNA, 20 nt, Human
cugccccaacuccuuccagc

SEQ ID NO: 3400956 - RNA, 22 nt, Human
cugccccaacuccuuccagcua

SEQ ID NO: 3400957 - RNA, 13 nt, Human
cugccccaacucu

SEQ ID NO: 3400958 - RNA, 13 nt, Human
cugccccaaguug

SEQ ID NO: 3400959 - RNA, 20 nt, Human
cugccccacaccuccucuca

SEQ ID NO: 3400960 - RNA, 13 nt, Human
cugccccagccag

SEQ ID NO: 3400961 - RNA, 14 nt, Human
cugccccagccaga

SEQ ID NO: 3400962 - RNA, 17 nt, Human
cugccccagcccaaguc

SEQ ID NO: 3400963 - RNA, 19 nt, Human
cugccccagcccaagucca

SEQ ID NO: 3400964 - RNA, 15 nt, Human
cugccccagcccaga

SEQ ID NO: 3400965 - RNA, 16 nt, Human
cugccccagcccagau

SEQ ID NO: 3400966 - RNA, 12 nt, Human
cugccccaggcc

SEQ ID NO: 3400967 - RNA, 12 nt, Human
cugccccauccc

SEQ ID NO: 3400968 - RNA, 17 nt, Human
cugccccauccuccagc

SEQ ID NO: 3400969 - RNA, 19 nt, Human
cugccccaucuccccucag

SEQ ID NO: 3400970 - RNA, 21 nt, Human
cugccccaucuccccucagcu

SEQ ID NO: 3400971 - RNA, 22 nt, Human
cugccccaucuccccucagcuc

SEQ ID NO: 3400972 - RNA, 16 nt, Human
cugccccaucugggga

SEQ ID NO: 3400973 - RNA, 16 nt, Human
cugccccaugaagcca

SEQ ID NO: 3400974 - RNA, 17 nt, Human
cugcccccacaccuggc

SEQ ID NO: 3400975 - RNA, 19 nt, Human
cugcccccacaccuggccc

SEQ ID NO: 3400976 - RNA, 19 nt, Human
cugcccccaccacggccac

SEQ ID NO: 3400977 - RNA, 13 nt, Human
cugcccccaggac

SEQ ID NO: 3400978 - RNA, 15 nt, Human
cugcccccaggacug

SEQ ID NO: 3400979 - RNA, 16 nt, Human
cugcccccaggacugg

SEQ ID NO: 3400980 - RNA, 21 nt, Human
cugccccccagccucuggcau

SEQ ID NO: 3400981 - RNA, 20 nt, Human
cugcccccgcauccccugcc

SEQ ID NO: 3400982 - RNA, 21 nt, Human
cugcccccgcauccccugccu

SEQ ID NO: 3400983 - RNA, 23 nt, Human
cugcccccgcauccccugccucc

SEQ ID NO: 3400984 - RNA, 16 nt, Human
cugcccccggcccccu

SEQ ID NO: 3400985 - RNA, 14 nt, Human
cugcccccuccuga

SEQ ID NO: 3400986 - RNA, 14 nt, Human
cugcccccucugcc

SEQ ID NO: 3400987 - RNA, 16 nt, Human
cugcccccucugcccu

SEQ ID NO: 3400988 - RNA, 16 nt, Human
cugcccccugaaacuu

SEQ ID NO: 3400989 - RNA, 13 nt, Human
cugcccccugcag

SEQ ID NO: 3400990 - RNA, 15 nt, Human
cugcccccugcagaa

SEQ ID NO: 3400991 - RNA, 14 nt, Human
cugcccccugcagg

SEQ ID NO: 3400992 - RNA, 15 nt, Human
cugcccccugcagga

SEQ ID NO: 3400993 - RNA, 16 nt, Human
cugcccccugcaggaa

SEQ ID NO: 3400994 - RNA, 14 nt, Human
cugcccccugcugg

SEQ ID NO: 3400995 - RNA, 15 nt, Human
cugcccccugcuggc

SEQ ID NO: 3400996 - RNA, 17 nt, Human
cugcccccugcuggcuc

SEQ ID NO: 3400997 - RNA, 19 nt, Human
cugcccccugcuggcucuu

SEQ ID NO: 3400998 - RNA, 14 nt, Human
cugccccgccccca

SEQ ID NO: 3400999 - RNA, 17 nt, Human
cugccccgcccccaguc

SEQ ID NO: 3401000 - RNA, 23 nt, Human
cugccccgcccccaguccccacc

SEQ ID NO: 3401001 - RNA, 14 nt, Human
cugccccgcccuca

SEQ ID NO: 3401002 - RNA, 19 nt, Human
cugccccggagcuggagga

SEQ ID NO: 3401003 - RNA, 23 nt, Human
cugccccggggaggggcgcucgc

SEQ ID NO: 3401004 - RNA, 21 nt, Human
cugccccgucaccaucucagg

SEQ ID NO: 3401005 - RNA, 23 nt, Human
cugccccgucaccaucucaggcc

SEQ ID NO: 3401006 - RNA, 17 nt, Human
cugccccuacccuggac

SEQ ID NO: 3401007 - RNA, 14 nt, Human
cugccccucaacuc

SEQ ID NO: 3401008 - RNA, 14 nt, Human
cugccccucccaga

SEQ ID NO: 3401009 - RNA, 13 nt, Human
cugccccuccccc

SEQ ID NO: 3401010 - RNA, 16 nt, Human
cugccccucccccagc

SEQ ID NO: 3401011 - RNA, 22 nt, Human
cugccccucccugccagcaccc

SEQ ID NO: 3401012 - RNA, 15 nt, Human
cugccccucccugcu

SEQ ID NO: 3401013 - RNA, 17 nt, Human
cugccccucccuucaac

SEQ ID NO: 3401014 - RNA, 17 nt, Human
cugccccuccucucugc

SEQ ID NO: 3401015 - RNA, 19 nt, Human
cugccccuccucucugccc

SEQ ID NO: 3401016 - RNA, 13 nt, Human
cugccccucucug

SEQ ID NO: 3401017 - RNA, 14 nt, Human
cugccccucucugg

SEQ ID NO: 3401018 - RNA, 15 nt, Human
cugccccucucuggg

SEQ ID NO: 3401019 - RNA, 22 nt, Human
cugccccucucugggccucaga

SEQ ID NO: 3401020 - RNA, 12 nt, Human
cugccccucuuu

SEQ ID NO: 3401021 - RNA, 19 nt, Human
cugccccugcacagcaggc

SEQ ID NO: 3401022 - RNA, 14 nt, Human
cugccccugccccg

SEQ ID NO: 3401023 - RNA, 17 nt, Human
cugccccugccccguca

SEQ ID NO: 3401024 - RNA, 22 nt, Human
cugccccugccuuggggucagg

SEQ ID NO: 3401025 - RNA, 11 nt, Human
cugccccuggc

SEQ ID NO: 3401026 - RNA, 16 nt, Human
cugccccuggcagccc

SEQ ID NO: 3401027 - RNA, 18 nt, Human
cugccccuggcagccccu

SEQ ID NO: 3401028 - RNA, 23 nt, Human
cugccccuucuacacucuccugg

SEQ ID NO: 3401029 - RNA, 14 nt, Human
cugcccgagcuggu

SEQ ID NO: 3401030 - RNA, 16 nt, Human
cugcccgagcuggugc

SEQ ID NO: 3401031 - RNA, 20 nt, Human
cugcccgcacagcagccugc

SEQ ID NO: 3401032 - RNA, 19 nt, Human
cugcccgcagaccucugga

SEQ ID NO: 3401033 - RNA, 13 nt, Human
cugcccgccugcc

SEQ ID NO: 3401034 - RNA, 16 nt, Human
cugcccgccugcccac

SEQ ID NO: 3401035 - RNA, 19 nt, Human
cugcccgccugcccaccug

SEQ ID NO: 3401036 - RNA, 13 nt, Human
cugcccgcuccca

SEQ ID NO: 3401037 - RNA, 21 nt, Human
cugcccgggaaggucaccagc

SEQ ID NO: 3401038 - RNA, 19 nt, Human
cugcccgggagcucaggaa

SEQ ID NO: 3401039 - RNA, 20 nt, Human
cugcccggggcagcugccag

SEQ ID NO: 3401040 - RNA, 23 nt, Human
cugcccggggcagcugccagaga

SEQ ID NO: 3401041 - RNA, 23 nt, Human
cugcccggugggggggcagagcc

SEQ ID NO: 3401042 - RNA, 21 nt, Human
cugcccguaaacacgccugca

SEQ ID NO: 3401043 - RNA, 19 nt, Human
cugcccgucucucucccau

SEQ ID NO: 3401044 - RNA, 21 nt, Human
cugcccgucuucagccuagcc

SEQ ID NO: 3401045 - RNA, 15 nt, Human
cugcccguguacaua

SEQ ID NO: 3401046 - RNA, 22 nt, Human
cugcccuaaugcgcaggcuggc

SEQ ID NO: 3401047 - RNA, 18 nt, Human
cugcccuacagaggucuc

SEQ ID NO: 3401048 - RNA, 18 nt, Human
cugcccuaggcuccguca

SEQ ID NO: 3401049 - RNA, 16 nt, Human
cugcccucaagagcaa

SEQ ID NO: 3401050 - RNA, 23 nt, Human
cugcccucauuacugggccuuag

SEQ ID NO: 3401051 - RNA, 17 nt, Human
cugcccuccccagagca

SEQ ID NO: 3401052 - RNA, 16 nt, Human
cugcccuccugugcuc

SEQ ID NO: 3401053 - RNA, 22 nt, Human
cugcccuccugugcucagcccu

SEQ ID NO: 3401054 - RNA, 22 nt, Human
cugcccucgcacggccccgaag

SEQ ID NO: 3401055 - RNA, 16 nt, Human
cugcccucguggccag

SEQ ID NO: 3401056 - RNA, 17 nt, Human
cugcccucguggccagc

SEQ ID NO: 3401057 - RNA, 19 nt, Human
cugcccucguggccagccc

SEQ ID NO: 3401058 - RNA, 23 nt, Human
cugcccucguggccagcccggcu

SEQ ID NO: 3401059 - RNA, 16 nt, Human
cugcccucuccugggc

SEQ ID NO: 3401060 - RNA, 18 nt, Human
cugcccucuccugggcag

SEQ ID NO: 3401061 - RNA, 18 nt, Human
cugcccucuccuuccuua

SEQ ID NO: 3401062 - RNA, 17 nt, Human
cugcccucugcauccuc

SEQ ID NO: 3401063 - RNA, 17 nt, Human
cugcccugcacgucaug

SEQ ID NO: 3401064 - RNA, 11 nt, Human
cugcccugccc

SEQ ID NO: 3401065 - RNA, 13 nt, Human
cugcccugcccac

SEQ ID NO: 3401066 - RNA, 14 nt, Human
cugcccugcccacc

SEQ ID NO: 3401067 - RNA, 17 nt, Human
cugcccugccccaaguu

SEQ ID NO: 3401068 - RNA, 15 nt, Human
cugcccugcccugcc

SEQ ID NO: 3401069 - RNA, 12 nt, Human
cugcccugccug

SEQ ID NO: 3401070 - RNA, 16 nt, Human
cugcccugccugaggg

SEQ ID NO: 3401071 - RNA, 20 nt, Human
cugcccugcgggucacagga

SEQ ID NO: 3401072 - RNA, 11 nt, Human
cugcccugcug

SEQ ID NO: 3401073 - RNA, 17 nt, Human
cugcccuggcaggguca

SEQ ID NO: 3401074 - RNA, 12 nt, Human
cugcccuggccc

SEQ ID NO: 3401075 - RNA, 13 nt, Human
cugcccuggcccu

SEQ ID NO: 3401076 - RNA, 15 nt, Human
cugcccuggcccuga

SEQ ID NO: 3401077 - RNA, 23 nt, Human
cugcccuggcccugagguguggg

SEQ ID NO: 3401078 - RNA, 14 nt, Human
cugcccuggcugcu

SEQ ID NO: 3401079 - RNA, 20 nt, Human
cugcccuggcugcugccccc

SEQ ID NO: 3401080 - RNA, 15 nt, Human
cugcccugguccagg

SEQ ID NO: 3401081 - RNA, 23 nt, Human
cugcccugguccagggaagcugg

SEQ ID NO: 3401082 - RNA, 13 nt, Human
cugcccuggugcu

SEQ ID NO: 3401083 - RNA, 16 nt, Human
cugcccuggugcugcc

SEQ ID NO: 3401084 - RNA, 20 nt, Human
cugcccuggugcugccacac

SEQ ID NO: 3401085 - RNA, 21 nt, Human
cugcccuggugcugccacacu

SEQ ID NO: 3401086 - RNA, 23 nt, Human
cugcccuggugcugccacacuuc

SEQ ID NO: 3401087 - RNA, 18 nt, Human
cugcccugguggcccucu

SEQ ID NO: 3401088 - RNA, 18 nt, Human
cugcccugguuuccugcc

SEQ ID NO: 3401089 - RNA, 12 nt, Human
cugggcauugcu

SEQ ID NO: 3401090 - RNA, 14 nt, Human
cugggcauugcuuu

SEQ ID NO: 3401091 - RNA, 19 nt, Human
cugggccaagccagggaug

SEQ ID NO: 3401092 - RNA, 15 nt, Human
cugggccaaguuccu

SEQ ID NO: 3401093 - RNA, 20 nt, Human
cugggccaauucaauacaaa

SEQ ID NO: 3401094 - RNA, 19 nt, Human
cugggccagggucugugug

SEQ ID NO: 3401095 - RNA, 20 nt, Human
cugggccauucuccacagca

SEQ ID NO: 3401096 - RNA, 21 nt, Human
cugggccauucuccacagcaa

SEQ ID NO: 3401097 - RNA, 17 nt, Human
cugggcccacaaaggca

SEQ ID NO: 3401098 - RNA, 15 nt, Human
cugggcccagaggca

SEQ ID NO: 3401099 - RNA, 14 nt, Human
cugggccccagccc

SEQ ID NO: 3401100 - RNA, 16 nt, Human
cugggccccagcccac

SEQ ID NO: 3401101 - RNA, 18 nt, Human
cugggccccccagcucag

SEQ ID NO: 3401102 - RNA, 20 nt, Human
cugggccccccagcucaggg

SEQ ID NO: 3401103 - RNA, 12 nt, Human
cugggccccucc

SEQ ID NO: 3401104 - RNA, 16 nt, Human
cugggccccucccuac

SEQ ID NO: 3401105 - RNA, 17 nt, Human
cugggccccugccucuc

SEQ ID NO: 3401106 - RNA, 19 nt, Human
cugggccccugccucucug

SEQ ID NO: 3401107 - RNA, 20 nt, Human
cugggcccgacauggcuccg

SEQ ID NO: 3401108 - RNA, 14 nt, Human
cugggcccucucug

SEQ ID NO: 3401109 - RNA, 15 nt, Human
cugggcccucucugc

SEQ ID NO: 3401110 - RNA, 15 nt, Human
cugggcccucucuuc

SEQ ID NO: 3401111 - RNA, 11 nt, Human
cugggcccuga

SEQ ID NO: 3401112 - RNA, 22 nt, Human
cugggcccugagucugggcagc

SEQ ID NO: 3401113 - RNA, 16 nt, Human
cugggcccugggcugg

SEQ ID NO: 3401114 - RNA, 18 nt, Human
cugggcccugggcuggaa

SEQ ID NO: 3401115 - RNA, 18 nt, Human
cugggcccuggggccugu

SEQ ID NO: 3401116 - RNA, 17 nt, Human
cugggccggagggucag

SEQ ID NO: 3401117 - RNA, 20 nt, Human
cugggccgggacccagggcc

SEQ ID NO: 3401118 - RNA, 18 nt, Human
cugggccguaucuccggc

SEQ ID NO: 3401119 - RNA, 23 nt, Human
cugggccuauggagagcccuggg

SEQ ID NO: 3401120 - RNA, 14 nt, Human
cugggccugccuca

SEQ ID NO: 3401121 - RNA, 15 nt, Human
cugggccugccucac

SEQ ID NO: 3401122 - RNA, 19 nt, Human
cugggccugcugcugagaa

SEQ ID NO: 3401123 - RNA, 20 nt, Human
cugggccuggcagcucagcu

SEQ ID NO: 3401124 - RNA, 11 nt, Human
cugggccuggg

SEQ ID NO: 3401125 - RNA, 11 nt, Human
cugggccuggu

SEQ ID NO: 3401126 - RNA, 13 nt, Human
cugggccuggucu

SEQ ID NO: 3401127 - RNA, 14 nt, Human
cugggccuggucuc

SEQ ID NO: 3401128 - RNA, 16 nt, Human
cugggccuggucucac

SEQ ID NO: 3401129 - RNA, 23 nt, Human
cugggccuggucucacccuggag

SEQ ID NO: 3401130 - RNA, 19 nt, Human
cugggccuuggccuggagc

SEQ ID NO: 3401131 - RNA, 20 nt, Human
cugggccuuggccuggagca

SEQ ID NO: 3401132 - RNA, 15 nt, Human
cugggccuugggcuc

SEQ ID NO: 3401133 - RNA, 13 nt, Human
cugggcgacagag

SEQ ID NO: 3401134 - RNA, 14 nt, Human
cugggcgcuggucc

SEQ ID NO: 3401135 - RNA, 23 nt, Human
cugggcguaguggcucacaccug

SEQ ID NO: 3401136 - RNA, 15 nt, Human
cugggcuaggggaca

SEQ ID NO: 3401137 - RNA, 20 nt, Human
cugggcuaggggacaucaga

SEQ ID NO: 3401138 - RNA, 22 nt, Human
cugggcuagguagaaaaagggu

SEQ ID NO: 3401139 - RNA, 12 nt, Human
cugggcucagug

SEQ ID NO: 3401140 - RNA, 16 nt, Human
cugggcucggaggcug

SEQ ID NO: 3401141 - RNA, 17 nt, Human
cugggcucgucuuugca

SEQ ID NO: 3401142 - RNA, 13 nt, Human
cugggcucuccac

SEQ ID NO: 3401143 - RNA, 16 nt, Human
cugggcucuccaccuc

SEQ ID NO: 3401144 - RNA, 21 nt, Human
cugggcucuccaccucagccu

SEQ ID NO: 3401145 - RNA, 20 nt, Human
cugggcucugccacccuacc

SEQ ID NO: 3401146 - RNA, 23 nt, Human
cugggcucugccccagcucuggc

SEQ ID NO: 3401147 - RNA, 15 nt, Human
cugggcucugggagc

SEQ ID NO: 3401148 - RNA, 14 nt, Human
cugggcucugguuu

SEQ ID NO: 3401149 - RNA, 14 nt, Human
cugggcucuguggg

SEQ ID NO: 3401150 - RNA, 22 nt, Human
cugggcucugugggcugcacuc

SEQ ID NO: 3401151 - RNA, 18 nt, Human
cugggcugaacacuccaa

SEQ ID NO: 3401152 - RNA, 19 nt, Human
cugggcugacugggccagg

SEQ ID NO: 3401153 - RNA, 18 nt, Human
cugggcugagccccuacc

SEQ ID NO: 3401154 - RNA, 19 nt, Human
cugggcugagccccuaccc

SEQ ID NO: 3401155 - RNA, 19 nt, Human
cugggcugagggagccugg

SEQ ID NO: 3401156 - RNA, 15 nt, Human
cugggcugcuggagg

SEQ ID NO: 3401157 - RNA, 18 nt, Human
cugggcuggaugagcucc

SEQ ID NO: 3401158 - RNA, 15 nt, Human
cugggcuggccaguu

SEQ ID NO: 3401159 - RNA, 18 nt, Human
cugggcuggcucccucuu

SEQ ID NO: 3401160 - RNA, 12 nt, Human
cugggcugggaa

SEQ ID NO: 3401161 - RNA, 13 nt, Human
cugggcugggcac

SEQ ID NO: 3401162 - RNA, 18 nt, Human
cugggcuggggaggaccu

SEQ ID NO: 3401163 - RNA, 21 nt, Human
cugggcugguggcucccggag

SEQ ID NO: 3401164 - RNA, 13 nt, Human
cugggcugugcua

SEQ ID NO: 3401165 - RNA, 15 nt, Human
cugggcugugggcaa

SEQ ID NO: 3401166 - RNA, 12 nt, Human
cugggcugugug

SEQ ID NO: 3401167 - RNA, 20 nt, Human
cugggcuuauaucuggccuc

SEQ ID NO: 3401168 - RNA, 15 nt, Human
cugggcuucaguggc

SEQ ID NO: 3401169 - RNA, 20 nt, Human
cugggcuucaguggcagcug

SEQ ID NO: 3401170 - RNA, 12 nt, Human
cugggcuuccug

SEQ ID NO: 3401171 - RNA, 16 nt, Human
cugggcuuccuggagc

SEQ ID NO: 3401172 - RNA, 13 nt, Human
cugggcuuggccu

SEQ ID NO: 3401173 - RNA, 14 nt, Human
cugggcuuggccug

SEQ ID NO: 3401174 - RNA, 16 nt, Human
cugggcuuggccugcu

SEQ ID NO: 3401175 - RNA, 13 nt, Human
cugggcuugggga

SEQ ID NO: 3401176 - RNA, 17 nt, Human
cugggcuuggggaccag

SEQ ID NO: 3401177 - RNA, 20 nt, Human
cugggcuuggggcuuccuaa

SEQ ID NO: 3401178 - RNA, 20 nt, Human
cugggcuuugauuccaucuc

SEQ ID NO: 3401179 - RNA, 21 nt, Human
cugggcuuuuguuuugcuuuu

SEQ ID NO: 3401180 - RNA, 23 nt, Human
cugggcuuuuuuuuucucuuucu

SEQ ID NO: 3401181 - RNA, 20 nt, Human
cuggggaaaacuccaccuuc

SEQ ID NO: 3401182 - RNA, 20 nt, Human
cuggggaaacaacauuuaua

SEQ ID NO: 3401183 - RNA, 17 nt, Human
cuggggaaacuggccau

SEQ ID NO: 3401184 - RNA, 19 nt, Human
cuggggaaacuggccaugg

SEQ ID NO: 3401185 - RNA, 16 nt, Human
cuggggaagacagugg

SEQ ID NO: 3401186 - RNA, 19 nt, Human
cuggggacagguccucagu

SEQ ID NO: 3401187 - RNA, 22 nt, Human
cuggggaccagcuuggcucagg

SEQ ID NO: 3401188 - RNA, 18 nt, Human
cuggggacuuggccucuc

SEQ ID NO: 3401189 - RNA, 17 nt, Human
cuggggacuugugucug

SEQ ID NO: 3401190 - RNA, 18 nt, Human
cuggggacuugugucugc

SEQ ID NO: 3401191 - RNA, 15 nt, Human
cuggggagcaggcag

SEQ ID NO: 3401192 - RNA, 21 nt, Human
cuggggagcaggcagccagca

SEQ ID NO: 3401193 - RNA, 15 nt, Human
cuggggagcccgucu

SEQ ID NO: 3401194 - RNA, 12 nt, Human
cuggggaggagc

SEQ ID NO: 3401195 - RNA, 20 nt, Human
cuggggauccccgccuggcc

SEQ ID NO: 3401196 - RNA, 22 nt, Human
cuggggauccccgccuggccag

SEQ ID NO: 3401197 - RNA, 22 nt, Human
cuggggaugucucucaugacca

SEQ ID NO: 3401198 - RNA, 15 nt, Human
cuggggaugugggag

SEQ ID NO: 3401199 - RNA, 22 nt, Human
cuggggauugggccccugccag

SEQ ID NO: 3401200 - RNA, 16 nt, Human
cuggggcaagucccug

SEQ ID NO: 3401201 - RNA, 21 nt, Human
cuggggcacaguccaggaaca

SEQ ID NO: 3401202 - RNA, 22 nt, Human
cuggggcagcacccuauaaauc

SEQ ID NO: 3401203 - RNA, 14 nt, Human
cuggggcaggcugc

SEQ ID NO: 3401204 - RNA, 14 nt, Human
cuggggcaggcugg

SEQ ID NO: 3401205 - RNA, 15 nt, Human
cuggggcaggcuggg

SEQ ID NO: 3401206 - RNA, 18 nt, Human
cuggggcaggcugggcca

SEQ ID NO: 3401207 - RNA, 21 nt, Human
cuggggcaggcugggccaugu

SEQ ID NO: 3401208 - RNA, 15 nt, Human
cuggggcagucaccu

SEQ ID NO: 3401209 - RNA, 17 nt, Human
cuggggcauggaaggca

SEQ ID NO: 3401210 - RNA, 14 nt, Human
cuggggccaggccg

SEQ ID NO: 3401211 - RNA, 15 nt, Human
cuggggccaggcugg

SEQ ID NO: 3401212 - RNA, 22 nt, Human
cuggggccaggcugggucgccc

SEQ ID NO: 3401213 - RNA, 13 nt, Human
cuggggccccacc

SEQ ID NO: 3401214 - RNA, 12 nt, Human
cuggggccccuu

SEQ ID NO: 3401215 - RNA, 16 nt, Human
cuggggccgaaagaac

SEQ ID NO: 3401216 - RNA, 22 nt, Human
cuggggccuaucagugugcccc

SEQ ID NO: 3401217 - RNA, 23 nt, Human
cuggggccucggagccucauccg

SEQ ID NO: 3401218 - RNA, 12 nt, Human
cuggggccucuu

SEQ ID NO: 3401219 - RNA, 13 nt, Human
cuggggccugaga

SEQ ID NO: 3401220 - RNA, 15 nt, Human
cuggggccugagaga

SEQ ID NO: 3401221 - RNA, 16 nt, Human
cuggggccugagagaa

SEQ ID NO: 3401222 - RNA, 17 nt, Human
cuggggccugagagaau

SEQ ID NO: 3401223 - RNA, 16 nt, Human
cuggggccuggaccug

SEQ ID NO: 3401224 - RNA, 17 nt, Human
cuggggccuggaccugc

SEQ ID NO: 3401225 - RNA, 18 nt, Human
cuggggccuggaccugcc

SEQ ID NO: 3401226 - RNA, 19 nt, Human
cuggggccuggaccugccu

SEQ ID NO: 3401227 - RNA, 13 nt, Human
cuggggccuggca

SEQ ID NO: 3401228 - RNA, 18 nt, Human
cuggggccuggcagggag

SEQ ID NO: 3401229 - RNA, 12 nt, Human
cuggggccuggg

SEQ ID NO: 3401230 - RNA, 13 nt, Human
cuggggccuggga

SEQ ID NO: 3401231 - RNA, 15 nt, Human
cuggggccugggaca

SEQ ID NO: 3401232 - RNA, 14 nt, Human
cuggggcgugggga

SEQ ID NO: 3401233 - RNA, 18 nt, Human
cuggggcuagggggagcc

SEQ ID NO: 3401234 - RNA, 16 nt, Human
cuggggcucagagccg

SEQ ID NO: 3401235 - RNA, 15 nt, Human
cugguauuaaaugcc

SEQ ID NO: 3401236 - RNA, 15 nt, Human
cugguauuccugccu

SEQ ID NO: 3401237 - RNA, 19 nt, Human
cugguauucuguucuggag

SEQ ID NO: 3401238 - RNA, 12 nt, Human
cugguauuuccu

SEQ ID NO: 3401239 - RNA, 18 nt, Human
cuggucaaacaaacucuc

SEQ ID NO: 3401240 - RNA, 13 nt, Human
cuggucaaagaaa

SEQ ID NO: 3401241 - RNA, 20 nt, Human
cuggucaacuugagcauguu

SEQ ID NO: 3401242 - RNA, 16 nt, Human
cuggucacagccuccu

SEQ ID NO: 3401243 - RNA, 19 nt, Human
cuggucacagccuccucug

SEQ ID NO: 3401244 - RNA, 23 nt, Human
cuggucacaggacucugccuccu

SEQ ID NO: 3401245 - RNA, 23 nt, Human
cuggucacagggcaugccccggc

SEQ ID NO: 3401246 - RNA, 16 nt, Human
cuggucaccuaggaag

SEQ ID NO: 3401247 - RNA, 22 nt, Human
cuggucacugccauggaggcac

SEQ ID NO: 3401248 - RNA, 12 nt, Human
cuggucagccca

SEQ ID NO: 3401249 - RNA, 13 nt, Human
cuggucagcccaa

SEQ ID NO: 3401250 - RNA, 15 nt, Human
cugguccaaaagauu

SEQ ID NO: 3401251 - RNA, 22 nt, Human
cugguccaaaagauugcugaaa

SEQ ID NO: 3401252 - RNA, 16 nt, Human
cugguccacagggcac

SEQ ID NO: 3401253 - RNA, 14 nt, Human
cugguccagggcua

SEQ ID NO: 3401254 - RNA, 18 nt, Human
cugguccauagagagcaa

SEQ ID NO: 3401255 - RNA, 17 nt, Human
cugguccaucugguuuu

SEQ ID NO: 3401256 - RNA, 17 nt, Human
cugguccaugauggagu

SEQ ID NO: 3401257 - RNA, 14 nt, Human
cuggucccacucag

SEQ ID NO: 3401258 - RNA, 18 nt, Human
cuggucccacucagucca

SEQ ID NO: 3401259 - RNA, 17 nt, Human
cugguccccuccuuccc

SEQ ID NO: 3401260 - RNA, 20 nt, Human
cuggucccggggccagcacu

SEQ ID NO: 3401261 - RNA, 15 nt, Human
cuggucccugggagg

SEQ ID NO: 3401262 - RNA, 21 nt, Human
cuggucccuugcagcuaguuu

SEQ ID NO: 3401263 - RNA, 22 nt, Human
cuggucccuuguauccccugca

SEQ ID NO: 3401264 - RNA, 24 nt, Human
cuggucccuuguauccccugcagg

SEQ ID NO: 3401265 - RNA, 22 nt, Human
cugguccggacacuccuagaga

SEQ ID NO: 3401266 - RNA, 15 nt, Human
cugguccgugggacg

SEQ ID NO: 3401267 - RNA, 16 nt, Human
cugguccgugggacgg

SEQ ID NO: 3401268 - RNA, 21 nt, Human
cugguccgugggacggugccc

SEQ ID NO: 3401269 - RNA, 16 nt, Human
cugguccuacccaucc

SEQ ID NO: 3401270 - RNA, 21 nt, Human
cugguccuauggccucauguu

SEQ ID NO: 3401271 - RNA, 16 nt, Human
cugguccugagggucc

SEQ ID NO: 3401272 - RNA, 14 nt, Human
cuggucgcuccugc

SEQ ID NO: 3401273 - RNA, 15 nt, Human
cuggucgcuccugcc

SEQ ID NO: 3401274 - RNA, 16 nt, Human
cuggucgcuccugccc

SEQ ID NO: 3401275 - RNA, 18 nt, Human
cuggucgcuccugcccac

SEQ ID NO: 3401276 - RNA, 19 nt, Human
cuggucuauaccuuaagaa

SEQ ID NO: 3401277 - RNA, 17 nt, Human
cuggucucacccuggag

SEQ ID NO: 3401278 - RNA, 17 nt, Human
cuggucuccucagccuc

SEQ ID NO: 3401279 - RNA, 17 nt, Human
cuggucucuaggcuggg

SEQ ID NO: 3401280 - RNA, 21 nt, Human
cuggucugguugggcagccag

SEQ ID NO: 3401281 - RNA, 21 nt, Human
cuggucuugaaguccuggcuu

SEQ ID NO: 3401282 - RNA, 15 nt, Human
cuggucuuguaagag

SEQ ID NO: 3401283 - RNA, 15 nt, Human
cuggucuuuccucug

SEQ ID NO: 3401284 - RNA, 15 nt, Human
cuggugaagcucacu

SEQ ID NO: 3401285 - RNA, 16 nt, Human
cuggugaauauuuuca

SEQ ID NO: 3401286 - RNA, 15 nt, Human
cuggugacaccagcc

SEQ ID NO: 3401287 - RNA, 23 nt, Human
cuggugaccccuuuucagcuucu

SEQ ID NO: 3401288 - RNA, 22 nt, Human
cuggugaccuuccaagagccug

SEQ ID NO: 3401289 - RNA, 21 nt, Human
cuggugacugcgaucuucaga

SEQ ID NO: 3401290 - RNA, 15 nt, Human
cuggugacuuuccuc

SEQ ID NO: 3401291 - RNA, 23 nt, Human
cuggugacuuuccucuuuggucu

SEQ ID NO: 3401292 - RNA, 13 nt, Human
cuggugagcauua

SEQ ID NO: 3401293 - RNA, 19 nt, Human
cuggugaggaagcuccagu

SEQ ID NO: 3401294 - RNA, 14 nt, Human
cuggugaggagcac

SEQ ID NO: 3401295 - RNA, 23 nt, Human
cuggugagucuuggcggcagcag

SEQ ID NO: 3401296 - RNA, 21 nt, Human
cuggugaucacguggucacgg

SEQ ID NO: 3401297 - RNA, 19 nt, Human
cuggugaugcgcaguugcu

SEQ ID NO: 3401298 - RNA, 14 nt, Human
cuggugcagggccu

SEQ ID NO: 3401299 - RNA, 20 nt, Human
cuggugccaauuucaaguuc

SEQ ID NO: 3401300 - RNA, 23 nt, Human
cuggugcccuaaccucugaguca

SEQ ID NO: 3401301 - RNA, 21 nt, Human
cuggugcccugcuuucagaua

SEQ ID NO: 3401302 - RNA, 23 nt, Human
cuggugcccugcuuucagauacu

SEQ ID NO: 3401303 - RNA, 21 nt, Human
cuggugcccuggaugcccagg

SEQ ID NO: 3401304 - RNA, 12 nt, Human
cuggugccucac

SEQ ID NO: 3401305 - RNA, 16 nt, Human
cuggugcgaauggacu

SEQ ID NO: 3401306 - RNA, 15 nt, Human
cuggugcggcuggcc

SEQ ID NO: 3401307 - RNA, 16 nt, Human
cuggugcucucugcca

SEQ ID NO: 3401308 - RNA, 14 nt, Human
cuggugcugccucu

SEQ ID NO: 3401309 - RNA, 12 nt, Human
cuggugcugcug

SEQ ID NO: 3401310 - RNA, 14 nt, Human
cuggugcugcugcu

SEQ ID NO: 3401311 - RNA, 16 nt, Human
cuggugcuguggccag

SEQ ID NO: 3401312 - RNA, 18 nt, Human
cuggugcuguggccaggg

SEQ ID NO: 3401313 - RNA, 19 nt, Human
cuggugcuguggccagggu

SEQ ID NO: 3401314 - RNA, 19 nt, Human
cuggugcuuaugcucuuaa

SEQ ID NO: 3401315 - RNA, 21 nt, Human
cuggugcuucuccucuccuag

SEQ ID NO: 3401316 - RNA, 15 nt, Human
cugguggacaguccu

SEQ ID NO: 3401317 - RNA, 18 nt, Human
cugguggacaguccuggg

SEQ ID NO: 3401318 - RNA, 14 nt, Human
cugguggcacagga

SEQ ID NO: 3401319 - RNA, 13 nt, Human
cugguggcagcuc

SEQ ID NO: 3401320 - RNA, 14 nt, Human
cugguggcagcuca

SEQ ID NO: 3401321 - RNA, 18 nt, Human
cugguggcagcucaccuc

SEQ ID NO: 3401322 - RNA, 20 nt, Human
cugguggcagcucaccucuc

SEQ ID NO: 3401323 - RNA, 21 nt, Human
cugguggcagcucaccucucc

SEQ ID NO: 3401324 - RNA, 23 nt, Human
cugguggcagcucaccucucccu

SEQ ID NO: 3401325 - RNA, 14 nt, Human
cugguggcagcugc

SEQ ID NO: 3401326 - RNA, 16 nt, Human
cugguggcaggggcuu

SEQ ID NO: 3401327 - RNA, 15 nt, Human
cugguggccccugcc

SEQ ID NO: 3401328 - RNA, 22 nt, Human
cugguggcccucuccccugccc

SEQ ID NO: 3401329 - RNA, 22 nt, Human
cuggugggcaccaagagccaau

SEQ ID NO: 3401330 - RNA, 13 nt, Human
cuggugggccaac

SEQ ID NO: 3401331 - RNA, 20 nt, Human
cugguggggcagcuccucug

SEQ ID NO: 3401332 - RNA, 22 nt, Human
cugguggguccaggggccccuc

SEQ ID NO: 3401333 - RNA, 20 nt, Human
cuggugggugaaagaaauca

SEQ ID NO: 3401334 - RNA, 18 nt, Human
cugguggucuguuggcag

SEQ ID NO: 3401335 - RNA, 23 nt, Human
cuggugguucacucuuggagccu

SEQ ID NO: 3401336 - RNA, 15 nt, Human
cuggugguugcuguu

SEQ ID NO: 3401337 - RNA, 16 nt, Human
cuggugguuucacggu

SEQ ID NO: 3401338 - RNA, 15 nt, Human
cugguguagcuacag

SEQ ID NO: 3401339 - RNA, 18 nt, Human
cugguguagcuacagaga

SEQ ID NO: 3401340 - RNA, 16 nt, Human
cugguguccagcugag

SEQ ID NO: 3401341 - RNA, 13 nt, Human
cugguguccugac

SEQ ID NO: 3401342 - RNA, 18 nt, Human
cugguguccugaccaccc

SEQ ID NO: 3401343 - RNA, 16 nt, Human
cuggugugguacagag

SEQ ID NO: 3401344 - RNA, 15 nt, Human
cugguguuaacagaa

SEQ ID NO: 3401345 - RNA, 17 nt, Human
cugguguuaacagaagg

SEQ ID NO: 3401346 - RNA, 22 nt, Human
cugguguuucuagcacuggccu

SEQ ID NO: 3401347 - RNA, 19 nt, Human
cugguuaaauaaggcaggg

SEQ ID NO: 3401348 - RNA, 20 nt, Human
cugguuaacuuguuuggccu

SEQ ID NO: 3401349 - RNA, 23 nt, Human
cugguuaauauuuauaggucacu

SEQ ID NO: 3401350 - RNA, 14 nt, Human
cugguuagaaaugc

SEQ ID NO: 3401351 - RNA, 21 nt, Human
cugguuagagguucccuuuga

SEQ ID NO: 3401352 - RNA, 22 nt, Human
cugguuagagguucccuuugac

SEQ ID NO: 3401353 - RNA, 14 nt, Human
cugguuagcucagc

SEQ ID NO: 3401354 - RNA, 21 nt, Human
cugguuagcucagccccagcc

SEQ ID NO: 3401355 - RNA, 16 nt, Human
cugguuaggauggcag

SEQ ID NO: 3401356 - RNA, 16 nt, Human
cugguuauaagcagca

SEQ ID NO: 3401357 - RNA, 20 nt, Human
cugguuauugauguggcccu

SEQ ID NO: 3401358 - RNA, 17 nt, Human
cugguuauuuaaaaugu

SEQ ID NO: 3401359 - RNA, 20 nt, Human
cugguucauucuucagauau

SEQ ID NO: 3401360 - RNA, 17 nt, Human
cugguuccggaauccug

SEQ ID NO: 3401361 - RNA, 18 nt, Human
cugguuccggaauccugu

SEQ ID NO: 3401362 - RNA, 18 nt, Human
cugguuccugcuagaaau

SEQ ID NO: 3401363 - RNA, 17 nt, Human
cugguucuauuuaaugg

SEQ ID NO: 3401364 - RNA, 13 nt, Human
cugguucucaaug

SEQ ID NO: 3401365 - RNA, 18 nt, Human
cugguucucaaugaaaaa

SEQ ID NO: 3401366 - RNA, 15 nt, Human
cugguucucaucuuu

SEQ ID NO: 3401367 - RNA, 22 nt, Human
cugguucuucauuuauugagca

SEQ ID NO: 3401368 - RNA, 22 nt, Human
cugguugcauggaaaucagcca

SEQ ID NO: 3401369 - RNA, 23 nt, Human
cugguuggagagcuagaaccugg

SEQ ID NO: 3401370 - RNA, 13 nt, Human
cugguugggcagc

SEQ ID NO: 3401371 - RNA, 20 nt, Human
cugguugguguugcagaagg

SEQ ID NO: 3401372 - RNA, 19 nt, Human
cugguuguuucuguuccaa

SEQ ID NO: 3401373 - RNA, 14 nt, Human
cugguuuaauguuu

SEQ ID NO: 3401374 - RNA, 17 nt, Human
cugguuuacaggcccug

SEQ ID NO: 3401375 - RNA, 21 nt, Human
cugguuuacaggcccugcucc

SEQ ID NO: 3401376 - RNA, 22 nt, Human
cugguuuacaggcccugcuccu

SEQ ID NO: 3401377 - RNA, 17 nt, Human
cugguuucacuggccca

SEQ ID NO: 3401378 - RNA, 18 nt, Human
cugguuuccugcccuggg

SEQ ID NO: 3401379 - RNA, 19 nt, Human
cugucacuuugcucugggu

SEQ ID NO: 3401380 - RNA, 17 nt, Human
cugucagaaugcuauug

SEQ ID NO: 3401381 - RNA, 18 nt, Human
cugucagauccaggagcu

SEQ ID NO: 3401382 - RNA, 18 nt, Human
cugucagaugagaacaaa

SEQ ID NO: 3401383 - RNA, 21 nt, Human
cugucagaugggaagacauga

SEQ ID NO: 3401384 - RNA, 12 nt, Human
cugucagcauga

SEQ ID NO: 3401385 - RNA, 15 nt, Human
cugucagcaugaauu

SEQ ID NO: 3401386 - RNA, 18 nt, Human
cugucagccauuccuguu

SEQ ID NO: 3401387 - RNA, 13 nt, Human
cugucagccgggc

SEQ ID NO: 3401388 - RNA, 23 nt, Human
cugucagcuccccucggagaaga

SEQ ID NO: 3401389 - RNA, 13 nt, Human
cugucaggaagaa

SEQ ID NO: 3401390 - RNA, 16 nt, Human
cugucaggagagcagc

SEQ ID NO: 3401391 - RNA, 19 nt, Human
cugucaggcugaaaacaau

SEQ ID NO: 3401392 - RNA, 16 nt, Human
cugucaguaugacauu

SEQ ID NO: 3401393 - RNA, 15 nt, Human
cugucagucacagcc

SEQ ID NO: 3401394 - RNA, 18 nt, Human
cugucagucacagccacc

SEQ ID NO: 3401395 - RNA, 14 nt, Human
cugucagugccgcc

SEQ ID NO: 3401396 - RNA, 19 nt, Human
cugucauaagaaugaauaa

SEQ ID NO: 3401397 - RNA, 23 nt, Human
cugucaucaauuaaaggcaaagg

SEQ ID NO: 3401398 - RNA, 21 nt, Human
cugucaucaucauggccagcu

SEQ ID NO: 3401399 - RNA, 20 nt, Human
cugucauccucaaagaaagu

SEQ ID NO: 3401400 - RNA, 21 nt, Human
cugucaucuaccuuuucucuu

SEQ ID NO: 3401401 - RNA, 16 nt, Human
cugucaucugagaaug

SEQ ID NO: 3401402 - RNA, 19 nt, Human
cugucaucugagaaugaac

SEQ ID NO: 3401403 - RNA, 20 nt, Human
cugucaugaaaucagcaaga

SEQ ID NO: 3401404 - RNA, 15 nt, Human
cugucaugaacaugu

SEQ ID NO: 3401405 - RNA, 14 nt, Human
cugucaugcuucau

SEQ ID NO: 3401406 - RNA, 22 nt, Human
cugucaugguguccagacagag

SEQ ID NO: 3401407 - RNA, 14 nt, Human
cugucauucaaaug

SEQ ID NO: 3401408 - RNA, 17 nt, Human
cugucauucaaaugggu

SEQ ID NO: 3401409 - RNA, 14 nt, Human
cugucauugcuucu

SEQ ID NO: 3401410 - RNA, 20 nt, Human
cuguccaaaggaggcuggca

SEQ ID NO: 3401411 - RNA, 21 nt, Human
cuguccaaaggaggcuggcag

SEQ ID NO: 3401412 - RNA, 11 nt, Human
cuguccaagga

SEQ ID NO: 3401413 - RNA, 20 nt, Human
cuguccacacccagcucagc

SEQ ID NO: 3401414 - RNA, 17 nt, Human
cuguccacaggcuucug

SEQ ID NO: 3401415 - RNA, 17 nt, Human
cuguccagacagccugu

SEQ ID NO: 3401416 - RNA, 17 nt, Human
cuguccaggcacugcug

SEQ ID NO: 3401417 - RNA, 22 nt, Human
cuguccaggcacugcugcccag

SEQ ID NO: 3401418 - RNA, 13 nt, Human
cuguccaggcucg

SEQ ID NO: 3401419 - RNA, 18 nt, Human
cuguccagggcccugagc

SEQ ID NO: 3401420 - RNA, 19 nt, Human
cuguccagggcccugagcu

SEQ ID NO: 3401421 - RNA, 22 nt, Human
cuguccagggcccugagcucgg

SEQ ID NO: 3401422 - RNA, 23 nt, Human
cuguccagggcccugagcucggu

SEQ ID NO: 3401423 - RNA, 15 nt, Human
cuguccagugcccau

SEQ ID NO: 3401424 - RNA, 14 nt, Human
cuguccaguuccca

SEQ ID NO: 3401425 - RNA, 19 nt, Human
cuguccaguucccagaagg

SEQ ID NO: 3401426 - RNA, 21 nt, Human
cuguccaguucccagaaggca

SEQ ID NO: 3401427 - RNA, 20 nt, Human
cuguccaguuccuuuagaaa

SEQ ID NO: 3401428 - RNA, 13 nt, Human
cuguccaucugcc

SEQ ID NO: 3401429 - RNA, 17 nt, Human
cuguccaucugcccgcc

SEQ ID NO: 3401430 - RNA, 17 nt, Human
cuguccauuuuuauuca

SEQ ID NO: 3401431 - RNA, 13 nt, Human
cugucccaccuca

SEQ ID NO: 3401432 - RNA, 13 nt, Human
cugucccaccucu

SEQ ID NO: 3401433 - RNA, 14 nt, Human
cugucccaccucuu

SEQ ID NO: 3401434 - RNA, 23 nt, Human
cugucccaccucuucucuuccug

SEQ ID NO: 3401435 - RNA, 19 nt, Human
cugucccagguuaucuggg

SEQ ID NO: 3401436 - RNA, 22 nt, Human
cugucccagguuaucugggcau

SEQ ID NO: 3401437 - RNA, 14 nt, Human
cugucccauucccu

SEQ ID NO: 3401438 - RNA, 12 nt, Human
cuguccccagcc

SEQ ID NO: 3401439 - RNA, 18 nt, Human
cugucccccagcucuggu

SEQ ID NO: 3401440 - RNA, 13 nt, Human
cuguccccccacu

SEQ ID NO: 3401441 - RNA, 16 nt, Human
cuguccccccacuccc

SEQ ID NO: 3401442 - RNA, 21 nt, Human
cuguccccccacucccucaca

SEQ ID NO: 3401443 - RNA, 13 nt, Human
cugucccccugac

SEQ ID NO: 3401444 - RNA, 14 nt, Human
cugucccccugaca

SEQ ID NO: 3401445 - RNA, 20 nt, Human
cuguccccucagcuccagac

SEQ ID NO: 3401446 - RNA, 17 nt, Human
cuguccccucuugcccc

SEQ ID NO: 3401447 - RNA, 22 nt, Human
cuguccccuggggucucugcug

SEQ ID NO: 3401448 - RNA, 23 nt, Human
cuguccccuucucucaucucuua

SEQ ID NO: 3401449 - RNA, 15 nt, Human
cuguccccuuggcag

SEQ ID NO: 3401450 - RNA, 18 nt, Human
cugucccgggguccugug

SEQ ID NO: 3401451 - RNA, 21 nt, Human
cugucccuaguaaaaauacaa

SEQ ID NO: 3401452 - RNA, 16 nt, Human
cugucccucacagcac

SEQ ID NO: 3401453 - RNA, 12 nt, Human
cugucccucacu

SEQ ID NO: 3401454 - RNA, 13 nt, Human
cugucccucacug

SEQ ID NO: 3401455 - RNA, 16 nt, Human
cugucccucccaccuc

SEQ ID NO: 3401456 - RNA, 19 nt, Human
cugucccucccaccucugu

SEQ ID NO: 3401457 - RNA, 21 nt, Human
cugucccucccaccucuguga

SEQ ID NO: 3401458 - RNA, 17 nt, Human
cugucccuccgggaccu

SEQ ID NO: 3401459 - RNA, 14 nt, Human
cugucccuccuggu

SEQ ID NO: 3401460 - RNA, 19 nt, Human
cugucccuccuggugucac

SEQ ID NO: 3401461 - RNA, 18 nt, Human
cugucccugcgccuuucc

SEQ ID NO: 3401462 - RNA, 20 nt, Human
cugucccuuacgugaguccu

SEQ ID NO: 3401463 - RNA, 19 nt, Human
cugucccuucccccauaag

SEQ ID NO: 3401464 - RNA, 14 nt, Human
cugucccuugcugu

SEQ ID NO: 3401465 - RNA, 23 nt, Human
cugucccuugcuugccugcaggg

SEQ ID NO: 3401466 - RNA, 22 nt, Human
cugucccuuggagcuguaaacc

SEQ ID NO: 3401467 - RNA, 17 nt, Human
cuguccgcccucuuccc

SEQ ID NO: 3401468 - RNA, 20 nt, Human
cuguccggaaugccacccac

SEQ ID NO: 3401469 - RNA, 22 nt, Human
cuguccguaguaucagagaugu

SEQ ID NO: 3401470 - RNA, 18 nt, Human
cuguccguuuacuccaag

SEQ ID NO: 3401471 - RNA, 14 nt, Human
cuguccuacccacc

SEQ ID NO: 3401472 - RNA, 18 nt, Human
cuguccuacucuguguca

SEQ ID NO: 3401473 - RNA, 13 nt, Human
cuguccucagccu

SEQ ID NO: 3401474 - RNA, 15 nt, Human
cuguccucagguggc

SEQ ID NO: 3401475 - RNA, 23 nt, Human
cuguccuccaacaccaagcacag

SEQ ID NO: 3401476 - RNA, 21 nt, Human
cuguccucccauccccuggac

SEQ ID NO: 3401477 - RNA, 12 nt, Human
cuguccuccucg

SEQ ID NO: 3401478 - RNA, 23 nt, Human
cuguccuccucggaucaccgaga

SEQ ID NO: 3401479 - RNA, 16 nt, Human
cuguccuccugguggg

SEQ ID NO: 3401480 - RNA, 20 nt, Human
cuguccucuccccuccagcc

SEQ ID NO: 3401481 - RNA, 13 nt, Human
cuguccucuuuca

SEQ ID NO: 3401482 - RNA, 19 nt, Human
cuguccucuuucagaaaac

SEQ ID NO: 3401483 - RNA, 19 nt, Human
cuguccucuuucagcuccu

SEQ ID NO: 3401484 - RNA, 15 nt, Human
cuguccugaaggccu

SEQ ID NO: 3401485 - RNA, 19 nt, Human
cuguccugaaggccugagg

SEQ ID NO: 3401486 - RNA, 20 nt, Human
cuguccugaaggccugaggu

SEQ ID NO: 3401487 - RNA, 16 nt, Human
cuguccugaucuguga

SEQ ID NO: 3401488 - RNA, 17 nt, Human
cuguccugauggucagc

SEQ ID NO: 3401489 - RNA, 19 nt, Human
cuguccugauggucagcuc

SEQ ID NO: 3401490 - RNA, 21 nt, Human
cuguccugauggucagcuccc

SEQ ID NO: 3401491 - RNA, 14 nt, Human
cuguccugcagcaa

SEQ ID NO: 3401492 - RNA, 23 nt, Human
cuguccugccacccagccccagc

SEQ ID NO: 3401493 - RNA, 12 nt, Human
cuguccugccua

SEQ ID NO: 3401494 - RNA, 13 nt, Human
cuguccugccugu

SEQ ID NO: 3401495 - RNA, 22 nt, Human
cuguccugcucauuaugccacu

SEQ ID NO: 3401496 - RNA, 17 nt, Human
cuguccugcuccacagu

SEQ ID NO: 3401497 - RNA, 13 nt, Human
cuguccugggagu

SEQ ID NO: 3401498 - RNA, 20 nt, Human
cuguccugggagugagcugg

SEQ ID NO: 3401499 - RNA, 13 nt, Human
cuguccugggccu

SEQ ID NO: 3401500 - RNA, 12 nt, Human
cuguccugggcg

SEQ ID NO: 3401501 - RNA, 19 nt, Human
cuguccuggugguauuuuc

SEQ ID NO: 3401502 - RNA, 21 nt, Human
cuguccuggugguauuuucaa

SEQ ID NO: 3401503 - RNA, 17 nt, Human
cuguccuggugucacuu

SEQ ID NO: 3401504 - RNA, 14 nt, Human
cuguccugucauca

SEQ ID NO: 3401505 - RNA, 14 nt, Human
cuguccugugaggu

SEQ ID NO: 3401506 - RNA, 16 nt, Human
cuguccugugagguuu

SEQ ID NO: 3401507 - RNA, 21 nt, Human
cuguccugugagguuucccaa

SEQ ID NO: 3401508 - RNA, 16 nt, Human
cuguccuucagaugga

SEQ ID NO: 3401509 - RNA, 23 nt, Human
cuguccuucucucaccuccuaaa

SEQ ID NO: 3401510 - RNA, 17 nt, Human
cuguccuuuuuccucuc

SEQ ID NO: 3401511 - RNA, 20 nt, Human
cuguccuuuuuccucuccac

SEQ ID NO: 3401512 - RNA, 14 nt, Human
cugucgagacacuu

SEQ ID NO: 3401513 - RNA, 18 nt, Human
cugucgagacacuugccu

SEQ ID NO: 3401514 - RNA, 16 nt, Human
cugucgcccaggcugg

SEQ ID NO: 3401515 - RNA, 17 nt, Human
cugucggagcccugucu

SEQ ID NO: 3401516 - RNA, 15 nt, Human
cugucgugauggggc

SEQ ID NO: 3401517 - RNA, 13 nt, Human
cugucuacaaaua

SEQ ID NO: 3401518 - RNA, 20 nt, Human
cugucuacacuaagagagaa

SEQ ID NO: 3401519 - RNA, 17 nt, Human
cugucuaccaucucccu

SEQ ID NO: 3401520 - RNA, 14 nt, Human
cugucuaccugguc

SEQ ID NO: 3401521 - RNA, 14 nt, Human
cugucuagagaggg

SEQ ID NO: 3401522 - RNA, 12 nt, Human
cugucuagagua

SEQ ID NO: 3401523 - RNA, 18 nt, Human
cugucuagcacuuccuug

SEQ ID NO: 3401524 - RNA, 17 nt, Human
cuucaacagcuccccau

SEQ ID NO: 3401525 - RNA, 16 nt, Human
cuucaacauccugcca

SEQ ID NO: 3401526 - RNA, 14 nt, Human
cuucaaccagggau

SEQ ID NO: 3401527 - RNA, 22 nt, Human
cuucaaccagggauuguuucug

SEQ ID NO: 3401528 - RNA, 16 nt, Human
cuucaacguuucuuca

SEQ ID NO: 3401529 - RNA, 19 nt, Human
cuucaacguuucuucacuu

SEQ ID NO: 3401530 - RNA, 16 nt, Human
cuucaacucccugccc

SEQ ID NO: 3401531 - RNA, 20 nt, Human
cuucaacugaccagccucca

SEQ ID NO: 3401532 - RNA, 18 nt, Human
cuucaagaacucugggcu

SEQ ID NO: 3401533 - RNA, 14 nt, Human
cuucaagaaugcag

SEQ ID NO: 3401534 - RNA, 13 nt, Human
cuucaaggauccu

SEQ ID NO: 3401535 - RNA, 15 nt, Human
cuucaaggauccuga

SEQ ID NO: 3401536 - RNA, 16 nt, Human
cuucaaggauccugag

SEQ ID NO: 3401537 - RNA, 18 nt, Human
cuucaaggauccugagcc

SEQ ID NO: 3401538 - RNA, 19 nt, Human
cuucaaggauccugagcca

SEQ ID NO: 3401539 - RNA, 20 nt, Human
cuucaaggauccugagccag

SEQ ID NO: 3401540 - RNA, 16 nt, Human
cuucaaggcuuccacu

SEQ ID NO: 3401541 - RNA, 16 nt, Human
cuucaagucugugccu

SEQ ID NO: 3401542 - RNA, 18 nt, Human
cuucaagucugugccugg

SEQ ID NO: 3401543 - RNA, 22 nt, Human
cuucaagugcaugcucucugca

SEQ ID NO: 3401544 - RNA, 18 nt, Human
cuucaaguuagcucagga

SEQ ID NO: 3401545 - RNA, 19 nt, Human
cuucaaguuagcucaggag

SEQ ID NO: 3401546 - RNA, 22 nt, Human
cuucaauacccaaauccucucc

SEQ ID NO: 3401547 - RNA, 19 nt, Human
cuucaauaguucaaggaac

SEQ ID NO: 3401548 - RNA, 13 nt, Human
cuucaaucccagc

SEQ ID NO: 3401549 - RNA, 15 nt, Human
cuucaauuaauaaaa

SEQ ID NO: 3401550 - RNA, 16 nt, Human
cuucaauuccugggcc

SEQ ID NO: 3401551 - RNA, 21 nt, Human
cuucaauuuauaccucaauuu

SEQ ID NO: 3401552 - RNA, 15 nt, Human
cuucacaaagcccaa

SEQ ID NO: 3401553 - RNA, 17 nt, Human
cuucacaaagcccaagg

SEQ ID NO: 3401554 - RNA, 16 nt, Human
cuucacacacaggcaa

SEQ ID NO: 3401555 - RNA, 19 nt, Human
cuucacacagaccccucgc

SEQ ID NO: 3401556 - RNA, 12 nt, Human
cuucacacugca

SEQ ID NO: 3401557 - RNA, 21 nt, Human
cuucacacugcaagagccuug

SEQ ID NO: 3401558 - RNA, 11 nt, Human
cuucacagagu

SEQ ID NO: 3401559 - RNA, 22 nt, Human
cuucacagagugugcuggagga

SEQ ID NO: 3401560 - RNA, 19 nt, Human
cuucacaguagagccagcu

SEQ ID NO: 3401561 - RNA, 23 nt, Human
cuucacagugaucgaugauucag

SEQ ID NO: 3401562 - RNA, 20 nt, Human
cuucaccaucaauccugauu

SEQ ID NO: 3401563 - RNA, 15 nt, Human
cuucacccaggccua

SEQ ID NO: 3401564 - RNA, 15 nt, Human
cuucaccccggcagg

SEQ ID NO: 3401565 - RNA, 19 nt, Human
cuucaccccggcaggcccu

SEQ ID NO: 3401566 - RNA, 22 nt, Human
cuucaccccggcaggcccugca

SEQ ID NO: 3401567 - RNA, 20 nt, Human
cuucaccuaagucucuguga

SEQ ID NO: 3401568 - RNA, 14 nt, Human
cuucaccuccucgc

SEQ ID NO: 3401569 - RNA, 14 nt, Human
cuucaccucugcua

SEQ ID NO: 3401570 - RNA, 20 nt, Human
cuucacgaaguguugcaugg

SEQ ID NO: 3401571 - RNA, 20 nt, Human
cuucacuccagccuggguga

SEQ ID NO: 3401572 - RNA, 24 nt, Human
cuucacuccggugugccugcagcc

SEQ ID NO: 3401573 - RNA, 15 nt, Human
cuucacucucugaag

SEQ ID NO: 3401574 - RNA, 19 nt, Human
cuucacugccuuugcuccu

SEQ ID NO: 3401575 - RNA, 13 nt, Human
cuucacugugcug

SEQ ID NO: 3401576 - RNA, 15 nt, Human
cuucacuguugaaaa

SEQ ID NO: 3401577 - RNA, 20 nt, Human
cuucacuucugacucuuccc

SEQ ID NO: 3401578 - RNA, 21 nt, Human
cuucagaauuccauaucuugc

SEQ ID NO: 3401579 - RNA, 18 nt, Human
cuucagacuuugcuuccc

SEQ ID NO: 3401580 - RNA, 17 nt, Human
cuucagagacuccugca

SEQ ID NO: 3401581 - RNA, 23 nt, Human
cuucagagacuccugcaggcagc

SEQ ID NO: 3401582 - RNA, 18 nt, Human
cuucagagagcagugcuu

SEQ ID NO: 3401583 - RNA, 14 nt, Human
cuucagagagcugg

SEQ ID NO: 3401584 - RNA, 15 nt, Human
cuucagagagcuggu

SEQ ID NO: 3401585 - RNA, 21 nt, Human
cuucagaggcccucgcugcca

SEQ ID NO: 3401586 - RNA, 16 nt, Human
cuucagaggcugaggu

SEQ ID NO: 3401587 - RNA, 18 nt, Human
cuucagauauuauugcuu

SEQ ID NO: 3401588 - RNA, 17 nt, Human
cuucagaucagugcuug

SEQ ID NO: 3401589 - RNA, 15 nt, Human
cuucagauccuaccc

SEQ ID NO: 3401590 - RNA, 16 nt, Human
cuucagauccuacccc

SEQ ID NO: 3401591 - RNA, 23 nt, Human
cuucagaugggaggaaagagagc

SEQ ID NO: 3401592 - RNA, 22 nt, Human
cuucagauguggagccaggcgu

SEQ ID NO: 3401593 - RNA, 14 nt, Human
cuucagcaagagag

SEQ ID NO: 3401594 - RNA, 20 nt, Human
cuucagcaagagagaaccua

SEQ ID NO: 3401595 - RNA, 15 nt, Human
cuucagcacuuuaga

SEQ ID NO: 3401596 - RNA, 15 nt, Human
cuucagcauucccuc

SEQ ID NO: 3401597 - RNA, 15 nt, Human
cuucagccaggagcu

SEQ ID NO: 3401598 - RNA, 21 nt, Human
cuucagcccccagccccuccc

SEQ ID NO: 3401599 - RNA, 17 nt, Human
cuucagcccucaccccu

SEQ ID NO: 3401600 - RNA, 22 nt, Human
cuucagccuagccgaccucagc

SEQ ID NO: 3401601 - RNA, 19 nt, Human
cuucagccuaguggcuugu

SEQ ID NO: 3401602 - RNA, 20 nt, Human
cuucagccucccgaguagcu

SEQ ID NO: 3401603 - RNA, 16 nt, Human
cuucagccugaggcug

SEQ ID NO: 3401604 - RNA, 17 nt, Human
cuucagcguaaaauggu

SEQ ID NO: 3401605 - RNA, 20 nt, Human
cuucagcuagcuuuuaggaa

SEQ ID NO: 3401606 - RNA, 20 nt, Human
cuucagcucacgcuucacag

SEQ ID NO: 3401607 - RNA, 15 nt, Human
cuucagcuccagccc

SEQ ID NO: 3401608 - RNA, 23 nt, Human
cuucagcuccagggaauccaagc

SEQ ID NO: 3401609 - RNA, 13 nt, Human
cuucagcucugaa

SEQ ID NO: 3401610 - RNA, 14 nt, Human
cuucagcucugaaa

SEQ ID NO: 3401611 - RNA, 12 nt, Human
cuucagcucugu

SEQ ID NO: 3401612 - RNA, 15 nt, Human
cuucagcucuuuuug

SEQ ID NO: 3401613 - RNA, 14 nt, Human
cuucagcugccagu

SEQ ID NO: 3401614 - RNA, 13 nt, Human
cuucagcuucuuc

SEQ ID NO: 3401615 - RNA, 14 nt, Human
cuucagcuugcuuc

SEQ ID NO: 3401616 - RNA, 23 nt, Human
cuucaggaacacccccaugacau

SEQ ID NO: 3401617 - RNA, 16 nt, Human
cuucaggacacucacu

SEQ ID NO: 3401618 - RNA, 17 nt, Human
cuucaggaucaaguccu

SEQ ID NO: 3401619 - RNA, 12 nt, Human
cuucaggccucc

SEQ ID NO: 3401620 - RNA, 15 nt, Human
cuucaggccucccuc

SEQ ID NO: 3401621 - RNA, 15 nt, Human
cuucaggcucuucuc

SEQ ID NO: 3401622 - RNA, 15 nt, Human
cuucagggcagauuu

SEQ ID NO: 3401623 - RNA, 17 nt, Human
cuucagggcagauuuua

SEQ ID NO: 3401624 - RNA, 16 nt, Human
cuucagggcagggcuc

SEQ ID NO: 3401625 - RNA, 19 nt, Human
cuucagggcagggcucuga

SEQ ID NO: 3401626 - RNA, 14 nt, Human
cuucagggcaggug

SEQ ID NO: 3401627 - RNA, 13 nt, Human
cuucagggccugg

SEQ ID NO: 3401628 - RNA, 15 nt, Human
cuucagggccugguu

SEQ ID NO: 3401629 - RNA, 21 nt, Human
cuucaggggagucccgucagg

SEQ ID NO: 3401630 - RNA, 19 nt, Human
cuucaggggcacuucauug

SEQ ID NO: 3401631 - RNA, 14 nt, Human
cuucaggguucucc

SEQ ID NO: 3401632 - RNA, 18 nt, Human
cuucaggguucuccucuc

SEQ ID NO: 3401633 - RNA, 23 nt, Human
cuucaggguucuccucuccccuc

SEQ ID NO: 3401634 - RNA, 17 nt, Human
cuucagguccaggcugu

SEQ ID NO: 3401635 - RNA, 15 nt, Human
cuucagguucuuagu

SEQ ID NO: 3401636 - RNA, 19 nt, Human
cuucagguucuuaguguca

SEQ ID NO: 3401637 - RNA, 16 nt, Human
cuucaguaagccguga

SEQ ID NO: 3401638 - RNA, 19 nt, Human
cuucaguauguugucaaag

SEQ ID NO: 3401639 - RNA, 13 nt, Human
cuucagucauuaa

SEQ ID NO: 3401640 - RNA, 15 nt, Human
cuucagucauuaaau

SEQ ID NO: 3401641 - RNA, 22 nt, Human
cuucagucccuuccccaugcuu

SEQ ID NO: 3401642 - RNA, 11 nt, Human
cuucaguccug

SEQ ID NO: 3401643 - RNA, 12 nt, Human
cuucaguccugc

SEQ ID NO: 3401644 - RNA, 17 nt, Human
cuucaguccugcuccag

SEQ ID NO: 3401645 - RNA, 15 nt, Human
cuucaguccugggag

SEQ ID NO: 3401646 - RNA, 13 nt, Human
cuucagucucuau

SEQ ID NO: 3401647 - RNA, 17 nt, Human
cuucagucucuauacca

SEQ ID NO: 3401648 - RNA, 22 nt, Human
cuucagucucuauaccaauaaa

SEQ ID NO: 3401649 - RNA, 11 nt, Human
cuucagugccu

SEQ ID NO: 3401650 - RNA, 12 nt, Human
cuucagugccuu

SEQ ID NO: 3401651 - RNA, 14 nt, Human
cuucaguggcagcu

SEQ ID NO: 3401652 - RNA, 15 nt, Human
cuucaguggcagcug

SEQ ID NO: 3401653 - RNA, 17 nt, Human
cuucaguggcagcugcu

SEQ ID NO: 3401654 - RNA, 13 nt, Human
cuucagugggaga

SEQ ID NO: 3401655 - RNA, 18 nt, Human
cuucagugggagaaaaca

SEQ ID NO: 3401656 - RNA, 19 nt, Human
cuucaguuauugguggaau

SEQ ID NO: 3401657 - RNA, 17 nt, Human
cuucaguugucucugau

SEQ ID NO: 3401658 - RNA, 20 nt, Human
cuucaguugucucugaugca

SEQ ID NO: 3401659 - RNA, 17 nt, Human
cuucaguuuccuggucu

SEQ ID NO: 3401660 - RNA, 16 nt, Human
cuucaguuugcagagu

SEQ ID NO: 3401661 - RNA, 16 nt, Human
cuucaguuuuuguguu

SEQ ID NO: 3401662 - RNA, 19 nt, Human
cuucauaacaauuuuagga

SEQ ID NO: 3401663 - RNA, 12 nt, Human
cuucauaaucca

SEQ ID NO: 3401664 - RNA, 10 nt, Human
cuucauacac

SEQ ID NO: 3401665 - RNA, 16 nt, Human
cuucauacuugaacgu

SEQ ID NO: 3401666 - RNA, 19 nt, Human
cuucauagagacuugggaa

SEQ ID NO: 3401667 - RNA, 21 nt, Human
cuucauaucauccacacauga

SEQ ID NO: 3401668 - RNA, 17 nt, Human
cuucaucauucccucuc

SEQ ID NO: 3401669 - RNA, 18 nt, Human
cuucaucauucccucuca

SEQ ID NO: 3401670 - RNA, 16 nt, Human
cuuccauggcccucau

SEQ ID NO: 3401671 - RNA, 19 nt, Human
cuuccauggcccucauuaa

SEQ ID NO: 3401672 - RNA, 15 nt, Human
cuuccauuccacaca

SEQ ID NO: 3401673 - RNA, 15 nt, Human
cuuccauuucugccu

SEQ ID NO: 3401674 - RNA, 20 nt, Human
cuuccauuucugccuuuugu

SEQ ID NO: 3401675 - RNA, 17 nt, Human
cuucccaacuugccuuu

SEQ ID NO: 3401676 - RNA, 23 nt, Human
cuucccaaguaagaggcuggagu

SEQ ID NO: 3401677 - RNA, 23 nt, Human
cuucccaagugagucucucuggg

SEQ ID NO: 3401678 - RNA, 15 nt, Human
cuucccaaucagcac

SEQ ID NO: 3401679 - RNA, 18 nt, Human
cuucccacaaagaauaua

SEQ ID NO: 3401680 - RNA, 21 nt, Human
cuucccacccaucgcugugug

SEQ ID NO: 3401681 - RNA, 16 nt, Human
cuucccaccucccugc

SEQ ID NO: 3401682 - RNA, 17 nt, Human
cuucccaccucccugcc

SEQ ID NO: 3401683 - RNA, 19 nt, Human
cuucccaccucccugccca

SEQ ID NO: 3401684 - RNA, 18 nt, Human
cuucccagaggggccugc

SEQ ID NO: 3401685 - RNA, 22 nt, Human
cuucccagaggggccugccacc

SEQ ID NO: 3401686 - RNA, 16 nt, Human
cuucccagcuaggaag

SEQ ID NO: 3401687 - RNA, 15 nt, Human
cuucccagcucuccc

SEQ ID NO: 3401688 - RNA, 22 nt, Human
cuucccagcucucccucuggcc

SEQ ID NO: 3401689 - RNA, 15 nt, Human
cuucccagcugcccc

SEQ ID NO: 3401690 - RNA, 16 nt, Human
cuucccagcugccccu

SEQ ID NO: 3401691 - RNA, 18 nt, Human
cuucccagcugccccucc

SEQ ID NO: 3401692 - RNA, 21 nt, Human
cuucccagcugccccucccug

SEQ ID NO: 3401693 - RNA, 22 nt, Human
cuucccagcugccccucccugc

SEQ ID NO: 3401694 - RNA, 22 nt, Human
cuucccaggcuggggcugaccu

SEQ ID NO: 3401695 - RNA, 12 nt, Human
cuucccagggca

SEQ ID NO: 3401696 - RNA, 21 nt, Human
cuucccagguaagcaggagga

SEQ ID NO: 3401697 - RNA, 20 nt, Human
cuucccauaccacccaaugc

SEQ ID NO: 3401698 - RNA, 17 nt, Human
cuucccaucacuggagc

SEQ ID NO: 3401699 - RNA, 18 nt, Human
cuucccaucacuggagca

SEQ ID NO: 3401700 - RNA, 15 nt, Human
cuucccauccccagc

SEQ ID NO: 3401701 - RNA, 21 nt, Human
cuucccaugacccaggcuggg

SEQ ID NO: 3401702 - RNA, 21 nt, Human
cuucccaugucuuucuccaaa

SEQ ID NO: 3401703 - RNA, 12 nt, Human
cuucccauucca

SEQ ID NO: 3401704 - RNA, 15 nt, Human
cuucccauuguggcu

SEQ ID NO: 3401705 - RNA, 16 nt, Human
cuuccccaaauaauau

SEQ ID NO: 3401706 - RNA, 18 nt, Human
cuuccccaacacgcagga

SEQ ID NO: 3401707 - RNA, 23 nt, Human
cuuccccacugcacacaccucag

SEQ ID NO: 3401708 - RNA, 16 nt, Human
cuuccccacugccugc

SEQ ID NO: 3401709 - RNA, 18 nt, Human
cuuccccagacgccuggc

SEQ ID NO: 3401710 - RNA, 21 nt, Human
cuuccccagacgccuggcugc

SEQ ID NO: 3401711 - RNA, 11 nt, Human
cuuccccauac

SEQ ID NO: 3401712 - RNA, 16 nt, Human
cuuccccauacaaaua

SEQ ID NO: 3401713 - RNA, 18 nt, Human
cuuccccaucuucuaaac

SEQ ID NO: 3401714 - RNA, 19 nt, Human
cuuccccauggcccugagc

SEQ ID NO: 3401715 - RNA, 15 nt, Human
cuucccccaccacca

SEQ ID NO: 3401716 - RNA, 14 nt, Human
cuucccccauagcc

SEQ ID NO: 3401717 - RNA, 12 nt, Human
cuucccccucca

SEQ ID NO: 3401718 - RNA, 16 nt, Human
cuucccccucccaggg

SEQ ID NO: 3401719 - RNA, 17 nt, Human
cuucccccucucccagu

SEQ ID NO: 3401720 - RNA, 18 nt, Human
cuucccccugcuuccacc

SEQ ID NO: 3401721 - RNA, 14 nt, Human
cuuccccucccugg

SEQ ID NO: 3401722 - RNA, 20 nt, Human
cuuccccucccuggcuccca

SEQ ID NO: 3401723 - RNA, 22 nt, Human
cuuccccuccuaccccucccag

SEQ ID NO: 3401724 - RNA, 23 nt, Human
cuuccccuccuaccccucccagc

SEQ ID NO: 3401725 - RNA, 18 nt, Human
cuuccccuuauccucccu

SEQ ID NO: 3401726 - RNA, 20 nt, Human
cuuccccuuauccucccugu

SEQ ID NO: 3401727 - RNA, 13 nt, Human
cuuccccuugccc

SEQ ID NO: 3401728 - RNA, 19 nt, Human
cuuccccuugcccagggcu

SEQ ID NO: 3401729 - RNA, 23 nt, Human
cuuccccuugcccagggcucagc

SEQ ID NO: 3401730 - RNA, 14 nt, Human
cuuccccuugcccu

SEQ ID NO: 3401731 - RNA, 13 nt, Human
cuuccccuuuccc

SEQ ID NO: 3401732 - RNA, 19 nt, Human
cuucccgccagagggcuug

SEQ ID NO: 3401733 - RNA, 20 nt, Human
cuucccgccgcccagcccac

SEQ ID NO: 3401734 - RNA, 17 nt, Human
cuucccgcucagcccuc

SEQ ID NO: 3401735 - RNA, 17 nt, Human
cuucccgggccagggcu

SEQ ID NO: 3401736 - RNA, 16 nt, Human
cuucccuaacacuuac

SEQ ID NO: 3401737 - RNA, 17 nt, Human
cuucccuaccucaggca

SEQ ID NO: 3401738 - RNA, 23 nt, Human
cuucccuagaggguuccuguaga

SEQ ID NO: 3401739 - RNA, 16 nt, Human
cuucccuagggcuggg

SEQ ID NO: 3401740 - RNA, 18 nt, Human
cuucccuagggcugggug

SEQ ID NO: 3401741 - RNA, 19 nt, Human
cuucccuccccucuaguuu

SEQ ID NO: 3401742 - RNA, 15 nt, Human
cuucccucccuaucu

SEQ ID NO: 3401743 - RNA, 18 nt, Human
cuucccucccugcuguca

SEQ ID NO: 3401744 - RNA, 16 nt, Human
cuucccuccucccaug

SEQ ID NO: 3401745 - RNA, 17 nt, Human
cuucccuccucccaugu

SEQ ID NO: 3401746 - RNA, 16 nt, Human
cuucccucucuggaga

SEQ ID NO: 3401747 - RNA, 21 nt, Human
cuucccucuguuucucuuucc

SEQ ID NO: 3401748 - RNA, 13 nt, Human
cuucccugaagcu

SEQ ID NO: 3401749 - RNA, 18 nt, Human
cuucccugaagcucccac

SEQ ID NO: 3401750 - RNA, 18 nt, Human
cuucccugauugaccugc

SEQ ID NO: 3401751 - RNA, 11 nt, Human
cuucccuggcg

SEQ ID NO: 3401752 - RNA, 11 nt, Human
cuucccuggcu

SEQ ID NO: 3401753 - RNA, 13 nt, Human
cuucccugggcug

SEQ ID NO: 3401754 - RNA, 17 nt, Human
cuucccugggcugugcu

SEQ ID NO: 3401755 - RNA, 13 nt, Human
cuucccugguuca

SEQ ID NO: 3401756 - RNA, 22 nt, Human
cuucccuguaugauuccuugau

SEQ ID NO: 3401757 - RNA, 13 nt, Human
cuucccugucccu

SEQ ID NO: 3401758 - RNA, 14 nt, Human
cuucccugucccuc

SEQ ID NO: 3401759 - RNA, 15 nt, Human
cuucccugucccucu

SEQ ID NO: 3401760 - RNA, 21 nt, Human
cuucccugugccuccucccuc

SEQ ID NO: 3401761 - RNA, 16 nt, Human
cuucccuuaaaauuua

SEQ ID NO: 3401762 - RNA, 16 nt, Human
cuucccuuccacugcc

SEQ ID NO: 3401763 - RNA, 14 nt, Human
cuucccuugccacu

SEQ ID NO: 3401764 - RNA, 17 nt, Human
cuucccuugccacuuug

SEQ ID NO: 3401765 - RNA, 20 nt, Human
cuucccuugccacuuugcac

SEQ ID NO: 3401766 - RNA, 21 nt, Human
cuucccuugcuaccacggccu

SEQ ID NO: 3401767 - RNA, 16 nt, Human
cuucccuuuccccagc

SEQ ID NO: 3401768 - RNA, 16 nt, Human
cuucccuuuucuguuc

SEQ ID NO: 3401769 - RNA, 23 nt, Human
cuuccgaaaaauccucuuccucu

SEQ ID NO: 3401770 - RNA, 13 nt, Human
cuuccgacccucu

SEQ ID NO: 3401771 - RNA, 15 nt, Human
cuuccgacccucugg

SEQ ID NO: 3401772 - RNA, 19 nt, Human
cuuccgacccucugggaac

SEQ ID NO: 3401773 - RNA, 21 nt, Human
cuuccgacccucugggaaccu

SEQ ID NO: 3401774 - RNA, 22 nt, Human
cuuccgauggaugaaucuccca

SEQ ID NO: 3401775 - RNA, 21 nt, Human
cuuccgcaguguggccaggcu

SEQ ID NO: 3401776 - RNA, 17 nt, Human
cuuccgcauccuagucu

SEQ ID NO: 3401777 - RNA, 16 nt, Human
cuuccgccacuggggc

SEQ ID NO: 3401778 - RNA, 14 nt, Human
cuuccggagaugua

SEQ ID NO: 3401779 - RNA, 20 nt, Human
cuuccgguagggaggcagcc

SEQ ID NO: 3401780 - RNA, 22 nt, Human
cuuccgguagggaggcagccuc

SEQ ID NO: 3401781 - RNA, 13 nt, Human
cuuccgucucccc

SEQ ID NO: 3401782 - RNA, 16 nt, Human
cuuccgucucccccgu

SEQ ID NO: 3401783 - RNA, 18 nt, Human
cuuccuaagccuguggcu

SEQ ID NO: 3401784 - RNA, 13 nt, Human
cuuccuaauucca

SEQ ID NO: 3401785 - RNA, 17 nt, Human
cuuccuaauuccacagc

SEQ ID NO: 3401786 - RNA, 22 nt, Human
cuuccuaauuucccuucuugca

SEQ ID NO: 3401787 - RNA, 23 nt, Human
cuuccuaauuucccuucuugcau

SEQ ID NO: 3401788 - RNA, 22 nt, Human
cuuccuacaagagcagccugug

SEQ ID NO: 3401789 - RNA, 24 nt, Human
cuuccuacaagagcagccuguggc

SEQ ID NO: 3401790 - RNA, 17 nt, Human
cuuccuaccaagucaaa

SEQ ID NO: 3401791 - RNA, 23 nt, Human
cuuccuaccacccgguccccacu

SEQ ID NO: 3401792 - RNA, 18 nt, Human
cuuccuacccacaccucu

SEQ ID NO: 3401793 - RNA, 15 nt, Human
cuuccuacucuucuc

SEQ ID NO: 3401794 - RNA, 21 nt, Human
cuuccuacucuucucucugcu

SEQ ID NO: 3401795 - RNA, 21 nt, Human
cuuccuagaaguuacugaaug

SEQ ID NO: 3401796 - RNA, 16 nt, Human
cuuccuaguucauccc

SEQ ID NO: 3401797 - RNA, 15 nt, Human
cuuccuaguuuucuc

SEQ ID NO: 3401798 - RNA, 15 nt, Human
cuuccuauaacuuga

SEQ ID NO: 3401799 - RNA, 17 nt, Human
cuuccuauaacuugaug

SEQ ID NO: 3401800 - RNA, 19 nt, Human
cuuccuauaacuugaugca

SEQ ID NO: 3401801 - RNA, 14 nt, Human
cuuccuaucccauc

SEQ ID NO: 3401802 - RNA, 16 nt, Human
cuuccuaucccauccc

SEQ ID NO: 3401803 - RNA, 17 nt, Human
cuuccuaucccauccca

SEQ ID NO: 3401804 - RNA, 18 nt, Human
cuuccuaucccaucccau

SEQ ID NO: 3401805 - RNA, 16 nt, Human
cuuccuauuucagaag

SEQ ID NO: 3401806 - RNA, 23 nt, Human
cuuccuauuucuagggcugggaa

SEQ ID NO: 3401807 - RNA, 13 nt, Human
cuuccucacugcc

SEQ ID NO: 3401808 - RNA, 14 nt, Human
cuuccucagagggc

SEQ ID NO: 3401809 - RNA, 18 nt, Human
cuuccucauccaccccau

SEQ ID NO: 3401810 - RNA, 22 nt, Human
cuuccucauccaccccaucccu

SEQ ID NO: 3401811 - RNA, 13 nt, Human
cuuccuccagcug

SEQ ID NO: 3401812 - RNA, 15 nt, Human
cuuccuccagcugca

SEQ ID NO: 3401813 - RNA, 14 nt, Human
cuuccuccauccuc

SEQ ID NO: 3401814 - RNA, 19 nt, Human
cuucugcuuuucugcccug

SEQ ID NO: 3401815 - RNA, 14 nt, Human
cuucuggaaacugu

SEQ ID NO: 3401816 - RNA, 18 nt, Human
cuucuggaauuuguucaa

SEQ ID NO: 3401817 - RNA, 21 nt, Human
cuucuggacaggcucugcuuc

SEQ ID NO: 3401818 - RNA, 11 nt, Human
cuucuggagcc

SEQ ID NO: 3401819 - RNA, 13 nt, Human
cuucuggagcccu

SEQ ID NO: 3401820 - RNA, 15 nt, Human
cuucuggauauagcu

SEQ ID NO: 3401821 - RNA, 16 nt, Human
cuucuggauggauuuu

SEQ ID NO: 3401822 - RNA, 18 nt, Human
cuucuggauucuuggccc

SEQ ID NO: 3401823 - RNA, 17 nt, Human
cuucuggcacuuggaga

SEQ ID NO: 3401824 - RNA, 12 nt, Human
cuucuggccagg

SEQ ID NO: 3401825 - RNA, 13 nt, Human
cuucuggccagga

SEQ ID NO: 3401826 - RNA, 15 nt, Human
cuucuggccaggaag

SEQ ID NO: 3401827 - RNA, 14 nt, Human
cuucuggccuccca

SEQ ID NO: 3401828 - RNA, 19 nt, Human
cuucuggccucccacagac

SEQ ID NO: 3401829 - RNA, 15 nt, Human
cuucuggccuuuccu

SEQ ID NO: 3401830 - RNA, 22 nt, Human
cuucuggccuuuccucucuccu

SEQ ID NO: 3401831 - RNA, 12 nt, Human
cuucuggcucaa

SEQ ID NO: 3401832 - RNA, 20 nt, Human
cuucuggcuuccuucucuca

SEQ ID NO: 3401833 - RNA, 21 nt, Human
cuucugggaagacaacuagga

SEQ ID NO: 3401834 - RNA, 23 nt, Human
cuucugggagggcagcagggcua

SEQ ID NO: 3401835 - RNA, 21 nt, Human
cuucugggcaucuguucuggu

SEQ ID NO: 3401836 - RNA, 19 nt, Human
cuucuggggcaggcugggc

SEQ ID NO: 3401837 - RNA, 20 nt, Human
cuucuggggcaggcugggcc

SEQ ID NO: 3401838 - RNA, 16 nt, Human
cuucugggguccccag

SEQ ID NO: 3401839 - RNA, 20 nt, Human
cuucugggguccccagggcu

SEQ ID NO: 3401840 - RNA, 23 nt, Human
cuucuggguuccuuccucugagc

SEQ ID NO: 3401841 - RNA, 18 nt, Human
cuucugguacucuccuag

SEQ ID NO: 3401842 - RNA, 20 nt, Human
cuucugguacucuccuagag

SEQ ID NO: 3401843 - RNA, 15 nt, Human
cuucuguaauugugu

SEQ ID NO: 3401844 - RNA, 15 nt, Human
cuucuguacgucuga

SEQ ID NO: 3401845 - RNA, 15 nt, Human
cuucuguaguacucc

SEQ ID NO: 3401846 - RNA, 18 nt, Human
cuucuguaguacuccuua

SEQ ID NO: 3401847 - RNA, 14 nt, Human
cuucuguaguuuua

SEQ ID NO: 3401848 - RNA, 18 nt, Human
cuucuguauacuguggag

SEQ ID NO: 3401849 - RNA, 21 nt, Human
cuucuguauauaaaugggaac

SEQ ID NO: 3401850 - RNA, 14 nt, Human
cuucugucccucac

SEQ ID NO: 3401851 - RNA, 19 nt, Human
cuucuguccuacucugugu

SEQ ID NO: 3401852 - RNA, 22 nt, Human
cuucugucuucacaacagauua

SEQ ID NO: 3401853 - RNA, 14 nt, Human
cuucugugaaagua

SEQ ID NO: 3401854 - RNA, 22 nt, Human
cuucugugagacccccacaccu

SEQ ID NO: 3401855 - RNA, 15 nt, Human
cuucugugaugagcu

SEQ ID NO: 3401856 - RNA, 12 nt, Human
cuucugugccca

SEQ ID NO: 3401857 - RNA, 21 nt, Human
cuucugugcccagaauacuga

SEQ ID NO: 3401858 - RNA, 22 nt, Human
cuucuguggcucacagaacccu

SEQ ID NO: 3401859 - RNA, 14 nt, Human
cuucuguggguuuc

SEQ ID NO: 3401860 - RNA, 14 nt, Human
cuucuguucugccu

SEQ ID NO: 3401861 - RNA, 18 nt, Human
cuucuguugcugccucau

SEQ ID NO: 3401862 - RNA, 19 nt, Human
cuucuguugcugccucaug

SEQ ID NO: 3401863 - RNA, 12 nt, Human
cuucuguuucua

SEQ ID NO: 3401864 - RNA, 13 nt, Human
cuucuguuuucaa

SEQ ID NO: 3401865 - RNA, 18 nt, Human
cuucuuaaauaucuuuua

SEQ ID NO: 3401866 - RNA, 22 nt, Human
cuucuuaaauaucuuuuauguu

SEQ ID NO: 3401867 - RNA, 16 nt, Human
cuucuuaaaugagaag

SEQ ID NO: 3401868 - RNA, 16 nt, Human
cuucuuaaucuuuuca

SEQ ID NO: 3401869 - RNA, 22 nt, Human
cuucuuaaucuuuucacaaaua

SEQ ID NO: 3401870 - RNA, 23 nt, Human
cuucuuaaucuuuucacaaauaa

SEQ ID NO: 3401871 - RNA, 16 nt, Human
cuucuuaauguacaua

SEQ ID NO: 3401872 - RNA, 18 nt, Human
cuucuuaauguacauagu

SEQ ID NO: 3401873 - RNA, 21 nt, Human
cuucuuaauuaauuugauuaa

SEQ ID NO: 3401874 - RNA, 22 nt, Human
cuucuuaauuaauuugauuaac

SEQ ID NO: 3401875 - RNA, 16 nt, Human
cuucuuacgcaaugcu

SEQ ID NO: 3401876 - RNA, 23 nt, Human
cuucuuauggaauugauuugcau

SEQ ID NO: 3401877 - RNA, 20 nt, Human
cuucuuauucucacuccacc

SEQ ID NO: 3401878 - RNA, 18 nt, Human
cuucuucacccagcuaau

SEQ ID NO: 3401879 - RNA, 20 nt, Human
cuucuucagagacuccugca

SEQ ID NO: 3401880 - RNA, 17 nt, Human
cuucuucagccaccucu

SEQ ID NO: 3401881 - RNA, 15 nt, Human
cuucuucagggccug

SEQ ID NO: 3401882 - RNA, 16 nt, Human
cuucuucagggccugg

SEQ ID NO: 3401883 - RNA, 13 nt, Human
cuucuucauguuc

SEQ ID NO: 3401884 - RNA, 21 nt, Human
cuucuucccacaaagaauaua

SEQ ID NO: 3401885 - RNA, 20 nt, Human
cuucuuccccuucccugacu

SEQ ID NO: 3401886 - RNA, 15 nt, Human
cuucuuccugaagcu

SEQ ID NO: 3401887 - RNA, 21 nt, Human
cuucuucuacuucagucuucu

SEQ ID NO: 3401888 - RNA, 12 nt, Human
cuucuucuccau

SEQ ID NO: 3401889 - RNA, 13 nt, Human
cuucuucuccccc

SEQ ID NO: 3401890 - RNA, 13 nt, Human
cuucuucuguaau

SEQ ID NO: 3401891 - RNA, 17 nt, Human
cuucuucuguaauauuu

SEQ ID NO: 3401892 - RNA, 21 nt, Human
cuucuucuguccaagcagauu

SEQ ID NO: 3401893 - RNA, 13 nt, Human
cuucuucuucaga

SEQ ID NO: 3401894 - RNA, 15 nt, Human
cuucuucuuucuaca

SEQ ID NO: 3401895 - RNA, 12 nt, Human
cuucuugaaggu

SEQ ID NO: 3401896 - RNA, 13 nt, Human
cuucuugcauccu

SEQ ID NO: 3401897 - RNA, 12 nt, Human
cuucuugcccug

SEQ ID NO: 3401898 - RNA, 14 nt, Human
cuucuugcccuggg

SEQ ID NO: 3401899 - RNA, 13 nt, Human
cuucuugcugccc

SEQ ID NO: 3401900 - RNA, 13 nt, Human
cuucuugcuucuc

SEQ ID NO: 3401901 - RNA, 16 nt, Human
cuucuuggccauggga

SEQ ID NO: 3401902 - RNA, 18 nt, Human
cuucuuggccaugggagg

SEQ ID NO: 3401903 - RNA, 11 nt, Human
cuucuugggau

SEQ ID NO: 3401904 - RNA, 19 nt, Human
cuucuugucagacauaaag

SEQ ID NO: 3401905 - RNA, 21 nt, Human
cuucuugucagacauaaagcc

SEQ ID NO: 3401906 - RNA, 22 nt, Human
cuucuugucagacauaaagcca

SEQ ID NO: 3401907 - RNA, 13 nt, Human
cuucuuguucccc

SEQ ID NO: 3401908 - RNA, 15 nt, Human
cuucuuguucugaga

SEQ ID NO: 3401909 - RNA, 21 nt, Human
cuucuuguucugagauucaau

SEQ ID NO: 3401910 - RNA, 15 nt, Human
cuucuuguuuccuug

SEQ ID NO: 3401911 - RNA, 15 nt, Human
cuucuuuaauuuugg

SEQ ID NO: 3401912 - RNA, 17 nt, Human
cuucuuuaauuuuggaa

SEQ ID NO: 3401913 - RNA, 13 nt, Human
cuucuuuccacag

SEQ ID NO: 3401914 - RNA, 12 nt, Human
cuucuuuccauu

SEQ ID NO: 3401915 - RNA, 14 nt, Human
cuucuuucccuucc

SEQ ID NO: 3401916 - RNA, 16 nt, Human
cuucuuucccuuccuc

SEQ ID NO: 3401917 - RNA, 17 nt, Human
cuucuuugauaauguua

SEQ ID NO: 3401918 - RNA, 19 nt, Human
cuucuuugcuuugcccagc

SEQ ID NO: 3401919 - RNA, 19 nt, Human
cuucuuuuaaaccauuuuc

SEQ ID NO: 3401920 - RNA, 23 nt, Human
cuucuuuuaagaugugucuucaa

SEQ ID NO: 3401921 - RNA, 23 nt, Human
cuucuuuuagcaguaaaauagcu

SEQ ID NO: 3401922 - RNA, 20 nt, Human
cuucuuuucacauucuuaua

SEQ ID NO: 3401923 - RNA, 14 nt, Human
cuucuuuuucugga

SEQ ID NO: 3401924 - RNA, 21 nt, Human
cuucuuuuucuggacucugga

SEQ ID NO: 3401925 - RNA, 14 nt, Human
cuucuuuuugcugu

SEQ ID NO: 3401926 - RNA, 15 nt, Human
cuucuuuuugcuguu

SEQ ID NO: 3401927 - RNA, 16 nt, Human
cuugaaaaaaaacagu

SEQ ID NO: 3401928 - RNA, 18 nt, Human
cuugaaaaaaaacagugg

SEQ ID NO: 3401929 - RNA, 12 nt, Human
cuugaaaaauac

SEQ ID NO: 3401930 - RNA, 20 nt, Human
cuugaaaaauacuuuuccuu

SEQ ID NO: 3401931 - RNA, 21 nt, Human
cuugaaaaauacuuuuccuua

SEQ ID NO: 3401932 - RNA, 13 nt, Human
cuugaaaaaugug

SEQ ID NO: 3401933 - RNA, 22 nt, Human
cuugaaaaaugugcaaaacagc

SEQ ID NO: 3401934 - RNA, 21 nt, Human
cuugaaaagagacaggcaggu

SEQ ID NO: 3401935 - RNA, 15 nt, Human
cuugaaaaggguguu

SEQ ID NO: 3401936 - RNA, 20 nt, Human
cuugaaaauauaugauggcu

SEQ ID NO: 3401937 - RNA, 17 nt, Human
cuugaaagaaaggggca

SEQ ID NO: 3401938 - RNA, 23 nt, Human
cuugaaagaaaggggcaggagcu

SEQ ID NO: 3401939 - RNA, 13 nt, Human
cuugaaagaaaug

SEQ ID NO: 3401940 - RNA, 20 nt, Human
cuugaaagcauccaugugug

SEQ ID NO: 3401941 - RNA, 20 nt, Human
cuugaaagucaugaacacau

SEQ ID NO: 3401942 - RNA, 17 nt, Human
cuugaaauaccagugaa

SEQ ID NO: 3401943 - RNA, 22 nt, Human
cuugaaaugaaaguauaacuga

SEQ ID NO: 3401944 - RNA, 24 nt, Human
cuugaaauuauaucuguggucuuc

SEQ ID NO: 3401945 - RNA, 15 nt, Human
cuugaaauuuuaacc

SEQ ID NO: 3401946 - RNA, 11 nt, Human
cuugaacaaaa

SEQ ID NO: 3401947 - RNA, 14 nt, Human
cuugaacaaaaggg

SEQ ID NO: 3401948 - RNA, 18 nt, Human
cuugaacaaaaucuguug

SEQ ID NO: 3401949 - RNA, 20 nt, Human
cuugaacaaaaucuguugcc

SEQ ID NO: 3401950 - RNA, 15 nt, Human
cuugaacacuggggg

SEQ ID NO: 3401951 - RNA, 16 nt, Human
cuugaacacuggggga

SEQ ID NO: 3401952 - RNA, 16 nt, Human
cuugaacauuaaucca

SEQ ID NO: 3401953 - RNA, 15 nt, Human
cuugaaccacuuccc

SEQ ID NO: 3401954 - RNA, 17 nt, Human
cuugaaccauaaaaugu

SEQ ID NO: 3401955 - RNA, 19 nt, Human
cuugaacccgggaggcaga

SEQ ID NO: 3401956 - RNA, 18 nt, Human
cuugaaccuaugaagcaa

SEQ ID NO: 3401957 - RNA, 15 nt, Human
cuugaaccugggagg

SEQ ID NO: 3401958 - RNA, 16 nt, Human
cuugaaccugugagua

SEQ ID NO: 3401959 - RNA, 18 nt, Human
cuuuuaaggauaaaucau

SEQ ID NO: 3401960 - RNA, 16 nt, Human
cuuuuaaguaaggucc

SEQ ID NO: 3401961 - RNA, 19 nt, Human
cuuuuaaugcuccaaaugc

SEQ ID NO: 3401962 - RNA, 17 nt, Human
cuuuuaaugcuucauuc

SEQ ID NO: 3401963 - RNA, 20 nt, Human
cuuuuaauuaaauaaaagcu

SEQ ID NO: 3401964 - RNA, 20 nt, Human
cuuuuaauuaaaugcucauc

SEQ ID NO: 3401965 - RNA, 22 nt, Human
cuuuuaauuaaugaaauaucug

SEQ ID NO: 3401966 - RNA, 19 nt, Human
cuuuuaauuguuucagaau

SEQ ID NO: 3401967 - RNA, 14 nt, Human
cuuuuacauacugc

SEQ ID NO: 3401968 - RNA, 17 nt, Human
cuuuuacauacugcugu

SEQ ID NO: 3401969 - RNA, 21 nt, Human
cuuuuaccagcuuuuaaccau

SEQ ID NO: 3401970 - RNA, 14 nt, Human
cuuuuaccaugccc

SEQ ID NO: 3401971 - RNA, 20 nt, Human
cuuuuacguccaucucuugu

SEQ ID NO: 3401972 - RNA, 20 nt, Human
cuuuuacugaagccuuucuu

SEQ ID NO: 3401973 - RNA, 17 nt, Human
cuuuuacugguugcaug

SEQ ID NO: 3401974 - RNA, 18 nt, Human
cuuuuacugguugcaugg

SEQ ID NO: 3401975 - RNA, 12 nt, Human
cuuuuacuguga

SEQ ID NO: 3401976 - RNA, 16 nt, Human
cuuuuacuuuucuucu

SEQ ID NO: 3401977 - RNA, 15 nt, Human
cuuuuagaaauacug

SEQ ID NO: 3401978 - RNA, 18 nt, Human
cuuuuaggccaaaaaaau

SEQ ID NO: 3401979 - RNA, 21 nt, Human
cuuuuagggagagucauauuu

SEQ ID NO: 3401980 - RNA, 20 nt, Human
cuuuuagggagcuggucuga

SEQ ID NO: 3401981 - RNA, 22 nt, Human
cuuuuaguacccaccugagcuu

SEQ ID NO: 3401982 - RNA, 15 nt, Human
cuuuuaguuccugug

SEQ ID NO: 3401983 - RNA, 20 nt, Human
cuuuuaguuguaucucuuuu

SEQ ID NO: 3401984 - RNA, 23 nt, Human
cuuuuauaaaaaaaaugaaaugu

SEQ ID NO: 3401985 - RNA, 14 nt, Human
cuuuuauaaacuuu

SEQ ID NO: 3401986 - RNA, 20 nt, Human
cuuuuauaaacuuuaccuuu

SEQ ID NO: 3401987 - RNA, 21 nt, Human
cuuuuauaaacuuuaccuuuu

SEQ ID NO: 3401988 - RNA, 16 nt, Human
cuuuuauaaagcaugu

SEQ ID NO: 3401989 - RNA, 11 nt, Human
cuuuuauaaau

SEQ ID NO: 3401990 - RNA, 14 nt, Human
cuuuuauaaauuaa

SEQ ID NO: 3401991 - RNA, 15 nt, Human
cuuuuauaaauuaaa

SEQ ID NO: 3401992 - RNA, 19 nt, Human
cuuuuauacucuuucugua

SEQ ID NO: 3401993 - RNA, 20 nt, Human
cuuuuauacucuuucuguau

SEQ ID NO: 3401994 - RNA, 16 nt, Human
cuuuuauagaugguca

SEQ ID NO: 3401995 - RNA, 17 nt, Human
cuuuuauagcuauuacu

SEQ ID NO: 3401996 - RNA, 12 nt, Human
cuuuuauagugg

SEQ ID NO: 3401997 - RNA, 13 nt, Human
cuuuuauauuugu

SEQ ID NO: 3401998 - RNA, 23 nt, Human
cuuuuaucuauucugagaaaaca

SEQ ID NO: 3401999 - RNA, 21 nt, Human
cuuuuaugagcucauguagca

SEQ ID NO: 3402000 - RNA, 13 nt, Human
cuuuuauguagca

SEQ ID NO: 3402001 - RNA, 14 nt, Human
cuuuuauguagcac

SEQ ID NO: 3402002 - RNA, 18 nt, Human
cuuuuauguaguaauuga

SEQ ID NO: 3402003 - RNA, 19 nt, Human
cuuuuaugugaaacauguu

SEQ ID NO: 3402004 - RNA, 18 nt, Human
cuuuuauucauuagcugu

SEQ ID NO: 3402005 - RNA, 22 nt, Human
cuuuuauuccugcccugcuguu

SEQ ID NO: 3402006 - RNA, 17 nt, Human
cuuuuauugacacagaa

SEQ ID NO: 3402007 - RNA, 19 nt, Human
cuuuuauuuagcaccaggg

SEQ ID NO: 3402008 - RNA, 21 nt, Human
cuuuuauuugcaacauuuaca

SEQ ID NO: 3402009 - RNA, 12 nt, Human
cuuuuauuuuga

SEQ ID NO: 3402010 - RNA, 18 nt, Human
cuuuuauuuuuuucuaau

SEQ ID NO: 3402011 - RNA, 14 nt, Human
cuuuucacaaauaa

SEQ ID NO: 3402012 - RNA, 20 nt, Human
cuuuucacauagcugucuag

SEQ ID NO: 3402013 - RNA, 20 nt, Human
cuuuucacauucuuauaaau

SEQ ID NO: 3402014 - RNA, 14 nt, Human
cuuuucacccuucu

SEQ ID NO: 3402015 - RNA, 16 nt, Human
cuuuucaccuccuuca

SEQ ID NO: 3402016 - RNA, 18 nt, Human
cuuuucaccuccuucaau

SEQ ID NO: 3402017 - RNA, 21 nt, Human
cuuuucaccuuuacuuuagaa

SEQ ID NO: 3402018 - RNA, 12 nt, Human
cuuuucacugcu

SEQ ID NO: 3402019 - RNA, 18 nt, Human
cuuuucacugcuggcugc

SEQ ID NO: 3402020 - RNA, 20 nt, Human
cuuuucacugcuggcugccu

SEQ ID NO: 3402021 - RNA, 18 nt, Human
cuuuucacugcuguuaua

SEQ ID NO: 3402022 - RNA, 22 nt, Human
cuuuucacuucgggcuguguaa

SEQ ID NO: 3402023 - RNA, 19 nt, Human
cuuuucagaagugagcuuu

SEQ ID NO: 3402024 - RNA, 21 nt, Human
cuuuucagaagugagcuuugc

SEQ ID NO: 3402025 - RNA, 17 nt, Human
cuuuucagcuucugcug

SEQ ID NO: 3402026 - RNA, 14 nt, Human
cuuuucaggaaaau

SEQ ID NO: 3402027 - RNA, 17 nt, Human
cuuuucagggcuggcuc

SEQ ID NO: 3402028 - RNA, 22 nt, Human
cuuuucauaaccuagccuuaga

SEQ ID NO: 3402029 - RNA, 14 nt, Human
cuuuucauaucauu

SEQ ID NO: 3402030 - RNA, 15 nt, Human
cuuuucauaucauuu

SEQ ID NO: 3402031 - RNA, 16 nt, Human
cuuuucaucugggaaa

SEQ ID NO: 3402032 - RNA, 14 nt, Human
cuuuucaugcaaac

SEQ ID NO: 3402033 - RNA, 20 nt, Human
cuuuucaugcaaacucuuug

SEQ ID NO: 3402034 - RNA, 17 nt, Human
cuuuucauucucuuuua

SEQ ID NO: 3402035 - RNA, 22 nt, Human
cuuuucauuuaggugaggaagc

SEQ ID NO: 3402036 - RNA, 23 nt, Human
cuuuuccaacccucaucaccaac

SEQ ID NO: 3402037 - RNA, 14 nt, Human
cuuuuccagagcau

SEQ ID NO: 3402038 - RNA, 21 nt, Human
cuuuuccagagcauuccaguc

SEQ ID NO: 3402039 - RNA, 18 nt, Human
cuuuuccaguauuuuagu

SEQ ID NO: 3402040 - RNA, 18 nt, Human
cuuuucccaaaauguuga

SEQ ID NO: 3402041 - RNA, 22 nt, Human
cuuuucccaaaauguugaaaua

SEQ ID NO: 3402042 - RNA, 14 nt, Human
cuuuucccaaccau

SEQ ID NO: 3402043 - RNA, 17 nt, Human
cuuuuccccuuuccugu

SEQ ID NO: 3402044 - RNA, 22 nt, Human
cuuuucccucggaguucuucuu

SEQ ID NO: 3402045 - RNA, 12 nt, Human
cuuuucccucuu

SEQ ID NO: 3402046 - RNA, 13 nt, Human
cuuuucccucuuu

SEQ ID NO: 3402047 - RNA, 15 nt, Human
cuuuucccuugcuuc

SEQ ID NO: 3402048 - RNA, 16 nt, Human
cuuuuccuauuuguuu

SEQ ID NO: 3402049 - RNA, 19 nt, Human
cuuuuccuauuuucagccc

SEQ ID NO: 3402050 - RNA, 19 nt, Human
cuuuuccucgcuucuuuca

SEQ ID NO: 3402051 - RNA, 20 nt, Human
cuuuuccucgcuucuuucaa

SEQ ID NO: 3402052 - RNA, 18 nt, Human
cuuuuccucucucccgga

SEQ ID NO: 3402053 - RNA, 15 nt, Human
cuuuuccucuuagaa

SEQ ID NO: 3402054 - RNA, 19 nt, Human
cuuuuccucuuagaagaau

SEQ ID NO: 3402055 - RNA, 19 nt, Human
cuuuuccugauaaagcaca

SEQ ID NO: 3402056 - RNA, 20 nt, Human
cuuuuccuucccuuuucugu

SEQ ID NO: 3402057 - RNA, 22 nt, Human
cuuuuccuucccuuuucuguuc

SEQ ID NO: 3402058 - RNA, 15 nt, Human
cuuuuccuuggcauu

SEQ ID NO: 3402059 - RNA, 21 nt, Human
cuuuuccuuggggcaggcagu

SEQ ID NO: 3402060 - RNA, 16 nt, Human
cuuuucgccguggcug

SEQ ID NO: 3402061 - RNA, 14 nt, Human
cuuuucgccuuucc

SEQ ID NO: 3402062 - RNA, 22 nt, Human
cuuuucuaaacuaggcuccuuc

SEQ ID NO: 3402063 - RNA, 16 nt, Human
cuuuucuaacagaaag

SEQ ID NO: 3402064 - RNA, 13 nt, Human
cuuuucuacagca

SEQ ID NO: 3402065 - RNA, 14 nt, Human
cuuuucuacagcaa

SEQ ID NO: 3402066 - RNA, 15 nt, Human
cuuuucuacagcaaa

SEQ ID NO: 3402067 - RNA, 16 nt, Human
cuuuucuacccuagcc

SEQ ID NO: 3402068 - RNA, 21 nt, Human
cuuuucuagcccgaauacaaa

SEQ ID NO: 3402069 - RNA, 13 nt, Human
cuuuucuauuuuc

SEQ ID NO: 3402070 - RNA, 14 nt, Human
cuuuucuauuuucc

SEQ ID NO: 3402071 - RNA, 21 nt, Human
cuuuucuccaauaucagugcu

SEQ ID NO: 3402072 - RNA, 14 nt, Human
cuuuucugauagag

SEQ ID NO: 3402073 - RNA, 16 nt, Human
cuuuucugauccaguu

SEQ ID NO: 3402074 - RNA, 14 nt, Human
cuuuucugcauuuu

SEQ ID NO: 3402075 - RNA, 15 nt, Human
cuuuucugcccuggc

SEQ ID NO: 3402076 - RNA, 18 nt, Human
cuuuucuggaauguaauc

SEQ ID NO: 3402077 - RNA, 12 nt, Human
cuuuucuggcac

SEQ ID NO: 3402078 - RNA, 23 nt, Human
cuuuucuggggaaagacacugcc

SEQ ID NO: 3402079 - RNA, 15 nt, Human
cuuuucuguaauuca

SEQ ID NO: 3402080 - RNA, 18 nt, Human
cuuuucuguccgagcuuu

SEQ ID NO: 3402081 - RNA, 16 nt, Human
cuuuucugucucugcc

SEQ ID NO: 3402082 - RNA, 17 nt, Human
cuuuucugucucugccu

SEQ ID NO: 3402083 - RNA, 18 nt, Human
cuuuucugucucugccuc

SEQ ID NO: 3402084 - RNA, 17 nt, Human
cuuuucuguucuaguuu

SEQ ID NO: 3402085 - RNA, 19 nt, Human
cuuuucuuacuccuccucu

SEQ ID NO: 3402086 - RNA, 18 nt, Human
cuuuucuugcaugaggcu

SEQ ID NO: 3402087 - RNA, 11 nt, Human
cuuuucuuggc

SEQ ID NO: 3402088 - RNA, 21 nt, Human
cuuuucuuggcaaaagccuug

SEQ ID NO: 3402089 - RNA, 23 nt, Human
cuuuucuuggcaaaagccuugug

SEQ ID NO: 3402090 - RNA, 11 nt, Human
cuuuucuugua

SEQ ID NO: 3402091 - RNA, 21 nt, Human
cuuuucuuguuuaucagcagu

SEQ ID NO: 3402092 - RNA, 15 nt, Human
cuuuucuuuaacuuu

SEQ ID NO: 3402093 - RNA, 20 nt, Human
cuuuucuuuagagaacugaa

SEQ ID NO: 3402094 - RNA, 15 nt, Human
cuuuucuuuguuaua

SEQ ID NO: 3402095 - RNA, 13 nt, Human
cuuuucuuuucuu

SEQ ID NO: 3402096 - RNA, 15 nt, Human
cuuuucuuuuguuac

SEQ ID NO: 3402097 - RNA, 21 nt, Human
cuuuucuuuuguuacuguucu

SEQ ID NO: 3402098 - RNA, 14 nt, Human
cuuuucuuuuuaca

SEQ ID NO: 3402099 - RNA, 15 nt, Human
cuuuucuuuuuacau

SEQ ID NO: 3402100 - RNA, 13 nt, Human
cuuuugaacccag

SEQ ID NO: 3402101 - RNA, 22 nt, Human
cuuuugaacuggcaauugucua

SEQ ID NO: 3402102 - RNA, 17 nt, Human
cuuuugacacugcucua

SEQ ID NO: 3402103 - RNA, 14 nt, Human
cuuuugacaugugg

SEQ ID NO: 3402104 - RNA, 22 nt, Human
cuuuuuucccauaagacaauga

SEQ ID NO: 3402105 - RNA, 19 nt, Human
cuuuuuucugccuccuuua

SEQ ID NO: 3402106 - RNA, 15 nt, Human
cuuuuuugaaaucag

SEQ ID NO: 3402107 - RNA, 17 nt, Human
cuuuuuugauaaaguuu

SEQ ID NO: 3402108 - RNA, 17 nt, Human
cuuuuuuggcugcugaa

SEQ ID NO: 3402109 - RNA, 10 nt, Human
cuuuuuuguc

SEQ ID NO: 3402110 - RNA, 20 nt, Human
cuuuuuuguguuuuuaaaag

SEQ ID NO: 3402111 - RNA, 17 nt, Human
cuuuuuuguuuguuucu

SEQ ID NO: 3402112 - RNA, 18 nt, Human
cuuuuuuguuuguuucuu

SEQ ID NO: 3402113 - RNA, 16 nt, Human
cuuuuuuuagagaagu

SEQ ID NO: 3402114 - RNA, 14 nt, Human
cuuuuuuucaaugu

SEQ ID NO: 3402115 - RNA, 13 nt, Human
cuuuuuuuccuuu

SEQ ID NO: 3402116 - RNA, 14 nt, Human
cuuuuuuucuguac

SEQ ID NO: 3402117 - RNA, 21 nt, Human
cuuuuuuuguguguauuugcu

SEQ ID NO: 3402118 - RNA, 22 nt, Human
cuuuuuuuguguguauuugcua

SEQ ID NO: 3402119 - RNA, 14 nt, Human
cuuuuuuuuaaguu

SEQ ID NO: 3402120 - RNA, 15 nt, Human
cuuuuuuuuccuucu

SEQ ID NO: 3402121 - RNA, 17 nt, Human
cuuuuuuuucuauuuca

SEQ ID NO: 3402122 - RNA, 14 nt, Human
cuuuuuuuucuuua

SEQ ID NO: 3402123 - RNA, 16 nt, Human
cuuuuuuuuuccaaaa

SEQ ID NO: 3402124 - RNA, 15 nt, Human
cuuuuuuuuucucuu

SEQ ID NO: 3402125 - RNA, 18 nt, Human
cuuuuuuuuucucuuucu

SEQ ID NO: 3402126 - RNA, 15 nt, Human
cuuuuuuuuuuaagu

SEQ ID NO: 3402127 - RNA, 21 nt, Human
cuuuuuuuuuuaagugaaauu

SEQ ID NO: 3402128 - RNA, 14 nt, Human
cuuuuuuuuuucau

SEQ ID NO: 3402129 - RNA, 23 nt, Human
cuuuuuuuuuuuuuaaagacaga

SEQ ID NO: 3402130 - RNA, 19 nt, Human
cuuuuuuuuuuuuuuggua

SEQ ID NO: 3402131 - RNA, 22 nt, Human
cuuuuuuuuuuuuuuuuugguc

SEQ ID NO: 3402132 - RNA, 18 nt, Human
gaaaaaaaaaaaagagga

SEQ ID NO: 3402133 - RNA, 15 nt, Human
gaaaaaaaaaaaagc

SEQ ID NO: 3402134 - RNA, 17 nt, Human
gaaaaaaaaaagaagaa

SEQ ID NO: 3402135 - RNA, 19 nt, Human
gaaaaaaaaaaugcugaac

SEQ ID NO: 3402136 - RNA, 13 nt, Human
gaaaaaaaaaugc

SEQ ID NO: 3402137 - RNA, 21 nt, Human
gaaaaaaaaaugccauaauac

SEQ ID NO: 3402138 - RNA, 14 nt, Human
gaaaaaaaacacac

SEQ ID NO: 3402139 - RNA, 11 nt, Human
gaaaaaaaaga

SEQ ID NO: 3402140 - RNA, 16 nt, Human
gaaaaaaaagaaaaaa

SEQ ID NO: 3402141 - RNA, 13 nt, Human
gaaaaaaaauuag

SEQ ID NO: 3402142 - RNA, 21 nt, Human
gaaaaaaaccacacaaagaca

SEQ ID NO: 3402143 - RNA, 17 nt, Human
gaaaaaaacgaaaacag

SEQ ID NO: 3402144 - RNA, 14 nt, Human
gaaaaaaacuucau

SEQ ID NO: 3402145 - RNA, 13 nt, Human
gaaaaaaacuuuu

SEQ ID NO: 3402146 - RNA, 14 nt, Human
gaaaaaaacuuuua

SEQ ID NO: 3402147 - RNA, 10 nt, Human
gaaaaaaaga

SEQ ID NO: 3402148 - RNA, 17 nt, Human
gaaaaaaauaaauaaaa

SEQ ID NO: 3402149 - RNA, 18 nt, Human
gaaaaaaauaauuuuaaa

SEQ ID NO: 3402150 - RNA, 23 nt, Human
gaaaaaaauaauuuuaugaacug

SEQ ID NO: 3402151 - RNA, 20 nt, Human
gaaaaaaauacuauuuaaga

SEQ ID NO: 3402152 - RNA, 13 nt, Human
gaaaaaaaucauc

SEQ ID NO: 3402153 - RNA, 19 nt, Human
gaaaaaaaucguccaggga

SEQ ID NO: 3402154 - RNA, 13 nt, Human
gaaaaaaaucuuc

SEQ ID NO: 3402155 - RNA, 13 nt, Human
gaaaaaaaugacu

SEQ ID NO: 3402156 - RNA, 16 nt, Human
gaaaaaaaugacuaaa

SEQ ID NO: 3402157 - RNA, 15 nt, Human
gaaaaaaauguauuu

SEQ ID NO: 3402158 - RNA, 22 nt, Human
gaaaaaaaugucaaaaguagaa

SEQ ID NO: 3402159 - RNA, 16 nt, Human
gaaaaaaauugaaaug

SEQ ID NO: 3402160 - RNA, 16 nt, Human
gaaaaaaauuggcauu

SEQ ID NO: 3402161 - RNA, 22 nt, Human
gaaaaaaccguguuugucucuu

SEQ ID NO: 3402162 - RNA, 22 nt, Human
gaaaaaaguuguaggcgaauca

SEQ ID NO: 3402163 - RNA, 17 nt, Human
gaaaaaauaacacacau

SEQ ID NO: 3402164 - RNA, 21 nt, Human
gaaaaaauaauugauuucaag

SEQ ID NO: 3402165 - RNA, 13 nt, Human
gaaaaaauacauu

SEQ ID NO: 3402166 - RNA, 14 nt, Human
gaaaaaauacauuu

SEQ ID NO: 3402167 - RNA, 14 nt, Human
gaaaaaauauauau

SEQ ID NO: 3402168 - RNA, 21 nt, Human
gaaaaaauauauguauauaca

SEQ ID NO: 3402169 - RNA, 19 nt, Human
gaaaaaauauuuuccugcc

SEQ ID NO: 3402170 - RNA, 18 nt, Human
gaaaaaauguuggauuua

SEQ ID NO: 3402171 - RNA, 21 nt, Human
gaaaaacaaacucguuuuuua

SEQ ID NO: 3402172 - RNA, 14 nt, Human
gaaaaacacaagca

SEQ ID NO: 3402173 - RNA, 17 nt, Human
gaaaaacacaagcaaaa

SEQ ID NO: 3402174 - RNA, 11 nt, Human
gaaaaacaggu

SEQ ID NO: 3402175 - RNA, 20 nt, Human
gaaaaaccacucccaguccc

SEQ ID NO: 3402176 - RNA, 14 nt, Human
gaaaaacugauuuu

SEQ ID NO: 3402177 - RNA, 21 nt, Human
gaaaaacuuuggaaccagacu

SEQ ID NO: 3402178 - RNA, 14 nt, Human
gaaaaagaaaugca

SEQ ID NO: 3402179 - RNA, 19 nt, Human
gaaaaagaacaugcaguuu

SEQ ID NO: 3402180 - RNA, 21 nt, Human
gaaaaagaacaugcaguuuga

SEQ ID NO: 3402181 - RNA, 23 nt, Human
gaaaaagaacuuccccauacaaa

SEQ ID NO: 3402182 - RNA, 14 nt, Human
gaaaaagaagaauc

SEQ ID NO: 3402183 - RNA, 22 nt, Human
gaaaaagcaguaacugacaacu

SEQ ID NO: 3402184 - RNA, 18 nt, Human
gaaaaagcauguacagug

SEQ ID NO: 3402185 - RNA, 20 nt, Human
gaaaaagcuccaugugccuc

SEQ ID NO: 3402186 - RNA, 15 nt, Human
gaaaaaggacaggca

SEQ ID NO: 3402187 - RNA, 18 nt, Human
gaaaaaggacaggcagaa

SEQ ID NO: 3402188 - RNA, 12 nt, Human
gaaaaaggguca

SEQ ID NO: 3402189 - RNA, 18 nt, Human
gaaaaaguaucauggaaa

SEQ ID NO: 3402190 - RNA, 22 nt, Human
gaaaaaguaucauggaaauauu

SEQ ID NO: 3402191 - RNA, 18 nt, Human
gaaaaagucauccaaucu

SEQ ID NO: 3402192 - RNA, 21 nt, Human
gaaaaagucauccaaucuaac

SEQ ID NO: 3402193 - RNA, 19 nt, Human
gaaaaaguuaaacauugaa

SEQ ID NO: 3402194 - RNA, 18 nt, Human
gaaaaaguuaaugcuuaa

SEQ ID NO: 3402195 - RNA, 17 nt, Human
gaaaaauaaagaaaaga

SEQ ID NO: 3402196 - RNA, 19 nt, Human
gaaaaauaaagaaaagaug

SEQ ID NO: 3402197 - RNA, 22 nt, Human
gaaaaauaaagacaccugguug

SEQ ID NO: 3402198 - RNA, 16 nt, Human
gaaaaauagcaacuug

SEQ ID NO: 3402199 - RNA, 17 nt, Human
gaaaaauagcaacuugu

SEQ ID NO: 3402200 - RNA, 20 nt, Human
gaaaaauaucuguaagagug

SEQ ID NO: 3402201 - RNA, 15 nt, Human
gaaaaauaugauauu

SEQ ID NO: 3402202 - RNA, 10 nt, Human
gaaaaauauu

SEQ ID NO: 3402203 - RNA, 13 nt, Human
gaaaaauauuuaa

SEQ ID NO: 3402204 - RNA, 14 nt, Human
gaaaaauauuuaag

SEQ ID NO: 3402205 - RNA, 16 nt, Human
gaaaaauauuuauuca

SEQ ID NO: 3402206 - RNA, 20 nt, Human
gaaaaaucaaguauuauaaa

SEQ ID NO: 3402207 - RNA, 13 nt, Human
gaaaaauccucuu

SEQ ID NO: 3402208 - RNA, 14 nt, Human
gaaaaaucuugugc

SEQ ID NO: 3402209 - RNA, 20 nt, Human
gaaaaaugcccuuaaaucau

SEQ ID NO: 3402210 - RNA, 16 nt, Human
gaaaaaugcuccccac

SEQ ID NO: 3402211 - RNA, 16 nt, Human
gaaaaauggagcaaag

SEQ ID NO: 3402212 - RNA, 13 nt, Human
gaaaaauguguaa

SEQ ID NO: 3402213 - RNA, 14 nt, Human
gaaaaauguguaau

SEQ ID NO: 3402214 - RNA, 12 nt, Human
gaaaaauguuug

SEQ ID NO: 3402215 - RNA, 20 nt, Human
gaaaaauucaauaguaauau

SEQ ID NO: 3402216 - RNA, 20 nt, Human
gaaaaauuccuauugugauu

SEQ ID NO: 3402217 - RNA, 22 nt, Human
gaaaaauugcugacuguagcuu

SEQ ID NO: 3402218 - RNA, 17 nt, Human
gaaaaauuuaagcauug

SEQ ID NO: 3402219 - RNA, 19 nt, Human
gaaaaauuuaagcauuguu

SEQ ID NO: 3402220 - RNA, 14 nt, Human
gaaaaauuucacga

SEQ ID NO: 3402221 - RNA, 19 nt, Human
gaaaacaaaaccaaaaguu

SEQ ID NO: 3402222 - RNA, 22 nt, Human
gaaaacaaaaccaaaaguuauu

SEQ ID NO: 3402223 - RNA, 19 nt, Human
gaaaacaaaauuuuauuuu

SEQ ID NO: 3402224 - RNA, 15 nt, Human
gaaaacaacaaaaaa

SEQ ID NO: 3402225 - RNA, 19 nt, Human
gaaaacaaugcaaaaccuu

SEQ ID NO: 3402226 - RNA, 14 nt, Human
gaaaacacauuuuu

SEQ ID NO: 3402227 - RNA, 19 nt, Human
gaaaacacauuuuucuuag

SEQ ID NO: 3402228 - RNA, 15 nt, Human
gaaaacacuguuauc

SEQ ID NO: 3402229 - RNA, 22 nt, Human
gaaaacacuguuaucauuuuuu

SEQ ID NO: 3402230 - RNA, 19 nt, Human
gaaaacacuguucucugcc

SEQ ID NO: 3402231 - RNA, 12 nt, Human
gaaaacauaaaa

SEQ ID NO: 3402232 - RNA, 19 nt, Human
gaaaacaucacugaaaugc

SEQ ID NO: 3402233 - RNA, 12 nt, Human
gaaaacaucugg

SEQ ID NO: 3402234 - RNA, 16 nt, Human
gaaaacauggaacagu

SEQ ID NO: 3402235 - RNA, 13 nt, Human
gaaaacauuccau

SEQ ID NO: 3402236 - RNA, 17 nt, Human
gaaaacauuccauccuu

SEQ ID NO: 3402237 - RNA, 20 nt, Human
gaaaacauucugauuuggaa

SEQ ID NO: 3402238 - RNA, 12 nt, Human
gaaaacauuguu

SEQ ID NO: 3402239 - RNA, 18 nt, Human
gaaaacauuguuccagau

SEQ ID NO: 3402240 - RNA, 17 nt, Human
gaaaaccaaaaugacau

SEQ ID NO: 3402241 - RNA, 18 nt, Human
gaaaaccaucuggccugg

SEQ ID NO: 3402242 - RNA, 20 nt, Human
gaaaaccaucuggccuggcc

SEQ ID NO: 3402243 - RNA, 14 nt, Human
gaaaaccccagcau

SEQ ID NO: 3402244 - RNA, 13 nt, Human
gaaaaccuagaaa

SEQ ID NO: 3402245 - RNA, 15 nt, Human
gaaaaccuagaaaac

SEQ ID NO: 3402246 - RNA, 15 nt, Human
gaaaaccuuucuuca

SEQ ID NO: 3402247 - RNA, 15 nt, Human
gaaaacguggcugcu

SEQ ID NO: 3402248 - RNA, 16 nt, Human
gaaaacguggcugcuu

SEQ ID NO: 3402249 - RNA, 18 nt, Human
gaaaacguggcugcuuca

SEQ ID NO: 3402250 - RNA, 18 nt, Human
gaaaauguuuuguaagaa

SEQ ID NO: 3402251 - RNA, 19 nt, Human
gaaaauguuuuguaagaaa

SEQ ID NO: 3402252 - RNA, 13 nt, Human
gaaaauuaacacu

SEQ ID NO: 3402253 - RNA, 18 nt, Human
gaaaauuaggauuucaug

SEQ ID NO: 3402254 - RNA, 22 nt, Human
gaaaauuaggauuucaugauuu

SEQ ID NO: 3402255 - RNA, 16 nt, Human
gaaaauuauucuauaa

SEQ ID NO: 3402256 - RNA, 22 nt, Human
gaaaauuauuuuguucauacau

SEQ ID NO: 3402257 - RNA, 21 nt, Human
gaaaauucaaaaaguguuuau

SEQ ID NO: 3402258 - RNA, 21 nt, Human
gaaaauucauaguaagauuga

SEQ ID NO: 3402259 - RNA, 13 nt, Human
gaaaauucauuuu

SEQ ID NO: 3402260 - RNA, 20 nt, Human
gaaaauucugugccuuguuu

SEQ ID NO: 3402261 - RNA, 22 nt, Human
gaaaauucugugccuuguuuuu

SEQ ID NO: 3402262 - RNA, 16 nt, Human
gaaaauugaauuuaac

SEQ ID NO: 3402263 - RNA, 19 nt, Human
gaaaauugaauuuaacaau

SEQ ID NO: 3402264 - RNA, 17 nt, Human
gaaaauugccuuucugu

SEQ ID NO: 3402265 - RNA, 15 nt, Human
gaaaauuggacauua

SEQ ID NO: 3402266 - RNA, 14 nt, Human
gaaaauuguuuagu

SEQ ID NO: 3402267 - RNA, 17 nt, Human
gaaaauuuguuauuuug

SEQ ID NO: 3402268 - RNA, 13 nt, Human
gaaaauuuuugua

SEQ ID NO: 3402269 - RNA, 16 nt, Human
gaaaauuuuuguagua

SEQ ID NO: 3402270 - RNA, 17 nt, Human
gaaaauuuuuguuuaua

SEQ ID NO: 3402271 - RNA, 14 nt, Human
gaaacaaaaacacu

SEQ ID NO: 3402272 - RNA, 23 nt, Human
gaaacaaacaaaagcugaacaca

SEQ ID NO: 3402273 - RNA, 12 nt, Human
gaaacaaagaag

SEQ ID NO: 3402274 - RNA, 13 nt, Human
gaaacaaagaagg

SEQ ID NO: 3402275 - RNA, 19 nt, Human
gaaacaaaguggaaggaaa

SEQ ID NO: 3402276 - RNA, 17 nt, Human
gaaacaaauaaucacau

SEQ ID NO: 3402277 - RNA, 14 nt, Human
gaaacaacacugua

SEQ ID NO: 3402278 - RNA, 15 nt, Human
gaaacaacacuguag

SEQ ID NO: 3402279 - RNA, 17 nt, Human
gaaacaacacuguagua

SEQ ID NO: 3402280 - RNA, 22 nt, Human
gaaacaauacucauaaugugaa

SEQ ID NO: 3402281 - RNA, 14 nt, Human
gaaacaauuucugu

SEQ ID NO: 3402282 - RNA, 16 nt, Human
gaaacacaacuauauu

SEQ ID NO: 3402283 - RNA, 23 nt, Human
gaaacacaccaggcugugggccu

SEQ ID NO: 3402284 - RNA, 20 nt, Human
gaaacacacugaggcaggga

SEQ ID NO: 3402285 - RNA, 13 nt, Human
gaaacacagaaac

SEQ ID NO: 3402286 - RNA, 14 nt, Human
gaaacacagaaacc

SEQ ID NO: 3402287 - RNA, 23 nt, Human
gaaacacagcuguucuucuguuc

SEQ ID NO: 3402288 - RNA, 15 nt, Human
gaaacacauaauuaa

SEQ ID NO: 3402289 - RNA, 21 nt, Human
gaaacaccuucucuggagcca

SEQ ID NO: 3402290 - RNA, 15 nt, Human
gaaacacgaaacuug

SEQ ID NO: 3402291 - RNA, 18 nt, Human
gaaacacgaaacuuguua

SEQ ID NO: 3402292 - RNA, 18 nt, Human
gaaacacuaaauguuaaa

SEQ ID NO: 3402293 - RNA, 17 nt, Human
gaaacacuccuugcauc

SEQ ID NO: 3402294 - RNA, 16 nt, Human
gaaacacugaaaagaa

SEQ ID NO: 3402295 - RNA, 11 nt, Human
gaaacacugcc

SEQ ID NO: 3402296 - RNA, 13 nt, Human
gaaacacugccuu

SEQ ID NO: 3402297 - RNA, 14 nt, Human
gaaacacugccuuu

SEQ ID NO: 3402298 - RNA, 18 nt, Human
gaaacacuuugccuccug

SEQ ID NO: 3402299 - RNA, 20 nt, Human
gaaacacuuugccuccugug

SEQ ID NO: 3402300 - RNA, 16 nt, Human
gaaacagagacaggcc

SEQ ID NO: 3402301 - RNA, 17 nt, Human
gaaacagagacaggccc

SEQ ID NO: 3402302 - RNA, 19 nt, Human
gaaacagaggagaguccca

SEQ ID NO: 3402303 - RNA, 20 nt, Human
gaaacagaucuccuggcaaa

SEQ ID NO: 3402304 - RNA, 16 nt, Human
gaaacagauuucauac

SEQ ID NO: 3402305 - RNA, 13 nt, Human
gaaacagcaucuc

SEQ ID NO: 3402306 - RNA, 22 nt, Human
gaaacagcugccuuagcuucag

SEQ ID NO: 3402307 - RNA, 22 nt, Human
gaaacaggaccacaaaaaugaa

SEQ ID NO: 3402308 - RNA, 13 nt, Human
gaaacaggagaga

SEQ ID NO: 3402309 - RNA, 21 nt, Human
gaaacagguugggaugggaua

SEQ ID NO: 3402310 - RNA, 22 nt, Human
gaaacagguugggaugggauag

SEQ ID NO: 3402311 - RNA, 20 nt, Human
gaaacaguugguaacuuuug

SEQ ID NO: 3402312 - RNA, 21 nt, Human
gaaacaguugguaacuuuugu

SEQ ID NO: 3402313 - RNA, 13 nt, Human
gaaacauaaauaa

SEQ ID NO: 3402314 - RNA, 15 nt, Human
gaaacauaaauaaaa

SEQ ID NO: 3402315 - RNA, 17 nt, Human
gaaacaucucaauaaag

SEQ ID NO: 3402316 - RNA, 16 nt, Human
gaaacaugacacugac

SEQ ID NO: 3402317 - RNA, 17 nt, Human
gaaacaugacacugacc

SEQ ID NO: 3402318 - RNA, 20 nt, Human
gaaacaugacucguauaugu

SEQ ID NO: 3402319 - RNA, 23 nt, Human
gaaacauguugccaaaauggugg

SEQ ID NO: 3402320 - RNA, 18 nt, Human
gaaacauuggaagcaggu

SEQ ID NO: 3402321 - RNA, 11 nt, Human
gaaacauuugg

SEQ ID NO: 3402322 - RNA, 18 nt, Human
gaaaccacagcugcugga

SEQ ID NO: 3402323 - RNA, 20 nt, Human
gaaaccacagcugcuggaga

SEQ ID NO: 3402324 - RNA, 21 nt, Human
gaaaccauuaugaagaagaga

SEQ ID NO: 3402325 - RNA, 13 nt, Human
gaaacccagcucu

SEQ ID NO: 3402326 - RNA, 23 nt, Human
gaaacccagcucugguccauaga

SEQ ID NO: 3402327 - RNA, 22 nt, Human
gaaacccauaggcccacacaca

SEQ ID NO: 3402328 - RNA, 23 nt, Human
gaaacccauaggcccacacacag

SEQ ID NO: 3402329 - RNA, 17 nt, Human
gaaaccccaucucuacu

SEQ ID NO: 3402330 - RNA, 14 nt, Human
gaaacccucuguca

SEQ ID NO: 3402331 - RNA, 21 nt, Human
gaaaccuacacacugucaugc

SEQ ID NO: 3402332 - RNA, 16 nt, Human
gaaaccucuacauauu

SEQ ID NO: 3402333 - RNA, 20 nt, Human
gaaaccucuacuaaaaagaa

SEQ ID NO: 3402334 - RNA, 12 nt, Human
gaaaccugcccu

SEQ ID NO: 3402335 - RNA, 23 nt, Human
gaaaccuguaucuuucuaugcug

SEQ ID NO: 3402336 - RNA, 19 nt, Human
gaaaccuuauuguaccucu

SEQ ID NO: 3402337 - RNA, 13 nt, Human
gaaaccuuauuuu

SEQ ID NO: 3402338 - RNA, 17 nt, Human
gaaaccuuccacccagu

SEQ ID NO: 3402339 - RNA, 17 nt, Human
gaaaccuugguguaguu

SEQ ID NO: 3402340 - RNA, 22 nt, Human
gaaaccuugguguaguugaacu

SEQ ID NO: 3402341 - RNA, 14 nt, Human
gaaaccuuuuuuaa

SEQ ID NO: 3402342 - RNA, 17 nt, Human
gaaaccuuuuuuaagau

SEQ ID NO: 3402343 - RNA, 14 nt, Human
gaaacgcuaccucu

SEQ ID NO: 3402344 - RNA, 21 nt, Human
gaaacgcuaccucucuguccc

SEQ ID NO: 3402345 - RNA, 23 nt, Human
gaaacgcuaccucucugucccuu

SEQ ID NO: 3402346 - RNA, 16 nt, Human
gaaacgucuucuaaac

SEQ ID NO: 3402347 - RNA, 20 nt, Human
gaaacuaauugacuuuagaa

SEQ ID NO: 3402348 - RNA, 20 nt, Human
gaaacuacugccuuuagaaa

SEQ ID NO: 3402349 - RNA, 22 nt, Human
gaaacuacugccuuuagaaaau

SEQ ID NO: 3402350 - RNA, 21 nt, Human
gaaacuagaaagcagagauuu

SEQ ID NO: 3402351 - RNA, 14 nt, Human
gaaacuagaaaugu

SEQ ID NO: 3402352 - RNA, 21 nt, Human
gaaacuagcuguuuaaaguuu

SEQ ID NO: 3402353 - RNA, 18 nt, Human
gaaacuaggucugauauu

SEQ ID NO: 3402354 - RNA, 19 nt, Human
gaaacuaggugcauauuua

SEQ ID NO: 3402355 - RNA, 15 nt, Human
gaaacuaguguacau

SEQ ID NO: 3402356 - RNA, 13 nt, Human
gaaacuauguguu

SEQ ID NO: 3402357 - RNA, 14 nt, Human
gaaacuauguguuu

SEQ ID NO: 3402358 - RNA, 18 nt, Human
gaaacuauguguuuuucu

SEQ ID NO: 3402359 - RNA, 20 nt, Human
gaaacucaccauguaaaaga

SEQ ID NO: 3402360 - RNA, 20 nt, Human
gaaacucaccugcuggcccc

SEQ ID NO: 3402361 - RNA, 22 nt, Human
gaaacucaccugcuggccccuc

SEQ ID NO: 3402362 - RNA, 16 nt, Human
gaaacuccacaucugc

SEQ ID NO: 3402363 - RNA, 17 nt, Human
gaaacuccacaucugcc

SEQ ID NO: 3402364 - RNA, 18 nt, Human
gaaacuccacaucugccu

SEQ ID NO: 3402365 - RNA, 20 nt, Human
gaaacuccacaucugccuua

SEQ ID NO: 3402366 - RNA, 18 nt, Human
gaaacuccgucuuagaag

SEQ ID NO: 3402367 - RNA, 23 nt, Human
gaaacucguuaauuuguaguguu

SEQ ID NO: 3402368 - RNA, 15 nt, Human
gaaacucuuaucuca

SEQ ID NO: 3402369 - RNA, 16 nt, Human
gaaacucuuaucucag

SEQ ID NO: 3402370 - RNA, 20 nt, Human
gaaacucuuaucucagucau

SEQ ID NO: 3402371 - RNA, 19 nt, Human
gaaacugacaugcccuccc

SEQ ID NO: 3402372 - RNA, 22 nt, Human
gaaacugaggaauuuucuuugu

SEQ ID NO: 3402373 - RNA, 13 nt, Human
gaaacugccagca

SEQ ID NO: 3402374 - RNA, 15 nt, Human
gaaacugccagcaac

SEQ ID NO: 3402375 - RNA, 16 nt, Human
gaaacuggcaaagcag

SEQ ID NO: 3402376 - RNA, 21 nt, Human
gaaacuggccauggccugcaa

SEQ ID NO: 3402377 - RNA, 18 nt, Human
gaaacuguagucucagga

SEQ ID NO: 3402378 - RNA, 21 nt, Human
gaaacuguugccagagaugga

SEQ ID NO: 3402379 - RNA, 23 nt, Human
gaaacuguugccagagauggagg

SEQ ID NO: 3402380 - RNA, 19 nt, Human
gaaacuuaaauguuauuau

SEQ ID NO: 3402381 - RNA, 16 nt, Human
gaaacuuaucuuacaa

SEQ ID NO: 3402382 - RNA, 19 nt, Human
gaaacuuaucuuacaaagu

SEQ ID NO: 3402383 - RNA, 11 nt, Human
gaaacuuauuu

SEQ ID NO: 3402384 - RNA, 12 nt, Human
gaaacuuauuuu

SEQ ID NO: 3402385 - RNA, 17 nt, Human
gaaacuuauuuuuuucu

SEQ ID NO: 3402386 - RNA, 17 nt, Human
gaaacuugucacuugca

SEQ ID NO: 3402387 - RNA, 19 nt, Human
gaaacuugucacuugcaug

SEQ ID NO: 3402388 - RNA, 14 nt, Human
gaaacuuguguaaa

SEQ ID NO: 3402389 - RNA, 20 nt, Human
gaaacuuguuagaaaugcaa

SEQ ID NO: 3402390 - RNA, 17 nt, Human
gaaacuuguuauuguga

SEQ ID NO: 3402391 - RNA, 19 nt, Human
gaaacuuguuauugugaau

SEQ ID NO: 3402392 - RNA, 22 nt, Human
gaaacuuguucuuccaaagcag

SEQ ID NO: 3402393 - RNA, 18 nt, Human
gaaacuuguuucacugaa

SEQ ID NO: 3402394 - RNA, 17 nt, Human
gaaauggaauacugaag

SEQ ID NO: 3402395 - RNA, 20 nt, Human
gaaauggacugguuugagau

SEQ ID NO: 3402396 - RNA, 16 nt, Human
gaaauggauacuacau

SEQ ID NO: 3402397 - RNA, 16 nt, Human
gaaauggcuuugugau

SEQ ID NO: 3402398 - RNA, 17 nt, Human
gaaaugggacuuaacuc

SEQ ID NO: 3402399 - RNA, 16 nt, Human
gaaaugggcagagcag

SEQ ID NO: 3402400 - RNA, 17 nt, Human
gaaaugggcagagcaga

SEQ ID NO: 3402401 - RNA, 17 nt, Human
gaaaugguaugagcuga

SEQ ID NO: 3402402 - RNA, 21 nt, Human
gaaaugguaugagcugagggg

SEQ ID NO: 3402403 - RNA, 13 nt, Human
gaaaugguuguau

SEQ ID NO: 3402404 - RNA, 17 nt, Human
gaaaugguuguauuaga

SEQ ID NO: 3402405 - RNA, 14 nt, Human
gaaauguaaggcug

SEQ ID NO: 3402406 - RNA, 12 nt, Human
gaaauguaaugc

SEQ ID NO: 3402407 - RNA, 17 nt, Human
gaaauguacagcaagga

SEQ ID NO: 3402408 - RNA, 20 nt, Human
gaaaugucccuuucuucucc

SEQ ID NO: 3402409 - RNA, 13 nt, Human
gaaauguguguga

SEQ ID NO: 3402410 - RNA, 18 nt, Human
gaaaugugugugauguga

SEQ ID NO: 3402411 - RNA, 19 nt, Human
gaaaugugugugaugugac

SEQ ID NO: 3402412 - RNA, 21 nt, Human
gaaaugugugugaugugacau

SEQ ID NO: 3402413 - RNA, 13 nt, Human
gaaauguguuucu

SEQ ID NO: 3402414 - RNA, 14 nt, Human
gaaauguuuuguaa

SEQ ID NO: 3402415 - RNA, 19 nt, Human
gaaauguuuuuaauaaaag

SEQ ID NO: 3402416 - RNA, 20 nt, Human
gaaauuaaaacuauucaugc

SEQ ID NO: 3402417 - RNA, 13 nt, Human
gaaauuaaaguuu

SEQ ID NO: 3402418 - RNA, 22 nt, Human
gaaauuaagaaggcaaaaaugu

SEQ ID NO: 3402419 - RNA, 17 nt, Human
gaaauuaccaaaauguc

SEQ ID NO: 3402420 - RNA, 20 nt, Human
gaaauuacuaauuuuacuuc

SEQ ID NO: 3402421 - RNA, 19 nt, Human
gaaauuagcugugugaaau

SEQ ID NO: 3402422 - RNA, 14 nt, Human
gaaauuaggaugua

SEQ ID NO: 3402423 - RNA, 18 nt, Human
gaaauuauguauguuuac

SEQ ID NO: 3402424 - RNA, 17 nt, Human
gaaauuauuuaauaaaa

SEQ ID NO: 3402425 - RNA, 22 nt, Human
gaaauucccuucaucuggaacc

SEQ ID NO: 3402426 - RNA, 19 nt, Human
gaaauuccuguagcaucuu

SEQ ID NO: 3402427 - RNA, 15 nt, Human
gaaauucguguguuu

SEQ ID NO: 3402428 - RNA, 15 nt, Human
gaaauucuccuggag

SEQ ID NO: 3402429 - RNA, 15 nt, Human
gaaauucugaauuug

SEQ ID NO: 3402430 - RNA, 19 nt, Human
gaaauucugaauuugcaaa

SEQ ID NO: 3402431 - RNA, 11 nt, Human
gaaauucuguu

SEQ ID NO: 3402432 - RNA, 15 nt, Human
gaaauucuguuaaaa

SEQ ID NO: 3402433 - RNA, 18 nt, Human
gaaauucuguuaaaaucu

SEQ ID NO: 3402434 - RNA, 24 nt, Human
gaaauucuguuaaaaucuauucug

SEQ ID NO: 3402435 - RNA, 16 nt, Human
gaaauucuguuuuuaa

SEQ ID NO: 3402436 - RNA, 22 nt, Human
gaaauucuuguuaugguagaaa

SEQ ID NO: 3402437 - RNA, 23 nt, Human
gaaauucuuucccagucugucga

SEQ ID NO: 3402438 - RNA, 16 nt, Human
gaaauugaauacuuug

SEQ ID NO: 3402439 - RNA, 17 nt, Human
gaaauugaauacuuuga

SEQ ID NO: 3402440 - RNA, 18 nt, Human
gaaauugaauacuuugaa

SEQ ID NO: 3402441 - RNA, 20 nt, Human
gaaauugaauacuuugaaug

SEQ ID NO: 3402442 - RNA, 22 nt, Human
gaaauugaauacuuugaaugug

SEQ ID NO: 3402443 - RNA, 21 nt, Human
gaaauugacacaaguggaccu

SEQ ID NO: 3402444 - RNA, 12 nt, Human
gaaauugacaga

SEQ ID NO: 3402445 - RNA, 23 nt, Human
gaaauugagcugcuuuuuuugaa

SEQ ID NO: 3402446 - RNA, 15 nt, Human
gaaauugauuuugaa

SEQ ID NO: 3402447 - RNA, 13 nt, Human
gaaauugcauacu

SEQ ID NO: 3402448 - RNA, 19 nt, Human
gaaauugcauuuccugaca

SEQ ID NO: 3402449 - RNA, 15 nt, Human
gaaauuggcuggaug

SEQ ID NO: 3402450 - RNA, 16 nt, Human
gaaauugguaccuugc

SEQ ID NO: 3402451 - RNA, 20 nt, Human
gaaauugguaccuugcacac

SEQ ID NO: 3402452 - RNA, 18 nt, Human
gaaauuguacauauuugu

SEQ ID NO: 3402453 - RNA, 13 nt, Human
gaaauugugaacu

SEQ ID NO: 3402454 - RNA, 18 nt, Human
gaaauugugaacucauug

SEQ ID NO: 3402455 - RNA, 15 nt, Human
gaaauuuaaacauua

SEQ ID NO: 3402456 - RNA, 20 nt, Human
gaaauuuaaacuauaagcaa

SEQ ID NO: 3402457 - RNA, 14 nt, Human
gaaauuuaaagcag

SEQ ID NO: 3402458 - RNA, 13 nt, Human
gaaauuuacuaua

SEQ ID NO: 3402459 - RNA, 18 nt, Human
gaaauuuagcauuguagu

SEQ ID NO: 3402460 - RNA, 18 nt, Human
gaaauuucacauagccca

SEQ ID NO: 3402461 - RNA, 20 nt, Human
gaaauuucacgucauaggaa

SEQ ID NO: 3402462 - RNA, 21 nt, Human
gaaauuucagauucccagagc

SEQ ID NO: 3402463 - RNA, 23 nt, Human
gaaauuucagauucccagagcaa

SEQ ID NO: 3402464 - RNA, 20 nt, Human
gaaauuuccuaauuuauucu

SEQ ID NO: 3402465 - RNA, 11 nt, Human
gaaauuugaau

SEQ ID NO: 3402466 - RNA, 13 nt, Human
gaaauuugaauuu

SEQ ID NO: 3402467 - RNA, 13 nt, Human
gaaauuuuaccaa

SEQ ID NO: 3402468 - RNA, 18 nt, Human
gaaauuuucuagacuuuc

SEQ ID NO: 3402469 - RNA, 21 nt, Human
gaaauuuucuagacuuucugu

SEQ ID NO: 3402470 - RNA, 19 nt, Human
gaaauuuugcaaauauaaa

SEQ ID NO: 3402471 - RNA, 22 nt, Human
gaaauuuugcaaauauaaacau

SEQ ID NO: 3402472 - RNA, 13 nt, Human
gaaauuuugcuau

SEQ ID NO: 3402473 - RNA, 15 nt, Human
gaaauuuuguaagaa

SEQ ID NO: 3402474 - RNA, 20 nt, Human
gaaauuuuguaagaaggcaa

SEQ ID NO: 3402475 - RNA, 22 nt, Human
gaaauuuuucagaugcuucugg

SEQ ID NO: 3402476 - RNA, 13 nt, Human
gaaauuuuucaua

SEQ ID NO: 3402477 - RNA, 15 nt, Human
gaaauuuuucauauu

SEQ ID NO: 3402478 - RNA, 14 nt, Human
gaaauuuuuguaaa

SEQ ID NO: 3402479 - RNA, 15 nt, Human
gaaauuuuuguaaau

SEQ ID NO: 3402480 - RNA, 21 nt, Human
gaaauuuuuguaaaucacauc

SEQ ID NO: 3402481 - RNA, 14 nt, Human
gaacaaaaaaacca

SEQ ID NO: 3402482 - RNA, 19 nt, Human
gaacaaaaaaaccacaaag

SEQ ID NO: 3402483 - RNA, 21 nt, Human
gaacaaaaaaaucugcagaag

SEQ ID NO: 3402484 - RNA, 23 nt, Human
gaacaaaacacacgcgcgcacac

SEQ ID NO: 3402485 - RNA, 15 nt, Human
gaacaaaauaaauug

SEQ ID NO: 3402486 - RNA, 15 nt, Human
gaacaaagcagccac

SEQ ID NO: 3402487 - RNA, 13 nt, Human
gaacaaagcuguu

SEQ ID NO: 3402488 - RNA, 18 nt, Human
gaacaaagcuguuaaacu

SEQ ID NO: 3402489 - RNA, 20 nt, Human
gaacaaagcuguuaaacugu

SEQ ID NO: 3402490 - RNA, 22 nt, Human
gaacaaaggacagaguaugaac

SEQ ID NO: 3402491 - RNA, 17 nt, Human
gaacaaagugaaggaca

SEQ ID NO: 3402492 - RNA, 15 nt, Human
gaacaaauggccuuu

SEQ ID NO: 3402493 - RNA, 23 nt, Human
gaacaaauguuuauuaagcauca

SEQ ID NO: 3402494 - RNA, 14 nt, Human
gaacaaauuauuuu

SEQ ID NO: 3402495 - RNA, 18 nt, Human
gaacaaauuuacagagac

SEQ ID NO: 3402496 - RNA, 17 nt, Human
gaacaagagaagcauuc

SEQ ID NO: 3402497 - RNA, 16 nt, Human
gaacaagaugguucua

SEQ ID NO: 3402498 - RNA, 16 nt, Human
gaacaagcauucuccu

SEQ ID NO: 3402499 - RNA, 18 nt, Human
gaacaagcuucaguaagu

SEQ ID NO: 3402500 - RNA, 14 nt, Human
gaacaaggcaaggc

SEQ ID NO: 3402501 - RNA, 13 nt, Human
gaacaagugaaca

SEQ ID NO: 3402502 - RNA, 17 nt, Human
gaacaagugaacacauu

SEQ ID NO: 3402503 - RNA, 12 nt, Human
gaacaaguuuua

SEQ ID NO: 3402504 - RNA, 12 nt, Human
gaacaaugaagu

SEQ ID NO: 3402505 - RNA, 13 nt, Human
gaacaauugaagu

SEQ ID NO: 3402506 - RNA, 20 nt, Human
gaacaauugaaguaaacuuu

SEQ ID NO: 3402507 - RNA, 20 nt, Human
gaacaauuuggcaauuuugu

SEQ ID NO: 3402508 - RNA, 20 nt, Human
gaacacaaacacauuguuau

SEQ ID NO: 3402509 - RNA, 17 nt, Human
gaacacaaacuguaaau

SEQ ID NO: 3402510 - RNA, 22 nt, Human
gaacacaaagcggggggagggu

SEQ ID NO: 3402511 - RNA, 16 nt, Human
gaacacacacauauac

SEQ ID NO: 3402512 - RNA, 17 nt, Human
gaacacacacauauaca

SEQ ID NO: 3402513 - RNA, 11 nt, Human
gaacacaggca

SEQ ID NO: 3402514 - RNA, 17 nt, Human
gaacacaggcaaaaucc

SEQ ID NO: 3402515 - RNA, 12 nt, Human
gaacacaggcag

SEQ ID NO: 3402516 - RNA, 19 nt, Human
gaacacaggcagcuuucua

SEQ ID NO: 3402517 - RNA, 22 nt, Human
gaacaccacgcuugacaggaca

SEQ ID NO: 3402518 - RNA, 20 nt, Human
gaacaccauagguagaaugu

SEQ ID NO: 3402519 - RNA, 16 nt, Human
gaacaccauugaaggc

SEQ ID NO: 3402520 - RNA, 21 nt, Human
gaacacccgacuccucaaaag

SEQ ID NO: 3402521 - RNA, 23 nt, Human
gaacacccuuagaaaaugugucc

SEQ ID NO: 3402522 - RNA, 22 nt, Human
gaacacuaaccugaccgugggc

SEQ ID NO: 3402523 - RNA, 22 nt, Human
gaacacuaacucaccagcccca

SEQ ID NO: 3402524 - RNA, 15 nt, Human
gaacacuaauucaua

SEQ ID NO: 3402525 - RNA, 18 nt, Human
gaacacuagacaagccag

SEQ ID NO: 3402526 - RNA, 13 nt, Human
gaacacuagccag

SEQ ID NO: 3402527 - RNA, 13 nt, Human
gaacacuauuuuc

SEQ ID NO: 3402528 - RNA, 17 nt, Human
gaacacuauuuucagaa

SEQ ID NO: 3402529 - RNA, 21 nt, Human
gaacacuauuuucagaaucug

SEQ ID NO: 3402530 - RNA, 18 nt, Human
gaacacuccaauuaagga

SEQ ID NO: 3402531 - RNA, 13 nt, Human
gaacacucugaga

SEQ ID NO: 3402532 - RNA, 15 nt, Human
gaacacucugagacu

SEQ ID NO: 3402533 - RNA, 16 nt, Human
gaacacucuuuugcuu

SEQ ID NO: 3402534 - RNA, 18 nt, Human
gaacacucuuuugcuuua

SEQ ID NO: 3402535 - RNA, 13 nt, Human
gaacacugcccuc

SEQ ID NO: 3402536 - RNA, 22 nt, Human
gaacacuggcagacuguguaaa

SEQ ID NO: 3402537 - RNA, 18 nt, Human
gaacacugggggagggga

SEQ ID NO: 3402538 - RNA, 16 nt, Human
gaacacuuauugcuuu

SEQ ID NO: 3402539 - RNA, 21 nt, Human
gacaauaauauuguuguauaa

SEQ ID NO: 3402540 - RNA, 14 nt, Human
gacaauagaacauu

SEQ ID NO: 3402541 - RNA, 17 nt, Human
gacaaucaacucuaaua

SEQ ID NO: 3402542 - RNA, 20 nt, Human
gacaaucaguccccucccau

SEQ ID NO: 3402543 - RNA, 13 nt, Human
gacaaucaugugu

SEQ ID NO: 3402544 - RNA, 17 nt, Human
gacaaucauuguuuuga

SEQ ID NO: 3402545 - RNA, 13 nt, Human
gacaaucuucugu

SEQ ID NO: 3402546 - RNA, 20 nt, Human
gacaaugacuuacuguacau

SEQ ID NO: 3402547 - RNA, 12 nt, Human
gacaaugcaaac

SEQ ID NO: 3402548 - RNA, 16 nt, Human
gacaaugcaaaccauc

SEQ ID NO: 3402549 - RNA, 20 nt, Human
gacaaugcagaugccagagc

SEQ ID NO: 3402550 - RNA, 20 nt, Human
gacaauggacccuuuuuguu

SEQ ID NO: 3402551 - RNA, 17 nt, Human
gacaaugucugcagccc

SEQ ID NO: 3402552 - RNA, 20 nt, Human
gacaaugugaaaagaaaaau

SEQ ID NO: 3402553 - RNA, 13 nt, Human
gacaauucaugaa

SEQ ID NO: 3402554 - RNA, 23 nt, Human
gacaauuccuagauaaaaagaug

SEQ ID NO: 3402555 - RNA, 13 nt, Human
gacaauucuguuu

SEQ ID NO: 3402556 - RNA, 12 nt, Human
gacaauuuauua

SEQ ID NO: 3402557 - RNA, 13 nt, Human
gacacaaaaaaag

SEQ ID NO: 3402558 - RNA, 18 nt, Human
gacacaaaacuccgcccc

SEQ ID NO: 3402559 - RNA, 23 nt, Human
gacacaaaacuccgcccccagcc

SEQ ID NO: 3402560 - RNA, 23 nt, Human
gacacaaacaaacaagcuaggug

SEQ ID NO: 3402561 - RNA, 19 nt, Human
gacacaaacacacacaaaa

SEQ ID NO: 3402562 - RNA, 18 nt, Human
gacacaaaccugccuggg

SEQ ID NO: 3402563 - RNA, 22 nt, Human
gacacaagccuucggcgccuua

SEQ ID NO: 3402564 - RNA, 14 nt, Human
gacacacaaagcag

SEQ ID NO: 3402565 - RNA, 22 nt, Human
gacacacacacgcacgcacaca

SEQ ID NO: 3402566 - RNA, 23 nt, Human
gacacacacacgcacgcacacac

SEQ ID NO: 3402567 - RNA, 16 nt, Human
gacacacuacaccaca

SEQ ID NO: 3402568 - RNA, 20 nt, Human
gacacacuacaccacacaca

SEQ ID NO: 3402569 - RNA, 12 nt, Human
gacacagacuca

SEQ ID NO: 3402570 - RNA, 11 nt, Human
gacacagcagc

SEQ ID NO: 3402571 - RNA, 20 nt, Human
gacacagcagcuucaccaga

SEQ ID NO: 3402572 - RNA, 22 nt, Human
gacacagcagcuucaccagagc

SEQ ID NO: 3402573 - RNA, 20 nt, Human
gacacagcucuucuccaggc

SEQ ID NO: 3402574 - RNA, 23 nt, Human
gacacagcucuucuccaggcugu

SEQ ID NO: 3402575 - RNA, 20 nt, Human
gacacaggaugaaggcaaug

SEQ ID NO: 3402576 - RNA, 12 nt, Human
gacacaggcccg

SEQ ID NO: 3402577 - RNA, 20 nt, Human
gacacaggcccggcuccagg

SEQ ID NO: 3402578 - RNA, 21 nt, Human
gacacaggcccggcuccaggc

SEQ ID NO: 3402579 - RNA, 14 nt, Human
gacacaggccugug

SEQ ID NO: 3402580 - RNA, 17 nt, Human
gacacaggccuguguag

SEQ ID NO: 3402581 - RNA, 16 nt, Human
gacacagggacuugaa

SEQ ID NO: 3402582 - RNA, 18 nt, Human
gacacagggacuugaagu

SEQ ID NO: 3402583 - RNA, 20 nt, Human
gacacagggacuugaaguug

SEQ ID NO: 3402584 - RNA, 16 nt, Human
gacacaggucuuuccu

SEQ ID NO: 3402585 - RNA, 13 nt, Human
gacacaguuccug

SEQ ID NO: 3402586 - RNA, 23 nt, Human
gacacauccgccuuuuguauaca

SEQ ID NO: 3402587 - RNA, 19 nt, Human
gacacaugaagguaaauaa

SEQ ID NO: 3402588 - RNA, 14 nt, Human
gacacaugcaaggu

SEQ ID NO: 3402589 - RNA, 19 nt, Human
gacacaugcaaggucauuu

SEQ ID NO: 3402590 - RNA, 14 nt, Human
gacaccaaaguucu

SEQ ID NO: 3402591 - RNA, 13 nt, Human
gacaccagagcag

SEQ ID NO: 3402592 - RNA, 18 nt, Human
gacaccagagcagaugca

SEQ ID NO: 3402593 - RNA, 15 nt, Human
gacaccagccaggcu

SEQ ID NO: 3402594 - RNA, 23 nt, Human
gacaccagccaggcucugugcug

SEQ ID NO: 3402595 - RNA, 19 nt, Human
gacaccaggagucccuggu

SEQ ID NO: 3402596 - RNA, 20 nt, Human
gacaccaggagucccuggua

SEQ ID NO: 3402597 - RNA, 22 nt, Human
gacaccaucuuuugugagaugu

SEQ ID NO: 3402598 - RNA, 15 nt, Human
gacaccccacuuagc

SEQ ID NO: 3402599 - RNA, 18 nt, Human
gacaccccuuauccagga

SEQ ID NO: 3402600 - RNA, 12 nt, Human
gacacccuguga

SEQ ID NO: 3402601 - RNA, 16 nt, Human
gacaccgccacauggc

SEQ ID NO: 3402602 - RNA, 20 nt, Human
gacaccgggguggugggaac

SEQ ID NO: 3402603 - RNA, 18 nt, Human
gacaccuaacucuucuuu

SEQ ID NO: 3402604 - RNA, 17 nt, Human
gacaccugaacccucca

SEQ ID NO: 3402605 - RNA, 13 nt, Human
gacaccugcaccu

SEQ ID NO: 3402606 - RNA, 20 nt, Human
gacaccugcaccucccccca

SEQ ID NO: 3402607 - RNA, 12 nt, Human
gacaccugcccu

SEQ ID NO: 3402608 - RNA, 13 nt, Human
gacaccugcccug

SEQ ID NO: 3402609 - RNA, 16 nt, Human
gacaccugcccugccc

SEQ ID NO: 3402610 - RNA, 18 nt, Human
gacaccuugacagggcac

SEQ ID NO: 3402611 - RNA, 20 nt, Human
gacaccuuucagucucuuuu

SEQ ID NO: 3402612 - RNA, 12 nt, Human
gacaccuuucau

SEQ ID NO: 3402613 - RNA, 17 nt, Human
gacaccuuugcaggcau

SEQ ID NO: 3402614 - RNA, 19 nt, Human
gacaccuuuuuucaacagu

SEQ ID NO: 3402615 - RNA, 19 nt, Human
gacacgaauauugcugaug

SEQ ID NO: 3402616 - RNA, 19 nt, Human
gacacgcacggcagccaca

SEQ ID NO: 3402617 - RNA, 17 nt, Human
gacacgccuuccccuca

SEQ ID NO: 3402618 - RNA, 21 nt, Human
gacacgccuuccccucagcca

SEQ ID NO: 3402619 - RNA, 21 nt, Human
gacacgcgccccccucccaga

SEQ ID NO: 3402620 - RNA, 23 nt, Human
gacacgcucccucccccugcccc

SEQ ID NO: 3402621 - RNA, 15 nt, Human
gacacggagcccagc

SEQ ID NO: 3402622 - RNA, 18 nt, Human
gacacgggccuguccaca

SEQ ID NO: 3402623 - RNA, 19 nt, Human
gacacggucggggcaucug

SEQ ID NO: 3402624 - RNA, 20 nt, Human
gacacgugggcuccccucuu

SEQ ID NO: 3402625 - RNA, 23 nt, Human
gacacgugggcuccccucuuccu

SEQ ID NO: 3402626 - RNA, 18 nt, Human
gacacuaaccacgcugga

SEQ ID NO: 3402627 - RNA, 18 nt, Human
gacacuaaguuauaguau

SEQ ID NO: 3402628 - RNA, 13 nt, Human
gacacuagaagau

SEQ ID NO: 3402629 - RNA, 18 nt, Human
gacacuagcccaaugaaa

SEQ ID NO: 3402630 - RNA, 19 nt, Human
gacacucagaccagagaag

SEQ ID NO: 3402631 - RNA, 15 nt, Human
gacacuccagggaca

SEQ ID NO: 3402632 - RNA, 13 nt, Human
gacacucccaccc

SEQ ID NO: 3402633 - RNA, 23 nt, Human
gacacucccacccagucucugcu

SEQ ID NO: 3402634 - RNA, 14 nt, Human
gacacuccuagaga

SEQ ID NO: 3402635 - RNA, 21 nt, Human
gacacucgaggucgggcagca

SEQ ID NO: 3402636 - RNA, 20 nt, Human
gacacucuauaagauuccaa

SEQ ID NO: 3402637 - RNA, 15 nt, Human
gacacucuccuugca

SEQ ID NO: 3402638 - RNA, 19 nt, Human
gacacucuccuugcaguuc

SEQ ID NO: 3402639 - RNA, 13 nt, Human
gacacucugcucu

SEQ ID NO: 3402640 - RNA, 20 nt, Human
gacacugaaaguuuuguaaa

SEQ ID NO: 3402641 - RNA, 13 nt, Human
gacacugaaauaa

SEQ ID NO: 3402642 - RNA, 12 nt, Human
gacacugaaaug

SEQ ID NO: 3402643 - RNA, 15 nt, Human
gacacugaugggcaa

SEQ ID NO: 3402644 - RNA, 21 nt, Human
gacacugcucuaacagcccuc

SEQ ID NO: 3402645 - RNA, 16 nt, Human
gacacugggaggccag

SEQ ID NO: 3402646 - RNA, 20 nt, Human
gacacuggugccaugucagc

SEQ ID NO: 3402647 - RNA, 19 nt, Human
gacacugguuuacacuuua

SEQ ID NO: 3402648 - RNA, 16 nt, Human
gacacugguuugaaga

SEQ ID NO: 3402649 - RNA, 12 nt, Human
gacacuguucuu

SEQ ID NO: 3402650 - RNA, 17 nt, Human
gacacuguugauaaaaa

SEQ ID NO: 3402651 - RNA, 19 nt, Human
gacacuguuuacaagaaaa

SEQ ID NO: 3402652 - RNA, 16 nt, Human
gacacuuaaaaauggu

SEQ ID NO: 3402653 - RNA, 21 nt, Human
gacacuucaaggugacagaag

SEQ ID NO: 3402654 - RNA, 19 nt, Human
gacacuucccucuguuucu

SEQ ID NO: 3402655 - RNA, 21 nt, Human
gacacuucccucuguuucucu

SEQ ID NO: 3402656 - RNA, 13 nt, Human
gacacuuccugcc

SEQ ID NO: 3402657 - RNA, 15 nt, Human
gacacuuccugccua

SEQ ID NO: 3402658 - RNA, 15 nt, Human
gacacuugccuucuu

SEQ ID NO: 3402659 - RNA, 20 nt, Human
gacacuuugaaauguguuuc

SEQ ID NO: 3402660 - RNA, 21 nt, Human
gacacuuugaaauguguuucu

SEQ ID NO: 3402661 - RNA, 17 nt, Human
gacacuuuucauaucau

SEQ ID NO: 3402662 - RNA, 21 nt, Human
gacagaaaggagaguggccau

SEQ ID NO: 3402663 - RNA, 14 nt, Human
gacagaacacuguc

SEQ ID NO: 3402664 - RNA, 13 nt, Human
gacagaagcaggc

SEQ ID NO: 3402665 - RNA, 19 nt, Human
gacagaaggcuccugcccc

SEQ ID NO: 3402666 - RNA, 20 nt, Human
gacagaaggcuccugccccc

SEQ ID NO: 3402667 - RNA, 17 nt, Human
gacagaagucuccucaa

SEQ ID NO: 3402668 - RNA, 15 nt, Human
gacagaaguuugcac

SEQ ID NO: 3402669 - RNA, 18 nt, Human
gacagaauuuuuuuuguu

SEQ ID NO: 3402670 - RNA, 15 nt, Human
gacagacacacacac

SEQ ID NO: 3402671 - RNA, 12 nt, Human
gacagacacagg

SEQ ID NO: 3402672 - RNA, 14 nt, Human
gacagacacaggcc

SEQ ID NO: 3402673 - RNA, 15 nt, Human
gacagacagcccucc

SEQ ID NO: 3402674 - RNA, 19 nt, Human
gacagacuccugaggacag

SEQ ID NO: 3402675 - RNA, 23 nt, Human
gacagacuccugaggacagcugu

SEQ ID NO: 3402676 - RNA, 18 nt, Human
gacagacuugagaacuug

SEQ ID NO: 3402677 - RNA, 22 nt, Human
gacagagaauaugucugcuccu

SEQ ID NO: 3402678 - RNA, 22 nt, Human
gacagagacaccugcaccuccc

SEQ ID NO: 3402679 - RNA, 14 nt, Human
gacagagagagaga

SEQ ID NO: 3402680 - RNA, 16 nt, Human
gacagagaggacugua

SEQ ID NO: 3402681 - RNA, 20 nt, Human
gacagagcaaccccuggacc

SEQ ID NO: 3402682 - RNA, 13 nt, Human
gacagagccagga

SEQ ID NO: 3402683 - RNA, 16 nt, Human
gacagagccaggagaa

SEQ ID NO: 3402684 - RNA, 13 nt, Human
gacagagccaugc

SEQ ID NO: 3402685 - RNA, 18 nt, Human
gacagagcgacagagcag

SEQ ID NO: 3402686 - RNA, 20 nt, Human
gacagagcugguugggaaga

SEQ ID NO: 3402687 - RNA, 17 nt, Human
gacagaggcagccccau

SEQ ID NO: 3402688 - RNA, 19 nt, Human
gacagaggccccagccucc

SEQ ID NO: 3402689 - RNA, 12 nt, Human
gacagaggccug

SEQ ID NO: 3402690 - RNA, 13 nt, Human
gacagaggccugc

SEQ ID NO: 3402691 - RNA, 13 nt, Human
gacagagggaaga

SEQ ID NO: 3402692 - RNA, 19 nt, Human
gacagagggaagaaaagag

SEQ ID NO: 3402693 - RNA, 15 nt, Human
gacagaggggacucu

SEQ ID NO: 3402694 - RNA, 21 nt, Human
gacagaggggguggccuccca

SEQ ID NO: 3402695 - RNA, 21 nt, Human
gacagagucucacuguugccc

SEQ ID NO: 3402696 - RNA, 15 nt, Human
gacagagucugggug

SEQ ID NO: 3402697 - RNA, 19 nt, Human
gacagagugagacucuguc

SEQ ID NO: 3402698 - RNA, 19 nt, Human
gacagaucaagcugugaga

SEQ ID NO: 3402699 - RNA, 23 nt, Human
gacagauccccguuccugacauc

SEQ ID NO: 3402700 - RNA, 20 nt, Human
gacagaugaggcuuuccaug

SEQ ID NO: 3402701 - RNA, 14 nt, Human
gacagaugccuccu

SEQ ID NO: 3402702 - RNA, 17 nt, Human
gacagauucagucuugc

SEQ ID NO: 3402703 - RNA, 19 nt, Human
gacagcaaaaccauugcuu

SEQ ID NO: 3402704 - RNA, 20 nt, Human
gacagcaaaaccauugcuuc

SEQ ID NO: 3402705 - RNA, 18 nt, Human
gacagcaaccuguagagu

SEQ ID NO: 3402706 - RNA, 19 nt, Human
gacagcaacggggaggcca

SEQ ID NO: 3402707 - RNA, 14 nt, Human
gacagcagaacugc

SEQ ID NO: 3402708 - RNA, 14 nt, Human
gacagcagcaucuc

SEQ ID NO: 3402709 - RNA, 16 nt, Human
gacagcagcaucucua

SEQ ID NO: 3402710 - RNA, 13 nt, Human
gacagcagcucag

SEQ ID NO: 3402711 - RNA, 16 nt, Human
gacagcagcucaggca

SEQ ID NO: 3402712 - RNA, 20 nt, Human
gacagcagcucaggcacacu

SEQ ID NO: 3402713 - RNA, 14 nt, Human
gacagcaggcagcg

SEQ ID NO: 3402714 - RNA, 16 nt, Human
gacagcaggugggaaa

SEQ ID NO: 3402715 - RNA, 12 nt, Human
gacagcaugaga

SEQ ID NO: 3402716 - RNA, 13 nt, Human
gacagcauggugc

SEQ ID NO: 3402717 - RNA, 20 nt, Human
gacagcaugugcccuccuga

SEQ ID NO: 3402718 - RNA, 16 nt, Human
gacagcauuuuccucu

SEQ ID NO: 3402719 - RNA, 20 nt, Human
gacagcauuuuccucugcuu

SEQ ID NO: 3402720 - RNA, 23 nt, Human
gacagcauuuuccucugcuuuga

SEQ ID NO: 3402721 - RNA, 16 nt, Human
gacagccaaaggcugg

SEQ ID NO: 3402722 - RNA, 13 nt, Human
gacagccacggcc

SEQ ID NO: 3402723 - RNA, 17 nt, Human
gacagccacggccaggc

SEQ ID NO: 3402724 - RNA, 22 nt, Human
gacagcccaggauacuggcaca

SEQ ID NO: 3402725 - RNA, 14 nt, Human
gacagccccagagc

SEQ ID NO: 3402726 - RNA, 16 nt, Human
gacagccccagagcag

SEQ ID NO: 3402727 - RNA, 17 nt, Human
gacagccccagagcagg

SEQ ID NO: 3402728 - RNA, 17 nt, Human
gacagcccgggcucugc

SEQ ID NO: 3402729 - RNA, 20 nt, Human
gacagcccgggcucugccuc

SEQ ID NO: 3402730 - RNA, 16 nt, Human
gacagccucccacccc

SEQ ID NO: 3402731 - RNA, 18 nt, Human
gacagccucccccugucc

SEQ ID NO: 3402732 - RNA, 23 nt, Human
gacagccuguggcggugccuggg

SEQ ID NO: 3402733 - RNA, 12 nt, Human
gacagcuccacc

SEQ ID NO: 3402734 - RNA, 18 nt, Human
gacagcuccacccuggcc

SEQ ID NO: 3402735 - RNA, 16 nt, Human
gacagcucccucugcc

SEQ ID NO: 3402736 - RNA, 17 nt, Human
gacagcucccucugccu

SEQ ID NO: 3402737 - RNA, 17 nt, Human
gacagcuccuucugucc

SEQ ID NO: 3402738 - RNA, 16 nt, Human
gacagcugccugggau

SEQ ID NO: 3402739 - RNA, 18 nt, Human
gacagcugccugggaucc

SEQ ID NO: 3402740 - RNA, 11 nt, Human
gacagcugcuc

SEQ ID NO: 3402741 - RNA, 14 nt, Human
gacagcugcuccua

SEQ ID NO: 3402742 - RNA, 20 nt, Human
gacagcugcuccuagaggga

SEQ ID NO: 3402743 - RNA, 21 nt, Human
gacagcugcuccuagagggag

SEQ ID NO: 3402744 - RNA, 19 nt, Human
gacagcugucccugucacc

SEQ ID NO: 3402745 - RNA, 19 nt, Human
gacagcugugccucgcucc

SEQ ID NO: 3402746 - RNA, 17 nt, Human
gacagcuuagaauuauu

SEQ ID NO: 3402747 - RNA, 22 nt, Human
gacagcuucucauccugcaggc

SEQ ID NO: 3402748 - RNA, 15 nt, Human
gacagcuugagccgg

SEQ ID NO: 3402749 - RNA, 12 nt, Human
gacagcuuugcu

SEQ ID NO: 3402750 - RNA, 19 nt, Human
gacaggaaaauccucuggc

SEQ ID NO: 3402751 - RNA, 22 nt, Human
gacaggaaccuuaaguaaucau

SEQ ID NO: 3402752 - RNA, 22 nt, Human
gacaggacagugcuucagccug

SEQ ID NO: 3402753 - RNA, 14 nt, Human
gacaggaccaggga

SEQ ID NO: 3402754 - RNA, 21 nt, Human
gacaggaccccugcaguuccc

SEQ ID NO: 3402755 - RNA, 13 nt, Human
gacaggaccugac

SEQ ID NO: 3402756 - RNA, 21 nt, Human
gacaggacuaacacucagaag

SEQ ID NO: 3402757 - RNA, 20 nt, Human
gacaggagaaacacuugaac

SEQ ID NO: 3402758 - RNA, 12 nt, Human
gacaggagaaau

SEQ ID NO: 3402759 - RNA, 18 nt, Human
gacaggauccaggccggc

SEQ ID NO: 3402760 - RNA, 23 nt, Human
gacaggaugguucccuugaugaa

SEQ ID NO: 3402761 - RNA, 19 nt, Human
gacaggauguguuugcuuu

SEQ ID NO: 3402762 - RNA, 20 nt, Human
gacaggcaagcaccuccugc

SEQ ID NO: 3402763 - RNA, 18 nt, Human
gacaggcaaugcuggcug

SEQ ID NO: 3402764 - RNA, 14 nt, Human
gacaggcagaaaga

SEQ ID NO: 3402765 - RNA, 14 nt, Human
gacaggcagagcug

SEQ ID NO: 3402766 - RNA, 13 nt, Human
gacaggcagcaga

SEQ ID NO: 3402767 - RNA, 15 nt, Human
gacaggccucaccuc

SEQ ID NO: 3402768 - RNA, 17 nt, Human
gacaggcgaaagaaaac

SEQ ID NO: 3402769 - RNA, 17 nt, Human
gacaggcucuuagcagc

SEQ ID NO: 3402770 - RNA, 19 nt, Human
gacaggcucuuagcagcuu

SEQ ID NO: 3402771 - RNA, 22 nt, Human
gacaggcugcggccccuccccc

SEQ ID NO: 3402772 - RNA, 12 nt, Human
gacaggcuggcu

SEQ ID NO: 3402773 - RNA, 14 nt, Human
gacagggaagcuac

SEQ ID NO: 3402774 - RNA, 17 nt, Human
gacagggaagcuacagg

SEQ ID NO: 3402775 - RNA, 24 nt, Human
gacagggcacaccgggcacucaga

SEQ ID NO: 3402776 - RNA, 18 nt, Human
gacagggccagugcaguu

SEQ ID NO: 3402777 - RNA, 20 nt, Human
gacagggccaguggggccug

SEQ ID NO: 3402778 - RNA, 21 nt, Human
gacagggccaguggggccugu

SEQ ID NO: 3402779 - RNA, 22 nt, Human
gacagggccaguggggccugug

SEQ ID NO: 3402780 - RNA, 17 nt, Human
gacagggcggggguggc

SEQ ID NO: 3402781 - RNA, 19 nt, Human
gacagggcggggguggcgg

SEQ ID NO: 3402782 - RNA, 15 nt, Human
gacagggcuggccca

SEQ ID NO: 3402783 - RNA, 21 nt, Human
gacagggcuggcccagcccug

SEQ ID NO: 3402784 - RNA, 18 nt, Human
gacaggggcaggaggaag

SEQ ID NO: 3402785 - RNA, 21 nt, Human
gacagggguuccuucugggca

SEQ ID NO: 3402786 - RNA, 13 nt, Human
gacaggguccugc

SEQ ID NO: 3402787 - RNA, 20 nt, Human
gacaggguuuggcugugucu

SEQ ID NO: 3402788 - RNA, 22 nt, Human
gacagguuugggaccccuggug

SEQ ID NO: 3402789 - RNA, 15 nt, Human
gacaguaacuugguu

SEQ ID NO: 3402790 - RNA, 20 nt, Human
gacaguaauuguguuuacau

SEQ ID NO: 3402791 - RNA, 22 nt, Human
gacaguaauuguguuuacauuu

SEQ ID NO: 3402792 - RNA, 15 nt, Human
gacaguauacagucc

SEQ ID NO: 3402793 - RNA, 15 nt, Human
gacaguaucccacau

SEQ ID NO: 3402794 - RNA, 22 nt, Human
gacaguaugagucaaugugcag

SEQ ID NO: 3402795 - RNA, 20 nt, Human
gacaguauggcagcuuuccu

SEQ ID NO: 3402796 - RNA, 15 nt, Human
gacaguauuuguggg

SEQ ID NO: 3402797 - RNA, 15 nt, Human
gacagucaaaaccaa

SEQ ID NO: 3402798 - RNA, 23 nt, Human
gacagucacugccacuuugcaca

SEQ ID NO: 3402799 - RNA, 18 nt, Human
gacagucaucaucagggc

SEQ ID NO: 3402800 - RNA, 22 nt, Human
gacagucaucaucagggccugg

SEQ ID NO: 3402801 - RNA, 23 nt, Human
gacagucaucaucagggccuggg

SEQ ID NO: 3402802 - RNA, 14 nt, Human
gacagucccugcca

SEQ ID NO: 3402803 - RNA, 15 nt, Human
gacagucccugccaa

SEQ ID NO: 3402804 - RNA, 21 nt, Human
gacaguccgucaaaacagauu

SEQ ID NO: 3402805 - RNA, 13 nt, Human
gacaguccuggga

SEQ ID NO: 3402806 - RNA, 23 nt, Human
gacagucugcucuagaugagcug

SEQ ID NO: 3402807 - RNA, 16 nt, Human
gacagugaucuccaua

SEQ ID NO: 3402808 - RNA, 15 nt, Human
gacagugcacaugaa

SEQ ID NO: 3402809 - RNA, 16 nt, Human
gacagugcacaugaac

SEQ ID NO: 3402810 - RNA, 16 nt, Human
gacagugccuauacug

SEQ ID NO: 3402811 - RNA, 13 nt, Human
gacagugccuggg

SEQ ID NO: 3402812 - RNA, 22 nt, Human
gacagugccugggaauguauua

SEQ ID NO: 3402813 - RNA, 21 nt, Human
gacagugcugcagcucccugg

SEQ ID NO: 3402814 - RNA, 19 nt, Human
gacagugcuucagccugag

SEQ ID NO: 3402815 - RNA, 20 nt, Human
gacaguggauugcauuucuu

SEQ ID NO: 3402816 - RNA, 13 nt, Human
gacagugggaaau

SEQ ID NO: 3402817 - RNA, 20 nt, Human
gacaguguuccccgauacca

SEQ ID NO: 3402818 - RNA, 17 nt, Human
gacaguucacacccugc

SEQ ID NO: 3402819 - RNA, 19 nt, Human
gacaguucauucagggccg

SEQ ID NO: 3402820 - RNA, 19 nt, Human
gacaguugggugagaacaa

SEQ ID NO: 3402821 - RNA, 13 nt, Human
gacaguuggguuu

SEQ ID NO: 3402822 - RNA, 17 nt, Human
gacaguuggguuuuuua

SEQ ID NO: 3402823 - RNA, 21 nt, Human
gacaguuuaccaguugccuuu

SEQ ID NO: 3402824 - RNA, 17 nt, Human
gacaguuuaucaugaag

SEQ ID NO: 3402825 - RNA, 21 nt, Human
gacaguuuaucaugaagccug

SEQ ID NO: 3402826 - RNA, 12 nt, Human
gacaguuucuua

SEQ ID NO: 3402827 - RNA, 16 nt, Human
gacccaugggcaggag

SEQ ID NO: 3402828 - RNA, 20 nt, Human
gacccaugggcaggagacug

SEQ ID NO: 3402829 - RNA, 22 nt, Human
gacccauguaaauaccagacug

SEQ ID NO: 3402830 - RNA, 16 nt, Human
gacccauuccuuccca

SEQ ID NO: 3402831 - RNA, 13 nt, Human
gacccauugcugu

SEQ ID NO: 3402832 - RNA, 23 nt, Human
gaccccaaacaccuuccagcucc

SEQ ID NO: 3402833 - RNA, 19 nt, Human
gaccccaaagagccuggag

SEQ ID NO: 3402834 - RNA, 21 nt, Human
gaccccaaagagccuggagaa

SEQ ID NO: 3402835 - RNA, 19 nt, Human
gaccccacccaagcuuggc

SEQ ID NO: 3402836 - RNA, 20 nt, Human
gaccccacccaagcuuggca

SEQ ID NO: 3402837 - RNA, 12 nt, Human
gaccccagagga

SEQ ID NO: 3402838 - RNA, 15 nt, Human
gaccccagccaucca

SEQ ID NO: 3402839 - RNA, 12 nt, Human
gaccccagccuc

SEQ ID NO: 3402840 - RNA, 19 nt, Human
gaccccagcggcugaguca

SEQ ID NO: 3402841 - RNA, 12 nt, Human
gaccccagcucu

SEQ ID NO: 3402842 - RNA, 15 nt, Human
gaccccagcugggag

SEQ ID NO: 3402843 - RNA, 18 nt, Human
gaccccaggcccacucag

SEQ ID NO: 3402844 - RNA, 19 nt, Human
gaccccaggcccacucagg

SEQ ID NO: 3402845 - RNA, 17 nt, Human
gaccccaggcuggacau

SEQ ID NO: 3402846 - RNA, 14 nt, Human
gaccccagggcaca

SEQ ID NO: 3402847 - RNA, 21 nt, Human
gaccccagggcacaggagcua

SEQ ID NO: 3402848 - RNA, 15 nt, Human
gaccccaucugccca

SEQ ID NO: 3402849 - RNA, 16 nt, Human
gaccccaucugugaau

SEQ ID NO: 3402850 - RNA, 15 nt, Human
gacccccaccccuuc

SEQ ID NO: 3402851 - RNA, 18 nt, Human
gacccccaccccuucccc

SEQ ID NO: 3402852 - RNA, 20 nt, Human
gacccccagcaacccuccua

SEQ ID NO: 3402853 - RNA, 16 nt, Human
gacccccaucccaugg

SEQ ID NO: 3402854 - RNA, 15 nt, Human
gaccccccuuucaca

SEQ ID NO: 3402855 - RNA, 19 nt, Human
gaccccccuuucacaggca

SEQ ID NO: 3402856 - RNA, 20 nt, Human
gaccccccuuucacaggcag

SEQ ID NO: 3402857 - RNA, 19 nt, Human
gacccccgcccccugcccu

SEQ ID NO: 3402858 - RNA, 20 nt, Human
gaccccgagccuggcuccaa

SEQ ID NO: 3402859 - RNA, 22 nt, Human
gaccccgguggcggccccagca

SEQ ID NO: 3402860 - RNA, 18 nt, Human
gaccccuaguucccucug

SEQ ID NO: 3402861 - RNA, 14 nt, Human
gaccccucaccuug

SEQ ID NO: 3402862 - RNA, 17 nt, Human
gaccccuccucacuggc

SEQ ID NO: 3402863 - RNA, 23 nt, Human
gaccccuccucacuggccauccc

SEQ ID NO: 3402864 - RNA, 12 nt, Human
gaccccuccugg

SEQ ID NO: 3402865 - RNA, 13 nt, Human
gaccccuccuggg

SEQ ID NO: 3402866 - RNA, 15 nt, Human
gaccccucuggccag

SEQ ID NO: 3402867 - RNA, 11 nt, Human
gaccccugcau

SEQ ID NO: 3402868 - RNA, 13 nt, Human
gaccccuggcuuu

SEQ ID NO: 3402869 - RNA, 11 nt, Human
gacccggaggc

SEQ ID NO: 3402870 - RNA, 13 nt, Human
gacccggaggcca

SEQ ID NO: 3402871 - RNA, 14 nt, Human
gacccggaggccac

SEQ ID NO: 3402872 - RNA, 17 nt, Human
gacccggaggccacaug

SEQ ID NO: 3402873 - RNA, 23 nt, Human
gacccggaggccacaugaguccc

SEQ ID NO: 3402874 - RNA, 18 nt, Human
gacccggaggccgaggcc

SEQ ID NO: 3402875 - RNA, 19 nt, Human
gacccggcacccccugcag

SEQ ID NO: 3402876 - RNA, 18 nt, Human
gacccgucuccagcugcu

SEQ ID NO: 3402877 - RNA, 19 nt, Human
gacccguucaugggggagg

SEQ ID NO: 3402878 - RNA, 15 nt, Human
gacccuaaaucugag

SEQ ID NO: 3402879 - RNA, 18 nt, Human
gacccuaagaccggcggc

SEQ ID NO: 3402880 - RNA, 22 nt, Human
gacccuacucccuugcccuaga

SEQ ID NO: 3402881 - RNA, 21 nt, Human
gacccuacuuccugcacugac

SEQ ID NO: 3402882 - RNA, 12 nt, Human
gacccucaugcu

SEQ ID NO: 3402883 - RNA, 17 nt, Human
gacccucaugcugccaa

SEQ ID NO: 3402884 - RNA, 18 nt, Human
gacccucaugcugccaau

SEQ ID NO: 3402885 - RNA, 20 nt, Human
gacccuccaaggccaggccu

SEQ ID NO: 3402886 - RNA, 22 nt, Human
gacccuccaaggccaggccuug

SEQ ID NO: 3402887 - RNA, 20 nt, Human
gacccuccuguugcacccag

SEQ ID NO: 3402888 - RNA, 21 nt, Human
gacccuccuguugcacccagc

SEQ ID NO: 3402889 - RNA, 22 nt, Human
gacccuccuguugcacccagcc

SEQ ID NO: 3402890 - RNA, 15 nt, Human
gacccucgcuggccc

SEQ ID NO: 3402891 - RNA, 15 nt, Human
gacccucguggccuu

SEQ ID NO: 3402892 - RNA, 20 nt, Human
gacccucugaaugguccagg

SEQ ID NO: 3402893 - RNA, 20 nt, Human
gacccucugccaccagagac

SEQ ID NO: 3402894 - RNA, 16 nt, Human
gacccucugcugaaga

SEQ ID NO: 3402895 - RNA, 17 nt, Human
gacccucugcugaagac

SEQ ID NO: 3402896 - RNA, 17 nt, Human
gacccucuugcccaucc

SEQ ID NO: 3402897 - RNA, 20 nt, Human
gacccugaaaugugugugau

SEQ ID NO: 3402898 - RNA, 10 nt, Human
gacccugagg

SEQ ID NO: 3402899 - RNA, 12 nt, Human
gacccugaggcc

SEQ ID NO: 3402900 - RNA, 16 nt, Human
gacccugaggcccaga

SEQ ID NO: 3402901 - RNA, 20 nt, Human
gacccugaggcccagagggc

SEQ ID NO: 3402902 - RNA, 22 nt, Human
gacccugaggcccagagggccu

SEQ ID NO: 3402903 - RNA, 18 nt, Human
gacccugcaaacagaaca

SEQ ID NO: 3402904 - RNA, 19 nt, Human
gacccugcaaacagaacag

SEQ ID NO: 3402905 - RNA, 15 nt, Human
gacccugcagagaug

SEQ ID NO: 3402906 - RNA, 18 nt, Human
gacccugccaggcacagg

SEQ ID NO: 3402907 - RNA, 11 nt, Human
gacccugcccu

SEQ ID NO: 3402908 - RNA, 15 nt, Human
gacccugcccugugg

SEQ ID NO: 3402909 - RNA, 20 nt, Human
gacccugcccugugggcccc

SEQ ID NO: 3402910 - RNA, 15 nt, Human
gacccugcccuuguu

SEQ ID NO: 3402911 - RNA, 22 nt, Human
gacccugcgaaggggcccuggu

SEQ ID NO: 3402912 - RNA, 17 nt, Human
gacccugggcagggacu

SEQ ID NO: 3402913 - RNA, 16 nt, Human
gacccuggggcuggcu

SEQ ID NO: 3402914 - RNA, 21 nt, Human
gacccugggggcacaggaggc

SEQ ID NO: 3402915 - RNA, 22 nt, Human
gacccugggugggcucugugca

SEQ ID NO: 3402916 - RNA, 17 nt, Human
gacccuggugccuggcu

SEQ ID NO: 3402917 - RNA, 12 nt, Human
gacccugucucu

SEQ ID NO: 3402918 - RNA, 16 nt, Human
gacccuuauugcuguc

SEQ ID NO: 3402919 - RNA, 20 nt, Human
gacccuuauugcuguccugg

SEQ ID NO: 3402920 - RNA, 15 nt, Human
gacccuuccagacau

SEQ ID NO: 3402921 - RNA, 22 nt, Human
gacccuucccaaucagcacuga

SEQ ID NO: 3402922 - RNA, 20 nt, Human
gacccuugccgucuaccuga

SEQ ID NO: 3402923 - RNA, 23 nt, Human
gacccuuuagccaaacccuuguc

SEQ ID NO: 3402924 - RNA, 21 nt, Human
gacccuuuccuuccuucccug

SEQ ID NO: 3402925 - RNA, 12 nt, Human
gacccuuugggg

SEQ ID NO: 3402926 - RNA, 19 nt, Human
gaccgaacuguuguauaaa

SEQ ID NO: 3402927 - RNA, 17 nt, Human
gaccgaggcuggagcug

SEQ ID NO: 3402928 - RNA, 12 nt, Human
gaccgcccccuc

SEQ ID NO: 3402929 - RNA, 18 nt, Human
gaccgcccuuuuccccua

SEQ ID NO: 3402930 - RNA, 16 nt, Human
gaccggaagcuccugg

SEQ ID NO: 3402931 - RNA, 17 nt, Human
gaccggagagugggggu

SEQ ID NO: 3402932 - RNA, 21 nt, Human
gaccggaggcaaaaggcagug

SEQ ID NO: 3402933 - RNA, 12 nt, Human
gaccgucuuccu

SEQ ID NO: 3402934 - RNA, 16 nt, Human
gaccgugaggccagag

SEQ ID NO: 3402935 - RNA, 17 nt, Human
gaccgugaggccagaga

SEQ ID NO: 3402936 - RNA, 19 nt, Human
gaccgugaggccagagaca

SEQ ID NO: 3402937 - RNA, 17 nt, Human
gaccguggcccugcccu

SEQ ID NO: 3402938 - RNA, 17 nt, Human
gaccuaaaaauuggugu

SEQ ID NO: 3402939 - RNA, 22 nt, Human
gaccuaaaauuugcccucccau

SEQ ID NO: 3402940 - RNA, 20 nt, Human
gaccuaaauggccucaugug

SEQ ID NO: 3402941 - RNA, 17 nt, Human
gaccuaacauucgaucu

SEQ ID NO: 3402942 - RNA, 13 nt, Human
gaccuacaggggg

SEQ ID NO: 3402943 - RNA, 12 nt, Human
gaccuaccucag

SEQ ID NO: 3402944 - RNA, 15 nt, Human
gaccuaccucagguu

SEQ ID NO: 3402945 - RNA, 16 nt, Human
gaccuaccucagguug

SEQ ID NO: 3402946 - RNA, 19 nt, Human
gaccuaccucagguugcug

SEQ ID NO: 3402947 - RNA, 23 nt, Human
gaccuagggauguucuggcccuc

SEQ ID NO: 3402948 - RNA, 17 nt, Human
gaccuauaacugcccag

SEQ ID NO: 3402949 - RNA, 16 nt, Human
gaccuauaccuguguu

SEQ ID NO: 3402950 - RNA, 20 nt, Human
gaccuauaccuguguuucuu

SEQ ID NO: 3402951 - RNA, 16 nt, Human
gaccuauuccuccugg

SEQ ID NO: 3402952 - RNA, 17 nt, Human
gaccuauuccuccuggg

SEQ ID NO: 3402953 - RNA, 22 nt, Human
gaccucaaaugaugugccugcu

SEQ ID NO: 3402954 - RNA, 17 nt, Human
gaccucaagugaucugc

SEQ ID NO: 3402955 - RNA, 16 nt, Human
gaccucacagugaccc

SEQ ID NO: 3402956 - RNA, 18 nt, Human
gaccucacagugacccuu

SEQ ID NO: 3402957 - RNA, 19 nt, Human
gaccucagaguccaggccc

SEQ ID NO: 3402958 - RNA, 21 nt, Human
gaccucagaguccaggcccca

SEQ ID NO: 3402959 - RNA, 10 nt, Human
gaccucagcc

SEQ ID NO: 3402960 - RNA, 12 nt, Human
gaccucagccug

SEQ ID NO: 3402961 - RNA, 13 nt, Human
gaccucagccugu

SEQ ID NO: 3402962 - RNA, 14 nt, Human
gaccucagccugug

SEQ ID NO: 3402963 - RNA, 16 nt, Human
gaccucagcugcuucu

SEQ ID NO: 3402964 - RNA, 17 nt, Human
gaccucagcugcuucuc

SEQ ID NO: 3402965 - RNA, 19 nt, Human
gaccucaggcacuagccuu

SEQ ID NO: 3402966 - RNA, 11 nt, Human
gaccucaggcc

SEQ ID NO: 3402967 - RNA, 12 nt, Human
gaccucaggccu

SEQ ID NO: 3402968 - RNA, 22 nt, Human
gaccucagguaaucgaccugcc

SEQ ID NO: 3402969 - RNA, 18 nt, Human
gaccucaggugagaagca

SEQ ID NO: 3402970 - RNA, 13 nt, Human
gaccucaggugau

SEQ ID NO: 3402971 - RNA, 19 nt, Human
gaccucaggugauccaccc

SEQ ID NO: 3402972 - RNA, 16 nt, Human
gagcucugagaggccc

SEQ ID NO: 3402973 - RNA, 22 nt, Human
gagcucugagaggcccuggauc

SEQ ID NO: 3402974 - RNA, 23 nt, Human
gagcucugagaggcccuggauca

SEQ ID NO: 3402975 - RNA, 20 nt, Human
gagcucuggugauaaggaca

SEQ ID NO: 3402976 - RNA, 15 nt, Human
gagcucugucugucc

SEQ ID NO: 3402977 - RNA, 17 nt, Human
gagcucuucauguuuca

SEQ ID NO: 3402978 - RNA, 21 nt, Human
gagcucuuccuaucccucucc

SEQ ID NO: 3402979 - RNA, 21 nt, Human
gagcucuuggaggugucugua

SEQ ID NO: 3402980 - RNA, 22 nt, Human
gagcugaacccauuuugaguga

SEQ ID NO: 3402981 - RNA, 20 nt, Human
gagcugaagguuguggccuu

SEQ ID NO: 3402982 - RNA, 16 nt, Human
gagcugacacaggaug

SEQ ID NO: 3402983 - RNA, 12 nt, Human
gagcugagaaga

SEQ ID NO: 3402984 - RNA, 15 nt, Human
gagcugagaauagaa

SEQ ID NO: 3402985 - RNA, 10 nt, Human
gagcugagau

SEQ ID NO: 3402986 - RNA, 21 nt, Human
gagcugagaucgugcuacugc

SEQ ID NO: 3402987 - RNA, 17 nt, Human
gagcugaggcaauucua

SEQ ID NO: 3402988 - RNA, 23 nt, Human
gagcugaggggggccgugcccag

SEQ ID NO: 3402989 - RNA, 16 nt, Human
gagcugaucgcuucuc

SEQ ID NO: 3402990 - RNA, 16 nt, Human
gagcugauggagaagg

SEQ ID NO: 3402991 - RNA, 12 nt, Human
gagcugccaaga

SEQ ID NO: 3402992 - RNA, 17 nt, Human
gagcugcccacagcagg

SEQ ID NO: 3402993 - RNA, 19 nt, Human
gagcugccccucucugggc

SEQ ID NO: 3402994 - RNA, 17 nt, Human
gagcugcccucuccugg

SEQ ID NO: 3402995 - RNA, 18 nt, Human
gagcugcccucuccuggg

SEQ ID NO: 3402996 - RNA, 21 nt, Human
gagcugcccucuccugggcag

SEQ ID NO: 3402997 - RNA, 23 nt, Human
gagcugcccucuccugggcagcu

SEQ ID NO: 3402998 - RNA, 14 nt, Human
gagcugccuggacc

SEQ ID NO: 3402999 - RNA, 11 nt, Human
gagcugccuuc

SEQ ID NO: 3403000 - RNA, 22 nt, Human
gagcugccuuggcucagacaug

SEQ ID NO: 3403001 - RNA, 21 nt, Human
gagcugcuauagccuggggug

SEQ ID NO: 3403002 - RNA, 14 nt, Human
gagcugcugcccug

SEQ ID NO: 3403003 - RNA, 16 nt, Human
gagcugcuuuuuuuga

SEQ ID NO: 3403004 - RNA, 22 nt, Human
gagcuggagaugaggccagacc

SEQ ID NO: 3403005 - RNA, 15 nt, Human
gagcuggagccuggu

SEQ ID NO: 3403006 - RNA, 23 nt, Human
gagcuggccgcgccaaauaaugu

SEQ ID NO: 3403007 - RNA, 14 nt, Human
gagcugggagccgg

SEQ ID NO: 3403008 - RNA, 16 nt, Human
gagcugggagccgggc

SEQ ID NO: 3403009 - RNA, 18 nt, Human
gagcugggaggcauggcc

SEQ ID NO: 3403010 - RNA, 17 nt, Human
gagcugggcagaaggcc

SEQ ID NO: 3403011 - RNA, 14 nt, Human
gagcugggcauggu

SEQ ID NO: 3403012 - RNA, 13 nt, Human
gagcugggcccga

SEQ ID NO: 3403013 - RNA, 20 nt, Human
gagcugggcccgacauggcu

SEQ ID NO: 3403014 - RNA, 13 nt, Human
gagcugggccugg

SEQ ID NO: 3403015 - RNA, 14 nt, Human
gagcugggccuggu

SEQ ID NO: 3403016 - RNA, 13 nt, Human
gagcuggggaccu

SEQ ID NO: 3403017 - RNA, 18 nt, Human
gagcugggggccaugagc

SEQ ID NO: 3403018 - RNA, 18 nt, Human
gagcugguugggaagaca

SEQ ID NO: 3403019 - RNA, 18 nt, Human
gagcuguauuaagccacu

SEQ ID NO: 3403020 - RNA, 16 nt, Human
gagcugucaccaagga

SEQ ID NO: 3403021 - RNA, 18 nt, Human
gagcugucaccaaggaaa

SEQ ID NO: 3403022 - RNA, 21 nt, Human
gagcugugaguucucccugua

SEQ ID NO: 3403023 - RNA, 22 nt, Human
gagcugugggcaaaagagugua

SEQ ID NO: 3403024 - RNA, 16 nt, Human
gagcuguuaccauuca

SEQ ID NO: 3403025 - RNA, 22 nt, Human
gagcuguucaacaucacugaaa

SEQ ID NO: 3403026 - RNA, 18 nt, Human
gagcuguugaugggauga

SEQ ID NO: 3403027 - RNA, 16 nt, Human
gagcuguugccucagu

SEQ ID NO: 3403028 - RNA, 16 nt, Human
gagcuguuuauggccu

SEQ ID NO: 3403029 - RNA, 20 nt, Human
gagcuguuuauggccucagc

SEQ ID NO: 3403030 - RNA, 22 nt, Human
gagcuguuuauggccucagcug

SEQ ID NO: 3403031 - RNA, 15 nt, Human
gagcuuaagccacug

SEQ ID NO: 3403032 - RNA, 22 nt, Human
gagcuuaaucuuugaaagguua

SEQ ID NO: 3403033 - RNA, 20 nt, Human
gagcuucaagucugugccug

SEQ ID NO: 3403034 - RNA, 13 nt, Human
gagcuucccugac

SEQ ID NO: 3403035 - RNA, 17 nt, Human
gagcuucccugacucau

SEQ ID NO: 3403036 - RNA, 10 nt, Human
gagcuucucu

SEQ ID NO: 3403037 - RNA, 16 nt, Human
gagcuucucugugaac

SEQ ID NO: 3403038 - RNA, 23 nt, Human
gagcuucucuuuaacucaggacu

SEQ ID NO: 3403039 - RNA, 11 nt, Human
gagcuucuggg

SEQ ID NO: 3403040 - RNA, 22 nt, Human
gagcuucugggaagacaacuag

SEQ ID NO: 3403041 - RNA, 18 nt, Human
gagcuucuggggucccca

SEQ ID NO: 3403042 - RNA, 19 nt, Human
gagcuucugggguccccag

SEQ ID NO: 3403043 - RNA, 21 nt, Human
gagcuucugggguccccaggg

SEQ ID NO: 3403044 - RNA, 22 nt, Human
gagcuucuuccaggugcccagc

SEQ ID NO: 3403045 - RNA, 12 nt, Human
gagcuuggggca

SEQ ID NO: 3403046 - RNA, 19 nt, Human
gagcuuuacaaaaagacac

SEQ ID NO: 3403047 - RNA, 17 nt, Human
gagcuuuccauguugcu

SEQ ID NO: 3403048 - RNA, 21 nt, Human
gagcuuuccauguugcugcca

SEQ ID NO: 3403049 - RNA, 19 nt, Human
gagcuuucugaacagcugg

SEQ ID NO: 3403050 - RNA, 20 nt, Human
gagcuuucugaacagcuggu

SEQ ID NO: 3403051 - RNA, 23 nt, Human
gagcuuucugaacagcuggugua

SEQ ID NO: 3403052 - RNA, 21 nt, Human
gagcuuugacucaggagccug

SEQ ID NO: 3403053 - RNA, 19 nt, Human
gagcuuugcauguuccacu

SEQ ID NO: 3403054 - RNA, 13 nt, Human
gagcuuugcugcu

SEQ ID NO: 3403055 - RNA, 23 nt, Human
gaggaaaaccaagccguggcuuc

SEQ ID NO: 3403056 - RNA, 22 nt, Human
gaggaaaaguaaccaucacugg

SEQ ID NO: 3403057 - RNA, 21 nt, Human
gaggaaaaguaaggugcaguu

SEQ ID NO: 3403058 - RNA, 22 nt, Human
gaggaaacucaccugcuggccc

SEQ ID NO: 3403059 - RNA, 17 nt, Human
gaggaaagacaacacaa

SEQ ID NO: 3403060 - RNA, 13 nt, Human
gaggaaagagagc

SEQ ID NO: 3403061 - RNA, 16 nt, Human
gaggaaagagucuuca

SEQ ID NO: 3403062 - RNA, 16 nt, Human
gaggaaagcaaaggag

SEQ ID NO: 3403063 - RNA, 17 nt, Human
gaggaaagcaaaggaga

SEQ ID NO: 3403064 - RNA, 19 nt, Human
gaggaaagcacagaggccu

SEQ ID NO: 3403065 - RNA, 20 nt, Human
gaggaaagcacagaggccuc

SEQ ID NO: 3403066 - RNA, 22 nt, Human
gaggaaagcacagaggccuccu

SEQ ID NO: 3403067 - RNA, 21 nt, Human
gaggaaagggaggaguggagg

SEQ ID NO: 3403068 - RNA, 20 nt, Human
gaggaaagucauuggcuuua

SEQ ID NO: 3403069 - RNA, 12 nt, Human
gaggaaaucaaa

SEQ ID NO: 3403070 - RNA, 13 nt, Human
gaggaaaucccuu

SEQ ID NO: 3403071 - RNA, 14 nt, Human
gaggaaccagagcc

SEQ ID NO: 3403072 - RNA, 15 nt, Human
gaggaaccagagcca

SEQ ID NO: 3403073 - RNA, 18 nt, Human
gaggaaccucugauuuau

SEQ ID NO: 3403074 - RNA, 15 nt, Human
gaggaacuguccaga

SEQ ID NO: 3403075 - RNA, 17 nt, Human
gaggaacuguccagaga

SEQ ID NO: 3403076 - RNA, 14 nt, Human
gaggaagaauaggg

SEQ ID NO: 3403077 - RNA, 19 nt, Human
gaggaagagcaggcacaug

SEQ ID NO: 3403078 - RNA, 21 nt, Human
gaggaagaugggggcaagaag

SEQ ID NO: 3403079 - RNA, 15 nt, Human
gaggaagcagaauaa

SEQ ID NO: 3403080 - RNA, 19 nt, Human
gaggaagcagaauaaagca

SEQ ID NO: 3403081 - RNA, 22 nt, Human
gaggaagccagguccacggucu

SEQ ID NO: 3403082 - RNA, 17 nt, Human
gaggaagccgcuggggc

SEQ ID NO: 3403083 - RNA, 19 nt, Human
gaggaagcuccaguccugc

SEQ ID NO: 3403084 - RNA, 21 nt, Human
gaggaagcuccaguccugcuc

SEQ ID NO: 3403085 - RNA, 13 nt, Human
gaggaaggaaacc

SEQ ID NO: 3403086 - RNA, 16 nt, Human
gaggaaggacuucccu

SEQ ID NO: 3403087 - RNA, 16 nt, Human
gaggaaggaggaccca

SEQ ID NO: 3403088 - RNA, 21 nt, Human
gaggaaggaggacccaggaca

SEQ ID NO: 3403089 - RNA, 17 nt, Human
gaggaaggaugcaaagu

SEQ ID NO: 3403090 - RNA, 17 nt, Human
gaggaaguucagaucuu

SEQ ID NO: 3403091 - RNA, 22 nt, Human
gaggaauaagaauggagcagua

SEQ ID NO: 3403092 - RNA, 21 nt, Human
gaggaauaagcucccagggcc

SEQ ID NO: 3403093 - RNA, 21 nt, Human
gaggaauaauuauuuauuuaa

SEQ ID NO: 3403094 - RNA, 17 nt, Human
gaggaauacugaacauc

SEQ ID NO: 3403095 - RNA, 23 nt, Human
gaggaauaugacggaagaacaua

SEQ ID NO: 3403096 - RNA, 20 nt, Human
gaggaaucaugucaggccug

SEQ ID NO: 3403097 - RNA, 21 nt, Human
gaggaaucaugucaggccugu

SEQ ID NO: 3403098 - RNA, 20 nt, Human
gaggaaucgaggaaccagag

SEQ ID NO: 3403099 - RNA, 15 nt, Human
gaggaaugcuccccc

SEQ ID NO: 3403100 - RNA, 14 nt, Human
gaggaauggacaga

SEQ ID NO: 3403101 - RNA, 22 nt, Human
gaggacaaaacuucuugucaga

SEQ ID NO: 3403102 - RNA, 19 nt, Human
gaggacaauucaugaacuu

SEQ ID NO: 3403103 - RNA, 13 nt, Human
gaggacacagaga

SEQ ID NO: 3403104 - RNA, 11 nt, Human
gaggacacaug

SEQ ID NO: 3403105 - RNA, 13 nt, Human
gaggacacauguc

SEQ ID NO: 3403106 - RNA, 16 nt, Human
gaggacagaugccucc

SEQ ID NO: 3403107 - RNA, 22 nt, Human
gaggacagaugccuccuuccuc

SEQ ID NO: 3403108 - RNA, 20 nt, Human
gaggacaggcgggaggaggu

SEQ ID NO: 3403109 - RNA, 16 nt, Human
gaggacauggcuucug

SEQ ID NO: 3403110 - RNA, 21 nt, Human
gaggacauguuuuuguuuucu

SEQ ID NO: 3403111 - RNA, 13 nt, Human
gaggaccacuccu

SEQ ID NO: 3403112 - RNA, 14 nt, Human
gaggaccagcacac

SEQ ID NO: 3403113 - RNA, 13 nt, Human
gaggacccagacc

SEQ ID NO: 3403114 - RNA, 20 nt, Human
gaggacccuggaaauggacu

SEQ ID NO: 3403115 - RNA, 20 nt, Human
gaggaccugacccuacuccc

SEQ ID NO: 3403116 - RNA, 16 nt, Human
gaggaccuggggcaca

SEQ ID NO: 3403117 - RNA, 17 nt, Human
gaggaccuguauuuaag

SEQ ID NO: 3403118 - RNA, 15 nt, Human
gaggaccuuaucugu

SEQ ID NO: 3403119 - RNA, 21 nt, Human
gaggacgcucucuggccuucg

SEQ ID NO: 3403120 - RNA, 17 nt, Human
gaggacggugcaaccca

SEQ ID NO: 3403121 - RNA, 20 nt, Human
gaggacggugcaacccaagg

SEQ ID NO: 3403122 - RNA, 15 nt, Human
gaggacgugggcggc

SEQ ID NO: 3403123 - RNA, 18 nt, Human
gaggacgugggcggcaga

SEQ ID NO: 3403124 - RNA, 20 nt, Human
gaggacgugggcggcagaga

SEQ ID NO: 3403125 - RNA, 22 nt, Human
gaggacgugggcggcagagagg

SEQ ID NO: 3403126 - RNA, 16 nt, Human
gaggacuagaaccugg

SEQ ID NO: 3403127 - RNA, 18 nt, Human
gaggacuccaggcagcag

SEQ ID NO: 3403128 - RNA, 17 nt, Human
gaggacucccaacccug

SEQ ID NO: 3403129 - RNA, 19 nt, Human
gaggacucgcuuguaaaua

SEQ ID NO: 3403130 - RNA, 21 nt, Human
gaggacucgcuuguaaauacc

SEQ ID NO: 3403131 - RNA, 22 nt, Human
gaggacucgcuuguaaauacca

SEQ ID NO: 3403132 - RNA, 20 nt, Human
gaggacuuuucuuuguggcu

SEQ ID NO: 3403133 - RNA, 13 nt, Human
gaggagaaacaca

SEQ ID NO: 3403134 - RNA, 12 nt, Human
gaggagaaacug

SEQ ID NO: 3403135 - RNA, 18 nt, Human
gaggagaacuugcugccu

SEQ ID NO: 3403136 - RNA, 22 nt, Human
gaggagaagaauuuucagaccc

SEQ ID NO: 3403137 - RNA, 22 nt, Human
gaggagacuagauuuaugaaua

SEQ ID NO: 3403138 - RNA, 12 nt, Human
gaggagagaaga

SEQ ID NO: 3403139 - RNA, 21 nt, Human
gaggagagagcagcuucugcc

SEQ ID NO: 3403140 - RNA, 14 nt, Human
gaggagagaggacc

SEQ ID NO: 3403141 - RNA, 15 nt, Human
gaggagagaggaccc

SEQ ID NO: 3403142 - RNA, 13 nt, Human
gaggagagaggca

SEQ ID NO: 3403143 - RNA, 14 nt, Human
gaggagagaggcag

SEQ ID NO: 3403144 - RNA, 14 nt, Human
gaggagagucccag

SEQ ID NO: 3403145 - RNA, 20 nt, Human
gaggagcagcaggagggggg

SEQ ID NO: 3403146 - RNA, 17 nt, Human
gaggagcagugcaggca

SEQ ID NO: 3403147 - RNA, 14 nt, Human
gaggagcauguuuu

SEQ ID NO: 3403148 - RNA, 12 nt, Human
gaggagcccagg

SEQ ID NO: 3403149 - RNA, 13 nt, Human
gaggagcccaggc

SEQ ID NO: 3403150 - RNA, 18 nt, Human
gaggagcccaggccagga

SEQ ID NO: 3403151 - RNA, 15 nt, Human
gaggagccccagcua

SEQ ID NO: 3403152 - RNA, 13 nt, Human
gaggagccccauc

SEQ ID NO: 3403153 - RNA, 16 nt, Human
gaggagcccugccucu

SEQ ID NO: 3403154 - RNA, 18 nt, Human
gaggagcccugccucucc

SEQ ID NO: 3403155 - RNA, 12 nt, Human
gaggagccuguc

SEQ ID NO: 3403156 - RNA, 16 nt, Human
gaggagccuguccugc

SEQ ID NO: 3403157 - RNA, 22 nt, Human
gaggagccuguccugccugugg

SEQ ID NO: 3403158 - RNA, 13 nt, Human
gaggagccuuuuu

SEQ ID NO: 3403159 - RNA, 12 nt, Human
gaggagcugcug

SEQ ID NO: 3403160 - RNA, 15 nt, Human
gaggagcuuggggga

SEQ ID NO: 3403161 - RNA, 19 nt, Human
gaggaggaaaucccuucau

SEQ ID NO: 3403162 - RNA, 19 nt, Human
gaggaggaaggagagaagg

SEQ ID NO: 3403163 - RNA, 19 nt, Human
gaggaggaugucccugggc

SEQ ID NO: 3403164 - RNA, 22 nt, Human
gaggaggaugucccugggccag

SEQ ID NO: 3403165 - RNA, 16 nt, Human
gaggaggcagagaaga

SEQ ID NO: 3403166 - RNA, 20 nt, Human
gaggaggcagagaagaaaga

SEQ ID NO: 3403167 - RNA, 14 nt, Human
gaggaggcagcagg

SEQ ID NO: 3403168 - RNA, 12 nt, Human
gaggaggccacc

SEQ ID NO: 3403169 - RNA, 14 nt, Human
gaggaggccaccuc

SEQ ID NO: 3403170 - RNA, 16 nt, Human
gaggaggccaccucuc

SEQ ID NO: 3403171 - RNA, 13 nt, Human
gaggaggggaggg

SEQ ID NO: 3403172 - RNA, 19 nt, Human
gaggaggggccccccugcc

SEQ ID NO: 3403173 - RNA, 22 nt, Human
gaggaggggccccccugcccug

SEQ ID NO: 3403174 - RNA, 21 nt, Human
gaggagggucggugccuucaa

SEQ ID NO: 3403175 - RNA, 15 nt, Human
gaggaggguggggga

SEQ ID NO: 3403176 - RNA, 19 nt, Human
gaggagguaaugaauuaaa

SEQ ID NO: 3403177 - RNA, 15 nt, Human
gaggagguggcagcc

SEQ ID NO: 3403178 - RNA, 21 nt, Human
gaggaggugucucaggcugcc

SEQ ID NO: 3403179 - RNA, 14 nt, Human
gaggaguaaaauuc

SEQ ID NO: 3403180 - RNA, 21 nt, Human
gaggagucugagguccugagc

SEQ ID NO: 3403181 - RNA, 22 nt, Human
gaggagucugagguccugagca

SEQ ID NO: 3403182 - RNA, 14 nt, Human
gaggagucuugugu

SEQ ID NO: 3403183 - RNA, 15 nt, Human
gaggaguucaaugau

SEQ ID NO: 3403184 - RNA, 16 nt, Human
gaggaguucaaugauc

SEQ ID NO: 3403185 - RNA, 17 nt, Human
gaggaguucaaugaucu

SEQ ID NO: 3403186 - RNA, 19 nt, Human
gaggaguucaaugaucuag

SEQ ID NO: 3403187 - RNA, 12 nt, Human
gaggaguuuccu

SEQ ID NO: 3403188 - RNA, 19 nt, Human
gaggaucacuggagcccag

SEQ ID NO: 3403189 - RNA, 20 nt, Human
gaggaucacuggagcccagg

SEQ ID NO: 3403190 - RNA, 14 nt, Human
gaggaucagaaagu

SEQ ID NO: 3403191 - RNA, 13 nt, Human
gaggaucuggaga

SEQ ID NO: 3403192 - RNA, 21 nt, Human
gaggaugaauguaugugcacu

SEQ ID NO: 3403193 - RNA, 15 nt, Human
gaggauggccagugu

SEQ ID NO: 3403194 - RNA, 20 nt, Human
gaggauggccucugcuaagc

SEQ ID NO: 3403195 - RNA, 17 nt, Human
gaggaugggucagagcu

SEQ ID NO: 3403196 - RNA, 13 nt, Human
gaggaugucccug

SEQ ID NO: 3403197 - RNA, 15 nt, Human
gaggaugugggcagc

SEQ ID NO: 3403198 - RNA, 14 nt, Human
gaggauuaguuuag

SEQ ID NO: 3403199 - RNA, 14 nt, Human
gaggauuauugaua

SEQ ID NO: 3403200 - RNA, 16 nt, Human
gaggauucuaugaggc

SEQ ID NO: 3403201 - RNA, 17 nt, Human
gaggauucuaugaggca

SEQ ID NO: 3403202 - RNA, 20 nt, Human
gaggauuuaagggauggaaa

SEQ ID NO: 3403203 - RNA, 22 nt, Human
gaggauuuagaagugucauguu

SEQ ID NO: 3403204 - RNA, 23 nt, Human
gaggcaaaaggcaguggggcugg

SEQ ID NO: 3403205 - RNA, 23 nt, Human
gaggcaaccugauuguaaacuuc

SEQ ID NO: 3403206 - RNA, 13 nt, Human
gaggcaagagaau

SEQ ID NO: 3403207 - RNA, 15 nt, Human
gaggcaagcaagcuc

SEQ ID NO: 3403208 - RNA, 17 nt, Human
gaggcaagcugaaauuu

SEQ ID NO: 3403209 - RNA, 19 nt, Human
gaggcaaugucaggaacag

SEQ ID NO: 3403210 - RNA, 19 nt, Human
gaggcaccaguguccuccc

SEQ ID NO: 3403211 - RNA, 18 nt, Human
gaggcaccauucaggaac

SEQ ID NO: 3403212 - RNA, 16 nt, Human
gaggcagaaaauugca

SEQ ID NO: 3403213 - RNA, 19 nt, Human
gaggcagaaagcagaggcu

SEQ ID NO: 3403214 - RNA, 12 nt, Human
gaggcagacagc

SEQ ID NO: 3403215 - RNA, 22 nt, Human
gaggcagacuucccugaaugua

SEQ ID NO: 3403216 - RNA, 19 nt, Human
gaggcagagaaagaagaga

SEQ ID NO: 3403217 - RNA, 16 nt, Human
gaggcagagaagaaag

SEQ ID NO: 3403218 - RNA, 14 nt, Human
gaggcagagugccc

SEQ ID NO: 3403219 - RNA, 12 nt, Human
gaggcagaguuu

SEQ ID NO: 3403220 - RNA, 13 nt, Human
gaggcagcagugu

SEQ ID NO: 3403221 - RNA, 20 nt, Human
gaggcagcagugugaggcca

SEQ ID NO: 3403222 - RNA, 22 nt, Human
gaggcagcagugugaggccagg

SEQ ID NO: 3403223 - RNA, 12 nt, Human
gaggcagccagg

SEQ ID NO: 3403224 - RNA, 12 nt, Human
gaggcagcccag

SEQ ID NO: 3403225 - RNA, 21 nt, Human
gaggcagccccauucugccug

SEQ ID NO: 3403226 - RNA, 16 nt, Human
gaggcaggagacuggc

SEQ ID NO: 3403227 - RNA, 23 nt, Human
gaggcaggaggauugcuugagcc

SEQ ID NO: 3403228 - RNA, 20 nt, Human
gaggcaggcauggcccuggg

SEQ ID NO: 3403229 - RNA, 22 nt, Human
gaggcagggaaguccccaggcc

SEQ ID NO: 3403230 - RNA, 16 nt, Human
gaggcagggaggcagc

SEQ ID NO: 3403231 - RNA, 18 nt, Human
gaggcagggaggcagccg

SEQ ID NO: 3403232 - RNA, 14 nt, Human
gaggcaggggcgga

SEQ ID NO: 3403233 - RNA, 20 nt, Human
gaggcaggggcuuccuggug

SEQ ID NO: 3403234 - RNA, 15 nt, Human
gaggcagggucucac

SEQ ID NO: 3403235 - RNA, 19 nt, Human
gaggcagggucucacucug

SEQ ID NO: 3403236 - RNA, 13 nt, Human
gaggcaggucccc

SEQ ID NO: 3403237 - RNA, 19 nt, Human
gaggcagugggucccacuu

SEQ ID NO: 3403238 - RNA, 21 nt, Human
gaggcaguucgaccagccagg

SEQ ID NO: 3403239 - RNA, 15 nt, Human
gaggcaguugcccag

SEQ ID NO: 3403240 - RNA, 18 nt, Human
gaggcaguugcccagccu

SEQ ID NO: 3403241 - RNA, 15 nt, Human
gaggcauggcccugg

SEQ ID NO: 3403242 - RNA, 19 nt, Human
gaggcauggucugcccucu

SEQ ID NO: 3403243 - RNA, 21 nt, Human
gaggcaugugaugagaggaaa

SEQ ID NO: 3403244 - RNA, 22 nt, Human
gaggcaugugaugagaggaaau

SEQ ID NO: 3403245 - RNA, 19 nt, Human
gaggcauuuguuugaacug

SEQ ID NO: 3403246 - RNA, 18 nt, Human
gaggccaaaggcuggugg

SEQ ID NO: 3403247 - RNA, 17 nt, Human
gaggccaacacuguggg

SEQ ID NO: 3403248 - RNA, 20 nt, Human
gaggccaagaguggccccac

SEQ ID NO: 3403249 - RNA, 22 nt, Human
gaggccaagaguggccccaccu

SEQ ID NO: 3403250 - RNA, 12 nt, Human
gaggccaaggug

SEQ ID NO: 3403251 - RNA, 17 nt, Human
gaggccacaugaguccc

SEQ ID NO: 3403252 - RNA, 22 nt, Human
gaggccacaugagucccagugg

SEQ ID NO: 3403253 - RNA, 11 nt, Human
gaggccaccuc

SEQ ID NO: 3403254 - RNA, 12 nt, Human
gaggccaccucu

SEQ ID NO: 3403255 - RNA, 20 nt, Human
gaggccaccucuccaagggc

SEQ ID NO: 3403256 - RNA, 12 nt, Human
gaggccagacca

SEQ ID NO: 3403257 - RNA, 18 nt, Human
gaggccagaccauggaca

SEQ ID NO: 3403258 - RNA, 14 nt, Human
gaggccagagacac

SEQ ID NO: 3403259 - RNA, 20 nt, Human
gaggccagagacacaagccu

SEQ ID NO: 3403260 - RNA, 14 nt, Human
gaggccagccccac

SEQ ID NO: 3403261 - RNA, 15 nt, Human
gagggguaggggcug

SEQ ID NO: 3403262 - RNA, 21 nt, Human
gaggggucgacuucgggcugg

SEQ ID NO: 3403263 - RNA, 19 nt, Human
gaggggugcagaggcugug

SEQ ID NO: 3403264 - RNA, 15 nt, Human
gaggggugggcuggu

SEQ ID NO: 3403265 - RNA, 18 nt, Human
gagggguguggcaguggu

SEQ ID NO: 3403266 - RNA, 23 nt, Human
gagggguuccuccccuccagcuc

SEQ ID NO: 3403267 - RNA, 17 nt, Human
gagggguugccacaggc

SEQ ID NO: 3403268 - RNA, 18 nt, Human
gagggguugccacaggcc

SEQ ID NO: 3403269 - RNA, 13 nt, Human
gaggguaaggcug

SEQ ID NO: 3403270 - RNA, 21 nt, Human
gaggguaggagggugggaagg

SEQ ID NO: 3403271 - RNA, 13 nt, Human
gaggguaggcagg

SEQ ID NO: 3403272 - RNA, 22 nt, Human
gaggguaggcaggauuggggaa

SEQ ID NO: 3403273 - RNA, 14 nt, Human
gagggucagccagg

SEQ ID NO: 3403274 - RNA, 15 nt, Human
gagggucagccaggg

SEQ ID NO: 3403275 - RNA, 16 nt, Human
gagggucaggaaggau

SEQ ID NO: 3403276 - RNA, 18 nt, Human
gagggucccaagcugggc

SEQ ID NO: 3403277 - RNA, 19 nt, Human
gagggucccaagcugggcc

SEQ ID NO: 3403278 - RNA, 23 nt, Human
gagggucccaagcugggccccag

SEQ ID NO: 3403279 - RNA, 17 nt, Human
gagggucuauggggaga

SEQ ID NO: 3403280 - RNA, 24 nt, Human
gagggucuggagaagcagugagcc

SEQ ID NO: 3403281 - RNA, 13 nt, Human
gagggugaagccu

SEQ ID NO: 3403282 - RNA, 19 nt, Human
gagggugaguccuccagaa

SEQ ID NO: 3403283 - RNA, 16 nt, Human
gagggugaguuggcuu

SEQ ID NO: 3403284 - RNA, 13 nt, Human
gagggugcugccc

SEQ ID NO: 3403285 - RNA, 12 nt, Human
gaggguggaaua

SEQ ID NO: 3403286 - RNA, 20 nt, Human
gaggguggagacuaagcccu

SEQ ID NO: 3403287 - RNA, 13 nt, Human
gagggugggaagg

SEQ ID NO: 3403288 - RNA, 19 nt, Human
gagggugggagagcccagc

SEQ ID NO: 3403289 - RNA, 15 nt, Human
gagggugggaguggg

SEQ ID NO: 3403290 - RNA, 15 nt, Human
gagggugggggaggg

SEQ ID NO: 3403291 - RNA, 15 nt, Human
gaggguugggcuggu

SEQ ID NO: 3403292 - RNA, 17 nt, Human
gaggguuggggaggggc

SEQ ID NO: 3403293 - RNA, 20 nt, Human
gaggguuggguucaucugag

SEQ ID NO: 3403294 - RNA, 22 nt, Human
gaggguuucauugucugugaag

SEQ ID NO: 3403295 - RNA, 21 nt, Human
gaggguuuccaugggguagga

SEQ ID NO: 3403296 - RNA, 14 nt, Human
gagguaacagaaca

SEQ ID NO: 3403297 - RNA, 16 nt, Human
gagguaacagaacagc

SEQ ID NO: 3403298 - RNA, 12 nt, Human
gagguaaguuuu

SEQ ID NO: 3403299 - RNA, 17 nt, Human
gagguacuagaaugcuu

SEQ ID NO: 3403300 - RNA, 15 nt, Human
gagguagaaugacuc

SEQ ID NO: 3403301 - RNA, 20 nt, Human
gagguagaccaggauuucua

SEQ ID NO: 3403302 - RNA, 18 nt, Human
gagguagaguuugaagga

SEQ ID NO: 3403303 - RNA, 14 nt, Human
gagguauuaaaacu

SEQ ID NO: 3403304 - RNA, 19 nt, Human
gagguauuuaucuuuacuu

SEQ ID NO: 3403305 - RNA, 17 nt, Human
gaggucaagcccaggag

SEQ ID NO: 3403306 - RNA, 15 nt, Human
gaggucacuggaaag

SEQ ID NO: 3403307 - RNA, 21 nt, Human
gaggucacuggaaaggggaga

SEQ ID NO: 3403308 - RNA, 13 nt, Human
gaggucagagccu

SEQ ID NO: 3403309 - RNA, 20 nt, Human
gaggucagagccugcaguua

SEQ ID NO: 3403310 - RNA, 21 nt, Human
gaggucagcacaucucaacag

SEQ ID NO: 3403311 - RNA, 22 nt, Human
gaggucagggagugcuggcuca

SEQ ID NO: 3403312 - RNA, 23 nt, Human
gaggucagggagugcuggcucac

SEQ ID NO: 3403313 - RNA, 13 nt, Human
gagguccagccca

SEQ ID NO: 3403314 - RNA, 17 nt, Human
gagguccagcccuggcu

SEQ ID NO: 3403315 - RNA, 20 nt, Human
gagguccagcccuggcugaa

SEQ ID NO: 3403316 - RNA, 17 nt, Human
gagguccugagcacugc

SEQ ID NO: 3403317 - RNA, 14 nt, Human
gagguccugggggc

SEQ ID NO: 3403318 - RNA, 21 nt, Human
gagguccugggggccugaccu

SEQ ID NO: 3403319 - RNA, 22 nt, Human
gaggucgguagguucagccaag

SEQ ID NO: 3403320 - RNA, 13 nt, Human
gaggucucagccc

SEQ ID NO: 3403321 - RNA, 22 nt, Human
gaggucucgcugaugcugggcu

SEQ ID NO: 3403322 - RNA, 14 nt, Human
gaggucuguuccuu

SEQ ID NO: 3403323 - RNA, 14 nt, Human
gaggucuguucuuu

SEQ ID NO: 3403324 - RNA, 13 nt, Human
gaggucuguuuaa

SEQ ID NO: 3403325 - RNA, 12 nt, Human
gaggucuugcua

SEQ ID NO: 3403326 - RNA, 22 nt, Human
gaggucuuuugacauguggaaa

SEQ ID NO: 3403327 - RNA, 16 nt, Human
gaggugaaagggagcu

SEQ ID NO: 3403328 - RNA, 23 nt, Human
gaggugaacaagcaaacccagac

SEQ ID NO: 3403329 - RNA, 23 nt, Human
gaggugaacuguuuccacauuca

SEQ ID NO: 3403330 - RNA, 18 nt, Human
gaggugaccccagggcac

SEQ ID NO: 3403331 - RNA, 21 nt, Human
gaggugaccccagggcacagg

SEQ ID NO: 3403332 - RNA, 22 nt, Human
gaggugaccccagggcacagga

SEQ ID NO: 3403333 - RNA, 23 nt, Human
gaggugaccccagggcacaggag

SEQ ID NO: 3403334 - RNA, 16 nt, Human
gaggugagaccaccuc

SEQ ID NO: 3403335 - RNA, 16 nt, Human
gaggugaggagcagag

SEQ ID NO: 3403336 - RNA, 13 nt, Human
gaggugauuccag

SEQ ID NO: 3403337 - RNA, 18 nt, Human
gaggugcacugggaggcu

SEQ ID NO: 3403338 - RNA, 18 nt, Human
gaggugcagagugcccag

SEQ ID NO: 3403339 - RNA, 13 nt, Human
gaggugccagcaa

SEQ ID NO: 3403340 - RNA, 16 nt, Human
gaggugccagcaaagc

SEQ ID NO: 3403341 - RNA, 20 nt, Human
gaggugccagcaaagcccca

SEQ ID NO: 3403342 - RNA, 22 nt, Human
gaggugccagcaacugaauaaa

SEQ ID NO: 3403343 - RNA, 14 nt, Human
gaggugcccaggag

SEQ ID NO: 3403344 - RNA, 15 nt, Human
gaggugcccaggaga

SEQ ID NO: 3403345 - RNA, 12 nt, Human
gaggugccugga

SEQ ID NO: 3403346 - RNA, 21 nt, Human
gaggugccugucccaccccca

SEQ ID NO: 3403347 - RNA, 23 nt, Human
gaggugccuucuucagggccugg

SEQ ID NO: 3403348 - RNA, 22 nt, Human
gaggugcuuaagcagaagcauu

SEQ ID NO: 3403349 - RNA, 22 nt, Human
gaggugcuucuaguucugccag

SEQ ID NO: 3403350 - RNA, 23 nt, Human
gaggugcuucuaguucugccagg

SEQ ID NO: 3403351 - RNA, 13 nt, Human
gagguggaagaag

SEQ ID NO: 3403352 - RNA, 17 nt, Human
gagguggaagagggcug

SEQ ID NO: 3403353 - RNA, 20 nt, Human
gagguggaagagggcugcaa

SEQ ID NO: 3403354 - RNA, 19 nt, Human
gagguggagguugcaguga

SEQ ID NO: 3403355 - RNA, 20 nt, Human
gagguggagguugcagugag

SEQ ID NO: 3403356 - RNA, 17 nt, Human
gagguggaucacagagg

SEQ ID NO: 3403357 - RNA, 21 nt, Human
gagguggauuccgagugguga

SEQ ID NO: 3403358 - RNA, 24 nt, Human
gagguggauuccgaguggugacag

SEQ ID NO: 3403359 - RNA, 16 nt, Human
gagguggcagcccugu

SEQ ID NO: 3403360 - RNA, 18 nt, Human
gagguggccuccuugcuu

SEQ ID NO: 3403361 - RNA, 11 nt, Human
gaggugggagg

SEQ ID NO: 3403362 - RNA, 20 nt, Human
gaggugggaggaucuuuuga

SEQ ID NO: 3403363 - RNA, 13 nt, Human
gaggugggagggc

SEQ ID NO: 3403364 - RNA, 18 nt, Human
gaggugggagguggaaga

SEQ ID NO: 3403365 - RNA, 15 nt, Human
gaggugggauccucc

SEQ ID NO: 3403366 - RNA, 16 nt, Human
gaggugggauccucca

SEQ ID NO: 3403367 - RNA, 22 nt, Human
gaggugggauccuccaggugca

SEQ ID NO: 3403368 - RNA, 14 nt, Human
gaggugggcaggug

SEQ ID NO: 3403369 - RNA, 22 nt, Human
gaggugggcccaggaccagcug

SEQ ID NO: 3403370 - RNA, 23 nt, Human
gaggugggcccaggaccagcugg

SEQ ID NO: 3403371 - RNA, 14 nt, Human
gaggugggccgugg

SEQ ID NO: 3403372 - RNA, 18 nt, Human
gagguggggcgaggcagg

SEQ ID NO: 3403373 - RNA, 17 nt, Human
gagguggucugaauguu

SEQ ID NO: 3403374 - RNA, 15 nt, Human
gaggugucaggcugc

SEQ ID NO: 3403375 - RNA, 19 nt, Human
gaggugucucaggcugccu

SEQ ID NO: 3403376 - RNA, 17 nt, Human
gaggugugggggcugca

SEQ ID NO: 3403377 - RNA, 16 nt, Human
gagguuaaaaagaaaa

SEQ ID NO: 3403378 - RNA, 22 nt, Human
gagguuaggaguucgagaccag

SEQ ID NO: 3403379 - RNA, 13 nt, Human
gagguuauagguc

SEQ ID NO: 3403380 - RNA, 16 nt, Human
gagguuccucugccug

SEQ ID NO: 3403381 - RNA, 18 nt, Human
gagguugaaaaacaaaau

SEQ ID NO: 3403382 - RNA, 13 nt, Human
gagguugcagugu

SEQ ID NO: 3403383 - RNA, 17 nt, Human
gagguugggguguacua

SEQ ID NO: 3403384 - RNA, 22 nt, Human
gagguugguuuaaugcaauaga

SEQ ID NO: 3403385 - RNA, 19 nt, Human
gagguuuaggucaagaaga

SEQ ID NO: 3403386 - RNA, 16 nt, Human
gagguuuuauuucauu

SEQ ID NO: 3403387 - RNA, 21 nt, Human
gagguuuuauuucauuuuuca

SEQ ID NO: 3403388 - RNA, 15 nt, Human
gagguuuucuccccc

SEQ ID NO: 3403389 - RNA, 23 nt, Human
gagguuuuuuugucaacauugug

SEQ ID NO: 3403390 - RNA, 21 nt, Human
gaguaaaaaaaaaaacaauua

SEQ ID NO: 3403391 - RNA, 23 nt, Human
gaguaaaauaaauauugucuuuu

SEQ ID NO: 3403392 - RNA, 10 nt, Human
gaguaaagcu

SEQ ID NO: 3403393 - RNA, 17 nt, Human
gaguaaagcuccuaucu

SEQ ID NO: 3403394 - RNA, 13 nt, Human
gaguaacauuugc

SEQ ID NO: 3403395 - RNA, 18 nt, Human
gaguaagaaauuucaggu

SEQ ID NO: 3403396 - RNA, 23 nt, Human
gaguaaugcauacagaaauauaa

SEQ ID NO: 3403397 - RNA, 14 nt, Human
gaguaaugguguag

SEQ ID NO: 3403398 - RNA, 17 nt, Human
gaguaaugguguagaac

SEQ ID NO: 3403399 - RNA, 19 nt, Human
gaguaaugguguagaacac

SEQ ID NO: 3403400 - RNA, 18 nt, Human
gaguaauugcauuugcuu

SEQ ID NO: 3403401 - RNA, 16 nt, Human
gaguaauuuauuguuu

SEQ ID NO: 3403402 - RNA, 23 nt, Human
gaguacaaaugccuuaaaaugga

SEQ ID NO: 3403403 - RNA, 20 nt, Human
gaguacguugugcauuuggu

SEQ ID NO: 3403404 - RNA, 19 nt, Human
gaguacuacaguccuccca

SEQ ID NO: 3403405 - RNA, 13 nt, Human
gauuuccuaauac

SEQ ID NO: 3403406 - RNA, 11 nt, Human
gauuuccugug

SEQ ID NO: 3403407 - RNA, 13 nt, Human
gauuuccuguguc

SEQ ID NO: 3403408 - RNA, 17 nt, Human
gauuuccuugaaugugg

SEQ ID NO: 3403409 - RNA, 15 nt, Human
gauuuccuugugcaa

SEQ ID NO: 3403410 - RNA, 19 nt, Human
gauuucgugggucuguuuu

SEQ ID NO: 3403411 - RNA, 16 nt, Human
gauuucuaaucaaaag

SEQ ID NO: 3403412 - RNA, 15 nt, Human
gauuucuaguuauuu

SEQ ID NO: 3403413 - RNA, 15 nt, Human
gauuucucauugacu

SEQ ID NO: 3403414 - RNA, 13 nt, Human
gauuucugccuuc

SEQ ID NO: 3403415 - RNA, 22 nt, Human
gauuucuguuuagauaauacac

SEQ ID NO: 3403416 - RNA, 11 nt, Human
gauuucuuagg

SEQ ID NO: 3403417 - RNA, 19 nt, Human
gauuucuuugcuguaagau

SEQ ID NO: 3403418 - RNA, 23 nt, Human
gauuucuuuuguaauaaacuauu

SEQ ID NO: 3403419 - RNA, 16 nt, Human
gauuugaaaaauauaa

SEQ ID NO: 3403420 - RNA, 21 nt, Human
gauuugaaaaauauaaaauua

SEQ ID NO: 3403421 - RNA, 19 nt, Human
gauuugaagaacaugugag

SEQ ID NO: 3403422 - RNA, 12 nt, Human
gauuugacuguu

SEQ ID NO: 3403423 - RNA, 18 nt, Human
gauuugaugcuguuugac

SEQ ID NO: 3403424 - RNA, 21 nt, Human
gauuugauuuuuuuuuuuaau

SEQ ID NO: 3403425 - RNA, 14 nt, Human
gauuugcaaaaaaa

SEQ ID NO: 3403426 - RNA, 17 nt, Human
gauuugcauugaacaca

SEQ ID NO: 3403427 - RNA, 20 nt, Human
gauuuggcuugacaaaggca

SEQ ID NO: 3403428 - RNA, 20 nt, Human
gauuugucuuuggugaacau

SEQ ID NO: 3403429 - RNA, 22 nt, Human
gauuugucuuuggugaacauug

SEQ ID NO: 3403430 - RNA, 22 nt, Human
gauuugugucugugacuuuugu

SEQ ID NO: 3403431 - RNA, 16 nt, Human
gauuuguuuuuaaacu

SEQ ID NO: 3403432 - RNA, 21 nt, Human
gauuuguuuuuaaacuguaca

SEQ ID NO: 3403433 - RNA, 23 nt, Human
gauuuguuuuuaaacuguacagu

SEQ ID NO: 3403434 - RNA, 13 nt, Human
gauuuuaaacuag

SEQ ID NO: 3403435 - RNA, 15 nt, Human
gauuuuaaacuagau

SEQ ID NO: 3403436 - RNA, 17 nt, Human
gauuuuaaacuagauga

SEQ ID NO: 3403437 - RNA, 14 nt, Human
gauuuuaaaugugu

SEQ ID NO: 3403438 - RNA, 15 nt, Human
gauuuuaaaugugug

SEQ ID NO: 3403439 - RNA, 16 nt, Human
gauuuuaaauguguga

SEQ ID NO: 3403440 - RNA, 12 nt, Human
gauuuuaacaau

SEQ ID NO: 3403441 - RNA, 23 nt, Human
gauuuuaacaauaacuacugugu

SEQ ID NO: 3403442 - RNA, 16 nt, Human
gauuuuaauugucaug

SEQ ID NO: 3403443 - RNA, 13 nt, Human
gauuuuaauuuug

SEQ ID NO: 3403444 - RNA, 15 nt, Human
gauuuuaauuuugaa

SEQ ID NO: 3403445 - RNA, 16 nt, Human
gauuuuacaaaagaug

SEQ ID NO: 3403446 - RNA, 17 nt, Human
gauuuuacaaaagaugu

SEQ ID NO: 3403447 - RNA, 17 nt, Human
gauuuuacagagcgcac

SEQ ID NO: 3403448 - RNA, 13 nt, Human
gauuuuacaugaa

SEQ ID NO: 3403449 - RNA, 18 nt, Human
gauuuuacauguggccca

SEQ ID NO: 3403450 - RNA, 20 nt, Human
gauuuuagcuaggauuugaa

SEQ ID NO: 3403451 - RNA, 21 nt, Human
gauuuuaggagcuaaggcucu

SEQ ID NO: 3403452 - RNA, 22 nt, Human
gauuuuaucuuucgcacagcag

SEQ ID NO: 3403453 - RNA, 20 nt, Human
gauuuuauguugacauuugu

SEQ ID NO: 3403454 - RNA, 13 nt, Human
gauuuuauuaugu

SEQ ID NO: 3403455 - RNA, 23 nt, Human
gauuuuauuauguaaaucccauu

SEQ ID NO: 3403456 - RNA, 15 nt, Human
gauuuuauuugacaa

SEQ ID NO: 3403457 - RNA, 15 nt, Human
gauuuuccugaaaac

SEQ ID NO: 3403458 - RNA, 18 nt, Human
gauuuuccuuuuuuauac

SEQ ID NO: 3403459 - RNA, 21 nt, Human
gauuuuccuuuuuuauacaca

SEQ ID NO: 3403460 - RNA, 23 nt, Human
gauuuucuacaaguauucugccu

SEQ ID NO: 3403461 - RNA, 17 nt, Human
gauuuucuauuguuacu

SEQ ID NO: 3403462 - RNA, 18 nt, Human
gauuuucuauuguuacuc

SEQ ID NO: 3403463 - RNA, 15 nt, Human
gauuuucuccagcuc

SEQ ID NO: 3403464 - RNA, 13 nt, Human
gauuuucuuuaaa

SEQ ID NO: 3403465 - RNA, 12 nt, Human
gauuuugaaaac

SEQ ID NO: 3403466 - RNA, 21 nt, Human
gauuuugaaaccaugaagaga

SEQ ID NO: 3403467 - RNA, 23 nt, Human
gauuuugaaccugaugaaaauaa

SEQ ID NO: 3403468 - RNA, 14 nt, Human
gauuuugaguaucu

SEQ ID NO: 3403469 - RNA, 18 nt, Human
gauuuugauagcaaagcg

SEQ ID NO: 3403470 - RNA, 19 nt, Human
gauuuugauccaagcuggu

SEQ ID NO: 3403471 - RNA, 12 nt, Human
gauuuugaucuc

SEQ ID NO: 3403472 - RNA, 21 nt, Human
gauuuugguauuacacuguau

SEQ ID NO: 3403473 - RNA, 19 nt, Human
gauuuugguuuuguucccc

SEQ ID NO: 3403474 - RNA, 22 nt, Human
gauuuugguuuuguuccccucc

SEQ ID NO: 3403475 - RNA, 23 nt, Human
gauuuuguaucugcaggcagaca

SEQ ID NO: 3403476 - RNA, 14 nt, Human
gauuuuguuuugcu

SEQ ID NO: 3403477 - RNA, 14 nt, Human
gauuuuuacacaug

SEQ ID NO: 3403478 - RNA, 16 nt, Human
gauuuuuacuguguuu

SEQ ID NO: 3403479 - RNA, 13 nt, Human
gauuuuuauccaa

SEQ ID NO: 3403480 - RNA, 13 nt, Human
gauuuuucucaaa

SEQ ID NO: 3403481 - RNA, 18 nt, Human
gauuuuucucaaaguuuu

SEQ ID NO: 3403482 - RNA, 12 nt, Human
gauuuuucuuua

SEQ ID NO: 3403483 - RNA, 20 nt, Human
gauuuuucuuuacaaaacaa

SEQ ID NO: 3403484 - RNA, 22 nt, Human
gauuuuuguuuuguuuuuacaa

SEQ ID NO: 3403485 - RNA, 16 nt, Human
gauuuuuuaauaauuu

SEQ ID NO: 3403486 - RNA, 17 nt, Human
gauuuuuuaauaauuua

SEQ ID NO: 3403487 - RNA, 16 nt, Human
gauuuuuuauugcuag

SEQ ID NO: 3403488 - RNA, 14 nt, Human
gauuuuuuccaaaa

SEQ ID NO: 3403489 - RNA, 18 nt, Human
gauuuuuuccuucaaagu

SEQ ID NO: 3403490 - RNA, 19 nt, Human
gauuuuuugcauuccugac

SEQ ID NO: 3403491 - RNA, 14 nt, Human
gauuuuuuucugag

SEQ ID NO: 3403492 - RNA, 21 nt, Human
gauuuuuuuguuguuuguuua

SEQ ID NO: 3403493 - RNA, 15 nt, Human
gauuuuuuuuucaua

SEQ ID NO: 3403494 - RNA, 17 nt, Human
gauuuuuuuuuccuuca

SEQ ID NO: 3403495 - RNA, 22 nt, Human
gauuuuuuuuuccuucagugcc

SEQ ID NO: 3403496 - RNA, 23 nt, Human
gauuuuuuuuuccuucagugccu

SEQ ID NO: 3403497 - RNA, 16 nt, Human
gauuuuuuuuuuuucu

SEQ ID NO: 3403498 - RNA, 13 nt, Human
gcaaaaaaaauua

SEQ ID NO: 3403499 - RNA, 16 nt, Human
gcaaaaaaaauuagcc

SEQ ID NO: 3403500 - RNA, 17 nt, Human
gcaaaaaaaguuguaug

SEQ ID NO: 3403501 - RNA, 18 nt, Human
gcaaaaaaaguuguauga

SEQ ID NO: 3403502 - RNA, 12 nt, Human
gcaaaaaaauua

SEQ ID NO: 3403503 - RNA, 17 nt, Human
gcaaaaaagaaaaccuu

SEQ ID NO: 3403504 - RNA, 18 nt, Human
gcaaaaaagaaaaccuuu

SEQ ID NO: 3403505 - RNA, 21 nt, Human
gcaaaaaaguccaauuuuaau

SEQ ID NO: 3403506 - RNA, 15 nt, Human
gcaaaaaauaaugac

SEQ ID NO: 3403507 - RNA, 11 nt, Human
gcaaaaaauac

SEQ ID NO: 3403508 - RNA, 22 nt, Human
gcaaaaaaucuuaauacuguua

SEQ ID NO: 3403509 - RNA, 17 nt, Human
gcaaaaaauguuuuugg

SEQ ID NO: 3403510 - RNA, 22 nt, Human
gcaaaaacauguaugugcauuu

SEQ ID NO: 3403511 - RNA, 14 nt, Human
gcaaaaaggcagga

SEQ ID NO: 3403512 - RNA, 13 nt, Human
gcaaaaauaauca

SEQ ID NO: 3403513 - RNA, 23 nt, Human
gcaaaaauaguuuggauauguaa

SEQ ID NO: 3403514 - RNA, 14 nt, Human
gcaaaaauauaaaa

SEQ ID NO: 3403515 - RNA, 16 nt, Human
gcaaaaauauuuuaug

SEQ ID NO: 3403516 - RNA, 15 nt, Human
gcaaaaaugcuaaua

SEQ ID NO: 3403517 - RNA, 11 nt, Human
gcaaaaauuuu

SEQ ID NO: 3403518 - RNA, 12 nt, Human
gcaaaaccagaa

SEQ ID NO: 3403519 - RNA, 21 nt, Human
gcaaaaccagguuuuguuccg

SEQ ID NO: 3403520 - RNA, 17 nt, Human
gcaaaaccauugcuuca

SEQ ID NO: 3403521 - RNA, 17 nt, Human
gcaaaaccuuuuacugg

SEQ ID NO: 3403522 - RNA, 17 nt, Human
gcaaaacucuacuuaau

SEQ ID NO: 3403523 - RNA, 17 nt, Human
gcaaaacuuuuaaacua

SEQ ID NO: 3403524 - RNA, 15 nt, Human
gcaaaagaagaaguu

SEQ ID NO: 3403525 - RNA, 22 nt, Human
gcaaaagaugcuucucacugcc

SEQ ID NO: 3403526 - RNA, 14 nt, Human
gcaaaagccuugug

SEQ ID NO: 3403527 - RNA, 11 nt, Human
gcaaaaggaaa

SEQ ID NO: 3403528 - RNA, 21 nt, Human
gcaaaaggagagacucccaug

SEQ ID NO: 3403529 - RNA, 23 nt, Human
gcaaaaggccucuuguaaagacu

SEQ ID NO: 3403530 - RNA, 15 nt, Human
gcaaaauaaaaacua

SEQ ID NO: 3403531 - RNA, 21 nt, Human
gcaaaauaaaacauagcaaau

SEQ ID NO: 3403532 - RNA, 18 nt, Human
gcaaaauacaugaugauu

SEQ ID NO: 3403533 - RNA, 10 nt, Human
gcaaaauaug

SEQ ID NO: 3403534 - RNA, 19 nt, Human
gcaaaaucaagcaagccuc

SEQ ID NO: 3403535 - RNA, 20 nt, Human
gcaaaaucauggaaugguua

SEQ ID NO: 3403536 - RNA, 23 nt, Human
gcaaaaucauuuuauaugucaaa

SEQ ID NO: 3403537 - RNA, 18 nt, Human
gcaaaauuauagaaguuu

SEQ ID NO: 3403538 - RNA, 16 nt, Human
gcaaaauucccaggga

SEQ ID NO: 3403539 - RNA, 13 nt, Human
gcaaaauuccuga

SEQ ID NO: 3403540 - RNA, 17 nt, Human
gcaaaauugauguguuu

SEQ ID NO: 3403541 - RNA, 10 nt, Human
gcaaaauuuc

SEQ ID NO: 3403542 - RNA, 17 nt, Human
gcaaacacacaaaggua

SEQ ID NO: 3403543 - RNA, 15 nt, Human
gcaaacaccugcuga

SEQ ID NO: 3403544 - RNA, 15 nt, Human
gcaaacacuccaccc

SEQ ID NO: 3403545 - RNA, 21 nt, Human
gcaaacaggaucaguuaacua

SEQ ID NO: 3403546 - RNA, 16 nt, Human
gcaaacagggccucug

SEQ ID NO: 3403547 - RNA, 17 nt, Human
gcaaacagggccucugc

SEQ ID NO: 3403548 - RNA, 21 nt, Human
gcaaacaugggguuggcuggg

SEQ ID NO: 3403549 - RNA, 15 nt, Human
gcaaacauuuucucu

SEQ ID NO: 3403550 - RNA, 16 nt, Human
gcaaaccaagagauug

SEQ ID NO: 3403551 - RNA, 19 nt, Human
gcaagaggcaagcugaaau

SEQ ID NO: 3403552 - RNA, 20 nt, Human
gcaagaggccguggcugcug

SEQ ID NO: 3403553 - RNA, 18 nt, Human
gcaagauaaacauuauua

SEQ ID NO: 3403554 - RNA, 17 nt, Human
gcaagauggcacagggc

SEQ ID NO: 3403555 - RNA, 13 nt, Human
gcaagaugugaau

SEQ ID NO: 3403556 - RNA, 14 nt, Human
gcaagaugugaauu

SEQ ID NO: 3403557 - RNA, 17 nt, Human
gcaagaugugaauuauu

SEQ ID NO: 3403558 - RNA, 16 nt, Human
gcaagaugugggcagu

SEQ ID NO: 3403559 - RNA, 13 nt, Human
gcaagauugcuua

SEQ ID NO: 3403560 - RNA, 14 nt, Human
gcaagauugcuuaa

SEQ ID NO: 3403561 - RNA, 19 nt, Human
gcaagcaacacagaggaau

SEQ ID NO: 3403562 - RNA, 18 nt, Human
gcaagcaagaaacacugg

SEQ ID NO: 3403563 - RNA, 15 nt, Human
gcaagcaagaggccg

SEQ ID NO: 3403564 - RNA, 15 nt, Human
gcaagcacagcccuu

SEQ ID NO: 3403565 - RNA, 18 nt, Human
gcaagcaccauccccucc

SEQ ID NO: 3403566 - RNA, 20 nt, Human
gcaagcaccuccugccucga

SEQ ID NO: 3403567 - RNA, 14 nt, Human
gcaagcagaggacc

SEQ ID NO: 3403568 - RNA, 15 nt, Human
gcaagcaugcuugug

SEQ ID NO: 3403569 - RNA, 22 nt, Human
gcaagcauguaacuuauauuaa

SEQ ID NO: 3403570 - RNA, 17 nt, Human
gcaagcauucagaagaa

SEQ ID NO: 3403571 - RNA, 15 nt, Human
gcaagcccuacagag

SEQ ID NO: 3403572 - RNA, 11 nt, Human
gcaagccugcg

SEQ ID NO: 3403573 - RNA, 19 nt, Human
gcaagccuguaaucccagc

SEQ ID NO: 3403574 - RNA, 16 nt, Human
gcaagcuaauucuuug

SEQ ID NO: 3403575 - RNA, 22 nt, Human
gcaagcuaauucuuugaccugu

SEQ ID NO: 3403576 - RNA, 19 nt, Human
gcaagcucuuuuauaugcu

SEQ ID NO: 3403577 - RNA, 14 nt, Human
gcaagcugaaauuu

SEQ ID NO: 3403578 - RNA, 17 nt, Human
gcaagcuuggcuguaga

SEQ ID NO: 3403579 - RNA, 14 nt, Human
gcaaggaaggaaag

SEQ ID NO: 3403580 - RNA, 15 nt, Human
gcaaggaaggaaaga

SEQ ID NO: 3403581 - RNA, 14 nt, Human
gcaaggaccaggac

SEQ ID NO: 3403582 - RNA, 15 nt, Human
gcaaggaccaggacu

SEQ ID NO: 3403583 - RNA, 20 nt, Human
gcaaggaccaggacucccuc

SEQ ID NO: 3403584 - RNA, 14 nt, Human
gcaaggaggcuggc

SEQ ID NO: 3403585 - RNA, 16 nt, Human
gcaaggaggcuggcug

SEQ ID NO: 3403586 - RNA, 18 nt, Human
gcaaggcaggugccucca

SEQ ID NO: 3403587 - RNA, 22 nt, Human
gcaaggccaccucuuccuggcc

SEQ ID NO: 3403588 - RNA, 23 nt, Human
gcaaggcccgagcagcugagcag

SEQ ID NO: 3403589 - RNA, 24 nt, Human
gcaaggcccgagcagcugagcagg

SEQ ID NO: 3403590 - RNA, 14 nt, Human
gcaaggcccugcug

SEQ ID NO: 3403591 - RNA, 18 nt, Human
gcaaggcgcuaacuugcu

SEQ ID NO: 3403592 - RNA, 12 nt, Human
gcaaggcugugc

SEQ ID NO: 3403593 - RNA, 21 nt, Human
gcaagggaauuucuucaacuc

SEQ ID NO: 3403594 - RNA, 12 nt, Human
gcaagggacugu

SEQ ID NO: 3403595 - RNA, 15 nt, Human
gcaagggaggcccag

SEQ ID NO: 3403596 - RNA, 21 nt, Human
gcaagggcagggacagggccg

SEQ ID NO: 3403597 - RNA, 19 nt, Human
gcaagggccaugcugaagg

SEQ ID NO: 3403598 - RNA, 22 nt, Human
gcaagggguucccuugagggcu

SEQ ID NO: 3403599 - RNA, 14 nt, Human
gcaagggugauggg

SEQ ID NO: 3403600 - RNA, 18 nt, Human
gcaaggguuaaggccuga

SEQ ID NO: 3403601 - RNA, 16 nt, Human
gcaaggguucccucaa

SEQ ID NO: 3403602 - RNA, 18 nt, Human
gcaaggguucccucaaga

SEQ ID NO: 3403603 - RNA, 15 nt, Human
gcaaggucauuucuu

SEQ ID NO: 3403604 - RNA, 19 nt, Human
gcaaggucuggccucaggu

SEQ ID NO: 3403605 - RNA, 20 nt, Human
gcaagguggcuccagcacca

SEQ ID NO: 3403606 - RNA, 14 nt, Human
gcaagguuccacag

SEQ ID NO: 3403607 - RNA, 19 nt, Human
gcaagguuuaaguuauuaa

SEQ ID NO: 3403608 - RNA, 24 nt, Human
gcaagguuuaggcugguggcccag

SEQ ID NO: 3403609 - RNA, 15 nt, Human
gcaaguaaaaauaua

SEQ ID NO: 3403610 - RNA, 23 nt, Human
gcaaguauguuuuagcauguguu

SEQ ID NO: 3403611 - RNA, 16 nt, Human
gcaagucacaaaggaa

SEQ ID NO: 3403612 - RNA, 20 nt, Human
gcaagucacaaaggaaugga

SEQ ID NO: 3403613 - RNA, 19 nt, Human
gcaagucagaggauggcca

SEQ ID NO: 3403614 - RNA, 24 nt, Human
gcaagucagaggauggccaguguc

SEQ ID NO: 3403615 - RNA, 13 nt, Human
gcaagucaggguu

SEQ ID NO: 3403616 - RNA, 17 nt, Human
gcaagucauggcugugc

SEQ ID NO: 3403617 - RNA, 12 nt, Human
gcaagucaugua

SEQ ID NO: 3403618 - RNA, 15 nt, Human
gcaagucauguaaau

SEQ ID NO: 3403619 - RNA, 22 nt, Human
gcaagucccugacucucuguga

SEQ ID NO: 3403620 - RNA, 17 nt, Human
gcaaguccuuuuguaaa

SEQ ID NO: 3403621 - RNA, 18 nt, Human
gcaaguccuuuuguaaag

SEQ ID NO: 3403622 - RNA, 20 nt, Human
gcaagucugcaggugcacca

SEQ ID NO: 3403623 - RNA, 21 nt, Human
gcaagucuuuaggucuuugua

SEQ ID NO: 3403624 - RNA, 13 nt, Human
gcaagugaagaaa

SEQ ID NO: 3403625 - RNA, 18 nt, Human
gcaagugagagcugggug

SEQ ID NO: 3403626 - RNA, 21 nt, Human
gcaagugagcaaaccugcccc

SEQ ID NO: 3403627 - RNA, 19 nt, Human
gcaagugauugggacagag

SEQ ID NO: 3403628 - RNA, 12 nt, Human
gcaagugcugga

SEQ ID NO: 3403629 - RNA, 16 nt, Human
gcaagugucugugugc

SEQ ID NO: 3403630 - RNA, 19 nt, Human
gcaagugugugcaugugug

SEQ ID NO: 3403631 - RNA, 16 nt, Human
gcaaguuaagagaaac

SEQ ID NO: 3403632 - RNA, 21 nt, Human
gcaaguucuagagaagaggcu

SEQ ID NO: 3403633 - RNA, 12 nt, Human
gcaauaaaaauc

SEQ ID NO: 3403634 - RNA, 22 nt, Human
gcaauaaaagcccaggagccca

SEQ ID NO: 3403635 - RNA, 14 nt, Human
gcaauaaaauuuaa

SEQ ID NO: 3403636 - RNA, 15 nt, Human
gcaauaaauuuugaa

SEQ ID NO: 3403637 - RNA, 18 nt, Human
gcaauaaauuuugaaaag

SEQ ID NO: 3403638 - RNA, 12 nt, Human
gcaauaacuucu

SEQ ID NO: 3403639 - RNA, 12 nt, Human
gcaauaaugcag

SEQ ID NO: 3403640 - RNA, 19 nt, Human
gcaauaauggucccaucca

SEQ ID NO: 3403641 - RNA, 23 nt, Human
gcaauaauggucccauccaggca

SEQ ID NO: 3403642 - RNA, 13 nt, Human
gcaauacauacca

SEQ ID NO: 3403643 - RNA, 10 nt, Human
gcaauagaaa

SEQ ID NO: 3403644 - RNA, 17 nt, Human
gcaauagagacuguaga

SEQ ID NO: 3403645 - RNA, 21 nt, Human
gcaauauauuaccagcaagaa

SEQ ID NO: 3403646 - RNA, 14 nt, Human
gcaauauauuuugu

SEQ ID NO: 3403647 - RNA, 13 nt, Human
gcaauaugaaguu

SEQ ID NO: 3403648 - RNA, 14 nt, Human
gcaauauguaaaua

SEQ ID NO: 3403649 - RNA, 21 nt, Human
gcaauauuaaugccuuuaaag

SEQ ID NO: 3403650 - RNA, 22 nt, Human
gcaauauuccuuagucaaauca

SEQ ID NO: 3403651 - RNA, 14 nt, Human
gcaauauucucugu

SEQ ID NO: 3403652 - RNA, 14 nt, Human
gcaauauuugaauu

SEQ ID NO: 3403653 - RNA, 18 nt, Human
gcaaucaaaucugcuuuu

SEQ ID NO: 3403654 - RNA, 18 nt, Human
gcaauccacaaucugaca

SEQ ID NO: 3403655 - RNA, 13 nt, Human
gcaauccauguua

SEQ ID NO: 3403656 - RNA, 20 nt, Human
gcaauccucccacuucagcc

SEQ ID NO: 3403657 - RNA, 14 nt, Human
gcaauccugucuuu

SEQ ID NO: 3403658 - RNA, 19 nt, Human
gcaauccuuacaaaugauu

SEQ ID NO: 3403659 - RNA, 21 nt, Human
gcaaucuauuaauagcugccu

SEQ ID NO: 3403660 - RNA, 21 nt, Human
gcaaucuccccuugauuuaaa

SEQ ID NO: 3403661 - RNA, 23 nt, Human
gcaaucuccccuugauuuaaaca

SEQ ID NO: 3403662 - RNA, 13 nt, Human
gcaaucuuugaaa

SEQ ID NO: 3403663 - RNA, 16 nt, Human
gcaaugaaaaauucuc

SEQ ID NO: 3403664 - RNA, 18 nt, Human
gcaaugaaagguacuaua

SEQ ID NO: 3403665 - RNA, 16 nt, Human
gcaaugacaucuucaa

SEQ ID NO: 3403666 - RNA, 13 nt, Human
gcaaugaccuuuc

SEQ ID NO: 3403667 - RNA, 17 nt, Human
gcaaugaccuuucaaua

SEQ ID NO: 3403668 - RNA, 22 nt, Human
gcaaugaccuuucaauaggaaa

SEQ ID NO: 3403669 - RNA, 21 nt, Human
gcaaugccacagcccugucag

SEQ ID NO: 3403670 - RNA, 22 nt, Human
gcaaugccacagcccugucagc

SEQ ID NO: 3403671 - RNA, 23 nt, Human
gcaaugccauccucaaacacugc

SEQ ID NO: 3403672 - RNA, 22 nt, Human
gcaaugcuggcuguuggcuggg

SEQ ID NO: 3403673 - RNA, 12 nt, Human
gcaauggcagcc

SEQ ID NO: 3403674 - RNA, 16 nt, Human
gcaaugggcacuggga

SEQ ID NO: 3403675 - RNA, 22 nt, Human
gcaauggugucaguauccaggc

SEQ ID NO: 3403676 - RNA, 23 nt, Human
gcaauggugucaguauccaggcu

SEQ ID NO: 3403677 - RNA, 23 nt, Human
gcaaugguguugcccugagugga

SEQ ID NO: 3403678 - RNA, 19 nt, Human
gcaauguaaauauuuuaaa

SEQ ID NO: 3403679 - RNA, 22 nt, Human
gcaaugucaggaacagaaggau

SEQ ID NO: 3403680 - RNA, 14 nt, Human
gcaauguguguaua

SEQ ID NO: 3403681 - RNA, 18 nt, Human
gcaauguguguauaugga

SEQ ID NO: 3403682 - RNA, 14 nt, Human
gcaauguuaucuug

SEQ ID NO: 3403683 - RNA, 14 nt, Human
gcaauguuuuccuu

SEQ ID NO: 3403684 - RNA, 19 nt, Human
gcaauuaauuccuucagca

SEQ ID NO: 3403685 - RNA, 12 nt, Human
gcaauuaugaaa

SEQ ID NO: 3403686 - RNA, 19 nt, Human
gcaauuaugaaaauaaucu

SEQ ID NO: 3403687 - RNA, 16 nt, Human
gcaauucaaaaguucc

SEQ ID NO: 3403688 - RNA, 14 nt, Human
gcaauucaucccag

SEQ ID NO: 3403689 - RNA, 21 nt, Human
gcaauuccccucugcugcugu

SEQ ID NO: 3403690 - RNA, 15 nt, Human
gcaauuccgcauuua

SEQ ID NO: 3403691 - RNA, 17 nt, Human
gcaauuccgcauuuaau

SEQ ID NO: 3403692 - RNA, 14 nt, Human
gcaauucuccugcc

SEQ ID NO: 3403693 - RNA, 17 nt, Human
gcaauucuccugccuca

SEQ ID NO: 3403694 - RNA, 15 nt, Human
gcaauugaaaugcau

SEQ ID NO: 3403695 - RNA, 18 nt, Human
gcaauuuaaauguuauga

SEQ ID NO: 3403696 - RNA, 15 nt, Human
gcacaggucccaccu

SEQ ID NO: 3403697 - RNA, 17 nt, Human
gcacaggucccaccucc

SEQ ID NO: 3403698 - RNA, 21 nt, Human
gcacaggucccaccuccagcc

SEQ ID NO: 3403699 - RNA, 21 nt, Human
gcacaggugggcuucccagug

SEQ ID NO: 3403700 - RNA, 15 nt, Human
gcacaguauuuguaa

SEQ ID NO: 3403701 - RNA, 14 nt, Human
gcacagucagguug

SEQ ID NO: 3403702 - RNA, 13 nt, Human
gcacaguccagga

SEQ ID NO: 3403703 - RNA, 16 nt, Human
gcacagugacuucuga

SEQ ID NO: 3403704 - RNA, 19 nt, Human
gcacagugacuucugagau

SEQ ID NO: 3403705 - RNA, 15 nt, Human
gcacagugcaucuca

SEQ ID NO: 3403706 - RNA, 20 nt, Human
gcacagugcaucucagccca

SEQ ID NO: 3403707 - RNA, 16 nt, Human
gcacagugguggcagg

SEQ ID NO: 3403708 - RNA, 16 nt, Human
gcacagugucccccag

SEQ ID NO: 3403709 - RNA, 17 nt, Human
gcacagugucugggcug

SEQ ID NO: 3403710 - RNA, 18 nt, Human
gcacagugucugggcuga

SEQ ID NO: 3403711 - RNA, 13 nt, Human
gcacaguuugaac

SEQ ID NO: 3403712 - RNA, 14 nt, Human
gcacauaaacuuug

SEQ ID NO: 3403713 - RNA, 14 nt, Human
gcacauagagaggg

SEQ ID NO: 3403714 - RNA, 16 nt, Human
gcacauauacacacac

SEQ ID NO: 3403715 - RNA, 22 nt, Human
gcacauauuagugcagccaagu

SEQ ID NO: 3403716 - RNA, 22 nt, Human
gcacaucagcacgauuucuguu

SEQ ID NO: 3403717 - RNA, 23 nt, Human
gcacauccauucccaagaaaugc

SEQ ID NO: 3403718 - RNA, 13 nt, Human
gcacaucucugcu

SEQ ID NO: 3403719 - RNA, 21 nt, Human
gcacaucuguaaaucuacaca

SEQ ID NO: 3403720 - RNA, 18 nt, Human
gcacaucugugucuuguu

SEQ ID NO: 3403721 - RNA, 19 nt, Human
gcacaugacaacuuugcca

SEQ ID NO: 3403722 - RNA, 21 nt, Human
gcacaugagcuggcgggauug

SEQ ID NO: 3403723 - RNA, 14 nt, Human
gcacaugauuucac

SEQ ID NO: 3403724 - RNA, 15 nt, Human
gcacaugauuucaca

SEQ ID NO: 3403725 - RNA, 19 nt, Human
gcacaugcugagucuccca

SEQ ID NO: 3403726 - RNA, 14 nt, Human
gcacaugcuggcca

SEQ ID NO: 3403727 - RNA, 15 nt, Human
gcacaugcuggccag

SEQ ID NO: 3403728 - RNA, 18 nt, Human
gcacaugcuggccagccu

SEQ ID NO: 3403729 - RNA, 19 nt, Human
gcacaugcuggccagccug

SEQ ID NO: 3403730 - RNA, 21 nt, Human
gcacaugcuggccagccuggg

SEQ ID NO: 3403731 - RNA, 23 nt, Human
gcacaugcuggccagccuggggc

SEQ ID NO: 3403732 - RNA, 20 nt, Human
gcacaugucuuaaugaaguu

SEQ ID NO: 3403733 - RNA, 21 nt, Human
gcacaugucuuaaugaaguuu

SEQ ID NO: 3403734 - RNA, 12 nt, Human
gcacauguuucc

SEQ ID NO: 3403735 - RNA, 12 nt, Human
gcacauuaaaug

SEQ ID NO: 3403736 - RNA, 21 nt, Human
gcacauuuaagagacagucac

SEQ ID NO: 3403737 - RNA, 16 nt, Human
gcacauuuccccagac

SEQ ID NO: 3403738 - RNA, 18 nt, Human
gcaccaaaagaaguaaaa

SEQ ID NO: 3403739 - RNA, 18 nt, Human
gcaccaaaauaagaaaag

SEQ ID NO: 3403740 - RNA, 20 nt, Human
gcaccaaaucaaaaucucuc

SEQ ID NO: 3403741 - RNA, 15 nt, Human
gcaccaacccagccg

SEQ ID NO: 3403742 - RNA, 14 nt, Human
gcaccaagcccaca

SEQ ID NO: 3403743 - RNA, 14 nt, Human
gcaccacaaaauau

SEQ ID NO: 3403744 - RNA, 15 nt, Human
gcaccacacucagcc

SEQ ID NO: 3403745 - RNA, 20 nt, Human
gcaccaccaggucucccggg

SEQ ID NO: 3403746 - RNA, 20 nt, Human
gcaccacccuagucccuucc

SEQ ID NO: 3403747 - RNA, 15 nt, Human
gcaccacccuccuuc

SEQ ID NO: 3403748 - RNA, 20 nt, Human
gcaccacugcacuccagccu

SEQ ID NO: 3403749 - RNA, 16 nt, Human
gcaccagaauguauau

SEQ ID NO: 3403750 - RNA, 19 nt, Human
gcaccagacacccaggacu

SEQ ID NO: 3403751 - RNA, 20 nt, Human
gcaccagacacccaggacuu

SEQ ID NO: 3403752 - RNA, 21 nt, Human
gcaccagacacccaggacuua

SEQ ID NO: 3403753 - RNA, 18 nt, Human
gcaccagagcaaccucuc

SEQ ID NO: 3403754 - RNA, 13 nt, Human
gcaccagcagccu

SEQ ID NO: 3403755 - RNA, 16 nt, Human
gcaccagcagccugga

SEQ ID NO: 3403756 - RNA, 11 nt, Human
gcaccagccag

SEQ ID NO: 3403757 - RNA, 12 nt, Human
gcaccagccagc

SEQ ID NO: 3403758 - RNA, 17 nt, Human
gcaccagccggggaaga

SEQ ID NO: 3403759 - RNA, 19 nt, Human
gcaccagcuucuccaggcu

SEQ ID NO: 3403760 - RNA, 18 nt, Human
gcaccaggaagccguccu

SEQ ID NO: 3403761 - RNA, 12 nt, Human
gcaccaggagac

SEQ ID NO: 3403762 - RNA, 16 nt, Human
gcaccagggguuucuc

SEQ ID NO: 3403763 - RNA, 20 nt, Human
gcaccaguguccuccccuca

SEQ ID NO: 3403764 - RNA, 13 nt, Human
gcaccauacucau

SEQ ID NO: 3403765 - RNA, 14 nt, Human
gcaccaucccuuuu

SEQ ID NO: 3403766 - RNA, 22 nt, Human
gcaccaucccuuuuugaagugu

SEQ ID NO: 3403767 - RNA, 17 nt, Human
gcaccauccgccagggc

SEQ ID NO: 3403768 - RNA, 14 nt, Human
gcaccaucucuccu

SEQ ID NO: 3403769 - RNA, 15 nt, Human
gcaccaucucuccuc

SEQ ID NO: 3403770 - RNA, 17 nt, Human
gcaccaucucuccuccu

SEQ ID NO: 3403771 - RNA, 20 nt, Human
gcaccaucucugauuuucaa

SEQ ID NO: 3403772 - RNA, 15 nt, Human
gcaccauucugacuc

SEQ ID NO: 3403773 - RNA, 23 nt, Human
gcaccauucugacucgguuucuc

SEQ ID NO: 3403774 - RNA, 17 nt, Human
gcacccaagaccucagg

SEQ ID NO: 3403775 - RNA, 22 nt, Human
gcacccacaaauaaaugacaag

SEQ ID NO: 3403776 - RNA, 19 nt, Human
gcacccacaagugccacug

SEQ ID NO: 3403777 - RNA, 11 nt, Human
gcacccagaac

SEQ ID NO: 3403778 - RNA, 14 nt, Human
gcacccagaacagu

SEQ ID NO: 3403779 - RNA, 19 nt, Human
gcacccagccucuagggac

SEQ ID NO: 3403780 - RNA, 21 nt, Human
gcacccagccucuagggaccc

SEQ ID NO: 3403781 - RNA, 21 nt, Human
gcacccagugagcacucccaa

SEQ ID NO: 3403782 - RNA, 23 nt, Human
gcacccagugagcacucccaagu

SEQ ID NO: 3403783 - RNA, 16 nt, Human
gcacccauccaccguc

SEQ ID NO: 3403784 - RNA, 23 nt, Human
gcacccauccaccguccccuccc

SEQ ID NO: 3403785 - RNA, 21 nt, Human
gcacccaucugucugccaacc

SEQ ID NO: 3403786 - RNA, 13 nt, Human
gcaccccaaggcu

SEQ ID NO: 3403787 - RNA, 15 nt, Human
gcaccccaaguccag

SEQ ID NO: 3403788 - RNA, 20 nt, Human
gcaccccagcuggggccagg

SEQ ID NO: 3403789 - RNA, 15 nt, Human
gcaccccaugcuguu

SEQ ID NO: 3403790 - RNA, 14 nt, Human
gcacccccagccug

SEQ ID NO: 3403791 - RNA, 16 nt, Human
gcacccccagccuggg

SEQ ID NO: 3403792 - RNA, 19 nt, Human
gcacccccagccugggccu

SEQ ID NO: 3403793 - RNA, 14 nt, Human
gcaccccccaagcu

SEQ ID NO: 3403794 - RNA, 18 nt, Human
gcacccccuccugcugca

SEQ ID NO: 3403795 - RNA, 24 nt, Human
gcacccccugcagcuuguagccag

SEQ ID NO: 3403796 - RNA, 23 nt, Human
gcaccccgauguggaccucuacu

SEQ ID NO: 3403797 - RNA, 15 nt, Human
gcaccccucugcccu

SEQ ID NO: 3403798 - RNA, 13 nt, Human
gcaccccugucuc

SEQ ID NO: 3403799 - RNA, 21 nt, Human
gcaccccuucucuccucccca

SEQ ID NO: 3403800 - RNA, 15 nt, Human
gcacccgccucuccc

SEQ ID NO: 3403801 - RNA, 14 nt, Human
gcacccggccccug

SEQ ID NO: 3403802 - RNA, 19 nt, Human
gcacccggccccugcuggu

SEQ ID NO: 3403803 - RNA, 17 nt, Human
gcacccgggcucaggga

SEQ ID NO: 3403804 - RNA, 21 nt, Human
gcacccgggcucagggaccac

SEQ ID NO: 3403805 - RNA, 18 nt, Human
gcacccucaggcaggugg

SEQ ID NO: 3403806 - RNA, 17 nt, Human
gcacccucauacacaga

SEQ ID NO: 3403807 - RNA, 15 nt, Human
gcacccuccacccug

SEQ ID NO: 3403808 - RNA, 18 nt, Human
gcacccuccacccugucc

SEQ ID NO: 3403809 - RNA, 17 nt, Human
gcacccuccccucccgu

SEQ ID NO: 3403810 - RNA, 13 nt, Human
gcacccucccucc

SEQ ID NO: 3403811 - RNA, 16 nt, Human
gcacccuccgccuuca

SEQ ID NO: 3403812 - RNA, 19 nt, Human
gcacccucgaugaagccca

SEQ ID NO: 3403813 - RNA, 21 nt, Human
gcacccuggggccuggaccug

SEQ ID NO: 3403814 - RNA, 17 nt, Human
gcacccuguggcccugg

SEQ ID NO: 3403815 - RNA, 18 nt, Human
gcacccuguggcccuggc

SEQ ID NO: 3403816 - RNA, 16 nt, Human
gcacccuucuuuccuc

SEQ ID NO: 3403817 - RNA, 19 nt, Human
gcacccuucuuuccucuuc

SEQ ID NO: 3403818 - RNA, 19 nt, Human
gcaccgacuagacacacaa

SEQ ID NO: 3403819 - RNA, 13 nt, Human
gcaccgccuucuc

SEQ ID NO: 3403820 - RNA, 20 nt, Human
gcaccgcuuuuguucucgca

SEQ ID NO: 3403821 - RNA, 15 nt, Human
gcaccggaccagccu

SEQ ID NO: 3403822 - RNA, 16 nt, Human
gcaccggaccagccug

SEQ ID NO: 3403823 - RNA, 17 nt, Human
gcaccggaccagccugg

SEQ ID NO: 3403824 - RNA, 21 nt, Human
gcaccggaccagccuggccca

SEQ ID NO: 3403825 - RNA, 21 nt, Human
gcaccggcuggccuggccccu

SEQ ID NO: 3403826 - RNA, 18 nt, Human
gcaccgggccacagagaa

SEQ ID NO: 3403827 - RNA, 23 nt, Human
gcaccgggccacagagaaaguac

SEQ ID NO: 3403828 - RNA, 14 nt, Human
gcaccggggccugg

SEQ ID NO: 3403829 - RNA, 14 nt, Human
gcaccguacugugg

SEQ ID NO: 3403830 - RNA, 14 nt, Human
gcaccguucugugc

SEQ ID NO: 3403831 - RNA, 14 nt, Human
gcaccuaaaacuua

SEQ ID NO: 3403832 - RNA, 21 nt, Human
gcaccuaaaccaccagugccc

SEQ ID NO: 3403833 - RNA, 23 nt, Human
gcaccuaaaccaccagugcccaa

SEQ ID NO: 3403834 - RNA, 16 nt, Human
gcaccuaaagcagcca

SEQ ID NO: 3403835 - RNA, 16 nt, Human
gcaccuaauccaggca

SEQ ID NO: 3403836 - RNA, 17 nt, Human
gcaccuaauccaggcag

SEQ ID NO: 3403837 - RNA, 22 nt, Human
gcaccuaccaccacgcccggcu

SEQ ID NO: 3403838 - RNA, 19 nt, Human
gcaccuaccaucagggaca

SEQ ID NO: 3403839 - RNA, 18 nt, Human
gcaccuauagucccagcu

SEQ ID NO: 3403840 - RNA, 13 nt, Human
gcaccucagccug

SEQ ID NO: 3403841 - RNA, 13 nt, Human
gcagacagacaau

SEQ ID NO: 3403842 - RNA, 12 nt, Human
gcagacagagcc

SEQ ID NO: 3403843 - RNA, 22 nt, Human
gcagacagagccaggagaagcu

SEQ ID NO: 3403844 - RNA, 17 nt, Human
gcagacagcagcucagg

SEQ ID NO: 3403845 - RNA, 21 nt, Human
gcagacagcagcucaggcaca

SEQ ID NO: 3403846 - RNA, 15 nt, Human
gcagacagcaggcag

SEQ ID NO: 3403847 - RNA, 18 nt, Human
gcagacagcaggcagcgc

SEQ ID NO: 3403848 - RNA, 12 nt, Human
gcagacaggacc

SEQ ID NO: 3403849 - RNA, 14 nt, Human
gcagacaggaggaa

SEQ ID NO: 3403850 - RNA, 12 nt, Human
gcagacaggcaa

SEQ ID NO: 3403851 - RNA, 14 nt, Human
gcagacaggcaagc

SEQ ID NO: 3403852 - RNA, 20 nt, Human
gcagacaggccccgugaggc

SEQ ID NO: 3403853 - RNA, 17 nt, Human
gcagacaguuaagagaa

SEQ ID NO: 3403854 - RNA, 20 nt, Human
gcagacaugguggggucucc

SEQ ID NO: 3403855 - RNA, 17 nt, Human
gcagaccaccccgccug

SEQ ID NO: 3403856 - RNA, 21 nt, Human
gcagaccaccccgccugcccu

SEQ ID NO: 3403857 - RNA, 23 nt, Human
gcagaccacgcccguccugccug

SEQ ID NO: 3403858 - RNA, 22 nt, Human
gcagaccauuggggcucccagc

SEQ ID NO: 3403859 - RNA, 14 nt, Human
gcagacccugcccu

SEQ ID NO: 3403860 - RNA, 16 nt, Human
gcagaccuguccuccu

SEQ ID NO: 3403861 - RNA, 17 nt, Human
gcagaccuuuuuuagga

SEQ ID NO: 3403862 - RNA, 15 nt, Human
gcagacuacacagga

SEQ ID NO: 3403863 - RNA, 13 nt, Human
gcagacuggaggg

SEQ ID NO: 3403864 - RNA, 20 nt, Human
gcagacuggggcauccugug

SEQ ID NO: 3403865 - RNA, 13 nt, Human
gcagacugguggg

SEQ ID NO: 3403866 - RNA, 16 nt, Human
gcagacuucccagcua

SEQ ID NO: 3403867 - RNA, 18 nt, Human
gcagacuucccagcuagg

SEQ ID NO: 3403868 - RNA, 19 nt, Human
gcagacuuuuaaagacuug

SEQ ID NO: 3403869 - RNA, 21 nt, Human
gcagagaaacuuaagcaaagg

SEQ ID NO: 3403870 - RNA, 15 nt, Human
gcagagaaagaagag

SEQ ID NO: 3403871 - RNA, 18 nt, Human
gcagagaaagaagagaca

SEQ ID NO: 3403872 - RNA, 22 nt, Human
gcagagaaagaagagacaggag

SEQ ID NO: 3403873 - RNA, 20 nt, Human
gcagagaaagggacaaugau

SEQ ID NO: 3403874 - RNA, 17 nt, Human
gcagagaagcucucggg

SEQ ID NO: 3403875 - RNA, 21 nt, Human
gcagagaagugacgguuccua

SEQ ID NO: 3403876 - RNA, 12 nt, Human
gcagagaauaua

SEQ ID NO: 3403877 - RNA, 20 nt, Human
gcagagaaucauacuuagca

SEQ ID NO: 3403878 - RNA, 20 nt, Human
gcagagaaugaaagggccca

SEQ ID NO: 3403879 - RNA, 21 nt, Human
gcagagaaugaaagggcccag

SEQ ID NO: 3403880 - RNA, 23 nt, Human
gcagagaaugaaagggcccagag

SEQ ID NO: 3403881 - RNA, 14 nt, Human
gcagagaccauccc

SEQ ID NO: 3403882 - RNA, 19 nt, Human
gcagagaccaucccugaag

SEQ ID NO: 3403883 - RNA, 12 nt, Human
gcagagacuugg

SEQ ID NO: 3403884 - RNA, 12 nt, Human
gcagagagaagc

SEQ ID NO: 3403885 - RNA, 14 nt, Human
gcagagagaagccu

SEQ ID NO: 3403886 - RNA, 19 nt, Human
gcagagagccauuuuguga

SEQ ID NO: 3403887 - RNA, 21 nt, Human
gcagagagccauuuugugaau

SEQ ID NO: 3403888 - RNA, 19 nt, Human
gcagagagcggucucaggc

SEQ ID NO: 3403889 - RNA, 14 nt, Human
gcagagaggcugug

SEQ ID NO: 3403890 - RNA, 16 nt, Human
gcagagaugccucccu

SEQ ID NO: 3403891 - RNA, 18 nt, Human
gcagagcaagucugcagg

SEQ ID NO: 3403892 - RNA, 12 nt, Human
gcagagcagaga

SEQ ID NO: 3403893 - RNA, 14 nt, Human
gcagagcagagacc

SEQ ID NO: 3403894 - RNA, 20 nt, Human
gcagagcagagaccaucccu

SEQ ID NO: 3403895 - RNA, 20 nt, Human
gcagagcaggggcaggguga

SEQ ID NO: 3403896 - RNA, 17 nt, Human
gcagagcccccaggaag

SEQ ID NO: 3403897 - RNA, 15 nt, Human
gcagagcccugcucc

SEQ ID NO: 3403898 - RNA, 16 nt, Human
gcagagcccugcuccc

SEQ ID NO: 3403899 - RNA, 14 nt, Human
gcagagccuucuca

SEQ ID NO: 3403900 - RNA, 16 nt, Human
gcagagccuucucaga

SEQ ID NO: 3403901 - RNA, 23 nt, Human
gcagagcgccgugaguucucagg

SEQ ID NO: 3403902 - RNA, 23 nt, Human
gcagagcugauggagaaggaagg

SEQ ID NO: 3403903 - RNA, 22 nt, Human
gcagagcuucuuccaggugccc

SEQ ID NO: 3403904 - RNA, 14 nt, Human
gcagaggaaagcaa

SEQ ID NO: 3403905 - RNA, 21 nt, Human
gcagaggagaacuugcugccu

SEQ ID NO: 3403906 - RNA, 12 nt, Human
gcagaggccaga

SEQ ID NO: 3403907 - RNA, 15 nt, Human
gcagaggccagaggc

SEQ ID NO: 3403908 - RNA, 14 nt, Human
gcagaggcccacau

SEQ ID NO: 3403909 - RNA, 14 nt, Human
gcagaggcuggccu

SEQ ID NO: 3403910 - RNA, 19 nt, Human
gcagaggcuggccucagac

SEQ ID NO: 3403911 - RNA, 19 nt, Human
gcagaggcuguggcuggug

SEQ ID NO: 3403912 - RNA, 19 nt, Human
gcagagggcagaggcugga

SEQ ID NO: 3403913 - RNA, 13 nt, Human
gcagagggcugga

SEQ ID NO: 3403914 - RNA, 18 nt, Human
gcagagggcuggaggccc

SEQ ID NO: 3403915 - RNA, 20 nt, Human
gcagagggcuggaggcccag

SEQ ID NO: 3403916 - RNA, 15 nt, Human
gcagaggggcagagg

SEQ ID NO: 3403917 - RNA, 19 nt, Human
gcagaggggcagauggaaa

SEQ ID NO: 3403918 - RNA, 13 nt, Human
gcagaggggcagg

SEQ ID NO: 3403919 - RNA, 20 nt, Human
gcagaggggcuuucuggaga

SEQ ID NO: 3403920 - RNA, 13 nt, Human
gcagagguaaaag

SEQ ID NO: 3403921 - RNA, 20 nt, Human
gcagagguaaaagugugagc

SEQ ID NO: 3403922 - RNA, 18 nt, Human
gcagagguacccugggug

SEQ ID NO: 3403923 - RNA, 19 nt, Human
gcagagguacccugggugu

SEQ ID NO: 3403924 - RNA, 14 nt, Human
gcagaggucagacu

SEQ ID NO: 3403925 - RNA, 15 nt, Human
gcagaggucugugcu

SEQ ID NO: 3403926 - RNA, 15 nt, Human
gcagagguggccaga

SEQ ID NO: 3403927 - RNA, 23 nt, Human
gcagagguggccagagcugggag

SEQ ID NO: 3403928 - RNA, 23 nt, Human
gcagagguugcagugagccgaga

SEQ ID NO: 3403929 - RNA, 21 nt, Human
gcagagguugcagugagcuga

SEQ ID NO: 3403930 - RNA, 13 nt, Human
gcagagucacacg

SEQ ID NO: 3403931 - RNA, 16 nt, Human
gcagagugcacagcug

SEQ ID NO: 3403932 - RNA, 23 nt, Human
gcagagugcccagaacuggacuc

SEQ ID NO: 3403933 - RNA, 14 nt, Human
gcagagugccccac

SEQ ID NO: 3403934 - RNA, 21 nt, Human
gcagagugccccaccugccac

SEQ ID NO: 3403935 - RNA, 13 nt, Human
gcagaguuaaauc

SEQ ID NO: 3403936 - RNA, 20 nt, Human
gcagaguuacaguucugugg

SEQ ID NO: 3403937 - RNA, 16 nt, Human
gcagaguugaagacag

SEQ ID NO: 3403938 - RNA, 17 nt, Human
gcagaguugaagacaga

SEQ ID NO: 3403939 - RNA, 13 nt, Human
gcagaguuguaaa

SEQ ID NO: 3403940 - RNA, 20 nt, Human
gcagaguuguaaauauauaa

SEQ ID NO: 3403941 - RNA, 12 nt, Human
gcagaguuuuca

SEQ ID NO: 3403942 - RNA, 14 nt, Human
gcagaguuuucauu

SEQ ID NO: 3403943 - RNA, 19 nt, Human
gcagaguuuucauuaaauc

SEQ ID NO: 3403944 - RNA, 18 nt, Human
gcagauaaucagccucuu

SEQ ID NO: 3403945 - RNA, 19 nt, Human
gcagauaaucagccucuua

SEQ ID NO: 3403946 - RNA, 17 nt, Human
gcagauacuacugacca

SEQ ID NO: 3403947 - RNA, 24 nt, Human
gcagauacuacugaccagacaagc

SEQ ID NO: 3403948 - RNA, 15 nt, Human
gcagauacugucucu

SEQ ID NO: 3403949 - RNA, 12 nt, Human
gcagauauuuug

SEQ ID NO: 3403950 - RNA, 16 nt, Human
gcagaucaccugaggu

SEQ ID NO: 3403951 - RNA, 20 nt, Human
gcagaucugugccccaugcc

SEQ ID NO: 3403952 - RNA, 22 nt, Human
gcagaucugugccccaugccug

SEQ ID NO: 3403953 - RNA, 13 nt, Human
gcagaugauccau

SEQ ID NO: 3403954 - RNA, 14 nt, Human
gcagaugauccaug

SEQ ID NO: 3403955 - RNA, 19 nt, Human
gcagaugcaaugacucagg

SEQ ID NO: 3403956 - RNA, 18 nt, Human
gcagaugcagagagccau

SEQ ID NO: 3403957 - RNA, 16 nt, Human
gcagaugccacccuag

SEQ ID NO: 3403958 - RNA, 18 nt, Human
gcagaugccacccuagcc

SEQ ID NO: 3403959 - RNA, 20 nt, Human
gcagaugcuagcacaugccc

SEQ ID NO: 3403960 - RNA, 17 nt, Human
gcagauggaaaggagcc

SEQ ID NO: 3403961 - RNA, 22 nt, Human
gcagauguaaaguuauucuuga

SEQ ID NO: 3403962 - RNA, 13 nt, Human
gcagauguaggag

SEQ ID NO: 3403963 - RNA, 14 nt, Human
gcagauguaggagg

SEQ ID NO: 3403964 - RNA, 17 nt, Human
gcagauguaggagggac

SEQ ID NO: 3403965 - RNA, 19 nt, Human
gcagauguaggagggacug

SEQ ID NO: 3403966 - RNA, 18 nt, Human
gcagauguccuugaugcu

SEQ ID NO: 3403967 - RNA, 20 nt, Human
gcagauguuagauauuuuuc

SEQ ID NO: 3403968 - RNA, 13 nt, Human
gcagauuagcagg

SEQ ID NO: 3403969 - RNA, 16 nt, Human
gcagauuagcaggcca

SEQ ID NO: 3403970 - RNA, 18 nt, Human
gcagauuauucacugauu

SEQ ID NO: 3403971 - RNA, 21 nt, Human
gcagauucucccuugcucugc

SEQ ID NO: 3403972 - RNA, 17 nt, Human
gcagauugaaaaggaca

SEQ ID NO: 3403973 - RNA, 20 nt, Human
gcagauuggaaggagacaca

SEQ ID NO: 3403974 - RNA, 23 nt, Human
gcagauuuagugaaagcuagaga

SEQ ID NO: 3403975 - RNA, 16 nt, Human
gcagauuugggcugga

SEQ ID NO: 3403976 - RNA, 21 nt, Human
gcagauuuucagcaaacucuu

SEQ ID NO: 3403977 - RNA, 16 nt, Human
gcagauuuuggccaug

SEQ ID NO: 3403978 - RNA, 22 nt, Human
gcagcaaacacuccacccucca

SEQ ID NO: 3403979 - RNA, 14 nt, Human
gcagcaaauuuuca

SEQ ID NO: 3403980 - RNA, 11 nt, Human
gcagcaacaau

SEQ ID NO: 3403981 - RNA, 16 nt, Human
gcagcaaccagagcac

SEQ ID NO: 3403982 - RNA, 19 nt, Human
gcagcaacuuguccuagca

SEQ ID NO: 3403983 - RNA, 16 nt, Human
gcagcaaggcccgagc

SEQ ID NO: 3403984 - RNA, 16 nt, Human
gcagcaaggcccugcu

SEQ ID NO: 3403985 - RNA, 17 nt, Human
gcagcaaggucuugcuc

SEQ ID NO: 3403986 - RNA, 16 nt, Human
gccaggcgggcucaag

SEQ ID NO: 3403987 - RNA, 18 nt, Human
gccaggcucaggccaugg

SEQ ID NO: 3403988 - RNA, 18 nt, Human
gccaggcuccuuccuguc

SEQ ID NO: 3403989 - RNA, 15 nt, Human
gccaggcugaccaca

SEQ ID NO: 3403990 - RNA, 19 nt, Human
gccaggcugaccacagcac

SEQ ID NO: 3403991 - RNA, 16 nt, Human
gccaggcuggagugca

SEQ ID NO: 3403992 - RNA, 16 nt, Human
gccaggcugggucgcc

SEQ ID NO: 3403993 - RNA, 17 nt, Human
gccaggcuggucuaaaa

SEQ ID NO: 3403994 - RNA, 15 nt, Human
gccaggcuggucuca

SEQ ID NO: 3403995 - RNA, 16 nt, Human
gccagggacagagggg

SEQ ID NO: 3403996 - RNA, 14 nt, Human
gccagggagaagcu

SEQ ID NO: 3403997 - RNA, 19 nt, Human
gccagggagaccuggacac

SEQ ID NO: 3403998 - RNA, 15 nt, Human
gccagggagagccca

SEQ ID NO: 3403999 - RNA, 16 nt, Human
gccagggagagcccag

SEQ ID NO: 3404000 - RNA, 17 nt, Human
gccagggagagcccagg

SEQ ID NO: 3404001 - RNA, 21 nt, Human
gccagggagagcccaggagcu

SEQ ID NO: 3404002 - RNA, 20 nt, Human
gccagggauggggccacagc

SEQ ID NO: 3404003 - RNA, 15 nt, Human
gccagggcagugcua

SEQ ID NO: 3404004 - RNA, 18 nt, Human
gccagggcagugcuagug

SEQ ID NO: 3404005 - RNA, 19 nt, Human
gccagggccacgcuccagc

SEQ ID NO: 3404006 - RNA, 13 nt, Human
gccagggccaggg

SEQ ID NO: 3404007 - RNA, 13 nt, Human
gccagggccccuc

SEQ ID NO: 3404008 - RNA, 15 nt, Human
gccagggccccucuc

SEQ ID NO: 3404009 - RNA, 16 nt, Human
gccagggcccugcaga

SEQ ID NO: 3404010 - RNA, 15 nt, Human
gccagggccuggaag

SEQ ID NO: 3404011 - RNA, 22 nt, Human
gccagggcuauagcucaggacc

SEQ ID NO: 3404012 - RNA, 18 nt, Human
gccagggcugcccugaga

SEQ ID NO: 3404013 - RNA, 17 nt, Human
gccaggggaaaaucagc

SEQ ID NO: 3404014 - RNA, 19 nt, Human
gccagggggacuagccccu

SEQ ID NO: 3404015 - RNA, 20 nt, Human
gccaggggggugaggagcug

SEQ ID NO: 3404016 - RNA, 18 nt, Human
gccaggggucucccugga

SEQ ID NO: 3404017 - RNA, 19 nt, Human
gccagggucuccagaaagc

SEQ ID NO: 3404018 - RNA, 16 nt, Human
gccagggucucucccu

SEQ ID NO: 3404019 - RNA, 23 nt, Human
gccagggugagagcugcucugga

SEQ ID NO: 3404020 - RNA, 23 nt, Human
gccaggguguggcccugccaucu

SEQ ID NO: 3404021 - RNA, 15 nt, Human
gccagguaaugugaa

SEQ ID NO: 3404022 - RNA, 16 nt, Human
gccagguauggcucug

SEQ ID NO: 3404023 - RNA, 22 nt, Human
gccaggucacccuuugcuguga

SEQ ID NO: 3404024 - RNA, 16 nt, Human
gccagguccuugcccu

SEQ ID NO: 3404025 - RNA, 21 nt, Human
gccaggugacugucuggggag

SEQ ID NO: 3404026 - RNA, 13 nt, Human
gccaggugcagug

SEQ ID NO: 3404027 - RNA, 16 nt, Human
gccaggugccuccuga

SEQ ID NO: 3404028 - RNA, 12 nt, Human
gccaggugccuu

SEQ ID NO: 3404029 - RNA, 19 nt, Human
gccagguucuauuuggaau

SEQ ID NO: 3404030 - RNA, 20 nt, Human
gccagguucuauuuggaauu

SEQ ID NO: 3404031 - RNA, 12 nt, Human
gccaguaaaugg

SEQ ID NO: 3404032 - RNA, 23 nt, Human
gccaguaaaugggggugcauuug

SEQ ID NO: 3404033 - RNA, 15 nt, Human
gccaguaacaggcuc

SEQ ID NO: 3404034 - RNA, 21 nt, Human
gccaguaacgcgucuuccuga

SEQ ID NO: 3404035 - RNA, 16 nt, Human
gccaguaauugguccg

SEQ ID NO: 3404036 - RNA, 23 nt, Human
gccaguaucuauauauguguaug

SEQ ID NO: 3404037 - RNA, 12 nt, Human
gccaguauuuua

SEQ ID NO: 3404038 - RNA, 15 nt, Human
gccaguauuuuaaaa

SEQ ID NO: 3404039 - RNA, 17 nt, Human
gccaguauuuuuaaagg

SEQ ID NO: 3404040 - RNA, 17 nt, Human
gccagucaagaagaaaa

SEQ ID NO: 3404041 - RNA, 18 nt, Human
gccagucaagaagaaaaa

SEQ ID NO: 3404042 - RNA, 17 nt, Human
gccagucaccccggcca

SEQ ID NO: 3404043 - RNA, 22 nt, Human
gccagucccugaggcagguccc

SEQ ID NO: 3404044 - RNA, 14 nt, Human
gccaguccugccug

SEQ ID NO: 3404045 - RNA, 18 nt, Human
gccaguccugccuggcca

SEQ ID NO: 3404046 - RNA, 19 nt, Human
gccaguccugccuggccag

SEQ ID NO: 3404047 - RNA, 20 nt, Human
gccaguccugccuggccagg

SEQ ID NO: 3404048 - RNA, 15 nt, Human
gccaguccugcuacc

SEQ ID NO: 3404049 - RNA, 14 nt, Human
gccaguccuguccu

SEQ ID NO: 3404050 - RNA, 19 nt, Human
gccagucgcgcugccugug

SEQ ID NO: 3404051 - RNA, 13 nt, Human
gccagucugggcu

SEQ ID NO: 3404052 - RNA, 14 nt, Human
gccagucugggcug

SEQ ID NO: 3404053 - RNA, 20 nt, Human
gccagucuugacgaguguga

SEQ ID NO: 3404054 - RNA, 13 nt, Human
gccagugacagac

SEQ ID NO: 3404055 - RNA, 17 nt, Human
gccagugaccugaggaa

SEQ ID NO: 3404056 - RNA, 13 nt, Human
gccagugacucca

SEQ ID NO: 3404057 - RNA, 21 nt, Human
gccagugacuccaggagagga

SEQ ID NO: 3404058 - RNA, 15 nt, Human
gccagugagccacuc

SEQ ID NO: 3404059 - RNA, 13 nt, Human
gccagugccuggg

SEQ ID NO: 3404060 - RNA, 19 nt, Human
gccagugccuuaccuccug

SEQ ID NO: 3404061 - RNA, 21 nt, Human
gccagugccuuaccuccugcc

SEQ ID NO: 3404062 - RNA, 14 nt, Human
gccaguggcuggau

SEQ ID NO: 3404063 - RNA, 14 nt, Human
gccaguggggccug

SEQ ID NO: 3404064 - RNA, 16 nt, Human
gccaguggggccugug

SEQ ID NO: 3404065 - RNA, 17 nt, Human
gccaguggggccugugg

SEQ ID NO: 3404066 - RNA, 20 nt, Human
gccaguguaaucccccagga

SEQ ID NO: 3404067 - RNA, 18 nt, Human
gccagugugcugaugggc

SEQ ID NO: 3404068 - RNA, 16 nt, Human
gccaguguugccuaag

SEQ ID NO: 3404069 - RNA, 22 nt, Human
gccaguuauggcuauaggugcu

SEQ ID NO: 3404070 - RNA, 15 nt, Human
gccaguucaguaccu

SEQ ID NO: 3404071 - RNA, 18 nt, Human
gccaguugaauuuaugga

SEQ ID NO: 3404072 - RNA, 14 nt, Human
gccaguuggaacca

SEQ ID NO: 3404073 - RNA, 22 nt, Human
gccaguuggucccccuuccaug

SEQ ID NO: 3404074 - RNA, 16 nt, Human
gccaguuguccuccuu

SEQ ID NO: 3404075 - RNA, 21 nt, Human
gccauaaaacauuaagaaaau

SEQ ID NO: 3404076 - RNA, 21 nt, Human
gccauaagcaacaauuuucag

SEQ ID NO: 3404077 - RNA, 21 nt, Human
gccauaauacaaaaggcucca

SEQ ID NO: 3404078 - RNA, 19 nt, Human
gccauacuggccucgccug

SEQ ID NO: 3404079 - RNA, 22 nt, Human
gccauacuggccucgccuggcc

SEQ ID NO: 3404080 - RNA, 18 nt, Human
gccauacuuaucucucug

SEQ ID NO: 3404081 - RNA, 21 nt, Human
gccauacuuaucucucugugc

SEQ ID NO: 3404082 - RNA, 18 nt, Human
gccauagaguacacugcc

SEQ ID NO: 3404083 - RNA, 18 nt, Human
gccauauaaguuugaagg

SEQ ID NO: 3404084 - RNA, 20 nt, Human
gccauauuuaccucagccug

SEQ ID NO: 3404085 - RNA, 22 nt, Human
gccauauuuaccucagccuggg

SEQ ID NO: 3404086 - RNA, 18 nt, Human
gccauauuuguaaaauga

SEQ ID NO: 3404087 - RNA, 14 nt, Human
gccaucaaaaugcu

SEQ ID NO: 3404088 - RNA, 16 nt, Human
gccaucaaaaugcuuu

SEQ ID NO: 3404089 - RNA, 19 nt, Human
gccaucaaaaugcuuuuua

SEQ ID NO: 3404090 - RNA, 15 nt, Human
gccaucaacuaaagu

SEQ ID NO: 3404091 - RNA, 22 nt, Human
gccaucacaugaucuguuuuuc

SEQ ID NO: 3404092 - RNA, 19 nt, Human
gccaucaccucagauggca

SEQ ID NO: 3404093 - RNA, 22 nt, Human
gccaucaccuuagaccaccaag

SEQ ID NO: 3404094 - RNA, 21 nt, Human
gccauccaaauaagaaaccua

SEQ ID NO: 3404095 - RNA, 14 nt, Human
gccauccagguuca

SEQ ID NO: 3404096 - RNA, 14 nt, Human
gccaucccagcccc

SEQ ID NO: 3404097 - RNA, 17 nt, Human
gccaucccgucuucucc

SEQ ID NO: 3404098 - RNA, 18 nt, Human
gccaucccucccuccacc

SEQ ID NO: 3404099 - RNA, 23 nt, Human
gccaucccucccuccaccucccu

SEQ ID NO: 3404100 - RNA, 19 nt, Human
gccauccucaaacacugca

SEQ ID NO: 3404101 - RNA, 19 nt, Human
gccauccuggcccagggca

SEQ ID NO: 3404102 - RNA, 12 nt, Human
gccauccugucc

SEQ ID NO: 3404103 - RNA, 18 nt, Human
gccaucgccgggacucca

SEQ ID NO: 3404104 - RNA, 17 nt, Human
gccaucgguccugucuc

SEQ ID NO: 3404105 - RNA, 18 nt, Human
gccaucgguccugucucc

SEQ ID NO: 3404106 - RNA, 20 nt, Human
gccaucucaccuccugcugg

SEQ ID NO: 3404107 - RNA, 12 nt, Human
gccaucucugga

SEQ ID NO: 3404108 - RNA, 16 nt, Human
gccaucucuggaugcc

SEQ ID NO: 3404109 - RNA, 13 nt, Human
gccaucuggagag

SEQ ID NO: 3404110 - RNA, 21 nt, Human
gccaucugggcuccuccaggg

SEQ ID NO: 3404111 - RNA, 20 nt, Human
gccaugaacuggaggccagg

SEQ ID NO: 3404112 - RNA, 16 nt, Human
gccaugaagggacccu

SEQ ID NO: 3404113 - RNA, 11 nt, Human
gccaugaauua

SEQ ID NO: 3404114 - RNA, 16 nt, Human
gccaugacccugccuc

SEQ ID NO: 3404115 - RNA, 22 nt, Human
gccaugacccugccucucccag

SEQ ID NO: 3404116 - RNA, 23 nt, Human
gccaugagaugauacauccaaag

SEQ ID NO: 3404117 - RNA, 19 nt, Human
gccaugagccgcccaaggc

SEQ ID NO: 3404118 - RNA, 17 nt, Human
gccaugagcuccagacc

SEQ ID NO: 3404119 - RNA, 22 nt, Human
gccaugagcuccagacccccag

SEQ ID NO: 3404120 - RNA, 23 nt, Human
gccaugagcuccagacccccagc

SEQ ID NO: 3404121 - RNA, 18 nt, Human
gccaugaggaacaaggca

SEQ ID NO: 3404122 - RNA, 15 nt, Human
gccaugaugccucug

SEQ ID NO: 3404123 - RNA, 18 nt, Human
gccaugaugccucugucu

SEQ ID NO: 3404124 - RNA, 19 nt, Human
gccaugaugccucugucuu

SEQ ID NO: 3404125 - RNA, 19 nt, Human
gccaugauggcaacagauc

SEQ ID NO: 3404126 - RNA, 15 nt, Human
gccaugauguggagu

SEQ ID NO: 3404127 - RNA, 14 nt, Human
gccaugcaagaacu

SEQ ID NO: 3404128 - RNA, 14 nt, Human
gccaugcaauucau

SEQ ID NO: 3404129 - RNA, 20 nt, Human
gccaugcgcccccuccgccc

SEQ ID NO: 3404130 - RNA, 21 nt, Human
gccaugcuccucuuccccaga

SEQ ID NO: 3404131 - RNA, 13 nt, Human
gccaugcugaggc

SEQ ID NO: 3404132 - RNA, 14 nt, Human
gccaugcugaggcc

SEQ ID NO: 3404133 - RNA, 21 nt, Human
gccaugcugaggccugggccg

SEQ ID NO: 3404134 - RNA, 16 nt, Human
gccaugcugggaagac

SEQ ID NO: 3404135 - RNA, 22 nt, Human
gccauggaagaggcuacagggc

SEQ ID NO: 3404136 - RNA, 18 nt, Human
gccauggacagaagaagg

SEQ ID NO: 3404137 - RNA, 18 nt, Human
gccauggacucuacacug

SEQ ID NO: 3404138 - RNA, 23 nt, Human
gccauggacucuacacugugaac

SEQ ID NO: 3404139 - RNA, 16 nt, Human
gccauggacucugucc

SEQ ID NO: 3404140 - RNA, 22 nt, Human
gccauggagaaagcugacuugg

SEQ ID NO: 3404141 - RNA, 16 nt, Human
gccauggagagcugga

SEQ ID NO: 3404142 - RNA, 20 nt, Human
gccauggagagcuggagccu

SEQ ID NO: 3404143 - RNA, 16 nt, Human
gccauggaggcacaca

SEQ ID NO: 3404144 - RNA, 13 nt, Human
gccauggaguugu

SEQ ID NO: 3404145 - RNA, 23 nt, Human
gccauggauggaaaacgcucucu

SEQ ID NO: 3404146 - RNA, 17 nt, Human
gccauggccugcaaacu

SEQ ID NO: 3404147 - RNA, 22 nt, Human
gccauggcgugucccucucgga

SEQ ID NO: 3404148 - RNA, 20 nt, Human
gccauggcugucucaaacca

SEQ ID NO: 3404149 - RNA, 19 nt, Human
gccauggcuuccaaggugg

SEQ ID NO: 3404150 - RNA, 14 nt, Human
gccaugggacaggg

SEQ ID NO: 3404151 - RNA, 12 nt, Human
gccaugggacca

SEQ ID NO: 3404152 - RNA, 13 nt, Human
gccaugggaccaa

SEQ ID NO: 3404153 - RNA, 17 nt, Human
gccaugggaccaaaccu

SEQ ID NO: 3404154 - RNA, 21 nt, Human
gccaugggaccaaaccuagcc

SEQ ID NO: 3404155 - RNA, 17 nt, Human
gccauggguagccuggg

SEQ ID NO: 3404156 - RNA, 19 nt, Human
gccauggguagccugggug

SEQ ID NO: 3404157 - RNA, 19 nt, Human
gccaugguacccccuucug

SEQ ID NO: 3404158 - RNA, 16 nt, Human
gccauguaccuccccu

SEQ ID NO: 3404159 - RNA, 21 nt, Human
gccauguaccuccccugccuu

SEQ ID NO: 3404160 - RNA, 15 nt, Human
gccauguacuaguuu

SEQ ID NO: 3404161 - RNA, 16 nt, Human
gccaugucagacacag

SEQ ID NO: 3404162 - RNA, 15 nt, Human
gccauguccaaagag

SEQ ID NO: 3404163 - RNA, 18 nt, Human
gccauguccaaagaggcu

SEQ ID NO: 3404164 - RNA, 19 nt, Human
gccauguccaaagaggcug

SEQ ID NO: 3404165 - RNA, 22 nt, Human
gccauguccaaagaggcugccc

SEQ ID NO: 3404166 - RNA, 12 nt, Human
gccaugucuaca

SEQ ID NO: 3404167 - RNA, 22 nt, Human
gccaugucugcagugugccccc

SEQ ID NO: 3404168 - RNA, 14 nt, Human
gccaugucuucucc

SEQ ID NO: 3404169 - RNA, 15 nt, Human
gccauguguuccaag

SEQ ID NO: 3404170 - RNA, 16 nt, Human
gccauguguuccaagg

SEQ ID NO: 3404171 - RNA, 17 nt, Human
gccauguuaacaugaca

SEQ ID NO: 3404172 - RNA, 18 nt, Human
gccauguuccaauaaaca

SEQ ID NO: 3404173 - RNA, 16 nt, Human
gccauguuggccaggc

SEQ ID NO: 3404174 - RNA, 22 nt, Human
gccauguuggccaggcuggucu

SEQ ID NO: 3404175 - RNA, 24 nt, Human
gccauguuggccaggcuggucuca

SEQ ID NO: 3404176 - RNA, 14 nt, Human
gccauguuuaagau

SEQ ID NO: 3404177 - RNA, 17 nt, Human
gccauguuuaagauuua

SEQ ID NO: 3404178 - RNA, 11 nt, Human
gccauguuuau

SEQ ID NO: 3404179 - RNA, 18 nt, Human
gccauguuuauuacagua

SEQ ID NO: 3404180 - RNA, 16 nt, Human
gccauuaccauggaga

SEQ ID NO: 3404181 - RNA, 18 nt, Human
gccauuaccauggagaca

SEQ ID NO: 3404182 - RNA, 18 nt, Human
gccauuacccagcuaaau

SEQ ID NO: 3404183 - RNA, 12 nt, Human
gccauuauuuuc

SEQ ID NO: 3404184 - RNA, 19 nt, Human
gccauuauuuucugucaga

SEQ ID NO: 3404185 - RNA, 18 nt, Human
gccauucacugcccccag

SEQ ID NO: 3404186 - RNA, 22 nt, Human
gccauucacuucauaauccagu

SEQ ID NO: 3404187 - RNA, 17 nt, Human
gccauuccccgucucug

SEQ ID NO: 3404188 - RNA, 18 nt, Human
gccauucucaagcccugc

SEQ ID NO: 3404189 - RNA, 14 nt, Human
gccauugcacucca

SEQ ID NO: 3404190 - RNA, 15 nt, Human
gccauugcacuccag

SEQ ID NO: 3404191 - RNA, 19 nt, Human
gccauugcacuccagccug

SEQ ID NO: 3404192 - RNA, 15 nt, Human
gccauugcuuaccuu

SEQ ID NO: 3404193 - RNA, 21 nt, Human
gccauugucuucggaaaccuu

SEQ ID NO: 3404194 - RNA, 14 nt, Human
gccauugucuuuau

SEQ ID NO: 3404195 - RNA, 15 nt, Human
gccauugucuuuaua

SEQ ID NO: 3404196 - RNA, 18 nt, Human
gccauugucuuuauauga

SEQ ID NO: 3404197 - RNA, 12 nt, Human
gccauugugaac

SEQ ID NO: 3404198 - RNA, 18 nt, Human
gccauuuaaaaaguugua

SEQ ID NO: 3404199 - RNA, 22 nt, Human
gccauuuaaagcuuauuaaaac

SEQ ID NO: 3404200 - RNA, 17 nt, Human
gccauuugcaauaacag

SEQ ID NO: 3404201 - RNA, 23 nt, Human
gccauuugcacccuccgccuuca

SEQ ID NO: 3404202 - RNA, 14 nt, Human
gccauuugucccaa

SEQ ID NO: 3404203 - RNA, 13 nt, Human
gccauuuugcauu

SEQ ID NO: 3404204 - RNA, 15 nt, Human
gcccaaaggacgcac

SEQ ID NO: 3404205 - RNA, 22 nt, Human
gcccaaauuaucaagcuaauaa

SEQ ID NO: 3404206 - RNA, 23 nt, Human
gcccaaauuaucaagcuaauaaa

SEQ ID NO: 3404207 - RNA, 14 nt, Human
gcccaaauuuuucu

SEQ ID NO: 3404208 - RNA, 23 nt, Human
gcccaacagacaccaucuuuugu

SEQ ID NO: 3404209 - RNA, 22 nt, Human
gcccaacaggggcuccaugcca

SEQ ID NO: 3404210 - RNA, 13 nt, Human
gcccaaccacacu

SEQ ID NO: 3404211 - RNA, 15 nt, Human
gcccaacccugucug

SEQ ID NO: 3404212 - RNA, 16 nt, Human
gcccaacccuucccuc

SEQ ID NO: 3404213 - RNA, 23 nt, Human
gcccaaccggggagcccccgccc

SEQ ID NO: 3404214 - RNA, 14 nt, Human
gcccaaccucagca

SEQ ID NO: 3404215 - RNA, 13 nt, Human
gcccaaccuccug

SEQ ID NO: 3404216 - RNA, 15 nt, Human
gcccaaccucuuccu

SEQ ID NO: 3404217 - RNA, 24 nt, Human
gcccaaccugcucuccucuugcca

SEQ ID NO: 3404218 - RNA, 15 nt, Human
gcccaacuguguagc

SEQ ID NO: 3404219 - RNA, 21 nt, Human
gcccaagaauagaugcugacu

SEQ ID NO: 3404220 - RNA, 21 nt, Human
gcccaagacagaugccccaga

SEQ ID NO: 3404221 - RNA, 23 nt, Human
gcccaagacagaugccccagagc

SEQ ID NO: 3404222 - RNA, 17 nt, Human
gcccaagccagaggcug

SEQ ID NO: 3404223 - RNA, 20 nt, Human
gcccaagcccgacuugcugu

SEQ ID NO: 3404224 - RNA, 14 nt, Human
gcccaagcuucccu

SEQ ID NO: 3404225 - RNA, 20 nt, Human
gcccaagcuucccuccaucc

SEQ ID NO: 3404226 - RNA, 16 nt, Human
gcccaaggcggccccu

SEQ ID NO: 3404227 - RNA, 15 nt, Human
gcccaagggaucugg

SEQ ID NO: 3404228 - RNA, 16 nt, Human
gcccaaguccaaaugu

SEQ ID NO: 3404229 - RNA, 19 nt, Human
gcccaaguccaaauguuua

SEQ ID NO: 3404230 - RNA, 20 nt, Human
gcccaaguucaugcagcugu

SEQ ID NO: 3404231 - RNA, 22 nt, Human
gcccacaaucccuuucuaagga

SEQ ID NO: 3404232 - RNA, 11 nt, Human
gcccacacaca

SEQ ID NO: 3404233 - RNA, 13 nt, Human
gcccacacacagg

SEQ ID NO: 3404234 - RNA, 13 nt, Human
gcccacacacccc

SEQ ID NO: 3404235 - RNA, 13 nt, Human
gcccacacccccu

SEQ ID NO: 3404236 - RNA, 13 nt, Human
gcccacacuugag

SEQ ID NO: 3404237 - RNA, 14 nt, Human
gcccacagcaggcc

SEQ ID NO: 3404238 - RNA, 14 nt, Human
gcccacagcccgca

SEQ ID NO: 3404239 - RNA, 16 nt, Human
gcccacagcuguauga

SEQ ID NO: 3404240 - RNA, 16 nt, Human
gcccacaggaggcaag

SEQ ID NO: 3404241 - RNA, 18 nt, Human
gcccacagguguccccag

SEQ ID NO: 3404242 - RNA, 17 nt, Human
gcccacaguauauuuua

SEQ ID NO: 3404243 - RNA, 20 nt, Human
gcccacauagugaugguucc

SEQ ID NO: 3404244 - RNA, 23 nt, Human
gcccacauccggggccagcuccg

SEQ ID NO: 3404245 - RNA, 22 nt, Human
gcccacauguguccaucccagc

SEQ ID NO: 3404246 - RNA, 16 nt, Human
gcccacauuggaccca

SEQ ID NO: 3404247 - RNA, 17 nt, Human
gcccacauuuagucucu

SEQ ID NO: 3404248 - RNA, 21 nt, Human
gcccaccaacaucccauugcc

SEQ ID NO: 3404249 - RNA, 21 nt, Human
gcccaccaggccccccuguca

SEQ ID NO: 3404250 - RNA, 13 nt, Human
gcccaccccaccc

SEQ ID NO: 3404251 - RNA, 16 nt, Human
gcccaccccauggccg

SEQ ID NO: 3404252 - RNA, 14 nt, Human
gcccaccccccuca

SEQ ID NO: 3404253 - RNA, 20 nt, Human
gcccacccccggcagcagcc

SEQ ID NO: 3404254 - RNA, 16 nt, Human
gcccacccccugcccu

SEQ ID NO: 3404255 - RNA, 17 nt, Human
gcccacccccugcccug

SEQ ID NO: 3404256 - RNA, 19 nt, Human
gcccacccccugcccugca

SEQ ID NO: 3404257 - RNA, 18 nt, Human
gcccacccggugggaccc

SEQ ID NO: 3404258 - RNA, 20 nt, Human
gcccacccgguucaguguuu

SEQ ID NO: 3404259 - RNA, 15 nt, Human
gcccacccugcugcc

SEQ ID NO: 3404260 - RNA, 20 nt, Human
gcccacccugcugcuggugc

SEQ ID NO: 3404261 - RNA, 20 nt, Human
gcccacccugcuuggcccag

SEQ ID NO: 3404262 - RNA, 23 nt, Human
gcccacccugcuuggcccagggg

SEQ ID NO: 3404263 - RNA, 14 nt, Human
gcccaccgcaugcc

SEQ ID NO: 3404264 - RNA, 20 nt, Human
gcccaccgcaugcccccucg

SEQ ID NO: 3404265 - RNA, 11 nt, Human
gcccaccugcc

SEQ ID NO: 3404266 - RNA, 20 nt, Human
gcccaccugcccaucacagg

SEQ ID NO: 3404267 - RNA, 12 nt, Human
gcccaccugccu

SEQ ID NO: 3404268 - RNA, 13 nt, Human
gcccaccugccug

SEQ ID NO: 3404269 - RNA, 15 nt, Human
gcccaccugccuggc

SEQ ID NO: 3404270 - RNA, 16 nt, Human
gcccaccugccuggcc

SEQ ID NO: 3404271 - RNA, 16 nt, Human
gcccaccuggccaccu

SEQ ID NO: 3404272 - RNA, 17 nt, Human
gcccaccuggccaccug

SEQ ID NO: 3404273 - RNA, 18 nt, Human
gcccaccuggccaccuga

SEQ ID NO: 3404274 - RNA, 24 nt, Human
gcccaccuggccucugcacucccc

SEQ ID NO: 3404275 - RNA, 22 nt, Human
gccccacccugggcccugggcu

SEQ ID NO: 3404276 - RNA, 20 nt, Human
gccccaccugccacuaggcu

SEQ ID NO: 3404277 - RNA, 15 nt, Human
gccccaccuuuauua

SEQ ID NO: 3404278 - RNA, 23 nt, Human
gccccaccuuuauuaaaaucuua

SEQ ID NO: 3404279 - RNA, 13 nt, Human
gccccacuccucu

SEQ ID NO: 3404280 - RNA, 20 nt, Human
gccccacuccucugcugacc

SEQ ID NO: 3404281 - RNA, 12 nt, Human
gccccacucuca

SEQ ID NO: 3404282 - RNA, 14 nt, Human
gccccacugccagc

SEQ ID NO: 3404283 - RNA, 12 nt, Human
gccccacugccc

SEQ ID NO: 3404284 - RNA, 17 nt, Human
gccccacuuguccuuag

SEQ ID NO: 3404285 - RNA, 18 nt, Human
gccccacuuguccuuagc

SEQ ID NO: 3404286 - RNA, 18 nt, Human
gccccagaaggcagggaa

SEQ ID NO: 3404287 - RNA, 13 nt, Human
gccccagagcugu

SEQ ID NO: 3404288 - RNA, 22 nt, Human
gccccagagcuguuuauggccu

SEQ ID NO: 3404289 - RNA, 20 nt, Human
gccccagauaccagccccug

SEQ ID NO: 3404290 - RNA, 19 nt, Human
gccccagcaccaccagguc

SEQ ID NO: 3404291 - RNA, 11 nt, Human
gccccagccag

SEQ ID NO: 3404292 - RNA, 14 nt, Human
gccccagccagagu

SEQ ID NO: 3404293 - RNA, 18 nt, Human
gccccagcccacccuccu

SEQ ID NO: 3404294 - RNA, 17 nt, Human
gccccagcccccuuugg

SEQ ID NO: 3404295 - RNA, 14 nt, Human
gccccagcccugcu

SEQ ID NO: 3404296 - RNA, 13 nt, Human
gccccagccugcu

SEQ ID NO: 3404297 - RNA, 22 nt, Human
gccccagccugcuagcuagcuc

SEQ ID NO: 3404298 - RNA, 15 nt, Human
gccccagccuggccc

SEQ ID NO: 3404299 - RNA, 20 nt, Human
gccccagccuggcccagcuc

SEQ ID NO: 3404300 - RNA, 22 nt, Human
gccccagccuggcccagcuccc

SEQ ID NO: 3404301 - RNA, 14 nt, Human
gccccagcgcugac

SEQ ID NO: 3404302 - RNA, 14 nt, Human
gccccaggaagccg

SEQ ID NO: 3404303 - RNA, 23 nt, Human
gccccaggaccagcucaggacag

SEQ ID NO: 3404304 - RNA, 12 nt, Human
gccccaggcagg

SEQ ID NO: 3404305 - RNA, 19 nt, Human
gccccaggcucguggacug

SEQ ID NO: 3404306 - RNA, 17 nt, Human
gccccaggcugcggcuu

SEQ ID NO: 3404307 - RNA, 14 nt, Human
gccccagucagccu

SEQ ID NO: 3404308 - RNA, 20 nt, Human
gccccagucagccucucucc

SEQ ID NO: 3404309 - RNA, 14 nt, Human
gccccagugccaag

SEQ ID NO: 3404310 - RNA, 15 nt, Human
gccccagugcccaca

SEQ ID NO: 3404311 - RNA, 14 nt, Human
gccccaucagugcu

SEQ ID NO: 3404312 - RNA, 19 nt, Human
gccccaucggucaccuugu

SEQ ID NO: 3404313 - RNA, 19 nt, Human
gccccaucuccccucagcu

SEQ ID NO: 3404314 - RNA, 14 nt, Human
gccccaugaagcca

SEQ ID NO: 3404315 - RNA, 19 nt, Human
gccccaugaagccacagcc

SEQ ID NO: 3404316 - RNA, 15 nt, Human
gccccaugaccucca

SEQ ID NO: 3404317 - RNA, 14 nt, Human
gccccaugccuguc

SEQ ID NO: 3404318 - RNA, 17 nt, Human
gccccaugccuguccag

SEQ ID NO: 3404319 - RNA, 16 nt, Human
gccccaugcuggagcc

SEQ ID NO: 3404320 - RNA, 17 nt, Human
gccccaugcuggagccu

SEQ ID NO: 3404321 - RNA, 21 nt, Human
gccccaugcuggagccugugu

SEQ ID NO: 3404322 - RNA, 18 nt, Human
gccccaugucucucagaa

SEQ ID NO: 3404323 - RNA, 13 nt, Human
gccccauuaacug

SEQ ID NO: 3404324 - RNA, 15 nt, Human
gccccauuccuggga

SEQ ID NO: 3404325 - RNA, 22 nt, Human
gccccauucugccugcccaggc

SEQ ID NO: 3404326 - RNA, 20 nt, Human
gccccauucuuuuguaauuu

SEQ ID NO: 3404327 - RNA, 23 nt, Human
gccccauucuuuuguaauuuaaa

SEQ ID NO: 3404328 - RNA, 20 nt, Human
gcccccaaagauagacaggu

SEQ ID NO: 3404329 - RNA, 24 nt, Human
gcccccaaagauagacagguccug

SEQ ID NO: 3404330 - RNA, 23 nt, Human
gcccccaacagcacccucuccag

SEQ ID NO: 3404331 - RNA, 17 nt, Human
gcccccaaccucagggc

SEQ ID NO: 3404332 - RNA, 16 nt, Human
gcccccacaccuggcc

SEQ ID NO: 3404333 - RNA, 22 nt, Human
gcccccacauuugugccgacac

SEQ ID NO: 3404334 - RNA, 13 nt, Human
gcccccaccacac

SEQ ID NO: 3404335 - RNA, 22 nt, Human
gcccccaccacggccacuggcc

SEQ ID NO: 3404336 - RNA, 14 nt, Human
gcccccaccccauu

SEQ ID NO: 3404337 - RNA, 17 nt, Human
gcccccaccccggggac

SEQ ID NO: 3404338 - RNA, 18 nt, Human
gcccccaccgugggcagg

SEQ ID NO: 3404339 - RNA, 16 nt, Human
gcccccaccuccaccc

SEQ ID NO: 3404340 - RNA, 19 nt, Human
gcccccacugccuuugacc

SEQ ID NO: 3404341 - RNA, 16 nt, Human
gcccccacuugccucu

SEQ ID NO: 3404342 - RNA, 17 nt, Human
gcccccacuugccucuu

SEQ ID NO: 3404343 - RNA, 17 nt, Human
gcccccagagcccaggc

SEQ ID NO: 3404344 - RNA, 19 nt, Human
gcccccagagcccaggcuc

SEQ ID NO: 3404345 - RNA, 18 nt, Human
gcccccagagcgccccuc

SEQ ID NO: 3404346 - RNA, 15 nt, Human
gcccccagcccaaag

SEQ ID NO: 3404347 - RNA, 17 nt, Human
gcccccagcccagggcu

SEQ ID NO: 3404348 - RNA, 22 nt, Human
gcccccagcccagggcuccugc

SEQ ID NO: 3404349 - RNA, 15 nt, Human
gcccccagccccucc

SEQ ID NO: 3404350 - RNA, 19 nt, Human
gcccccagccccuccccca

SEQ ID NO: 3404351 - RNA, 14 nt, Human
gcccccagccuaug

SEQ ID NO: 3404352 - RNA, 23 nt, Human
gcccccagccuaugagcauccug

SEQ ID NO: 3404353 - RNA, 12 nt, Human
gcccccagccug

SEQ ID NO: 3404354 - RNA, 16 nt, Human
gcccccagccugucag

SEQ ID NO: 3404355 - RNA, 21 nt, Human
gcccccagcuaagaaccugga

SEQ ID NO: 3404356 - RNA, 12 nt, Human
gcccccagcuuc

SEQ ID NO: 3404357 - RNA, 13 nt, Human
gcccccaggacug

SEQ ID NO: 3404358 - RNA, 14 nt, Human
gcccccaggacugg

SEQ ID NO: 3404359 - RNA, 16 nt, Human
gcccccaggugccagu

SEQ ID NO: 3404360 - RNA, 20 nt, Human
gcccccaguccccaccccug

SEQ ID NO: 3404361 - RNA, 21 nt, Human
gcccccaguccccaccccugc

SEQ ID NO: 3404362 - RNA, 22 nt, Human
gcccccaguccccaccccugcc

SEQ ID NO: 3404363 - RNA, 18 nt, Human
gcccccaucucaugcccc

SEQ ID NO: 3404364 - RNA, 16 nt, Human
gccccccacacuuccc

SEQ ID NO: 3404365 - RNA, 20 nt, Human
gccccccacacuucccuggc

SEQ ID NO: 3404366 - RNA, 19 nt, Human
gccccccaccccuggaaga

SEQ ID NO: 3404367 - RNA, 21 nt, Human
gccccccaccccuggaagagc

SEQ ID NO: 3404368 - RNA, 13 nt, Human
gcccccccuucca

SEQ ID NO: 3404369 - RNA, 15 nt, Human
gccccccucccagag

SEQ ID NO: 3404370 - RNA, 16 nt, Human
gccccccucccagagg

SEQ ID NO: 3404371 - RNA, 14 nt, Human
gccccccugcccug

SEQ ID NO: 3404372 - RNA, 13 nt, Human
gccccccuggccu

SEQ ID NO: 3404373 - RNA, 19 nt, Human
gccccccuggccuccccca

SEQ ID NO: 3404374 - RNA, 20 nt, Human
gccccccugguccccuccuu

SEQ ID NO: 3404375 - RNA, 14 nt, Human
gcccccgagcuggg

SEQ ID NO: 3404376 - RNA, 16 nt, Human
gcccccgcauccccug

SEQ ID NO: 3404377 - RNA, 16 nt, Human
gcccccgcccccggcg

SEQ ID NO: 3404378 - RNA, 15 nt, Human
gcccccgcucauggg

SEQ ID NO: 3404379 - RNA, 16 nt, Human
gcccccgcucaugggc

SEQ ID NO: 3404380 - RNA, 23 nt, Human
gcccccuccccggcacccucugg

SEQ ID NO: 3404381 - RNA, 16 nt, Human
gcccccucccuggaug

SEQ ID NO: 3404382 - RNA, 22 nt, Human
gcccccuccgcccugccacuca

SEQ ID NO: 3404383 - RNA, 21 nt, Human
gcccccuccucuagcuguggg

SEQ ID NO: 3404384 - RNA, 21 nt, Human
gcccccuccucucccaucccc

SEQ ID NO: 3404385 - RNA, 12 nt, Human
gcccccuccuga

SEQ ID NO: 3404386 - RNA, 12 nt, Human
gcccccucgugc

SEQ ID NO: 3404387 - RNA, 16 nt, Human
gcccccucgugccagu

SEQ ID NO: 3404388 - RNA, 14 nt, Human
gcccccucugcccu

SEQ ID NO: 3404389 - RNA, 20 nt, Human
gcccccugaccacucagaga

SEQ ID NO: 3404390 - RNA, 24 nt, Human
gcccccugcaggaaggagcugccu

SEQ ID NO: 3404391 - RNA, 19 nt, Human
gcccccugcccguguacau

SEQ ID NO: 3404392 - RNA, 15 nt, Human
gcccccugcuggcuc

SEQ ID NO: 3404393 - RNA, 18 nt, Human
gcccccugcuucaguccc

SEQ ID NO: 3404394 - RNA, 17 nt, Human
gcccccuggccucugug

SEQ ID NO: 3404395 - RNA, 16 nt, Human
gcccccugucucucag

SEQ ID NO: 3404396 - RNA, 16 nt, Human
gcccccuucucccaca

SEQ ID NO: 3404397 - RNA, 18 nt, Human
gcccccuucucccacacu

SEQ ID NO: 3404398 - RNA, 17 nt, Human
gcccccuuucccgggcu

SEQ ID NO: 3404399 - RNA, 23 nt, Human
gcccccuuucccgggcuguccac

SEQ ID NO: 3404400 - RNA, 18 nt, Human
gcccccuuugggcccagg

SEQ ID NO: 3404401 - RNA, 17 nt, Human
gccccgaagggccccca

SEQ ID NO: 3404402 - RNA, 12 nt, Human
gccccgacucca

SEQ ID NO: 3404403 - RNA, 15 nt, Human
gccccgacuccagcc

SEQ ID NO: 3404404 - RNA, 18 nt, Human
gccccgaggccuucucug

SEQ ID NO: 3404405 - RNA, 13 nt, Human
gccccgccccaca

SEQ ID NO: 3404406 - RNA, 22 nt, Human
gccccgccccacauuccgacaa

SEQ ID NO: 3404407 - RNA, 15 nt, Human
gccccgcccucuucc

SEQ ID NO: 3404408 - RNA, 16 nt, Human
gccccgcccucuuccu

SEQ ID NO: 3404409 - RNA, 17 nt, Human
gccccgcgccuccuucc

SEQ ID NO: 3404410 - RNA, 22 nt, Human
gccccgcuuggcuucuucuuua

SEQ ID NO: 3404411 - RNA, 20 nt, Human
gccccgcuuguccagcgccu

SEQ ID NO: 3404412 - RNA, 16 nt, Human
gccccggaucagagca

SEQ ID NO: 3404413 - RNA, 21 nt, Human
gccccggaucagagcaggacc

SEQ ID NO: 3404414 - RNA, 23 nt, Human
gccccggaucagagcaggaccuc

SEQ ID NO: 3404415 - RNA, 17 nt, Human
gccccggccaccucugc

SEQ ID NO: 3404416 - RNA, 16 nt, Human
gccccggccccagcca

SEQ ID NO: 3404417 - RNA, 13 nt, Human
gccccggccccgg

SEQ ID NO: 3404418 - RNA, 14 nt, Human
gccccggcccuggg

SEQ ID NO: 3404419 - RNA, 18 nt, Human
gccccgguggcugggcag

SEQ ID NO: 3404420 - RNA, 16 nt, Human
gccccggugugcggug

SEQ ID NO: 3404421 - RNA, 22 nt, Human
gccccgucaccaucucaggcca

SEQ ID NO: 3404422 - RNA, 23 nt, Human
gccccgucaccaucucaggccac

SEQ ID NO: 3404423 - RNA, 13 nt, Human
gccccgucucagg

SEQ ID NO: 3404424 - RNA, 19 nt, Human
gccccgugcagacuggagg

SEQ ID NO: 3404425 - RNA, 20 nt, Human
gccccgugcagacuggaggg

SEQ ID NO: 3404426 - RNA, 13 nt, Human
gccccuacugcug

SEQ ID NO: 3404427 - RNA, 14 nt, Human
gccccuacugcugu

SEQ ID NO: 3404428 - RNA, 19 nt, Human
gccccuagaaacccaagcu

SEQ ID NO: 3404429 - RNA, 13 nt, Human
gccccuagcccag

SEQ ID NO: 3404430 - RNA, 20 nt, Human
gccccuagcccaggagagag

SEQ ID NO: 3404431 - RNA, 21 nt, Human
gccccuagcccaggagagaga

SEQ ID NO: 3404432 - RNA, 19 nt, Human
gccccuagccgguuccugu

SEQ ID NO: 3404433 - RNA, 14 nt, Human
gccccucaccuacu

SEQ ID NO: 3404434 - RNA, 14 nt, Human
gccccucaccuggg

SEQ ID NO: 3404435 - RNA, 14 nt, Human
gccccucagggucc

SEQ ID NO: 3404436 - RNA, 13 nt, Human
gccccuccagcuu

SEQ ID NO: 3404437 - RNA, 14 nt, Human
gccccuccagcuug

SEQ ID NO: 3404438 - RNA, 12 nt, Human
gccccuccccca

SEQ ID NO: 3404439 - RNA, 16 nt, Human
gccccucccccugcca

SEQ ID NO: 3404440 - RNA, 16 nt, Human
gccccucccgccccuu

SEQ ID NO: 3404441 - RNA, 16 nt, Human
gccccucccucccaga

SEQ ID NO: 3404442 - RNA, 20 nt, Human
gccccucccucccagagcac

SEQ ID NO: 3404443 - RNA, 17 nt, Human
gccccucccuccucuga

SEQ ID NO: 3404444 - RNA, 23 nt, Human
gccccucccucuccagcaggccc

SEQ ID NO: 3404445 - RNA, 13 nt, Human
gccccuccuccag

SEQ ID NO: 3404446 - RNA, 20 nt, Human
gccccuccuccagccccugu

SEQ ID NO: 3404447 - RNA, 12 nt, Human
gccccuccucug

SEQ ID NO: 3404448 - RNA, 14 nt, Human
gccccuccucugcc

SEQ ID NO: 3404449 - RNA, 15 nt, Human
gccccuccucugcca

SEQ ID NO: 3404450 - RNA, 16 nt, Human
gccccuccucugccac

SEQ ID NO: 3404451 - RNA, 15 nt, Human
gccccucgccugugg

SEQ ID NO: 3404452 - RNA, 15 nt, Human
gccccucucagcccu

SEQ ID NO: 3404453 - RNA, 20 nt, Human
gccccucuccccgcaguguu

SEQ ID NO: 3404454 - RNA, 12 nt, Human
gccccucucccu

SEQ ID NO: 3404455 - RNA, 21 nt, Human
gccccucucccuugggcucug

SEQ ID NO: 3404456 - RNA, 14 nt, Human
gccccucucugggc

SEQ ID NO: 3404457 - RNA, 11 nt, Human
gccccucugcc

SEQ ID NO: 3404458 - RNA, 12 nt, Human
gccccucugccc

SEQ ID NO: 3404459 - RNA, 14 nt, Human
gccccucugcccag

SEQ ID NO: 3404460 - RNA, 20 nt, Human
gccccucugcccagcuuggg

SEQ ID NO: 3404461 - RNA, 14 nt, Human
gccccucuucccca

SEQ ID NO: 3404462 - RNA, 23 nt, Human
gccccucuuggagaagucucagc

SEQ ID NO: 3404463 - RNA, 14 nt, Human
gccccucuuucucu

SEQ ID NO: 3404464 - RNA, 16 nt, Human
gccccugaacaagaau

SEQ ID NO: 3404465 - RNA, 16 nt, Human
gccccugagaucucug

SEQ ID NO: 3404466 - RNA, 20 nt, Human
gccccugagaucucugcagg

SEQ ID NO: 3404467 - RNA, 16 nt, Human
gccccugagcccacug

SEQ ID NO: 3404468 - RNA, 22 nt, Human
gccccugcacagcaggcugcca

SEQ ID NO: 3404469 - RNA, 23 nt, Human
gccccugcauccccuuggcugug

SEQ ID NO: 3404470 - RNA, 13 nt, Human
gccccugccaccc

SEQ ID NO: 3404471 - RNA, 15 nt, Human
gccccugccacccug

SEQ ID NO: 3404472 - RNA, 23 nt, Human
gccccugccaccuccugccucag

SEQ ID NO: 3404473 - RNA, 20 nt, Human
gccccugccccagcccaagu

SEQ ID NO: 3404474 - RNA, 12 nt, Human
gccccugccccg

SEQ ID NO: 3404475 - RNA, 16 nt, Human
gccccugccccgucac

SEQ ID NO: 3404476 - RNA, 14 nt, Human
gccccugccccuca

SEQ ID NO: 3404477 - RNA, 15 nt, Human
gccccugccccugcc

SEQ ID NO: 3404478 - RNA, 17 nt, Human
gccccugccucucugca

SEQ ID NO: 3404479 - RNA, 12 nt, Human
gccccugccugc

SEQ ID NO: 3404480 - RNA, 13 nt, Human
gccccugccugcc

SEQ ID NO: 3404481 - RNA, 14 nt, Human
gccccugccugcca

SEQ ID NO: 3404482 - RNA, 15 nt, Human
gccccugcucuggug

SEQ ID NO: 3404483 - RNA, 17 nt, Human
gccccugcugccucccc

SEQ ID NO: 3404484 - RNA, 20 nt, Human
gccccugcugccuccccaac

SEQ ID NO: 3404485 - RNA, 20 nt, Human
gccccugcugcugucaccuc

SEQ ID NO: 3404486 - RNA, 20 nt, Human
gccccugcuucuccagccug

SEQ ID NO: 3404487 - RNA, 15 nt, Human
gccccuggagccaga

SEQ ID NO: 3404488 - RNA, 20 nt, Human
gccccuggaggcugccuccc

SEQ ID NO: 3404489 - RNA, 21 nt, Human
gccccuggaggcugccuccca

SEQ ID NO: 3404490 - RNA, 18 nt, Human
gccccuggaugcagccuc

SEQ ID NO: 3404491 - RNA, 12 nt, Human
gccccuggcacu

SEQ ID NO: 3404492 - RNA, 17 nt, Human
gccccuggcacucuugu

SEQ ID NO: 3404493 - RNA, 21 nt, Human
gccccuggcagagaugccucc

SEQ ID NO: 3404494 - RNA, 23 nt, Human
gccccuggcagccccuguucugg

SEQ ID NO: 3404495 - RNA, 13 nt, Human
gccccuggcccag

SEQ ID NO: 3404496 - RNA, 16 nt, Human
gccccuggcccagcgg

SEQ ID NO: 3404497 - RNA, 17 nt, Human
gccccuggcccagcggc

SEQ ID NO: 3404498 - RNA, 18 nt, Human
gccccuggcccagcggcc

SEQ ID NO: 3404499 - RNA, 23 nt, Human
gccccuggcccagcggccccucc

SEQ ID NO: 3404500 - RNA, 14 nt, Human
gccccuggccccag

SEQ ID NO: 3404501 - RNA, 19 nt, Human
gccccuggccgcgcuccgg

SEQ ID NO: 3404502 - RNA, 21 nt, Human
gccccuggccgcgcuccgggc

SEQ ID NO: 3404503 - RNA, 11 nt, Human
gccccugggcu

SEQ ID NO: 3404504 - RNA, 23 nt, Human
gccccugggcuuggccugcugug

SEQ ID NO: 3404505 - RNA, 17 nt, Human
gccccuggggccuagac

SEQ ID NO: 3404506 - RNA, 15 nt, Human
gccccugggguggcc

SEQ ID NO: 3404507 - RNA, 21 nt, Human
gccccuggguggguggugggg

SEQ ID NO: 3404508 - RNA, 20 nt, Human
gccccuggucccucugcagu

SEQ ID NO: 3404509 - RNA, 17 nt, Human
gccccuguucuggcaga

SEQ ID NO: 3404510 - RNA, 16 nt, Human
gccccuuagacagagg

SEQ ID NO: 3404511 - RNA, 17 nt, Human
gccccuuagcccccacc

SEQ ID NO: 3404512 - RNA, 23 nt, Human
gccccuucauugauuuccugugu

SEQ ID NO: 3404513 - RNA, 19 nt, Human
gccccuucccacucacccc

SEQ ID NO: 3404514 - RNA, 13 nt, Human
gccccuucccuuc

SEQ ID NO: 3404515 - RNA, 17 nt, Human
gccccuucucagaaucu

SEQ ID NO: 3404516 - RNA, 18 nt, Human
gccccuucucagaaucua

SEQ ID NO: 3404517 - RNA, 17 nt, Human
gccccuucucucccugc

SEQ ID NO: 3404518 - RNA, 19 nt, Human
gccccuucugacccaugcu

SEQ ID NO: 3404519 - RNA, 15 nt, Human
gccccuucugcucag

SEQ ID NO: 3404520 - RNA, 19 nt, Human
gccccuucugcucagcucu

SEQ ID NO: 3404521 - RNA, 19 nt, Human
gccccuugacaacuggcag

SEQ ID NO: 3404522 - RNA, 21 nt, Human
gccccuuucccuuguagcucc

SEQ ID NO: 3404523 - RNA, 19 nt, Human
gccccuuuuuacuccccuu

SEQ ID NO: 3404524 - RNA, 21 nt, Human
gcccgaauacaaacaccugga

SEQ ID NO: 3404525 - RNA, 17 nt, Human
gcccgacagccuggcac

SEQ ID NO: 3404526 - RNA, 16 nt, Human
gcccgacauggcuccg

SEQ ID NO: 3404527 - RNA, 18 nt, Human
gcccgacuugcuguuuug

SEQ ID NO: 3404528 - RNA, 13 nt, Human
gcccgagcagcug

SEQ ID NO: 3404529 - RNA, 12 nt, Human
gcccgagcuggu

SEQ ID NO: 3404530 - RNA, 14 nt, Human
gcccgagcuggugc

SEQ ID NO: 3404531 - RNA, 22 nt, Human
gcccgagcuggugcauuacaga

SEQ ID NO: 3404532 - RNA, 22 nt, Human
gcccgagcuguuuauguuuuua

SEQ ID NO: 3404533 - RNA, 23 nt, Human
gcccgaggaggugucucaggcug

SEQ ID NO: 3404534 - RNA, 15 nt, Human
gcccgaggcaccagu

SEQ ID NO: 3404535 - RNA, 18 nt, Human
gcccgagguggcugccug

SEQ ID NO: 3404536 - RNA, 14 nt, Human
gcccgauccucccc

SEQ ID NO: 3404537 - RNA, 20 nt, Human
gcccgauccuccccuggacu

SEQ ID NO: 3404538 - RNA, 22 nt, Human
gcccgcacacccucacucugcc

SEQ ID NO: 3404539 - RNA, 23 nt, Human
gcccgcacacccucacucugcca

SEQ ID NO: 3404540 - RNA, 13 nt, Human
gcccgcacaccug

SEQ ID NO: 3404541 - RNA, 14 nt, Human
gcccgcacagagcu

SEQ ID NO: 3404542 - RNA, 13 nt, Human
gcccgcacagcag

SEQ ID NO: 3404543 - RNA, 14 nt, Human
gcccgcacagcagc

SEQ ID NO: 3404544 - RNA, 15 nt, Human
gcccgcacagcagcc

SEQ ID NO: 3404545 - RNA, 16 nt, Human
gcccgcacccccaccc

SEQ ID NO: 3404546 - RNA, 19 nt, Human
gcccgcacccccacccuuu

SEQ ID NO: 3404547 - RNA, 15 nt, Human
gcccgcagaccucug

SEQ ID NO: 3404548 - RNA, 13 nt, Human
gcccgcaucagcu

SEQ ID NO: 3404549 - RNA, 19 nt, Human
gcccgcaucagcugcucag

SEQ ID NO: 3404550 - RNA, 20 nt, Human
gcccgcaucagcugcucaga

SEQ ID NO: 3404551 - RNA, 14 nt, Human
gcccgcaugcagca

SEQ ID NO: 3404552 - RNA, 17 nt, Human
gcccgcaugcagcagcu

SEQ ID NO: 3404553 - RNA, 19 nt, Human
gcccgcaugcagcagcuug

SEQ ID NO: 3404554 - RNA, 19 nt, Human
gcccgcaugcggcccagga

SEQ ID NO: 3404555 - RNA, 15 nt, Human
gcccgccacacagac

SEQ ID NO: 3404556 - RNA, 12 nt, Human
gcccgccaccac

SEQ ID NO: 3404557 - RNA, 13 nt, Human
gcccgcccacugu

SEQ ID NO: 3404558 - RNA, 15 nt, Human
gcccgcccacugucc

SEQ ID NO: 3404559 - RNA, 14 nt, Human
gcccgccccugcag

SEQ ID NO: 3404560 - RNA, 16 nt, Human
gcccgccccugcagca

SEQ ID NO: 3404561 - RNA, 13 nt, Human
gcccgccugccag

SEQ ID NO: 3404562 - RNA, 14 nt, Human
gcccgccugccagu

SEQ ID NO: 3404563 - RNA, 15 nt, Human
gcccgccugccaguc

SEQ ID NO: 3404564 - RNA, 16 nt, Human
gcccgccugccagucc

SEQ ID NO: 3404565 - RNA, 18 nt, Human
gcccgccugccaguccua

SEQ ID NO: 3404566 - RNA, 22 nt, Human
gcgccaggcugaccacagcaca

SEQ ID NO: 3404567 - RNA, 13 nt, Human
gcgccaguccugc

SEQ ID NO: 3404568 - RNA, 17 nt, Human
gcgcccaccuccccacg

SEQ ID NO: 3404569 - RNA, 17 nt, Human
gcgcccaguccuuccac

SEQ ID NO: 3404570 - RNA, 22 nt, Human
gcgcccaguccuuccaccucga

SEQ ID NO: 3404571 - RNA, 23 nt, Human
gcgcccaguuggguggaugccug

SEQ ID NO: 3404572 - RNA, 19 nt, Human
gcgccccccccuccccaug

SEQ ID NO: 3404573 - RNA, 13 nt, Human
gcgccccuagccg

SEQ ID NO: 3404574 - RNA, 22 nt, Human
gcgccccuagccgguuccuguc

SEQ ID NO: 3404575 - RNA, 16 nt, Human
gcgcccgccccugcag

SEQ ID NO: 3404576 - RNA, 14 nt, Human
gcgcccgcugggcu

SEQ ID NO: 3404577 - RNA, 13 nt, Human
gcgcccucugucc

SEQ ID NO: 3404578 - RNA, 14 nt, Human
gcgcccucuguccu

SEQ ID NO: 3404579 - RNA, 15 nt, Human
gcgcccucuguccug

SEQ ID NO: 3404580 - RNA, 14 nt, Human
gcgcccugcagacc

SEQ ID NO: 3404581 - RNA, 16 nt, Human
gcgcccugcagacccu

SEQ ID NO: 3404582 - RNA, 13 nt, Human
gcgcccuggcccc

SEQ ID NO: 3404583 - RNA, 16 nt, Human
gcgcccuggcccccac

SEQ ID NO: 3404584 - RNA, 16 nt, Human
gcgcccuuccucucca

SEQ ID NO: 3404585 - RNA, 18 nt, Human
gcgcccuuccucuccacc

SEQ ID NO: 3404586 - RNA, 17 nt, Human
gcgccgagucugucucu

SEQ ID NO: 3404587 - RNA, 17 nt, Human
gcgccgcaaaccacacu

SEQ ID NO: 3404588 - RNA, 18 nt, Human
gcgccggcgggcgggccg

SEQ ID NO: 3404589 - RNA, 22 nt, Human
gcgccgucuccaggggcugcuu

SEQ ID NO: 3404590 - RNA, 15 nt, Human
gcgccgugcugggca

SEQ ID NO: 3404591 - RNA, 18 nt, Human
gcgccgugcugggcagcc

SEQ ID NO: 3404592 - RNA, 15 nt, Human
gcgccuacaggagug

SEQ ID NO: 3404593 - RNA, 20 nt, Human
gcgccuaguggggucucccu

SEQ ID NO: 3404594 - RNA, 21 nt, Human
gcgccuaguggggucucccuc

SEQ ID NO: 3404595 - RNA, 18 nt, Human
gcgccuccaacccuagca

SEQ ID NO: 3404596 - RNA, 19 nt, Human
gcgccuccauccaaggcca

SEQ ID NO: 3404597 - RNA, 17 nt, Human
gcgccucccuccacccc

SEQ ID NO: 3404598 - RNA, 18 nt, Human
gcgccugccccucccaga

SEQ ID NO: 3404599 - RNA, 16 nt, Human
gcgccuguagucccag

SEQ ID NO: 3404600 - RNA, 13 nt, Human
gcgccuucucccc

SEQ ID NO: 3404601 - RNA, 23 nt, Human
gcgccuugucuccuacuccugac

SEQ ID NO: 3404602 - RNA, 14 nt, Human
gcgccuuucccaac

SEQ ID NO: 3404603 - RNA, 15 nt, Human
gcgccuuucccaacu

SEQ ID NO: 3404604 - RNA, 21 nt, Human
gcgcgaucccacacaggcugg

SEQ ID NO: 3404605 - RNA, 15 nt, Human
gcgcgaucucagcuc

SEQ ID NO: 3404606 - RNA, 16 nt, Human
gcgcgaucucagcuca

SEQ ID NO: 3404607 - RNA, 18 nt, Human
gcgcgcacacacacacau

SEQ ID NO: 3404608 - RNA, 19 nt, Human
gcgcgcacacacacacaua

SEQ ID NO: 3404609 - RNA, 15 nt, Human
gcgcgccccuagccg

SEQ ID NO: 3404610 - RNA, 17 nt, Human
gcgcggacgugcugggc

SEQ ID NO: 3404611 - RNA, 16 nt, Human
gcgcggccagccccgg

SEQ ID NO: 3404612 - RNA, 21 nt, Human
gcgcggccagccccggcccug

SEQ ID NO: 3404613 - RNA, 23 nt, Human
gcgcggccagccccggcccuggg

SEQ ID NO: 3404614 - RNA, 19 nt, Human
gcgcgggccccggcgcccc

SEQ ID NO: 3404615 - RNA, 15 nt, Human
gcgcgucccccugcc

SEQ ID NO: 3404616 - RNA, 20 nt, Human
gcgcuaacuugcuuaaaugu

SEQ ID NO: 3404617 - RNA, 21 nt, Human
gcgcuaacuugcuuaaaugug

SEQ ID NO: 3404618 - RNA, 16 nt, Human
gcgcuacccacuucua

SEQ ID NO: 3404619 - RNA, 13 nt, Human
gcgcuagaggcca

SEQ ID NO: 3404620 - RNA, 17 nt, Human
gcgcucaauaggaccag

SEQ ID NO: 3404621 - RNA, 19 nt, Human
gcgcucagaacaguaucuu

SEQ ID NO: 3404622 - RNA, 22 nt, Human
gcgcucagggccaugcugaggc

SEQ ID NO: 3404623 - RNA, 19 nt, Human
gcgcucccuugaccugcug

SEQ ID NO: 3404624 - RNA, 23 nt, Human
gcgcucgaaguugaucuccccag

SEQ ID NO: 3404625 - RNA, 16 nt, Human
gcgcucucuuugcaac

SEQ ID NO: 3404626 - RNA, 20 nt, Human
gcgcucugccucaccgcuuc

SEQ ID NO: 3404627 - RNA, 19 nt, Human
gcgcugcccaccugccggc

SEQ ID NO: 3404628 - RNA, 23 nt, Human
gcgcugccccaucuccccucagc

SEQ ID NO: 3404629 - RNA, 14 nt, Human
gcgcugccccuggc

SEQ ID NO: 3404630 - RNA, 17 nt, Human
gcgcugccccuggcagc

SEQ ID NO: 3404631 - RNA, 16 nt, Human
gcgcugccgcacccca

SEQ ID NO: 3404632 - RNA, 15 nt, Human
gcgcugccugugugg

SEQ ID NO: 3404633 - RNA, 23 nt, Human
gcgcugcucuuaugccauuuguu

SEQ ID NO: 3404634 - RNA, 14 nt, Human
gcgcuggccgggac

SEQ ID NO: 3404635 - RNA, 16 nt, Human
gcgcugggcacuuccc

SEQ ID NO: 3404636 - RNA, 18 nt, Human
gcgcugggcacuucccug

SEQ ID NO: 3404637 - RNA, 19 nt, Human
gcgcugggcacuucccugc

SEQ ID NO: 3404638 - RNA, 22 nt, Human
gcgcugggcacuucccugcugc

SEQ ID NO: 3404639 - RNA, 17 nt, Human
gcgcuggguauuggaaa

SEQ ID NO: 3404640 - RNA, 18 nt, Human
gcgcuguuuuuguugugu

SEQ ID NO: 3404641 - RNA, 21 nt, Human
gcgcuguuuuuguugugugug

SEQ ID NO: 3404642 - RNA, 20 nt, Human
gcggaacaaggagucagaca

SEQ ID NO: 3404643 - RNA, 19 nt, Human
gcggaaugaaccacaucuu

SEQ ID NO: 3404644 - RNA, 20 nt, Human
gcggacauccccugcuggcc

SEQ ID NO: 3404645 - RNA, 22 nt, Human
gcggacauccccugcuggccgg

SEQ ID NO: 3404646 - RNA, 17 nt, Human
gcggaccacccucacug

SEQ ID NO: 3404647 - RNA, 14 nt, Human
gcggaccccagcug

SEQ ID NO: 3404648 - RNA, 17 nt, Human
gcggacuccuccuuucu

SEQ ID NO: 3404649 - RNA, 16 nt, Human
gcggagaaaggaaggg

SEQ ID NO: 3404650 - RNA, 19 nt, Human
gcggagaaccuugugccug

SEQ ID NO: 3404651 - RNA, 23 nt, Human
gcggagaaccuugugccuggcuc

SEQ ID NO: 3404652 - RNA, 20 nt, Human
gcggagaguacagugagcca

SEQ ID NO: 3404653 - RNA, 16 nt, Human
gcggagcuugcaguga

SEQ ID NO: 3404654 - RNA, 16 nt, Human
gcggaggagagagagg

SEQ ID NO: 3404655 - RNA, 17 nt, Human
gcggaggggacagagcg

SEQ ID NO: 3404656 - RNA, 15 nt, Human
gcggagguugcaggg

SEQ ID NO: 3404657 - RNA, 19 nt, Human
gcggagguugcagugagcu

SEQ ID NO: 3404658 - RNA, 18 nt, Human
gcggagugaagaggggca

SEQ ID NO: 3404659 - RNA, 21 nt, Human
gcggagugaagaggggcagcc

SEQ ID NO: 3404660 - RNA, 21 nt, Human
gcggauggauggaagguugga

SEQ ID NO: 3404661 - RNA, 12 nt, Human
gcggcacagccu

SEQ ID NO: 3404662 - RNA, 14 nt, Human
gcggcagcagccau

SEQ ID NO: 3404663 - RNA, 17 nt, Human
gcggcagcagccaucau

SEQ ID NO: 3404664 - RNA, 14 nt, Human
gcggcaggagggag

SEQ ID NO: 3404665 - RNA, 13 nt, Human
gcggcagggaaga

SEQ ID NO: 3404666 - RNA, 15 nt, Human
gcggcaggggccugg

SEQ ID NO: 3404667 - RNA, 13 nt, Human
gcggcaucaggcu

SEQ ID NO: 3404668 - RNA, 11 nt, Human
gcggccagccc

SEQ ID NO: 3404669 - RNA, 13 nt, Human
gcggccagccccg

SEQ ID NO: 3404670 - RNA, 18 nt, Human
gcggccagccccggcccu

SEQ ID NO: 3404671 - RNA, 20 nt, Human
gcggccagccccggcccugg

SEQ ID NO: 3404672 - RNA, 19 nt, Human
gcggccaguauuagacugg

SEQ ID NO: 3404673 - RNA, 22 nt, Human
gcggcccaagcccgacuugcug

SEQ ID NO: 3404674 - RNA, 14 nt, Human
gcggccccuccccc

SEQ ID NO: 3404675 - RNA, 17 nt, Human
gcggccccucccccguc

SEQ ID NO: 3404676 - RNA, 13 nt, Human
gcggcccucagua

SEQ ID NO: 3404677 - RNA, 14 nt, Human
gcggcccugucauc

SEQ ID NO: 3404678 - RNA, 15 nt, Human
gcggccgcauucccu

SEQ ID NO: 3404679 - RNA, 16 nt, Human
gcggccgcauucccug

SEQ ID NO: 3404680 - RNA, 19 nt, Human
gcggccgcauucccugagu

SEQ ID NO: 3404681 - RNA, 13 nt, Human
gcggccucagagu

SEQ ID NO: 3404682 - RNA, 14 nt, Human
gcggccuccuucug

SEQ ID NO: 3404683 - RNA, 15 nt, Human
gcggccuccuucuga

SEQ ID NO: 3404684 - RNA, 19 nt, Human
gcggccuccuucugagcuc

SEQ ID NO: 3404685 - RNA, 19 nt, Human
gcggccucuucucucagac

SEQ ID NO: 3404686 - RNA, 16 nt, Human
gcggcguacaggcugg

SEQ ID NO: 3404687 - RNA, 19 nt, Human
gcggcuacucagcagcccu

SEQ ID NO: 3404688 - RNA, 20 nt, Human
gcggcuacucagcagcccuc

SEQ ID NO: 3404689 - RNA, 12 nt, Human
gcggcuccucag

SEQ ID NO: 3404690 - RNA, 22 nt, Human
gcggcugagagccccagcugac

SEQ ID NO: 3404691 - RNA, 21 nt, Human
gcggcuggacuuggagguagc

SEQ ID NO: 3404692 - RNA, 13 nt, Human
gcggcugggagga

SEQ ID NO: 3404693 - RNA, 18 nt, Human
gcggcugggaggagggca

SEQ ID NO: 3404694 - RNA, 19 nt, Human
gcggcugggaggagggcag

SEQ ID NO: 3404695 - RNA, 17 nt, Human
gcggcuggggucccagc

SEQ ID NO: 3404696 - RNA, 22 nt, Human
gcggcuggggucccagcagcug

SEQ ID NO: 3404697 - RNA, 14 nt, Human
gcgggaaaagcagc

SEQ ID NO: 3404698 - RNA, 23 nt, Human
gcgggaaaagcagcccuuggcca

SEQ ID NO: 3404699 - RNA, 13 nt, Human
gcgggaaggaggg

SEQ ID NO: 3404700 - RNA, 16 nt, Human
gcgggacagaguagcc

SEQ ID NO: 3404701 - RNA, 19 nt, Human
gcgggaccgguacagaaag

SEQ ID NO: 3404702 - RNA, 23 nt, Human
gcgggacgagacccuacaggaga

SEQ ID NO: 3404703 - RNA, 21 nt, Human
gcgggacgucccugcccaugu

SEQ ID NO: 3404704 - RNA, 20 nt, Human
gcgggaggauguucugggac

SEQ ID NO: 3404705 - RNA, 14 nt, Human
gcgggaugggccac

SEQ ID NO: 3404706 - RNA, 15 nt, Human
gcgggaugggccacc

SEQ ID NO: 3404707 - RNA, 16 nt, Human
gcgggaugggccaccg

SEQ ID NO: 3404708 - RNA, 15 nt, Human
gcgggaugguccugg

SEQ ID NO: 3404709 - RNA, 15 nt, Human
gcgggcacaauaaau

SEQ ID NO: 3404710 - RNA, 16 nt, Human
gcgggcagcacagcaa

SEQ ID NO: 3404711 - RNA, 21 nt, Human
gcuaggcgagugccaggacuc

SEQ ID NO: 3404712 - RNA, 17 nt, Human
gcuagggaaacuucccg

SEQ ID NO: 3404713 - RNA, 14 nt, Human
gcuaggggagcagg

SEQ ID NO: 3404714 - RNA, 14 nt, Human
gcuaggguggcccu

SEQ ID NO: 3404715 - RNA, 17 nt, Human
gcuaggguggggagaga

SEQ ID NO: 3404716 - RNA, 17 nt, Human
gcuaggugggccagccc

SEQ ID NO: 3404717 - RNA, 18 nt, Human
gcuagguuaaaugguugg

SEQ ID NO: 3404718 - RNA, 18 nt, Human
gcuagucagagagagugu

SEQ ID NO: 3404719 - RNA, 18 nt, Human
gcuaguccuagugaaccu

SEQ ID NO: 3404720 - RNA, 15 nt, Human
gcuagucuuuugcuu

SEQ ID NO: 3404721 - RNA, 17 nt, Human
gcuagucuuuugcuuuu

SEQ ID NO: 3404722 - RNA, 21 nt, Human
gcuagugacuugugucccaug

SEQ ID NO: 3404723 - RNA, 13 nt, Human
gcuagugagcugg

SEQ ID NO: 3404724 - RNA, 17 nt, Human
gcuaguguaccuccucu

SEQ ID NO: 3404725 - RNA, 15 nt, Human
gcuaguugaauacuu

SEQ ID NO: 3404726 - RNA, 17 nt, Human
gcuauaaacaauuacau

SEQ ID NO: 3404727 - RNA, 23 nt, Human
gcuauaaauuccucuuugcuuug

SEQ ID NO: 3404728 - RNA, 18 nt, Human
gcuauaaugagcauguuu

SEQ ID NO: 3404729 - RNA, 16 nt, Human
gcuauaccugugccuc

SEQ ID NO: 3404730 - RNA, 23 nt, Human
gcuauagcuuuagccgugucacg

SEQ ID NO: 3404731 - RNA, 20 nt, Human
gcuauaguauuugauucaaa

SEQ ID NO: 3404732 - RNA, 15 nt, Human
gcuauauauauaaau

SEQ ID NO: 3404733 - RNA, 22 nt, Human
gcuaucaaaauaaauugaaaua

SEQ ID NO: 3404734 - RNA, 20 nt, Human
gcuaucaagaggcugagaca

SEQ ID NO: 3404735 - RNA, 13 nt, Human
gcuaucacacagu

SEQ ID NO: 3404736 - RNA, 18 nt, Human
gcuauccccaucucccug

SEQ ID NO: 3404737 - RNA, 21 nt, Human
gcuauccccaucucccugccu

SEQ ID NO: 3404738 - RNA, 20 nt, Human
gcuauccugccaaaaucauu

SEQ ID NO: 3404739 - RNA, 14 nt, Human
gcuaucuaaaguuu

SEQ ID NO: 3404740 - RNA, 14 nt, Human
gcuaucucccccag

SEQ ID NO: 3404741 - RNA, 19 nt, Human
gcuaucucccccagcccca

SEQ ID NO: 3404742 - RNA, 21 nt, Human
gcuaucucccccagccccauc

SEQ ID NO: 3404743 - RNA, 20 nt, Human
gcuaucucugugugcacaaa

SEQ ID NO: 3404744 - RNA, 16 nt, Human
gcuaucuuaauuuugg

SEQ ID NO: 3404745 - RNA, 14 nt, Human
gcuaucuucaugua

SEQ ID NO: 3404746 - RNA, 18 nt, Human
gcuaucuucauguaaauu

SEQ ID NO: 3404747 - RNA, 19 nt, Human
gcuaucuucauguaaauug

SEQ ID NO: 3404748 - RNA, 12 nt, Human
gcuaugaauuuu

SEQ ID NO: 3404749 - RNA, 11 nt, Human
gcuauggacac

SEQ ID NO: 3404750 - RNA, 16 nt, Human
gcuauggacacagggu

SEQ ID NO: 3404751 - RNA, 18 nt, Human
gcuauggauggcuucuaa

SEQ ID NO: 3404752 - RNA, 15 nt, Human
gcuauggccugugcg

SEQ ID NO: 3404753 - RNA, 18 nt, Human
gcuaugggagccccaggg

SEQ ID NO: 3404754 - RNA, 21 nt, Human
gcuaugggagccccagggucu

SEQ ID NO: 3404755 - RNA, 18 nt, Human
gcuauggggagaaaagac

SEQ ID NO: 3404756 - RNA, 15 nt, Human
gcuauggugagaugc

SEQ ID NO: 3404757 - RNA, 14 nt, Human
gcuauggugggaga

SEQ ID NO: 3404758 - RNA, 18 nt, Human
gcuaugucccaggaauca

SEQ ID NO: 3404759 - RNA, 17 nt, Human
gcuauguuacuauuuuc

SEQ ID NO: 3404760 - RNA, 16 nt, Human
gcuauguuuuuaaugu

SEQ ID NO: 3404761 - RNA, 20 nt, Human
gcuauuaaaacucagccugg

SEQ ID NO: 3404762 - RNA, 12 nt, Human
gcuauuacaaau

SEQ ID NO: 3404763 - RNA, 13 nt, Human
gcuauuacaaaua

SEQ ID NO: 3404764 - RNA, 13 nt, Human
gcuauuagccagg

SEQ ID NO: 3404765 - RNA, 17 nt, Human
gcuauuagccaggauca

SEQ ID NO: 3404766 - RNA, 18 nt, Human
gcuauuagccaggaucau

SEQ ID NO: 3404767 - RNA, 18 nt, Human
gcuauuauuuucacugua

SEQ ID NO: 3404768 - RNA, 21 nt, Human
gcuauucaguugguaagcuuc

SEQ ID NO: 3404769 - RNA, 14 nt, Human
gcuauuccuuuccc

SEQ ID NO: 3404770 - RNA, 16 nt, Human
gcuauuccuuucccuu

SEQ ID NO: 3404771 - RNA, 22 nt, Human
gcuauuguuucuuuaagaaagu

SEQ ID NO: 3404772 - RNA, 22 nt, Human
gcuauuuaaaaaaaaaagagga

SEQ ID NO: 3404773 - RNA, 14 nt, Human
gcuauuuaaaacuu

SEQ ID NO: 3404774 - RNA, 17 nt, Human
gcuauuuaugggccccu

SEQ ID NO: 3404775 - RNA, 19 nt, Human
gcuauuuaugggccccugg

SEQ ID NO: 3404776 - RNA, 22 nt, Human
gcuauuuaugggccccuggcac

SEQ ID NO: 3404777 - RNA, 16 nt, Human
gcuauuuauuuuccua

SEQ ID NO: 3404778 - RNA, 20 nt, Human
gcuauuuauuuuccuaaaga

SEQ ID NO: 3404779 - RNA, 22 nt, Human
gcuauuucuauauuuucauucu

SEQ ID NO: 3404780 - RNA, 15 nt, Human
gcuauuuguaaaucu

SEQ ID NO: 3404781 - RNA, 17 nt, Human
gcuauuuuacugucuua

SEQ ID NO: 3404782 - RNA, 18 nt, Human
gcuauuuuauauuacacu

SEQ ID NO: 3404783 - RNA, 13 nt, Human
gcuauuuuccagg

SEQ ID NO: 3404784 - RNA, 15 nt, Human
gcuauuuuccaggcu

SEQ ID NO: 3404785 - RNA, 13 nt, Human
gcuauuuuucuaa

SEQ ID NO: 3404786 - RNA, 12 nt, Human
gcuauuuuugua

SEQ ID NO: 3404787 - RNA, 20 nt, Human
gcucaaaauuugaagaauga

SEQ ID NO: 3404788 - RNA, 23 nt, Human
gcucaaaauuugaagaaugaaca

SEQ ID NO: 3404789 - RNA, 22 nt, Human
gcucaaacaaugacaaagcaga

SEQ ID NO: 3404790 - RNA, 23 nt, Human
gcucaaagguuuggaaggagcag

SEQ ID NO: 3404791 - RNA, 22 nt, Human
gcucaaaucuauucagacaagc

SEQ ID NO: 3404792 - RNA, 12 nt, Human
gcucaaccuaac

SEQ ID NO: 3404793 - RNA, 21 nt, Human
gcucaagaagacauggagacu

SEQ ID NO: 3404794 - RNA, 18 nt, Human
gcucaagcaauccuccug

SEQ ID NO: 3404795 - RNA, 19 nt, Human
gcucaaggaaaggccugaa

SEQ ID NO: 3404796 - RNA, 20 nt, Human
gcucaaggaaaggccugaaa

SEQ ID NO: 3404797 - RNA, 20 nt, Human
gcucaagucuucccugauca

SEQ ID NO: 3404798 - RNA, 12 nt, Human
gcucaaguucau

SEQ ID NO: 3404799 - RNA, 22 nt, Human
gcucaauauuccugaaugaaau

SEQ ID NO: 3404800 - RNA, 16 nt, Human
gcucaaucaagaaaau

SEQ ID NO: 3404801 - RNA, 16 nt, Human
gcucaaucccugagga

SEQ ID NO: 3404802 - RNA, 14 nt, Human
gcucaaugagcaug

SEQ ID NO: 3404803 - RNA, 19 nt, Human
gcucaaugagcauguuuag

SEQ ID NO: 3404804 - RNA, 17 nt, Human
gcucaauggacuggaag

SEQ ID NO: 3404805 - RNA, 14 nt, Human
gcucacaaggcagc

SEQ ID NO: 3404806 - RNA, 19 nt, Human
gcucacaaggcagcaaggc

SEQ ID NO: 3404807 - RNA, 23 nt, Human
gcucacaauaaaaauggcucaga

SEQ ID NO: 3404808 - RNA, 14 nt, Human
gcucacaccuguaa

SEQ ID NO: 3404809 - RNA, 13 nt, Human
gcucacagcugug

SEQ ID NO: 3404810 - RNA, 20 nt, Human
gcucacaguacagcaugugc

SEQ ID NO: 3404811 - RNA, 13 nt, Human
gcucacaguuccu

SEQ ID NO: 3404812 - RNA, 22 nt, Human
gcucacaguuccucgcccuggg

SEQ ID NO: 3404813 - RNA, 14 nt, Human
gcucaccagcccca

SEQ ID NO: 3404814 - RNA, 15 nt, Human
gcucaccagccccag

SEQ ID NO: 3404815 - RNA, 19 nt, Human
gcucaccagccccagugcc

SEQ ID NO: 3404816 - RNA, 20 nt, Human
gcucacccaauaaacauuaa

SEQ ID NO: 3404817 - RNA, 13 nt, Human
gcucacccagugc

SEQ ID NO: 3404818 - RNA, 19 nt, Human
gcucacccagugcccucuc

SEQ ID NO: 3404819 - RNA, 19 nt, Human
gcucaccccaucaucccuu

SEQ ID NO: 3404820 - RNA, 16 nt, Human
gcucacccccuucucc

SEQ ID NO: 3404821 - RNA, 22 nt, Human
gcucacccccuucuccauccac

SEQ ID NO: 3404822 - RNA, 15 nt, Human
gcucaccccuggagg

SEQ ID NO: 3404823 - RNA, 16 nt, Human
gcucaccgcccaucag

SEQ ID NO: 3404824 - RNA, 18 nt, Human
gcucaccuagagccagac

SEQ ID NO: 3404825 - RNA, 17 nt, Human
gcucaccucucccuugg

SEQ ID NO: 3404826 - RNA, 13 nt, Human
gcucaccuggggu

SEQ ID NO: 3404827 - RNA, 20 nt, Human
gcucaccuguugcuuacaau

SEQ ID NO: 3404828 - RNA, 21 nt, Human
gcucaccuguugcuuacaauu

SEQ ID NO: 3404829 - RNA, 21 nt, Human
gcucacgccuaugaucccagc

SEQ ID NO: 3404830 - RNA, 23 nt, Human
gcucacgccuguaaucccagcac

SEQ ID NO: 3404831 - RNA, 18 nt, Human
gcucacgcuucacaguga

SEQ ID NO: 3404832 - RNA, 16 nt, Human
gcucacuauggugcca

SEQ ID NO: 3404833 - RNA, 18 nt, Human
gcucacuauggugccaau

SEQ ID NO: 3404834 - RNA, 18 nt, Human
gcucacucacagagucaa

SEQ ID NO: 3404835 - RNA, 20 nt, Human
gcucacucagccacccugag

SEQ ID NO: 3404836 - RNA, 16 nt, Human
gcucacucggcacccu

SEQ ID NO: 3404837 - RNA, 11 nt, Human
gcucacugcag

SEQ ID NO: 3404838 - RNA, 12 nt, Human
gcucacugcagc

SEQ ID NO: 3404839 - RNA, 17 nt, Human
gcucacugcagccuccg

SEQ ID NO: 3404840 - RNA, 16 nt, Human
gcucacugcauccucc

SEQ ID NO: 3404841 - RNA, 22 nt, Human
gcucacugccaggccagccucc

SEQ ID NO: 3404842 - RNA, 12 nt, Human
gcucagaacaca

SEQ ID NO: 3404843 - RNA, 15 nt, Human
gcucagaaccacagc

SEQ ID NO: 3404844 - RNA, 17 nt, Human
gcucagaaccacagcaa

SEQ ID NO: 3404845 - RNA, 14 nt, Human
gcucagaacccagg

SEQ ID NO: 3404846 - RNA, 16 nt, Human
gcucagaacccagggc

SEQ ID NO: 3404847 - RNA, 17 nt, Human
gcucagaacccagggcu

SEQ ID NO: 3404848 - RNA, 22 nt, Human
gcucagaacccagggcucugcc

SEQ ID NO: 3404849 - RNA, 16 nt, Human
gcucagaacuugcugc

SEQ ID NO: 3404850 - RNA, 17 nt, Human
gcucagaacuugcugcu

SEQ ID NO: 3404851 - RNA, 20 nt, Human
gcucagaacuugcugcuguc

SEQ ID NO: 3404852 - RNA, 15 nt, Human
gcucagaagugacca

SEQ ID NO: 3404853 - RNA, 15 nt, Human
gcucagaauaaggca

SEQ ID NO: 3404854 - RNA, 15 nt, Human
gcucagaauccaagu

SEQ ID NO: 3404855 - RNA, 18 nt, Human
gcucagagagggugggag

SEQ ID NO: 3404856 - RNA, 22 nt, Human
gcucccacagucccaucugcuu

SEQ ID NO: 3404857 - RNA, 21 nt, Human
gcucccaccccacccccuuca

SEQ ID NO: 3404858 - RNA, 15 nt, Human
gcucccaccuccuga

SEQ ID NO: 3404859 - RNA, 16 nt, Human
gcucccaccuccugac

SEQ ID NO: 3404860 - RNA, 14 nt, Human
gcucccaccuggcu

SEQ ID NO: 3404861 - RNA, 16 nt, Human
gcucccaccuggcucu

SEQ ID NO: 3404862 - RNA, 15 nt, Human
gcucccagccaggcc

SEQ ID NO: 3404863 - RNA, 12 nt, Human
gcucccagccuc

SEQ ID NO: 3404864 - RNA, 13 nt, Human
gcucccagccuca

SEQ ID NO: 3404865 - RNA, 13 nt, Human
gcucccaggacac

SEQ ID NO: 3404866 - RNA, 21 nt, Human
gcucccaggagccugcccagc

SEQ ID NO: 3404867 - RNA, 17 nt, Human
gcucccaggcauucccc

SEQ ID NO: 3404868 - RNA, 19 nt, Human
gcucccaggcauuccccag

SEQ ID NO: 3404869 - RNA, 22 nt, Human
gcucccaggcauuccccaggag

SEQ ID NO: 3404870 - RNA, 23 nt, Human
gcucccaggcauuccccaggagg

SEQ ID NO: 3404871 - RNA, 11 nt, Human
gcucccaggcc

SEQ ID NO: 3404872 - RNA, 11 nt, Human
gcucccagggc

SEQ ID NO: 3404873 - RNA, 14 nt, Human
gcucccagggccau

SEQ ID NO: 3404874 - RNA, 20 nt, Human
gcucccaggggucucccugg

SEQ ID NO: 3404875 - RNA, 20 nt, Human
gcucccaggugcagccagag

SEQ ID NO: 3404876 - RNA, 20 nt, Human
gcucccagugucuuccugug

SEQ ID NO: 3404877 - RNA, 22 nt, Human
gcucccagugucuuccuguggg

SEQ ID NO: 3404878 - RNA, 22 nt, Human
gcuccccagcccuggcucugca

SEQ ID NO: 3404879 - RNA, 14 nt, Human
gcuccccauguguc

SEQ ID NO: 3404880 - RNA, 15 nt, Human
gcucccccacccccu

SEQ ID NO: 3404881 - RNA, 22 nt, Human
gcucccccacccccuccccagg

SEQ ID NO: 3404882 - RNA, 14 nt, Human
gcucccccagcucc

SEQ ID NO: 3404883 - RNA, 14 nt, Human
gcucccccauccuc

SEQ ID NO: 3404884 - RNA, 21 nt, Human
gcucccccgggaggggcccgc

SEQ ID NO: 3404885 - RNA, 18 nt, Human
gcucccccuguccccuca

SEQ ID NO: 3404886 - RNA, 17 nt, Human
gcucccccuuuucccuc

SEQ ID NO: 3404887 - RNA, 22 nt, Human
gcuccccgccuguucccccgcc

SEQ ID NO: 3404888 - RNA, 19 nt, Human
gcuccccuaaagccucaaa

SEQ ID NO: 3404889 - RNA, 13 nt, Human
gcuccccuccucu

SEQ ID NO: 3404890 - RNA, 18 nt, Human
gcuccccucggagaagag

SEQ ID NO: 3404891 - RNA, 20 nt, Human
gcuccccucugcacggacca

SEQ ID NO: 3404892 - RNA, 13 nt, Human
gcuccccucuucc

SEQ ID NO: 3404893 - RNA, 12 nt, Human
gcuccccugagg

SEQ ID NO: 3404894 - RNA, 15 nt, Human
gcuccccugcagccc

SEQ ID NO: 3404895 - RNA, 15 nt, Human
gcuccccuggggagu

SEQ ID NO: 3404896 - RNA, 18 nt, Human
gcuccccuuucgcccaca

SEQ ID NO: 3404897 - RNA, 13 nt, Human
gcucccgccucca

SEQ ID NO: 3404898 - RNA, 20 nt, Human
gcucccggggcagggcagcc

SEQ ID NO: 3404899 - RNA, 18 nt, Human
gcucccggguccuuggcc

SEQ ID NO: 3404900 - RNA, 18 nt, Human
gcucccuaagccagccug

SEQ ID NO: 3404901 - RNA, 16 nt, Human
gcucccuaccaccucc

SEQ ID NO: 3404902 - RNA, 16 nt, Human
gcucccucaaagaggc

SEQ ID NO: 3404903 - RNA, 17 nt, Human
gcucccucaaagaggca

SEQ ID NO: 3404904 - RNA, 15 nt, Human
gcucccucacucuca

SEQ ID NO: 3404905 - RNA, 18 nt, Human
gcucccucacucucagga

SEQ ID NO: 3404906 - RNA, 11 nt, Human
gcucccucaga

SEQ ID NO: 3404907 - RNA, 22 nt, Human
gcucccucagacuggggcaaug

SEQ ID NO: 3404908 - RNA, 15 nt, Human
gcucccucccaggac

SEQ ID NO: 3404909 - RNA, 18 nt, Human
gcucccucccaggacucu

SEQ ID NO: 3404910 - RNA, 21 nt, Human
gcucccucccaggacucugac

SEQ ID NO: 3404911 - RNA, 16 nt, Human
gcucccucccaucccu

SEQ ID NO: 3404912 - RNA, 14 nt, Human
gcucccuccuccag

SEQ ID NO: 3404913 - RNA, 17 nt, Human
gcucccucuuggucuuc

SEQ ID NO: 3404914 - RNA, 16 nt, Human
gcucccugaagccagc

SEQ ID NO: 3404915 - RNA, 13 nt, Human
gcucccugcccca

SEQ ID NO: 3404916 - RNA, 18 nt, Human
gcucccuggcuucugugg

SEQ ID NO: 3404917 - RNA, 17 nt, Human
gcucccuguagggucca

SEQ ID NO: 3404918 - RNA, 21 nt, Human
gcucccuguguccaccugugg

SEQ ID NO: 3404919 - RNA, 14 nt, Human
gcucccuucagccc

SEQ ID NO: 3404920 - RNA, 18 nt, Human
gcucccuuccaccuguca

SEQ ID NO: 3404921 - RNA, 15 nt, Human
gcucccuucccaccu

SEQ ID NO: 3404922 - RNA, 19 nt, Human
gcucccuucccaccucucu

SEQ ID NO: 3404923 - RNA, 14 nt, Human
gcucccuuccuccc

SEQ ID NO: 3404924 - RNA, 15 nt, Human
gcucccuucucugua

SEQ ID NO: 3404925 - RNA, 15 nt, Human
gcucccuugugcgug

SEQ ID NO: 3404926 - RNA, 14 nt, Human
gcuccgcaggacuu

SEQ ID NO: 3404927 - RNA, 16 nt, Human
gcuccgcccuuagucc

SEQ ID NO: 3404928 - RNA, 17 nt, Human
gcuccgccuggccuggc

SEQ ID NO: 3404929 - RNA, 14 nt, Human
gcuccgcugcuccu

SEQ ID NO: 3404930 - RNA, 22 nt, Human
gcuccgcuuucuacccagcgag

SEQ ID NO: 3404931 - RNA, 23 nt, Human
gcuccgcuuucuacccagcgagc

SEQ ID NO: 3404932 - RNA, 18 nt, Human
gcuccgucuccugcgggc

SEQ ID NO: 3404933 - RNA, 22 nt, Human
gcuccgugagugaaccaucauu

SEQ ID NO: 3404934 - RNA, 14 nt, Human
gcuccgugccucca

SEQ ID NO: 3404935 - RNA, 16 nt, Human
gcuccgugccuccacc

SEQ ID NO: 3404936 - RNA, 22 nt, Human
gcuccuaacccuuaucaccagc

SEQ ID NO: 3404937 - RNA, 21 nt, Human
gcuccuacccaccgcccuugc

SEQ ID NO: 3404938 - RNA, 21 nt, Human
gcuccuauucaacacacacau

SEQ ID NO: 3404939 - RNA, 18 nt, Human
gcuccucaacucaccuaa

SEQ ID NO: 3404940 - RNA, 20 nt, Human
gcuccucagggacucaggug

SEQ ID NO: 3404941 - RNA, 21 nt, Human
gcuccucauccagggcucuga

SEQ ID NO: 3404942 - RNA, 14 nt, Human
gcuccuccagggcc

SEQ ID NO: 3404943 - RNA, 15 nt, Human
gcuccuccagggcca

SEQ ID NO: 3404944 - RNA, 22 nt, Human
gcuccuccagggccacgugcca

SEQ ID NO: 3404945 - RNA, 22 nt, Human
gcuccuccaggguggcagcaac

SEQ ID NO: 3404946 - RNA, 15 nt, Human
gcuccuccccuuccu

SEQ ID NO: 3404947 - RNA, 16 nt, Human
gcuccucccggugccc

SEQ ID NO: 3404948 - RNA, 19 nt, Human
gcuccucccucugaggcug

SEQ ID NO: 3404949 - RNA, 20 nt, Human
gcuccucccucugaggcugu

SEQ ID NO: 3404950 - RNA, 15 nt, Human
gcuccucccuggcug

SEQ ID NO: 3404951 - RNA, 16 nt, Human
gcuccucccuggcugc

SEQ ID NO: 3404952 - RNA, 17 nt, Human
gcuccucccuggcugcc

SEQ ID NO: 3404953 - RNA, 18 nt, Human
gcuccucccuggcugccc

SEQ ID NO: 3404954 - RNA, 20 nt, Human
gcuccucccuggcugcccug

SEQ ID NO: 3404955 - RNA, 16 nt, Human
gcuccuccucccugca

SEQ ID NO: 3404956 - RNA, 18 nt, Human
gcuccuccucccugcauc

SEQ ID NO: 3404957 - RNA, 18 nt, Human
gcuccucgagaucccaac

SEQ ID NO: 3404958 - RNA, 15 nt, Human
gcuccucuccaggca

SEQ ID NO: 3404959 - RNA, 16 nt, Human
gcuccucuccaggcac

SEQ ID NO: 3404960 - RNA, 17 nt, Human
gcuccucuccaggcacc

SEQ ID NO: 3404961 - RNA, 11 nt, Human
gcuccucuggg

SEQ ID NO: 3404962 - RNA, 12 nt, Human
gcuccucugggc

SEQ ID NO: 3404963 - RNA, 13 nt, Human
gcuccucugggca

SEQ ID NO: 3404964 - RNA, 17 nt, Human
gcuccucuguccugcuu

SEQ ID NO: 3404965 - RNA, 20 nt, Human
gcuccucuguccugcuucug

SEQ ID NO: 3404966 - RNA, 19 nt, Human
gcuccucuguggugucugc

SEQ ID NO: 3404967 - RNA, 22 nt, Human
gcuccucuuccaugcugugcgc

SEQ ID NO: 3404968 - RNA, 16 nt, Human
gcuccucuuccccaga

SEQ ID NO: 3404969 - RNA, 23 nt, Human
gcuccucuuccccagacgccugg

SEQ ID NO: 3404970 - RNA, 19 nt, Human
gcuccugacacugcuggag

SEQ ID NO: 3404971 - RNA, 12 nt, Human
gcuccugagccc

SEQ ID NO: 3404972 - RNA, 17 nt, Human
gcuccugagggagcucc

SEQ ID NO: 3404973 - RNA, 19 nt, Human
gcuccugagggagcuccaa

SEQ ID NO: 3404974 - RNA, 12 nt, Human
gcuccugcacuu

SEQ ID NO: 3404975 - RNA, 14 nt, Human
gcuccugcagcaug

SEQ ID NO: 3404976 - RNA, 21 nt, Human
gcuccugcagcauggucccug

SEQ ID NO: 3404977 - RNA, 12 nt, Human
gcuccugccacc

SEQ ID NO: 3404978 - RNA, 21 nt, Human
gcuccugccaccacgcccggc

SEQ ID NO: 3404979 - RNA, 19 nt, Human
gcuccugccaguguggaac

SEQ ID NO: 3404980 - RNA, 15 nt, Human
gcuccugccuucugu

SEQ ID NO: 3404981 - RNA, 17 nt, Human
gcuccugccuucugucc

SEQ ID NO: 3404982 - RNA, 19 nt, Human
gcuccugccuucuguccug

SEQ ID NO: 3404983 - RNA, 22 nt, Human
gcuccugcuaacggugcucagg

SEQ ID NO: 3404984 - RNA, 17 nt, Human
gcuccugcuccacagcc

SEQ ID NO: 3404985 - RNA, 20 nt, Human
gcuccugcuccacagccauc

SEQ ID NO: 3404986 - RNA, 11 nt, Human
gcuccugcugc

SEQ ID NO: 3404987 - RNA, 15 nt, Human
gcuccugcugcacca

SEQ ID NO: 3404988 - RNA, 18 nt, Human
gcuccugcugcaccaacc

SEQ ID NO: 3404989 - RNA, 22 nt, Human
gcuccugcugcaccaacccagc

SEQ ID NO: 3404990 - RNA, 23 nt, Human
gcuccuggaaaggcucagucuca

SEQ ID NO: 3404991 - RNA, 19 nt, Human
gcuccuggaccccccuuuc

SEQ ID NO: 3404992 - RNA, 19 nt, Human
gcuccuggagccuuugaau

SEQ ID NO: 3404993 - RNA, 14 nt, Human
gcuccuggcccacu

SEQ ID NO: 3404994 - RNA, 15 nt, Human
gcuccuggcccagcc

SEQ ID NO: 3404995 - RNA, 16 nt, Human
gcuccuggcccagccu

SEQ ID NO: 3404996 - RNA, 22 nt, Human
gcuccugggaaggcuacucacc

SEQ ID NO: 3404997 - RNA, 23 nt, Human
gcuccuggggguucuuucuuccu

SEQ ID NO: 3404998 - RNA, 21 nt, Human
gcuccuggucaccuaggaagc

SEQ ID NO: 3404999 - RNA, 21 nt, Human
gcuccugucugccagccagca

SEQ ID NO: 3405000 - RNA, 14 nt, Human
gcuccugugcuuuc

SEQ ID NO: 3405001 - RNA, 22 nt, Human
gcuucucugugaacgauuuaga

SEQ ID NO: 3405002 - RNA, 19 nt, Human
gcuucucugugacugaugu

SEQ ID NO: 3405003 - RNA, 17 nt, Human
gcuucugaaugugcuga

SEQ ID NO: 3405004 - RNA, 23 nt, Human
gcuucugagcagcgagccugcua

SEQ ID NO: 3405005 - RNA, 15 nt, Human
gcuucugaugaaucu

SEQ ID NO: 3405006 - RNA, 20 nt, Human
gcuucugaugaaucuugcgu

SEQ ID NO: 3405007 - RNA, 12 nt, Human
gcuucugccacu

SEQ ID NO: 3405008 - RNA, 13 nt, Human
gcuucugccacuu

SEQ ID NO: 3405009 - RNA, 14 nt, Human
gcuucugccacuuc

SEQ ID NO: 3405010 - RNA, 21 nt, Human
gcuucugccacuucccaggua

SEQ ID NO: 3405011 - RNA, 17 nt, Human
gcuucugcugggcuggg

SEQ ID NO: 3405012 - RNA, 20 nt, Human
gcuucugcuggggccuggga

SEQ ID NO: 3405013 - RNA, 15 nt, Human
gcuucugcuuuucug

SEQ ID NO: 3405014 - RNA, 21 nt, Human
gcuucugcuuuucugcccugg

SEQ ID NO: 3405015 - RNA, 17 nt, Human
gcuucuggaauuuguuc

SEQ ID NO: 3405016 - RNA, 18 nt, Human
gcuucuggagcccuuggg

SEQ ID NO: 3405017 - RNA, 15 nt, Human
gcuucuggccaggaa

SEQ ID NO: 3405018 - RNA, 12 nt, Human
gcuucugggguc

SEQ ID NO: 3405019 - RNA, 13 nt, Human
gcuucugucucca

SEQ ID NO: 3405020 - RNA, 18 nt, Human
gcuucugugaugagcuga

SEQ ID NO: 3405021 - RNA, 18 nt, Human
gcuucugugcaccugggc

SEQ ID NO: 3405022 - RNA, 21 nt, Human
gcuucugugcccagaauacug

SEQ ID NO: 3405023 - RNA, 18 nt, Human
gcuucuguugcugccuca

SEQ ID NO: 3405024 - RNA, 17 nt, Human
gcuucuguugucaccuu

SEQ ID NO: 3405025 - RNA, 15 nt, Human
gcuucuuaaagaguu

SEQ ID NO: 3405026 - RNA, 21 nt, Human
gcuucuuaaucuuuucacaaa

SEQ ID NO: 3405027 - RNA, 22 nt, Human
gcuucuuaaucuuuucacaaau

SEQ ID NO: 3405028 - RNA, 13 nt, Human
gcuucuuaauuaa

SEQ ID NO: 3405029 - RNA, 12 nt, Human
gcuucuucagag

SEQ ID NO: 3405030 - RNA, 22 nt, Human
gcuucuucagagacuccugcag

SEQ ID NO: 3405031 - RNA, 16 nt, Human
gcuucuucagaucagu

SEQ ID NO: 3405032 - RNA, 20 nt, Human
gcuucuucccuuaaaauuua

SEQ ID NO: 3405033 - RNA, 20 nt, Human
gcuucuucuccuauguguaa

SEQ ID NO: 3405034 - RNA, 19 nt, Human
gcuucuugccucugugcug

SEQ ID NO: 3405035 - RNA, 14 nt, Human
gcuucuugugaagg

SEQ ID NO: 3405036 - RNA, 20 nt, Human
gcuucuugugaaggccauga

SEQ ID NO: 3405037 - RNA, 16 nt, Human
gcuucuuguuuccuug

SEQ ID NO: 3405038 - RNA, 12 nt, Human
gcuucuuucuag

SEQ ID NO: 3405039 - RNA, 15 nt, Human
gcuucuuucuagaaa

SEQ ID NO: 3405040 - RNA, 12 nt, Human
gcuucuuucuuu

SEQ ID NO: 3405041 - RNA, 20 nt, Human
gcuucuuuucuuuguaucau

SEQ ID NO: 3405042 - RNA, 16 nt, Human
gcuugaacacaguauu

SEQ ID NO: 3405043 - RNA, 23 nt, Human
gcuugaacacaguauuuucccaa

SEQ ID NO: 3405044 - RNA, 23 nt, Human
gcuugaaccugggaggcagaggu

SEQ ID NO: 3405045 - RNA, 19 nt, Human
gcuugaacuaggcugagca

SEQ ID NO: 3405046 - RNA, 20 nt, Human
gcuugaacuaggcugagcaa

SEQ ID NO: 3405047 - RNA, 18 nt, Human
gcuugaagcaaacaguug

SEQ ID NO: 3405048 - RNA, 12 nt, Human
gcuugaagccaa

SEQ ID NO: 3405049 - RNA, 15 nt, Human
gcuugaagccaaaga

SEQ ID NO: 3405050 - RNA, 16 nt, Human
gcuugaagccaaagaa

SEQ ID NO: 3405051 - RNA, 15 nt, Human
gcuugaaggcccugc

SEQ ID NO: 3405052 - RNA, 20 nt, Human
gcuugaaggcccugcugagu

SEQ ID NO: 3405053 - RNA, 16 nt, Human
gcuugacaggacagca

SEQ ID NO: 3405054 - RNA, 20 nt, Human
gcuugaccaggcuuggccuu

SEQ ID NO: 3405055 - RNA, 20 nt, Human
gcuugaccgugaggccagag

SEQ ID NO: 3405056 - RNA, 14 nt, Human
gcuugaccugaggc

SEQ ID NO: 3405057 - RNA, 21 nt, Human
gcuugagagcccugaggccua

SEQ ID NO: 3405058 - RNA, 12 nt, Human
gcuugagcccag

SEQ ID NO: 3405059 - RNA, 15 nt, Human
gcuugagcccaggag

SEQ ID NO: 3405060 - RNA, 17 nt, Human
gcuugagccgggccccu

SEQ ID NO: 3405061 - RNA, 14 nt, Human
gcuugagcucagga

SEQ ID NO: 3405062 - RNA, 20 nt, Human
gcuugaggguugggcuggug

SEQ ID NO: 3405063 - RNA, 14 nt, Human
gcuugaugaagcaa

SEQ ID NO: 3405064 - RNA, 19 nt, Human
gcuugaugaagcaaggaag

SEQ ID NO: 3405065 - RNA, 22 nt, Human
gcuugaugggauucuggacagg

SEQ ID NO: 3405066 - RNA, 13 nt, Human
gcuugauuaaauc

SEQ ID NO: 3405067 - RNA, 14 nt, Human
gcuugcacucucuu

SEQ ID NO: 3405068 - RNA, 15 nt, Human
gcuugcauaauaagc

SEQ ID NO: 3405069 - RNA, 23 nt, Human
gcuugcauaauaagcuaaagagg

SEQ ID NO: 3405070 - RNA, 17 nt, Human
gcuugcauauauuucau

SEQ ID NO: 3405071 - RNA, 14 nt, Human
gcuugccaaaguac

SEQ ID NO: 3405072 - RNA, 15 nt, Human
gcuugccacagcucu

SEQ ID NO: 3405073 - RNA, 22 nt, Human
gcuugcccaguacauuuaaauu

SEQ ID NO: 3405074 - RNA, 16 nt, Human
gcuugcccuaagcaga

SEQ ID NO: 3405075 - RNA, 19 nt, Human
gcuugcccuaagcagaaag

SEQ ID NO: 3405076 - RNA, 20 nt, Human
gcuugcccuaagcagaaagu

SEQ ID NO: 3405077 - RNA, 21 nt, Human
gcuugcccuaagcagaaagug

SEQ ID NO: 3405078 - RNA, 17 nt, Human
gcuugcccuggugccuc

SEQ ID NO: 3405079 - RNA, 20 nt, Human
gcuugccgaaacuggaaguu

SEQ ID NO: 3405080 - RNA, 15 nt, Human
gcuugccucggcucc

SEQ ID NO: 3405081 - RNA, 12 nt, Human
gcuugccuggag

SEQ ID NO: 3405082 - RNA, 16 nt, Human
gcuugcgaacuagaga

SEQ ID NO: 3405083 - RNA, 16 nt, Human
gcuugcguaugucugu

SEQ ID NO: 3405084 - RNA, 14 nt, Human
gcuugcuauucugu

SEQ ID NO: 3405085 - RNA, 13 nt, Human
gcuugcugagagg

SEQ ID NO: 3405086 - RNA, 21 nt, Human
gcuugcuuuucaugcaaacuc

SEQ ID NO: 3405087 - RNA, 12 nt, Human
gcuugcuuuucu

SEQ ID NO: 3405088 - RNA, 21 nt, Human
gcuuggaaagcaucaccucag

SEQ ID NO: 3405089 - RNA, 18 nt, Human
gcuuggaagagccugcag

SEQ ID NO: 3405090 - RNA, 16 nt, Human
gcuuggacggcugggc

SEQ ID NO: 3405091 - RNA, 12 nt, Human
gcuuggacugga

SEQ ID NO: 3405092 - RNA, 14 nt, Human
gcuuggagcugagc

SEQ ID NO: 3405093 - RNA, 14 nt, Human
gcuuggaggaagga

SEQ ID NO: 3405094 - RNA, 13 nt, Human
gcuuggcagccga

SEQ ID NO: 3405095 - RNA, 15 nt, Human
gcuuggcccuuuccu

SEQ ID NO: 3405096 - RNA, 14 nt, Human
gcuuggcugcuugg

SEQ ID NO: 3405097 - RNA, 19 nt, Human
gcuugggaccgccagaugg

SEQ ID NO: 3405098 - RNA, 20 nt, Human
gcuugggagagccccugggg

SEQ ID NO: 3405099 - RNA, 17 nt, Human
gcuugggauuugcugug

SEQ ID NO: 3405100 - RNA, 17 nt, Human
gcuugggcccagcuggg

SEQ ID NO: 3405101 - RNA, 19 nt, Human
gcuugggcuucauccuccu

SEQ ID NO: 3405102 - RNA, 23 nt, Human
gcuugggcuucauccuccucaga

SEQ ID NO: 3405103 - RNA, 18 nt, Human
gcuuggggaccagagcug

SEQ ID NO: 3405104 - RNA, 22 nt, Human
gcuuggggaccagagcugccac

SEQ ID NO: 3405105 - RNA, 22 nt, Human
gcuuggggccaccaaagcugcc

SEQ ID NO: 3405106 - RNA, 13 nt, Human
gcuuggggccagg

SEQ ID NO: 3405107 - RNA, 16 nt, Human
gcuuggggcuuccuaa

SEQ ID NO: 3405108 - RNA, 22 nt, Human
gcuuggggggugaugagggcag

SEQ ID NO: 3405109 - RNA, 14 nt, Human
gcuuggguggagaa

SEQ ID NO: 3405110 - RNA, 16 nt, Human
gcuuggguggagaagc

SEQ ID NO: 3405111 - RNA, 17 nt, Human
gcuuggguggagaagcc

SEQ ID NO: 3405112 - RNA, 22 nt, Human
gcuuggguguaacaggucuccu

SEQ ID NO: 3405113 - RNA, 23 nt, Human
gcuuggguguaacaggucuccuc

SEQ ID NO: 3405114 - RNA, 13 nt, Human
gcuuggucuguuu

SEQ ID NO: 3405115 - RNA, 15 nt, Human
gcuuggucuguuuga

SEQ ID NO: 3405116 - RNA, 18 nt, Human
gcuuguaaauagcucagg

SEQ ID NO: 3405117 - RNA, 20 nt, Human
gcuuguaaauagcucaggug

SEQ ID NO: 3405118 - RNA, 22 nt, Human
gcuuguaacuaaaauaauuuug

SEQ ID NO: 3405119 - RNA, 22 nt, Human
gcuuguaacuccaccaacccau

SEQ ID NO: 3405120 - RNA, 16 nt, Human
gcuuguacacucauuc

SEQ ID NO: 3405121 - RNA, 12 nt, Human
gcuuguacauaa

SEQ ID NO: 3405122 - RNA, 17 nt, Human
gcuuguaccucuggcug

SEQ ID NO: 3405123 - RNA, 18 nt, Human
gcuuguaccucuggcuga

SEQ ID NO: 3405124 - RNA, 23 nt, Human
gcuuguagaacucacucugggcu

SEQ ID NO: 3405125 - RNA, 14 nt, Human
gcuuguagccagcc

SEQ ID NO: 3405126 - RNA, 16 nt, Human
gcuuguagccagccgg

SEQ ID NO: 3405127 - RNA, 22 nt, Human
gcuuguaggagcugagguuuca

SEQ ID NO: 3405128 - RNA, 13 nt, Human
gcuuguaguucuu

SEQ ID NO: 3405129 - RNA, 14 nt, Human
gcuuguauagugua

SEQ ID NO: 3405130 - RNA, 16 nt, Human
gcuugucagagcuggg

SEQ ID NO: 3405131 - RNA, 17 nt, Human
gcuugucagagcuggga

SEQ ID NO: 3405132 - RNA, 18 nt, Human
gcuugucagagcugggag

SEQ ID NO: 3405133 - RNA, 21 nt, Human
gcuuguccaacccgaggcccg

SEQ ID NO: 3405134 - RNA, 18 nt, Human
gcuugugcagaaaacauu

SEQ ID NO: 3405135 - RNA, 19 nt, Human
gcuuguggcuccacacaca

SEQ ID NO: 3405136 - RNA, 22 nt, Human
gcuuguggcuccacacacacaa

SEQ ID NO: 3405137 - RNA, 13 nt, Human
gcuuguuaaugcu

SEQ ID NO: 3405138 - RNA, 18 nt, Human
gcuuguuccaaugccaca

SEQ ID NO: 3405139 - RNA, 16 nt, Human
gcuuguugugcuuuua

SEQ ID NO: 3405140 - RNA, 11 nt, Human
gcuuguuuaca

SEQ ID NO: 3405141 - RNA, 15 nt, Human
gcuuguuuccuagca

SEQ ID NO: 3405142 - RNA, 20 nt, Human
gcuuuaaaauucucuuccaa

SEQ ID NO: 3405143 - RNA, 22 nt, Human
gcuuuaaacauugguucuugua

SEQ ID NO: 3405144 - RNA, 16 nt, Human
gcuuuaaacucaggga

SEQ ID NO: 3405145 - RNA, 18 nt, Human
gcuuuaaacucagggaca

SEQ ID NO: 3405146 - RNA, 17 nt, Human
ggaaaugucaacaagua

SEQ ID NO: 3405147 - RNA, 18 nt, Human
ggaaauguuuuguaaaca

SEQ ID NO: 3405148 - RNA, 19 nt, Human
ggaaauucccuucaucugg

SEQ ID NO: 3405149 - RNA, 20 nt, Human
ggaaauucccuucaucugga

SEQ ID NO: 3405150 - RNA, 16 nt, Human
ggaaauuccuguacug

SEQ ID NO: 3405151 - RNA, 16 nt, Human
ggaaauucugcucaga

SEQ ID NO: 3405152 - RNA, 23 nt, Human
ggaaauuuuacaagggcauaaag

SEQ ID NO: 3405153 - RNA, 21 nt, Human
ggaacaaggcaaggcugucaa

SEQ ID NO: 3405154 - RNA, 15 nt, Human
ggaacaauugaagua

SEQ ID NO: 3405155 - RNA, 21 nt, Human
ggaacaauugaaguaaacuuu

SEQ ID NO: 3405156 - RNA, 14 nt, Human
ggaacacacuugga

SEQ ID NO: 3405157 - RNA, 17 nt, Human
ggaacaccauaggucac

SEQ ID NO: 3405158 - RNA, 13 nt, Human
ggaacaccuccuc

SEQ ID NO: 3405159 - RNA, 13 nt, Human
ggaacacugcccu

SEQ ID NO: 3405160 - RNA, 21 nt, Human
ggaacacuggggacuuggccu

SEQ ID NO: 3405161 - RNA, 19 nt, Human
ggaacagaaggaugaauga

SEQ ID NO: 3405162 - RNA, 13 nt, Human
ggaacagacagga

SEQ ID NO: 3405163 - RNA, 11 nt, Human
ggaacagcaga

SEQ ID NO: 3405164 - RNA, 19 nt, Human
ggaacagugugcaaggcag

SEQ ID NO: 3405165 - RNA, 13 nt, Human
ggaacauaaaaag

SEQ ID NO: 3405166 - RNA, 22 nt, Human
ggaacaucaucaaggcacugcc

SEQ ID NO: 3405167 - RNA, 18 nt, Human
ggaacauuuauuuuauga

SEQ ID NO: 3405168 - RNA, 22 nt, Human
ggaacauuucuguaaauaccau

SEQ ID NO: 3405169 - RNA, 21 nt, Human
ggaaccaaagcgaauuuuaaa

SEQ ID NO: 3405170 - RNA, 19 nt, Human
ggaaccagacucuugccug

SEQ ID NO: 3405171 - RNA, 15 nt, Human
ggaacccagacucag

SEQ ID NO: 3405172 - RNA, 20 nt, Human
ggaacccagcaguucuguua

SEQ ID NO: 3405173 - RNA, 15 nt, Human
ggaaccgaaaggcca

SEQ ID NO: 3405174 - RNA, 16 nt, Human
ggaaccgcaggaagcu

SEQ ID NO: 3405175 - RNA, 18 nt, Human
ggaaccgcaggaagcugc

SEQ ID NO: 3405176 - RNA, 19 nt, Human
ggaaccgcucaccuagagc

SEQ ID NO: 3405177 - RNA, 21 nt, Human
ggaaccgcucaccuagagcca

SEQ ID NO: 3405178 - RNA, 21 nt, Human
ggaaccguaggacccaagcag

SEQ ID NO: 3405179 - RNA, 21 nt, Human
ggaaccgugguaugucugcca

SEQ ID NO: 3405180 - RNA, 21 nt, Human
ggaaccucacucuugccaacc

SEQ ID NO: 3405181 - RNA, 13 nt, Human
ggaaccucagccu

SEQ ID NO: 3405182 - RNA, 19 nt, Human
ggaaccucagccuggccag

SEQ ID NO: 3405183 - RNA, 20 nt, Human
ggaaccucagccuggccaga

SEQ ID NO: 3405184 - RNA, 21 nt, Human
ggaaccucagccuggccagac

SEQ ID NO: 3405185 - RNA, 14 nt, Human
ggaaccucccagag

SEQ ID NO: 3405186 - RNA, 16 nt, Human
ggaaccucccagaggu

SEQ ID NO: 3405187 - RNA, 14 nt, Human
ggaaccuccccagc

SEQ ID NO: 3405188 - RNA, 12 nt, Human
ggaaccuccuuu

SEQ ID NO: 3405189 - RNA, 18 nt, Human
ggaaccucgaguacugug

SEQ ID NO: 3405190 - RNA, 15 nt, Human
ggaaccugcaaaaaa

SEQ ID NO: 3405191 - RNA, 22 nt, Human
ggaaccuguccuaaggaaccuu

SEQ ID NO: 3405192 - RNA, 18 nt, Human
ggaaccugugagcugcac

SEQ ID NO: 3405193 - RNA, 20 nt, Human
ggaaccuuccuuccugcuug

SEQ ID NO: 3405194 - RNA, 14 nt, Human
ggaacgaugugucu

SEQ ID NO: 3405195 - RNA, 16 nt, Human
ggaacgcguugaaauu

SEQ ID NO: 3405196 - RNA, 17 nt, Human
ggaacggaucagauguc

SEQ ID NO: 3405197 - RNA, 18 nt, Human
ggaacgggguccuucaag

SEQ ID NO: 3405198 - RNA, 17 nt, Human
ggaacucaccuggggcu

SEQ ID NO: 3405199 - RNA, 17 nt, Human
ggaacucaucugguuga

SEQ ID NO: 3405200 - RNA, 22 nt, Human
ggaacucauuccugccugucuc

SEQ ID NO: 3405201 - RNA, 15 nt, Human
ggaacucccaagaac

SEQ ID NO: 3405202 - RNA, 23 nt, Human
ggaacucccaagaacagcaggcc

SEQ ID NO: 3405203 - RNA, 11 nt, Human
ggaacucccag

SEQ ID NO: 3405204 - RNA, 22 nt, Human
ggaacucccagcaacacaagcu

SEQ ID NO: 3405205 - RNA, 19 nt, Human
ggaacucuaucugggccug

SEQ ID NO: 3405206 - RNA, 21 nt, Human
ggaacucuaucugggccuggg

SEQ ID NO: 3405207 - RNA, 12 nt, Human
ggaacucugaca

SEQ ID NO: 3405208 - RNA, 20 nt, Human
ggaacucuggcuuccaggua

SEQ ID NO: 3405209 - RNA, 15 nt, Human
ggaacugcaugcugc

SEQ ID NO: 3405210 - RNA, 16 nt, Human
ggaacugcaugcugcu

SEQ ID NO: 3405211 - RNA, 13 nt, Human
ggaacugcugcca

SEQ ID NO: 3405212 - RNA, 17 nt, Human
ggaacugcugccacuga

SEQ ID NO: 3405213 - RNA, 14 nt, Human
ggaacugcugggcu

SEQ ID NO: 3405214 - RNA, 16 nt, Human
ggaacuggccaagcug

SEQ ID NO: 3405215 - RNA, 16 nt, Human
ggaacuguccagagag

SEQ ID NO: 3405216 - RNA, 18 nt, Human
ggaacuguccagagagca

SEQ ID NO: 3405217 - RNA, 13 nt, Human
ggaacuugagaac

SEQ ID NO: 3405218 - RNA, 17 nt, Human
ggaacuugccugccuuu

SEQ ID NO: 3405219 - RNA, 15 nt, Human
ggaagaaaacacugu

SEQ ID NO: 3405220 - RNA, 14 nt, Human
ggaagaaaagagcu

SEQ ID NO: 3405221 - RNA, 14 nt, Human
ggaagaaaaugguu

SEQ ID NO: 3405222 - RNA, 15 nt, Human
ggaagaaagaauguu

SEQ ID NO: 3405223 - RNA, 15 nt, Human
ggaagaacaggccuc

SEQ ID NO: 3405224 - RNA, 14 nt, Human
ggaagaacauagaa

SEQ ID NO: 3405225 - RNA, 20 nt, Human
ggaagaagagaucaggaaga

SEQ ID NO: 3405226 - RNA, 22 nt, Human
ggaagaagagaucaggaagaga

SEQ ID NO: 3405227 - RNA, 14 nt, Human
ggaagaagggagaa

SEQ ID NO: 3405228 - RNA, 15 nt, Human
ggaagaagggagaag

SEQ ID NO: 3405229 - RNA, 18 nt, Human
ggaagaagggagaagaaa

SEQ ID NO: 3405230 - RNA, 23 nt, Human
ggaagaauagggcccaugggagg

SEQ ID NO: 3405231 - RNA, 13 nt, Human
ggaagaaugaaag

SEQ ID NO: 3405232 - RNA, 16 nt, Human
ggaagaaugaaagcug

SEQ ID NO: 3405233 - RNA, 16 nt, Human
ggaagacaaugugaaa

SEQ ID NO: 3405234 - RNA, 22 nt, Human
ggaagacaaugugaaaagaaaa

SEQ ID NO: 3405235 - RNA, 13 nt, Human
ggaagacagcucu

SEQ ID NO: 3405236 - RNA, 22 nt, Human
ggaagacauggggaggaaggac

SEQ ID NO: 3405237 - RNA, 15 nt, Human
ggaagacauuuuucc

SEQ ID NO: 3405238 - RNA, 20 nt, Human
ggaagacccaacacauggga

SEQ ID NO: 3405239 - RNA, 17 nt, Human
ggaagacccauuccuuc

SEQ ID NO: 3405240 - RNA, 23 nt, Human
ggaagaccccacccaagcuuggc

SEQ ID NO: 3405241 - RNA, 15 nt, Human
ggaagacgaggcccu

SEQ ID NO: 3405242 - RNA, 16 nt, Human
ggaagacgaggcccuc

SEQ ID NO: 3405243 - RNA, 16 nt, Human
ggaagacgccugagcu

SEQ ID NO: 3405244 - RNA, 17 nt, Human
ggaagacuuuggaaaga

SEQ ID NO: 3405245 - RNA, 17 nt, Human
ggaagagacagcccagg

SEQ ID NO: 3405246 - RNA, 13 nt, Human
ggaagagagaaag

SEQ ID NO: 3405247 - RNA, 21 nt, Human
ggaagagagccugcaggaucu

SEQ ID NO: 3405248 - RNA, 19 nt, Human
ggaagagaggaguucaaug

SEQ ID NO: 3405249 - RNA, 17 nt, Human
ggaagagcacagcccuc

SEQ ID NO: 3405250 - RNA, 18 nt, Human
ggaagagcacagcccucc

SEQ ID NO: 3405251 - RNA, 19 nt, Human
ggaagagcagaacggagcc

SEQ ID NO: 3405252 - RNA, 13 nt, Human
ggaagagcaggac

SEQ ID NO: 3405253 - RNA, 23 nt, Human
ggaagagcaggacuccaggccca

SEQ ID NO: 3405254 - RNA, 21 nt, Human
ggaagagcaggcacauggagg

SEQ ID NO: 3405255 - RNA, 20 nt, Human
ggaagagccuuccacccagg

SEQ ID NO: 3405256 - RNA, 18 nt, Human
ggaagaggaaaaggcugg

SEQ ID NO: 3405257 - RNA, 14 nt, Human
ggaagaggaaaauu

SEQ ID NO: 3405258 - RNA, 14 nt, Human
ggaagaggggacag

SEQ ID NO: 3405259 - RNA, 22 nt, Human
ggaagaggggugcagaggcugu

SEQ ID NO: 3405260 - RNA, 20 nt, Human
ggaagagugacucuccaggg

SEQ ID NO: 3405261 - RNA, 19 nt, Human
ggaagaguguacugggggu

SEQ ID NO: 3405262 - RNA, 14 nt, Human
ggaagagugugugu

SEQ ID NO: 3405263 - RNA, 18 nt, Human
ggaagauaggcucugcac

SEQ ID NO: 3405264 - RNA, 21 nt, Human
ggaagauaggcucugcacaga

SEQ ID NO: 3405265 - RNA, 22 nt, Human
ggaagaucccccagaaaagaaa

SEQ ID NO: 3405266 - RNA, 14 nt, Human
ggaagaucccuuug

SEQ ID NO: 3405267 - RNA, 22 nt, Human
ggaagauccugcggguggggcu

SEQ ID NO: 3405268 - RNA, 16 nt, Human
ggaagauccugugagg

SEQ ID NO: 3405269 - RNA, 19 nt, Human
ggaagauccugugaggagc

SEQ ID NO: 3405270 - RNA, 19 nt, Human
ggaagaucucugcagggcc

SEQ ID NO: 3405271 - RNA, 22 nt, Human
ggaagaucuuaaauuuugugau

SEQ ID NO: 3405272 - RNA, 18 nt, Human
ggaagauuucuaaauaaa

SEQ ID NO: 3405273 - RNA, 16 nt, Human
ggaagcacagaaaacu

SEQ ID NO: 3405274 - RNA, 17 nt, Human
ggaagcacagcuucauu

SEQ ID NO: 3405275 - RNA, 22 nt, Human
ggaagcacaugccucucucagg

SEQ ID NO: 3405276 - RNA, 23 nt, Human
ggaagcacauguuuauuuauucu

SEQ ID NO: 3405277 - RNA, 13 nt, Human
ggaagcagaagga

SEQ ID NO: 3405278 - RNA, 12 nt, Human
ggaagcagaaua

SEQ ID NO: 3405279 - RNA, 20 nt, Human
ggaagcagugccuuccauaa

SEQ ID NO: 3405280 - RNA, 18 nt, Human
ggaagcauucagagagca

SEQ ID NO: 3405281 - RNA, 19 nt, Human
ggaagcauuuguuucuacu

SEQ ID NO: 3405282 - RNA, 22 nt, Human
ggaagccaaaccucugugagca

SEQ ID NO: 3405283 - RNA, 18 nt, Human
ggaagccaacuuggcuuu

SEQ ID NO: 3405284 - RNA, 23 nt, Human
ggaagcccagccccuacugcugu

SEQ ID NO: 3405285 - RNA, 16 nt, Human
ggaagcccagcuccag

SEQ ID NO: 3405286 - RNA, 19 nt, Human
ggaagcccaggagccucac

SEQ ID NO: 3405287 - RNA, 17 nt, Human
ggaagcccauccugacc

SEQ ID NO: 3405288 - RNA, 20 nt, Human
ggaagcccauccugaccagc

SEQ ID NO: 3405289 - RNA, 13 nt, Human
ggaagccccacau

SEQ ID NO: 3405290 - RNA, 10 nt, Human
ggacccagac

SEQ ID NO: 3405291 - RNA, 13 nt, Human
ggacccagaccca

SEQ ID NO: 3405292 - RNA, 21 nt, Human
ggacccagaggaaggggccag

SEQ ID NO: 3405293 - RNA, 15 nt, Human
ggacccagccaggcc

SEQ ID NO: 3405294 - RNA, 20 nt, Human
ggacccagccaggcccagcc

SEQ ID NO: 3405295 - RNA, 10 nt, Human
ggacccagga

SEQ ID NO: 3405296 - RNA, 14 nt, Human
ggacccagggauga

SEQ ID NO: 3405297 - RNA, 13 nt, Human
ggacccagggcuc

SEQ ID NO: 3405298 - RNA, 16 nt, Human
ggacccagugcagaau

SEQ ID NO: 3405299 - RNA, 11 nt, Human
ggacccagugg

SEQ ID NO: 3405300 - RNA, 16 nt, Human
ggacccaguggcaggg

SEQ ID NO: 3405301 - RNA, 18 nt, Human
ggacccaguggcagggca

SEQ ID NO: 3405302 - RNA, 22 nt, Human
ggacccaugaguuggggucugg

SEQ ID NO: 3405303 - RNA, 14 nt, Human
ggaccccagccuca

SEQ ID NO: 3405304 - RNA, 15 nt, Human
ggaccccagcucugc

SEQ ID NO: 3405305 - RNA, 12 nt, Human
ggaccccagcug

SEQ ID NO: 3405306 - RNA, 21 nt, Human
ggaccccagcugggaggcaag

SEQ ID NO: 3405307 - RNA, 20 nt, Human
ggaccccaucugugaauaag

SEQ ID NO: 3405308 - RNA, 19 nt, Human
ggacccccaggacaggcug

SEQ ID NO: 3405309 - RNA, 16 nt, Human
ggacccccgcccccug

SEQ ID NO: 3405310 - RNA, 13 nt, Human
ggaccccugcccu

SEQ ID NO: 3405311 - RNA, 15 nt, Human
ggacccgcucuggac

SEQ ID NO: 3405312 - RNA, 16 nt, Human
ggacccuccaaggcca

SEQ ID NO: 3405313 - RNA, 21 nt, Human
ggacccuccgcucuguagugc

SEQ ID NO: 3405314 - RNA, 17 nt, Human
ggacccucgcuggcccc

SEQ ID NO: 3405315 - RNA, 18 nt, Human
ggacccucgcuggccccc

SEQ ID NO: 3405316 - RNA, 14 nt, Human
ggacccugaaaugu

SEQ ID NO: 3405317 - RNA, 14 nt, Human
ggacccugaggccc

SEQ ID NO: 3405318 - RNA, 15 nt, Human
ggacccugaggccca

SEQ ID NO: 3405319 - RNA, 18 nt, Human
ggacccugaggcccagag

SEQ ID NO: 3405320 - RNA, 16 nt, Human
ggacccugugacaugg

SEQ ID NO: 3405321 - RNA, 18 nt, Human
ggacccuuuuuguuauga

SEQ ID NO: 3405322 - RNA, 15 nt, Human
ggaccgccaaagaau

SEQ ID NO: 3405323 - RNA, 15 nt, Human
ggaccgccagauggg

SEQ ID NO: 3405324 - RNA, 18 nt, Human
ggaccggagagugggggu

SEQ ID NO: 3405325 - RNA, 19 nt, Human
ggaccggagagugggggug

SEQ ID NO: 3405326 - RNA, 22 nt, Human
ggaccuagggaggcauggucug

SEQ ID NO: 3405327 - RNA, 23 nt, Human
ggaccuagggaggcauggucugc

SEQ ID NO: 3405328 - RNA, 13 nt, Human
ggaccucaccaag

SEQ ID NO: 3405329 - RNA, 16 nt, Human
ggaccucagcugcuuc

SEQ ID NO: 3405330 - RNA, 12 nt, Human
ggaccucaggcc

SEQ ID NO: 3405331 - RNA, 14 nt, Human
ggaccucaggccug

SEQ ID NO: 3405332 - RNA, 14 nt, Human
ggaccuccccugag

SEQ ID NO: 3405333 - RNA, 16 nt, Human
ggaccuccucuucccc

SEQ ID NO: 3405334 - RNA, 13 nt, Human
ggaccucgugcca

SEQ ID NO: 3405335 - RNA, 17 nt, Human
ggaccucugcucugagg

SEQ ID NO: 3405336 - RNA, 12 nt, Human
ggaccucugggc

SEQ ID NO: 3405337 - RNA, 23 nt, Human
ggaccugagccugccgagcaacc

SEQ ID NO: 3405338 - RNA, 14 nt, Human
ggaccugccaggca

SEQ ID NO: 3405339 - RNA, 11 nt, Human
ggaccugcccc

SEQ ID NO: 3405340 - RNA, 13 nt, Human
ggaccugccugca

SEQ ID NO: 3405341 - RNA, 14 nt, Human
ggaccuggcugcca

SEQ ID NO: 3405342 - RNA, 15 nt, Human
ggaccuggggcacag

SEQ ID NO: 3405343 - RNA, 22 nt, Human
ggaccuguauuuaagcaaauac

SEQ ID NO: 3405344 - RNA, 23 nt, Human
ggaccuguauuuaagcaaauacu

SEQ ID NO: 3405345 - RNA, 20 nt, Human
ggaccuuacgaucaggcaca

SEQ ID NO: 3405346 - RNA, 18 nt, Human
ggaccuuaggccuuccuc

SEQ ID NO: 3405347 - RNA, 22 nt, Human
ggaccuuaucugugcgugaaac

SEQ ID NO: 3405348 - RNA, 21 nt, Human
ggaccuucacucuaagauguu

SEQ ID NO: 3405349 - RNA, 12 nt, Human
ggaccuuccugc

SEQ ID NO: 3405350 - RNA, 13 nt, Human
ggaccuuccugcc

SEQ ID NO: 3405351 - RNA, 15 nt, Human
ggaccuugaacuggg

SEQ ID NO: 3405352 - RNA, 17 nt, Human
ggaccuugaacugggua

SEQ ID NO: 3405353 - RNA, 15 nt, Human
ggaccuuucagcugu

SEQ ID NO: 3405354 - RNA, 21 nt, Human
ggaccuuuuaaaguguuucag

SEQ ID NO: 3405355 - RNA, 16 nt, Human
ggaccuuuuguuuucu

SEQ ID NO: 3405356 - RNA, 23 nt, Human
ggacgacacggucggggcaucug

SEQ ID NO: 3405357 - RNA, 19 nt, Human
ggacgccacucauuucauc

SEQ ID NO: 3405358 - RNA, 17 nt, Human
ggacgcccaggacccca

SEQ ID NO: 3405359 - RNA, 19 nt, Human
ggacgccugggggugccag

SEQ ID NO: 3405360 - RNA, 17 nt, Human
ggacgcuacccgggaag

SEQ ID NO: 3405361 - RNA, 17 nt, Human
ggacgcugaccguggag

SEQ ID NO: 3405362 - RNA, 12 nt, Human
ggacggccaaga

SEQ ID NO: 3405363 - RNA, 22 nt, Human
ggacggccugaugcucccuccc

SEQ ID NO: 3405364 - RNA, 15 nt, Human
ggacggcugggcaca

SEQ ID NO: 3405365 - RNA, 19 nt, Human
ggacggggggccccaguca

SEQ ID NO: 3405366 - RNA, 21 nt, Human
ggacggggggccccagucagc

SEQ ID NO: 3405367 - RNA, 23 nt, Human
ggacggggggccccagucagccu

SEQ ID NO: 3405368 - RNA, 19 nt, Human
ggacggugcccaagccaga

SEQ ID NO: 3405369 - RNA, 15 nt, Human
ggacggugcuccagg

SEQ ID NO: 3405370 - RNA, 20 nt, Human
ggacggugcuccaggcaggc

SEQ ID NO: 3405371 - RNA, 21 nt, Human
ggacguacguaauaagguuuu

SEQ ID NO: 3405372 - RNA, 13 nt, Human
ggacguccuccaa

SEQ ID NO: 3405373 - RNA, 18 nt, Human
ggacguccugccaccugg

SEQ ID NO: 3405374 - RNA, 13 nt, Human
ggacgucuuucuu

SEQ ID NO: 3405375 - RNA, 12 nt, Human
ggacgugcuggg

SEQ ID NO: 3405376 - RNA, 13 nt, Human
ggacgugggcugg

SEQ ID NO: 3405377 - RNA, 14 nt, Human
ggacguuccagccg

SEQ ID NO: 3405378 - RNA, 12 nt, Human
ggacuaaaagau

SEQ ID NO: 3405379 - RNA, 16 nt, Human
ggacuaggguccuggg

SEQ ID NO: 3405380 - RNA, 15 nt, Human
ggacuauagcccagg

SEQ ID NO: 3405381 - RNA, 23 nt, Human
ggacuauauuugggccugcucca

SEQ ID NO: 3405382 - RNA, 16 nt, Human
ggacucaaguuucuuc

SEQ ID NO: 3405383 - RNA, 19 nt, Human
ggacucaaguuucuucaau

SEQ ID NO: 3405384 - RNA, 18 nt, Human
ggacucaaugcacugaca

SEQ ID NO: 3405385 - RNA, 18 nt, Human
ggacucaauuucucccca

SEQ ID NO: 3405386 - RNA, 20 nt, Human
ggacucacagguuggaagag

SEQ ID NO: 3405387 - RNA, 23 nt, Human
ggacucacagguuggaagagaau

SEQ ID NO: 3405388 - RNA, 15 nt, Human
ggacucacuggcagc

SEQ ID NO: 3405389 - RNA, 19 nt, Human
ggacucacuggcagcccca

SEQ ID NO: 3405390 - RNA, 17 nt, Human
ggacucagaagccucug

SEQ ID NO: 3405391 - RNA, 18 nt, Human
ggacucagaagccucugg

SEQ ID NO: 3405392 - RNA, 15 nt, Human
ggacucagcccugag

SEQ ID NO: 3405393 - RNA, 21 nt, Human
ggacucagccuucagacagag

SEQ ID NO: 3405394 - RNA, 18 nt, Human
ggacucaggaugcccagg

SEQ ID NO: 3405395 - RNA, 16 nt, Human
ggacucaggcgggaca

SEQ ID NO: 3405396 - RNA, 13 nt, Human
ggacucagggcag

SEQ ID NO: 3405397 - RNA, 22 nt, Human
ggacucagggcagcgccaggcu

SEQ ID NO: 3405398 - RNA, 22 nt, Human
ggacucaucuuucccuccuugg

SEQ ID NO: 3405399 - RNA, 20 nt, Human
ggacuccacccauccuauca

SEQ ID NO: 3405400 - RNA, 18 nt, Human
ggacuccagaaucuaaag

SEQ ID NO: 3405401 - RNA, 19 nt, Human
ggacuccagacucucugug

SEQ ID NO: 3405402 - RNA, 10 nt, Human
ggacuccagc

SEQ ID NO: 3405403 - RNA, 23 nt, Human
ggacuccaggcccaaggcucccg

SEQ ID NO: 3405404 - RNA, 16 nt, Human
ggacuccccaggccag

SEQ ID NO: 3405405 - RNA, 20 nt, Human
ggacucccuccucaccucug

SEQ ID NO: 3405406 - RNA, 16 nt, Human
ggacuccggcccuccu

SEQ ID NO: 3405407 - RNA, 22 nt, Human
ggacuccuccccacccuccugg

SEQ ID NO: 3405408 - RNA, 15 nt, Human
ggacuccuccuuucu

SEQ ID NO: 3405409 - RNA, 17 nt, Human
ggacuccuccuuucucc

SEQ ID NO: 3405410 - RNA, 14 nt, Human
ggacuccucugucc

SEQ ID NO: 3405411 - RNA, 11 nt, Human
ggacuccugaa

SEQ ID NO: 3405412 - RNA, 16 nt, Human
ggacucgcuuguaaau

SEQ ID NO: 3405413 - RNA, 17 nt, Human
ggacucucagucucuga

SEQ ID NO: 3405414 - RNA, 18 nt, Human
ggacucucagucucugag

SEQ ID NO: 3405415 - RNA, 20 nt, Human
ggacucucagucucugagca

SEQ ID NO: 3405416 - RNA, 21 nt, Human
ggacucucagucucugagcag

SEQ ID NO: 3405417 - RNA, 19 nt, Human
ggacucugagcgggaggca

SEQ ID NO: 3405418 - RNA, 21 nt, Human
ggacucugagcgggaggcaga

SEQ ID NO: 3405419 - RNA, 20 nt, Human
ggacucugcacaugucuugu

SEQ ID NO: 3405420 - RNA, 12 nt, Human
ggacucuguccu

SEQ ID NO: 3405421 - RNA, 21 nt, Human
ggacucuucagcacaaaagga

SEQ ID NO: 3405422 - RNA, 16 nt, Human
ggacugacacccaugu

SEQ ID NO: 3405423 - RNA, 20 nt, Human
ggacugacagcaugugcccu

SEQ ID NO: 3405424 - RNA, 13 nt, Human
ggacugccaccuc

SEQ ID NO: 3405425 - RNA, 15 nt, Human
ggacugccucugcca

SEQ ID NO: 3405426 - RNA, 20 nt, Human
ggacugccuugaauaucccc

SEQ ID NO: 3405427 - RNA, 19 nt, Human
ggacugcuaaauaaaauuu

SEQ ID NO: 3405428 - RNA, 22 nt, Human
ggacugcuaccuuucaaagcuu

SEQ ID NO: 3405429 - RNA, 16 nt, Human
ggacugcucaggaaac

SEQ ID NO: 3405430 - RNA, 17 nt, Human
ggacugcugcugccugg

SEQ ID NO: 3405431 - RNA, 17 nt, Human
ggacuggaaccagggag

SEQ ID NO: 3405432 - RNA, 17 nt, Human
ggacuggagucccugug

SEQ ID NO: 3405433 - RNA, 15 nt, Human
ggacuggaguggagc

SEQ ID NO: 3405434 - RNA, 14 nt, Human
ggacuggccccugg

SEQ ID NO: 3405435 - RNA, 15 nt, Human
ggacuggccccuggg

SEQ ID NO: 3405436 - RNA, 23 nt, Human
ggcaggucuugaacuccuggccu

SEQ ID NO: 3405437 - RNA, 16 nt, Human
ggcaggugccuccagg

SEQ ID NO: 3405438 - RNA, 19 nt, Human
ggcaggugcuggagcacug

SEQ ID NO: 3405439 - RNA, 20 nt, Human
ggcaggugcuggagcacugg

SEQ ID NO: 3405440 - RNA, 14 nt, Human
ggcaggugguggca

SEQ ID NO: 3405441 - RNA, 20 nt, Human
ggcagguuagaaccuagaag

SEQ ID NO: 3405442 - RNA, 15 nt, Human
ggcaguaaagagaaa

SEQ ID NO: 3405443 - RNA, 14 nt, Human
ggcaguaauaaaaa

SEQ ID NO: 3405444 - RNA, 20 nt, Human
ggcaguaccugagggucugu

SEQ ID NO: 3405445 - RNA, 23 nt, Human
ggcaguagcuguggugagguggg

SEQ ID NO: 3405446 - RNA, 20 nt, Human
ggcagucauuggcugucucc

SEQ ID NO: 3405447 - RNA, 16 nt, Human
ggcaguccgugggacg

SEQ ID NO: 3405448 - RNA, 23 nt, Human
ggcagucgggggcuggccuagga

SEQ ID NO: 3405449 - RNA, 14 nt, Human
ggcagucuggaggg

SEQ ID NO: 3405450 - RNA, 16 nt, Human
ggcagucuggaggggc

SEQ ID NO: 3405451 - RNA, 18 nt, Human
ggcagugagugagccugg

SEQ ID NO: 3405452 - RNA, 17 nt, Human
ggcagugcgggaggaau

SEQ ID NO: 3405453 - RNA, 24 nt, Human
ggcagugcuagugagcugggcaug

SEQ ID NO: 3405454 - RNA, 18 nt, Human
ggcagugcuuggcccagg

SEQ ID NO: 3405455 - RNA, 19 nt, Human
ggcagugcuuggcccagga

SEQ ID NO: 3405456 - RNA, 15 nt, Human
ggcagugggaaaaau

SEQ ID NO: 3405457 - RNA, 13 nt, Human
ggcagugggagcu

SEQ ID NO: 3405458 - RNA, 20 nt, Human
ggcagugguaagcucuggcu

SEQ ID NO: 3405459 - RNA, 20 nt, Human
ggcaguggugguuuucuguu

SEQ ID NO: 3405460 - RNA, 11 nt, Human
ggcaguuacau

SEQ ID NO: 3405461 - RNA, 22 nt, Human
ggcaguuaccauuaaaccaucu

SEQ ID NO: 3405462 - RNA, 23 nt, Human
ggcaguuaccauuaaaccaucuc

SEQ ID NO: 3405463 - RNA, 20 nt, Human
ggcaguuagagaugccuccc

SEQ ID NO: 3405464 - RNA, 15 nt, Human
ggcaguucgcagcca

SEQ ID NO: 3405465 - RNA, 18 nt, Human
ggcaguucgcagccaccc

SEQ ID NO: 3405466 - RNA, 19 nt, Human
ggcaguucgcagccacccu

SEQ ID NO: 3405467 - RNA, 20 nt, Human
ggcaguucgcagccacccug

SEQ ID NO: 3405468 - RNA, 21 nt, Human
ggcaguucugggugcucccua

SEQ ID NO: 3405469 - RNA, 21 nt, Human
ggcaguuuugacaucagccag

SEQ ID NO: 3405470 - RNA, 15 nt, Human
ggcaguuuuucugua

SEQ ID NO: 3405471 - RNA, 19 nt, Human
ggcaguuuuucuguauuuu

SEQ ID NO: 3405472 - RNA, 14 nt, Human
ggcauaaacuguuu

SEQ ID NO: 3405473 - RNA, 17 nt, Human
ggcauaacauaaaucug

SEQ ID NO: 3405474 - RNA, 22 nt, Human
ggcauacgagagcagaggucuc

SEQ ID NO: 3405475 - RNA, 21 nt, Human
ggcauacgccuguaguccuag

SEQ ID NO: 3405476 - RNA, 22 nt, Human
ggcauagaggcuucuccgccag

SEQ ID NO: 3405477 - RNA, 21 nt, Human
ggcauagcccagacacagaag

SEQ ID NO: 3405478 - RNA, 15 nt, Human
ggcauaggccugggu

SEQ ID NO: 3405479 - RNA, 23 nt, Human
ggcauauauguacuaguggcaug

SEQ ID NO: 3405480 - RNA, 22 nt, Human
ggcauauccaccaccucccuca

SEQ ID NO: 3405481 - RNA, 21 nt, Human
ggcaucaagaggugggagggc

SEQ ID NO: 3405482 - RNA, 18 nt, Human
ggcaucaccuuaggcagg

SEQ ID NO: 3405483 - RNA, 20 nt, Human
ggcaucaguguccuuggcag

SEQ ID NO: 3405484 - RNA, 17 nt, Human
ggcaucaucaauaaaac

SEQ ID NO: 3405485 - RNA, 13 nt, Human
ggcaucaugcaug

SEQ ID NO: 3405486 - RNA, 16 nt, Human
ggcauccagagucccu

SEQ ID NO: 3405487 - RNA, 18 nt, Human
ggcauccagcagucucug

SEQ ID NO: 3405488 - RNA, 15 nt, Human
ggcaucccaggggac

SEQ ID NO: 3405489 - RNA, 18 nt, Human
ggcaucccaguggccuca

SEQ ID NO: 3405490 - RNA, 12 nt, Human
ggcaucccuggg

SEQ ID NO: 3405491 - RNA, 14 nt, Human
ggcauccuccagcc

SEQ ID NO: 3405492 - RNA, 21 nt, Human
ggcaucuagagcuugaugcca

SEQ ID NO: 3405493 - RNA, 16 nt, Human
ggcaucuaucugugcu

SEQ ID NO: 3405494 - RNA, 16 nt, Human
ggcaucuccugugcau

SEQ ID NO: 3405495 - RNA, 14 nt, Human
ggcaucucuguccc

SEQ ID NO: 3405496 - RNA, 15 nt, Human
ggcaucucuguccca

SEQ ID NO: 3405497 - RNA, 14 nt, Human
ggcaucugccccuc

SEQ ID NO: 3405498 - RNA, 18 nt, Human
ggcaucugccccuccccc

SEQ ID NO: 3405499 - RNA, 16 nt, Human
ggcaucuugcuggcua

SEQ ID NO: 3405500 - RNA, 22 nt, Human
ggcaucuuugccuugggcugcu

SEQ ID NO: 3405501 - RNA, 17 nt, Human
ggcaugaaaugaacaca

SEQ ID NO: 3405502 - RNA, 18 nt, Human
ggcaugaacauguacugu

SEQ ID NO: 3405503 - RNA, 23 nt, Human
ggcaugaaguuuccuuggcuggu

SEQ ID NO: 3405504 - RNA, 18 nt, Human
ggcaugacacgaauauug

SEQ ID NO: 3405505 - RNA, 13 nt, Human
ggcaugaccagau

SEQ ID NO: 3405506 - RNA, 12 nt, Human
ggcaugagauag

SEQ ID NO: 3405507 - RNA, 19 nt, Human
ggcaugagggaucacaggg

SEQ ID NO: 3405508 - RNA, 23 nt, Human
ggcaugagggguuccuccccucc

SEQ ID NO: 3405509 - RNA, 15 nt, Human
ggcaugccccggcca

SEQ ID NO: 3405510 - RNA, 22 nt, Human
ggcaugccccggccaccucugc

SEQ ID NO: 3405511 - RNA, 14 nt, Human
ggcaugccugugug

SEQ ID NO: 3405512 - RNA, 19 nt, Human
ggcaugcgcacaaggcuga

SEQ ID NO: 3405513 - RNA, 17 nt, Human
ggcaugcggucgggcag

SEQ ID NO: 3405514 - RNA, 11 nt, Human
ggcaugcuaaa

SEQ ID NO: 3405515 - RNA, 12 nt, Human
ggcaugcugggg

SEQ ID NO: 3405516 - RNA, 13 nt, Human
ggcaugcuggggc

SEQ ID NO: 3405517 - RNA, 15 nt, Human
ggcauggacuucugg

SEQ ID NO: 3405518 - RNA, 18 nt, Human
ggcaugggaaugaauguc

SEQ ID NO: 3405519 - RNA, 22 nt, Human
ggcaugggaaugaaugucagug

SEQ ID NO: 3405520 - RNA, 19 nt, Human
ggcaugguaccagcccugg

SEQ ID NO: 3405521 - RNA, 20 nt, Human
ggcaugguaccagcccuggg

SEQ ID NO: 3405522 - RNA, 21 nt, Human
ggcaugguggcgcaagccugu

SEQ ID NO: 3405523 - RNA, 22 nt, Human
ggcaugguggcgcaagccugua

SEQ ID NO: 3405524 - RNA, 11 nt, Human
ggcauguaaau

SEQ ID NO: 3405525 - RNA, 19 nt, Human
ggcauguauuggccuggag

SEQ ID NO: 3405526 - RNA, 20 nt, Human
ggcauguauuggccuggagg

SEQ ID NO: 3405527 - RNA, 18 nt, Human
ggcaugugaugagaggaa

SEQ ID NO: 3405528 - RNA, 20 nt, Human
ggcauguggccuguggccug

SEQ ID NO: 3405529 - RNA, 16 nt, Human
ggcauuaacacaaagg

SEQ ID NO: 3405530 - RNA, 15 nt, Human
ggcauuccccaggag

SEQ ID NO: 3405531 - RNA, 13 nt, Human
ggcauuccugcuu

SEQ ID NO: 3405532 - RNA, 15 nt, Human
ggcauuccugcuuau

SEQ ID NO: 3405533 - RNA, 12 nt, Human
ggcauuccuucu

SEQ ID NO: 3405534 - RNA, 12 nt, Human
ggcauucucuga

SEQ ID NO: 3405535 - RNA, 18 nt, Human
ggcauucuggaccucugg

SEQ ID NO: 3405536 - RNA, 18 nt, Human
ggcauucuuguacagugu

SEQ ID NO: 3405537 - RNA, 17 nt, Human
ggcauugacaaaucugu

SEQ ID NO: 3405538 - RNA, 19 nt, Human
ggcauugaggaagagucuu

SEQ ID NO: 3405539 - RNA, 11 nt, Human
ggcauugagua

SEQ ID NO: 3405540 - RNA, 19 nt, Human
ggcauugaguauuguuuaa

SEQ ID NO: 3405541 - RNA, 23 nt, Human
ggcauugauggggaaggaggcug

SEQ ID NO: 3405542 - RNA, 21 nt, Human
ggcauuggcagcaggugcugc

SEQ ID NO: 3405543 - RNA, 20 nt, Human
ggcauugguucccuuugcuc

SEQ ID NO: 3405544 - RNA, 16 nt, Human
ggcauuguaucugucu

SEQ ID NO: 3405545 - RNA, 21 nt, Human
ggcauuguaucugucuuucca

SEQ ID NO: 3405546 - RNA, 19 nt, Human
ggcauugucccugugccua

SEQ ID NO: 3405547 - RNA, 12 nt, Human
ggcauuguggga

SEQ ID NO: 3405548 - RNA, 22 nt, Human
ggcauuuguaaauauuaaacca

SEQ ID NO: 3405549 - RNA, 16 nt, Human
ggcauuuuauagacac

SEQ ID NO: 3405550 - RNA, 22 nt, Human
ggcauuuucccccuuggcucuc

SEQ ID NO: 3405551 - RNA, 23 nt, Human
ggccaaaagcuucccucccugcu

SEQ ID NO: 3405552 - RNA, 19 nt, Human
ggccaaaaggaaaaagcuc

SEQ ID NO: 3405553 - RNA, 23 nt, Human
ggccaaacaacagucuucauuuu

SEQ ID NO: 3405554 - RNA, 12 nt, Human
ggccaaaccucu

SEQ ID NO: 3405555 - RNA, 17 nt, Human
ggccaaacucaccugcc

SEQ ID NO: 3405556 - RNA, 21 nt, Human
ggccaaacucaccugccccuc

SEQ ID NO: 3405557 - RNA, 22 nt, Human
ggccaaagaaccaaagaagaaa

SEQ ID NO: 3405558 - RNA, 15 nt, Human
ggccaaagccaaagc

SEQ ID NO: 3405559 - RNA, 16 nt, Human
ggccaaaggaagcaca

SEQ ID NO: 3405560 - RNA, 19 nt, Human
ggccaaaggaagcacaugc

SEQ ID NO: 3405561 - RNA, 21 nt, Human
ggccaaaggaagcacaugccu

SEQ ID NO: 3405562 - RNA, 19 nt, Human
ggccaaaggggaccuggaa

SEQ ID NO: 3405563 - RNA, 23 nt, Human
ggccaaagugccggugagaccca

SEQ ID NO: 3405564 - RNA, 19 nt, Human
ggccaaaucacccuuagaa

SEQ ID NO: 3405565 - RNA, 21 nt, Human
ggccaaauuauuuguguaaua

SEQ ID NO: 3405566 - RNA, 14 nt, Human
ggccaacaaagaac

SEQ ID NO: 3405567 - RNA, 15 nt, Human
ggccaagacuuggca

SEQ ID NO: 3405568 - RNA, 19 nt, Human
ggccaagauaggaccuugg

SEQ ID NO: 3405569 - RNA, 15 nt, Human
ggccaagcugaggug

SEQ ID NO: 3405570 - RNA, 14 nt, Human
ggccaaggagcugc

SEQ ID NO: 3405571 - RNA, 16 nt, Human
ggccaaggagggugag

SEQ ID NO: 3405572 - RNA, 16 nt, Human
ggccaaggccuucucc

SEQ ID NO: 3405573 - RNA, 18 nt, Human
ggccaaggccuucuccuc

SEQ ID NO: 3405574 - RNA, 13 nt, Human
ggccaagguggga

SEQ ID NO: 3405575 - RNA, 19 nt, Human
ggccaagguguccuacaga

SEQ ID NO: 3405576 - RNA, 23 nt, Human
ggccaaguccgcagaagcccuga

SEQ ID NO: 3405577 - RNA, 18 nt, Human
ggccaagugcaggcuggc

SEQ ID NO: 3405578 - RNA, 15 nt, Human
ggccaaguuccucua

SEQ ID NO: 3405579 - RNA, 19 nt, Human
ggccccgcuuguccagcgc

SEQ ID NO: 3405580 - RNA, 23 nt, Human
ggccccggaucagagcaggaccu

SEQ ID NO: 3405581 - RNA, 24 nt, Human
ggccccggaucagagcaggaccuc

SEQ ID NO: 3405582 - RNA, 13 nt, Human
ggccccggcccca

SEQ ID NO: 3405583 - RNA, 14 nt, Human
ggccccggccccag

SEQ ID NO: 3405584 - RNA, 16 nt, Human
ggccccggccccagcc

SEQ ID NO: 3405585 - RNA, 15 nt, Human
ggccccgucucaggu

SEQ ID NO: 3405586 - RNA, 19 nt, Human
ggccccgucucaggucuga

SEQ ID NO: 3405587 - RNA, 18 nt, Human
ggccccguuucugguggu

SEQ ID NO: 3405588 - RNA, 20 nt, Human
ggccccucagggucccuggu

SEQ ID NO: 3405589 - RNA, 21 nt, Human
ggccccucagggucccuggug

SEQ ID NO: 3405590 - RNA, 23 nt, Human
ggccccucaucugcucagcagcu

SEQ ID NO: 3405591 - RNA, 17 nt, Human
ggccccuccagcuugug

SEQ ID NO: 3405592 - RNA, 14 nt, Human
ggccccucccacac

SEQ ID NO: 3405593 - RNA, 23 nt, Human
ggccccucccacacccaaagcug

SEQ ID NO: 3405594 - RNA, 17 nt, Human
ggccccucccccguccu

SEQ ID NO: 3405595 - RNA, 20 nt, Human
ggccccucccuaccucaacc

SEQ ID NO: 3405596 - RNA, 15 nt, Human
ggccccucccucucc

SEQ ID NO: 3405597 - RNA, 13 nt, Human
ggccccucucagc

SEQ ID NO: 3405598 - RNA, 23 nt, Human
ggccccucucccuugggcucuga

SEQ ID NO: 3405599 - RNA, 12 nt, Human
ggccccucugcc

SEQ ID NO: 3405600 - RNA, 17 nt, Human
ggccccugagaucucug

SEQ ID NO: 3405601 - RNA, 18 nt, Human
ggccccugccacccuggg

SEQ ID NO: 3405602 - RNA, 13 nt, Human
ggccccugcccgg

SEQ ID NO: 3405603 - RNA, 16 nt, Human
ggccccugcccggcug

SEQ ID NO: 3405604 - RNA, 17 nt, Human
ggccccugcccggcugc

SEQ ID NO: 3405605 - RNA, 18 nt, Human
ggccccugccucucugca

SEQ ID NO: 3405606 - RNA, 23 nt, Human
ggccccugcugguucaggguugg

SEQ ID NO: 3405607 - RNA, 16 nt, Human
ggccccugcuucucca

SEQ ID NO: 3405608 - RNA, 14 nt, Human
ggccccuggaggcu

SEQ ID NO: 3405609 - RNA, 13 nt, Human
ggccccuggcacu

SEQ ID NO: 3405610 - RNA, 17 nt, Human
ggccccuggcccagcgg

SEQ ID NO: 3405611 - RNA, 18 nt, Human
ggccccuggcccagcggc

SEQ ID NO: 3405612 - RNA, 13 nt, Human
ggccccugugagu

SEQ ID NO: 3405613 - RNA, 20 nt, Human
ggccccuucacuucugacca

SEQ ID NO: 3405614 - RNA, 21 nt, Human
ggccccuucacuucugaccac

SEQ ID NO: 3405615 - RNA, 23 nt, Human
ggccccuucucucccugccagag

SEQ ID NO: 3405616 - RNA, 20 nt, Human
ggccccuugacucuggggac

SEQ ID NO: 3405617 - RNA, 17 nt, Human
ggccccuuugggcccug

SEQ ID NO: 3405618 - RNA, 21 nt, Human
ggccccuuugggcccugcaug

SEQ ID NO: 3405619 - RNA, 20 nt, Human
ggccccuuuucacucccucc

SEQ ID NO: 3405620 - RNA, 15 nt, Human
ggcccgacagccugg

SEQ ID NO: 3405621 - RNA, 16 nt, Human
ggcccgacagccuggc

SEQ ID NO: 3405622 - RNA, 22 nt, Human
ggcccgagcagcugagcagggc

SEQ ID NO: 3405623 - RNA, 15 nt, Human
ggcccgccuggcaga

SEQ ID NO: 3405624 - RNA, 19 nt, Human
ggcccgcuugccucggcuc

SEQ ID NO: 3405625 - RNA, 23 nt, Human
ggcccgcuugccucggcuccugc

SEQ ID NO: 3405626 - RNA, 17 nt, Human
ggcccggaugcugcuuc

SEQ ID NO: 3405627 - RNA, 20 nt, Human
ggcccggccagccaugucug

SEQ ID NO: 3405628 - RNA, 15 nt, Human
ggcccggcuccaggc

SEQ ID NO: 3405629 - RNA, 19 nt, Human
ggcccggggcuggcggcua

SEQ ID NO: 3405630 - RNA, 15 nt, Human
ggcccgucauguucc

SEQ ID NO: 3405631 - RNA, 18 nt, Human
ggcccgucuguccaucug

SEQ ID NO: 3405632 - RNA, 19 nt, Human
ggcccgucuguccaucugc

SEQ ID NO: 3405633 - RNA, 16 nt, Human
ggcccguugaggauga

SEQ ID NO: 3405634 - RNA, 18 nt, Human
ggcccguugucucccugg

SEQ ID NO: 3405635 - RNA, 21 nt, Human
ggcccguugucucccuggccc

SEQ ID NO: 3405636 - RNA, 16 nt, Human
ggcccuaauucagcca

SEQ ID NO: 3405637 - RNA, 22 nt, Human
ggcccuagacucggggugcuuc

SEQ ID NO: 3405638 - RNA, 21 nt, Human
ggcccuagcccagcgcucugc

SEQ ID NO: 3405639 - RNA, 23 nt, Human
ggcccucaaggccucccacagug

SEQ ID NO: 3405640 - RNA, 19 nt, Human
ggcccucaagucuuucucu

SEQ ID NO: 3405641 - RNA, 21 nt, Human
ggcccucaguagucccugcac

SEQ ID NO: 3405642 - RNA, 14 nt, Human
ggcccuccacaccu

SEQ ID NO: 3405643 - RNA, 15 nt, Human
ggcccuccacaccug

SEQ ID NO: 3405644 - RNA, 19 nt, Human
ggcccuccacaccugcggc

SEQ ID NO: 3405645 - RNA, 23 nt, Human
ggcccuccagagccccacagccc

SEQ ID NO: 3405646 - RNA, 12 nt, Human
ggcccucccagu

SEQ ID NO: 3405647 - RNA, 14 nt, Human
ggcccucccaguac

SEQ ID NO: 3405648 - RNA, 19 nt, Human
ggcccucccuguuccccag

SEQ ID NO: 3405649 - RNA, 21 nt, Human
ggcccucccuguuccccagag

SEQ ID NO: 3405650 - RNA, 22 nt, Human
ggcccucccuguuccccagaga

SEQ ID NO: 3405651 - RNA, 23 nt, Human
ggcccucccuguuccccagagaa

SEQ ID NO: 3405652 - RNA, 15 nt, Human
ggcccucccuuggaa

SEQ ID NO: 3405653 - RNA, 22 nt, Human
ggcccuccgaccacuuccaggg

SEQ ID NO: 3405654 - RNA, 23 nt, Human
ggcccucgacacucaccaugaag

SEQ ID NO: 3405655 - RNA, 19 nt, Human
ggcccucgcugccagcucu

SEQ ID NO: 3405656 - RNA, 16 nt, Human
ggcccucuccccugcc

SEQ ID NO: 3405657 - RNA, 17 nt, Human
ggcccucucccuuaccc

SEQ ID NO: 3405658 - RNA, 20 nt, Human
ggcccucucugaaggaggcc

SEQ ID NO: 3405659 - RNA, 20 nt, Human
ggcccucucuucucaccuuu

SEQ ID NO: 3405660 - RNA, 14 nt, Human
ggcccucuggagug

SEQ ID NO: 3405661 - RNA, 14 nt, Human
ggcccugagcucgg

SEQ ID NO: 3405662 - RNA, 14 nt, Human
ggcccugagcugag

SEQ ID NO: 3405663 - RNA, 15 nt, Human
ggcccugaggugugg

SEQ ID NO: 3405664 - RNA, 21 nt, Human
ggcccugaggugugggggcug

SEQ ID NO: 3405665 - RNA, 22 nt, Human
ggcccugcaauguaucccuucu

SEQ ID NO: 3405666 - RNA, 17 nt, Human
ggcccugcacuguccug

SEQ ID NO: 3405667 - RNA, 21 nt, Human
ggcccugcacuguccugcucc

SEQ ID NO: 3405668 - RNA, 22 nt, Human
ggcccugcacuguccugcucca

SEQ ID NO: 3405669 - RNA, 16 nt, Human
ggcccugcagccagcu

SEQ ID NO: 3405670 - RNA, 17 nt, Human
ggcccugcagccagcuc

SEQ ID NO: 3405671 - RNA, 12 nt, Human
ggcccugcagcu

SEQ ID NO: 3405672 - RNA, 15 nt, Human
ggcccugcaguguuc

SEQ ID NO: 3405673 - RNA, 11 nt, Human
ggcccugcaug

SEQ ID NO: 3405674 - RNA, 18 nt, Human
ggcccugccaucuuccca

SEQ ID NO: 3405675 - RNA, 11 nt, Human
ggcccugccca

SEQ ID NO: 3405676 - RNA, 11 nt, Human
ggcccugcccu

SEQ ID NO: 3405677 - RNA, 12 nt, Human
ggcccugcccug

SEQ ID NO: 3405678 - RNA, 19 nt, Human
ggcccugcccugaggaagg

SEQ ID NO: 3405679 - RNA, 13 nt, Human
ggcccugccucug

SEQ ID NO: 3405680 - RNA, 13 nt, Human
ggcccugccugcu

SEQ ID NO: 3405681 - RNA, 21 nt, Human
ggcccugcuccugcagcaugg

SEQ ID NO: 3405682 - RNA, 15 nt, Human
ggcccugcuuccugc

SEQ ID NO: 3405683 - RNA, 20 nt, Human
ggcccuggaucagcguggcc

SEQ ID NO: 3405684 - RNA, 22 nt, Human
ggcccuggaucagcguggccuu

SEQ ID NO: 3405685 - RNA, 14 nt, Human
ggcccuggcagccc

SEQ ID NO: 3405686 - RNA, 13 nt, Human
ggcccuggccucc

SEQ ID NO: 3405687 - RNA, 14 nt, Human
ggcccuggccuccc

SEQ ID NO: 3405688 - RNA, 15 nt, Human
ggcccuggccugcug

SEQ ID NO: 3405689 - RNA, 17 nt, Human
ggcccuggccugcuggg

SEQ ID NO: 3405690 - RNA, 13 nt, Human
ggcccuggcugcc

SEQ ID NO: 3405691 - RNA, 16 nt, Human
ggcccugggcucggag

SEQ ID NO: 3405692 - RNA, 13 nt, Human
ggcccugggcugg

SEQ ID NO: 3405693 - RNA, 12 nt, Human
ggcccuggggcc

SEQ ID NO: 3405694 - RNA, 14 nt, Human
ggcccuggggccug

SEQ ID NO: 3405695 - RNA, 18 nt, Human
ggcccuggggccuguacu

SEQ ID NO: 3405696 - RNA, 12 nt, Human
ggcccugguccu

SEQ ID NO: 3405697 - RNA, 19 nt, Human
ggcccugguguuucuagca

SEQ ID NO: 3405698 - RNA, 20 nt, Human
ggcccugucccucccaccuc

SEQ ID NO: 3405699 - RNA, 22 nt, Human
ggcccugucccucccaccucug

SEQ ID NO: 3405700 - RNA, 20 nt, Human
ggcccuuaugacugccaaga

SEQ ID NO: 3405701 - RNA, 20 nt, Human
ggcccuucacugccuuugcu

SEQ ID NO: 3405702 - RNA, 19 nt, Human
ggcccuucccacaggacau

SEQ ID NO: 3405703 - RNA, 19 nt, Human
ggcccuuccuccuccacca

SEQ ID NO: 3405704 - RNA, 21 nt, Human
ggcccuuccuccuccaccacc

SEQ ID NO: 3405705 - RNA, 15 nt, Human
ggcccuuccucucca

SEQ ID NO: 3405706 - RNA, 12 nt, Human
ggcccuuccugg

SEQ ID NO: 3405707 - RNA, 16 nt, Human
ggcccuuccuggacag

SEQ ID NO: 3405708 - RNA, 23 nt, Human
ggcccuuccuggacagcugugcc

SEQ ID NO: 3405709 - RNA, 16 nt, Human
ggcccuucucuccagc

SEQ ID NO: 3405710 - RNA, 18 nt, Human
ggcccuucucuccagccc

SEQ ID NO: 3405711 - RNA, 21 nt, Human
ggcccuucucuccagccccug

SEQ ID NO: 3405712 - RNA, 22 nt, Human
ggcccuucucuccagccccugg

SEQ ID NO: 3405713 - RNA, 23 nt, Human
ggcccuucuugcugcccugcccc

SEQ ID NO: 3405714 - RNA, 18 nt, Human
ggcccuuuccucaggcaa

SEQ ID NO: 3405715 - RNA, 18 nt, Human
ggcccuuugaagccucag

SEQ ID NO: 3405716 - RNA, 20 nt, Human
ggcccuuugaagccucagcu

SEQ ID NO: 3405717 - RNA, 14 nt, Human
ggcccuuugcuguc

SEQ ID NO: 3405718 - RNA, 19 nt, Human
ggcccuuuuucaauaacug

SEQ ID NO: 3405719 - RNA, 15 nt, Human
ggccgaagcucuggc

SEQ ID NO: 3405720 - RNA, 19 nt, Human
ggccgaauccccucccugu

SEQ ID NO: 3405721 - RNA, 21 nt, Human
ggccgaauccccucccuguca

SEQ ID NO: 3405722 - RNA, 12 nt, Human
ggccgagaagca

SEQ ID NO: 3405723 - RNA, 20 nt, Human
ggcggagcuugcagugagcc

SEQ ID NO: 3405724 - RNA, 21 nt, Human
ggcggagcuugcagugagccg

SEQ ID NO: 3405725 - RNA, 14 nt, Human
ggcggcacagccuu

SEQ ID NO: 3405726 - RNA, 15 nt, Human
ggcggcacagccuuc

SEQ ID NO: 3405727 - RNA, 16 nt, Human
ggcggcgggcggcugg

SEQ ID NO: 3405728 - RNA, 20 nt, Human
ggcggcuacucagcagcccu

SEQ ID NO: 3405729 - RNA, 22 nt, Human
ggcggcuacucagcagcccucc

SEQ ID NO: 3405730 - RNA, 23 nt, Human
ggcggcuacucagcagcccuccu

SEQ ID NO: 3405731 - RNA, 18 nt, Human
ggcggcucggaggaagcc

SEQ ID NO: 3405732 - RNA, 18 nt, Human
ggcggcugagagccccag

SEQ ID NO: 3405733 - RNA, 18 nt, Human
ggcggcuggggucccagc

SEQ ID NO: 3405734 - RNA, 19 nt, Human
ggcgggacccaggcaccug

SEQ ID NO: 3405735 - RNA, 21 nt, Human
ggcgggaguggaguggaagaa

SEQ ID NO: 3405736 - RNA, 20 nt, Human
ggcgggcacaccuccuccca

SEQ ID NO: 3405737 - RNA, 22 nt, Human
ggcgggcaccuauagucccagc

SEQ ID NO: 3405738 - RNA, 17 nt, Human
ggcgggcagagggcugg

SEQ ID NO: 3405739 - RNA, 15 nt, Human
ggcgggccagccagg

SEQ ID NO: 3405740 - RNA, 17 nt, Human
ggcgggccagccaggcg

SEQ ID NO: 3405741 - RNA, 14 nt, Human
ggcgggccccucau

SEQ ID NO: 3405742 - RNA, 12 nt, Human
ggcggguggggg

SEQ ID NO: 3405743 - RNA, 17 nt, Human
ggcggugcccacaccgg

SEQ ID NO: 3405744 - RNA, 20 nt, Human
ggcguaaguacagagaagcc

SEQ ID NO: 3405745 - RNA, 22 nt, Human
ggcguaaguacagagaagccau

SEQ ID NO: 3405746 - RNA, 17 nt, Human
ggcgucagccuccagcc

SEQ ID NO: 3405747 - RNA, 15 nt, Human
ggcgucagucuuuuu

SEQ ID NO: 3405748 - RNA, 15 nt, Human
ggcgucugucuucaa

SEQ ID NO: 3405749 - RNA, 14 nt, Human
ggcgucugugugcg

SEQ ID NO: 3405750 - RNA, 14 nt, Human
ggcgugagaccugc

SEQ ID NO: 3405751 - RNA, 18 nt, Human
ggcgugagccaccgugcc

SEQ ID NO: 3405752 - RNA, 15 nt, Human
ggcgugaggauggga

SEQ ID NO: 3405753 - RNA, 12 nt, Human
ggcgugaucucg

SEQ ID NO: 3405754 - RNA, 14 nt, Human
ggcgugcaguggug

SEQ ID NO: 3405755 - RNA, 15 nt, Human
ggcguggagcaggcg

SEQ ID NO: 3405756 - RNA, 15 nt, Human
ggcguggagcugccu

SEQ ID NO: 3405757 - RNA, 17 nt, Human
ggcguggagggaggccc

SEQ ID NO: 3405758 - RNA, 18 nt, Human
ggcguggagggaggcccc

SEQ ID NO: 3405759 - RNA, 23 nt, Human
ggcguucuuaggcugcugggaug

SEQ ID NO: 3405760 - RNA, 21 nt, Human
ggcuaaacauccaauauuuuc

SEQ ID NO: 3405761 - RNA, 14 nt, Human
ggcuaacuggaagc

SEQ ID NO: 3405762 - RNA, 19 nt, Human
ggcuaagaguguccuagga

SEQ ID NO: 3405763 - RNA, 20 nt, Human
ggcuaagcuucacuguaaaa

SEQ ID NO: 3405764 - RNA, 23 nt, Human
ggcuaaguugggaucuaggagag

SEQ ID NO: 3405765 - RNA, 23 nt, Human
ggcuaauucccagagugugaaac

SEQ ID NO: 3405766 - RNA, 22 nt, Human
ggcuacaccuuagccugcccuc

SEQ ID NO: 3405767 - RNA, 13 nt, Human
ggcuacagagaag

SEQ ID NO: 3405768 - RNA, 15 nt, Human
ggcuacagagaagcc

SEQ ID NO: 3405769 - RNA, 17 nt, Human
ggcuacagagaagccuu

SEQ ID NO: 3405770 - RNA, 22 nt, Human
ggcuaccaacuuguauccaggc

SEQ ID NO: 3405771 - RNA, 15 nt, Human
ggcuacgaaucuucc

SEQ ID NO: 3405772 - RNA, 23 nt, Human
ggcuacucacucaaguucaagga

SEQ ID NO: 3405773 - RNA, 15 nt, Human
ggcuacucagcagcc

SEQ ID NO: 3405774 - RNA, 16 nt, Human
ggcuacucagcagccc

SEQ ID NO: 3405775 - RNA, 17 nt, Human
ggcuacucagcagcccu

SEQ ID NO: 3405776 - RNA, 18 nt, Human
ggcuacucagcagcccuc

SEQ ID NO: 3405777 - RNA, 24 nt, Human
ggcuacucugugccagagccuggg

SEQ ID NO: 3405778 - RNA, 18 nt, Human
ggcuacugcagcuuuaca

SEQ ID NO: 3405779 - RNA, 16 nt, Human
ggcuagaaccuggaga

SEQ ID NO: 3405780 - RNA, 22 nt, Human
ggcuagaaccuggagagcuaga

SEQ ID NO: 3405781 - RNA, 22 nt, Human
ggcuagaaccuguagagcuaga

SEQ ID NO: 3405782 - RNA, 14 nt, Human
ggcuagaaucugga

SEQ ID NO: 3405783 - RNA, 16 nt, Human
ggcuagaaucuggaga

SEQ ID NO: 3405784 - RNA, 22 nt, Human
ggcuagagguucaaagauauuu

SEQ ID NO: 3405785 - RNA, 20 nt, Human
ggcuagagugcgguggcgcg

SEQ ID NO: 3405786 - RNA, 16 nt, Human
ggcuagcuggagccug

SEQ ID NO: 3405787 - RNA, 20 nt, Human
ggcuagcuucugcuuuucug

SEQ ID NO: 3405788 - RNA, 22 nt, Human
ggcuagcuucugcuuuucugcc

SEQ ID NO: 3405789 - RNA, 16 nt, Human
ggcuaggaccccucca

SEQ ID NO: 3405790 - RNA, 22 nt, Human
ggcuaggaccccuccauguggg

SEQ ID NO: 3405791 - RNA, 14 nt, Human
ggcuagggggagcc

SEQ ID NO: 3405792 - RNA, 16 nt, Human
ggcuaggguggggaga

SEQ ID NO: 3405793 - RNA, 13 nt, Human
ggcuagguacaca

SEQ ID NO: 3405794 - RNA, 21 nt, Human
ggcuagguagaaaaaggguca

SEQ ID NO: 3405795 - RNA, 19 nt, Human
ggcuagguggguugaaagc

SEQ ID NO: 3405796 - RNA, 20 nt, Human
ggcuaguaucaaaagaaaga

SEQ ID NO: 3405797 - RNA, 15 nt, Human
ggcuagucagagaga

SEQ ID NO: 3405798 - RNA, 23 nt, Human
ggcuagugugguguuuccuggca

SEQ ID NO: 3405799 - RNA, 21 nt, Human
ggcuaucaaagaauaagaaaa

SEQ ID NO: 3405800 - RNA, 13 nt, Human
ggcuauccugauu

SEQ ID NO: 3405801 - RNA, 13 nt, Human
ggcuaugcauuug

SEQ ID NO: 3405802 - RNA, 14 nt, Human
ggcuaugcauuuga

SEQ ID NO: 3405803 - RNA, 17 nt, Human
ggcuaugguguggacug

SEQ ID NO: 3405804 - RNA, 19 nt, Human
ggcuauguauggaauacag

SEQ ID NO: 3405805 - RNA, 19 nt, Human
ggcuauuccauaauuccau

SEQ ID NO: 3405806 - RNA, 23 nt, Human
ggcucaagcagucuacccaccuc

SEQ ID NO: 3405807 - RNA, 18 nt, Human
ggcucaagcccaggaggg

SEQ ID NO: 3405808 - RNA, 15 nt, Human
ggcucaaguccucuu

SEQ ID NO: 3405809 - RNA, 21 nt, Human
ggcucaaguccucuuuucuga

SEQ ID NO: 3405810 - RNA, 14 nt, Human
ggcucacacugaga

SEQ ID NO: 3405811 - RNA, 15 nt, Human
ggcucacacugagaa

SEQ ID NO: 3405812 - RNA, 17 nt, Human
ggcucacacugagaaug

SEQ ID NO: 3405813 - RNA, 14 nt, Human
ggcucacagacugg

SEQ ID NO: 3405814 - RNA, 23 nt, Human
ggcucacaguacagcaugugccu

SEQ ID NO: 3405815 - RNA, 17 nt, Human
ggcucacccccuucucc

SEQ ID NO: 3405816 - RNA, 22 nt, Human
ggcucacccccuucuccaucca

SEQ ID NO: 3405817 - RNA, 23 nt, Human
ggcucacgccuguaaucccagca

SEQ ID NO: 3405818 - RNA, 24 nt, Human
ggcucacgccuguaaucccagcag

SEQ ID NO: 3405819 - RNA, 14 nt, Human
ggcucacucagcca

SEQ ID NO: 3405820 - RNA, 14 nt, Human
ggcucacugcagcc

SEQ ID NO: 3405821 - RNA, 17 nt, Human
ggcucacugcagccuca

SEQ ID NO: 3405822 - RNA, 19 nt, Human
ggcucacugccaggccagc

SEQ ID NO: 3405823 - RNA, 21 nt, Human
ggcucagagggggacugcugc

SEQ ID NO: 3405824 - RNA, 20 nt, Human
ggcucagaggguguccugca

SEQ ID NO: 3405825 - RNA, 14 nt, Human
ggcucagagugggg

SEQ ID NO: 3405826 - RNA, 13 nt, Human
ggcucagaucuca

SEQ ID NO: 3405827 - RNA, 16 nt, Human
ggcucagauuguaaua

SEQ ID NO: 3405828 - RNA, 23 nt, Human
ggcucagcaaaagaugcuucuca

SEQ ID NO: 3405829 - RNA, 14 nt, Human
ggcucagcaaggcc

SEQ ID NO: 3405830 - RNA, 15 nt, Human
ggcucagccagcacu

SEQ ID NO: 3405831 - RNA, 10 nt, Human
ggcucagccu

SEQ ID NO: 3405832 - RNA, 13 nt, Human
ggcucagccuggu

SEQ ID NO: 3405833 - RNA, 20 nt, Human
ggcucagccuggugggccuc

SEQ ID NO: 3405834 - RNA, 18 nt, Human
ggcucagcggggacagcu

SEQ ID NO: 3405835 - RNA, 19 nt, Human
ggcucagcggggacagcuc

SEQ ID NO: 3405836 - RNA, 13 nt, Human
ggcucagcucugg

SEQ ID NO: 3405837 - RNA, 14 nt, Human
ggcucagcucuggc

SEQ ID NO: 3405838 - RNA, 12 nt, Human
ggcucaggaaaa

SEQ ID NO: 3405839 - RNA, 17 nt, Human
ggcucaggcaggggccu

SEQ ID NO: 3405840 - RNA, 15 nt, Human
ggcucaggcugagcu

SEQ ID NO: 3405841 - RNA, 18 nt, Human
ggcucagggaccacagca

SEQ ID NO: 3405842 - RNA, 19 nt, Human
ggcucagguggggucacuc

SEQ ID NO: 3405843 - RNA, 14 nt, Human
ggcucagucucagg

SEQ ID NO: 3405844 - RNA, 19 nt, Human
ggcucagugcaaccucugc

SEQ ID NO: 3405845 - RNA, 21 nt, Human
ggcucagugcaaccucugcuu

SEQ ID NO: 3405846 - RNA, 17 nt, Human
ggcuccaaacccucgag

SEQ ID NO: 3405847 - RNA, 14 nt, Human
ggcuccacacacac

SEQ ID NO: 3405848 - RNA, 23 nt, Human
ggcuccacacacacaaaaaaaga

SEQ ID NO: 3405849 - RNA, 13 nt, Human
ggcuccagagggc

SEQ ID NO: 3405850 - RNA, 22 nt, Human
ggcuccagagggcacucugcuu

SEQ ID NO: 3405851 - RNA, 15 nt, Human
ggcuccagccccucu

SEQ ID NO: 3405852 - RNA, 17 nt, Human
ggcuccaggagcagcca

SEQ ID NO: 3405853 - RNA, 14 nt, Human
ggcuccaggcagca

SEQ ID NO: 3405854 - RNA, 15 nt, Human
ggcuccaguccccag

SEQ ID NO: 3405855 - RNA, 24 nt, Human
ggcuccagucugcugcccuccauc

SEQ ID NO: 3405856 - RNA, 12 nt, Human
ggcuccaugcca

SEQ ID NO: 3405857 - RNA, 18 nt, Human
ggcuccaugcuccucacu

SEQ ID NO: 3405858 - RNA, 22 nt, Human
ggcucccaaaacaccugacagc

SEQ ID NO: 3405859 - RNA, 16 nt, Human
ggcucccagccaggcc

SEQ ID NO: 3405860 - RNA, 16 nt, Human
ggcucccagccucagc

SEQ ID NO: 3405861 - RNA, 17 nt, Human
ggcucccaugucaagag

SEQ ID NO: 3405862 - RNA, 22 nt, Human
ggcucccauucacucuuccaga

SEQ ID NO: 3405863 - RNA, 16 nt, Human
ggcuccccugcagccc

SEQ ID NO: 3405864 - RNA, 23 nt, Human
ggcuccccugcagcccuggccca

SEQ ID NO: 3405865 - RNA, 15 nt, Human
ggcucccgccuccaa

SEQ ID NO: 3405866 - RNA, 15 nt, Human
ggcucccggaauucc

SEQ ID NO: 3405867 - RNA, 16 nt, Human
ggcucccucacucuca

SEQ ID NO: 3405868 - RNA, 20 nt, Human
ggcucccuccuccaggccug

SEQ ID NO: 3405869 - RNA, 11 nt, Human
ggcucccugga

SEQ ID NO: 3405870 - RNA, 21 nt, Human
ggcucccuucaucuccaggga

SEQ ID NO: 3405871 - RNA, 13 nt, Human
ggcucccuuccca

SEQ ID NO: 3405872 - RNA, 16 nt, Human
ggcucccuucccaccu

SEQ ID NO: 3405873 - RNA, 17 nt, Human
ggcucccuucccaccuc

SEQ ID NO: 3405874 - RNA, 16 nt, Human
ggcucccuuccuccca

SEQ ID NO: 3405875 - RNA, 14 nt, Human
ggcuccguguggga

SEQ ID NO: 3405876 - RNA, 17 nt, Human
ggcuccgugugggagac

SEQ ID NO: 3405877 - RNA, 18 nt, Human
ggcuccgugugggagacc

SEQ ID NO: 3405878 - RNA, 14 nt, Human
ggcuccucacauag

SEQ ID NO: 3405879 - RNA, 17 nt, Human
ggcuccucccggugccc

SEQ ID NO: 3405880 - RNA, 16 nt, Human
ggcuccucccucccuc

SEQ ID NO: 3405881 - RNA, 19 nt, Human
ggcuccugagggagcucca

SEQ ID NO: 3405882 - RNA, 12 nt, Human
ggcuccugccag

SEQ ID NO: 3405883 - RNA, 13 nt, Human
ggcuccugcugca

SEQ ID NO: 3405884 - RNA, 21 nt, Human
ggcuccugcugcaccaaccca

SEQ ID NO: 3405885 - RNA, 14 nt, Human
ggcuccuggacccc

SEQ ID NO: 3405886 - RNA, 17 nt, Human
ggcuccugugcccuuau

SEQ ID NO: 3405887 - RNA, 21 nt, Human
ggcuccuguuagcuccucacu

SEQ ID NO: 3405888 - RNA, 12 nt, Human
ggcuccuuucca

SEQ ID NO: 3405889 - RNA, 12 nt, Human
ggcuccuuucuc

SEQ ID NO: 3405890 - RNA, 13 nt, Human
ggcuccuuucucc

SEQ ID NO: 3405891 - RNA, 20 nt, Human
ggcuccuuuuucucccucug

SEQ ID NO: 3405892 - RNA, 18 nt, Human
ggcucgaaucucugugcc

SEQ ID NO: 3405893 - RNA, 19 nt, Human
ggcucgauuuuguaucugc

SEQ ID NO: 3405894 - RNA, 13 nt, Human
ggcucgccaggcc

SEQ ID NO: 3405895 - RNA, 17 nt, Human
ggcucgccaugccgggg

SEQ ID NO: 3405896 - RNA, 15 nt, Human
ggcucgccuucccuc

SEQ ID NO: 3405897 - RNA, 18 nt, Human
ggcucgccuucccuccug

SEQ ID NO: 3405898 - RNA, 15 nt, Human
ggcucggccugcccc

SEQ ID NO: 3405899 - RNA, 13 nt, Human
ggcucguggacug

SEQ ID NO: 3405900 - RNA, 23 nt, Human
ggcucguggacugagugggaagc

SEQ ID NO: 3405901 - RNA, 15 nt, Human
ggcucuaacgccuga

SEQ ID NO: 3405902 - RNA, 19 nt, Human
ggcucuaacgccugagccc

SEQ ID NO: 3405903 - RNA, 18 nt, Human
ggcucuacaacugagucc

SEQ ID NO: 3405904 - RNA, 19 nt, Human
ggcucuacaacugaguccu

SEQ ID NO: 3405905 - RNA, 11 nt, Human
ggcucuagauc

SEQ ID NO: 3405906 - RNA, 18 nt, Human
ggcucuaugagucuagau

SEQ ID NO: 3405907 - RNA, 17 nt, Human
ggcucucaaugcuguuu

SEQ ID NO: 3405908 - RNA, 11 nt, Human
ggcucucaggc

SEQ ID NO: 3405909 - RNA, 17 nt, Human
ggcucucaggccagcug

SEQ ID NO: 3405910 - RNA, 18 nt, Human
ggcucucaggccagcugc

SEQ ID NO: 3405911 - RNA, 17 nt, Human
ggcucuccaagugccag

SEQ ID NO: 3405912 - RNA, 23 nt, Human
ggcucuccaagugccagaggugg

SEQ ID NO: 3405913 - RNA, 12 nt, Human
ggcucuccaccu

SEQ ID NO: 3405914 - RNA, 16 nt, Human
ggcucuccaccucagc

SEQ ID NO: 3405915 - RNA, 17 nt, Human
ggcucuccaccucagcc

SEQ ID NO: 3405916 - RNA, 18 nt, Human
ggcucuccaccucagccu

SEQ ID NO: 3405917 - RNA, 23 nt, Human
ggcucuccggggccauuugcaau

SEQ ID NO: 3405918 - RNA, 20 nt, Human
ggcucuccucagaagaaaga

SEQ ID NO: 3405919 - RNA, 12 nt, Human
ggcucuccuggc

SEQ ID NO: 3405920 - RNA, 13 nt, Human
ggcucuccuggcu

SEQ ID NO: 3405921 - RNA, 16 nt, Human
ggcucuccuggcuucc

SEQ ID NO: 3405922 - RNA, 12 nt, Human
ggcucucugagu

SEQ ID NO: 3405923 - RNA, 17 nt, Human
ggcucucuuuccuucuu

SEQ ID NO: 3405924 - RNA, 18 nt, Human
ggcucucuuuccuucuug

SEQ ID NO: 3405925 - RNA, 16 nt, Human
ggcucugaagcaaggc

SEQ ID NO: 3405926 - RNA, 22 nt, Human
ggcucugagagucuagauucuc

SEQ ID NO: 3405927 - RNA, 20 nt, Human
ggcucugaggugccuguccc

SEQ ID NO: 3405928 - RNA, 23 nt, Human
ggcucugaggugccugucccacc

SEQ ID NO: 3405929 - RNA, 19 nt, Human
ggcucugcaauuccccucu

SEQ ID NO: 3405930 - RNA, 16 nt, Human
ggcucugcaccccucu

SEQ ID NO: 3405931 - RNA, 19 nt, Human
ggcucugccacccuaccug

SEQ ID NO: 3405932 - RNA, 16 nt, Human
ggcucugccaguccug

SEQ ID NO: 3405933 - RNA, 13 nt, Human
ggcucugccccag

SEQ ID NO: 3405934 - RNA, 23 nt, Human
ggcucugccccagcucuggcuuc

SEQ ID NO: 3405935 - RNA, 14 nt, Human
ggcucugcccuugg

SEQ ID NO: 3405936 - RNA, 15 nt, Human
ggcucugccucccau

SEQ ID NO: 3405937 - RNA, 16 nt, Human
ggcucuggacucuaaa

SEQ ID NO: 3405938 - RNA, 19 nt, Human
ggcucuggagacagcccca

SEQ ID NO: 3405939 - RNA, 15 nt, Human
ggcucuggagagaaa

SEQ ID NO: 3405940 - RNA, 19 nt, Human
ggcucuggagcccacugua

SEQ ID NO: 3405941 - RNA, 23 nt, Human
ggcucugggauagcugacccagc

SEQ ID NO: 3405942 - RNA, 18 nt, Human
ggcucugugcugacccuc

SEQ ID NO: 3405943 - RNA, 15 nt, Human
ggcucugugggcugc

SEQ ID NO: 3405944 - RNA, 22 nt, Human
ggcucugugggugauggggagg

SEQ ID NO: 3405945 - RNA, 18 nt, Human
ggcucuuagcagcuucca

SEQ ID NO: 3405946 - RNA, 14 nt, Human
ggcucuuccaggcu

SEQ ID NO: 3405947 - RNA, 15 nt, Human
ggcucuuccaggcug

SEQ ID NO: 3405948 - RNA, 17 nt, Human
ggcucuuccaggcuggg

SEQ ID NO: 3405949 - RNA, 20 nt, Human
ggcucuucucauuucacccc

SEQ ID NO: 3405950 - RNA, 15 nt, Human
ggcucuucuccuuuc

SEQ ID NO: 3405951 - RNA, 23 nt, Human
ggcucuucuccuuucacaaccuu

SEQ ID NO: 3405952 - RNA, 14 nt, Human
ggcucuucugacua

SEQ ID NO: 3405953 - RNA, 19 nt, Human
ggcucuugaacugagcuug

SEQ ID NO: 3405954 - RNA, 20 nt, Human
ggcucuugauaccccccucu

SEQ ID NO: 3405955 - RNA, 21 nt, Human
ggcucuugauaccccccucug

SEQ ID NO: 3405956 - RNA, 20 nt, Human
ggcucuugugcuggauggag

SEQ ID NO: 3405957 - RNA, 14 nt, Human
ggcucuuuccuugc

SEQ ID NO: 3405958 - RNA, 16 nt, Human
ggcucuuuccuugcuc

SEQ ID NO: 3405959 - RNA, 20 nt, Human
ggcugaaagaggccaaugcc

SEQ ID NO: 3405960 - RNA, 16 nt, Human
ggcugaaauucuccug

SEQ ID NO: 3405961 - RNA, 21 nt, Human
ggcugaaauucuccuggaggu

SEQ ID NO: 3405962 - RNA, 21 nt, Human
ggcugaacacuccaauuaagg

SEQ ID NO: 3405963 - RNA, 16 nt, Human
ggcugaacccugugcu

SEQ ID NO: 3405964 - RNA, 19 nt, Human
ggcugaacccugugcuggu

SEQ ID NO: 3405965 - RNA, 20 nt, Human
ggcugaacggggagaaaagg

SEQ ID NO: 3405966 - RNA, 18 nt, Human
ggcugaacuuuguggucg

SEQ ID NO: 3405967 - RNA, 20 nt, Human
ggcugaagcuguguccucau

SEQ ID NO: 3405968 - RNA, 19 nt, Human
ggcugacccagucccuggg

SEQ ID NO: 3405969 - RNA, 22 nt, Human
ggcugacccagucccuggggga

SEQ ID NO: 3405970 - RNA, 13 nt, Human
ggcugaccccccu

SEQ ID NO: 3405971 - RNA, 17 nt, Human
ggcugaccugccucuca

SEQ ID NO: 3405972 - RNA, 21 nt, Human
ggcugaccuugaacuccuggg

SEQ ID NO: 3405973 - RNA, 17 nt, Human
ggcugacguuccgggca

SEQ ID NO: 3405974 - RNA, 19 nt, Human
ggcugacuagaagggccag

SEQ ID NO: 3405975 - RNA, 22 nt, Human
ggcugacuagaagggccagucc

SEQ ID NO: 3405976 - RNA, 21 nt, Human
ggcugagacuggauacugccc

SEQ ID NO: 3405977 - RNA, 18 nt, Human
ggcugagagccccagcug

SEQ ID NO: 3405978 - RNA, 13 nt, Human
ggcugagccccua

SEQ ID NO: 3405979 - RNA, 12 nt, Human
ggcugagcccug

SEQ ID NO: 3405980 - RNA, 13 nt, Human
ggcugagcccugg

SEQ ID NO: 3405981 - RNA, 15 nt, Human
ggcugagcccuggca

SEQ ID NO: 3405982 - RNA, 16 nt, Human
ggcugagcccuggcag

SEQ ID NO: 3405983 - RNA, 20 nt, Human
ggcugagcucucugugggcu

SEQ ID NO: 3405984 - RNA, 15 nt, Human
ggcugaggaggccuc

SEQ ID NO: 3405985 - RNA, 14 nt, Human
ggcugaggcuggca

SEQ ID NO: 3405986 - RNA, 17 nt, Human
ggcugaggcuggcacag

SEQ ID NO: 3405987 - RNA, 23 nt, Human
ggcugagggauggacugaugcuu

SEQ ID NO: 3405988 - RNA, 14 nt, Human
ggcugagggcagcu

SEQ ID NO: 3405989 - RNA, 21 nt, Human
ggcugagggcaguucgcagcc

SEQ ID NO: 3405990 - RNA, 18 nt, Human
ggcugagggccugcugga

SEQ ID NO: 3405991 - RNA, 21 nt, Human
ggcugagggccugcuggaggc

SEQ ID NO: 3405992 - RNA, 19 nt, Human
ggcugaggggcaacgaaga

SEQ ID NO: 3405993 - RNA, 14 nt, Human
ggcugagguuccuc

SEQ ID NO: 3405994 - RNA, 21 nt, Human
ggcugagguuccucugccugc

SEQ ID NO: 3405995 - RNA, 23 nt, Human
ggcugagguuccucugccugccc

SEQ ID NO: 3405996 - RNA, 20 nt, Human
ggcugagugcaggcccaccc

SEQ ID NO: 3405997 - RNA, 21 nt, Human
ggcugagugcaggcccacccu

SEQ ID NO: 3405998 - RNA, 21 nt, Human
ggcugaguucuggucaaagaa

SEQ ID NO: 3405999 - RNA, 15 nt, Human
ggcugauaauuuuaa

SEQ ID NO: 3406000 - RNA, 22 nt, Human
ggcugaucucagggaagcccag

SEQ ID NO: 3406001 - RNA, 15 nt, Human
ggcugauggaguaaa

SEQ ID NO: 3406002 - RNA, 22 nt, Human
ggcugaugucaauuucuguguu

SEQ ID NO: 3406003 - RNA, 24 nt, Human
ggcugaugucaauuucuguguugc

SEQ ID NO: 3406004 - RNA, 24 nt, Human
ggcugcaaaggguaucaggugcug

SEQ ID NO: 3406005 - RNA, 22 nt, Human
ggcugcaagguuuaggcuggug

SEQ ID NO: 3406006 - RNA, 18 nt, Human
ggcugcaccggcuggccu

SEQ ID NO: 3406007 - RNA, 19 nt, Human
ggcugcaccggcuggccug

SEQ ID NO: 3406008 - RNA, 16 nt, Human
ggcugcacucugugcc

SEQ ID NO: 3406009 - RNA, 18 nt, Human
ggcugcacucugugccca

SEQ ID NO: 3406010 - RNA, 19 nt, Human
ggcugcacucugugcccau

SEQ ID NO: 3406011 - RNA, 16 nt, Human
ggguggggguggguca

SEQ ID NO: 3406012 - RNA, 17 nt, Human
gggugggguagggcuga

SEQ ID NO: 3406013 - RNA, 12 nt, Human
ggguggguauaa

SEQ ID NO: 3406014 - RNA, 21 nt, Human
gggugggucagaacccugcca

SEQ ID NO: 3406015 - RNA, 15 nt, Human
gggugggugcucaga

SEQ ID NO: 3406016 - RNA, 16 nt, Human
gggugggugcucagaa

SEQ ID NO: 3406017 - RNA, 12 nt, Human
ggguggugaccu

SEQ ID NO: 3406018 - RNA, 15 nt, Human
gggugguggccuggu

SEQ ID NO: 3406019 - RNA, 12 nt, Human
ggguggugggga

SEQ ID NO: 3406020 - RNA, 19 nt, Human
gggugguggggaggggcgc

SEQ ID NO: 3406021 - RNA, 15 nt, Human
gggugguggugauag

SEQ ID NO: 3406022 - RNA, 18 nt, Human
ggguguaacaggucuccu

SEQ ID NO: 3406023 - RNA, 13 nt, Human
ggguguagccagg

SEQ ID NO: 3406024 - RNA, 23 nt, Human
ggguguauuuauuuuccucccca

SEQ ID NO: 3406025 - RNA, 17 nt, Human
ggguguccugcaccggg

SEQ ID NO: 3406026 - RNA, 21 nt, Human
ggguguccugcaccggggccu

SEQ ID NO: 3406027 - RNA, 21 nt, Human
gggugucuugggcagagcugg

SEQ ID NO: 3406028 - RNA, 13 nt, Human
gggugugggaggc

SEQ ID NO: 3406029 - RNA, 22 nt, Human
ggguuaacccuucaucuuccug

SEQ ID NO: 3406030 - RNA, 22 nt, Human
ggguuaagaaaagagauauuuu

SEQ ID NO: 3406031 - RNA, 14 nt, Human
ggguuaaggccuga

SEQ ID NO: 3406032 - RNA, 18 nt, Human
ggguuauguaucagaaga

SEQ ID NO: 3406033 - RNA, 22 nt, Human
ggguucaagcgauucuucugcu

SEQ ID NO: 3406034 - RNA, 20 nt, Human
ggguucaccugggcugaggc

SEQ ID NO: 3406035 - RNA, 21 nt, Human
ggguucagaaaugcugccugc

SEQ ID NO: 3406036 - RNA, 22 nt, Human
ggguucauaggucacuggcucu

SEQ ID NO: 3406037 - RNA, 13 nt, Human
ggguucauuauug

SEQ ID NO: 3406038 - RNA, 18 nt, Human
ggguucccuuuccuucca

SEQ ID NO: 3406039 - RNA, 23 nt, Human
ggguucccuuuuuuggcugcuga

SEQ ID NO: 3406040 - RNA, 19 nt, Human
ggguuccuccccuccagcu

SEQ ID NO: 3406041 - RNA, 14 nt, Human
ggguuccucuuccc

SEQ ID NO: 3406042 - RNA, 11 nt, Human
ggguuccugca

SEQ ID NO: 3406043 - RNA, 20 nt, Human
ggguuccuuccucugagccu

SEQ ID NO: 3406044 - RNA, 15 nt, Human
ggguucucacagugg

SEQ ID NO: 3406045 - RNA, 16 nt, Human
ggguucuccucucccc

SEQ ID NO: 3406046 - RNA, 18 nt, Human
ggguucuccucuccccuc

SEQ ID NO: 3406047 - RNA, 13 nt, Human
ggguucugccucu

SEQ ID NO: 3406048 - RNA, 21 nt, Human
ggguucugccugccagcugca

SEQ ID NO: 3406049 - RNA, 19 nt, Human
ggguucuuuggaaggagug

SEQ ID NO: 3406050 - RNA, 18 nt, Human
ggguugcaguggagaggg

SEQ ID NO: 3406051 - RNA, 18 nt, Human
ggguugcaucagaaaugu

SEQ ID NO: 3406052 - RNA, 20 nt, Human
ggguugccacaggccucccu

SEQ ID NO: 3406053 - RNA, 14 nt, Human
ggguugggcccaga

SEQ ID NO: 3406054 - RNA, 16 nt, Human
ggguugggcccagugu

SEQ ID NO: 3406055 - RNA, 15 nt, Human
ggguuggggccgggc

SEQ ID NO: 3406056 - RNA, 15 nt, Human
ggguuggggugacag

SEQ ID NO: 3406057 - RNA, 19 nt, Human
ggguuggugcacagugauu

SEQ ID NO: 3406058 - RNA, 23 nt, Human
ggguuguaaauuggcauggaaau

SEQ ID NO: 3406059 - RNA, 23 nt, Human
ggguugugaggccuggccaggca

SEQ ID NO: 3406060 - RNA, 19 nt, Human
ggguuuaauccccaguaaa

SEQ ID NO: 3406061 - RNA, 22 nt, Human
ggguuuaauccccaguaaaauu

SEQ ID NO: 3406062 - RNA, 20 nt, Human
ggguuucaccauguuggcca

SEQ ID NO: 3406063 - RNA, 20 nt, Human
ggguuucacuguguuagcca

SEQ ID NO: 3406064 - RNA, 14 nt, Human
ggguuugaauuguu

SEQ ID NO: 3406065 - RNA, 18 nt, Human
ggguuuggaccccagcug

SEQ ID NO: 3406066 - RNA, 17 nt, Human
ggguuugugacagggcg

SEQ ID NO: 3406067 - RNA, 15 nt, Human
ggguuuuaacuuugu

SEQ ID NO: 3406068 - RNA, 12 nt, Human
ggguuuucucuc

SEQ ID NO: 3406069 - RNA, 18 nt, Human
ggguuuuguauucucuga

SEQ ID NO: 3406070 - RNA, 14 nt, Human
gguaaaaaauuuau

SEQ ID NO: 3406071 - RNA, 18 nt, Human
gguaaaaaguauuuuuuc

SEQ ID NO: 3406072 - RNA, 19 nt, Human
gguaaaacucacugugauc

SEQ ID NO: 3406073 - RNA, 12 nt, Human
gguaaaaugaag

SEQ ID NO: 3406074 - RNA, 13 nt, Human
gguaaaaugaaga

SEQ ID NO: 3406075 - RNA, 14 nt, Human
gguaaaaugaagaa

SEQ ID NO: 3406076 - RNA, 13 nt, Human
gguaaaauucuaa

SEQ ID NO: 3406077 - RNA, 14 nt, Human
gguaaaauucuaaa

SEQ ID NO: 3406078 - RNA, 14 nt, Human
gguaaaauugcaug

SEQ ID NO: 3406079 - RNA, 15 nt, Human
gguaaauaaaccacu

SEQ ID NO: 3406080 - RNA, 17 nt, Human
gguaaaugcaaaguucu

SEQ ID NO: 3406081 - RNA, 12 nt, Human
gguaaauguuuc

SEQ ID NO: 3406082 - RNA, 14 nt, Human
gguaacagaacagc

SEQ ID NO: 3406083 - RNA, 13 nt, Human
gguaacaggcaga

SEQ ID NO: 3406084 - RNA, 21 nt, Human
gguaacaguucauguuugcuu

SEQ ID NO: 3406085 - RNA, 13 nt, Human
gguaacuguccug

SEQ ID NO: 3406086 - RNA, 16 nt, Human
gguaacuguccugucc

SEQ ID NO: 3406087 - RNA, 18 nt, Human
gguaagauuguuauuaaa

SEQ ID NO: 3406088 - RNA, 20 nt, Human
gguaaggaauaccugucccc

SEQ ID NO: 3406089 - RNA, 13 nt, Human
gguaaggugccuu

SEQ ID NO: 3406090 - RNA, 19 nt, Human
gguaaguuguuaagagugg

SEQ ID NO: 3406091 - RNA, 18 nt, Human
gguaaguuuuuugaaauu

SEQ ID NO: 3406092 - RNA, 19 nt, Human
gguaauaaguacuguguac

SEQ ID NO: 3406093 - RNA, 20 nt, Human
gguaauacuuccagaagugc

SEQ ID NO: 3406094 - RNA, 18 nt, Human
gguaaucgaccugccucg

SEQ ID NO: 3406095 - RNA, 13 nt, Human
gguacaaaaauaa

SEQ ID NO: 3406096 - RNA, 14 nt, Human
gguacaaaaauaaa

SEQ ID NO: 3406097 - RNA, 15 nt, Human
gguacaaaaauaaau

SEQ ID NO: 3406098 - RNA, 23 nt, Human
gguacaaccuguucugcuuuccu

SEQ ID NO: 3406099 - RNA, 12 nt, Human
gguacagagaag

SEQ ID NO: 3406100 - RNA, 15 nt, Human
gguacagagaagcca

SEQ ID NO: 3406101 - RNA, 18 nt, Human
gguacagagaaggaaugu

SEQ ID NO: 3406102 - RNA, 15 nt, Human
gguaccaaugcugca

SEQ ID NO: 3406103 - RNA, 17 nt, Human
gguaccagauaaaauua

SEQ ID NO: 3406104 - RNA, 12 nt, Human
gguaccagcugc

SEQ ID NO: 3406105 - RNA, 16 nt, Human
gguacccaauucaauu

SEQ ID NO: 3406106 - RNA, 17 nt, Human
gguacccacugcucugg

SEQ ID NO: 3406107 - RNA, 19 nt, Human
gguaccccuuucuggcucu

SEQ ID NO: 3406108 - RNA, 19 nt, Human
gguacccggggcccagggc

SEQ ID NO: 3406109 - RNA, 13 nt, Human
gguacccucugga

SEQ ID NO: 3406110 - RNA, 18 nt, Human
gguaccgucuacauuuca

SEQ ID NO: 3406111 - RNA, 14 nt, Human
gguacgcacagaca

SEQ ID NO: 3406112 - RNA, 18 nt, Human
gguacuaauaaucuuguu

SEQ ID NO: 3406113 - RNA, 23 nt, Human
gguacuauaaaagcuuucugcca

SEQ ID NO: 3406114 - RNA, 19 nt, Human
gguacuauucugauuacac

SEQ ID NO: 3406115 - RNA, 18 nt, Human
gguacugacuuugcuugc

SEQ ID NO: 3406116 - RNA, 15 nt, Human
gguacuguacagcug

SEQ ID NO: 3406117 - RNA, 17 nt, Human
gguacuguaugaucaaa

SEQ ID NO: 3406118 - RNA, 20 nt, Human
gguacuucaggggcacuuca

SEQ ID NO: 3406119 - RNA, 15 nt, Human
gguacuucuugaagg

SEQ ID NO: 3406120 - RNA, 17 nt, Human
gguacuuguggacacag

SEQ ID NO: 3406121 - RNA, 20 nt, Human
gguacuuguggacacagcuc

SEQ ID NO: 3406122 - RNA, 16 nt, Human
gguacuuuuaaaaaca

SEQ ID NO: 3406123 - RNA, 23 nt, Human
gguacuuuuaugauguauauuua

SEQ ID NO: 3406124 - RNA, 22 nt, Human
gguagaaauaucugaaaaugua

SEQ ID NO: 3406125 - RNA, 15 nt, Human
gguagaagggaaagc

SEQ ID NO: 3406126 - RNA, 19 nt, Human
gguagaccugucuccuggc

SEQ ID NO: 3406127 - RNA, 17 nt, Human
gguagagauggaggagg

SEQ ID NO: 3406128 - RNA, 17 nt, Human
gguagagcugauccaga

SEQ ID NO: 3406129 - RNA, 21 nt, Human
gguagagcugauccagagcac

SEQ ID NO: 3406130 - RNA, 20 nt, Human
gguagaggugcaugccuaau

SEQ ID NO: 3406131 - RNA, 18 nt, Human
gguagaguuuacagcucu

SEQ ID NO: 3406132 - RNA, 12 nt, Human
gguagcagcugg

SEQ ID NO: 3406133 - RNA, 14 nt, Human
gguagcagcuggac

SEQ ID NO: 3406134 - RNA, 16 nt, Human
gguagcccgccugcca

SEQ ID NO: 3406135 - RNA, 18 nt, Human
gguagcccuggccagagg

SEQ ID NO: 3406136 - RNA, 17 nt, Human
gguagcuagaggaacca

SEQ ID NO: 3406137 - RNA, 12 nt, Human
gguagcucaggu

SEQ ID NO: 3406138 - RNA, 17 nt, Human
gguagcucaggugggcg

SEQ ID NO: 3406139 - RNA, 12 nt, Human
gguagcugccac

SEQ ID NO: 3406140 - RNA, 18 nt, Human
gguagcugggaaagcaua

SEQ ID NO: 3406141 - RNA, 14 nt, Human
gguagcuuuucccu

SEQ ID NO: 3406142 - RNA, 17 nt, Human
gguaggagggugggaag

SEQ ID NO: 3406143 - RNA, 18 nt, Human
gguaggccaagguguccu

SEQ ID NO: 3406144 - RNA, 14 nt, Human
gguagggcucugac

SEQ ID NO: 3406145 - RNA, 18 nt, Human
gguaggggccccucucag

SEQ ID NO: 3406146 - RNA, 21 nt, Human
gguaggggccccucucagccc

SEQ ID NO: 3406147 - RNA, 16 nt, Human
gguaggggcugggaac

SEQ ID NO: 3406148 - RNA, 13 nt, Human
gguagggggcugg

SEQ ID NO: 3406149 - RNA, 20 nt, Human
gguaggguaagugagagagg

SEQ ID NO: 3406150 - RNA, 16 nt, Human
gguagguucagccaag

SEQ ID NO: 3406151 - RNA, 15 nt, Human
gguagguugggacac

SEQ ID NO: 3406152 - RNA, 14 nt, Human
gguagucaaaggca

SEQ ID NO: 3406153 - RNA, 14 nt, Human
gguaguucaagaaa

SEQ ID NO: 3406154 - RNA, 23 nt, Human
gguaguuuuccauggucacagag

SEQ ID NO: 3406155 - RNA, 12 nt, Human
gguauaaaagau

SEQ ID NO: 3406156 - RNA, 17 nt, Human
gguauaaugguugacug

SEQ ID NO: 3406157 - RNA, 14 nt, Human
ggugacugucuggg

SEQ ID NO: 3406158 - RNA, 19 nt, Human
ggugacuuuggauaauaag

SEQ ID NO: 3406159 - RNA, 15 nt, Human
ggugagaagcagagg

SEQ ID NO: 3406160 - RNA, 16 nt, Human
ggugagaauagaaucu

SEQ ID NO: 3406161 - RNA, 12 nt, Human
ggugagagcugc

SEQ ID NO: 3406162 - RNA, 20 nt, Human
ggugagagggccgggcagag

SEQ ID NO: 3406163 - RNA, 16 nt, Human
ggugagaugcagcugg

SEQ ID NO: 3406164 - RNA, 21 nt, Human
ggugagaugcuggagaagaga

SEQ ID NO: 3406165 - RNA, 23 nt, Human
ggugagaugcuggagaagagagg

SEQ ID NO: 3406166 - RNA, 14 nt, Human
ggugagcaaccagu

SEQ ID NO: 3406167 - RNA, 22 nt, Human
ggugagcccauggcccucccag

SEQ ID NO: 3406168 - RNA, 15 nt, Human
ggugaggaccacucc

SEQ ID NO: 3406169 - RNA, 14 nt, Human
ggugaggcaggcuu

SEQ ID NO: 3406170 - RNA, 17 nt, Human
ggugaggccugucugug

SEQ ID NO: 3406171 - RNA, 19 nt, Human
ggugaggccugucugugac

SEQ ID NO: 3406172 - RNA, 12 nt, Human
ggugagggaugu

SEQ ID NO: 3406173 - RNA, 23 nt, Human
ggugaggucuguuccuuuuauau

SEQ ID NO: 3406174 - RNA, 15 nt, Human
ggugaguccuccaga

SEQ ID NO: 3406175 - RNA, 19 nt, Human
ggugaguuugagcugccuu

SEQ ID NO: 3406176 - RNA, 16 nt, Human
ggugauagcauugcuu

SEQ ID NO: 3406177 - RNA, 20 nt, Human
ggugauauccauucuuucug

SEQ ID NO: 3406178 - RNA, 22 nt, Human
ggugaugagggcagcagccagc

SEQ ID NO: 3406179 - RNA, 15 nt, Human
ggugaugcugggcug

SEQ ID NO: 3406180 - RNA, 13 nt, Human
ggugauggggagg

SEQ ID NO: 3406181 - RNA, 18 nt, Human
ggugauguagcccauccu

SEQ ID NO: 3406182 - RNA, 16 nt, Human
ggugauguccuguaaa

SEQ ID NO: 3406183 - RNA, 22 nt, Human
ggugauuacauaaucuguacaa

SEQ ID NO: 3406184 - RNA, 12 nt, Human
ggugcaaauccu

SEQ ID NO: 3406185 - RNA, 12 nt, Human
ggugcaaccagg

SEQ ID NO: 3406186 - RNA, 22 nt, Human
ggugcaacccaaggacugaggg

SEQ ID NO: 3406187 - RNA, 19 nt, Human
ggugcaaugaccuuucaau

SEQ ID NO: 3406188 - RNA, 20 nt, Human
ggugcaaugaccuuucaaua

SEQ ID NO: 3406189 - RNA, 21 nt, Human
ggugcaauguguguauaugga

SEQ ID NO: 3406190 - RNA, 13 nt, Human
ggugcaauuucaa

SEQ ID NO: 3406191 - RNA, 16 nt, Human
ggugcacaagcuccaa

SEQ ID NO: 3406192 - RNA, 12 nt, Human
ggugcacaggag

SEQ ID NO: 3406193 - RNA, 15 nt, Human
ggugcacagugauuu

SEQ ID NO: 3406194 - RNA, 16 nt, Human
ggugcacagugauuuu

SEQ ID NO: 3406195 - RNA, 17 nt, Human
ggugcacuggccccacc

SEQ ID NO: 3406196 - RNA, 18 nt, Human
ggugcaugccgcugcauc

SEQ ID NO: 3406197 - RNA, 15 nt, Human
ggugccaacuggugu

SEQ ID NO: 3406198 - RNA, 22 nt, Human
ggugccaauggaaccuccuuuc

SEQ ID NO: 3406199 - RNA, 15 nt, Human
ggugccagcaaagcc

SEQ ID NO: 3406200 - RNA, 16 nt, Human
ggugccagcaaagccc

SEQ ID NO: 3406201 - RNA, 17 nt, Human
ggugccagcaacugaau

SEQ ID NO: 3406202 - RNA, 19 nt, Human
ggugccagcaacugaauaa

SEQ ID NO: 3406203 - RNA, 17 nt, Human
ggugccagccugaggca

SEQ ID NO: 3406204 - RNA, 17 nt, Human
ggugcccaagccagagg

SEQ ID NO: 3406205 - RNA, 21 nt, Human
ggugcccaagccagaggcugg

SEQ ID NO: 3406206 - RNA, 22 nt, Human
ggugcccaagccagaggcuggg

SEQ ID NO: 3406207 - RNA, 22 nt, Human
ggugcccaagcucagaaggcuc

SEQ ID NO: 3406208 - RNA, 13 nt, Human
ggugcccacaggc

SEQ ID NO: 3406209 - RNA, 20 nt, Human
ggugcccagaaugaggcugc

SEQ ID NO: 3406210 - RNA, 13 nt, Human
ggugcccaggaga

SEQ ID NO: 3406211 - RNA, 14 nt, Human
ggugcccaggagaa

SEQ ID NO: 3406212 - RNA, 15 nt, Human
ggugccccaggacca

SEQ ID NO: 3406213 - RNA, 17 nt, Human
ggugccccaggaccagc

SEQ ID NO: 3406214 - RNA, 22 nt, Human
ggugccccccaccccuggaaga

SEQ ID NO: 3406215 - RNA, 22 nt, Human
ggugccccccuugccagacaug

SEQ ID NO: 3406216 - RNA, 19 nt, Human
ggugcccccuccucuccca

SEQ ID NO: 3406217 - RNA, 20 nt, Human
ggugcccccuccucucccau

SEQ ID NO: 3406218 - RNA, 13 nt, Human
ggugcccuggaug

SEQ ID NO: 3406219 - RNA, 17 nt, Human
ggugccugagaggcagg

SEQ ID NO: 3406220 - RNA, 19 nt, Human
ggugccugagaggcaggca

SEQ ID NO: 3406221 - RNA, 18 nt, Human
ggugccuggguggggcug

SEQ ID NO: 3406222 - RNA, 22 nt, Human
ggugccuggguggggcugcucc

SEQ ID NO: 3406223 - RNA, 17 nt, Human
ggugccugugaggcagg

SEQ ID NO: 3406224 - RNA, 19 nt, Human
ggugccugugaggcagggg

SEQ ID NO: 3406225 - RNA, 17 nt, Human
ggugccuuuauuuccac

SEQ ID NO: 3406226 - RNA, 17 nt, Human
ggugccuuuccuguuca

SEQ ID NO: 3406227 - RNA, 22 nt, Human
ggugccuuuccuguucagcauu

SEQ ID NO: 3406228 - RNA, 14 nt, Human
ggugcgaccccauc

SEQ ID NO: 3406229 - RNA, 19 nt, Human
ggugcgaccccaucugccc

SEQ ID NO: 3406230 - RNA, 21 nt, Human
ggugcgaccccaucugcccag

SEQ ID NO: 3406231 - RNA, 18 nt, Human
ggugcgagugcgugaaua

SEQ ID NO: 3406232 - RNA, 17 nt, Human
ggugcggcuggccaugg

SEQ ID NO: 3406233 - RNA, 20 nt, Human
ggugcuaaauggucgcccag

SEQ ID NO: 3406234 - RNA, 21 nt, Human
ggugcuaaauggucgcccagg

SEQ ID NO: 3406235 - RNA, 15 nt, Human
ggugcuacgccugca

SEQ ID NO: 3406236 - RNA, 18 nt, Human
ggugcuacuggggaaacu

SEQ ID NO: 3406237 - RNA, 21 nt, Human
ggugcuauaggcuggagaagc

SEQ ID NO: 3406238 - RNA, 20 nt, Human
ggugcuaucucccccagccc

SEQ ID NO: 3406239 - RNA, 15 nt, Human
ggugcucagggcuga

SEQ ID NO: 3406240 - RNA, 19 nt, Human
ggugcugacuggcuucagc

SEQ ID NO: 3406241 - RNA, 21 nt, Human
ggugcugacuucaucucccac

SEQ ID NO: 3406242 - RNA, 22 nt, Human
ggugcugcuacccucccugcug

SEQ ID NO: 3406243 - RNA, 23 nt, Human
ggugcugcuacccucccugcugu

SEQ ID NO: 3406244 - RNA, 18 nt, Human
ggugcuggagcacugggc

SEQ ID NO: 3406245 - RNA, 21 nt, Human
ggugcuggaggugggagcagg

SEQ ID NO: 3406246 - RNA, 19 nt, Human
ggugcugggccccugccuc

SEQ ID NO: 3406247 - RNA, 20 nt, Human
ggugcugggccccugccucu

SEQ ID NO: 3406248 - RNA, 19 nt, Human
ggugcuguccucagguggc

SEQ ID NO: 3406249 - RNA, 19 nt, Human
ggugcuguggccaggguga

SEQ ID NO: 3406250 - RNA, 18 nt, Human
ggugcuuaagcagaagca

SEQ ID NO: 3406251 - RNA, 20 nt, Human
ggugcuuaagcagaagcauu

SEQ ID NO: 3406252 - RNA, 19 nt, Human
ggugcuuauucucaaagca

SEQ ID NO: 3406253 - RNA, 22 nt, Human
ggugcuucuaguucugccagga

SEQ ID NO: 3406254 - RNA, 15 nt, Human
gguggaacaagcaca

SEQ ID NO: 3406255 - RNA, 19 nt, Human
gguggaagaagggagaaga

SEQ ID NO: 3406256 - RNA, 14 nt, Human
gguggaagagcuca

SEQ ID NO: 3406257 - RNA, 19 nt, Human
gguggaagcuuggggaaga

SEQ ID NO: 3406258 - RNA, 15 nt, Human
gguggaaggaggcgc

SEQ ID NO: 3406259 - RNA, 20 nt, Human
gguggaaggguagagaggcg

SEQ ID NO: 3406260 - RNA, 16 nt, Human
gguggacaguccuggg

SEQ ID NO: 3406261 - RNA, 19 nt, Human
gguggacuuagaaagcagg

SEQ ID NO: 3406262 - RNA, 21 nt, Human
gguggacuuagaaagcagggg

SEQ ID NO: 3406263 - RNA, 16 nt, Human
gguggagaaagcacug

SEQ ID NO: 3406264 - RNA, 11 nt, Human
gguggagaagc

SEQ ID NO: 3406265 - RNA, 13 nt, Human
gguggagaagcca

SEQ ID NO: 3406266 - RNA, 13 nt, Human
gguggaggagagc

SEQ ID NO: 3406267 - RNA, 20 nt, Human
gguggaggguggggggcgcu

SEQ ID NO: 3406268 - RNA, 20 nt, Human
gguggagguugcagugagcu

SEQ ID NO: 3406269 - RNA, 15 nt, Human
gguggaguugaaaga

SEQ ID NO: 3406270 - RNA, 13 nt, Human
gguggauauaaau

SEQ ID NO: 3406271 - RNA, 16 nt, Human
gguggaucaccugagg

SEQ ID NO: 3406272 - RNA, 21 nt, Human
gguggaugccugguggcagcu

SEQ ID NO: 3406273 - RNA, 13 nt, Human
gguggauguaaau

SEQ ID NO: 3406274 - RNA, 19 nt, Human
gguggauuccgagugguga

SEQ ID NO: 3406275 - RNA, 17 nt, Human
gguggcaaggcugugcu

SEQ ID NO: 3406276 - RNA, 12 nt, Human
gguggcaagugc

SEQ ID NO: 3406277 - RNA, 18 nt, Human
gguggcacaggcccccuu

SEQ ID NO: 3406278 - RNA, 16 nt, Human
gguggcacugagcccc

SEQ ID NO: 3406279 - RNA, 20 nt, Human
gguggcacugagccccccca

SEQ ID NO: 3406280 - RNA, 14 nt, Human
gguggcagcaacaa

SEQ ID NO: 3406281 - RNA, 12 nt, Human
gguggcagcugc

SEQ ID NO: 3406282 - RNA, 23 nt, Human
gguggcagcugcgguccacccag

SEQ ID NO: 3406283 - RNA, 14 nt, Human
gguggcaggaccag

SEQ ID NO: 3406284 - RNA, 17 nt, Human
gguggcaggaccaggac

SEQ ID NO: 3406285 - RNA, 15 nt, Human
gguggcaguggaggu

SEQ ID NO: 3406286 - RNA, 15 nt, Human
gguggcauacgccug

SEQ ID NO: 3406287 - RNA, 11 nt, Human
gguggccaggc

SEQ ID NO: 3406288 - RNA, 10 nt, Human
gguggccaug

SEQ ID NO: 3406289 - RNA, 13 nt, Human
gguggcccauccc

SEQ ID NO: 3406290 - RNA, 16 nt, Human
gguggcccgacagccu

SEQ ID NO: 3406291 - RNA, 19 nt, Human
gguggcccgacagccuggc

SEQ ID NO: 3406292 - RNA, 15 nt, Human
gguggcccucucccc

SEQ ID NO: 3406293 - RNA, 20 nt, Human
gguggcccuuaugacugcca

SEQ ID NO: 3406294 - RNA, 11 nt, Human
gguggccucag

SEQ ID NO: 3406295 - RNA, 12 nt, Human
gguggccucggg

SEQ ID NO: 3406296 - RNA, 16 nt, Human
gguggcggccccagca

SEQ ID NO: 3406297 - RNA, 20 nt, Human
gguggcgugagccuguaguc

SEQ ID NO: 3406298 - RNA, 14 nt, Human
gguggcuacucugu

SEQ ID NO: 3406299 - RNA, 18 nt, Human
gguggcuacucugugcca

SEQ ID NO: 3406300 - RNA, 22 nt, Human
gguggcuacucugugccagagc

SEQ ID NO: 3406301 - RNA, 21 nt, Human
gguggcuagucaagcuccucc

SEQ ID NO: 3406302 - RNA, 23 nt, Human
gguggcuagucaagcuccuccuc

SEQ ID NO: 3406303 - RNA, 19 nt, Human
gguggcucacaccuguaau

SEQ ID NO: 3406304 - RNA, 20 nt, Human
gguggcucccggagggcccu

SEQ ID NO: 3406305 - RNA, 21 nt, Human
gguggcugacccagucccugg

SEQ ID NO: 3406306 - RNA, 14 nt, Human
gguggcugcagccu

SEQ ID NO: 3406307 - RNA, 13 nt, Human
gguggcuucagcu

SEQ ID NO: 3406308 - RNA, 21 nt, Human
gguggcuuuccuuguggcaga

SEQ ID NO: 3406309 - RNA, 22 nt, Human
gguggcuuuccuuguggcagag

SEQ ID NO: 3406310 - RNA, 14 nt, Human
gguggcuuuugcgg

SEQ ID NO: 3406311 - RNA, 13 nt, Human
ggugggacacccu

SEQ ID NO: 3406312 - RNA, 17 nt, Human
ggugggacacccuguga

SEQ ID NO: 3406313 - RNA, 11 nt, Human
ggugggacccc

SEQ ID NO: 3406314 - RNA, 16 nt, Human
ggugggagagcccagc

SEQ ID NO: 3406315 - RNA, 19 nt, Human
ggugggauccuccaggugc

SEQ ID NO: 3406316 - RNA, 16 nt, Human
ggugggauggaggaga

SEQ ID NO: 3406317 - RNA, 17 nt, Human
ggugggauggaggagaa

SEQ ID NO: 3406318 - RNA, 17 nt, Human
ggugggcacccacccug

SEQ ID NO: 3406319 - RNA, 17 nt, Human
ggugggcccaggaccag

SEQ ID NO: 3406320 - RNA, 23 nt, Human
ggugggcccaggaccagcugggg

SEQ ID NO: 3406321 - RNA, 22 nt, Human
ggugggcccggcccgcgccaca

SEQ ID NO: 3406322 - RNA, 16 nt, Human
ggugggccgcaggcgg

SEQ ID NO: 3406323 - RNA, 15 nt, Human
ggugggccuugcugg

SEQ ID NO: 3406324 - RNA, 13 nt, Human
ggugggcugagcc

SEQ ID NO: 3406325 - RNA, 16 nt, Human
ggugggcugguaucuc

SEQ ID NO: 3406326 - RNA, 16 nt, Human
ggugggcuucagggca

SEQ ID NO: 3406327 - RNA, 12 nt, Human
gguggggaaagg

SEQ ID NO: 3406328 - RNA, 12 nt, Human
gguggggagggg

SEQ ID NO: 3406329 - RNA, 13 nt, Human
gguggggaggggc

SEQ ID NO: 3406330 - RNA, 17 nt, Human
gguggggcagcuugagg

SEQ ID NO: 3406331 - RNA, 16 nt, Human
gguggggcgggaaagc

SEQ ID NO: 3406332 - RNA, 17 nt, Human
gguggggcgggaaagcc

SEQ ID NO: 3406333 - RNA, 18 nt, Human
gguggggcugcuccucca

SEQ ID NO: 3406334 - RNA, 14 nt, Human
ggugggggagggag

SEQ ID NO: 3406335 - RNA, 20 nt, Human
ggugggggccaccugccugc

SEQ ID NO: 3406336 - RNA, 16 nt, Human
gguggggggcuucaua

SEQ ID NO: 3406337 - RNA, 17 nt, Human
gguggggggggugcugg

SEQ ID NO: 3406338 - RNA, 23 nt, Human
gguggggguagagcugauccaga

SEQ ID NO: 3406339 - RNA, 16 nt, Human
gguggggguggaggcu

SEQ ID NO: 3406340 - RNA, 16 nt, Human
ggugggggugggucag

SEQ ID NO: 3406341 - RNA, 15 nt, Human
gguggggucacucug

SEQ ID NO: 3406342 - RNA, 20 nt, Human
ggugggucccggcucugugg

SEQ ID NO: 3406343 - RNA, 14 nt, Human
gguggguggugggg

SEQ ID NO: 3406344 - RNA, 15 nt, Human
gguggguuaauuaaa

SEQ ID NO: 3406345 - RNA, 17 nt, Human
gguggguuuucuuccca

SEQ ID NO: 3406346 - RNA, 22 nt, Human
ggugguaccaggucuccuccac

SEQ ID NO: 3406347 - RNA, 19 nt, Human
gguggucacuggaacucag

SEQ ID NO: 3406348 - RNA, 14 nt, Human
gguggucagcccua

SEQ ID NO: 3406349 - RNA, 18 nt, Human
ggugguccugagaccuga

SEQ ID NO: 3406350 - RNA, 18 nt, Human
gguggucugcaggcaggg

SEQ ID NO: 3406351 - RNA, 13 nt, Human
gguggucugcucg

SEQ ID NO: 3406352 - RNA, 16 nt, Human
gguggucuguuggcag

SEQ ID NO: 3406353 - RNA, 23 nt, Human
gguggugcugggacugagccagu

SEQ ID NO: 3406354 - RNA, 13 nt, Human
ggugguggagcca

SEQ ID NO: 3406355 - RNA, 14 nt, Human
ggugguggggaggg

SEQ ID NO: 3406356 - RNA, 16 nt, Human
gguggugucgggcccu

SEQ ID NO: 3406357 - RNA, 14 nt, Human
gguguaaacacauc

SEQ ID NO: 3406358 - RNA, 22 nt, Human
gguguagaacacuaauucauaa

SEQ ID NO: 3406359 - RNA, 15 nt, Human
gguguagcuacagag

SEQ ID NO: 3406360 - RNA, 22 nt, Human
gguguagcuacagagaaaccag

SEQ ID NO: 3406361 - RNA, 16 nt, Human
gguguaugguucugug

SEQ ID NO: 3406362 - RNA, 19 nt, Human
ggugucaagagggucugag

SEQ ID NO: 3406363 - RNA, 21 nt, Human
ggugucacccaaaccggcagg

SEQ ID NO: 3406364 - RNA, 18 nt, Human
ggugucagacccuggagg

SEQ ID NO: 3406365 - RNA, 13 nt, Human
ggugucaggcugc

SEQ ID NO: 3406366 - RNA, 17 nt, Human
ggugucaggcugcuggc

SEQ ID NO: 3406367 - RNA, 17 nt, Human
ggugucauuucauucca

SEQ ID NO: 3406368 - RNA, 16 nt, Human
ggugucccagaccccg

SEQ ID NO: 3406369 - RNA, 13 nt, Human
gguguccccaaca

SEQ ID NO: 3406370 - RNA, 17 nt, Human
gguguccccagcccacu

SEQ ID NO: 3406371 - RNA, 14 nt, Human
gguguccuacagaa

SEQ ID NO: 3406372 - RNA, 16 nt, Human
gguguccuacagaaaa

SEQ ID NO: 3406373 - RNA, 21 nt, Human
gguguccuacagaaaaaccuu

SEQ ID NO: 3406374 - RNA, 14 nt, Human
gguguccugaccac

SEQ ID NO: 3406375 - RNA, 17 nt, Human
gguguccugaccacccu

SEQ ID NO: 3406376 - RNA, 15 nt, Human
gguguccugccuguc

SEQ ID NO: 3406377 - RNA, 18 nt, Human
gguguccugccugucugc

SEQ ID NO: 3406378 - RNA, 15 nt, Human
ggugucgcgccuucu

SEQ ID NO: 3406379 - RNA, 16 nt, Human
ggugucgggcaugaca

SEQ ID NO: 3406380 - RNA, 15 nt, Human
ggugucucaggcugc

SEQ ID NO: 3406381 - RNA, 16 nt, Human
ggugucucaggcugcc

SEQ ID NO: 3406382 - RNA, 20 nt, Human
ggugucucaggcugccugag

SEQ ID NO: 3406383 - RNA, 21 nt, Human
ggugucucaggcugccugagu

SEQ ID NO: 3406384 - RNA, 16 nt, Human
ggugucugcacccagg

SEQ ID NO: 3406385 - RNA, 15 nt, Human
ggugucuuucucuuu

SEQ ID NO: 3406386 - RNA, 22 nt, Human
ggugugagggcagugcaaggag

SEQ ID NO: 3406387 - RNA, 18 nt, Human
ggugugagucaccaagcc

SEQ ID NO: 3406388 - RNA, 18 nt, Human
ggugugaucgucugacug

SEQ ID NO: 3406389 - RNA, 20 nt, Human
ggugugcaaugucugaguga

SEQ ID NO: 3406390 - RNA, 23 nt, Human
ggugugcacaucucugcuugagu

SEQ ID NO: 3406391 - RNA, 17 nt, Human
ggugugcaccaggguug

SEQ ID NO: 3406392 - RNA, 17 nt, Human
ggugugccuuccagauc

SEQ ID NO: 3406393 - RNA, 22 nt, Human
ggugugcugggagcuccacucu

SEQ ID NO: 3406394 - RNA, 12 nt, Human
gguguggagaag

SEQ ID NO: 3406395 - RNA, 18 nt, Human
gguguggcccugccaucu

SEQ ID NO: 3406396 - RNA, 17 nt, Human
ggugugguacagagaag

SEQ ID NO: 3406397 - RNA, 20 nt, Human
ggugugguacagagaagcca

SEQ ID NO: 3406398 - RNA, 15 nt, Human
gguguggugcagugu

SEQ ID NO: 3406399 - RNA, 17 nt, Human
gguguggugcaguguga

SEQ ID NO: 3406400 - RNA, 18 nt, Human
gguguguggagaugcaga

SEQ ID NO: 3406401 - RNA, 22 nt, Human
gguguguuuuugggaugucuua

SEQ ID NO: 3406402 - RNA, 21 nt, Human
gguguuaucaccgugggcucc

SEQ ID NO: 3406403 - RNA, 11 nt, Human
gguguucuaag

SEQ ID NO: 3406404 - RNA, 17 nt, Human
gguguugacaugugcuu

SEQ ID NO: 3406405 - RNA, 21 nt, Human
gguguugccaaauauguccug

SEQ ID NO: 3406406 - RNA, 19 nt, Human
gguguuguacucaauuuua

SEQ ID NO: 3406407 - RNA, 17 nt, Human
gguguuguaugccuuua

SEQ ID NO: 3406408 - RNA, 13 nt, Human
gguguuuauacag

SEQ ID NO: 3406409 - RNA, 19 nt, Human
gguguuuccuggcacugcu

SEQ ID NO: 3406410 - RNA, 13 nt, Human
gguguuugaaaau

SEQ ID NO: 3406411 - RNA, 20 nt, Human
gguguuuuguucaccauuau

SEQ ID NO: 3406412 - RNA, 23 nt, Human
gguuaaaaaaaggcauuguuuga

SEQ ID NO: 3406413 - RNA, 20 nt, Human
gguuaaaaaaauggcaguga

SEQ ID NO: 3406414 - RNA, 22 nt, Human
gguuaacccuucaucuuccugu

SEQ ID NO: 3406415 - RNA, 22 nt, Human
gguuaaggcugaggaaaggcca

SEQ ID NO: 3406416 - RNA, 17 nt, Human
gguuaaucuuuccugau

SEQ ID NO: 3406417 - RNA, 13 nt, Human
gguuacaacagau

SEQ ID NO: 3406418 - RNA, 19 nt, Human
gguuacaacagauuuguga

SEQ ID NO: 3406419 - RNA, 23 nt, Human
gguuacaaucauugcugaaaaug

SEQ ID NO: 3406420 - RNA, 15 nt, Human
gguuacacuguuaga

SEQ ID NO: 3406421 - RNA, 20 nt, Human
gguuacacuguuagaacacu

SEQ ID NO: 3406422 - RNA, 16 nt, Human
gguuacagagaccuau

SEQ ID NO: 3406423 - RNA, 22 nt, Human
gguuacaguaugcuugcucuaa

SEQ ID NO: 3406424 - RNA, 22 nt, Human
gguuagacagccaaaggcuggc

SEQ ID NO: 3406425 - RNA, 14 nt, Human
gguuagaccuacag

SEQ ID NO: 3406426 - RNA, 20 nt, Human
gguuagaccuacaggggguc

SEQ ID NO: 3406427 - RNA, 13 nt, Human
gguuagauguugc

SEQ ID NO: 3406428 - RNA, 18 nt, Human
gguuagauucaaggcccc

SEQ ID NO: 3406429 - RNA, 16 nt, Human
gguuaggauuuaacag

SEQ ID NO: 3406430 - RNA, 12 nt, Human
gguuauaauuuu

SEQ ID NO: 3406431 - RNA, 23 nt, Human
gguuauacaugacacugaaaugc

SEQ ID NO: 3406432 - RNA, 15 nt, Human
gguuaucugucccag

SEQ ID NO: 3406433 - RNA, 12 nt, Human
gguuaugaaaga

SEQ ID NO: 3406434 - RNA, 17 nt, Human
gguuauguaucagaaga

SEQ ID NO: 3406435 - RNA, 18 nt, Human
gguuauuuaaaauguaaa

SEQ ID NO: 3406436 - RNA, 20 nt, Human
gguuauuuagggaacugcuu

SEQ ID NO: 3406437 - RNA, 17 nt, Human
gguuauuuuaguuucug

SEQ ID NO: 3406438 - RNA, 19 nt, Human
gguuauuuuaguuucuguu

SEQ ID NO: 3406439 - RNA, 23 nt, Human
gguuauuuugauguaaagauguu

SEQ ID NO: 3406440 - RNA, 13 nt, Human
gguucaaagauau

SEQ ID NO: 3406441 - RNA, 22 nt, Human
gguucacaaacuucauuucaga

SEQ ID NO: 3406442 - RNA, 22 nt, Human
gguucacaggcgaggccuggag

SEQ ID NO: 3406443 - RNA, 12 nt, Human
gguucaccagcc

SEQ ID NO: 3406444 - RNA, 14 nt, Human
gguucaccagccuc

SEQ ID NO: 3406445 - RNA, 20 nt, Human
gguucacucuuggagccugc

SEQ ID NO: 3406446 - RNA, 23 nt, Human
gguucacucuuggagccugcaga

SEQ ID NO: 3406447 - RNA, 14 nt, Human
gucagccagggccu

SEQ ID NO: 3406448 - RNA, 16 nt, Human
gucagccagggccugc

SEQ ID NO: 3406449 - RNA, 13 nt, Human
gucagcccuaggg

SEQ ID NO: 3406450 - RNA, 12 nt, Human
gucagccuccag

SEQ ID NO: 3406451 - RNA, 11 nt, Human
gucagccucuc

SEQ ID NO: 3406452 - RNA, 16 nt, Human
gucagccucucuccca

SEQ ID NO: 3406453 - RNA, 20 nt, Human
gucagccucucucccagucu

SEQ ID NO: 3406454 - RNA, 21 nt, Human
gucagccucucucccagucua

SEQ ID NO: 3406455 - RNA, 22 nt, Human
gucagccuucccccucccaggg

SEQ ID NO: 3406456 - RNA, 19 nt, Human
gucagcguugcaugucgug

SEQ ID NO: 3406457 - RNA, 13 nt, Human
gucagcuaaagaa

SEQ ID NO: 3406458 - RNA, 23 nt, Human
gucagcuccccucggagaagagc

SEQ ID NO: 3406459 - RNA, 15 nt, Human
gucagcucccuucuc

SEQ ID NO: 3406460 - RNA, 19 nt, Human
gucagcucucaucugaggc

SEQ ID NO: 3406461 - RNA, 23 nt, Human
gucagcugaggcugggggagagc

SEQ ID NO: 3406462 - RNA, 16 nt, Human
gucagcuugcugcccu

SEQ ID NO: 3406463 - RNA, 18 nt, Human
gucagcuuugccuuccac

SEQ ID NO: 3406464 - RNA, 15 nt, Human
gucaggaagaaauca

SEQ ID NO: 3406465 - RNA, 17 nt, Human
gucaggaggcagaagga

SEQ ID NO: 3406466 - RNA, 20 nt, Human
gucaggagugugugugagug

SEQ ID NO: 3406467 - RNA, 19 nt, Human
gucaggauugcgagagaug

SEQ ID NO: 3406468 - RNA, 14 nt, Human
gucaggcagccagu

SEQ ID NO: 3406469 - RNA, 13 nt, Human
gucaggcagggug

SEQ ID NO: 3406470 - RNA, 15 nt, Human
gucaggccacggcag

SEQ ID NO: 3406471 - RNA, 13 nt, Human
gucaggcccugga

SEQ ID NO: 3406472 - RNA, 16 nt, Human
gucaggccgggcagag

SEQ ID NO: 3406473 - RNA, 22 nt, Human
gucaggccgggcagagcacagc

SEQ ID NO: 3406474 - RNA, 12 nt, Human
gucaggcuccau

SEQ ID NO: 3406475 - RNA, 14 nt, Human
gucaggcucucugg

SEQ ID NO: 3406476 - RNA, 16 nt, Human
gucaggcugcuggcgc

SEQ ID NO: 3406477 - RNA, 17 nt, Human
gucaggcugcuggcgcc

SEQ ID NO: 3406478 - RNA, 13 nt, Human
gucagggaccaag

SEQ ID NO: 3406479 - RNA, 16 nt, Human
gucagggaccaaggac

SEQ ID NO: 3406480 - RNA, 18 nt, Human
gucagggaccccugcccu

SEQ ID NO: 3406481 - RNA, 19 nt, Human
gucagggcccaagucccug

SEQ ID NO: 3406482 - RNA, 16 nt, Human
gucagggcccagaggc

SEQ ID NO: 3406483 - RNA, 20 nt, Human
gucagggcccagaggcugag

SEQ ID NO: 3406484 - RNA, 14 nt, Human
gucaggggcagcug

SEQ ID NO: 3406485 - RNA, 15 nt, Human
gucaggggugacaca

SEQ ID NO: 3406486 - RNA, 15 nt, Human
gucagggugagccca

SEQ ID NO: 3406487 - RNA, 18 nt, Human
gucaggguuggugugcug

SEQ ID NO: 3406488 - RNA, 18 nt, Human
gucagguaggggggaaac

SEQ ID NO: 3406489 - RNA, 16 nt, Human
gucagguggggcagcu

SEQ ID NO: 3406490 - RNA, 17 nt, Human
gucagguggggcagcuu

SEQ ID NO: 3406491 - RNA, 18 nt, Human
gucagguggggcagcuug

SEQ ID NO: 3406492 - RNA, 18 nt, Human
gucagguugacaggaggu

SEQ ID NO: 3406493 - RNA, 18 nt, Human
gucaguacccaccugagc

SEQ ID NO: 3406494 - RNA, 20 nt, Human
gucaguacccaccugagcuu

SEQ ID NO: 3406495 - RNA, 16 nt, Human
gucaguaccuucaaac

SEQ ID NO: 3406496 - RNA, 16 nt, Human
gucaguaucaggccug

SEQ ID NO: 3406497 - RNA, 21 nt, Human
gucaguaucuguaucucucuc

SEQ ID NO: 3406498 - RNA, 16 nt, Human
gucagucuuuuucugu

SEQ ID NO: 3406499 - RNA, 23 nt, Human
gucagugaggcccagggagaggc

SEQ ID NO: 3406500 - RNA, 18 nt, Human
gucagugcaaaugucaga

SEQ ID NO: 3406501 - RNA, 22 nt, Human
gucagugguccacaucccggga

SEQ ID NO: 3406502 - RNA, 16 nt, Human
gucaguguagaucaac

SEQ ID NO: 3406503 - RNA, 17 nt, Human
gucaguguccaaagcag

SEQ ID NO: 3406504 - RNA, 11 nt, Human
gucaguuuuca

SEQ ID NO: 3406505 - RNA, 21 nt, Human
gucauaaagugagaaaacugu

SEQ ID NO: 3406506 - RNA, 22 nt, Human
gucauaaagugagaaaacugug

SEQ ID NO: 3406507 - RNA, 17 nt, Human
gucauaacuagaacuga

SEQ ID NO: 3406508 - RNA, 13 nt, Human
gucauacagagaa

SEQ ID NO: 3406509 - RNA, 14 nt, Human
gucauacagagaag

SEQ ID NO: 3406510 - RNA, 16 nt, Human
gucauaccaacuuuag

SEQ ID NO: 3406511 - RNA, 15 nt, Human
gucauaccaaugaaa

SEQ ID NO: 3406512 - RNA, 19 nt, Human
gucauagauguuuccuugc

SEQ ID NO: 3406513 - RNA, 15 nt, Human
gucauaggaaguuag

SEQ ID NO: 3406514 - RNA, 21 nt, Human
gucauauaagauucauauuua

SEQ ID NO: 3406515 - RNA, 23 nt, Human
gucaucaauaguguccuaugcaa

SEQ ID NO: 3406516 - RNA, 23 nt, Human
gucaucacucuagguuuuacaga

SEQ ID NO: 3406517 - RNA, 17 nt, Human
gucaucacuuuucagug

SEQ ID NO: 3406518 - RNA, 14 nt, Human
gucaucagccacca

SEQ ID NO: 3406519 - RNA, 17 nt, Human
gucaucaggagaaaaag

SEQ ID NO: 3406520 - RNA, 17 nt, Human
gucaucaucauggccag

SEQ ID NO: 3406521 - RNA, 21 nt, Human
gucaucauuguauauaugugu

SEQ ID NO: 3406522 - RNA, 18 nt, Human
gucauccagacucagagc

SEQ ID NO: 3406523 - RNA, 21 nt, Human
gucaucccaucauuuuccaua

SEQ ID NO: 3406524 - RNA, 22 nt, Human
gucauccuuggucuuuguaucu

SEQ ID NO: 3406525 - RNA, 12 nt, Human
gucaucuaguuu

SEQ ID NO: 3406526 - RNA, 16 nt, Human
gucaucucagcuggau

SEQ ID NO: 3406527 - RNA, 17 nt, Human
gucaucuccaucagcug

SEQ ID NO: 3406528 - RNA, 23 nt, Human
gucaucugaauuugcccugggaa

SEQ ID NO: 3406529 - RNA, 18 nt, Human
gucaucuugaccaagcag

SEQ ID NO: 3406530 - RNA, 23 nt, Human
gucaucuuucuuuucuuugaguc

SEQ ID NO: 3406531 - RNA, 16 nt, Human
gucaugagcugagcag

SEQ ID NO: 3406532 - RNA, 22 nt, Human
gucaugaucucccugccgccuc

SEQ ID NO: 3406533 - RNA, 17 nt, Human
gucaugcaaaggcuggg

SEQ ID NO: 3406534 - RNA, 19 nt, Human
gucaugcacaguauuugua

SEQ ID NO: 3406535 - RNA, 24 nt, Human
gucaugcacaguauuuguaauuaa

SEQ ID NO: 3406536 - RNA, 19 nt, Human
gucaugcuccccugugcca

SEQ ID NO: 3406537 - RNA, 16 nt, Human
gucauggagaaccacc

SEQ ID NO: 3406538 - RNA, 16 nt, Human
gucauggccacacugu

SEQ ID NO: 3406539 - RNA, 22 nt, Human
gucauggccacacugugacaca

SEQ ID NO: 3406540 - RNA, 22 nt, Human
gucauggcugugcccucuugau

SEQ ID NO: 3406541 - RNA, 16 nt, Human
gucauguaaauacugu

SEQ ID NO: 3406542 - RNA, 19 nt, Human
gucauguaaauacuguugg

SEQ ID NO: 3406543 - RNA, 15 nt, Human
gucaugugacaggua

SEQ ID NO: 3406544 - RNA, 12 nt, Human
gucauguguaua

SEQ ID NO: 3406545 - RNA, 23 nt, Human
gucauguguucccuuugucuuuc

SEQ ID NO: 3406546 - RNA, 23 nt, Human
gucauguuggucaaaagcuggau

SEQ ID NO: 3406547 - RNA, 14 nt, Human
gucauguuuaucug

SEQ ID NO: 3406548 - RNA, 16 nt, Human
gucauguuuuaaaugu

SEQ ID NO: 3406549 - RNA, 17 nt, Human
gucauguuuuaaaugua

SEQ ID NO: 3406550 - RNA, 20 nt, Human
gucauguuuuaaauguacag

SEQ ID NO: 3406551 - RNA, 14 nt, Human
gucauuaaaauaaa

SEQ ID NO: 3406552 - RNA, 12 nt, Human
gucauuaaacug

SEQ ID NO: 3406553 - RNA, 19 nt, Human
gucauuagccugaguagaa

SEQ ID NO: 3406554 - RNA, 21 nt, Human
gucauuagccugaguagaaag

SEQ ID NO: 3406555 - RNA, 22 nt, Human
gucauuauagaucccccagacu

SEQ ID NO: 3406556 - RNA, 21 nt, Human
gucauuauggguuaggcauua

SEQ ID NO: 3406557 - RNA, 21 nt, Human
gucauucagauaugauucaaa

SEQ ID NO: 3406558 - RNA, 21 nt, Human
gucauucgcuacuaugauuua

SEQ ID NO: 3406559 - RNA, 18 nt, Human
gucauugcuguugucccu

SEQ ID NO: 3406560 - RNA, 13 nt, Human
gucauugcuucuu

SEQ ID NO: 3406561 - RNA, 15 nt, Human
gucauugcuucuucu

SEQ ID NO: 3406562 - RNA, 16 nt, Human
gucauugcuuuacugg

SEQ ID NO: 3406563 - RNA, 20 nt, Human
gucauuguaaacaaacucuu

SEQ ID NO: 3406564 - RNA, 23 nt, Human
gucauuguaauguugugaauaau

SEQ ID NO: 3406565 - RNA, 21 nt, Human
gucauuguuauauaaucauua

SEQ ID NO: 3406566 - RNA, 14 nt, Human
gucauuuaaaugug

SEQ ID NO: 3406567 - RNA, 17 nt, Human
gucauuuacuaaacaua

SEQ ID NO: 3406568 - RNA, 16 nt, Human
gucauuuauuuuaaaa

SEQ ID NO: 3406569 - RNA, 15 nt, Human
gucauuucauuccau

SEQ ID NO: 3406570 - RNA, 16 nt, Human
gucauuucauuccauu

SEQ ID NO: 3406571 - RNA, 20 nt, Human
gucauuucauuccauugccu

SEQ ID NO: 3406572 - RNA, 17 nt, Human
gucauuugagcagggcu

SEQ ID NO: 3406573 - RNA, 21 nt, Human
gucauuugagcagggcucagc

SEQ ID NO: 3406574 - RNA, 16 nt, Human
gucauuugcucugccu

SEQ ID NO: 3406575 - RNA, 18 nt, Human
gucauuuugguacuuugg

SEQ ID NO: 3406576 - RNA, 20 nt, Human
guccaaaaccgccagcucug

SEQ ID NO: 3406577 - RNA, 20 nt, Human
guccaaauaaaaacuaaauu

SEQ ID NO: 3406578 - RNA, 18 nt, Human
guccaacguggggcagca

SEQ ID NO: 3406579 - RNA, 14 nt, Human
guccaacuccagua

SEQ ID NO: 3406580 - RNA, 22 nt, Human
guccaagaauccacauuucuaa

SEQ ID NO: 3406581 - RNA, 13 nt, Human
guccaagcagauu

SEQ ID NO: 3406582 - RNA, 21 nt, Human
guccaagcauuuagauguaua

SEQ ID NO: 3406583 - RNA, 22 nt, Human
guccaaggaaaccacagcugcu

SEQ ID NO: 3406584 - RNA, 22 nt, Human
guccaagggguccccuccagga

SEQ ID NO: 3406585 - RNA, 15 nt, Human
guccaagugugugug

SEQ ID NO: 3406586 - RNA, 16 nt, Human
guccaagugugugugc

SEQ ID NO: 3406587 - RNA, 17 nt, Human
guccaagugugugugcg

SEQ ID NO: 3406588 - RNA, 17 nt, Human
guccaauccuauguuuu

SEQ ID NO: 3406589 - RNA, 15 nt, Human
guccaaugagcuuuc

SEQ ID NO: 3406590 - RNA, 17 nt, Human
guccaaugagcuuucug

SEQ ID NO: 3406591 - RNA, 15 nt, Human
guccucccccugcca

SEQ ID NO: 3406592 - RNA, 19 nt, Human
guccuccccucacagccuc

SEQ ID NO: 3406593 - RNA, 17 nt, Human
guccuccccucucuugu

SEQ ID NO: 3406594 - RNA, 16 nt, Human
guccucccgagcuccu

SEQ ID NO: 3406595 - RNA, 17 nt, Human
guccucccgggcccucc

SEQ ID NO: 3406596 - RNA, 14 nt, Human
guccucccucaccc

SEQ ID NO: 3406597 - RNA, 13 nt, Human
guccuccucaccu

SEQ ID NO: 3406598 - RNA, 17 nt, Human
guccuccuccagggaca

SEQ ID NO: 3406599 - RNA, 22 nt, Human
guccuccucggaucaccgagag

SEQ ID NO: 3406600 - RNA, 14 nt, Human
guccuccucuguga

SEQ ID NO: 3406601 - RNA, 17 nt, Human
guccuccugcugccagu

SEQ ID NO: 3406602 - RNA, 22 nt, Human
guccuccugguggguccagggg

SEQ ID NO: 3406603 - RNA, 23 nt, Human
guccuccugguggguccaggggc

SEQ ID NO: 3406604 - RNA, 18 nt, Human
guccucguuuguguucug

SEQ ID NO: 3406605 - RNA, 18 nt, Human
guccucuccaccuagugg

SEQ ID NO: 3406606 - RNA, 20 nt, Human
guccucuccaccuaguggcu

SEQ ID NO: 3406607 - RNA, 13 nt, Human
guccucugaauga

SEQ ID NO: 3406608 - RNA, 17 nt, Human
guccucugaaugaaccu

SEQ ID NO: 3406609 - RNA, 19 nt, Human
guccucugauacccagagc

SEQ ID NO: 3406610 - RNA, 21 nt, Human
guccucuggauggcaccagag

SEQ ID NO: 3406611 - RNA, 19 nt, Human
guccucuucccucucugca

SEQ ID NO: 3406612 - RNA, 13 nt, Human
guccucuucugca

SEQ ID NO: 3406613 - RNA, 15 nt, Human
guccucuuucaaagg

SEQ ID NO: 3406614 - RNA, 16 nt, Human
guccucuuucagaaaa

SEQ ID NO: 3406615 - RNA, 20 nt, Human
guccucuuucagaaaacaga

SEQ ID NO: 3406616 - RNA, 13 nt, Human
guccucuuucagc

SEQ ID NO: 3406617 - RNA, 19 nt, Human
guccucuuucagcuccuga

SEQ ID NO: 3406618 - RNA, 15 nt, Human
guccugaccacccuc

SEQ ID NO: 3406619 - RNA, 16 nt, Human
guccugaccacccucc

SEQ ID NO: 3406620 - RNA, 21 nt, Human
guccugaccacccuccccucu

SEQ ID NO: 3406621 - RNA, 23 nt, Human
guccugaccacccuccccucucu

SEQ ID NO: 3406622 - RNA, 17 nt, Human
guccugacuucaggggc

SEQ ID NO: 3406623 - RNA, 20 nt, Human
guccugacuucaggggcugc

SEQ ID NO: 3406624 - RNA, 13 nt, Human
guccugagaccug

SEQ ID NO: 3406625 - RNA, 18 nt, Human
guccugagcacugccagg

SEQ ID NO: 3406626 - RNA, 19 nt, Human
guccugagcacugccagga

SEQ ID NO: 3406627 - RNA, 18 nt, Human
guccugagccccagggag

SEQ ID NO: 3406628 - RNA, 18 nt, Human
guccugagcucagcgugg

SEQ ID NO: 3406629 - RNA, 19 nt, Human
guccugauggucagcuccc

SEQ ID NO: 3406630 - RNA, 20 nt, Human
guccugauggucagcucccu

SEQ ID NO: 3406631 - RNA, 10 nt, Human
guccugcagc

SEQ ID NO: 3406632 - RNA, 23 nt, Human
guccugcagcaaacacuccaccc

SEQ ID NO: 3406633 - RNA, 19 nt, Human
guccugcagucuggcugag

SEQ ID NO: 3406634 - RNA, 20 nt, Human
guccugccacccagccccag

SEQ ID NO: 3406635 - RNA, 14 nt, Human
guccugccaccugg

SEQ ID NO: 3406636 - RNA, 17 nt, Human
guccugccaccuggggc

SEQ ID NO: 3406637 - RNA, 16 nt, Human
guccugccggagagga

SEQ ID NO: 3406638 - RNA, 22 nt, Human
guccugccuaaggcugaacuug

SEQ ID NO: 3406639 - RNA, 15 nt, Human
guccugccucagccu

SEQ ID NO: 3406640 - RNA, 13 nt, Human
guccugccuggcc

SEQ ID NO: 3406641 - RNA, 12 nt, Human
guccugccuguc

SEQ ID NO: 3406642 - RNA, 22 nt, Human
guccugccuguggcgccgucuc

SEQ ID NO: 3406643 - RNA, 21 nt, Human
guccugcuauuucccaagcug

SEQ ID NO: 3406644 - RNA, 21 nt, Human
guccugcucauuaugccacuu

SEQ ID NO: 3406645 - RNA, 11 nt, Human
guccugcucca

SEQ ID NO: 3406646 - RNA, 19 nt, Human
guccugcugcaguugccag

SEQ ID NO: 3406647 - RNA, 17 nt, Human
guccuggagcaaucaca

SEQ ID NO: 3406648 - RNA, 14 nt, Human
guccuggaggggcu

SEQ ID NO: 3406649 - RNA, 17 nt, Human
guccuggauguugugug

SEQ ID NO: 3406650 - RNA, 16 nt, Human
guccuggcaugggaau

SEQ ID NO: 3406651 - RNA, 22 nt, Human
guccuggccagauggcccggau

SEQ ID NO: 3406652 - RNA, 18 nt, Human
guccuggccaucccacaa

SEQ ID NO: 3406653 - RNA, 14 nt, Human
guccuggccuggcu

SEQ ID NO: 3406654 - RNA, 11 nt, Human
guccuggcucc

SEQ ID NO: 3406655 - RNA, 16 nt, Human
guccugggaggagaga

SEQ ID NO: 3406656 - RNA, 15 nt, Human
guccugggagugagc

SEQ ID NO: 3406657 - RNA, 17 nt, Human
guccugggagugagcug

SEQ ID NO: 3406658 - RNA, 19 nt, Human
guccugggagugagcuggu

SEQ ID NO: 3406659 - RNA, 13 nt, Human
guccugggccugc

SEQ ID NO: 3406660 - RNA, 17 nt, Human
guccugggccugcagaa

SEQ ID NO: 3406661 - RNA, 17 nt, Human
guccugggcgcccugga

SEQ ID NO: 3406662 - RNA, 23 nt, Human
guccugggcgcccuggaagccgg

SEQ ID NO: 3406663 - RNA, 12 nt, Human
guccugggcugg

SEQ ID NO: 3406664 - RNA, 17 nt, Human
guccuggggcucugugc

SEQ ID NO: 3406665 - RNA, 12 nt, Human
guccuggugccc

SEQ ID NO: 3406666 - RNA, 11 nt, Human
guccugguguc

SEQ ID NO: 3406667 - RNA, 13 nt, Human
guccuggugucac

SEQ ID NO: 3406668 - RNA, 22 nt, Human
guccuguaguuuuauuuuaugu

SEQ ID NO: 3406669 - RNA, 15 nt, Human
guccuguaugucugu

SEQ ID NO: 3406670 - RNA, 19 nt, Human
guccugucagugccgccgc

SEQ ID NO: 3406671 - RNA, 23 nt, Human
guccugucaucaucauggccagc

SEQ ID NO: 3406672 - RNA, 18 nt, Human
guccugucuccccucugc

SEQ ID NO: 3406673 - RNA, 15 nt, Human
guccugugaauuucu

SEQ ID NO: 3406674 - RNA, 16 nt, Human
guccugugagaugugu

SEQ ID NO: 3406675 - RNA, 19 nt, Human
guccugugagguuucccaa

SEQ ID NO: 3406676 - RNA, 20 nt, Human
guccugugagguuucccaau

SEQ ID NO: 3406677 - RNA, 23 nt, Human
guccuuaaacagggcaucuccag

SEQ ID NO: 3406678 - RNA, 17 nt, Human
guccuuaccagcagagc

SEQ ID NO: 3406679 - RNA, 21 nt, Human
guccuuaccagcagagcaccu

SEQ ID NO: 3406680 - RNA, 18 nt, Human
guccuuacuccuguggga

SEQ ID NO: 3406681 - RNA, 20 nt, Human
guccuuagccuggaccucug

SEQ ID NO: 3406682 - RNA, 18 nt, Human
guccuuaggccucugaga

SEQ ID NO: 3406683 - RNA, 17 nt, Human
guccuuaucuagcugca

SEQ ID NO: 3406684 - RNA, 22 nt, Human
guccuuauguuaagcccuggca

SEQ ID NO: 3406685 - RNA, 13 nt, Human
guccuucaaaggc

SEQ ID NO: 3406686 - RNA, 12 nt, Human
guccuucccucu

SEQ ID NO: 3406687 - RNA, 15 nt, Human
guccuuccugaaacu

SEQ ID NO: 3406688 - RNA, 19 nt, Human
guccuugagugcucuugcu

SEQ ID NO: 3406689 - RNA, 14 nt, Human
guccuugauuucaa

SEQ ID NO: 3406690 - RNA, 17 nt, Human
guccuugcaccugcauc

SEQ ID NO: 3406691 - RNA, 22 nt, Human
guccuugcugguuuucuggaug

SEQ ID NO: 3406692 - RNA, 13 nt, Human
guccuuggccccc

SEQ ID NO: 3406693 - RNA, 15 nt, Human
guccuuggcccccuu

SEQ ID NO: 3406694 - RNA, 22 nt, Human
guccuuggugugacccucugaa

SEQ ID NO: 3406695 - RNA, 21 nt, Human
guccuugugaugugcacguaa

SEQ ID NO: 3406696 - RNA, 13 nt, Human
guccuuuagaaac

SEQ ID NO: 3406697 - RNA, 16 nt, Human
guccuuuauguggaaa

SEQ ID NO: 3406698 - RNA, 22 nt, Human
guccuuucuagagcacugccac

SEQ ID NO: 3406699 - RNA, 20 nt, Human
guccuuucuuccggccccuc

SEQ ID NO: 3406700 - RNA, 19 nt, Human
guccuuuuacuacagcuau

SEQ ID NO: 3406701 - RNA, 18 nt, Human
guccuuuucacuacacca

SEQ ID NO: 3406702 - RNA, 22 nt, Human
guccuuuucauaggucugaaau

SEQ ID NO: 3406703 - RNA, 16 nt, Human
guccuuuugacacugc

SEQ ID NO: 3406704 - RNA, 20 nt, Human
guccuuuugacacugcucua

SEQ ID NO: 3406705 - RNA, 21 nt, Human
guccuuuugacacugcucuaa

SEQ ID NO: 3406706 - RNA, 12 nt, Human
guccuuuuguaa

SEQ ID NO: 3406707 - RNA, 17 nt, Human
guccuuuuguaccaugg

SEQ ID NO: 3406708 - RNA, 13 nt, Human
guccuuuugucuu

SEQ ID NO: 3406709 - RNA, 16 nt, Human
guccuuuuuccucucc

SEQ ID NO: 3406710 - RNA, 13 nt, Human
gucgagcuccccc

SEQ ID NO: 3406711 - RNA, 15 nt, Human
gucgaggggcucuca

SEQ ID NO: 3406712 - RNA, 19 nt, Human
gucgaggggcucucagcuc

SEQ ID NO: 3406713 - RNA, 14 nt, Human
gucgauagagcugu

SEQ ID NO: 3406714 - RNA, 14 nt, Human
gucgauauuuccau

SEQ ID NO: 3406715 - RNA, 12 nt, Human
gucgcccaggag

SEQ ID NO: 3406716 - RNA, 15 nt, Human
gucgcccaggcugga

SEQ ID NO: 3406717 - RNA, 21 nt, Human
gucgcccuuugcugcauggca

SEQ ID NO: 3406718 - RNA, 13 nt, Human
gucgcgcugccug

SEQ ID NO: 3406719 - RNA, 17 nt, Human
gucgcgcugccugugug

SEQ ID NO: 3406720 - RNA, 16 nt, Human
gucgcucaugugugca

SEQ ID NO: 3406721 - RNA, 18 nt, Human
gucgcucugcuggccugg

SEQ ID NO: 3406722 - RNA, 20 nt, Human
gucgcucugcuggccuggcc

SEQ ID NO: 3406723 - RNA, 14 nt, Human
gucggaacagcaga

SEQ ID NO: 3406724 - RNA, 15 nt, Human
gucggaggaaagaca

SEQ ID NO: 3406725 - RNA, 16 nt, Human
gucggaggcuugggac

SEQ ID NO: 3406726 - RNA, 19 nt, Human
gucggccccaccagugccu

SEQ ID NO: 3406727 - RNA, 22 nt, Human
gucggccucuaaccccaggccc

SEQ ID NO: 3406728 - RNA, 11 nt, Human
gucggcuccag

SEQ ID NO: 3406729 - RNA, 17 nt, Human
gucggcugaccaugcuc

SEQ ID NO: 3406730 - RNA, 18 nt, Human
gucgggaguucgagacca

SEQ ID NO: 3406731 - RNA, 14 nt, Human
gucgggcaccagcc

SEQ ID NO: 3406732 - RNA, 18 nt, Human
gucgggcaccagccagcg

SEQ ID NO: 3406733 - RNA, 12 nt, Human
gucgggcucagc

SEQ ID NO: 3406734 - RNA, 16 nt, Human
gucgggcuuuguguga

SEQ ID NO: 3406735 - RNA, 14 nt, Human
gucggggcaucugg

SEQ ID NO: 3406736 - RNA, 15 nt, Human
gucgggggcuggccu

SEQ ID NO: 3406737 - RNA, 23 nt, Human
gucggguuuuauuguuuaaaauc

SEQ ID NO: 3406738 - RNA, 18 nt, Human
gucgguccuggugcccug

SEQ ID NO: 3406739 - RNA, 14 nt, Human
gucggugccuucaa

SEQ ID NO: 3406740 - RNA, 20 nt, Human
gucguagccaaggugggcug

SEQ ID NO: 3406741 - RNA, 17 nt, Human
gucguaguuacucucag

SEQ ID NO: 3406742 - RNA, 18 nt, Human
gucgucaaagcugaaaug

SEQ ID NO: 3406743 - RNA, 15 nt, Human
gucgucgcacagucu

SEQ ID NO: 3406744 - RNA, 12 nt, Human
gucgugccugug

SEQ ID NO: 3406745 - RNA, 24 nt, Human
gucguggagagcuaggagcaaagc

SEQ ID NO: 3406746 - RNA, 17 nt, Human
gucguggagaugucuuc

SEQ ID NO: 3406747 - RNA, 23 nt, Human
gucguggcagauaaucagccucu

SEQ ID NO: 3406748 - RNA, 19 nt, Human
gucguggggugugcuggga

SEQ ID NO: 3406749 - RNA, 17 nt, Human
gucguugacuuuaggga

SEQ ID NO: 3406750 - RNA, 17 nt, Human
gucguuuuccaaacuga

SEQ ID NO: 3406751 - RNA, 13 nt, Human
gucuaaaacaaua

SEQ ID NO: 3406752 - RNA, 16 nt, Human
gucuaaaauccugcuu

SEQ ID NO: 3406753 - RNA, 10 nt, Human
gucuaaacug

SEQ ID NO: 3406754 - RNA, 15 nt, Human
gucuaaaguuuacag

SEQ ID NO: 3406755 - RNA, 17 nt, Human
gucuaaaguuuacagua

SEQ ID NO: 3406756 - RNA, 16 nt, Human
gucuaaauaaguuugc

SEQ ID NO: 3406757 - RNA, 16 nt, Human
gucuaacucagaauua

SEQ ID NO: 3406758 - RNA, 22 nt, Human
gucuaacuuuagaagugcauuu

SEQ ID NO: 3406759 - RNA, 23 nt, Human
gucuaacuuuagaagugcauuuc

SEQ ID NO: 3406760 - RNA, 14 nt, Human
gucuaagaaacauu

SEQ ID NO: 3406761 - RNA, 19 nt, Human
gucuaagaaacauuggaag

SEQ ID NO: 3406762 - RNA, 23 nt, Human
gucuaagacuauauauauaaaug

SEQ ID NO: 3406763 - RNA, 12 nt, Human
gucuaagauucu

SEQ ID NO: 3406764 - RNA, 13 nt, Human
gucuaagauucua

SEQ ID NO: 3406765 - RNA, 18 nt, Human
gucuaagauucuagauca

SEQ ID NO: 3406766 - RNA, 15 nt, Human
gucuaauguuuaagc

SEQ ID NO: 3406767 - RNA, 17 nt, Human
gucuaauguuuaagcag

SEQ ID NO: 3406768 - RNA, 19 nt, Human
gucuacacugcaaucauau

SEQ ID NO: 3406769 - RNA, 21 nt, Human
gucuacacugcaaucauaugu

SEQ ID NO: 3406770 - RNA, 15 nt, Human
gucuacacugugcug

SEQ ID NO: 3406771 - RNA, 15 nt, Human
gucuacagcuccccc

SEQ ID NO: 3406772 - RNA, 17 nt, Human
gucuacagcucccccag

SEQ ID NO: 3406773 - RNA, 22 nt, Human
gucuacauaacuaauacagcug

SEQ ID NO: 3406774 - RNA, 14 nt, Human
gucuaccaucuccc

SEQ ID NO: 3406775 - RNA, 20 nt, Human
gucuacccagagaagccccu

SEQ ID NO: 3406776 - RNA, 23 nt, Human
gucuaccccucccggcccugccu

SEQ ID NO: 3406777 - RNA, 13 nt, Human
gucuacccuggga

SEQ ID NO: 3406778 - RNA, 13 nt, Human
gucuaccugaggg

SEQ ID NO: 3406779 - RNA, 14 nt, Human
gucuaccugagggg

SEQ ID NO: 3406780 - RNA, 15 nt, Human
gucuaccugaggggc

SEQ ID NO: 3406781 - RNA, 16 nt, Human
gucuaccugaggggcc

SEQ ID NO: 3406782 - RNA, 18 nt, Human
gucuacucuuaagccauc

SEQ ID NO: 3406783 - RNA, 23 nt, Human
gucuacucuuaagccaucuuggu

SEQ ID NO: 3406784 - RNA, 21 nt, Human
gucuagaaguuguuugucauc

SEQ ID NO: 3406785 - RNA, 13 nt, Human
gucuagagaggga

SEQ ID NO: 3406786 - RNA, 14 nt, Human
gucuagagagggag

SEQ ID NO: 3406787 - RNA, 15 nt, Human
gucuagagagggagg

SEQ ID NO: 3406788 - RNA, 16 nt, Human
gucuagagagggaggc

SEQ ID NO: 3406789 - RNA, 15 nt, Human
gucuagauggcuccu

SEQ ID NO: 3406790 - RNA, 17 nt, Human
gucuagauggcuccucu

SEQ ID NO: 3406791 - RNA, 18 nt, Human
gucuagauggcuccucuc

SEQ ID NO: 3406792 - RNA, 19 nt, Human
gucuagauggcuccucuca

SEQ ID NO: 3406793 - RNA, 22 nt, Human
gucuagauguuuauucuucuag

SEQ ID NO: 3406794 - RNA, 20 nt, Human
gucuagauuaauacucuauu

SEQ ID NO: 3406795 - RNA, 15 nt, Human
gucuagauucaaagg

SEQ ID NO: 3406796 - RNA, 20 nt, Human
gucuagauucaaagguucua

SEQ ID NO: 3406797 - RNA, 21 nt, Human
gucuagcguagugcagcaggg

SEQ ID NO: 3406798 - RNA, 13 nt, Human
gucuaggagcugg

SEQ ID NO: 3406799 - RNA, 22 nt, Human
gucuaggucaguacccaccuga

SEQ ID NO: 3406800 - RNA, 14 nt, Human
gucuagucucuccu

SEQ ID NO: 3406801 - RNA, 22 nt, Human
gucuaguuccugaugacccagg

SEQ ID NO: 3406802 - RNA, 21 nt, Human
gucuaguugccaaaucuggcu

SEQ ID NO: 3406803 - RNA, 15 nt, Human
gucuauaaagcauuu

SEQ ID NO: 3406804 - RNA, 22 nt, Human
gucuauaccuuaagaaugccaa

SEQ ID NO: 3406805 - RNA, 14 nt, Human
gucuaucauuguug

SEQ ID NO: 3406806 - RNA, 13 nt, Human
gucuauccacaga

SEQ ID NO: 3406807 - RNA, 14 nt, Human
gucuauccacagag

SEQ ID NO: 3406808 - RNA, 15 nt, Human
gucuauccacagaga

SEQ ID NO: 3406809 - RNA, 17 nt, Human
gucuaucuaaugacaug

SEQ ID NO: 3406810 - RNA, 22 nt, Human
gucuaucugguauuaaaugcca

SEQ ID NO: 3406811 - RNA, 21 nt, Human
gucuaugacuuauuuccuuca

SEQ ID NO: 3406812 - RNA, 22 nt, Human
gucuauguaaaugcaucugucc

SEQ ID NO: 3406813 - RNA, 13 nt, Human
gucuauuccagcu

SEQ ID NO: 3406814 - RNA, 20 nt, Human
gucuauuccagcucauucau

SEQ ID NO: 3406815 - RNA, 21 nt, Human
gucuauuccagcucauucauu

SEQ ID NO: 3406816 - RNA, 17 nt, Human
gucuauucuccagcuga

SEQ ID NO: 3406817 - RNA, 14 nt, Human
gucuauuucuaguu

SEQ ID NO: 3406818 - RNA, 13 nt, Human
gucuauuucugcu

SEQ ID NO: 3406819 - RNA, 12 nt, Human
gucuauuugaga

SEQ ID NO: 3406820 - RNA, 11 nt, Human
gucuauuuuaa

SEQ ID NO: 3406821 - RNA, 16 nt, Human
gucucaaacuccugac

SEQ ID NO: 3406822 - RNA, 21 nt, Human
gucucaacucuguccccagga

SEQ ID NO: 3406823 - RNA, 12 nt, Human
gucucaaugcuc

SEQ ID NO: 3406824 - RNA, 14 nt, Human
gucucaaugcucau

SEQ ID NO: 3406825 - RNA, 13 nt, Human
gucucacagcccu

SEQ ID NO: 3406826 - RNA, 19 nt, Human
gucucacaguguugcccag

SEQ ID NO: 3406827 - RNA, 22 nt, Human
gucucaccauuuccccagggca

SEQ ID NO: 3406828 - RNA, 23 nt, Human
gucucacccaugcaagcagagga

SEQ ID NO: 3406829 - RNA, 19 nt, Human
gucucaccggcucucaccu

SEQ ID NO: 3406830 - RNA, 16 nt, Human
gucucacucugucgcc

SEQ ID NO: 3406831 - RNA, 21 nt, Human
gucucacucugucgcccaguc

SEQ ID NO: 3406832 - RNA, 21 nt, Human
gucucacugaaacauuuaaau

SEQ ID NO: 3406833 - RNA, 16 nt, Human
gucucacugagcacug

SEQ ID NO: 3406834 - RNA, 15 nt, Human
gucucacugcuugaa

SEQ ID NO: 3406835 - RNA, 21 nt, Human
gucucacuguugcccaggcug

SEQ ID NO: 3406836 - RNA, 17 nt, Human
gucucagaaucuuuccu

SEQ ID NO: 3406837 - RNA, 17 nt, Human
gucucagauuuuauuau

SEQ ID NO: 3406838 - RNA, 21 nt, Human
gucucagauuuuauuauguaa

SEQ ID NO: 3406839 - RNA, 22 nt, Human
gucucagcagcgaccaccccug

SEQ ID NO: 3406840 - RNA, 13 nt, Human
gucucagccuccc

SEQ ID NO: 3406841 - RNA, 13 nt, Human
gucucaggcugcc

SEQ ID NO: 3406842 - RNA, 18 nt, Human
gucucaggcugccugagu

SEQ ID NO: 3406843 - RNA, 17 nt, Human
gucucaggcugguggga

SEQ ID NO: 3406844 - RNA, 22 nt, Human
gucucaggcuggugggaggggc

SEQ ID NO: 3406845 - RNA, 17 nt, Human
gucucagggugcagagg

SEQ ID NO: 3406846 - RNA, 22 nt, Human
gucucagguuuguuuugugaau

SEQ ID NO: 3406847 - RNA, 18 nt, Human
gucucaguggcuucaucu

SEQ ID NO: 3406848 - RNA, 22 nt, Human
gucucaguggcuucaucuguca

SEQ ID NO: 3406849 - RNA, 14 nt, Human
gucucaguuucuug

SEQ ID NO: 3406850 - RNA, 14 nt, Human
gucucauccccagg

SEQ ID NO: 3406851 - RNA, 14 nt, Human
gucucauccuccug

SEQ ID NO: 3406852 - RNA, 22 nt, Human
gucucaucuggggagcaggcag

SEQ ID NO: 3406853 - RNA, 11 nt, Human
gucucaugugu

SEQ ID NO: 3406854 - RNA, 20 nt, Human
gucucauuccguugucugug

SEQ ID NO: 3406855 - RNA, 15 nt, Human
gucucauuuuaaugu

SEQ ID NO: 3406856 - RNA, 20 nt, Human
gucucauuuuaauguaaaga

SEQ ID NO: 3406857 - RNA, 16 nt, Human
gucuccaaccccccag

SEQ ID NO: 3406858 - RNA, 12 nt, Human
gucuccaccagg

SEQ ID NO: 3406859 - RNA, 15 nt, Human
gucuccaccaggaac

SEQ ID NO: 3406860 - RNA, 20 nt, Human
gucuccagaaagccccaccc

SEQ ID NO: 3406861 - RNA, 20 nt, Human
gucuccagccccuucucaga

SEQ ID NO: 3406862 - RNA, 13 nt, Human
gucuccagcugcu

SEQ ID NO: 3406863 - RNA, 21 nt, Human
gucuccaggggcugcuuccuc

SEQ ID NO: 3406864 - RNA, 22 nt, Human
gucuccaggggcugcuuccucc

SEQ ID NO: 3406865 - RNA, 23 nt, Human
gucuccaggggcugcuuccuccu

SEQ ID NO: 3406866 - RNA, 17 nt, Human
gucucccacgugggaga

SEQ ID NO: 3406867 - RNA, 18 nt, Human
gucucccccaacagcugg

SEQ ID NO: 3406868 - RNA, 23 nt, Human
gucucccccaacagcuggacccu

SEQ ID NO: 3406869 - RNA, 20 nt, Human
gucucccccacccuuguucc

SEQ ID NO: 3406870 - RNA, 14 nt, Human
gucuccccucugcu

SEQ ID NO: 3406871 - RNA, 19 nt, Human
gucuccccucugcuggccg

SEQ ID NO: 3406872 - RNA, 19 nt, Human
gucuccccuguuccccucu

SEQ ID NO: 3406873 - RNA, 22 nt, Human
gucucccuauaaugcuggagcg

SEQ ID NO: 3406874 - RNA, 14 nt, Human
gucucccucuccug

SEQ ID NO: 3406875 - RNA, 19 nt, Human
gucucccucuccugccuac

SEQ ID NO: 3406876 - RNA, 21 nt, Human
gucucccucuccugccuacuc

SEQ ID NO: 3406877 - RNA, 11 nt, Human
gucucccuggc

SEQ ID NO: 3406878 - RNA, 14 nt, Human
gucucccuggcccu

SEQ ID NO: 3406879 - RNA, 15 nt, Human
gucucccuggcccuc

SEQ ID NO: 3406880 - RNA, 15 nt, Human
gucucccuucuccca

SEQ ID NO: 3406881 - RNA, 20 nt, Human
guggguggauauaaauauau

SEQ ID NO: 3406882 - RNA, 14 nt, Human
guggguggggcugc

SEQ ID NO: 3406883 - RNA, 12 nt, Human
guggguguguga

SEQ ID NO: 3406884 - RNA, 13 nt, Human
guggguucuaugu

SEQ ID NO: 3406885 - RNA, 19 nt, Human
guggguuuguggggggagg

SEQ ID NO: 3406886 - RNA, 12 nt, Human
gugguacagaga

SEQ ID NO: 3406887 - RNA, 17 nt, Human
gugguacagagaagcca

SEQ ID NO: 3406888 - RNA, 19 nt, Human
gugguaggccuuuuaacau

SEQ ID NO: 3406889 - RNA, 19 nt, Human
gugguaugaucacggcuca

SEQ ID NO: 3406890 - RNA, 13 nt, Human
gugguaugugaca

SEQ ID NO: 3406891 - RNA, 18 nt, Human
gugguauuaauuuugaua

SEQ ID NO: 3406892 - RNA, 14 nt, Human
gugguauuuucaau

SEQ ID NO: 3406893 - RNA, 18 nt, Human
guggucacagcggaggug

SEQ ID NO: 3406894 - RNA, 22 nt, Human
guggucacagcggaggugugga

SEQ ID NO: 3406895 - RNA, 24 nt, Human
guggucccaacaggaggacaauuc

SEQ ID NO: 3406896 - RNA, 15 nt, Human
gugguccugagaccu

SEQ ID NO: 3406897 - RNA, 13 nt, Human
guggucucaggau

SEQ ID NO: 3406898 - RNA, 17 nt, Human
guggucuccuuggaaau

SEQ ID NO: 3406899 - RNA, 21 nt, Human
guggucugagccaaagagaau

SEQ ID NO: 3406900 - RNA, 22 nt, Human
guggucugcucgggcccaggcc

SEQ ID NO: 3406901 - RNA, 22 nt, Human
guggucuguuggcaggcuggcc

SEQ ID NO: 3406902 - RNA, 16 nt, Human
guggucuuucuggaga

SEQ ID NO: 3406903 - RNA, 17 nt, Human
guggugaccucugccug

SEQ ID NO: 3406904 - RNA, 13 nt, Human
guggugacuuugg

SEQ ID NO: 3406905 - RNA, 16 nt, Human
guggugacuuuggaua

SEQ ID NO: 3406906 - RNA, 18 nt, Human
guggugauuugaaaaaua

SEQ ID NO: 3406907 - RNA, 18 nt, Human
guggugccaucauugcug

SEQ ID NO: 3406908 - RNA, 23 nt, Human
guggugccaucauugcugucugc

SEQ ID NO: 3406909 - RNA, 22 nt, Human
guggugccauccccagggggca

SEQ ID NO: 3406910 - RNA, 19 nt, Human
guggugcgaucuggguuca

SEQ ID NO: 3406911 - RNA, 14 nt, Human
guggugcugggacu

SEQ ID NO: 3406912 - RNA, 14 nt, Human
gugguggcaggcac

SEQ ID NO: 3406913 - RNA, 15 nt, Human
gugguggcagggccu

SEQ ID NO: 3406914 - RNA, 23 nt, Human
gugguggcauacgccuguagucc

SEQ ID NO: 3406915 - RNA, 15 nt, Human
gugguggcucugaga

SEQ ID NO: 3406916 - RNA, 19 nt, Human
guggugguaacccuggugg

SEQ ID NO: 3406917 - RNA, 20 nt, Human
guggugguaacccugguggu

SEQ ID NO: 3406918 - RNA, 15 nt, Human
gugguggucccuggg

SEQ ID NO: 3406919 - RNA, 20 nt, Human
guggugguuuucuguucuuu

SEQ ID NO: 3406920 - RNA, 19 nt, Human
guggugucacugucccucc

SEQ ID NO: 3406921 - RNA, 23 nt, Human
guggugugucccccucuguccag

SEQ ID NO: 3406922 - RNA, 14 nt, Human
gugguuacacagug

SEQ ID NO: 3406923 - RNA, 20 nt, Human
gugguuauaacuuaaugaaa

SEQ ID NO: 3406924 - RNA, 20 nt, Human
gugguucacucuuggagccu

SEQ ID NO: 3406925 - RNA, 21 nt, Human
gugguucacucuuggagccug

SEQ ID NO: 3406926 - RNA, 20 nt, Human
gugguucugagauggcuccc

SEQ ID NO: 3406927 - RNA, 21 nt, Human
gugguugaggcuaaguuggga

SEQ ID NO: 3406928 - RNA, 13 nt, Human
gugguugugaucc

SEQ ID NO: 3406929 - RNA, 23 nt, Human
gugguuuccaaggagcugagaau

SEQ ID NO: 3406930 - RNA, 21 nt, Human
gugguuugauggugacuuccu

SEQ ID NO: 3406931 - RNA, 12 nt, Human
gugguuuggaau

SEQ ID NO: 3406932 - RNA, 24 nt, Human
gugguuuuccccucccuggguuca

SEQ ID NO: 3406933 - RNA, 16 nt, Human
gugguuuucuguuucu

SEQ ID NO: 3406934 - RNA, 15 nt, Human
guguaaaaaugagaa

SEQ ID NO: 3406935 - RNA, 16 nt, Human
guguaaaaaugagaac

SEQ ID NO: 3406936 - RNA, 20 nt, Human
guguaaaaaugagaacaugu

SEQ ID NO: 3406937 - RNA, 18 nt, Human
guguaaaauauuuugaau

SEQ ID NO: 3406938 - RNA, 21 nt, Human
guguaaagcauuccaacaaag

SEQ ID NO: 3406939 - RNA, 18 nt, Human
guguaaauacaauuuugu

SEQ ID NO: 3406940 - RNA, 21 nt, Human
guguaaauacaauuuuguuuc

SEQ ID NO: 3406941 - RNA, 22 nt, Human
guguaaauacaauuuuguuucu

SEQ ID NO: 3406942 - RNA, 19 nt, Human
guguaaauaguuacuccag

SEQ ID NO: 3406943 - RNA, 19 nt, Human
guguaacaauuguguagcc

SEQ ID NO: 3406944 - RNA, 13 nt, Human
guguaacagcucc

SEQ ID NO: 3406945 - RNA, 14 nt, Human
guguaacagcuccu

SEQ ID NO: 3406946 - RNA, 15 nt, Human
guguaacagcugagg

SEQ ID NO: 3406947 - RNA, 21 nt, Human
guguaacagcugaggucucuu

SEQ ID NO: 3406948 - RNA, 21 nt, Human
guguaaccugagauggcccuc

SEQ ID NO: 3406949 - RNA, 23 nt, Human
guguaaccugagauggcccucug

SEQ ID NO: 3406950 - RNA, 19 nt, Human
guguaacugcccaaagcag

SEQ ID NO: 3406951 - RNA, 23 nt, Human
guguaacugucagccgggcccug

SEQ ID NO: 3406952 - RNA, 17 nt, Human
guguaagacaaaaagcu

SEQ ID NO: 3406953 - RNA, 12 nt, Human
guguaagagaau

SEQ ID NO: 3406954 - RNA, 21 nt, Human
guguaaguagauaggccaugg

SEQ ID NO: 3406955 - RNA, 21 nt, Human
guguaauaaaguguuuucaga

SEQ ID NO: 3406956 - RNA, 22 nt, Human
guguaauaaaguguuuucagag

SEQ ID NO: 3406957 - RNA, 12 nt, Human
guguaauaagac

SEQ ID NO: 3406958 - RNA, 14 nt, Human
guguaauaagacau

SEQ ID NO: 3406959 - RNA, 19 nt, Human
guguaaucauuucuugggc

SEQ ID NO: 3406960 - RNA, 23 nt, Human
guguaaucauuucuugggcccuc

SEQ ID NO: 3406961 - RNA, 18 nt, Human
guguaauugagaaggaaa

SEQ ID NO: 3406962 - RNA, 13 nt, Human
guguacaaagaaa

SEQ ID NO: 3406963 - RNA, 16 nt, Human
guguacaauguacaca

SEQ ID NO: 3406964 - RNA, 19 nt, Human
guguacacugacaccuuug

SEQ ID NO: 3406965 - RNA, 18 nt, Human
guguacagaauucugcua

SEQ ID NO: 3406966 - RNA, 16 nt, Human
guguacagccagacca

SEQ ID NO: 3406967 - RNA, 12 nt, Human
guguacagguac

SEQ ID NO: 3406968 - RNA, 16 nt, Human
guguacagucuuguau

SEQ ID NO: 3406969 - RNA, 17 nt, Human
guguacaguuggcaugg

SEQ ID NO: 3406970 - RNA, 16 nt, Human
guguacauaacugaaa

SEQ ID NO: 3406971 - RNA, 12 nt, Human
guguacauaugu

SEQ ID NO: 3406972 - RNA, 19 nt, Human
guguacaucccauguaaca

SEQ ID NO: 3406973 - RNA, 15 nt, Human
guguaccauuaaaau

SEQ ID NO: 3406974 - RNA, 22 nt, Human
guguaccgcgucuacccuggga

SEQ ID NO: 3406975 - RNA, 13 nt, Human
guguacucccagg

SEQ ID NO: 3406976 - RNA, 21 nt, Human
guguacucccagggcuuacgg

SEQ ID NO: 3406977 - RNA, 15 nt, Human
guguacucuggccuc

SEQ ID NO: 3406978 - RNA, 19 nt, Human
guguacucuggccucuguc

SEQ ID NO: 3406979 - RNA, 19 nt, Human
guguacuguauagacaguu

SEQ ID NO: 3406980 - RNA, 23 nt, Human
guguacuucccgggccagggcug

SEQ ID NO: 3406981 - RNA, 13 nt, Human
guguagaagcauu

SEQ ID NO: 3406982 - RNA, 22 nt, Human
guguagacgaagggggcaucug

SEQ ID NO: 3406983 - RNA, 17 nt, Human
guguagaguuaagaagc

SEQ ID NO: 3406984 - RNA, 21 nt, Human
guguagccagguauggcucug

SEQ ID NO: 3406985 - RNA, 15 nt, Human
guguagccccaagaa

SEQ ID NO: 3406986 - RNA, 20 nt, Human
guguagccccaagaaggcug

SEQ ID NO: 3406987 - RNA, 22 nt, Human
guguagcuacagagaaaccagc

SEQ ID NO: 3406988 - RNA, 16 nt, Human
guguagcugugaccug

SEQ ID NO: 3406989 - RNA, 23 nt, Human
guguagcugugaccugcugagcu

SEQ ID NO: 3406990 - RNA, 15 nt, Human
guguaggcagacaca

SEQ ID NO: 3406991 - RNA, 14 nt, Human
guguauaauauaaa

SEQ ID NO: 3406992 - RNA, 14 nt, Human
guguauacaugcca

SEQ ID NO: 3406993 - RNA, 14 nt, Human
guguauauauacau

SEQ ID NO: 3406994 - RNA, 12 nt, Human
guguauauauau

SEQ ID NO: 3406995 - RNA, 13 nt, Human
guguauaucagaa

SEQ ID NO: 3406996 - RNA, 15 nt, Human
guguauauuauuugg

SEQ ID NO: 3406997 - RNA, 15 nt, Human
guguaucaaaaugcu

SEQ ID NO: 3406998 - RNA, 16 nt, Human
guguauccauuaucau

SEQ ID NO: 3406999 - RNA, 23 nt, Human
guguauccauuaucauguguaau

SEQ ID NO: 3407000 - RNA, 13 nt, Human
guguauccugggg

SEQ ID NO: 3407001 - RNA, 14 nt, Human
guguauccuggggc

SEQ ID NO: 3407002 - RNA, 20 nt, Human
guguauccuggggcucccuu

SEQ ID NO: 3407003 - RNA, 23 nt, Human
guguauggguguuggugaacuug

SEQ ID NO: 3407004 - RNA, 17 nt, Human
guguauguacauauaua

SEQ ID NO: 3407005 - RNA, 20 nt, Human
guguaugugaguauucucau

SEQ ID NO: 3407006 - RNA, 21 nt, Human
guguaugugggggucugugug

SEQ ID NO: 3407007 - RNA, 19 nt, Human
guguauucuaguuuuguca

SEQ ID NO: 3407008 - RNA, 12 nt, Human
guguauuguucc

SEQ ID NO: 3407009 - RNA, 17 nt, Human
guguauuuaacagggag

SEQ ID NO: 3407010 - RNA, 20 nt, Human
guguauuuaauuguaaacug

SEQ ID NO: 3407011 - RNA, 17 nt, Human
guguauuuacgcuuuga

SEQ ID NO: 3407012 - RNA, 12 nt, Human
guguauuuauuu

SEQ ID NO: 3407013 - RNA, 21 nt, Human
guguauuuauuuuccucccca

SEQ ID NO: 3407014 - RNA, 14 nt, Human
guguauuucaguuc

SEQ ID NO: 3407015 - RNA, 10 nt, Human
guguauuugc

SEQ ID NO: 3407016 - RNA, 14 nt, Human
guguauuuucaguc

SEQ ID NO: 3407017 - RNA, 17 nt, Human
guguauuuuuuuacuaa

SEQ ID NO: 3407018 - RNA, 23 nt, Human
guguauuuuuuuacuaauagaca

SEQ ID NO: 3407019 - RNA, 19 nt, Human
gugucaaccagacagaggg

SEQ ID NO: 3407020 - RNA, 19 nt, Human
gugucaacucuuuguuauu

SEQ ID NO: 3407021 - RNA, 20 nt, Human
gugucaagagggucugagga

SEQ ID NO: 3407022 - RNA, 16 nt, Human
gugucaaguugugcuu

SEQ ID NO: 3407023 - RNA, 18 nt, Human
gugucaaguugugcuugu

SEQ ID NO: 3407024 - RNA, 15 nt, Human
gugucaccccagagc

SEQ ID NO: 3407025 - RNA, 19 nt, Human
guguuuuuuuaugaauggg

SEQ ID NO: 3407026 - RNA, 22 nt, Human
guguuuuuuuuucguuuguuug

SEQ ID NO: 3407027 - RNA, 15 nt, Human
guuaaaaaaauggca

SEQ ID NO: 3407028 - RNA, 22 nt, Human
guuaaaaacagauuuggaaaga

SEQ ID NO: 3407029 - RNA, 11 nt, Human
guuaaaaauaa

SEQ ID NO: 3407030 - RNA, 18 nt, Human
guuaaaacuguacauuua

SEQ ID NO: 3407031 - RNA, 19 nt, Human
guuaaaacuguacauuuaa

SEQ ID NO: 3407032 - RNA, 12 nt, Human
guuaaaacuguc

SEQ ID NO: 3407033 - RNA, 14 nt, Human
guuaaaagagguuu

SEQ ID NO: 3407034 - RNA, 22 nt, Human
guuaaaauacaguucugucaua

SEQ ID NO: 3407035 - RNA, 14 nt, Human
guuaaaauggauuu

SEQ ID NO: 3407036 - RNA, 13 nt, Human
guuaaaauuauac

SEQ ID NO: 3407037 - RNA, 14 nt, Human
guuaaacauugaag

SEQ ID NO: 3407038 - RNA, 21 nt, Human
guuaaaccaugggauaaaugc

SEQ ID NO: 3407039 - RNA, 19 nt, Human
guuaaacuagcauaucugc

SEQ ID NO: 3407040 - RNA, 22 nt, Human
guuaaacuagcauaucugccuu

SEQ ID NO: 3407041 - RNA, 17 nt, Human
guuaaacucgcucacug

SEQ ID NO: 3407042 - RNA, 12 nt, Human
guuaaacuguua

SEQ ID NO: 3407043 - RNA, 21 nt, Human
guuaaagggaagaaaacacug

SEQ ID NO: 3407044 - RNA, 21 nt, Human
guuaaauaaauuguauauuca

SEQ ID NO: 3407045 - RNA, 16 nt, Human
guuaaauacaggaaac

SEQ ID NO: 3407046 - RNA, 20 nt, Human
guuaaauacaggaaacaguu

SEQ ID NO: 3407047 - RNA, 20 nt, Human
guuaaauagaguauaugcac

SEQ ID NO: 3407048 - RNA, 21 nt, Human
guuaaauagaguauaugcacu

SEQ ID NO: 3407049 - RNA, 15 nt, Human
guuaaaugaaauugu

SEQ ID NO: 3407050 - RNA, 17 nt, Human
guuaaauugcuguguau

SEQ ID NO: 3407051 - RNA, 12 nt, Human
guuaacaaauaa

SEQ ID NO: 3407052 - RNA, 17 nt, Human
guuaacaaauaacaacu

SEQ ID NO: 3407053 - RNA, 14 nt, Human
guuaacaaugauau

SEQ ID NO: 3407054 - RNA, 12 nt, Human
guuaacacauuu

SEQ ID NO: 3407055 - RNA, 20 nt, Human
guuaacagaagggagggcag

SEQ ID NO: 3407056 - RNA, 19 nt, Human
guuaacauaguaaguucag

SEQ ID NO: 3407057 - RNA, 21 nt, Human
guuaacauugaccaagaacug

SEQ ID NO: 3407058 - RNA, 22 nt, Human
guuaacauuguugcucccugug

SEQ ID NO: 3407059 - RNA, 15 nt, Human
guuaaccauuuaagu

SEQ ID NO: 3407060 - RNA, 16 nt, Human
guuaaccucugcuuuu

SEQ ID NO: 3407061 - RNA, 20 nt, Human
guuaacuauguacaauauuu

SEQ ID NO: 3407062 - RNA, 23 nt, Human
guuaacuauguacaauauuuuaa

SEQ ID NO: 3407063 - RNA, 18 nt, Human
guuaacugagugccuuuu

SEQ ID NO: 3407064 - RNA, 12 nt, Human
guuaagaaaaaa

SEQ ID NO: 3407065 - RNA, 20 nt, Human
guuaagaaaucuguuuuugu

SEQ ID NO: 3407066 - RNA, 15 nt, Human
guuaagaaauuucac

SEQ ID NO: 3407067 - RNA, 15 nt, Human
guuaagaaugucgau

SEQ ID NO: 3407068 - RNA, 17 nt, Human
guuaagacaugauuucc

SEQ ID NO: 3407069 - RNA, 16 nt, Human
guuaagacuugacagu

SEQ ID NO: 3407070 - RNA, 17 nt, Human
guuaagacuugacagug

SEQ ID NO: 3407071 - RNA, 19 nt, Human
guuaagacuugacagugga

SEQ ID NO: 3407072 - RNA, 10 nt, Human
guuaagagaa

SEQ ID NO: 3407073 - RNA, 15 nt, Human
guuaagagaaacuuu

SEQ ID NO: 3407074 - RNA, 19 nt, Human
guuaagagaaacuuuauac

SEQ ID NO: 3407075 - RNA, 14 nt, Human
guuaagauuccuaa

SEQ ID NO: 3407076 - RNA, 21 nt, Human
guuaagcauuaccacucaggc

SEQ ID NO: 3407077 - RNA, 12 nt, Human
guuaagccuuug

SEQ ID NO: 3407078 - RNA, 16 nt, Human
guuaagccuuuggaaa

SEQ ID NO: 3407079 - RNA, 19 nt, Human
guuaaggaaacucuuaucu

SEQ ID NO: 3407080 - RNA, 21 nt, Human
guuaaggaaacucuuaucuca

SEQ ID NO: 3407081 - RNA, 13 nt, Human
guuaagggaagga

SEQ ID NO: 3407082 - RNA, 22 nt, Human
guuaagggaaggaacucuggcu

SEQ ID NO: 3407083 - RNA, 15 nt, Human
guuaaggugggcccg

SEQ ID NO: 3407084 - RNA, 21 nt, Human
guuaagucuaucugguauuaa

SEQ ID NO: 3407085 - RNA, 13 nt, Human
guuaagucuguuu

SEQ ID NO: 3407086 - RNA, 23 nt, Human
guuaaguugagauaguuuucauc

SEQ ID NO: 3407087 - RNA, 19 nt, Human
guuaauaagcaaaauccug

SEQ ID NO: 3407088 - RNA, 16 nt, Human
guuaauacaagguaua

SEQ ID NO: 3407089 - RNA, 12 nt, Human
guuaauacuagu

SEQ ID NO: 3407090 - RNA, 16 nt, Human
guuaauauucuuucaa

SEQ ID NO: 3407091 - RNA, 17 nt, Human
guuaauauucuuucaau

SEQ ID NO: 3407092 - RNA, 15 nt, Human
guuaauauuuaagac

SEQ ID NO: 3407093 - RNA, 17 nt, Human
guuaaucaacugaaagu

SEQ ID NO: 3407094 - RNA, 13 nt, Human
guuaaucaauuua

SEQ ID NO: 3407095 - RNA, 17 nt, Human
guuaaucaauuuaaacc

SEQ ID NO: 3407096 - RNA, 22 nt, Human
guuaaucaauuuaaacccauuu

SEQ ID NO: 3407097 - RNA, 19 nt, Human
guuaaucucuguuauguac

SEQ ID NO: 3407098 - RNA, 21 nt, Human
guuaaucuugcuuucuuuguu

SEQ ID NO: 3407099 - RNA, 23 nt, Human
guuaaugaugguugauggguucu

SEQ ID NO: 3407100 - RNA, 23 nt, Human
guuaauguauuuguucauguuug

SEQ ID NO: 3407101 - RNA, 15 nt, Human
guuaauuagcauucu

SEQ ID NO: 3407102 - RNA, 18 nt, Human
guuaauucagcacugauu

SEQ ID NO: 3407103 - RNA, 17 nt, Human
guuaauugauagaauaa

SEQ ID NO: 3407104 - RNA, 13 nt, Human
guuaauuuaaguu

SEQ ID NO: 3407105 - RNA, 22 nt, Human
guuaauuuugaagugcuguuua

SEQ ID NO: 3407106 - RNA, 20 nt, Human
guuaauuuuuccaacuacua

SEQ ID NO: 3407107 - RNA, 14 nt, Human
guuaauuuuuccua

SEQ ID NO: 3407108 - RNA, 13 nt, Human
guuacaaaaugua

SEQ ID NO: 3407109 - RNA, 15 nt, Human
guuacaaacugcaau

SEQ ID NO: 3407110 - RNA, 23 nt, Human
guuacaaacugcaauagagacug

SEQ ID NO: 3407111 - RNA, 17 nt, Human
guuacaaauuauaaugu

SEQ ID NO: 3407112 - RNA, 22 nt, Human
guuacaacagauuugugaacuc

SEQ ID NO: 3407113 - RNA, 18 nt, Human
guuacaaucauugcugaa

SEQ ID NO: 3407114 - RNA, 14 nt, Human
guuacacaaagaac

SEQ ID NO: 3407115 - RNA, 21 nt, Human
guuacacaaaggaccucagcu

SEQ ID NO: 3407116 - RNA, 20 nt, Human
guuacacagaaaugcugcug

SEQ ID NO: 3407117 - RNA, 17 nt, Human
guuacacagugugaaua

SEQ ID NO: 3407118 - RNA, 20 nt, Human
guuacacauuaaguaaucaa

SEQ ID NO: 3407119 - RNA, 16 nt, Human
guuacacauuuuucag

SEQ ID NO: 3407120 - RNA, 15 nt, Human
guuacacuaaaaggu

SEQ ID NO: 3407121 - RNA, 22 nt, Human
guuacacuuuuuggaagugaaa

SEQ ID NO: 3407122 - RNA, 22 nt, Human
guuacagagaccuauguaagaa

SEQ ID NO: 3407123 - RNA, 21 nt, Human
guuacagcacaaaaugauggc

SEQ ID NO: 3407124 - RNA, 16 nt, Human
guuacagccaagugcc

SEQ ID NO: 3407125 - RNA, 19 nt, Human
guuacagcgagaggcagag

SEQ ID NO: 3407126 - RNA, 19 nt, Human
guuacagguaccaguucuu

SEQ ID NO: 3407127 - RNA, 15 nt, Human
guuacaguucugugg

SEQ ID NO: 3407128 - RNA, 20 nt, Human
guuacaugcagccacuuagg

SEQ ID NO: 3407129 - RNA, 19 nt, Human
guuacaugcauacuucaaa

SEQ ID NO: 3407130 - RNA, 14 nt, Human
guuacauguuugca

SEQ ID NO: 3407131 - RNA, 15 nt, Human
guuaccaugucacug

SEQ ID NO: 3407132 - RNA, 15 nt, Human
guuaccaugucuuuc

SEQ ID NO: 3407133 - RNA, 23 nt, Human
guuaccauuaaaccaucucccug

SEQ ID NO: 3407134 - RNA, 14 nt, Human
guuaccauuggaaa

SEQ ID NO: 3407135 - RNA, 16 nt, Human
guuaccauuggaaauu

SEQ ID NO: 3407136 - RNA, 19 nt, Human
guuaccauuggaaauuuca

SEQ ID NO: 3407137 - RNA, 16 nt, Human
guuaccauuuacaugu

SEQ ID NO: 3407138 - RNA, 20 nt, Human
guuacccaguaacucaucug

SEQ ID NO: 3407139 - RNA, 10 nt, Human
guuaccuaau

SEQ ID NO: 3407140 - RNA, 23 nt, Human
guuaccuccaacagaacuaaaug

SEQ ID NO: 3407141 - RNA, 17 nt, Human
guuaccuccuauaaacu

SEQ ID NO: 3407142 - RNA, 21 nt, Human
guuaccugaucaaugacagag

SEQ ID NO: 3407143 - RNA, 13 nt, Human
guuaccugugugc

SEQ ID NO: 3407144 - RNA, 14 nt, Human
guuaccugugugcu

SEQ ID NO: 3407145 - RNA, 20 nt, Human
guuaccuuauaguuacugug

SEQ ID NO: 3407146 - RNA, 22 nt, Human
guuacuaaguuuuuauggcuuu

SEQ ID NO: 3407147 - RNA, 15 nt, Human
guuacuacaugcacu

SEQ ID NO: 3407148 - RNA, 15 nt, Human
guuacucagaauucu

SEQ ID NO: 3407149 - RNA, 15 nt, Human
guuacucagcccugg

SEQ ID NO: 3407150 - RNA, 16 nt, Human
guuacucagcccuggg

SEQ ID NO: 3407151 - RNA, 21 nt, Human
guuacuccaaaacuucguuua

SEQ ID NO: 3407152 - RNA, 17 nt, Human
guuacucuccaaccugg

SEQ ID NO: 3407153 - RNA, 14 nt, Human
guuacucugaaggg

SEQ ID NO: 3407154 - RNA, 15 nt, Human
guuacucuugggaca

SEQ ID NO: 3407155 - RNA, 14 nt, Human
guuacugccuuaau

SEQ ID NO: 3407156 - RNA, 19 nt, Human
guuacugugccauguguuu

SEQ ID NO: 3407157 - RNA, 11 nt, Human
guuacuguucu

SEQ ID NO: 3407158 - RNA, 12 nt, Human
guuacuguucuu

SEQ ID NO: 3407159 - RNA, 24 nt, Human
guuacuguucuugcugcuagaacu

SEQ ID NO: 3407160 - RNA, 14 nt, Human
guuacuguugugac

SEQ ID NO: 3407161 - RNA, 17 nt, Human
guuacuuaccuaaacag

SEQ ID NO: 3407162 - RNA, 14 nt, Human
guuacuucuucucu

SEQ ID NO: 3407163 - RNA, 15 nt, Human
guuacuucuucucuu

SEQ ID NO: 3407164 - RNA, 21 nt, Human
guuacuuuauguuugucuuuu

SEQ ID NO: 3407165 - RNA, 21 nt, Human
guuacuuuccaauucuccuuu

SEQ ID NO: 3407166 - RNA, 21 nt, Human
guuacuuuucauauuugcacu

SEQ ID NO: 3407167 - RNA, 22 nt, Human
guuacuuuucauauuugcacua

SEQ ID NO: 3407168 - RNA, 13 nt, Human
guuacuuuuccuu

SEQ ID NO: 3407169 - RNA, 14 nt, Human
guuacuuuuccuug

SEQ ID NO: 3407170 - RNA, 15 nt, Human
guuagaaaugcaaau

SEQ ID NO: 3407171 - RNA, 19 nt, Human
guuagaacacuauuuucag

SEQ ID NO: 3407172 - RNA, 20 nt, Human
guuagaacacuauuuucaga

SEQ ID NO: 3407173 - RNA, 20 nt, Human
guuagaauaauaaauauuua

SEQ ID NO: 3407174 - RNA, 17 nt, Human
guuagaaucuauuuucu

SEQ ID NO: 3407175 - RNA, 18 nt, Human
guuagaaucuauuuucua

SEQ ID NO: 3407176 - RNA, 19 nt, Human
guuagaaugagaucugaau

SEQ ID NO: 3407177 - RNA, 23 nt, Human
guuagacugacuuguuugucuuc

SEQ ID NO: 3407178 - RNA, 14 nt, Human
guuagacugccagc

SEQ ID NO: 3407179 - RNA, 17 nt, Human
guuagacugccagcucu

SEQ ID NO: 3407180 - RNA, 22 nt, Human
guuagacugccagcucuuccua

SEQ ID NO: 3407181 - RNA, 23 nt, Human
guuagagaacuaaacuaguuuuu

SEQ ID NO: 3407182 - RNA, 20 nt, Human
guuagagagggaccaugugu

SEQ ID NO: 3407183 - RNA, 18 nt, Human
guuagagaugccucccug

SEQ ID NO: 3407184 - RNA, 16 nt, Human
guuagcacuguugaug

SEQ ID NO: 3407185 - RNA, 13 nt, Human
guuagcagacagg

SEQ ID NO: 3407186 - RNA, 18 nt, Human
guuagccuuuuuucccca

SEQ ID NO: 3407187 - RNA, 23 nt, Human
guuagccuuuuuuccccagacuu

SEQ ID NO: 3407188 - RNA, 21 nt, Human
guuagcucagccccagcccag

SEQ ID NO: 3407189 - RNA, 23 nt, Human
guuagcucagccccagcccagcc

SEQ ID NO: 3407190 - RNA, 20 nt, Human
guuagcucaggaggcuugga

SEQ ID NO: 3407191 - RNA, 14 nt, Human
guuagcuccugugg

SEQ ID NO: 3407192 - RNA, 16 nt, Human
guuagcuccuguggcc

SEQ ID NO: 3407193 - RNA, 17 nt, Human
guuagcugaagaauuga

SEQ ID NO: 3407194 - RNA, 14 nt, Human
guuaggaaauaaaa

SEQ ID NO: 3407195 - RNA, 16 nt, Human
guuaggaaauaaaacc

SEQ ID NO: 3407196 - RNA, 19 nt, Human
guuaggaaauaaaaccuuu

SEQ ID NO: 3407197 - RNA, 15 nt, Human
guuaggaguucgaga

SEQ ID NO: 3407198 - RNA, 23 nt, Human
guuaggauuuaacagucauuuaa

SEQ ID NO: 3407199 - RNA, 19 nt, Human
guuaggcauugugggaagg

SEQ ID NO: 3407200 - RNA, 20 nt, Human
guuagggacugaccagcagc

SEQ ID NO: 3407201 - RNA, 23 nt, Human
guuagggugcucuggaagagagg

SEQ ID NO: 3407202 - RNA, 14 nt, Human
guuaguaauaccuc

SEQ ID NO: 3407203 - RNA, 15 nt, Human
guuaguaaucuguau

SEQ ID NO: 3407204 - RNA, 13 nt, Human
guuaguagaaauu

SEQ ID NO: 3407205 - RNA, 16 nt, Human
guuaguaucuaacaug

SEQ ID NO: 3407206 - RNA, 14 nt, Human
guuaguaucuuuug

SEQ ID NO: 3407207 - RNA, 17 nt, Human
guuaguaucuuuugaua

SEQ ID NO: 3407208 - RNA, 18 nt, Human
guuaguaucuuuugauau

SEQ ID NO: 3407209 - RNA, 12 nt, Human
guuagucauuug

SEQ ID NO: 3407210 - RNA, 22 nt, Human
guuaguuaccuuauaguuacug

SEQ ID NO: 3407211 - RNA, 23 nt, Human
guuaguuaccuuauaguuacugu

SEQ ID NO: 3407212 - RNA, 16 nt, Human
guuaguuccacugaga

SEQ ID NO: 3407213 - RNA, 16 nt, Human
guuaguuucuccaagc

SEQ ID NO: 3407214 - RNA, 21 nt, Human
guuaguuuguauauauuauua

SEQ ID NO: 3407215 - RNA, 13 nt, Human
guuauaaaggaau

SEQ ID NO: 3407216 - RNA, 18 nt, Human
guuauaaaucaaugucac

SEQ ID NO: 3407217 - RNA, 17 nt, Human
guuauaacuuaaugaaa

SEQ ID NO: 3407218 - RNA, 21 nt, Human
guuauaacuuaaugaaaacaa

SEQ ID NO: 3407219 - RNA, 13 nt, Human
guuauaagaagaa

SEQ ID NO: 3407220 - RNA, 22 nt, Human
guuauacaguuauaaaauuaaa

SEQ ID NO: 3407221 - RNA, 15 nt, Human
guuauacaugacacu

SEQ ID NO: 3407222 - RNA, 23 nt, Human
guuauacaugacacugaaaugcc

SEQ ID NO: 3407223 - RNA, 22 nt, Human
guuauagagggucuaagauuca

SEQ ID NO: 3407224 - RNA, 17 nt, Human
guuauaggucacuccug

SEQ ID NO: 3407225 - RNA, 17 nt, Human
guuauaguaacucccau

SEQ ID NO: 3407226 - RNA, 13 nt, Human
guuauagugaauu

SEQ ID NO: 3407227 - RNA, 12 nt, Human
guuauauaaaug

SEQ ID NO: 3407228 - RNA, 13 nt, Human
guuauauaaucau

SEQ ID NO: 3407229 - RNA, 16 nt, Human
guuauauaauucacuc

SEQ ID NO: 3407230 - RNA, 12 nt, Human
guuauauaauuu

SEQ ID NO: 3407231 - RNA, 15 nt, Human
guuauauaauuuaga

SEQ ID NO: 3407232 - RNA, 13 nt, Human
guuauauauaaau

SEQ ID NO: 3407233 - RNA, 22 nt, Human
guuauauauaaauauauuauua

SEQ ID NO: 3407234 - RNA, 17 nt, Human
guuauauauuuuuugua

SEQ ID NO: 3407235 - RNA, 14 nt, Human
guuauaucaacaga

SEQ ID NO: 3407236 - RNA, 17 nt, Human
guuauauccccugcuac

SEQ ID NO: 3407237 - RNA, 17 nt, Human
guuauauuuaaugcauu

SEQ ID NO: 3407238 - RNA, 10 nt, Human
guuauauuuc

SEQ ID NO: 3407239 - RNA, 22 nt, Human
guuaucaaaaaaaaaaaaaugu

SEQ ID NO: 3407240 - RNA, 23 nt, Human
guuaucaaacuucagcuguacuu

SEQ ID NO: 3407241 - RNA, 18 nt, Human
guuaucagucucucuuuc

SEQ ID NO: 3407242 - RNA, 17 nt, Human
guuaucagugcuucccg

SEQ ID NO: 3407243 - RNA, 19 nt, Human
guuaucaugaauuuuaaag

SEQ ID NO: 3407244 - RNA, 18 nt, Human
guuaucccaaucauuguu

SEQ ID NO: 3407245 - RNA, 15 nt, Human
guuaucgaaauaaca

SEQ ID NO: 3407246 - RNA, 17 nt, Human
guuaucgaaauaacaau

SEQ ID NO: 3407247 - RNA, 21 nt, Human
guuaucgaaauaacaauguua

SEQ ID NO: 3407248 - RNA, 23 nt, Human
guuaucgaaauaacaauguuaag

SEQ ID NO: 3407249 - RNA, 15 nt, Human
guuaucuaaaagaaa

SEQ ID NO: 3407250 - RNA, 19 nt, Human
guuaucuaauagggcaauu

SEQ ID NO: 3407251 - RNA, 14 nt, Human
guuaucucuguguu

SEQ ID NO: 3407252 - RNA, 17 nt, Human
guuaucuguucuuuuga

SEQ ID NO: 3407253 - RNA, 22 nt, Human
guuaucuuauacuguacaauaa

SEQ ID NO: 3407254 - RNA, 18 nt, Human
guuaucuucucaaguucu

SEQ ID NO: 3407255 - RNA, 23 nt, Human
guuaucuucucaaguucuaagau

SEQ ID NO: 3407256 - RNA, 13 nt, Human
guuaugaaagaau

SEQ ID NO: 3407257 - RNA, 20 nt, Human
guuaugaaagaauauauuua

SEQ ID NO: 3407258 - RNA, 12 nt, Human
guuaugaauauu

SEQ ID NO: 3407259 - RNA, 23 nt, Human
guuaugaauauuuacguuuuugu

SEQ ID NO: 3407260 - RNA, 17 nt, Human
guuaugacuauguaaac

SEQ ID NO: 3407261 - RNA, 14 nt, Human
guuaugaugugcuu

SEQ ID NO: 3407262 - RNA, 17 nt, Human
guuaugaugugcuuaac

SEQ ID NO: 3407263 - RNA, 13 nt, Human
guuaugcugugac

SEQ ID NO: 3407264 - RNA, 21 nt, Human
guuauguaaauaauucuuuuu

SEQ ID NO: 3407265 - RNA, 14 nt, Human
guuauguauauggu

SEQ ID NO: 3407266 - RNA, 15 nt, Human
guuauguauauuuua

SEQ ID NO: 3407267 - RNA, 23 nt, Human
guuauguauuuccuggauguuug

SEQ ID NO: 3407268 - RNA, 19 nt, Human
guuauuaaaaaucucaaau

SEQ ID NO: 3407269 - RNA, 12 nt, Human
guuauuaaaauu

SEQ ID NO: 3407270 - RNA, 13 nt, Human
guuauuaaaauug

SEQ ID NO: 3407271 - RNA, 21 nt, Human
guuauuacauccuuguggcac

SEQ ID NO: 3407272 - RNA, 22 nt, Human
guuauuagagauuaccuccuga

SEQ ID NO: 3407273 - RNA, 21 nt, Human
guuauuagggugguauuuagu

SEQ ID NO: 3407274 - RNA, 17 nt, Human
guuauuauauuuacaaa

SEQ ID NO: 3407275 - RNA, 19 nt, Human
guuauuauauuuacaaaug

SEQ ID NO: 3407276 - RNA, 18 nt, Human
guuauuaugauuagcuuu

SEQ ID NO: 3407277 - RNA, 22 nt, Human
guuauucaacagcaagugugaa

SEQ ID NO: 3407278 - RNA, 18 nt, Human
guuauuccuugaucauuu

SEQ ID NO: 3407279 - RNA, 15 nt, Human
guuauucuuugcacu

SEQ ID NO: 3407280 - RNA, 16 nt, Human
guuauucuuugcacuu

SEQ ID NO: 3407281 - RNA, 22 nt, Human
guuauugagagagauguguaau

SEQ ID NO: 3407282 - RNA, 17 nt, Human
guuauugcaauaaagua

SEQ ID NO: 3407283 - RNA, 20 nt, Human
guuauuggccuuuucuauuc

SEQ ID NO: 3407284 - RNA, 21 nt, Human
guuauugggcaagugauugaa

SEQ ID NO: 3407285 - RNA, 17 nt, Human
guuauuguacagcuguu

SEQ ID NO: 3407286 - RNA, 12 nt, Human
guuauugugaau

SEQ ID NO: 3407287 - RNA, 15 nt, Human
guuauugugaaugau

SEQ ID NO: 3407288 - RNA, 10 nt, Human
guuauuuaaa

SEQ ID NO: 3407289 - RNA, 13 nt, Human
guuauuuaaauga

SEQ ID NO: 3407290 - RNA, 20 nt, Human
guuauuuauacaagauugaa

SEQ ID NO: 3407291 - RNA, 21 nt, Human
guuauuucccuacauuaaaca

SEQ ID NO: 3407292 - RNA, 23 nt, Human
guuauuucccuuuagcuguguua

SEQ ID NO: 3407293 - RNA, 14 nt, Human
guuauuucuuacag

SEQ ID NO: 3407294 - RNA, 16 nt, Human
guuauuugcacacugc

SEQ ID NO: 3407295 - RNA, 17 nt, Human
guuauuuguaauagaug

SEQ ID NO: 3407296 - RNA, 20 nt, Human
guuauuuguacaguucaguu

SEQ ID NO: 3407297 - RNA, 19 nt, Human
guuauuuuaguuucuguuc

SEQ ID NO: 3407298 - RNA, 14 nt, Human
guuauuuucuacag

SEQ ID NO: 3407299 - RNA, 20 nt, Human
guuauuuucuacagugguuu

SEQ ID NO: 3407300 - RNA, 15 nt, Human
guuauuuucuucuaa

SEQ ID NO: 3407301 - RNA, 23 nt, Human
guuauuuucuuugaaauuguuua

SEQ ID NO: 3407302 - RNA, 19 nt, Human
guuauuuuuauaagaaaac

SEQ ID NO: 3407303 - RNA, 23 nt, Human
guuauuuuuauuuauuuaaauuu

SEQ ID NO: 3407304 - RNA, 17 nt, Human
guuauuuuucaaggaag

SEQ ID NO: 3407305 - RNA, 22 nt, Human
guucaaagauauuuugcuuugu

SEQ ID NO: 3407306 - RNA, 12 nt, Human
guucaaagccag

SEQ ID NO: 3407307 - RNA, 14 nt, Human
guucaaagcugccu

SEQ ID NO: 3407308 - RNA, 15 nt, Human
guucaacccacagcu

SEQ ID NO: 3407309 - RNA, 12 nt, Human
guucaacuauuu

SEQ ID NO: 3407310 - RNA, 16 nt, Human
guucaagaaauaaguu

SEQ ID NO: 3407311 - RNA, 18 nt, Human
guucaagaccagccuggc

SEQ ID NO: 3407312 - RNA, 20 nt, Human
guucaagcgauucuccugcc

SEQ ID NO: 3407313 - RNA, 22 nt, Human
guucaaggaacuugaaaaauac

SEQ ID NO: 3407314 - RNA, 13 nt, Human
guucuguuuuguu

SEQ ID NO: 3407315 - RNA, 16 nt, Human
guucuuaagacgugau

SEQ ID NO: 3407316 - RNA, 17 nt, Human
guucuuaauugcacucu

SEQ ID NO: 3407317 - RNA, 13 nt, Human
guucuuacacaua

SEQ ID NO: 3407318 - RNA, 22 nt, Human
guucuuaccuguaugucuccag

SEQ ID NO: 3407319 - RNA, 17 nt, Human
guucuuaguucucacug

SEQ ID NO: 3407320 - RNA, 19 nt, Human
guucuuaguugcuguaugu

SEQ ID NO: 3407321 - RNA, 15 nt, Human
guucuuaugaggagg

SEQ ID NO: 3407322 - RNA, 20 nt, Human
guucuuaugaggaggggagg

SEQ ID NO: 3407323 - RNA, 14 nt, Human
guucuuaugcaaaa

SEQ ID NO: 3407324 - RNA, 14 nt, Human
guucuucaucuaag

SEQ ID NO: 3407325 - RNA, 19 nt, Human
guucuuccaguuacuuucc

SEQ ID NO: 3407326 - RNA, 17 nt, Human
guucuuccucagccagc

SEQ ID NO: 3407327 - RNA, 19 nt, Human
guucuuccucagccagccu

SEQ ID NO: 3407328 - RNA, 20 nt, Human
guucuuccucagccagccuc

SEQ ID NO: 3407329 - RNA, 21 nt, Human
guucuuccuccagcugcacca

SEQ ID NO: 3407330 - RNA, 21 nt, Human
guucuucuguucugcagacac

SEQ ID NO: 3407331 - RNA, 23 nt, Human
guucuugaggggaccaggagugg

SEQ ID NO: 3407332 - RNA, 12 nt, Human
guucuugcugcu

SEQ ID NO: 3407333 - RNA, 18 nt, Human
guucuugcugcuagaacu

SEQ ID NO: 3407334 - RNA, 22 nt, Human
guucuugcugcuagaacuuuuu

SEQ ID NO: 3407335 - RNA, 21 nt, Human
guucuuggcaauaaauuuuga

SEQ ID NO: 3407336 - RNA, 23 nt, Human
guucuuggcaauaaauuuugaaa

SEQ ID NO: 3407337 - RNA, 19 nt, Human
guucuuggggcccuacacc

SEQ ID NO: 3407338 - RNA, 16 nt, Human
guucuugguagagauu

SEQ ID NO: 3407339 - RNA, 15 nt, Human
guucuugguuuguaa

SEQ ID NO: 3407340 - RNA, 18 nt, Human
guucuugguuuguaaauu

SEQ ID NO: 3407341 - RNA, 21 nt, Human
guucuugguuuguaaauuaac

SEQ ID NO: 3407342 - RNA, 13 nt, Human
guucuuguaauuu

SEQ ID NO: 3407343 - RNA, 18 nt, Human
guucuuguaauuuuacac

SEQ ID NO: 3407344 - RNA, 17 nt, Human
guucuuguauuaagaau

SEQ ID NO: 3407345 - RNA, 18 nt, Human
guucuuguauuaagaaug

SEQ ID NO: 3407346 - RNA, 18 nt, Human
guucuuguuuuuaaguuu

SEQ ID NO: 3407347 - RNA, 23 nt, Human
guucuuuaaacugucgugucaua

SEQ ID NO: 3407348 - RNA, 15 nt, Human
guucuuuaggagauu

SEQ ID NO: 3407349 - RNA, 11 nt, Human
guucuuuauau

SEQ ID NO: 3407350 - RNA, 20 nt, Human
guucuuucauuugcuuugga

SEQ ID NO: 3407351 - RNA, 22 nt, Human
guucuuucauuugcuuuggaag

SEQ ID NO: 3407352 - RNA, 20 nt, Human
guucuuuccaaaguacacug

SEQ ID NO: 3407353 - RNA, 13 nt, Human
guucuuucucuuu

SEQ ID NO: 3407354 - RNA, 17 nt, Human
guucuuucuuccucugc

SEQ ID NO: 3407355 - RNA, 19 nt, Human
guucuuucuuccucugcug

SEQ ID NO: 3407356 - RNA, 22 nt, Human
guucuuugagggacugccucug

SEQ ID NO: 3407357 - RNA, 16 nt, Human
guucuuugggccagac

SEQ ID NO: 3407358 - RNA, 13 nt, Human
guucuuuguucau

SEQ ID NO: 3407359 - RNA, 19 nt, Human
guugaaaaaguuuguuuuu

SEQ ID NO: 3407360 - RNA, 21 nt, Human
guugaaaaaguuuguuuuugc

SEQ ID NO: 3407361 - RNA, 15 nt, Human
guugaaaagccaugu

SEQ ID NO: 3407362 - RNA, 23 nt, Human
guugaaaagccauguuuaagauu

SEQ ID NO: 3407363 - RNA, 15 nt, Human
guugaaagaguccua

SEQ ID NO: 3407364 - RNA, 15 nt, Human
guugaaagcaaaaau

SEQ ID NO: 3407365 - RNA, 17 nt, Human
guugaacaaaauaaauu

SEQ ID NO: 3407366 - RNA, 14 nt, Human
guugaacuguuaga

SEQ ID NO: 3407367 - RNA, 16 nt, Human
guugaagacagagcua

SEQ ID NO: 3407368 - RNA, 19 nt, Human
guugaagaccuaaccaggg

SEQ ID NO: 3407369 - RNA, 15 nt, Human
guugaagccaugucu

SEQ ID NO: 3407370 - RNA, 13 nt, Human
guugaagcucugg

SEQ ID NO: 3407371 - RNA, 12 nt, Human
guugaagucacc

SEQ ID NO: 3407372 - RNA, 20 nt, Human
guugaagucaugcuccccug

SEQ ID NO: 3407373 - RNA, 13 nt, Human
guugaauaaaagu

SEQ ID NO: 3407374 - RNA, 17 nt, Human
guugaauacuuuuuaca

SEQ ID NO: 3407375 - RNA, 19 nt, Human
guugaaugacaacagaagc

SEQ ID NO: 3407376 - RNA, 14 nt, Human
guugaauuuauugg

SEQ ID NO: 3407377 - RNA, 22 nt, Human
guugaauuuuguucucugggag

SEQ ID NO: 3407378 - RNA, 20 nt, Human
guugaauuuuuuuuaacauu

SEQ ID NO: 3407379 - RNA, 23 nt, Human
guugaauuuuuuuuaacauuccu

SEQ ID NO: 3407380 - RNA, 16 nt, Human
guugacaguucugaag

SEQ ID NO: 3407381 - RNA, 17 nt, Human
guugacauauuuaaugu

SEQ ID NO: 3407382 - RNA, 13 nt, Human
guugacaugggac

SEQ ID NO: 3407383 - RNA, 15 nt, Human
guugacauucugaau

SEQ ID NO: 3407384 - RNA, 18 nt, Human
guugacauucugaaugcu

SEQ ID NO: 3407385 - RNA, 12 nt, Human
guugacauuugu

SEQ ID NO: 3407386 - RNA, 21 nt, Human
guugacucuaguacugugaau

SEQ ID NO: 3407387 - RNA, 24 nt, Human
guugacuuauaguacaugauaaau

SEQ ID NO: 3407388 - RNA, 15 nt, Human
guugacuuuagggac

SEQ ID NO: 3407389 - RNA, 18 nt, Human
guugacuuuauaaauuuc

SEQ ID NO: 3407390 - RNA, 12 nt, Human
guugagaaauga

SEQ ID NO: 3407391 - RNA, 15 nt, Human
guugagacaagaaaa

SEQ ID NO: 3407392 - RNA, 12 nt, Human
guugagacagag

SEQ ID NO: 3407393 - RNA, 18 nt, Human
guugagauaguuuucauc

SEQ ID NO: 3407394 - RNA, 16 nt, Human
guugagcaucuguccc

SEQ ID NO: 3407395 - RNA, 21 nt, Human
guugagcaugacagccugcag

SEQ ID NO: 3407396 - RNA, 20 nt, Human
guugagccagcagacauugu

SEQ ID NO: 3407397 - RNA, 15 nt, Human
guugagccaggccug

SEQ ID NO: 3407398 - RNA, 10 nt, Human
guugagcccc

SEQ ID NO: 3407399 - RNA, 20 nt, Human
guugagccccaaguccugaa

SEQ ID NO: 3407400 - RNA, 15 nt, Human
guugagccccuggag

SEQ ID NO: 3407401 - RNA, 16 nt, Human
guugagcuaugacuua

SEQ ID NO: 3407402 - RNA, 14 nt, Human
guugaggccacugu

SEQ ID NO: 3407403 - RNA, 22 nt, Human
guugagggaacagacaggagaa

SEQ ID NO: 3407404 - RNA, 23 nt, Human
guugagguggaagcccuccuucc

SEQ ID NO: 3407405 - RNA, 16 nt, Human
guugagguggucugaa

SEQ ID NO: 3407406 - RNA, 12 nt, Human
guugauaaaaac

SEQ ID NO: 3407407 - RNA, 13 nt, Human
guugauaacuuug

SEQ ID NO: 3407408 - RNA, 14 nt, Human
guugauaacuuugc

SEQ ID NO: 3407409 - RNA, 15 nt, Human
guugauaacuuugcu

SEQ ID NO: 3407410 - RNA, 17 nt, Human
guugauaacuuugcuug

SEQ ID NO: 3407411 - RNA, 13 nt, Human
guugauacuguug

SEQ ID NO: 3407412 - RNA, 14 nt, Human
guugauacuguugc

SEQ ID NO: 3407413 - RNA, 12 nt, Human
guugauaguuua

SEQ ID NO: 3407414 - RNA, 14 nt, Human
guugauauuucuau

SEQ ID NO: 3407415 - RNA, 22 nt, Human
guugaucauguacuuuuuagua

SEQ ID NO: 3407416 - RNA, 16 nt, Human
guugaucuggaaccca

SEQ ID NO: 3407417 - RNA, 19 nt, Human
guugaucuggaacccagac

SEQ ID NO: 3407418 - RNA, 16 nt, Human
guugaugaggccucuu

SEQ ID NO: 3407419 - RNA, 12 nt, Human
guugaugcaauc

SEQ ID NO: 3407420 - RNA, 21 nt, Human
guugaugggaugauugaagaa

SEQ ID NO: 3407421 - RNA, 13 nt, Human
guugauguaucug

SEQ ID NO: 3407422 - RNA, 14 nt, Human
guugauguaucuga

SEQ ID NO: 3407423 - RNA, 16 nt, Human
guugauguuggcuggg

SEQ ID NO: 3407424 - RNA, 14 nt, Human
guugauugcuaaau

SEQ ID NO: 3407425 - RNA, 18 nt, Human
guugauugcuaaauguaa

SEQ ID NO: 3407426 - RNA, 22 nt, Human
guugauugcuaaauguaacagu

SEQ ID NO: 3407427 - RNA, 22 nt, Human
guugauuuuuuuuuuuuuuucc

SEQ ID NO: 3407428 - RNA, 14 nt, Human
guugcaacuuugua

SEQ ID NO: 3407429 - RNA, 16 nt, Human
guugcaacuuuguaua

SEQ ID NO: 3407430 - RNA, 18 nt, Human
guugcaagaugugaauua

SEQ ID NO: 3407431 - RNA, 16 nt, Human
guugcaaggccgcugu

SEQ ID NO: 3407432 - RNA, 14 nt, Human
guugcacacuuugg

SEQ ID NO: 3407433 - RNA, 16 nt, Human
guugcacagcaucuca

SEQ ID NO: 3407434 - RNA, 16 nt, Human
guugcacagcuaugaa

SEQ ID NO: 3407435 - RNA, 19 nt, Human
guugcacguguguuuuucu

SEQ ID NO: 3407436 - RNA, 22 nt, Human
guugcacguguguuuuucuauu

SEQ ID NO: 3407437 - RNA, 12 nt, Human
guugcacugaag

SEQ ID NO: 3407438 - RNA, 15 nt, Human
guugcacugaaguuu

SEQ ID NO: 3407439 - RNA, 16 nt, Human
guugcacugaaguuug

SEQ ID NO: 3407440 - RNA, 13 nt, Human
guugcagcuggac

SEQ ID NO: 3407441 - RNA, 23 nt, Human
guugcagcuguuuuguugacauu

SEQ ID NO: 3407442 - RNA, 15 nt, Human
guugcaguggagagg

SEQ ID NO: 3407443 - RNA, 20 nt, Human
guugcauuaaaaaugcauau

SEQ ID NO: 3407444 - RNA, 18 nt, Human
guugcauuccuuugucuu

SEQ ID NO: 3407445 - RNA, 17 nt, Human
guugccaaacagccaca

SEQ ID NO: 3407446 - RNA, 18 nt, Human
guugccaaacagccacac

SEQ ID NO: 3407447 - RNA, 20 nt, Human
guugccaaauauguccuggg

SEQ ID NO: 3407448 - RNA, 13 nt, Human
guugccaagacaa

SEQ ID NO: 3407449 - RNA, 15 nt, Human
guugccaagacaaau

SEQ ID NO: 3407450 - RNA, 15 nt, Human
guugccaagcuccaa

SEQ ID NO: 3407451 - RNA, 19 nt, Human
guugccaagcuccaagccc

SEQ ID NO: 3407452 - RNA, 11 nt, Human
guugccacagg

SEQ ID NO: 3407453 - RNA, 13 nt, Human
guugccacaggac

SEQ ID NO: 3407454 - RNA, 16 nt, Human
guugccacaggacaca

SEQ ID NO: 3407455 - RNA, 12 nt, Human
guugccacaggc

SEQ ID NO: 3407456 - RNA, 15 nt, Human
guugccacaggccuc

SEQ ID NO: 3407457 - RNA, 19 nt, Human
guugccacaggccucccug

SEQ ID NO: 3407458 - RNA, 21 nt, Human
guugccaccaccucuguggca

SEQ ID NO: 3407459 - RNA, 17 nt, Human
guugccagucaccccgg

SEQ ID NO: 3407460 - RNA, 21 nt, Human
uaaaguauguaaaguauguaa

SEQ ID NO: 3407461 - RNA, 19 nt, Human
uaaaguauguauuauuuac

SEQ ID NO: 3407462 - RNA, 21 nt, Human
uaaaguauguauuauuuacau

SEQ ID NO: 3407463 - RNA, 15 nt, Human
uaaaguauuccaccu

SEQ ID NO: 3407464 - RNA, 20 nt, Human
uaaaguauuccaccuuaaau

SEQ ID NO: 3407465 - RNA, 21 nt, Human
uaaaguauuccaccuuaaauu

SEQ ID NO: 3407466 - RNA, 23 nt, Human
uaaaguauuccaccuuaaauuaa

SEQ ID NO: 3407467 - RNA, 13 nt, Human
uaaaguauucuuc

SEQ ID NO: 3407468 - RNA, 23 nt, Human
uaaaguauucuuuuucuuuuuua

SEQ ID NO: 3407469 - RNA, 16 nt, Human
uaaaguauuuaauuag

SEQ ID NO: 3407470 - RNA, 17 nt, Human
uaaaguauuuaauuagu

SEQ ID NO: 3407471 - RNA, 19 nt, Human
uaaaguauuuaauuagugc

SEQ ID NO: 3407472 - RNA, 22 nt, Human
uaaaguauuuaauuagugcuaa

SEQ ID NO: 3407473 - RNA, 17 nt, Human
uaaagucagguccaauu

SEQ ID NO: 3407474 - RNA, 18 nt, Human
uaaagucagguccaauuu

SEQ ID NO: 3407475 - RNA, 21 nt, Human
uaaagucaguugcucaaaaag

SEQ ID NO: 3407476 - RNA, 19 nt, Human
uaaaguccuuuucuugcuu

SEQ ID NO: 3407477 - RNA, 21 nt, Human
uaaaguccuuuucuugcuuac

SEQ ID NO: 3407478 - RNA, 19 nt, Human
uaaagucgagcuuuucuaa

SEQ ID NO: 3407479 - RNA, 22 nt, Human
uaaagugaauuguugacaaaug

SEQ ID NO: 3407480 - RNA, 20 nt, Human
uaaagugacccugcucucac

SEQ ID NO: 3407481 - RNA, 21 nt, Human
uaaagugaggccacugaagag

SEQ ID NO: 3407482 - RNA, 18 nt, Human
uaaagugauuaaacgugc

SEQ ID NO: 3407483 - RNA, 18 nt, Human
uaaagugccaguauuuua

SEQ ID NO: 3407484 - RNA, 22 nt, Human
uaaagugccaguauuuuaaaau

SEQ ID NO: 3407485 - RNA, 18 nt, Human
uaaagugcuaagguucua

SEQ ID NO: 3407486 - RNA, 20 nt, Human
uaaagugcuaagguucuaag

SEQ ID NO: 3407487 - RNA, 16 nt, Human
uaaaguguaaauccuu

SEQ ID NO: 3407488 - RNA, 19 nt, Human
uaaaguguaacaauugugu

SEQ ID NO: 3407489 - RNA, 18 nt, Human
uaaaguguaaguucacaa

SEQ ID NO: 3407490 - RNA, 15 nt, Human
uaaaguguauuuuuu

SEQ ID NO: 3407491 - RNA, 21 nt, Human
uaaaguguauuuuuuuacuaa

SEQ ID NO: 3407492 - RNA, 23 nt, Human
uaaaguguauuuuuuuacuaaua

SEQ ID NO: 3407493 - RNA, 21 nt, Human
uaaaguguccauugacaugua

SEQ ID NO: 3407494 - RNA, 20 nt, Human
uaaaguguggucccaacagg

SEQ ID NO: 3407495 - RNA, 18 nt, Human
uaaaguguguuguugcuu

SEQ ID NO: 3407496 - RNA, 17 nt, Human
uaaaguguguuucuaug

SEQ ID NO: 3407497 - RNA, 13 nt, Human
uaaaguguuacuu

SEQ ID NO: 3407498 - RNA, 17 nt, Human
uaaaguguuacuuuuug

SEQ ID NO: 3407499 - RNA, 18 nt, Human
uaaaguguuucagcuaag

SEQ ID NO: 3407500 - RNA, 14 nt, Human
uaaaguguuuucag

SEQ ID NO: 3407501 - RNA, 14 nt, Human
uaaaguuaaguuga

SEQ ID NO: 3407502 - RNA, 22 nt, Human
uaaaguuagaaucuauuuucua

SEQ ID NO: 3407503 - RNA, 20 nt, Human
uaaaguuaguaucuuuugau

SEQ ID NO: 3407504 - RNA, 13 nt, Human
uaaaguuauauuu

SEQ ID NO: 3407505 - RNA, 14 nt, Human
uaaaguuauucuug

SEQ ID NO: 3407506 - RNA, 15 nt, Human
uaaaguucaacaugu

SEQ ID NO: 3407507 - RNA, 17 nt, Human
uaaaguucauugcaauu

SEQ ID NO: 3407508 - RNA, 18 nt, Human
uaaaguucuaagauucug

SEQ ID NO: 3407509 - RNA, 13 nt, Human
uaaaguucugugu

SEQ ID NO: 3407510 - RNA, 13 nt, Human
uaaaguugaauuu

SEQ ID NO: 3407511 - RNA, 15 nt, Human
uaaaguugaauuuau

SEQ ID NO: 3407512 - RNA, 17 nt, Human
uaaaguugaauuuauug

SEQ ID NO: 3407513 - RNA, 19 nt, Human
uaaaguugaauuuauuggc

SEQ ID NO: 3407514 - RNA, 16 nt, Human
uaaaguugauaaagau

SEQ ID NO: 3407515 - RNA, 14 nt, Human
uaaaguuggaauuu

SEQ ID NO: 3407516 - RNA, 12 nt, Human
uaaaguuguacu

SEQ ID NO: 3407517 - RNA, 16 nt, Human
uaaaguuguacuuuaa

SEQ ID NO: 3407518 - RNA, 16 nt, Human
uaaaguuuacaguaaa

SEQ ID NO: 3407519 - RNA, 13 nt, Human
uaaaguuucaaaa

SEQ ID NO: 3407520 - RNA, 13 nt, Human
uaaaguuucuguu

SEQ ID NO: 3407521 - RNA, 15 nt, Human
uaaaguuugaucuuc

SEQ ID NO: 3407522 - RNA, 17 nt, Human
uaaaguuugaucuuccu

SEQ ID NO: 3407523 - RNA, 14 nt, Human
uaaaguuuguugaa

SEQ ID NO: 3407524 - RNA, 17 nt, Human
uaaaguuuuauauauua

SEQ ID NO: 3407525 - RNA, 23 nt, Human
uaaaguuuuauauauuauaugga

SEQ ID NO: 3407526 - RNA, 23 nt, Human
uaaauaaaaaauaauaauacaag

SEQ ID NO: 3407527 - RNA, 19 nt, Human
uaaauaaaaacuaauuaag

SEQ ID NO: 3407528 - RNA, 21 nt, Human
uaaauaaaagaaaugcacaau

SEQ ID NO: 3407529 - RNA, 17 nt, Human
uaaauaaaauauaauug

SEQ ID NO: 3407530 - RNA, 15 nt, Human
uaaauaaaaucaauu

SEQ ID NO: 3407531 - RNA, 17 nt, Human
uaaauaaaaugcuaggu

SEQ ID NO: 3407532 - RNA, 23 nt, Human
uaaauaaacacauagauucaccu

SEQ ID NO: 3407533 - RNA, 11 nt, Human
uaaauaaacuu

SEQ ID NO: 3407534 - RNA, 21 nt, Human
uaaauaaaguuuguugaaaca

SEQ ID NO: 3407535 - RNA, 12 nt, Human
uaaauaaauaca

SEQ ID NO: 3407536 - RNA, 12 nt, Human
uaaauaaauaua

SEQ ID NO: 3407537 - RNA, 13 nt, Human
uaaauaaauauau

SEQ ID NO: 3407538 - RNA, 14 nt, Human
uaaauaaauauaua

SEQ ID NO: 3407539 - RNA, 22 nt, Human
uaaauaaaugaaguauuucuca

SEQ ID NO: 3407540 - RNA, 17 nt, Human
uaaauaaauuguauauu

SEQ ID NO: 3407541 - RNA, 20 nt, Human
uaaauaaauuguauauucac

SEQ ID NO: 3407542 - RNA, 22 nt, Human
uaaauaaauuguauauucacuu

SEQ ID NO: 3407543 - RNA, 13 nt, Human
uaaauaaauuguu

SEQ ID NO: 3407544 - RNA, 14 nt, Human
uaaauaacuggaaa

SEQ ID NO: 3407545 - RNA, 22 nt, Human
uaaauaacuggaggaauuuucu

SEQ ID NO: 3407546 - RNA, 15 nt, Human
uaaauaagauucuaa

SEQ ID NO: 3407547 - RNA, 17 nt, Human
uaaauaaggaaaagcuu

SEQ ID NO: 3407548 - RNA, 18 nt, Human
uaaauaaugcuucagaua

SEQ ID NO: 3407549 - RNA, 17 nt, Human
uaaauaauucuuuuuua

SEQ ID NO: 3407550 - RNA, 23 nt, Human
uaaauaauucuuuuuuauuaauc

SEQ ID NO: 3407551 - RNA, 16 nt, Human
uaaauaauuuccuaca

SEQ ID NO: 3407552 - RNA, 15 nt, Human
uaaauacaauuuugu

SEQ ID NO: 3407553 - RNA, 22 nt, Human
uaaauacaauuuuguuucugua

SEQ ID NO: 3407554 - RNA, 16 nt, Human
uaaauacagacacuaa

SEQ ID NO: 3407555 - RNA, 22 nt, Human
uaaauacagacacuaaguuaua

SEQ ID NO: 3407556 - RNA, 17 nt, Human
uaaauacagucuuccau

SEQ ID NO: 3407557 - RNA, 16 nt, Human
uaaauacauauggaug

SEQ ID NO: 3407558 - RNA, 15 nt, Human
uaaauacaugcauau

SEQ ID NO: 3407559 - RNA, 12 nt, Human
uaaauaccagga

SEQ ID NO: 3407560 - RNA, 22 nt, Human
uaaauaccucaaccuaugguau

SEQ ID NO: 3407561 - RNA, 13 nt, Human
uaaauaccucuua

SEQ ID NO: 3407562 - RNA, 20 nt, Human
uaaauacugagaaaaccugu

SEQ ID NO: 3407563 - RNA, 16 nt, Human
uaaauacuguguggaa

SEQ ID NO: 3407564 - RNA, 17 nt, Human
uaaauacuguguggaac

SEQ ID NO: 3407565 - RNA, 13 nt, Human
uaaauagaaugua

SEQ ID NO: 3407566 - RNA, 18 nt, Human
uaaauagaauguaaaugu

SEQ ID NO: 3407567 - RNA, 15 nt, Human
uaaauagacacgcac

SEQ ID NO: 3407568 - RNA, 13 nt, Human
uaaauagcaugua

SEQ ID NO: 3407569 - RNA, 23 nt, Human
uaaauagcuagacuggugacuga

SEQ ID NO: 3407570 - RNA, 16 nt, Human
uaaauagcuauaucca

SEQ ID NO: 3407571 - RNA, 12 nt, Human
uaaauagcuuuu

SEQ ID NO: 3407572 - RNA, 21 nt, Human
uaaauaggagaggaugagagc

SEQ ID NO: 3407573 - RNA, 22 nt, Human
uaaauaggcggggcuugccuuc

SEQ ID NO: 3407574 - RNA, 20 nt, Human
uaaauaguaaaaauaaaauu

SEQ ID NO: 3407575 - RNA, 12 nt, Human
uaaauaguauuu

SEQ ID NO: 3407576 - RNA, 21 nt, Human
uaaauagucuagacuaaaaga

SEQ ID NO: 3407577 - RNA, 16 nt, Human
uaaauaguguuauuga

SEQ ID NO: 3407578 - RNA, 23 nt, Human
uaaauauaaagacguuuuauaag

SEQ ID NO: 3407579 - RNA, 21 nt, Human
uaaauauaccacucuuuaccu

SEQ ID NO: 3407580 - RNA, 16 nt, Human
uaaauauagauuagaa

SEQ ID NO: 3407581 - RNA, 21 nt, Human
uaaauauagcaguagucuuuu

SEQ ID NO: 3407582 - RNA, 15 nt, Human
uaaauauaguuccua

SEQ ID NO: 3407583 - RNA, 12 nt, Human
uaaauauauaaa

SEQ ID NO: 3407584 - RNA, 14 nt, Human
uaaauauauaaaaa

SEQ ID NO: 3407585 - RNA, 13 nt, Human
uaaauauauaaau

SEQ ID NO: 3407586 - RNA, 16 nt, Human
uaaauauauaaauaua

SEQ ID NO: 3407587 - RNA, 17 nt, Human
uaaauauauaaauauau

SEQ ID NO: 3407588 - RNA, 11 nt, Human
uaaauauauau

SEQ ID NO: 3407589 - RNA, 15 nt, Human
uaaauauauauaaac

SEQ ID NO: 3407590 - RNA, 19 nt, Human
uaaauauauauaaaccuaa

SEQ ID NO: 3407591 - RNA, 15 nt, Human
uaaauauauguaugu

SEQ ID NO: 3407592 - RNA, 19 nt, Human
uaaauauauguauguaaaa

SEQ ID NO: 3407593 - RNA, 13 nt, Human
uaaauauauuauu

SEQ ID NO: 3407594 - RNA, 15 nt, Human
uaaauauauuauuac

SEQ ID NO: 3407595 - RNA, 17 nt, Human
uaaauauauuauuacuu

SEQ ID NO: 3407596 - RNA, 22 nt, Human
uaaauauauuauuacuuguaaa

SEQ ID NO: 3407597 - RNA, 16 nt, Human
uaaauauauuuuaaga

SEQ ID NO: 3407598 - RNA, 16 nt, Human
uaaauaucaaucauuu

SEQ ID NO: 3407599 - RNA, 21 nt, Human
uaaauaucugaacauuuacua

SEQ ID NO: 3407600 - RNA, 17 nt, Human
uaaauaucuucugauuu

SEQ ID NO: 3407601 - RNA, 15 nt, Human
uaaauaucuuuuaug

SEQ ID NO: 3407602 - RNA, 23 nt, Human
uaaauaucuuuuauguuugaaua

SEQ ID NO: 3407603 - RNA, 18 nt, Human
uaaauaugaacccuuugu

SEQ ID NO: 3407604 - RNA, 13 nt, Human
uaaauuacaauuu

SEQ ID NO: 3407605 - RNA, 23 nt, Human
uaaauuacaauuuuaucuguuuc

SEQ ID NO: 3407606 - RNA, 17 nt, Human
uaaauuacauuuguaau

SEQ ID NO: 3407607 - RNA, 16 nt, Human
uaaauuacuauagcaa

SEQ ID NO: 3407608 - RNA, 17 nt, Human
uaaauuacuauagcaaa

SEQ ID NO: 3407609 - RNA, 13 nt, Human
uaaauuauaagga

SEQ ID NO: 3407610 - RNA, 20 nt, Human
uaaauuauaaggacugcaug

SEQ ID NO: 3407611 - RNA, 16 nt, Human
uaaauuauacuggaga

SEQ ID NO: 3407612 - RNA, 17 nt, Human
uaaauuauaguguagaa

SEQ ID NO: 3407613 - RNA, 20 nt, Human
uaaauuaugggaaucaagau

SEQ ID NO: 3407614 - RNA, 16 nt, Human
uaaauuaugguauuaa

SEQ ID NO: 3407615 - RNA, 13 nt, Human
uaaauuauguaaa

SEQ ID NO: 3407616 - RNA, 17 nt, Human
uaaauuauguaaugcaa

SEQ ID NO: 3407617 - RNA, 18 nt, Human
uaaauuauguaaugcaaa

SEQ ID NO: 3407618 - RNA, 21 nt, Human
uaaauuaugugaccauaaugu

SEQ ID NO: 3407619 - RNA, 22 nt, Human
uaaauuaugugaccauaaugua

SEQ ID NO: 3407620 - RNA, 13 nt, Human
uaaauuauguuua

SEQ ID NO: 3407621 - RNA, 16 nt, Human
uaaauuauguuuuacu

SEQ ID NO: 3407622 - RNA, 20 nt, Human
uaaauuauuaugacaccuuu

SEQ ID NO: 3407623 - RNA, 21 nt, Human
uaaauuauucaguuaagaaaa

SEQ ID NO: 3407624 - RNA, 13 nt, Human
uaaauuauuuaug

SEQ ID NO: 3407625 - RNA, 22 nt, Human
uaaauuauuugauuauuuaaga

SEQ ID NO: 3407626 - RNA, 15 nt, Human
uaaauucaaaccuaa

SEQ ID NO: 3407627 - RNA, 18 nt, Human
uaaauucaacuuuguaaa

SEQ ID NO: 3407628 - RNA, 19 nt, Human
uaaauucaacuuuguaaaa

SEQ ID NO: 3407629 - RNA, 16 nt, Human
uaaauucacaaacuuu

SEQ ID NO: 3407630 - RNA, 22 nt, Human
uaaauucaccuagucuaaggau

SEQ ID NO: 3407631 - RNA, 18 nt, Human
uaaauucagauauauuuu

SEQ ID NO: 3407632 - RNA, 16 nt, Human
uaaauuccacuggacu

SEQ ID NO: 3407633 - RNA, 18 nt, Human
uaaauucccaacuucucu

SEQ ID NO: 3407634 - RNA, 19 nt, Human
uaaauucccguuuugucac

SEQ ID NO: 3407635 - RNA, 20 nt, Human
uaaauuccucaacaguguuu

SEQ ID NO: 3407636 - RNA, 22 nt, Human
uaaauuccucaacaguguuuuc

SEQ ID NO: 3407637 - RNA, 12 nt, Human
uaaauuccucuu

SEQ ID NO: 3407638 - RNA, 19 nt, Human
uaaauuccucuuugcuuug

SEQ ID NO: 3407639 - RNA, 22 nt, Human
uaaauucucucucuugcaggaa

SEQ ID NO: 3407640 - RNA, 15 nt, Human
uaaauucugagacau

SEQ ID NO: 3407641 - RNA, 17 nt, Human
uaaauucugagccugau

SEQ ID NO: 3407642 - RNA, 13 nt, Human
uaaauucugauuu

SEQ ID NO: 3407643 - RNA, 22 nt, Human
uaaauucuugcaaaguaucccu

SEQ ID NO: 3407644 - RNA, 20 nt, Human
uaaauucuuuuuuaaauuuu

SEQ ID NO: 3407645 - RNA, 20 nt, Human
uaaauugaaauauaaugcaa

SEQ ID NO: 3407646 - RNA, 13 nt, Human
uaaauugaauaau

SEQ ID NO: 3407647 - RNA, 12 nt, Human
uaaauugauguu

SEQ ID NO: 3407648 - RNA, 20 nt, Human
uaaauugcaugcugcuuuaa

SEQ ID NO: 3407649 - RNA, 16 nt, Human
uaaauugcuaauguug

SEQ ID NO: 3407650 - RNA, 13 nt, Human
uaaauuggaaagc

SEQ ID NO: 3407651 - RNA, 18 nt, Human
uaaauuguauauucacuu

SEQ ID NO: 3407652 - RNA, 23 nt, Human
uaaauuguccguguucauacauu

SEQ ID NO: 3407653 - RNA, 18 nt, Human
uaaauugucuuuaaaaac

SEQ ID NO: 3407654 - RNA, 16 nt, Human
uaaauuuaaagauauu

SEQ ID NO: 3407655 - RNA, 14 nt, Human
uaaauuuaauacca

SEQ ID NO: 3407656 - RNA, 17 nt, Human
uaaauuuaauaccagau

SEQ ID NO: 3407657 - RNA, 14 nt, Human
uaaauuuaaugcug

SEQ ID NO: 3407658 - RNA, 22 nt, Human
uaaauuuaguauuuuguuucag

SEQ ID NO: 3407659 - RNA, 12 nt, Human
uaaauuuauuaa

SEQ ID NO: 3407660 - RNA, 16 nt, Human
uaaauuuauuaaauaa

SEQ ID NO: 3407661 - RNA, 14 nt, Human
uaaauuuauuuacu

SEQ ID NO: 3407662 - RNA, 21 nt, Human
uaaauuucacuacuagauuga

SEQ ID NO: 3407663 - RNA, 18 nt, Human
uaaauuuccccaacagug

SEQ ID NO: 3407664 - RNA, 20 nt, Human
uaaauuuccccaacagugug

SEQ ID NO: 3407665 - RNA, 20 nt, Human
uaaauuucuauuuuuaucug

SEQ ID NO: 3407666 - RNA, 13 nt, Human
uaaauuugauacu

SEQ ID NO: 3407667 - RNA, 14 nt, Human
uaaauuugauacuu

SEQ ID NO: 3407668 - RNA, 16 nt, Human
uaaauuugauacuuau

SEQ ID NO: 3407669 - RNA, 21 nt, Human
uaaauuugauacuuauauuuu

SEQ ID NO: 3407670 - RNA, 20 nt, Human
uaaauuugauuuacauauau

SEQ ID NO: 3407671 - RNA, 13 nt, Human
uaaauuuguaagu

SEQ ID NO: 3407672 - RNA, 18 nt, Human
uaaauuuguaaguuucag

SEQ ID NO: 3407673 - RNA, 19 nt, Human
uaaauuuguaaguuucagg

SEQ ID NO: 3407674 - RNA, 23 nt, Human
uaaauuuguaaguuucaggugac

SEQ ID NO: 3407675 - RNA, 13 nt, Human
uaaauuuguacua

SEQ ID NO: 3407676 - RNA, 23 nt, Human
uaaauuuguguaauauuacuuua

SEQ ID NO: 3407677 - RNA, 17 nt, Human
uaaauuuuaacuaaauu

SEQ ID NO: 3407678 - RNA, 16 nt, Human
uaaauuuuacccuuua

SEQ ID NO: 3407679 - RNA, 18 nt, Human
uaaauuuucuucaguugg

SEQ ID NO: 3407680 - RNA, 14 nt, Human
uaaauuuugaaaag

SEQ ID NO: 3407681 - RNA, 18 nt, Human
uaaauuuugaguucuaca

SEQ ID NO: 3407682 - RNA, 17 nt, Human
uaaauuuuguaugaaaa

SEQ ID NO: 3407683 - RNA, 14 nt, Human
uaaauuuuuccuua

SEQ ID NO: 3407684 - RNA, 18 nt, Human
uaaauuuuuuguugacau

SEQ ID NO: 3407685 - RNA, 15 nt, Human
uaaauuuuuuuguau

SEQ ID NO: 3407686 - RNA, 18 nt, Human
uaaauuuuuuuguaugaa

SEQ ID NO: 3407687 - RNA, 20 nt, Human
uaacaaaaaaauauauuuaa

SEQ ID NO: 3407688 - RNA, 18 nt, Human
uaacaaaaacuacacaua

SEQ ID NO: 3407689 - RNA, 13 nt, Human
uaacaaaaauaaa

SEQ ID NO: 3407690 - RNA, 20 nt, Human
uaacaaaaauaaaaacucuu

SEQ ID NO: 3407691 - RNA, 20 nt, Human
uaacaaaagaugaaagcagg

SEQ ID NO: 3407692 - RNA, 12 nt, Human
uaacaaaaugga

SEQ ID NO: 3407693 - RNA, 19 nt, Human
uaacaaaauguaugucugg

SEQ ID NO: 3407694 - RNA, 20 nt, Human
uaacaaacccucguuucuga

SEQ ID NO: 3407695 - RNA, 23 nt, Human
uaacaaacccucguuucugauua

SEQ ID NO: 3407696 - RNA, 20 nt, Human
uaacaaacuacauguaaucc

SEQ ID NO: 3407697 - RNA, 22 nt, Human
uaacaaagaaccuaacauuuau

SEQ ID NO: 3407698 - RNA, 12 nt, Human
uaacaaagauau

SEQ ID NO: 3407699 - RNA, 14 nt, Human
uaacaaagauaucu

SEQ ID NO: 3407700 - RNA, 22 nt, Human
uaacaaagauaucuuuucuuua

SEQ ID NO: 3407701 - RNA, 15 nt, Human
uaacaaaggauacuu

SEQ ID NO: 3407702 - RNA, 16 nt, Human
uaacaaaggauacuua

SEQ ID NO: 3407703 - RNA, 19 nt, Human
uaacaaaggauacuuauuu

SEQ ID NO: 3407704 - RNA, 20 nt, Human
uaacaaaggauacuuauuua

SEQ ID NO: 3407705 - RNA, 21 nt, Human
uaacaaaggauacuuauuuaa

SEQ ID NO: 3407706 - RNA, 21 nt, Human
uaacaaauaaaaaagcucuuu

SEQ ID NO: 3407707 - RNA, 17 nt, Human
uaacaaauaacaacuuu

SEQ ID NO: 3407708 - RNA, 17 nt, Human
uaacaaauaugcuaauu

SEQ ID NO: 3407709 - RNA, 18 nt, Human
uaacaaauaugcuaauuu

SEQ ID NO: 3407710 - RNA, 12 nt, Human
uaacaaaugaac

SEQ ID NO: 3407711 - RNA, 14 nt, Human
uaacaacauguuuc

SEQ ID NO: 3407712 - RNA, 19 nt, Human
uaacaacauguuuccagca

SEQ ID NO: 3407713 - RNA, 20 nt, Human
uaacaacauguuuccagcau

SEQ ID NO: 3407714 - RNA, 15 nt, Human
uaacaaccaaagacu

SEQ ID NO: 3407715 - RNA, 14 nt, Human
uaacaaccuggaga

SEQ ID NO: 3407716 - RNA, 13 nt, Human
uaacaaccuggcc

SEQ ID NO: 3407717 - RNA, 20 nt, Human
uaacaacuuuuuuuucuuuu

SEQ ID NO: 3407718 - RNA, 15 nt, Human
uaacaagaaaacaua

SEQ ID NO: 3407719 - RNA, 15 nt, Human
uaacaagaaaaucaa

SEQ ID NO: 3407720 - RNA, 14 nt, Human
uaacaagaaaauga

SEQ ID NO: 3407721 - RNA, 14 nt, Human
uaacaagaaaggag

SEQ ID NO: 3407722 - RNA, 13 nt, Human
uaacaagaagcaa

SEQ ID NO: 3407723 - RNA, 17 nt, Human
uaacaagcucccaggcc

SEQ ID NO: 3407724 - RNA, 16 nt, Human
uaacaagguccaagau

SEQ ID NO: 3407725 - RNA, 21 nt, Human
uaacaaguaccaaaguuuuau

SEQ ID NO: 3407726 - RNA, 18 nt, Human
uaacaauaacuacugugu

SEQ ID NO: 3407727 - RNA, 19 nt, Human
uaacaauaacuacuguguu

SEQ ID NO: 3407728 - RNA, 20 nt, Human
uaacaauacaaauggauuuu

SEQ ID NO: 3407729 - RNA, 14 nt, Human
uaacaaucagcucc

SEQ ID NO: 3407730 - RNA, 17 nt, Human
uaacaaugaagauaaaa

SEQ ID NO: 3407731 - RNA, 21 nt, Human
uaacaaugacacuagaaaacu

SEQ ID NO: 3407732 - RNA, 13 nt, Human
uaacaaugauaua

SEQ ID NO: 3407733 - RNA, 21 nt, Human
uaacaaugcagcaaggcccug

SEQ ID NO: 3407734 - RNA, 17 nt, Human
uaacaaugccuauugua

SEQ ID NO: 3407735 - RNA, 13 nt, Human
uaacaaugcugua

SEQ ID NO: 3407736 - RNA, 16 nt, Human
uaacaauguauuuucu

SEQ ID NO: 3407737 - RNA, 16 nt, Human
uaacaauguuaaggaa

SEQ ID NO: 3407738 - RNA, 22 nt, Human
uaacaauguuaaggaaacucuu

SEQ ID NO: 3407739 - RNA, 20 nt, Human
uaacaauuaauugucuugca

SEQ ID NO: 3407740 - RNA, 16 nt, Human
uaacaauuaggcagac

SEQ ID NO: 3407741 - RNA, 20 nt, Human
uaacaauuaggcagacucuu

SEQ ID NO: 3407742 - RNA, 15 nt, Human
uaacaauugugaagu

SEQ ID NO: 3407743 - RNA, 18 nt, Human
uaacaauuguguagccuu

SEQ ID NO: 3407744 - RNA, 20 nt, Human
uaacaauuguguagccuuuu

SEQ ID NO: 3407745 - RNA, 13 nt, Human
uaacaauuuccuu

SEQ ID NO: 3407746 - RNA, 15 nt, Human
uaacaauuuccuuua

SEQ ID NO: 3407747 - RNA, 18 nt, Human
uaacaauuuuaaugcuau

SEQ ID NO: 3407748 - RNA, 18 nt, Human
uaacacaaaugcucaaag

SEQ ID NO: 3407749 - RNA, 17 nt, Human
uaaccucugcuuuuauc

SEQ ID NO: 3407750 - RNA, 18 nt, Human
uaaccucuguucaggaag

SEQ ID NO: 3407751 - RNA, 20 nt, Human
uaaccugaccgugggcgggg

SEQ ID NO: 3407752 - RNA, 22 nt, Human
uaaccugacugguuaacagcag

SEQ ID NO: 3407753 - RNA, 18 nt, Human
uaaccugucucaccugga

SEQ ID NO: 3407754 - RNA, 23 nt, Human
uaaccugugucugcgaaguccua

SEQ ID NO: 3407755 - RNA, 16 nt, Human
uaaccuuaauuuauua

SEQ ID NO: 3407756 - RNA, 21 nt, Human
uaaccuuaccagauuuuuaca

SEQ ID NO: 3407757 - RNA, 17 nt, Human
uaaccuuauccugcauu

SEQ ID NO: 3407758 - RNA, 15 nt, Human
uaaccuugaaugcug

SEQ ID NO: 3407759 - RNA, 17 nt, Human
uaaccuugaaugcugcc

SEQ ID NO: 3407760 - RNA, 21 nt, Human
uaaccuugccugguacaguau

SEQ ID NO: 3407761 - RNA, 23 nt, Human
uaacgacuucagggcagggcucu

SEQ ID NO: 3407762 - RNA, 17 nt, Human
uaacgcccuauuuuugc

SEQ ID NO: 3407763 - RNA, 19 nt, Human
uaacgccugagcccaggga

SEQ ID NO: 3407764 - RNA, 16 nt, Human
uaacgcgucuuccuga

SEQ ID NO: 3407765 - RNA, 17 nt, Human
uaacgcgucuuccugag

SEQ ID NO: 3407766 - RNA, 14 nt, Human
uaacggaccaaagc

SEQ ID NO: 3407767 - RNA, 13 nt, Human
uaacggaucagaa

SEQ ID NO: 3407768 - RNA, 12 nt, Human
uaacggcuccag

SEQ ID NO: 3407769 - RNA, 18 nt, Human
uaacggcuccaggauuuu

SEQ ID NO: 3407770 - RNA, 17 nt, Human
uaacguugcugugggaa

SEQ ID NO: 3407771 - RNA, 19 nt, Human
uaacguuuuuccuuuaaaa

SEQ ID NO: 3407772 - RNA, 17 nt, Human
uaacuaaaacaaagcca

SEQ ID NO: 3407773 - RNA, 14 nt, Human
uaacuaaaagguau

SEQ ID NO: 3407774 - RNA, 14 nt, Human
uaacuaaacucucu

SEQ ID NO: 3407775 - RNA, 14 nt, Human
uaacuaaauuaaca

SEQ ID NO: 3407776 - RNA, 16 nt, Human
uaacuaaauuaacauu

SEQ ID NO: 3407777 - RNA, 20 nt, Human
uaacuaaauuugauacuuau

SEQ ID NO: 3407778 - RNA, 21 nt, Human
uaacuaaauuugauacuuaua

SEQ ID NO: 3407779 - RNA, 22 nt, Human
uaacuaaauuugauacuuauau

SEQ ID NO: 3407780 - RNA, 14 nt, Human
uaacuaaauuuuaa

SEQ ID NO: 3407781 - RNA, 19 nt, Human
uaacuaacaaacagauucu

SEQ ID NO: 3407782 - RNA, 22 nt, Human
uaacuacaaagguuuaaaugaa

SEQ ID NO: 3407783 - RNA, 23 nt, Human
uaacuacaaagguuuaaaugaac

SEQ ID NO: 3407784 - RNA, 18 nt, Human
uaacuacauauugaauag

SEQ ID NO: 3407785 - RNA, 13 nt, Human
uaacuacauuuau

SEQ ID NO: 3407786 - RNA, 18 nt, Human
uaacuacccuuaauuacu

SEQ ID NO: 3407787 - RNA, 17 nt, Human
uaacuacuccggagaca

SEQ ID NO: 3407788 - RNA, 14 nt, Human
uaacuacuguguuc

SEQ ID NO: 3407789 - RNA, 14 nt, Human
uaacuacuuuauaa

SEQ ID NO: 3407790 - RNA, 14 nt, Human
uaacuagaacugaa

SEQ ID NO: 3407791 - RNA, 17 nt, Human
uaacuagaacugaauuu

SEQ ID NO: 3407792 - RNA, 20 nt, Human
uaacuagaacugaauuuugu

SEQ ID NO: 3407793 - RNA, 15 nt, Human
uaacuagaauuuauu

SEQ ID NO: 3407794 - RNA, 21 nt, Human
uaacuagacacagauaauaau

SEQ ID NO: 3407795 - RNA, 21 nt, Human
uaacuagacaccaaaguucua

SEQ ID NO: 3407796 - RNA, 16 nt, Human
uaacuagauggugcug

SEQ ID NO: 3407797 - RNA, 15 nt, Human
uaacuagcaccaggg

SEQ ID NO: 3407798 - RNA, 19 nt, Human
uaacuaggcucagagaugu

SEQ ID NO: 3407799 - RNA, 17 nt, Human
uaacuauaaauauguac

SEQ ID NO: 3407800 - RNA, 23 nt, Human
uaacuauaguccagcuuuguucu

SEQ ID NO: 3407801 - RNA, 22 nt, Human
uaacuauguacaauauuuuaag

SEQ ID NO: 3407802 - RNA, 16 nt, Human
uaacuauguugauaaa

SEQ ID NO: 3407803 - RNA, 15 nt, Human
uaacuauugcauuua

SEQ ID NO: 3407804 - RNA, 21 nt, Human
uaacucaccagccccacugcc

SEQ ID NO: 3407805 - RNA, 23 nt, Human
uaacucagaucacuacugcaguc

SEQ ID NO: 3407806 - RNA, 15 nt, Human
uaacucaggacucca

SEQ ID NO: 3407807 - RNA, 16 nt, Human
uaacucaggacuccag

SEQ ID NO: 3407808 - RNA, 17 nt, Human
uaacucaggacuccagc

SEQ ID NO: 3407809 - RNA, 20 nt, Human
uaacucaggacuccagccca

SEQ ID NO: 3407810 - RNA, 16 nt, Human
uaacucauaguuuguu

SEQ ID NO: 3407811 - RNA, 14 nt, Human
uaacucaucauaaa

SEQ ID NO: 3407812 - RNA, 17 nt, Human
uaacucaucauaaaaua

SEQ ID NO: 3407813 - RNA, 16 nt, Human
uaacuccccuguuuca

SEQ ID NO: 3407814 - RNA, 12 nt, Human
uaacuccuccca

SEQ ID NO: 3407815 - RNA, 16 nt, Human
uaacuccucccagggu

SEQ ID NO: 3407816 - RNA, 17 nt, Human
uaacuccugagaaaugu

SEQ ID NO: 3407817 - RNA, 14 nt, Human
uaacucugauguaa

SEQ ID NO: 3407818 - RNA, 11 nt, Human
uaacucugucu

SEQ ID NO: 3407819 - RNA, 14 nt, Human
uaacucugucuuca

SEQ ID NO: 3407820 - RNA, 16 nt, Human
uaacucuugucuauuu

SEQ ID NO: 3407821 - RNA, 12 nt, Human
uaacucuuugga

SEQ ID NO: 3407822 - RNA, 23 nt, Human
uaacugaacauccaaaaucuuga

SEQ ID NO: 3407823 - RNA, 14 nt, Human
uaacugaauaccac

SEQ ID NO: 3407824 - RNA, 18 nt, Human
uaacugaauaccacucug

SEQ ID NO: 3407825 - RNA, 22 nt, Human
uaacugaauaccacucuguaau

SEQ ID NO: 3407826 - RNA, 13 nt, Human
uaacugacaacuu

SEQ ID NO: 3407827 - RNA, 17 nt, Human
uaacugacaagccaucu

SEQ ID NO: 3407828 - RNA, 14 nt, Human
uaacugacuauucu

SEQ ID NO: 3407829 - RNA, 21 nt, Human
uaacugacuauucuugaugua

SEQ ID NO: 3407830 - RNA, 16 nt, Human
uaacugagugccuuuu

SEQ ID NO: 3407831 - RNA, 17 nt, Human
uaacugagugccuuuug

SEQ ID NO: 3407832 - RNA, 23 nt, Human
uaacugauuaguaagucuugccu

SEQ ID NO: 3407833 - RNA, 19 nt, Human
uaacugcaaagugaaguug

SEQ ID NO: 3407834 - RNA, 20 nt, Human
uaacugcaauuuuaauugau

SEQ ID NO: 3407835 - RNA, 17 nt, Human
uaacugcauugagaacu

SEQ ID NO: 3407836 - RNA, 23 nt, Human
uaacugccaucaagaugagagaa

SEQ ID NO: 3407837 - RNA, 21 nt, Human
uaacugcccaaagcagcacuu

SEQ ID NO: 3407838 - RNA, 23 nt, Human
uaacugcccagcggacaguggca

SEQ ID NO: 3407839 - RNA, 17 nt, Human
uaacugccguaauuuaa

SEQ ID NO: 3407840 - RNA, 15 nt, Human
uaacugccuagaaac

SEQ ID NO: 3407841 - RNA, 12 nt, Human
uaacugccuuga

SEQ ID NO: 3407842 - RNA, 21 nt, Human
uaacugccuugaaccugugag

SEQ ID NO: 3407843 - RNA, 12 nt, Human
uaacugcucuug

SEQ ID NO: 3407844 - RNA, 15 nt, Human
uaacugcucuugggc

SEQ ID NO: 3407845 - RNA, 19 nt, Human
uaacugcucuugggcaaua

SEQ ID NO: 3407846 - RNA, 14 nt, Human
uaacugcuuucugu

SEQ ID NO: 3407847 - RNA, 17 nt, Human
uaacugcuuucuguucc

SEQ ID NO: 3407848 - RNA, 20 nt, Human
uaacugcuuucuguuccaaa

SEQ ID NO: 3407849 - RNA, 18 nt, Human
uaacuggaaaacagaaca

SEQ ID NO: 3407850 - RNA, 14 nt, Human
uaacuggaaagaag

SEQ ID NO: 3407851 - RNA, 15 nt, Human
uaacuggaaagaagu

SEQ ID NO: 3407852 - RNA, 19 nt, Human
uaacuggaacaaauuauuu

SEQ ID NO: 3407853 - RNA, 17 nt, Human
uaacuggguaaugaaac

SEQ ID NO: 3407854 - RNA, 20 nt, Human
uaacuggguaaugaaacaaa

SEQ ID NO: 3407855 - RNA, 18 nt, Human
uaacuggugauauaucuc

SEQ ID NO: 3407856 - RNA, 23 nt, Human
uaacuguaaagauguuuauuuca

SEQ ID NO: 3407857 - RNA, 13 nt, Human
uaacuguaaauca

SEQ ID NO: 3407858 - RNA, 14 nt, Human
uaacuguaaaucau

SEQ ID NO: 3407859 - RNA, 18 nt, Human
uaacuguaaaugugacau

SEQ ID NO: 3407860 - RNA, 19 nt, Human
uaacuguaauuauuugaau

SEQ ID NO: 3407861 - RNA, 17 nt, Human
uaacuguauauuuguau

SEQ ID NO: 3407862 - RNA, 21 nt, Human
uaacugucaggcugaaaacaa

SEQ ID NO: 3407863 - RNA, 17 nt, Human
uaacugugaaguuuaca

SEQ ID NO: 3407864 - RNA, 16 nt, Human
uaacugugcugaaugc

SEQ ID NO: 3407865 - RNA, 18 nt, Human
uaacuguguauguacaua

SEQ ID NO: 3407866 - RNA, 20 nt, Human
uaacuguguauguacauaua

SEQ ID NO: 3407867 - RNA, 22 nt, Human
uaacuguuaaauugcuguguau

SEQ ID NO: 3407868 - RNA, 20 nt, Human
uaacuguuacaguaauguca

SEQ ID NO: 3407869 - RNA, 16 nt, Human
uaacuguuauuuauaa

SEQ ID NO: 3407870 - RNA, 17 nt, Human
uaacuguuucaaagcca

SEQ ID NO: 3407871 - RNA, 21 nt, Human
uaacuuaaaaauguaaauauu

SEQ ID NO: 3407872 - RNA, 22 nt, Human
uaacuuaaaagaacauguauau

SEQ ID NO: 3407873 - RNA, 16 nt, Human
uaacuuaauaaucaag

SEQ ID NO: 3407874 - RNA, 14 nt, Human
uaacuuaaucaauu

SEQ ID NO: 3407875 - RNA, 15 nt, Human
uaacuuaaugaaaac

SEQ ID NO: 3407876 - RNA, 17 nt, Human
uaacuuagagcuuuuuu

SEQ ID NO: 3407877 - RNA, 17 nt, Human
uaacuuaguuuugcaua

SEQ ID NO: 3407878 - RNA, 16 nt, Human
uaacuuauauugaaga

SEQ ID NO: 3407879 - RNA, 17 nt, Human
uaacuuauauuguaaga

SEQ ID NO: 3407880 - RNA, 18 nt, Human
uaacuuauauuguaagaa

SEQ ID NO: 3407881 - RNA, 19 nt, Human
uaacuuauauuguaagaaa

SEQ ID NO: 3407882 - RNA, 20 nt, Human
uaacuuauauuguaagaaau

SEQ ID NO: 3407883 - RNA, 21 nt, Human
uaacuuauauuguaagaaaua

SEQ ID NO: 3407884 - RNA, 21 nt, Human
uaacuuauguagauauuuggc

SEQ ID NO: 3407885 - RNA, 17 nt, Human
uaacuuauucaaagaga

SEQ ID NO: 3407886 - RNA, 16 nt, Human
uaacuuauuuagagau

SEQ ID NO: 3407887 - RNA, 23 nt, Human
uaacuuauuuauguuaaaagauu

SEQ ID NO: 3407888 - RNA, 21 nt, Human
uaacuucacauauugauuucc

SEQ ID NO: 3407889 - RNA, 18 nt, Human
uaacuucacauuaaaaaa

SEQ ID NO: 3407890 - RNA, 14 nt, Human
uaacuucaccauau

SEQ ID NO: 3407891 - RNA, 16 nt, Human
uaacuucauaagcaaa

SEQ ID NO: 3407892 - RNA, 17 nt, Human
uaacuuccaugugaggg

SEQ ID NO: 3407893 - RNA, 15 nt, Human
uacagguuacaacag

SEQ ID NO: 3407894 - RNA, 18 nt, Human
uacagguuacaacagauu

SEQ ID NO: 3407895 - RNA, 21 nt, Human
uacagguuacaacagauuugu

SEQ ID NO: 3407896 - RNA, 23 nt, Human
uacagguuacaacagauuuguga

SEQ ID NO: 3407897 - RNA, 13 nt, Human
uacaguaaauaaa

SEQ ID NO: 3407898 - RNA, 17 nt, Human
uacaguaaauaaauugu

SEQ ID NO: 3407899 - RNA, 18 nt, Human
uacaguaaauaaauuguu

SEQ ID NO: 3407900 - RNA, 13 nt, Human
uacaguaggagcc

SEQ ID NO: 3407901 - RNA, 20 nt, Human
uacaguaggagcccagcucu

SEQ ID NO: 3407902 - RNA, 16 nt, Human
uacaguagugagaaga

SEQ ID NO: 3407903 - RNA, 16 nt, Human
uacaguauaauuaaca

SEQ ID NO: 3407904 - RNA, 17 nt, Human
uacaguauaauuaacau

SEQ ID NO: 3407905 - RNA, 20 nt, Human
uacaguauggggguuguaaa

SEQ ID NO: 3407906 - RNA, 13 nt, Human
uacaguauucugu

SEQ ID NO: 3407907 - RNA, 18 nt, Human
uacagucaagauagaaag

SEQ ID NO: 3407908 - RNA, 19 nt, Human
uacaguccaaaauacuguu

SEQ ID NO: 3407909 - RNA, 15 nt, Human
uacaguccuucaaaa

SEQ ID NO: 3407910 - RNA, 19 nt, Human
uacaguccuucaaaauccu

SEQ ID NO: 3407911 - RNA, 15 nt, Human
uacagucuaaagcug

SEQ ID NO: 3407912 - RNA, 13 nt, Human
uacagucuauuug

SEQ ID NO: 3407913 - RNA, 14 nt, Human
uacagucugucaug

SEQ ID NO: 3407914 - RNA, 15 nt, Human
uacagucugucauga

SEQ ID NO: 3407915 - RNA, 14 nt, Human
uacagucuuccaca

SEQ ID NO: 3407916 - RNA, 19 nt, Human
uacagucuuccauuugcaa

SEQ ID NO: 3407917 - RNA, 20 nt, Human
uacagucuuccauuugcaag

SEQ ID NO: 3407918 - RNA, 19 nt, Human
uacagucuucuuacuugga

SEQ ID NO: 3407919 - RNA, 12 nt, Human
uacagucuugua

SEQ ID NO: 3407920 - RNA, 16 nt, Human
uacaguggauugcuca

SEQ ID NO: 3407921 - RNA, 11 nt, Human
uacagugguuu

SEQ ID NO: 3407922 - RNA, 13 nt, Human
uacaguguacagu

SEQ ID NO: 3407923 - RNA, 22 nt, Human
uacaguguacagucuuguauua

SEQ ID NO: 3407924 - RNA, 14 nt, Human
uacagugucuuuuu

SEQ ID NO: 3407925 - RNA, 19 nt, Human
uacaguguuauuuucuuug

SEQ ID NO: 3407926 - RNA, 15 nt, Human
uacaguguuuauccu

SEQ ID NO: 3407927 - RNA, 23 nt, Human
uacaguguuuauccuuucauaua

SEQ ID NO: 3407928 - RNA, 17 nt, Human
uacaguuacuuuuccuu

SEQ ID NO: 3407929 - RNA, 20 nt, Human
uacaguuaggcaccagaaga

SEQ ID NO: 3407930 - RNA, 23 nt, Human
uacaguuaggcaccagaagaaca

SEQ ID NO: 3407931 - RNA, 12 nt, Human
uacaguucaguu

SEQ ID NO: 3407932 - RNA, 23 nt, Human
uacaguucggugagcuacaaaug

SEQ ID NO: 3407933 - RNA, 20 nt, Human
uacaguucugcucugguugu

SEQ ID NO: 3407934 - RNA, 14 nt, Human
uacaguucuguggu

SEQ ID NO: 3407935 - RNA, 15 nt, Human
uacaguucugugguu

SEQ ID NO: 3407936 - RNA, 21 nt, Human
uacaguucugugguuucaugu

SEQ ID NO: 3407937 - RNA, 18 nt, Human
uacaguucuucgggaaga

SEQ ID NO: 3407938 - RNA, 18 nt, Human
uacaguuguuggccuccg

SEQ ID NO: 3407939 - RNA, 23 nt, Human
uacaguuuauuuuuaaagauaga

SEQ ID NO: 3407940 - RNA, 13 nt, Human
uacaguuucaaaa

SEQ ID NO: 3407941 - RNA, 15 nt, Human
uacaguuuguuuaca

SEQ ID NO: 3407942 - RNA, 13 nt, Human
uacaguuuuaugc

SEQ ID NO: 3407943 - RNA, 17 nt, Human
uacaguuuuaugcucuu

SEQ ID NO: 3407944 - RNA, 15 nt, Human
uacaguuuucagaaa

SEQ ID NO: 3407945 - RNA, 15 nt, Human
uacauaaaagaauuu

SEQ ID NO: 3407946 - RNA, 16 nt, Human
uacauaaaagaauuuu

SEQ ID NO: 3407947 - RNA, 23 nt, Human
uacauaaaccauuuuuguuacuc

SEQ ID NO: 3407948 - RNA, 17 nt, Human
uacauaaacugacuuua

SEQ ID NO: 3407949 - RNA, 16 nt, Human
uacauaaauuggccug

SEQ ID NO: 3407950 - RNA, 23 nt, Human
uacauaacaggguaaauuauuca

SEQ ID NO: 3407951 - RNA, 21 nt, Human
uacauaacugaaaaugugcua

SEQ ID NO: 3407952 - RNA, 15 nt, Human
uacauaaguaauuca

SEQ ID NO: 3407953 - RNA, 20 nt, Human
uacauaauacugaaccacuu

SEQ ID NO: 3407954 - RNA, 24 nt, Human
uacauaaugcgugcauaccacuuu

SEQ ID NO: 3407955 - RNA, 22 nt, Human
uacauaaugcuuaauuucuaaa

SEQ ID NO: 3407956 - RNA, 15 nt, Human
uacauaauucacucu

SEQ ID NO: 3407957 - RNA, 17 nt, Human
uacauaauucacucuga

SEQ ID NO: 3407958 - RNA, 23 nt, Human
uacauacacauauauacacacac

SEQ ID NO: 3407959 - RNA, 16 nt, Human
uacauacaccagcauu

SEQ ID NO: 3407960 - RNA, 21 nt, Human
uacauacacuuguauaaaugu

SEQ ID NO: 3407961 - RNA, 12 nt, Human
uacauacagaau

SEQ ID NO: 3407962 - RNA, 20 nt, Human
uacauacagaauuacuguaa

SEQ ID NO: 3407963 - RNA, 20 nt, Human
uacauaccacgcuagggcug

SEQ ID NO: 3407964 - RNA, 15 nt, Human
uacauacgauuuaag

SEQ ID NO: 3407965 - RNA, 13 nt, Human
uacauacggucag

SEQ ID NO: 3407966 - RNA, 17 nt, Human
uacauacggucagguuu

SEQ ID NO: 3407967 - RNA, 23 nt, Human
uacauacggucagguuuaacauu

SEQ ID NO: 3407968 - RNA, 17 nt, Human
uacauacuaugaaauau

SEQ ID NO: 3407969 - RNA, 12 nt, Human
uacauacugcug

SEQ ID NO: 3407970 - RNA, 13 nt, Human
uacauacugcugu

SEQ ID NO: 3407971 - RNA, 19 nt, Human
uacauacuuuaucaaugug

SEQ ID NO: 3407972 - RNA, 14 nt, Human
uacauagaugcuua

SEQ ID NO: 3407973 - RNA, 17 nt, Human
uacauagaugcuuaguc

SEQ ID NO: 3407974 - RNA, 13 nt, Human
uacauagccuaua

SEQ ID NO: 3407975 - RNA, 21 nt, Human
uacauagggauaugcguauua

SEQ ID NO: 3407976 - RNA, 16 nt, Human
uacauagugcuaacau

SEQ ID NO: 3407977 - RNA, 23 nt, Human
uacauagugcuaacaugaagacc

SEQ ID NO: 3407978 - RNA, 17 nt, Human
uacauagugcugcugug

SEQ ID NO: 3407979 - RNA, 19 nt, Human
uacauagugcugcugugug

SEQ ID NO: 3407980 - RNA, 15 nt, Human
uacauauauuuuuaa

SEQ ID NO: 3407981 - RNA, 15 nt, Human
uacauaucgcugacu

SEQ ID NO: 3407982 - RNA, 17 nt, Human
uacauaucgcugacuuc

SEQ ID NO: 3407983 - RNA, 20 nt, Human
uacauaucgcugacuucaug

SEQ ID NO: 3407984 - RNA, 22 nt, Human
uacauaucuuuauuaaucacua

SEQ ID NO: 3407985 - RNA, 17 nt, Human
uacauaugaucugucug

SEQ ID NO: 3407986 - RNA, 14 nt, Human
uacauaugcuuuaa

SEQ ID NO: 3407987 - RNA, 17 nt, Human
uacauaugcuuuaagaa

SEQ ID NO: 3407988 - RNA, 18 nt, Human
uacauauggauguuacuc

SEQ ID NO: 3407989 - RNA, 15 nt, Human
uacauauguagacua

SEQ ID NO: 3407990 - RNA, 17 nt, Human
uacauauguagacuaua

SEQ ID NO: 3407991 - RNA, 14 nt, Human
uacauauucuuuaa

SEQ ID NO: 3407992 - RNA, 17 nt, Human
uacauauuuauuuucuu

SEQ ID NO: 3407993 - RNA, 13 nt, Human
uacauauuuccaa

SEQ ID NO: 3407994 - RNA, 19 nt, Human
uacauauuugcauauguau

SEQ ID NO: 3407995 - RNA, 17 nt, Human
uacauauuuguggaaua

SEQ ID NO: 3407996 - RNA, 12 nt, Human
uacaucacugcu

SEQ ID NO: 3407997 - RNA, 15 nt, Human
uacaucacugcuuga

SEQ ID NO: 3407998 - RNA, 22 nt, Human
uacaucacugcuugaugaagca

SEQ ID NO: 3407999 - RNA, 12 nt, Human
uacaucauuucu

SEQ ID NO: 3408000 - RNA, 19 nt, Human
uacauccaaagcagacagc

SEQ ID NO: 3408001 - RNA, 20 nt, Human
uacauccaaagcagacagcu

SEQ ID NO: 3408002 - RNA, 16 nt, Human
uacaucccauguaaca

SEQ ID NO: 3408003 - RNA, 18 nt, Human
uacaucccauguaacaga

SEQ ID NO: 3408004 - RNA, 22 nt, Human
uacaucccauguaacagaaagg

SEQ ID NO: 3408005 - RNA, 14 nt, Human
uacauccuggguaa

SEQ ID NO: 3408006 - RNA, 20 nt, Human
uacauccuuguggcacauuu

SEQ ID NO: 3408007 - RNA, 19 nt, Human
uacaucuauuuuggauugu

SEQ ID NO: 3408008 - RNA, 15 nt, Human
uacaucucuccccaa

SEQ ID NO: 3408009 - RNA, 17 nt, Human
uacaucuggcuuauuuu

SEQ ID NO: 3408010 - RNA, 14 nt, Human
uacaucuucugccu

SEQ ID NO: 3408011 - RNA, 17 nt, Human
uacaucuucugccuuag

SEQ ID NO: 3408012 - RNA, 16 nt, Human
uacaucuuuaaacagu

SEQ ID NO: 3408013 - RNA, 14 nt, Human
uacaucuuucacau

SEQ ID NO: 3408014 - RNA, 17 nt, Human
uacaucuuuuuucacaa

SEQ ID NO: 3408015 - RNA, 20 nt, Human
uacaucuuuuuucacaaauu

SEQ ID NO: 3408016 - RNA, 12 nt, Human
uacaugaaacag

SEQ ID NO: 3408017 - RNA, 13 nt, Human
uacaugaaacaga

SEQ ID NO: 3408018 - RNA, 14 nt, Human
uacaugaaacagaa

SEQ ID NO: 3408019 - RNA, 18 nt, Human
uacaugaaauuuuuguaa

SEQ ID NO: 3408020 - RNA, 13 nt, Human
uacaugaaguauu

SEQ ID NO: 3408021 - RNA, 14 nt, Human
uacaugaauacaaa

SEQ ID NO: 3408022 - RNA, 18 nt, Human
uacaugacacugaaaugc

SEQ ID NO: 3408023 - RNA, 20 nt, Human
uacaugacacugaaaugccu

SEQ ID NO: 3408024 - RNA, 21 nt, Human
uacaugacauuuauuuuucau

SEQ ID NO: 3408025 - RNA, 18 nt, Human
uacaugacgacaaagcug

SEQ ID NO: 3408026 - RNA, 23 nt, Human
uacaugacgacaaagcugcuaaa

SEQ ID NO: 3408027 - RNA, 19 nt, Human
uacaugacucagcauaccu

SEQ ID NO: 3408028 - RNA, 13 nt, Human
uacaugaggacuc

SEQ ID NO: 3408029 - RNA, 14 nt, Human
uacaugaggacucu

SEQ ID NO: 3408030 - RNA, 22 nt, Human
uacaugaggacucuauucuuua

SEQ ID NO: 3408031 - RNA, 15 nt, Human
uacaugaugauuuca

SEQ ID NO: 3408032 - RNA, 14 nt, Human
uacaugauucauuu

SEQ ID NO: 3408033 - RNA, 15 nt, Human
uacaugauucauuuu

SEQ ID NO: 3408034 - RNA, 16 nt, Human
uacaugcaaaaagaaa

SEQ ID NO: 3408035 - RNA, 22 nt, Human
uacaugcaauuuauuaaaauga

SEQ ID NO: 3408036 - RNA, 14 nt, Human
uacaugcauacacu

SEQ ID NO: 3408037 - RNA, 14 nt, Human
uacaugcauacuuc

SEQ ID NO: 3408038 - RNA, 17 nt, Human
uaccugaccucuugcug

SEQ ID NO: 3408039 - RNA, 22 nt, Human
uaccugaccucuugcugucucu

SEQ ID NO: 3408040 - RNA, 15 nt, Human
uaccugaggggccuc

SEQ ID NO: 3408041 - RNA, 20 nt, Human
uaccugccacucacacagcc

SEQ ID NO: 3408042 - RNA, 22 nt, Human
uaccugccacucacacagccag

SEQ ID NO: 3408043 - RNA, 20 nt, Human
uaccugccaggaagccagca

SEQ ID NO: 3408044 - RNA, 13 nt, Human
uaccugcccugga

SEQ ID NO: 3408045 - RNA, 21 nt, Human
uaccugcucacgucaaaugca

SEQ ID NO: 3408046 - RNA, 14 nt, Human
uaccugcugcuucu

SEQ ID NO: 3408047 - RNA, 17 nt, Human
uaccuggaggaggagca

SEQ ID NO: 3408048 - RNA, 15 nt, Human
uaccuggauguucuu

SEQ ID NO: 3408049 - RNA, 14 nt, Human
uaccugggaagggg

SEQ ID NO: 3408050 - RNA, 20 nt, Human
uaccugggcauacuaauaaa

SEQ ID NO: 3408051 - RNA, 14 nt, Human
uaccuguacacuga

SEQ ID NO: 3408052 - RNA, 12 nt, Human
uaccuguauaca

SEQ ID NO: 3408053 - RNA, 18 nt, Human
uaccuguauuuaaaaaua

SEQ ID NO: 3408054 - RNA, 22 nt, Human
uaccuguauuuaaaaauagaaa

SEQ ID NO: 3408055 - RNA, 14 nt, Human
uaccugucacauug

SEQ ID NO: 3408056 - RNA, 19 nt, Human
uaccugucacauugcauuc

SEQ ID NO: 3408057 - RNA, 10 nt, Human
uaccuguccc

SEQ ID NO: 3408058 - RNA, 13 nt, Human
uaccugucccccu

SEQ ID NO: 3408059 - RNA, 15 nt, Human
uaccugugaaguguu

SEQ ID NO: 3408060 - RNA, 22 nt, Human
uaccuguguauuuuuuaaagcu

SEQ ID NO: 3408061 - RNA, 17 nt, Human
uaccuguguuucuugcc

SEQ ID NO: 3408062 - RNA, 17 nt, Human
uaccuuaaaauuugaaa

SEQ ID NO: 3408063 - RNA, 18 nt, Human
uaccuuaaaauuugaaac

SEQ ID NO: 3408064 - RNA, 18 nt, Human
uaccuuauaguuacugug

SEQ ID NO: 3408065 - RNA, 14 nt, Human
uaccuuaucuuaca

SEQ ID NO: 3408066 - RNA, 14 nt, Human
uaccuucauuucag

SEQ ID NO: 3408067 - RNA, 20 nt, Human
uaccuuccagucaggaugac

SEQ ID NO: 3408068 - RNA, 23 nt, Human
uaccuucuccccagcucccagga

SEQ ID NO: 3408069 - RNA, 16 nt, Human
uaccuugaacugaagg

SEQ ID NO: 3408070 - RNA, 18 nt, Human
uaccuugacacauaguuu

SEQ ID NO: 3408071 - RNA, 15 nt, Human
uaccuugaggucuuu

SEQ ID NO: 3408072 - RNA, 23 nt, Human
uaccuugcacacaucaucuguaa

SEQ ID NO: 3408073 - RNA, 17 nt, Human
uaccuugcaucucacag

SEQ ID NO: 3408074 - RNA, 18 nt, Human
uaccuugccaauuaguaa

SEQ ID NO: 3408075 - RNA, 16 nt, Human
uaccuuguauacugua

SEQ ID NO: 3408076 - RNA, 19 nt, Human
uaccuugucauuuuggucu

SEQ ID NO: 3408077 - RNA, 18 nt, Human
uaccuugugacccagcac

SEQ ID NO: 3408078 - RNA, 14 nt, Human
uaccuuuaugguuu

SEQ ID NO: 3408079 - RNA, 16 nt, Human
uaccuuuaugguuucu

SEQ ID NO: 3408080 - RNA, 14 nt, Human
uaccuuucaaagcu

SEQ ID NO: 3408081 - RNA, 12 nt, Human
uaccuuucauac

SEQ ID NO: 3408082 - RNA, 20 nt, Human
uaccuuugaauucaagaaca

SEQ ID NO: 3408083 - RNA, 12 nt, Human
uaccuuugucac

SEQ ID NO: 3408084 - RNA, 21 nt, Human
uaccuuuuaacaccugaugug

SEQ ID NO: 3408085 - RNA, 17 nt, Human
uaccuuuuaccagcuuu

SEQ ID NO: 3408086 - RNA, 18 nt, Human
uaccuuuuaccagcuuuu

SEQ ID NO: 3408087 - RNA, 16 nt, Human
uaccuuuuauguagca

SEQ ID NO: 3408088 - RNA, 19 nt, Human
uaccuuuuuuagaguugau

SEQ ID NO: 3408089 - RNA, 16 nt, Human
uaccuuuuuuauacau

SEQ ID NO: 3408090 - RNA, 17 nt, Human
uaccuuuuuuauacaua

SEQ ID NO: 3408091 - RNA, 22 nt, Human
uaccuuuuuuauacauaaacaa

SEQ ID NO: 3408092 - RNA, 21 nt, Human
uaccuuuuuugauaaaguuuc

SEQ ID NO: 3408093 - RNA, 22 nt, Human
uaccuuuuuuguuuuuucaaaa

SEQ ID NO: 3408094 - RNA, 15 nt, Human
uaccuuuuuuuuucu

SEQ ID NO: 3408095 - RNA, 19 nt, Human
uaccuuuuuuuuucuuuuu

SEQ ID NO: 3408096 - RNA, 20 nt, Human
uaccuuuuuuuuuucuuggu

SEQ ID NO: 3408097 - RNA, 23 nt, Human
uacgaagaguauuuuugacagaa

SEQ ID NO: 3408098 - RNA, 16 nt, Human
uacgaaguucaagauc

SEQ ID NO: 3408099 - RNA, 18 nt, Human
uacgaaguucaagaucaa

SEQ ID NO: 3408100 - RNA, 15 nt, Human
uacgacuuuauuuuc

SEQ ID NO: 3408101 - RNA, 17 nt, Human
uacgacuuuauuuucug

SEQ ID NO: 3408102 - RNA, 19 nt, Human
uacgagagcagaggucucc

SEQ ID NO: 3408103 - RNA, 21 nt, Human
uacgagcaccuccagccugaa

SEQ ID NO: 3408104 - RNA, 14 nt, Human
uacgaucaggcaca

SEQ ID NO: 3408105 - RNA, 16 nt, Human
uacgaucaggcacagg

SEQ ID NO: 3408106 - RNA, 13 nt, Human
uacgcacagacag

SEQ ID NO: 3408107 - RNA, 14 nt, Human
uacgcacagacagg

SEQ ID NO: 3408108 - RNA, 17 nt, Human
uacgcaggcaucugauu

SEQ ID NO: 3408109 - RNA, 17 nt, Human
uacgcccaacccuuccc

SEQ ID NO: 3408110 - RNA, 13 nt, Human
uacgccucuucug

SEQ ID NO: 3408111 - RNA, 17 nt, Human
uacgccugcauguaaac

SEQ ID NO: 3408112 - RNA, 16 nt, Human
uacgccugccuccccu

SEQ ID NO: 3408113 - RNA, 13 nt, Human
uacgcugaagaug

SEQ ID NO: 3408114 - RNA, 13 nt, Human
uacgcuggugcug

SEQ ID NO: 3408115 - RNA, 20 nt, Human
uacgcuuugucacacaaaaa

SEQ ID NO: 3408116 - RNA, 17 nt, Human
uacgcuuuucuuuguua

SEQ ID NO: 3408117 - RNA, 20 nt, Human
uacggucagguuuaacauuu

SEQ ID NO: 3408118 - RNA, 12 nt, Human
uacguaugucug

SEQ ID NO: 3408119 - RNA, 14 nt, Human
uacguaugucuggu

SEQ ID NO: 3408120 - RNA, 21 nt, Human
uacgugacccucugcugaaga

SEQ ID NO: 3408121 - RNA, 13 nt, Human
uacgugaguccug

SEQ ID NO: 3408122 - RNA, 15 nt, Human
uacgugugauuuuuc

SEQ ID NO: 3408123 - RNA, 14 nt, Human
uacguuaccaggca

SEQ ID NO: 3408124 - RNA, 15 nt, Human
uacguuccuauuguc

SEQ ID NO: 3408125 - RNA, 15 nt, Human
uacguugugcauuug

SEQ ID NO: 3408126 - RNA, 11 nt, Human
uacguuucuuu

SEQ ID NO: 3408127 - RNA, 13 nt, Human
uacguuuguaugu

SEQ ID NO: 3408128 - RNA, 20 nt, Human
uacguuuguauguguguaga

SEQ ID NO: 3408129 - RNA, 13 nt, Human
uacguuuuuguaa

SEQ ID NO: 3408130 - RNA, 16 nt, Human
uacuaaaaaaaagaug

SEQ ID NO: 3408131 - RNA, 18 nt, Human
uacuaaaaaguauaaaau

SEQ ID NO: 3408132 - RNA, 19 nt, Human
uacuaaaaaguauaaaaua

SEQ ID NO: 3408133 - RNA, 16 nt, Human
uacuaaaaaugcaaaa

SEQ ID NO: 3408134 - RNA, 20 nt, Human
uacuaaaaguucuucuccaa

SEQ ID NO: 3408135 - RNA, 21 nt, Human
uacuaaaaguuuugagaaauu

SEQ ID NO: 3408136 - RNA, 13 nt, Human
uacuaaaauauau

SEQ ID NO: 3408137 - RNA, 18 nt, Human
uacuaaacauaugauuuc

SEQ ID NO: 3408138 - RNA, 16 nt, Human
uacuaaagaaagauua

SEQ ID NO: 3408139 - RNA, 14 nt, Human
uacuaaagccaaac

SEQ ID NO: 3408140 - RNA, 14 nt, Human
uacuaaauuuaaau

SEQ ID NO: 3408141 - RNA, 17 nt, Human
uacuaaauuuaaauuua

SEQ ID NO: 3408142 - RNA, 23 nt, Human
uacuaaauuuaaauuuaaagaua

SEQ ID NO: 3408143 - RNA, 18 nt, Human
uacuaacauuuauuugag

SEQ ID NO: 3408144 - RNA, 17 nt, Human
uacuaaccagcagaaau

SEQ ID NO: 3408145 - RNA, 19 nt, Human
uacuaaccagcagaaaugc

SEQ ID NO: 3408146 - RNA, 20 nt, Human
uacuaagcauagcaaacaga

SEQ ID NO: 3408147 - RNA, 14 nt, Human
uacuaaggaaucuu

SEQ ID NO: 3408148 - RNA, 18 nt, Human
uacuaaggaguaaucugu

SEQ ID NO: 3408149 - RNA, 23 nt, Human
uacuaaggaguaaucuguguaca

SEQ ID NO: 3408150 - RNA, 23 nt, Human
uacuaauagaauaaaggcaguuu

SEQ ID NO: 3408151 - RNA, 17 nt, Human
uacuaauagacaauuua

SEQ ID NO: 3408152 - RNA, 20 nt, Human
uacuaauagacaauuuauua

SEQ ID NO: 3408153 - RNA, 21 nt, Human
uacuaauagacaauuuauuau

SEQ ID NO: 3408154 - RNA, 16 nt, Human
uacuaaugaaaacaga

SEQ ID NO: 3408155 - RNA, 16 nt, Human
uacuaauguaaaauga

SEQ ID NO: 3408156 - RNA, 19 nt, Human
uacuaauuaacauauaaua

SEQ ID NO: 3408157 - RNA, 23 nt, Human
uacuaauuaacauauaauauaug

SEQ ID NO: 3408158 - RNA, 13 nt, Human
uacuacaaaauuu

SEQ ID NO: 3408159 - RNA, 18 nt, Human
uacuacaaaauuugaaau

SEQ ID NO: 3408160 - RNA, 17 nt, Human
uacuacaauauguacau

SEQ ID NO: 3408161 - RNA, 18 nt, Human
uacuacacauucaauaag

SEQ ID NO: 3408162 - RNA, 15 nt, Human
uacuacacauuuuua

SEQ ID NO: 3408163 - RNA, 15 nt, Human
uacuacacugaggag

SEQ ID NO: 3408164 - RNA, 15 nt, Human
uacuacagucaagau

SEQ ID NO: 3408165 - RNA, 14 nt, Human
uacuacaguccucc

SEQ ID NO: 3408166 - RNA, 17 nt, Human
uacuacaguccucccau

SEQ ID NO: 3408167 - RNA, 14 nt, Human
uacuacaguuuguu

SEQ ID NO: 3408168 - RNA, 13 nt, Human
uacuacaugcacu

SEQ ID NO: 3408169 - RNA, 18 nt, Human
uacuacaugugggagcuu

SEQ ID NO: 3408170 - RNA, 16 nt, Human
uacuaccuugaaaaua

SEQ ID NO: 3408171 - RNA, 17 nt, Human
uacuacugaaucucuaa

SEQ ID NO: 3408172 - RNA, 20 nt, Human
uacuacuguggaaaaauauu

SEQ ID NO: 3408173 - RNA, 22 nt, Human
uacuacuguggaaaaauauuua

SEQ ID NO: 3408174 - RNA, 13 nt, Human
uacuagaaugcuu

SEQ ID NO: 3408175 - RNA, 14 nt, Human
uacuagaaugcuua

SEQ ID NO: 3408176 - RNA, 23 nt, Human
uacuagagauauuuuguaaaaug

SEQ ID NO: 3408177 - RNA, 16 nt, Human
uacuagaguuggcaug

SEQ ID NO: 3408178 - RNA, 14 nt, Human
uacuagaugucuuu

SEQ ID NO: 3408179 - RNA, 23 nt, Human
uacuagauuugggagaagggcag

SEQ ID NO: 3408180 - RNA, 14 nt, Human
uacuagcaaaauaa

SEQ ID NO: 3408181 - RNA, 19 nt, Human
uacuagcaaaauaaaacau

SEQ ID NO: 3408182 - RNA, 18 nt, Human
uacuagggagaagguuuc

SEQ ID NO: 3408183 - RNA, 21 nt, Human
uacuagggaucccucaucugu

SEQ ID NO: 3408184 - RNA, 13 nt, Human
uacuagguaacuu

SEQ ID NO: 3408185 - RNA, 21 nt, Human
uacuaguacuguguacuguau

SEQ ID NO: 3408186 - RNA, 19 nt, Human
uacuagucugugugggacu

SEQ ID NO: 3408187 - RNA, 14 nt, Human
uacuaguguucugu

SEQ ID NO: 3408188 - RNA, 22 nt, Human
uacuaguucagacacuuuggaa

SEQ ID NO: 3408189 - RNA, 12 nt, Human
uacuauaguacc

SEQ ID NO: 3408190 - RNA, 16 nt, Human
uacuauaucuguuuua

SEQ ID NO: 3408191 - RNA, 14 nt, Human
uacuauauuuaugg

SEQ ID NO: 3408192 - RNA, 14 nt, Human
uacuauauuugcua

SEQ ID NO: 3408193 - RNA, 15 nt, Human
uacuauauuugcuag

SEQ ID NO: 3408194 - RNA, 17 nt, Human
uacuauccaguuacugc

SEQ ID NO: 3408195 - RNA, 15 nt, Human
uacuaucuacucucc

SEQ ID NO: 3408196 - RNA, 17 nt, Human
uacuaucuuaucucaga

SEQ ID NO: 3408197 - RNA, 14 nt, Human
uacuaugccugugu

SEQ ID NO: 3408198 - RNA, 13 nt, Human
uacuauuaaacau

SEQ ID NO: 3408199 - RNA, 14 nt, Human
uacuauuaaacaug

SEQ ID NO: 3408200 - RNA, 18 nt, Human
uacuauuaaacaugcugu

SEQ ID NO: 3408201 - RNA, 19 nt, Human
uacuauucagguaacacua

SEQ ID NO: 3408202 - RNA, 23 nt, Human
uacuauuguugcugaaacuugcu

SEQ ID NO: 3408203 - RNA, 12 nt, Human
uacuauuuaaag

SEQ ID NO: 3408204 - RNA, 12 nt, Human
uacuauuuaacu

SEQ ID NO: 3408205 - RNA, 21 nt, Human
uacuauuuaagaugugaaaau

SEQ ID NO: 3408206 - RNA, 11 nt, Human
uacuauuucca

SEQ ID NO: 3408207 - RNA, 22 nt, Human
uacuauuucuugugguuauaac

SEQ ID NO: 3408208 - RNA, 14 nt, Human
uacuauuuuacuuc

SEQ ID NO: 3408209 - RNA, 14 nt, Human
uacuauuuuuacug

SEQ ID NO: 3408210 - RNA, 17 nt, Human
uacucaaacuccauucu

SEQ ID NO: 3408211 - RNA, 18 nt, Human
uacucaaaugaguaacau

SEQ ID NO: 3408212 - RNA, 23 nt, Human
uacucaaaugaguaacauuugcu

SEQ ID NO: 3408213 - RNA, 19 nt, Human
uacucaagcggguggcucu

SEQ ID NO: 3408214 - RNA, 23 nt, Human
uacucaauggaguaugucugaug

SEQ ID NO: 3408215 - RNA, 22 nt, Human
uacucaauguuacuaucugcuu

SEQ ID NO: 3408216 - RNA, 14 nt, Human
uacucaauuuuaac

SEQ ID NO: 3408217 - RNA, 21 nt, Human
uacucacacaggcauuuccug

SEQ ID NO: 3408218 - RNA, 15 nt, Human
uacucacagucucuu

SEQ ID NO: 3408219 - RNA, 20 nt, Human
uacucacucaaguucaagga

SEQ ID NO: 3408220 - RNA, 15 nt, Human
uacucacugaagccu

SEQ ID NO: 3408221 - RNA, 20 nt, Human
uacucacuuucuagauuaag

SEQ ID NO: 3408222 - RNA, 16 nt, Human
uacucagaagccugag

SEQ ID NO: 3408223 - RNA, 14 nt, Human
uacucagaauuaag

SEQ ID NO: 3408224 - RNA, 22 nt, Human
uacucagaauucucuaguuuga

SEQ ID NO: 3408225 - RNA, 14 nt, Human
uacucagcagcccu

SEQ ID NO: 3408226 - RNA, 15 nt, Human
uacucagcagcccuc

SEQ ID NO: 3408227 - RNA, 14 nt, Human
uacucagcccuggg

SEQ ID NO: 3408228 - RNA, 22 nt, Human
uacucagcccugggccccacca

SEQ ID NO: 3408229 - RNA, 23 nt, Human
uacucagcccugggccccaccac

SEQ ID NO: 3408230 - RNA, 16 nt, Human
uacucagccugcugcc

SEQ ID NO: 3408231 - RNA, 13 nt, Human
uacucaggaagaa

SEQ ID NO: 3408232 - RNA, 16 nt, Human
uacucagggcuccucc

SEQ ID NO: 3408233 - RNA, 18 nt, Human
uacucagggcuccuccca

SEQ ID NO: 3408234 - RNA, 20 nt, Human
uacucagggcuccucccagc

SEQ ID NO: 3408235 - RNA, 14 nt, Human
uacucauaauguga

SEQ ID NO: 3408236 - RNA, 15 nt, Human
uacucauugaaaugu

SEQ ID NO: 3408237 - RNA, 16 nt, Human
uacucauugaaauguc

SEQ ID NO: 3408238 - RNA, 17 nt, Human
uacucauugaaauguca

SEQ ID NO: 3408239 - RNA, 11 nt, Human
uacucauuucu

SEQ ID NO: 3408240 - RNA, 11 nt, Human
uacucauuuuu

SEQ ID NO: 3408241 - RNA, 14 nt, Human
uacucauuuuucau

SEQ ID NO: 3408242 - RNA, 19 nt, Human
uacuccaaaacuucguuua

SEQ ID NO: 3408243 - RNA, 22 nt, Human
uacuccaaaacuucguuuaaug

SEQ ID NO: 3408244 - RNA, 17 nt, Human
uacuccacacugcacaa

SEQ ID NO: 3408245 - RNA, 12 nt, Human
uacucccaucug

SEQ ID NO: 3408246 - RNA, 14 nt, Human
uacucccaucugug

SEQ ID NO: 3408247 - RNA, 16 nt, Human
uacucccaucugugaa

SEQ ID NO: 3408248 - RNA, 10 nt, Human
uacuccccuu

SEQ ID NO: 3408249 - RNA, 15 nt, Human
uacuccccuugagcu

SEQ ID NO: 3408250 - RNA, 13 nt, Human
uacucccugcaga

SEQ ID NO: 3408251 - RNA, 18 nt, Human
uacucccugcagaugcca

SEQ ID NO: 3408252 - RNA, 13 nt, Human
uacuccuauuuuu

SEQ ID NO: 3408253 - RNA, 20 nt, Human
uacuccuauuuuuguaaacu

SEQ ID NO: 3408254 - RNA, 21 nt, Human
uacuccuauuuuuguaaacug

SEQ ID NO: 3408255 - RNA, 12 nt, Human
uacuccucugca

SEQ ID NO: 3408256 - RNA, 11 nt, Human
uacuccugacu

SEQ ID NO: 3408257 - RNA, 11 nt, Human
uacuccugugg

SEQ ID NO: 3408258 - RNA, 18 nt, Human
uacucgaguuacagacaa

SEQ ID NO: 3408259 - RNA, 22 nt, Human
uacucgggaggcugaggcagga

SEQ ID NO: 3408260 - RNA, 18 nt, Human
uacucuaagaucuuagau

SEQ ID NO: 3408261 - RNA, 14 nt, Human
uacucuaauucuaa

SEQ ID NO: 3408262 - RNA, 15 nt, Human
uacucuaauucuaac

SEQ ID NO: 3408263 - RNA, 16 nt, Human
uacucuaauucuaacc

SEQ ID NO: 3408264 - RNA, 22 nt, Human
uacucuacccucuuagaaaaac

SEQ ID NO: 3408265 - RNA, 15 nt, Human
uacucuagauuuugu

SEQ ID NO: 3408266 - RNA, 20 nt, Human
uacucuauaaccaaaugaaa

SEQ ID NO: 3408267 - RNA, 18 nt, Human
uacucuccaaccuggaca

SEQ ID NO: 3408268 - RNA, 14 nt, Human
uacucuccuagaga

SEQ ID NO: 3408269 - RNA, 19 nt, Human
uacucuccucggcccccuc

SEQ ID NO: 3408270 - RNA, 21 nt, Human
uacucuccuugaguguaugag

SEQ ID NO: 3408271 - RNA, 14 nt, Human
uacucucuucuucu

SEQ ID NO: 3408272 - RNA, 19 nt, Human
uacucugaagggcaucaug

SEQ ID NO: 3408273 - RNA, 20 nt, Human
uacucugccacuuuauuucu

SEQ ID NO: 3408274 - RNA, 11 nt, Human
uacucugggaa

SEQ ID NO: 3408275 - RNA, 13 nt, Human
uacucugggaacu

SEQ ID NO: 3408276 - RNA, 21 nt, Human
uacucuggggugcugccugaa

SEQ ID NO: 3408277 - RNA, 15 nt, Human
uacucugucagaugg

SEQ ID NO: 3408278 - RNA, 19 nt, Human
uacucuguccauuuaucca

SEQ ID NO: 3408279 - RNA, 12 nt, Human
uacucugucucc

SEQ ID NO: 3408280 - RNA, 13 nt, Human
uacucugucuccc

SEQ ID NO: 3408281 - RNA, 15 nt, Human
uacucugugccagag

SEQ ID NO: 3408282 - RNA, 17 nt, Human
uacucugugccagagcc

SEQ ID NO: 3408283 - RNA, 18 nt, Human
uacucugugccagagccu

SEQ ID NO: 3408284 - RNA, 20 nt, Human
uacucugugccagagccugg

SEQ ID NO: 3408285 - RNA, 21 nt, Human
uacucugugccagagccuggg

SEQ ID NO: 3408286 - RNA, 12 nt, Human
uacucuguguca

SEQ ID NO: 3408287 - RNA, 14 nt, Human
uacucuguuccuuc

SEQ ID NO: 3408288 - RNA, 15 nt, Human
uacucuuaagccauc

SEQ ID NO: 3408289 - RNA, 12 nt, Human
uacucuuccgaa

SEQ ID NO: 3408290 - RNA, 16 nt, Human
uacucuucucucugcu

SEQ ID NO: 3408291 - RNA, 17 nt, Human
uacucuucucucugcuc

SEQ ID NO: 3408292 - RNA, 18 nt, Human
uacucuucucucugcucu

SEQ ID NO: 3408293 - RNA, 19 nt, Human
uacucuucucucugcucug

SEQ ID NO: 3408294 - RNA, 17 nt, Human
uacucuucuugaaauuu

SEQ ID NO: 3408295 - RNA, 16 nt, Human
uacucuugguuuuuau

SEQ ID NO: 3408296 - RNA, 20 nt, Human
uacucuuguaagauuuugaa

SEQ ID NO: 3408297 - RNA, 17 nt, Human
uacucuuguugaguucu

SEQ ID NO: 3408298 - RNA, 13 nt, Human
uacucuuucugua

SEQ ID NO: 3408299 - RNA, 16 nt, Human
uacucuuucuguauau

SEQ ID NO: 3408300 - RNA, 14 nt, Human
uacucuuuuuguuu

SEQ ID NO: 3408301 - RNA, 13 nt, Human
uacugaaagccuu

SEQ ID NO: 3408302 - RNA, 19 nt, Human
uacugaaauaaacgucuua

SEQ ID NO: 3408303 - RNA, 20 nt, Human
uacugaacaucugaguccug

SEQ ID NO: 3408304 - RNA, 21 nt, Human
uacugaacaucugaguccugg

SEQ ID NO: 3408305 - RNA, 19 nt, Human
uacugaaccacuuguagau

SEQ ID NO: 3408306 - RNA, 22 nt, Human
uacugaacuguguguaauuguu

SEQ ID NO: 3408307 - RNA, 13 nt, Human
uacugaaggaaaa

SEQ ID NO: 3408308 - RNA, 23 nt, Human
uacugaaggaaaaacacaagcaa

SEQ ID NO: 3408309 - RNA, 16 nt, Human
uacugaaguaaaacaa

SEQ ID NO: 3408310 - RNA, 19 nt, Human
uacugaaugaagcaguauu

SEQ ID NO: 3408311 - RNA, 12 nt, Human
uacugaauuuuu

SEQ ID NO: 3408312 - RNA, 22 nt, Human
uacugacauguggggccagguc

SEQ ID NO: 3408313 - RNA, 19 nt, Human
uacugacccuggggcuggc

SEQ ID NO: 3408314 - RNA, 20 nt, Human
uacugacuccaaccauucaa

SEQ ID NO: 3408315 - RNA, 17 nt, Human
uacugacuuugcuugcu

SEQ ID NO: 3408316 - RNA, 20 nt, Human
uacugacuuugcuugcuuug

SEQ ID NO: 3408317 - RNA, 22 nt, Human
uacugacuuugcuugcuuugaa

SEQ ID NO: 3408318 - RNA, 15 nt, Human
uacugagccuuguaa

SEQ ID NO: 3408319 - RNA, 15 nt, Human
uacugaggugcuaug

SEQ ID NO: 3408320 - RNA, 20 nt, Human
uacugaguauguggaaggca

SEQ ID NO: 3408321 - RNA, 18 nt, Human
uacugauguuccuuugga

SEQ ID NO: 3408322 - RNA, 20 nt, Human
uacugauucaauuugaugug

SEQ ID NO: 3408323 - RNA, 19 nt, Human
uacugauuucaguaagucu

SEQ ID NO: 3408324 - RNA, 13 nt, Human
uacugauuuuugu

SEQ ID NO: 3408325 - RNA, 16 nt, Human
uacugcaaaaagaaaa

SEQ ID NO: 3408326 - RNA, 14 nt, Human
uacugcaagaaaau

SEQ ID NO: 3408327 - RNA, 21 nt, Human
uacugcaagguucaacuuauu

SEQ ID NO: 3408328 - RNA, 16 nt, Human
uacugcacuccagccu

SEQ ID NO: 3408329 - RNA, 18 nt, Human
uacugcacuccagccugg

SEQ ID NO: 3408330 - RNA, 15 nt, Human
uacuuagcagcuauc

SEQ ID NO: 3408331 - RNA, 15 nt, Human
uacuuagcauccuaa

SEQ ID NO: 3408332 - RNA, 17 nt, Human
uacuuaguauugcaaag

SEQ ID NO: 3408333 - RNA, 16 nt, Human
uacuuauauggaaauu

SEQ ID NO: 3408334 - RNA, 17 nt, Human
uacuuauauuuucguau

SEQ ID NO: 3408335 - RNA, 17 nt, Human
uacuuaucccugcccau

SEQ ID NO: 3408336 - RNA, 13 nt, Human
uacuuauuccaga

SEQ ID NO: 3408337 - RNA, 14 nt, Human
uacuuauuuaaaua

SEQ ID NO: 3408338 - RNA, 16 nt, Human
uacuucaaaaguauuu

SEQ ID NO: 3408339 - RNA, 22 nt, Human
uacuucaaaaguuuguuugcuu

SEQ ID NO: 3408340 - RNA, 14 nt, Human
uacuucaaauccuu

SEQ ID NO: 3408341 - RNA, 19 nt, Human
uacuucaaauccuugaaga

SEQ ID NO: 3408342 - RNA, 14 nt, Human
uacuucacugucag

SEQ ID NO: 3408343 - RNA, 22 nt, Human
uacuucacuuuaauucucaugu

SEQ ID NO: 3408344 - RNA, 23 nt, Human
uacuuccaagacuuauuuucaca

SEQ ID NO: 3408345 - RNA, 14 nt, Human
uacuuccaugaauu

SEQ ID NO: 3408346 - RNA, 19 nt, Human
uacuucccgggccagggcu

SEQ ID NO: 3408347 - RNA, 21 nt, Human
uacuucccgggccagggcugc

SEQ ID NO: 3408348 - RNA, 16 nt, Human
uacuuccuccucccca

SEQ ID NO: 3408349 - RNA, 22 nt, Human
uacuuccuuaugcuucuuucaa

SEQ ID NO: 3408350 - RNA, 15 nt, Human
uacuucugcuacaua

SEQ ID NO: 3408351 - RNA, 20 nt, Human
uacuucuguaauugugugga

SEQ ID NO: 3408352 - RNA, 15 nt, Human
uacuucuuauacauu

SEQ ID NO: 3408353 - RNA, 17 nt, Human
uacuucuucuguaauau

SEQ ID NO: 3408354 - RNA, 16 nt, Human
uacuugaaccauaaaa

SEQ ID NO: 3408355 - RNA, 16 nt, Human
uacuugaacguuuucu

SEQ ID NO: 3408356 - RNA, 18 nt, Human
uacuugaacguuuucuaa

SEQ ID NO: 3408357 - RNA, 23 nt, Human
uacuugaacguuuucuaauugcu

SEQ ID NO: 3408358 - RNA, 11 nt, Human
uacuugaacuu

SEQ ID NO: 3408359 - RNA, 17 nt, Human
uacuugaacuugccucu

SEQ ID NO: 3408360 - RNA, 12 nt, Human
uacuugaagggc

SEQ ID NO: 3408361 - RNA, 17 nt, Human
uacuugaagggccagag

SEQ ID NO: 3408362 - RNA, 18 nt, Human
uacuugaagggccagagc

SEQ ID NO: 3408363 - RNA, 20 nt, Human
uacuugaagggccagagcca

SEQ ID NO: 3408364 - RNA, 21 nt, Human
uacuugaagggccagagccag

SEQ ID NO: 3408365 - RNA, 15 nt, Human
uacuugaauaguauu

SEQ ID NO: 3408366 - RNA, 12 nt, Human
uacuugaaugaa

SEQ ID NO: 3408367 - RNA, 14 nt, Human
uacuugaaugaaaa

SEQ ID NO: 3408368 - RNA, 18 nt, Human
uacuugaguguaauguuu

SEQ ID NO: 3408369 - RNA, 22 nt, Human
uacuugaugaguguaacaagaa

SEQ ID NO: 3408370 - RNA, 16 nt, Human
uacuugcacucuucua

SEQ ID NO: 3408371 - RNA, 15 nt, Human
uacuugccagaaguu

SEQ ID NO: 3408372 - RNA, 14 nt, Human
uacuugcucuggac

SEQ ID NO: 3408373 - RNA, 19 nt, Human
uacuugcucuugaugccug

SEQ ID NO: 3408374 - RNA, 15 nt, Human
uacuugcugcuauuu

SEQ ID NO: 3408375 - RNA, 23 nt, Human
uacuugcuuuaccuuuucagggc

SEQ ID NO: 3408376 - RNA, 17 nt, Human
uacuuggaaauauuaaa

SEQ ID NO: 3408377 - RNA, 14 nt, Human
uacuuggauuuagu

SEQ ID NO: 3408378 - RNA, 19 nt, Human
uacuugggaagcugaggcg

SEQ ID NO: 3408379 - RNA, 15 nt, Human
uacuuggucacagcc

SEQ ID NO: 3408380 - RNA, 19 nt, Human
uacuuggucacagccaggc

SEQ ID NO: 3408381 - RNA, 13 nt, Human
uacuugguuugug

SEQ ID NO: 3408382 - RNA, 14 nt, Human
uacuugguuugugu

SEQ ID NO: 3408383 - RNA, 20 nt, Human
uacuugguuuguguucuucu

SEQ ID NO: 3408384 - RNA, 20 nt, Human
uacuuguaaauauaaagacg

SEQ ID NO: 3408385 - RNA, 14 nt, Human
uacuuguaauuaug

SEQ ID NO: 3408386 - RNA, 11 nt, Human
uacuugucaau

SEQ ID NO: 3408387 - RNA, 20 nt, Human
uacuugugaaacacagcugu

SEQ ID NO: 3408388 - RNA, 13 nt, Human
uacuuguggacac

SEQ ID NO: 3408389 - RNA, 18 nt, Human
uacuuguggacacagcuc

SEQ ID NO: 3408390 - RNA, 19 nt, Human
uacuuguggacacagcucu

SEQ ID NO: 3408391 - RNA, 16 nt, Human
uacuuguggacuaaaa

SEQ ID NO: 3408392 - RNA, 20 nt, Human
uacuuguggacuaaaagaua

SEQ ID NO: 3408393 - RNA, 17 nt, Human
uacuugugguuuucaaa

SEQ ID NO: 3408394 - RNA, 13 nt, Human
uacuuguucaaaa

SEQ ID NO: 3408395 - RNA, 13 nt, Human
uacuuguuguuua

SEQ ID NO: 3408396 - RNA, 14 nt, Human
uacuuguuucagag

SEQ ID NO: 3408397 - RNA, 13 nt, Human
uacuuguuucuau

SEQ ID NO: 3408398 - RNA, 12 nt, Human
uacuuuaaacua

SEQ ID NO: 3408399 - RNA, 13 nt, Human
uacuuuaacaugc

SEQ ID NO: 3408400 - RNA, 21 nt, Human
uacuuuaacuuaguuuugcau

SEQ ID NO: 3408401 - RNA, 23 nt, Human
uacuuuaacuuaguuuugcauag

SEQ ID NO: 3408402 - RNA, 22 nt, Human
uacuuuaagcacuacauaaacu

SEQ ID NO: 3408403 - RNA, 17 nt, Human
uacuuuacauaugcuuu

SEQ ID NO: 3408404 - RNA, 18 nt, Human
uacuuuaccucucuguca

SEQ ID NO: 3408405 - RNA, 22 nt, Human
uacuuuaccucucugucaugug

SEQ ID NO: 3408406 - RNA, 15 nt, Human
uacuuuacugccuga

SEQ ID NO: 3408407 - RNA, 17 nt, Human
uacuuuagaagccugca

SEQ ID NO: 3408408 - RNA, 21 nt, Human
uacuuuagaagccugcauaau

SEQ ID NO: 3408409 - RNA, 21 nt, Human
uacuuuagauggcaagcaugu

SEQ ID NO: 3408410 - RNA, 20 nt, Human
uacuuuauaacuaacauguc

SEQ ID NO: 3408411 - RNA, 23 nt, Human
uacuuuauaacuaacauguccug

SEQ ID NO: 3408412 - RNA, 14 nt, Human
uacuuuaucacuuu

SEQ ID NO: 3408413 - RNA, 18 nt, Human
uacuuuaucacuuuuuga

SEQ ID NO: 3408414 - RNA, 21 nt, Human
uacuuuaucaugaaugcuuuu

SEQ ID NO: 3408415 - RNA, 20 nt, Human
uacuuuauuuauacacuguc

SEQ ID NO: 3408416 - RNA, 15 nt, Human
uacuuucccuugcuu

SEQ ID NO: 3408417 - RNA, 17 nt, Human
uacuuucguacauuggc

SEQ ID NO: 3408418 - RNA, 12 nt, Human
uacuuucuguua

SEQ ID NO: 3408419 - RNA, 18 nt, Human
uacuuugaagucauacca

SEQ ID NO: 3408420 - RNA, 14 nt, Human
uacuuugauucaca

SEQ ID NO: 3408421 - RNA, 17 nt, Human
uacuuugauucacaugu

SEQ ID NO: 3408422 - RNA, 21 nt, Human
uacuuugauucacauguuuuc

SEQ ID NO: 3408423 - RNA, 12 nt, Human
uacuuugcauug

SEQ ID NO: 3408424 - RNA, 20 nt, Human
uacuuugccuuuugcaaacu

SEQ ID NO: 3408425 - RNA, 18 nt, Human
uacuuugguuucugagca

SEQ ID NO: 3408426 - RNA, 23 nt, Human
uacuuuguaaauaggauuuuuag

SEQ ID NO: 3408427 - RNA, 22 nt, Human
uacuuuguaagugagagagaca

SEQ ID NO: 3408428 - RNA, 18 nt, Human
uacuuuguauuguccuau

SEQ ID NO: 3408429 - RNA, 20 nt, Human
uacuuuguccuuuuuguuau

SEQ ID NO: 3408430 - RNA, 17 nt, Human
uacuuugucuaagaaac

SEQ ID NO: 3408431 - RNA, 20 nt, Human
uacuuugucuaagaaacauu

SEQ ID NO: 3408432 - RNA, 16 nt, Human
uacuuugugcuggggu

SEQ ID NO: 3408433 - RNA, 21 nt, Human
uacuuuguggaccaauuauug

SEQ ID NO: 3408434 - RNA, 22 nt, Human
uacuuuguggaccaauuauuga

SEQ ID NO: 3408435 - RNA, 14 nt, Human
uacuuuuaaaaaca

SEQ ID NO: 3408436 - RNA, 15 nt, Human
uacuuuuaaaaacau

SEQ ID NO: 3408437 - RNA, 21 nt, Human
uacuuuuaaacuguguacaua

SEQ ID NO: 3408438 - RNA, 22 nt, Human
uacuuuuaaagaauuucuuuau

SEQ ID NO: 3408439 - RNA, 23 nt, Human
uacuuuuacaaguaacaaaaaua

SEQ ID NO: 3408440 - RNA, 19 nt, Human
uacuuuuauuugcaacauu

SEQ ID NO: 3408441 - RNA, 21 nt, Human
uacuuuuauuugcaacauuua

SEQ ID NO: 3408442 - RNA, 11 nt, Human
uacuuuuccuu

SEQ ID NO: 3408443 - RNA, 13 nt, Human
uacuuuuccuucc

SEQ ID NO: 3408444 - RNA, 22 nt, Human
uacuuuuccuugcauacaaaca

SEQ ID NO: 3408445 - RNA, 21 nt, Human
uacuuuucuucuauugccucu

SEQ ID NO: 3408446 - RNA, 14 nt, Human
uacuuuugagugug

SEQ ID NO: 3408447 - RNA, 17 nt, Human
uacuuuugagugugugu

SEQ ID NO: 3408448 - RNA, 15 nt, Human
uacuuuugcccuuug

SEQ ID NO: 3408449 - RNA, 13 nt, Human
uacuuuuggaauc

SEQ ID NO: 3408450 - RNA, 14 nt, Human
uacuuuuggaaucu

SEQ ID NO: 3408451 - RNA, 19 nt, Human
uacuuuuuaguaauuucuu

SEQ ID NO: 3408452 - RNA, 16 nt, Human
uacuuuuuauauauau

SEQ ID NO: 3408453 - RNA, 14 nt, Human
uacuuuuuggcaua

SEQ ID NO: 3408454 - RNA, 13 nt, Human
uacuuuuugugaa

SEQ ID NO: 3408455 - RNA, 13 nt, Human
uacuuuuuuaaau

SEQ ID NO: 3408456 - RNA, 20 nt, Human
uacuuuuuuaaauauuuucu

SEQ ID NO: 3408457 - RNA, 22 nt, Human
uacuuuuuuaaauauuuucuau

SEQ ID NO: 3408458 - RNA, 23 nt, Human
uacuuuuuuaaauauuuucuauu

SEQ ID NO: 3408459 - RNA, 18 nt, Human
uacuuuuuucuuauuuaa

SEQ ID NO: 3408460 - RNA, 14 nt, Human
uacuuuuuuucaca

SEQ ID NO: 3408461 - RNA, 21 nt, Human
uacuuuuuuuuuuuuuuggua

SEQ ID NO: 3408462 - RNA, 14 nt, Human
uagaaaaacaggca

SEQ ID NO: 3408463 - RNA, 19 nt, Human
uagaaaaagaacaugcagu

SEQ ID NO: 3408464 - RNA, 21 nt, Human
uagaaaaagaacaugcaguuu

SEQ ID NO: 3408465 - RNA, 23 nt, Human
uagaaaaagaacaugcaguuuga

SEQ ID NO: 3408466 - RNA, 13 nt, Human
uagaaaaagcagu

SEQ ID NO: 3408467 - RNA, 20 nt, Human
uagaaaacaaugcaaaaccu

SEQ ID NO: 3408468 - RNA, 23 nt, Human
uagaaaacaggaaaaaaacuuuu

SEQ ID NO: 3408469 - RNA, 20 nt, Human
uagaaaacugaaaaucuaau

SEQ ID NO: 3408470 - RNA, 21 nt, Human
uagaaaacugaaaaucuaaua

SEQ ID NO: 3408471 - RNA, 11 nt, Human
uagaaaacuuu

SEQ ID NO: 3408472 - RNA, 20 nt, Human
uagaaaagcugaucauaagu

SEQ ID NO: 3408473 - RNA, 18 nt, Human
uagaaaagugaauugaag

SEQ ID NO: 3408474 - RNA, 16 nt, Human
uauaagauuagaauga

SEQ ID NO: 3408475 - RNA, 19 nt, Human
uauaagcaaauugcuuuuu

SEQ ID NO: 3408476 - RNA, 23 nt, Human
uauaagcaaauuucaaaagacau

SEQ ID NO: 3408477 - RNA, 22 nt, Human
uauaagcaagaaggcaaaaaua

SEQ ID NO: 3408478 - RNA, 16 nt, Human
uauaagcaucauuauu

SEQ ID NO: 3408479 - RNA, 19 nt, Human
uauaagccaaaauuaaggu

SEQ ID NO: 3408480 - RNA, 22 nt, Human
uauaagccaaaauuaagguguu

SEQ ID NO: 3408481 - RNA, 14 nt, Human
uauaagcuuuucuu

SEQ ID NO: 3408482 - RNA, 14 nt, Human
uauaaggaagauuu

SEQ ID NO: 3408483 - RNA, 15 nt, Human
uauaaggacugcaug

SEQ ID NO: 3408484 - RNA, 21 nt, Human
uauaaggugcucucuuucugu

SEQ ID NO: 3408485 - RNA, 22 nt, Human
uauaaggugcucucuuucuguc

SEQ ID NO: 3408486 - RNA, 20 nt, Human
uauaagguguuuucugugua

SEQ ID NO: 3408487 - RNA, 22 nt, Human
uauaagguguuuucuguguaac

SEQ ID NO: 3408488 - RNA, 17 nt, Human
uauaagguuuaaaaaga

SEQ ID NO: 3408489 - RNA, 15 nt, Human
uauaagguuuuaagu

SEQ ID NO: 3408490 - RNA, 15 nt, Human
uauaagugaagugau

SEQ ID NO: 3408491 - RNA, 21 nt, Human
uauaagugcacacagaaauau

SEQ ID NO: 3408492 - RNA, 22 nt, Human
uauaagugcacacagaaauaua

SEQ ID NO: 3408493 - RNA, 21 nt, Human
uauaagugcuguauaaaauca

SEQ ID NO: 3408494 - RNA, 18 nt, Human
uauaaguggaggcacuuu

SEQ ID NO: 3408495 - RNA, 19 nt, Human
uauaaguggaggcacuuua

SEQ ID NO: 3408496 - RNA, 23 nt, Human
uauaaguguguguuuuucauaaa

SEQ ID NO: 3408497 - RNA, 19 nt, Human
uauaaguuauuuuuguaca

SEQ ID NO: 3408498 - RNA, 20 nt, Human
uauaaguuauuuuuguacau

SEQ ID NO: 3408499 - RNA, 21 nt, Human
uauaaguuauuuuuguacaug

SEQ ID NO: 3408500 - RNA, 12 nt, Human
uauaaguuucuu

SEQ ID NO: 3408501 - RNA, 13 nt, Human
uauaaguuugaag

SEQ ID NO: 3408502 - RNA, 18 nt, Human
uauaauaaaaauauauuu

SEQ ID NO: 3408503 - RNA, 21 nt, Human
uauaauaaaaggaaaagcaaa

SEQ ID NO: 3408504 - RNA, 20 nt, Human
uauaauaaaauguguugaaa

SEQ ID NO: 3408505 - RNA, 14 nt, Human
uauaauaaacauaa

SEQ ID NO: 3408506 - RNA, 16 nt, Human
uauaauacacaaaauc

SEQ ID NO: 3408507 - RNA, 18 nt, Human
uauaauacacaaaaucaa

SEQ ID NO: 3408508 - RNA, 23 nt, Human
uauaauacacaaaaucaaauaau

SEQ ID NO: 3408509 - RNA, 20 nt, Human
uauaauacagaaucuuguuu

SEQ ID NO: 3408510 - RNA, 17 nt, Human
uauaauacucuguugua

SEQ ID NO: 3408511 - RNA, 15 nt, Human
uauaauacuuuguau

SEQ ID NO: 3408512 - RNA, 22 nt, Human
uauaauacuuuguauacaagua

SEQ ID NO: 3408513 - RNA, 22 nt, Human
uauaauauaaaaaauuuuaaaa

SEQ ID NO: 3408514 - RNA, 22 nt, Human
uauaauauauuuguguauuuaa

SEQ ID NO: 3408515 - RNA, 16 nt, Human
uauaaucaccagggcc

SEQ ID NO: 3408516 - RNA, 14 nt, Human
uauaaucagaaugg

SEQ ID NO: 3408517 - RNA, 15 nt, Human
uauaaucucuucuua

SEQ ID NO: 3408518 - RNA, 17 nt, Human
uauaaugaacaaaauua

SEQ ID NO: 3408519 - RNA, 14 nt, Human
uauaaugaagcuuu

SEQ ID NO: 3408520 - RNA, 23 nt, Human
uauaaugaagcuuuauacgugua

SEQ ID NO: 3408521 - RNA, 11 nt, Human
uauaaugaaug

SEQ ID NO: 3408522 - RNA, 20 nt, Human
uauaaugaaugaaacauuuu

SEQ ID NO: 3408523 - RNA, 18 nt, Human
uauaaugaaugagagaau

SEQ ID NO: 3408524 - RNA, 13 nt, Human
uauaaugauuauu

SEQ ID NO: 3408525 - RNA, 17 nt, Human
uauaauggaagagaaau

SEQ ID NO: 3408526 - RNA, 21 nt, Human
uauaauggaagagaaaucuca

SEQ ID NO: 3408527 - RNA, 16 nt, Human
uauaauggaguuaacg

SEQ ID NO: 3408528 - RNA, 17 nt, Human
uauaaugguuucaaaga

SEQ ID NO: 3408529 - RNA, 18 nt, Human
uauaauguauucauauuu

SEQ ID NO: 3408530 - RNA, 19 nt, Human
uauaauguauucauauuug

SEQ ID NO: 3408531 - RNA, 13 nt, Human
uauaaugugugua

SEQ ID NO: 3408532 - RNA, 15 nt, Human
uauaauguguguaug

SEQ ID NO: 3408533 - RNA, 19 nt, Human
uauaauguguguaugugua

SEQ ID NO: 3408534 - RNA, 22 nt, Human
uauaauguguguauguguauuu

SEQ ID NO: 3408535 - RNA, 17 nt, Human
uauaauguuguuauuua

SEQ ID NO: 3408536 - RNA, 19 nt, Human
uauaauguuguuauuuaaa

SEQ ID NO: 3408537 - RNA, 17 nt, Human
uauaauguuuauuaaau

SEQ ID NO: 3408538 - RNA, 13 nt, Human
uauaauuaacaug

SEQ ID NO: 3408539 - RNA, 15 nt, Human
uauaauuaacauguu

SEQ ID NO: 3408540 - RNA, 18 nt, Human
uauaauuaacauguuaaa

SEQ ID NO: 3408541 - RNA, 17 nt, Human
uauaauuauauguugua

SEQ ID NO: 3408542 - RNA, 19 nt, Human
uauaauuauauguuguaag

SEQ ID NO: 3408543 - RNA, 19 nt, Human
uauaauuaucggaagcagu

SEQ ID NO: 3408544 - RNA, 16 nt, Human
uauaauucaguauguu

SEQ ID NO: 3408545 - RNA, 14 nt, Human
uauaauucuguaaa

SEQ ID NO: 3408546 - RNA, 13 nt, Human
uauaauucuguac

SEQ ID NO: 3408547 - RNA, 14 nt, Human
uauaauucuguaca

SEQ ID NO: 3408548 - RNA, 15 nt, Human
uauaauucuguacau

SEQ ID NO: 3408549 - RNA, 22 nt, Human
uauaauucuguacauagccuau

SEQ ID NO: 3408550 - RNA, 18 nt, Human
uauaauucuguacugauu

SEQ ID NO: 3408551 - RNA, 17 nt, Human
uauaauuggauuuccua

SEQ ID NO: 3408552 - RNA, 19 nt, Human
uauaauuggauuuccuaau

SEQ ID NO: 3408553 - RNA, 20 nt, Human
uauaauuggauuuccuaaua

SEQ ID NO: 3408554 - RNA, 13 nt, Human
uauaauuguacaa

SEQ ID NO: 3408555 - RNA, 14 nt, Human
uauaauuguacaaa

SEQ ID NO: 3408556 - RNA, 16 nt, Human
uauaauuguacaaaau

SEQ ID NO: 3408557 - RNA, 13 nt, Human
uauaauuguaucg

SEQ ID NO: 3408558 - RNA, 14 nt, Human
uauaauuguaucgu

SEQ ID NO: 3408559 - RNA, 23 nt, Human
uauaauugugugauauuucagaa

SEQ ID NO: 3408560 - RNA, 21 nt, Human
uauaauuguucucagaauccc

SEQ ID NO: 3408561 - RNA, 14 nt, Human
uauaauuguugcau

SEQ ID NO: 3408562 - RNA, 18 nt, Human
uauaauuguuuuuuaucu

SEQ ID NO: 3408563 - RNA, 15 nt, Human
uauaauuuaacuuca

SEQ ID NO: 3408564 - RNA, 17 nt, Human
uauaauuuaccuaagau

SEQ ID NO: 3408565 - RNA, 20 nt, Human
uauaauuuaccuaagauuac

SEQ ID NO: 3408566 - RNA, 21 nt, Human
uauaauuucgagauuuguagg

SEQ ID NO: 3408567 - RNA, 20 nt, Human
uauaauuuuaagauuccuuu

SEQ ID NO: 3408568 - RNA, 17 nt, Human
uauaauuuuaugaaugu

SEQ ID NO: 3408569 - RNA, 14 nt, Human
uauaauuuugauag

SEQ ID NO: 3408570 - RNA, 15 nt, Human
uauaauuuuuuaaag

SEQ ID NO: 3408571 - RNA, 18 nt, Human
uauaauuuuuuucaauau

SEQ ID NO: 3408572 - RNA, 21 nt, Human
uauacaaaauaagaacgagga

SEQ ID NO: 3408573 - RNA, 13 nt, Human
uauacaaauuaga

SEQ ID NO: 3408574 - RNA, 17 nt, Human
uauacaaauuagaaaau

SEQ ID NO: 3408575 - RNA, 23 nt, Human
uauacaacaccaaaaaauaucua

SEQ ID NO: 3408576 - RNA, 21 nt, Human
uauacaacagugcuaaaaaug

SEQ ID NO: 3408577 - RNA, 15 nt, Human
uauacaauaacauaa

SEQ ID NO: 3408578 - RNA, 13 nt, Human
uauacaauaaugg

SEQ ID NO: 3408579 - RNA, 18 nt, Human
uauacaauauauaaaaau

SEQ ID NO: 3408580 - RNA, 19 nt, Human
uauacaauauauaaaaaua

SEQ ID NO: 3408581 - RNA, 12 nt, Human
uauacacugugu

SEQ ID NO: 3408582 - RNA, 22 nt, Human
uauacagaauugugucugcagg

SEQ ID NO: 3408583 - RNA, 20 nt, Human
uauacagaggaaaucuguaa

SEQ ID NO: 3408584 - RNA, 14 nt, Human
uauacagaugaaaa

SEQ ID NO: 3408585 - RNA, 19 nt, Human
uauacagaugaaaauuuga

SEQ ID NO: 3408586 - RNA, 21 nt, Human
uauacagaugaaaauuugaga

SEQ ID NO: 3408587 - RNA, 19 nt, Human
uauacaggggaauauuuua

SEQ ID NO: 3408588 - RNA, 23 nt, Human
uauacaggggaauauuuuauuca

SEQ ID NO: 3408589 - RNA, 18 nt, Human
uauacaguaacuuuaugu

SEQ ID NO: 3408590 - RNA, 19 nt, Human
uauacaguaacuuuaugug

SEQ ID NO: 3408591 - RNA, 22 nt, Human
uauacaguagugagaagaauau

SEQ ID NO: 3408592 - RNA, 16 nt, Human
uauacaguuauaaaau

SEQ ID NO: 3408593 - RNA, 18 nt, Human
uauacaguuauaaaauua

SEQ ID NO: 3408594 - RNA, 20 nt, Human
uauacaguucaauaaacuua

SEQ ID NO: 3408595 - RNA, 19 nt, Human
uauacaguuuuaaagaauc

SEQ ID NO: 3408596 - RNA, 19 nt, Human
uauacauacuuacaugugu

SEQ ID NO: 3408597 - RNA, 22 nt, Human
uauacauagcaugacauuucuu

SEQ ID NO: 3408598 - RNA, 18 nt, Human
uauacauaucuuuauuaa

SEQ ID NO: 3408599 - RNA, 13 nt, Human
uauacauauguag

SEQ ID NO: 3408600 - RNA, 16 nt, Human
uauacauauguagacu

SEQ ID NO: 3408601 - RNA, 16 nt, Human
uauacaucacguuaaa

SEQ ID NO: 3408602 - RNA, 16 nt, Human
uauacauccuggguaa

SEQ ID NO: 3408603 - RNA, 15 nt, Human
uauacaugaaaauuu

SEQ ID NO: 3408604 - RNA, 15 nt, Human
uauacaugaaauuca

SEQ ID NO: 3408605 - RNA, 12 nt, Human
uauacaugugug

SEQ ID NO: 3408606 - RNA, 18 nt, Human
uauacauguguguauaua

SEQ ID NO: 3408607 - RNA, 20 nt, Human
uauacauguguguauauaug

SEQ ID NO: 3408608 - RNA, 18 nt, Human
uauacauguuuaguauua

SEQ ID NO: 3408609 - RNA, 17 nt, Human
uauacauucuuuaucuu

SEQ ID NO: 3408610 - RNA, 22 nt, Human
uauacauucuuuaucuugacau

SEQ ID NO: 3408611 - RNA, 15 nt, Human
uauaccaaaauguug

SEQ ID NO: 3408612 - RNA, 17 nt, Human
uauaccagcaauauauc

SEQ ID NO: 3408613 - RNA, 18 nt, Human
uauaccauuuccucagcu

SEQ ID NO: 3408614 - RNA, 23 nt, Human
uauacccaugaacuuaaaaugaa

SEQ ID NO: 3408615 - RNA, 15 nt, Human
uauaccuauaaugug

SEQ ID NO: 3408616 - RNA, 19 nt, Human
uauaccuauaaugugugua

SEQ ID NO: 3408617 - RNA, 12 nt, Human
uauaccucacuu

SEQ ID NO: 3408618 - RNA, 20 nt, Human
uauauguucuaauuaauaaa

SEQ ID NO: 3408619 - RNA, 19 nt, Human
uauauguuuuaagaggcag

SEQ ID NO: 3408620 - RNA, 13 nt, Human
uauauuaaaaaua

SEQ ID NO: 3408621 - RNA, 17 nt, Human
uauauuaaaaauauaaa

SEQ ID NO: 3408622 - RNA, 18 nt, Human
uauauuaaaaauauaaaa

SEQ ID NO: 3408623 - RNA, 14 nt, Human
uauauuaaaaaugg

SEQ ID NO: 3408624 - RNA, 16 nt, Human
uauauuaaaaauggua

SEQ ID NO: 3408625 - RNA, 14 nt, Human
uauauuaagcagaa

SEQ ID NO: 3408626 - RNA, 11 nt, Human
uauauuacaag

SEQ ID NO: 3408627 - RNA, 17 nt, Human
uauauuacaaugaucac

SEQ ID NO: 3408628 - RNA, 21 nt, Human
uauauuacacauuuguacaga

SEQ ID NO: 3408629 - RNA, 23 nt, Human
uauauuacugacauuucuucuag

SEQ ID NO: 3408630 - RNA, 22 nt, Human
uauauuagaucaaauaguugca

SEQ ID NO: 3408631 - RNA, 16 nt, Human
uauauuagcauuuagu

SEQ ID NO: 3408632 - RNA, 23 nt, Human
uauauuagcauuuaguccaaugu

SEQ ID NO: 3408633 - RNA, 14 nt, Human
uauauuauaaauau

SEQ ID NO: 3408634 - RNA, 17 nt, Human
uauauuauacuuguaau

SEQ ID NO: 3408635 - RNA, 14 nt, Human
uauauuauauggaa

SEQ ID NO: 3408636 - RNA, 14 nt, Human
uauauuaucaugca

SEQ ID NO: 3408637 - RNA, 12 nt, Human
uauauuauuacu

SEQ ID NO: 3408638 - RNA, 12 nt, Human
uauauuauuaua

SEQ ID NO: 3408639 - RNA, 16 nt, Human
uauauuauuucuagga

SEQ ID NO: 3408640 - RNA, 22 nt, Human
uauauuauuucuaggaagaauu

SEQ ID NO: 3408641 - RNA, 14 nt, Human
uauauuauuuggca

SEQ ID NO: 3408642 - RNA, 22 nt, Human
uauauuauuuggcaguuuggua

SEQ ID NO: 3408643 - RNA, 13 nt, Human
uauauucaaccau

SEQ ID NO: 3408644 - RNA, 19 nt, Human
uauauucauucuuuuugaa

SEQ ID NO: 3408645 - RNA, 18 nt, Human
uauauuccagguuuaagu

SEQ ID NO: 3408646 - RNA, 15 nt, Human
uauauuccuaaacua

SEQ ID NO: 3408647 - RNA, 13 nt, Human
uauauucucuuug

SEQ ID NO: 3408648 - RNA, 12 nt, Human
uauauucuuuca

SEQ ID NO: 3408649 - RNA, 13 nt, Human
uauauugaacuuu

SEQ ID NO: 3408650 - RNA, 14 nt, Human
uauauugagacaaa

SEQ ID NO: 3408651 - RNA, 19 nt, Human
uauauugcacaauuauaaa

SEQ ID NO: 3408652 - RNA, 17 nt, Human
uauauugguaacauccu

SEQ ID NO: 3408653 - RNA, 19 nt, Human
uauauugguaacauccuuu

SEQ ID NO: 3408654 - RNA, 16 nt, Human
uauauugguuuuauga

SEQ ID NO: 3408655 - RNA, 14 nt, Human
uauauuguaauuua

SEQ ID NO: 3408656 - RNA, 19 nt, Human
uauauugucagauauuuuu

SEQ ID NO: 3408657 - RNA, 15 nt, Human
uauauuguugaagag

SEQ ID NO: 3408658 - RNA, 15 nt, Human
uauauuguuugcuaa

SEQ ID NO: 3408659 - RNA, 14 nt, Human
uauauuuaaaagaa

SEQ ID NO: 3408660 - RNA, 18 nt, Human
uauauuuaaaagugucaa

SEQ ID NO: 3408661 - RNA, 13 nt, Human
uauauuuaaacuc

SEQ ID NO: 3408662 - RNA, 19 nt, Human
uauauuuaaagggaaauug

SEQ ID NO: 3408663 - RNA, 18 nt, Human
uauauuuaaguauucaag

SEQ ID NO: 3408664 - RNA, 16 nt, Human
uauauuuaaugcauua

SEQ ID NO: 3408665 - RNA, 14 nt, Human
uauauuuauaacuc

SEQ ID NO: 3408666 - RNA, 21 nt, Human
uauauuuauaacucaucauaa

SEQ ID NO: 3408667 - RNA, 16 nt, Human
uauauuuauacuguau

SEQ ID NO: 3408668 - RNA, 20 nt, Human
uauauuuauuacuguaagaa

SEQ ID NO: 3408669 - RNA, 23 nt, Human
uauauuuauuacuguaagaaaau

SEQ ID NO: 3408670 - RNA, 21 nt, Human
uauauuuauugacucuugagu

SEQ ID NO: 3408671 - RNA, 12 nt, Human
uauauuuauuua

SEQ ID NO: 3408672 - RNA, 12 nt, Human
uauauuucaagu

SEQ ID NO: 3408673 - RNA, 16 nt, Human
uauauuuccacuucuu

SEQ ID NO: 3408674 - RNA, 20 nt, Human
uauauuucccuaaaauacau

SEQ ID NO: 3408675 - RNA, 22 nt, Human
uauauuuccuuuaugugaauuu

SEQ ID NO: 3408676 - RNA, 16 nt, Human
uauauuucuaaauguu

SEQ ID NO: 3408677 - RNA, 13 nt, Human
uauauuucuauua

SEQ ID NO: 3408678 - RNA, 14 nt, Human
uauauuucuuuguu

SEQ ID NO: 3408679 - RNA, 14 nt, Human
uauauuugaaauau

SEQ ID NO: 3408680 - RNA, 16 nt, Human
uauauuugauuuauua

SEQ ID NO: 3408681 - RNA, 23 nt, Human
uauauuuggaugcagaguucagg

SEQ ID NO: 3408682 - RNA, 15 nt, Human
uauauuuguaaagcu

SEQ ID NO: 3408683 - RNA, 13 nt, Human
uauauuuguagga

SEQ ID NO: 3408684 - RNA, 13 nt, Human
uauauuuguaucg

SEQ ID NO: 3408685 - RNA, 21 nt, Human
uauauuugugauagcacuuuc

SEQ ID NO: 3408686 - RNA, 23 nt, Human
uauauuugugauagcacuuucua

SEQ ID NO: 3408687 - RNA, 20 nt, Human
uauauuugugcuauaguauu

SEQ ID NO: 3408688 - RNA, 21 nt, Human
uauauuugugcuauaguauuu

SEQ ID NO: 3408689 - RNA, 22 nt, Human
uauauuugugcuauaguauuug

SEQ ID NO: 3408690 - RNA, 16 nt, Human
uauauuuguguauuua

SEQ ID NO: 3408691 - RNA, 20 nt, Human
uauauuuguguauuuaacag

SEQ ID NO: 3408692 - RNA, 14 nt, Human
uauauuuuaagacg

SEQ ID NO: 3408693 - RNA, 16 nt, Human
uauauuuuacaauuuu

SEQ ID NO: 3408694 - RNA, 21 nt, Human
uauauuuuauacauuaacuuc

SEQ ID NO: 3408695 - RNA, 15 nt, Human
uauauuuuauauuac

SEQ ID NO: 3408696 - RNA, 21 nt, Human
uauauuuucaauucaaaaaug

SEQ ID NO: 3408697 - RNA, 16 nt, Human
uauauuuucauucucc

SEQ ID NO: 3408698 - RNA, 15 nt, Human
uauauuuucuuucuc

SEQ ID NO: 3408699 - RNA, 14 nt, Human
uauauuuugccugu

SEQ ID NO: 3408700 - RNA, 12 nt, Human
uauauuuuggga

SEQ ID NO: 3408701 - RNA, 15 nt, Human
uauauuuuguaugca

SEQ ID NO: 3408702 - RNA, 13 nt, Human
uauauuuugucau

SEQ ID NO: 3408703 - RNA, 14 nt, Human
uauauuuugucaua

SEQ ID NO: 3408704 - RNA, 16 nt, Human
uauauuuugugugaaa

SEQ ID NO: 3408705 - RNA, 18 nt, Human
uauauuuugugugaaauu

SEQ ID NO: 3408706 - RNA, 17 nt, Human
uauauuuuguuuacaaa

SEQ ID NO: 3408707 - RNA, 21 nt, Human
uauauuuuuaaaaaaugaaau

SEQ ID NO: 3408708 - RNA, 20 nt, Human
uauauuuuuaagauaauaau

SEQ ID NO: 3408709 - RNA, 20 nt, Human
uauauuuuuauauuuaguua

SEQ ID NO: 3408710 - RNA, 22 nt, Human
uauauuuuuaucuauauaaaau

SEQ ID NO: 3408711 - RNA, 15 nt, Human
uauauuuuucacagu

SEQ ID NO: 3408712 - RNA, 17 nt, Human
uauauuuuucuuaaaaa

SEQ ID NO: 3408713 - RNA, 20 nt, Human
uauauuuuucuuaaaaagua

SEQ ID NO: 3408714 - RNA, 15 nt, Human
uauauuuuuguuugu

SEQ ID NO: 3408715 - RNA, 20 nt, Human
uauauuuuuguuuguuuugu

SEQ ID NO: 3408716 - RNA, 18 nt, Human
uauauuuuuuaaaauaag

SEQ ID NO: 3408717 - RNA, 19 nt, Human
uauauuuuuuaauuugaug

SEQ ID NO: 3408718 - RNA, 21 nt, Human
uauauuuuuuguuaaaugauu

SEQ ID NO: 3408719 - RNA, 16 nt, Human
uauauuuuuuucugaa

SEQ ID NO: 3408720 - RNA, 21 nt, Human
uaucaaaauaaauugaaauau

SEQ ID NO: 3408721 - RNA, 19 nt, Human
uaucaaacaccaacauaaa

SEQ ID NO: 3408722 - RNA, 20 nt, Human
uaucaaacagaauuuuaaag

SEQ ID NO: 3408723 - RNA, 18 nt, Human
uaucaaacagcucaggcu

SEQ ID NO: 3408724 - RNA, 19 nt, Human
uaucaaacccuagccuugc

SEQ ID NO: 3408725 - RNA, 21 nt, Human
uaucaaacccuagccuugcuu

SEQ ID NO: 3408726 - RNA, 21 nt, Human
uaucaaacuucagcuguacuu

SEQ ID NO: 3408727 - RNA, 22 nt, Human
uaucaaagggugaaaauuauuu

SEQ ID NO: 3408728 - RNA, 19 nt, Human
uaucaaaugcaguauauuu

SEQ ID NO: 3408729 - RNA, 21 nt, Human
uaucaaaugcaguauauuucu

SEQ ID NO: 3408730 - RNA, 23 nt, Human
uaucaaaugcaguauauuucuuc

SEQ ID NO: 3408731 - RNA, 16 nt, Human
uaucaacccagaaaca

SEQ ID NO: 3408732 - RNA, 17 nt, Human
uaucaacccagaaacac

SEQ ID NO: 3408733 - RNA, 14 nt, Human
uaucaacuuccuaa

SEQ ID NO: 3408734 - RNA, 14 nt, Human
uaucaagacauagc

SEQ ID NO: 3408735 - RNA, 20 nt, Human
uaucaagaggcugagacagg

SEQ ID NO: 3408736 - RNA, 15 nt, Human
uaucaagcagccaag

SEQ ID NO: 3408737 - RNA, 22 nt, Human
uaucaaggaagaaaugguucag

SEQ ID NO: 3408738 - RNA, 15 nt, Human
uaucaaguauagaaa

SEQ ID NO: 3408739 - RNA, 15 nt, Human
uaucaaguggcaugu

SEQ ID NO: 3408740 - RNA, 18 nt, Human
uaucaauaucuaauauau

SEQ ID NO: 3408741 - RNA, 21 nt, Human
uaucaauaucuaauauauaug

SEQ ID NO: 3408742 - RNA, 14 nt, Human
uaucaaucauuuuc

SEQ ID NO: 3408743 - RNA, 17 nt, Human
uaucaauccuuguucag

SEQ ID NO: 3408744 - RNA, 18 nt, Human
uaucaaugugucuuucua

SEQ ID NO: 3408745 - RNA, 22 nt, Human
uaucaauuggaaaggaagaaaa

SEQ ID NO: 3408746 - RNA, 16 nt, Human
uaucaauuugucauuu

SEQ ID NO: 3408747 - RNA, 19 nt, Human
uaucaauuugucauuuuga

SEQ ID NO: 3408748 - RNA, 20 nt, Human
uaucaauuugucauuuugaa

SEQ ID NO: 3408749 - RNA, 14 nt, Human
uaucacacaaagca

SEQ ID NO: 3408750 - RNA, 13 nt, Human
uaucacacacauu

SEQ ID NO: 3408751 - RNA, 19 nt, Human
uaucacacacauugcugug

SEQ ID NO: 3408752 - RNA, 13 nt, Human
uaucacacuucug

SEQ ID NO: 3408753 - RNA, 15 nt, Human
uaucacagucuaauu

SEQ ID NO: 3408754 - RNA, 16 nt, Human
uaucacauguauguuu

SEQ ID NO: 3408755 - RNA, 18 nt, Human
uaucacauguuuucucug

SEQ ID NO: 3408756 - RNA, 20 nt, Human
uaucacccagacauaaagga

SEQ ID NO: 3408757 - RNA, 22 nt, Human
uaucacccagacauaaaggaaa

SEQ ID NO: 3408758 - RNA, 19 nt, Human
uaucaccgugggcucccug

SEQ ID NO: 3408759 - RNA, 18 nt, Human
uaucaccuagcugaaugu

SEQ ID NO: 3408760 - RNA, 15 nt, Human
uaucaccuccccucc

SEQ ID NO: 3408761 - RNA, 14 nt, Human
uaucacuuuuugaa

SEQ ID NO: 3408762 - RNA, 18 nt, Human
uaucacuuuuugaacuaa

SEQ ID NO: 3408763 - RNA, 20 nt, Human
ucaaacuccugaccucaggc

SEQ ID NO: 3408764 - RNA, 13 nt, Human
ucaaacucuuaaa

SEQ ID NO: 3408765 - RNA, 16 nt, Human
ucaaacugaagccaga

SEQ ID NO: 3408766 - RNA, 20 nt, Human
ucaaacugccuuggcuucag

SEQ ID NO: 3408767 - RNA, 14 nt, Human
ucaaacuggggccu

SEQ ID NO: 3408768 - RNA, 20 nt, Human
ucaaacuggggccuccagaa

SEQ ID NO: 3408769 - RNA, 14 nt, Human
ucaaacuguagaaa

SEQ ID NO: 3408770 - RNA, 20 nt, Human
ucaaacuguagaaaugauga

SEQ ID NO: 3408771 - RNA, 16 nt, Human
ucaaacuuacuauuuu

SEQ ID NO: 3408772 - RNA, 14 nt, Human
ucaaacuuccaguc

SEQ ID NO: 3408773 - RNA, 12 nt, Human
ucaaagaaauuu

SEQ ID NO: 3408774 - RNA, 19 nt, Human
ucaaagaaauuuccacuca

SEQ ID NO: 3408775 - RNA, 12 nt, Human
ucaaagaaggaa

SEQ ID NO: 3408776 - RNA, 14 nt, Human
ucaaagaaggcauu

SEQ ID NO: 3408777 - RNA, 23 nt, Human
ucaaagaccuggggcugcuguga

SEQ ID NO: 3408778 - RNA, 17 nt, Human
ucaaagaccuugugugu

SEQ ID NO: 3408779 - RNA, 16 nt, Human
ucaaagagaguuuuua

SEQ ID NO: 3408780 - RNA, 21 nt, Human
ucaaagaggcacagagccaaa

SEQ ID NO: 3408781 - RNA, 13 nt, Human
ucaaagauauuuu

SEQ ID NO: 3408782 - RNA, 20 nt, Human
ucaaagauauuuugcuuugu

SEQ ID NO: 3408783 - RNA, 19 nt, Human
ucaaagaugcugugagucu

SEQ ID NO: 3408784 - RNA, 10 nt, Human
ucaaagcaag

SEQ ID NO: 3408785 - RNA, 13 nt, Human
ucaaagcaagcau

SEQ ID NO: 3408786 - RNA, 21 nt, Human
ucaaagcaagcauucagaaga

SEQ ID NO: 3408787 - RNA, 15 nt, Human
ucaaagcaaggaaac

SEQ ID NO: 3408788 - RNA, 17 nt, Human
ucaaagcaaugcauuuu

SEQ ID NO: 3408789 - RNA, 19 nt, Human
ucaaagcaaugcauuuugg

SEQ ID NO: 3408790 - RNA, 19 nt, Human
ucaaagcaauugaaaugca

SEQ ID NO: 3408791 - RNA, 18 nt, Human
ucaaagcaccaaaauaag

SEQ ID NO: 3408792 - RNA, 20 nt, Human
ucaaagcaccaaaauaagaa

SEQ ID NO: 3408793 - RNA, 22 nt, Human
ucaaagcaccaaaauaagaaaa

SEQ ID NO: 3408794 - RNA, 19 nt, Human
ucaaagcacuguugagaag

SEQ ID NO: 3408795 - RNA, 10 nt, Human
ucaaagcaga

SEQ ID NO: 3408796 - RNA, 14 nt, Human
ucaaagcauagaug

SEQ ID NO: 3408797 - RNA, 19 nt, Human
ucaaagcaucuugcauuau

SEQ ID NO: 3408798 - RNA, 12 nt, Human
ucaaagccagcg

SEQ ID NO: 3408799 - RNA, 22 nt, Human
ucaaagccagcguccuccucug

SEQ ID NO: 3408800 - RNA, 23 nt, Human
ucaaagccagcguccuccucugu

SEQ ID NO: 3408801 - RNA, 14 nt, Human
ucaaagcugaaaug

SEQ ID NO: 3408802 - RNA, 14 nt, Human
ucaaagcuugaaga

SEQ ID NO: 3408803 - RNA, 20 nt, Human
ucaaaggagcgagcaugucg

SEQ ID NO: 3408804 - RNA, 14 nt, Human
ucaaaggccagacc

SEQ ID NO: 3408805 - RNA, 19 nt, Human
ucaaagggacggucaguuu

SEQ ID NO: 3408806 - RNA, 17 nt, Human
ucaaagggugaaaauua

SEQ ID NO: 3408807 - RNA, 23 nt, Human
ucaaagguucuagguuucaaaga

SEQ ID NO: 3408808 - RNA, 18 nt, Human
ucaaagguuuggaaggag

SEQ ID NO: 3408809 - RNA, 13 nt, Human
ucaaaguauuugu

SEQ ID NO: 3408810 - RNA, 17 nt, Human
ucaaagucaugauguuu

SEQ ID NO: 3408811 - RNA, 18 nt, Human
ucaaagucucaaugaaau

SEQ ID NO: 3408812 - RNA, 16 nt, Human
ucaaaguggaugcaau

SEQ ID NO: 3408813 - RNA, 20 nt, Human
ucaaaguguaaacaccauag

SEQ ID NO: 3408814 - RNA, 17 nt, Human
ucaaaguucugcuuucu

SEQ ID NO: 3408815 - RNA, 17 nt, Human
ucaaaguugaaaauuca

SEQ ID NO: 3408816 - RNA, 22 nt, Human
ucaaaguugccuaaauccauuu

SEQ ID NO: 3408817 - RNA, 13 nt, Human
ucaaaguuuugaa

SEQ ID NO: 3408818 - RNA, 20 nt, Human
ucaaauaaaaauucuagauu

SEQ ID NO: 3408819 - RNA, 11 nt, Human
ucaaauaaaca

SEQ ID NO: 3408820 - RNA, 15 nt, Human
ucaaauaaacacugu

SEQ ID NO: 3408821 - RNA, 16 nt, Human
ucaaauaaacacugug

SEQ ID NO: 3408822 - RNA, 23 nt, Human
ucaaauaaagagagaacaggacu

SEQ ID NO: 3408823 - RNA, 18 nt, Human
ucaaauaaguauuuauaa

SEQ ID NO: 3408824 - RNA, 14 nt, Human
ucaaauacacauuu

SEQ ID NO: 3408825 - RNA, 17 nt, Human
ucaaauacacauuugcu

SEQ ID NO: 3408826 - RNA, 20 nt, Human
ucaaauacgugggcauucaa

SEQ ID NO: 3408827 - RNA, 21 nt, Human
ucaaauacgugggcauucaaa

SEQ ID NO: 3408828 - RNA, 22 nt, Human
ucaaauacgugggcauucaaau

SEQ ID NO: 3408829 - RNA, 23 nt, Human
ucaaauacuuuaaaggaaaaaau

SEQ ID NO: 3408830 - RNA, 13 nt, Human
ucaaauauauuca

SEQ ID NO: 3408831 - RNA, 21 nt, Human
ucaaauaugaguacaaaugcc

SEQ ID NO: 3408832 - RNA, 18 nt, Human
ucaaauaugcaaagcacu

SEQ ID NO: 3408833 - RNA, 14 nt, Human
ucaaauauuagaug

SEQ ID NO: 3408834 - RNA, 20 nt, Human
ucaaaucaagaaacuuaagg

SEQ ID NO: 3408835 - RNA, 24 nt, Human
ucaaaucagucagugcaaauguca

SEQ ID NO: 3408836 - RNA, 19 nt, Human
ucaaauccaggacccugcc

SEQ ID NO: 3408837 - RNA, 22 nt, Human
ucaaauccaggacccugccagg

SEQ ID NO: 3408838 - RNA, 16 nt, Human
ucaaauccuuccaaaa

SEQ ID NO: 3408839 - RNA, 22 nt, Human
ucaaauccuuccaaaaauuauu

SEQ ID NO: 3408840 - RNA, 15 nt, Human
ucaaaucuaccacug

SEQ ID NO: 3408841 - RNA, 13 nt, Human
ucaaaucuauuca

SEQ ID NO: 3408842 - RNA, 16 nt, Human
ucaaaucuauucagac

SEQ ID NO: 3408843 - RNA, 22 nt, Human
ucaaaucucuacaaauuuuucu

SEQ ID NO: 3408844 - RNA, 17 nt, Human
ucaaaucuuaagaaaua

SEQ ID NO: 3408845 - RNA, 18 nt, Human
ucaaaucuuaagaaauaa

SEQ ID NO: 3408846 - RNA, 13 nt, Human
ucaaaugaaaugu

SEQ ID NO: 3408847 - RNA, 20 nt, Human
ucaaaugaaauguaugcauu

SEQ ID NO: 3408848 - RNA, 23 nt, Human
ucaaaugaaauguaugcauucac

SEQ ID NO: 3408849 - RNA, 19 nt, Human
ucaaaugaauaaugccuuu

SEQ ID NO: 3408850 - RNA, 16 nt, Human
ucaaaugaguaacauu

SEQ ID NO: 3408851 - RNA, 17 nt, Human
ucaaaugaugugcaaaa

SEQ ID NO: 3408852 - RNA, 21 nt, Human
ucaaaugaugugcaaaaccuu

SEQ ID NO: 3408853 - RNA, 19 nt, Human
ucaaaugaugugccugcuu

SEQ ID NO: 3408854 - RNA, 17 nt, Human
ucaaaugcuagaaaaau

SEQ ID NO: 3408855 - RNA, 15 nt, Human
ucaaaugggugauau

SEQ ID NO: 3408856 - RNA, 12 nt, Human
ucaaauguguac

SEQ ID NO: 3408857 - RNA, 13 nt, Human
ucaaauguucuaa

SEQ ID NO: 3408858 - RNA, 15 nt, Human
ucaaauguuuaauca

SEQ ID NO: 3408859 - RNA, 17 nt, Human
ucaaauguuuaaucaua

SEQ ID NO: 3408860 - RNA, 18 nt, Human
ucaaauguuuaaucauau

SEQ ID NO: 3408861 - RNA, 21 nt, Human
ucaaauguuuaaucauauaaa

SEQ ID NO: 3408862 - RNA, 12 nt, Human
ucaaauuaauaa

SEQ ID NO: 3408863 - RNA, 16 nt, Human
ucaaauucucaaccua

SEQ ID NO: 3408864 - RNA, 20 nt, Human
ucaaauuguaagcaugcaca

SEQ ID NO: 3408865 - RNA, 20 nt, Human
ucaaauugucagcaauuuaa

SEQ ID NO: 3408866 - RNA, 15 nt, Human
ucaaauugugugaaa

SEQ ID NO: 3408867 - RNA, 18 nt, Human
ucaaauugugugaaaggu

SEQ ID NO: 3408868 - RNA, 22 nt, Human
ucaaauuuagaaacuaauugac

SEQ ID NO: 3408869 - RNA, 18 nt, Human
ucaaauuuauuuuuuucu

SEQ ID NO: 3408870 - RNA, 15 nt, Human
ucaaauuucuaaauc

SEQ ID NO: 3408871 - RNA, 21 nt, Human
ucaaauuuuuuaaaagagaca

SEQ ID NO: 3408872 - RNA, 16 nt, Human
ucaaauuuuuugacuu

SEQ ID NO: 3408873 - RNA, 18 nt, Human
ucaacaaacuauuucuua

SEQ ID NO: 3408874 - RNA, 21 nt, Human
ucaacaaagaaacaaagaugu

SEQ ID NO: 3408875 - RNA, 14 nt, Human
ucaacaaagaaaua

SEQ ID NO: 3408876 - RNA, 16 nt, Human
ucaacaaagaaauauu

SEQ ID NO: 3408877 - RNA, 21 nt, Human
ucaacaaagaaauauuauuug

SEQ ID NO: 3408878 - RNA, 18 nt, Human
ucaacaaauauucacugg

SEQ ID NO: 3408879 - RNA, 13 nt, Human
ucaacaagccuga

SEQ ID NO: 3408880 - RNA, 20 nt, Human
ucaacaagggagagaccuca

SEQ ID NO: 3408881 - RNA, 15 nt, Human
ucaacaauaaaacau

SEQ ID NO: 3408882 - RNA, 22 nt, Human
ucaacaauuugggcuuccuguu

SEQ ID NO: 3408883 - RNA, 15 nt, Human
ucaacaccccugugu

SEQ ID NO: 3408884 - RNA, 22 nt, Human
ucaacaccuuaauaugcugcaa

SEQ ID NO: 3408885 - RNA, 14 nt, Human
ucaacagaagcauu

SEQ ID NO: 3408886 - RNA, 13 nt, Human
ucaacagaaugaa

SEQ ID NO: 3408887 - RNA, 19 nt, Human
ucaacagagaaggcaggaa

SEQ ID NO: 3408888 - RNA, 15 nt, Human
ucaacagcaagugug

SEQ ID NO: 3408889 - RNA, 16 nt, Human
ucaacagcaaguguga

SEQ ID NO: 3408890 - RNA, 18 nt, Human
ucaacaggagaauuuuac

SEQ ID NO: 3408891 - RNA, 16 nt, Human
ucaacagguuuuccug

SEQ ID NO: 3408892 - RNA, 20 nt, Human
ucaacaguaaaccacugaaa

SEQ ID NO: 3408893 - RNA, 22 nt, Human
ucaacaguaaaccacugaaaaa

SEQ ID NO: 3408894 - RNA, 15 nt, Human
ucaacaguuuuccua

SEQ ID NO: 3408895 - RNA, 17 nt, Human
ucaacaguuuuccuaug

SEQ ID NO: 3408896 - RNA, 20 nt, Human
ucaacaguuuuccuaugcuu

SEQ ID NO: 3408897 - RNA, 14 nt, Human
ucaacaucaauguu

SEQ ID NO: 3408898 - RNA, 15 nt, Human
ucaacaucaauguuc

SEQ ID NO: 3408899 - RNA, 21 nt, Human
ucaacaucaauguucauugua

SEQ ID NO: 3408900 - RNA, 13 nt, Human
ucaacaucacuga

SEQ ID NO: 3408901 - RNA, 14 nt, Human
ucaacauccugcca

SEQ ID NO: 3408902 - RNA, 15 nt, Human
ucaacauccugccag

SEQ ID NO: 3408903 - RNA, 14 nt, Human
ucaacaugaaacac

SEQ ID NO: 3408904 - RNA, 14 nt, Human
ucaacaugucuccu

SEQ ID NO: 3408905 - RNA, 19 nt, Human
ucaacauguuacugaccag

SEQ ID NO: 3408906 - RNA, 22 nt, Human
ucaacauguuacugaccagcaa

SEQ ID NO: 3408907 - RNA, 14 nt, Human
ucaacauucuuugc

SEQ ID NO: 3408908 - RNA, 20 nt, Human
ucaauuacugguccaaaaga

SEQ ID NO: 3408909 - RNA, 16 nt, Human
ucaauuauaguuucug

SEQ ID NO: 3408910 - RNA, 17 nt, Human
ucaauuauaguuucuga

SEQ ID NO: 3408911 - RNA, 19 nt, Human
ucaauuauaguuucugagg

SEQ ID NO: 3408912 - RNA, 15 nt, Human
ucaauuauuuccccc

SEQ ID NO: 3408913 - RNA, 17 nt, Human
ucaauucaaagcugugu

SEQ ID NO: 3408914 - RNA, 13 nt, Human
ucaauucaacacu

SEQ ID NO: 3408915 - RNA, 18 nt, Human
ucaauucauauuuaugaa

SEQ ID NO: 3408916 - RNA, 14 nt, Human
ucaauuccaccugc

SEQ ID NO: 3408917 - RNA, 16 nt, Human
ucaauucccauugcau

SEQ ID NO: 3408918 - RNA, 19 nt, Human
ucaauuccguagccagcug

SEQ ID NO: 3408919 - RNA, 13 nt, Human
ucaauuccugggc

SEQ ID NO: 3408920 - RNA, 12 nt, Human
ucaauucucaaa

SEQ ID NO: 3408921 - RNA, 19 nt, Human
ucaauucuucccuaucuuu

SEQ ID NO: 3408922 - RNA, 16 nt, Human
ucaauucuugccaaau

SEQ ID NO: 3408923 - RNA, 14 nt, Human
ucaauugucacuuu

SEQ ID NO: 3408924 - RNA, 12 nt, Human
ucaauugugaaa

SEQ ID NO: 3408925 - RNA, 12 nt, Human
ucaauuuaaaaa

SEQ ID NO: 3408926 - RNA, 14 nt, Human
ucaauuuaaaccca

SEQ ID NO: 3408927 - RNA, 21 nt, Human
ucaauuuaaacccauuuuagu

SEQ ID NO: 3408928 - RNA, 15 nt, Human
ucaauuuaaauaacc

SEQ ID NO: 3408929 - RNA, 21 nt, Human
ucaauuuaaguguuggaaaaa

SEQ ID NO: 3408930 - RNA, 16 nt, Human
ucaauuuauugcacaa

SEQ ID NO: 3408931 - RNA, 17 nt, Human
ucaauuuauugcacaaa

SEQ ID NO: 3408932 - RNA, 23 nt, Human
ucaauuuauugcacaaaauauaa

SEQ ID NO: 3408933 - RNA, 18 nt, Human
ucaauuuccaagagcuga

SEQ ID NO: 3408934 - RNA, 21 nt, Human
ucaauuucccugacuccucua

SEQ ID NO: 3408935 - RNA, 20 nt, Human
ucaauuuguaauugcuuaca

SEQ ID NO: 3408936 - RNA, 20 nt, Human
ucaauuugucauuuugaagc

SEQ ID NO: 3408937 - RNA, 13 nt, Human
ucaauuuuaaaca

SEQ ID NO: 3408938 - RNA, 14 nt, Human
ucaauuuuaaacau

SEQ ID NO: 3408939 - RNA, 16 nt, Human
ucaauuuuaaacauau

SEQ ID NO: 3408940 - RNA, 13 nt, Human
ucaauuuuaacaa

SEQ ID NO: 3408941 - RNA, 16 nt, Human
ucaauuuuaucccuca

SEQ ID NO: 3408942 - RNA, 21 nt, Human
ucaauuuuaucccucaccugu

SEQ ID NO: 3408943 - RNA, 15 nt, Human
ucaauuuucacugug

SEQ ID NO: 3408944 - RNA, 18 nt, Human
ucaauuuugacuuaaugu

SEQ ID NO: 3408945 - RNA, 20 nt, Human
ucaauuuuugguugaauaaa

SEQ ID NO: 3408946 - RNA, 19 nt, Human
ucaauuuuugucucagaag

SEQ ID NO: 3408947 - RNA, 21 nt, Human
ucacaaaaccuggcacaaugg

SEQ ID NO: 3408948 - RNA, 17 nt, Human
ucacaaacuuuuauacu

SEQ ID NO: 3408949 - RNA, 21 nt, Human
ucacaaacuuuuauacucuuu

SEQ ID NO: 3408950 - RNA, 12 nt, Human
ucacaaaggaau

SEQ ID NO: 3408951 - RNA, 17 nt, Human
ucacaaaggaugcccaa

SEQ ID NO: 3408952 - RNA, 20 nt, Human
ucacaaauauuaaaaagucu

SEQ ID NO: 3408953 - RNA, 20 nt, Human
ucacaaauccuaaaagaagc

SEQ ID NO: 3408954 - RNA, 11 nt, Human
ucacaaaugac

SEQ ID NO: 3408955 - RNA, 12 nt, Human
ucacaaaugacu

SEQ ID NO: 3408956 - RNA, 22 nt, Human
ucacaaauuucacuuauaccug

SEQ ID NO: 3408957 - RNA, 18 nt, Human
ucacaaauuucucuguuc

SEQ ID NO: 3408958 - RNA, 16 nt, Human
ucacaacaaccugguc

SEQ ID NO: 3408959 - RNA, 22 nt, Human
ucacaacagccugacaacauuu

SEQ ID NO: 3408960 - RNA, 13 nt, Human
ucacaaccaagaa

SEQ ID NO: 3408961 - RNA, 13 nt, Human
ucacaacccaucu

SEQ ID NO: 3408962 - RNA, 19 nt, Human
ucacaacuugauggcugcg

SEQ ID NO: 3408963 - RNA, 15 nt, Human
ucacaagaagaccag

SEQ ID NO: 3408964 - RNA, 18 nt, Human
ucacaagacccaaaaggc

SEQ ID NO: 3408965 - RNA, 17 nt, Human
ucacaagagcccagcag

SEQ ID NO: 3408966 - RNA, 12 nt, Human
ucacaagcugcc

SEQ ID NO: 3408967 - RNA, 15 nt, Human
ucacaagcugccucc

SEQ ID NO: 3408968 - RNA, 12 nt, Human
ucacaaggcagc

SEQ ID NO: 3408969 - RNA, 22 nt, Human
ucacaaguuaagauucuuggua

SEQ ID NO: 3408970 - RNA, 20 nt, Human
ucacaaguuguguuugauau

SEQ ID NO: 3408971 - RNA, 17 nt, Human
ucacaaguuuuuuuacu

SEQ ID NO: 3408972 - RNA, 14 nt, Human
ucacaauaaaagcu

SEQ ID NO: 3408973 - RNA, 15 nt, Human
ucacaauaauuuucu

SEQ ID NO: 3408974 - RNA, 13 nt, Human
ucacaauacagau

SEQ ID NO: 3408975 - RNA, 14 nt, Human
ucacaauagaaacu

SEQ ID NO: 3408976 - RNA, 21 nt, Human
ucacaauagccgauaucagaa

SEQ ID NO: 3408977 - RNA, 22 nt, Human
ucacaauagccgauaucagaau

SEQ ID NO: 3408978 - RNA, 17 nt, Human
ucacaaugucaguauuu

SEQ ID NO: 3408979 - RNA, 15 nt, Human
ucacaauuuuuaaug

SEQ ID NO: 3408980 - RNA, 23 nt, Human
ucacacacagacucauauuacug

SEQ ID NO: 3408981 - RNA, 22 nt, Human
ucacacacagacuguugucccu

SEQ ID NO: 3408982 - RNA, 12 nt, Human
ucacacacaugg

SEQ ID NO: 3408983 - RNA, 15 nt, Human
ucacacacccugagg

SEQ ID NO: 3408984 - RNA, 12 nt, Human
ucacacaccugu

SEQ ID NO: 3408985 - RNA, 12 nt, Human
ucacacacugau

SEQ ID NO: 3408986 - RNA, 23 nt, Human
ucacacagccaggugccuuggag

SEQ ID NO: 3408987 - RNA, 19 nt, Human
ucacacaggacccccuucc

SEQ ID NO: 3408988 - RNA, 20 nt, Human
ucacacaggacccccuuccc

SEQ ID NO: 3408989 - RNA, 22 nt, Human
ucacacaguauuacuucugcua

SEQ ID NO: 3408990 - RNA, 21 nt, Human
ucacaccaggcuugccugcag

SEQ ID NO: 3408991 - RNA, 15 nt, Human
ucacacccaccgucc

SEQ ID NO: 3408992 - RNA, 23 nt, Human
ucacacccaccguccgcccugcu

SEQ ID NO: 3408993 - RNA, 15 nt, Human
ucacaccccaccugc

SEQ ID NO: 3408994 - RNA, 14 nt, Human
ucacacccugcaag

SEQ ID NO: 3408995 - RNA, 15 nt, Human
ucacaccucacucuu

SEQ ID NO: 3408996 - RNA, 22 nt, Human
ucacaccucacucuuuauagug

SEQ ID NO: 3408997 - RNA, 21 nt, Human
ucacaccugaaaauguuagug

SEQ ID NO: 3408998 - RNA, 20 nt, Human
ucacaccugaacugaacacc

SEQ ID NO: 3408999 - RNA, 13 nt, Human
ucacaccugacuc

SEQ ID NO: 3409000 - RNA, 18 nt, Human
ucacaccugacucugaaa

SEQ ID NO: 3409001 - RNA, 17 nt, Human
ucacaccugcccuaaac

SEQ ID NO: 3409002 - RNA, 16 nt, Human
ucacacgaccggggcc

SEQ ID NO: 3409003 - RNA, 17 nt, Human
ucacacgggguauuuua

SEQ ID NO: 3409004 - RNA, 12 nt, Human
ucacacucgaca

SEQ ID NO: 3409005 - RNA, 20 nt, Human
ucacacugagaauguaagaa

SEQ ID NO: 3409006 - RNA, 23 nt, Human
ucacacugagaauguaagaacua

SEQ ID NO: 3409007 - RNA, 21 nt, Human
ucacacugggugguggccugg

SEQ ID NO: 3409008 - RNA, 22 nt, Human
ucacacugggugguggccuggu

SEQ ID NO: 3409009 - RNA, 16 nt, Human
ucacacugguucucaa

SEQ ID NO: 3409010 - RNA, 17 nt, Human
ucacacugguucucaau

SEQ ID NO: 3409011 - RNA, 23 nt, Human
ucacacuuacuguaagacauuag

SEQ ID NO: 3409012 - RNA, 23 nt, Human
ucacacuucugugagacccccac

SEQ ID NO: 3409013 - RNA, 16 nt, Human
ucacagaaaugagauc

SEQ ID NO: 3409014 - RNA, 14 nt, Human
ucacagaagaugaa

SEQ ID NO: 3409015 - RNA, 23 nt, Human
ucacagaaguguuaacuuuucua

SEQ ID NO: 3409016 - RNA, 22 nt, Human
ucacagaaucauaugauucugc

SEQ ID NO: 3409017 - RNA, 11 nt, Human
ucacagacagg

SEQ ID NO: 3409018 - RNA, 14 nt, Human
ucacagacaggacc

SEQ ID NO: 3409019 - RNA, 15 nt, Human
ucacagaccuggagc

SEQ ID NO: 3409020 - RNA, 20 nt, Human
ucacagaccuggagccccug

SEQ ID NO: 3409021 - RNA, 23 nt, Human
ucacagaccuggagccccugggu

SEQ ID NO: 3409022 - RNA, 16 nt, Human
ucacagaccuuugaac

SEQ ID NO: 3409023 - RNA, 21 nt, Human
ucacagagacauuccuccgag

SEQ ID NO: 3409024 - RNA, 21 nt, Human
ucacagagucaaggccugcuc

SEQ ID NO: 3409025 - RNA, 15 nt, Human
ucacagagugugcug

SEQ ID NO: 3409026 - RNA, 18 nt, Human
ucacagagugugcuggag

SEQ ID NO: 3409027 - RNA, 14 nt, Human
ucacagaugggugc

SEQ ID NO: 3409028 - RNA, 23 nt, Human
ucacagaugugugauucacagug

SEQ ID NO: 3409029 - RNA, 18 nt, Human
ucacagcacagagaagac

SEQ ID NO: 3409030 - RNA, 14 nt, Human
ucacagcagccucc

SEQ ID NO: 3409031 - RNA, 17 nt, Human
ucacagcagccuccaac

SEQ ID NO: 3409032 - RNA, 16 nt, Human
ucacagccacuuggga

SEQ ID NO: 3409033 - RNA, 17 nt, Human
ucacagccagacuggca

SEQ ID NO: 3409034 - RNA, 11 nt, Human
ucacagccagg

SEQ ID NO: 3409035 - RNA, 13 nt, Human
ucacagcccagcc

SEQ ID NO: 3409036 - RNA, 23 nt, Human
ucacagcccugcuuaccagauaa

SEQ ID NO: 3409037 - RNA, 21 nt, Human
ucacagccucugaccccuccu

SEQ ID NO: 3409038 - RNA, 22 nt, Human
ucacagccucugaccccuccuc

SEQ ID NO: 3409039 - RNA, 20 nt, Human
ucacagcuaugcaaaaagcu

SEQ ID NO: 3409040 - RNA, 19 nt, Human
ucacagcuccaagaauuuc

SEQ ID NO: 3409041 - RNA, 17 nt, Human
ucacagcuuguauuuug

SEQ ID NO: 3409042 - RNA, 17 nt, Human
ucacaggacucugccuc

SEQ ID NO: 3409043 - RNA, 19 nt, Human
ucacaggagggagggggaa

SEQ ID NO: 3409044 - RNA, 14 nt, Human
ucacaggcagccag

SEQ ID NO: 3409045 - RNA, 15 nt, Human
ucacaggcagccagu

SEQ ID NO: 3409046 - RNA, 16 nt, Human
ucacaggcagguccag

SEQ ID NO: 3409047 - RNA, 18 nt, Human
ucacaggcagguccaggg

SEQ ID NO: 3409048 - RNA, 19 nt, Human
ucacaggccccaggaaagg

SEQ ID NO: 3409049 - RNA, 18 nt, Human
ucacaggcgaggccugga

SEQ ID NO: 3409050 - RNA, 19 nt, Human
ucacaggcugggcugggca

SEQ ID NO: 3409051 - RNA, 20 nt, Human
ucacaggcugggcugggcac

SEQ ID NO: 3409052 - RNA, 23 nt, Human
ucacagggacugaaaaccucucc

SEQ ID NO: 3409053 - RNA, 12 nt, Human
ucacucaaggcg

SEQ ID NO: 3409054 - RNA, 20 nt, Human
ucacucaaguucaaggacca

SEQ ID NO: 3409055 - RNA, 14 nt, Human
ucacucacagaguc

SEQ ID NO: 3409056 - RNA, 23 nt, Human
ucacucacagagucaaggccugc

SEQ ID NO: 3409057 - RNA, 15 nt, Human
ucacucacucuaaag

SEQ ID NO: 3409058 - RNA, 16 nt, Human
ucacucacugucaaug

SEQ ID NO: 3409059 - RNA, 18 nt, Human
ucacucagaaguccagag

SEQ ID NO: 3409060 - RNA, 14 nt, Human
ucacucagcaccac

SEQ ID NO: 3409061 - RNA, 14 nt, Human
ucacucauuaauua

SEQ ID NO: 3409062 - RNA, 19 nt, Human
ucacucauugcugagccuc

SEQ ID NO: 3409063 - RNA, 20 nt, Human
ucacucauugcugagccucu

SEQ ID NO: 3409064 - RNA, 13 nt, Human
ucacuccaccacc

SEQ ID NO: 3409065 - RNA, 16 nt, Human
ucacuccaccacccaa

SEQ ID NO: 3409066 - RNA, 23 nt, Human
ucacucccaccugcaucuggggc

SEQ ID NO: 3409067 - RNA, 20 nt, Human
ucacuccccaacccccaacu

SEQ ID NO: 3409068 - RNA, 21 nt, Human
ucacuccccaugccacguucc

SEQ ID NO: 3409069 - RNA, 15 nt, Human
ucacucccuccauca

SEQ ID NO: 3409070 - RNA, 15 nt, Human
ucacucccuucuacc

SEQ ID NO: 3409071 - RNA, 19 nt, Human
ucacucccuucuaccugcc

SEQ ID NO: 3409072 - RNA, 16 nt, Human
ucacucccuucuccuu

SEQ ID NO: 3409073 - RNA, 21 nt, Human
ucacuccugagaccccuggcc

SEQ ID NO: 3409074 - RNA, 22 nt, Human
ucacuccugagaccccuggccu

SEQ ID NO: 3409075 - RNA, 19 nt, Human
ucacuccugcuguaaauuu

SEQ ID NO: 3409076 - RNA, 11 nt, Human
ucacuccuggg

SEQ ID NO: 3409077 - RNA, 20 nt, Human
ucacuccuggggccucuugg

SEQ ID NO: 3409078 - RNA, 14 nt, Human
ucacuccuuuuaaa

SEQ ID NO: 3409079 - RNA, 14 nt, Human
ucacucgauaauaa

SEQ ID NO: 3409080 - RNA, 17 nt, Human
ucacucggcacccugca

SEQ ID NO: 3409081 - RNA, 16 nt, Human
ucacucgucuccccca

SEQ ID NO: 3409082 - RNA, 14 nt, Human
ucacucuaagaugu

SEQ ID NO: 3409083 - RNA, 21 nt, Human
ucacucuaagauguuauauuu

SEQ ID NO: 3409084 - RNA, 16 nt, Human
ucacucuaagucaugu

SEQ ID NO: 3409085 - RNA, 17 nt, Human
ucacucuagguuuuaca

SEQ ID NO: 3409086 - RNA, 21 nt, Human
ucacucuagucaaugacauga

SEQ ID NO: 3409087 - RNA, 17 nt, Human
ucacucuccuaugccuu

SEQ ID NO: 3409088 - RNA, 12 nt, Human
ucacucuccuug

SEQ ID NO: 3409089 - RNA, 23 nt, Human
ucacucuccuuggugucgggcau

SEQ ID NO: 3409090 - RNA, 12 nt, Human
ucacucugccag

SEQ ID NO: 3409091 - RNA, 14 nt, Human
ucacucugccaggg

SEQ ID NO: 3409092 - RNA, 13 nt, Human
ucacucugcugcu

SEQ ID NO: 3409093 - RNA, 15 nt, Human
ucacucuggcagcuc

SEQ ID NO: 3409094 - RNA, 17 nt, Human
ucacucuggcagcucag

SEQ ID NO: 3409095 - RNA, 20 nt, Human
ucacucuggcagcucagaga

SEQ ID NO: 3409096 - RNA, 12 nt, Human
ucacucugggcu

SEQ ID NO: 3409097 - RNA, 12 nt, Human
ucacucugucgc

SEQ ID NO: 3409098 - RNA, 22 nt, Human
ucacucugucgcccagucugga

SEQ ID NO: 3409099 - RNA, 20 nt, Human
ucacucuuauugcccacgcu

SEQ ID NO: 3409100 - RNA, 18 nt, Human
ucacucuuccugcaagga

SEQ ID NO: 3409101 - RNA, 19 nt, Human
ucacucuuccugcaaggac

SEQ ID NO: 3409102 - RNA, 14 nt, Human
ucacucuuuauagu

SEQ ID NO: 3409103 - RNA, 19 nt, Human
ucacucuuuauagugcaca

SEQ ID NO: 3409104 - RNA, 18 nt, Human
ucacugaaaacaucugga

SEQ ID NO: 3409105 - RNA, 17 nt, Human
ucacugaaaauuggaca

SEQ ID NO: 3409106 - RNA, 12 nt, Human
ucacugaagacg

SEQ ID NO: 3409107 - RNA, 11 nt, Human
ucacugaagcc

SEQ ID NO: 3409108 - RNA, 22 nt, Human
ucacugaaugccucaaugugac

SEQ ID NO: 3409109 - RNA, 19 nt, Human
ucacugacacaaaaaguag

SEQ ID NO: 3409110 - RNA, 15 nt, Human
ucacugacacaaagg

SEQ ID NO: 3409111 - RNA, 15 nt, Human
ucacugagcacuguu

SEQ ID NO: 3409112 - RNA, 16 nt, Human
ucacugagcacuguuu

SEQ ID NO: 3409113 - RNA, 16 nt, Human
ucacugaggccugaga

SEQ ID NO: 3409114 - RNA, 18 nt, Human
ucacugcaaccuccaccu

SEQ ID NO: 3409115 - RNA, 21 nt, Human
ucacugcaaccuucgccaccu

SEQ ID NO: 3409116 - RNA, 15 nt, Human
ucacugcacagugca

SEQ ID NO: 3409117 - RNA, 24 nt, Human
ucacugcacagugcaucucagccc

SEQ ID NO: 3409118 - RNA, 20 nt, Human
ucacugcagccuccgcuucc

SEQ ID NO: 3409119 - RNA, 15 nt, Human
ucacugcagccucga

SEQ ID NO: 3409120 - RNA, 13 nt, Human
ucacugcauccuc

SEQ ID NO: 3409121 - RNA, 18 nt, Human
ucacugcauccuccgccu

SEQ ID NO: 3409122 - RNA, 19 nt, Human
ucacugccacuuugcacau

SEQ ID NO: 3409123 - RNA, 11 nt, Human
ucacugccagg

SEQ ID NO: 3409124 - RNA, 18 nt, Human
ucacugccaggccagccu

SEQ ID NO: 3409125 - RNA, 20 nt, Human
ucacugccaggccagccucc

SEQ ID NO: 3409126 - RNA, 23 nt, Human
ucacugccaggccagccuccgag

SEQ ID NO: 3409127 - RNA, 16 nt, Human
ucacugcgccacugcu

SEQ ID NO: 3409128 - RNA, 23 nt, Human
ucacugcgccacugcuccgugga

SEQ ID NO: 3409129 - RNA, 14 nt, Human
ucacugcucacacu

SEQ ID NO: 3409130 - RNA, 20 nt, Human
ucacugcucccugaagccag

SEQ ID NO: 3409131 - RNA, 24 nt, Human
ucacugcucccugaagccagccuu

SEQ ID NO: 3409132 - RNA, 12 nt, Human
ucacugcugcaa

SEQ ID NO: 3409133 - RNA, 17 nt, Human
ucacugcugcaaggccu

SEQ ID NO: 3409134 - RNA, 12 nt, Human
ucacugcuggcu

SEQ ID NO: 3409135 - RNA, 10 nt, Human
ucacugcugu

SEQ ID NO: 3409136 - RNA, 12 nt, Human
ucacugcuguca

SEQ ID NO: 3409137 - RNA, 16 nt, Human
ucacugcugucaucaa

SEQ ID NO: 3409138 - RNA, 22 nt, Human
ucacugcuguuauauuucauca

SEQ ID NO: 3409139 - RNA, 15 nt, Human
ucacugcuuaacuuc

SEQ ID NO: 3409140 - RNA, 19 nt, Human
ucacugcuugaacuaggcu

SEQ ID NO: 3409141 - RNA, 21 nt, Human
ucacugcuugaugaagcaagg

SEQ ID NO: 3409142 - RNA, 15 nt, Human
ucacuggaaagggga

SEQ ID NO: 3409143 - RNA, 23 nt, Human
ucacuggaaaggggagagccugc

SEQ ID NO: 3409144 - RNA, 11 nt, Human
ucacuggagca

SEQ ID NO: 3409145 - RNA, 16 nt, Human
ucacuggagcacaaua

SEQ ID NO: 3409146 - RNA, 15 nt, Human
ucacuggagcccagg

SEQ ID NO: 3409147 - RNA, 19 nt, Human
ucacuggaguuacauuaau

SEQ ID NO: 3409148 - RNA, 21 nt, Human
ucacuggaguuacauuaaugu

SEQ ID NO: 3409149 - RNA, 21 nt, Human
ucacuggccacaguuguuuga

SEQ ID NO: 3409150 - RNA, 15 nt, Human
ucacuggccaucccu

SEQ ID NO: 3409151 - RNA, 13 nt, Human
ucacuggcucucc

SEQ ID NO: 3409152 - RNA, 16 nt, Human
ucacuggcucuccaag

SEQ ID NO: 3409153 - RNA, 22 nt, Human
ucacuggcucuccaagugccag

SEQ ID NO: 3409154 - RNA, 14 nt, Human
ucacuggcugccuc

SEQ ID NO: 3409155 - RNA, 21 nt, Human
ucacugggguccuggggccuc

SEQ ID NO: 3409156 - RNA, 18 nt, Human
ucacugguagaccaaaau

SEQ ID NO: 3409157 - RNA, 20 nt, Human
ucacuguagaaugauuucau

SEQ ID NO: 3409158 - RNA, 14 nt, Human
ucacugucaaugau

SEQ ID NO: 3409159 - RNA, 16 nt, Human
ucacugucccuccugg

SEQ ID NO: 3409160 - RNA, 17 nt, Human
ucacugucccuccuggu

SEQ ID NO: 3409161 - RNA, 15 nt, Human
ucacuguccuccaag

SEQ ID NO: 3409162 - RNA, 15 nt, Human
ucacugucugagagu

SEQ ID NO: 3409163 - RNA, 12 nt, Human
ucacugucuuuc

SEQ ID NO: 3409164 - RNA, 21 nt, Human
ucacugugaucaauauuuuua

SEQ ID NO: 3409165 - RNA, 16 nt, Human
ucacugugcuguuguu

SEQ ID NO: 3409166 - RNA, 15 nt, Human
ucacuguggcugucu

SEQ ID NO: 3409167 - RNA, 20 nt, Human
ucacugugguaaaugccaca

SEQ ID NO: 3409168 - RNA, 21 nt, Human
ucacugugguaaaugccacac

SEQ ID NO: 3409169 - RNA, 21 nt, Human
ucacuguguauauuugauuua

SEQ ID NO: 3409170 - RNA, 16 nt, Human
ucacuguucccucugc

SEQ ID NO: 3409171 - RNA, 21 nt, Human
ucacuguucccucugcuccug

SEQ ID NO: 3409172 - RNA, 15 nt, Human
ucacuguugaaaauu

SEQ ID NO: 3409173 - RNA, 15 nt, Human
ucacuguugcccagg

SEQ ID NO: 3409174 - RNA, 15 nt, Human
ucacuguuuagauuu

SEQ ID NO: 3409175 - RNA, 16 nt, Human
ucacuguuuagauuug

SEQ ID NO: 3409176 - RNA, 17 nt, Human
ucacuguuuagauuugc

SEQ ID NO: 3409177 - RNA, 14 nt, Human
ucacuguuucacua

SEQ ID NO: 3409178 - RNA, 21 nt, Human
ucacuguuucacuacucagca

SEQ ID NO: 3409179 - RNA, 23 nt, Human
ucacuguuucaucuaagugccuc

SEQ ID NO: 3409180 - RNA, 14 nt, Human
ucacuguuuccugg

SEQ ID NO: 3409181 - RNA, 14 nt, Human
ucacuguuucucug

SEQ ID NO: 3409182 - RNA, 17 nt, Human
ucacuguuucucugcug

SEQ ID NO: 3409183 - RNA, 20 nt, Human
ucacuguuucucugcuguug

SEQ ID NO: 3409184 - RNA, 22 nt, Human
ucacuguuuuuagacaccuuca

SEQ ID NO: 3409185 - RNA, 17 nt, Human
ucacuuaccuagauuua

SEQ ID NO: 3409186 - RNA, 15 nt, Human
ucacuuacuguuucu

SEQ ID NO: 3409187 - RNA, 17 nt, Human
ucacuucacgcuuucag

SEQ ID NO: 3409188 - RNA, 15 nt, Human
ucacuucacugugcu

SEQ ID NO: 3409189 - RNA, 19 nt, Human
ucacuucaucuucucagcu

SEQ ID NO: 3409190 - RNA, 18 nt, Human
ucacuuccauacagcucu

SEQ ID NO: 3409191 - RNA, 17 nt, Human
ucacuuccuacaagagc

SEQ ID NO: 3409192 - RNA, 20 nt, Human
ucacuucuaggguaugggaa

SEQ ID NO: 3409193 - RNA, 22 nt, Human
ucacuucucuuaaacuugugaa

SEQ ID NO: 3409194 - RNA, 13 nt, Human
ucacuucuucugu

SEQ ID NO: 3409195 - RNA, 13 nt, Human
ucacuucuuuccc

SEQ ID NO: 3409196 - RNA, 22 nt, Human
ucacuucuuucccuuccuccau

SEQ ID NO: 3409197 - RNA, 22 nt, Human
ucacuugaacccgggaggcaga

SEQ ID NO: 3409198 - RNA, 21 nt, Human
uccaaccggcuuuguggcacu

SEQ ID NO: 3409199 - RNA, 18 nt, Human
uccaaccuaaccccuuuc

SEQ ID NO: 3409200 - RNA, 21 nt, Human
uccaaccuaaccccuuuccug

SEQ ID NO: 3409201 - RNA, 14 nt, Human
uccaaccuaaccug

SEQ ID NO: 3409202 - RNA, 18 nt, Human
uccaaccuaaccuguguc

SEQ ID NO: 3409203 - RNA, 21 nt, Human
uccaaccuggggggcaguggu

SEQ ID NO: 3409204 - RNA, 13 nt, Human
uccaaccuuccca

SEQ ID NO: 3409205 - RNA, 15 nt, Human
uccaacuaaugccuu

SEQ ID NO: 3409206 - RNA, 22 nt, Human
uccaacuaaugccuuacucuuc

SEQ ID NO: 3409207 - RNA, 21 nt, Human
uccaacuccaguacuggagcu

SEQ ID NO: 3409208 - RNA, 18 nt, Human
uccaacucgaaucugugu

SEQ ID NO: 3409209 - RNA, 12 nt, Human
uccaacugcugc

SEQ ID NO: 3409210 - RNA, 23 nt, Human
uccaacuggcccuauuuagauga

SEQ ID NO: 3409211 - RNA, 15 nt, Human
uccaacuuggcugca

SEQ ID NO: 3409212 - RNA, 20 nt, Human
uccaagaagcccaggaaagg

SEQ ID NO: 3409213 - RNA, 18 nt, Human
uccaagaauagcaucugu

SEQ ID NO: 3409214 - RNA, 14 nt, Human
uccaagaauccaca

SEQ ID NO: 3409215 - RNA, 19 nt, Human
uccaagaauccacauuucu

SEQ ID NO: 3409216 - RNA, 23 nt, Human
uccaagaauccacauuucuaaaa

SEQ ID NO: 3409217 - RNA, 13 nt, Human
uccaagaaugcug

SEQ ID NO: 3409218 - RNA, 14 nt, Human
uccaagaaugcuga

SEQ ID NO: 3409219 - RNA, 16 nt, Human
uccaagaaugcugaaa

SEQ ID NO: 3409220 - RNA, 17 nt, Human
uccaagaaugcugaaac

SEQ ID NO: 3409221 - RNA, 18 nt, Human
uccaagacagaauaauga

SEQ ID NO: 3409222 - RNA, 18 nt, Human
uccaagacaguauacagu

SEQ ID NO: 3409223 - RNA, 22 nt, Human
uccaagacaugucuguucuaca

SEQ ID NO: 3409224 - RNA, 19 nt, Human
uccaagaccuucuccuuca

SEQ ID NO: 3409225 - RNA, 13 nt, Human
uccaagacucuag

SEQ ID NO: 3409226 - RNA, 15 nt, Human
uccaagacucuagag

SEQ ID NO: 3409227 - RNA, 12 nt, Human
uccaagagcuga

SEQ ID NO: 3409228 - RNA, 16 nt, Human
uccaagagucuaaaga

SEQ ID NO: 3409229 - RNA, 17 nt, Human
uccaagagucuaaagau

SEQ ID NO: 3409230 - RNA, 13 nt, Human
uccaagauuccgg

SEQ ID NO: 3409231 - RNA, 15 nt, Human
uccaagauuccggau

SEQ ID NO: 3409232 - RNA, 13 nt, Human
uccaagauucuag

SEQ ID NO: 3409233 - RNA, 14 nt, Human
uccaagauucuaga

SEQ ID NO: 3409234 - RNA, 15 nt, Human
uccaagauucuagau

SEQ ID NO: 3409235 - RNA, 20 nt, Human
uccaagauucuagaugauua

SEQ ID NO: 3409236 - RNA, 13 nt, Human
uccaagcaaaugu

SEQ ID NO: 3409237 - RNA, 15 nt, Human
uccaagcaaauguga

SEQ ID NO: 3409238 - RNA, 14 nt, Human
uccaagcaggacau

SEQ ID NO: 3409239 - RNA, 22 nt, Human
uccaagcaggacauggacaagg

SEQ ID NO: 3409240 - RNA, 21 nt, Human
uccaagcccagcccauggaga

SEQ ID NO: 3409241 - RNA, 16 nt, Human
uccaagccuccacagc

SEQ ID NO: 3409242 - RNA, 20 nt, Human
uccaagccuccacagcgagg

SEQ ID NO: 3409243 - RNA, 21 nt, Human
uccaagccuccacagcgaggg

SEQ ID NO: 3409244 - RNA, 23 nt, Human
uccaagccucucuggcacuuuga

SEQ ID NO: 3409245 - RNA, 15 nt, Human
uccaagcucccaggc

SEQ ID NO: 3409246 - RNA, 15 nt, Human
uccaagcucccugcc

SEQ ID NO: 3409247 - RNA, 17 nt, Human
uccaagcugagagucua

SEQ ID NO: 3409248 - RNA, 12 nt, Human
uccaagcuggga

SEQ ID NO: 3409249 - RNA, 16 nt, Human
uccaagcuggucccac

SEQ ID NO: 3409250 - RNA, 20 nt, Human
uccaagcuggucccacucag

SEQ ID NO: 3409251 - RNA, 21 nt, Human
uccaagcuggucccacucagu

SEQ ID NO: 3409252 - RNA, 12 nt, Human
uccaagcuuuug

SEQ ID NO: 3409253 - RNA, 21 nt, Human
uccaaggaaaccacagcugcu

SEQ ID NO: 3409254 - RNA, 21 nt, Human
uccaaggaagggauguauuug

SEQ ID NO: 3409255 - RNA, 23 nt, Human
uccaaggaagggauguauuugua

SEQ ID NO: 3409256 - RNA, 16 nt, Human
uccaaggacagaaggc

SEQ ID NO: 3409257 - RNA, 15 nt, Human
uccaaggagcugaga

SEQ ID NO: 3409258 - RNA, 21 nt, Human
uccaaggaguuccaugaagac

SEQ ID NO: 3409259 - RNA, 16 nt, Human
uccaagggcuucugca

SEQ ID NO: 3409260 - RNA, 19 nt, Human
uccaagggcuucugcaccc

SEQ ID NO: 3409261 - RNA, 21 nt, Human
uccaaggggaaucagaacuca

SEQ ID NO: 3409262 - RNA, 20 nt, Human
uccaagggguccccuccagg

SEQ ID NO: 3409263 - RNA, 23 nt, Human
uccaagguggucugcucgggccc

SEQ ID NO: 3409264 - RNA, 14 nt, Human
uccaagguuuaaag

SEQ ID NO: 3409265 - RNA, 20 nt, Human
uccaagguuuaaagagucua

SEQ ID NO: 3409266 - RNA, 23 nt, Human
uccaagucacugcaaaaccaggu

SEQ ID NO: 3409267 - RNA, 19 nt, Human
uccaaguccacaguggaac

SEQ ID NO: 3409268 - RNA, 14 nt, Human
uccaagucuccacc

SEQ ID NO: 3409269 - RNA, 17 nt, Human
uccaagugaacacuagc

SEQ ID NO: 3409270 - RNA, 15 nt, Human
uccaagugccaauau

SEQ ID NO: 3409271 - RNA, 19 nt, Human
uccaagugugcauauugua

SEQ ID NO: 3409272 - RNA, 21 nt, Human
uccaagugugcauauuguaca

SEQ ID NO: 3409273 - RNA, 14 nt, Human
uccaaguuaaaugu

SEQ ID NO: 3409274 - RNA, 22 nt, Human
uccaaguuguucgggccaagga

SEQ ID NO: 3409275 - RNA, 14 nt, Human
uccaaguuuccaaa

SEQ ID NO: 3409276 - RNA, 14 nt, Human
uccaauaaaccagg

SEQ ID NO: 3409277 - RNA, 17 nt, Human
uccaauaugugauuuuu

SEQ ID NO: 3409278 - RNA, 19 nt, Human
uccaaucaaucuugcaugu

SEQ ID NO: 3409279 - RNA, 22 nt, Human
uccaaucccauagaugggucug

SEQ ID NO: 3409280 - RNA, 16 nt, Human
uccaauccuauguuuu

SEQ ID NO: 3409281 - RNA, 19 nt, Human
uccaaucuaaccacaucaa

SEQ ID NO: 3409282 - RNA, 15 nt, Human
uccaaucucaaggaa

SEQ ID NO: 3409283 - RNA, 15 nt, Human
uccaaucucauggag

SEQ ID NO: 3409284 - RNA, 22 nt, Human
uccaaucugugaugacauuccc

SEQ ID NO: 3409285 - RNA, 16 nt, Human
uccaaugagcuuucug

SEQ ID NO: 3409286 - RNA, 15 nt, Human
uccaaugucuggaga

SEQ ID NO: 3409287 - RNA, 16 nt, Human
uccaaugucuggagac

SEQ ID NO: 3409288 - RNA, 17 nt, Human
uccaaugucuggagacc

SEQ ID NO: 3409289 - RNA, 23 nt, Human
uccaaugucuggagaccaccagg

SEQ ID NO: 3409290 - RNA, 17 nt, Human
uccaauguuuagcaaau

SEQ ID NO: 3409291 - RNA, 14 nt, Human
uccaauguuucaag

SEQ ID NO: 3409292 - RNA, 15 nt, Human
uccaauguuucaagc

SEQ ID NO: 3409293 - RNA, 17 nt, Human
uccaauuagcuuauguu

SEQ ID NO: 3409294 - RNA, 19 nt, Human
uccaauuaguuuccuuuuu

SEQ ID NO: 3409295 - RNA, 23 nt, Human
uccaauuaguuuccuuuuuaaua

SEQ ID NO: 3409296 - RNA, 22 nt, Human
uccaauuauaagaggauaugaa

SEQ ID NO: 3409297 - RNA, 11 nt, Human
uccaauucuau

SEQ ID NO: 3409298 - RNA, 13 nt, Human
uccaauucuccuu

SEQ ID NO: 3409299 - RNA, 15 nt, Human
uccaauuuuccuuca

SEQ ID NO: 3409300 - RNA, 19 nt, Human
uccacaaagaaaauuccua

SEQ ID NO: 3409301 - RNA, 14 nt, Human
uccacaaauuauua

SEQ ID NO: 3409302 - RNA, 14 nt, Human
uccacaacacacag

SEQ ID NO: 3409303 - RNA, 21 nt, Human
uccacaagacagaagcugaag

SEQ ID NO: 3409304 - RNA, 14 nt, Human
uccacaagagccca

SEQ ID NO: 3409305 - RNA, 21 nt, Human
uccacaagagcccaggccucc

SEQ ID NO: 3409306 - RNA, 17 nt, Human
uccacaagauucccaga

SEQ ID NO: 3409307 - RNA, 19 nt, Human
uccacaagauucccagaga

SEQ ID NO: 3409308 - RNA, 18 nt, Human
uccacaaguuaaauaaau

SEQ ID NO: 3409309 - RNA, 23 nt, Human
uccacacaacauauccguauaua

SEQ ID NO: 3409310 - RNA, 18 nt, Human
uccacacaagggaaggac

SEQ ID NO: 3409311 - RNA, 14 nt, Human
uccacacacacaaa

SEQ ID NO: 3409312 - RNA, 15 nt, Human
uccacacacagagga

SEQ ID NO: 3409313 - RNA, 22 nt, Human
uccacacacagaggaagagcag

SEQ ID NO: 3409314 - RNA, 23 nt, Human
uccacacacagaggaagagcagg

SEQ ID NO: 3409315 - RNA, 14 nt, Human
uccacacacgcagg

SEQ ID NO: 3409316 - RNA, 13 nt, Human
uccacacaugaau

SEQ ID NO: 3409317 - RNA, 17 nt, Human
uccacacaugaaucugc

SEQ ID NO: 3409318 - RNA, 17 nt, Human
uccacaccaagcagcaa

SEQ ID NO: 3409319 - RNA, 19 nt, Human
uccacacccucacugcugu

SEQ ID NO: 3409320 - RNA, 19 nt, Human
uccacacccucucccagga

SEQ ID NO: 3409321 - RNA, 20 nt, Human
uccacacccucucccaggac

SEQ ID NO: 3409322 - RNA, 21 nt, Human
uccacacccucucccaggacc

SEQ ID NO: 3409323 - RNA, 14 nt, Human
uccacaccugcggc

SEQ ID NO: 3409324 - RNA, 18 nt, Human
uccacaccugcggcccaa

SEQ ID NO: 3409325 - RNA, 19 nt, Human
uccacaccuggcacugcug

SEQ ID NO: 3409326 - RNA, 20 nt, Human
uccacaccuggcacugcugu

SEQ ID NO: 3409327 - RNA, 22 nt, Human
uccacagagagggagagcagag

SEQ ID NO: 3409328 - RNA, 23 nt, Human
uccacagagagggagagcagaga

SEQ ID NO: 3409329 - RNA, 18 nt, Human
uccacagagagucccacu

SEQ ID NO: 3409330 - RNA, 21 nt, Human
uccacagagagucccacugcc

SEQ ID NO: 3409331 - RNA, 19 nt, Human
uccacagaggacacagaga

SEQ ID NO: 3409332 - RNA, 17 nt, Human
uccacagaguaagacau

SEQ ID NO: 3409333 - RNA, 19 nt, Human
uccacagaguaagacauug

SEQ ID NO: 3409334 - RNA, 17 nt, Human
uccacagaugccuccac

SEQ ID NO: 3409335 - RNA, 11 nt, Human
uccacagauug

SEQ ID NO: 3409336 - RNA, 14 nt, Human
uccacagccauccc

SEQ ID NO: 3409337 - RNA, 21 nt, Human
uccacagcgagggcagcugcu

SEQ ID NO: 3409338 - RNA, 22 nt, Human
uccacagcgagggcagcugcua

SEQ ID NO: 3409339 - RNA, 23 nt, Human
uccacagcugccucuucccucuu

SEQ ID NO: 3409340 - RNA, 23 nt, Human
uccacagcuuccccucucuccuc

SEQ ID NO: 3409341 - RNA, 12 nt, Human
uccacagggcac

SEQ ID NO: 3409342 - RNA, 12 nt, Human
uccaggcagcac

SEQ ID NO: 3409343 - RNA, 18 nt, Human
uccaggcagccucuguca

SEQ ID NO: 3409344 - RNA, 21 nt, Human
uccaggcaggucugaagcuca

SEQ ID NO: 3409345 - RNA, 11 nt, Human
uccaggcccaa

SEQ ID NO: 3409346 - RNA, 15 nt, Human
uccaggcccaaggcu

SEQ ID NO: 3409347 - RNA, 15 nt, Human
uccaggcccgucugu

SEQ ID NO: 3409348 - RNA, 16 nt, Human
uccaggcccgucuguc

SEQ ID NO: 3409349 - RNA, 17 nt, Human
uccaggcccgucugucc

SEQ ID NO: 3409350 - RNA, 19 nt, Human
uccaggcccgucuguccau

SEQ ID NO: 3409351 - RNA, 22 nt, Human
uccaggcccgucuguccaucug

SEQ ID NO: 3409352 - RNA, 16 nt, Human
uccaggccuacuccug

SEQ ID NO: 3409353 - RNA, 14 nt, Human
uccaggccugccuc

SEQ ID NO: 3409354 - RNA, 16 nt, Human
uccaggcugccguggg

SEQ ID NO: 3409355 - RNA, 14 nt, Human
uccaggcugggaga

SEQ ID NO: 3409356 - RNA, 18 nt, Human
uccaggcugggagagccu

SEQ ID NO: 3409357 - RNA, 20 nt, Human
uccaggcugggagagccuuc

SEQ ID NO: 3409358 - RNA, 15 nt, Human
uccaggcuguguuug

SEQ ID NO: 3409359 - RNA, 17 nt, Human
uccaggcuucugcuggg

SEQ ID NO: 3409360 - RNA, 23 nt, Human
uccaggcuucugcuggggccugg

SEQ ID NO: 3409361 - RNA, 20 nt, Human
uccaggcuuucccacuuccc

SEQ ID NO: 3409362 - RNA, 17 nt, Human
uccagggaagcuggccg

SEQ ID NO: 3409363 - RNA, 18 nt, Human
uccagggaauccaagccu

SEQ ID NO: 3409364 - RNA, 19 nt, Human
uccagggaauccaagccuc

SEQ ID NO: 3409365 - RNA, 23 nt, Human
uccagggacagaggccccagccu

SEQ ID NO: 3409366 - RNA, 17 nt, Human
uccagggaggcuggucc

SEQ ID NO: 3409367 - RNA, 18 nt, Human
uccagggaggcugguccu

SEQ ID NO: 3409368 - RNA, 11 nt, Human
uccagggaggg

SEQ ID NO: 3409369 - RNA, 18 nt, Human
uccagggaugauucaagc

SEQ ID NO: 3409370 - RNA, 20 nt, Human
uccagggaugccaucugugg

SEQ ID NO: 3409371 - RNA, 14 nt, Human
uccagggccagaug

SEQ ID NO: 3409372 - RNA, 17 nt, Human
uccagggcucaacacug

SEQ ID NO: 3409373 - RNA, 13 nt, Human
uccagggcucuga

SEQ ID NO: 3409374 - RNA, 14 nt, Human
uccagggcuggacu

SEQ ID NO: 3409375 - RNA, 21 nt, Human
uccagggcuggacugaggccu

SEQ ID NO: 3409376 - RNA, 17 nt, Human
uccaggggaugggaggu

SEQ ID NO: 3409377 - RNA, 19 nt, Human
uccaggggccccuccagcu

SEQ ID NO: 3409378 - RNA, 23 nt, Human
uccaggggcugcuuccuccugga

SEQ ID NO: 3409379 - RNA, 19 nt, Human
uccagggggaaggccaagg

SEQ ID NO: 3409380 - RNA, 19 nt, Human
uccagggguccuaggccuc

SEQ ID NO: 3409381 - RNA, 17 nt, Human
uccagggguuuacagug

SEQ ID NO: 3409382 - RNA, 17 nt, Human
uccagggucccucugug

SEQ ID NO: 3409383 - RNA, 18 nt, Human
uccagggucccucugugu

SEQ ID NO: 3409384 - RNA, 11 nt, Human
uccaggguggu

SEQ ID NO: 3409385 - RNA, 18 nt, Human
uccagguacgcacagaca

SEQ ID NO: 3409386 - RNA, 16 nt, Human
uccagguaucuccagg

SEQ ID NO: 3409387 - RNA, 17 nt, Human
uccaggucaacagaaug

SEQ ID NO: 3409388 - RNA, 22 nt, Human
uccaggucaacagaaugaaaaa

SEQ ID NO: 3409389 - RNA, 22 nt, Human
uccagguccugguggggcagcu

SEQ ID NO: 3409390 - RNA, 16 nt, Human
uccaggucgggcucag

SEQ ID NO: 3409391 - RNA, 18 nt, Human
uccaggucgggcucagcu

SEQ ID NO: 3409392 - RNA, 21 nt, Human
uccagguggggugaggcagug

SEQ ID NO: 3409393 - RNA, 23 nt, Human
uccagguucaacccacagcuacu

SEQ ID NO: 3409394 - RNA, 16 nt, Human
uccagguuuuucaauu

SEQ ID NO: 3409395 - RNA, 18 nt, Human
uccagguuuuucaauuaa

SEQ ID NO: 3409396 - RNA, 19 nt, Human
uccagguuuuucaauuaaa

SEQ ID NO: 3409397 - RNA, 17 nt, Human
uccaguaagaucacugu

SEQ ID NO: 3409398 - RNA, 22 nt, Human
uccaguaccuugcuucuuacug

SEQ ID NO: 3409399 - RNA, 23 nt, Human
uccaguagcuugggacaaaucaa

SEQ ID NO: 3409400 - RNA, 13 nt, Human
uccaguauucuug

SEQ ID NO: 3409401 - RNA, 20 nt, Human
uccagucaggccuaucuaaa

SEQ ID NO: 3409402 - RNA, 12 nt, Human
uccagucaggcu

SEQ ID NO: 3409403 - RNA, 21 nt, Human
uccagucauuauguuaauauu

SEQ ID NO: 3409404 - RNA, 22 nt, Human
uccaguccccagaacucugccu

SEQ ID NO: 3409405 - RNA, 17 nt, Human
uccagucccccuauccu

SEQ ID NO: 3409406 - RNA, 21 nt, Human
uccagucccccuauccuuggc

SEQ ID NO: 3409407 - RNA, 14 nt, Human
uccaguccugcucu

SEQ ID NO: 3409408 - RNA, 22 nt, Human
uccagucuaaaaauaucugucu

SEQ ID NO: 3409409 - RNA, 16 nt, Human
uccagucuaucauugu

SEQ ID NO: 3409410 - RNA, 16 nt, Human
uccagucucuuguaca

SEQ ID NO: 3409411 - RNA, 18 nt, Human
uccagucuuccaccugga

SEQ ID NO: 3409412 - RNA, 15 nt, Human
uccagucuuccugac

SEQ ID NO: 3409413 - RNA, 14 nt, Human
uccagugaccucuc

SEQ ID NO: 3409414 - RNA, 19 nt, Human
uccagugaggcucugcccu

SEQ ID NO: 3409415 - RNA, 22 nt, Human
uccagugaggcucugcccuugg

SEQ ID NO: 3409416 - RNA, 17 nt, Human
uccagugcaaccacaca

SEQ ID NO: 3409417 - RNA, 18 nt, Human
uccagugccaacaauccu

SEQ ID NO: 3409418 - RNA, 17 nt, Human
uccaguggagguuuguc

SEQ ID NO: 3409419 - RNA, 17 nt, Human
uccaguggccuggcucc

SEQ ID NO: 3409420 - RNA, 20 nt, Human
uccaguggccuggcuccgcu

SEQ ID NO: 3409421 - RNA, 23 nt, Human
uccagugggaggugagaccaccu

SEQ ID NO: 3409422 - RNA, 15 nt, Human
uccagugguugcugu

SEQ ID NO: 3409423 - RNA, 16 nt, Human
uccagugguuugagac

SEQ ID NO: 3409424 - RNA, 17 nt, Human
uccaguguccuuagaac

SEQ ID NO: 3409425 - RNA, 20 nt, Human
uccaguguccuuagaacauu

SEQ ID NO: 3409426 - RNA, 15 nt, Human
uccagugucucacag

SEQ ID NO: 3409427 - RNA, 22 nt, Human
uccaguuaaggaccguggcccu

SEQ ID NO: 3409428 - RNA, 19 nt, Human
uccaguucaugagaaucua

SEQ ID NO: 3409429 - RNA, 23 nt, Human
uccaguucuucgacuguuguuau

SEQ ID NO: 3409430 - RNA, 23 nt, Human
uccaguuggaguuuuuuguacca

SEQ ID NO: 3409431 - RNA, 17 nt, Human
uccaguuugcaccuguc

SEQ ID NO: 3409432 - RNA, 18 nt, Human
uccaguuugcaccugucc

SEQ ID NO: 3409433 - RNA, 18 nt, Human
uccauaaagaagcaauaa

SEQ ID NO: 3409434 - RNA, 20 nt, Human
uccauaaagaagcaauaaag

SEQ ID NO: 3409435 - RNA, 14 nt, Human
uccauaaccccacc

SEQ ID NO: 3409436 - RNA, 21 nt, Human
uccauaaucuggacuccucug

SEQ ID NO: 3409437 - RNA, 23 nt, Human
uccauaaucuggacuccucuguc

SEQ ID NO: 3409438 - RNA, 20 nt, Human
uccauaauguauaaagaaca

SEQ ID NO: 3409439 - RNA, 12 nt, Human
uccauaauuaug

SEQ ID NO: 3409440 - RNA, 19 nt, Human
uccauaauuaugacaguua

SEQ ID NO: 3409441 - RNA, 18 nt, Human
uccauacacacgcugccu

SEQ ID NO: 3409442 - RNA, 19 nt, Human
uccauacacacgcugccuu

SEQ ID NO: 3409443 - RNA, 13 nt, Human
uccauacucagga

SEQ ID NO: 3409444 - RNA, 15 nt, Human
uccauagagagcaag

SEQ ID NO: 3409445 - RNA, 22 nt, Human
uccauaguauauuaaaaauggu

SEQ ID NO: 3409446 - RNA, 19 nt, Human
uccauaguuuugaugacug

SEQ ID NO: 3409447 - RNA, 22 nt, Human
uccauaguuuugaugacuggca

SEQ ID NO: 3409448 - RNA, 20 nt, Human
uccauaucagaacugugcca

SEQ ID NO: 3409449 - RNA, 17 nt, Human
uccauaucuaaccagug

SEQ ID NO: 3409450 - RNA, 14 nt, Human
uccauaucuugcga

SEQ ID NO: 3409451 - RNA, 18 nt, Human
uccauaugaccucaugca

SEQ ID NO: 3409452 - RNA, 24 nt, Human
uccauaugaccucaugcaucucca

SEQ ID NO: 3409453 - RNA, 15 nt, Human
uccauauuagaaaac

SEQ ID NO: 3409454 - RNA, 17 nt, Human
uccauauuagaaaacuu

SEQ ID NO: 3409455 - RNA, 18 nt, Human
uccauauuagaaaacuuu

SEQ ID NO: 3409456 - RNA, 14 nt, Human
uccauauuuggaag

SEQ ID NO: 3409457 - RNA, 15 nt, Human
uccauauuuggaaga

SEQ ID NO: 3409458 - RNA, 19 nt, Human
uccauauuuuauuacuguu

SEQ ID NO: 3409459 - RNA, 20 nt, Human
uccauauuuuauuacuguuu

SEQ ID NO: 3409460 - RNA, 13 nt, Human
uccauauuuucac

SEQ ID NO: 3409461 - RNA, 16 nt, Human
uccauauuuuuacaac

SEQ ID NO: 3409462 - RNA, 17 nt, Human
uccauauuuuuuuccuu

SEQ ID NO: 3409463 - RNA, 18 nt, Human
uccauauuuuuuuccuua

SEQ ID NO: 3409464 - RNA, 22 nt, Human
uccaucaagccaagccuccugu

SEQ ID NO: 3409465 - RNA, 23 nt, Human
uccaucacccucuuccugugauc

SEQ ID NO: 3409466 - RNA, 19 nt, Human
uccaucagguuccaucccg

SEQ ID NO: 3409467 - RNA, 13 nt, Human
uccaucaucaugu

SEQ ID NO: 3409468 - RNA, 13 nt, Human
uccaucauguccc

SEQ ID NO: 3409469 - RNA, 15 nt, Human
uccaucaugucccca

SEQ ID NO: 3409470 - RNA, 16 nt, Human
uccauccagcuugcca

SEQ ID NO: 3409471 - RNA, 18 nt, Human
uccauccagcuugccaga

SEQ ID NO: 3409472 - RNA, 22 nt, Human
uccauccauaaauccaguucua

SEQ ID NO: 3409473 - RNA, 15 nt, Human
uccauccauggccag

SEQ ID NO: 3409474 - RNA, 17 nt, Human
uccaucccaacagccau

SEQ ID NO: 3409475 - RNA, 19 nt, Human
uccaucccaaccagugcca

SEQ ID NO: 3409476 - RNA, 22 nt, Human
uccaucccaggacaccacaccc

SEQ ID NO: 3409477 - RNA, 13 nt, Human
uccaucccuggcc

SEQ ID NO: 3409478 - RNA, 14 nt, Human
uccaucccuggccc

SEQ ID NO: 3409479 - RNA, 23 nt, Human
uccaucccuggcccccucccugg

SEQ ID NO: 3409480 - RNA, 16 nt, Human
uccauccuacccccug

SEQ ID NO: 3409481 - RNA, 20 nt, Human
uccauccuacccccugugcc

SEQ ID NO: 3409482 - RNA, 18 nt, Human
uccauccuccuccuuccu

SEQ ID NO: 3409483 - RNA, 11 nt, Human
uccauccugag

SEQ ID NO: 3409484 - RNA, 12 nt, Human
uccauccugagg

SEQ ID NO: 3409485 - RNA, 13 nt, Human
uccauccugaggc

SEQ ID NO: 3409486 - RNA, 19 nt, Human
uccucuuccccuugcccuu

SEQ ID NO: 3409487 - RNA, 14 nt, Human
uccucuucccucuc

SEQ ID NO: 3409488 - RNA, 18 nt, Human
uccucuucccucucugca

SEQ ID NO: 3409489 - RNA, 12 nt, Human
uccucuuccucu

SEQ ID NO: 3409490 - RNA, 13 nt, Human
uccucuuccucug

SEQ ID NO: 3409491 - RNA, 14 nt, Human
uccucuuccucuga

SEQ ID NO: 3409492 - RNA, 15 nt, Human
uccucuuccucugag

SEQ ID NO: 3409493 - RNA, 21 nt, Human
uccucuuccugaauuuuauuu

SEQ ID NO: 3409494 - RNA, 21 nt, Human
uccucuucggcccucagaugu

SEQ ID NO: 3409495 - RNA, 17 nt, Human
uccucuucugacgugcc

SEQ ID NO: 3409496 - RNA, 13 nt, Human
uccucuucugggc

SEQ ID NO: 3409497 - RNA, 13 nt, Human
uccucuucuuuau

SEQ ID NO: 3409498 - RNA, 17 nt, Human
uccucuugccuccugga

SEQ ID NO: 3409499 - RNA, 20 nt, Human
uccucuuguaaauaaagccc

SEQ ID NO: 3409500 - RNA, 13 nt, Human
uccucuuguccua

SEQ ID NO: 3409501 - RNA, 19 nt, Human
uccucuuuaaaacaaaaca

SEQ ID NO: 3409502 - RNA, 19 nt, Human
uccucuuuaguuuuugguu

SEQ ID NO: 3409503 - RNA, 19 nt, Human
uccucuuuccaucuacccu

SEQ ID NO: 3409504 - RNA, 17 nt, Human
uccucuuugcauggaau

SEQ ID NO: 3409505 - RNA, 15 nt, Human
uccucuuugcuuugc

SEQ ID NO: 3409506 - RNA, 20 nt, Human
uccucuuugcuuugcuuucu

SEQ ID NO: 3409507 - RNA, 15 nt, Human
uccucuuuguuuugu

SEQ ID NO: 3409508 - RNA, 21 nt, Human
uccucuuuuaucuuggacuga

SEQ ID NO: 3409509 - RNA, 18 nt, Human
uccucuuuuccuucccaa

SEQ ID NO: 3409510 - RNA, 18 nt, Human
uccucuuuuguuguuucu

SEQ ID NO: 3409511 - RNA, 21 nt, Human
uccugaaacuauauuuuguca

SEQ ID NO: 3409512 - RNA, 19 nt, Human
uccugaaacuuacacacaa

SEQ ID NO: 3409513 - RNA, 12 nt, Human
uccugaaaucaa

SEQ ID NO: 3409514 - RNA, 15 nt, Human
uccugaaauuucaga

SEQ ID NO: 3409515 - RNA, 13 nt, Human
uccugaacagcau

SEQ ID NO: 3409516 - RNA, 18 nt, Human
uccugaaccgcacagcuc

SEQ ID NO: 3409517 - RNA, 22 nt, Human
uccugaaccgcacagcucagga

SEQ ID NO: 3409518 - RNA, 14 nt, Human
uccugaagaaccag

SEQ ID NO: 3409519 - RNA, 16 nt, Human
uccugaagaaccaguc

SEQ ID NO: 3409520 - RNA, 18 nt, Human
uccugaagaaccaguccc

SEQ ID NO: 3409521 - RNA, 13 nt, Human
uccugaagaauua

SEQ ID NO: 3409522 - RNA, 19 nt, Human
uccugaagaggcgggccag

SEQ ID NO: 3409523 - RNA, 22 nt, Human
uccugaagaggcgggccagcca

SEQ ID NO: 3409524 - RNA, 13 nt, Human
uccugaagccaca

SEQ ID NO: 3409525 - RNA, 21 nt, Human
uccugacacaccugcagccuc

SEQ ID NO: 3409526 - RNA, 16 nt, Human
uccugacaccccacuu

SEQ ID NO: 3409527 - RNA, 19 nt, Human
uccugacacccuucuccca

SEQ ID NO: 3409528 - RNA, 20 nt, Human
uccugacacccuucucccac

SEQ ID NO: 3409529 - RNA, 13 nt, Human
uccugacacugca

SEQ ID NO: 3409530 - RNA, 20 nt, Human
uccugacaucacagcagccu

SEQ ID NO: 3409531 - RNA, 14 nt, Human
uccugacauugucu

SEQ ID NO: 3409532 - RNA, 14 nt, Human
uccugaccacccuc

SEQ ID NO: 3409533 - RNA, 19 nt, Human
uccugaccacccuccccuc

SEQ ID NO: 3409534 - RNA, 11 nt, Human
uccugaccagc

SEQ ID NO: 3409535 - RNA, 14 nt, Human
uccugaccaguugc

SEQ ID NO: 3409536 - RNA, 14 nt, Human
uccugacccaggcc

SEQ ID NO: 3409537 - RNA, 15 nt, Human
uccugacccaguccc

SEQ ID NO: 3409538 - RNA, 15 nt, Human
uccugaccuccgcca

SEQ ID NO: 3409539 - RNA, 14 nt, Human
uccugaccugaggc

SEQ ID NO: 3409540 - RNA, 20 nt, Human
uccugacgaaacuggccccg

SEQ ID NO: 3409541 - RNA, 18 nt, Human
uccugacgagauaagcag

SEQ ID NO: 3409542 - RNA, 21 nt, Human
uccugacggcgcccccagugu

SEQ ID NO: 3409543 - RNA, 18 nt, Human
uccugacgucugaagcuu

SEQ ID NO: 3409544 - RNA, 17 nt, Human
uccugacuauuauguug

SEQ ID NO: 3409545 - RNA, 15 nt, Human
uccugacucugcccc

SEQ ID NO: 3409546 - RNA, 23 nt, Human
uccugacucugcccccugcuggc

SEQ ID NO: 3409547 - RNA, 13 nt, Human
uccugacugcccg

SEQ ID NO: 3409548 - RNA, 14 nt, Human
uccugacuggugcu

SEQ ID NO: 3409549 - RNA, 13 nt, Human
uccugacuguaac

SEQ ID NO: 3409550 - RNA, 22 nt, Human
uccugacuguaacauauucugu

SEQ ID NO: 3409551 - RNA, 16 nt, Human
uccugacuucaggggc

SEQ ID NO: 3409552 - RNA, 21 nt, Human
uccugacuucaggggcugccc

SEQ ID NO: 3409553 - RNA, 24 nt, Human
uccugagaaaaaagguuccgcuug

SEQ ID NO: 3409554 - RNA, 18 nt, Human
uccugagaaagcucaaag

SEQ ID NO: 3409555 - RNA, 18 nt, Human
uccugagaccccuggccu

SEQ ID NO: 3409556 - RNA, 19 nt, Human
uccugagaccccuggccuc

SEQ ID NO: 3409557 - RNA, 20 nt, Human
uccugagauuuccuccuggc

SEQ ID NO: 3409558 - RNA, 12 nt, Human
uccugagcacug

SEQ ID NO: 3409559 - RNA, 13 nt, Human
uccugagcacugc

SEQ ID NO: 3409560 - RNA, 22 nt, Human
uccugagcacugccaggaggga

SEQ ID NO: 3409561 - RNA, 11 nt, Human
uccugagcccc

SEQ ID NO: 3409562 - RNA, 17 nt, Human
uccugagccccagggag

SEQ ID NO: 3409563 - RNA, 16 nt, Human
uccugagcccccagcu

SEQ ID NO: 3409564 - RNA, 14 nt, Human
uccugagccccgcc

SEQ ID NO: 3409565 - RNA, 18 nt, Human
uccugagcucagcgugga

SEQ ID NO: 3409566 - RNA, 12 nt, Human
uccugagcuugg

SEQ ID NO: 3409567 - RNA, 15 nt, Human
uccugagcuuggcca

SEQ ID NO: 3409568 - RNA, 16 nt, Human
uccugagcuuggccag

SEQ ID NO: 3409569 - RNA, 19 nt, Human
uccugagcuuggccagaag

SEQ ID NO: 3409570 - RNA, 20 nt, Human
uccugagcuuggccagaagg

SEQ ID NO: 3409571 - RNA, 15 nt, Human
uccugaggaucagaa

SEQ ID NO: 3409572 - RNA, 18 nt, Human
uccugaggaucagaaagu

SEQ ID NO: 3409573 - RNA, 19 nt, Human
uccugaggcuccacuuggu

SEQ ID NO: 3409574 - RNA, 16 nt, Human
uccugaggcuuuggau

SEQ ID NO: 3409575 - RNA, 16 nt, Human
uccugagggagcucca

SEQ ID NO: 3409576 - RNA, 23 nt, Human
uccugagggaggaccuggggcac

SEQ ID NO: 3409577 - RNA, 20 nt, Human
uccugaggggagacagagca

SEQ ID NO: 3409578 - RNA, 20 nt, Human
uccugaggggcaucugcccc

SEQ ID NO: 3409579 - RNA, 21 nt, Human
uccugaggggcaucugccccu

SEQ ID NO: 3409580 - RNA, 22 nt, Human
uccugaggggcaucugccccuc

SEQ ID NO: 3409581 - RNA, 13 nt, Human
uccugaguagcug

SEQ ID NO: 3409582 - RNA, 20 nt, Human
uccugaguagcugggauuac

SEQ ID NO: 3409583 - RNA, 15 nt, Human
uccugagugcuugcu

SEQ ID NO: 3409584 - RNA, 18 nt, Human
uccugauaaagcacagcu

SEQ ID NO: 3409585 - RNA, 18 nt, Human
uccugauaauaauugauc

SEQ ID NO: 3409586 - RNA, 23 nt, Human
uccugauagcauaugacaaaugu

SEQ ID NO: 3409587 - RNA, 24 nt, Human
uccugauaugauuuaaaacaugua

SEQ ID NO: 3409588 - RNA, 14 nt, Human
uccugaucagagcc

SEQ ID NO: 3409589 - RNA, 15 nt, Human
uccugaucagagccg

SEQ ID NO: 3409590 - RNA, 14 nt, Human
uccugaucugugau

SEQ ID NO: 3409591 - RNA, 18 nt, Human
uccugaugguacaggaaa

SEQ ID NO: 3409592 - RNA, 17 nt, Human
uccugauggucagcucc

SEQ ID NO: 3409593 - RNA, 18 nt, Human
uccugauggucagcuccc

SEQ ID NO: 3409594 - RNA, 19 nt, Human
uccugauggucagcucccu

SEQ ID NO: 3409595 - RNA, 20 nt, Human
uccugauugguuucucuucu

SEQ ID NO: 3409596 - RNA, 21 nt, Human
uccugauugguuucucuucuc

SEQ ID NO: 3409597 - RNA, 23 nt, Human
uccugauuucuagaacccgugac

SEQ ID NO: 3409598 - RNA, 17 nt, Human
uccugcaacucaaggac

SEQ ID NO: 3409599 - RNA, 13 nt, Human
uccugcaaugaaa

SEQ ID NO: 3409600 - RNA, 15 nt, Human
uccugcaaugaaguc

SEQ ID NO: 3409601 - RNA, 20 nt, Human
uccugcaaugaagucucuga

SEQ ID NO: 3409602 - RNA, 21 nt, Human
uccugcaaugaagucucugaa

SEQ ID NO: 3409603 - RNA, 21 nt, Human
uccugcacugacccacagccu

SEQ ID NO: 3409604 - RNA, 15 nt, Human
uccugcacuguuuaa

SEQ ID NO: 3409605 - RNA, 17 nt, Human
uccugcagaccacgccc

SEQ ID NO: 3409606 - RNA, 20 nt, Human
uccugcagcaaacacuccac

SEQ ID NO: 3409607 - RNA, 16 nt, Human
uccugcagccuccucc

SEQ ID NO: 3409608 - RNA, 17 nt, Human
uccugcaggcaggaaca

SEQ ID NO: 3409609 - RNA, 14 nt, Human
uccugcaggccagg

SEQ ID NO: 3409610 - RNA, 22 nt, Human
uccugcagggccagaccugccu

SEQ ID NO: 3409611 - RNA, 18 nt, Human
uccugcagguaaacaguu

SEQ ID NO: 3409612 - RNA, 18 nt, Human
uccugccacauuagaacu

SEQ ID NO: 3409613 - RNA, 19 nt, Human
uccugccacauuagaacuu

SEQ ID NO: 3409614 - RNA, 11 nt, Human
uccugccacca

SEQ ID NO: 3409615 - RNA, 16 nt, Human
uccugccaccacgccc

SEQ ID NO: 3409616 - RNA, 14 nt, Human
uccugccaccaguc

SEQ ID NO: 3409617 - RNA, 22 nt, Human
uccugccaccagucacuguccc

SEQ ID NO: 3409618 - RNA, 18 nt, Human
uccugccaccuggggcag

SEQ ID NO: 3409619 - RNA, 22 nt, Human
uccugccagccccacacagcua

SEQ ID NO: 3409620 - RNA, 13 nt, Human
uccugccaggcau

SEQ ID NO: 3409621 - RNA, 14 nt, Human
uccugccaggcaug

SEQ ID NO: 3409622 - RNA, 15 nt, Human
uccugcccacugaua

SEQ ID NO: 3409623 - RNA, 12 nt, Human
uccugcccagga

SEQ ID NO: 3409624 - RNA, 14 nt, Human
uccugcccaggaga

SEQ ID NO: 3409625 - RNA, 18 nt, Human
uccugcccaggagagcca

SEQ ID NO: 3409626 - RNA, 22 nt, Human
uccugcccaggagagccagccc

SEQ ID NO: 3409627 - RNA, 13 nt, Human
uccugcccagucc

SEQ ID NO: 3409628 - RNA, 15 nt, Human
uccugcccagucccc

SEQ ID NO: 3409629 - RNA, 16 nt, Human
uccugcccaguccccc

SEQ ID NO: 3409630 - RNA, 21 nt, Human
uccugccccaacuccuuccag

SEQ ID NO: 3409631 - RNA, 17 nt, Human
uccuuccccuuucccca

SEQ ID NO: 3409632 - RNA, 17 nt, Human
uccuucccucaaagcuu

SEQ ID NO: 3409633 - RNA, 14 nt, Human
uccuucccugcugu

SEQ ID NO: 3409634 - RNA, 12 nt, Human
uccuucccuggc

SEQ ID NO: 3409635 - RNA, 19 nt, Human
uccuucccugggcugugcu

SEQ ID NO: 3409636 - RNA, 23 nt, Human
uccuuccuaaauuuuccuguccu

SEQ ID NO: 3409637 - RNA, 21 nt, Human
uccuuccuacacccuuggacu

SEQ ID NO: 3409638 - RNA, 13 nt, Human
uccuuccuacccu

SEQ ID NO: 3409639 - RNA, 16 nt, Human
uccuuccucacaccag

SEQ ID NO: 3409640 - RNA, 14 nt, Human
uccuuccucuccuu

SEQ ID NO: 3409641 - RNA, 17 nt, Human
uccuuccucugagccuu

SEQ ID NO: 3409642 - RNA, 16 nt, Human
uccuuccucugaggcu

SEQ ID NO: 3409643 - RNA, 17 nt, Human
uccuuccuggccugaga

SEQ ID NO: 3409644 - RNA, 13 nt, Human
uccuuccugucuu

SEQ ID NO: 3409645 - RNA, 14 nt, Human
uccuuccugucuuc

SEQ ID NO: 3409646 - RNA, 14 nt, Human
uccuuccuguucug

SEQ ID NO: 3409647 - RNA, 19 nt, Human
uccuuccuugcuguccuag

SEQ ID NO: 3409648 - RNA, 23 nt, Human
uccuucuaaucugcuaugcuuga

SEQ ID NO: 3409649 - RNA, 16 nt, Human
uccuucuaguuuccca

SEQ ID NO: 3409650 - RNA, 18 nt, Human
uccuucucccaucucuuc

SEQ ID NO: 3409651 - RNA, 12 nt, Human
uccuucucccuu

SEQ ID NO: 3409652 - RNA, 12 nt, Human
uccuucucuguc

SEQ ID NO: 3409653 - RNA, 15 nt, Human
uccuucucugucuca

SEQ ID NO: 3409654 - RNA, 18 nt, Human
uccuucugccugagcuuc

SEQ ID NO: 3409655 - RNA, 12 nt, Human
uccuucuggccu

SEQ ID NO: 3409656 - RNA, 13 nt, Human
uccuucuggccuu

SEQ ID NO: 3409657 - RNA, 12 nt, Human
uccuucuguccu

SEQ ID NO: 3409658 - RNA, 22 nt, Human
uccuucuuucuaguucagcugc

SEQ ID NO: 3409659 - RNA, 20 nt, Human
uccuucuuugauaauguuaa

SEQ ID NO: 3409660 - RNA, 19 nt, Human
uccuucuuugcccuuuacu

SEQ ID NO: 3409661 - RNA, 15 nt, Human
uccuucuuuuuaaaa

SEQ ID NO: 3409662 - RNA, 18 nt, Human
uccuugaagaacugcagg

SEQ ID NO: 3409663 - RNA, 21 nt, Human
uccuugaaggacuaauagaaa

SEQ ID NO: 3409664 - RNA, 21 nt, Human
uccuugaccagcagaucccag

SEQ ID NO: 3409665 - RNA, 22 nt, Human
uccuugaccugcauuguaaaua

SEQ ID NO: 3409666 - RNA, 17 nt, Human
uccuugaccuuccucug

SEQ ID NO: 3409667 - RNA, 21 nt, Human
uccuugaccuuccucuggggc

SEQ ID NO: 3409668 - RNA, 21 nt, Human
uccuugagacacggagcccag

SEQ ID NO: 3409669 - RNA, 22 nt, Human
uccuugaggggagccaggaggg

SEQ ID NO: 3409670 - RNA, 14 nt, Human
uccuugauaacagc

SEQ ID NO: 3409671 - RNA, 12 nt, Human
uccuugauaaug

SEQ ID NO: 3409672 - RNA, 14 nt, Human
uccuugaucauuuu

SEQ ID NO: 3409673 - RNA, 14 nt, Human
uccuugauuucaaa

SEQ ID NO: 3409674 - RNA, 22 nt, Human
uccuugauuuuagccuucucug

SEQ ID NO: 3409675 - RNA, 23 nt, Human
uccuugauuuuagccuucucugu

SEQ ID NO: 3409676 - RNA, 21 nt, Human
uccuugcacacuccccugcac

SEQ ID NO: 3409677 - RNA, 21 nt, Human
uccuugcaccccucacucugg

SEQ ID NO: 3409678 - RNA, 21 nt, Human
uccuugcagguggggguugcu

SEQ ID NO: 3409679 - RNA, 15 nt, Human
uccuugcuaugauga

SEQ ID NO: 3409680 - RNA, 13 nt, Human
uccuugcucuccc

SEQ ID NO: 3409681 - RNA, 15 nt, Human
uccuugcucugcacc

SEQ ID NO: 3409682 - RNA, 14 nt, Human
uccuugcucugcag

SEQ ID NO: 3409683 - RNA, 16 nt, Human
uccuugcucugcaggc

SEQ ID NO: 3409684 - RNA, 22 nt, Human
uccuugcugcaaggcucuuccu

SEQ ID NO: 3409685 - RNA, 21 nt, Human
uccuugcuguccuaggccaca

SEQ ID NO: 3409686 - RNA, 23 nt, Human
uccuuggcaggcugauuucuagg

SEQ ID NO: 3409687 - RNA, 21 nt, Human
uccuuggcaguggacucagaa

SEQ ID NO: 3409688 - RNA, 20 nt, Human
uccuuggcaugccuuccagc

SEQ ID NO: 3409689 - RNA, 16 nt, Human
uccuuggccaugcaga

SEQ ID NO: 3409690 - RNA, 17 nt, Human
uccuuggccaugcagaa

SEQ ID NO: 3409691 - RNA, 14 nt, Human
uccuuggcccccuu

SEQ ID NO: 3409692 - RNA, 21 nt, Human
uccuuggcccccuuucccggg

SEQ ID NO: 3409693 - RNA, 22 nt, Human
uccuuggccuagcccacccugc

SEQ ID NO: 3409694 - RNA, 16 nt, Human
uccuugggaggaagca

SEQ ID NO: 3409695 - RNA, 19 nt, Human
uccuugggaggaagcagaa

SEQ ID NO: 3409696 - RNA, 21 nt, Human
uccuugggaggaagcagaaua

SEQ ID NO: 3409697 - RNA, 22 nt, Human
uccuugggaggaagcagaauaa

SEQ ID NO: 3409698 - RNA, 14 nt, Human
uccuugggcccuuu

SEQ ID NO: 3409699 - RNA, 16 nt, Human
uccuugggcccuuuga

SEQ ID NO: 3409700 - RNA, 14 nt, Human
uccuuggggcaggc

SEQ ID NO: 3409701 - RNA, 15 nt, Human
uccuuggggcaggca

SEQ ID NO: 3409702 - RNA, 16 nt, Human
uccuuggggcaggcag

SEQ ID NO: 3409703 - RNA, 18 nt, Human
uccuugggggcucccagg

SEQ ID NO: 3409704 - RNA, 14 nt, Human
uccuuggugccugg

SEQ ID NO: 3409705 - RNA, 18 nt, Human
uccuuggugccuggccug

SEQ ID NO: 3409706 - RNA, 18 nt, Human
uccuuggugucgggcaug

SEQ ID NO: 3409707 - RNA, 15 nt, Human
uccuuguauuuaaau

SEQ ID NO: 3409708 - RNA, 13 nt, Human
uccuugucacugg

SEQ ID NO: 3409709 - RNA, 15 nt, Human
uccuuguccacccac

SEQ ID NO: 3409710 - RNA, 13 nt, Human
uccuuguccccac

SEQ ID NO: 3409711 - RNA, 19 nt, Human
uccuuguccccacacuccu

SEQ ID NO: 3409712 - RNA, 16 nt, Human
uccuugucuuggcagc

SEQ ID NO: 3409713 - RNA, 20 nt, Human
uccuugugaugugcacguaa

SEQ ID NO: 3409714 - RNA, 23 nt, Human
uccuugugcaaaauauuugacua

SEQ ID NO: 3409715 - RNA, 12 nt, Human
uccuugugcaug

SEQ ID NO: 3409716 - RNA, 18 nt, Human
uccuuguggccugggccu

SEQ ID NO: 3409717 - RNA, 16 nt, Human
uccuugugggccuggg

SEQ ID NO: 3409718 - RNA, 22 nt, Human
uccuugugguuuaugucaucau

SEQ ID NO: 3409719 - RNA, 23 nt, Human
uccuuguguuacuaaguuuuuau

SEQ ID NO: 3409720 - RNA, 13 nt, Human
uccuuguuuauca

SEQ ID NO: 3409721 - RNA, 13 nt, Human
uccuuguuucaaa

SEQ ID NO: 3409722 - RNA, 14 nt, Human
uccuuguuucaaac

SEQ ID NO: 3409723 - RNA, 22 nt, Human
uccuuuaaaaaaauuuaagugc

SEQ ID NO: 3409724 - RNA, 17 nt, Human
uccuuuaaauccuucca

SEQ ID NO: 3409725 - RNA, 11 nt, Human
uccuuuaacaa

SEQ ID NO: 3409726 - RNA, 14 nt, Human
uccuuuaauaugaa

SEQ ID NO: 3409727 - RNA, 18 nt, Human
uccuuuaauaugaaauuu

SEQ ID NO: 3409728 - RNA, 13 nt, Human
uccuuuacuuucc

SEQ ID NO: 3409729 - RNA, 13 nt, Human
uccuuuagaaaca

SEQ ID NO: 3409730 - RNA, 19 nt, Human
uccuuuagauagcagccug

SEQ ID NO: 3409731 - RNA, 15 nt, Human
uccuuuagcgcccag

SEQ ID NO: 3409732 - RNA, 19 nt, Human
uccuuuaggguucugccuc

SEQ ID NO: 3409733 - RNA, 23 nt, Human
uccuuuaguaaaacuccgaguga

SEQ ID NO: 3409734 - RNA, 13 nt, Human
uccuuuauaauga

SEQ ID NO: 3409735 - RNA, 16 nt, Human
uccuuuauauuuagug

SEQ ID NO: 3409736 - RNA, 14 nt, Human
uccuuuaugugaau

SEQ ID NO: 3409737 - RNA, 20 nt, Human
uccuuuaugugaauuuuuaa

SEQ ID NO: 3409738 - RNA, 18 nt, Human
uccuuucaagguaacugu

SEQ ID NO: 3409739 - RNA, 18 nt, Human
uccuuucacaaccuucug

SEQ ID NO: 3409740 - RNA, 21 nt, Human
uccuuucagggaauuucagga

SEQ ID NO: 3409741 - RNA, 23 nt, Human
uccuuucagggaauuucaggaac

SEQ ID NO: 3409742 - RNA, 19 nt, Human
uccuuucauauaguuagcu

SEQ ID NO: 3409743 - RNA, 20 nt, Human
uccuuucauuuacuguggcu

SEQ ID NO: 3409744 - RNA, 13 nt, Human
uccuuuccaccuu

SEQ ID NO: 3409745 - RNA, 21 nt, Human
uccuuucccaagccuucgggc

SEQ ID NO: 3409746 - RNA, 15 nt, Human
uccuuuccccagccc

SEQ ID NO: 3409747 - RNA, 14 nt, Human
uccuuucuaaacaa

SEQ ID NO: 3409748 - RNA, 22 nt, Human
uccuuucuaacaaaaaaauaua

SEQ ID NO: 3409749 - RNA, 20 nt, Human
uccuuucuagagcacugcca

SEQ ID NO: 3409750 - RNA, 11 nt, Human
uccuuucuauc

SEQ ID NO: 3409751 - RNA, 15 nt, Human
uccuuucuccaggac

SEQ ID NO: 3409752 - RNA, 13 nt, Human
uccuuucucuuuc

SEQ ID NO: 3409753 - RNA, 13 nt, Human
uccuuucugugcc

SEQ ID NO: 3409754 - RNA, 16 nt, Human
uccuuucugugcccua

SEQ ID NO: 3409755 - RNA, 12 nt, Human
uccuuucuuccg

SEQ ID NO: 3409756 - RNA, 20 nt, Human
uccuuucuugguucauaaau

SEQ ID NO: 3409757 - RNA, 13 nt, Human
uccuuucuuuucc

SEQ ID NO: 3409758 - RNA, 14 nt, Human
uccuuucuuuuucu

SEQ ID NO: 3409759 - RNA, 21 nt, Human
uccuuugaauccucucucugu

SEQ ID NO: 3409760 - RNA, 22 nt, Human
uccuuuggagcuuuuuucuuua

SEQ ID NO: 3409761 - RNA, 12 nt, Human
uccuuuguaaaa

SEQ ID NO: 3409762 - RNA, 18 nt, Human
uccuuuguacuuugugcu

SEQ ID NO: 3409763 - RNA, 12 nt, Human
uccuuugucuuc

SEQ ID NO: 3409764 - RNA, 17 nt, Human
uccuuugugaggaagcc

SEQ ID NO: 3409765 - RNA, 17 nt, Human
uccuuuguguguguguc

SEQ ID NO: 3409766 - RNA, 20 nt, Human
uccuuuguguuucuauugac

SEQ ID NO: 3409767 - RNA, 16 nt, Human
uccuuuguucuuaccu

SEQ ID NO: 3409768 - RNA, 19 nt, Human
uccuuuguuuuuuuuuccu

SEQ ID NO: 3409769 - RNA, 23 nt, Human
uccuuuguuuuuuuuuccugucc

SEQ ID NO: 3409770 - RNA, 13 nt, Human
uccuuuuaaagaa

SEQ ID NO: 3409771 - RNA, 15 nt, Human
uccuuuuagccuagu

SEQ ID NO: 3409772 - RNA, 14 nt, Human
uccuuuucauaggu

SEQ ID NO: 3409773 - RNA, 13 nt, Human
uccuuuucccugc

SEQ ID NO: 3409774 - RNA, 18 nt, Human
uccuuuucgcaggauucu

SEQ ID NO: 3409775 - RNA, 15 nt, Human
uccuuuucuguguuu

SEQ ID NO: 3409776 - RNA, 13 nt, Human
uccuuuucuuuaa

SEQ ID NO: 3409777 - RNA, 18 nt, Human
ucuaaaacuguacuuuga

SEQ ID NO: 3409778 - RNA, 12 nt, Human
ucuaaaagacuu

SEQ ID NO: 3409779 - RNA, 17 nt, Human
ucuaaaagcagaaaaua

SEQ ID NO: 3409780 - RNA, 22 nt, Human
ucuaaaaucuuauaguucuagg

SEQ ID NO: 3409781 - RNA, 21 nt, Human
ucuaaaaugccucaguguauu

SEQ ID NO: 3409782 - RNA, 22 nt, Human
ucuaaaaugccucaguguauuu

SEQ ID NO: 3409783 - RNA, 20 nt, Human
ucuaaaaugugauguucuaa

SEQ ID NO: 3409784 - RNA, 14 nt, Human
ucuaaaauuacaua

SEQ ID NO: 3409785 - RNA, 19 nt, Human
ucuaaacccaauccaaaug

SEQ ID NO: 3409786 - RNA, 21 nt, Human
ucuaaacuggauucacagcuc

SEQ ID NO: 3409787 - RNA, 22 nt, Human
ucuaaagaccaaacuucacucu

SEQ ID NO: 3409788 - RNA, 20 nt, Human
ucuaaagaguuuauuuuaag

SEQ ID NO: 3409789 - RNA, 18 nt, Human
ucuaaagauggaguuucu

SEQ ID NO: 3409790 - RNA, 22 nt, Human
ucuaaagauucuauaguucuag

SEQ ID NO: 3409791 - RNA, 12 nt, Human
ucuaaagcaaau

SEQ ID NO: 3409792 - RNA, 18 nt, Human
ucuaaagccuuaagucuu

SEQ ID NO: 3409793 - RNA, 12 nt, Human
ucuaaagcucug

SEQ ID NO: 3409794 - RNA, 14 nt, Human
ucuaaagcugccag

SEQ ID NO: 3409795 - RNA, 21 nt, Human
ucuaaagcugguuuaauguuu

SEQ ID NO: 3409796 - RNA, 20 nt, Human
ucuaaaggcuaccuuuguau

SEQ ID NO: 3409797 - RNA, 15 nt, Human
ucuaaagguccacag

SEQ ID NO: 3409798 - RNA, 22 nt, Human
ucuaaagguccacaggucuaga

SEQ ID NO: 3409799 - RNA, 16 nt, Human
ucuaaaguacugagca

SEQ ID NO: 3409800 - RNA, 13 nt, Human
ucuaaaguucuaa

SEQ ID NO: 3409801 - RNA, 15 nt, Human
ucuaaaguuuacagu

SEQ ID NO: 3409802 - RNA, 18 nt, Human
ucuaaaguuuacaguaaa

SEQ ID NO: 3409803 - RNA, 17 nt, Human
ucuaaauaaaauauaau

SEQ ID NO: 3409804 - RNA, 22 nt, Human
ucuaaauaucccuuggacauuu

SEQ ID NO: 3409805 - RNA, 14 nt, Human
ucuaaaucuauuua

SEQ ID NO: 3409806 - RNA, 21 nt, Human
ucuaaaucuccaaaauaaaac

SEQ ID NO: 3409807 - RNA, 21 nt, Human
ucuaaaucuguccaacugaga

SEQ ID NO: 3409808 - RNA, 17 nt, Human
ucuaaauucuuuauuuc

SEQ ID NO: 3409809 - RNA, 15 nt, Human
ucuaaauugaauaau

SEQ ID NO: 3409810 - RNA, 23 nt, Human
ucuaaauuugaauguuaagcaga

SEQ ID NO: 3409811 - RNA, 23 nt, Human
ucuaaauuuuauaucuuguagcu

SEQ ID NO: 3409812 - RNA, 19 nt, Human
ucuaacaaaaaaauauauu

SEQ ID NO: 3409813 - RNA, 13 nt, Human
ucuaacaaugaca

SEQ ID NO: 3409814 - RNA, 13 nt, Human
ucuaacagauuag

SEQ ID NO: 3409815 - RNA, 14 nt, Human
ucuaacagcaccaa

SEQ ID NO: 3409816 - RNA, 15 nt, Human
ucuaacagcucagga

SEQ ID NO: 3409817 - RNA, 18 nt, Human
ucuaacaggggcuggugg

SEQ ID NO: 3409818 - RNA, 24 nt, Human
ucuaacaggggcuggugggcacca

SEQ ID NO: 3409819 - RNA, 16 nt, Human
ucuaaccacagcuccu

SEQ ID NO: 3409820 - RNA, 20 nt, Human
ucuaaccacagcuccuuuuc

SEQ ID NO: 3409821 - RNA, 13 nt, Human
ucuaaccagugau

SEQ ID NO: 3409822 - RNA, 16 nt, Human
ucuaaccccaggcccc

SEQ ID NO: 3409823 - RNA, 17 nt, Human
ucuaaccccaggccccg

SEQ ID NO: 3409824 - RNA, 23 nt, Human
ucuaacccuaggcaucacaugcu

SEQ ID NO: 3409825 - RNA, 19 nt, Human
ucuaacccuauacuguagu

SEQ ID NO: 3409826 - RNA, 20 nt, Human
ucuaacccucccauggcacc

SEQ ID NO: 3409827 - RNA, 13 nt, Human
ucuaaccucaucu

SEQ ID NO: 3409828 - RNA, 14 nt, Human
ucuaaccugugacc

SEQ ID NO: 3409829 - RNA, 12 nt, Human
ucuaaccuugaa

SEQ ID NO: 3409830 - RNA, 17 nt, Human
ucuaaccuugaaugcug

SEQ ID NO: 3409831 - RNA, 19 nt, Human
ucuaaccuugaaugcugcc

SEQ ID NO: 3409832 - RNA, 16 nt, Human
ucuaaccuuuacauga

SEQ ID NO: 3409833 - RNA, 13 nt, Human
ucuaacgccugag

SEQ ID NO: 3409834 - RNA, 14 nt, Human
ucuaacgccugagc

SEQ ID NO: 3409835 - RNA, 22 nt, Human
ucuaacggucuguucuguuuca

SEQ ID NO: 3409836 - RNA, 16 nt, Human
ucuaacucagaauuau

SEQ ID NO: 3409837 - RNA, 18 nt, Human
ucuaacucagaauuauuu

SEQ ID NO: 3409838 - RNA, 16 nt, Human
ucuaacucugauguaa

SEQ ID NO: 3409839 - RNA, 20 nt, Human
ucuaacucugauguaaauga

SEQ ID NO: 3409840 - RNA, 18 nt, Human
ucuaacuguauauuugua

SEQ ID NO: 3409841 - RNA, 21 nt, Human
ucuaacuuaagaaauaaauca

SEQ ID NO: 3409842 - RNA, 16 nt, Human
ucuaacuucaccauau

SEQ ID NO: 3409843 - RNA, 16 nt, Human
ucuaagaaacauugga

SEQ ID NO: 3409844 - RNA, 17 nt, Human
ucuaagaaacauuggaa

SEQ ID NO: 3409845 - RNA, 22 nt, Human
ucuaagaaacauuuauauugau

SEQ ID NO: 3409846 - RNA, 16 nt, Human
ucuaagaaauaucugu

SEQ ID NO: 3409847 - RNA, 21 nt, Human
ucuaagaaauaucugugaaau

SEQ ID NO: 3409848 - RNA, 22 nt, Human
ucuaagaaauaucugugaaaua

SEQ ID NO: 3409849 - RNA, 16 nt, Human
ucuaagaaauugaaua

SEQ ID NO: 3409850 - RNA, 24 nt, Human
ucuaagaaauugaauacuuugaau

SEQ ID NO: 3409851 - RNA, 14 nt, Human
ucuaagaauaauaa

SEQ ID NO: 3409852 - RNA, 17 nt, Human
ucuaagaauacagcuuu

SEQ ID NO: 3409853 - RNA, 21 nt, Human
ucuaagacucaaauguucuaa

SEQ ID NO: 3409854 - RNA, 22 nt, Human
ucuaagacucaaauguucuaag

SEQ ID NO: 3409855 - RNA, 12 nt, Human
ucuaagagaagu

SEQ ID NO: 3409856 - RNA, 20 nt, Human
ucuaagaugugauauucuaa

SEQ ID NO: 3409857 - RNA, 21 nt, Human
ucuaagauguuauauuuuucu

SEQ ID NO: 3409858 - RNA, 22 nt, Human
ucuaagauguuauauuuuucuu

SEQ ID NO: 3409859 - RNA, 18 nt, Human
ucuaagauucuaaagguc

SEQ ID NO: 3409860 - RNA, 14 nt, Human
ucuaagcagcauuu

SEQ ID NO: 3409861 - RNA, 15 nt, Human
ucuaagccugaaggg

SEQ ID NO: 3409862 - RNA, 22 nt, Human
ucuaaggaagaucacuuugcuc

SEQ ID NO: 3409863 - RNA, 20 nt, Human
ucuaaggaugucacagggcc

SEQ ID NO: 3409864 - RNA, 15 nt, Human
ucuaaggcaggaugu

SEQ ID NO: 3409865 - RNA, 21 nt, Human
ucuaaggccuaggauucuaaa

SEQ ID NO: 3409866 - RNA, 14 nt, Human
ucuaaggcucugag

SEQ ID NO: 3409867 - RNA, 15 nt, Human
ucuaaggcucugaga

SEQ ID NO: 3409868 - RNA, 20 nt, Human
ucuaaggcucugagagucua

SEQ ID NO: 3409869 - RNA, 23 nt, Human
ucuaaggcucugagagucuagau

SEQ ID NO: 3409870 - RNA, 15 nt, Human
ucuaaggucuaucaa

SEQ ID NO: 3409871 - RNA, 18 nt, Human
ucuaagguucucauagga

SEQ ID NO: 3409872 - RNA, 21 nt, Human
ucuaaguaaaaccacagcagu

SEQ ID NO: 3409873 - RNA, 15 nt, Human
ucuaaguaaauacaa

SEQ ID NO: 3409874 - RNA, 16 nt, Human
ucuaagucauguaugu

SEQ ID NO: 3409875 - RNA, 20 nt, Human
ucuaagucauguauguuucu

SEQ ID NO: 3409876 - RNA, 20 nt, Human
ucuaagucgguuaaaaugga

SEQ ID NO: 3409877 - RNA, 13 nt, Human
ucuaagucuuucc

SEQ ID NO: 3409878 - RNA, 18 nt, Human
ucuaaguuaauuuaaagu

SEQ ID NO: 3409879 - RNA, 21 nt, Human
ucuaaguuaauuuaaaguugu

SEQ ID NO: 3409880 - RNA, 22 nt, Human
ucuaaguuauaagacucucaca

SEQ ID NO: 3409881 - RNA, 18 nt, Human
ucuaaguuucuaagauuc

SEQ ID NO: 3409882 - RNA, 11 nt, Human
ucuaauaaacu

SEQ ID NO: 3409883 - RNA, 14 nt, Human
ucuaauaaauuaua

SEQ ID NO: 3409884 - RNA, 18 nt, Human
ucuaauaagcuaguugaa

SEQ ID NO: 3409885 - RNA, 13 nt, Human
ucuaauaauaaau

SEQ ID NO: 3409886 - RNA, 16 nt, Human
ucuaauaauuucuaau

SEQ ID NO: 3409887 - RNA, 17 nt, Human
ucuaauaauuucuaaug

SEQ ID NO: 3409888 - RNA, 14 nt, Human
ucuaauaccucugu

SEQ ID NO: 3409889 - RNA, 17 nt, Human
ucuaauaccucugugug

SEQ ID NO: 3409890 - RNA, 20 nt, Human
ucuaauaccucugugugcuc

SEQ ID NO: 3409891 - RNA, 16 nt, Human
ucuaauagggcaauua

SEQ ID NO: 3409892 - RNA, 13 nt, Human
ucuaauagugcuu

SEQ ID NO: 3409893 - RNA, 17 nt, Human
ucuaauauuaaaaauau

SEQ ID NO: 3409894 - RNA, 18 nt, Human
ucuaaucaugaaacuccc

SEQ ID NO: 3409895 - RNA, 20 nt, Human
ucuaaucugcuaugcuugaa

SEQ ID NO: 3409896 - RNA, 20 nt, Human
ucuaaucugugcuguuucaa

SEQ ID NO: 3409897 - RNA, 22 nt, Human
ucuaaugaggagagaaaauaua

SEQ ID NO: 3409898 - RNA, 16 nt, Human
ucuaaugauggcccau

SEQ ID NO: 3409899 - RNA, 15 nt, Human
ucuaaugcucacgcu

SEQ ID NO: 3409900 - RNA, 20 nt, Human
ucuaauggguauuuaaacaa

SEQ ID NO: 3409901 - RNA, 17 nt, Human
ucuaauguauuuuauug

SEQ ID NO: 3409902 - RNA, 20 nt, Human
ucuaaugugguuauuucucu

SEQ ID NO: 3409903 - RNA, 14 nt, Human
ucuaaugugugaau

SEQ ID NO: 3409904 - RNA, 17 nt, Human
ucuaauguuugcauaua

SEQ ID NO: 3409905 - RNA, 18 nt, Human
ucuaauuaaccuuacuaa

SEQ ID NO: 3409906 - RNA, 21 nt, Human
ucuaauucccauuuugcaaaa

SEQ ID NO: 3409907 - RNA, 16 nt, Human
ucuaauuccuguuugu

SEQ ID NO: 3409908 - RNA, 12 nt, Human
ucuaauucuaac

SEQ ID NO: 3409909 - RNA, 17 nt, Human
ucuaauucuuccuuugu

SEQ ID NO: 3409910 - RNA, 21 nt, Human
ucuaauucuuccuuuguaaaa

SEQ ID NO: 3409911 - RNA, 19 nt, Human
ucuaauugcaucucaaaau

SEQ ID NO: 3409912 - RNA, 14 nt, Human
ucuaauugcuuauu

SEQ ID NO: 3409913 - RNA, 13 nt, Human
ucuaauuuauaaa

SEQ ID NO: 3409914 - RNA, 14 nt, Human
ucuaauuuauaaaa

SEQ ID NO: 3409915 - RNA, 22 nt, Human
ucuaauuuaucuugucucuggg

SEQ ID NO: 3409916 - RNA, 15 nt, Human
ucuaauuugcugcug

SEQ ID NO: 3409917 - RNA, 14 nt, Human
ucuaauuuuuaaga

SEQ ID NO: 3409918 - RNA, 15 nt, Human
ucuaauuuuuaagaa

SEQ ID NO: 3409919 - RNA, 17 nt, Human
ucuaauuuuuauucaua

SEQ ID NO: 3409920 - RNA, 17 nt, Human
ucuacaacucauacacu

SEQ ID NO: 3409921 - RNA, 16 nt, Human
ucugcugaauuuucac

SEQ ID NO: 3409922 - RNA, 17 nt, Human
ucugcugaauuuucaca

SEQ ID NO: 3409923 - RNA, 19 nt, Human
ucugcugacagacacaggc

SEQ ID NO: 3409924 - RNA, 15 nt, Human
ucugcugaccugcug

SEQ ID NO: 3409925 - RNA, 12 nt, Human
ucugcugagggu

SEQ ID NO: 3409926 - RNA, 16 nt, Human
ucugcugcagagcagu

SEQ ID NO: 3409927 - RNA, 13 nt, Human
ucugcugcuggcu

SEQ ID NO: 3409928 - RNA, 17 nt, Human
ucugcugcuggcugguu

SEQ ID NO: 3409929 - RNA, 21 nt, Human
ucugcuggccgggcacagcug

SEQ ID NO: 3409930 - RNA, 23 nt, Human
ucugcuggccgggcacagcugug

SEQ ID NO: 3409931 - RNA, 14 nt, Human
ucugcuggccucug

SEQ ID NO: 3409932 - RNA, 16 nt, Human
ucugcuggccucugcg

SEQ ID NO: 3409933 - RNA, 19 nt, Human
ucugcuggccucugcgagu

SEQ ID NO: 3409934 - RNA, 15 nt, Human
ucugcuggccuggau

SEQ ID NO: 3409935 - RNA, 15 nt, Human
ucugcuggccuggcc

SEQ ID NO: 3409936 - RNA, 12 nt, Human
ucugcugggcug

SEQ ID NO: 3409937 - RNA, 17 nt, Human
ucugcugggcuggggcc

SEQ ID NO: 3409938 - RNA, 22 nt, Human
ucugcugggcuggggccugaug

SEQ ID NO: 3409939 - RNA, 19 nt, Human
ucugcuggggccugggaca

SEQ ID NO: 3409940 - RNA, 20 nt, Human
ucugcuggucacuucuucug

SEQ ID NO: 3409941 - RNA, 16 nt, Human
ucugcugguuuuaaca

SEQ ID NO: 3409942 - RNA, 12 nt, Human
ucugcuguagaa

SEQ ID NO: 3409943 - RNA, 18 nt, Human
ucugcugucagucugcuu

SEQ ID NO: 3409944 - RNA, 17 nt, Human
ucugcuguccagacagc

SEQ ID NO: 3409945 - RNA, 21 nt, Human
ucugcuguccagacagccugu

SEQ ID NO: 3409946 - RNA, 17 nt, Human
ucugcuguccccuuggc

SEQ ID NO: 3409947 - RNA, 16 nt, Human
ucugcugucucagccu

SEQ ID NO: 3409948 - RNA, 22 nt, Human
ucugcugugggcacaggucagg

SEQ ID NO: 3409949 - RNA, 16 nt, Human
ucugcuguuccagugg

SEQ ID NO: 3409950 - RNA, 21 nt, Human
ucugcuguucucuagaaagaa

SEQ ID NO: 3409951 - RNA, 16 nt, Human
ucugcuuaaaaacuca

SEQ ID NO: 3409952 - RNA, 19 nt, Human
ucugcuuacaauucccugc

SEQ ID NO: 3409953 - RNA, 22 nt, Human
ucugcuuacaauucccugcugu

SEQ ID NO: 3409954 - RNA, 14 nt, Human
ucugcuuagaaaua

SEQ ID NO: 3409955 - RNA, 16 nt, Human
ucugcuuagaaauaac

SEQ ID NO: 3409956 - RNA, 16 nt, Human
ucugcuuauccuucca

SEQ ID NO: 3409957 - RNA, 19 nt, Human
ucugcuucaauaaaucuuu

SEQ ID NO: 3409958 - RNA, 13 nt, Human
ucugcuucagccu

SEQ ID NO: 3409959 - RNA, 13 nt, Human
ucugcuucagcuu

SEQ ID NO: 3409960 - RNA, 12 nt, Human
ucugcuucccag

SEQ ID NO: 3409961 - RNA, 22 nt, Human
ucugcuucccagguucaagcga

SEQ ID NO: 3409962 - RNA, 16 nt, Human
ucugcuucucugacuu

SEQ ID NO: 3409963 - RNA, 16 nt, Human
ucugcuugccaucccu

SEQ ID NO: 3409964 - RNA, 17 nt, Human
ucugcuugccaucccuc

SEQ ID NO: 3409965 - RNA, 23 nt, Human
ucugcuugccaucccucccucca

SEQ ID NO: 3409966 - RNA, 21 nt, Human
ucugcuuuaaagggccugccu

SEQ ID NO: 3409967 - RNA, 13 nt, Human
ucugcuuuccucu

SEQ ID NO: 3409968 - RNA, 18 nt, Human
ucugcuuuccucuuccug

SEQ ID NO: 3409969 - RNA, 19 nt, Human
ucugcuuucuuugauucuc

SEQ ID NO: 3409970 - RNA, 20 nt, Human
ucugcuuugcucuucaagaa

SEQ ID NO: 3409971 - RNA, 22 nt, Human
ucugcuuugggguuuaucagaa

SEQ ID NO: 3409972 - RNA, 22 nt, Human
ucugcuuuguugugugccucua

SEQ ID NO: 3409973 - RNA, 13 nt, Human
ucugcuuuuaucu

SEQ ID NO: 3409974 - RNA, 13 nt, Human
ucugcuuuuauua

SEQ ID NO: 3409975 - RNA, 16 nt, Human
ucugcuuuucugcccu

SEQ ID NO: 3409976 - RNA, 19 nt, Human
ucugcuuuucugcccuggc

SEQ ID NO: 3409977 - RNA, 20 nt, Human
ucuggaaaccucuacauauu

SEQ ID NO: 3409978 - RNA, 14 nt, Human
ucuggaacccagac

SEQ ID NO: 3409979 - RNA, 22 nt, Human
ucuggaacccagacucagacau

SEQ ID NO: 3409980 - RNA, 15 nt, Human
ucuggaaccucagcc

SEQ ID NO: 3409981 - RNA, 13 nt, Human
ucuggaagagagg

SEQ ID NO: 3409982 - RNA, 17 nt, Human
ucuggaagccccugggc

SEQ ID NO: 3409983 - RNA, 13 nt, Human
ucuggaagggcca

SEQ ID NO: 3409984 - RNA, 18 nt, Human
ucuggaagugacuuuggc

SEQ ID NO: 3409985 - RNA, 19 nt, Human
ucuggaagugacuuuggcu

SEQ ID NO: 3409986 - RNA, 19 nt, Human
ucuggaauaaggagaauga

SEQ ID NO: 3409987 - RNA, 20 nt, Human
ucuggaauaugcaacauugu

SEQ ID NO: 3409988 - RNA, 22 nt, Human
ucuggaauguaaucaauguuuc

SEQ ID NO: 3409989 - RNA, 14 nt, Human
ucuggaaugugaag

SEQ ID NO: 3409990 - RNA, 15 nt, Human
ucuggaauuguggcu

SEQ ID NO: 3409991 - RNA, 19 nt, Human
ucuggaauuuaaggcccaa

SEQ ID NO: 3409992 - RNA, 21 nt, Human
ucuggacaggcauguucucug

SEQ ID NO: 3409993 - RNA, 18 nt, Human
ucuggacagucagcucuu

SEQ ID NO: 3409994 - RNA, 22 nt, Human
ucuggaccaacccuguuuccug

SEQ ID NO: 3409995 - RNA, 17 nt, Human
ucuggaccccaucugug

SEQ ID NO: 3409996 - RNA, 18 nt, Human
ucuggaccccaucuguga

SEQ ID NO: 3409997 - RNA, 20 nt, Human
ucuggaccuuguuguuguua

SEQ ID NO: 3409998 - RNA, 21 nt, Human
ucuggacggcaggcucacugc

SEQ ID NO: 3409999 - RNA, 23 nt, Human
ucuggacggcaggcucacugcca

SEQ ID NO: 3410000 - RNA, 20 nt, Human
ucuggacucuaaagaccaaa

SEQ ID NO: 3410001 - RNA, 14 nt, Human
ucuggacucuggac

SEQ ID NO: 3410002 - RNA, 13 nt, Human
ucuggacugaagc

SEQ ID NO: 3410003 - RNA, 21 nt, Human
ucuggacugaagccugcagga

SEQ ID NO: 3410004 - RNA, 19 nt, Human
ucuggacuuggcaacagaa

SEQ ID NO: 3410005 - RNA, 21 nt, Human
ucuggagaaagggcccugggc

SEQ ID NO: 3410006 - RNA, 11 nt, Human
ucuggagaagc

SEQ ID NO: 3410007 - RNA, 22 nt, Human
ucuggagaagcucccaggaaca

SEQ ID NO: 3410008 - RNA, 19 nt, Human
ucuggagaccaccagggca

SEQ ID NO: 3410009 - RNA, 20 nt, Human
ucuggagaccaccagggcau

SEQ ID NO: 3410010 - RNA, 15 nt, Human
ucuggagaccaggga

SEQ ID NO: 3410011 - RNA, 13 nt, Human
ucuggagagcuag

SEQ ID NO: 3410012 - RNA, 20 nt, Human
ucuggagagcuagaaccugg

SEQ ID NO: 3410013 - RNA, 22 nt, Human
ucuggagagguuauaggucacu

SEQ ID NO: 3410014 - RNA, 13 nt, Human
ucuggagccaccu

SEQ ID NO: 3410015 - RNA, 15 nt, Human
ucuggagccaccugu

SEQ ID NO: 3410016 - RNA, 20 nt, Human
ucuggagccaccugucccac

SEQ ID NO: 3410017 - RNA, 23 nt, Human
ucuggagccaccugucccaccuc

SEQ ID NO: 3410018 - RNA, 22 nt, Human
ucuggagccagccgagcaggag

SEQ ID NO: 3410019 - RNA, 12 nt, Human
ucuggagcccac

SEQ ID NO: 3410020 - RNA, 23 nt, Human
ucuggagcccacuguacuugcuc

SEQ ID NO: 3410021 - RNA, 16 nt, Human
ucuggagcccuaaccc

SEQ ID NO: 3410022 - RNA, 21 nt, Human
ucuggagcccuaaccccuucc

SEQ ID NO: 3410023 - RNA, 23 nt, Human
ucuggagcccuaaccccuuccag

SEQ ID NO: 3410024 - RNA, 14 nt, Human
ucuggaggaaaggg

SEQ ID NO: 3410025 - RNA, 23 nt, Human
ucuggaggccuuccagcugcugu

SEQ ID NO: 3410026 - RNA, 21 nt, Human
ucuggaggggagggggauccg

SEQ ID NO: 3410027 - RNA, 17 nt, Human
ucuggaggggccccugc

SEQ ID NO: 3410028 - RNA, 17 nt, Human
ucuggagguugauaacu

SEQ ID NO: 3410029 - RNA, 19 nt, Human
ucuggagguugauaacuuu

SEQ ID NO: 3410030 - RNA, 20 nt, Human
ucuggagguugauaacuuug

SEQ ID NO: 3410031 - RNA, 17 nt, Human
ucuggaguugaucugga

SEQ ID NO: 3410032 - RNA, 24 nt, Human
ucuggaguuuuuguuuggagagca

SEQ ID NO: 3410033 - RNA, 21 nt, Human
ucuggauaacuuccacagggu

SEQ ID NO: 3410034 - RNA, 14 nt, Human
ucuggauaggagcc

SEQ ID NO: 3410035 - RNA, 17 nt, Human
ucuggaugcauuucucu

SEQ ID NO: 3410036 - RNA, 21 nt, Human
ucuggauggugugccuuccag

SEQ ID NO: 3410037 - RNA, 17 nt, Human
ucuggauuaggucucug

SEQ ID NO: 3410038 - RNA, 18 nt, Human
ucuggauucagccuucuu

SEQ ID NO: 3410039 - RNA, 16 nt, Human
ucuggauucauauuua

SEQ ID NO: 3410040 - RNA, 22 nt, Human
ucuggauuccagagcacugcuc

SEQ ID NO: 3410041 - RNA, 14 nt, Human
ucuggauucccagg

SEQ ID NO: 3410042 - RNA, 16 nt, Human
ucuggauucugaaucu

SEQ ID NO: 3410043 - RNA, 15 nt, Human
ucuggauucuuggcc

SEQ ID NO: 3410044 - RNA, 14 nt, Human
ucuggauuguggga

SEQ ID NO: 3410045 - RNA, 14 nt, Human
ucuggcaaugccac

SEQ ID NO: 3410046 - RNA, 15 nt, Human
ucuggcaaugccaca

SEQ ID NO: 3410047 - RNA, 20 nt, Human
ucuggcaaugccacagcccu

SEQ ID NO: 3410048 - RNA, 21 nt, Human
ucuggcaaugccacagcccug

SEQ ID NO: 3410049 - RNA, 22 nt, Human
ucuggcacagccuggcuguggc

SEQ ID NO: 3410050 - RNA, 23 nt, Human
ucuggcagaguugaagacagagc

SEQ ID NO: 3410051 - RNA, 22 nt, Human
ucuggcagcaccgccucuuccc

SEQ ID NO: 3410052 - RNA, 11 nt, Human
ucuggcagcca

SEQ ID NO: 3410053 - RNA, 12 nt, Human
ucuggcagccac

SEQ ID NO: 3410054 - RNA, 18 nt, Human
ucuggcagccacacuucu

SEQ ID NO: 3410055 - RNA, 22 nt, Human
ucuggcagccacacuucucagg

SEQ ID NO: 3410056 - RNA, 15 nt, Human
ucuggcagcucagag

SEQ ID NO: 3410057 - RNA, 17 nt, Human
ucuggcagcucagagag

SEQ ID NO: 3410058 - RNA, 18 nt, Human
ucuggcagcucagagagg

SEQ ID NO: 3410059 - RNA, 23 nt, Human
ucuggcaguuuugacaucagcca

SEQ ID NO: 3410060 - RNA, 16 nt, Human
ucuggccaggaagcuu

SEQ ID NO: 3410061 - RNA, 17 nt, Human
ucuggccaggaagcuuu

SEQ ID NO: 3410062 - RNA, 12 nt, Human
ucuggccccccu

SEQ ID NO: 3410063 - RNA, 14 nt, Human
ucuggcccuagacu

SEQ ID NO: 3410064 - RNA, 14 nt, Human
ucuggcccugccuu

SEQ ID NO: 3410065 - RNA, 21 nt, Human
ucugugugcacaaauauuuau

SEQ ID NO: 3410066 - RNA, 18 nt, Human
ucugugugcaccuuacca

SEQ ID NO: 3410067 - RNA, 19 nt, Human
ucugugugggacuguacac

SEQ ID NO: 3410068 - RNA, 18 nt, Human
ucugugugucaguuuuca

SEQ ID NO: 3410069 - RNA, 20 nt, Human
ucugugugugaccccuccug

SEQ ID NO: 3410070 - RNA, 21 nt, Human
ucugugugugaccccuccugg

SEQ ID NO: 3410071 - RNA, 19 nt, Human
ucuguguguguguaugugg

SEQ ID NO: 3410072 - RNA, 15 nt, Human
ucuguguguuccugg

SEQ ID NO: 3410073 - RNA, 20 nt, Human
ucuguguguuuaugugugug

SEQ ID NO: 3410074 - RNA, 21 nt, Human
ucuguguugcauuauucauuu

SEQ ID NO: 3410075 - RNA, 22 nt, Human
ucuguguugcauuauucauuua

SEQ ID NO: 3410076 - RNA, 18 nt, Human
ucuguguuuaauuucuuc

SEQ ID NO: 3410077 - RNA, 20 nt, Human
ucuguguuuacagagauguc

SEQ ID NO: 3410078 - RNA, 17 nt, Human
ucuguguuuauucaaac

SEQ ID NO: 3410079 - RNA, 14 nt, Human
ucuguguuuugaau

SEQ ID NO: 3410080 - RNA, 18 nt, Human
ucuguuaaaauaaaauug

SEQ ID NO: 3410081 - RNA, 14 nt, Human
ucuguuaaaaugca

SEQ ID NO: 3410082 - RNA, 14 nt, Human
ucuguuacaaaaug

SEQ ID NO: 3410083 - RNA, 17 nt, Human
ucuguuacaaaauguaa

SEQ ID NO: 3410084 - RNA, 19 nt, Human
ucuguuacacuuuuuggaa

SEQ ID NO: 3410085 - RNA, 14 nt, Human
ucuguuagaugcua

SEQ ID NO: 3410086 - RNA, 14 nt, Human
ucuguuagggccuu

SEQ ID NO: 3410087 - RNA, 21 nt, Human
ucuguuauagguccuuuagaa

SEQ ID NO: 3410088 - RNA, 15 nt, Human
ucuguuaugggcuuu

SEQ ID NO: 3410089 - RNA, 21 nt, Human
ucuguuaugggcuuuugggga

SEQ ID NO: 3410090 - RNA, 16 nt, Human
ucuguuauguacugua

SEQ ID NO: 3410091 - RNA, 19 nt, Human
ucuguuauguacuguacua

SEQ ID NO: 3410092 - RNA, 22 nt, Human
ucuguucacuuuuccucccuca

SEQ ID NO: 3410093 - RNA, 17 nt, Human
ucuguucaguguaaaua

SEQ ID NO: 3410094 - RNA, 21 nt, Human
ucuguucauuuguuauucuua

SEQ ID NO: 3410095 - RNA, 13 nt, Human
ucuguuccaaauu

SEQ ID NO: 3410096 - RNA, 20 nt, Human
ucuguucccccuucacaaag

SEQ ID NO: 3410097 - RNA, 22 nt, Human
ucuguuccuggcucagccucaa

SEQ ID NO: 3410098 - RNA, 20 nt, Human
ucuguucuacauagaugcuu

SEQ ID NO: 3410099 - RNA, 12 nt, Human
ucuguucugaua

SEQ ID NO: 3410100 - RNA, 23 nt, Human
ucuguucugauauuaauuuauca

SEQ ID NO: 3410101 - RNA, 17 nt, Human
ucuguucugcacacagc

SEQ ID NO: 3410102 - RNA, 19 nt, Human
ucuguucugcacacagcac

SEQ ID NO: 3410103 - RNA, 19 nt, Human
ucuguucuguggaaagugu

SEQ ID NO: 3410104 - RNA, 13 nt, Human
ucuguucuuucca

SEQ ID NO: 3410105 - RNA, 19 nt, Human
ucuguugcaauuaggauuu

SEQ ID NO: 3410106 - RNA, 15 nt, Human
ucuguugccaggcua

SEQ ID NO: 3410107 - RNA, 16 nt, Human
ucuguugcccaggcug

SEQ ID NO: 3410108 - RNA, 19 nt, Human
ucuguugcccaggcuggag

SEQ ID NO: 3410109 - RNA, 11 nt, Human
ucuguuguaac

SEQ ID NO: 3410110 - RNA, 15 nt, Human
ucuguuguaagaaua

SEQ ID NO: 3410111 - RNA, 16 nt, Human
ucuguugucaccuuca

SEQ ID NO: 3410112 - RNA, 17 nt, Human
ucuguugucaccuucac

SEQ ID NO: 3410113 - RNA, 18 nt, Human
ucuguugucauugcuguu

SEQ ID NO: 3410114 - RNA, 15 nt, Human
ucuguuguccucccc

SEQ ID NO: 3410115 - RNA, 15 nt, Human
ucuguuguguucguu

SEQ ID NO: 3410116 - RNA, 22 nt, Human
ucuguuuaaagcauauagagau

SEQ ID NO: 3410117 - RNA, 13 nt, Human
ucuguuuaaagug

SEQ ID NO: 3410118 - RNA, 20 nt, Human
ucuguuuaagaaaaguauuu

SEQ ID NO: 3410119 - RNA, 17 nt, Human
ucuguuuaauacucauc

SEQ ID NO: 3410120 - RNA, 16 nt, Human
ucuguuuagauaauac

SEQ ID NO: 3410121 - RNA, 23 nt, Human
ucuguuuauggccacauuuaaua

SEQ ID NO: 3410122 - RNA, 18 nt, Human
ucuguuucucuuuccuug

SEQ ID NO: 3410123 - RNA, 16 nt, Human
ucuguuugauucuuuu

SEQ ID NO: 3410124 - RNA, 18 nt, Human
ucuguuugcuguggaacu

SEQ ID NO: 3410125 - RNA, 19 nt, Human
ucuguuuggacugcagaag

SEQ ID NO: 3410126 - RNA, 21 nt, Human
ucuguuuggacugcagaagca

SEQ ID NO: 3410127 - RNA, 14 nt, Human
ucuguuuguuaaaa

SEQ ID NO: 3410128 - RNA, 20 nt, Human
ucuguuuuauaauuuuguga

SEQ ID NO: 3410129 - RNA, 13 nt, Human
ucuguuuuaugac

SEQ ID NO: 3410130 - RNA, 12 nt, Human
ucuguuuucaau

SEQ ID NO: 3410131 - RNA, 16 nt, Human
ucuguuuuccuuucuc

SEQ ID NO: 3410132 - RNA, 20 nt, Human
ucuguuuuccuuucucaccg

SEQ ID NO: 3410133 - RNA, 16 nt, Human
ucuguuuugccugaag

SEQ ID NO: 3410134 - RNA, 19 nt, Human
ucuguuuugugguuuggaa

SEQ ID NO: 3410135 - RNA, 13 nt, Human
ucuuaaaaacaac

SEQ ID NO: 3410136 - RNA, 22 nt, Human
ucuuaaaaacaacgaaagaagg

SEQ ID NO: 3410137 - RNA, 12 nt, Human
ucuuaaaaagua

SEQ ID NO: 3410138 - RNA, 21 nt, Human
ucuuaaaaaguuguucaacua

SEQ ID NO: 3410139 - RNA, 24 nt, Human
ucuuaaaagcuaucuucauguaaa

SEQ ID NO: 3410140 - RNA, 23 nt, Human
ucuuaaaaguugugauuccagau

SEQ ID NO: 3410141 - RNA, 21 nt, Human
ucuuaaaauaacuuauaucau

SEQ ID NO: 3410142 - RNA, 20 nt, Human
ucuuaaaauauauuucagau

SEQ ID NO: 3410143 - RNA, 14 nt, Human
ucuuaaaaugcaau

SEQ ID NO: 3410144 - RNA, 16 nt, Human
ucuuaaaauguuucaa

SEQ ID NO: 3410145 - RNA, 17 nt, Human
ucuuaaacaaauguaug

SEQ ID NO: 3410146 - RNA, 15 nt, Human
ucuuaaacuugugaa

SEQ ID NO: 3410147 - RNA, 20 nt, Human
ucuuaaagaaaacccacccc

SEQ ID NO: 3410148 - RNA, 19 nt, Human
ucuuaaagcaaaaaaugaa

SEQ ID NO: 3410149 - RNA, 21 nt, Human
ucuuaaagcugccuguaguua

SEQ ID NO: 3410150 - RNA, 22 nt, Human
ucuuaaauaaaagaaaugcaca

SEQ ID NO: 3410151 - RNA, 16 nt, Human
ucuuaaauaagaaacu

SEQ ID NO: 3410152 - RNA, 23 nt, Human
ucuuaaauuggguucaugaugca

SEQ ID NO: 3410153 - RNA, 13 nt, Human
ucuuaaauuuugu

SEQ ID NO: 3410154 - RNA, 18 nt, Human
ucuuaaauuuugugauau

SEQ ID NO: 3410155 - RNA, 23 nt, Human
ucuuaacacauguccuugugugu

SEQ ID NO: 3410156 - RNA, 12 nt, Human
ucuuaacuucuu

SEQ ID NO: 3410157 - RNA, 14 nt, Human
ucuuaagaaaugua

SEQ ID NO: 3410158 - RNA, 15 nt, Human
ucuuaagacuuuugg

SEQ ID NO: 3410159 - RNA, 16 nt, Human
ucuuaagaggcugaca

SEQ ID NO: 3410160 - RNA, 19 nt, Human
ucuuaagccaucuugguaa

SEQ ID NO: 3410161 - RNA, 20 nt, Human
ucuuaagccaucuugguaaa

SEQ ID NO: 3410162 - RNA, 21 nt, Human
ucuuaagccuuuugcucacaa

SEQ ID NO: 3410163 - RNA, 15 nt, Human
ucuuaaguuucucag

SEQ ID NO: 3410164 - RNA, 15 nt, Human
ucuuaauacuguuau

SEQ ID NO: 3410165 - RNA, 19 nt, Human
ucuuaauacuguuauucuu

SEQ ID NO: 3410166 - RNA, 19 nt, Human
ucuuaauauguucuuuuaa

SEQ ID NO: 3410167 - RNA, 18 nt, Human
ucuuaauauucuggaguc

SEQ ID NO: 3410168 - RNA, 17 nt, Human
ucuuaaugaaguuugaa

SEQ ID NO: 3410169 - RNA, 18 nt, Human
ucuuaaugaaguuugaau

SEQ ID NO: 3410170 - RNA, 18 nt, Human
ucuuaauggaugaaauca

SEQ ID NO: 3410171 - RNA, 15 nt, Human
ucuuaauguaucaaa

SEQ ID NO: 3410172 - RNA, 17 nt, Human
ucuuaauguaucaaacu

SEQ ID NO: 3410173 - RNA, 20 nt, Human
ucuuaauguuccucaaagcu

SEQ ID NO: 3410174 - RNA, 21 nt, Human
ucuuaauguuccucaaagcuu

SEQ ID NO: 3410175 - RNA, 18 nt, Human
ucuuaauuaaaagaauau

SEQ ID NO: 3410176 - RNA, 21 nt, Human
ucuuaauuaaaagaauauuuu

SEQ ID NO: 3410177 - RNA, 14 nt, Human
ucuuaauuaaguaa

SEQ ID NO: 3410178 - RNA, 14 nt, Human
ucuuaauuauuaua

SEQ ID NO: 3410179 - RNA, 10 nt, Human
ucuuaauuuu

SEQ ID NO: 3410180 - RNA, 17 nt, Human
ucuuaauuuugguugua

SEQ ID NO: 3410181 - RNA, 20 nt, Human
ucuuacaaaguguauuuuau

SEQ ID NO: 3410182 - RNA, 19 nt, Human
ucuuacaauaauucuauga

SEQ ID NO: 3410183 - RNA, 21 nt, Human
ucuuacaauauugauugggaa

SEQ ID NO: 3410184 - RNA, 14 nt, Human
ucuuacacauacag

SEQ ID NO: 3410185 - RNA, 13 nt, Human
ucuuacagcaggc

SEQ ID NO: 3410186 - RNA, 19 nt, Human
ucuuacaggcacaaaauga

SEQ ID NO: 3410187 - RNA, 16 nt, Human
ucuuacauaaaccauu

SEQ ID NO: 3410188 - RNA, 15 nt, Human
ucuuacaucugaaau

SEQ ID NO: 3410189 - RNA, 14 nt, Human
ucuuacauguuuuc

SEQ ID NO: 3410190 - RNA, 22 nt, Human
ucuuaccagaugcuuuccuguu

SEQ ID NO: 3410191 - RNA, 16 nt, Human
ucuuacccuucugugc

SEQ ID NO: 3410192 - RNA, 22 nt, Human
ucuuaccgacaagcacagucag

SEQ ID NO: 3410193 - RNA, 21 nt, Human
ucuuaccuguaugucuccagu

SEQ ID NO: 3410194 - RNA, 14 nt, Human
ucuuacuaaacauu

SEQ ID NO: 3410195 - RNA, 15 nt, Human
ucuuacuaauguaaa

SEQ ID NO: 3410196 - RNA, 16 nt, Human
ucuuacuaauguaaaa

SEQ ID NO: 3410197 - RNA, 17 nt, Human
ucuuacuauuaagcagu

SEQ ID NO: 3410198 - RNA, 23 nt, Human
ucuuacuauuaagcaguaaaaac

SEQ ID NO: 3410199 - RNA, 17 nt, Human
ucuuacuccuccucuuu

SEQ ID NO: 3410200 - RNA, 13 nt, Human
ucuuacucugccg

SEQ ID NO: 3410201 - RNA, 14 nt, Human
ucuuacugcaaaug

SEQ ID NO: 3410202 - RNA, 15 nt, Human
ucuuacugcaaaugu

SEQ ID NO: 3410203 - RNA, 22 nt, Human
ucuuacugcaaaugucaucaga

SEQ ID NO: 3410204 - RNA, 12 nt, Human
ucuuacugcuug

SEQ ID NO: 3410205 - RNA, 23 nt, Human
ucuuacuuacuaaaauauauaua

SEQ ID NO: 3410206 - RNA, 16 nt, Human
ucuuacuugagccuuu

SEQ ID NO: 3410207 - RNA, 22 nt, Human
ucuuacuuuccuuuccccagcc

SEQ ID NO: 3410208 - RNA, 14 nt, Human
ucuuacuuuguaaa

SEQ ID NO: 3410209 - RNA, 17 nt, Human
ucuuacuuuguaaauuc

SEQ ID NO: 3410210 - RNA, 14 nt, Human
ucuuagaaaugaag

SEQ ID NO: 3410211 - RNA, 15 nt, Human
ucuuagaaaugaagg

SEQ ID NO: 3410212 - RNA, 13 nt, Human
ucuuagaagaaua

SEQ ID NO: 3410213 - RNA, 20 nt, Human
ucuuagacuucugcuuucca

SEQ ID NO: 3410214 - RNA, 14 nt, Human
ucuuagauaucuuu

SEQ ID NO: 3410215 - RNA, 21 nt, Human
ucuuagauaucuuuuuauuga

SEQ ID NO: 3410216 - RNA, 24 nt, Human
ucuuagauaucuuuuuauugaugu

SEQ ID NO: 3410217 - RNA, 18 nt, Human
ucuuagauggauucucca

SEQ ID NO: 3410218 - RNA, 14 nt, Human
ucuuagauguauau

SEQ ID NO: 3410219 - RNA, 15 nt, Human
ucuuagauguauaua

SEQ ID NO: 3410220 - RNA, 12 nt, Human
ucuuagcugagu

SEQ ID NO: 3410221 - RNA, 14 nt, Human
ucuuagcugccaag

SEQ ID NO: 3410222 - RNA, 17 nt, Human
ucuuagcuuuuuaauug

SEQ ID NO: 3410223 - RNA, 18 nt, Human
ucuuagcuuuuuaauugu

SEQ ID NO: 3410224 - RNA, 14 nt, Human
ucuuaggugcuucu

SEQ ID NO: 3410225 - RNA, 14 nt, Human
ucuuagugccugag

SEQ ID NO: 3410226 - RNA, 14 nt, Human
ucuuagugugugca

SEQ ID NO: 3410227 - RNA, 16 nt, Human
ucuuaguuuggauucu

SEQ ID NO: 3410228 - RNA, 23 nt, Human
ucuuaguuuggauucuuauguag

SEQ ID NO: 3410229 - RNA, 21 nt, Human
ucuuauaaaguggaaguaugu

SEQ ID NO: 3410230 - RNA, 11 nt, Human
ucuuauaaaua

SEQ ID NO: 3410231 - RNA, 13 nt, Human
ucuuauaaauaug

SEQ ID NO: 3410232 - RNA, 19 nt, Human
ucuuauaauacucuguugu

SEQ ID NO: 3410233 - RNA, 20 nt, Human
ucuuauaauacucuguugua

SEQ ID NO: 3410234 - RNA, 13 nt, Human
ucuuauaauuuaa

SEQ ID NO: 3410235 - RNA, 20 nt, Human
ucuuauacagauaaaacaug

SEQ ID NO: 3410236 - RNA, 15 nt, Human
ucuuauacuguacaa

SEQ ID NO: 3410237 - RNA, 13 nt, Human
ucuuauagaaagu

SEQ ID NO: 3410238 - RNA, 19 nt, Human
ucuuauagaauauuuauua

SEQ ID NO: 3410239 - RNA, 20 nt, Human
ucuuauagaauauuuauuac

SEQ ID NO: 3410240 - RNA, 17 nt, Human
ucuuauagcacuuugaa

SEQ ID NO: 3410241 - RNA, 22 nt, Human
ucuuauagucaauguuucuuuu

SEQ ID NO: 3410242 - RNA, 13 nt, Human
ucuuauaguucua

SEQ ID NO: 3410243 - RNA, 17 nt, Human
ucuuauaguucuaggca

SEQ ID NO: 3410244 - RNA, 15 nt, Human
ucuuauauaugugaa

SEQ ID NO: 3410245 - RNA, 23 nt, Human
ucuuaucaagaguugugacaacu

SEQ ID NO: 3410246 - RNA, 13 nt, Human
ucuuaucaagcag

SEQ ID NO: 3410247 - RNA, 16 nt, Human
ucuuaucaagcagcca

SEQ ID NO: 3410248 - RNA, 14 nt, Human
ucuuaucucaguca

SEQ ID NO: 3410249 - RNA, 16 nt, Human
ucuuaugcaaaaugga

SEQ ID NO: 3410250 - RNA, 14 nt, Human
ucuuaugcaauuuc

SEQ ID NO: 3410251 - RNA, 17 nt, Human
ucuuaugcuuauaauau

SEQ ID NO: 3410252 - RNA, 20 nt, Human
ucuuaugcuuccagaaacac

SEQ ID NO: 3410253 - RNA, 17 nt, Human
ucuuauggaauugauuu

SEQ ID NO: 3410254 - RNA, 15 nt, Human
ucuuaugggcugggu

SEQ ID NO: 3410255 - RNA, 18 nt, Human
ucuuaugggcuggguucu

SEQ ID NO: 3410256 - RNA, 13 nt, Human
ucuuaugugacau

SEQ ID NO: 3410257 - RNA, 17 nt, Human
ucuuauuaaaguuucaa

SEQ ID NO: 3410258 - RNA, 19 nt, Human
ucuuauuaaaguuucaaaa

SEQ ID NO: 3410259 - RNA, 17 nt, Human
ucuuauuagggagaaaa

SEQ ID NO: 3410260 - RNA, 22 nt, Human
ucuuauuaguuccccaaauaca

SEQ ID NO: 3410261 - RNA, 18 nt, Human
ucuuauucaaagaaauau

SEQ ID NO: 3410262 - RNA, 18 nt, Human
ucuuauucaguaaaaaac

SEQ ID NO: 3410263 - RNA, 14 nt, Human
ucuuauuccauauu

SEQ ID NO: 3410264 - RNA, 20 nt, Human
ucuuauucccuuccugccag

SEQ ID NO: 3410265 - RNA, 14 nt, Human
ucuuauucuuucgu

SEQ ID NO: 3410266 - RNA, 21 nt, Human
ucuuauucuuucguucaguua

SEQ ID NO: 3410267 - RNA, 14 nt, Human
ucuuauugcccacg

SEQ ID NO: 3410268 - RNA, 22 nt, Human
ucuuauugcccacgcuggagug

SEQ ID NO: 3410269 - RNA, 14 nt, Human
ucuuauuuaacuua

SEQ ID NO: 3410270 - RNA, 17 nt, Human
ucuuauuuaaugaaaga

SEQ ID NO: 3410271 - RNA, 14 nt, Human
ucuuauuucaugaa

SEQ ID NO: 3410272 - RNA, 16 nt, Human
ucuuauuucaugaaaa

SEQ ID NO: 3410273 - RNA, 16 nt, Human
ucuuauuuuucuaaac

SEQ ID NO: 3410274 - RNA, 16 nt, Human
ucuuauuuuuuucuau

SEQ ID NO: 3410275 - RNA, 22 nt, Human
ucuucaaaaguaaugccucugu

SEQ ID NO: 3410276 - RNA, 14 nt, Human
ucuucaaaauguau

SEQ ID NO: 3410277 - RNA, 17 nt, Human
ucuucaaaauguauaua

SEQ ID NO: 3410278 - RNA, 14 nt, Human
ucuucaaacuguga

SEQ ID NO: 3410279 - RNA, 15 nt, Human
ucuucaaauaucucu

SEQ ID NO: 3410280 - RNA, 20 nt, Human
ucuucaaauuagaagacauu

SEQ ID NO: 3410281 - RNA, 11 nt, Human
ucuucaacaga

SEQ ID NO: 3410282 - RNA, 22 nt, Human
ucuucaacauccugccagcccc

SEQ ID NO: 3410283 - RNA, 20 nt, Human
ucuucaaccagggauuguuu

SEQ ID NO: 3410284 - RNA, 12 nt, Human
ucuucaaccagu

SEQ ID NO: 3410285 - RNA, 22 nt, Human
ucuucaagagacccuucaaacu

SEQ ID NO: 3410286 - RNA, 16 nt, Human
ucuucaaggcuucagu

SEQ ID NO: 3410287 - RNA, 17 nt, Human
ucuucaagggcugcuuc

SEQ ID NO: 3410288 - RNA, 20 nt, Human
ucuucaauuuguauaaaaug

SEQ ID NO: 3410289 - RNA, 16 nt, Human
ucuucaccaaaucuug

SEQ ID NO: 3410290 - RNA, 17 nt, Human
ucuucaccccggcaggc

SEQ ID NO: 3410291 - RNA, 22 nt, Human
ucuucaccccggcaggcccugc

SEQ ID NO: 3410292 - RNA, 16 nt, Human
ucuucacucaaauuuu

SEQ ID NO: 3410293 - RNA, 20 nt, Human
ucuucagaaagugugcuuua

SEQ ID NO: 3410294 - RNA, 22 nt, Human
ucuucagacucucagcccagaa

SEQ ID NO: 3410295 - RNA, 18 nt, Human
ucuucagagacuccugca

SEQ ID NO: 3410296 - RNA, 21 nt, Human
ucuucagagacuccugcaggc

SEQ ID NO: 3410297 - RNA, 13 nt, Human
ucuucagagauca

SEQ ID NO: 3410298 - RNA, 16 nt, Human
ucuucagagcaggggu

SEQ ID NO: 3410299 - RNA, 12 nt, Human
ucuucagagcug

SEQ ID NO: 3410300 - RNA, 15 nt, Human
ucuucagaucucuaa

SEQ ID NO: 3410301 - RNA, 18 nt, Human
ucuucagaucucuaacuu

SEQ ID NO: 3410302 - RNA, 17 nt, Human
ucuucagcacaaaagga

SEQ ID NO: 3410303 - RNA, 16 nt, Human
ucuucagccaccucuc

SEQ ID NO: 3410304 - RNA, 16 nt, Human
ucuucagccaucaaca

SEQ ID NO: 3410305 - RNA, 22 nt, Human
ucuucagccucuuucugucccu

SEQ ID NO: 3410306 - RNA, 18 nt, Human
ucuucagcguaaaauggu

SEQ ID NO: 3410307 - RNA, 13 nt, Human
ucuucaggccucc

SEQ ID NO: 3410308 - RNA, 13 nt, Human
ucuucagggccug

SEQ ID NO: 3410309 - RNA, 16 nt, Human
ucuucaguaagccgug

SEQ ID NO: 3410310 - RNA, 22 nt, Human
ucuucagucagaaaacuuuaaa

SEQ ID NO: 3410311 - RNA, 19 nt, Human
ucuucaguuaagccuuugg

SEQ ID NO: 3410312 - RNA, 15 nt, Human
ucuucaguugucucu

SEQ ID NO: 3410313 - RNA, 17 nt, Human
ucuucaguugucucuga

SEQ ID NO: 3410314 - RNA, 21 nt, Human
ucuucaguugucucugaugca

SEQ ID NO: 3410315 - RNA, 12 nt, Human
ucuucaguuuua

SEQ ID NO: 3410316 - RNA, 18 nt, Human
ucuucaguuuuaucuuua

SEQ ID NO: 3410317 - RNA, 19 nt, Human
ucuucaguuuuaucuuuaa

SEQ ID NO: 3410318 - RNA, 21 nt, Human
ucuucauaccuacauguauuu

SEQ ID NO: 3410319 - RNA, 22 nt, Human
ucuucauacuuuuuuucacagu

SEQ ID NO: 3410320 - RNA, 16 nt, Human
ucuucaucccauucca

SEQ ID NO: 3410321 - RNA, 15 nt, Human
ucuucauccuuagca

SEQ ID NO: 3410322 - RNA, 21 nt, Human
ucuucauccuuagcaacagcc

SEQ ID NO: 3410323 - RNA, 18 nt, Human
ucuucaucuaauaugaua

SEQ ID NO: 3410324 - RNA, 14 nt, Human
ucuucaucugccca

SEQ ID NO: 3410325 - RNA, 14 nt, Human
ucuucaugaaaugc

SEQ ID NO: 3410326 - RNA, 18 nt, Human
ucuucauggaauucacaa

SEQ ID NO: 3410327 - RNA, 16 nt, Human
ucuucauggugacacu

SEQ ID NO: 3410328 - RNA, 20 nt, Human
ucuucauguaaauugacugu

SEQ ID NO: 3410329 - RNA, 21 nt, Human
ucuucauguacauuuggaacu

SEQ ID NO: 3410330 - RNA, 22 nt, Human
ucuucauuaagcccucuuccau

SEQ ID NO: 3410331 - RNA, 20 nt, Human
ucuucauucuaucaagccca

SEQ ID NO: 3410332 - RNA, 15 nt, Human
ucuucauuucauugu

SEQ ID NO: 3410333 - RNA, 16 nt, Human
ucuucauuucauugua

SEQ ID NO: 3410334 - RNA, 15 nt, Human
ucuuccaaaggcaua

SEQ ID NO: 3410335 - RNA, 17 nt, Human
ucuuccacaaagaaaau

SEQ ID NO: 3410336 - RNA, 21 nt, Human
ucuuccacaagagcccaggcc

SEQ ID NO: 3410337 - RNA, 13 nt, Human
ucuuccaccugga

SEQ ID NO: 3410338 - RNA, 13 nt, Human
ucuuccacuuugc

SEQ ID NO: 3410339 - RNA, 18 nt, Human
ucuuccagaagugugauu

SEQ ID NO: 3410340 - RNA, 13 nt, Human
ucuuccagaaucc

SEQ ID NO: 3410341 - RNA, 13 nt, Human
ucuuccaggcagc

SEQ ID NO: 3410342 - RNA, 15 nt, Human
ucuuccaggugccca

SEQ ID NO: 3410343 - RNA, 18 nt, Human
ucuuccaggugcccagcu

SEQ ID NO: 3410344 - RNA, 16 nt, Human
ucuuccauaauguaua

SEQ ID NO: 3410345 - RNA, 16 nt, Human
ucuuccaucauguccc

SEQ ID NO: 3410346 - RNA, 15 nt, Human
ucuuccaucccagga

SEQ ID NO: 3410347 - RNA, 19 nt, Human
ucuuccauguaucuuuuga

SEQ ID NO: 3410348 - RNA, 14 nt, Human
ucuuccauuugcaa

SEQ ID NO: 3410349 - RNA, 18 nt, Human
ucuucccaggcuggggcu

SEQ ID NO: 3410350 - RNA, 12 nt, Human
ucuucccagggu

SEQ ID NO: 3410351 - RNA, 13 nt, Human
ucuucccauucuc

SEQ ID NO: 3410352 - RNA, 15 nt, Human
ucuucccauucucca

SEQ ID NO: 3410353 - RNA, 18 nt, Human
ucuucccccucucccagu

SEQ ID NO: 3410354 - RNA, 14 nt, Human
ucuuccccucucag

SEQ ID NO: 3410355 - RNA, 13 nt, Human
ugaauuauugaca

SEQ ID NO: 3410356 - RNA, 14 nt, Human
ugaauuauugacac

SEQ ID NO: 3410357 - RNA, 16 nt, Human
ugaauuauugacacug

SEQ ID NO: 3410358 - RNA, 17 nt, Human
ugaauuauugacacuga

SEQ ID NO: 3410359 - RNA, 17 nt, Human
ugaauucagauuuuaaa

SEQ ID NO: 3410360 - RNA, 16 nt, Human
ugaauucauuucacug

SEQ ID NO: 3410361 - RNA, 12 nt, Human
ugaauucccuca

SEQ ID NO: 3410362 - RNA, 16 nt, Human
ugaauuccuagaauua

SEQ ID NO: 3410363 - RNA, 20 nt, Human
ugaauucuugguugaggaaa

SEQ ID NO: 3410364 - RNA, 21 nt, Human
ugaauucuugguugaggaaac

SEQ ID NO: 3410365 - RNA, 17 nt, Human
ugaauugacuuauuuca

SEQ ID NO: 3410366 - RNA, 18 nt, Human
ugaauugagccuaaaaau

SEQ ID NO: 3410367 - RNA, 18 nt, Human
ugaauugagcugcagaaa

SEQ ID NO: 3410368 - RNA, 21 nt, Human
ugaauugcauuuuuuaaaaca

SEQ ID NO: 3410369 - RNA, 22 nt, Human
ugaauugcguuggucucugcau

SEQ ID NO: 3410370 - RNA, 15 nt, Human
ugaauuguaaaagca

SEQ ID NO: 3410371 - RNA, 21 nt, Human
ugaauuguaaaagcaacauca

SEQ ID NO: 3410372 - RNA, 18 nt, Human
ugaauuguaacuguucuu

SEQ ID NO: 3410373 - RNA, 19 nt, Human
ugaauuguuuuuauuguuu

SEQ ID NO: 3410374 - RNA, 16 nt, Human
ugaauuuaaauauaau

SEQ ID NO: 3410375 - RNA, 20 nt, Human
ugaauuuaaauauaauucug

SEQ ID NO: 3410376 - RNA, 14 nt, Human
ugaauuuaacaaug

SEQ ID NO: 3410377 - RNA, 16 nt, Human
ugaauuuaacaaugcg

SEQ ID NO: 3410378 - RNA, 19 nt, Human
ugaauuuaauaaucuguag

SEQ ID NO: 3410379 - RNA, 21 nt, Human
ugaauuuauaccuaccugugu

SEQ ID NO: 3410380 - RNA, 12 nt, Human
ugaauuuauugg

SEQ ID NO: 3410381 - RNA, 16 nt, Human
ugaauuuauuggcuuu

SEQ ID NO: 3410382 - RNA, 23 nt, Human
ugaauuuauuggcuuuucugauc

SEQ ID NO: 3410383 - RNA, 13 nt, Human
ugaauuucacugu

SEQ ID NO: 3410384 - RNA, 15 nt, Human
ugaauuucucuacag

SEQ ID NO: 3410385 - RNA, 21 nt, Human
ugaauuucuucacuguugaaa

SEQ ID NO: 3410386 - RNA, 17 nt, Human
ugaauuugaaugaaaaa

SEQ ID NO: 3410387 - RNA, 18 nt, Human
ugaauuugaaugaaaaau

SEQ ID NO: 3410388 - RNA, 19 nt, Human
ugaauuugcaaaguacugu

SEQ ID NO: 3410389 - RNA, 15 nt, Human
ugaauuugcccuggg

SEQ ID NO: 3410390 - RNA, 14 nt, Human
ugaauuugccuaau

SEQ ID NO: 3410391 - RNA, 14 nt, Human
ugaauuuggagacu

SEQ ID NO: 3410392 - RNA, 17 nt, Human
ugaauuuguaaugucuu

SEQ ID NO: 3410393 - RNA, 14 nt, Human
ugaauuuuaaagua

SEQ ID NO: 3410394 - RNA, 16 nt, Human
ugaauuuuaaaguaug

SEQ ID NO: 3410395 - RNA, 18 nt, Human
ugaauuuucaagcaucuc

SEQ ID NO: 3410396 - RNA, 17 nt, Human
ugaauuuucacaugaac

SEQ ID NO: 3410397 - RNA, 18 nt, Human
ugaauuuucacaugaaca

SEQ ID NO: 3410398 - RNA, 13 nt, Human
ugaauuuucauuu

SEQ ID NO: 3410399 - RNA, 15 nt, Human
ugaauuuucccacug

SEQ ID NO: 3410400 - RNA, 17 nt, Human
ugaauuuucccacugca

SEQ ID NO: 3410401 - RNA, 11 nt, Human
ugaauuuucua

SEQ ID NO: 3410402 - RNA, 17 nt, Human
ugaauuuuguguuagag

SEQ ID NO: 3410403 - RNA, 19 nt, Human
ugaauuuuguucucuggga

SEQ ID NO: 3410404 - RNA, 22 nt, Human
ugaauuuuuaaaacccauuuaa

SEQ ID NO: 3410405 - RNA, 15 nt, Human
ugaauuuuuaugugu

SEQ ID NO: 3410406 - RNA, 17 nt, Human
ugaauuuuugcaauaau

SEQ ID NO: 3410407 - RNA, 22 nt, Human
ugaauuuuugcaauaaugcagu

SEQ ID NO: 3410408 - RNA, 23 nt, Human
ugaauuuuugcaauaaugcagua

SEQ ID NO: 3410409 - RNA, 15 nt, Human
ugaauuuuuuuguaa

SEQ ID NO: 3410410 - RNA, 17 nt, Human
ugaauuuuuuuuaacau

SEQ ID NO: 3410411 - RNA, 18 nt, Human
ugaauuuuuuuuaacauu

SEQ ID NO: 3410412 - RNA, 16 nt, Human
ugaauuuuuuuuuccu

SEQ ID NO: 3410413 - RNA, 19 nt, Human
ugacaaaaaguuuccauau

SEQ ID NO: 3410414 - RNA, 14 nt, Human
ugacaaaaauucaa

SEQ ID NO: 3410415 - RNA, 22 nt, Human
ugacaaaauacuugucuguuuu

SEQ ID NO: 3410416 - RNA, 12 nt, Human
ugacaaaauguu

SEQ ID NO: 3410417 - RNA, 20 nt, Human
ugacaaaauguuauuucccu

SEQ ID NO: 3410418 - RNA, 10 nt, Human
ugacaaaauu

SEQ ID NO: 3410419 - RNA, 22 nt, Human
ugacaaacuguguacauagcgg

SEQ ID NO: 3410420 - RNA, 19 nt, Human
ugacaaagauggcucagag

SEQ ID NO: 3410421 - RNA, 22 nt, Human
ugacaaagcagauucagaaaug

SEQ ID NO: 3410422 - RNA, 14 nt, Human
ugacaaagcuuccc

SEQ ID NO: 3410423 - RNA, 14 nt, Human
ugacaaaguuacug

SEQ ID NO: 3410424 - RNA, 20 nt, Human
ugacaaauaaauuaggacca

SEQ ID NO: 3410425 - RNA, 14 nt, Human
ugacaaaucaaguu

SEQ ID NO: 3410426 - RNA, 15 nt, Human
ugacaaaucugugua

SEQ ID NO: 3410427 - RNA, 14 nt, Human
ugacaaauguuucu

SEQ ID NO: 3410428 - RNA, 12 nt, Human
ugacaacacagc

SEQ ID NO: 3410429 - RNA, 13 nt, Human
ugacaacagaagc

SEQ ID NO: 3410430 - RNA, 22 nt, Human
ugacaacagaagcuucagaagu

SEQ ID NO: 3410431 - RNA, 18 nt, Human
ugacaacagacuucugaa

SEQ ID NO: 3410432 - RNA, 15 nt, Human
ugacaacuacagaaa

SEQ ID NO: 3410433 - RNA, 13 nt, Human
ugacaacuggcag

SEQ ID NO: 3410434 - RNA, 22 nt, Human
ugacaacugucuaacuuuagaa

SEQ ID NO: 3410435 - RNA, 13 nt, Human
ugacaacugugac

SEQ ID NO: 3410436 - RNA, 22 nt, Human
ugacaacuucccagugaauucu

SEQ ID NO: 3410437 - RNA, 11 nt, Human
ugacaagagcc

SEQ ID NO: 3410438 - RNA, 14 nt, Human
ugacaagagccuga

SEQ ID NO: 3410439 - RNA, 23 nt, Human
ugacaagagccugaucucuuccu

SEQ ID NO: 3410440 - RNA, 21 nt, Human
ugacaagaguuggggacagaa

SEQ ID NO: 3410441 - RNA, 13 nt, Human
ugacaagcagaua

SEQ ID NO: 3410442 - RNA, 20 nt, Human
ugacaagcagauacugcugu

SEQ ID NO: 3410443 - RNA, 15 nt, Human
ugacaagcucacaga

SEQ ID NO: 3410444 - RNA, 21 nt, Human
ugacaaggcacuucauguaaa

SEQ ID NO: 3410445 - RNA, 14 nt, Human
ugacaaggccccag

SEQ ID NO: 3410446 - RNA, 16 nt, Human
ugacaaggccccagag

SEQ ID NO: 3410447 - RNA, 18 nt, Human
ugacaaggccccagagac

SEQ ID NO: 3410448 - RNA, 21 nt, Human
ugacaagggcugaccugccuc

SEQ ID NO: 3410449 - RNA, 22 nt, Human
ugacaagggcugaccugccucu

SEQ ID NO: 3410450 - RNA, 14 nt, Human
ugacaagucauuuu

SEQ ID NO: 3410451 - RNA, 17 nt, Human
ugacaaguuuaaaggcu

SEQ ID NO: 3410452 - RNA, 17 nt, Human
ugacaauaauuucaggu

SEQ ID NO: 3410453 - RNA, 16 nt, Human
ugacaaucaugugugu

SEQ ID NO: 3410454 - RNA, 17 nt, Human
ugacaaucauguguguu

SEQ ID NO: 3410455 - RNA, 18 nt, Human
ugacaaucauguguguua

SEQ ID NO: 3410456 - RNA, 18 nt, Human
ugacaauuuuguacaaau

SEQ ID NO: 3410457 - RNA, 13 nt, Human
ugacacaaacaca

SEQ ID NO: 3410458 - RNA, 17 nt, Human
ugacacaaacacacaca

SEQ ID NO: 3410459 - RNA, 16 nt, Human
ugacacaaaccugccu

SEQ ID NO: 3410460 - RNA, 22 nt, Human
ugacacaacugugugauuaaaa

SEQ ID NO: 3410461 - RNA, 16 nt, Human
ugacacacagcucugu

SEQ ID NO: 3410462 - RNA, 20 nt, Human
ugacacacagcucuguccug

SEQ ID NO: 3410463 - RNA, 21 nt, Human
ugacacacagcucuguccugg

SEQ ID NO: 3410464 - RNA, 12 nt, Human
ugacacacuaac

SEQ ID NO: 3410465 - RNA, 13 nt, Human
ugacacacuacac

SEQ ID NO: 3410466 - RNA, 15 nt, Human
ugacacacuacacca

SEQ ID NO: 3410467 - RNA, 17 nt, Human
ugacacacuacaccaca

SEQ ID NO: 3410468 - RNA, 21 nt, Human
ugacacacuacaccacacaca

SEQ ID NO: 3410469 - RNA, 23 nt, Human
ugacacagaaaauguugagaauc

SEQ ID NO: 3410470 - RNA, 13 nt, Human
ugacacagacuca

SEQ ID NO: 3410471 - RNA, 22 nt, Human
ugacacagacucauccugaaca

SEQ ID NO: 3410472 - RNA, 16 nt, Human
ugacacagcagcuuca

SEQ ID NO: 3410473 - RNA, 16 nt, Human
ugacacaggaugaagg

SEQ ID NO: 3410474 - RNA, 16 nt, Human
ugacacaggucuuucc

SEQ ID NO: 3410475 - RNA, 17 nt, Human
ugacacaggucuuuccu

SEQ ID NO: 3410476 - RNA, 22 nt, Human
ugacacagucuuggcucacugc

SEQ ID NO: 3410477 - RNA, 21 nt, Human
ugacacauaugcaccuugugu

SEQ ID NO: 3410478 - RNA, 20 nt, Human
ugacacaugcaaggucauuu

SEQ ID NO: 3410479 - RNA, 16 nt, Human
ugacacauggccccuc

SEQ ID NO: 3410480 - RNA, 22 nt, Human
ugacaccagccuuucucccagg

SEQ ID NO: 3410481 - RNA, 13 nt, Human
ugacacccauguu

SEQ ID NO: 3410482 - RNA, 14 nt, Human
ugacacccuucucc

SEQ ID NO: 3410483 - RNA, 16 nt, Human
ugacacccuucuccca

SEQ ID NO: 3410484 - RNA, 20 nt, Human
ugacacccuucucccacucu

SEQ ID NO: 3410485 - RNA, 23 nt, Human
ugacacccuucucccacucuccu

SEQ ID NO: 3410486 - RNA, 18 nt, Human
ugacaccuaacucuucuu

SEQ ID NO: 3410487 - RNA, 20 nt, Human
ugacaccuuucauaaucuuu

SEQ ID NO: 3410488 - RNA, 23 nt, Human
ugacaccuuucauaaucuuugcu

SEQ ID NO: 3410489 - RNA, 16 nt, Human
ugacacgaauauugcu

SEQ ID NO: 3410490 - RNA, 16 nt, Human
ugacacggccaugacc

SEQ ID NO: 3410491 - RNA, 17 nt, Human
ugacacguccaccccag

SEQ ID NO: 3410492 - RNA, 21 nt, Human
ugacacuagcccaaugaaaug

SEQ ID NO: 3410493 - RNA, 23 nt, Human
ugacacuagcccaaugaaaugaa

SEQ ID NO: 3410494 - RNA, 20 nt, Human
ugacacuauaguuuaaaaca

SEQ ID NO: 3410495 - RNA, 22 nt, Human
ugacacucccuugggcucccug

SEQ ID NO: 3410496 - RNA, 18 nt, Human
ugacacucuccuugcagu

SEQ ID NO: 3410497 - RNA, 20 nt, Human
ugacacugaaaguuuuguaa

SEQ ID NO: 3410498 - RNA, 17 nt, Human
ugacacugaaaugccuu

SEQ ID NO: 3410499 - RNA, 23 nt, Human
ugacacugaccuuggagagacac

SEQ ID NO: 3410500 - RNA, 14 nt, Human
ugaccuucugggaa

SEQ ID NO: 3410501 - RNA, 20 nt, Human
ugaccuugaacuccugggcu

SEQ ID NO: 3410502 - RNA, 18 nt, Human
ugaccuugaugagcugug

SEQ ID NO: 3410503 - RNA, 19 nt, Human
ugaccuugaugagcugugc

SEQ ID NO: 3410504 - RNA, 22 nt, Human
ugaccuugaugagcugugcaca

SEQ ID NO: 3410505 - RNA, 19 nt, Human
ugaccuuggagagacacag

SEQ ID NO: 3410506 - RNA, 12 nt, Human
ugaccuuguaau

SEQ ID NO: 3410507 - RNA, 14 nt, Human
ugaccuuguaaugu

SEQ ID NO: 3410508 - RNA, 21 nt, Human
ugaccuuguaauguaacugcu

SEQ ID NO: 3410509 - RNA, 21 nt, Human
ugaccuuguaccucucuuuga

SEQ ID NO: 3410510 - RNA, 15 nt, Human
ugaccuuuaagagaa

SEQ ID NO: 3410511 - RNA, 12 nt, Human
ugaccuuucaau

SEQ ID NO: 3410512 - RNA, 14 nt, Human
ugaccuuucaauag

SEQ ID NO: 3410513 - RNA, 15 nt, Human
ugaccuuucaauagg

SEQ ID NO: 3410514 - RNA, 18 nt, Human
ugaccuuucaauaggaaa

SEQ ID NO: 3410515 - RNA, 22 nt, Human
ugaccuuucaauaggaaaaacu

SEQ ID NO: 3410516 - RNA, 20 nt, Human
ugaccuuuugacuuaaagca

SEQ ID NO: 3410517 - RNA, 19 nt, Human
ugacgaaacuggccccgga

SEQ ID NO: 3410518 - RNA, 19 nt, Human
ugacgaacuuccauggccc

SEQ ID NO: 3410519 - RNA, 14 nt, Human
ugacgaggcugggc

SEQ ID NO: 3410520 - RNA, 13 nt, Human
ugacgccauccca

SEQ ID NO: 3410521 - RNA, 17 nt, Human
ugacgccaucccagccc

SEQ ID NO: 3410522 - RNA, 17 nt, Human
ugacgcugaauaaaugu

SEQ ID NO: 3410523 - RNA, 22 nt, Human
ugacgcugaauaaaugucuuuu

SEQ ID NO: 3410524 - RNA, 21 nt, Human
ugacggaaggaccuauguuug

SEQ ID NO: 3410525 - RNA, 19 nt, Human
ugacggaugauuggauuau

SEQ ID NO: 3410526 - RNA, 13 nt, Human
ugacggcccugca

SEQ ID NO: 3410527 - RNA, 15 nt, Human
ugacggcccugcaau

SEQ ID NO: 3410528 - RNA, 19 nt, Human
ugacggcgcccccagugug

SEQ ID NO: 3410529 - RNA, 23 nt, Human
ugacguacaaguaguucuguauu

SEQ ID NO: 3410530 - RNA, 19 nt, Human
ugacgucaagucuccuucc

SEQ ID NO: 3410531 - RNA, 19 nt, Human
ugacgucuagcuaugcugu

SEQ ID NO: 3410532 - RNA, 14 nt, Human
ugacgucugggugg

SEQ ID NO: 3410533 - RNA, 19 nt, Human
ugacgugccuuuugcaccc

SEQ ID NO: 3410534 - RNA, 22 nt, Human
ugacgugccuuuugcaccccuc

SEQ ID NO: 3410535 - RNA, 23 nt, Human
ugacguggagcgggguaugaaga

SEQ ID NO: 3410536 - RNA, 14 nt, Human
ugacguuccgggca

SEQ ID NO: 3410537 - RNA, 18 nt, Human
ugacuaaacuuuuuuucu

SEQ ID NO: 3410538 - RNA, 17 nt, Human
ugacuaaagagagaaug

SEQ ID NO: 3410539 - RNA, 15 nt, Human
ugacuaaauucguga

SEQ ID NO: 3410540 - RNA, 18 nt, Human
ugacuaaauucgugauuu

SEQ ID NO: 3410541 - RNA, 13 nt, Human
ugacuaaauuugg

SEQ ID NO: 3410542 - RNA, 23 nt, Human
ugacuaacuagacaccaaaguuc

SEQ ID NO: 3410543 - RNA, 20 nt, Human
ugacuaacucaaauacacau

SEQ ID NO: 3410544 - RNA, 23 nt, Human
ugacuaacucaaauacacauuug

SEQ ID NO: 3410545 - RNA, 15 nt, Human
ugacuaagaaauucu

SEQ ID NO: 3410546 - RNA, 15 nt, Human
ugacuaauggcauga

SEQ ID NO: 3410547 - RNA, 14 nt, Human
ugacuaauuagggu

SEQ ID NO: 3410548 - RNA, 22 nt, Human
ugacuaauucuugcauauuuug

SEQ ID NO: 3410549 - RNA, 23 nt, Human
ugacuaauuguauaacagguuau

SEQ ID NO: 3410550 - RNA, 18 nt, Human
ugacuaauuuuacauguu

SEQ ID NO: 3410551 - RNA, 13 nt, Human
ugacuacagggcc

SEQ ID NO: 3410552 - RNA, 14 nt, Human
ugacuacauuuuuu

SEQ ID NO: 3410553 - RNA, 17 nt, Human
ugacuagggagccaugu

SEQ ID NO: 3410554 - RNA, 18 nt, Human
ugacuagggagccauguu

SEQ ID NO: 3410555 - RNA, 21 nt, Human
ugacuagggagccauguuuca

SEQ ID NO: 3410556 - RNA, 13 nt, Human
ugacuaguacaaa

SEQ ID NO: 3410557 - RNA, 19 nt, Human
ugacuagugaggaaagauu

SEQ ID NO: 3410558 - RNA, 18 nt, Human
ugacuagugcugaagcuu

SEQ ID NO: 3410559 - RNA, 18 nt, Human
ugacuauauagagauguu

SEQ ID NO: 3410560 - RNA, 13 nt, Human
ugacuauguaaac

SEQ ID NO: 3410561 - RNA, 17 nt, Human
ugacuauuauguuguua

SEQ ID NO: 3410562 - RNA, 22 nt, Human
ugacuauuauguuguuagagaa

SEQ ID NO: 3410563 - RNA, 19 nt, Human
ugacuauucugagaugacu

SEQ ID NO: 3410564 - RNA, 20 nt, Human
ugacuauucuugauguaaaa

SEQ ID NO: 3410565 - RNA, 21 nt, Human
ugacuauucuugauguaaaau

SEQ ID NO: 3410566 - RNA, 22 nt, Human
ugacuauucuugauguaaaauc

SEQ ID NO: 3410567 - RNA, 22 nt, Human
ugacuauuuuuguuuuuauuaa

SEQ ID NO: 3410568 - RNA, 15 nt, Human
ugacucaacauguua

SEQ ID NO: 3410569 - RNA, 23 nt, Human
ugacucaacauguuacugaccag

SEQ ID NO: 3410570 - RNA, 15 nt, Human
ugacucaagauuccc

SEQ ID NO: 3410571 - RNA, 21 nt, Human
ugacucaagauucccaggagu

SEQ ID NO: 3410572 - RNA, 19 nt, Human
ugacucacaagaagaccag

SEQ ID NO: 3410573 - RNA, 20 nt, Human
ugacucacaagaagaccaga

SEQ ID NO: 3410574 - RNA, 14 nt, Human
ugacucacaccuga

SEQ ID NO: 3410575 - RNA, 15 nt, Human
ugacucacccaagca

SEQ ID NO: 3410576 - RNA, 18 nt, Human
ugacucacuuaucccaag

SEQ ID NO: 3410577 - RNA, 21 nt, Human
ugacucagcauaccugcuggu

SEQ ID NO: 3410578 - RNA, 14 nt, Human
ugacucagggcucc

SEQ ID NO: 3410579 - RNA, 17 nt, Human
ugacucagggcuccugg

SEQ ID NO: 3410580 - RNA, 13 nt, Human
ugacucauccucu

SEQ ID NO: 3410581 - RNA, 20 nt, Human
ugacucauucugaaggagcc

SEQ ID NO: 3410582 - RNA, 21 nt, Human
ugacuccacgauccugccacc

SEQ ID NO: 3410583 - RNA, 17 nt, Human
ugacuccagaauuuccc

SEQ ID NO: 3410584 - RNA, 11 nt, Human
ugacuccagga

SEQ ID NO: 3410585 - RNA, 21 nt, Human
ugacuccauagaccuuuucau

SEQ ID NO: 3410586 - RNA, 17 nt, Human
ugacucccaaagagcug

SEQ ID NO: 3410587 - RNA, 18 nt, Human
ugacucccaaagagcugc

SEQ ID NO: 3410588 - RNA, 20 nt, Human
ugacucccaaagagcugccu

SEQ ID NO: 3410589 - RNA, 22 nt, Human
ugacucccaaagagcugccuaa

SEQ ID NO: 3410590 - RNA, 21 nt, Human
ugacuccgcuggagguggggc

SEQ ID NO: 3410591 - RNA, 20 nt, Human
ugacuccuaccugcccugga

SEQ ID NO: 3410592 - RNA, 22 nt, Human
ugacuccuaccugcccuggaac

SEQ ID NO: 3410593 - RNA, 20 nt, Human
ugacuccuaugaucucaggu

SEQ ID NO: 3410594 - RNA, 17 nt, Human
ugacuccucuaagccac

SEQ ID NO: 3410595 - RNA, 21 nt, Human
ugacucgggcuccugugcccu

SEQ ID NO: 3410596 - RNA, 16 nt, Human
ugacucgggggugggg

SEQ ID NO: 3410597 - RNA, 18 nt, Human
ugacucggggguggggaa

SEQ ID NO: 3410598 - RNA, 15 nt, Human
ugacucgguuucucc

SEQ ID NO: 3410599 - RNA, 15 nt, Human
ugacucgugcugcau

SEQ ID NO: 3410600 - RNA, 12 nt, Human
ugacucuaaauu

SEQ ID NO: 3410601 - RNA, 23 nt, Human
ugacucuaguacugugaauccag

SEQ ID NO: 3410602 - RNA, 15 nt, Human
ugacucuauaagcaa

SEQ ID NO: 3410603 - RNA, 13 nt, Human
ugacucucuguga

SEQ ID NO: 3410604 - RNA, 14 nt, Human
ugacucugaaaucu

SEQ ID NO: 3410605 - RNA, 15 nt, Human
ugacucugaaaucug

SEQ ID NO: 3410606 - RNA, 22 nt, Human
ugacucugaaaucugaagaccu

SEQ ID NO: 3410607 - RNA, 18 nt, Human
ugacucugcccccugcug

SEQ ID NO: 3410608 - RNA, 13 nt, Human
ugacucugggucc

SEQ ID NO: 3410609 - RNA, 18 nt, Human
ugacucuggguccuuccu

SEQ ID NO: 3410610 - RNA, 20 nt, Human
ugacucuggguccuuccuga

SEQ ID NO: 3410611 - RNA, 16 nt, Human
ugacucuuaagaagac

SEQ ID NO: 3410612 - RNA, 14 nt, Human
ugacucuuggcaca

SEQ ID NO: 3410613 - RNA, 14 nt, Human
ugacugaacuguaa

SEQ ID NO: 3410614 - RNA, 14 nt, Human
ugacugaauuucuu

SEQ ID NO: 3410615 - RNA, 19 nt, Human
ugacugagcaagacccugu

SEQ ID NO: 3410616 - RNA, 13 nt, Human
ugacugauucuuc

SEQ ID NO: 3410617 - RNA, 14 nt, Human
ugacugauucuuca

SEQ ID NO: 3410618 - RNA, 18 nt, Human
ugacugcacguggcuucu

SEQ ID NO: 3410619 - RNA, 21 nt, Human
ugacugcauuuuacuguacag

SEQ ID NO: 3410620 - RNA, 22 nt, Human
ugacugcccggcacagaugcuc

SEQ ID NO: 3410621 - RNA, 16 nt, Human
ugacugcgaucuucag

SEQ ID NO: 3410622 - RNA, 17 nt, Human
ugacugcgaucuucaga

SEQ ID NO: 3410623 - RNA, 22 nt, Human
ugacugcucagaacuugcugcu

SEQ ID NO: 3410624 - RNA, 23 nt, Human
ugacugcuccccagcccuggcuc

SEQ ID NO: 3410625 - RNA, 19 nt, Human
ugacuggaauuuuuauuau

SEQ ID NO: 3410626 - RNA, 15 nt, Human
ugacuggcacagucu

SEQ ID NO: 3410627 - RNA, 14 nt, Human
ugacuggcauuuua

SEQ ID NO: 3410628 - RNA, 18 nt, Human
ugacuggcauuuuauaga

SEQ ID NO: 3410629 - RNA, 16 nt, Human
ugacugggaccaggca

SEQ ID NO: 3410630 - RNA, 23 nt, Human
ugacugguguuaucaccgugggc

SEQ ID NO: 3410631 - RNA, 16 nt, Human
ugacugguuaucacac

SEQ ID NO: 3410632 - RNA, 17 nt, Human
ugacuguagcuuuggaa

SEQ ID NO: 3410633 - RNA, 15 nt, Human
ugacuguaucugugu

SEQ ID NO: 3410634 - RNA, 16 nt, Human
ugacugucacuguucc

SEQ ID NO: 3410635 - RNA, 12 nt, Human
ugacugucuggg

SEQ ID NO: 3410636 - RNA, 17 nt, Human
ugacuguggccaugguc

SEQ ID NO: 3410637 - RNA, 21 nt, Human
ugacugugguagccagcaucg

SEQ ID NO: 3410638 - RNA, 15 nt, Human
ugacuguugauguac

SEQ ID NO: 3410639 - RNA, 15 nt, Human
ugacuguuuuuaccc

SEQ ID NO: 3410640 - RNA, 22 nt, Human
ugacuguuuuuuaaacuaggaa

SEQ ID NO: 3410641 - RNA, 20 nt, Human
ugacuuaacauagccaaaau

SEQ ID NO: 3410642 - RNA, 19 nt, Human
ugacuuaagcaaaagaaaa

SEQ ID NO: 3410643 - RNA, 15 nt, Human
ugacuuacuguacau

SEQ ID NO: 3410644 - RNA, 22 nt, Human
ugagcagugauauucuuuguua

SEQ ID NO: 3410645 - RNA, 13 nt, Human
ugagcaguggcug

SEQ ID NO: 3410646 - RNA, 18 nt, Human
ugagcaguggcuggucca

SEQ ID NO: 3410647 - RNA, 22 nt, Human
ugagcaguggcugguccagggc

SEQ ID NO: 3410648 - RNA, 17 nt, Human
ugagcagugugucuccu

SEQ ID NO: 3410649 - RNA, 23 nt, Human
ugagcauaggugauccauguaac

SEQ ID NO: 3410650 - RNA, 18 nt, Human
ugagcaucacagaaugug

SEQ ID NO: 3410651 - RNA, 15 nt, Human
ugagcaucacaguuu

SEQ ID NO: 3410652 - RNA, 17 nt, Human
ugagcauccugagcccc

SEQ ID NO: 3410653 - RNA, 23 nt, Human
ugagcauccugagccccgcccuc

SEQ ID NO: 3410654 - RNA, 21 nt, Human
ugagcaugacagccugcagca

SEQ ID NO: 3410655 - RNA, 18 nt, Human
ugagcauggagcuggccg

SEQ ID NO: 3410656 - RNA, 18 nt, Human
ugagcauguaaaagcgga

SEQ ID NO: 3410657 - RNA, 23 nt, Human
ugagcauuguggcugucagcagg

SEQ ID NO: 3410658 - RNA, 20 nt, Human
ugagccacagcagcauuuuu

SEQ ID NO: 3410659 - RNA, 12 nt, Human
ugagccaccacg

SEQ ID NO: 3410660 - RNA, 13 nt, Human
ugagccaccugcc

SEQ ID NO: 3410661 - RNA, 14 nt, Human
ugagccacugcacc

SEQ ID NO: 3410662 - RNA, 18 nt, Human
ugagccacugcaccgggc

SEQ ID NO: 3410663 - RNA, 21 nt, Human
ugagccacugcaccgggccac

SEQ ID NO: 3410664 - RNA, 15 nt, Human
ugagccacugcgccc

SEQ ID NO: 3410665 - RNA, 16 nt, Human
ugagccagauuucacu

SEQ ID NO: 3410666 - RNA, 21 nt, Human
ugagccagauuucacucuccu

SEQ ID NO: 3410667 - RNA, 13 nt, Human
ugagccagcagac

SEQ ID NO: 3410668 - RNA, 16 nt, Human
ugagccagcagacauu

SEQ ID NO: 3410669 - RNA, 21 nt, Human
ugagccagguaaugagggacu

SEQ ID NO: 3410670 - RNA, 16 nt, Human
ugagccagucccaggg

SEQ ID NO: 3410671 - RNA, 22 nt, Human
ugagccaguucaguaccuggag

SEQ ID NO: 3410672 - RNA, 15 nt, Human
ugagcccacaaagcc

SEQ ID NO: 3410673 - RNA, 16 nt, Human
ugagcccacaaagccu

SEQ ID NO: 3410674 - RNA, 19 nt, Human
ugagcccacugcccacccc

SEQ ID NO: 3410675 - RNA, 22 nt, Human
ugagcccacugcccacccccuc

SEQ ID NO: 3410676 - RNA, 11 nt, Human
ugagcccaggg

SEQ ID NO: 3410677 - RNA, 13 nt, Human
ugagcccagggag

SEQ ID NO: 3410678 - RNA, 22 nt, Human
ugagcccauguggagucagccu

SEQ ID NO: 3410679 - RNA, 13 nt, Human
ugagccccaaaag

SEQ ID NO: 3410680 - RNA, 14 nt, Human
ugagccccaagucc

SEQ ID NO: 3410681 - RNA, 19 nt, Human
ugagccccagggugcccag

SEQ ID NO: 3410682 - RNA, 21 nt, Human
ugagccccaucuucacccagg

SEQ ID NO: 3410683 - RNA, 16 nt, Human
ugagcccccagcuucc

SEQ ID NO: 3410684 - RNA, 17 nt, Human
ugagcccccagcuucca

SEQ ID NO: 3410685 - RNA, 22 nt, Human
ugagcccccagcuuccagcagg

SEQ ID NO: 3410686 - RNA, 22 nt, Human
ugagccccgcagaccuccccag

SEQ ID NO: 3410687 - RNA, 14 nt, Human
ugagccccgcccuc

SEQ ID NO: 3410688 - RNA, 19 nt, Human
ugagccccgcccucuuccu

SEQ ID NO: 3410689 - RNA, 22 nt, Human
ugagccccuaccccacaccagg

SEQ ID NO: 3410690 - RNA, 15 nt, Human
ugagccccuggaggc

SEQ ID NO: 3410691 - RNA, 14 nt, Human
ugagccccugggac

SEQ ID NO: 3410692 - RNA, 22 nt, Human
ugagccccugucuagagaggga

SEQ ID NO: 3410693 - RNA, 13 nt, Human
ugagccccuuccu

SEQ ID NO: 3410694 - RNA, 13 nt, Human
ugagcccgggcug

SEQ ID NO: 3410695 - RNA, 16 nt, Human
ugagcccgggcugccu

SEQ ID NO: 3410696 - RNA, 18 nt, Human
ugagcccgggcugccugg

SEQ ID NO: 3410697 - RNA, 22 nt, Human
ugagcccucagaacccuuggcu

SEQ ID NO: 3410698 - RNA, 16 nt, Human
ugagcccugaggaggc

SEQ ID NO: 3410699 - RNA, 18 nt, Human
ugagcccuguccugccua

SEQ ID NO: 3410700 - RNA, 15 nt, Human
ugagcccuuguuuca

SEQ ID NO: 3410701 - RNA, 22 nt, Human
ugagccgagaucacgccacugc

SEQ ID NO: 3410702 - RNA, 21 nt, Human
ugagccgcugugagccccugg

SEQ ID NO: 3410703 - RNA, 15 nt, Human
ugagccgggccccug

SEQ ID NO: 3410704 - RNA, 16 nt, Human
ugagccgggccccugg

SEQ ID NO: 3410705 - RNA, 16 nt, Human
ugagccuaaaaauaaa

SEQ ID NO: 3410706 - RNA, 18 nt, Human
ugagccuaaaaauaaagc

SEQ ID NO: 3410707 - RNA, 18 nt, Human
ugagccucugcuccccag

SEQ ID NO: 3410708 - RNA, 14 nt, Human
ugagccugagcaga

SEQ ID NO: 3410709 - RNA, 13 nt, Human
ugagccugcaggg

SEQ ID NO: 3410710 - RNA, 13 nt, Human
ugagccugccgag

SEQ ID NO: 3410711 - RNA, 13 nt, Human
ugagccugcugga

SEQ ID NO: 3410712 - RNA, 17 nt, Human
ugagccugcuggaagcc

SEQ ID NO: 3410713 - RNA, 16 nt, Human
ugagccuggcaagaau

SEQ ID NO: 3410714 - RNA, 22 nt, Human
ugagccuggcccauagaaacau

SEQ ID NO: 3410715 - RNA, 18 nt, Human
ugagccuggcucuugugc

SEQ ID NO: 3410716 - RNA, 13 nt, Human
ugagccuggcugg

SEQ ID NO: 3410717 - RNA, 14 nt, Human
ugagccugggaggu

SEQ ID NO: 3410718 - RNA, 22 nt, Human
ugagccugggaggucaaggcug

SEQ ID NO: 3410719 - RNA, 19 nt, Human
ugagccuugaacuuugacc

SEQ ID NO: 3410720 - RNA, 13 nt, Human
ugagccuuguaau

SEQ ID NO: 3410721 - RNA, 16 nt, Human
ugagcgacaaagauga

SEQ ID NO: 3410722 - RNA, 13 nt, Human
ugagcgacaguga

SEQ ID NO: 3410723 - RNA, 14 nt, Human
ugagcgacagugag

SEQ ID NO: 3410724 - RNA, 16 nt, Human
ugagcgacagugagac

SEQ ID NO: 3410725 - RNA, 22 nt, Human
ugagcgacaucucugacuuucu

SEQ ID NO: 3410726 - RNA, 23 nt, Human
ugagcgaggagaugcuccuuggg

SEQ ID NO: 3410727 - RNA, 20 nt, Human
ugagcgccuccauccaaggc

SEQ ID NO: 3410728 - RNA, 15 nt, Human
ugagcgggaggcaga

SEQ ID NO: 3410729 - RNA, 16 nt, Human
ugagcuacaaaugcau

SEQ ID NO: 3410730 - RNA, 21 nt, Human
ugagcuacugccgucagugcu

SEQ ID NO: 3410731 - RNA, 18 nt, Human
ugagcuagaacccucugu

SEQ ID NO: 3410732 - RNA, 14 nt, Human
ugagcuaggaauug

SEQ ID NO: 3410733 - RNA, 14 nt, Human
ugagcuaugacuua

SEQ ID NO: 3410734 - RNA, 15 nt, Human
ugagcuaugacuuaa

SEQ ID NO: 3410735 - RNA, 21 nt, Human
ugagcuauuuccauuccagaa

SEQ ID NO: 3410736 - RNA, 18 nt, Human
ugagcucacaaggcagca

SEQ ID NO: 3410737 - RNA, 22 nt, Human
ugagcucacaaggcagcaaggc

SEQ ID NO: 3410738 - RNA, 16 nt, Human
ugagcucagaccccca

SEQ ID NO: 3410739 - RNA, 19 nt, Human
ugagcucagacccccacuc

SEQ ID NO: 3410740 - RNA, 11 nt, Human
ugagcucagcc

SEQ ID NO: 3410741 - RNA, 12 nt, Human
ugagcucagccc

SEQ ID NO: 3410742 - RNA, 13 nt, Human
ugagcuccagacc

SEQ ID NO: 3410743 - RNA, 15 nt, Human
ugagcuccagacccc

SEQ ID NO: 3410744 - RNA, 18 nt, Human
ugagcucccacaagccug

SEQ ID NO: 3410745 - RNA, 19 nt, Human
ugagcucccacuucugcca

SEQ ID NO: 3410746 - RNA, 20 nt, Human
ugagcucccacuucugccag

SEQ ID NO: 3410747 - RNA, 15 nt, Human
ugagcuccccaaaaa

SEQ ID NO: 3410748 - RNA, 15 nt, Human
ugagcuccucugggc

SEQ ID NO: 3410749 - RNA, 12 nt, Human
ugagcuccuggg

SEQ ID NO: 3410750 - RNA, 18 nt, Human
ugagcucuacccagggcc

SEQ ID NO: 3410751 - RNA, 20 nt, Human
ugagcucuauuaugaaugug

SEQ ID NO: 3410752 - RNA, 16 nt, Human
ugagcucucggaacug

SEQ ID NO: 3410753 - RNA, 15 nt, Human
ugagcucugaaaucu

SEQ ID NO: 3410754 - RNA, 16 nt, Human
ugagcucugaaaucuu

SEQ ID NO: 3410755 - RNA, 20 nt, Human
ugagcucugagaggcccugg

SEQ ID NO: 3410756 - RNA, 21 nt, Human
ugagcucugagaggcccugga

SEQ ID NO: 3410757 - RNA, 18 nt, Human
ugagcucuucauguuuca

SEQ ID NO: 3410758 - RNA, 14 nt, Human
ugagcugagcaggc

SEQ ID NO: 3410759 - RNA, 14 nt, Human
ugagcugcagaaac

SEQ ID NO: 3410760 - RNA, 17 nt, Human
ugagcugcagaaacgaa

SEQ ID NO: 3410761 - RNA, 12 nt, Human
ugagcugccagu

SEQ ID NO: 3410762 - RNA, 15 nt, Human
ugagcugccauccag

SEQ ID NO: 3410763 - RNA, 16 nt, Human
ugagcugccucugaga

SEQ ID NO: 3410764 - RNA, 16 nt, Human
ugagcugccuucccua

SEQ ID NO: 3410765 - RNA, 19 nt, Human
ugagcugccuucccuagcu

SEQ ID NO: 3410766 - RNA, 17 nt, Human
ugagcugcuuuuuuuga

SEQ ID NO: 3410767 - RNA, 18 nt, Human
ugagcugggccggagggu

SEQ ID NO: 3410768 - RNA, 12 nt, Human
ugagcugucacu

SEQ ID NO: 3410769 - RNA, 15 nt, Human
ugagcuguguucuug

SEQ ID NO: 3410770 - RNA, 14 nt, Human
ugagcuguugccuc

SEQ ID NO: 3410771 - RNA, 19 nt, Human
ugagcuuaaaauacaagac

SEQ ID NO: 3410772 - RNA, 17 nt, Human
ugagcuuacguaguucu

SEQ ID NO: 3410773 - RNA, 18 nt, Human
ugagcuuacguaguucua

SEQ ID NO: 3410774 - RNA, 19 nt, Human
ugagcuuggcagcugaacu

SEQ ID NO: 3410775 - RNA, 13 nt, Human
ugagcuuggccag

SEQ ID NO: 3410776 - RNA, 14 nt, Human
ugagcuuggccaga

SEQ ID NO: 3410777 - RNA, 21 nt, Human
ugagcuuggccagaagggggc

SEQ ID NO: 3410778 - RNA, 18 nt, Human
ugagcuuuccauguugcu

SEQ ID NO: 3410779 - RNA, 19 nt, Human
ugagcuuuccauguugcug

SEQ ID NO: 3410780 - RNA, 20 nt, Human
ugagcuuuccauguugcugc

SEQ ID NO: 3410781 - RNA, 21 nt, Human
ugagcuuuccauguugcugcc

SEQ ID NO: 3410782 - RNA, 22 nt, Human
ugagcuuuccauguugcugcca

SEQ ID NO: 3410783 - RNA, 13 nt, Human
ugagcuuucugaa

SEQ ID NO: 3410784 - RNA, 14 nt, Human
ugagcuuucugaac

SEQ ID NO: 3410785 - RNA, 19 nt, Human
ugagcuuucugaacagcug

SEQ ID NO: 3410786 - RNA, 16 nt, Human
ugaggaaaaauaugug

SEQ ID NO: 3410787 - RNA, 16 nt, Human
ugaggaaaauaaugua

SEQ ID NO: 3410788 - RNA, 14 nt, Human
ugaggaaagcacac

SEQ ID NO: 3410789 - RNA, 15 nt, Human
ugcaggucuuuaaau

SEQ ID NO: 3410790 - RNA, 13 nt, Human
ugcaggugcacca

SEQ ID NO: 3410791 - RNA, 19 nt, Human
ugcagguggccaaguuccu

SEQ ID NO: 3410792 - RNA, 23 nt, Human
ugcagguugggccauacuggccu

SEQ ID NO: 3410793 - RNA, 15 nt, Human
ugcagguuuguuaca

SEQ ID NO: 3410794 - RNA, 11 nt, Human
ugcaguaacug

SEQ ID NO: 3410795 - RNA, 18 nt, Human
ugcaguacaggacauaua

SEQ ID NO: 3410796 - RNA, 17 nt, Human
ugcaguacuuugugcau

SEQ ID NO: 3410797 - RNA, 16 nt, Human
ugcaguagauuuucuu

SEQ ID NO: 3410798 - RNA, 16 nt, Human
ugcaguaggggaggag

SEQ ID NO: 3410799 - RNA, 18 nt, Human
ugcaguagucucugugcu

SEQ ID NO: 3410800 - RNA, 13 nt, Human
ugcaguauagaau

SEQ ID NO: 3410801 - RNA, 14 nt, Human
ugcaguauauuucu

SEQ ID NO: 3410802 - RNA, 16 nt, Human
ugcaguaucaugcccu

SEQ ID NO: 3410803 - RNA, 21 nt, Human
ugcaguaucaugcccugugca

SEQ ID NO: 3410804 - RNA, 21 nt, Human
ugcagucacguggaggagcag

SEQ ID NO: 3410805 - RNA, 13 nt, Human
ugcagucacugca

SEQ ID NO: 3410806 - RNA, 21 nt, Human
ugcagucagucaugauggcac

SEQ ID NO: 3410807 - RNA, 15 nt, Human
ugcagucaucagaag

SEQ ID NO: 3410808 - RNA, 13 nt, Human
ugcagucccaagc

SEQ ID NO: 3410809 - RNA, 14 nt, Human
ugcagucccaagcg

SEQ ID NO: 3410810 - RNA, 22 nt, Human
ugcagucccaagcggugucucu

SEQ ID NO: 3410811 - RNA, 19 nt, Human
ugcaguccugaucagagcc

SEQ ID NO: 3410812 - RNA, 21 nt, Human
ugcagucuccucuuuaaaaca

SEQ ID NO: 3410813 - RNA, 16 nt, Human
ugcagucucuauacca

SEQ ID NO: 3410814 - RNA, 18 nt, Human
ugcagucucuauaccaau

SEQ ID NO: 3410815 - RNA, 23 nt, Human
ugcagucucuauaccaauaaagu

SEQ ID NO: 3410816 - RNA, 19 nt, Human
ugcagucugcuucugcacc

SEQ ID NO: 3410817 - RNA, 22 nt, Human
ugcagucuuagaucauaguuuu

SEQ ID NO: 3410818 - RNA, 14 nt, Human
ugcagugaacuucc

SEQ ID NO: 3410819 - RNA, 19 nt, Human
ugcagugagccgagauugu

SEQ ID NO: 3410820 - RNA, 13 nt, Human
ugcagugagcuga

SEQ ID NO: 3410821 - RNA, 16 nt, Human
ugcagugcuuccaagg

SEQ ID NO: 3410822 - RNA, 18 nt, Human
ugcaguggcgcauucuag

SEQ ID NO: 3410823 - RNA, 21 nt, Human
ugcaguggcgcauucuaggcu

SEQ ID NO: 3410824 - RNA, 22 nt, Human
ugcaguggcgcgaucucagcuc

SEQ ID NO: 3410825 - RNA, 22 nt, Human
ugcaguggcgugaucucagcuc

SEQ ID NO: 3410826 - RNA, 17 nt, Human
ugcaguggcucacgccu

SEQ ID NO: 3410827 - RNA, 22 nt, Human
ugcagugguaugaucacggcuc

SEQ ID NO: 3410828 - RNA, 20 nt, Human
ugcaguggugcgaucugggu

SEQ ID NO: 3410829 - RNA, 13 nt, Human
ugcaguuacaaau

SEQ ID NO: 3410830 - RNA, 19 nt, Human
ugcaguuacaaauuauaau

SEQ ID NO: 3410831 - RNA, 14 nt, Human
ugcaguucugaaga

SEQ ID NO: 3410832 - RNA, 16 nt, Human
ugcaguucugaagaag

SEQ ID NO: 3410833 - RNA, 19 nt, Human
ugcaguucugaagaagaug

SEQ ID NO: 3410834 - RNA, 14 nt, Human
ugcaguucugagca

SEQ ID NO: 3410835 - RNA, 21 nt, Human
ugcaguucuuuggcugaaagg

SEQ ID NO: 3410836 - RNA, 13 nt, Human
ugcaguugccagu

SEQ ID NO: 3410837 - RNA, 18 nt, Human
ugcaguuuaagagcagaa

SEQ ID NO: 3410838 - RNA, 16 nt, Human
ugcaguuuaucauuca

SEQ ID NO: 3410839 - RNA, 12 nt, Human
ugcaguuuccaa

SEQ ID NO: 3410840 - RNA, 12 nt, Human
ugcaguuugaaa

SEQ ID NO: 3410841 - RNA, 19 nt, Human
ugcaguuugaaauucugaa

SEQ ID NO: 3410842 - RNA, 21 nt, Human
ugcaguuugaaauucugaauu

SEQ ID NO: 3410843 - RNA, 22 nt, Human
ugcaguuugaaauucugaauuu

SEQ ID NO: 3410844 - RNA, 14 nt, Human
ugcaguuuuucaga

SEQ ID NO: 3410845 - RNA, 12 nt, Human
ugcauaaauaug

SEQ ID NO: 3410846 - RNA, 18 nt, Human
ugcauaacaaauucugaa

SEQ ID NO: 3410847 - RNA, 18 nt, Human
ugcauaacaauuccucua

SEQ ID NO: 3410848 - RNA, 22 nt, Human
ugcauaacguauaaaagccugu

SEQ ID NO: 3410849 - RNA, 15 nt, Human
ugcauaacugacaaa

SEQ ID NO: 3410850 - RNA, 22 nt, Human
ugcauaacugacaaaucaaguu

SEQ ID NO: 3410851 - RNA, 23 nt, Human
ugcauaacugacaaaucaaguuu

SEQ ID NO: 3410852 - RNA, 14 nt, Human
ugcauaaguuaacu

SEQ ID NO: 3410853 - RNA, 11 nt, Human
ugcauaauaaa

SEQ ID NO: 3410854 - RNA, 24 nt, Human
ugcauaauaagcuaaagaggcuga

SEQ ID NO: 3410855 - RNA, 17 nt, Human
ugcauaauagcuacagu

SEQ ID NO: 3410856 - RNA, 15 nt, Human
ugcauaauggucaga

SEQ ID NO: 3410857 - RNA, 22 nt, Human
ugcauacaaacaagcauauaaa

SEQ ID NO: 3410858 - RNA, 23 nt, Human
ugcauacaaacaagcauauaaaa

SEQ ID NO: 3410859 - RNA, 14 nt, Human
ugcauacacacaca

SEQ ID NO: 3410860 - RNA, 15 nt, Human
ugcauacacacacac

SEQ ID NO: 3410861 - RNA, 16 nt, Human
ugcauacacacacaca

SEQ ID NO: 3410862 - RNA, 21 nt, Human
ugcauacacacacacacacag

SEQ ID NO: 3410863 - RNA, 22 nt, Human
ugcauacacuuuuucucuuucc

SEQ ID NO: 3410864 - RNA, 20 nt, Human
ugcauacauucuucaagauc

SEQ ID NO: 3410865 - RNA, 14 nt, Human
ugcauaccaaccug

SEQ ID NO: 3410866 - RNA, 14 nt, Human
ugcauaccacuuuu

SEQ ID NO: 3410867 - RNA, 18 nt, Human
ugcauaccacuuuuguuc

SEQ ID NO: 3410868 - RNA, 22 nt, Human
ugcauaccacuuuuguucuugg

SEQ ID NO: 3410869 - RNA, 19 nt, Human
ugcauacccgggcagggcu

SEQ ID NO: 3410870 - RNA, 15 nt, Human
ugcauacuauuaaac

SEQ ID NO: 3410871 - RNA, 16 nt, Human
ugcauacuauuaaaca

SEQ ID NO: 3410872 - RNA, 20 nt, Human
ugcauacuauuaaacaugcu

SEQ ID NO: 3410873 - RNA, 13 nt, Human
ugcauacucauua

SEQ ID NO: 3410874 - RNA, 14 nt, Human
ugcauacuucaaaa

SEQ ID NO: 3410875 - RNA, 16 nt, Human
ugcauacuucaaaagu

SEQ ID NO: 3410876 - RNA, 19 nt, Human
ugcauacuucaaaaguauu

SEQ ID NO: 3410877 - RNA, 18 nt, Human
ugcauacuuuuuaaaugu

SEQ ID NO: 3410878 - RNA, 22 nt, Human
ugcauacuuuuuaaauguaaag

SEQ ID NO: 3410879 - RNA, 23 nt, Human
ugcauacuuuuuaaauguaaaga

SEQ ID NO: 3410880 - RNA, 17 nt, Human
ugcauagaauaaaauuu

SEQ ID NO: 3410881 - RNA, 17 nt, Human
ugcauagagccacguau

SEQ ID NO: 3410882 - RNA, 19 nt, Human
ugcauagagguaccagcaa

SEQ ID NO: 3410883 - RNA, 22 nt, Human
ugcauagcagaugguuuccaca

SEQ ID NO: 3410884 - RNA, 20 nt, Human
ugcauaggaguuuggaggaa

SEQ ID NO: 3410885 - RNA, 22 nt, Human
ugcauaguaaauguaguucaua

SEQ ID NO: 3410886 - RNA, 22 nt, Human
ugcauaguaccaaucauuuuaa

SEQ ID NO: 3410887 - RNA, 20 nt, Human
ugcauagucccagcuaccca

SEQ ID NO: 3410888 - RNA, 13 nt, Human
ugcauagugcugg

SEQ ID NO: 3410889 - RNA, 19 nt, Human
ugcauaguucccauguuaa

SEQ ID NO: 3410890 - RNA, 14 nt, Human
ugcauaguuucuuu

SEQ ID NO: 3410891 - RNA, 15 nt, Human
ugcauaguuucuuua

SEQ ID NO: 3410892 - RNA, 14 nt, Human
ugcauauaacuuau

SEQ ID NO: 3410893 - RNA, 22 nt, Human
ugcauauaagggaaguaguuau

SEQ ID NO: 3410894 - RNA, 23 nt, Human
ugcauauaagggaaguaguuauc

SEQ ID NO: 3410895 - RNA, 17 nt, Human
ugcauauaaugaauaaa

SEQ ID NO: 3410896 - RNA, 20 nt, Human
ugcauauaaugaauaaauca

SEQ ID NO: 3410897 - RNA, 16 nt, Human
ugcauauccugagcca

SEQ ID NO: 3410898 - RNA, 18 nt, Human
ugcauauccugagccauc

SEQ ID NO: 3410899 - RNA, 13 nt, Human
ugcauauguugaa

SEQ ID NO: 3410900 - RNA, 13 nt, Human
ugcauauuacugu

SEQ ID NO: 3410901 - RNA, 22 nt, Human
ugcauauuacuguacaugggac

SEQ ID NO: 3410902 - RNA, 13 nt, Human
ugcauauuauaaa

SEQ ID NO: 3410903 - RNA, 16 nt, Human
ugcauauuccuuucua

SEQ ID NO: 3410904 - RNA, 22 nt, Human
ugcauauucuaguaauaaagac

SEQ ID NO: 3410905 - RNA, 14 nt, Human
ugcauauuguacac

SEQ ID NO: 3410906 - RNA, 20 nt, Human
ugcauauuguauuacuagaa

SEQ ID NO: 3410907 - RNA, 19 nt, Human
ugcauauuugcaaagugua

SEQ ID NO: 3410908 - RNA, 24 nt, Human
ugcauauuuuguaacuuccaugug

SEQ ID NO: 3410909 - RNA, 15 nt, Human
ugcaucaauccugug

SEQ ID NO: 3410910 - RNA, 21 nt, Human
ugcaucacuguaucauuuucu

SEQ ID NO: 3410911 - RNA, 20 nt, Human
ugcaucagaaagggagggcu

SEQ ID NO: 3410912 - RNA, 23 nt, Human
ugcaucagaaagggagggcucug

SEQ ID NO: 3410913 - RNA, 13 nt, Human
ugcaucagcugcu

SEQ ID NO: 3410914 - RNA, 22 nt, Human
ugcaucagcugcugaaacaaca

SEQ ID NO: 3410915 - RNA, 14 nt, Human
ugcaucaguauuaa

SEQ ID NO: 3410916 - RNA, 12 nt, Human
ugcaucaguucu

SEQ ID NO: 3410917 - RNA, 17 nt, Human
ugcaucaucuguagaua

SEQ ID NO: 3410918 - RNA, 19 nt, Human
ugcaucaucuugaacauua

SEQ ID NO: 3410919 - RNA, 18 nt, Human
ugcauccaaaggugcuca

SEQ ID NO: 3410920 - RNA, 21 nt, Human
ugcauccagcaguacaauaaa

SEQ ID NO: 3410921 - RNA, 16 nt, Human
ugcauccauuccucag

SEQ ID NO: 3410922 - RNA, 17 nt, Human
ugcauccauuccucagg

SEQ ID NO: 3410923 - RNA, 18 nt, Human
ugcauccauuccucaggg

SEQ ID NO: 3410924 - RNA, 23 nt, Human
ugcaucccaaaccacgccucuug

SEQ ID NO: 3410925 - RNA, 14 nt, Human
ugcaucccagcacc

SEQ ID NO: 3410926 - RNA, 17 nt, Human
ugcaucccccccaccuc

SEQ ID NO: 3410927 - RNA, 13 nt, Human
ugcaucccugaga

SEQ ID NO: 3410928 - RNA, 19 nt, Human
ugcauccgggggcagcucu

SEQ ID NO: 3410929 - RNA, 19 nt, Human
ugcauccguaguucccuga

SEQ ID NO: 3410930 - RNA, 18 nt, Human
ugcauccuaacuccaugu

SEQ ID NO: 3410931 - RNA, 15 nt, Human
ugcauccuccaagaa

SEQ ID NO: 3410932 - RNA, 22 nt, Human
ugcauccucuggagccagccga

SEQ ID NO: 3410933 - RNA, 20 nt, Human
ugccacugagagaucugcug

SEQ ID NO: 3410934 - RNA, 19 nt, Human
ugccacugauauucagaau

SEQ ID NO: 3410935 - RNA, 23 nt, Human
ugccacugccucuuccucccuca

SEQ ID NO: 3410936 - RNA, 19 nt, Human
ugccacuggggaaaacucc

SEQ ID NO: 3410937 - RNA, 17 nt, Human
ugccacuuaauguaugu

SEQ ID NO: 3410938 - RNA, 20 nt, Human
ugccacuuaauguauguuac

SEQ ID NO: 3410939 - RNA, 15 nt, Human
ugccacuuccuuuua

SEQ ID NO: 3410940 - RNA, 16 nt, Human
ugccacuucuaagaaa

SEQ ID NO: 3410941 - RNA, 21 nt, Human
ugccacuugaacaaaaucugu

SEQ ID NO: 3410942 - RNA, 21 nt, Human
ugccacuuuacccaccuagaa

SEQ ID NO: 3410943 - RNA, 22 nt, Human
ugccacuuuacccaccuagaac

SEQ ID NO: 3410944 - RNA, 20 nt, Human
ugccacuuugcacauuuuga

SEQ ID NO: 3410945 - RNA, 20 nt, Human
ugccagaaagcauaaaauuc

SEQ ID NO: 3410946 - RNA, 20 nt, Human
ugccagaacaguuuguacag

SEQ ID NO: 3410947 - RNA, 23 nt, Human
ugccagacgcucauucagcaucu

SEQ ID NO: 3410948 - RNA, 21 nt, Human
ugccagagaacccagcccacc

SEQ ID NO: 3410949 - RNA, 22 nt, Human
ugccagagacggaagccuuuuu

SEQ ID NO: 3410950 - RNA, 15 nt, Human
ugccagagauaaacu

SEQ ID NO: 3410951 - RNA, 20 nt, Human
ugccagagcaaagggccagg

SEQ ID NO: 3410952 - RNA, 17 nt, Human
ugccagagccuggggcu

SEQ ID NO: 3410953 - RNA, 21 nt, Human
ugccagaggaauccuggcagc

SEQ ID NO: 3410954 - RNA, 22 nt, Human
ugccagaggaauccuggcagcc

SEQ ID NO: 3410955 - RNA, 14 nt, Human
ugccagaggggaag

SEQ ID NO: 3410956 - RNA, 18 nt, Human
ugccagaggugggcaggu

SEQ ID NO: 3410957 - RNA, 19 nt, Human
ugccagaggugggcaggug

SEQ ID NO: 3410958 - RNA, 14 nt, Human
ugccagaugcugau

SEQ ID NO: 3410959 - RNA, 22 nt, Human
ugccagaugcugauguucagug

SEQ ID NO: 3410960 - RNA, 15 nt, Human
ugccagcaaagcccc

SEQ ID NO: 3410961 - RNA, 16 nt, Human
ugccagcaacugaaua

SEQ ID NO: 3410962 - RNA, 23 nt, Human
ugccagcaaugacaucucagggg

SEQ ID NO: 3410963 - RNA, 17 nt, Human
ugccagcacccccacgc

SEQ ID NO: 3410964 - RNA, 10 nt, Human
ugccagcagc

SEQ ID NO: 3410965 - RNA, 14 nt, Human
ugccagcagcagca

SEQ ID NO: 3410966 - RNA, 15 nt, Human
ugccagcagcagcag

SEQ ID NO: 3410967 - RNA, 15 nt, Human
ugccagccagcagcc

SEQ ID NO: 3410968 - RNA, 22 nt, Human
ugccagcccccuaaaagcacuc

SEQ ID NO: 3410969 - RNA, 11 nt, Human
ugccagccccu

SEQ ID NO: 3410970 - RNA, 23 nt, Human
ugccagccgagauagccaaggcc

SEQ ID NO: 3410971 - RNA, 21 nt, Human
ugccagccgugaugcucaggc

SEQ ID NO: 3410972 - RNA, 12 nt, Human
ugccagccuucc

SEQ ID NO: 3410973 - RNA, 17 nt, Human
ugccagccuuccucugc

SEQ ID NO: 3410974 - RNA, 18 nt, Human
ugccagccuuccucugca

SEQ ID NO: 3410975 - RNA, 21 nt, Human
ugccagccuuccucugcagcu

SEQ ID NO: 3410976 - RNA, 23 nt, Human
ugccagccuuccucugcagcuga

SEQ ID NO: 3410977 - RNA, 17 nt, Human
ugccagccuugagcccu

SEQ ID NO: 3410978 - RNA, 21 nt, Human
ugccagccuugagcccuggcu

SEQ ID NO: 3410979 - RNA, 17 nt, Human
ugccagcucagucccau

SEQ ID NO: 3410980 - RNA, 22 nt, Human
ugccagcucuguaucaggaccc

SEQ ID NO: 3410981 - RNA, 23 nt, Human
ugccagcucuguaucaggaccca

SEQ ID NO: 3410982 - RNA, 15 nt, Human
ugccagcucuuccua

SEQ ID NO: 3410983 - RNA, 18 nt, Human
ugccagcucuuccuagcu

SEQ ID NO: 3410984 - RNA, 20 nt, Human
ugccagcucuuccuagcugg

SEQ ID NO: 3410985 - RNA, 15 nt, Human
ugccagcugcugagc

SEQ ID NO: 3410986 - RNA, 19 nt, Human
ugccagcuuuuccucccuu

SEQ ID NO: 3410987 - RNA, 20 nt, Human
ugccaggaaacucuugcuau

SEQ ID NO: 3410988 - RNA, 19 nt, Human
ugccaggaacccuuaaaca

SEQ ID NO: 3410989 - RNA, 21 nt, Human
ugccaggaaccuguccuaagg

SEQ ID NO: 3410990 - RNA, 12 nt, Human
ugccaggaagcc

SEQ ID NO: 3410991 - RNA, 16 nt, Human
ugccaggaagccagca

SEQ ID NO: 3410992 - RNA, 23 nt, Human
ugccaggaaggggugagcacaga

SEQ ID NO: 3410993 - RNA, 13 nt, Human
ugccaggacacgc

SEQ ID NO: 3410994 - RNA, 23 nt, Human
ugccaggacaugcaauaaaauuu

SEQ ID NO: 3410995 - RNA, 22 nt, Human
ugccaggacuccccaggccagg

SEQ ID NO: 3410996 - RNA, 23 nt, Human
ugccaggacuccccaggccaggc

SEQ ID NO: 3410997 - RNA, 13 nt, Human
ugccaggaggacc

SEQ ID NO: 3410998 - RNA, 21 nt, Human
ugccaggagggacaaaggagc

SEQ ID NO: 3410999 - RNA, 18 nt, Human
ugccaggauggaaugaug

SEQ ID NO: 3411000 - RNA, 18 nt, Human
ugccaggcacaggcaggg

SEQ ID NO: 3411001 - RNA, 17 nt, Human
ugccaggcagggguggg

SEQ ID NO: 3411002 - RNA, 18 nt, Human
ugccaggccagccuccga

SEQ ID NO: 3411003 - RNA, 22 nt, Human
ugccaggcccccaccacacauc

SEQ ID NO: 3411004 - RNA, 11 nt, Human
ugccaggcccg

SEQ ID NO: 3411005 - RNA, 14 nt, Human
ugccaggcccgggg

SEQ ID NO: 3411006 - RNA, 16 nt, Human
ugccaggcuaauuuuu

SEQ ID NO: 3411007 - RNA, 17 nt, Human
ugccaggcuggagugca

SEQ ID NO: 3411008 - RNA, 11 nt, Human
ugccagggaca

SEQ ID NO: 3411009 - RNA, 15 nt, Human
ugccagggagacaga

SEQ ID NO: 3411010 - RNA, 23 nt, Human
ugccagggccaugucagacacag

SEQ ID NO: 3411011 - RNA, 12 nt, Human
ugccagggcccg

SEQ ID NO: 3411012 - RNA, 11 nt, Human
ugccaggggag

SEQ ID NO: 3411013 - RNA, 20 nt, Human
ugccaggguuucgagaagcu

SEQ ID NO: 3411014 - RNA, 18 nt, Human
ugccaggucccuuucauu

SEQ ID NO: 3411015 - RNA, 22 nt, Human
ugccaggugaaggaggcuccag

SEQ ID NO: 3411016 - RNA, 19 nt, Human
ugccagguuuucugggugu

SEQ ID NO: 3411017 - RNA, 22 nt, Human
ugccaguaaaaaaaaaaaaugg

SEQ ID NO: 3411018 - RNA, 17 nt, Human
ugccaguaacaggcuca

SEQ ID NO: 3411019 - RNA, 18 nt, Human
ugccaguaacgcgucuuc

SEQ ID NO: 3411020 - RNA, 13 nt, Human
ugccaguauuuuu

SEQ ID NO: 3411021 - RNA, 18 nt, Human
ugccaguauuuuuaaagg

SEQ ID NO: 3411022 - RNA, 16 nt, Human
ugccagucaccccggc

SEQ ID NO: 3411023 - RNA, 18 nt, Human
ugccagucaccccggcca

SEQ ID NO: 3411024 - RNA, 20 nt, Human
ugccagucaccccggccacc

SEQ ID NO: 3411025 - RNA, 22 nt, Human
ugccagucaccccggccaccug

SEQ ID NO: 3411026 - RNA, 17 nt, Human
ugccaguccuagcugca

SEQ ID NO: 3411027 - RNA, 15 nt, Human
ugccaguccuguccu

SEQ ID NO: 3411028 - RNA, 16 nt, Human
ugccagugacagacag

SEQ ID NO: 3411029 - RNA, 17 nt, Human
ugccagugacagacagg

SEQ ID NO: 3411030 - RNA, 22 nt, Human
ugccagugccuuaccuccugcc

SEQ ID NO: 3411031 - RNA, 23 nt, Human
ugccagugccuuaccuccugccc

SEQ ID NO: 3411032 - RNA, 12 nt, Human
ugccagugucuu

SEQ ID NO: 3411033 - RNA, 13 nt, Human
ugccagugugcug

SEQ ID NO: 3411034 - RNA, 21 nt, Human
ugccauaaaacauuaagaaaa

SEQ ID NO: 3411035 - RNA, 22 nt, Human
ugccauaaaacauuaagaaaau

SEQ ID NO: 3411036 - RNA, 23 nt, Human
ugccauaaaacauuaagaaaauc

SEQ ID NO: 3411037 - RNA, 16 nt, Human
ugccauaauacaaaag

SEQ ID NO: 3411038 - RNA, 15 nt, Human
ugccauagaguacac

SEQ ID NO: 3411039 - RNA, 18 nt, Human
ugccauagaguuuaacac

SEQ ID NO: 3411040 - RNA, 21 nt, Human
ugccauagaguuuaacacaag

SEQ ID NO: 3411041 - RNA, 18 nt, Human
ugccauagucacauggcc

SEQ ID NO: 3411042 - RNA, 19 nt, Human
ugccauagucacauggccu

SEQ ID NO: 3411043 - RNA, 20 nt, Human
ugccauagucuuaacugguc

SEQ ID NO: 3411044 - RNA, 21 nt, Human
ugccauauauaacagauacau

SEQ ID NO: 3411045 - RNA, 18 nt, Human
ugccauaugauuuacauu

SEQ ID NO: 3411046 - RNA, 23 nt, Human
ugccauauuaaauuuuuuguuga

SEQ ID NO: 3411047 - RNA, 20 nt, Human
ugccauauucuguuggccag

SEQ ID NO: 3411048 - RNA, 15 nt, Human
ugccauauugcacau

SEQ ID NO: 3411049 - RNA, 21 nt, Human
ugccaucaacuacuauucaaa

SEQ ID NO: 3411050 - RNA, 13 nt, Human
ugccaucaucucc

SEQ ID NO: 3411051 - RNA, 16 nt, Human
ugccaucauguuuaca

SEQ ID NO: 3411052 - RNA, 14 nt, Human
ugccaucauugcug

SEQ ID NO: 3411053 - RNA, 12 nt, Human
ugccauccaagu

SEQ ID NO: 3411054 - RNA, 12 nt, Human
ugccauccaggu

SEQ ID NO: 3411055 - RNA, 11 nt, Human
ugccaucccuc

SEQ ID NO: 3411056 - RNA, 12 nt, Human
ugccaucccucc

SEQ ID NO: 3411057 - RNA, 19 nt, Human
ugccauccucaaacacugc

SEQ ID NO: 3411058 - RNA, 15 nt, Human
ugccauccucuuucu

SEQ ID NO: 3411059 - RNA, 17 nt, Human
ugccauccucuuucucu

SEQ ID NO: 3411060 - RNA, 15 nt, Human
ugccauccuggccca

SEQ ID NO: 3411061 - RNA, 18 nt, Human
ugccaucuagccagcccc

SEQ ID NO: 3411062 - RNA, 16 nt, Human
ugccaucuaucuaguu

SEQ ID NO: 3411063 - RNA, 13 nt, Human
ugccaucucugcu

SEQ ID NO: 3411064 - RNA, 15 nt, Human
ugccaucucugcucc

SEQ ID NO: 3411065 - RNA, 12 nt, Human
ugccaucuguag

SEQ ID NO: 3411066 - RNA, 16 nt, Human
ugccaucuguguccug

SEQ ID NO: 3411067 - RNA, 19 nt, Human
ugccaugaacuggaggcca

SEQ ID NO: 3411068 - RNA, 20 nt, Human
ugccaugaagggacccuuug

SEQ ID NO: 3411069 - RNA, 18 nt, Human
ugccaugagccgcccaag

SEQ ID NO: 3411070 - RNA, 23 nt, Human
ugccaugagccgcccaaggccuu

SEQ ID NO: 3411071 - RNA, 20 nt, Human
ugccaugaggaacaaggcaa

SEQ ID NO: 3411072 - RNA, 23 nt, Human
ugccaugaggaacaaggcaaggc

SEQ ID NO: 3411073 - RNA, 17 nt, Human
ugccaugaugccucugu

SEQ ID NO: 3411074 - RNA, 20 nt, Human
ugccaugaugccucugucuu

SEQ ID NO: 3411075 - RNA, 20 nt, Human
ugccauggacagaagaaggc

SEQ ID NO: 3411076 - RNA, 12 nt, Human
ugcccugcuuuc

SEQ ID NO: 3411077 - RNA, 17 nt, Human
ugcccugcuuucagaua

SEQ ID NO: 3411078 - RNA, 18 nt, Human
ugcccuggauccaucagg

SEQ ID NO: 3411079 - RNA, 16 nt, Human
ugcccuggaugcccag

SEQ ID NO: 3411080 - RNA, 22 nt, Human
ugcccuggcagggucauccugu

SEQ ID NO: 3411081 - RNA, 23 nt, Human
ugcccuggcagggucauccugug

SEQ ID NO: 3411082 - RNA, 14 nt, Human
ugcccuggcccuga

SEQ ID NO: 3411083 - RNA, 22 nt, Human
ugcccuggcccugagguguggg

SEQ ID NO: 3411084 - RNA, 20 nt, Human
ugcccuggcugcugccccca

SEQ ID NO: 3411085 - RNA, 15 nt, Human
ugcccugggaggcag

SEQ ID NO: 3411086 - RNA, 17 nt, Human
ugcccugggaggcagug

SEQ ID NO: 3411087 - RNA, 18 nt, Human
ugcccugggaggcaguga

SEQ ID NO: 3411088 - RNA, 13 nt, Human
ugcccugggccac

SEQ ID NO: 3411089 - RNA, 20 nt, Human
ugcccuggugcugccacacu

SEQ ID NO: 3411090 - RNA, 21 nt, Human
ugcccuggugcugccacacuu

SEQ ID NO: 3411091 - RNA, 16 nt, Human
ugcccugguggcccuc

SEQ ID NO: 3411092 - RNA, 21 nt, Human
ugcccugguggcccucucccc

SEQ ID NO: 3411093 - RNA, 22 nt, Human
ugcccugguggcccucuccccu

SEQ ID NO: 3411094 - RNA, 19 nt, Human
ugcccugugggaccccagg

SEQ ID NO: 3411095 - RNA, 13 nt, Human
ugcccuguguacu

SEQ ID NO: 3411096 - RNA, 20 nt, Human
ugcccuguguacuucccggg

SEQ ID NO: 3411097 - RNA, 20 nt, Human
ugcccuguuaaaagaugaaa

SEQ ID NO: 3411098 - RNA, 20 nt, Human
ugcccuguuguguauagaug

SEQ ID NO: 3411099 - RNA, 19 nt, Human
ugcccuuaccugccaggaa

SEQ ID NO: 3411100 - RNA, 22 nt, Human
ugcccuuaccugccaggaagcc

SEQ ID NO: 3411101 - RNA, 13 nt, Human
ugcccuuaggcca

SEQ ID NO: 3411102 - RNA, 15 nt, Human
ugcccuucacuguca

SEQ ID NO: 3411103 - RNA, 15 nt, Human
ugcccuucccugucc

SEQ ID NO: 3411104 - RNA, 18 nt, Human
ugcccuuccucaguuuaa

SEQ ID NO: 3411105 - RNA, 13 nt, Human
ugcccuugcccug

SEQ ID NO: 3411106 - RNA, 15 nt, Human
ugcccuugcccugac

SEQ ID NO: 3411107 - RNA, 19 nt, Human
ugcccuuggaggccagcca

SEQ ID NO: 3411108 - RNA, 18 nt, Human
ugcccuuggcacccaaga

SEQ ID NO: 3411109 - RNA, 13 nt, Human
ugcccuugggcca

SEQ ID NO: 3411110 - RNA, 20 nt, Human
ugcccuuguuuggggcagga

SEQ ID NO: 3411111 - RNA, 23 nt, Human
ugcccuuguuuggggcaggagua

SEQ ID NO: 3411112 - RNA, 15 nt, Human
ugcccuuucugggca

SEQ ID NO: 3411113 - RNA, 17 nt, Human
ugcccuuuguccuccug

SEQ ID NO: 3411114 - RNA, 18 nt, Human
ugccgaaacuggaaguua

SEQ ID NO: 3411115 - RNA, 22 nt, Human
ugccgaccgaggcuggagcugg

SEQ ID NO: 3411116 - RNA, 15 nt, Human
ugccgagcaaccgug

SEQ ID NO: 3411117 - RNA, 17 nt, Human
ugccgagcaaccguggc

SEQ ID NO: 3411118 - RNA, 14 nt, Human
ugccgaggagccag

SEQ ID NO: 3411119 - RNA, 17 nt, Human
ugccgaggagccaggca

SEQ ID NO: 3411120 - RNA, 21 nt, Human
ugccgauauacucuagaugaa

SEQ ID NO: 3411121 - RNA, 13 nt, Human
ugccgauuucugu

SEQ ID NO: 3411122 - RNA, 20 nt, Human
ugccgauuucuguaaacucu

SEQ ID NO: 3411123 - RNA, 15 nt, Human
ugccgcaaauuguac

SEQ ID NO: 3411124 - RNA, 12 nt, Human
ugccgcacccca

SEQ ID NO: 3411125 - RNA, 18 nt, Human
ugccgcaccccagagugu

SEQ ID NO: 3411126 - RNA, 14 nt, Human
ugccgccccaccca

SEQ ID NO: 3411127 - RNA, 15 nt, Human
ugccgccccacccag

SEQ ID NO: 3411128 - RNA, 15 nt, Human
ugccgccgccucgcc

SEQ ID NO: 3411129 - RNA, 18 nt, Human
ugccgccgccucgcccac

SEQ ID NO: 3411130 - RNA, 21 nt, Human
ugccgccgccucgcccaccgc

SEQ ID NO: 3411131 - RNA, 21 nt, Human
ugccgcgucgcccucccaggc

SEQ ID NO: 3411132 - RNA, 13 nt, Human
ugccgcuaccucc

SEQ ID NO: 3411133 - RNA, 14 nt, Human
ugccggaugugcuu

SEQ ID NO: 3411134 - RNA, 14 nt, Human
ugccggcccugggg

SEQ ID NO: 3411135 - RNA, 15 nt, Human
ugccggcccuggggc

SEQ ID NO: 3411136 - RNA, 16 nt, Human
ugccggccggggcuga

SEQ ID NO: 3411137 - RNA, 16 nt, Human
ugccggcucuggcucu

SEQ ID NO: 3411138 - RNA, 14 nt, Human
ugccgggccugauu

SEQ ID NO: 3411139 - RNA, 14 nt, Human
ugccgucaccacca

SEQ ID NO: 3411140 - RNA, 17 nt, Human
ugccgucaccaccaccc

SEQ ID NO: 3411141 - RNA, 15 nt, Human
ugccgucuaccugag

SEQ ID NO: 3411142 - RNA, 16 nt, Human
ugccgucuaccugagg

SEQ ID NO: 3411143 - RNA, 19 nt, Human
ugccgucuaccugaggggc

SEQ ID NO: 3411144 - RNA, 22 nt, Human
ugccguggauugcacguggccu

SEQ ID NO: 3411145 - RNA, 13 nt, Human
ugccguggcacca

SEQ ID NO: 3411146 - RNA, 21 nt, Human
ugccguguccccugacagggc

SEQ ID NO: 3411147 - RNA, 22 nt, Human
ugccguuacucuccaaccugga

SEQ ID NO: 3411148 - RNA, 23 nt, Human
ugccuaaauccauuuggaaaucu

SEQ ID NO: 3411149 - RNA, 16 nt, Human
ugccuaacaaaauauu

SEQ ID NO: 3411150 - RNA, 19 nt, Human
ugccuaagaauaaacauuu

SEQ ID NO: 3411151 - RNA, 18 nt, Human
ugccuaagcauugccugg

SEQ ID NO: 3411152 - RNA, 12 nt, Human
ugccuaaggacu

SEQ ID NO: 3411153 - RNA, 17 nt, Human
ugccuaaguauuaaaac

SEQ ID NO: 3411154 - RNA, 21 nt, Human
ugccuaaguauuaaaacauug

SEQ ID NO: 3411155 - RNA, 22 nt, Human
ugccuaaguauuaaaacauugg

SEQ ID NO: 3411156 - RNA, 23 nt, Human
ugccuaaguauuaaaacauugga

SEQ ID NO: 3411157 - RNA, 14 nt, Human
ugccuaaguggcug

SEQ ID NO: 3411158 - RNA, 17 nt, Human
ugccuaaguggcugcug

SEQ ID NO: 3411159 - RNA, 22 nt, Human
ugccuaauaugaugacuguuuu

SEQ ID NO: 3411160 - RNA, 15 nt, Human
ugccuacauuaucua

SEQ ID NO: 3411161 - RNA, 23 nt, Human
ugccuaccaauauuuaaucuuuu

SEQ ID NO: 3411162 - RNA, 12 nt, Human
ugccuacugcau

SEQ ID NO: 3411163 - RNA, 13 nt, Human
ugccuagaaacaa

SEQ ID NO: 3411164 - RNA, 19 nt, Human
ugccuagaaacaacacugu

SEQ ID NO: 3411165 - RNA, 22 nt, Human
ugccuagaaacaacacuguagu

SEQ ID NO: 3411166 - RNA, 23 nt, Human
ugccuagaaacaacacuguagua

SEQ ID NO: 3411167 - RNA, 17 nt, Human
ugccuagauucagggaa

SEQ ID NO: 3411168 - RNA, 19 nt, Human
ugccuagcaagcuggccuc

SEQ ID NO: 3411169 - RNA, 18 nt, Human
ugccuaggauugugccug

SEQ ID NO: 3411170 - RNA, 17 nt, Human
ugccuagggccuggucc

SEQ ID NO: 3411171 - RNA, 16 nt, Human
ugccuaguuuuuagua

SEQ ID NO: 3411172 - RNA, 17 nt, Human
ugccuauaagccaaaau

SEQ ID NO: 3411173 - RNA, 14 nt, Human
ugccuauaguccca

SEQ ID NO: 3411174 - RNA, 21 nt, Human
ugccuauaugagaagaauagc

SEQ ID NO: 3411175 - RNA, 23 nt, Human
ugccuauccugcuguucuagcac

SEQ ID NO: 3411176 - RNA, 17 nt, Human
ugccuauugcuagagcu

SEQ ID NO: 3411177 - RNA, 15 nt, Human
ugccuauuguaauau

SEQ ID NO: 3411178 - RNA, 14 nt, Human
ugccuauuugugug

SEQ ID NO: 3411179 - RNA, 12 nt, Human
ugccucaaauaa

SEQ ID NO: 3411180 - RNA, 22 nt, Human
ugccucaaauaaaaagugcuuu

SEQ ID NO: 3411181 - RNA, 14 nt, Human
ugccucaaccuccc

SEQ ID NO: 3411182 - RNA, 14 nt, Human
ugccucaagagaag

SEQ ID NO: 3411183 - RNA, 15 nt, Human
ugccucaagagaagg

SEQ ID NO: 3411184 - RNA, 18 nt, Human
ugccucaagaggaaugaa

SEQ ID NO: 3411185 - RNA, 13 nt, Human
ugccucaaugcca

SEQ ID NO: 3411186 - RNA, 16 nt, Human
ugccucaaugccagua

SEQ ID NO: 3411187 - RNA, 20 nt, Human
ugccucacccacccuuuuuu

SEQ ID NO: 3411188 - RNA, 15 nt, Human
ugccucaccgcuucc

SEQ ID NO: 3411189 - RNA, 16 nt, Human
ugccucaccgcuuccc

SEQ ID NO: 3411190 - RNA, 15 nt, Human
ugccucacuaauuuu

SEQ ID NO: 3411191 - RNA, 18 nt, Human
ugccucacuaauuuuugu

SEQ ID NO: 3411192 - RNA, 12 nt, Human
ugccucagaacg

SEQ ID NO: 3411193 - RNA, 18 nt, Human
ugccucagagaccagggc

SEQ ID NO: 3411194 - RNA, 19 nt, Human
ugccucagcccugacccug

SEQ ID NO: 3411195 - RNA, 12 nt, Human
ugccucagccuc

SEQ ID NO: 3411196 - RNA, 14 nt, Human
ugccucagccuccc

SEQ ID NO: 3411197 - RNA, 14 nt, Human
ugccucagccuccg

SEQ ID NO: 3411198 - RNA, 17 nt, Human
ugccucagccuccugag

SEQ ID NO: 3411199 - RNA, 16 nt, Human
ugccucaggccucugu

SEQ ID NO: 3411200 - RNA, 12 nt, Human
ugccucagguuc

SEQ ID NO: 3411201 - RNA, 21 nt, Human
ugccucaguauauuuaaacuc

SEQ ID NO: 3411202 - RNA, 19 nt, Human
ugccucaguguauuuguau

SEQ ID NO: 3411203 - RNA, 20 nt, Human
ugccucaucuauaacaugca

SEQ ID NO: 3411204 - RNA, 21 nt, Human
ugccucauuuuagaaccacca

SEQ ID NO: 3411205 - RNA, 16 nt, Human
ugccucauuuuuuucc

SEQ ID NO: 3411206 - RNA, 17 nt, Human
ugccuccaccaccacug

SEQ ID NO: 3411207 - RNA, 12 nt, Human
ugccuccacccu

SEQ ID NO: 3411208 - RNA, 13 nt, Human
ugccuccacccuc

SEQ ID NO: 3411209 - RNA, 15 nt, Human
ugccuccacccucug

SEQ ID NO: 3411210 - RNA, 16 nt, Human
ugccuccacccucuga

SEQ ID NO: 3411211 - RNA, 17 nt, Human
ugccuccacccucugag

SEQ ID NO: 3411212 - RNA, 13 nt, Human
ugccuccaccgcu

SEQ ID NO: 3411213 - RNA, 16 nt, Human
ugccuccaccgcugcc

SEQ ID NO: 3411214 - RNA, 19 nt, Human
ugccuccacucccacuucc

SEQ ID NO: 3411215 - RNA, 20 nt, Human
ugccuccacucccacuuccc

SEQ ID NO: 3411216 - RNA, 19 nt, Human
ugccuccaggaaccacacc

SEQ ID NO: 3411217 - RNA, 17 nt, Human
ugccuccagggcuggac

SEQ ID NO: 3411218 - RNA, 20 nt, Human
ugccuccagggcuggacuga

SEQ ID NO: 3411219 - RNA, 21 nt, Human
ugccuccagggcuggacugag

SEQ ID NO: 3411220 - RNA, 13 nt, Human
ugccuccaggugu

SEQ ID NO: 3411221 - RNA, 15 nt, Human
uggaauauuguccau

SEQ ID NO: 3411222 - RNA, 20 nt, Human
uggaauauuguccauugucc

SEQ ID NO: 3411223 - RNA, 16 nt, Human
uggaaucagcucagga

SEQ ID NO: 3411224 - RNA, 12 nt, Human
uggaaucuggag

SEQ ID NO: 3411225 - RNA, 13 nt, Human
uggaaucuggaga

SEQ ID NO: 3411226 - RNA, 17 nt, Human
uggaaucuggagaccag

SEQ ID NO: 3411227 - RNA, 15 nt, Human
uggaaucuggagagc

SEQ ID NO: 3411228 - RNA, 18 nt, Human
uggaaugaauuaaauaaa

SEQ ID NO: 3411229 - RNA, 20 nt, Human
uggaaugaugggucaguugu

SEQ ID NO: 3411230 - RNA, 17 nt, Human
uggaaugcuuccuagaa

SEQ ID NO: 3411231 - RNA, 15 nt, Human
uggaauggacauccu

SEQ ID NO: 3411232 - RNA, 22 nt, Human
uggaaugguacaugucuuccau

SEQ ID NO: 3411233 - RNA, 18 nt, Human
uggaaugguuauaaaagu

SEQ ID NO: 3411234 - RNA, 16 nt, Human
uggaaugguuugggaa

SEQ ID NO: 3411235 - RNA, 14 nt, Human
uggaauguaaucaa

SEQ ID NO: 3411236 - RNA, 21 nt, Human
uggaauguggccccugaacaa

SEQ ID NO: 3411237 - RNA, 21 nt, Human
uggaauuaaaaggauaguauu

SEQ ID NO: 3411238 - RNA, 16 nt, Human
uggaauuaaccuggug

SEQ ID NO: 3411239 - RNA, 19 nt, Human
uggaauuaaccuggugcug

SEQ ID NO: 3411240 - RNA, 20 nt, Human
uggaauuagcuuggggccag

SEQ ID NO: 3411241 - RNA, 17 nt, Human
uggaauuauuuuaaaag

SEQ ID NO: 3411242 - RNA, 19 nt, Human
uggaauuccauuugaggau

SEQ ID NO: 3411243 - RNA, 12 nt, Human
uggaauugauuu

SEQ ID NO: 3411244 - RNA, 15 nt, Human
uggaauugauuugca

SEQ ID NO: 3411245 - RNA, 18 nt, Human
uggaauugauuugcauug

SEQ ID NO: 3411246 - RNA, 22 nt, Human
uggaauugauuugcauugaaca

SEQ ID NO: 3411247 - RNA, 15 nt, Human
uggaauugccagcug

SEQ ID NO: 3411248 - RNA, 18 nt, Human
uggaauuggagcucgugg

SEQ ID NO: 3411249 - RNA, 22 nt, Human
uggaauuggguggggggcuuca

SEQ ID NO: 3411250 - RNA, 19 nt, Human
uggaauuuaccaguuaauu

SEQ ID NO: 3411251 - RNA, 22 nt, Human
uggaauuucuuguuucuccaga

SEQ ID NO: 3411252 - RNA, 17 nt, Human
uggaauuugccugcugg

SEQ ID NO: 3411253 - RNA, 16 nt, Human
uggaauuuguaaguuu

SEQ ID NO: 3411254 - RNA, 12 nt, Human
uggaauuuuuca

SEQ ID NO: 3411255 - RNA, 18 nt, Human
uggacaaacuggagucug

SEQ ID NO: 3411256 - RNA, 15 nt, Human
uggacaaaucacaua

SEQ ID NO: 3411257 - RNA, 21 nt, Human
uggacaaaucacauauuuuaa

SEQ ID NO: 3411258 - RNA, 13 nt, Human
uggacaaauguga

SEQ ID NO: 3411259 - RNA, 18 nt, Human
uggacaaaugugaagaug

SEQ ID NO: 3411260 - RNA, 21 nt, Human
uggacaaaugugaagaugcau

SEQ ID NO: 3411261 - RNA, 22 nt, Human
uggacaagcagagguggccaga

SEQ ID NO: 3411262 - RNA, 16 nt, Human
uggacaagcuucugag

SEQ ID NO: 3411263 - RNA, 19 nt, Human
uggacaagcuucugagacg

SEQ ID NO: 3411264 - RNA, 13 nt, Human
uggacaaggaggu

SEQ ID NO: 3411265 - RNA, 20 nt, Human
uggacacacacagacuauuu

SEQ ID NO: 3411266 - RNA, 21 nt, Human
uggacacagcucuucuccagg

SEQ ID NO: 3411267 - RNA, 22 nt, Human
uggacaccccuuauccaggacu

SEQ ID NO: 3411268 - RNA, 10 nt, Human
uggacaccug

SEQ ID NO: 3411269 - RNA, 11 nt, Human
uggacaccugc

SEQ ID NO: 3411270 - RNA, 15 nt, Human
uggacaccugcccug

SEQ ID NO: 3411271 - RNA, 17 nt, Human
uggacacuacacccagc

SEQ ID NO: 3411272 - RNA, 20 nt, Human
uggacacuacacccagcaau

SEQ ID NO: 3411273 - RNA, 16 nt, Human
uggacacucagaccug

SEQ ID NO: 3411274 - RNA, 23 nt, Human
uggacacuccagggacacacagc

SEQ ID NO: 3411275 - RNA, 23 nt, Human
uggacacuuuucaccuccuucaa

SEQ ID NO: 3411276 - RNA, 15 nt, Human
uggacagaagcagcu

SEQ ID NO: 3411277 - RNA, 17 nt, Human
uggacagaagcagcucu

SEQ ID NO: 3411278 - RNA, 18 nt, Human
uggacagaagcagcucuu

SEQ ID NO: 3411279 - RNA, 18 nt, Human
uggacagaggggacucug

SEQ ID NO: 3411280 - RNA, 21 nt, Human
uggacagauugccuguuucug

SEQ ID NO: 3411281 - RNA, 21 nt, Human
uggacagcaaaaccauugcuu

SEQ ID NO: 3411282 - RNA, 14 nt, Human
uggacagcugugcc

SEQ ID NO: 3411283 - RNA, 23 nt, Human
uggacaggacuaacacucagaag

SEQ ID NO: 3411284 - RNA, 13 nt, Human
uggacaggaugug

SEQ ID NO: 3411285 - RNA, 17 nt, Human
uggacaggcauguucuc

SEQ ID NO: 3411286 - RNA, 18 nt, Human
uggacaggcauguucucu

SEQ ID NO: 3411287 - RNA, 22 nt, Human
uggacaggcauguucucugagg

SEQ ID NO: 3411288 - RNA, 16 nt, Human
uggacaggucugggag

SEQ ID NO: 3411289 - RNA, 21 nt, Human
uggacaguaucacugucuuuc

SEQ ID NO: 3411290 - RNA, 20 nt, Human
uggacagucacugccacuuu

SEQ ID NO: 3411291 - RNA, 20 nt, Human
uggacaguucacacccugca

SEQ ID NO: 3411292 - RNA, 23 nt, Human
uggacaguuuaccaguugccuuu

SEQ ID NO: 3411293 - RNA, 20 nt, Human
uggacauaacugacuuaguu

SEQ ID NO: 3411294 - RNA, 14 nt, Human
uggacauagagagg

SEQ ID NO: 3411295 - RNA, 22 nt, Human
uggacauagauauuuucacaau

SEQ ID NO: 3411296 - RNA, 23 nt, Human
uggacauccuccucccacccggc

SEQ ID NO: 3411297 - RNA, 18 nt, Human
uggacauccucuucugcu

SEQ ID NO: 3411298 - RNA, 16 nt, Human
uggacaugagauaaug

SEQ ID NO: 3411299 - RNA, 19 nt, Human
uggacaugcacagcuaaca

SEQ ID NO: 3411300 - RNA, 12 nt, Human
uggacauggccc

SEQ ID NO: 3411301 - RNA, 23 nt, Human
uggacauuaagcaucacaaauga

SEQ ID NO: 3411302 - RNA, 18 nt, Human
uggacauuucuaauuccu

SEQ ID NO: 3411303 - RNA, 17 nt, Human
uggacauuugccuugcu

SEQ ID NO: 3411304 - RNA, 15 nt, Human
uggaccaaaaaccag

SEQ ID NO: 3411305 - RNA, 20 nt, Human
uggaccacugcaugagcuuu

SEQ ID NO: 3411306 - RNA, 19 nt, Human
uggaccacugggcaaugau

SEQ ID NO: 3411307 - RNA, 20 nt, Human
uggaccacuguuucuugcuu

SEQ ID NO: 3411308 - RNA, 22 nt, Human
uggaccagccucuccacucaug

SEQ ID NO: 3411309 - RNA, 17 nt, Human
uggaccaguggugccuu

SEQ ID NO: 3411310 - RNA, 23 nt, Human
uggaccaugcugucuggcacagc

SEQ ID NO: 3411311 - RNA, 15 nt, Human
uggaccauuuuccug

SEQ ID NO: 3411312 - RNA, 20 nt, Human
uggacccagggaugacaugu

SEQ ID NO: 3411313 - RNA, 13 nt, Human
uggaccccagcug

SEQ ID NO: 3411314 - RNA, 20 nt, Human
uggaccccagcugggaggca

SEQ ID NO: 3411315 - RNA, 18 nt, Human
uggaccccaucugugaau

SEQ ID NO: 3411316 - RNA, 20 nt, Human
uggaccccccuuucacaggc

SEQ ID NO: 3411317 - RNA, 19 nt, Human
uggacccgcucuggaccaa

SEQ ID NO: 3411318 - RNA, 20 nt, Human
uggacccguucaugggggag

SEQ ID NO: 3411319 - RNA, 21 nt, Human
uggacccguucaugggggagg

SEQ ID NO: 3411320 - RNA, 15 nt, Human
uggacccugaaaugu

SEQ ID NO: 3411321 - RNA, 13 nt, Human
uggacccugacca

SEQ ID NO: 3411322 - RNA, 15 nt, Human
uggacccugaccagc

SEQ ID NO: 3411323 - RNA, 13 nt, Human
uggacccugaggc

SEQ ID NO: 3411324 - RNA, 14 nt, Human
uggacccugaggcc

SEQ ID NO: 3411325 - RNA, 15 nt, Human
uggacccugaggccc

SEQ ID NO: 3411326 - RNA, 16 nt, Human
uggacccugaggccca

SEQ ID NO: 3411327 - RNA, 18 nt, Human
uggacccugaggcccaga

SEQ ID NO: 3411328 - RNA, 14 nt, Human
uggacccuguugcu

SEQ ID NO: 3411329 - RNA, 19 nt, Human
uggaccgcccuuuuccccu

SEQ ID NO: 3411330 - RNA, 17 nt, Human
uggaccuaaauggccuc

SEQ ID NO: 3411331 - RNA, 17 nt, Human
uggaccuaacauucgau

SEQ ID NO: 3411332 - RNA, 14 nt, Human
uggaccuaauccaa

SEQ ID NO: 3411333 - RNA, 19 nt, Human
uggaccuauguccuaagga

SEQ ID NO: 3411334 - RNA, 22 nt, Human
uggaccuauguccuaaggacac

SEQ ID NO: 3411335 - RNA, 15 nt, Human
uggaccucaccaagc

SEQ ID NO: 3411336 - RNA, 13 nt, Human
uggaccucugaca

SEQ ID NO: 3411337 - RNA, 14 nt, Human
uggaccucugacag

SEQ ID NO: 3411338 - RNA, 15 nt, Human
uggaccucugacagc

SEQ ID NO: 3411339 - RNA, 16 nt, Human
uggaccucugcucuga

SEQ ID NO: 3411340 - RNA, 17 nt, Human
uggaccugccuccugcc

SEQ ID NO: 3411341 - RNA, 18 nt, Human
uggaccugccuccugccu

SEQ ID NO: 3411342 - RNA, 19 nt, Human
uggaccugccuccugccug

SEQ ID NO: 3411343 - RNA, 14 nt, Human
uggaccugccugca

SEQ ID NO: 3411344 - RNA, 22 nt, Human
uggaccuuacgaucaggcacag

SEQ ID NO: 3411345 - RNA, 15 nt, Human
uggaccuuaggccuu

SEQ ID NO: 3411346 - RNA, 21 nt, Human
uggaccuuaggccuuccucuc

SEQ ID NO: 3411347 - RNA, 13 nt, Human
uggaccuuccugc

SEQ ID NO: 3411348 - RNA, 14 nt, Human
uggaccuuccugcc

SEQ ID NO: 3411349 - RNA, 15 nt, Human
uggaccuuuuaaagu

SEQ ID NO: 3411350 - RNA, 21 nt, Human
uggaccuuuuaaaguguuuca

SEQ ID NO: 3411351 - RNA, 15 nt, Human
uggacggcaggcuca

SEQ ID NO: 3411352 - RNA, 15 nt, Human
uggacggcugggcac

SEQ ID NO: 3411353 - RNA, 13 nt, Human
uggacuaaaagau

SEQ ID NO: 3411354 - RNA, 22 nt, Human
uggacuaaaagauauaagugcu

SEQ ID NO: 3411355 - RNA, 16 nt, Human
uggacuaaaugccuag

SEQ ID NO: 3411356 - RNA, 22 nt, Human
uggacuaaccccaacgcacagg

SEQ ID NO: 3411357 - RNA, 20 nt, Human
uggacuaacuugucuuugga

SEQ ID NO: 3411358 - RNA, 14 nt, Human
uggacuaucugucu

SEQ ID NO: 3411359 - RNA, 17 nt, Human
uggacuaucugucuggu

SEQ ID NO: 3411360 - RNA, 20 nt, Human
uggacuaucugucugguggc

SEQ ID NO: 3411361 - RNA, 22 nt, Human
uggacuaucugucugguggccc

SEQ ID NO: 3411362 - RNA, 18 nt, Human
uggacuauuauaauuuaa

SEQ ID NO: 3411363 - RNA, 17 nt, Human
uggacucaaucccuagg

SEQ ID NO: 3411364 - RNA, 16 nt, Human
uggacucaggaugccc

SEQ ID NO: 3411365 - RNA, 22 nt, Human
uggagcccagggcaucuugcug

SEQ ID NO: 3411366 - RNA, 15 nt, Human
uggagccccacacug

SEQ ID NO: 3411367 - RNA, 12 nt, Human
uggagccccagc

SEQ ID NO: 3411368 - RNA, 16 nt, Human
uggagccccagccccc

SEQ ID NO: 3411369 - RNA, 22 nt, Human
uggagccccagcccccuuuggg

SEQ ID NO: 3411370 - RNA, 13 nt, Human
uggagccccaggg

SEQ ID NO: 3411371 - RNA, 15 nt, Human
uggagccccugggug

SEQ ID NO: 3411372 - RNA, 17 nt, Human
uggagcccgaggcacca

SEQ ID NO: 3411373 - RNA, 19 nt, Human
uggagcccgaggcaccagu

SEQ ID NO: 3411374 - RNA, 17 nt, Human
uggagcccgcaccccca

SEQ ID NO: 3411375 - RNA, 17 nt, Human
uggagcccuccgccuuc

SEQ ID NO: 3411376 - RNA, 19 nt, Human
uggagcccuccgccuucac

SEQ ID NO: 3411377 - RNA, 16 nt, Human
uggagcccuggagacc

SEQ ID NO: 3411378 - RNA, 22 nt, Human
uggagccuagagugagggccug

SEQ ID NO: 3411379 - RNA, 20 nt, Human
uggagccuccacugccucug

SEQ ID NO: 3411380 - RNA, 22 nt, Human
uggagccugagucagggcccag

SEQ ID NO: 3411381 - RNA, 14 nt, Human
uggagccuggcaca

SEQ ID NO: 3411382 - RNA, 14 nt, Human
uggagccuggugcc

SEQ ID NO: 3411383 - RNA, 17 nt, Human
uggagccuguguaacag

SEQ ID NO: 3411384 - RNA, 23 nt, Human
uggagcgagcaucccccaaaguu

SEQ ID NO: 3411385 - RNA, 22 nt, Human
uggagcgcaccugcccccuggu

SEQ ID NO: 3411386 - RNA, 16 nt, Human
uggagcguggacuggu

SEQ ID NO: 3411387 - RNA, 13 nt, Human
uggagcuccuggg

SEQ ID NO: 3411388 - RNA, 17 nt, Human
uggagcuccugggaagg

SEQ ID NO: 3411389 - RNA, 17 nt, Human
uggagcugagccucuca

SEQ ID NO: 3411390 - RNA, 13 nt, Human
uggagcugccuga

SEQ ID NO: 3411391 - RNA, 15 nt, Human
uggagcugccugaua

SEQ ID NO: 3411392 - RNA, 17 nt, Human
uggagcuuaagccacug

SEQ ID NO: 3411393 - RNA, 18 nt, Human
uggagcuuaagccacugc

SEQ ID NO: 3411394 - RNA, 21 nt, Human
uggagcuucauggcagaaggc

SEQ ID NO: 3411395 - RNA, 14 nt, Human
uggagcuuuuuucc

SEQ ID NO: 3411396 - RNA, 14 nt, Human
uggaggaaagcaac

SEQ ID NO: 3411397 - RNA, 19 nt, Human
uggaggaacaacucuccag

SEQ ID NO: 3411398 - RNA, 20 nt, Human
uggaggaacaaucggcugca

SEQ ID NO: 3411399 - RNA, 15 nt, Human
uggaggaagaacuga

SEQ ID NO: 3411400 - RNA, 12 nt, Human
uggaggaaggaa

SEQ ID NO: 3411401 - RNA, 18 nt, Human
uggaggaaggaaacccag

SEQ ID NO: 3411402 - RNA, 15 nt, Human
uggaggaccugagcc

SEQ ID NO: 3411403 - RNA, 16 nt, Human
uggaggagagccuggu

SEQ ID NO: 3411404 - RNA, 14 nt, Human
uggaggagcaaagg

SEQ ID NO: 3411405 - RNA, 18 nt, Human
uggaggagcaaaggcuga

SEQ ID NO: 3411406 - RNA, 20 nt, Human
uggaggagcaaaggcugaga

SEQ ID NO: 3411407 - RNA, 22 nt, Human
uggaggagcagugcaggcacag

SEQ ID NO: 3411408 - RNA, 19 nt, Human
uggaggagcccaggccagg

SEQ ID NO: 3411409 - RNA, 22 nt, Human
uggaggagcccaggccaggacu

SEQ ID NO: 3411410 - RNA, 21 nt, Human
uggaggaggaaggcaagaggg

SEQ ID NO: 3411411 - RNA, 13 nt, Human
uggaggaggaggc

SEQ ID NO: 3411412 - RNA, 15 nt, Human
uggaggaggccuggg

SEQ ID NO: 3411413 - RNA, 15 nt, Human
uggaggauggagaga

SEQ ID NO: 3411414 - RNA, 19 nt, Human
uggaggcacacagcugcag

SEQ ID NO: 3411415 - RNA, 14 nt, Human
uggaggcacuuuag

SEQ ID NO: 3411416 - RNA, 19 nt, Human
uggaggcaggggcuuccug

SEQ ID NO: 3411417 - RNA, 20 nt, Human
uggaggcaggggcuuccugg

SEQ ID NO: 3411418 - RNA, 21 nt, Human
uggaggccacuguuuggaaau

SEQ ID NO: 3411419 - RNA, 15 nt, Human
uggaggccagccagu

SEQ ID NO: 3411420 - RNA, 14 nt, Human
uggaggccaggaau

SEQ ID NO: 3411421 - RNA, 22 nt, Human
uggaggccauugugugagccua

SEQ ID NO: 3411422 - RNA, 12 nt, Human
uggaggcccagg

SEQ ID NO: 3411423 - RNA, 14 nt, Human
uggaggcccaggcu

SEQ ID NO: 3411424 - RNA, 18 nt, Human
uggaggcccaggcuggga

SEQ ID NO: 3411425 - RNA, 18 nt, Human
uggaggccccaacccugu

SEQ ID NO: 3411426 - RNA, 17 nt, Human
uggaggccccuggagcc

SEQ ID NO: 3411427 - RNA, 16 nt, Human
uggaggcccuccugug

SEQ ID NO: 3411428 - RNA, 14 nt, Human
uggaggccucaggu

SEQ ID NO: 3411429 - RNA, 17 nt, Human
uggaggccuuccagcug

SEQ ID NO: 3411430 - RNA, 18 nt, Human
uggaggcggugcggcagg

SEQ ID NO: 3411431 - RNA, 14 nt, Human
uggaggcucaaauu

SEQ ID NO: 3411432 - RNA, 13 nt, Human
uggaggcuuccug

SEQ ID NO: 3411433 - RNA, 20 nt, Human
uggagggaaacaccaaacuc

SEQ ID NO: 3411434 - RNA, 12 nt, Human
uggagggaaagc

SEQ ID NO: 3411435 - RNA, 11 nt, Human
uggagggaagc

SEQ ID NO: 3411436 - RNA, 12 nt, Human
uggagggaagcc

SEQ ID NO: 3411437 - RNA, 19 nt, Human
uggagggaaugaaccugga

SEQ ID NO: 3411438 - RNA, 20 nt, Human
uggagggaaugaaccuggag

SEQ ID NO: 3411439 - RNA, 11 nt, Human
uggagggaggc

SEQ ID NO: 3411440 - RNA, 13 nt, Human
uggagggaggccc

SEQ ID NO: 3411441 - RNA, 12 nt, Human
uggagggccugg

SEQ ID NO: 3411442 - RNA, 20 nt, Human
uggagggcuagaaccuggag

SEQ ID NO: 3411443 - RNA, 22 nt, Human
uggagggcuagaaccuggagag

SEQ ID NO: 3411444 - RNA, 23 nt, Human
uggagggcuagaaccuggagagc

SEQ ID NO: 3411445 - RNA, 21 nt, Human
uggagggcuagaaccuggagg

SEQ ID NO: 3411446 - RNA, 20 nt, Human
uggagggcuagaacuggaga

SEQ ID NO: 3411447 - RNA, 23 nt, Human
uggagggcuagaaucuggagagc

SEQ ID NO: 3411448 - RNA, 22 nt, Human
uggagggcuggaaucuggagag

SEQ ID NO: 3411449 - RNA, 13 nt, Human
uggaggggcagag

SEQ ID NO: 3411450 - RNA, 18 nt, Human
uggaggggcagagccagg

SEQ ID NO: 3411451 - RNA, 21 nt, Human
uggaggggcagagccaggaag

SEQ ID NO: 3411452 - RNA, 19 nt, Human
uggagggggaauggcagca

SEQ ID NO: 3411453 - RNA, 17 nt, Human
uggagggguguggcagu

SEQ ID NO: 3411454 - RNA, 19 nt, Human
uggagggguguggcagugg

SEQ ID NO: 3411455 - RNA, 23 nt, Human
uggagggguguggcuccuuccca

SEQ ID NO: 3411456 - RNA, 17 nt, Human
uggagggucccaagcug

SEQ ID NO: 3411457 - RNA, 22 nt, Human
uggagggucccaagcugggccc

SEQ ID NO: 3411458 - RNA, 20 nt, Human
uggaggugccagcaaagccc

SEQ ID NO: 3411459 - RNA, 17 nt, Human
uggaggugggguuggga

SEQ ID NO: 3411460 - RNA, 18 nt, Human
uggaggugucaggcugcu

SEQ ID NO: 3411461 - RNA, 21 nt, Human
uggagguuaaggcugaggaaa

SEQ ID NO: 3411462 - RNA, 13 nt, Human
uggagguucuaag

SEQ ID NO: 3411463 - RNA, 17 nt, Human
uggagguugaagccaag

SEQ ID NO: 3411464 - RNA, 21 nt, Human
uggagguugcagugagccaag

SEQ ID NO: 3411465 - RNA, 15 nt, Human
uggagguuucauacu

SEQ ID NO: 3411466 - RNA, 13 nt, Human
uggaguagaaugu

SEQ ID NO: 3411467 - RNA, 14 nt, Human
uggaguaugucuga

SEQ ID NO: 3411468 - RNA, 22 nt, Human
uggagucaugguccgguguccu

SEQ ID NO: 3411469 - RNA, 15 nt, Human
uggagucauucucau

SEQ ID NO: 3411470 - RNA, 16 nt, Human
uggagucauuucugau

SEQ ID NO: 3411471 - RNA, 17 nt, Human
uggagucauuucugauu

SEQ ID NO: 3411472 - RNA, 15 nt, Human
uggaguccccucacc

SEQ ID NO: 3411473 - RNA, 18 nt, Human
uggaguccgaugauucuc

SEQ ID NO: 3411474 - RNA, 16 nt, Human
uggagucuggaguggg

SEQ ID NO: 3411475 - RNA, 12 nt, Human
uggagugaccaa

SEQ ID NO: 3411476 - RNA, 13 nt, Human
uggaguggcagcc

SEQ ID NO: 3411477 - RNA, 20 nt, Human
uggaguggcagcccagccag

SEQ ID NO: 3411478 - RNA, 13 nt, Human
uggaguggccacu

SEQ ID NO: 3411479 - RNA, 24 nt, Human
uggaguguuucuaauaaacuugga

SEQ ID NO: 3411480 - RNA, 20 nt, Human
uggaguuaacgggugaauaa

SEQ ID NO: 3411481 - RNA, 17 nt, Human
uggaguuacauuaaugu

SEQ ID NO: 3411482 - RNA, 20 nt, Human
uggaguuauugaagcagagu

SEQ ID NO: 3411483 - RNA, 16 nt, Human
uggaguucaucuugaa

SEQ ID NO: 3411484 - RNA, 19 nt, Human
uggaguucucaaagaccug

SEQ ID NO: 3411485 - RNA, 15 nt, Human
uggaguucuugugcc

SEQ ID NO: 3411486 - RNA, 16 nt, Human
uggaguucuugugcca

SEQ ID NO: 3411487 - RNA, 15 nt, Human
uggaguugaucugga

SEQ ID NO: 3411488 - RNA, 22 nt, Human
uggaguugaucuggaacccaga

SEQ ID NO: 3411489 - RNA, 17 nt, Human
uggaguugguggugcug

SEQ ID NO: 3411490 - RNA, 13 nt, Human
uggaguuucuaag

SEQ ID NO: 3411491 - RNA, 17 nt, Human
uggaguuuuaacuguaa

SEQ ID NO: 3411492 - RNA, 20 nt, Human
uggaguuuuguuuccucugu

SEQ ID NO: 3411493 - RNA, 15 nt, Human
uggauaaagccacug

SEQ ID NO: 3411494 - RNA, 15 nt, Human
uggauaacuuccaca

SEQ ID NO: 3411495 - RNA, 21 nt, Human
uggauaacuuccacagggucc

SEQ ID NO: 3411496 - RNA, 14 nt, Human
uggauaauuuugca

SEQ ID NO: 3411497 - RNA, 19 nt, Human
uggauacagcaguagacau

SEQ ID NO: 3411498 - RNA, 14 nt, Human
uggauacauaaaga

SEQ ID NO: 3411499 - RNA, 13 nt, Human
uggauaccauuau

SEQ ID NO: 3411500 - RNA, 17 nt, Human
uggauacugcccggggc

SEQ ID NO: 3411501 - RNA, 23 nt, Human
uggauagaacaugggauacuuua

SEQ ID NO: 3411502 - RNA, 13 nt, Human
uggauagcuaaua

SEQ ID NO: 3411503 - RNA, 21 nt, Human
uggauauagcuaggugacaua

SEQ ID NO: 3411504 - RNA, 16 nt, Human
uggauauaguuuuacu

SEQ ID NO: 3411505 - RNA, 17 nt, Human
uggauauguaaaacauu

SEQ ID NO: 3411506 - RNA, 13 nt, Human
uggauauuuguau

SEQ ID NO: 3411507 - RNA, 22 nt, Human
uggaucaaaaucuguagagcag

SEQ ID NO: 3411508 - RNA, 15 nt, Human
uggaucacaaagugg

SEQ ID NO: 3411509 - RNA, 15 nt, Human
uggaucacagcugcu

SEQ ID NO: 3411510 - RNA, 22 nt, Human
uggccacagcccauccauagua

SEQ ID NO: 3411511 - RNA, 23 nt, Human
uggccacagcccauccauaguaa

SEQ ID NO: 3411512 - RNA, 13 nt, Human
uggccacagcgcc

SEQ ID NO: 3411513 - RNA, 18 nt, Human
uggccacagcgccagccu

SEQ ID NO: 3411514 - RNA, 17 nt, Human
uggccacaguagucuug

SEQ ID NO: 3411515 - RNA, 18 nt, Human
uggccaccaccccccacu

SEQ ID NO: 3411516 - RNA, 17 nt, Human
uggccaccaggcuggcg

SEQ ID NO: 3411517 - RNA, 22 nt, Human
uggccaccaggcuggcgcagcc

SEQ ID NO: 3411518 - RNA, 11 nt, Human
uggccaccagu

SEQ ID NO: 3411519 - RNA, 22 nt, Human
uggccacccguucugcuggccu

SEQ ID NO: 3411520 - RNA, 23 nt, Human
uggccaccugaggugggcccagg

SEQ ID NO: 3411521 - RNA, 19 nt, Human
uggccacgcagccaggaca

SEQ ID NO: 3411522 - RNA, 20 nt, Human
uggccacgcagccaggacac

SEQ ID NO: 3411523 - RNA, 13 nt, Human
uggccacucagcu

SEQ ID NO: 3411524 - RNA, 17 nt, Human
uggccacuccagacccc

SEQ ID NO: 3411525 - RNA, 21 nt, Human
uggccacuccagaccccuggc

SEQ ID NO: 3411526 - RNA, 14 nt, Human
uggccacuccgaga

SEQ ID NO: 3411527 - RNA, 18 nt, Human
uggccacuccgagaggug

SEQ ID NO: 3411528 - RNA, 14 nt, Human
uggccacugcuccc

SEQ ID NO: 3411529 - RNA, 21 nt, Human
uggccacuugggucuucccug

SEQ ID NO: 3411530 - RNA, 16 nt, Human
uggccagaagucaagc

SEQ ID NO: 3411531 - RNA, 17 nt, Human
uggccagaccagagcuc

SEQ ID NO: 3411532 - RNA, 23 nt, Human
uggccagaccagagcucuggagc

SEQ ID NO: 3411533 - RNA, 24 nt, Human
uggccagagcugggaggcauggcc

SEQ ID NO: 3411534 - RNA, 17 nt, Human
uggccagauggcccgga

SEQ ID NO: 3411535 - RNA, 13 nt, Human
uggccagcagcac

SEQ ID NO: 3411536 - RNA, 18 nt, Human
uggccagcagcaccugcc

SEQ ID NO: 3411537 - RNA, 21 nt, Human
uggccagcagcaccugcccua

SEQ ID NO: 3411538 - RNA, 12 nt, Human
uggccagcagcu

SEQ ID NO: 3411539 - RNA, 13 nt, Human
uggccagcagcuu

SEQ ID NO: 3411540 - RNA, 20 nt, Human
uggccagccccacagcccac

SEQ ID NO: 3411541 - RNA, 16 nt, Human
uggccagccccuuaga

SEQ ID NO: 3411542 - RNA, 14 nt, Human
uggccagcccggcu

SEQ ID NO: 3411543 - RNA, 19 nt, Human
uggccagcccggcugguuu

SEQ ID NO: 3411544 - RNA, 20 nt, Human
uggccagcccggcugguuuu

SEQ ID NO: 3411545 - RNA, 24 nt, Human
uggccagccgcucuccugccacau

SEQ ID NO: 3411546 - RNA, 14 nt, Human
uggccagccuggau

SEQ ID NO: 3411547 - RNA, 18 nt, Human
uggccagccuggggccug

SEQ ID NO: 3411548 - RNA, 21 nt, Human
uggccagccuggggccuggca

SEQ ID NO: 3411549 - RNA, 22 nt, Human
uggccagccuggggccuggcag

SEQ ID NO: 3411550 - RNA, 13 nt, Human
uggccaggaagcu

SEQ ID NO: 3411551 - RNA, 11 nt, Human
uggccaggagc

SEQ ID NO: 3411552 - RNA, 19 nt, Human
uggccaggcagaucugugc

SEQ ID NO: 3411553 - RNA, 13 nt, Human
uggccaggccggg

SEQ ID NO: 3411554 - RNA, 17 nt, Human
uggccaggcugcucuca

SEQ ID NO: 3411555 - RNA, 19 nt, Human
uggccaggcugcucucaaa

SEQ ID NO: 3411556 - RNA, 20 nt, Human
uggccaggcuggucuugaac

SEQ ID NO: 3411557 - RNA, 20 nt, Human
uggccaggcuugucucgaac

SEQ ID NO: 3411558 - RNA, 22 nt, Human
uggccagggccacgcuccagcu

SEQ ID NO: 3411559 - RNA, 23 nt, Human
uggccagggccuggaagacagag

SEQ ID NO: 3411560 - RNA, 13 nt, Human
uggccagggugag

SEQ ID NO: 3411561 - RNA, 18 nt, Human
uggccagggugagagcug

SEQ ID NO: 3411562 - RNA, 19 nt, Human
uggccagggugagagcugc

SEQ ID NO: 3411563 - RNA, 19 nt, Human
uggccagguggccacucca

SEQ ID NO: 3411564 - RNA, 22 nt, Human
uggccaguccacccugccugcc

SEQ ID NO: 3411565 - RNA, 17 nt, Human
uggccaguccaggcugc

SEQ ID NO: 3411566 - RNA, 14 nt, Human
uggccagugcccug

SEQ ID NO: 3411567 - RNA, 21 nt, Human
uggccagugcccugaucccag

SEQ ID NO: 3411568 - RNA, 14 nt, Human
uggccaguggcugg

SEQ ID NO: 3411569 - RNA, 16 nt, Human
uggccaguuaucccuu

SEQ ID NO: 3411570 - RNA, 16 nt, Human
uggccaguuggaacca

SEQ ID NO: 3411571 - RNA, 16 nt, Human
uggccauacugugucc

SEQ ID NO: 3411572 - RNA, 21 nt, Human
uggccauauuuaccucagccu

SEQ ID NO: 3411573 - RNA, 17 nt, Human
uggccaucccugugagg

SEQ ID NO: 3411574 - RNA, 11 nt, Human
uggccaucucu

SEQ ID NO: 3411575 - RNA, 14 nt, Human
uggccaucugcucc

SEQ ID NO: 3411576 - RNA, 14 nt, Human
uggccaugacccug

SEQ ID NO: 3411577 - RNA, 21 nt, Human
uggccaugacccugccucucc

SEQ ID NO: 3411578 - RNA, 14 nt, Human
uggccaugccucag

SEQ ID NO: 3411579 - RNA, 17 nt, Human
uggccaugccucagccc

SEQ ID NO: 3411580 - RNA, 16 nt, Human
uggccauggagaaagc

SEQ ID NO: 3411581 - RNA, 14 nt, Human
uggccauggccugc

SEQ ID NO: 3411582 - RNA, 22 nt, Human
uggccaugggaggccuuucccu

SEQ ID NO: 3411583 - RNA, 14 nt, Human
uggccauguaugaa

SEQ ID NO: 3411584 - RNA, 17 nt, Human
uggccauucuauugugg

SEQ ID NO: 3411585 - RNA, 23 nt, Human
uggccauucuuuuuuucuuggcc

SEQ ID NO: 3411586 - RNA, 16 nt, Human
uggccauuuagccacc

SEQ ID NO: 3411587 - RNA, 19 nt, Human
uggcccaaaacgucuuauu

SEQ ID NO: 3411588 - RNA, 17 nt, Human
uggcccaaggcuggcag

SEQ ID NO: 3411589 - RNA, 19 nt, Human
uggcccaccaggccccccu

SEQ ID NO: 3411590 - RNA, 19 nt, Human
uggcccaccccacccacuu

SEQ ID NO: 3411591 - RNA, 20 nt, Human
uggcccacgccuguaauccc

SEQ ID NO: 3411592 - RNA, 14 nt, Human
uggcccagcccugc

SEQ ID NO: 3411593 - RNA, 15 nt, Human
uggcccagcccugcu

SEQ ID NO: 3411594 - RNA, 15 nt, Human
uggcccagccggccu

SEQ ID NO: 3411595 - RNA, 22 nt, Human
uggcccagccggccucucuggc

SEQ ID NO: 3411596 - RNA, 12 nt, Human
uggcccagccuu

SEQ ID NO: 3411597 - RNA, 13 nt, Human
uggcccagccuuu

SEQ ID NO: 3411598 - RNA, 14 nt, Human
uggcccagcggccc

SEQ ID NO: 3411599 - RNA, 16 nt, Human
uggcccagcggccccu

SEQ ID NO: 3411600 - RNA, 12 nt, Human
uggcccagcucc

SEQ ID NO: 3411601 - RNA, 15 nt, Human
uggcccagcucccca

SEQ ID NO: 3411602 - RNA, 11 nt, Human
uggcccaggag

SEQ ID NO: 3411603 - RNA, 13 nt, Human
uggcccaggaguu

SEQ ID NO: 3411604 - RNA, 20 nt, Human
uggcccaggaguuuggccag

SEQ ID NO: 3411605 - RNA, 14 nt, Human
uggcccagggcauc

SEQ ID NO: 3411606 - RNA, 15 nt, Human
uggcccagggcccag

SEQ ID NO: 3411607 - RNA, 17 nt, Human
uggcccaggguggccac

SEQ ID NO: 3411608 - RNA, 15 nt, Human
uggcccaguccucuc

SEQ ID NO: 3411609 - RNA, 22 nt, Human
uggcccauagaaacaugacacu

SEQ ID NO: 3411610 - RNA, 22 nt, Human
uggcccaucaggguaggcugga

SEQ ID NO: 3411611 - RNA, 22 nt, Human
uggcccaucaguguacccccgc

SEQ ID NO: 3411612 - RNA, 22 nt, Human
uggcccauccccccucaccagg

SEQ ID NO: 3411613 - RNA, 21 nt, Human
uggcccauguauggccaggaa

SEQ ID NO: 3411614 - RNA, 16 nt, Human
uggcccauucuacuug

SEQ ID NO: 3411615 - RNA, 22 nt, Human
uggcccauucuacuugcucugg

SEQ ID NO: 3411616 - RNA, 13 nt, Human
uggccccacccug

SEQ ID NO: 3411617 - RNA, 12 nt, Human
uggccccaccug

SEQ ID NO: 3411618 - RNA, 19 nt, Human
uggccccaccuggcccucu

SEQ ID NO: 3411619 - RNA, 18 nt, Human
uggccccagcacagcuug

SEQ ID NO: 3411620 - RNA, 19 nt, Human
uggccccagcacagcuuga

SEQ ID NO: 3411621 - RNA, 13 nt, Human
uggccccagcccu

SEQ ID NO: 3411622 - RNA, 19 nt, Human
uggccccagcccugcuggg

SEQ ID NO: 3411623 - RNA, 12 nt, Human
uggccccagccu

SEQ ID NO: 3411624 - RNA, 17 nt, Human
uggccccagccuggccc

SEQ ID NO: 3411625 - RNA, 19 nt, Human
uggccccagccuggcccag

SEQ ID NO: 3411626 - RNA, 20 nt, Human
uggccccagccuggcccagc

SEQ ID NO: 3411627 - RNA, 21 nt, Human
uggccccagccuggcccagcu

SEQ ID NO: 3411628 - RNA, 12 nt, Human
uggccccaggac

SEQ ID NO: 3411629 - RNA, 23 nt, Human
uggccccaugucucucagaauuc

SEQ ID NO: 3411630 - RNA, 15 nt, Human
uggcccccacuggcu

SEQ ID NO: 3411631 - RNA, 21 nt, Human
uggcccccacuggcugugggc

SEQ ID NO: 3411632 - RNA, 15 nt, Human
uggcccccgagcugg

SEQ ID NO: 3411633 - RNA, 13 nt, Human
uggcccccugucc

SEQ ID NO: 3411634 - RNA, 16 nt, Human
uggcccccuuucccgg

SEQ ID NO: 3411635 - RNA, 12 nt, Human
uggccccucaac

SEQ ID NO: 3411636 - RNA, 16 nt, Human
uggccccucaccuggg

SEQ ID NO: 3411637 - RNA, 21 nt, Human
uggccccucaccugggcaccu

SEQ ID NO: 3411638 - RNA, 20 nt, Human
uggccccucagggucccugg

SEQ ID NO: 3411639 - RNA, 22 nt, Human
uggccccucagggucccuggug

SEQ ID NO: 3411640 - RNA, 19 nt, Human
uggccccucccccugccag

SEQ ID NO: 3411641 - RNA, 17 nt, Human
uggccccucgccugugg

SEQ ID NO: 3411642 - RNA, 13 nt, Human
uggccccucugac

SEQ ID NO: 3411643 - RNA, 20 nt, Human
uggccccugaacaagaauug

SEQ ID NO: 3411644 - RNA, 14 nt, Human
uggccccugcccgg

SEQ ID NO: 3411645 - RNA, 14 nt, Human
uggccccugccuug

SEQ ID NO: 3411646 - RNA, 12 nt, Human
uggccccugggu

SEQ ID NO: 3411647 - RNA, 11 nt, Human
uggccccuuca

SEQ ID NO: 3411648 - RNA, 19 nt, Human
uggccccuuugggcccugc

SEQ ID NO: 3411649 - RNA, 21 nt, Human
uggccccuuugggcccugcau

SEQ ID NO: 3411650 - RNA, 16 nt, Human
uggcccgacagccugg

SEQ ID NO: 3411651 - RNA, 17 nt, Human
uggcccgacagccuggc

SEQ ID NO: 3411652 - RNA, 17 nt, Human
uggcccggaugcugcuu

SEQ ID NO: 3411653 - RNA, 22 nt, Human
uggcccgucaagugcugccccu

SEQ ID NO: 3411654 - RNA, 23 nt, Human
uggcccgugacagacuccugagg

SEQ ID NO: 3411655 - RNA, 19 nt, Human
uggucuucaaauugucuuu

SEQ ID NO: 3411656 - RNA, 14 nt, Human
uggucuucccaggc

SEQ ID NO: 3411657 - RNA, 20 nt, Human
uggucuuggaauuccauuug

SEQ ID NO: 3411658 - RNA, 14 nt, Human
uggucuuuccucug

SEQ ID NO: 3411659 - RNA, 20 nt, Human
uggucuuuuccucgcuucuu

SEQ ID NO: 3411660 - RNA, 15 nt, Human
uggugaaaauguacu

SEQ ID NO: 3411661 - RNA, 14 nt, Human
uggugaaaccuccu

SEQ ID NO: 3411662 - RNA, 19 nt, Human
uggugaacagaacaaaagg

SEQ ID NO: 3411663 - RNA, 15 nt, Human
uggugaacauugcaa

SEQ ID NO: 3411664 - RNA, 13 nt, Human
uggugaagaguag

SEQ ID NO: 3411665 - RNA, 17 nt, Human
uggugaauggccuuccu

SEQ ID NO: 3411666 - RNA, 19 nt, Human
uggugaauggccuuccuuc

SEQ ID NO: 3411667 - RNA, 16 nt, Human
uggugaauuucacaag

SEQ ID NO: 3411668 - RNA, 13 nt, Human
uggugaauuugaa

SEQ ID NO: 3411669 - RNA, 22 nt, Human
uggugacaucagguuuuucccg

SEQ ID NO: 3411670 - RNA, 14 nt, Human
uggugaccucugcc

SEQ ID NO: 3411671 - RNA, 17 nt, Human
uggugaccucugccuga

SEQ ID NO: 3411672 - RNA, 22 nt, Human
uggugaccuuccaagagccuga

SEQ ID NO: 3411673 - RNA, 19 nt, Human
uggugacugauucuucagc

SEQ ID NO: 3411674 - RNA, 19 nt, Human
uggugacuuuccucuuugg

SEQ ID NO: 3411675 - RNA, 16 nt, Human
uggugacuuugcuuca

SEQ ID NO: 3411676 - RNA, 15 nt, Human
uggugacuuuggaua

SEQ ID NO: 3411677 - RNA, 19 nt, Human
uggugacuuuggauaauaa

SEQ ID NO: 3411678 - RNA, 23 nt, Human
uggugagaacuacucagggaaug

SEQ ID NO: 3411679 - RNA, 17 nt, Human
uggugagaugcagcugg

SEQ ID NO: 3411680 - RNA, 18 nt, Human
uggugagccggucaggca

SEQ ID NO: 3411681 - RNA, 17 nt, Human
uggugaggccuugcucc

SEQ ID NO: 3411682 - RNA, 19 nt, Human
uggugaggcuuaacaaugu

SEQ ID NO: 3411683 - RNA, 16 nt, Human
uggugauuuagcagga

SEQ ID NO: 3411684 - RNA, 17 nt, Human
uggugauuuagcaggaa

SEQ ID NO: 3411685 - RNA, 19 nt, Human
uggugauuugaaaaauaua

SEQ ID NO: 3411686 - RNA, 12 nt, Human
uggugauuuuaa

SEQ ID NO: 3411687 - RNA, 15 nt, Human
uggugauuuuaaaug

SEQ ID NO: 3411688 - RNA, 19 nt, Human
uggugauuuuaaaugugug

SEQ ID NO: 3411689 - RNA, 19 nt, Human
uggugcaaguugaggacuu

SEQ ID NO: 3411690 - RNA, 23 nt, Human
uggugcacgcuggggaagaauuu

SEQ ID NO: 3411691 - RNA, 19 nt, Human
uggugcacuuuguaaauuc

SEQ ID NO: 3411692 - RNA, 13 nt, Human
uggugcagacaga

SEQ ID NO: 3411693 - RNA, 15 nt, Human
uggugcagacagaag

SEQ ID NO: 3411694 - RNA, 22 nt, Human
uggugcagacagaagucuccuc

SEQ ID NO: 3411695 - RNA, 17 nt, Human
uggugcagggccuccau

SEQ ID NO: 3411696 - RNA, 15 nt, Human
uggugcauagaacug

SEQ ID NO: 3411697 - RNA, 18 nt, Human
uggugcauagaacugggu

SEQ ID NO: 3411698 - RNA, 17 nt, Human
uggugcauagcagaugg

SEQ ID NO: 3411699 - RNA, 16 nt, Human
uggugcauuacagaga

SEQ ID NO: 3411700 - RNA, 20 nt, Human
uggugccaauggaaccuccu

SEQ ID NO: 3411701 - RNA, 17 nt, Human
uggugccacaaauaaaa

SEQ ID NO: 3411702 - RNA, 18 nt, Human
uggugccacaaauaaaau

SEQ ID NO: 3411703 - RNA, 10 nt, Human
uggugccacc

SEQ ID NO: 3411704 - RNA, 22 nt, Human
uggugccaucauugcugucugc

SEQ ID NO: 3411705 - RNA, 14 nt, Human
uggugccaucccca

SEQ ID NO: 3411706 - RNA, 18 nt, Human
uggugccccaggaccagc

SEQ ID NO: 3411707 - RNA, 19 nt, Human
uggugccccaggaccagcu

SEQ ID NO: 3411708 - RNA, 21 nt, Human
uggugccccaggaccagcuca

SEQ ID NO: 3411709 - RNA, 23 nt, Human
uggugccccaggaccagcucagg

SEQ ID NO: 3411710 - RNA, 23 nt, Human
uggugccccccaccccuggaaga

SEQ ID NO: 3411711 - RNA, 20 nt, Human
uggugcccugcuuucagaua

SEQ ID NO: 3411712 - RNA, 20 nt, Human
uggugcccuguucucuacca

SEQ ID NO: 3411713 - RNA, 24 nt, Human
uggugccuaguauugacaaaaugu

SEQ ID NO: 3411714 - RNA, 21 nt, Human
uggugccucuggaggccucug

SEQ ID NO: 3411715 - RNA, 15 nt, Human
uggugccugagaggc

SEQ ID NO: 3411716 - RNA, 17 nt, Human
uggugccugagaggcag

SEQ ID NO: 3411717 - RNA, 19 nt, Human
uggugccugagaggcaggc

SEQ ID NO: 3411718 - RNA, 21 nt, Human
uggugccugauucggcugucu

SEQ ID NO: 3411719 - RNA, 18 nt, Human
uggugccuggccuggcac

SEQ ID NO: 3411720 - RNA, 19 nt, Human
uggugccuggccuggcaca

SEQ ID NO: 3411721 - RNA, 24 nt, Human
uggugccuggccuggcacacauca

SEQ ID NO: 3411722 - RNA, 12 nt, Human
uggugccuucau

SEQ ID NO: 3411723 - RNA, 17 nt, Human
uggugcgaucuggguuc

SEQ ID NO: 3411724 - RNA, 22 nt, Human
uggugcggcuggccauggagaa

SEQ ID NO: 3411725 - RNA, 19 nt, Human
uggugcgggcacaauaaau

SEQ ID NO: 3411726 - RNA, 21 nt, Human
uggugcucaccaugcuuccag

SEQ ID NO: 3411727 - RNA, 15 nt, Human
uggugcucaguugua

SEQ ID NO: 3411728 - RNA, 21 nt, Human
uggugcucaguuguagaaugu

SEQ ID NO: 3411729 - RNA, 15 nt, Human
uggugcucucugcca

SEQ ID NO: 3411730 - RNA, 15 nt, Human
uggugcugaccucug

SEQ ID NO: 3411731 - RNA, 13 nt, Human
uggugcugccaca

SEQ ID NO: 3411732 - RNA, 18 nt, Human
uggugcugccacacuuca

SEQ ID NO: 3411733 - RNA, 12 nt, Human
uggugcuggaua

SEQ ID NO: 3411734 - RNA, 17 nt, Human
uggugcuggauauuuuc

SEQ ID NO: 3411735 - RNA, 11 nt, Human
uggugcuggga

SEQ ID NO: 3411736 - RNA, 17 nt, Human
uggugcuuaaguuccag

SEQ ID NO: 3411737 - RNA, 22 nt, Human
uggugcuuacacaucucagacc

SEQ ID NO: 3411738 - RNA, 19 nt, Human
uggugcuuccaaauauugu

SEQ ID NO: 3411739 - RNA, 23 nt, Human
uggugcuucucagauuucugagg

SEQ ID NO: 3411740 - RNA, 18 nt, Human
uggugcuuuccuguuucu

SEQ ID NO: 3411741 - RNA, 17 nt, Human
uggugcuuuuuauaaaa

SEQ ID NO: 3411742 - RNA, 18 nt, Human
ugguggaagaggggacag

SEQ ID NO: 3411743 - RNA, 18 nt, Human
ugguggacaguccuggga

SEQ ID NO: 3411744 - RNA, 16 nt, Human
ugguggcacugagccc

SEQ ID NO: 3411745 - RNA, 12 nt, Human
ugguggcagcuc

SEQ ID NO: 3411746 - RNA, 16 nt, Human
ugguggcagcucaccu

SEQ ID NO: 3411747 - RNA, 15 nt, Human
ugguggccaugcucc

SEQ ID NO: 3411748 - RNA, 21 nt, Human
ugguggccaugcuccucuucc

SEQ ID NO: 3411749 - RNA, 19 nt, Human
ugguggcccgacagccugg

SEQ ID NO: 3411750 - RNA, 21 nt, Human
ugguggcccgacagccuggca

SEQ ID NO: 3411751 - RNA, 14 nt, Human
ugguggcccucucc

SEQ ID NO: 3411752 - RNA, 12 nt, Human
ugguggccucag

SEQ ID NO: 3411753 - RNA, 16 nt, Human
ugguggccuggucccu

SEQ ID NO: 3411754 - RNA, 14 nt, Human
ugguggcuucagcu

SEQ ID NO: 3411755 - RNA, 13 nt, Human
ugguggcuuuccu

SEQ ID NO: 3411756 - RNA, 22 nt, Human
uggugggaggggcgcccaccuc

SEQ ID NO: 3411757 - RNA, 19 nt, Human
uggugggaugugguuuucu

SEQ ID NO: 3411758 - RNA, 20 nt, Human
uggugggccaacaaagaaca

SEQ ID NO: 3411759 - RNA, 14 nt, Human
uggugggcuucagg

SEQ ID NO: 3411760 - RNA, 13 nt, Human
ugguggggagggg

SEQ ID NO: 3411761 - RNA, 14 nt, Human
ugguggggcagcuc

SEQ ID NO: 3411762 - RNA, 20 nt, Human
ugguggggcugccaggggag

SEQ ID NO: 3411763 - RNA, 18 nt, Human
ugguggggguagagcuga

SEQ ID NO: 3411764 - RNA, 23 nt, Human
ugguggggucuccucaggaccag

SEQ ID NO: 3411765 - RNA, 23 nt, Human
uggugggguguguuccaacugcc

SEQ ID NO: 3411766 - RNA, 15 nt, Human
uggugggugaaagaa

SEQ ID NO: 3411767 - RNA, 19 nt, Human
ugguggguucaggggacuc

SEQ ID NO: 3411768 - RNA, 17 nt, Human
uggugguuucacggugc

SEQ ID NO: 3411769 - RNA, 18 nt, Human
ugguguaagguacuuuca

SEQ ID NO: 3411770 - RNA, 17 nt, Human
ugguguaauaagacaua

SEQ ID NO: 3411771 - RNA, 17 nt, Human
ugguguaauuugaagau

SEQ ID NO: 3411772 - RNA, 14 nt, Human
ugguguacaaaaug

SEQ ID NO: 3411773 - RNA, 21 nt, Human
ugguguagaacacuaauucau

SEQ ID NO: 3411774 - RNA, 21 nt, Human
ugguguagcccucccacuuug

SEQ ID NO: 3411775 - RNA, 17 nt, Human
ugguguagcuacagaga

SEQ ID NO: 3411776 - RNA, 20 nt, Human
ugguguagcuacagagaaac

SEQ ID NO: 3411777 - RNA, 19 nt, Human
ugguguaguugaacugaua

SEQ ID NO: 3411778 - RNA, 23 nt, Human
ugguguauagaaguuuguccauu

SEQ ID NO: 3411779 - RNA, 14 nt, Human
uggugucaccccag

SEQ ID NO: 3411780 - RNA, 16 nt, Human
uggugucaccccagag

SEQ ID NO: 3411781 - RNA, 17 nt, Human
uggugucaccccagagc

SEQ ID NO: 3411782 - RNA, 18 nt, Human
uggugucaccccagagcc

SEQ ID NO: 3411783 - RNA, 19 nt, Human
uggugucacugucccuccu

SEQ ID NO: 3411784 - RNA, 17 nt, Human
uggugucacuuacuguu

SEQ ID NO: 3411785 - RNA, 18 nt, Human
uggugucaguauccaggc

SEQ ID NO: 3411786 - RNA, 20 nt, Human
uggugucauagaauagcaug

SEQ ID NO: 3411787 - RNA, 14 nt, Human
ugguguccaccugg

SEQ ID NO: 3411788 - RNA, 18 nt, Human
ugguguccaccuggcccc

SEQ ID NO: 3411789 - RNA, 18 nt, Human
ugguguccagacagagcc

SEQ ID NO: 3411790 - RNA, 17 nt, Human
ugguguccagcugaguu

SEQ ID NO: 3411791 - RNA, 17 nt, Human
ugguguccugaccaccc

SEQ ID NO: 3411792 - RNA, 15 nt, Human
uggugucgggcccuu

SEQ ID NO: 3411793 - RNA, 20 nt, Human
uggugucuccaaccccccag

SEQ ID NO: 3411794 - RNA, 15 nt, Human
uggugugaaagucag

SEQ ID NO: 3411795 - RNA, 14 nt, Human
uggugugaacuaaa

SEQ ID NO: 3411796 - RNA, 16 nt, Human
uggugugaccugaggg

SEQ ID NO: 3411797 - RNA, 22 nt, Human
ugguguggguguccugccuguc

SEQ ID NO: 3411798 - RNA, 14 nt, Human
ugguguguuggaca

SEQ ID NO: 3411799 - RNA, 20 nt, Human
uguaacuugcuuaaauuucu

SEQ ID NO: 3411800 - RNA, 17 nt, Human
uguaacuuucucuauga

SEQ ID NO: 3411801 - RNA, 18 nt, Human
uguaagaaaauaucacuu

SEQ ID NO: 3411802 - RNA, 12 nt, Human
uguaagaaauac

SEQ ID NO: 3411803 - RNA, 18 nt, Human
uguaagaacuacaaacaa

SEQ ID NO: 3411804 - RNA, 17 nt, Human
uguaagaagagacuggg

SEQ ID NO: 3411805 - RNA, 14 nt, Human
uguaagaaggcaau

SEQ ID NO: 3411806 - RNA, 16 nt, Human
uguaagaauucagaag

SEQ ID NO: 3411807 - RNA, 19 nt, Human
uguaagacaauccauguaa

SEQ ID NO: 3411808 - RNA, 17 nt, Human
uguaagagaauguugaa

SEQ ID NO: 3411809 - RNA, 19 nt, Human
uguaagagcaccuuccuca

SEQ ID NO: 3411810 - RNA, 22 nt, Human
uguaagagcaccuuccucacuu

SEQ ID NO: 3411811 - RNA, 15 nt, Human
uguaagaguguagaa

SEQ ID NO: 3411812 - RNA, 14 nt, Human
uguaagaugcuggg

SEQ ID NO: 3411813 - RNA, 15 nt, Human
uguaagaugcugggu

SEQ ID NO: 3411814 - RNA, 17 nt, Human
uguaagaugcuggguug

SEQ ID NO: 3411815 - RNA, 14 nt, Human
uguaagaugucugu

SEQ ID NO: 3411816 - RNA, 18 nt, Human
uguaagauuauagauucu

SEQ ID NO: 3411817 - RNA, 22 nt, Human
uguaagauuauagauucuaaag

SEQ ID NO: 3411818 - RNA, 17 nt, Human
uguaagauuuugaaaac

SEQ ID NO: 3411819 - RNA, 18 nt, Human
uguaagcacucuggauga

SEQ ID NO: 3411820 - RNA, 13 nt, Human
uguaagccaaaga

SEQ ID NO: 3411821 - RNA, 15 nt, Human
uguaagccaaagaaa

SEQ ID NO: 3411822 - RNA, 22 nt, Human
uguaagcucuacugaggugcua

SEQ ID NO: 3411823 - RNA, 16 nt, Human
uguaagcuguguccua

SEQ ID NO: 3411824 - RNA, 15 nt, Human
uguaagcuguuuauu

SEQ ID NO: 3411825 - RNA, 22 nt, Human
uguaagcuguuuauuuuauauu

SEQ ID NO: 3411826 - RNA, 18 nt, Human
uguaaggaaugauuaauu

SEQ ID NO: 3411827 - RNA, 15 nt, Human
uguaaggcaugaagg

SEQ ID NO: 3411828 - RNA, 14 nt, Human
uguaaggcucuaga

SEQ ID NO: 3411829 - RNA, 15 nt, Human
uguaaggcucuagau

SEQ ID NO: 3411830 - RNA, 14 nt, Human
uguaaggcugugua

SEQ ID NO: 3411831 - RNA, 21 nt, Human
uguaaggcuguguaagauuug

SEQ ID NO: 3411832 - RNA, 13 nt, Human
uguaagggaaacu

SEQ ID NO: 3411833 - RNA, 21 nt, Human
uguaagggccagaaauaucuu

SEQ ID NO: 3411834 - RNA, 18 nt, Human
uguaaguaaacugcccug

SEQ ID NO: 3411835 - RNA, 16 nt, Human
uguaaguaaaugucug

SEQ ID NO: 3411836 - RNA, 17 nt, Human
uguaaguaaaugucugu

SEQ ID NO: 3411837 - RNA, 14 nt, Human
uguaaguaauuauc

SEQ ID NO: 3411838 - RNA, 17 nt, Human
uguaagucaguguugag

SEQ ID NO: 3411839 - RNA, 17 nt, Human
uguaagugaaaaacaug

SEQ ID NO: 3411840 - RNA, 22 nt, Human
uguaagugcuacauaaauuggc

SEQ ID NO: 3411841 - RNA, 14 nt, Human
uguaagugggccca

SEQ ID NO: 3411842 - RNA, 12 nt, Human
uguaagugugag

SEQ ID NO: 3411843 - RNA, 21 nt, Human
uguaagugugaguaagagcug

SEQ ID NO: 3411844 - RNA, 15 nt, Human
uguaauaaacuuuaa

SEQ ID NO: 3411845 - RNA, 12 nt, Human
uguaauaaauau

SEQ ID NO: 3411846 - RNA, 14 nt, Human
uguaauaaauauga

SEQ ID NO: 3411847 - RNA, 14 nt, Human
uguaauaaauaugu

SEQ ID NO: 3411848 - RNA, 21 nt, Human
uguaauaaauauguuucacac

SEQ ID NO: 3411849 - RNA, 22 nt, Human
uguaauaaauauguuucacaca

SEQ ID NO: 3411850 - RNA, 14 nt, Human
uguaauaacuguga

SEQ ID NO: 3411851 - RNA, 22 nt, Human
uguaauaacugugaaguuuaca

SEQ ID NO: 3411852 - RNA, 13 nt, Human
uguaauaagacau

SEQ ID NO: 3411853 - RNA, 19 nt, Human
uguaauaauaaagaauagc

SEQ ID NO: 3411854 - RNA, 13 nt, Human
uguaauaauaccu

SEQ ID NO: 3411855 - RNA, 20 nt, Human
uguaauaauaccucaauguu

SEQ ID NO: 3411856 - RNA, 23 nt, Human
uguaauaauaccucaauguuuga

SEQ ID NO: 3411857 - RNA, 13 nt, Human
uguaauaauguga

SEQ ID NO: 3411858 - RNA, 20 nt, Human
uguaauagggaaaauucuaa

SEQ ID NO: 3411859 - RNA, 19 nt, Human
uguaauauaccagcuugua

SEQ ID NO: 3411860 - RNA, 14 nt, Human
uguaauauuuacaa

SEQ ID NO: 3411861 - RNA, 21 nt, Human
uguaauauuuacaauguauua

SEQ ID NO: 3411862 - RNA, 17 nt, Human
uguaauauuucuucaaa

SEQ ID NO: 3411863 - RNA, 17 nt, Human
uguaauauuuuguauua

SEQ ID NO: 3411864 - RNA, 18 nt, Human
uguaaucaauaaacgauu

SEQ ID NO: 3411865 - RNA, 14 nt, Human
uguaaucaauguuu

SEQ ID NO: 3411866 - RNA, 14 nt, Human
uguaaucaguuuua

SEQ ID NO: 3411867 - RNA, 14 nt, Human
uguaaucauuuguu

SEQ ID NO: 3411868 - RNA, 19 nt, Human
uguaaucauuuguuuacau

SEQ ID NO: 3411869 - RNA, 12 nt, Human
uguaauccagca

SEQ ID NO: 3411870 - RNA, 13 nt, Human
uguaaucccagca

SEQ ID NO: 3411871 - RNA, 22 nt, Human
uguaaucccagcacuuugggag

SEQ ID NO: 3411872 - RNA, 23 nt, Human
uguaaucccagcacuuugggagg

SEQ ID NO: 3411873 - RNA, 22 nt, Human
uguaaucucucugcagcugccg

SEQ ID NO: 3411874 - RNA, 21 nt, Human
uguaaucuugaauuguaacug

SEQ ID NO: 3411875 - RNA, 14 nt, Human
uguaaucuuguuga

SEQ ID NO: 3411876 - RNA, 17 nt, Human
uguaaugcgauuuuauu

SEQ ID NO: 3411877 - RNA, 12 nt, Human
uguaaugcugca

SEQ ID NO: 3411878 - RNA, 22 nt, Human
uguaauggagcaucaagccacu

SEQ ID NO: 3411879 - RNA, 17 nt, Human
uguaauggcaguuauau

SEQ ID NO: 3411880 - RNA, 23 nt, Human
uguaauggcaguuauauuuugca

SEQ ID NO: 3411881 - RNA, 21 nt, Human
uguaaugguacugacuuugcu

SEQ ID NO: 3411882 - RNA, 20 nt, Human
uguaaugguaucuuaaagug

SEQ ID NO: 3411883 - RNA, 12 nt, Human
uguaauguaacu

SEQ ID NO: 3411884 - RNA, 13 nt, Human
uguaauguaacug

SEQ ID NO: 3411885 - RNA, 19 nt, Human
uguaaugucaccaccuucc

SEQ ID NO: 3411886 - RNA, 21 nt, Human
uguaaugugugguggccucag

SEQ ID NO: 3411887 - RNA, 17 nt, Human
uguaauguuaauauuga

SEQ ID NO: 3411888 - RNA, 18 nt, Human
uguaauguuaauauugau

SEQ ID NO: 3411889 - RNA, 16 nt, Human
uguaauguuacugauc

SEQ ID NO: 3411890 - RNA, 19 nt, Human
uguaauguuacugaucaug

SEQ ID NO: 3411891 - RNA, 18 nt, Human
uguaauuaaauuauggua

SEQ ID NO: 3411892 - RNA, 15 nt, Human
uguaauuaaauucug

SEQ ID NO: 3411893 - RNA, 23 nt, Human
uguaauuaaguacuauguaucaa

SEQ ID NO: 3411894 - RNA, 17 nt, Human
uguaauuacuuauugua

SEQ ID NO: 3411895 - RNA, 23 nt, Human
uguaauuagugccacuuaaugua

SEQ ID NO: 3411896 - RNA, 21 nt, Human
uguaauuauaucuaaaauauu

SEQ ID NO: 3411897 - RNA, 14 nt, Human
uguaauuauaucug

SEQ ID NO: 3411898 - RNA, 23 nt, Human
uguaauuaugguuaguagaggua

SEQ ID NO: 3411899 - RNA, 11 nt, Human
uguaauuauug

SEQ ID NO: 3411900 - RNA, 12 nt, Human
uguaauuauugu

SEQ ID NO: 3411901 - RNA, 20 nt, Human
uguaauuauuuauguauggu

SEQ ID NO: 3411902 - RNA, 14 nt, Human
uguaauuauuugaa

SEQ ID NO: 3411903 - RNA, 15 nt, Human
uguaauuauuugaau

SEQ ID NO: 3411904 - RNA, 21 nt, Human
uguaauuccuaccucccugca

SEQ ID NO: 3411905 - RNA, 16 nt, Human
uguaauucuaaaugaa

SEQ ID NO: 3411906 - RNA, 15 nt, Human
uguaauugaauaaag

SEQ ID NO: 3411907 - RNA, 17 nt, Human
uguaauugaauauuauu

SEQ ID NO: 3411908 - RNA, 19 nt, Human
uguaauugaauauuauucc

SEQ ID NO: 3411909 - RNA, 16 nt, Human
uguaauugcuuacauu

SEQ ID NO: 3411910 - RNA, 16 nt, Human
uguaauuguguggauu

SEQ ID NO: 3411911 - RNA, 15 nt, Human
uguaauuguuccuuu

SEQ ID NO: 3411912 - RNA, 19 nt, Human
uguaauuguuugucuuuaa

SEQ ID NO: 3411913 - RNA, 20 nt, Human
uguaauuuaaaauugugaug

SEQ ID NO: 3411914 - RNA, 21 nt, Human
uguaauuuaaaauugugaugu

SEQ ID NO: 3411915 - RNA, 14 nt, Human
uguaauuuaaacag

SEQ ID NO: 3411916 - RNA, 23 nt, Human
uguaauuuaaacaggcccagcau

SEQ ID NO: 3411917 - RNA, 15 nt, Human
uguaauuuaaaugaa

SEQ ID NO: 3411918 - RNA, 17 nt, Human
uguaauuuaaaugaaag

SEQ ID NO: 3411919 - RNA, 16 nt, Human
uguaauuuaugugaaa

SEQ ID NO: 3411920 - RNA, 19 nt, Human
uguaauuucaggaggaaua

SEQ ID NO: 3411921 - RNA, 23 nt, Human
uguaauuucaggaggaauacuga

SEQ ID NO: 3411922 - RNA, 14 nt, Human
uguaauuugugaua

SEQ ID NO: 3411923 - RNA, 17 nt, Human
uguaauuuguguaauaa

SEQ ID NO: 3411924 - RNA, 21 nt, Human
uguaauuuuaaauaaaaguga

SEQ ID NO: 3411925 - RNA, 23 nt, Human
uguaauuuuauuuuaaaauuuca

SEQ ID NO: 3411926 - RNA, 12 nt, Human
uguaauuuucuu

SEQ ID NO: 3411927 - RNA, 17 nt, Human
uguaauuuucuugauga

SEQ ID NO: 3411928 - RNA, 19 nt, Human
uguaauuuuucuguauaga

SEQ ID NO: 3411929 - RNA, 20 nt, Human
uguaauuuuucuguauagac

SEQ ID NO: 3411930 - RNA, 13 nt, Human
uguacaaaauaaa

SEQ ID NO: 3411931 - RNA, 21 nt, Human
uguacaaaaucgauuggcuuu

SEQ ID NO: 3411932 - RNA, 16 nt, Human
uguacaaaauuaagca

SEQ ID NO: 3411933 - RNA, 21 nt, Human
uguacaaauauaagaauaaaa

SEQ ID NO: 3411934 - RNA, 16 nt, Human
uguacaauaaaaacau

SEQ ID NO: 3411935 - RNA, 14 nt, Human
uguacaauauuuaa

SEQ ID NO: 3411936 - RNA, 15 nt, Human
uguacaauauuuuaa

SEQ ID NO: 3411937 - RNA, 20 nt, Human
uguacaauauuuuaagcauu

SEQ ID NO: 3411938 - RNA, 21 nt, Human
uguacaauauuuuaagcauua

SEQ ID NO: 3411939 - RNA, 17 nt, Human
uguacaauuaaaaaccu

SEQ ID NO: 3411940 - RNA, 13 nt, Human
uguacacacuuua

SEQ ID NO: 3411941 - RNA, 19 nt, Human
uguacacacuuuauuuacu

SEQ ID NO: 3411942 - RNA, 12 nt, Human
uguacacaguca

SEQ ID NO: 3411943 - RNA, 17 nt, Human
uguacacguguccugua

SEQ ID NO: 3411944 - RNA, 22 nt, Human
uguauagacaguuuguaaaugu

SEQ ID NO: 3411945 - RNA, 18 nt, Human
uguauagaugcaagauau

SEQ ID NO: 3411946 - RNA, 23 nt, Human
uguauagauuagagaguguugaa

SEQ ID NO: 3411947 - RNA, 22 nt, Human
uguauagauuagauuauauuga

SEQ ID NO: 3411948 - RNA, 23 nt, Human
uguauagccaaaugacugaaagc

SEQ ID NO: 3411949 - RNA, 15 nt, Human
uguauaguaaaucac

SEQ ID NO: 3411950 - RNA, 21 nt, Human
uguauaguacuggcaugguac

SEQ ID NO: 3411951 - RNA, 16 nt, Human
uguauaguauuugaaa

SEQ ID NO: 3411952 - RNA, 20 nt, Human
uguauaguauuugaaaacag

SEQ ID NO: 3411953 - RNA, 15 nt, Human
uguauaguuauguaa

SEQ ID NO: 3411954 - RNA, 17 nt, Human
uguauaguuauguaaau

SEQ ID NO: 3411955 - RNA, 18 nt, Human
uguauaguuauguaaaua

SEQ ID NO: 3411956 - RNA, 14 nt, Human
uguauaguucacgu

SEQ ID NO: 3411957 - RNA, 17 nt, Human
uguauaguuuucccuau

SEQ ID NO: 3411958 - RNA, 19 nt, Human
uguauauaaaauauuuuca

SEQ ID NO: 3411959 - RNA, 18 nt, Human
uguauauaaaugggaaca

SEQ ID NO: 3411960 - RNA, 19 nt, Human
uguauauaaaugggaacau

SEQ ID NO: 3411961 - RNA, 16 nt, Human
uguauauacaauaaca

SEQ ID NO: 3411962 - RNA, 13 nt, Human
uguauauacacau

SEQ ID NO: 3411963 - RNA, 17 nt, Human
uguauauacacauauac

SEQ ID NO: 3411964 - RNA, 19 nt, Human
uguauauacacauauaccu

SEQ ID NO: 3411965 - RNA, 15 nt, Human
uguauauacauauau

SEQ ID NO: 3411966 - RNA, 21 nt, Human
uguauauacgcaucuauaaau

SEQ ID NO: 3411967 - RNA, 14 nt, Human
uguauauaguuuuu

SEQ ID NO: 3411968 - RNA, 14 nt, Human
uguauauauacaua

SEQ ID NO: 3411969 - RNA, 15 nt, Human
uguauauauauauau

SEQ ID NO: 3411970 - RNA, 14 nt, Human
uguauauauaugug

SEQ ID NO: 3411971 - RNA, 21 nt, Human
uguauauauaugugaggaugu

SEQ ID NO: 3411972 - RNA, 13 nt, Human
uguauauaugugu

SEQ ID NO: 3411973 - RNA, 16 nt, Human
uguauauauguguaua

SEQ ID NO: 3411974 - RNA, 18 nt, Human
uguauauauguguauaua

SEQ ID NO: 3411975 - RNA, 14 nt, Human
uguauauaugugug

SEQ ID NO: 3411976 - RNA, 19 nt, Human
uguauauauguguguuuaa

SEQ ID NO: 3411977 - RNA, 22 nt, Human
uguauauauuuccuauauuguu

SEQ ID NO: 3411978 - RNA, 13 nt, Human
uguauaucagaaa

SEQ ID NO: 3411979 - RNA, 13 nt, Human
uguauaucguuau

SEQ ID NO: 3411980 - RNA, 19 nt, Human
uguauaugguauauauaca

SEQ ID NO: 3411981 - RNA, 20 nt, Human
uguauaugguauauauacau

SEQ ID NO: 3411982 - RNA, 21 nt, Human
uguauaugguauauauacaua

SEQ ID NO: 3411983 - RNA, 16 nt, Human
uguauauguagaugua

SEQ ID NO: 3411984 - RNA, 21 nt, Human
uguauauguagauguaugcac

SEQ ID NO: 3411985 - RNA, 16 nt, Human
uguauauuaaggugug

SEQ ID NO: 3411986 - RNA, 19 nt, Human
uguauauuaagguguggcu

SEQ ID NO: 3411987 - RNA, 18 nt, Human
uguauauuacacauuugu

SEQ ID NO: 3411988 - RNA, 23 nt, Human
uguauauuacacauuuguacaga

SEQ ID NO: 3411989 - RNA, 21 nt, Human
uguauauuauggaagauuuua

SEQ ID NO: 3411990 - RNA, 23 nt, Human
uguauauuauggaagauuuuaaa

SEQ ID NO: 3411991 - RNA, 12 nt, Human
uguauauuauuu

SEQ ID NO: 3411992 - RNA, 16 nt, Human
uguauauuauuucuag

SEQ ID NO: 3411993 - RNA, 21 nt, Human
uguauauuauuucuaggaaga

SEQ ID NO: 3411994 - RNA, 15 nt, Human
uguauauuauuuggc

SEQ ID NO: 3411995 - RNA, 14 nt, Human
uguauauuccuuug

SEQ ID NO: 3411996 - RNA, 14 nt, Human
uguauauuugauuu

SEQ ID NO: 3411997 - RNA, 16 nt, Human
uguauauuugauuuau

SEQ ID NO: 3411998 - RNA, 16 nt, Human
uguauauuuguaaagc

SEQ ID NO: 3411999 - RNA, 14 nt, Human
uguauauuuguaca

SEQ ID NO: 3412000 - RNA, 16 nt, Human
uguauauuuguacaaa

SEQ ID NO: 3412001 - RNA, 15 nt, Human
uguauauuuguauau

SEQ ID NO: 3412002 - RNA, 19 nt, Human
uguauauuuguaugauauu

SEQ ID NO: 3412003 - RNA, 22 nt, Human
uguauauuugugauagcacuuu

SEQ ID NO: 3412004 - RNA, 12 nt, Human
uguauauuuuau

SEQ ID NO: 3412005 - RNA, 22 nt, Human
uguauauuuuuaucuauauaaa

SEQ ID NO: 3412006 - RNA, 14 nt, Human
uguaucaaaaugcu

SEQ ID NO: 3412007 - RNA, 15 nt, Human
uguaucaaaaugcuc

SEQ ID NO: 3412008 - RNA, 20 nt, Human
uguaucaaacuguauaacuu

SEQ ID NO: 3412009 - RNA, 14 nt, Human
uguaucaaauacau

SEQ ID NO: 3412010 - RNA, 23 nt, Human
uguaucaaauacauuuaaaacau

SEQ ID NO: 3412011 - RNA, 17 nt, Human
uguaucaaugaguaaca

SEQ ID NO: 3412012 - RNA, 18 nt, Human
uguaucacaaaucuuaac

SEQ ID NO: 3412013 - RNA, 19 nt, Human
uguaucagaagagagggga

SEQ ID NO: 3412014 - RNA, 18 nt, Human
uguaucagaggccuauaa

SEQ ID NO: 3412015 - RNA, 21 nt, Human
uguaucaggugcccaucccug

SEQ ID NO: 3412016 - RNA, 15 nt, Human
uguaucaguguuuau

SEQ ID NO: 3412017 - RNA, 16 nt, Human
uguaucauaauuacca

SEQ ID NO: 3412018 - RNA, 15 nt, Human
uguaucauagaaaug

SEQ ID NO: 3412019 - RNA, 22 nt, Human
uguauccaacaagccagaauca

SEQ ID NO: 3412020 - RNA, 22 nt, Human
uguauccauccauggggcugau

SEQ ID NO: 3412021 - RNA, 18 nt, Human
uguauccauuaucaugug

SEQ ID NO: 3412022 - RNA, 22 nt, Human
uguauccccccccuguauaguu

SEQ ID NO: 3412023 - RNA, 18 nt, Human
uguauccuggaacaauau

SEQ ID NO: 3412024 - RNA, 21 nt, Human
uguauccuuccaauuuggaau

SEQ ID NO: 3412025 - RNA, 19 nt, Human
uguauccuuucacacauuu

SEQ ID NO: 3412026 - RNA, 19 nt, Human
uguaucguauagcuguauu

SEQ ID NO: 3412027 - RNA, 21 nt, Human
uguaucguauagcuguauuga

SEQ ID NO: 3412028 - RNA, 16 nt, Human
uguaucucuuucacau

SEQ ID NO: 3412029 - RNA, 12 nt, Human
uguaucugaguu

SEQ ID NO: 3412030 - RNA, 16 nt, Human
uguaucugaguugcca

SEQ ID NO: 3412031 - RNA, 20 nt, Human
uguaucugcaggcagacacg

SEQ ID NO: 3412032 - RNA, 15 nt, Human
uguaucugucuuucc

SEQ ID NO: 3412033 - RNA, 22 nt, Human
uguaucugucuuuccacucugg

SEQ ID NO: 3412034 - RNA, 13 nt, Human
uguaucugugaag

SEQ ID NO: 3412035 - RNA, 12 nt, Human
uguaucugugua

SEQ ID NO: 3412036 - RNA, 16 nt, Human
uguaucuguguagacu

SEQ ID NO: 3412037 - RNA, 16 nt, Human
uguaucuuccauauuu

SEQ ID NO: 3412038 - RNA, 22 nt, Human
uguaucuugggggacagggcug

SEQ ID NO: 3412039 - RNA, 14 nt, Human
uguaucuuucuaug

SEQ ID NO: 3412040 - RNA, 18 nt, Human
uguaugaaaaauugggga

SEQ ID NO: 3412041 - RNA, 20 nt, Human
uguaugaaaaauuggggagg

SEQ ID NO: 3412042 - RNA, 19 nt, Human
uguaugaaaacauggaaca

SEQ ID NO: 3412043 - RNA, 20 nt, Human
uguaugacuaaagagagaau

SEQ ID NO: 3412044 - RNA, 17 nt, Human
uguaugacugcacauga

SEQ ID NO: 3412045 - RNA, 16 nt, Human
uguaugaguagccagg

SEQ ID NO: 3412046 - RNA, 21 nt, Human
uguaugauauuccauaguaua

SEQ ID NO: 3412047 - RNA, 23 nt, Human
uguaugaucaaauguuuaaucau

SEQ ID NO: 3412048 - RNA, 15 nt, Human
uguaugcacacacau

SEQ ID NO: 3412049 - RNA, 18 nt, Human
uguaugcacgugugcaca

SEQ ID NO: 3412050 - RNA, 12 nt, Human
uguaugcagcua

SEQ ID NO: 3412051 - RNA, 17 nt, Human
uguaugcauaauaaucc

SEQ ID NO: 3412052 - RNA, 16 nt, Human
uguaugccaagugaga

SEQ ID NO: 3412053 - RNA, 20 nt, Human
uguaugccaagugagaagau

SEQ ID NO: 3412054 - RNA, 19 nt, Human
uguaugcuucauacaggga

SEQ ID NO: 3412055 - RNA, 18 nt, Human
uguauggaaauaaaugua

SEQ ID NO: 3412056 - RNA, 13 nt, Human
uguauggggaggc

SEQ ID NO: 3412057 - RNA, 20 nt, Human
uguauggguaggguaaauca

SEQ ID NO: 3412058 - RNA, 22 nt, Human
uguaugguccauagcacuguau

SEQ ID NO: 3412059 - RNA, 23 nt, Human
uguaugguuuuugagauauuaau

SEQ ID NO: 3412060 - RNA, 12 nt, Human
uguauguaaaaa

SEQ ID NO: 3412061 - RNA, 13 nt, Human
uguauguacauau

SEQ ID NO: 3412062 - RNA, 15 nt, Human
uguaugucaaagcuu

SEQ ID NO: 3412063 - RNA, 15 nt, Human
uguaugucuuaaaac

SEQ ID NO: 3412064 - RNA, 17 nt, Human
uguaugucuuaaaaccu

SEQ ID NO: 3412065 - RNA, 16 nt, Human
uguaugugcacuguca

SEQ ID NO: 3412066 - RNA, 19 nt, Human
uguaugugcacugucacuu

SEQ ID NO: 3412067 - RNA, 16 nt, Human
uguauguguaauaaau

SEQ ID NO: 3412068 - RNA, 16 nt, Human
uguauguguuuagaau

SEQ ID NO: 3412069 - RNA, 22 nt, Human
uguauguugugaagauguuugc

SEQ ID NO: 3412070 - RNA, 14 nt, Human
uguauguuuacacu

SEQ ID NO: 3412071 - RNA, 18 nt, Human
uguauguuuacacuguca

SEQ ID NO: 3412072 - RNA, 11 nt, Human
uguauguuuug

SEQ ID NO: 3412073 - RNA, 17 nt, Human
uguauuaaauuacauuu

SEQ ID NO: 3412074 - RNA, 18 nt, Human
uguauuaaauuacauuug

SEQ ID NO: 3412075 - RNA, 19 nt, Human
uguauuaaauuacauuugu

SEQ ID NO: 3412076 - RNA, 12 nt, Human
uguauuaacaaa

SEQ ID NO: 3412077 - RNA, 19 nt, Human
uguauuaacaaaaguuccc

SEQ ID NO: 3412078 - RNA, 21 nt, Human
uguauuaacacuacucaaagc

SEQ ID NO: 3412079 - RNA, 16 nt, Human
uguauuaagaaaggaa

SEQ ID NO: 3412080 - RNA, 16 nt, Human
uguauuaagaaugaaa

SEQ ID NO: 3412081 - RNA, 22 nt, Human
uguauuaagcccacaguauauu

SEQ ID NO: 3412082 - RNA, 18 nt, Human
uguauuaagggauuuagu

SEQ ID NO: 3412083 - RNA, 21 nt, Human
uguauuaaguuguuaauaaaa

SEQ ID NO: 3412084 - RNA, 21 nt, Human
uguauuaauauucauuguaua

SEQ ID NO: 3412085 - RNA, 22 nt, Human
uguauuacaaauccaaugaaau

SEQ ID NO: 3412086 - RNA, 18 nt, Human
uguauuacauaaauaaau

SEQ ID NO: 3412087 - RNA, 13 nt, Human
uguauuagauguu

SEQ ID NO: 3412088 - RNA, 12 nt, Human
uguguuguuuga

SEQ ID NO: 3412089 - RNA, 14 nt, Human
uguguuguuugaaa

SEQ ID NO: 3412090 - RNA, 18 nt, Human
uguguuuaaauaaaguau

SEQ ID NO: 3412091 - RNA, 22 nt, Human
uguguuuaaauaaaguaucaug

SEQ ID NO: 3412092 - RNA, 21 nt, Human
uguguuuacauuuuauggugc

SEQ ID NO: 3412093 - RNA, 17 nt, Human
uguguuuaugugagcug

SEQ ID NO: 3412094 - RNA, 22 nt, Human
uguguuuauucuugaugaaaag

SEQ ID NO: 3412095 - RNA, 15 nt, Human
uguguuuauuucacu

SEQ ID NO: 3412096 - RNA, 23 nt, Human
uguguuucacaguuugaaauaag

SEQ ID NO: 3412097 - RNA, 15 nt, Human
uguguuucuguauaa

SEQ ID NO: 3412098 - RNA, 21 nt, Human
uguguuucuguccuguaacug

SEQ ID NO: 3412099 - RNA, 16 nt, Human
uguguuugaaaucauc

SEQ ID NO: 3412100 - RNA, 16 nt, Human
uguguuuggcuuucag

SEQ ID NO: 3412101 - RNA, 16 nt, Human
uguguuugguuuacau

SEQ ID NO: 3412102 - RNA, 17 nt, Human
uguguuugucauuagcc

SEQ ID NO: 3412103 - RNA, 19 nt, Human
uguguuugucauuagccug

SEQ ID NO: 3412104 - RNA, 10 nt, Human
uguguuuguu

SEQ ID NO: 3412105 - RNA, 17 nt, Human
uguguuuucauaauaaa

SEQ ID NO: 3412106 - RNA, 19 nt, Human
uguguuuuguuuugauuua

SEQ ID NO: 3412107 - RNA, 15 nt, Human
uguguuuuuaacaug

SEQ ID NO: 3412108 - RNA, 15 nt, Human
uguguuuuuaauaaa

SEQ ID NO: 3412109 - RNA, 14 nt, Human
uguguuuuuauugu

SEQ ID NO: 3412110 - RNA, 19 nt, Human
uguguuuuuauuguuaacu

SEQ ID NO: 3412111 - RNA, 13 nt, Human
uguguuuuucuca

SEQ ID NO: 3412112 - RNA, 21 nt, Human
uguguuuuugcuaucacacag

SEQ ID NO: 3412113 - RNA, 20 nt, Human
uguguuuuugggaugucuua

SEQ ID NO: 3412114 - RNA, 13 nt, Human
uguuaaaaauaaa

SEQ ID NO: 3412115 - RNA, 21 nt, Human
uguuaaaagaugaaaauauuu

SEQ ID NO: 3412116 - RNA, 15 nt, Human
uguuaaaagauuuuu

SEQ ID NO: 3412117 - RNA, 19 nt, Human
uguuaaaaucucucucugu

SEQ ID NO: 3412118 - RNA, 15 nt, Human
uguuaaaauguauuc

SEQ ID NO: 3412119 - RNA, 17 nt, Human
uguuaaaauuaugaauc

SEQ ID NO: 3412120 - RNA, 20 nt, Human
uguuaaaccaugggauaaau

SEQ ID NO: 3412121 - RNA, 21 nt, Human
uguuaaaccaugggauaaaug

SEQ ID NO: 3412122 - RNA, 23 nt, Human
uguuaaaccaugggauaaaugcc

SEQ ID NO: 3412123 - RNA, 18 nt, Human
uguuaaacuagcauaucu

SEQ ID NO: 3412124 - RNA, 23 nt, Human
uguuaaacuagcauaucugccuu

SEQ ID NO: 3412125 - RNA, 20 nt, Human
uguuaaacuguuagcacugu

SEQ ID NO: 3412126 - RNA, 12 nt, Human
uguuaaagagaa

SEQ ID NO: 3412127 - RNA, 16 nt, Human
uguuaaagagaaugag

SEQ ID NO: 3412128 - RNA, 19 nt, Human
uguuaaagauguagcaaac

SEQ ID NO: 3412129 - RNA, 13 nt, Human
uguuaaauaaauu

SEQ ID NO: 3412130 - RNA, 18 nt, Human
uguuaaauaaauuguaua

SEQ ID NO: 3412131 - RNA, 16 nt, Human
uguuaaauacaggaaa

SEQ ID NO: 3412132 - RNA, 16 nt, Human
uguuaaauauuuacau

SEQ ID NO: 3412133 - RNA, 14 nt, Human
uguuaaaugaaacc

SEQ ID NO: 3412134 - RNA, 14 nt, Human
uguuaaauuuguaa

SEQ ID NO: 3412135 - RNA, 21 nt, Human
uguuaaauuuguaaguuucag

SEQ ID NO: 3412136 - RNA, 16 nt, Human
uguuaaauuuuucuga

SEQ ID NO: 3412137 - RNA, 14 nt, Human
uguuaacaaugccu

SEQ ID NO: 3412138 - RNA, 13 nt, Human
uguuaacacauuu

SEQ ID NO: 3412139 - RNA, 20 nt, Human
uguuaacacauuuuguauaa

SEQ ID NO: 3412140 - RNA, 21 nt, Human
uguuaacacauuuuguauaau

SEQ ID NO: 3412141 - RNA, 22 nt, Human
uguuaacacauuuuguauaauu

SEQ ID NO: 3412142 - RNA, 20 nt, Human
uguuaacauuccaagacucu

SEQ ID NO: 3412143 - RNA, 17 nt, Human
uguuaacauuuuuggua

SEQ ID NO: 3412144 - RNA, 19 nt, Human
uguuaaccucugcuuuuau

SEQ ID NO: 3412145 - RNA, 17 nt, Human
uguuaacucuugucuau

SEQ ID NO: 3412146 - RNA, 14 nt, Human
uguuaacugaauac

SEQ ID NO: 3412147 - RNA, 22 nt, Human
uguuaacugagugccuuuuggu

SEQ ID NO: 3412148 - RNA, 22 nt, Human
uguuaacuuaauaguauuuaug

SEQ ID NO: 3412149 - RNA, 17 nt, Human
uguuaacuuauucaaag

SEQ ID NO: 3412150 - RNA, 18 nt, Human
uguuaacuuauucaaaga

SEQ ID NO: 3412151 - RNA, 23 nt, Human
uguuaacuuauucaaagagaaaa

SEQ ID NO: 3412152 - RNA, 17 nt, Human
uguuaagaaaucuguuu

SEQ ID NO: 3412153 - RNA, 13 nt, Human
uguuaagcaucua

SEQ ID NO: 3412154 - RNA, 20 nt, Human
uguuaagcgugucuguauuu

SEQ ID NO: 3412155 - RNA, 15 nt, Human
uguuaagugguuuca

SEQ ID NO: 3412156 - RNA, 19 nt, Human
uguuaauaaaaguacaugu

SEQ ID NO: 3412157 - RNA, 19 nt, Human
uguuaauaucacucauuaa

SEQ ID NO: 3412158 - RNA, 14 nt, Human
uguuaauauucuuu

SEQ ID NO: 3412159 - RNA, 17 nt, Human
uguuaauauucuuucaa

SEQ ID NO: 3412160 - RNA, 13 nt, Human
uguuaauauugau

SEQ ID NO: 3412161 - RNA, 13 nt, Human
uguuaauauuuua

SEQ ID NO: 3412162 - RNA, 20 nt, Human
uguuaauccuagcugugugc

SEQ ID NO: 3412163 - RNA, 17 nt, Human
uguuaaugaaaauguca

SEQ ID NO: 3412164 - RNA, 19 nt, Human
uguuaaugauagcuacugu

SEQ ID NO: 3412165 - RNA, 17 nt, Human
uguuaaugguuugaaua

SEQ ID NO: 3412166 - RNA, 12 nt, Human
uguuaauuauac

SEQ ID NO: 3412167 - RNA, 18 nt, Human
uguuaauuauaggagccu

SEQ ID NO: 3412168 - RNA, 13 nt, Human
uguuaauuuaugc

SEQ ID NO: 3412169 - RNA, 13 nt, Human
uguuaauuucagu

SEQ ID NO: 3412170 - RNA, 15 nt, Human
uguuaauuuuugaua

SEQ ID NO: 3412171 - RNA, 16 nt, Human
uguuacaaaauguaac

SEQ ID NO: 3412172 - RNA, 23 nt, Human
uguuacaaaauguaacuguuacc

SEQ ID NO: 3412173 - RNA, 18 nt, Human
uguuacaaaguuguaugu

SEQ ID NO: 3412174 - RNA, 17 nt, Human
uguuacaaauuguagaa

SEQ ID NO: 3412175 - RNA, 19 nt, Human
uguuacaaguuuauauaua

SEQ ID NO: 3412176 - RNA, 21 nt, Human
uguuacaggcaccgagaaugu

SEQ ID NO: 3412177 - RNA, 21 nt, Human
uguuacaguaaugucauaaag

SEQ ID NO: 3412178 - RNA, 13 nt, Human
uguuacauagugu

SEQ ID NO: 3412179 - RNA, 15 nt, Human
uguuacauguaucaa

SEQ ID NO: 3412180 - RNA, 15 nt, Human
uguuacauuauuauc

SEQ ID NO: 3412181 - RNA, 22 nt, Human
uguuacauuuuuaagugcugca

SEQ ID NO: 3412182 - RNA, 18 nt, Human
uguuacccuccuguaaau

SEQ ID NO: 3412183 - RNA, 18 nt, Human
uguuaccuaaaguauuuu

SEQ ID NO: 3412184 - RNA, 20 nt, Human
uguuaccuaauuagagcaga

SEQ ID NO: 3412185 - RNA, 16 nt, Human
uguuaccugaaaacac

SEQ ID NO: 3412186 - RNA, 22 nt, Human
uguuaccugaaaacacugugca

SEQ ID NO: 3412187 - RNA, 15 nt, Human
uguuaccugugugcu

SEQ ID NO: 3412188 - RNA, 13 nt, Human
uguuaccuuaaaa

SEQ ID NO: 3412189 - RNA, 14 nt, Human
uguuaccuuaaaac

SEQ ID NO: 3412190 - RNA, 17 nt, Human
uguuaccuuaaaacuag

SEQ ID NO: 3412191 - RNA, 16 nt, Human
uguuacguagccuaag

SEQ ID NO: 3412192 - RNA, 15 nt, Human
uguuacuauuuucua

SEQ ID NO: 3412193 - RNA, 20 nt, Human
uguuacuauuuucuacaauu

SEQ ID NO: 3412194 - RNA, 18 nt, Human
uguuacucuugggacauc

SEQ ID NO: 3412195 - RNA, 20 nt, Human
uguuacugaucaugcauugu

SEQ ID NO: 3412196 - RNA, 14 nt, Human
uguuacugcaguug

SEQ ID NO: 3412197 - RNA, 19 nt, Human
uguuacugccuuaauaaaa

SEQ ID NO: 3412198 - RNA, 20 nt, Human
uguuacuggauaaauuguuu

SEQ ID NO: 3412199 - RNA, 10 nt, Human
uguuacuguu

SEQ ID NO: 3412200 - RNA, 17 nt, Human
uguuagaaaacaaaauu

SEQ ID NO: 3412201 - RNA, 19 nt, Human
uguuagaaaauggacacug

SEQ ID NO: 3412202 - RNA, 13 nt, Human
uguuagaacacua

SEQ ID NO: 3412203 - RNA, 15 nt, Human
uguuagaacacuauu

SEQ ID NO: 3412204 - RNA, 17 nt, Human
uguuagaacacuauuuu

SEQ ID NO: 3412205 - RNA, 18 nt, Human
uguuagaacacuauuuuc

SEQ ID NO: 3412206 - RNA, 15 nt, Human
uguuagacucauggu

SEQ ID NO: 3412207 - RNA, 18 nt, Human
uguuagacucuuacuuuu

SEQ ID NO: 3412208 - RNA, 18 nt, Human
uguuagagacuuuuuucu

SEQ ID NO: 3412209 - RNA, 22 nt, Human
uguuagaggaucccucucugga

SEQ ID NO: 3412210 - RNA, 19 nt, Human
uguuagagggaacagggcg

SEQ ID NO: 3412211 - RNA, 20 nt, Human
uguuagagguuuuaaaguga

SEQ ID NO: 3412212 - RNA, 22 nt, Human
uguuagagguuuuaaagugauu

SEQ ID NO: 3412213 - RNA, 18 nt, Human
uguuagaguccaacgugg

SEQ ID NO: 3412214 - RNA, 19 nt, Human
uguuagauagcugcaugug

SEQ ID NO: 3412215 - RNA, 13 nt, Human
uguuagcacuguu

SEQ ID NO: 3412216 - RNA, 14 nt, Human
uguuagcagacagg

SEQ ID NO: 3412217 - RNA, 17 nt, Human
uguuagccccauaauuu

SEQ ID NO: 3412218 - RNA, 19 nt, Human
uguuagccucaauuucuga

SEQ ID NO: 3412219 - RNA, 21 nt, Human
uguuagccuuuuuuccccaga

SEQ ID NO: 3412220 - RNA, 17 nt, Human
uguuagcuccucacugu

SEQ ID NO: 3412221 - RNA, 14 nt, Human
uguuagcuguuauu

SEQ ID NO: 3412222 - RNA, 14 nt, Human
uguuagcuuccuua

SEQ ID NO: 3412223 - RNA, 15 nt, Human
uguuagcuuccuuaa

SEQ ID NO: 3412224 - RNA, 21 nt, Human
uguuaggauuuucacauucuu

SEQ ID NO: 3412225 - RNA, 19 nt, Human
uguuaggccaaagacaaau

SEQ ID NO: 3412226 - RNA, 20 nt, Human
uguuaggccuggcacagugu

SEQ ID NO: 3412227 - RNA, 14 nt, Human
uguuaguaauaccu

SEQ ID NO: 3412228 - RNA, 14 nt, Human
uguuaguagaaauu

SEQ ID NO: 3412229 - RNA, 14 nt, Human
uguuagugcaaauu

SEQ ID NO: 3412230 - RNA, 21 nt, Human
uguuaguguuuuaagaaaugu

SEQ ID NO: 3412231 - RNA, 20 nt, Human
uguuaguuaccuuauaguua

SEQ ID NO: 3412232 - RNA, 13 nt, Human
uguuaguucccaa

SEQ ID NO: 3412233 - RNA, 19 nt, Human
uguuggacaaaugugaaga

SEQ ID NO: 3412234 - RNA, 23 nt, Human
uguuggacaaaugugaagaugca

SEQ ID NO: 3412235 - RNA, 21 nt, Human
uguuggacaagcuucugagac

SEQ ID NO: 3412236 - RNA, 21 nt, Human
uguuggagaagaacugaaauc

SEQ ID NO: 3412237 - RNA, 16 nt, Human
uguuggaguguuucua

SEQ ID NO: 3412238 - RNA, 20 nt, Human
uguuggauaaaucagugguu

SEQ ID NO: 3412239 - RNA, 17 nt, Human
uguuggauuuauaaaug

SEQ ID NO: 3412240 - RNA, 19 nt, Human
uguuggauuuauaaaugcu

SEQ ID NO: 3412241 - RNA, 23 nt, Human
uguuggauuuauaaaugcuauuu

SEQ ID NO: 3412242 - RNA, 15 nt, Human
uguuggcacucacag

SEQ ID NO: 3412243 - RNA, 23 nt, Human
uguuggcacucacagaccuggag

SEQ ID NO: 3412244 - RNA, 14 nt, Human
uguuggcagcauaa

SEQ ID NO: 3412245 - RNA, 12 nt, Human
uguuggcaggcu

SEQ ID NO: 3412246 - RNA, 21 nt, Human
uguuggcaggcuggccagucc

SEQ ID NO: 3412247 - RNA, 17 nt, Human
uguuggcauagcucugg

SEQ ID NO: 3412248 - RNA, 20 nt, Human
uguuggccuccggccucccc

SEQ ID NO: 3412249 - RNA, 18 nt, Human
uguuggcguaggcuacag

SEQ ID NO: 3412250 - RNA, 20 nt, Human
uguuggcguaggcuacagag

SEQ ID NO: 3412251 - RNA, 24 nt, Human
uguuggcguaggcuacagagaagc

SEQ ID NO: 3412252 - RNA, 14 nt, Human
uguuggcuuuguuu

SEQ ID NO: 3412253 - RNA, 19 nt, Human
uguugggagagggcgcagg

SEQ ID NO: 3412254 - RNA, 18 nt, Human
uguugggauuccugaccc

SEQ ID NO: 3412255 - RNA, 16 nt, Human
uguugggccuuuuucc

SEQ ID NO: 3412256 - RNA, 16 nt, Human
uguuggggcucuuccu

SEQ ID NO: 3412257 - RNA, 22 nt, Human
uguugggguggguauaaaagau

SEQ ID NO: 3412258 - RNA, 20 nt, Human
uguuggucaggcuggucuca

SEQ ID NO: 3412259 - RNA, 14 nt, Human
uguuggucuguacu

SEQ ID NO: 3412260 - RNA, 16 nt, Human
uguuggucuguacuga

SEQ ID NO: 3412261 - RNA, 22 nt, Human
uguugguuacccuccuagcuuu

SEQ ID NO: 3412262 - RNA, 16 nt, Human
uguugguuccaagccc

SEQ ID NO: 3412263 - RNA, 20 nt, Human
uguugguugguuuucuucuu

SEQ ID NO: 3412264 - RNA, 14 nt, Human
uguuguaaaaagaa

SEQ ID NO: 3412265 - RNA, 13 nt, Human
uguuguaaaaugu

SEQ ID NO: 3412266 - RNA, 14 nt, Human
uguuguaaccugcu

SEQ ID NO: 3412267 - RNA, 13 nt, Human
uguuguaacuuau

SEQ ID NO: 3412268 - RNA, 13 nt, Human
uguuguaaugcug

SEQ ID NO: 3412269 - RNA, 15 nt, Human
uguuguaaugcugca

SEQ ID NO: 3412270 - RNA, 13 nt, Human
uguuguaauucuu

SEQ ID NO: 3412271 - RNA, 20 nt, Human
uguuguacauuuaugauuua

SEQ ID NO: 3412272 - RNA, 14 nt, Human
uguuguagagaaaa

SEQ ID NO: 3412273 - RNA, 20 nt, Human
uguuguagauacaaucagcu

SEQ ID NO: 3412274 - RNA, 22 nt, Human
uguuguagauugauuguauugu

SEQ ID NO: 3412275 - RNA, 11 nt, Human
uguuguauaaa

SEQ ID NO: 3412276 - RNA, 13 nt, Human
uguuguauaaauu

SEQ ID NO: 3412277 - RNA, 15 nt, Human
uguuguaugccuuua

SEQ ID NO: 3412278 - RNA, 14 nt, Human
uguuguauuaacaa

SEQ ID NO: 3412279 - RNA, 15 nt, Human
uguuguauuaacaaa

SEQ ID NO: 3412280 - RNA, 17 nt, Human
uguugucagcaucuucu

SEQ ID NO: 3412281 - RNA, 15 nt, Human
uguugucauugcuuu

SEQ ID NO: 3412282 - RNA, 17 nt, Human
uguugucauugcuuuac

SEQ ID NO: 3412283 - RNA, 13 nt, Human
uguugucauugua

SEQ ID NO: 3412284 - RNA, 12 nt, Human
uguugucccuuc

SEQ ID NO: 3412285 - RNA, 17 nt, Human
uguuguccuuuucauag

SEQ ID NO: 3412286 - RNA, 22 nt, Human
uguuguccuuuucauaggucug

SEQ ID NO: 3412287 - RNA, 14 nt, Human
uguugucuaagaaa

SEQ ID NO: 3412288 - RNA, 17 nt, Human
uguugucuaagaaauug

SEQ ID NO: 3412289 - RNA, 22 nt, Human
uguugucuaagaaauugaauac

SEQ ID NO: 3412290 - RNA, 13 nt, Human
uguugucucuucu

SEQ ID NO: 3412291 - RNA, 18 nt, Human
uguugugaagauguuugc

SEQ ID NO: 3412292 - RNA, 15 nt, Human
uguugugaauaauua

SEQ ID NO: 3412293 - RNA, 17 nt, Human
uguugugaauaauuaca

SEQ ID NO: 3412294 - RNA, 13 nt, Human
uguugugaauguc

SEQ ID NO: 3412295 - RNA, 20 nt, Human
uguugugauguauucuagcu

SEQ ID NO: 3412296 - RNA, 14 nt, Human
uguugugaugucuu

SEQ ID NO: 3412297 - RNA, 16 nt, Human
uguugugccucccugg

SEQ ID NO: 3412298 - RNA, 16 nt, Human
uguugugguuuguugc

SEQ ID NO: 3412299 - RNA, 21 nt, Human
uguuguguacguggagaggga

SEQ ID NO: 3412300 - RNA, 12 nt, Human
uguugugugugc

SEQ ID NO: 3412301 - RNA, 16 nt, Human
uguugugugugggagu

SEQ ID NO: 3412302 - RNA, 14 nt, Human
uguuguguuucugu

SEQ ID NO: 3412303 - RNA, 18 nt, Human
uguuguuaaugaaaaugu

SEQ ID NO: 3412304 - RNA, 15 nt, Human
uguuguuaugaugug

SEQ ID NO: 3412305 - RNA, 23 nt, Human
uguuguuccaaauacuaaugaaa

SEQ ID NO: 3412306 - RNA, 15 nt, Human
uguuguuccuuuuga

SEQ ID NO: 3412307 - RNA, 13 nt, Human
uguuguucuguua

SEQ ID NO: 3412308 - RNA, 18 nt, Human
uguuguucuuucagaaag

SEQ ID NO: 3412309 - RNA, 13 nt, Human
uguuguuuaagug

SEQ ID NO: 3412310 - RNA, 15 nt, Human
uguuguuucuuaaau

SEQ ID NO: 3412311 - RNA, 12 nt, Human
uguuguuucuuu

SEQ ID NO: 3412312 - RNA, 12 nt, Human
uguuguuugcca

SEQ ID NO: 3412313 - RNA, 13 nt, Human
uguuguuuguaaa

SEQ ID NO: 3412314 - RNA, 19 nt, Human
uguuguuuguuuuuuugcc

SEQ ID NO: 3412315 - RNA, 13 nt, Human
uguuguuuuacua

SEQ ID NO: 3412316 - RNA, 20 nt, Human
uguuguuuuguuuuaaauac

SEQ ID NO: 3412317 - RNA, 21 nt, Human
uguuuaaaaaccgaauaaaug

SEQ ID NO: 3412318 - RNA, 20 nt, Human
uguuuaaaacaccuucuaua

SEQ ID NO: 3412319 - RNA, 14 nt, Human
uguuuaaaaggauu

SEQ ID NO: 3412320 - RNA, 18 nt, Human
uguuuaaaauaaaaugaa

SEQ ID NO: 3412321 - RNA, 19 nt, Human
uguuuaaaauaaaaugaaa

SEQ ID NO: 3412322 - RNA, 12 nt, Human
uguuuaaagaga

SEQ ID NO: 3412323 - RNA, 17 nt, Human
uguuuaaagagagguua

SEQ ID NO: 3412324 - RNA, 21 nt, Human
uguuuaaagagagguuauaga

SEQ ID NO: 3412325 - RNA, 13 nt, Human
uguuuaaaguuca

SEQ ID NO: 3412326 - RNA, 14 nt, Human
uguuuaaauaaagu

SEQ ID NO: 3412327 - RNA, 20 nt, Human
uguuuaacuuaaucaauuaa

SEQ ID NO: 3412328 - RNA, 19 nt, Human
uguuuaagacacuuccguc

SEQ ID NO: 3412329 - RNA, 13 nt, Human
uguuuaagauuua

SEQ ID NO: 3412330 - RNA, 23 nt, Human
uguuuaagauuuaauuugccaaa

SEQ ID NO: 3412331 - RNA, 13 nt, Human
uguuuaagcagaa

SEQ ID NO: 3412332 - RNA, 16 nt, Human
uguuuaauauugagaa

SEQ ID NO: 3412333 - RNA, 15 nt, Human
uguuuaauauuuaaa

SEQ ID NO: 3412334 - RNA, 20 nt, Human
uguuuaaucuguuauguacu

SEQ ID NO: 3412335 - RNA, 18 nt, Human
uguuuaaugugaacuugu

SEQ ID NO: 3412336 - RNA, 23 nt, Human
uguuuaaugugaacuuguagcug

SEQ ID NO: 3412337 - RNA, 19 nt, Human
uguuuaauguucugugaua

SEQ ID NO: 3412338 - RNA, 17 nt, Human
uguuuaauuucuucaaa

SEQ ID NO: 3412339 - RNA, 20 nt, Human
uguuuaauuucuucaaaaug

SEQ ID NO: 3412340 - RNA, 21 nt, Human
uguuuaauuucuucaaaaugu

SEQ ID NO: 3412341 - RNA, 18 nt, Human
uguuuaauuuuuauuucu

SEQ ID NO: 3412342 - RNA, 21 nt, Human
uguuuaauuuuuauuucuucc

SEQ ID NO: 3412343 - RNA, 21 nt, Human
uguuuacaaaaauuucuguaa

SEQ ID NO: 3412344 - RNA, 16 nt, Human
uguuuacacacgugca

SEQ ID NO: 3412345 - RNA, 19 nt, Human
uguuuacacucuuuguaag

SEQ ID NO: 3412346 - RNA, 14 nt, Human
uguuuacacuguca

SEQ ID NO: 3412347 - RNA, 15 nt, Human
uguuuacacugucaa

SEQ ID NO: 3412348 - RNA, 16 nt, Human
uguuuacacugucaaa

SEQ ID NO: 3412349 - RNA, 21 nt, Human
uguuuacagaggacaguauuu

SEQ ID NO: 3412350 - RNA, 16 nt, Human
uguuuacagauaauua

SEQ ID NO: 3412351 - RNA, 20 nt, Human
uguuuacagcacuacucugu

SEQ ID NO: 3412352 - RNA, 21 nt, Human
uguuuacagcacuacucugug

SEQ ID NO: 3412353 - RNA, 17 nt, Human
uguuuacagggagccuc

SEQ ID NO: 3412354 - RNA, 21 nt, Human
uguuuacaugcuuauuccaug

SEQ ID NO: 3412355 - RNA, 15 nt, Human
uguuuacauguguag

SEQ ID NO: 3412356 - RNA, 17 nt, Human
uguuuacauuugaugca

SEQ ID NO: 3412357 - RNA, 13 nt, Human
uguuuacuaggga

SEQ ID NO: 3412358 - RNA, 12 nt, Human
uguuuacugaaa

SEQ ID NO: 3412359 - RNA, 15 nt, Human
uguuuacuuaaagau

SEQ ID NO: 3412360 - RNA, 19 nt, Human
uguuuacuuaaagauuuau

SEQ ID NO: 3412361 - RNA, 23 nt, Human
uguuuacuuaaagauuuaucaaa

SEQ ID NO: 3412362 - RNA, 15 nt, Human
uguuuacuugaauag

SEQ ID NO: 3412363 - RNA, 22 nt, Human
uguuuacuugaauaguauugug

SEQ ID NO: 3412364 - RNA, 16 nt, Human
uguuuagaagaagugu

SEQ ID NO: 3412365 - RNA, 19 nt, Human
uguuuagaagaaguguguc

SEQ ID NO: 3412366 - RNA, 18 nt, Human
uguuuagacuuuaacaua

SEQ ID NO: 3412367 - RNA, 23 nt, Human
uguuuagacuuuaacauaagcua

SEQ ID NO: 3412368 - RNA, 17 nt, Human
uguuuagaguugcaauc

SEQ ID NO: 3412369 - RNA, 20 nt, Human
uguuuagauaauacaccacu

SEQ ID NO: 3412370 - RNA, 16 nt, Human
uguuuagauagggcug

SEQ ID NO: 3412371 - RNA, 15 nt, Human
uguuuagaugaaugu

SEQ ID NO: 3412372 - RNA, 17 nt, Human
uguuuagauuugccaua

SEQ ID NO: 3412373 - RNA, 22 nt, Human
uguuuagcagcagccuuuaaug

SEQ ID NO: 3412374 - RNA, 22 nt, Human
uguuuagcuacguuuacucaca

SEQ ID NO: 3412375 - RNA, 13 nt, Human
uguuuaguaauca

SEQ ID NO: 3412376 - RNA, 17 nt, Human
uguuuaguaaucauauu

SEQ ID NO: 3412377 - RNA, 14 nt, Human
uguuuaguugcaga

SEQ ID NO: 3412378 - RNA, 23 nt, Human
uuagauuuuacaugaaguauuuu

SEQ ID NO: 3412379 - RNA, 19 nt, Human
uuagcaaagaguuaauaua

SEQ ID NO: 3412380 - RNA, 12 nt, Human
uuagcaaggauu

SEQ ID NO: 3412381 - RNA, 18 nt, Human
uuagcaaggucauuucuu

SEQ ID NO: 3412382 - RNA, 13 nt, Human
uuagcacagauuu

SEQ ID NO: 3412383 - RNA, 22 nt, Human
uuagcacagauuuuaauuguca

SEQ ID NO: 3412384 - RNA, 12 nt, Human
uuagcaccaggg

SEQ ID NO: 3412385 - RNA, 22 nt, Human
uuagcacguuuaaaguucugug

SEQ ID NO: 3412386 - RNA, 21 nt, Human
uuagcacuucagggcagauuu

SEQ ID NO: 3412387 - RNA, 21 nt, Human
uuagcacuugggugacggcag

SEQ ID NO: 3412388 - RNA, 23 nt, Human
uuagcaggagaggagagccagag

SEQ ID NO: 3412389 - RNA, 23 nt, Human
uuagcaggccaaggucugagcca

SEQ ID NO: 3412390 - RNA, 12 nt, Human
uuagcaguucug

SEQ ID NO: 3412391 - RNA, 16 nt, Human
uuagcaguuugcuuug

SEQ ID NO: 3412392 - RNA, 18 nt, Human
uuagcauagcuuauuauu

SEQ ID NO: 3412393 - RNA, 17 nt, Human
uuagcauccuaagaaau

SEQ ID NO: 3412394 - RNA, 17 nt, Human
uuagcaucuaauuucaa

SEQ ID NO: 3412395 - RNA, 19 nt, Human
uuagcauguuguugaaagg

SEQ ID NO: 3412396 - RNA, 18 nt, Human
uuagccaagugugguaga

SEQ ID NO: 3412397 - RNA, 17 nt, Human
uuagccaggaucauggu

SEQ ID NO: 3412398 - RNA, 23 nt, Human
uuagccaggaucaugguguaaua

SEQ ID NO: 3412399 - RNA, 17 nt, Human
uuagcccccacccacuu

SEQ ID NO: 3412400 - RNA, 21 nt, Human
uuagccguggugauuuagcag

SEQ ID NO: 3412401 - RNA, 20 nt, Human
uuagccucaauuucugaaca

SEQ ID NO: 3412402 - RNA, 14 nt, Human
uuagccuguccugu

SEQ ID NO: 3412403 - RNA, 14 nt, Human
uuagccuucucugu

SEQ ID NO: 3412404 - RNA, 21 nt, Human
uuagccuucucuguucauuuc

SEQ ID NO: 3412405 - RNA, 17 nt, Human
uuagccuuuuuucccca

SEQ ID NO: 3412406 - RNA, 18 nt, Human
uuagccuuuuuuccccag

SEQ ID NO: 3412407 - RNA, 21 nt, Human
uuagccuuuuuuccccagacu

SEQ ID NO: 3412408 - RNA, 16 nt, Human
uuagcgacaacagauu

SEQ ID NO: 3412409 - RNA, 21 nt, Human
uuagcguagcuaagugaaaag

SEQ ID NO: 3412410 - RNA, 22 nt, Human
uuagcuaauaaaaagcuuuugu

SEQ ID NO: 3412411 - RNA, 14 nt, Human
uuagcuccccucca

SEQ ID NO: 3412412 - RNA, 13 nt, Human
uuagcuccugugg

SEQ ID NO: 3412413 - RNA, 12 nt, Human
uuagcucugaga

SEQ ID NO: 3412414 - RNA, 22 nt, Human
uuagcucuuaauuguucauuuu

SEQ ID NO: 3412415 - RNA, 23 nt, Human
uuagcucuuaauuguucauuuug

SEQ ID NO: 3412416 - RNA, 23 nt, Human
uuagcugaugaacuuauucugua

SEQ ID NO: 3412417 - RNA, 22 nt, Human
uuagcugccaagccccauccug

SEQ ID NO: 3412418 - RNA, 13 nt, Human
uuagcuggaaaag

SEQ ID NO: 3412419 - RNA, 13 nt, Human
uuagcuguaacag

SEQ ID NO: 3412420 - RNA, 17 nt, Human
uuagcuguaacaguucu

SEQ ID NO: 3412421 - RNA, 16 nt, Human
uuagcuguuauuucua

SEQ ID NO: 3412422 - RNA, 16 nt, Human
uuagcuuagaccucag

SEQ ID NO: 3412423 - RNA, 21 nt, Human
uuagcuuagaccucagccugu

SEQ ID NO: 3412424 - RNA, 19 nt, Human
uuagcuuaucaauuuguca

SEQ ID NO: 3412425 - RNA, 20 nt, Human
uuagcuuggggccagggaag

SEQ ID NO: 3412426 - RNA, 16 nt, Human
uuagcuuugucacugu

SEQ ID NO: 3412427 - RNA, 16 nt, Human
uuagcuuuuuaauugu

SEQ ID NO: 3412428 - RNA, 17 nt, Human
uuagcuuuuuaauuguu

SEQ ID NO: 3412429 - RNA, 17 nt, Human
uuagcuuuuucaucccc

SEQ ID NO: 3412430 - RNA, 18 nt, Human
uuaggaaaggaugaucaa

SEQ ID NO: 3412431 - RNA, 21 nt, Human
uuaggaaauaaaaccuuucaa

SEQ ID NO: 3412432 - RNA, 17 nt, Human
uuaggaacuucagagau

SEQ ID NO: 3412433 - RNA, 15 nt, Human
uuaggaagagaaacc

SEQ ID NO: 3412434 - RNA, 13 nt, Human
uuaggaaguguaa

SEQ ID NO: 3412435 - RNA, 19 nt, Human
uuaggaaguguaacagcug

SEQ ID NO: 3412436 - RNA, 21 nt, Human
uuaggaaguguaacagcugag

SEQ ID NO: 3412437 - RNA, 17 nt, Human
uuaggaaguuuucugua

SEQ ID NO: 3412438 - RNA, 14 nt, Human
uuaggaaugagaag

SEQ ID NO: 3412439 - RNA, 15 nt, Human
uuaggacuugcccuc

SEQ ID NO: 3412440 - RNA, 15 nt, Human
uuaggagcuaaggcu

SEQ ID NO: 3412441 - RNA, 20 nt, Human
uuaggcaaggcuaugugauu

SEQ ID NO: 3412442 - RNA, 19 nt, Human
uuaggcagauugaaaagga

SEQ ID NO: 3412443 - RNA, 18 nt, Human
uuaggcaguauaaagaau

SEQ ID NO: 3412444 - RNA, 18 nt, Human
uuaggcauaugcuucuuu

SEQ ID NO: 3412445 - RNA, 19 nt, Human
uuaggccaaagacaaauag

SEQ ID NO: 3412446 - RNA, 17 nt, Human
uuaggccagcaacgcuu

SEQ ID NO: 3412447 - RNA, 19 nt, Human
uuaggcccccaucauccuc

SEQ ID NO: 3412448 - RNA, 14 nt, Human
uuaggccuaccuga

SEQ ID NO: 3412449 - RNA, 12 nt, Human
uuaggccuggca

SEQ ID NO: 3412450 - RNA, 16 nt, Human
uuaggccuuccucucu

SEQ ID NO: 3412451 - RNA, 16 nt, Human
uuaggcuauuuguaaa

SEQ ID NO: 3412452 - RNA, 19 nt, Human
uuaggcuauuuguaaaucu

SEQ ID NO: 3412453 - RNA, 20 nt, Human
uuaggcuauuuguaaaucug

SEQ ID NO: 3412454 - RNA, 12 nt, Human
uuaggcugggcc

SEQ ID NO: 3412455 - RNA, 14 nt, Human
uuaggcugggccca

SEQ ID NO: 3412456 - RNA, 16 nt, Human
uuagggaagagaaaca

SEQ ID NO: 3412457 - RNA, 22 nt, Human
uuagggacaggaccccagcucu

SEQ ID NO: 3412458 - RNA, 23 nt, Human
uuagggacucaauuucuccccag

SEQ ID NO: 3412459 - RNA, 21 nt, Human
uuagggauaguacuaagcauu

SEQ ID NO: 3412460 - RNA, 17 nt, Human
uuagggcaccagggguu

SEQ ID NO: 3412461 - RNA, 19 nt, Human
uuaggggaaggagaaguaa

SEQ ID NO: 3412462 - RNA, 14 nt, Human
uuaggguuaugauu

SEQ ID NO: 3412463 - RNA, 17 nt, Human
uuagguaauuuuuuuca

SEQ ID NO: 3412464 - RNA, 14 nt, Human
uuaggucucuuccc

SEQ ID NO: 3412465 - RNA, 16 nt, Human
uuaggugaggaagcaa

SEQ ID NO: 3412466 - RNA, 18 nt, Human
uuagguggcaagcuguga

SEQ ID NO: 3412467 - RNA, 16 nt, Human
uuaggugugacugaau

SEQ ID NO: 3412468 - RNA, 19 nt, Human
uuagguguugauuuucugu

SEQ ID NO: 3412469 - RNA, 14 nt, Human
uuagguucuaaagu

SEQ ID NO: 3412470 - RNA, 16 nt, Human
uuagguucuaaaguuc

SEQ ID NO: 3412471 - RNA, 19 nt, Human
uuagguucuaaaguucuaa

SEQ ID NO: 3412472 - RNA, 12 nt, Human
uuaguaaaccaa

SEQ ID NO: 3412473 - RNA, 19 nt, Human
uuaguaaaugucuuuguaa

SEQ ID NO: 3412474 - RNA, 21 nt, Human
uuaguaaaugucuuuguaagu

SEQ ID NO: 3412475 - RNA, 16 nt, Human
uuaguaacaucauuuu

SEQ ID NO: 3412476 - RNA, 23 nt, Human
uuaguaacauguguuaaguauuu

SEQ ID NO: 3412477 - RNA, 16 nt, Human
uuaguaauaccucuaa

SEQ ID NO: 3412478 - RNA, 13 nt, Human
uuaguaaucauau

SEQ ID NO: 3412479 - RNA, 16 nt, Human
uuaguaaucuguacau

SEQ ID NO: 3412480 - RNA, 17 nt, Human
uuaguaaucuguacauu

SEQ ID NO: 3412481 - RNA, 17 nt, Human
uuaguaaucuguauaau

SEQ ID NO: 3412482 - RNA, 15 nt, Human
uuaguacuauaucug

SEQ ID NO: 3412483 - RNA, 18 nt, Human
uuaguacuauaucuguuu

SEQ ID NO: 3412484 - RNA, 20 nt, Human
uuaguacuauaucuguuuua

SEQ ID NO: 3412485 - RNA, 19 nt, Human
uuaguacuccccuccuuga

SEQ ID NO: 3412486 - RNA, 12 nt, Human
uuaguacuuuau

SEQ ID NO: 3412487 - RNA, 16 nt, Human
uuaguacuuuauagaa

SEQ ID NO: 3412488 - RNA, 21 nt, Human
uuaguacuuuauagaagaaug

SEQ ID NO: 3412489 - RNA, 16 nt, Human
uuaguaggauaugccu

SEQ ID NO: 3412490 - RNA, 22 nt, Human
uuaguaggauaugccugcucuu

SEQ ID NO: 3412491 - RNA, 15 nt, Human
uuaguaucuaacaug

SEQ ID NO: 3412492 - RNA, 19 nt, Human
uuaguaugacgcugauaca

SEQ ID NO: 3412493 - RNA, 22 nt, Human
uuaguaugacgcugauacauaa

SEQ ID NO: 3412494 - RNA, 22 nt, Human
uuaguauuuauuuaauguuaug

SEQ ID NO: 3412495 - RNA, 15 nt, Human
uuagucauuuugcuu

SEQ ID NO: 3412496 - RNA, 24 nt, Human
uuagucgugagcucuugugaggaa

SEQ ID NO: 3412497 - RNA, 20 nt, Human
uuagucuacucuuaagccau

SEQ ID NO: 3412498 - RNA, 21 nt, Human
uuagucuacucuuaagccauc

SEQ ID NO: 3412499 - RNA, 22 nt, Human
uuagucucaguuugugugucuu

SEQ ID NO: 3412500 - RNA, 23 nt, Human
uuagucucaguuugugugucuua

SEQ ID NO: 3412501 - RNA, 17 nt, Human
uuagucucuuuauuccu

SEQ ID NO: 3412502 - RNA, 17 nt, Human
uuagucugcaaaaugag

SEQ ID NO: 3412503 - RNA, 18 nt, Human
uuagucuucucauagcau

SEQ ID NO: 3412504 - RNA, 15 nt, Human
uuagugacaaaauag

SEQ ID NO: 3412505 - RNA, 20 nt, Human
uuagugcaucuuugccucuc

SEQ ID NO: 3412506 - RNA, 18 nt, Human
uuagugccacuuaaugua

SEQ ID NO: 3412507 - RNA, 15 nt, Human
uuagugcuaagugug

SEQ ID NO: 3412508 - RNA, 16 nt, Human
uuagugcuaaguguga

SEQ ID NO: 3412509 - RNA, 16 nt, Human
uuaguggacccugaaa

SEQ ID NO: 3412510 - RNA, 21 nt, Human
uuaguggacccugaaaugugu

SEQ ID NO: 3412511 - RNA, 19 nt, Human
uuagugguuuaucagcaaa

SEQ ID NO: 3412512 - RNA, 18 nt, Human
uuaguguaugauuacugg

SEQ ID NO: 3412513 - RNA, 23 nt, Human
uuagugucacuuaccuagauuua

SEQ ID NO: 3412514 - RNA, 12 nt, Human
uuagugugauug

SEQ ID NO: 3412515 - RNA, 21 nt, Human
uuaguguuuggguauauucau

SEQ ID NO: 3412516 - RNA, 14 nt, Human
uuaguuaaguuuua

SEQ ID NO: 3412517 - RNA, 13 nt, Human
uuaguuaauggau

SEQ ID NO: 3412518 - RNA, 14 nt, Human
uuaguuaauggauu

SEQ ID NO: 3412519 - RNA, 13 nt, Human
uuaguuaccuuau

SEQ ID NO: 3412520 - RNA, 22 nt, Human
uuaguuaccuuauaguuacugu

SEQ ID NO: 3412521 - RNA, 15 nt, Human
uuaguuacuuuagau

SEQ ID NO: 3412522 - RNA, 14 nt, Human
uuauagugcaauau

SEQ ID NO: 3412523 - RNA, 15 nt, Human
uuauagugcaauaua

SEQ ID NO: 3412524 - RNA, 13 nt, Human
uuauaguuaaucu

SEQ ID NO: 3412525 - RNA, 14 nt, Human
uuauaguuaaucua

SEQ ID NO: 3412526 - RNA, 14 nt, Human
uuauaguuuauaca

SEQ ID NO: 3412527 - RNA, 17 nt, Human
uuauaguuuauacaguu

SEQ ID NO: 3412528 - RNA, 14 nt, Human
uuauaguuucaagc

SEQ ID NO: 3412529 - RNA, 22 nt, Human
uuauauaaagagaaaauugaau

SEQ ID NO: 3412530 - RNA, 13 nt, Human
uuauauaaaugcu

SEQ ID NO: 3412531 - RNA, 18 nt, Human
uuauauaaauguaaaaau

SEQ ID NO: 3412532 - RNA, 16 nt, Human
uuauauaacuguauuu

SEQ ID NO: 3412533 - RNA, 18 nt, Human
uuauauaagcuuguauuc

SEQ ID NO: 3412534 - RNA, 13 nt, Human
uuauauaaguauu

SEQ ID NO: 3412535 - RNA, 20 nt, Human
uuauauaauaucuaaaguua

SEQ ID NO: 3412536 - RNA, 16 nt, Human
uuauauaauuauguua

SEQ ID NO: 3412537 - RNA, 22 nt, Human
uuauauaauucacucaagcacu

SEQ ID NO: 3412538 - RNA, 22 nt, Human
uuauauaauugccaaaaaguga

SEQ ID NO: 3412539 - RNA, 14 nt, Human
uuauauacaauaau

SEQ ID NO: 3412540 - RNA, 22 nt, Human
uuauauacaauaauggaaaaaa

SEQ ID NO: 3412541 - RNA, 21 nt, Human
uuauauagggaucaaccagcu

SEQ ID NO: 3412542 - RNA, 18 nt, Human
uuauauagguugugcaaa

SEQ ID NO: 3412543 - RNA, 18 nt, Human
uuauauauaaauauauua

SEQ ID NO: 3412544 - RNA, 14 nt, Human
uuauauauauauau

SEQ ID NO: 3412545 - RNA, 19 nt, Human
uuauauauauauauauuuc

SEQ ID NO: 3412546 - RNA, 13 nt, Human
uuauauaucccug

SEQ ID NO: 3412547 - RNA, 21 nt, Human
uuauauauggggaugguaguu

SEQ ID NO: 3412548 - RNA, 14 nt, Human
uuauauauguauuu

SEQ ID NO: 3412549 - RNA, 17 nt, Human
uuauauauguauuuaua

SEQ ID NO: 3412550 - RNA, 22 nt, Human
uuauauauugguaacauccuuu

SEQ ID NO: 3412551 - RNA, 14 nt, Human
uuauauauuuauaa

SEQ ID NO: 3412552 - RNA, 22 nt, Human
uuauaucagacugcuuugagaa

SEQ ID NO: 3412553 - RNA, 16 nt, Human
uuauaucaugcaaaau

SEQ ID NO: 3412554 - RNA, 20 nt, Human
uuauaucaugcaaaauaugu

SEQ ID NO: 3412555 - RNA, 18 nt, Human
uuauauccaguaacacau

SEQ ID NO: 3412556 - RNA, 14 nt, Human
uuauauccccugcu

SEQ ID NO: 3412557 - RNA, 17 nt, Human
uuauauccugacaagau

SEQ ID NO: 3412558 - RNA, 22 nt, Human
uuauaucugaggaauucuguau

SEQ ID NO: 3412559 - RNA, 11 nt, Human
uuauaucugua

SEQ ID NO: 3412560 - RNA, 14 nt, Human
uuauaucuguaugu

SEQ ID NO: 3412561 - RNA, 22 nt, Human
uuauaucuguggucuucaaauu

SEQ ID NO: 3412562 - RNA, 13 nt, Human
uuauaugaacaua

SEQ ID NO: 3412563 - RNA, 17 nt, Human
uuauaugaacauacaaa

SEQ ID NO: 3412564 - RNA, 16 nt, Human
uuauaugcuauuucua

SEQ ID NO: 3412565 - RNA, 10 nt, Human
uuauauggaa

SEQ ID NO: 3412566 - RNA, 20 nt, Human
uuauauggaaauauauauua

SEQ ID NO: 3412567 - RNA, 22 nt, Human
uuauauggaaauauauauuaua

SEQ ID NO: 3412568 - RNA, 12 nt, Human
uuauauguaugu

SEQ ID NO: 3412569 - RNA, 13 nt, Human
uuauauguguuga

SEQ ID NO: 3412570 - RNA, 19 nt, Human
uuauauuaauguacuuguu

SEQ ID NO: 3412571 - RNA, 20 nt, Human
uuauauuaguugcuuuguua

SEQ ID NO: 3412572 - RNA, 14 nt, Human
uuauauucaaccau

SEQ ID NO: 3412573 - RNA, 15 nt, Human
uuauauucaaccaug

SEQ ID NO: 3412574 - RNA, 19 nt, Human
uuauauucucagcagagug

SEQ ID NO: 3412575 - RNA, 21 nt, Human
uuauauucucagcagagugcu

SEQ ID NO: 3412576 - RNA, 16 nt, Human
uuauauugaagacaau

SEQ ID NO: 3412577 - RNA, 17 nt, Human
uuauauugauaagaucu

SEQ ID NO: 3412578 - RNA, 13 nt, Human
uuauauugcaaug

SEQ ID NO: 3412579 - RNA, 14 nt, Human
uuauauuguaagaa

SEQ ID NO: 3412580 - RNA, 15 nt, Human
uuauauuguucacuu

SEQ ID NO: 3412581 - RNA, 17 nt, Human
uuauauuguucacuucu

SEQ ID NO: 3412582 - RNA, 13 nt, Human
uuauauuuaacuc

SEQ ID NO: 3412583 - RNA, 16 nt, Human
uuauauuuaauuauua

SEQ ID NO: 3412584 - RNA, 19 nt, Human
uuauauuuauauuucaggu

SEQ ID NO: 3412585 - RNA, 11 nt, Human
uuauauuucaa

SEQ ID NO: 3412586 - RNA, 15 nt, Human
uuauauuucagaugu

SEQ ID NO: 3412587 - RNA, 11 nt, Human
uuauauuucau

SEQ ID NO: 3412588 - RNA, 22 nt, Human
uuauauuuccuuuaugugaauu

SEQ ID NO: 3412589 - RNA, 22 nt, Human
uuauauuucuauuuuauuauga

SEQ ID NO: 3412590 - RNA, 20 nt, Human
uuauauuuggaugcagaguu

SEQ ID NO: 3412591 - RNA, 15 nt, Human
uuauauuuucguaug

SEQ ID NO: 3412592 - RNA, 20 nt, Human
uuauauuuucguaugaaaau

SEQ ID NO: 3412593 - RNA, 14 nt, Human
uuauauuuuucuua

SEQ ID NO: 3412594 - RNA, 16 nt, Human
uuaucaaaaauuucau

SEQ ID NO: 3412595 - RNA, 22 nt, Human
uuaucaaagggugaaaauuauu

SEQ ID NO: 3412596 - RNA, 20 nt, Human
uuaucaaaucagucagugca

SEQ ID NO: 3412597 - RNA, 15 nt, Human
uuaucaacaauagug

SEQ ID NO: 3412598 - RNA, 14 nt, Human
uuaucaacauuugu

SEQ ID NO: 3412599 - RNA, 16 nt, Human
uuaucaacucaagaau

SEQ ID NO: 3412600 - RNA, 21 nt, Human
uuaucaacuuccuaaauauua

SEQ ID NO: 3412601 - RNA, 23 nt, Human
uuaucaagaguugugacaacuuc

SEQ ID NO: 3412602 - RNA, 15 nt, Human
uuaucaagugucuuc

SEQ ID NO: 3412603 - RNA, 17 nt, Human
uuaucaagugucuucca

SEQ ID NO: 3412604 - RNA, 22 nt, Human
uuaucaaguuugggucugugcu

SEQ ID NO: 3412605 - RNA, 16 nt, Human
uuaucaauagcccagg

SEQ ID NO: 3412606 - RNA, 15 nt, Human
uuaucaauaucuaau

SEQ ID NO: 3412607 - RNA, 23 nt, Human
uuaucaaugugucuuucuaagaa

SEQ ID NO: 3412608 - RNA, 20 nt, Human
uuaucaauuugucauuuuga

SEQ ID NO: 3412609 - RNA, 15 nt, Human
uuaucacauguaugu

SEQ ID NO: 3412610 - RNA, 16 nt, Human
uuaucacauguauguu

SEQ ID NO: 3412611 - RNA, 17 nt, Human
uuaucaccagcugccuc

SEQ ID NO: 3412612 - RNA, 18 nt, Human
uuaucacccagaagaaaa

SEQ ID NO: 3412613 - RNA, 18 nt, Human
uuaucaccgugggcuccc

SEQ ID NO: 3412614 - RNA, 21 nt, Human
uuaucaccgugggcucccuga

SEQ ID NO: 3412615 - RNA, 21 nt, Human
uuaucacugacacaaaaagua

SEQ ID NO: 3412616 - RNA, 16 nt, Human
uuaucacuuuuugaac

SEQ ID NO: 3412617 - RNA, 22 nt, Human
uuaucacuuuuugaacuaagaa

SEQ ID NO: 3412618 - RNA, 22 nt, Human
uuaucagacucggaaucuauuu

SEQ ID NO: 3412619 - RNA, 20 nt, Human
uuaucagauacaucacugcu

SEQ ID NO: 3412620 - RNA, 16 nt, Human
uuaucaguaaauaacu

SEQ ID NO: 3412621 - RNA, 23 nt, Human
uuaucagucauaacuaaauaaag

SEQ ID NO: 3412622 - RNA, 16 nt, Human
uuaucagugacagagu

SEQ ID NO: 3412623 - RNA, 21 nt, Human
uuaucaguuuccagucucaaa

SEQ ID NO: 3412624 - RNA, 16 nt, Human
uuaucauccacauugu

SEQ ID NO: 3412625 - RNA, 18 nt, Human
uuaucauccacauuguuu

SEQ ID NO: 3412626 - RNA, 12 nt, Human
uuaucaugaagc

SEQ ID NO: 3412627 - RNA, 18 nt, Human
uuaucaugaauuuuaaag

SEQ ID NO: 3412628 - RNA, 19 nt, Human
uuaucaugacauguuauau

SEQ ID NO: 3412629 - RNA, 17 nt, Human
uuaucaugugaaaucau

SEQ ID NO: 3412630 - RNA, 18 nt, Human
uuaucauguguaaucaau

SEQ ID NO: 3412631 - RNA, 11 nt, Human
uuaucauguua

SEQ ID NO: 3412632 - RNA, 22 nt, Human
uuaucauguuaguaauaccucu

SEQ ID NO: 3412633 - RNA, 23 nt, Human
uuaucauguuaguaauaccucua

SEQ ID NO: 3412634 - RNA, 18 nt, Human
uuaucauucaaguguaaa

SEQ ID NO: 3412635 - RNA, 16 nt, Human
uuaucauuuucaaaau

SEQ ID NO: 3412636 - RNA, 21 nt, Human
uuauccaaaauguguauuucu

SEQ ID NO: 3412637 - RNA, 22 nt, Human
uuauccaagguguaacucuaau

SEQ ID NO: 3412638 - RNA, 18 nt, Human
uuauccagaaaacuguga

SEQ ID NO: 3412639 - RNA, 18 nt, Human
uuauccauggggaaggga

SEQ ID NO: 3412640 - RNA, 15 nt, Human
uuaucccagcugccu

SEQ ID NO: 3412641 - RNA, 16 nt, Human
uuaucccagcugccua

SEQ ID NO: 3412642 - RNA, 20 nt, Human
uuaucccucaccuguagcag

SEQ ID NO: 3412643 - RNA, 19 nt, Human
uuauccuaaaacaaauagu

SEQ ID NO: 3412644 - RNA, 20 nt, Human
uuauccuagauuauaucaaa

SEQ ID NO: 3412645 - RNA, 22 nt, Human
uuauccuagauuauaucaaagu

SEQ ID NO: 3412646 - RNA, 18 nt, Human
uuauccuagcacaugcuu

SEQ ID NO: 3412647 - RNA, 11 nt, Human
uuauccucccu

SEQ ID NO: 3412648 - RNA, 13 nt, Human
uuauccucccugu

SEQ ID NO: 3412649 - RNA, 16 nt, Human
uuauccucugaucucc

SEQ ID NO: 3412650 - RNA, 19 nt, Human
uuauccucugaucuccaug

SEQ ID NO: 3412651 - RNA, 20 nt, Human
uuauccucugaucuccaugg

SEQ ID NO: 3412652 - RNA, 14 nt, Human
uuauccucuuuaga

SEQ ID NO: 3412653 - RNA, 18 nt, Human
uuauccucuuuagaguua

SEQ ID NO: 3412654 - RNA, 17 nt, Human
uuauccugaaauuucag

SEQ ID NO: 3412655 - RNA, 13 nt, Human
uuauccugcauug

SEQ ID NO: 3412656 - RNA, 14 nt, Human
uuaucgaaauaaca

SEQ ID NO: 3412657 - RNA, 22 nt, Human
uuaucgaaauaacaauguuaag

SEQ ID NO: 3412658 - RNA, 15 nt, Human
uuaucggaagcagug

SEQ ID NO: 3412659 - RNA, 17 nt, Human
uuaucgggaacaguguu

SEQ ID NO: 3412660 - RNA, 18 nt, Human
uuaucguccagugacuuu

SEQ ID NO: 3412661 - RNA, 18 nt, Human
uuaucguuuucuuaaagu

SEQ ID NO: 3412662 - RNA, 22 nt, Human
uuaucguuuuuguauuuucaug

SEQ ID NO: 3412663 - RNA, 21 nt, Human
uuaucuaaguuaauuuaaagu

SEQ ID NO: 3412664 - RNA, 11 nt, Human
uuaucuaauuu

SEQ ID NO: 3412665 - RNA, 17 nt, Human
uuaucuaccaacuuuca

SEQ ID NO: 3412666 - RNA, 19 nt, Human
uuaucuagauguaaauuuu

SEQ ID NO: 3412667 - RNA, 22 nt, Human
uuauguuuuuuaaaauauuuau

SEQ ID NO: 3412668 - RNA, 23 nt, Human
uuauuaaaaaucucaaauuucua

SEQ ID NO: 3412669 - RNA, 14 nt, Human
uuauuaaaaugauu

SEQ ID NO: 3412670 - RNA, 14 nt, Human
uuauuaaaauucug

SEQ ID NO: 3412671 - RNA, 15 nt, Human
uuauuaaaauucuga

SEQ ID NO: 3412672 - RNA, 12 nt, Human
uuauuaaagaaa

SEQ ID NO: 3412673 - RNA, 14 nt, Human
uuauuaaagaaaaa

SEQ ID NO: 3412674 - RNA, 23 nt, Human
uuauuaaagaaaaaaauguauuu

SEQ ID NO: 3412675 - RNA, 17 nt, Human
uuauuaaaguucuguaa

SEQ ID NO: 3412676 - RNA, 16 nt, Human
uuauuaaauaaaauca

SEQ ID NO: 3412677 - RNA, 19 nt, Human
uuauuaaauaaaaucaauu

SEQ ID NO: 3412678 - RNA, 20 nt, Human
uuauuaaauaaaaucaauuu

SEQ ID NO: 3412679 - RNA, 21 nt, Human
uuauuaaauaaaaucaauuuu

SEQ ID NO: 3412680 - RNA, 21 nt, Human
uuauuaaaugcccagccccuu

SEQ ID NO: 3412681 - RNA, 15 nt, Human
uuauuaaaugcuuca

SEQ ID NO: 3412682 - RNA, 16 nt, Human
uuauuaaauggaaacu

SEQ ID NO: 3412683 - RNA, 15 nt, Human
uuauuaaauguagcu

SEQ ID NO: 3412684 - RNA, 17 nt, Human
uuauuaaauuguaaaac

SEQ ID NO: 3412685 - RNA, 18 nt, Human
uuauuaacauaggugaaa

SEQ ID NO: 3412686 - RNA, 15 nt, Human
uuauuaacuuuaaug

SEQ ID NO: 3412687 - RNA, 18 nt, Human
uuauuaagagguaagacu

SEQ ID NO: 3412688 - RNA, 19 nt, Human
uuauuaagagguaagacuu

SEQ ID NO: 3412689 - RNA, 21 nt, Human
uuauuaagauggauucucaga

SEQ ID NO: 3412690 - RNA, 15 nt, Human
uuauuaagcuuuuug

SEQ ID NO: 3412691 - RNA, 15 nt, Human
uuauuaauaaacauu

SEQ ID NO: 3412692 - RNA, 19 nt, Human
uuauuaauauauauuaucu

SEQ ID NO: 3412693 - RNA, 12 nt, Human
uuauuaaucacu

SEQ ID NO: 3412694 - RNA, 13 nt, Human
uuauuaaucacug

SEQ ID NO: 3412695 - RNA, 18 nt, Human
uuauuaaucacuguguau

SEQ ID NO: 3412696 - RNA, 13 nt, Human
uuauuaaugcacu

SEQ ID NO: 3412697 - RNA, 18 nt, Human
uuauuaaugcacuuucua

SEQ ID NO: 3412698 - RNA, 15 nt, Human
uuauuaaugcuaagg

SEQ ID NO: 3412699 - RNA, 13 nt, Human
uuauuaauguuuu

SEQ ID NO: 3412700 - RNA, 16 nt, Human
uuauuaauguuuucaa

SEQ ID NO: 3412701 - RNA, 14 nt, Human
uuauuaauugcuuu

SEQ ID NO: 3412702 - RNA, 15 nt, Human
uuauuaauugcuuug

SEQ ID NO: 3412703 - RNA, 16 nt, Human
uuauuacaguauaauu

SEQ ID NO: 3412704 - RNA, 18 nt, Human
uuauuacauccuuguggc

SEQ ID NO: 3412705 - RNA, 20 nt, Human
uuauuacauccuuguggcac

SEQ ID NO: 3412706 - RNA, 13 nt, Human
uuauuacauguaa

SEQ ID NO: 3412707 - RNA, 18 nt, Human
uuauuacauguaauuuga

SEQ ID NO: 3412708 - RNA, 21 nt, Human
uuauuaccagugaaucuuugu

SEQ ID NO: 3412709 - RNA, 18 nt, Human
uuauuacccagaguuuuu

SEQ ID NO: 3412710 - RNA, 15 nt, Human
uuauuaccucugaua

SEQ ID NO: 3412711 - RNA, 21 nt, Human
uuauuacguaugucugguucu

SEQ ID NO: 3412712 - RNA, 14 nt, Human
uuauuacugcuaag

SEQ ID NO: 3412713 - RNA, 16 nt, Human
uuauuacuuccaugaa

SEQ ID NO: 3412714 - RNA, 18 nt, Human
uuauuacuuccaugaauu

SEQ ID NO: 3412715 - RNA, 16 nt, Human
uuauuacuuguaaaua

SEQ ID NO: 3412716 - RNA, 14 nt, Human
uuauuacuuuugcu

SEQ ID NO: 3412717 - RNA, 18 nt, Human
uuauuagaaucaaacauu

SEQ ID NO: 3412718 - RNA, 16 nt, Human
uuauuagggagaaaau

SEQ ID NO: 3412719 - RNA, 18 nt, Human
uuauuagggagaaaauuc

SEQ ID NO: 3412720 - RNA, 24 nt, Human
uuauuaguaccauaguaccauuua

SEQ ID NO: 3412721 - RNA, 22 nt, Human
uuauuaguuccccaaauacaaa

SEQ ID NO: 3412722 - RNA, 15 nt, Human
uuauuaguuuacauc

SEQ ID NO: 3412723 - RNA, 21 nt, Human
uuauuauaaucuuauaauugu

SEQ ID NO: 3412724 - RNA, 12 nt, Human
uuauuauaauug

SEQ ID NO: 3412725 - RNA, 18 nt, Human
uuauuauaauuguaucag

SEQ ID NO: 3412726 - RNA, 20 nt, Human
uuauuauaauuguaucagag

SEQ ID NO: 3412727 - RNA, 15 nt, Human
uuauuauauauauaa

SEQ ID NO: 3412728 - RNA, 15 nt, Human
uuauuauauuuacaa

SEQ ID NO: 3412729 - RNA, 17 nt, Human
uuauuaugaaacuugug

SEQ ID NO: 3412730 - RNA, 19 nt, Human
uuauuaugcauaacugaca

SEQ ID NO: 3412731 - RNA, 20 nt, Human
uuauuaugcauaacugacaa

SEQ ID NO: 3412732 - RNA, 23 nt, Human
uuauuauggcacaucagcacgau

SEQ ID NO: 3412733 - RNA, 15 nt, Human
uuauuauugaaauug

SEQ ID NO: 3412734 - RNA, 20 nt, Human
uuauuauuugcagucaugga

SEQ ID NO: 3412735 - RNA, 22 nt, Human
uuauuauuuguguuuuaauuua

SEQ ID NO: 3412736 - RNA, 16 nt, Human
uuauuauuuucaccug

SEQ ID NO: 3412737 - RNA, 15 nt, Human
uuauucaaagagaaa

SEQ ID NO: 3412738 - RNA, 20 nt, Human
uuauucaaagagaaaacauc

SEQ ID NO: 3412739 - RNA, 22 nt, Human
uuauucaacagcaagugugaau

SEQ ID NO: 3412740 - RNA, 23 nt, Human
uuauucaagaaugccaguagaaa

SEQ ID NO: 3412741 - RNA, 15 nt, Human
uuauucaagguaaaa

SEQ ID NO: 3412742 - RNA, 21 nt, Human
uuauucaauaaaguauuuaau

SEQ ID NO: 3412743 - RNA, 20 nt, Human
uuauucaauuuauuugaaug

SEQ ID NO: 3412744 - RNA, 19 nt, Human
uuauucaccauguaaaaca

SEQ ID NO: 3412745 - RNA, 21 nt, Human
uuauucacugaaguucuccug

SEQ ID NO: 3412746 - RNA, 20 nt, Human
uuauucacuuuuauuuagca

SEQ ID NO: 3412747 - RNA, 23 nt, Human
uuauucaggaaaagccucugugu

SEQ ID NO: 3412748 - RNA, 13 nt, Human
uuauucaguguca

SEQ ID NO: 3412749 - RNA, 14 nt, Human
uuauucagugucac

SEQ ID NO: 3412750 - RNA, 17 nt, Human
uuauucaguuaagaaaa

SEQ ID NO: 3412751 - RNA, 11 nt, Human
uuauucauugg

SEQ ID NO: 3412752 - RNA, 16 nt, Human
uuauucauuuaaaaug

SEQ ID NO: 3412753 - RNA, 13 nt, Human
uuauuccacaucu

SEQ ID NO: 3412754 - RNA, 19 nt, Human
uuauuccacaucuacguuu

SEQ ID NO: 3412755 - RNA, 17 nt, Human
uuauuccagaaugcugu

SEQ ID NO: 3412756 - RNA, 17 nt, Human
uuauuccauauuagaaa

SEQ ID NO: 3412757 - RNA, 19 nt, Human
uuauuccauauucauguaa

SEQ ID NO: 3412758 - RNA, 20 nt, Human
uuauuccauauucauguaaa

SEQ ID NO: 3412759 - RNA, 13 nt, Human
uuauuccaugacu

SEQ ID NO: 3412760 - RNA, 16 nt, Human
uuauuccaugacugcu

SEQ ID NO: 3412761 - RNA, 23 nt, Human
uuauuccaugacugcuugcccua

SEQ ID NO: 3412762 - RNA, 14 nt, Human
uuauuccuaguugg

SEQ ID NO: 3412763 - RNA, 17 nt, Human
uuauuccugauaauaau

SEQ ID NO: 3412764 - RNA, 20 nt, Human
uuauuccugcccugcuguuu

SEQ ID NO: 3412765 - RNA, 17 nt, Human
uuauuccuguauguugu

SEQ ID NO: 3412766 - RNA, 19 nt, Human
uuauuccuguauguugucc

SEQ ID NO: 3412767 - RNA, 14 nt, Human
uuauucucaaagca

SEQ ID NO: 3412768 - RNA, 16 nt, Human
uuauucucaaagcagg

SEQ ID NO: 3412769 - RNA, 20 nt, Human
uuauucugggaauguauagu

SEQ ID NO: 3412770 - RNA, 23 nt, Human
uuauucugggcaccacaaaauau

SEQ ID NO: 3412771 - RNA, 20 nt, Human
uuauucuguagauucugugg

SEQ ID NO: 3412772 - RNA, 15 nt, Human
uuauucuugaugaaa

SEQ ID NO: 3412773 - RNA, 12 nt, Human
uuauucuugguu

SEQ ID NO: 3412774 - RNA, 14 nt, Human
uuauucuuugcacu

SEQ ID NO: 3412775 - RNA, 15 nt, Human
uuauucuuugcacuu

SEQ ID NO: 3412776 - RNA, 13 nt, Human
uuauucuuuuuaa

SEQ ID NO: 3412777 - RNA, 13 nt, Human
uuauugaagaaac

SEQ ID NO: 3412778 - RNA, 22 nt, Human
uuauugaagaaacagauaccau

SEQ ID NO: 3412779 - RNA, 15 nt, Human
uuauugaagcagagu

SEQ ID NO: 3412780 - RNA, 16 nt, Human
uuauugaagcagagug

SEQ ID NO: 3412781 - RNA, 23 nt, Human
uuauugaaggaagccaaauuuau

SEQ ID NO: 3412782 - RNA, 16 nt, Human
uuauugaauauaugau

SEQ ID NO: 3412783 - RNA, 20 nt, Human
uuauugaaucuauuuaagua

SEQ ID NO: 3412784 - RNA, 14 nt, Human
uuauugacaauaau

SEQ ID NO: 3412785 - RNA, 18 nt, Human
uuauugacaauaauuuca

SEQ ID NO: 3412786 - RNA, 12 nt, Human
uuauugacacug

SEQ ID NO: 3412787 - RNA, 17 nt, Human
uuauugacucuugaguu

SEQ ID NO: 3412788 - RNA, 20 nt, Human
uuauugacucuugaguuguu

SEQ ID NO: 3412789 - RNA, 14 nt, Human
uuauugagaaagag

SEQ ID NO: 3412790 - RNA, 18 nt, Human
uuauugagagagaugugu

SEQ ID NO: 3412791 - RNA, 19 nt, Human
uuauugagagagaugugua

SEQ ID NO: 3412792 - RNA, 23 nt, Human
uuauugagauuguccucauuucu

SEQ ID NO: 3412793 - RNA, 14 nt, Human
uuauugaguuugua

SEQ ID NO: 3412794 - RNA, 19 nt, Human
uuauugauaaguucauaca

SEQ ID NO: 3412795 - RNA, 14 nt, Human
uuauugauauauau

SEQ ID NO: 3412796 - RNA, 13 nt, Human
uuauugaugaaaa

SEQ ID NO: 3412797 - RNA, 15 nt, Human
uuauugauguuuuca

SEQ ID NO: 3412798 - RNA, 12 nt, Human
uuauugcacaaa

SEQ ID NO: 3412799 - RNA, 19 nt, Human
uuauugcagcgauuaauaa

SEQ ID NO: 3412800 - RNA, 18 nt, Human
uuauugcaguuuaucauu

SEQ ID NO: 3412801 - RNA, 22 nt, Human
uuauugcaguuuaucauucaag

SEQ ID NO: 3412802 - RNA, 12 nt, Human
uuauugcauuug

SEQ ID NO: 3412803 - RNA, 21 nt, Human
uuauugcccaugauauaacuu

SEQ ID NO: 3412804 - RNA, 15 nt, Human
uuauugcgcugcuac

SEQ ID NO: 3412805 - RNA, 16 nt, Human
uuauugcuaguauuug

SEQ ID NO: 3412806 - RNA, 19 nt, Human
uuauugcuaguauuugaau

SEQ ID NO: 3412807 - RNA, 17 nt, Human
uuauugcugauuuuaau

SEQ ID NO: 3412808 - RNA, 12 nt, Human
uuauugcuguug

SEQ ID NO: 3412809 - RNA, 13 nt, Human
uuauugcuuuuau

SEQ ID NO: 3412810 - RNA, 22 nt, Human
uuauuggcugagauaugaacau

SEQ ID NO: 3412811 - RNA, 16 nt, Human
uuauuggcuuuucuga

SEQ ID NO: 3412812 - RNA, 13 nt, Human
uucacacugucug

SEQ ID NO: 3412813 - RNA, 12 nt, Human
uucacacuucca

SEQ ID NO: 3412814 - RNA, 15 nt, Human
uucacacuuccacca

SEQ ID NO: 3412815 - RNA, 20 nt, Human
uucacacuuccaccagccug

SEQ ID NO: 3412816 - RNA, 12 nt, Human
uucacacuugaa

SEQ ID NO: 3412817 - RNA, 10 nt, Human
uucacagagc

SEQ ID NO: 3412818 - RNA, 12 nt, Human
uucacagcuccu

SEQ ID NO: 3412819 - RNA, 13 nt, Human
uucacagcuccuc

SEQ ID NO: 3412820 - RNA, 12 nt, Human
uucacaggcagc

SEQ ID NO: 3412821 - RNA, 14 nt, Human
uucacaggcagcca

SEQ ID NO: 3412822 - RNA, 16 nt, Human
uucacaggcagccagu

SEQ ID NO: 3412823 - RNA, 10 nt, Human
uucacaggcg

SEQ ID NO: 3412824 - RNA, 15 nt, Human
uucacaguagagcca

SEQ ID NO: 3412825 - RNA, 19 nt, Human
uucacaguagagccagcuu

SEQ ID NO: 3412826 - RNA, 20 nt, Human
uucacaguagagccagcuug

SEQ ID NO: 3412827 - RNA, 21 nt, Human
uucacagugaucgaugauuca

SEQ ID NO: 3412828 - RNA, 22 nt, Human
uucacagugaucgaugauucag

SEQ ID NO: 3412829 - RNA, 13 nt, Human
uucacaguucucu

SEQ ID NO: 3412830 - RNA, 15 nt, Human
uucacaguucucucc

SEQ ID NO: 3412831 - RNA, 20 nt, Human
uucacaguucucuccuucuu

SEQ ID NO: 3412832 - RNA, 22 nt, Human
uucacaguuugaaauaagcuau

SEQ ID NO: 3412833 - RNA, 17 nt, Human
uucacauaaaauagauu

SEQ ID NO: 3412834 - RNA, 20 nt, Human
uucacauaaaugcagcccau

SEQ ID NO: 3412835 - RNA, 18 nt, Human
uucacauaagcucagaau

SEQ ID NO: 3412836 - RNA, 17 nt, Human
uucacauacccuccccc

SEQ ID NO: 3412837 - RNA, 19 nt, Human
uucacauagagaucauccu

SEQ ID NO: 3412838 - RNA, 15 nt, Human
uucacauagcugucu

SEQ ID NO: 3412839 - RNA, 17 nt, Human
uucacauauugauuucc

SEQ ID NO: 3412840 - RNA, 21 nt, Human
uucacauccuguguuucuagg

SEQ ID NO: 3412841 - RNA, 19 nt, Human
uucacaucuaaccucaucu

SEQ ID NO: 3412842 - RNA, 13 nt, Human
uucacaucucauu

SEQ ID NO: 3412843 - RNA, 20 nt, Human
uucacauguuuucaaaugga

SEQ ID NO: 3412844 - RNA, 18 nt, Human
uucacauuaaaaaaugaa

SEQ ID NO: 3412845 - RNA, 23 nt, Human
uucacauuaaaaaaugaaauauu

SEQ ID NO: 3412846 - RNA, 14 nt, Human
uucacauuauucug

SEQ ID NO: 3412847 - RNA, 19 nt, Human
uucacauucuuauaaauau

SEQ ID NO: 3412848 - RNA, 15 nt, Human
uucacauucuuggcu

SEQ ID NO: 3412849 - RNA, 13 nt, Human
uucacauuggaaa

SEQ ID NO: 3412850 - RNA, 17 nt, Human
uucacauuguuaagaaa

SEQ ID NO: 3412851 - RNA, 16 nt, Human
uucaccaaaauuaucc

SEQ ID NO: 3412852 - RNA, 15 nt, Human
uucaccacagacuuu

SEQ ID NO: 3412853 - RNA, 22 nt, Human
uucaccacaugugcacaugcac

SEQ ID NO: 3412854 - RNA, 16 nt, Human
uucaccacuucacuga

SEQ ID NO: 3412855 - RNA, 12 nt, Human
uucaccagagca

SEQ ID NO: 3412856 - RNA, 22 nt, Human
uucaccaguacauucucaguuu

SEQ ID NO: 3412857 - RNA, 17 nt, Human
uucaccaucaauccuga

SEQ ID NO: 3412858 - RNA, 16 nt, Human
uucaccauguaaaaca

SEQ ID NO: 3412859 - RNA, 22 nt, Human
uucaccauguaaaacaaaaaac

SEQ ID NO: 3412860 - RNA, 22 nt, Human
uucaccauguuggccaggcugc

SEQ ID NO: 3412861 - RNA, 18 nt, Human
uucaccauuauaaugaau

SEQ ID NO: 3412862 - RNA, 16 nt, Human
uucacccacagaaaga

SEQ ID NO: 3412863 - RNA, 13 nt, Human
uucaccccacccu

SEQ ID NO: 3412864 - RNA, 20 nt, Human
uucaccccagggccugagcc

SEQ ID NO: 3412865 - RNA, 20 nt, Human
uucaccccaucccuccuuaa

SEQ ID NO: 3412866 - RNA, 17 nt, Human
uucaccccccacucacc

SEQ ID NO: 3412867 - RNA, 22 nt, Human
uucaccccccacucaccagugu

SEQ ID NO: 3412868 - RNA, 21 nt, Human
uucacccccugagauccccug

SEQ ID NO: 3412869 - RNA, 18 nt, Human
uucaccccggcaggcccu

SEQ ID NO: 3412870 - RNA, 20 nt, Human
uucaccccggcaggcccugc

SEQ ID NO: 3412871 - RNA, 12 nt, Human
uucaccccuccc

SEQ ID NO: 3412872 - RNA, 13 nt, Human
uucacccucugua

SEQ ID NO: 3412873 - RNA, 22 nt, Human
uucacccuuauagucuaagacu

SEQ ID NO: 3412874 - RNA, 13 nt, Human
uucacccuuuucu

SEQ ID NO: 3412875 - RNA, 14 nt, Human
uucaccgaggacau

SEQ ID NO: 3412876 - RNA, 13 nt, Human
uucaccuccucgc

SEQ ID NO: 3412877 - RNA, 21 nt, Human
uucaccugauucaacuaaaaa

SEQ ID NO: 3412878 - RNA, 21 nt, Human
uucaccuggaagcauuuguuu

SEQ ID NO: 3412879 - RNA, 11 nt, Human
uucaccuguaa

SEQ ID NO: 3412880 - RNA, 22 nt, Human
uucaccuguuuuuaagcuguuu

SEQ ID NO: 3412881 - RNA, 15 nt, Human
uucacgauucauuuu

SEQ ID NO: 3412882 - RNA, 22 nt, Human
uucacgcaacuugaaauuauau

SEQ ID NO: 3412883 - RNA, 14 nt, Human
uucacgcccuuggc

SEQ ID NO: 3412884 - RNA, 19 nt, Human
uucacgccugaggcaauua

SEQ ID NO: 3412885 - RNA, 21 nt, Human
uucacgccuguaaucccagca

SEQ ID NO: 3412886 - RNA, 23 nt, Human
uucacgccuguaaucccagcacu

SEQ ID NO: 3412887 - RNA, 15 nt, Human
uucacgugguccuaa

SEQ ID NO: 3412888 - RNA, 18 nt, Human
uucacuauaaaugguguu

SEQ ID NO: 3412889 - RNA, 16 nt, Human
uucacuauaaugugaa

SEQ ID NO: 3412890 - RNA, 14 nt, Human
uucacuauuuccuu

SEQ ID NO: 3412891 - RNA, 14 nt, Human
uucacucacuguca

SEQ ID NO: 3412892 - RNA, 13 nt, Human
uucacuccagccu

SEQ ID NO: 3412893 - RNA, 23 nt, Human
uucacuccggugugccugcagcc

SEQ ID NO: 3412894 - RNA, 17 nt, Human
uucacucuaagauguua

SEQ ID NO: 3412895 - RNA, 18 nt, Human
uucacucuaagauguuau

SEQ ID NO: 3412896 - RNA, 22 nt, Human
uucacucuaagauguuauauuu

SEQ ID NO: 3412897 - RNA, 21 nt, Human
uucacucuccauuuaauaauu

SEQ ID NO: 3412898 - RNA, 19 nt, Human
uucacucuccuaugccuuu

SEQ ID NO: 3412899 - RNA, 13 nt, Human
uucacucuccuug

SEQ ID NO: 3412900 - RNA, 21 nt, Human
uucacucugggcacacucugc

SEQ ID NO: 3412901 - RNA, 23 nt, Human
uucacucuuaggcacuuuggggg

SEQ ID NO: 3412902 - RNA, 13 nt, Human
uucacugaagacg

SEQ ID NO: 3412903 - RNA, 13 nt, Human
uucacugccccca

SEQ ID NO: 3412904 - RNA, 16 nt, Human
uucacugccuuugcuc

SEQ ID NO: 3412905 - RNA, 17 nt, Human
uucacugcuggcugccu

SEQ ID NO: 3412906 - RNA, 19 nt, Human
uucacugcuggcugccuua

SEQ ID NO: 3412907 - RNA, 22 nt, Human
uucacuggccccuacuuugugg

SEQ ID NO: 3412908 - RNA, 20 nt, Human
uucacuguaagacucauucc

SEQ ID NO: 3412909 - RNA, 19 nt, Human
uucacuguauaaauaggag

SEQ ID NO: 3412910 - RNA, 20 nt, Human
uucacugucaccacccugcu

SEQ ID NO: 3412911 - RNA, 22 nt, Human
uucacugucaggaagaaaucac

SEQ ID NO: 3412912 - RNA, 16 nt, Human
uucacugucugucugg

SEQ ID NO: 3412913 - RNA, 12 nt, Human
uucacugugcug

SEQ ID NO: 3412914 - RNA, 18 nt, Human
uucacugugcuguuguua

SEQ ID NO: 3412915 - RNA, 22 nt, Human
uucacuguuagcuuuuuaaaac

SEQ ID NO: 3412916 - RNA, 21 nt, Human
uucacuguugaaaauuauuuu

SEQ ID NO: 3412917 - RNA, 22 nt, Human
uucacuuaaguuaguuccacug

SEQ ID NO: 3412918 - RNA, 13 nt, Human
uucacuucacgcu

SEQ ID NO: 3412919 - RNA, 14 nt, Human
uucacuucucccaa

SEQ ID NO: 3412920 - RNA, 18 nt, Human
uucacuucucccaagacu

SEQ ID NO: 3412921 - RNA, 13 nt, Human
uucacuucuuucc

SEQ ID NO: 3412922 - RNA, 16 nt, Human
uucacuucuuucccuu

SEQ ID NO: 3412923 - RNA, 22 nt, Human
uucacuucuuucccuuccucca

SEQ ID NO: 3412924 - RNA, 19 nt, Human
uucacuuguguuuuaaaau

SEQ ID NO: 3412925 - RNA, 20 nt, Human
uucacuuguucuuaaacuuu

SEQ ID NO: 3412926 - RNA, 17 nt, Human
uucacuuuagaugcuga

SEQ ID NO: 3412927 - RNA, 17 nt, Human
uucacuuucaaaaacau

SEQ ID NO: 3412928 - RNA, 15 nt, Human
uucacuuucauuuuu

SEQ ID NO: 3412929 - RNA, 22 nt, Human
uucacuuuugcaagguuccaca

SEQ ID NO: 3412930 - RNA, 18 nt, Human
uucagaaaacgggaagcg

SEQ ID NO: 3412931 - RNA, 13 nt, Human
uucagaaaauauu

SEQ ID NO: 3412932 - RNA, 15 nt, Human
uucagaaaauguucu

SEQ ID NO: 3412933 - RNA, 18 nt, Human
uucagaaagugugcuuua

SEQ ID NO: 3412934 - RNA, 21 nt, Human
uucagaaauauaacacauuuu

SEQ ID NO: 3412935 - RNA, 13 nt, Human
uucagaaauaugu

SEQ ID NO: 3412936 - RNA, 18 nt, Human
uucagaaaugcugccugc

SEQ ID NO: 3412937 - RNA, 20 nt, Human
uucagaaaugcugccugccu

SEQ ID NO: 3412938 - RNA, 21 nt, Human
uucagaaaugcugccugccug

SEQ ID NO: 3412939 - RNA, 11 nt, Human
uucagaaaugu

SEQ ID NO: 3412940 - RNA, 13 nt, Human
uucagaaaugugu

SEQ ID NO: 3412941 - RNA, 23 nt, Human
uucagaaccccaacuacuguguu

SEQ ID NO: 3412942 - RNA, 12 nt, Human
uucagaaccucu

SEQ ID NO: 3412943 - RNA, 17 nt, Human
uucagaaccucuucccc

SEQ ID NO: 3412944 - RNA, 13 nt, Human
uucagaagaaauu

SEQ ID NO: 3412945 - RNA, 16 nt, Human
uucagaagacacugca

SEQ ID NO: 3412946 - RNA, 16 nt, Human
uucagaaggggagggg

SEQ ID NO: 3412947 - RNA, 22 nt, Human
uucagaagucacacauuacaaa

SEQ ID NO: 3412948 - RNA, 22 nt, Human
uucagaagugagcuuugcugcu

SEQ ID NO: 3412949 - RNA, 20 nt, Human
uucagaagugcccuuccugc

SEQ ID NO: 3412950 - RNA, 14 nt, Human
uucagaaguuuaaa

SEQ ID NO: 3412951 - RNA, 20 nt, Human
uucagaaguuuggcaauagu

SEQ ID NO: 3412952 - RNA, 19 nt, Human
uucagaaucacuucugaga

SEQ ID NO: 3412953 - RNA, 13 nt, Human
uucagaaucugaa

SEQ ID NO: 3412954 - RNA, 17 nt, Human
uucagaaucugaaugua

SEQ ID NO: 3412955 - RNA, 21 nt, Human
uucagaaucugaauguaauuu

SEQ ID NO: 3412956 - RNA, 17 nt, Human
uucagaaucuuuguuaa

SEQ ID NO: 3412957 - RNA, 21 nt, Human
uucugaaauuuccugggagcu

SEQ ID NO: 3412958 - RNA, 18 nt, Human
uucugaacagcuggugua

SEQ ID NO: 3412959 - RNA, 23 nt, Human
uucugaacagcugguguagcuac

SEQ ID NO: 3412960 - RNA, 19 nt, Human
uucugaacuuggcgcugcc

SEQ ID NO: 3412961 - RNA, 22 nt, Human
uucugaacuuggcgcugccccu

SEQ ID NO: 3412962 - RNA, 12 nt, Human
uucugaagaaga

SEQ ID NO: 3412963 - RNA, 15 nt, Human
uucugaaguuauauu

SEQ ID NO: 3412964 - RNA, 16 nt, Human
uucugaauaaagcaau

SEQ ID NO: 3412965 - RNA, 11 nt, Human
uucugaauaug

SEQ ID NO: 3412966 - RNA, 22 nt, Human
uucugaauauuuuaucuuuccu

SEQ ID NO: 3412967 - RNA, 14 nt, Human
uucugaaugcugcu

SEQ ID NO: 3412968 - RNA, 23 nt, Human
uucugaaugcuucuaaguaaaua

SEQ ID NO: 3412969 - RNA, 15 nt, Human
uucugacaaacugug

SEQ ID NO: 3412970 - RNA, 22 nt, Human
uucugacacgacuucuguuuca

SEQ ID NO: 3412971 - RNA, 20 nt, Human
uucugaccacagcaucauuu

SEQ ID NO: 3412972 - RNA, 14 nt, Human
uucugaccauuuca

SEQ ID NO: 3412973 - RNA, 22 nt, Human
uucugacccaugcugcccugug

SEQ ID NO: 3412974 - RNA, 13 nt, Human
uucugaccucagc

SEQ ID NO: 3412975 - RNA, 15 nt, Human
uucugaccucagcau

SEQ ID NO: 3412976 - RNA, 15 nt, Human
uucugacuccagugg

SEQ ID NO: 3412977 - RNA, 15 nt, Human
uucugacucugagcu

SEQ ID NO: 3412978 - RNA, 14 nt, Human
uucugacucuuccc

SEQ ID NO: 3412979 - RNA, 13 nt, Human
uucugagaaaaca

SEQ ID NO: 3412980 - RNA, 21 nt, Human
uucugagaaaacaagcaaguu

SEQ ID NO: 3412981 - RNA, 16 nt, Human
uucugagaaagacuau

SEQ ID NO: 3412982 - RNA, 19 nt, Human
uucugagacgucaugagga

SEQ ID NO: 3412983 - RNA, 19 nt, Human
uucugagauggcucccagg

SEQ ID NO: 3412984 - RNA, 21 nt, Human
uucugagcccgggcugccugg

SEQ ID NO: 3412985 - RNA, 21 nt, Human
uucugaggacauuccaagaca

SEQ ID NO: 3412986 - RNA, 15 nt, Human
uucugagugccuucu

SEQ ID NO: 3412987 - RNA, 18 nt, Human
uucugagugccuucugug

SEQ ID NO: 3412988 - RNA, 22 nt, Human
uucugagugccuucugugggga

SEQ ID NO: 3412989 - RNA, 14 nt, Human
uucugaguguuuuu

SEQ ID NO: 3412990 - RNA, 20 nt, Human
uucugaguguuuuuacuaca

SEQ ID NO: 3412991 - RNA, 12 nt, Human
uucugaguuccu

SEQ ID NO: 3412992 - RNA, 23 nt, Human
uucugaguuucauucuccugccu

SEQ ID NO: 3412993 - RNA, 21 nt, Human
uucugaguuuuguguuuguug

SEQ ID NO: 3412994 - RNA, 19 nt, Human
uucugauaaaagauggcca

SEQ ID NO: 3412995 - RNA, 16 nt, Human
uucugauaaugaaaau

SEQ ID NO: 3412996 - RNA, 15 nt, Human
uucugaucaaggccu

SEQ ID NO: 3412997 - RNA, 15 nt, Human
uucugaucacugaaa

SEQ ID NO: 3412998 - RNA, 21 nt, Human
uucugaugucucuaaagcacu

SEQ ID NO: 3412999 - RNA, 15 nt, Human
uucugauuagcuuug

SEQ ID NO: 3413000 - RNA, 20 nt, Human
uucugauuagcuuuguguuu

SEQ ID NO: 3413001 - RNA, 12 nt, Human
uucugauuccac

SEQ ID NO: 3413002 - RNA, 11 nt, Human
uucugauugua

SEQ ID NO: 3413003 - RNA, 20 nt, Human
uucugauuucuuuucaccau

SEQ ID NO: 3413004 - RNA, 23 nt, Human
uucugauuuuaggagcuaaggcu

SEQ ID NO: 3413005 - RNA, 19 nt, Human
uucugcaaaaauauuuaua

SEQ ID NO: 3413006 - RNA, 13 nt, Human
uucugcaagccug

SEQ ID NO: 3413007 - RNA, 12 nt, Human
uucugcacccuc

SEQ ID NO: 3413008 - RNA, 16 nt, Human
uucugcacccuccacc

SEQ ID NO: 3413009 - RNA, 19 nt, Human
uucugcacccuccacccug

SEQ ID NO: 3413010 - RNA, 15 nt, Human
uucugcaccuuaucu

SEQ ID NO: 3413011 - RNA, 16 nt, Human
uucugcacuauaugca

SEQ ID NO: 3413012 - RNA, 17 nt, Human
uucugcacugagcagag

SEQ ID NO: 3413013 - RNA, 23 nt, Human
uucugcagaguuuccaaaaccag

SEQ ID NO: 3413014 - RNA, 17 nt, Human
uucugcauauguugaau

SEQ ID NO: 3413015 - RNA, 21 nt, Human
uucugcauucauuuuuauagc

SEQ ID NO: 3413016 - RNA, 22 nt, Human
uucugcauugcuagauaaaagc

SEQ ID NO: 3413017 - RNA, 14 nt, Human
uucugccacauaaa

SEQ ID NO: 3413018 - RNA, 22 nt, Human
uucugccagauguccuaauggu

SEQ ID NO: 3413019 - RNA, 16 nt, Human
uucugccauuucaugu

SEQ ID NO: 3413020 - RNA, 19 nt, Human
uucugcccaaaaauauggu

SEQ ID NO: 3413021 - RNA, 20 nt, Human
uucugcccauccugucuguu

SEQ ID NO: 3413022 - RNA, 23 nt, Human
uucugcccugugggaccccaggc

SEQ ID NO: 3413023 - RNA, 13 nt, Human
uucugccgcagcc

SEQ ID NO: 3413024 - RNA, 14 nt, Human
uucugccgcagccc

SEQ ID NO: 3413025 - RNA, 15 nt, Human
uucugccgcagcccu

SEQ ID NO: 3413026 - RNA, 21 nt, Human
uucugccgcccccuccugaac

SEQ ID NO: 3413027 - RNA, 16 nt, Human
uucugccucugaugua

SEQ ID NO: 3413028 - RNA, 12 nt, Human
uucugccugcca

SEQ ID NO: 3413029 - RNA, 17 nt, Human
uucugccugccagcugc

SEQ ID NO: 3413030 - RNA, 19 nt, Human
uucugccugccagcugcac

SEQ ID NO: 3413031 - RNA, 17 nt, Human
uucugccugcccaggcc

SEQ ID NO: 3413032 - RNA, 14 nt, Human
uucugccuguuaua

SEQ ID NO: 3413033 - RNA, 15 nt, Human
uucugccuguuauaa

SEQ ID NO: 3413034 - RNA, 24 nt, Human
uucugccuguuauaacucugcacu

SEQ ID NO: 3413035 - RNA, 11 nt, Human
uucugccuucc

SEQ ID NO: 3413036 - RNA, 16 nt, Human
uucugccuucucauga

SEQ ID NO: 3413037 - RNA, 23 nt, Human
uucugccuuugauguuacagauu

SEQ ID NO: 3413038 - RNA, 20 nt, Human
uucugccuuugcagaaacag

SEQ ID NO: 3413039 - RNA, 13 nt, Human
uucugccuuugcc

SEQ ID NO: 3413040 - RNA, 15 nt, Human
uucugccuuugccag

SEQ ID NO: 3413041 - RNA, 22 nt, Human
uucugccuuuggggacuuuucu

SEQ ID NO: 3413042 - RNA, 12 nt, Human
uucugccuuuuc

SEQ ID NO: 3413043 - RNA, 16 nt, Human
uucugcuaaauuucaa

SEQ ID NO: 3413044 - RNA, 19 nt, Human
uucugcuacuggcaaaagg

SEQ ID NO: 3413045 - RNA, 19 nt, Human
uucugcucauucuaaugau

SEQ ID NO: 3413046 - RNA, 11 nt, Human
uucugcuccac

SEQ ID NO: 3413047 - RNA, 18 nt, Human
uucugcuccacccuuggc

SEQ ID NO: 3413048 - RNA, 15 nt, Human
uucugcuccagacag

SEQ ID NO: 3413049 - RNA, 16 nt, Human
uucugcuccagacagg

SEQ ID NO: 3413050 - RNA, 15 nt, Human
uucugcuccucucca

SEQ ID NO: 3413051 - RNA, 16 nt, Human
uucugcuccucuccag

SEQ ID NO: 3413052 - RNA, 18 nt, Human
uucugcuccucuccaggc

SEQ ID NO: 3413053 - RNA, 17 nt, Human
uucugcucugguuguuu

SEQ ID NO: 3413054 - RNA, 21 nt, Human
uucugcucugguuguuucugu

SEQ ID NO: 3413055 - RNA, 18 nt, Human
uucugcugaauuuucaca

SEQ ID NO: 3413056 - RNA, 20 nt, Human
uucugcugaauuuucacaug

SEQ ID NO: 3413057 - RNA, 21 nt, Human
uucugcuggauaaaaugaggu

SEQ ID NO: 3413058 - RNA, 15 nt, Human
uucugcuggccucug

SEQ ID NO: 3413059 - RNA, 18 nt, Human
uucugcuggccucugcga

SEQ ID NO: 3413060 - RNA, 19 nt, Human
uucugcuggccuggaucuc

SEQ ID NO: 3413061 - RNA, 13 nt, Human
uucugcugggcug

SEQ ID NO: 3413062 - RNA, 14 nt, Human
uucugcuuaggaga

SEQ ID NO: 3413063 - RNA, 16 nt, Human
uucugcuucaauaaau

SEQ ID NO: 3413064 - RNA, 19 nt, Human
uucugcuucaauaaaucuu

SEQ ID NO: 3413065 - RNA, 15 nt, Human
uucugcuucagccuc

SEQ ID NO: 3413066 - RNA, 13 nt, Human
uucugcuugagaa

SEQ ID NO: 3413067 - RNA, 17 nt, Human
uucugcuugagaauauu

SEQ ID NO: 3413068 - RNA, 22 nt, Human
uucugcuugcuugcuuuuuaau

SEQ ID NO: 3413069 - RNA, 14 nt, Human
uucugcuuucuccc

SEQ ID NO: 3413070 - RNA, 19 nt, Human
uucugcuuucuuugauucu

SEQ ID NO: 3413071 - RNA, 19 nt, Human
uucugcuuuguugugugcc

SEQ ID NO: 3413072 - RNA, 20 nt, Human
uucugcuuuguugugugccu

SEQ ID NO: 3413073 - RNA, 22 nt, Human
uucugcuuuguugugugccucu

SEQ ID NO: 3413074 - RNA, 13 nt, Human
uucugcuuuucug

SEQ ID NO: 3413075 - RNA, 19 nt, Human
uucugcuuuucugcccugg

SEQ ID NO: 3413076 - RNA, 19 nt, Human
uucugcuuuugaaaucugu

SEQ ID NO: 3413077 - RNA, 19 nt, Human
uucuggaauacaugaaaua

SEQ ID NO: 3413078 - RNA, 22 nt, Human
uucuggaaucauuguccagagc

SEQ ID NO: 3413079 - RNA, 20 nt, Human
uucuggaauguaaucaaugu

SEQ ID NO: 3413080 - RNA, 19 nt, Human
uucuggaauuuguucaagu

SEQ ID NO: 3413081 - RNA, 20 nt, Human
uucuggaauuuguucaaguu

SEQ ID NO: 3413082 - RNA, 22 nt, Human
uucuggaauuuguucaaguuuu

SEQ ID NO: 3413083 - RNA, 15 nt, Human
uucuggaccucuggg

SEQ ID NO: 3413084 - RNA, 21 nt, Human
uucuggaccuuguuguuguua

SEQ ID NO: 3413085 - RNA, 15 nt, Human
uucuggagucuccag

SEQ ID NO: 3413086 - RNA, 18 nt, Human
uucuggauaaagccacug

SEQ ID NO: 3413087 - RNA, 23 nt, Human
uucuggauggauuuuauaggaaa

SEQ ID NO: 3413088 - RNA, 20 nt, Human
uucuggauggugugccuucc

SEQ ID NO: 3413089 - RNA, 20 nt, Human
uucuggauuuugucaagcag

SEQ ID NO: 3413090 - RNA, 11 nt, Human
uucuggcaccg

SEQ ID NO: 3413091 - RNA, 17 nt, Human
uucuggccaguguuuaa

SEQ ID NO: 3413092 - RNA, 20 nt, Human
uucuggccugccuucguuaa

SEQ ID NO: 3413093 - RNA, 21 nt, Human
uucuggccuuuccucucuccu

SEQ ID NO: 3413094 - RNA, 16 nt, Human
uucuggcucucccauu

SEQ ID NO: 3413095 - RNA, 22 nt, Human
uucuggcucucccauuuccuga

SEQ ID NO: 3413096 - RNA, 15 nt, Human
uucuggcucuuccag

SEQ ID NO: 3413097 - RNA, 16 nt, Human
uucuggcucuuccagg

SEQ ID NO: 3413098 - RNA, 18 nt, Human
uucuggcugaaaaaggcc

SEQ ID NO: 3413099 - RNA, 20 nt, Human
uucuggcugccccaaccugc

SEQ ID NO: 3413100 - RNA, 14 nt, Human
uucugggagggcag

SEQ ID NO: 3413101 - RNA, 16 nt, Human
uucuuugcaaaguauu

SEQ ID NO: 3413102 - RNA, 14 nt, Human
uucuuugccuguuc

SEQ ID NO: 3413103 - RNA, 21 nt, Human
uucuuugcuugaacacaguau

SEQ ID NO: 3413104 - RNA, 21 nt, Human
uucuuuggauucuaaauacau

SEQ ID NO: 3413105 - RNA, 15 nt, Human
uucuuuggugccuuu

SEQ ID NO: 3413106 - RNA, 22 nt, Human
uucuuuggugccuuuccuguuc

SEQ ID NO: 3413107 - RNA, 22 nt, Human
uucuuugguggagauaaagauu

SEQ ID NO: 3413108 - RNA, 15 nt, Human
uucuuuguaaugaaa

SEQ ID NO: 3413109 - RNA, 16 nt, Human
uucuuuguaaugaaaa

SEQ ID NO: 3413110 - RNA, 22 nt, Human
uucuuuguacacccaugaaaga

SEQ ID NO: 3413111 - RNA, 10 nt, Human
uucuuugugu

SEQ ID NO: 3413112 - RNA, 11 nt, Human
uucuuugugua

SEQ ID NO: 3413113 - RNA, 19 nt, Human
uucuuugugucaacaugaa

SEQ ID NO: 3413114 - RNA, 14 nt, Human
uucuuuuaaagacc

SEQ ID NO: 3413115 - RNA, 18 nt, Human
uucuuuuaaauuagaaaa

SEQ ID NO: 3413116 - RNA, 20 nt, Human
uucuuuuaacuucuuucuau

SEQ ID NO: 3413117 - RNA, 21 nt, Human
uucuuuuaacuucuuucuauu

SEQ ID NO: 3413118 - RNA, 19 nt, Human
uucuuuuacucaugaucuu

SEQ ID NO: 3413119 - RNA, 12 nt, Human
uucuuuucacau

SEQ ID NO: 3413120 - RNA, 20 nt, Human
uucuuuucacauucuuauaa

SEQ ID NO: 3413121 - RNA, 23 nt, Human
uucuuuucgccguggcugcggca

SEQ ID NO: 3413122 - RNA, 15 nt, Human
uucuuuucuggccaa

SEQ ID NO: 3413123 - RNA, 15 nt, Human
uucuuuugaauuguu

SEQ ID NO: 3413124 - RNA, 23 nt, Human
uucuuuugagcaacuuucuuaca

SEQ ID NO: 3413125 - RNA, 22 nt, Human
uucuuuugcccuucacaguguu

SEQ ID NO: 3413126 - RNA, 14 nt, Human
uucuuuuggcuucc

SEQ ID NO: 3413127 - RNA, 13 nt, Human
uucuuuugguaaa

SEQ ID NO: 3413128 - RNA, 13 nt, Human
uucuuuuguaauu

SEQ ID NO: 3413129 - RNA, 18 nt, Human
uucuuuuguauguaaaug

SEQ ID NO: 3413130 - RNA, 13 nt, Human
uucuuuuguuacu

SEQ ID NO: 3413131 - RNA, 17 nt, Human
uucuuuuguuacuguuc

SEQ ID NO: 3413132 - RNA, 18 nt, Human
uucuuuuguuacuguucu

SEQ ID NO: 3413133 - RNA, 19 nt, Human
uucuuuuguuacuguucuu

SEQ ID NO: 3413134 - RNA, 13 nt, Human
uucuuuuguuugg

SEQ ID NO: 3413135 - RNA, 21 nt, Human
uucuuuuuaaguaauguggaa

SEQ ID NO: 3413136 - RNA, 23 nt, Human
uucuuuuuacauaacugccuuga

SEQ ID NO: 3413137 - RNA, 22 nt, Human
uucuuuuuacccauuuguucau

SEQ ID NO: 3413138 - RNA, 12 nt, Human
uucuuuuucuga

SEQ ID NO: 3413139 - RNA, 14 nt, Human
uucuuuuugaaaug

SEQ ID NO: 3413140 - RNA, 18 nt, Human
uucuuuuugaaguauuua

SEQ ID NO: 3413141 - RNA, 18 nt, Human
uucuuuuugaaucuuuaa

SEQ ID NO: 3413142 - RNA, 18 nt, Human
uucuuuuugggagagacu

SEQ ID NO: 3413143 - RNA, 23 nt, Human
uucuuuuuguagcuggggcuuug

SEQ ID NO: 3413144 - RNA, 19 nt, Human
uucuuuuuuaaauuuucuu

SEQ ID NO: 3413145 - RNA, 22 nt, Human
uucuuuuuugauauagaaguau

SEQ ID NO: 3413146 - RNA, 23 nt, Human
uucuuuuuuggccaucugcuccu

SEQ ID NO: 3413147 - RNA, 16 nt, Human
uucuuuuuuucuuggc

SEQ ID NO: 3413148 - RNA, 14 nt, Human
uucuuuuuuuguga

SEQ ID NO: 3413149 - RNA, 20 nt, Human
uugaaaaaauagagccugag

SEQ ID NO: 3413150 - RNA, 19 nt, Human
uugaaaaaauuuaaaagua

SEQ ID NO: 3413151 - RNA, 21 nt, Human
uugaaaaacucuuuauuuucc

SEQ ID NO: 3413152 - RNA, 20 nt, Human
uugaaaaauauaaaauuaug

SEQ ID NO: 3413153 - RNA, 15 nt, Human
uugaaaaaugcaugu

SEQ ID NO: 3413154 - RNA, 15 nt, Human
uugaaaaauuccuau

SEQ ID NO: 3413155 - RNA, 20 nt, Human
uugaaaaauuccuauuguga

SEQ ID NO: 3413156 - RNA, 21 nt, Human
uugaaaacacuguucucugcc

SEQ ID NO: 3413157 - RNA, 19 nt, Human
uugaaaaccaaaaugacau

SEQ ID NO: 3413158 - RNA, 16 nt, Human
uugaaaaccugacaaa

SEQ ID NO: 3413159 - RNA, 14 nt, Human
uugaaaacuacauu

SEQ ID NO: 3413160 - RNA, 22 nt, Human
uugaaaacuacauuuuaacaug

SEQ ID NO: 3413161 - RNA, 18 nt, Human
uugaaaacuucagaagca

SEQ ID NO: 3413162 - RNA, 14 nt, Human
uugaaaacuuuucu

SEQ ID NO: 3413163 - RNA, 17 nt, Human
uugaaaacuuuucucag

SEQ ID NO: 3413164 - RNA, 16 nt, Human
uugaaaagacuccaaa

SEQ ID NO: 3413165 - RNA, 22 nt, Human
uugaaaagacuccaaagaaaug

SEQ ID NO: 3413166 - RNA, 23 nt, Human
uugaaaagacuccaaagaaaugu

SEQ ID NO: 3413167 - RNA, 13 nt, Human
uugaaaagagaca

SEQ ID NO: 3413168 - RNA, 14 nt, Human
uugaaaagaggugu

SEQ ID NO: 3413169 - RNA, 23 nt, Human
uugaaaagauguaccugguggau

SEQ ID NO: 3413170 - RNA, 13 nt, Human
uugaaaagccaug

SEQ ID NO: 3413171 - RNA, 19 nt, Human
uugaaaagccauguuuaag

SEQ ID NO: 3413172 - RNA, 21 nt, Human
uugaaaagccauguuuaagau

SEQ ID NO: 3413173 - RNA, 12 nt, Human
uugaaaagcuau

SEQ ID NO: 3413174 - RNA, 13 nt, Human
uugaaaagcuauu

SEQ ID NO: 3413175 - RNA, 14 nt, Human
uugaaaagcuauua

SEQ ID NO: 3413176 - RNA, 22 nt, Human
uugaaaauaaccuaauuaauau

SEQ ID NO: 3413177 - RNA, 21 nt, Human
uugaaaauaagaauagaaaua

SEQ ID NO: 3413178 - RNA, 14 nt, Human
uugaaaauauuauc

SEQ ID NO: 3413179 - RNA, 15 nt, Human
uugaaaauuauuuua

SEQ ID NO: 3413180 - RNA, 18 nt, Human
uugaaaauucaaaaagug

SEQ ID NO: 3413181 - RNA, 20 nt, Human
uugaaaauucaaaaaguguu

SEQ ID NO: 3413182 - RNA, 16 nt, Human
uugaaacaaagaaggu

SEQ ID NO: 3413183 - RNA, 11 nt, Human
uugaaacauug

SEQ ID NO: 3413184 - RNA, 21 nt, Human
uugaaacggaugauuucuaug

SEQ ID NO: 3413185 - RNA, 18 nt, Human
uugaaacuacuacaauga

SEQ ID NO: 3413186 - RNA, 16 nt, Human
uugaaacugcauuugu

SEQ ID NO: 3413187 - RNA, 14 nt, Human
uugaaacuuuaaga

SEQ ID NO: 3413188 - RNA, 20 nt, Human
uugaaacuuugagaucuaaa

SEQ ID NO: 3413189 - RNA, 16 nt, Human
uugaaagaauguaaag

SEQ ID NO: 3413190 - RNA, 14 nt, Human
uugaaagcaaaaau

SEQ ID NO: 3413191 - RNA, 17 nt, Human
uugaaagcaaaaaugcu

SEQ ID NO: 3413192 - RNA, 18 nt, Human
uugaaagcaaaaaugcua

SEQ ID NO: 3413193 - RNA, 21 nt, Human
uugaaagcaaaaaugcuaaua

SEQ ID NO: 3413194 - RNA, 19 nt, Human
uugaaaggcauucucugaa

SEQ ID NO: 3413195 - RNA, 17 nt, Human
uugaaagggcaauauga

SEQ ID NO: 3413196 - RNA, 18 nt, Human
uugaaagugaauaaacuu

SEQ ID NO: 3413197 - RNA, 15 nt, Human
uugaaagugccuuug

SEQ ID NO: 3413198 - RNA, 17 nt, Human
uugaaagugccuuugca

SEQ ID NO: 3413199 - RNA, 12 nt, Human
uugaaauaagcu

SEQ ID NO: 3413200 - RNA, 15 nt, Human
uugaaauaauaaauc

SEQ ID NO: 3413201 - RNA, 20 nt, Human
uugaaauaccucauguuuau

SEQ ID NO: 3413202 - RNA, 16 nt, Human
uugaaauauaaugcaa

SEQ ID NO: 3413203 - RNA, 20 nt, Human
uugaaauauauggucuaaug

SEQ ID NO: 3413204 - RNA, 23 nt, Human
uugaaauauauggucuaauguuu

SEQ ID NO: 3413205 - RNA, 18 nt, Human
uugaaauauccugcuuga

SEQ ID NO: 3413206 - RNA, 19 nt, Human
uugaaauauugacuuuuua

SEQ ID NO: 3413207 - RNA, 21 nt, Human
uugaaaucaguaaacacugug

SEQ ID NO: 3413208 - RNA, 23 nt, Human
uugaaaucaguaaacacugugua

SEQ ID NO: 3413209 - RNA, 21 nt, Human
uugaaaugaaaguauaacuga

SEQ ID NO: 3413210 - RNA, 14 nt, Human
uugaaaugaaauuu

SEQ ID NO: 3413211 - RNA, 20 nt, Human
uugaaaugaggucuguuuaa

SEQ ID NO: 3413212 - RNA, 14 nt, Human
uugaaaugauuuca

SEQ ID NO: 3413213 - RNA, 20 nt, Human
uugaaaugcauugcucugga

SEQ ID NO: 3413214 - RNA, 11 nt, Human
uugaaaugcug

SEQ ID NO: 3413215 - RNA, 20 nt, Human
uugaaauguaaggcugugua

SEQ ID NO: 3413216 - RNA, 18 nt, Human
uugaaaugugguuuuccu

SEQ ID NO: 3413217 - RNA, 19 nt, Human
uugaaaugugguuuuccug

SEQ ID NO: 3413218 - RNA, 11 nt, Human
uugaaauuaua

SEQ ID NO: 3413219 - RNA, 17 nt, Human
uugaaauuauaucugug

SEQ ID NO: 3413220 - RNA, 18 nt, Human
uugaaauuauguauguuu

SEQ ID NO: 3413221 - RNA, 19 nt, Human
uugaaauuauguauguuua

SEQ ID NO: 3413222 - RNA, 21 nt, Human
uugaaauuauguauguuuaca

SEQ ID NO: 3413223 - RNA, 23 nt, Human
uugaaauuauguauguuuacaua

SEQ ID NO: 3413224 - RNA, 17 nt, Human
uugaaauucugaauuug

SEQ ID NO: 3413225 - RNA, 22 nt, Human
uugaaauucugaauuugcaaag

SEQ ID NO: 3413226 - RNA, 15 nt, Human
uugaaauuguacaua

SEQ ID NO: 3413227 - RNA, 17 nt, Human
uugaaauuguauuacaa

SEQ ID NO: 3413228 - RNA, 13 nt, Human
uugaaauuuccua

SEQ ID NO: 3413229 - RNA, 13 nt, Human
uugaaauuugaau

SEQ ID NO: 3413230 - RNA, 12 nt, Human
uugaaauuuuaa

SEQ ID NO: 3413231 - RNA, 19 nt, Human
uugaaauuuugcaaauaua

SEQ ID NO: 3413232 - RNA, 16 nt, Human
uugaacaaaauaaauu

SEQ ID NO: 3413233 - RNA, 12 nt, Human
uugaacaaauga

SEQ ID NO: 3413234 - RNA, 23 nt, Human
uugaacaaugaaguugaaaauca

SEQ ID NO: 3413235 - RNA, 18 nt, Human
uugaacacaaacuguaaa

SEQ ID NO: 3413236 - RNA, 21 nt, Human
uugaacacaaacuguaaauaa

SEQ ID NO: 3413237 - RNA, 13 nt, Human
uugaacacaguau

SEQ ID NO: 3413238 - RNA, 18 nt, Human
uugaacacucaugcugaa

SEQ ID NO: 3413239 - RNA, 13 nt, Human
uugaacacugggg

SEQ ID NO: 3413240 - RNA, 22 nt, Human
uugaacauuaauccacauguuu

SEQ ID NO: 3413241 - RNA, 15 nt, Human
uugaaccaaaacauu

SEQ ID NO: 3413242 - RNA, 13 nt, Human
uugaacccaggag

SEQ ID NO: 3413243 - RNA, 17 nt, Human
uugaacccaggaguuca

SEQ ID NO: 3413244 - RNA, 20 nt, Human
uugaaccugaugaaaauaaa

SEQ ID NO: 3413245 - RNA, 14 nt, Human
uugacaacugugac

SEQ ID NO: 3413246 - RNA, 21 nt, Human
uugacaaguugcgacggagag

SEQ ID NO: 3413247 - RNA, 12 nt, Human
uugacaauaaaa

SEQ ID NO: 3413248 - RNA, 18 nt, Human
uugacaauaauuucaggu

SEQ ID NO: 3413249 - RNA, 16 nt, Human
uugacaauugggagcu

SEQ ID NO: 3413250 - RNA, 18 nt, Human
uugacacaaguggaccuu

SEQ ID NO: 3413251 - RNA, 15 nt, Human
uugacacaauuggaa

SEQ ID NO: 3413252 - RNA, 13 nt, Human
uugacacaggucu

SEQ ID NO: 3413253 - RNA, 19 nt, Human
uugacacaggucuuuccua

SEQ ID NO: 3413254 - RNA, 22 nt, Human
uugacacaggucuuuccuaagg

SEQ ID NO: 3413255 - RNA, 14 nt, Human
uugacacuauaucu

SEQ ID NO: 3413256 - RNA, 22 nt, Human
uugacacuauaucuguauauaa

SEQ ID NO: 3413257 - RNA, 14 nt, Human
uugacacucugcag

SEQ ID NO: 3413258 - RNA, 14 nt, Human
uugacacugcucua

SEQ ID NO: 3413259 - RNA, 22 nt, Human
uugacacugcucuaacagcccu

SEQ ID NO: 3413260 - RNA, 22 nt, Human
uugacacuuauagauugaaauu

SEQ ID NO: 3413261 - RNA, 14 nt, Human
uugacagaacacug

SEQ ID NO: 3413262 - RNA, 23 nt, Human
uugacagagccugccccagcgcu

SEQ ID NO: 3413263 - RNA, 19 nt, Human
uugacagcuuugcugcuga

SEQ ID NO: 3413264 - RNA, 10 nt, Human
uugacagggc

SEQ ID NO: 3413265 - RNA, 14 nt, Human
uugacaguguuuuu

SEQ ID NO: 3413266 - RNA, 15 nt, Human
uugacaguucugaag

SEQ ID NO: 3413267 - RNA, 15 nt, Human
uugacauaaaguuga

SEQ ID NO: 3413268 - RNA, 17 nt, Human
uugacauagucuggcug

SEQ ID NO: 3413269 - RNA, 13 nt, Human
uugacauauuuaa

SEQ ID NO: 3413270 - RNA, 16 nt, Human
uugacaucaacugcau

SEQ ID NO: 3413271 - RNA, 18 nt, Human
uugacaucagccagcugc

SEQ ID NO: 3413272 - RNA, 18 nt, Human
uugacaucaguuccuuug

SEQ ID NO: 3413273 - RNA, 23 nt, Human
uugacaugagauuuauaagguuu

SEQ ID NO: 3413274 - RNA, 13 nt, Human
uugacauggaaau

SEQ ID NO: 3413275 - RNA, 16 nt, Human
uugacauggaaaugaa

SEQ ID NO: 3413276 - RNA, 14 nt, Human
uugacauguacaga

SEQ ID NO: 3413277 - RNA, 22 nt, Human
uugacauguggaaagugaauuu

SEQ ID NO: 3413278 - RNA, 14 nt, Human
uugacauucugaau

SEQ ID NO: 3413279 - RNA, 16 nt, Human
uugacauucugaaugc

SEQ ID NO: 3413280 - RNA, 18 nt, Human
uugacauucugaaugcuu

SEQ ID NO: 3413281 - RNA, 21 nt, Human
uugacauuguauguaucuauu

SEQ ID NO: 3413282 - RNA, 22 nt, Human
uugacauuguauguaucuauuu

SEQ ID NO: 3413283 - RNA, 14 nt, Human
uugaccaagaacug

SEQ ID NO: 3413284 - RNA, 15 nt, Human
uugaccaagaacugc

SEQ ID NO: 3413285 - RNA, 21 nt, Human
uugaccaagaacugcauggac

SEQ ID NO: 3413286 - RNA, 18 nt, Human
uugaccaagcaggaagcu

SEQ ID NO: 3413287 - RNA, 17 nt, Human
uugaccaggcaccuccc

SEQ ID NO: 3413288 - RNA, 18 nt, Human
uugaccauucuccaccug

SEQ ID NO: 3413289 - RNA, 17 nt, Human
uugacccugcacccucc

SEQ ID NO: 3413290 - RNA, 17 nt, Human
uugaccgugaggccaga

SEQ ID NO: 3413291 - RNA, 23 nt, Human
uugacgaagucucuuuucuuuag

SEQ ID NO: 3413292 - RNA, 23 nt, Human
uugacgagugugaagcuuccuug

SEQ ID NO: 3413293 - RNA, 15 nt, Human
uugacgauuccuucu

SEQ ID NO: 3413294 - RNA, 14 nt, Human
uugacgccauccca

SEQ ID NO: 3413295 - RNA, 17 nt, Human
uugacgccaucccagcc

SEQ ID NO: 3413296 - RNA, 18 nt, Human
uugacgccaucccagccc

SEQ ID NO: 3413297 - RNA, 19 nt, Human
uugacgccaucccagcccc

SEQ ID NO: 3413298 - RNA, 20 nt, Human
uugacgccaucccagcccca

SEQ ID NO: 3413299 - RNA, 22 nt, Human
uugacgccaucccagccccaau

SEQ ID NO: 3413300 - RNA, 15 nt, Human
uugacggaugauugg

SEQ ID NO: 3413301 - RNA, 19 nt, Human
uugacguauuauuguccuu

SEQ ID NO: 3413302 - RNA, 23 nt, Human
uugacuagaugauggaugccaau

SEQ ID NO: 3413303 - RNA, 21 nt, Human
uugacuagggauucaggcugc

SEQ ID NO: 3413304 - RNA, 14 nt, Human
uugacucaccuguu

SEQ ID NO: 3413305 - RNA, 14 nt, Human
uugacucaggagcc

SEQ ID NO: 3413306 - RNA, 20 nt, Human
uugacucaggagccugugac

SEQ ID NO: 3413307 - RNA, 16 nt, Human
uugacucccaaguuuc

SEQ ID NO: 3413308 - RNA, 21 nt, Human
uugacucuaguacugugaauc

SEQ ID NO: 3413309 - RNA, 21 nt, Human
uugacugaugcugagauucuu

SEQ ID NO: 3413310 - RNA, 23 nt, Human
uugacuguuuuuacccauauccc

SEQ ID NO: 3413311 - RNA, 21 nt, Human
uugacuuaaugugauuacugc

SEQ ID NO: 3413312 - RNA, 15 nt, Human
uugacuuauuuucuc

SEQ ID NO: 3413313 - RNA, 19 nt, Human
uugacuugacagaacacug

SEQ ID NO: 3413314 - RNA, 20 nt, Human
uugacuugacagaacacugu

SEQ ID NO: 3413315 - RNA, 14 nt, Human
uugacuuuaauuua

SEQ ID NO: 3413316 - RNA, 22 nt, Human
uugacuuuacgcccaucucagg

SEQ ID NO: 3413317 - RNA, 12 nt, Human
uugacuuucagg

SEQ ID NO: 3413318 - RNA, 22 nt, Human
uugacuuuccccaccagaugcu

SEQ ID NO: 3413319 - RNA, 12 nt, Human
uugacuuugucu

SEQ ID NO: 3413320 - RNA, 18 nt, Human
uugacuuuucuguaauuc

SEQ ID NO: 3413321 - RNA, 19 nt, Human
uugacuuuucuguaauuca

SEQ ID NO: 3413322 - RNA, 22 nt, Human
uugagaaaccuuauuguaccuc

SEQ ID NO: 3413323 - RNA, 17 nt, Human
uugagaaagucagauuc

SEQ ID NO: 3413324 - RNA, 16 nt, Human
uugagaaaugaauaau

SEQ ID NO: 3413325 - RNA, 19 nt, Human
uugagaacugcauauguuu

SEQ ID NO: 3413326 - RNA, 21 nt, Human
uugagaacugcauauguuucg

SEQ ID NO: 3413327 - RNA, 15 nt, Human
uugagaagaaaacau

SEQ ID NO: 3413328 - RNA, 18 nt, Human
uugagaagaaaacaucua

SEQ ID NO: 3413329 - RNA, 22 nt, Human
uugagaagaccucaccuagaaa

SEQ ID NO: 3413330 - RNA, 16 nt, Human
uugagaagaggacauu

SEQ ID NO: 3413331 - RNA, 23 nt, Human
uugagaagccuucagcuccaggg

SEQ ID NO: 3413332 - RNA, 17 nt, Human
uugagaagcguauguuu

SEQ ID NO: 3413333 - RNA, 15 nt, Human
uugagaagcugcuca

SEQ ID NO: 3413334 - RNA, 16 nt, Human
uugagaagcugcucaa

SEQ ID NO: 3413335 - RNA, 19 nt, Human
uugagaaggaaaauuuuag

SEQ ID NO: 3413336 - RNA, 20 nt, Human
uugagaaggaaaauuuuagc

SEQ ID NO: 3413337 - RNA, 14 nt, Human
uugagaaggagaga

SEQ ID NO: 3413338 - RNA, 16 nt, Human
uugagaaggagagaaa

SEQ ID NO: 3413339 - RNA, 16 nt, Human
uugagaaguucauugu

SEQ ID NO: 3413340 - RNA, 13 nt, Human
uugagaauuuuaa

SEQ ID NO: 3413341 - RNA, 13 nt, Human
uugagacaaaaau

SEQ ID NO: 3413342 - RNA, 15 nt, Human
uugagacaaaaauua

SEQ ID NO: 3413343 - RNA, 22 nt, Human
uugagacaguuucuuagcuuuu

SEQ ID NO: 3413344 - RNA, 13 nt, Human
uugagacauucca

SEQ ID NO: 3413345 - RNA, 14 nt, Human
uugagaccucagcc

SEQ ID NO: 3413346 - RNA, 23 nt, Human
uugagagaaauaugaagaacuga

SEQ ID NO: 3413347 - RNA, 17 nt, Human
uugagagaagagacaaa

SEQ ID NO: 3413348 - RNA, 16 nt, Human
uugagagaccaggcaa

SEQ ID NO: 3413349 - RNA, 14 nt, Human
uugagaguucuaaa

SEQ ID NO: 3413350 - RNA, 20 nt, Human
uugagauacuuuuucuuuug

SEQ ID NO: 3413351 - RNA, 17 nt, Human
uugagauaguuuucauc

SEQ ID NO: 3413352 - RNA, 21 nt, Human
uugagauauuaaugcccagac

SEQ ID NO: 3413353 - RNA, 15 nt, Human
uugagaucagccugg

SEQ ID NO: 3413354 - RNA, 16 nt, Human
uugagaucagccuggg

SEQ ID NO: 3413355 - RNA, 17 nt, Human
uugagauugccccaggu

SEQ ID NO: 3413356 - RNA, 19 nt, Human
uugagauugccccaggucu

SEQ ID NO: 3413357 - RNA, 13 nt, Human
uugagcaaacauu

SEQ ID NO: 3413358 - RNA, 23 nt, Human
uugagcagcagguagccugcugg

SEQ ID NO: 3413359 - RNA, 15 nt, Human
uugagcaucacagaa

SEQ ID NO: 3413360 - RNA, 15 nt, Human
uugagcaucuguccc

SEQ ID NO: 3413361 - RNA, 19 nt, Human
uugagcaugacagccugca

SEQ ID NO: 3413362 - RNA, 14 nt, Human
uugagccagcagac

SEQ ID NO: 3413363 - RNA, 20 nt, Human
uugagccagcagacauuguc

SEQ ID NO: 3413364 - RNA, 13 nt, Human
uugagccaggccu

SEQ ID NO: 3413365 - RNA, 14 nt, Human
uugagcccucccca

SEQ ID NO: 3413366 - RNA, 15 nt, Human
uugagcccuccccag

SEQ ID NO: 3413367 - RNA, 16 nt, Human
uugagccuugaacuuu

SEQ ID NO: 3413368 - RNA, 13 nt, Human
uugagcucagccc

SEQ ID NO: 3413369 - RNA, 12 nt, Human
uugagcucccac

SEQ ID NO: 3413370 - RNA, 22 nt, Human
uugagcucccacuucugccaga

SEQ ID NO: 3413371 - RNA, 13 nt, Human
uugagcuccuggg

SEQ ID NO: 3413372 - RNA, 22 nt, Human
uugagcugaaaugcugcauuuu

SEQ ID NO: 3413373 - RNA, 12 nt, Human
uugagcugccuu

SEQ ID NO: 3413374 - RNA, 14 nt, Human
uugagcugccuucc

SEQ ID NO: 3413375 - RNA, 15 nt, Human
uugagcugccuuccc

SEQ ID NO: 3413376 - RNA, 19 nt, Human
uugagcugccuucccuagc

SEQ ID NO: 3413377 - RNA, 11 nt, Human
uugagcuggcc

SEQ ID NO: 3413378 - RNA, 14 nt, Human
uugagcugguaaca

SEQ ID NO: 3413379 - RNA, 21 nt, Human
uugagcuguugccucaguccc

SEQ ID NO: 3413380 - RNA, 18 nt, Human
uugagcuguuuucccuga

SEQ ID NO: 3413381 - RNA, 23 nt, Human
uugaggaaaacaagcauucacaa

SEQ ID NO: 3413382 - RNA, 14 nt, Human
uugaggaacuguac

SEQ ID NO: 3413383 - RNA, 19 nt, Human
uugaggaacuguacagaaa

SEQ ID NO: 3413384 - RNA, 15 nt, Human
uugaggacacugaua

SEQ ID NO: 3413385 - RNA, 16 nt, Human
uugaggagcauguuuu

SEQ ID NO: 3413386 - RNA, 16 nt, Human
uugaggagccccagcu

SEQ ID NO: 3413387 - RNA, 19 nt, Human
uugaggaggggcagguaaa

SEQ ID NO: 3413388 - RNA, 16 nt, Human
uugaggagugguuuuu

SEQ ID NO: 3413389 - RNA, 18 nt, Human
uugaggauauauuuucac

SEQ ID NO: 3413390 - RNA, 20 nt, Human
uugucuaugggacucaaugc

SEQ ID NO: 3413391 - RNA, 13 nt, Human
uugucuauuuuaa

SEQ ID NO: 3413392 - RNA, 16 nt, Human
uugucucaaugcucau

SEQ ID NO: 3413393 - RNA, 15 nt, Human
uugucucaugccagu

SEQ ID NO: 3413394 - RNA, 18 nt, Human
uugucucauuuuaaugua

SEQ ID NO: 3413395 - RNA, 18 nt, Human
uugucuccccuguucccc

SEQ ID NO: 3413396 - RNA, 21 nt, Human
uugucucccgccccccacacu

SEQ ID NO: 3413397 - RNA, 16 nt, Human
uugucucccuggcccu

SEQ ID NO: 3413398 - RNA, 17 nt, Human
uugucucccuggcccuc

SEQ ID NO: 3413399 - RNA, 17 nt, Human
uugucucguuugugauu

SEQ ID NO: 3413400 - RNA, 12 nt, Human
uugucucuccuu

SEQ ID NO: 3413401 - RNA, 14 nt, Human
uugucucuccuuuu

SEQ ID NO: 3413402 - RNA, 14 nt, Human
uugucucucuucag

SEQ ID NO: 3413403 - RNA, 15 nt, Human
uugucucugaugcag

SEQ ID NO: 3413404 - RNA, 17 nt, Human
uugucucugaugcagcu

SEQ ID NO: 3413405 - RNA, 12 nt, Human
uugucucugggc

SEQ ID NO: 3413406 - RNA, 22 nt, Human
uugucugaaaagugaagacaga

SEQ ID NO: 3413407 - RNA, 15 nt, Human
uugucugaaacauuu

SEQ ID NO: 3413408 - RNA, 17 nt, Human
uugucugccccaaguuu

SEQ ID NO: 3413409 - RNA, 16 nt, Human
uugucuguuuguuuca

SEQ ID NO: 3413410 - RNA, 15 nt, Human
uugucuuaaaaagug

SEQ ID NO: 3413411 - RNA, 13 nt, Human
uugucuuaaugga

SEQ ID NO: 3413412 - RNA, 14 nt, Human
uugucuuauucccu

SEQ ID NO: 3413413 - RNA, 15 nt, Human
uugucuuauugacag

SEQ ID NO: 3413414 - RNA, 16 nt, Human
uugucuucuccccagg

SEQ ID NO: 3413415 - RNA, 22 nt, Human
uugucuugaaugucuuuugaau

SEQ ID NO: 3413416 - RNA, 18 nt, Human
uugucuugccuuauuaaa

SEQ ID NO: 3413417 - RNA, 14 nt, Human
uugucuuuaacugu

SEQ ID NO: 3413418 - RNA, 19 nt, Human
uugucuuuggugaacauug

SEQ ID NO: 3413419 - RNA, 13 nt, Human
uugucuuuuuaga

SEQ ID NO: 3413420 - RNA, 17 nt, Human
uugugaaaugaaaacau

SEQ ID NO: 3413421 - RNA, 20 nt, Human
uugugaaaugaaaacaugua

SEQ ID NO: 3413422 - RNA, 23 nt, Human
uugugaaaugaaaacauguaaua

SEQ ID NO: 3413423 - RNA, 23 nt, Human
uugugaaauggccaggauccucu

SEQ ID NO: 3413424 - RNA, 14 nt, Human
uugugaaauuuuuc

SEQ ID NO: 3413425 - RNA, 23 nt, Human
uugugaaauuuuucauauuuuaa

SEQ ID NO: 3413426 - RNA, 23 nt, Human
uugugaacucagccaagcacagu

SEQ ID NO: 3413427 - RNA, 19 nt, Human
uugugaagaacuauuuuau

SEQ ID NO: 3413428 - RNA, 17 nt, Human
uugugaagauguuugca

SEQ ID NO: 3413429 - RNA, 22 nt, Human
uugugaagccaugaguuccaga

SEQ ID NO: 3413430 - RNA, 18 nt, Human
uugugaaggauuauggaa

SEQ ID NO: 3413431 - RNA, 14 nt, Human
uugugaaggccaug

SEQ ID NO: 3413432 - RNA, 22 nt, Human
uugugaaggccaugauauuuug

SEQ ID NO: 3413433 - RNA, 22 nt, Human
uugugaaggccucgcaggaaga

SEQ ID NO: 3413434 - RNA, 17 nt, Human
uugugaagguggaaaua

SEQ ID NO: 3413435 - RNA, 14 nt, Human
uugugaaguacaua

SEQ ID NO: 3413436 - RNA, 22 nt, Human
uugugaaguacccguucacauu

SEQ ID NO: 3413437 - RNA, 21 nt, Human
uugugaaguuagguucuuaaa

SEQ ID NO: 3413438 - RNA, 14 nt, Human
uugugaauaaagag

SEQ ID NO: 3413439 - RNA, 14 nt, Human
uugugaauaauuac

SEQ ID NO: 3413440 - RNA, 15 nt, Human
uugugaauaauuaca

SEQ ID NO: 3413441 - RNA, 21 nt, Human
uugugaauggauuggauuauu

SEQ ID NO: 3413442 - RNA, 19 nt, Human
uugugaauuaggcuguaac

SEQ ID NO: 3413443 - RNA, 13 nt, Human
uugugacaaaaaa

SEQ ID NO: 3413444 - RNA, 14 nt, Human
uugugacaaaaaau

SEQ ID NO: 3413445 - RNA, 16 nt, Human
uugugacaaaaaauua

SEQ ID NO: 3413446 - RNA, 19 nt, Human
uugugacagauuauacaga

SEQ ID NO: 3413447 - RNA, 23 nt, Human
uugugacagcucuuuuugugaag

SEQ ID NO: 3413448 - RNA, 17 nt, Human
uugugacccaauuaagu

SEQ ID NO: 3413449 - RNA, 14 nt, Human
uugugacuaauugu

SEQ ID NO: 3413450 - RNA, 16 nt, Human
uugugacuaauuguau

SEQ ID NO: 3413451 - RNA, 15 nt, Human
uugugacuauauaga

SEQ ID NO: 3413452 - RNA, 19 nt, Human
uugugacuauauagagaug

SEQ ID NO: 3413453 - RNA, 22 nt, Human
uugugacuauauagagauguuu

SEQ ID NO: 3413454 - RNA, 16 nt, Human
uugugacuguauauaa

SEQ ID NO: 3413455 - RNA, 16 nt, Human
uugugaggaaagucau

SEQ ID NO: 3413456 - RNA, 17 nt, Human
uugugaggaaagucauu

SEQ ID NO: 3413457 - RNA, 22 nt, Human
uugugaggaaagucauuggcuu

SEQ ID NO: 3413458 - RNA, 13 nt, Human
uugugaggaagcc

SEQ ID NO: 3413459 - RNA, 22 nt, Human
uugugaguuuguuucuuugaau

SEQ ID NO: 3413460 - RNA, 18 nt, Human
uugugauacaaugcugug

SEQ ID NO: 3413461 - RNA, 19 nt, Human
uugugauacaaugcugugc

SEQ ID NO: 3413462 - RNA, 16 nt, Human
uugugauauauguauu

SEQ ID NO: 3413463 - RNA, 13 nt, Human
uugugauaugcac

SEQ ID NO: 3413464 - RNA, 16 nt, Human
uugugauauggagccc

SEQ ID NO: 3413465 - RNA, 18 nt, Human
uugugaugucauacagag

SEQ ID NO: 3413466 - RNA, 21 nt, Human
uugugaugucauacagagaag

SEQ ID NO: 3413467 - RNA, 17 nt, Human
uugugaugugcacguaa

SEQ ID NO: 3413468 - RNA, 12 nt, Human
uugugauguguc

SEQ ID NO: 3413469 - RNA, 23 nt, Human
uugugauuauuucacuuuagaug

SEQ ID NO: 3413470 - RNA, 14 nt, Human
uugugauucugccu

SEQ ID NO: 3413471 - RNA, 23 nt, Human
uugugauuucccguggccccagc

SEQ ID NO: 3413472 - RNA, 11 nt, Human
uugugauuuga

SEQ ID NO: 3413473 - RNA, 15 nt, Human
uugugauuugacugu

SEQ ID NO: 3413474 - RNA, 15 nt, Human
uugugauuuugugau

SEQ ID NO: 3413475 - RNA, 12 nt, Human
uugugauuuuug

SEQ ID NO: 3413476 - RNA, 16 nt, Human
uugugauuuuuguaau

SEQ ID NO: 3413477 - RNA, 21 nt, Human
uugugcaaaagcuucaaauua

SEQ ID NO: 3413478 - RNA, 22 nt, Human
uugugcaaaagcuucaaauuaa

SEQ ID NO: 3413479 - RNA, 17 nt, Human
uugugcaauguaaauau

SEQ ID NO: 3413480 - RNA, 22 nt, Human
uugugcaauguaaauauuuuaa

SEQ ID NO: 3413481 - RNA, 19 nt, Human
uugugcacccucuauccca

SEQ ID NO: 3413482 - RNA, 21 nt, Human
uugugcacccucuaucccaau

SEQ ID NO: 3413483 - RNA, 12 nt, Human
uugugcacuguu

SEQ ID NO: 3413484 - RNA, 16 nt, Human
uugugcagaaaacauu

SEQ ID NO: 3413485 - RNA, 13 nt, Human
uugugcagcuuuu

SEQ ID NO: 3413486 - RNA, 23 nt, Human
uugugcauuaucuagauacugua

SEQ ID NO: 3413487 - RNA, 22 nt, Human
uugugccaaccuauuuugaagu

SEQ ID NO: 3413488 - RNA, 16 nt, Human
uugugccaauauguau

SEQ ID NO: 3413489 - RNA, 21 nt, Human
uugugccaugucaaacaaaua

SEQ ID NO: 3413490 - RNA, 22 nt, Human
uugugcccccaaccauuuccuc

SEQ ID NO: 3413491 - RNA, 12 nt, Human
uugugccccugc

SEQ ID NO: 3413492 - RNA, 17 nt, Human
uugugccucccugguga

SEQ ID NO: 3413493 - RNA, 13 nt, Human
uugugccuggggu

SEQ ID NO: 3413494 - RNA, 23 nt, Human
uugugcgcuaaacuuuucugaua

SEQ ID NO: 3413495 - RNA, 23 nt, Human
uugugcuacaugacgacaaagcu

SEQ ID NO: 3413496 - RNA, 14 nt, Human
uugugcuagaauac

SEQ ID NO: 3413497 - RNA, 19 nt, Human
uugugcuauaguauuugau

SEQ ID NO: 3413498 - RNA, 12 nt, Human
uugugcugccau

SEQ ID NO: 3413499 - RNA, 14 nt, Human
uugugcuucucccc

SEQ ID NO: 3413500 - RNA, 17 nt, Human
uugugcuucuccccaga

SEQ ID NO: 3413501 - RNA, 22 nt, Human
uuguggaauggagauucaguuu

SEQ ID NO: 3413502 - RNA, 21 nt, Human
uuguggaauugggagcuuggg

SEQ ID NO: 3413503 - RNA, 17 nt, Human
uuguggaccaauuauug

SEQ ID NO: 3413504 - RNA, 18 nt, Human
uuguggaccaauuauuga

SEQ ID NO: 3413505 - RNA, 13 nt, Human
uuguggacuaaaa

SEQ ID NO: 3413506 - RNA, 22 nt, Human
uuguggacuaaaagauauaagu

SEQ ID NO: 3413507 - RNA, 14 nt, Human
uuguggagccccac

SEQ ID NO: 3413508 - RNA, 22 nt, Human
uuguggaggagcucaggacacu

SEQ ID NO: 3413509 - RNA, 15 nt, Human
uuguggauaacaaag

SEQ ID NO: 3413510 - RNA, 14 nt, Human
uuguggaugucuuc

SEQ ID NO: 3413511 - RNA, 23 nt, Human
uuguggauguuuuaauuccauga

SEQ ID NO: 3413512 - RNA, 20 nt, Human
uuguggauuuaacagaaaug

SEQ ID NO: 3413513 - RNA, 21 nt, Human
uuguggauuuaacagaaaugu

SEQ ID NO: 3413514 - RNA, 22 nt, Human
uuguggauuuaacagaaaugua

SEQ ID NO: 3413515 - RNA, 14 nt, Human
uuguggcacauucu

SEQ ID NO: 3413516 - RNA, 20 nt, Human
uuguggccaaggagcugcua

SEQ ID NO: 3413517 - RNA, 12 nt, Human
uuguggccucag

SEQ ID NO: 3413518 - RNA, 21 nt, Human
uuguggccugggccuccucac

SEQ ID NO: 3413519 - RNA, 18 nt, Human
uuguggccuuugcgcucc

SEQ ID NO: 3413520 - RNA, 18 nt, Human
uuguggcuccacacacac

SEQ ID NO: 3413521 - RNA, 14 nt, Human
uuguggcugggggc

SEQ ID NO: 3413522 - RNA, 20 nt, Human
uugugggacuuauuacaauu

SEQ ID NO: 3413523 - RNA, 16 nt, Human
uugugggcauaaacug

SEQ ID NO: 3413524 - RNA, 18 nt, Human
uugugggggacuguaagu

SEQ ID NO: 3413525 - RNA, 13 nt, Human
uugugggugggag

SEQ ID NO: 3413526 - RNA, 22 nt, Human
uugugguaggccuuuuaacauu

SEQ ID NO: 3413527 - RNA, 20 nt, Human
uugugguuuauauauuuaaa

SEQ ID NO: 3413528 - RNA, 14 nt, Human
uugugguuuggaau

SEQ ID NO: 3413529 - RNA, 22 nt, Human
uuguguaacaauuuuaaugcua

SEQ ID NO: 3413530 - RNA, 14 nt, Human
uuguguaagaaaua

SEQ ID NO: 3413531 - RNA, 20 nt, Human
uuguguaagagaauguugaa

SEQ ID NO: 3413532 - RNA, 22 nt, Human
uuguguaagagaauguugaaua

SEQ ID NO: 3413533 - RNA, 14 nt, Human
uuguguaauaaagu

SEQ ID NO: 3413534 - RNA, 22 nt, Human
uuuaaacacucuucagagaaau

SEQ ID NO: 3413535 - RNA, 14 nt, Human
uuuaaacagauguc

SEQ ID NO: 3413536 - RNA, 13 nt, Human
uuuaaacagcagu

SEQ ID NO: 3413537 - RNA, 17 nt, Human
uuuaaacaguauuucau

SEQ ID NO: 3413538 - RNA, 14 nt, Human
uuuaaacauuaaaa

SEQ ID NO: 3413539 - RNA, 23 nt, Human
uuuaaacauuaaaaauggaacug

SEQ ID NO: 3413540 - RNA, 21 nt, Human
uuuaaacccauuuuagucacu

SEQ ID NO: 3413541 - RNA, 23 nt, Human
uuuaaaccgcuaaaagaaacuuu

SEQ ID NO: 3413542 - RNA, 18 nt, Human
uuuaaaccuauacucacu

SEQ ID NO: 3413543 - RNA, 16 nt, Human
uuuaaacuagaugacc

SEQ ID NO: 3413544 - RNA, 15 nt, Human
uuuaaacugauucau

SEQ ID NO: 3413545 - RNA, 18 nt, Human
uuuaaacuguacaguguc

SEQ ID NO: 3413546 - RNA, 14 nt, Human
uuuaaacuguguac

SEQ ID NO: 3413547 - RNA, 21 nt, Human
uuuaaagaaaaaaauugaaau

SEQ ID NO: 3413548 - RNA, 22 nt, Human
uuuaaagaaaaaaauugaaaug

SEQ ID NO: 3413549 - RNA, 17 nt, Human
uuuaaagaaaaguuuug

SEQ ID NO: 3413550 - RNA, 21 nt, Human
uuuaaagaaaaguuuuguaaa

SEQ ID NO: 3413551 - RNA, 13 nt, Human
uuuaaagaaagug

SEQ ID NO: 3413552 - RNA, 13 nt, Human
uuuaaagaaugcu

SEQ ID NO: 3413553 - RNA, 12 nt, Human
uuuaaagaauug

SEQ ID NO: 3413554 - RNA, 15 nt, Human
uuuaaagagucuaga

SEQ ID NO: 3413555 - RNA, 19 nt, Human
uuuaaagcagguucuuguu

SEQ ID NO: 3413556 - RNA, 17 nt, Human
uuuaaagcguuugcaca

SEQ ID NO: 3413557 - RNA, 24 nt, Human
uuuaaagcuuauuaaaacucauuu

SEQ ID NO: 3413558 - RNA, 12 nt, Human
uuuaaaggaaaa

SEQ ID NO: 3413559 - RNA, 15 nt, Human
uuuaaaggaaaaaau

SEQ ID NO: 3413560 - RNA, 19 nt, Human
uuuaaaggcccagccccua

SEQ ID NO: 3413561 - RNA, 23 nt, Human
uuuaaaggcccagccccuagaaa

SEQ ID NO: 3413562 - RNA, 18 nt, Human
uuuaaagucucaguuucu

SEQ ID NO: 3413563 - RNA, 17 nt, Human
uuuaaagugauuaaacg

SEQ ID NO: 3413564 - RNA, 18 nt, Human
uuuaaaguggcaaucuca

SEQ ID NO: 3413565 - RNA, 14 nt, Human
uuuaaaguguuuca

SEQ ID NO: 3413566 - RNA, 22 nt, Human
uuuaaaguuaguaucuuuugau

SEQ ID NO: 3413567 - RNA, 12 nt, Human
uuuaaaguucug

SEQ ID NO: 3413568 - RNA, 21 nt, Human
uuuaaaguucuguguauuuaa

SEQ ID NO: 3413569 - RNA, 23 nt, Human
uuuaaauaaaaauuacuguguua

SEQ ID NO: 3413570 - RNA, 16 nt, Human
uuuaaauaaaacccuu

SEQ ID NO: 3413571 - RNA, 19 nt, Human
uuuaaauaaaagugaucaa

SEQ ID NO: 3413572 - RNA, 12 nt, Human
uuuaaauaaacu

SEQ ID NO: 3413573 - RNA, 13 nt, Human
uuuaaauaaacuu

SEQ ID NO: 3413574 - RNA, 20 nt, Human
uuuaaauaaacuuuuuuuca

SEQ ID NO: 3413575 - RNA, 23 nt, Human
uuuaaauaaacuuuuuuucaaug

SEQ ID NO: 3413576 - RNA, 15 nt, Human
uuuaaauauaauucu

SEQ ID NO: 3413577 - RNA, 14 nt, Human
uuuaaauauagaau

SEQ ID NO: 3413578 - RNA, 16 nt, Human
uuuaaauauagaauuu

SEQ ID NO: 3413579 - RNA, 15 nt, Human
uuuaaauauuaagca

SEQ ID NO: 3413580 - RNA, 15 nt, Human
uuuaaauauuuucua

SEQ ID NO: 3413581 - RNA, 17 nt, Human
uuuaaauauuuucuauu

SEQ ID NO: 3413582 - RNA, 12 nt, Human
uuuaaauccugu

SEQ ID NO: 3413583 - RNA, 17 nt, Human
uuuaaauccuguugaaa

SEQ ID NO: 3413584 - RNA, 19 nt, Human
uuuaaaucuaaaucuauuu

SEQ ID NO: 3413585 - RNA, 14 nt, Human
uuuaaaucugugau

SEQ ID NO: 3413586 - RNA, 20 nt, Human
uuuaaaucuguuuuucuaac

SEQ ID NO: 3413587 - RNA, 21 nt, Human
uuuaaaugaaagugagacuuu

SEQ ID NO: 3413588 - RNA, 18 nt, Human
uuuaaaugcauaaaugca

SEQ ID NO: 3413589 - RNA, 12 nt, Human
uuuaaaugccau

SEQ ID NO: 3413590 - RNA, 15 nt, Human
uuuaaauguaaagau

SEQ ID NO: 3413591 - RNA, 20 nt, Human
uuuaaauguacagacauauu

SEQ ID NO: 3413592 - RNA, 12 nt, Human
uuuaaauguaua

SEQ ID NO: 3413593 - RNA, 15 nt, Human
uuuaaauguauacua

SEQ ID NO: 3413594 - RNA, 14 nt, Human
uuuaaauguuuuuu

SEQ ID NO: 3413595 - RNA, 14 nt, Human
uuuaaauuagaaaa

SEQ ID NO: 3413596 - RNA, 22 nt, Human
uuuaaauuauaacuuaaaauau

SEQ ID NO: 3413597 - RNA, 17 nt, Human
uuuaaauuauaaggacu

SEQ ID NO: 3413598 - RNA, 18 nt, Human
uuuaaauuauaaggacug

SEQ ID NO: 3413599 - RNA, 20 nt, Human
uuuaaauuauaaggacugca

SEQ ID NO: 3413600 - RNA, 19 nt, Human
uuuaaauuauguuuuacug

SEQ ID NO: 3413601 - RNA, 22 nt, Human
uuuaaauuauguuuuuauuaag

SEQ ID NO: 3413602 - RNA, 19 nt, Human
uuuaaauucacaauagaaa

SEQ ID NO: 3413603 - RNA, 12 nt, Human
uuuaaauugugu

SEQ ID NO: 3413604 - RNA, 18 nt, Human
uuuaaauuuuacccuuua

SEQ ID NO: 3413605 - RNA, 17 nt, Human
uuuaaauuuucuucagu

SEQ ID NO: 3413606 - RNA, 15 nt, Human
uuuaaauuuuguaau

SEQ ID NO: 3413607 - RNA, 18 nt, Human
uuuaacaaaaagugcuuc

SEQ ID NO: 3413608 - RNA, 16 nt, Human
uuuaacaaaagcaaga

SEQ ID NO: 3413609 - RNA, 23 nt, Human
uuuaacaacuaugauuuggaaaa

SEQ ID NO: 3413610 - RNA, 13 nt, Human
uuuaacaagaaga

SEQ ID NO: 3413611 - RNA, 15 nt, Human
uuuaacaagaagaug

SEQ ID NO: 3413612 - RNA, 20 nt, Human
uuuaacaauaacuacugugu

SEQ ID NO: 3413613 - RNA, 22 nt, Human
uuuaacaauaacuacuguguuc

SEQ ID NO: 3413614 - RNA, 19 nt, Human
uuuaacacaaguccuguga

SEQ ID NO: 3413615 - RNA, 18 nt, Human
uuuaacacacauaaagga

SEQ ID NO: 3413616 - RNA, 18 nt, Human
uuuaacaccugaugugua

SEQ ID NO: 3413617 - RNA, 14 nt, Human
uuuaacagaaaugu

SEQ ID NO: 3413618 - RNA, 13 nt, Human
uuuaacagaaauu

SEQ ID NO: 3413619 - RNA, 14 nt, Human
uuuaacagaaauug

SEQ ID NO: 3413620 - RNA, 16 nt, Human
uuuaacagaaauugua

SEQ ID NO: 3413621 - RNA, 23 nt, Human
uuuaacagggucucuagugcugu

SEQ ID NO: 3413622 - RNA, 16 nt, Human
uuuaacauaagcuauu

SEQ ID NO: 3413623 - RNA, 21 nt, Human
uuuaacauauaauuucuuuaa

SEQ ID NO: 3413624 - RNA, 23 nt, Human
uuuaacaugaacacccuuagaaa

SEQ ID NO: 3413625 - RNA, 12 nt, Human
uuuaacauuauu

SEQ ID NO: 3413626 - RNA, 19 nt, Human
uuuaaccaaacaauuauuu

SEQ ID NO: 3413627 - RNA, 21 nt, Human
uuuaaccaaaggugaaggaau

SEQ ID NO: 3413628 - RNA, 17 nt, Human
uuuaaccauuaaaacug

SEQ ID NO: 3413629 - RNA, 18 nt, Human
uuuaaccccccuguacac

SEQ ID NO: 3413630 - RNA, 19 nt, Human
uuuaaccccccuguacaca

SEQ ID NO: 3413631 - RNA, 16 nt, Human
uuuaaccuaugauauu

SEQ ID NO: 3413632 - RNA, 16 nt, Human
uuuaaccuuguauaaa

SEQ ID NO: 3413633 - RNA, 21 nt, Human
uuuaacgugggauucagagaa

SEQ ID NO: 3413634 - RNA, 18 nt, Human
uuuaacuacccuuaauua

SEQ ID NO: 3413635 - RNA, 17 nt, Human
uuuaacuagaauuuauu

SEQ ID NO: 3413636 - RNA, 20 nt, Human
uuuaacuaugaacugaaggc

SEQ ID NO: 3413637 - RNA, 21 nt, Human
uuuaacucagaucacuacugc

SEQ ID NO: 3413638 - RNA, 23 nt, Human
uuuaacucgagaccuuuucaacu

SEQ ID NO: 3413639 - RNA, 21 nt, Human
uuuaacucuacuguguaauau

SEQ ID NO: 3413640 - RNA, 13 nt, Human
uuuaacuggugca

SEQ ID NO: 3413641 - RNA, 12 nt, Human
uuuaacugugga

SEQ ID NO: 3413642 - RNA, 13 nt, Human
uuuaacuuaaaua

SEQ ID NO: 3413643 - RNA, 21 nt, Human
uuuaacuuaaucaauuaauuu

SEQ ID NO: 3413644 - RNA, 20 nt, Human
uuuaacuuaguuuugcauag

SEQ ID NO: 3413645 - RNA, 19 nt, Human
uuuaacuugaggguaauaa

SEQ ID NO: 3413646 - RNA, 15 nt, Human
uuuaacuuguaauaa

SEQ ID NO: 3413647 - RNA, 14 nt, Human
uuuaacuuuaaguu

SEQ ID NO: 3413648 - RNA, 12 nt, Human
uuuaacuuuguu

SEQ ID NO: 3413649 - RNA, 17 nt, Human
uuuaacuuuguuuuauu

SEQ ID NO: 3413650 - RNA, 22 nt, Human
uuuaagaaaaaauaacacacau

SEQ ID NO: 3413651 - RNA, 15 nt, Human
uuuaagaaaaguauu

SEQ ID NO: 3413652 - RNA, 19 nt, Human
uuuaagaaaaguauuuuga

SEQ ID NO: 3413653 - RNA, 12 nt, Human
uuuaagaaaaua

SEQ ID NO: 3413654 - RNA, 16 nt, Human
uuuaagaaaauacaau

SEQ ID NO: 3413655 - RNA, 20 nt, Human
uuuaagaauugaguaauggu

SEQ ID NO: 3413656 - RNA, 15 nt, Human
uuuaagacacuuuuu

SEQ ID NO: 3413657 - RNA, 16 nt, Human
uuuaagacccucucaa

SEQ ID NO: 3413658 - RNA, 19 nt, Human
uuuaagacguguuuguguu

SEQ ID NO: 3413659 - RNA, 14 nt, Human
uuuaagacuguaau

SEQ ID NO: 3413660 - RNA, 14 nt, Human
uuuaagagacagcc

SEQ ID NO: 3413661 - RNA, 21 nt, Human
uuuaagagagaaaucugaaaa

SEQ ID NO: 3413662 - RNA, 23 nt, Human
uuuaagauaauaauauauguuua

SEQ ID NO: 3413663 - RNA, 14 nt, Human
uuuaagaugugaaa

SEQ ID NO: 3413664 - RNA, 22 nt, Human
uuuaagauuuaauuugccaaaa

SEQ ID NO: 3413665 - RNA, 12 nt, Human
uuuaagauuuuu

SEQ ID NO: 3413666 - RNA, 18 nt, Human
uuuaagauuuuucucaaa

SEQ ID NO: 3413667 - RNA, 15 nt, Human
uuuaagcaacaucuu

SEQ ID NO: 3413668 - RNA, 17 nt, Human
uuuaagcaaguuaagug

SEQ ID NO: 3413669 - RNA, 23 nt, Human
uuuaagcacuacauaaacugacu

SEQ ID NO: 3413670 - RNA, 20 nt, Human
uuuaagcauuacucuuguaa

SEQ ID NO: 3413671 - RNA, 21 nt, Human
uuuaagcauuacucuuguaag

SEQ ID NO: 3413672 - RNA, 13 nt, Human
uuuaagcauuguu

SEQ ID NO: 3413673 - RNA, 14 nt, Human
uuuaagcauuguuu

SEQ ID NO: 3413674 - RNA, 21 nt, Human
uuuaagcauuguuugcuuauu

SEQ ID NO: 3413675 - RNA, 20 nt, Human
uuuaagccaaaacaauguuu

SEQ ID NO: 3413676 - RNA, 16 nt, Human
uuuaagccuaaagauu

SEQ ID NO: 3413677 - RNA, 12 nt, Human
uuuaagccuuug

SEQ ID NO: 3413678 - RNA, 21 nt, Human
uuuaagccuuuguugaacugu

SEQ ID NO: 3413679 - RNA, 16 nt, Human
uuuaggaacuucagag

SEQ ID NO: 3413680 - RNA, 13 nt, Human
uuuaggaaguguu

SEQ ID NO: 3413681 - RNA, 15 nt, Human
uuuaggacaugaaaa

SEQ ID NO: 3413682 - RNA, 23 nt, Human
uuuaggauguguauuucauuuau

SEQ ID NO: 3413683 - RNA, 20 nt, Human
uuuaggcauaugcuucuuua

SEQ ID NO: 3413684 - RNA, 18 nt, Human
uuuaggcuauuuguaaau

SEQ ID NO: 3413685 - RNA, 16 nt, Human
uuuaggguaaaaauug

SEQ ID NO: 3413686 - RNA, 17 nt, Human
uuuaggguucugccucu

SEQ ID NO: 3413687 - RNA, 22 nt, Human
uuuaggugaauuaauuaaacau

SEQ ID NO: 3413688 - RNA, 13 nt, Human
uuuagguucuaaa

SEQ ID NO: 3413689 - RNA, 16 nt, Human
uuuagguucuaaaguu

SEQ ID NO: 3413690 - RNA, 23 nt, Human
uuuagguucuaaaguucuaagau

SEQ ID NO: 3413691 - RNA, 23 nt, Human
uuuagguucuuugcugcauucug

SEQ ID NO: 3413692 - RNA, 22 nt, Human
uuuaguaaaccaauccuaugca

SEQ ID NO: 3413693 - RNA, 17 nt, Human
uuuaguaacaucauuuu

SEQ ID NO: 3413694 - RNA, 19 nt, Human
uuuaguaaucuguacauuu

SEQ ID NO: 3413695 - RNA, 22 nt, Human
uuuaguaucaguguuuuaaauu

SEQ ID NO: 3413696 - RNA, 16 nt, Human
uuuaguaucuuuuuau

SEQ ID NO: 3413697 - RNA, 21 nt, Human
uuuaguauugaauacuuacau

SEQ ID NO: 3413698 - RNA, 14 nt, Human
uuuagucucuuuau

SEQ ID NO: 3413699 - RNA, 16 nt, Human
uuuagucugcaaaaug

SEQ ID NO: 3413700 - RNA, 18 nt, Human
uuuagucugcaaaaugag

SEQ ID NO: 3413701 - RNA, 15 nt, Human
uuuagucuugucuca

SEQ ID NO: 3413702 - RNA, 13 nt, Human
uuuagucuuuaua

SEQ ID NO: 3413703 - RNA, 16 nt, Human
uuuagugaacuugaaa

SEQ ID NO: 3413704 - RNA, 12 nt, Human
uuuagugacuaa

SEQ ID NO: 3413705 - RNA, 19 nt, Human
uuuaguggacccugaaaug

SEQ ID NO: 3413706 - RNA, 22 nt, Human
uuuaguggacccugaaaugugu

SEQ ID NO: 3413707 - RNA, 24 nt, Human
uuuagugguagcauauagauuguc

SEQ ID NO: 3413708 - RNA, 15 nt, Human
uuuaguguaaaaaug

SEQ ID NO: 3413709 - RNA, 13 nt, Human
uuuagugugguuu

SEQ ID NO: 3413710 - RNA, 20 nt, Human
uuuaguguuuuuuuauuucu

SEQ ID NO: 3413711 - RNA, 23 nt, Human
uuuaguucaauauuuguuacugu

SEQ ID NO: 3413712 - RNA, 12 nt, Human
uuuaguuccugu

SEQ ID NO: 3413713 - RNA, 11 nt, Human
uuuaguucuuu

SEQ ID NO: 3413714 - RNA, 17 nt, Human
uuuaguucuuuggaaau

SEQ ID NO: 3413715 - RNA, 19 nt, Human
uuuaguugcagacucaguu

SEQ ID NO: 3413716 - RNA, 17 nt, Human
uuuaguuguaucucuuu

SEQ ID NO: 3413717 - RNA, 15 nt, Human
uuuaguuuucucuua

SEQ ID NO: 3413718 - RNA, 14 nt, Human
uuuaguuuugcuuu

SEQ ID NO: 3413719 - RNA, 13 nt, Human
uuuaguuuuucau

SEQ ID NO: 3413720 - RNA, 16 nt, Human
uuuaguuuuucauuaa

SEQ ID NO: 3413721 - RNA, 19 nt, Human
uuuauaaaaaaaaugaaau

SEQ ID NO: 3413722 - RNA, 20 nt, Human
uuuauaaaaaaaaugaaaug

SEQ ID NO: 3413723 - RNA, 21 nt, Human
uuuauaaaauagaguguaguu

SEQ ID NO: 3413724 - RNA, 18 nt, Human
uuuauaaaauuaaagaaa

SEQ ID NO: 3413725 - RNA, 19 nt, Human
uuuauaaaauuaaagaaaa

SEQ ID NO: 3413726 - RNA, 12 nt, Human
uuuauaaacaga

SEQ ID NO: 3413727 - RNA, 23 nt, Human
uuuauaaacagacaauaugugag

SEQ ID NO: 3413728 - RNA, 16 nt, Human
uuuauaaaccucuaau

SEQ ID NO: 3413729 - RNA, 12 nt, Human
uuuauaaagcau

SEQ ID NO: 3413730 - RNA, 15 nt, Human
uuuauaaaucgcuuu

SEQ ID NO: 3413731 - RNA, 12 nt, Human
uuuauaaaugag

SEQ ID NO: 3413732 - RNA, 14 nt, Human
uuuauaaaugcuau

SEQ ID NO: 3413733 - RNA, 15 nt, Human
uuuauaaauuaaaua

SEQ ID NO: 3413734 - RNA, 17 nt, Human
uuuauaaauuaaauaua

SEQ ID NO: 3413735 - RNA, 20 nt, Human
uuuauaacaucuuuauugaa

SEQ ID NO: 3413736 - RNA, 19 nt, Human
uuuauaacuaguccuuuac

SEQ ID NO: 3413737 - RNA, 16 nt, Human
uuuauaacuauucagu

SEQ ID NO: 3413738 - RNA, 19 nt, Human
uuuauaacucaucauaaaa

SEQ ID NO: 3413739 - RNA, 21 nt, Human
uuuauaacucaucauaaaaua

SEQ ID NO: 3413740 - RNA, 16 nt, Human
uuuauaagaaagccug

SEQ ID NO: 3413741 - RNA, 23 nt, Human
uuuauaagaaagccugaguacuc

SEQ ID NO: 3413742 - RNA, 23 nt, Human
uuuauaagcaaauuucaaaagac

SEQ ID NO: 3413743 - RNA, 20 nt, Human
uuuauaagcagauuuaacaa

SEQ ID NO: 3413744 - RNA, 14 nt, Human
uuuauaagcaucau

SEQ ID NO: 3413745 - RNA, 18 nt, Human
uuuauaagcaucauuauu

SEQ ID NO: 3413746 - RNA, 22 nt, Human
uuuauaagccaguguugccuaa

SEQ ID NO: 3413747 - RNA, 13 nt, Human
uuuauaaggucug

SEQ ID NO: 3413748 - RNA, 16 nt, Human
uuuauaauaaaaauau

SEQ ID NO: 3413749 - RNA, 21 nt, Human
uuuauaauacagaaucuuguu

SEQ ID NO: 3413750 - RNA, 18 nt, Human
uuuauaauucaguauguu

SEQ ID NO: 3413751 - RNA, 18 nt, Human
uuuauaauuuuaagauuc

SEQ ID NO: 3413752 - RNA, 22 nt, Human
uuuauaauuuugugaagcaaaa

SEQ ID NO: 3413753 - RNA, 19 nt, Human
uuuauacaacagugcuaaa

SEQ ID NO: 3413754 - RNA, 19 nt, Human
uuuauacaccaauugauuu

SEQ ID NO: 3413755 - RNA, 15 nt, Human
uuuauacaggucaua

SEQ ID NO: 3413756 - RNA, 12 nt, Human
uuuauacauaaa

SEQ ID NO: 3413757 - RNA, 17 nt, Human
uuuauacauuaguaaau

SEQ ID NO: 3413758 - RNA, 16 nt, Human
uuuauaccauucagau

SEQ ID NO: 3413759 - RNA, 21 nt, Human
uuuauaccucaaacuaucugg

SEQ ID NO: 3413760 - RNA, 17 nt, Human
uuuauacguguagcuau

SEQ ID NO: 3413761 - RNA, 16 nt, Human
uuuauacucuuucugu

SEQ ID NO: 3413762 - RNA, 17 nt, Human
uuuauacuggcaugcua

SEQ ID NO: 3413763 - RNA, 16 nt, Human
uuuauacuguuuacug

SEQ ID NO: 3413764 - RNA, 16 nt, Human
uuuauaggugagaaaa

SEQ ID NO: 3413765 - RNA, 19 nt, Human
uuuauagugcacaaaauga

SEQ ID NO: 3413766 - RNA, 17 nt, Human
uuuauaguguguugugc

SEQ ID NO: 3413767 - RNA, 18 nt, Human
uuuauaguuuauacaguu

SEQ ID NO: 3413768 - RNA, 13 nt, Human
uuuauauaagcuu

SEQ ID NO: 3413769 - RNA, 17 nt, Human
uuuauauaauaucuaaa

SEQ ID NO: 3413770 - RNA, 22 nt, Human
uuuauauaauaucuaaaguuau

SEQ ID NO: 3413771 - RNA, 13 nt, Human
uuuauauauacag

SEQ ID NO: 3413772 - RNA, 21 nt, Human
uuuauauauacaguaacuuua

SEQ ID NO: 3413773 - RNA, 15 nt, Human
uuuauauauauaucu

SEQ ID NO: 3413774 - RNA, 14 nt, Human
uuuauauauaugca

SEQ ID NO: 3413775 - RNA, 13 nt, Human
uuuauauauguau

SEQ ID NO: 3413776 - RNA, 15 nt, Human
uuuauauauuauaug

SEQ ID NO: 3413777 - RNA, 12 nt, Human
uuuauauauuua

SEQ ID NO: 3413778 - RNA, 13 nt, Human
uuuauauauuuau

SEQ ID NO: 3413779 - RNA, 15 nt, Human
uuuauaucaugcaaa

SEQ ID NO: 3413780 - RNA, 17 nt, Human
uuuauaucaugcaaaau

SEQ ID NO: 3413781 - RNA, 16 nt, Human
uuuauaucuggaauga

SEQ ID NO: 3413782 - RNA, 14 nt, Human
uuuauaugaacaua

SEQ ID NO: 3413783 - RNA, 12 nt, Human
uuuauaugcuuu

SEQ ID NO: 3413784 - RNA, 14 nt, Human
uuuauauguacaug

SEQ ID NO: 3413785 - RNA, 12 nt, Human
uuuauauguacu

SEQ ID NO: 3413786 - RNA, 17 nt, Human
uuuauauguauccagua

SEQ ID NO: 3413787 - RNA, 15 nt, Human
uuuauauguaugugu

SEQ ID NO: 3413788 - RNA, 14 nt, Human
uuuauaugucaaag

SEQ ID NO: 3413789 - RNA, 16 nt, Human
uuuauauuagaagugu

SEQ ID NO: 3413790 - RNA, 16 nt, Human
uuuauauuaguugcuu

SEQ ID NO: 3413791 - RNA, 19 nt, Human
uuuauauuaguugcuuugu

SEQ ID NO: 3413792 - RNA, 12 nt, Human
uuuauauugaaa

SEQ ID NO: 3413793 - RNA, 14 nt, Human
uuuauauugaaaaa

SEQ ID NO: 3413794 - RNA, 22 nt, Human
uuuauauugauaagaucuuuua

SEQ ID NO: 3413795 - RNA, 17 nt, Human
uuuauauuuaauuauua

SEQ ID NO: 3413796 - RNA, 16 nt, Human
uuuauauuuacuaaaa

SEQ ID NO: 3413797 - RNA, 14 nt, Human
uuuauauuuaucca

SEQ ID NO: 3413798 - RNA, 14 nt, Human
uuuauauuucaagu

SEQ ID NO: 3413799 - RNA, 21 nt, Human
uuuauauuucaaguacacuga

SEQ ID NO: 3413800 - RNA, 13 nt, Human
uuuauauuuccuu

SEQ ID NO: 3413801 - RNA, 15 nt, Human
uuuauauuuccuuua

SEQ ID NO: 3413802 - RNA, 14 nt, Human
uuuauauuuggaug

SEQ ID NO: 3413803 - RNA, 13 nt, Human
uuuauauuuucaa

SEQ ID NO: 3413804 - RNA, 19 nt, Human
uuuauauuuucaauucaaa

SEQ ID NO: 3413805 - RNA, 22 nt, Human
uuuaucaaacagaauuuuaaag

SEQ ID NO: 3413806 - RNA, 22 nt, Human
uuuaucaaacccuagccuugcu

SEQ ID NO: 3413807 - RNA, 13 nt, Human
uuuaucaagaagu

SEQ ID NO: 3413808 - RNA, 21 nt, Human
uuuaucaaucaguauaauucu

SEQ ID NO: 3413809 - RNA, 16 nt, Human
uuuaucaaugugucuu

SEQ ID NO: 3413810 - RNA, 17 nt, Human
uuuaucacacuucugug

SEQ ID NO: 3413811 - RNA, 18 nt, Human
uuuaucacauguauguuu

SEQ ID NO: 3413812 - RNA, 13 nt, Human
uuuaucacuuaaa

SEQ ID NO: 3413813 - RNA, 16 nt, Human
uuuaucagaacuaugu

SEQ ID NO: 3413814 - RNA, 23 nt, Human
uuuaucagacucggaaucuauuu

SEQ ID NO: 3413815 - RNA, 22 nt, Human
uuuaucagauugcuuuugugca

SEQ ID NO: 3413816 - RNA, 20 nt, Human
uuuaucagggaaacuaagau

SEQ ID NO: 3413817 - RNA, 13 nt, Human
uuuaucagugaca

SEQ ID NO: 3413818 - RNA, 21 nt, Human
uuuaucagugacagaguucac

SEQ ID NO: 3413819 - RNA, 19 nt, Human
uuuaucaugaaugcuuuua

SEQ ID NO: 3413820 - RNA, 23 nt, Human
uuuaucaugacauguuauauauu

SEQ ID NO: 3413821 - RNA, 18 nt, Human
uuuaucaugugaaaucau

SEQ ID NO: 3413822 - RNA, 12 nt, Human
uuuaucauuuuc

SEQ ID NO: 3413823 - RNA, 14 nt, Human
uuuauccacaggaa

SEQ ID NO: 3413824 - RNA, 18 nt, Human
uuuaucccaaaguuguug

SEQ ID NO: 3413825 - RNA, 14 nt, Human
uuuguucuuacaca

SEQ ID NO: 3413826 - RNA, 13 nt, Human
uuuguucuucaga

SEQ ID NO: 3413827 - RNA, 19 nt, Human
uuuguugacaaaauuuucu

SEQ ID NO: 3413828 - RNA, 13 nt, Human
uuuguugacauua

SEQ ID NO: 3413829 - RNA, 14 nt, Human
uuuguugacauuag

SEQ ID NO: 3413830 - RNA, 18 nt, Human
uuuguugacauucugaau

SEQ ID NO: 3413831 - RNA, 18 nt, Human
uuuguugcaagaugugaa

SEQ ID NO: 3413832 - RNA, 10 nt, Human
uuuguugcac

SEQ ID NO: 3413833 - RNA, 17 nt, Human
uuuguugcacugaaguu

SEQ ID NO: 3413834 - RNA, 18 nt, Human
uuuguugcacugaaguuu

SEQ ID NO: 3413835 - RNA, 14 nt, Human
uuuguugccccaga

SEQ ID NO: 3413836 - RNA, 19 nt, Human
uuuguuggaguguuucuaa

SEQ ID NO: 3413837 - RNA, 15 nt, Human
uuuguuguaaaacaa

SEQ ID NO: 3413838 - RNA, 17 nt, Human
uuuguuguaaagaguug

SEQ ID NO: 3413839 - RNA, 15 nt, Human
uuuguugucagcuga

SEQ ID NO: 3413840 - RNA, 21 nt, Human
uuuguugugugccucuagcug

SEQ ID NO: 3413841 - RNA, 10 nt, Human
uuuguuguua

SEQ ID NO: 3413842 - RNA, 19 nt, Human
uuuguuguucuuucagaaa

SEQ ID NO: 3413843 - RNA, 22 nt, Human
uuuguuguuucuuaauuuggaa

SEQ ID NO: 3413844 - RNA, 14 nt, Human
uuuguuguuuguuu

SEQ ID NO: 3413845 - RNA, 14 nt, Human
uuuguuuaaaaagu

SEQ ID NO: 3413846 - RNA, 14 nt, Human
uuuguuuaaaagga

SEQ ID NO: 3413847 - RNA, 17 nt, Human
uuuguuuaaugugaacu

SEQ ID NO: 3413848 - RNA, 21 nt, Human
uuuguuuaauuuuuauuucuu

SEQ ID NO: 3413849 - RNA, 17 nt, Human
uuuguuucaaugaggug

SEQ ID NO: 3413850 - RNA, 14 nt, Human
uuuguuuccuuugu

SEQ ID NO: 3413851 - RNA, 13 nt, Human
uuuguuucuguac

SEQ ID NO: 3413852 - RNA, 18 nt, Human
uuuguuucuguacuuuuu

SEQ ID NO: 3413853 - RNA, 10 nt, Human
uuuguuucuu

SEQ ID NO: 3413854 - RNA, 12 nt, Human
uuuguuugaacu

SEQ ID NO: 3413855 - RNA, 13 nt, Human
uuuguuugcuauc

SEQ ID NO: 3413856 - RNA, 15 nt, Human
uuuguuugcuaucuu

SEQ ID NO: 3413857 - RNA, 18 nt, Human
uuuguuugguauuguauu

SEQ ID NO: 3413858 - RNA, 12 nt, Human
uuuguuugucuc

SEQ ID NO: 3413859 - RNA, 15 nt, Human
uuuguuugugcuucu

SEQ ID NO: 3413860 - RNA, 16 nt, Human
uuuguuugugcuucua

SEQ ID NO: 3413861 - RNA, 15 nt, Human
uuuguuuuaaaauua

SEQ ID NO: 3413862 - RNA, 14 nt, Human
uuuguuuucauggu

SEQ ID NO: 3413863 - RNA, 21 nt, Human
uuuguuuuuaaacuguacagu

SEQ ID NO: 3413864 - RNA, 13 nt, Human
uuuguuuuuaauu

SEQ ID NO: 3413865 - RNA, 12 nt, Human
uuuguuuuucau

SEQ ID NO: 3413866 - RNA, 14 nt, Human
uuuguuuuucucac

SEQ ID NO: 3413867 - RNA, 15 nt, Human
uuuguuuuucugcuu

SEQ ID NO: 3413868 - RNA, 17 nt, Human
uuuguuuuuugaagugu

SEQ ID NO: 3413869 - RNA, 16 nt, Human
uuuguuuuuugagucu

SEQ ID NO: 3413870 - RNA, 19 nt, Human
uuuguuuuuugagucuuuu

SEQ ID NO: 3413871 - RNA, 13 nt, Human
uuuuaaaaaaaga

SEQ ID NO: 3413872 - RNA, 22 nt, Human
uuuuaaaaaaauaaaacauuuu

SEQ ID NO: 3413873 - RNA, 13 nt, Human
uuuuaaaaaagaa

SEQ ID NO: 3413874 - RNA, 23 nt, Human
uuuuaaaaaagcaacagaaaccu

SEQ ID NO: 3413875 - RNA, 20 nt, Human
uuuuaaaaaagcuuaaaacu

SEQ ID NO: 3413876 - RNA, 21 nt, Human
uuuuaaaaaagcuuaaaacuu

SEQ ID NO: 3413877 - RNA, 23 nt, Human
uuuuaaaaaagcuuaaaacuuug

SEQ ID NO: 3413878 - RNA, 17 nt, Human
uuuuaaaaaauggucac

SEQ ID NO: 3413879 - RNA, 20 nt, Human
uuuuaaaaacauaacauaaa

SEQ ID NO: 3413880 - RNA, 19 nt, Human
uuuuaaaaacauagaaaaa

SEQ ID NO: 3413881 - RNA, 13 nt, Human
uuuuaaaaaccua

SEQ ID NO: 3413882 - RNA, 18 nt, Human
uuuuaaaaaguauugcca

SEQ ID NO: 3413883 - RNA, 20 nt, Human
uuuuaaaaaguauugccaaa

SEQ ID NO: 3413884 - RNA, 16 nt, Human
uuuuaaaaauacauau

SEQ ID NO: 3413885 - RNA, 22 nt, Human
uuuuaaaaaucauaaacugugu

SEQ ID NO: 3413886 - RNA, 16 nt, Human
uuuuaaaaaugaaauu

SEQ ID NO: 3413887 - RNA, 14 nt, Human
uuuuaaaaaugaau

SEQ ID NO: 3413888 - RNA, 22 nt, Human
uuuuaaaaauuaaaucaaccuu

SEQ ID NO: 3413889 - RNA, 20 nt, Human
uuuuaaaaauuguuaauuuu

SEQ ID NO: 3413890 - RNA, 22 nt, Human
uuuuaaaacaagaaaguuuccc

SEQ ID NO: 3413891 - RNA, 22 nt, Human
uuuuaaaacacuuccauaaucu

SEQ ID NO: 3413892 - RNA, 15 nt, Human
uuuuaaaacuggacc

SEQ ID NO: 3413893 - RNA, 22 nt, Human
uuuuaaaagagacaaacuguaa

SEQ ID NO: 3413894 - RNA, 23 nt, Human
uuuuaaaagccuuggccucagag

SEQ ID NO: 3413895 - RNA, 12 nt, Human
uuuuaaaaguuu

SEQ ID NO: 3413896 - RNA, 13 nt, Human
uuuuaaaaguuuc

SEQ ID NO: 3413897 - RNA, 21 nt, Human
uuuuaaaaguuucaaugugau

SEQ ID NO: 3413898 - RNA, 17 nt, Human
uuuuaaaauaaggauuu

SEQ ID NO: 3413899 - RNA, 15 nt, Human
uuuuaaaauaagucu

SEQ ID NO: 3413900 - RNA, 22 nt, Human
uuuuaaaauaagucugauuuaa

SEQ ID NO: 3413901 - RNA, 19 nt, Human
uuuuaaaauacuguagaua

SEQ ID NO: 3413902 - RNA, 22 nt, Human
uuuuaaaaucagcuauuuugug

SEQ ID NO: 3413903 - RNA, 20 nt, Human
uuuuaaaaucugagggaaau

SEQ ID NO: 3413904 - RNA, 21 nt, Human
uuuuaaaaucugagggaaaug

SEQ ID NO: 3413905 - RNA, 12 nt, Human
uuuuaaaaugua

SEQ ID NO: 3413906 - RNA, 15 nt, Human
uuuuaaaauguacau

SEQ ID NO: 3413907 - RNA, 21 nt, Human
uuuuaaaauguacauguauua

SEQ ID NO: 3413908 - RNA, 13 nt, Human
uuuuaaacaaaca

SEQ ID NO: 3413909 - RNA, 13 nt, Human
uuuuaaacaguga

SEQ ID NO: 3413910 - RNA, 20 nt, Human
uuuuaaacccuauugguaaa

SEQ ID NO: 3413911 - RNA, 19 nt, Human
uuuuaaacuacagguaguu

SEQ ID NO: 3413912 - RNA, 13 nt, Human
uuuuaaacuagau

SEQ ID NO: 3413913 - RNA, 12 nt, Human
uuuuaaacucau

SEQ ID NO: 3413914 - RNA, 14 nt, Human
uuuuaaacuguaca

SEQ ID NO: 3413915 - RNA, 11 nt, Human
uuuuaaagaaa

SEQ ID NO: 3413916 - RNA, 23 nt, Human
uuuuaaagaaaaaaauugaaaug

SEQ ID NO: 3413917 - RNA, 19 nt, Human
uuuuaaagaaaagaugaaa

SEQ ID NO: 3413918 - RNA, 17 nt, Human
uuuuaaagaaugcucuu

SEQ ID NO: 3413919 - RNA, 13 nt, Human
uuuuaaagaauug

SEQ ID NO: 3413920 - RNA, 21 nt, Human
uuuuaaagaccugacaccuuu

SEQ ID NO: 3413921 - RNA, 18 nt, Human
uuuuaaagacuuuuauga

SEQ ID NO: 3413922 - RNA, 20 nt, Human
uuuuaaagagugaaaaauga

SEQ ID NO: 3413923 - RNA, 13 nt, Human
uuuuaaaggcauu

SEQ ID NO: 3413924 - RNA, 19 nt, Human
uuuuaaaggcauuagaguc

SEQ ID NO: 3413925 - RNA, 13 nt, Human
uuuuaaaguguuu

SEQ ID NO: 3413926 - RNA, 12 nt, Human
uuuuaaaguuca

SEQ ID NO: 3413927 - RNA, 17 nt, Human
uuuuaaauaaaagcagc

SEQ ID NO: 3413928 - RNA, 13 nt, Human
uuuuaaauaaacu

SEQ ID NO: 3413929 - RNA, 14 nt, Human
uuuuaaauaaacuu

SEQ ID NO: 3413930 - RNA, 16 nt, Human
uuuuaaauaaacuuuu

SEQ ID NO: 3413931 - RNA, 23 nt, Human
uuuuaaauaaacuuuuuuucaau

SEQ ID NO: 3413932 - RNA, 18 nt, Human
uuuuaaauauuuuuucuu

SEQ ID NO: 3413933 - RNA, 18 nt, Human
uuuuaaauccuguugaaa

SEQ ID NO: 3413934 - RNA, 19 nt, Human
uuuuaaauccuguugaaaa

SEQ ID NO: 3413935 - RNA, 18 nt, Human
uuuuaaaucuaaaucuau

SEQ ID NO: 3413936 - RNA, 12 nt, Human
uuuuaaaugcac

SEQ ID NO: 3413937 - RNA, 15 nt, Human
uuuuaaauguacaga

SEQ ID NO: 3413938 - RNA, 20 nt, Human
uuuuaaaugugugagugcau

SEQ ID NO: 3413939 - RNA, 18 nt, Human
uuuuaaauuagaaaauau

SEQ ID NO: 3413940 - RNA, 13 nt, Human
uuuuaaauucuga

SEQ ID NO: 3413941 - RNA, 14 nt, Human
uuuuaacaagaaga

SEQ ID NO: 3413942 - RNA, 19 nt, Human
uuuuaacaagaagaugaau

SEQ ID NO: 3413943 - RNA, 20 nt, Human
uuuuaacaccugauguguac

SEQ ID NO: 3413944 - RNA, 13 nt, Human
uuuuaacauggaa

SEQ ID NO: 3413945 - RNA, 15 nt, Human
uuuuaaccaaaggug

SEQ ID NO: 3413946 - RNA, 20 nt, Human
uuuuaacuaaauuuuaaagc

SEQ ID NO: 3413947 - RNA, 17 nt, Human
uuuuaacuuagagcuuu

SEQ ID NO: 3413948 - RNA, 12 nt, Human
uuuuaacuuugu

SEQ ID NO: 3413949 - RNA, 11 nt, Human
uuuuaagaaau

SEQ ID NO: 3413950 - RNA, 16 nt, Human
uuuuaagaauaucugu

SEQ ID NO: 3413951 - RNA, 17 nt, Human
uuuuaagacuuugguua

SEQ ID NO: 3413952 - RNA, 16 nt, Human
uuuuaagaggcagggu

SEQ ID NO: 3413953 - RNA, 22 nt, Human
uuuuaagauuccuuuucuuguu

SEQ ID NO: 3413954 - RNA, 18 nt, Human
uuuuaagauuuuucucaa

SEQ ID NO: 3413955 - RNA, 19 nt, Human
uuuuaagauuuuucucaaa

SEQ ID NO: 3413956 - RNA, 21 nt, Human
uuuuaagauuuuucucaaagu

SEQ ID NO: 3413957 - RNA, 21 nt, Human
uuuuaagcacucuuaaagcaa

SEQ ID NO: 3413958 - RNA, 19 nt, Human
uuuuaagcauuacucuugu

SEQ ID NO: 3413959 - RNA, 21 nt, Human
uuuuaagcguaauuuugccaa

SEQ ID NO: 3413960 - RNA, 21 nt, Human
uuuuaagcuaggaaaagaaau

SEQ ID NO: 3413961 - RNA, 15 nt, Human
uuuuaagcucugagc

SEQ ID NO: 3413962 - RNA, 12 nt, Human
uuuuaagcuguu

SEQ ID NO: 3413963 - RNA, 17 nt, Human
uuuuaaggaagaaaaau

SEQ ID NO: 3413964 - RNA, 16 nt, Human
uuuuaaggacugacug

SEQ ID NO: 3413965 - RNA, 22 nt, Human
uuuuaaggacugacugaggcag

SEQ ID NO: 3413966 - RNA, 21 nt, Human
uuuuaaggucuuucaguacuu

SEQ ID NO: 3413967 - RNA, 15 nt, Human
uuuuaaguaaugugg

SEQ ID NO: 3413968 - RNA, 17 nt, Human
uuuuaaguaauguggaa

SEQ ID NO: 3413969 - RNA, 18 nt, Human
uuuuaaguauuuauauau

SEQ ID NO: 3413970 - RNA, 19 nt, Human
uuuuaaguauuuauauauu

SEQ ID NO: 3413971 - RNA, 17 nt, Human
uuuuaucacauguaugu

SEQ ID NO: 3413972 - RNA, 14 nt, Human
uuuuaucaggauuu

SEQ ID NO: 3413973 - RNA, 12 nt, Human
uuuuaucaguag

SEQ ID NO: 3413974 - RNA, 19 nt, Human
uuuuaucauuuucaaaaug

SEQ ID NO: 3413975 - RNA, 17 nt, Human
uuuuaucccucaccugu

SEQ ID NO: 3413976 - RNA, 18 nt, Human
uuuuaucgucacugcuua

SEQ ID NO: 3413977 - RNA, 23 nt, Human
uuuuaucguuuuuguauuuucau

SEQ ID NO: 3413978 - RNA, 21 nt, Human
uuuuaucugaaaucaauuaaa

SEQ ID NO: 3413979 - RNA, 20 nt, Human
uuuuaucugaguuacagaaa

SEQ ID NO: 3413980 - RNA, 14 nt, Human
uuuuaucuguuuaa

SEQ ID NO: 3413981 - RNA, 15 nt, Human
uuuuaucuguuuccu

SEQ ID NO: 3413982 - RNA, 16 nt, Human
uuuuaucuuuucuaca

SEQ ID NO: 3413983 - RNA, 14 nt, Human
uuuuaugaagaaaa

SEQ ID NO: 3413984 - RNA, 19 nt, Human
uuuuaugagaaagccuucu

SEQ ID NO: 3413985 - RNA, 21 nt, Human
uuuuaugagauggaucacaua

SEQ ID NO: 3413986 - RNA, 18 nt, Human
uuuuaugagcuuccaagg

SEQ ID NO: 3413987 - RNA, 13 nt, Human
uuuuaugaucagu

SEQ ID NO: 3413988 - RNA, 23 nt, Human
uuuuaugcaaauauuuuuuugua

SEQ ID NO: 3413989 - RNA, 24 nt, Human
uuuuaugcucuuuuuuacucauug

SEQ ID NO: 3413990 - RNA, 23 nt, Human
uuuuauggaggcuuugcauagau

SEQ ID NO: 3413991 - RNA, 18 nt, Human
uuuuauggcuuuugugca

SEQ ID NO: 3413992 - RNA, 21 nt, Human
uuuuauggcuuuugugcauua

SEQ ID NO: 3413993 - RNA, 19 nt, Human
uuuuauguaguaauugaca

SEQ ID NO: 3413994 - RNA, 18 nt, Human
uuuuaugugagagaaagu

SEQ ID NO: 3413995 - RNA, 12 nt, Human
uuuuauuaaauu

SEQ ID NO: 3413996 - RNA, 15 nt, Human
uuuuauuaaucacug

SEQ ID NO: 3413997 - RNA, 21 nt, Human
uuuuauuaaucacuguguaua

SEQ ID NO: 3413998 - RNA, 19 nt, Human
uuuuauuaaugcacuuucu

SEQ ID NO: 3413999 - RNA, 13 nt, Human
uuuuauuauguaa

SEQ ID NO: 3414000 - RNA, 15 nt, Human
uuuuauuauuaacaa

SEQ ID NO: 3414001 - RNA, 12 nt, Human
uuuuauuauugu

SEQ ID NO: 3414002 - RNA, 13 nt, Human
uuuuauuccacau

SEQ ID NO: 3414003 - RNA, 14 nt, Human
uuuuauugccuucu

SEQ ID NO: 3414004 - RNA, 24 nt, Human
uuuuauugccuucucaccagcugc

SEQ ID NO: 3414005 - RNA, 19 nt, Human
uuuuauugcuaguauuuga

SEQ ID NO: 3414006 - RNA, 21 nt, Human
uuuuauugcuaguauuugaau

SEQ ID NO: 3414007 - RNA, 20 nt, Human
uuuuauuguaacagacauug

SEQ ID NO: 3414008 - RNA, 17 nt, Human
uuuuauuguuuaaagca

SEQ ID NO: 3414009 - RNA, 17 nt, Human
uuuuauuuagggaacau

SEQ ID NO: 3414010 - RNA, 16 nt, Human
uuuuauuuauauguau

SEQ ID NO: 3414011 - RNA, 15 nt, Human
uuuuauuuaugaagu

SEQ ID NO: 3414012 - RNA, 15 nt, Human
uuuuauuuauuuuau

SEQ ID NO: 3414013 - RNA, 16 nt, Human
uuuuauuuccuaugau

SEQ ID NO: 3414014 - RNA, 11 nt, Human
uuuuauuuuac

SEQ ID NO: 3414015 - RNA, 16 nt, Human
uuuuauuuuauguuua

SEQ ID NO: 3414016 - RNA, 17 nt, Human
uuuuauuuucaaaacca

SEQ ID NO: 3414017 - RNA, 16 nt, Human
uuuuauuuucuaaagu

SEQ ID NO: 3414018 - RNA, 12 nt, Human
uuuuauuuugaa

SEQ ID NO: 3414019 - RNA, 15 nt, Human
uuuuauuuuguaauu

SEQ ID NO: 3414020 - RNA, 14 nt, Human
uuuuauuuuguuuu

SEQ ID NO: 3414021 - RNA, 18 nt, Human
uuuuauuuuucuaaaaaa

SEQ ID NO: 3414022 - RNA, 14 nt, Human
uuuuauuuuuuagu

SEQ ID NO: 3414023 - RNA, 17 nt, Human
uuuucaaaauaaaaaug

SEQ ID NO: 3414024 - RNA, 14 nt, Human
uuuucaaaauggag

SEQ ID NO: 3414025 - RNA, 20 nt, Human
uuuucaaacaaagaugccac

SEQ ID NO: 3414026 - RNA, 13 nt, Human
uuuucaaagcaau

SEQ ID NO: 3414027 - RNA, 22 nt, Human
uuuucaacagugaagacagaag

SEQ ID NO: 3414028 - RNA, 23 nt, Human
uuuucaaccagauaacauaccuu

SEQ ID NO: 3414029 - RNA, 12 nt, Human
uuuucaacccca

SEQ ID NO: 3414030 - RNA, 17 nt, Human
uuuucaacgcagcccug

SEQ ID NO: 3414031 - RNA, 22 nt, Human
uuuucaacgcagcccugcuuug

SEQ ID NO: 3414032 - RNA, 16 nt, Human
uuuucaacuuugaaua

SEQ ID NO: 3414033 - RNA, 21 nt, Human
uuuucaacuuugaauaaagaa

SEQ ID NO: 3414034 - RNA, 16 nt, Human
uuuucaagaauaauca

SEQ ID NO: 3414035 - RNA, 19 nt, Human
uuuucaauaacuggaacac

SEQ ID NO: 3414036 - RNA, 23 nt, Human
uuuucaauaacuggaacacucua

SEQ ID NO: 3414037 - RNA, 14 nt, Human
uuuucaauagccac

SEQ ID NO: 3414038 - RNA, 23 nt, Human
uuuucaauauauugaacuuuugu

SEQ ID NO: 3414039 - RNA, 20 nt, Human
uuuucaaucucguauagaag

SEQ ID NO: 3414040 - RNA, 10 nt, Human
uuuucaauua

SEQ ID NO: 3414041 - RNA, 13 nt, Human
uuuucaauuaaac

SEQ ID NO: 3414042 - RNA, 15 nt, Human
uuuucaauuaaacgg

SEQ ID NO: 3414043 - RNA, 22 nt, Human
uuuucaauucaaaaauguacaa

SEQ ID NO: 3414044 - RNA, 13 nt, Human
uuuucacaaauaa

SEQ ID NO: 3414045 - RNA, 17 nt, Human
uuuucacaaugucagua

SEQ ID NO: 3414046 - RNA, 23 nt, Human
uuuucacacaauacaauaaguua

SEQ ID NO: 3414047 - RNA, 13 nt, Human
uuuucacauaucu

SEQ ID NO: 3414048 - RNA, 18 nt, Human
uuuucacauccuugacuu

SEQ ID NO: 3414049 - RNA, 13 nt, Human
uuuucacaugaac

SEQ ID NO: 3414050 - RNA, 14 nt, Human
uuuucacaugaaca

SEQ ID NO: 3414051 - RNA, 18 nt, Human
uuuucacauuagaagaca

SEQ ID NO: 3414052 - RNA, 17 nt, Human
uuuucacauucuuggcu

SEQ ID NO: 3414053 - RNA, 23 nt, Human
uuuucaccauucguacauaauac

SEQ ID NO: 3414054 - RNA, 17 nt, Human
uuuucacggaaguuuuc

SEQ ID NO: 3414055 - RNA, 19 nt, Human
uuuucacucuaagucaugu

SEQ ID NO: 3414056 - RNA, 21 nt, Human
uuuucacucuaagucauguau

SEQ ID NO: 3414057 - RNA, 16 nt, Human
uuuucagaaaauauua

SEQ ID NO: 3414058 - RNA, 23 nt, Human
uuuucagaaaauauuauguguuu

SEQ ID NO: 3414059 - RNA, 17 nt, Human
uuuucagaaccucuucc

SEQ ID NO: 3414060 - RNA, 11 nt, Human
uuuucagaauc

SEQ ID NO: 3414061 - RNA, 16 nt, Human
uuuucagaaucugaau

SEQ ID NO: 3414062 - RNA, 16 nt, Human
uuuucagacuugucaa

SEQ ID NO: 3414063 - RNA, 15 nt, Human
uuuucagauauaaaa

SEQ ID NO: 3414064 - RNA, 17 nt, Human
uuuucagaugugaacca

SEQ ID NO: 3414065 - RNA, 14 nt, Human
uuuucagauuugca

SEQ ID NO: 3414066 - RNA, 15 nt, Human
uuuucagauuugcac

SEQ ID NO: 3414067 - RNA, 18 nt, Human
uuuucagcaaacucuuuu

SEQ ID NO: 3414068 - RNA, 19 nt, Human
uuuucagcuaggaacaaau

SEQ ID NO: 3414069 - RNA, 17 nt, Human
uuuucagcuucugcugg

SEQ ID NO: 3414070 - RNA, 19 nt, Human
uuuucaguauuauauguac

SEQ ID NO: 3414071 - RNA, 14 nt, Human
uuuucaguguacau

SEQ ID NO: 3414072 - RNA, 16 nt, Human
uuuucaguuccaagaa

SEQ ID NO: 3414073 - RNA, 12 nt, Human
uuuucaguuguu

SEQ ID NO: 3414074 - RNA, 22 nt, Human
uuuucaguuguuuguuuuugcu

SEQ ID NO: 3414075 - RNA, 15 nt, Human
uuuucauaacuuauu

SEQ ID NO: 3414076 - RNA, 16 nt, Human
uuuucauacauuuucu

SEQ ID NO: 3414077 - RNA, 18 nt, Human
uuuucauacauuuucuaa

SEQ ID NO: 3414078 - RNA, 16 nt, Human
uuuucauauuugcacu

SEQ ID NO: 3414079 - RNA, 18 nt, Human
uuuucauccauaacugaa

SEQ ID NO: 3414080 - RNA, 13 nt, Human
uuuucauccccuu

SEQ ID NO: 3414081 - RNA, 15 nt, Human
uuuucaucugggaaa

SEQ ID NO: 3414082 - RNA, 16 nt, Human
uuuucaucuucaguug

SEQ ID NO: 3414083 - RNA, 21 nt, Human
uuuucaugauuuugaaaccau

SEQ ID NO: 3414084 - RNA, 17 nt, Human
uuuucaugcuuuaucaa

SEQ ID NO: 3414085 - RNA, 22 nt, Human
uuuucauggacacuuugaaaug

SEQ ID NO: 3414086 - RNA, 16 nt, Human
uuuucauguuuuaaca

SEQ ID NO: 3414087 - RNA, 18 nt, Human
uuuucauuaaauaaauuu

SEQ ID NO: 3414088 - RNA, 20 nt, Human
uuuucauuaaauaaauuuga

SEQ ID NO: 3414089 - RNA, 22 nt, Human
uuuucauuaaauaaauuugacu

SEQ ID NO: 3414090 - RNA, 19 nt, Human
uuuucauuacaauggaaac

SEQ ID NO: 3414091 - RNA, 22 nt, Human
uuuucauuagcaaaaaaaguug

SEQ ID NO: 3414092 - RNA, 20 nt, Human
uuuucauuccaugugcccag

SEQ ID NO: 3414093 - RNA, 21 nt, Human
uuuucauuccaugugcccagu

SEQ ID NO: 3414094 - RNA, 22 nt, Human
uuuucauucuccuaucaccugu

SEQ ID NO: 3414095 - RNA, 18 nt, Human
uuuucauugaacagcaaa

SEQ ID NO: 3414096 - RNA, 14 nt, Human
uuuucauugcugug

SEQ ID NO: 3414097 - RNA, 13 nt, Human
uuuucauuuuaca

SEQ ID NO: 3414098 - RNA, 14 nt, Human
uuuucauuuuccaa

SEQ ID NO: 3414099 - RNA, 17 nt, Human
uuuucauuuuccaauac

SEQ ID NO: 3414100 - RNA, 18 nt, Human
uuuucauuuucugcaagc

SEQ ID NO: 3414101 - RNA, 20 nt, Human
uuuuccaaaaguggccucuu

SEQ ID NO: 3414102 - RNA, 23 nt, Human
uuuuccaaaaguggccucuuugu

SEQ ID NO: 3414103 - RNA, 14 nt, Human
uuuuccaaugucug

SEQ ID NO: 3414104 - RNA, 15 nt, Human
uuuuccacuacugcu

SEQ ID NO: 3414105 - RNA, 19 nt, Human
uuuuccagagcauuccagu

SEQ ID NO: 3414106 - RNA, 20 nt, Human
uuuuccagagcauuccaguc

SEQ ID NO: 3414107 - RNA, 12 nt, Human
uuuuccagcaag

SEQ ID NO: 3414108 - RNA, 13 nt, Human
uuuuccagcaagu

SEQ ID NO: 3414109 - RNA, 19 nt, Human
uuuuccagguuuaagcugu

SEQ ID NO: 3414110 - RNA, 14 nt, Human
uuuuccaguauuuu

SEQ ID NO: 3414111 - RNA, 18 nt, Human
uuuuccagucucuuguac

SEQ ID NO: 3414112 - RNA, 18 nt, Human
uuuuccauauuuuuacaa

SEQ ID NO: 3414113 - RNA, 16 nt, Human
uuuuccaucuaaaaau

SEQ ID NO: 3414114 - RNA, 16 nt, Human
uuuuccaugaaaacgu

SEQ ID NO: 3414115 - RNA, 18 nt, Human
uuuuccaugaguccccug

SEQ ID NO: 3414116 - RNA, 14 nt, Human
uuuugaaucuuuaa

SEQ ID NO: 3414117 - RNA, 16 nt, Human
uuuugaaucuuuaauu

SEQ ID NO: 3414118 - RNA, 18 nt, Human
uuuugaaugcuuccugac

SEQ ID NO: 3414119 - RNA, 22 nt, Human
uuuugaaugcuuccugacaauc

SEQ ID NO: 3414120 - RNA, 18 nt, Human
uuuugaaugguguuguau

SEQ ID NO: 3414121 - RNA, 14 nt, Human
uuuugaauuuagug

SEQ ID NO: 3414122 - RNA, 16 nt, Human
uuuugacacuauaucu

SEQ ID NO: 3414123 - RNA, 18 nt, Human
uuuugacacuauaucugu

SEQ ID NO: 3414124 - RNA, 16 nt, Human
uuuugacacugaaaua

SEQ ID NO: 3414125 - RNA, 23 nt, Human
uuuugacagaauauguuucaaac

SEQ ID NO: 3414126 - RNA, 23 nt, Human
uuuugacaguguugaaaauguuc

SEQ ID NO: 3414127 - RNA, 15 nt, Human
uuuugaccuuugaua

SEQ ID NO: 3414128 - RNA, 21 nt, Human
uuuugacucuggcaaagcuuu

SEQ ID NO: 3414129 - RNA, 14 nt, Human
uuuugacuuaaugu

SEQ ID NO: 3414130 - RNA, 20 nt, Human
uuuugacuuucauuggaaau

SEQ ID NO: 3414131 - RNA, 17 nt, Human
uuuugagaacguaaaga

SEQ ID NO: 3414132 - RNA, 19 nt, Human
uuuugagaacguaaagaac

SEQ ID NO: 3414133 - RNA, 17 nt, Human
uuuugagcaacuuucuu

SEQ ID NO: 3414134 - RNA, 19 nt, Human
uuuugagcgacaucucuga

SEQ ID NO: 3414135 - RNA, 22 nt, Human
uuuugagcugaaaugcugcauu

SEQ ID NO: 3414136 - RNA, 18 nt, Human
uuuugaguagauauuacu

SEQ ID NO: 3414137 - RNA, 17 nt, Human
uuuugagugccuuacac

SEQ ID NO: 3414138 - RNA, 18 nt, Human
uuuugauaaaguaguaaa

SEQ ID NO: 3414139 - RNA, 20 nt, Human
uuuugauaaaguuucucaga

SEQ ID NO: 3414140 - RNA, 14 nt, Human
uuuugauaacuguu

SEQ ID NO: 3414141 - RNA, 18 nt, Human
uuuugauaauaaauugaa

SEQ ID NO: 3414142 - RNA, 18 nt, Human
uuuugauacuaagcauug

SEQ ID NO: 3414143 - RNA, 19 nt, Human
uuuugauagcauuguaagc

SEQ ID NO: 3414144 - RNA, 20 nt, Human
uuuugauagcugucccaucu

SEQ ID NO: 3414145 - RNA, 15 nt, Human
uuuugauauaugaaa

SEQ ID NO: 3414146 - RNA, 16 nt, Human
uuuugauauuucuagc

SEQ ID NO: 3414147 - RNA, 17 nt, Human
uuuugauccaagcuggu

SEQ ID NO: 3414148 - RNA, 18 nt, Human
uuuugaucuucaacaaau

SEQ ID NO: 3414149 - RNA, 15 nt, Human
uuuugaugcagcauu

SEQ ID NO: 3414150 - RNA, 16 nt, Human
uuuugauguaaagaug

SEQ ID NO: 3414151 - RNA, 18 nt, Human
uuuugauguaaagauguu

SEQ ID NO: 3414152 - RNA, 18 nt, Human
uuuugauuauuguauuua

SEQ ID NO: 3414153 - RNA, 19 nt, Human
uuuugcaaagauuuaaucu

SEQ ID NO: 3414154 - RNA, 18 nt, Human
uuuugcaaauaaguguau

SEQ ID NO: 3414155 - RNA, 18 nt, Human
uuuugcaaauauaaacau

SEQ ID NO: 3414156 - RNA, 21 nt, Human
uuuugcaaccucgcuggacuc

SEQ ID NO: 3414157 - RNA, 21 nt, Human
uuuugcaagguaaaauuuuag

SEQ ID NO: 3414158 - RNA, 21 nt, Human
uuuugcaagguuccacagagu

SEQ ID NO: 3414159 - RNA, 23 nt, Human
uuuugcaagugaagguuuacaau

SEQ ID NO: 3414160 - RNA, 18 nt, Human
uuuugcaaucccuuaaua

SEQ ID NO: 3414161 - RNA, 17 nt, Human
uuuugcaauggcuauau

SEQ ID NO: 3414162 - RNA, 17 nt, Human
uuuugcacagccaaauu

SEQ ID NO: 3414163 - RNA, 13 nt, Human
uuuugcaccccuc

SEQ ID NO: 3414164 - RNA, 21 nt, Human
uuuugcagcccagacaaaugu

SEQ ID NO: 3414165 - RNA, 13 nt, Human
uuuugcaggagca

SEQ ID NO: 3414166 - RNA, 14 nt, Human
uuuugcaguaacug

SEQ ID NO: 3414167 - RNA, 22 nt, Human
uuuugcaguagagucaucucca

SEQ ID NO: 3414168 - RNA, 15 nt, Human
uuuugcauauugcau

SEQ ID NO: 3414169 - RNA, 18 nt, Human
uuuugcauauugcauacu

SEQ ID NO: 3414170 - RNA, 19 nt, Human
uuuugcauggcacuugcau

SEQ ID NO: 3414171 - RNA, 22 nt, Human
uuuugcauggcacuugcaucug

SEQ ID NO: 3414172 - RNA, 14 nt, Human
uuuugccacagcuu

SEQ ID NO: 3414173 - RNA, 20 nt, Human
uuuugccacagcuuuugcaa

SEQ ID NO: 3414174 - RNA, 13 nt, Human
uuuugccagccca

SEQ ID NO: 3414175 - RNA, 20 nt, Human
uuuugccauacaucaguuau

SEQ ID NO: 3414176 - RNA, 13 nt, Human
uuuugcccuuuga

SEQ ID NO: 3414177 - RNA, 15 nt, Human
uuuugccucuuuucu

SEQ ID NO: 3414178 - RNA, 13 nt, Human
uuuugccuucauu

SEQ ID NO: 3414179 - RNA, 17 nt, Human
uuuugcuauuguaaaua

SEQ ID NO: 3414180 - RNA, 23 nt, Human
uuuugcuggaauuccuaacuuuu

SEQ ID NO: 3414181 - RNA, 13 nt, Human
uuuugcuguagaa

SEQ ID NO: 3414182 - RNA, 12 nt, Human
uuuugcuguaua

SEQ ID NO: 3414183 - RNA, 21 nt, Human
uuuugcuguuguuucuaaaca

SEQ ID NO: 3414184 - RNA, 21 nt, Human
uuuugcuuuuggcaaaacucu

SEQ ID NO: 3414185 - RNA, 14 nt, Human
uuuuggaaaagaau

SEQ ID NO: 3414186 - RNA, 13 nt, Human
uuuuggaauuugc

SEQ ID NO: 3414187 - RNA, 15 nt, Human
uuuuggaauuuuccu

SEQ ID NO: 3414188 - RNA, 17 nt, Human
uuuuggacuucaaagca

SEQ ID NO: 3414189 - RNA, 15 nt, Human
uuuuggacuucuggg

SEQ ID NO: 3414190 - RNA, 20 nt, Human
uuuuggaguguuauguauuu

SEQ ID NO: 3414191 - RNA, 17 nt, Human
uuuuggaucuugaaugu

SEQ ID NO: 3414192 - RNA, 18 nt, Human
uuuuggaugguguuacau

SEQ ID NO: 3414193 - RNA, 19 nt, Human
uuuuggcaaacgcuaaaga

SEQ ID NO: 3414194 - RNA, 23 nt, Human
uuuuggcaaugacucaaagucug

SEQ ID NO: 3414195 - RNA, 19 nt, Human
uuuuggcaucucuguccca

SEQ ID NO: 3414196 - RNA, 17 nt, Human
uuuuggccaaaguguua

SEQ ID NO: 3414197 - RNA, 16 nt, Human
uuuuggccaugaaagc

SEQ ID NO: 3414198 - RNA, 19 nt, Human
uuuuggcgcuauuacaaau

SEQ ID NO: 3414199 - RNA, 22 nt, Human
uuuuggcugaaauucuccugga

SEQ ID NO: 3414200 - RNA, 14 nt, Human
uuuuggcugcugaa

SEQ ID NO: 3414201 - RNA, 14 nt, Human
uuuugggaugucuu

SEQ ID NO: 3414202 - RNA, 21 nt, Human
uuuuggggauaugcuuaguaa

SEQ ID NO: 3414203 - RNA, 22 nt, Human
uuuuggggauuuucaaaagaua

SEQ ID NO: 3414204 - RNA, 18 nt, Human
uuuugggggucaggcagc

SEQ ID NO: 3414205 - RNA, 18 nt, Human
uuuugggguacccacugc

SEQ ID NO: 3414206 - RNA, 19 nt, Human
uuuugggguuguguuguca

SEQ ID NO: 3414207 - RNA, 17 nt, Human
uuuugguagauuaaaua

SEQ ID NO: 3414208 - RNA, 23 nt, Human
uuuugguauuacacuguauuugu

SEQ ID NO: 3414209 - RNA, 14 nt, Human
uuuugguauuugaa

SEQ ID NO: 3414210 - RNA, 14 nt, Human
uuuuggucauugua

SEQ ID NO: 3414211 - RNA, 15 nt, Human
uuuuggucuguguga

SEQ ID NO: 3414212 - RNA, 18 nt, Human
uuuugguggauguaaaua

SEQ ID NO: 3414213 - RNA, 20 nt, Human
uuuuggugguuuuagugauu

SEQ ID NO: 3414214 - RNA, 13 nt, Human
uuuugguguguug

SEQ ID NO: 3414215 - RNA, 22 nt, Human
uuuugguuaaguuggcuucugu

SEQ ID NO: 3414216 - RNA, 20 nt, Human
uuuugguugaauaaacuaga

SEQ ID NO: 3414217 - RNA, 16 nt, Human
uuuugguugcuuuaau

SEQ ID NO: 3414218 - RNA, 20 nt, Human
uuuugguuguauucuuugau

SEQ ID NO: 3414219 - RNA, 22 nt, Human
uuuugguuugcagaugacaaaa

SEQ ID NO: 3414220 - RNA, 13 nt, Human
uuuuguaaacauu

SEQ ID NO: 3414221 - RNA, 19 nt, Human
uuuuguaaacgacaagaau

SEQ ID NO: 3414222 - RNA, 15 nt, Human
uuuuguaaacuuuga

SEQ ID NO: 3414223 - RNA, 21 nt, Human
uuuuguaaagaugccggguuu

SEQ ID NO: 3414224 - RNA, 13 nt, Human
uuuuguaaagugu

SEQ ID NO: 3414225 - RNA, 11 nt, Human
uuuuguaagaa

SEQ ID NO: 3414226 - RNA, 20 nt, Human
uuuuguaagaugcuggguug

SEQ ID NO: 3414227 - RNA, 22 nt, Human
uuuuguaauaagcaaucaaggu

SEQ ID NO: 3414228 - RNA, 17 nt, Human
uuuuguaauaauaaaga

SEQ ID NO: 3414229 - RNA, 14 nt, Human
uuuuguaauugcuu

SEQ ID NO: 3414230 - RNA, 14 nt, Human
uuuuguaauuuaaa

SEQ ID NO: 3414231 - RNA, 17 nt, Human
uuuuguaauuuucuuga

SEQ ID NO: 3414232 - RNA, 21 nt, Human
uuuuguacaucuggcuuauuu

SEQ ID NO: 3414233 - RNA, 11 nt, Human
uuuuguacaug

SEQ ID NO: 3414234 - RNA, 15 nt, Human
uuuuguacugaauuu

SEQ ID NO: 3414235 - RNA, 19 nt, Human
uuuuguagagccagggucu

SEQ ID NO: 3414236 - RNA, 14 nt, Human
uuuuguagguacuu

SEQ ID NO: 3414237 - RNA, 16 nt, Human
uuuuguauaaaauaga

SEQ ID NO: 3414238 - RNA, 16 nt, Human
uuuuguauaauuggau

SEQ ID NO: 3414239 - RNA, 23 nt, Human
uuuuguauaauuggauuuccuaa

SEQ ID NO: 3414240 - RNA, 11 nt, Human
uuuuguauaca

SEQ ID NO: 3414241 - RNA, 16 nt, Human
uuuuguauaguaaagu

SEQ ID NO: 3414242 - RNA, 23 nt, Human
uuuuguaugcaagcaguuucaau

SEQ ID NO: 3414243 - RNA, 15 nt, Human
uuuugucaacauugu

SEQ ID NO: 3414244 - RNA, 16 nt, Human
uuuugucaacauugug

SEQ ID NO: 3414245 - RNA, 13 nt, Human
uuuugucuuauau

SEQ ID NO: 3414246 - RNA, 13 nt, Human
uuuugucuugaau

SEQ ID NO: 3414247 - RNA, 24 nt, Human
uuuugugaaaugaaaacauguaau

SEQ ID NO: 3414248 - RNA, 13 nt, Human
uuuugugaaauuu

SEQ ID NO: 3414249 - RNA, 14 nt, Human
uuuugugaacuuuu

SEQ ID NO: 3414250 - RNA, 19 nt, Human
uuuugugaagugaaggauu

SEQ ID NO: 3414251 - RNA, 19 nt, Human
uuuugugaauggauuggau

SEQ ID NO: 3414252 - RNA, 21 nt, Human
uuuugugaugucccaacuugu

SEQ ID NO: 3414253 - RNA, 19 nt, Human
uuuugugauuuagaacugu

SEQ ID NO: 3414254 - RNA, 22 nt, Human
uuuugugcaaaagcuucaaauu

SEQ ID NO: 3414255 - RNA, 14 nt, Human
uuuugugcauugga

SEQ ID NO: 3414256 - RNA, 13 nt, Human
uuuugugcauuug

SEQ ID NO: 3414257 - RNA, 16 nt, Human
uuuuguggaggcagug

SEQ ID NO: 3414258 - RNA, 21 nt, Human
uuuugugggggacuguaaguu

SEQ ID NO: 3414259 - RNA, 21 nt, Human
uuuuguggucauuaagcauug

SEQ ID NO: 3414260 - RNA, 20 nt, Human
aaaacacaguguuuuuguaa

SEQ ID NO: 3414261 - RNA, 12 nt, Human
aaaacacauugc

SEQ ID NO: 3414262 - RNA, 12 nt, Human
aaaacacauuuu

SEQ ID NO: 3414263 - RNA, 13 nt, Human
aaaacacauuuuu

SEQ ID NO: 3414264 - RNA, 21 nt, Human
aaaacaccgcuucugccuuuu

SEQ ID NO: 3414265 - RNA, 15 nt, Human
aaaacaccuagcuuu

SEQ ID NO: 3414266 - RNA, 13 nt, Human
aaaacacugugca

SEQ ID NO: 3414267 - RNA, 16 nt, Human
aaaacagaaauuggua

SEQ ID NO: 3414268 - RNA, 13 nt, Human
aaaacagaagccu

SEQ ID NO: 3414269 - RNA, 23 nt, Human
aaaacagcugucucuaacuuauu

SEQ ID NO: 3414270 - RNA, 19 nt, Human
aaaacaggaaaaaaacuuu

SEQ ID NO: 3414271 - RNA, 15 nt, Human
aaaacaggcaaauuc

SEQ ID NO: 3414272 - RNA, 17 nt, Human
aaaacaggcacugcccu

SEQ ID NO: 3414273 - RNA, 18 nt, Human
aaaacaggcacugcccug

SEQ ID NO: 3414274 - RNA, 23 nt, Human
aaaacaggcacugcccugguggc

SEQ ID NO: 3414275 - RNA, 12 nt, Human
aaaacagguaga

SEQ ID NO: 3414276 - RNA, 22 nt, Human
aaaacagguagaauuaucuaau

SEQ ID NO: 3414277 - RNA, 20 nt, Human
aaaacaguccuucaaacuuc

SEQ ID NO: 3414278 - RNA, 17 nt, Human
aaaacaguguguaaaca

SEQ ID NO: 3414279 - RNA, 20 nt, Human
aaaacaguuggcaugcaucc

SEQ ID NO: 3414280 - RNA, 17 nt, Human
aaaacauaaaaaguuaa

SEQ ID NO: 3414281 - RNA, 17 nt, Human
aaaacauaacauaaauu

SEQ ID NO: 3414282 - RNA, 24 nt, Human
aaaacauaaucuucugccuucuca

SEQ ID NO: 3414283 - RNA, 19 nt, Human
aaaacaucauuccuuuuua

SEQ ID NO: 3414284 - RNA, 14 nt, Human
aaaacaucuuugaa

SEQ ID NO: 3414285 - RNA, 23 nt, Human
aaaacaugcagaacaaaugaaga

SEQ ID NO: 3414286 - RNA, 14 nt, Human
aaaacaugguagaa

SEQ ID NO: 3414287 - RNA, 16 nt, Human
aaaacaugguagaauu

SEQ ID NO: 3414288 - RNA, 14 nt, Human
aaaacauuaagaaa

SEQ ID NO: 3414289 - RNA, 16 nt, Human
aaaacauucuaucuac

SEQ ID NO: 3414290 - RNA, 22 nt, Human
aaaacauugaagagagagcuga

SEQ ID NO: 3414291 - RNA, 22 nt, Human
aaaacauuguccccaaugaaua

SEQ ID NO: 3414292 - RNA, 16 nt, Human
aaaacauuuuaaaugg

SEQ ID NO: 3414293 - RNA, 17 nt, Human
aaaacauuuuaaaugga

SEQ ID NO: 3414294 - RNA, 19 nt, Human
aaaacauuuucacacaaua

SEQ ID NO: 3414295 - RNA, 14 nt, Human
aaaaccaaaaugac

SEQ ID NO: 3414296 - RNA, 13 nt, Human
aaaaccaaagagg

SEQ ID NO: 3414297 - RNA, 21 nt, Human
aaaaccacaaaggccaaacug

SEQ ID NO: 3414298 - RNA, 14 nt, Human
aaaaccacagcagu

SEQ ID NO: 3414299 - RNA, 14 nt, Human
aaaaccaggcuuuc

SEQ ID NO: 3414300 - RNA, 18 nt, Human
aaaaccaucuggccuggc

SEQ ID NO: 3414301 - RNA, 20 nt, Human
aaaacccuugggccagaagu

SEQ ID NO: 3414302 - RNA, 15 nt, Human
aaaaccuacauauuc

SEQ ID NO: 3414303 - RNA, 22 nt, Human
aaaaccucacccgaggcugccc

SEQ ID NO: 3414304 - RNA, 18 nt, Human
aaaaccugagauuuauua

SEQ ID NO: 3414305 - RNA, 22 nt, Human
aaaaccugagauuuauuaaaga

SEQ ID NO: 3414306 - RNA, 18 nt, Human
aaaaccugggauuauaua

SEQ ID NO: 3414307 - RNA, 23 nt, Human
aaaaccuuagcucccucccgcac

SEQ ID NO: 3414308 - RNA, 23 nt, Human
aaaaccuuuuacugguugcaugg

SEQ ID NO: 3414309 - RNA, 15 nt, Human
aaaacgauuuaauuu

SEQ ID NO: 3414310 - RNA, 13 nt, Human
aaaacgcauggag

SEQ ID NO: 3414311 - RNA, 14 nt, Human
aaaacgcgcagaug

SEQ ID NO: 3414312 - RNA, 16 nt, Human
aaaacggcccucuuga

SEQ ID NO: 3414313 - RNA, 16 nt, Human
aaaacgguuaaaacug

SEQ ID NO: 3414314 - RNA, 14 nt, Human
aaaacguggcugcu

SEQ ID NO: 3414315 - RNA, 18 nt, Human
aaaacguggcugcuucaa

SEQ ID NO: 3414316 - RNA, 15 nt, Human
aaaacguuuuauugu

SEQ ID NO: 3414317 - RNA, 18 nt, Human
aaaacuaaauagcaugua

SEQ ID NO: 3414318 - RNA, 19 nt, Human
aaaacuaaauagcauguau

SEQ ID NO: 3414319 - RNA, 14 nt, Human
aaaacuaaauuuca

SEQ ID NO: 3414320 - RNA, 13 nt, Human
aaaacuaaguucu

SEQ ID NO: 3414321 - RNA, 21 nt, Human
aaaacuacaaaucaaguauuu

SEQ ID NO: 3414322 - RNA, 22 nt, Human
aaaacuacaaccaauggaaugu

SEQ ID NO: 3414323 - RNA, 12 nt, Human
aaaacuacauuu

SEQ ID NO: 3414324 - RNA, 16 nt, Human
aaaacuacauuuuaac

SEQ ID NO: 3414325 - RNA, 17 nt, Human
aaaacuacauuuuaaca

SEQ ID NO: 3414326 - RNA, 22 nt, Human
aaaacuagaggugagaaauuua

SEQ ID NO: 3414327 - RNA, 15 nt, Human
aaaacuaguaguucu

SEQ ID NO: 3414328 - RNA, 12 nt, Human
aaaacuauacaa

SEQ ID NO: 3414329 - RNA, 15 nt, Human
aaaacuauuaaggau

SEQ ID NO: 3414330 - RNA, 19 nt, Human
aaaacucaaccaaauggua

SEQ ID NO: 3414331 - RNA, 18 nt, Human
aaaacucaggcaaagaaa

SEQ ID NO: 3414332 - RNA, 16 nt, Human
aaaacuccaccuuccc

SEQ ID NO: 3414333 - RNA, 17 nt, Human
aaaacuccaccuuccca

SEQ ID NO: 3414334 - RNA, 16 nt, Human
aaaacuccgcccccag

SEQ ID NO: 3414335 - RNA, 18 nt, Human
aaaacucuacuuaaucca

SEQ ID NO: 3414336 - RNA, 21 nt, Human
aaaacucuacuuaauccaaug

SEQ ID NO: 3414337 - RNA, 13 nt, Human
aaaacucuuuaac

SEQ ID NO: 3414338 - RNA, 12 nt, Human
aaaacucuuuga

SEQ ID NO: 3414339 - RNA, 12 nt, Human
aaaacucuuuua

SEQ ID NO: 3414340 - RNA, 23 nt, Human
aaaacugaaagugaaaguccaga

SEQ ID NO: 3414341 - RNA, 19 nt, Human
aaaacugaagucugaaauu

SEQ ID NO: 3414342 - RNA, 17 nt, Human
aaaacugaauuauaaga

SEQ ID NO: 3414343 - RNA, 13 nt, Human
aaaacugagcaua

SEQ ID NO: 3414344 - RNA, 23 nt, Human
aaaacugcugacuguuuucucuu

SEQ ID NO: 3414345 - RNA, 12 nt, Human
aaaacuguguug

SEQ ID NO: 3414346 - RNA, 17 nt, Human
aaaacuuaacauauuua

SEQ ID NO: 3414347 - RNA, 19 nt, Human
aaaacuuaacauauuuacu

SEQ ID NO: 3414348 - RNA, 21 nt, Human
aaaacuuaaccgcaucagaag

SEQ ID NO: 3414349 - RNA, 17 nt, Human
aaaacuuaguuugugaa

SEQ ID NO: 3414350 - RNA, 15 nt, Human
aaaacuuauuugagu

SEQ ID NO: 3414351 - RNA, 17 nt, Human
aaaacuucauguaauuu

SEQ ID NO: 3414352 - RNA, 10 nt, Human
aaaacuucuu

SEQ ID NO: 3414353 - RNA, 23 nt, Human
aaaacuucuuaaauaucuuuuau

SEQ ID NO: 3414354 - RNA, 21 nt, Human
aaaacuugacuccauuucauc

SEQ ID NO: 3414355 - RNA, 22 nt, Human
aaaacuugugugaaauuuucuu

SEQ ID NO: 3414356 - RNA, 13 nt, Human
aaaacuuuaaagc

SEQ ID NO: 3414357 - RNA, 19 nt, Human
aaaacuuuacuaagaugac

SEQ ID NO: 3414358 - RNA, 15 nt, Human
aaaacuuuauuuuau

SEQ ID NO: 3414359 - RNA, 17 nt, Human
aaaacuuuauuuuauau

SEQ ID NO: 3414360 - RNA, 18 nt, Human
aaaacuuuauuuuauaua

SEQ ID NO: 3414361 - RNA, 19 nt, Human
aaaacuuuauuuuauauaa

SEQ ID NO: 3414362 - RNA, 16 nt, Human
aaaacuuuccucgccu

SEQ ID NO: 3414363 - RNA, 16 nt, Human
aaaacuuuggaaccag

SEQ ID NO: 3414364 - RNA, 17 nt, Human
aaaacuuuggaaccaga

SEQ ID NO: 3414365 - RNA, 17 nt, Human
aaaacuuuguuaggcca

SEQ ID NO: 3414366 - RNA, 19 nt, Human
aaaacuuuguuaggccaaa

SEQ ID NO: 3414367 - RNA, 17 nt, Human
aaaacuuuuauaaauua

SEQ ID NO: 3414368 - RNA, 18 nt, Human
aaaacuuuuauaaauuaa

SEQ ID NO: 3414369 - RNA, 15 nt, Human
aaaacuuuucugcug

SEQ ID NO: 3414370 - RNA, 17 nt, Human
aaaacuuuuuauauuuu

SEQ ID NO: 3414371 - RNA, 20 nt, Human
aaaacuuuuuauauuuuaua

SEQ ID NO: 3414372 - RNA, 12 nt, Human
aaaagaaaaaaa

SEQ ID NO: 3414373 - RNA, 11 nt, Human
aaaagaaaaac

SEQ ID NO: 3414374 - RNA, 14 nt, Human
aaaagaaaaaccac

SEQ ID NO: 3414375 - RNA, 12 nt, Human
aaaagaaaacaa

SEQ ID NO: 3414376 - RNA, 10 nt, Human
aaaagaaaau

SEQ ID NO: 3414377 - RNA, 11 nt, Human
aaaagaaaaug

SEQ ID NO: 3414378 - RNA, 15 nt, Human
aaaagaaaauuuuug

SEQ ID NO: 3414379 - RNA, 11 nt, Human
aaaagaaaggc

SEQ ID NO: 3414380 - RNA, 13 nt, Human
aaaagaaauaaua

SEQ ID NO: 3414381 - RNA, 12 nt, Human
aaaagaaaucua

SEQ ID NO: 3414382 - RNA, 12 nt, Human
aaaagaaaugaa

SEQ ID NO: 3414383 - RNA, 20 nt, Human
aaaagaaauucccuggacca

SEQ ID NO: 3414384 - RNA, 17 nt, Human
aaaagaacacuagaguc

SEQ ID NO: 3414385 - RNA, 16 nt, Human
aaaagaacaguaaaca

SEQ ID NO: 3414386 - RNA, 16 nt, Human
aaaagaacaugcaguu

SEQ ID NO: 3414387 - RNA, 13 nt, Human
aaaagaaggaaaa

SEQ ID NO: 3414388 - RNA, 14 nt, Human
aaaagaauauucag

SEQ ID NO: 3414389 - RNA, 13 nt, Human
aaaagaauauuuu

SEQ ID NO: 3414390 - RNA, 20 nt, Human
aaaagacacacuuguccaca

SEQ ID NO: 3414391 - RNA, 18 nt, Human
aaaagacauguuguaaau

SEQ ID NO: 3414392 - RNA, 19 nt, Human
aaaagacgcaccagcccag

SEQ ID NO: 3414393 - RNA, 16 nt, Human
aaaagacucaguguuc

SEQ ID NO: 3414394 - RNA, 11 nt, Human
aaaagacucau

SEQ ID NO: 3414395 - RNA, 13 nt, Human
aaaagagaaugau

SEQ ID NO: 3414396 - RNA, 22 nt, Human
aaaagagagcagagaauauaac

SEQ ID NO: 3414397 - RNA, 21 nt, Human
aaaagagcagugguaagaaua

SEQ ID NO: 3414398 - RNA, 15 nt, Human
aaaagaggagcacuu

SEQ ID NO: 3414399 - RNA, 15 nt, Human
aaaagagucuuccaa

SEQ ID NO: 3414400 - RNA, 19 nt, Human
aaaagaguguaaaauauuu

SEQ ID NO: 3414401 - RNA, 22 nt, Human
aaaagauaaagaccagaaauuc

SEQ ID NO: 3414402 - RNA, 18 nt, Human
aaaagauaaagaugaucu

SEQ ID NO: 3414403 - RNA, 18 nt, Human
aaaagauacauuuguaug

SEQ ID NO: 3414404 - RNA, 22 nt, Human
aaaagauaccuuaaaauuugaa

SEQ ID NO: 3414405 - RNA, 13 nt, Human
aaaagauauaagu

SEQ ID NO: 3414406 - RNA, 12 nt, Human
aaaauaagaaaa

SEQ ID NO: 3414407 - RNA, 15 nt, Human
aaaauaagaaaagau

SEQ ID NO: 3414408 - RNA, 16 nt, Human
aaaauaagaauagaaa

SEQ ID NO: 3414409 - RNA, 16 nt, Human
aaaauaagucaacagu

SEQ ID NO: 3414410 - RNA, 18 nt, Human
aaaauaagucaacaguaa

SEQ ID NO: 3414411 - RNA, 11 nt, Human
aaaauaauaaa

SEQ ID NO: 3414412 - RNA, 13 nt, Human
aaaauaauaaauu

SEQ ID NO: 3414413 - RNA, 16 nt, Human
aaaauaauaaauugca

SEQ ID NO: 3414414 - RNA, 13 nt, Human
aaaauaaugucuu

SEQ ID NO: 3414415 - RNA, 23 nt, Human
aaaauaaugucuuguuaauauuc

SEQ ID NO: 3414416 - RNA, 19 nt, Human
aaaauaauuagguauuuuc

SEQ ID NO: 3414417 - RNA, 13 nt, Human
aaaauaauucuaa

SEQ ID NO: 3414418 - RNA, 16 nt, Human
aaaauaauugauuuca

SEQ ID NO: 3414419 - RNA, 11 nt, Human
aaaauaauuuu

SEQ ID NO: 3414420 - RNA, 14 nt, Human
aaaauaauuuuaug

SEQ ID NO: 3414421 - RNA, 23 nt, Human
aaaauaauuuuuauauuugaaau

SEQ ID NO: 3414422 - RNA, 14 nt, Human
aaaauacacacuca

SEQ ID NO: 3414423 - RNA, 15 nt, Human
aaaauacaguauucu

SEQ ID NO: 3414424 - RNA, 21 nt, Human
aaaauacaguuugucacauga

SEQ ID NO: 3414425 - RNA, 17 nt, Human
aaaauacauaagaccau

SEQ ID NO: 3414426 - RNA, 15 nt, Human
aaaauacaugaagcu

SEQ ID NO: 3414427 - RNA, 12 nt, Human
aaaauacauugu

SEQ ID NO: 3414428 - RNA, 12 nt, Human
aaaauacauuua

SEQ ID NO: 3414429 - RNA, 13 nt, Human
aaaauacauuuua

SEQ ID NO: 3414430 - RNA, 13 nt, Human
aaaauaccaagga

SEQ ID NO: 3414431 - RNA, 15 nt, Human
aaaauaccagccagu

SEQ ID NO: 3414432 - RNA, 18 nt, Human
aaaauaccucaggaaaga

SEQ ID NO: 3414433 - RNA, 16 nt, Human
aaaauacuauuuaaga

SEQ ID NO: 3414434 - RNA, 18 nt, Human
aaaauacucuaauucuaa

SEQ ID NO: 3414435 - RNA, 14 nt, Human
aaaauacucuuuuu

SEQ ID NO: 3414436 - RNA, 14 nt, Human
aaaauacugccaga

SEQ ID NO: 3414437 - RNA, 15 nt, Human
aaaauacuuaaaugu

SEQ ID NO: 3414438 - RNA, 20 nt, Human
aaaauacuugucuguuuuaa

SEQ ID NO: 3414439 - RNA, 15 nt, Human
aaaauacuuugaguu

SEQ ID NO: 3414440 - RNA, 19 nt, Human
aaaauacuuuuucuaauga

SEQ ID NO: 3414441 - RNA, 11 nt, Human
aaaauagaaac

SEQ ID NO: 3414442 - RNA, 13 nt, Human
aaaauagaaacau

SEQ ID NO: 3414443 - RNA, 14 nt, Human
aaaauagaagaaua

SEQ ID NO: 3414444 - RNA, 17 nt, Human
aaaauagaauugacauu

SEQ ID NO: 3414445 - RNA, 15 nt, Human
aaaauagacaaauag

SEQ ID NO: 3414446 - RNA, 19 nt, Human
aaaauagacaaauagaaaa

SEQ ID NO: 3414447 - RNA, 21 nt, Human
aaaauagagaugagcuuucuu

SEQ ID NO: 3414448 - RNA, 14 nt, Human
aaaauagaugucuu

SEQ ID NO: 3414449 - RNA, 17 nt, Human
aaaauagcaaaagaaga

SEQ ID NO: 3414450 - RNA, 17 nt, Human
aaaauagcaauccuaaa

SEQ ID NO: 3414451 - RNA, 16 nt, Human
aaaauaggcuuuuuaa

SEQ ID NO: 3414452 - RNA, 18 nt, Human
aaaauaguugagccagca

SEQ ID NO: 3414453 - RNA, 20 nt, Human
aaaauaguugagccagcaga

SEQ ID NO: 3414454 - RNA, 21 nt, Human
aaaauaguugagccagcagac

SEQ ID NO: 3414455 - RNA, 14 nt, Human
aaaauauaaaacug

SEQ ID NO: 3414456 - RNA, 22 nt, Human
aaaauauaaaacugcguuaaag

SEQ ID NO: 3414457 - RNA, 16 nt, Human
aaaauauaaacaaaga

SEQ ID NO: 3414458 - RNA, 10 nt, Human
aaaauauaac

SEQ ID NO: 3414459 - RNA, 12 nt, Human
aaaauauaagua

SEQ ID NO: 3414460 - RNA, 18 nt, Human
aaaauauaaguaaaguga

SEQ ID NO: 3414461 - RNA, 12 nt, Human
aaaauauaauug

SEQ ID NO: 3414462 - RNA, 15 nt, Human
aaaauauaauuguuu

SEQ ID NO: 3414463 - RNA, 19 nt, Human
aaaauauaauuguuuuuua

SEQ ID NO: 3414464 - RNA, 13 nt, Human
aaaauauacaaaa

SEQ ID NO: 3414465 - RNA, 14 nt, Human
aaaauauacuguaa

SEQ ID NO: 3414466 - RNA, 20 nt, Human
aaaauauacuguaaagaaag

SEQ ID NO: 3414467 - RNA, 22 nt, Human
aaaauauacuguaaagaaagag

SEQ ID NO: 3414468 - RNA, 10 nt, Human
aaaauauaua

SEQ ID NO: 3414469 - RNA, 13 nt, Human
aaaauauauacua

SEQ ID NO: 3414470 - RNA, 17 nt, Human
aaaauauauacuaaaca

SEQ ID NO: 3414471 - RNA, 20 nt, Human
aaaauauauauagugcuaua

SEQ ID NO: 3414472 - RNA, 14 nt, Human
aaaauauauaucua

SEQ ID NO: 3414473 - RNA, 21 nt, Human
aaaauauauauguugauuucu

SEQ ID NO: 3414474 - RNA, 14 nt, Human
aaaauauauguauu

SEQ ID NO: 3414475 - RNA, 15 nt, Human
aaaauauauguauuu

SEQ ID NO: 3414476 - RNA, 16 nt, Human
aaaauauauguauuuu

SEQ ID NO: 3414477 - RNA, 15 nt, Human
aaaauauauugaaua

SEQ ID NO: 3414478 - RNA, 16 nt, Human
aaaauauauuuaauga

SEQ ID NO: 3414479 - RNA, 21 nt, Human
aaaauaucaccaaaaaccuau

SEQ ID NO: 3414480 - RNA, 16 nt, Human
aaaauaucauucagca

SEQ ID NO: 3414481 - RNA, 13 nt, Human
aaaauaucuacau

SEQ ID NO: 3414482 - RNA, 18 nt, Human
aaaauaucugaaauguga

SEQ ID NO: 3414483 - RNA, 13 nt, Human
aaaauaugauauu

SEQ ID NO: 3414484 - RNA, 12 nt, Human
aaaauaugcacu

SEQ ID NO: 3414485 - RNA, 20 nt, Human
aaaauaugucccagaaaugu

SEQ ID NO: 3414486 - RNA, 23 nt, Human
aaaauaugucucgcuagugaugu

SEQ ID NO: 3414487 - RNA, 12 nt, Human
aaaauaugugaa

SEQ ID NO: 3414488 - RNA, 13 nt, Human
aaaauaugugaag

SEQ ID NO: 3414489 - RNA, 11 nt, Human
aaaauauuauc

SEQ ID NO: 3414490 - RNA, 21 nt, Human
aaaauauuauguguuuccaua

SEQ ID NO: 3414491 - RNA, 19 nt, Human
aaaauauuuaaaaaugucu

SEQ ID NO: 3414492 - RNA, 21 nt, Human
aaaauauuugacuauucugua

SEQ ID NO: 3414493 - RNA, 18 nt, Human
aaaauauuuuauaauuuu

SEQ ID NO: 3414494 - RNA, 15 nt, Human
aaaauauuuuaugau

SEQ ID NO: 3414495 - RNA, 13 nt, Human
aaaauauuuucuc

SEQ ID NO: 3414496 - RNA, 20 nt, Human
aaaauauuuucuguguguuc

SEQ ID NO: 3414497 - RNA, 22 nt, Human
aaaauauuuucuguguguuccu

SEQ ID NO: 3414498 - RNA, 23 nt, Human
aaaauauuuucuguguguuccug

SEQ ID NO: 3414499 - RNA, 13 nt, Human
aaaauauuuugaa

SEQ ID NO: 3414500 - RNA, 19 nt, Human
aaaauauuuugaucuucaa

SEQ ID NO: 3414501 - RNA, 16 nt, Human
aaaauauuuugucuaa

SEQ ID NO: 3414502 - RNA, 17 nt, Human
aaaauauuuuuuuuucu

SEQ ID NO: 3414503 - RNA, 16 nt, Human
aaaaucaaaacaagug

SEQ ID NO: 3414504 - RNA, 14 nt, Human
aaaaucaaauaaua

SEQ ID NO: 3414505 - RNA, 13 nt, Human
aaaaucaaauggu

SEQ ID NO: 3414506 - RNA, 16 nt, Human
aaaaucaaguauuaua

SEQ ID NO: 3414507 - RNA, 15 nt, Human
aaaaucaauuaacca

SEQ ID NO: 3414508 - RNA, 13 nt, Human
aaaaucacaaaaa

SEQ ID NO: 3414509 - RNA, 14 nt, Human
aaaaucacaaaaau

SEQ ID NO: 3414510 - RNA, 14 nt, Human
aaaaucacguuaaa

SEQ ID NO: 3414511 - RNA, 11 nt, Human
aaaaucacuaa

SEQ ID NO: 3414512 - RNA, 17 nt, Human
aaaaucacuuucauaau

SEQ ID NO: 3414513 - RNA, 20 nt, Human
aaaaucagccaauuauguua

SEQ ID NO: 3414514 - RNA, 15 nt, Human
aaaaucagccagaca

SEQ ID NO: 3414515 - RNA, 18 nt, Human
aaaaucagcuauuuugug

SEQ ID NO: 3414516 - RNA, 13 nt, Human
aaaaucauaaacu

SEQ ID NO: 3414517 - RNA, 13 nt, Human
aaaaucauauugc

SEQ ID NO: 3414518 - RNA, 15 nt, Human
aaaaucauguuugcu

SEQ ID NO: 3414519 - RNA, 22 nt, Human
aaaaucauuuuauaugucaaag

SEQ ID NO: 3414520 - RNA, 16 nt, Human
aaaauccaaauauugu

SEQ ID NO: 3414521 - RNA, 12 nt, Human
aaaauccagaaa

SEQ ID NO: 3414522 - RNA, 17 nt, Human
aaaaucccccagcacuu

SEQ ID NO: 3414523 - RNA, 22 nt, Human
aaaaucccuuaccucggugccu

SEQ ID NO: 3414524 - RNA, 16 nt, Human
aaaauccuaagacaca

SEQ ID NO: 3414525 - RNA, 21 nt, Human
aaaauccuaagacacaaaugc

SEQ ID NO: 3414526 - RNA, 12 nt, Human
aaaauccuacca

SEQ ID NO: 3414527 - RNA, 18 nt, Human
aaaauccuaccaaccucu

SEQ ID NO: 3414528 - RNA, 13 nt, Human
aaaauccuugcuu

SEQ ID NO: 3414529 - RNA, 22 nt, Human
aaaacugcuccuccuccuguau

SEQ ID NO: 3414530 - RNA, 20 nt, Human
aaaacugcugacuguuuucu

SEQ ID NO: 3414531 - RNA, 23 nt, Human
aaaacugcuuuuuuuuuuccagc

SEQ ID NO: 3414532 - RNA, 17 nt, Human
aaaacuggaauaagaag

SEQ ID NO: 3414533 - RNA, 21 nt, Human
aaaacuggaauaagaagcaaa

SEQ ID NO: 3414534 - RNA, 21 nt, Human
aaaacuggcaacauuccaaga

SEQ ID NO: 3414535 - RNA, 13 nt, Human
aaaacuggccuga

SEQ ID NO: 3414536 - RNA, 19 nt, Human
aaaacugggccuguagcuc

SEQ ID NO: 3414537 - RNA, 19 nt, Human
aaaacuguacuuugauuca

SEQ ID NO: 3414538 - RNA, 22 nt, Human
aaaacuguacuuugauucacau

SEQ ID NO: 3414539 - RNA, 11 nt, Human
aaaacuuauuu

SEQ ID NO: 3414540 - RNA, 15 nt, Human
aaaacuucagacaua

SEQ ID NO: 3414541 - RNA, 20 nt, Human
aaaacuucuugucagacaua

SEQ ID NO: 3414542 - RNA, 24 nt, Human
aaaacuucuugucagacauaaagc

SEQ ID NO: 3414543 - RNA, 20 nt, Human
aaaacuugaaaauauaugau

SEQ ID NO: 3414544 - RNA, 22 nt, Human
aaaacuugauguguuaucucuu

SEQ ID NO: 3414545 - RNA, 19 nt, Human
aaaacuugguuuuaugguu

SEQ ID NO: 3414546 - RNA, 19 nt, Human
aaaacuugugugaaauuuu

SEQ ID NO: 3414547 - RNA, 12 nt, Human
aaaacuuuauuu

SEQ ID NO: 3414548 - RNA, 20 nt, Human
aaaacuuuauuuuauauaau

SEQ ID NO: 3414549 - RNA, 11 nt, Human
aaaacuuugga

SEQ ID NO: 3414550 - RNA, 19 nt, Human
aaaacuuuggaaccagacu

SEQ ID NO: 3414551 - RNA, 11 nt, Human
aaaacuuuguu

SEQ ID NO: 3414552 - RNA, 13 nt, Human
aaaacuuuuaaac

SEQ ID NO: 3414553 - RNA, 23 nt, Human
aaaaugugcaguaauagcacugc

SEQ ID NO: 3414554 - RNA, 20 nt, Human
aaaaugugcuauacugcaua

SEQ ID NO: 3414555 - RNA, 22 nt, Human
aaaaugugggauuaugggucac

SEQ ID NO: 3414556 - RNA, 11 nt, Human
aaaauguguaa

SEQ ID NO: 3414557 - RNA, 16 nt, Human
aaaauguguugaaacu

SEQ ID NO: 3414558 - RNA, 18 nt, Human
aaaauguuaucuucucaa

SEQ ID NO: 3414559 - RNA, 15 nt, Human
aaaauguuauuuccc

SEQ ID NO: 3414560 - RNA, 12 nt, Human
aaaauguucuuu

SEQ ID NO: 3414561 - RNA, 15 nt, Human
aaaauguucuuugga

SEQ ID NO: 3414562 - RNA, 14 nt, Human
aaaauguugagaau

SEQ ID NO: 3414563 - RNA, 22 nt, Human
aaaauguuggauuuauaaaugc

SEQ ID NO: 3414564 - RNA, 21 nt, Human
aaaauguuggucauuuuaugu

SEQ ID NO: 3414565 - RNA, 18 nt, Human
aaaauguuuuagcaauuu

SEQ ID NO: 3414566 - RNA, 12 nt, Human
aaaauguuuuca

SEQ ID NO: 3414567 - RNA, 20 nt, Human
aaaauguuuuguaagaaacc

SEQ ID NO: 3414568 - RNA, 22 nt, Human
aaaauguuuuuggucuuuuaua

SEQ ID NO: 3414569 - RNA, 15 nt, Human
aaaauguuuuuucau

SEQ ID NO: 3414570 - RNA, 15 nt, Human
aaaauuaaagaaaau

SEQ ID NO: 3414571 - RNA, 13 nt, Human
aaaauuaagaaag

SEQ ID NO: 3414572 - RNA, 22 nt, Human
aaaauuacuuaguauugcaaag

SEQ ID NO: 3414573 - RNA, 23 nt, Human
aaaauuagacugugauucagaaa

SEQ ID NO: 3414574 - RNA, 18 nt, Human
aaaauuagaugcauguug

SEQ ID NO: 3414575 - RNA, 15 nt, Human
aaaauuagccaagug

SEQ ID NO: 3414576 - RNA, 17 nt, Human
aaaauuagccaguaauc

SEQ ID NO: 3414577 - RNA, 19 nt, Human
aaaauuagccaguaauccu

SEQ ID NO: 3414578 - RNA, 17 nt, Human
aaaauuagccuaagaua

SEQ ID NO: 3414579 - RNA, 15 nt, Human
aaaauuauacugugu

SEQ ID NO: 3414580 - RNA, 18 nt, Human
aaaauuauagaugggaau

SEQ ID NO: 3414581 - RNA, 23 nt, Human
aaaauuauaggaauaucaauaua

SEQ ID NO: 3414582 - RNA, 17 nt, Human
aaaauuauggaaacaga

SEQ ID NO: 3414583 - RNA, 18 nt, Human
aaaauuauggaaacagau

SEQ ID NO: 3414584 - RNA, 21 nt, Human
aaaauuauuugaaaacauaua

SEQ ID NO: 3414585 - RNA, 14 nt, Human
aaaauuauuugcag

SEQ ID NO: 3414586 - RNA, 14 nt, Human
aaaauuauuugcau

SEQ ID NO: 3414587 - RNA, 17 nt, Human
aaaauuauuuuaaacaa

SEQ ID NO: 3414588 - RNA, 18 nt, Human
aaaauuauuuuaaacaaa

SEQ ID NO: 3414589 - RNA, 18 nt, Human
aaaauuauuuuguucaua

SEQ ID NO: 3414590 - RNA, 22 nt, Human
aaaauucaaagcauggacauuu

SEQ ID NO: 3414591 - RNA, 14 nt, Human
aaaauucaauugua

SEQ ID NO: 3414592 - RNA, 18 nt, Human
aaaauucagcaaaccauu

SEQ ID NO: 3414593 - RNA, 14 nt, Human
aaaauucagcaaag

SEQ ID NO: 3414594 - RNA, 19 nt, Human
aaaauucauaguaagauug

SEQ ID NO: 3414595 - RNA, 13 nt, Human
aaaauucauuucu

SEQ ID NO: 3414596 - RNA, 13 nt, Human
aaaauucauuuuu

SEQ ID NO: 3414597 - RNA, 21 nt, Human
aaaauuccaucccaucaucuu

SEQ ID NO: 3414598 - RNA, 15 nt, Human
aaaauucccuaaagc

SEQ ID NO: 3414599 - RNA, 16 nt, Human
aaaauucccuaaagcc

SEQ ID NO: 3414600 - RNA, 17 nt, Human
aaaauuccuauugugau

SEQ ID NO: 3414601 - RNA, 13 nt, Human
aaaauucuccuga

SEQ ID NO: 3414602 - RNA, 13 nt, Human
aaaauucugaauu

SEQ ID NO: 3414603 - RNA, 23 nt, Human
aaaauucugugccuuguuuuuug

SEQ ID NO: 3414604 - RNA, 13 nt, Human
aaaauucuuggaa

SEQ ID NO: 3414605 - RNA, 22 nt, Human
aaaauugaagagagauauaucu

SEQ ID NO: 3414606 - RNA, 15 nt, Human
aaaauugaauuuaac

SEQ ID NO: 3414607 - RNA, 21 nt, Human
aaaauugauguguuuauuuau

SEQ ID NO: 3414608 - RNA, 12 nt, Human
aaaauugccaua

SEQ ID NO: 3414609 - RNA, 13 nt, Human
aaaauugccauau

SEQ ID NO: 3414610 - RNA, 14 nt, Human
aaaauugccauauu

SEQ ID NO: 3414611 - RNA, 16 nt, Human
aaaauugccauauugc

SEQ ID NO: 3414612 - RNA, 18 nt, Human
aaaauugccauauugcac

SEQ ID NO: 3414613 - RNA, 22 nt, Human
aaaauugcuauguuacuauuuu

SEQ ID NO: 3414614 - RNA, 22 nt, Human
aaaauuggacauuaagcaucac

SEQ ID NO: 3414615 - RNA, 19 nt, Human
aaaauuggcauuaaaacuu

SEQ ID NO: 3414616 - RNA, 17 nt, Human
aaaauuggggauucuua

SEQ ID NO: 3414617 - RNA, 13 nt, Human
aaaauuguuauuu

SEQ ID NO: 3414618 - RNA, 16 nt, Human
aaaauuuaagcauugu

SEQ ID NO: 3414619 - RNA, 15 nt, Human
aaaauuuaagugcgu

SEQ ID NO: 3414620 - RNA, 19 nt, Human
aaaauuuacuacaauaugu

SEQ ID NO: 3414621 - RNA, 21 nt, Human
aaaauuuacuacaauauguac

SEQ ID NO: 3414622 - RNA, 19 nt, Human
aaaauuuagaaauauaauu

SEQ ID NO: 3414623 - RNA, 16 nt, Human
aaaauuuaguuuuugu

SEQ ID NO: 3414624 - RNA, 10 nt, Human
aaaauuuaua

SEQ ID NO: 3414625 - RNA, 13 nt, Human
aaaauuuauaugu

SEQ ID NO: 3414626 - RNA, 17 nt, Human
aaaauuuccaguaccuu

SEQ ID NO: 3414627 - RNA, 23 nt, Human
aaaauuuccaguaccuuugucac

SEQ ID NO: 3414628 - RNA, 15 nt, Human
aaaauuugaaacauu

SEQ ID NO: 3414629 - RNA, 20 nt, Human
aaaauuugaaacauugcuuu

SEQ ID NO: 3414630 - RNA, 18 nt, Human
aaaauuugaaauuuagcu

SEQ ID NO: 3414631 - RNA, 14 nt, Human
aaaauuugaaccaa

SEQ ID NO: 3414632 - RNA, 16 nt, Human
aaaauuugaaccaaaa

SEQ ID NO: 3414633 - RNA, 22 nt, Human
aaaauuugaaccaaaacauucc

SEQ ID NO: 3414634 - RNA, 13 nt, Human
aaaauuuggaauu

SEQ ID NO: 3414635 - RNA, 18 nt, Human
aaaauuuguuauuuugca

SEQ ID NO: 3414636 - RNA, 19 nt, Human
aaaauuuguucuuguauuu

SEQ ID NO: 3414637 - RNA, 14 nt, Human
aaaauuuguugcau

SEQ ID NO: 3414638 - RNA, 13 nt, Human
aaaauuuguuuaa

SEQ ID NO: 3414639 - RNA, 13 nt, Human
aaaauuuuaagcu

SEQ ID NO: 3414640 - RNA, 19 nt, Human
aaaauuuuaccagcagaag

SEQ ID NO: 3414641 - RNA, 22 nt, Human
aaaauuuuaccagcagaaggau

SEQ ID NO: 3414642 - RNA, 19 nt, Human
aaaauuuuaggcaaguuuu

SEQ ID NO: 3414643 - RNA, 21 nt, Human
aaaauuuuaggcacucuuaaa

SEQ ID NO: 3414644 - RNA, 21 nt, Human
aaaauuuuauaaaauuaagca

SEQ ID NO: 3414645 - RNA, 13 nt, Human
aaaauuuuauaag

SEQ ID NO: 3414646 - RNA, 15 nt, Human
aaaauuuucucauuu

SEQ ID NO: 3414647 - RNA, 16 nt, Human
aaaauuuugccuaaua

SEQ ID NO: 3414648 - RNA, 15 nt, Human
aaaauuuuguaauuu

SEQ ID NO: 3414649 - RNA, 18 nt, Human
aaaauuuuguaauuuucu

SEQ ID NO: 3414650 - RNA, 21 nt, Human
aaaauuuuguauguuaaagag

SEQ ID NO: 3414651 - RNA, 15 nt, Human
aaaauuuuuaaucuu

SEQ ID NO: 3414652 - RNA, 16 nt, Human
aaaauuuuuaaucuuu

SEQ ID NO: 3414653 - RNA, 16 nt, Human
aaaauuuuuuuagaaa

SEQ ID NO: 3414654 - RNA, 15 nt, Human
aaaauuuuuuuucau

SEQ ID NO: 3414655 - RNA, 16 nt, Human
aaaauuuuuuuucaug

SEQ ID NO: 3414656 - RNA, 14 nt, Human
aaacaaaaaacaau

SEQ ID NO: 3414657 - RNA, 16 nt, Human
aaacaaaaagaacaaa

SEQ ID NO: 3414658 - RNA, 20 nt, Human
aaacaaaaauucacaagcug

SEQ ID NO: 3414659 - RNA, 9 nt, Human
aaacaaaac

SEQ ID NO: 3414660 - RNA, 15 nt, Human
aaacaaaacaaaacu

SEQ ID NO: 3414661 - RNA, 16 nt, Human
aaacaaaacaaaacua

SEQ ID NO: 3414662 - RNA, 12 nt, Human
aaacaaaaccaa

SEQ ID NO: 3414663 - RNA, 21 nt, Human
aaacaaaaccccuaagagacu

SEQ ID NO: 3414664 - RNA, 12 nt, Human
aaacaaaacuau

SEQ ID NO: 3414665 - RNA, 18 nt, Human
aaacaaaacuauacuuga

SEQ ID NO: 3414666 - RNA, 12 nt, Human
aaacaaaauaga

SEQ ID NO: 3414667 - RNA, 15 nt, Human
aaacaaaauuucuau

SEQ ID NO: 3414668 - RNA, 12 nt, Human
aaacaaaauuug

SEQ ID NO: 3414669 - RNA, 15 nt, Human
aaacaaacauugugu

SEQ ID NO: 3414670 - RNA, 23 nt, Human
aaacaaacuuuucaaggcuuaua

SEQ ID NO: 3414671 - RNA, 13 nt, Human
aaacaaagaaauu

SEQ ID NO: 3414672 - RNA, 15 nt, Human
aaacaaagcuuagca

SEQ ID NO: 3414673 - RNA, 23 nt, Human
aaacaaagcuuagcaggagagga

SEQ ID NO: 3414674 - RNA, 20 nt, Human
aaacaaaggccuaauucuau

SEQ ID NO: 3414675 - RNA, 17 nt, Human
aaacaaagguugagaug

SEQ ID NO: 3414676 - RNA, 11 nt, Human
aaacaaagugg

SEQ ID NO: 3414677 - RNA, 19 nt, Human
aaacaaaguuucagaguau

SEQ ID NO: 3414678 - RNA, 16 nt, Human
aaacaaauaaucacau

SEQ ID NO: 3414679 - RNA, 17 nt, Human
aaacaaaucuuuccaua

SEQ ID NO: 3414680 - RNA, 16 nt, Human
aaacaacaauuucuac

SEQ ID NO: 3414681 - RNA, 22 nt, Human
aaacaacaauuucuacuuugaa

SEQ ID NO: 3414682 - RNA, 20 nt, Human
aaacaacagcucgauccaaa

SEQ ID NO: 3414683 - RNA, 22 nt, Human
aaacaacauuuugagaacaaag

SEQ ID NO: 3414684 - RNA, 19 nt, Human
aaacaacuucaauauccaa

SEQ ID NO: 3414685 - RNA, 23 nt, Human
aaaaucuaagcagcuuauuguuu

SEQ ID NO: 3414686 - RNA, 15 nt, Human
aaaaucuaauauuaa

SEQ ID NO: 3414687 - RNA, 17 nt, Human
aaaaucuaccuucugua

SEQ ID NO: 3414688 - RNA, 20 nt, Human
aaaaucuaccuucuguaguu

SEQ ID NO: 3414689 - RNA, 21 nt, Human
aaaaucuaccuucuguaguuu

SEQ ID NO: 3414690 - RNA, 18 nt, Human
aaaaucuagaagagucua

SEQ ID NO: 3414691 - RNA, 15 nt, Human
aaaaucuauauuuug

SEQ ID NO: 3414692 - RNA, 19 nt, Human
aaaaucucuccacuuucag

SEQ ID NO: 3414693 - RNA, 21 nt, Human
aaaaucucuccacuuucagcu

SEQ ID NO: 3414694 - RNA, 13 nt, Human
aaaaucugaagau

SEQ ID NO: 3414695 - RNA, 15 nt, Human
aaaaucugaagauug

SEQ ID NO: 3414696 - RNA, 21 nt, Human
aaaaucuguugauaaauccau

SEQ ID NO: 3414697 - RNA, 20 nt, Human
aaaaucuuaauacuguuauu

SEQ ID NO: 3414698 - RNA, 12 nt, Human
aaacaaguauuu

SEQ ID NO: 3414699 - RNA, 19 nt, Human
aaacaagucagucauucag

SEQ ID NO: 3414700 - RNA, 15 nt, Human
aaacaagugcuggca

SEQ ID NO: 3414701 - RNA, 22 nt, Human
aaacaauaguaauucucaggcc

SEQ ID NO: 3414702 - RNA, 12 nt, Human
aaacaauaucau

SEQ ID NO: 3414703 - RNA, 16 nt, Human
aaacaauauuguuucu

SEQ ID NO: 3414704 - RNA, 17 nt, Human
aaacaauauuguuucua

SEQ ID NO: 3414705 - RNA, 18 nt, Human
aaacaaucuggaagaaaa

SEQ ID NO: 3414706 - RNA, 13 nt, Human
aaacaauucaaag

SEQ ID NO: 3414707 - RNA, 15 nt, Human
aaacaauuuaaaaau

SEQ ID NO: 3414708 - RNA, 16 nt, Human
aaacaauuuauuuuau

SEQ ID NO: 3414709 - RNA, 21 nt, Human
aaacacacgcgcgcacacaca

SEQ ID NO: 3414710 - RNA, 16 nt, Human
aaacacacugaggcag

SEQ ID NO: 3414711 - RNA, 20 nt, Human
aaacacacuguuguuuaguu

SEQ ID NO: 3414712 - RNA, 21 nt, Human
aaacacagacauucugccagg

SEQ ID NO: 3414713 - RNA, 11 nt, Human
aaacacagcug

SEQ ID NO: 3414714 - RNA, 23 nt, Human
aaacacagcuuacaaucgcaaau

SEQ ID NO: 3414715 - RNA, 19 nt, Human
aaacacaguguuuuuguaa

SEQ ID NO: 3414716 - RNA, 14 nt, Human
aaacacauagauuc

SEQ ID NO: 3414717 - RNA, 18 nt, Human
aaacacauagauucaccu

SEQ ID NO: 3414718 - RNA, 19 nt, Human
aaacacauagauucaccug

SEQ ID NO: 3414719 - RNA, 11 nt, Human
aaacacauuaa

SEQ ID NO: 3414720 - RNA, 17 nt, Human
aaacacauuaggaaaag

SEQ ID NO: 3414721 - RNA, 12 nt, Human
aaacacauuuuu

SEQ ID NO: 3414722 - RNA, 15 nt, Human
aaacaccaacauaaa

SEQ ID NO: 3414723 - RNA, 19 nt, Human
aaacaccaacauguuggga

SEQ ID NO: 3414724 - RNA, 15 nt, Human
aaacaccucacaccu

SEQ ID NO: 3414725 - RNA, 18 nt, Human
aaacaccuccucauguac

SEQ ID NO: 3414726 - RNA, 13 nt, Human
aaacaccuucucu

SEQ ID NO: 3414727 - RNA, 14 nt, Human
aaacaccuucucug

SEQ ID NO: 3414728 - RNA, 15 nt, Human
aaacaccuucucugg

SEQ ID NO: 3414729 - RNA, 14 nt, Human
aaacacgaaacuug

SEQ ID NO: 3414730 - RNA, 15 nt, Human
aaacacgaaacuugu

SEQ ID NO: 3414731 - RNA, 18 nt, Human
aaacacgaaacuuguuau

SEQ ID NO: 3414732 - RNA, 21 nt, Human
aaacacgcacuuagucucuaa

SEQ ID NO: 3414733 - RNA, 22 nt, Human
aaacacucaaguugauuagaaa

SEQ ID NO: 3414734 - RNA, 20 nt, Human
aaacacuccacccuccaccu

SEQ ID NO: 3414735 - RNA, 14 nt, Human
aaacacuccuugca

SEQ ID NO: 3414736 - RNA, 14 nt, Human
aaacacucuugaaa

SEQ ID NO: 3414737 - RNA, 15 nt, Human
aaacacugcaggcau

SEQ ID NO: 3414738 - RNA, 13 nt, Human
aaacacugccauc

SEQ ID NO: 3414739 - RNA, 22 nt, Human
aaacacugggagaaaugaaaaa

SEQ ID NO: 3414740 - RNA, 19 nt, Human
aaacacugguuuuaaauau

SEQ ID NO: 3414741 - RNA, 13 nt, Human
aaacacugugcac

SEQ ID NO: 3414742 - RNA, 22 nt, Human
aaacacuguggaacuaauaaau

SEQ ID NO: 3414743 - RNA, 18 nt, Human
aaacacuguucucugccc

SEQ ID NO: 3414744 - RNA, 23 nt, Human
aaacacuguuuguuccagaaucu

SEQ ID NO: 3414745 - RNA, 15 nt, Human
aaacacuucuguccu

SEQ ID NO: 3414746 - RNA, 14 nt, Human
aaacacuuucaaaa

SEQ ID NO: 3414747 - RNA, 13 nt, Human
aaacacuuucucu

SEQ ID NO: 3414748 - RNA, 15 nt, Human
aaacagaaaaaaaac

SEQ ID NO: 3414749 - RNA, 12 nt, Human
aaacagaacacu

SEQ ID NO: 3414750 - RNA, 13 nt, Human
aaacagaacauca

SEQ ID NO: 3414751 - RNA, 21 nt, Human
aaacagaacaucauuagaaca

SEQ ID NO: 3414752 - RNA, 13 nt, Human
aaacagaaugucu

SEQ ID NO: 3414753 - RNA, 22 nt, Human
aaacagacaauaugugagugcc

SEQ ID NO: 3414754 - RNA, 12 nt, Human
aaacagacacug

SEQ ID NO: 3414755 - RNA, 22 nt, Human
aaacagacuuguauauucuauu

SEQ ID NO: 3414756 - RNA, 16 nt, Human
aaacagagaugugaua

SEQ ID NO: 3414757 - RNA, 20 nt, Human
aaacagaggccauggcagaa

SEQ ID NO: 3414758 - RNA, 20 nt, Human
aaacagaucuccuggcaaag

SEQ ID NO: 3414759 - RNA, 20 nt, Human
aaacagauuuggugaauuug

SEQ ID NO: 3414760 - RNA, 15 nt, Human
aaacagauuuuuaca

SEQ ID NO: 3414761 - RNA, 19 nt, Human
aaacagauuuuuacaaaug

SEQ ID NO: 3414762 - RNA, 15 nt, Human
aaacagcaaaccaag

SEQ ID NO: 3414763 - RNA, 20 nt, Human
aaacagcaaaccaagagauu

SEQ ID NO: 3414764 - RNA, 20 nt, Human
aaacagcagaacuucugaaa

SEQ ID NO: 3414765 - RNA, 21 nt, Human
aaacagcauugcuuucugaaa

SEQ ID NO: 3414766 - RNA, 23 nt, Human
aaacagccgucagccaaauguaa

SEQ ID NO: 3414767 - RNA, 15 nt, Human
aaacagccugugucu

SEQ ID NO: 3414768 - RNA, 12 nt, Human
aaacagcugccu

SEQ ID NO: 3414769 - RNA, 14 nt, Human
aaacagcugccucu

SEQ ID NO: 3414770 - RNA, 21 nt, Human
aaacagcugccuuagcuucag

SEQ ID NO: 3414771 - RNA, 18 nt, Human
aaacagcuucaugccuuu

SEQ ID NO: 3414772 - RNA, 21 nt, Human
aaacagcuucaugccuuugua

SEQ ID NO: 3414773 - RNA, 12 nt, Human
aaacagcuuuca

SEQ ID NO: 3414774 - RNA, 11 nt, Human
aaacaggacca

SEQ ID NO: 3414775 - RNA, 21 nt, Human
aaacaggacuuaaaaugacau

SEQ ID NO: 3414776 - RNA, 18 nt, Human
aaacaggagacaggaagg

SEQ ID NO: 3414777 - RNA, 17 nt, Human
aaacaggcacugcccug

SEQ ID NO: 3414778 - RNA, 21 nt, Human
aaacaggcaguuggccagaga

SEQ ID NO: 3414779 - RNA, 11 nt, Human
aaacagggccu

SEQ ID NO: 3414780 - RNA, 18 nt, Human
aaacagguauauacuuug

SEQ ID NO: 3414781 - RNA, 17 nt, Human
aaacaggucaauacagu

SEQ ID NO: 3414782 - RNA, 20 nt, Human
aaacaguauuuauuuuguaa

SEQ ID NO: 3414783 - RNA, 15 nt, Human
aaacaguauuucauu

SEQ ID NO: 3414784 - RNA, 18 nt, Human
aaacaguauuucauugcc

SEQ ID NO: 3414785 - RNA, 13 nt, Human
aaacagugacugu

SEQ ID NO: 3414786 - RNA, 14 nt, Human
aaacagugagccug

SEQ ID NO: 3414787 - RNA, 23 nt, Human
aaacaguggaucacaaaguggaa

SEQ ID NO: 3414788 - RNA, 15 nt, Human
aaacaguguguaaac

SEQ ID NO: 3414789 - RNA, 14 nt, Human
aaacaguuaacuuu

SEQ ID NO: 3414790 - RNA, 23 nt, Human
aaacaguuaacuuucagaagaga

SEQ ID NO: 3414791 - RNA, 15 nt, Human
aaacaguugcacagc

SEQ ID NO: 3414792 - RNA, 16 nt, Human
aaacaguugcacagca

SEQ ID NO: 3414793 - RNA, 18 nt, Human
aaacaguugcauguagua

SEQ ID NO: 3414794 - RNA, 24 nt, Human
aaacaguugcauguaguaacacua

SEQ ID NO: 3414795 - RNA, 17 nt, Human
aaacauaagaucacugc

SEQ ID NO: 3414796 - RNA, 15 nt, Human
aaacauaaugaaaau

SEQ ID NO: 3414797 - RNA, 13 nt, Human
aaacauaauucuu

SEQ ID NO: 3414798 - RNA, 13 nt, Human
aaacauauauaac

SEQ ID NO: 3414799 - RNA, 16 nt, Human
aaacauauauaacaau

SEQ ID NO: 3414800 - RNA, 14 nt, Human
aaacauaucucuua

SEQ ID NO: 3414801 - RNA, 13 nt, Human
aaacauaugauuu

SEQ ID NO: 3414802 - RNA, 17 nt, Human
aaacauaugauuucacu

SEQ ID NO: 3414803 - RNA, 14 nt, Human
aaacauaugcacau

SEQ ID NO: 3414804 - RNA, 16 nt, Human
aaacaucaguuacucu

SEQ ID NO: 3414805 - RNA, 20 nt, Human
aaacaucaguuacucugaag

SEQ ID NO: 3414806 - RNA, 19 nt, Human
aaacaucauucauuuuugu

SEQ ID NO: 3414807 - RNA, 16 nt, Human
aaacaucauuccuuuu

SEQ ID NO: 3414808 - RNA, 22 nt, Human
aaacaucauuccuuuuuauuua

SEQ ID NO: 3414809 - RNA, 15 nt, Human
aaacaucucaucaug

SEQ ID NO: 3414810 - RNA, 22 nt, Human
aaacaucuuugaaauuauguaa

SEQ ID NO: 3414811 - RNA, 15 nt, Human
aaacaugacacugac

SEQ ID NO: 3414812 - RNA, 17 nt, Human
aaacaugacacugaccu

SEQ ID NO: 3414813 - RNA, 15 nt, Human
aaacaugagaugugu

SEQ ID NO: 3414814 - RNA, 20 nt, Human
aaacaugcagaacaaaugaa

SEQ ID NO: 3414815 - RNA, 16 nt, Human
aaacaugcuacacacu

SEQ ID NO: 3414816 - RNA, 17 nt, Human
aaacauggccuuugcuu

SEQ ID NO: 3414817 - RNA, 22 nt, Human
aaacaugggguuggcugggccc

SEQ ID NO: 3414818 - RNA, 17 nt, Human
aaacaugguuugacucu

SEQ ID NO: 3414819 - RNA, 18 nt, Human
aaacauguacaaaaucga

SEQ ID NO: 3414820 - RNA, 13 nt, Human
aaacauguauuua

SEQ ID NO: 3414821 - RNA, 15 nt, Human
aaacauguauuuaug

SEQ ID NO: 3414822 - RNA, 14 nt, Human
aaacauguguuuua

SEQ ID NO: 3414823 - RNA, 21 nt, Human
aaacauguuaaugacaauauu

SEQ ID NO: 3414824 - RNA, 20 nt, Human
aaacauguuuauuuuucuug

SEQ ID NO: 3414825 - RNA, 21 nt, Human
aaacauguuuauuuuucuugu

SEQ ID NO: 3414826 - RNA, 12 nt, Human
aaacauguuucc

SEQ ID NO: 3414827 - RNA, 22 nt, Human
aaacauguuucuuuguaaugaa

SEQ ID NO: 3414828 - RNA, 16 nt, Human
aaacauuaagaaaauc

SEQ ID NO: 3414829 - RNA, 19 nt, Human
aaacauuaagaaaaucaua

SEQ ID NO: 3414830 - RNA, 20 nt, Human
aaacauuaagaaaaucauau

SEQ ID NO: 3414831 - RNA, 15 nt, Human
aaacauuaagauuga

SEQ ID NO: 3414832 - RNA, 16 nt, Human
aaacauuaauguugau

SEQ ID NO: 3414833 - RNA, 14 nt, Human
aaacauuaguacuu

SEQ ID NO: 3414834 - RNA, 15 nt, Human
aaacauuaugaugug

SEQ ID NO: 3414835 - RNA, 20 nt, Human
aaacauugguucuuguauua

SEQ ID NO: 3414836 - RNA, 20 nt, Human
aaacauuuaccaaucauauu

SEQ ID NO: 3414837 - RNA, 12 nt, Human
aaacauuuauuu

SEQ ID NO: 3414838 - RNA, 23 nt, Human
aaacauuuauuuuuuuuaaagaa

SEQ ID NO: 3414839 - RNA, 23 nt, Human
aaacauuucauaauuuguuucca

SEQ ID NO: 3414840 - RNA, 20 nt, Human
aaacauuuuaaauggacaga

SEQ ID NO: 3414841 - RNA, 19 nt, Human
aaaagguuuuauuuuguaa

SEQ ID NO: 3414842 - RNA, 13 nt, Human
aaaaguaaaaugu

SEQ ID NO: 3414843 - RNA, 15 nt, Human
aaaaguaauauuuau

SEQ ID NO: 3414844 - RNA, 14 nt, Human
aaagagaaugaguc

SEQ ID NO: 3414845 - RNA, 21 nt, Human
aaagagaauugggggcuuagg

SEQ ID NO: 3414846 - RNA, 22 nt, Human
aaagagacaaacuguaaaaaau

SEQ ID NO: 3414847 - RNA, 15 nt, Human
aaagagacaaagcuu

SEQ ID NO: 3414848 - RNA, 21 nt, Human
aaagagacagugauauuggaa

SEQ ID NO: 3414849 - RNA, 12 nt, Human
aaagagagaaaa

SEQ ID NO: 3414850 - RNA, 13 nt, Human
aaagagagaaaac

SEQ ID NO: 3414851 - RNA, 13 nt, Human
aaagagagaaaau

SEQ ID NO: 3414852 - RNA, 15 nt, Human
aaagagagaaaauaa

SEQ ID NO: 3414853 - RNA, 19 nt, Human
aaagagagaaaauaaaaag

SEQ ID NO: 3414854 - RNA, 11 nt, Human
aaagagagaga

SEQ ID NO: 3414855 - RNA, 13 nt, Human
aaagagagauuuu

SEQ ID NO: 3414856 - RNA, 15 nt, Human
aaagagagcagagaa

SEQ ID NO: 3414857 - RNA, 14 nt, Human
aaagagauacagag

SEQ ID NO: 3414858 - RNA, 16 nt, Human
aaagagauauuuuaaa

SEQ ID NO: 3414859 - RNA, 21 nt, Human
aaagagaugagacaaacaugc

SEQ ID NO: 3414860 - RNA, 18 nt, Human
aaagagcacaaacauuuu

SEQ ID NO: 3414861 - RNA, 18 nt, Human
aaagagcacuuaagagaa

SEQ ID NO: 3414862 - RNA, 20 nt, Human
aaagagcacuuaagagaaua

SEQ ID NO: 3414863 - RNA, 11 nt, Human
aaagagcugcc

SEQ ID NO: 3414864 - RNA, 13 nt, Human
aaagagcugccua

SEQ ID NO: 3414865 - RNA, 11 nt, Human
aaagaggaaaa

SEQ ID NO: 3414866 - RNA, 20 nt, Human
aaagaggacucgcuuguaaa

SEQ ID NO: 3414867 - RNA, 20 nt, Human
aaagaggcagcuugaaacug

SEQ ID NO: 3414868 - RNA, 13 nt, Human
aaagaggcuaugu

SEQ ID NO: 3414869 - RNA, 18 nt, Human
aaagaggcuaugugagca

SEQ ID NO: 3414870 - RNA, 16 nt, Human
aaagaggcugaaagag

SEQ ID NO: 3414871 - RNA, 19 nt, Human
aaagaggcugaggccugga

SEQ ID NO: 3414872 - RNA, 19 nt, Human
aaagaggcugaggcuggca

SEQ ID NO: 3414873 - RNA, 20 nt, Human
aaagaggcugccccucucac

SEQ ID NO: 3414874 - RNA, 15 nt, Human
aaagagggcuuccuc

SEQ ID NO: 3414875 - RNA, 19 nt, Human
aaagagggcuuccucuaga

SEQ ID NO: 3414876 - RNA, 18 nt, Human
aaagaggucgcuugggaa

SEQ ID NO: 3414877 - RNA, 18 nt, Human
aaagaggugaccccaggg

SEQ ID NO: 3414878 - RNA, 21 nt, Human
aaagaggugaccccagggcac

SEQ ID NO: 3414879 - RNA, 11 nt, Human
aaagagguuuu

SEQ ID NO: 3414880 - RNA, 16 nt, Human
aaagagguuuuucuua

SEQ ID NO: 3414881 - RNA, 20 nt, Human
aaagaguccauuguuuaaaa

SEQ ID NO: 3414882 - RNA, 20 nt, Human
aaagaguucaagaaauaagu

SEQ ID NO: 3414883 - RNA, 23 nt, Human
aaagaguucuggaaaagaacugu

SEQ ID NO: 3414884 - RNA, 21 nt, Human
aaagaguugggugucuccuua

SEQ ID NO: 3414885 - RNA, 18 nt, Human
aaagauaaacacaagauu

SEQ ID NO: 3414886 - RNA, 15 nt, Human
aaagauaaagaccag

SEQ ID NO: 3414887 - RNA, 13 nt, Human
aaagauaaagaug

SEQ ID NO: 3414888 - RNA, 15 nt, Human
aaagauaaagaugau

SEQ ID NO: 3414889 - RNA, 13 nt, Human
aaagauaaauauu

SEQ ID NO: 3414890 - RNA, 15 nt, Human
aaagauaaauauuau

SEQ ID NO: 3414891 - RNA, 20 nt, Human
aaagauaacaagaucuuuca

SEQ ID NO: 3414892 - RNA, 22 nt, Human
aaagauaacaagaucuuucagg

SEQ ID NO: 3414893 - RNA, 21 nt, Human
aaagauacagaacucuuucaa

SEQ ID NO: 3414894 - RNA, 17 nt, Human
aaacaagaaaguuuccc

SEQ ID NO: 3414895 - RNA, 12 nt, Human
aaacaagaauga

SEQ ID NO: 3414896 - RNA, 22 nt, Human
aaacaagaguuuucuuccuugu

SEQ ID NO: 3414897 - RNA, 15 nt, Human
aaacaagauuuuaaa

SEQ ID NO: 3414898 - RNA, 15 nt, Human
aaacaagcauauaaa

SEQ ID NO: 3414899 - RNA, 20 nt, Human
aaacaaggggcuguuacaua

SEQ ID NO: 3414900 - RNA, 12 nt, Human
aaacaauaccug

SEQ ID NO: 3414901 - RNA, 21 nt, Human
aaacaauacucauaaugugaa

SEQ ID NO: 3414902 - RNA, 15 nt, Human
aaacaauauuguuuc

SEQ ID NO: 3414903 - RNA, 15 nt, Human
aaacaaucacacuca

SEQ ID NO: 3414904 - RNA, 16 nt, Human
aaacaaugaaugucuu

SEQ ID NO: 3414905 - RNA, 12 nt, Human
aaacaauuuauu

SEQ ID NO: 3414906 - RNA, 13 nt, Human
aaacacaaaugca

SEQ ID NO: 3414907 - RNA, 14 nt, Human
aaacacaaaugcag

SEQ ID NO: 3414908 - RNA, 15 nt, Human
aaacacaagauuggu

SEQ ID NO: 3414909 - RNA, 21 nt, Human
aaacacaagauugguguuuuu

SEQ ID NO: 3414910 - RNA, 14 nt, Human
aaacacaauauuuu

SEQ ID NO: 3414911 - RNA, 21 nt, Human
aaacacacagauacacacaca

SEQ ID NO: 3414912 - RNA, 16 nt, Human
aaacacaccaggcugu

SEQ ID NO: 3414913 - RNA, 17 nt, Human
aaacacacugaaagcuc

SEQ ID NO: 3414914 - RNA, 17 nt, Human
aaacacacugaggcagg

SEQ ID NO: 3414915 - RNA, 19 nt, Human
aaacacacugaggcaggga

SEQ ID NO: 3414916 - RNA, 10 nt, Human
aaacacagag

SEQ ID NO: 3414917 - RNA, 11 nt, Human
aaacacagagg

SEQ ID NO: 3414918 - RNA, 14 nt, Human
aaacacagcaaggg

SEQ ID NO: 3414919 - RNA, 12 nt, Human
aaacacagcugu

SEQ ID NO: 3414920 - RNA, 13 nt, Human
aaacacagcuguu

SEQ ID NO: 3414921 - RNA, 18 nt, Human
aaacacaguuacacuugu

SEQ ID NO: 3414922 - RNA, 14 nt, Human
aaacacauaauuaa

SEQ ID NO: 3414923 - RNA, 18 nt, Human
aaacacauaauuaacacu

SEQ ID NO: 3414924 - RNA, 22 nt, Human
aaacacauagauucaccuguaa

SEQ ID NO: 3414925 - RNA, 14 nt, Human
aaacacaucuuccc

SEQ ID NO: 3414926 - RNA, 13 nt, Human
aaacacauugccu

SEQ ID NO: 3414927 - RNA, 23 nt, Human
aaacacauugccuaacuacuagu

SEQ ID NO: 3414928 - RNA, 16 nt, Human
aaacacauuguuauuu

SEQ ID NO: 3414929 - RNA, 20 nt, Human
aaacacauuguuauuuucag

SEQ ID NO: 3414930 - RNA, 20 nt, Human
aaacacccgacgucauguau

SEQ ID NO: 3414931 - RNA, 15 nt, Human
aaacaccuagcuuua

SEQ ID NO: 3414932 - RNA, 12 nt, Human
aaacaccugcug

SEQ ID NO: 3414933 - RNA, 23 nt, Human
aaacaccuucuuauuauauauau

SEQ ID NO: 3414934 - RNA, 13 nt, Human
aaacacgaaacuu

SEQ ID NO: 3414935 - RNA, 23 nt, Human
aaacacgaaacuuguuauuguga

SEQ ID NO: 3414936 - RNA, 17 nt, Human
aaacacguuuuaaggac

SEQ ID NO: 3414937 - RNA, 18 nt, Human
aaacacguuuuaaggacu

SEQ ID NO: 3414938 - RNA, 14 nt, Human
aaacacuaaauguu

SEQ ID NO: 3414939 - RNA, 15 nt, Human
aaacacuaaauguua

SEQ ID NO: 3414940 - RNA, 17 nt, Human
aaacacuaaauguuaaa

SEQ ID NO: 3414941 - RNA, 19 nt, Human
aaacacuaaauguuaaaga

SEQ ID NO: 3414942 - RNA, 22 nt, Human
aaacacuaaauguuaaagaugu

SEQ ID NO: 3414943 - RNA, 23 nt, Human
aaacacuaguaccuucagauccu

SEQ ID NO: 3414944 - RNA, 16 nt, Human
aaacacucagcuguuc

SEQ ID NO: 3414945 - RNA, 24 nt, Human
aaacacucaguuguucaauaauaa

SEQ ID NO: 3414946 - RNA, 13 nt, Human
aaacacuccuugc

SEQ ID NO: 3414947 - RNA, 17 nt, Human
aaacacucggcauuuca

SEQ ID NO: 3414948 - RNA, 21 nt, Human
aaacacucggcauuucaaaug

SEQ ID NO: 3414949 - RNA, 16 nt, Human
aaacacugaaaagaag

SEQ ID NO: 3414950 - RNA, 13 nt, Human
aaacacugccuuu

SEQ ID NO: 3414951 - RNA, 22 nt, Human
aaacacugccuuuuuauuuaua

SEQ ID NO: 3414952 - RNA, 15 nt, Human
aaacacuguguaagc

SEQ ID NO: 3414953 - RNA, 19 nt, Human
aaacacuguucucugcccu

SEQ ID NO: 3414954 - RNA, 20 nt, Human
aaacacuugugacuuuugcu

SEQ ID NO: 3414955 - RNA, 21 nt, Human
aaacacuuucucuucuuguuu

SEQ ID NO: 3414956 - RNA, 14 nt, Human
aaacacuuuuuugg

SEQ ID NO: 3414957 - RNA, 12 nt, Human
aaacagaaaaaa

SEQ ID NO: 3414958 - RNA, 13 nt, Human
aaacagaaaaaaa

SEQ ID NO: 3414959 - RNA, 13 nt, Human
aaacagaaacaaa

SEQ ID NO: 3414960 - RNA, 21 nt, Human
aaacagaaacaaaaacacuaa

SEQ ID NO: 3414961 - RNA, 13 nt, Human
aaacagaacacuu

SEQ ID NO: 3414962 - RNA, 16 nt, Human
aaacagagacaggccc

SEQ ID NO: 3414963 - RNA, 13 nt, Human
aaacagaggacca

SEQ ID NO: 3414964 - RNA, 17 nt, Human
aaacagaguaaucuugu

SEQ ID NO: 3414965 - RNA, 19 nt, Human
aaacagauaccauacucau

SEQ ID NO: 3414966 - RNA, 12 nt, Human
aaacagauauaa

SEQ ID NO: 3414967 - RNA, 15 nt, Human
aaacagauauaaaug

SEQ ID NO: 3414968 - RNA, 14 nt, Human
aaacagaugaaaag

SEQ ID NO: 3414969 - RNA, 21 nt, Human
aaacagaugaugagaauuucu

SEQ ID NO: 3414970 - RNA, 22 nt, Human
aaacagaugaugagaauuucua

SEQ ID NO: 3414971 - RNA, 14 nt, Human
aaacagaugcucug

SEQ ID NO: 3414972 - RNA, 14 nt, Human
aaacagauguccau

SEQ ID NO: 3414973 - RNA, 22 nt, Human
aaacagauguccaucagaugac

SEQ ID NO: 3414974 - RNA, 17 nt, Human
aaacagauuuggaaaga

SEQ ID NO: 3414975 - RNA, 17 nt, Human
aaacagcaaaccaagag

SEQ ID NO: 3414976 - RNA, 18 nt, Human
aaacagcaaaccaagaga

SEQ ID NO: 3414977 - RNA, 14 nt, Human
aaacagcaguguuc

SEQ ID NO: 3414978 - RNA, 14 nt, Human
aaacagcauugcuu

SEQ ID NO: 3414979 - RNA, 16 nt, Human
aaacagcauugcuuuc

SEQ ID NO: 3414980 - RNA, 18 nt, Human
aaacagcauugcuuucug

SEQ ID NO: 3414981 - RNA, 14 nt, Human
aaacagccagcaag

SEQ ID NO: 3414982 - RNA, 18 nt, Human
aaacagcugcauuagaaa

SEQ ID NO: 3414983 - RNA, 13 nt, Human
aaacagcugccuu

SEQ ID NO: 3414984 - RNA, 17 nt, Human
aaacagcugccuuagcu

SEQ ID NO: 3414985 - RNA, 18 nt, Human
aaacagcugccuuagcuu

SEQ ID NO: 3414986 - RNA, 20 nt, Human
aaacagcuucaugccuuugu

SEQ ID NO: 3414987 - RNA, 14 nt, Human
aaacagcuuucaag

SEQ ID NO: 3414988 - RNA, 18 nt, Human
aaacagcuuucaagugcc

SEQ ID NO: 3414989 - RNA, 20 nt, Human
aaacagcuuuggggugucuu

SEQ ID NO: 3414990 - RNA, 22 nt, Human
aaagcagaacaguuaagcagcc

SEQ ID NO: 3414991 - RNA, 19 nt, Human
aaagcagaauaguauuuuu

SEQ ID NO: 3414992 - RNA, 14 nt, Human
aaagcagaggccaa

SEQ ID NO: 3414993 - RNA, 21 nt, Human
aaagcagaggcuggccucaga

SEQ ID NO: 3414994 - RNA, 22 nt, Human
aaagcagauaccucacccugcu

SEQ ID NO: 3414995 - RNA, 13 nt, Human
aaagcagcaucug

SEQ ID NO: 3414996 - RNA, 17 nt, Human
aaagcagccuggccaac

SEQ ID NO: 3414997 - RNA, 16 nt, Human
aaagcagcguuucuau

SEQ ID NO: 3414998 - RNA, 17 nt, Human
aaagcaggcagaacuca

SEQ ID NO: 3414999 - RNA, 18 nt, Human
aaagcagggaauuucuau

SEQ ID NO: 3415000 - RNA, 17 nt, Human
aaagcagggacuugaac

SEQ ID NO: 3415001 - RNA, 18 nt, Human
aaagcaggggcuacaaga

SEQ ID NO: 3415002 - RNA, 22 nt, Human
aaagcaggggcuacaagaggga

SEQ ID NO: 3415003 - RNA, 17 nt, Human
aaagcagguggcaucuc

SEQ ID NO: 3415004 - RNA, 19 nt, Human
aaagcagguucuuguuggu

SEQ ID NO: 3415005 - RNA, 17 nt, Human
aaagcagguuucaagga

SEQ ID NO: 3415006 - RNA, 22 nt, Human
aaagcaguagaaauaauaugca

SEQ ID NO: 3415007 - RNA, 23 nt, Human
aaagcaguuaacuuuaagacuga

SEQ ID NO: 3415008 - RNA, 20 nt, Human
aaagcauagauguuuuggua

SEQ ID NO: 3415009 - RNA, 21 nt, Human
aaagcauauggguuagauguu

SEQ ID NO: 3415010 - RNA, 17 nt, Human
aaagcaucaccucaggc

SEQ ID NO: 3415011 - RNA, 18 nt, Human
aaagcaucaccucaggcc

SEQ ID NO: 3415012 - RNA, 17 nt, Human
aaagcaucccucaccca

SEQ ID NO: 3415013 - RNA, 15 nt, Human
aaagcauggacauuu

SEQ ID NO: 3415014 - RNA, 16 nt, Human
aaagcauguacagugu

SEQ ID NO: 3415015 - RNA, 22 nt, Human
aaagcauguucacccuuauagu

SEQ ID NO: 3415016 - RNA, 17 nt, Human
aaagcauguuuugcaug

SEQ ID NO: 3415017 - RNA, 22 nt, Human
aaagcauucaauuuauucaaga

SEQ ID NO: 3415018 - RNA, 17 nt, Human
aaagcauuguaaaugug

SEQ ID NO: 3415019 - RNA, 15 nt, Human
aaagcauuuauaaau

SEQ ID NO: 3415020 - RNA, 14 nt, Human
aaagcauuuaucau

SEQ ID NO: 3415021 - RNA, 14 nt, Human
aaagcauuugaaug

SEQ ID NO: 3415022 - RNA, 19 nt, Human
aaagcauuugaaugcauuu

SEQ ID NO: 3415023 - RNA, 22 nt, Human
aaagcauuugaaugcauuuugu

SEQ ID NO: 3415024 - RNA, 13 nt, Human
aaagcauuuugua

SEQ ID NO: 3415025 - RNA, 14 nt, Human
aaagcauuuuguaa

SEQ ID NO: 3415026 - RNA, 15 nt, Human
aaagcauuuuguaau

SEQ ID NO: 3415027 - RNA, 15 nt, Human
aaagccaaugugaac

SEQ ID NO: 3415028 - RNA, 17 nt, Human
aaagccacauuauuucu

SEQ ID NO: 3415029 - RNA, 12 nt, Human
aaagccaccucu

SEQ ID NO: 3415030 - RNA, 18 nt, Human
aaagccaccucugucauu

SEQ ID NO: 3415031 - RNA, 20 nt, Human
aaagccagaaccagaugagu

SEQ ID NO: 3415032 - RNA, 14 nt, Human
aaagccagaagcug

SEQ ID NO: 3415033 - RNA, 21 nt, Human
aaagccagcguccuccucugu

SEQ ID NO: 3415034 - RNA, 13 nt, Human
aaagccagggucu

SEQ ID NO: 3415035 - RNA, 14 nt, Human
aaagccagucuuaa

SEQ ID NO: 3415036 - RNA, 19 nt, Human
aaagccagugacuccagga

SEQ ID NO: 3415037 - RNA, 16 nt, Human
aaagccauguuuaaga

SEQ ID NO: 3415038 - RNA, 17 nt, Human
aaagccauguuuaagau

SEQ ID NO: 3415039 - RNA, 14 nt, Human
aaagccauguuuau

SEQ ID NO: 3415040 - RNA, 12 nt, Human
aaagcccaggag

SEQ ID NO: 3415041 - RNA, 14 nt, Human
aaagcccaggagcc

SEQ ID NO: 3415042 - RNA, 22 nt, Human
aaagcccauaugcuaccaccag

SEQ ID NO: 3415043 - RNA, 16 nt, Human
aaagccccauuaacug

SEQ ID NO: 3415044 - RNA, 14 nt, Human
aaagcccccagagc

SEQ ID NO: 3415045 - RNA, 13 nt, Human
aaagcccugugcu

SEQ ID NO: 3415046 - RNA, 19 nt, Human
aaagcccuuaggaagaauu

SEQ ID NO: 3415047 - RNA, 16 nt, Human
aaagccuaaucacagu

SEQ ID NO: 3415048 - RNA, 17 nt, Human
aaagccugggugacauu

SEQ ID NO: 3415049 - RNA, 18 nt, Human
aaagccugggugacauuu

SEQ ID NO: 3415050 - RNA, 17 nt, Human
aaagccuguaagccugc

SEQ ID NO: 3415051 - RNA, 17 nt, Human
aaagccuguucauggca

SEQ ID NO: 3415052 - RNA, 18 nt, Human
aaagccuguucauggcag

SEQ ID NO: 3415053 - RNA, 20 nt, Human
aaagccuguuccccucacug

SEQ ID NO: 3415054 - RNA, 10 nt, Human
aaagccuucc

SEQ ID NO: 3415055 - RNA, 18 nt, Human
aaagccuucuuuuggggg

SEQ ID NO: 3415056 - RNA, 16 nt, Human
aaagcacaagaagcgu

SEQ ID NO: 3415057 - RNA, 19 nt, Human
aaagcacaggagacacugu

SEQ ID NO: 3415058 - RNA, 15 nt, Human
aaagcacaguuugaa

SEQ ID NO: 3415059 - RNA, 17 nt, Human
aaagcacaguuugaaca

SEQ ID NO: 3415060 - RNA, 19 nt, Human
aaagcaccaaaauaagaaa

SEQ ID NO: 3415061 - RNA, 22 nt, Human
aaagcaccaaaauaagaaaaga

SEQ ID NO: 3415062 - RNA, 14 nt, Human
aaagcacuauacag

SEQ ID NO: 3415063 - RNA, 22 nt, Human
aaagcacuuggacucuugcucu

SEQ ID NO: 3415064 - RNA, 16 nt, Human
aaagcagagauuuuca

SEQ ID NO: 3415065 - RNA, 15 nt, Human
aaagcagccacgagg

SEQ ID NO: 3415066 - RNA, 15 nt, Human
aaagcagcguuucua

SEQ ID NO: 3415067 - RNA, 18 nt, Human
aaagcagcguuucuauga

SEQ ID NO: 3415068 - RNA, 19 nt, Human
aaagcagcucaaaggcaca

SEQ ID NO: 3415069 - RNA, 19 nt, Human
aaagcaggcagaacucauc

SEQ ID NO: 3415070 - RNA, 24 nt, Human
aaagcaggcuugcccaguacauuu

SEQ ID NO: 3415071 - RNA, 14 nt, Human
aaagcagguucuug

SEQ ID NO: 3415072 - RNA, 17 nt, Human
aaagcagguucuuguug

SEQ ID NO: 3415073 - RNA, 22 nt, Human
aaagcagguucuuguuggugca

SEQ ID NO: 3415074 - RNA, 15 nt, Human
aaagcaguauuuuuc

SEQ ID NO: 3415075 - RNA, 13 nt, Human
aaagcagugcaug

SEQ ID NO: 3415076 - RNA, 22 nt, Human
aaagcagugcaugcugucccuu

SEQ ID NO: 3415077 - RNA, 14 nt, Human
aaagcauaaaaaca

SEQ ID NO: 3415078 - RNA, 13 nt, Human
aaagcauaaagcu

SEQ ID NO: 3415079 - RNA, 17 nt, Human
aaagcauauugacuuuu

SEQ ID NO: 3415080 - RNA, 24 nt, Human
aaagcaucccucacccauccuaga

SEQ ID NO: 3415081 - RNA, 22 nt, Human
aaagcaucuugcauuaugcaau

SEQ ID NO: 3415082 - RNA, 17 nt, Human
aaagcaugaaaugugaa

SEQ ID NO: 3415083 - RNA, 18 nt, Human
aaagcauggacauuuaga

SEQ ID NO: 3415084 - RNA, 12 nt, Human
aaagcauggacu

SEQ ID NO: 3415085 - RNA, 11 nt, Human
aaagcauguac

SEQ ID NO: 3415086 - RNA, 13 nt, Human
aaagcauguacag

SEQ ID NO: 3415087 - RNA, 14 nt, Human
aaagcauguacagu

SEQ ID NO: 3415088 - RNA, 15 nt, Human
aaagcauguacagug

SEQ ID NO: 3415089 - RNA, 21 nt, Human
aaagcauguacaguguucugu

SEQ ID NO: 3415090 - RNA, 13 nt, Human
aaagcaugucuca

SEQ ID NO: 3415091 - RNA, 20 nt, Human
aaagcauuguaaaugugcuu

SEQ ID NO: 3415092 - RNA, 17 nt, Human
aaagcauuuacuuugaa

SEQ ID NO: 3415093 - RNA, 16 nt, Human
aaagcauuuuucaaua

SEQ ID NO: 3415094 - RNA, 15 nt, Human
aaagccaagaggcug

SEQ ID NO: 3415095 - RNA, 17 nt, Human
aaagccaaggugucauu

SEQ ID NO: 3415096 - RNA, 19 nt, Human
aaagccaauaacacacagc

SEQ ID NO: 3415097 - RNA, 17 nt, Human
aaagccaaugugaacag

SEQ ID NO: 3415098 - RNA, 20 nt, Human
aaagccacauuauuucuagu

SEQ ID NO: 3415099 - RNA, 19 nt, Human
aaagccaccucugucauuu

SEQ ID NO: 3415100 - RNA, 20 nt, Human
aaagccaccucugucauuug

SEQ ID NO: 3415101 - RNA, 17 nt, Human
aaagccacuagacucuu

SEQ ID NO: 3415102 - RNA, 13 nt, Human
aaagccaugcugg

SEQ ID NO: 3415103 - RNA, 13 nt, Human
aaagccauguuua

SEQ ID NO: 3415104 - RNA, 19 nt, Human
aaagccauguuuaagauuu

SEQ ID NO: 3415105 - RNA, 18 nt, Human
aaagccauguuuauuaca

SEQ ID NO: 3415106 - RNA, 16 nt, Human
aaagcccaaccuccug

SEQ ID NO: 3415107 - RNA, 18 nt, Human
aaagcccaagggaucugg

SEQ ID NO: 3415108 - RNA, 23 nt, Human
aaagcccaagggaucugguccua

SEQ ID NO: 3415109 - RNA, 15 nt, Human
aaagcccagagacag

SEQ ID NO: 3415110 - RNA, 16 nt, Human
aaagcccauucauucc

SEQ ID NO: 3415111 - RNA, 14 nt, Human
aaagccccagaaau

SEQ ID NO: 3415112 - RNA, 14 nt, Human
aaagcccugagauc

SEQ ID NO: 3415113 - RNA, 14 nt, Human
aaagcccugugcuc

SEQ ID NO: 3415114 - RNA, 20 nt, Human
aaagccucaagguuuuaggu

SEQ ID NO: 3415115 - RNA, 16 nt, Human
aaagccucugcugcca

SEQ ID NO: 3415116 - RNA, 13 nt, Human
aaagccucugugu

SEQ ID NO: 3415117 - RNA, 24 nt, Human
aaagccucugugucacuggcugcc

SEQ ID NO: 3415118 - RNA, 17 nt, Human
aaagccucuguuuugau

SEQ ID NO: 3415119 - RNA, 13 nt, Human
aaagccugcucaa

SEQ ID NO: 3415120 - RNA, 20 nt, Human
aaagccuggguuugguguau

SEQ ID NO: 3415121 - RNA, 22 nt, Human
aaagccuguaagccugcaagcc

SEQ ID NO: 3415122 - RNA, 17 nt, Human
aaagccuguauucucaa

SEQ ID NO: 3415123 - RNA, 16 nt, Human
aaagccuguuuaagag

SEQ ID NO: 3415124 - RNA, 15 nt, Human
aaagccuuagggaag

SEQ ID NO: 3415125 - RNA, 17 nt, Human
aaagccuuaucaagugu

SEQ ID NO: 3415126 - RNA, 19 nt, Human
aaagccuuguguauauuug

SEQ ID NO: 3415127 - RNA, 23 nt, Human
aaagccuugugucuacagagaac

SEQ ID NO: 3415128 - RNA, 17 nt, Human
aaagccuuuaguaucag

SEQ ID NO: 3415129 - RNA, 16 nt, Human
aaagccuuuauuuguu

SEQ ID NO: 3415130 - RNA, 12 nt, Human
aaagcgaaaaaa

SEQ ID NO: 3415131 - RNA, 14 nt, Human
aaagcggggggagg

SEQ ID NO: 3415132 - RNA, 16 nt, Human
aaagcuaaaauaaaga

SEQ ID NO: 3415133 - RNA, 16 nt, Human
aaagcuaggccuggcc

SEQ ID NO: 3415134 - RNA, 17 nt, Human
aaagcuaggccuggcca

SEQ ID NO: 3415135 - RNA, 15 nt, Human
aaagguuuacagaau

SEQ ID NO: 3415136 - RNA, 22 nt, Human
aaagguuuaugaaaaagaagaa

SEQ ID NO: 3415137 - RNA, 16 nt, Human
aaagguuuauuuuucu

SEQ ID NO: 3415138 - RNA, 16 nt, Human
aaagguuuuauuuugu

SEQ ID NO: 3415139 - RNA, 17 nt, Human
aaagguuuuauuuugua

SEQ ID NO: 3415140 - RNA, 13 nt, Human
aaagguuuugagc

SEQ ID NO: 3415141 - RNA, 12 nt, Human
aaagguuuuuuu

SEQ ID NO: 3415142 - RNA, 12 nt, Human
aaaguaaaagag

SEQ ID NO: 3415143 - RNA, 15 nt, Human
aaaguaaaagcagca

SEQ ID NO: 3415144 - RNA, 19 nt, Human
aaaguaaaagcagcauaaa

SEQ ID NO: 3415145 - RNA, 14 nt, Human
aaaguaaaccacaa

SEQ ID NO: 3415146 - RNA, 20 nt, Human
aaaguaacucauuuguuaaa

SEQ ID NO: 3415147 - RNA, 16 nt, Human
aaaguaacugugagaa

SEQ ID NO: 3415148 - RNA, 21 nt, Human
aaaguaaggugcuuggaguuu

SEQ ID NO: 3415149 - RNA, 17 nt, Human
aaaguaaugaucucaaa

SEQ ID NO: 3415150 - RNA, 15 nt, Human
aaaguacacucugcu

SEQ ID NO: 3415151 - RNA, 14 nt, Human
aaaguacagaauuu

SEQ ID NO: 3415152 - RNA, 16 nt, Human
aaaguacagguacuuu

SEQ ID NO: 3415153 - RNA, 16 nt, Human
aaaguacauguuaaac

SEQ ID NO: 3415154 - RNA, 22 nt, Human
aaaguacauucuggggaaacaa

SEQ ID NO: 3415155 - RNA, 18 nt, Human
aaaguacugagcagugau

SEQ ID NO: 3415156 - RNA, 23 nt, Human
aaaguagaacuuuguauaguuau

SEQ ID NO: 3415157 - RNA, 14 nt, Human
aaaguagauuaaga

SEQ ID NO: 3415158 - RNA, 21 nt, Human
aaaguaguacuucuucuguaa

SEQ ID NO: 3415159 - RNA, 16 nt, Human
aaaguaguccugugaa

SEQ ID NO: 3415160 - RNA, 13 nt, Human
aaaguauagagag

SEQ ID NO: 3415161 - RNA, 15 nt, Human
aaaguauauauuuau

SEQ ID NO: 3415162 - RNA, 12 nt, Human
aaaguaucaugc

SEQ ID NO: 3415163 - RNA, 14 nt, Human
aaaguaucaugcau

SEQ ID NO: 3415164 - RNA, 15 nt, Human
aaaguaucaugcauu

SEQ ID NO: 3415165 - RNA, 16 nt, Human
aaaguaucaugcauuc

SEQ ID NO: 3415166 - RNA, 19 nt, Human
aaaguaucauggaaauauu

SEQ ID NO: 3415167 - RNA, 18 nt, Human
aaaguaucccuacuguaa

SEQ ID NO: 3415168 - RNA, 21 nt, Human
aaaguaucccuacuguaauuu

SEQ ID NO: 3415169 - RNA, 12 nt, Human
aaaguaugaauc

SEQ ID NO: 3415170 - RNA, 19 nt, Human
aaaguauguaaaguaugua

SEQ ID NO: 3415171 - RNA, 18 nt, Human
aaaguauguuagugcaaa

SEQ ID NO: 3415172 - RNA, 12 nt, Human
aaaguauguucu

SEQ ID NO: 3415173 - RNA, 20 nt, Human
aaaguauuaagcauauauuu

SEQ ID NO: 3415174 - RNA, 14 nt, Human
aaaguauuccaccu

SEQ ID NO: 3415175 - RNA, 18 nt, Human
aaaguauuccaccuuaaa

SEQ ID NO: 3415176 - RNA, 14 nt, Human
aaaguauucucuuu

SEQ ID NO: 3415177 - RNA, 16 nt, Human
aaaguauucucuuuuc

SEQ ID NO: 3415178 - RNA, 15 nt, Human
aaaguauucuuuuuc

SEQ ID NO: 3415179 - RNA, 21 nt, Human
aaaguauuguaaauuauauuu

SEQ ID NO: 3415180 - RNA, 12 nt, Human
aaaguauuuucc

SEQ ID NO: 3415181 - RNA, 17 nt, Human
aaaguauuuuccuguaa

SEQ ID NO: 3415182 - RNA, 12 nt, Human
aaaguauuuuga

SEQ ID NO: 3415183 - RNA, 13 nt, Human
aaaguauuuugaa

SEQ ID NO: 3415184 - RNA, 16 nt, Human
aaaguauuuugaaguu

SEQ ID NO: 3415185 - RNA, 20 nt, Human
aaagucaaaaggugccugug

SEQ ID NO: 3415186 - RNA, 21 nt, Human
aaagucaaucuuaucauauuu

SEQ ID NO: 3415187 - RNA, 17 nt, Human
aaagucaauguuuucag

SEQ ID NO: 3415188 - RNA, 13 nt, Human
aaagucacaguua

SEQ ID NO: 3415189 - RNA, 16 nt, Human
aaagucagaacaaauu

SEQ ID NO: 3415190 - RNA, 14 nt, Human
aaagucagauguuu

SEQ ID NO: 3415191 - RNA, 15 nt, Human
aaagucauaauugca

SEQ ID NO: 3415192 - RNA, 17 nt, Human
aaagucauuaaagacag

SEQ ID NO: 3415193 - RNA, 15 nt, Human
aaagucauuggcuuu

SEQ ID NO: 3415194 - RNA, 21 nt, Human
aaagucauuggcuuuauccuc

SEQ ID NO: 3415195 - RNA, 23 nt, Human
aaagucauuggcuuuauccucuu

SEQ ID NO: 3415196 - RNA, 20 nt, Human
aaaguccaauuuuaauuuag

SEQ ID NO: 3415197 - RNA, 13 nt, Human
aaaguccuuuucu

SEQ ID NO: 3415198 - RNA, 15 nt, Human
aaagucgaauuaaua

SEQ ID NO: 3415199 - RNA, 16 nt, Human
aaagucuaucuaauga

SEQ ID NO: 3415200 - RNA, 18 nt, Human
aaagucucaaugaaauag

SEQ ID NO: 3415201 - RNA, 14 nt, Human
aaagucuccagccc

SEQ ID NO: 3415202 - RNA, 15 nt, Human
aaagucuccagccca

SEQ ID NO: 3415203 - RNA, 13 nt, Human
aaagucucuauuu

SEQ ID NO: 3415204 - RNA, 20 nt, Human
aaagucucuauuuaaauucu

SEQ ID NO: 3415205 - RNA, 23 nt, Human
aaagucucuauuuaaauucuuuu

SEQ ID NO: 3415206 - RNA, 22 nt, Human
aaagucucucauucuaggccuc

SEQ ID NO: 3415207 - RNA, 19 nt, Human
aaagucucuggaauuugaa

SEQ ID NO: 3415208 - RNA, 23 nt, Human
aaagucugcucucauauaagaca

SEQ ID NO: 3415209 - RNA, 19 nt, Human
aaagucuguccuugaagga

SEQ ID NO: 3415210 - RNA, 16 nt, Human
aaagucugucuuuccu

SEQ ID NO: 3415211 - RNA, 17 nt, Human
aaagucuucaagggcug

SEQ ID NO: 3415212 - RNA, 18 nt, Human
aaagucuugaauguugaa

SEQ ID NO: 3415213 - RNA, 23 nt, Human
aaagucuuuggggucuacacugc

SEQ ID NO: 3415214 - RNA, 15 nt, Human
aaagugaaauaaugu

SEQ ID NO: 3415215 - RNA, 17 nt, Human
aaagugaaauaaugugu

SEQ ID NO: 3415216 - RNA, 11 nt, Human
aaagccuugug

SEQ ID NO: 3415217 - RNA, 21 nt, Human
aaagccuugugucuacagaga

SEQ ID NO: 3415218 - RNA, 14 nt, Human
aaagcgaauuuuaa

SEQ ID NO: 3415219 - RNA, 14 nt, Human
aaagcguuugcaca

SEQ ID NO: 3415220 - RNA, 18 nt, Human
aaagcuaaaguaucugua

SEQ ID NO: 3415221 - RNA, 13 nt, Human
aaagcuagaaaug

SEQ ID NO: 3415222 - RNA, 14 nt, Human
aaagcuagaaauga

SEQ ID NO: 3415223 - RNA, 19 nt, Human
aaagcuagaacacugccaa

SEQ ID NO: 3415224 - RNA, 13 nt, Human
aaagcuagaauug

SEQ ID NO: 3415225 - RNA, 14 nt, Human
aaagcuaggccugg

SEQ ID NO: 3415226 - RNA, 19 nt, Human
aaagcuagucaacaguacc

SEQ ID NO: 3415227 - RNA, 17 nt, Human
aaagcuauauaagacaa

SEQ ID NO: 3415228 - RNA, 18 nt, Human
aaagcuaucuucauguaa

SEQ ID NO: 3415229 - RNA, 14 nt, Human
aaagcucaaaugaa

SEQ ID NO: 3415230 - RNA, 18 nt, Human
aaagcucaaaugaaaugu

SEQ ID NO: 3415231 - RNA, 15 nt, Human
aaagcucacuuuacu

SEQ ID NO: 3415232 - RNA, 19 nt, Human
aaagcuccaugugccucuu

SEQ ID NO: 3415233 - RNA, 22 nt, Human
aaagcuccaugugccucuuugu

SEQ ID NO: 3415234 - RNA, 20 nt, Human
aaagcuccucgagggcaggg

SEQ ID NO: 3415235 - RNA, 13 nt, Human
aaagcuccugucc

SEQ ID NO: 3415236 - RNA, 16 nt, Human
aaagcuccuguccucc

SEQ ID NO: 3415237 - RNA, 19 nt, Human
aaagcugacgaggcugggc

SEQ ID NO: 3415238 - RNA, 18 nt, Human
aaagcugacuuggcuggu

SEQ ID NO: 3415239 - RNA, 17 nt, Human
aaagcugagaacuccug

SEQ ID NO: 3415240 - RNA, 20 nt, Human
aaagcugaucugguuugacu

SEQ ID NO: 3415241 - RNA, 22 nt, Human
aaagcugauuacugucaauaaa

SEQ ID NO: 3415242 - RNA, 22 nt, Human
aaagcugccagccgagauagcc

SEQ ID NO: 3415243 - RNA, 10 nt, Human
aaagcugccu

SEQ ID NO: 3415244 - RNA, 16 nt, Human
aaagcugccuguaguu

SEQ ID NO: 3415245 - RNA, 21 nt, Human
aaagcugccuguaguuaggaa

SEQ ID NO: 3415246 - RNA, 22 nt, Human
aaagcugcuaaaucuccuauuu

SEQ ID NO: 3415247 - RNA, 21 nt, Human
aaagcugcucagggaaaagca

SEQ ID NO: 3415248 - RNA, 20 nt, Human
aaagcugguggcagaguccu

SEQ ID NO: 3415249 - RNA, 22 nt, Human
aaagcuggugggugaaagaaau

SEQ ID NO: 3415250 - RNA, 15 nt, Human
aaagcugguuuaaug

SEQ ID NO: 3415251 - RNA, 16 nt, Human
aaagcugguuuaaugu

SEQ ID NO: 3415252 - RNA, 18 nt, Human
aaagcuguguguuuggaa

SEQ ID NO: 3415253 - RNA, 21 nt, Human
aaagcuguguuguugcuucuu

SEQ ID NO: 3415254 - RNA, 14 nt, Human
aaagcuguguuuau

SEQ ID NO: 3415255 - RNA, 17 nt, Human
aaagcuguucugucuuc

SEQ ID NO: 3415256 - RNA, 13 nt, Human
aaagcuguucuuc

SEQ ID NO: 3415257 - RNA, 19 nt, Human
aaagcuuaaaacuuugaag

SEQ ID NO: 3415258 - RNA, 16 nt, Human
aaagcuucacaguacc

SEQ ID NO: 3415259 - RNA, 14 nt, Human
aaagcuucagggaa

SEQ ID NO: 3415260 - RNA, 18 nt, Human
aaagcuuccaugauucua

SEQ ID NO: 3415261 - RNA, 12 nt, Human
aaagcuucuuaa

SEQ ID NO: 3415262 - RNA, 19 nt, Human
aaagcuugaguaaaauaaa

SEQ ID NO: 3415263 - RNA, 12 nt, Human
aaagcuuuauga

SEQ ID NO: 3415264 - RNA, 14 nt, Human
aaagcuuuguuugu

SEQ ID NO: 3415265 - RNA, 13 nt, Human
aaagcuuuugcau

SEQ ID NO: 3415266 - RNA, 17 nt, Human
aaagcuuuugcauauug

SEQ ID NO: 3415267 - RNA, 11 nt, Human
aaaggaaaaaa

SEQ ID NO: 3415268 - RNA, 14 nt, Human
aaaggaaaaaaaga

SEQ ID NO: 3415269 - RNA, 15 nt, Human
aaaggaaaaacaaac

SEQ ID NO: 3415270 - RNA, 15 nt, Human
aaaggaaaaaguauc

SEQ ID NO: 3415271 - RNA, 12 nt, Human
aaaggaaaagac

SEQ ID NO: 3415272 - RNA, 18 nt, Human
aaaggaaaauaguaaugu

SEQ ID NO: 3415273 - RNA, 12 nt, Human
aaaggaaaccuu

SEQ ID NO: 3415274 - RNA, 15 nt, Human
aaaggaaagaaaaca

SEQ ID NO: 3415275 - RNA, 15 nt, Human
aaaggaaaucaaaug

SEQ ID NO: 3415276 - RNA, 15 nt, Human
aaaggaaaugauuga

SEQ ID NO: 3415277 - RNA, 13 nt, Human
aaaggaagaaaaa

SEQ ID NO: 3415278 - RNA, 20 nt, Human
aaaggaagcauuguaaaaua

SEQ ID NO: 3415279 - RNA, 15 nt, Human
aaaggaagccaaaga

SEQ ID NO: 3415280 - RNA, 23 nt, Human
aaaggaagguaguucaagaaaug

SEQ ID NO: 3415281 - RNA, 18 nt, Human
aaaggaagugcccccucc

SEQ ID NO: 3415282 - RNA, 22 nt, Human
aaagauauaagugcuguauaaa

SEQ ID NO: 3415283 - RNA, 17 nt, Human
aaagauauauacacagg

SEQ ID NO: 3415284 - RNA, 12 nt, Human
aaagauauauua

SEQ ID NO: 3415285 - RNA, 20 nt, Human
aaagauauauuaaaaauaua

SEQ ID NO: 3415286 - RNA, 15 nt, Human
aaagauauggagaau

SEQ ID NO: 3415287 - RNA, 17 nt, Human
aaagauauuuugcuuug

SEQ ID NO: 3415288 - RNA, 16 nt, Human
aaagauauuuuuaucu

SEQ ID NO: 3415289 - RNA, 15 nt, Human
aaagaucauguaaaa

SEQ ID NO: 3415290 - RNA, 18 nt, Human
aaagaucuguccucagcc

SEQ ID NO: 3415291 - RNA, 21 nt, Human
aaagaucuguuuugaaggcaa

SEQ ID NO: 3415292 - RNA, 13 nt, Human
aaagaugaaaaua

SEQ ID NO: 3415293 - RNA, 16 nt, Human
aaagaugaaaauauuu

SEQ ID NO: 3415294 - RNA, 17 nt, Human
aaagaugaaagagcagu

SEQ ID NO: 3415295 - RNA, 21 nt, Human
aaagaugauuuaaaagggaag

SEQ ID NO: 3415296 - RNA, 13 nt, Human
aaagaugcacaga

SEQ ID NO: 3415297 - RNA, 19 nt, Human
aaagaugcacuuugcuuua

SEQ ID NO: 3415298 - RNA, 23 nt, Human
aaagaugcacuuugcuuuaauau

SEQ ID NO: 3415299 - RNA, 21 nt, Human
aaagaugcagccgccuuccuu

SEQ ID NO: 3415300 - RNA, 22 nt, Human
aaagaugcaucuaccgcucuug

SEQ ID NO: 3415301 - RNA, 22 nt, Human
aaagaugccggguuuuauauuu

SEQ ID NO: 3415302 - RNA, 19 nt, Human
aaagaugcuucucacugcc

SEQ ID NO: 3415303 - RNA, 17 nt, Human
aaagauggaguuucuaa

SEQ ID NO: 3415304 - RNA, 16 nt, Human
aaagauggaugugcuu

SEQ ID NO: 3415305 - RNA, 17 nt, Human
aaagauggggucuguaa

SEQ ID NO: 3415306 - RNA, 18 nt, Human
aaagauggggucuguaaa

SEQ ID NO: 3415307 - RNA, 23 nt, Human
aaagauggggucuguaaaaucuu

SEQ ID NO: 3415308 - RNA, 19 nt, Human
aaagaugguuaaacauuuu

SEQ ID NO: 3415309 - RNA, 12 nt, Human
aaagauguagca

SEQ ID NO: 3415310 - RNA, 20 nt, Human
aaagauguuugucagauaug

SEQ ID NO: 3415311 - RNA, 11 nt, Human
aaagauuaaac

SEQ ID NO: 3415312 - RNA, 14 nt, Human
aaagauuaaacugc

SEQ ID NO: 3415313 - RNA, 20 nt, Human
aaagauucuauaguucuaga

SEQ ID NO: 3415314 - RNA, 12 nt, Human
aaagauucuuuu

SEQ ID NO: 3415315 - RNA, 23 nt, Human
aaagauugaaguauuuugcugga

SEQ ID NO: 3415316 - RNA, 18 nt, Human
aaagauugacaccagguu

SEQ ID NO: 3415317 - RNA, 19 nt, Human
aaagauugcugaaauuuua

SEQ ID NO: 3415318 - RNA, 16 nt, Human
aaagauuguguggugu

SEQ ID NO: 3415319 - RNA, 12 nt, Human
aaagauuuauca

SEQ ID NO: 3415320 - RNA, 22 nt, Human
aaagauuuguacuacaguucuu

SEQ ID NO: 3415321 - RNA, 15 nt, Human
aaagauuuuaaucaa

SEQ ID NO: 3415322 - RNA, 18 nt, Human
aaagauuuuaaucaaguu

SEQ ID NO: 3415323 - RNA, 16 nt, Human
aaagauuuugaucuca

SEQ ID NO: 3415324 - RNA, 22 nt, Human
aaagauuuugaucucacauuuu

SEQ ID NO: 3415325 - RNA, 19 nt, Human
aaagauuuuuuaauaauuu

SEQ ID NO: 3415326 - RNA, 22 nt, Human
aaagauuuuuuaauaauuuaga

SEQ ID NO: 3415327 - RNA, 23 nt, Human
aaagauuuuuuuuuuuucucuca

SEQ ID NO: 3415328 - RNA, 15 nt, Human
aaagcaaaaaagaaa

SEQ ID NO: 3415329 - RNA, 21 nt, Human
aaagcaaaaaagaaaaccuuu

SEQ ID NO: 3415330 - RNA, 14 nt, Human
aaagcaaaaaugcu

SEQ ID NO: 3415331 - RNA, 18 nt, Human
aaagcaaaaaugcuaaua

SEQ ID NO: 3415332 - RNA, 13 nt, Human
aaagcaaaugaga

SEQ ID NO: 3415333 - RNA, 18 nt, Human
aaagcaacaucagcuuga

SEQ ID NO: 3415334 - RNA, 14 nt, Human
aaagcaagaaucag

SEQ ID NO: 3415335 - RNA, 20 nt, Human
aaagcaagcugauuaaauga

SEQ ID NO: 3415336 - RNA, 20 nt, Human
aaagcaaggaaacuauguaa

SEQ ID NO: 3415337 - RNA, 14 nt, Human
aaagcaaggaucuu

SEQ ID NO: 3415338 - RNA, 17 nt, Human
aaagcaaggaucuuuca

SEQ ID NO: 3415339 - RNA, 21 nt, Human
aaagcaauaaaauuuuuuugg

SEQ ID NO: 3415340 - RNA, 13 nt, Human
aaagcaauagaaa

SEQ ID NO: 3415341 - RNA, 12 nt, Human
aaagcaaugcau

SEQ ID NO: 3415342 - RNA, 23 nt, Human
aaagcaaugcugaugaaucacug

SEQ ID NO: 3415343 - RNA, 12 nt, Human
aaagcaauuuuc

SEQ ID NO: 3415344 - RNA, 13 nt, Human
aaagcaauuuucc

SEQ ID NO: 3415345 - RNA, 17 nt, Human
aaagcaauuuuccuuga

SEQ ID NO: 3415346 - RNA, 20 nt, Human
aaagcacacucauccccuca

SEQ ID NO: 3415347 - RNA, 15 nt, Human
aaagcacaggagaca

SEQ ID NO: 3415348 - RNA, 22 nt, Human
aaagcacaggugggcuucccag

SEQ ID NO: 3415349 - RNA, 21 nt, Human
aaagcacaguguuaaaugaaa

SEQ ID NO: 3415350 - RNA, 16 nt, Human
aaagcacaguuugaac

SEQ ID NO: 3415351 - RNA, 16 nt, Human
aaagcacauugaaaga

SEQ ID NO: 3415352 - RNA, 16 nt, Human
aaagcaccaaaauaag

SEQ ID NO: 3415353 - RNA, 23 nt, Human
aaagcaccaaaauaagaaaagau

SEQ ID NO: 3415354 - RNA, 14 nt, Human
aaagcacggacucu

SEQ ID NO: 3415355 - RNA, 15 nt, Human
aaagcacuagagaau

SEQ ID NO: 3415356 - RNA, 14 nt, Human
aaagcacugaccug

SEQ ID NO: 3415357 - RNA, 16 nt, Human
aaagcacuuggacucu

SEQ ID NO: 3415358 - RNA, 21 nt, Human
aaagcacuuggacucuugcuc

SEQ ID NO: 3415359 - RNA, 13 nt, Human
aaagcagaaaaua

SEQ ID NO: 3415360 - RNA, 14 nt, Human
aaagcagagauuuu

SEQ ID NO: 3415361 - RNA, 18 nt, Human
aaagcagcucuccccuca

SEQ ID NO: 3415362 - RNA, 22 nt, Human
aaagcaggcuugcccaguacau

SEQ ID NO: 3415363 - RNA, 18 nt, Human
aaagcagucacuuuuccu

SEQ ID NO: 3415364 - RNA, 21 nt, Human
aaagcagugcaugcugucccu

SEQ ID NO: 3415365 - RNA, 18 nt, Human
aaagcauaaaaacauuuu

SEQ ID NO: 3415366 - RNA, 21 nt, Human
aaagcauaaagcucaaaugaa

SEQ ID NO: 3415367 - RNA, 15 nt, Human
aaagcauaaaugcaa

SEQ ID NO: 3415368 - RNA, 18 nt, Human
aaagcauaaguauacagu

SEQ ID NO: 3415369 - RNA, 17 nt, Human
aaagcauagauguuuug

SEQ ID NO: 3415370 - RNA, 16 nt, Human
aaagcaucaccucagg

SEQ ID NO: 3415371 - RNA, 16 nt, Human
aaagcaucacuuggga

SEQ ID NO: 3415372 - RNA, 20 nt, Human
aaagcaucauggcuaucugu

SEQ ID NO: 3415373 - RNA, 13 nt, Human
aaagcauccaugu

SEQ ID NO: 3415374 - RNA, 12 nt, Human
aaagcaucccuc

SEQ ID NO: 3415375 - RNA, 15 nt, Human
aaagcaucuugcauu

SEQ ID NO: 3415376 - RNA, 16 nt, Human
aaagcaugaaauguga

SEQ ID NO: 3415377 - RNA, 18 nt, Human
aaagcaugaaaugugaau

SEQ ID NO: 3415378 - RNA, 18 nt, Human
aaagcauugcuguuaugu

SEQ ID NO: 3415379 - RNA, 22 nt, Human
aaagcauugcuuuuauuuugaa

SEQ ID NO: 3415380 - RNA, 15 nt, Human
aaagcauuguaaaug

SEQ ID NO: 3415381 - RNA, 19 nt, Human
aaagcauuguaaaugugcu

SEQ ID NO: 3415382 - RNA, 16 nt, Human
aaagcauuuacuuuga

SEQ ID NO: 3415383 - RNA, 12 nt, Human
aaagcauuuaua

SEQ ID NO: 3415384 - RNA, 13 nt, Human
aaagcauuugaau

SEQ ID NO: 3415385 - RNA, 17 nt, Human
aaagcauuugaaugcau

SEQ ID NO: 3415386 - RNA, 20 nt, Human
aaagcauuugaaugcauuuu

SEQ ID NO: 3415387 - RNA, 11 nt, Human
aaagcauuuuu

SEQ ID NO: 3415388 - RNA, 17 nt, Human
aaagccaaacucugcca

SEQ ID NO: 3415389 - RNA, 23 nt, Human
aaagccaacagucaaaacagaga

SEQ ID NO: 3415390 - RNA, 22 nt, Human
aaagccaaggagucacugagac

SEQ ID NO: 3415391 - RNA, 14 nt, Human
aaagccaagggcaa

SEQ ID NO: 3415392 - RNA, 23 nt, Human
aaagccaaguuuauauacaauua

SEQ ID NO: 3415393 - RNA, 19 nt, Human
aaagccacaaccacauaca

SEQ ID NO: 3415394 - RNA, 18 nt, Human
aaagccacauuauuucua

SEQ ID NO: 3415395 - RNA, 21 nt, Human
aaagccacauuauuucuaguc

SEQ ID NO: 3415396 - RNA, 17 nt, Human
aaagccaccucucccuc

SEQ ID NO: 3415397 - RNA, 16 nt, Human
aaagccacuagacucu

SEQ ID NO: 3415398 - RNA, 16 nt, Human
aaagccagggcuggag

SEQ ID NO: 3415399 - RNA, 14 nt, Human
aaagccagggucuc

SEQ ID NO: 3415400 - RNA, 15 nt, Human
aaagccaggucccuc

SEQ ID NO: 3415401 - RNA, 19 nt, Human
aaagccaggucccucucau

SEQ ID NO: 3415402 - RNA, 17 nt, Human
aaagccaucauguaaau

SEQ ID NO: 3415403 - RNA, 20 nt, Human
aaagccaucauguaaauuac

SEQ ID NO: 3415404 - RNA, 16 nt, Human
aaagccauguuuauua

SEQ ID NO: 3415405 - RNA, 23 nt, Human
aaagccauguuuauuacaguaua

SEQ ID NO: 3415406 - RNA, 16 nt, Human
aaagccauuuuaggcu

SEQ ID NO: 3415407 - RNA, 15 nt, Human
aaagcccaaaguggu

SEQ ID NO: 3415408 - RNA, 15 nt, Human
aaagcccaggagccc

SEQ ID NO: 3415409 - RNA, 17 nt, Human
aaagcccauucauucca

SEQ ID NO: 3415410 - RNA, 17 nt, Human
aaagccccaugcuggag

SEQ ID NO: 3415411 - RNA, 19 nt, Human
aaagccccaugcuggagcc

SEQ ID NO: 3415412 - RNA, 21 nt, Human
aaagccccaugcuggagccug

SEQ ID NO: 3415413 - RNA, 16 nt, Human
aaauaucugaacauuu

SEQ ID NO: 3415414 - RNA, 13 nt, Human
aaauaucuuuuau

SEQ ID NO: 3415415 - RNA, 14 nt, Human
aaauaucuuuuaug

SEQ ID NO: 3415416 - RNA, 20 nt, Human
aaauaucuuuuauguuugaa

SEQ ID NO: 3415417 - RNA, 23 nt, Human
aaauaucuuuuauguuugaauau

SEQ ID NO: 3415418 - RNA, 17 nt, Human
aaauaucuuuugaccug

SEQ ID NO: 3415419 - RNA, 23 nt, Human
aaauaugaaacauuuaaaauaua

SEQ ID NO: 3415420 - RNA, 18 nt, Human
aaauaugaacccuuuguu

SEQ ID NO: 3415421 - RNA, 19 nt, Human
aaauaugaacccuuuguuu

SEQ ID NO: 3415422 - RNA, 21 nt, Human
aaauaugauguuaaaaaaaua

SEQ ID NO: 3415423 - RNA, 19 nt, Human
aaauaugauuuuauuugac

SEQ ID NO: 3415424 - RNA, 10 nt, Human
aaauaugcaa

SEQ ID NO: 3415425 - RNA, 13 nt, Human
aaauaugcaaagc

SEQ ID NO: 3415426 - RNA, 12 nt, Human
aaauaugcaucu

SEQ ID NO: 3415427 - RNA, 12 nt, Human
aaaucaacuuuu

SEQ ID NO: 3415428 - RNA, 23 nt, Human
aaaucaacuuuuuauugccuucu

SEQ ID NO: 3415429 - RNA, 23 nt, Human
aaaucaaguauuugggaagugaa

SEQ ID NO: 3415430 - RNA, 17 nt, Human
aaaucaauacacuaguu

SEQ ID NO: 3415431 - RNA, 19 nt, Human
aaaucaaugcuauaacuau

SEQ ID NO: 3415432 - RNA, 13 nt, Human
aaaucaaugucac

SEQ ID NO: 3415433 - RNA, 16 nt, Human
aaaucacaauuuuuaa

SEQ ID NO: 3415434 - RNA, 19 nt, Human
aaaucacauauuuuaaaau

SEQ ID NO: 3415435 - RNA, 12 nt, Human
aaaucacauccu

SEQ ID NO: 3415436 - RNA, 20 nt, Human
aaaucaccacaaacuguaau

SEQ ID NO: 3415437 - RNA, 22 nt, Human
aaaucaccacaccaaaccucuc

SEQ ID NO: 3415438 - RNA, 22 nt, Human
aaaucagagacaaaauauuucc

SEQ ID NO: 3415439 - RNA, 21 nt, Human
aaaucagccaauuauguuaaa

SEQ ID NO: 3415440 - RNA, 23 nt, Human
aaaucagccaauuauguuaaacu

SEQ ID NO: 3415441 - RNA, 19 nt, Human
aaaucagccugcuccagcu

SEQ ID NO: 3415442 - RNA, 14 nt, Human
aaaucauaaaguca

SEQ ID NO: 3415443 - RNA, 22 nt, Human
aaaucauaggaaaguauuuuuu

SEQ ID NO: 3415444 - RNA, 23 nt, Human
aaaucauaggcaccuuuuacugu

SEQ ID NO: 3415445 - RNA, 19 nt, Human
aaaucauauuuggaauaaa

SEQ ID NO: 3415446 - RNA, 12 nt, Human
aaaucaucaaga

SEQ ID NO: 3415447 - RNA, 13 nt, Human
aaaucaucuauuu

SEQ ID NO: 3415448 - RNA, 14 nt, Human
aaaucaucuauuuu

SEQ ID NO: 3415449 - RNA, 17 nt, Human
aaaucauguacauuucu

SEQ ID NO: 3415450 - RNA, 13 nt, Human
aaaucauguuaug

SEQ ID NO: 3415451 - RNA, 18 nt, Human
aaaucauguuaugauaaa

SEQ ID NO: 3415452 - RNA, 19 nt, Human
aaaucauuaauacucuucu

SEQ ID NO: 3415453 - RNA, 21 nt, Human
aaaucauucuuacuaaaaagu

SEQ ID NO: 3415454 - RNA, 11 nt, Human
aaaucauuucu

SEQ ID NO: 3415455 - RNA, 19 nt, Human
aaaucauuucugcaucagc

SEQ ID NO: 3415456 - RNA, 12 nt, Human
aaaucauuuggg

SEQ ID NO: 3415457 - RNA, 17 nt, Human
aaaucauuuuaugucaa

SEQ ID NO: 3415458 - RNA, 18 nt, Human
aaauccaaauauuguuaa

SEQ ID NO: 3415459 - RNA, 22 nt, Human
aaauccagaaacuuguucuucc

SEQ ID NO: 3415460 - RNA, 11 nt, Human
aaauccaggac

SEQ ID NO: 3415461 - RNA, 14 nt, Human
aaauccauuuggaa

SEQ ID NO: 3415462 - RNA, 15 nt, Human
aaauccauuuggaaa

SEQ ID NO: 3415463 - RNA, 16 nt, Human
aaaucccauuauucaa

SEQ ID NO: 3415464 - RNA, 19 nt, Human
aaaucccauuauucaaagu

SEQ ID NO: 3415465 - RNA, 14 nt, Human
aaaucccuggauca

SEQ ID NO: 3415466 - RNA, 21 nt, Human
aaauccgaaccuccucuguga

SEQ ID NO: 3415467 - RNA, 18 nt, Human
aaauccgcucucuuccug

SEQ ID NO: 3415468 - RNA, 16 nt, Human
aaauccggagaagcug

SEQ ID NO: 3415469 - RNA, 19 nt, Human
aaauccuaccaaccucuga

SEQ ID NO: 3415470 - RNA, 16 nt, Human
aaauccuaugugauuu

SEQ ID NO: 3415471 - RNA, 17 nt, Human
aaauccuguugaaaagc

SEQ ID NO: 3415472 - RNA, 21 nt, Human
aaauccuguugaaaagccaug

SEQ ID NO: 3415473 - RNA, 16 nt, Human
aaauccuuccaugaaa

SEQ ID NO: 3415474 - RNA, 15 nt, Human
aaauccuucccaagu

SEQ ID NO: 3415475 - RNA, 14 nt, Human
aaauccuucuaauc

SEQ ID NO: 3415476 - RNA, 14 nt, Human
aaauccuugaagau

SEQ ID NO: 3415477 - RNA, 16 nt, Human
aaauccuuuacuguua

SEQ ID NO: 3415478 - RNA, 20 nt, Human
aaaucgaaugaaauuaacug

SEQ ID NO: 3415479 - RNA, 13 nt, Human
aaaucgcuuuuga

SEQ ID NO: 3415480 - RNA, 14 nt, Human
aaaucgcuuuugau

SEQ ID NO: 3415481 - RNA, 21 nt, Human
aaaucuaagcagcuuauuguu

SEQ ID NO: 3415482 - RNA, 19 nt, Human
aaaucuaauauuaaaaaua

SEQ ID NO: 3415483 - RNA, 15 nt, Human
aaaucuaccuucugu

SEQ ID NO: 3415484 - RNA, 17 nt, Human
aaaucuaccuucuguag

SEQ ID NO: 3415485 - RNA, 18 nt, Human
aaaucuaccuucuguagu

SEQ ID NO: 3415486 - RNA, 16 nt, Human
aaaucuaggaaaauau

SEQ ID NO: 3415487 - RNA, 22 nt, Human
aaaucuaggaaaauuauucuau

SEQ ID NO: 3415488 - RNA, 22 nt, Human
aaaucuaguauuucaugcuggg

SEQ ID NO: 3415489 - RNA, 14 nt, Human
aaaucuauagaaag

SEQ ID NO: 3415490 - RNA, 22 nt, Human
aaaucuauagaaaguguucugu

SEQ ID NO: 3415491 - RNA, 16 nt, Human
aaaucuaugauuccag

SEQ ID NO: 3415492 - RNA, 13 nt, Human
aaaucuaugccac

SEQ ID NO: 3415493 - RNA, 13 nt, Human
aaaucuauucaga

SEQ ID NO: 3415494 - RNA, 19 nt, Human
aaaucuauucagacaagca

SEQ ID NO: 3415495 - RNA, 19 nt, Human
aaaucucaaauuucuaaau

SEQ ID NO: 3415496 - RNA, 23 nt, Human
aaaucucaaauuuggauugcuaa

SEQ ID NO: 3415497 - RNA, 16 nt, Human
aaaucucaauucuucc

SEQ ID NO: 3415498 - RNA, 15 nt, Human
aaaucucagcaauga

SEQ ID NO: 3415499 - RNA, 11 nt, Human
aaaucucauac

SEQ ID NO: 3415500 - RNA, 23 nt, Human
aaaucucauacucccccacaguu

SEQ ID NO: 3415501 - RNA, 19 nt, Human
aaaucuccaaaauaaaacu

SEQ ID NO: 3415502 - RNA, 22 nt, Human
aaaucuccaaaauaaaacuuuu

SEQ ID NO: 3415503 - RNA, 18 nt, Human
aaaucucccauuuuggaa

SEQ ID NO: 3415504 - RNA, 21 nt, Human
aaaucucccauuuuggaauuu

SEQ ID NO: 3415505 - RNA, 14 nt, Human
aaaucuccuauuuu

SEQ ID NO: 3415506 - RNA, 13 nt, Human
aaaucucuccacu

SEQ ID NO: 3415507 - RNA, 19 nt, Human
aaaucucuccacuuucagc

SEQ ID NO: 3415508 - RNA, 21 nt, Human
aaaucucucucuguuguguuc

SEQ ID NO: 3415509 - RNA, 13 nt, Human
aaaucucuucugu

SEQ ID NO: 3415510 - RNA, 11 nt, Human
aaaucugaaga

SEQ ID NO: 3415511 - RNA, 13 nt, Human
aaaucugaagacc

SEQ ID NO: 3415512 - RNA, 15 nt, Human
aaaucugaagauugc

SEQ ID NO: 3415513 - RNA, 17 nt, Human
aaaucugaagauuguuu

SEQ ID NO: 3415514 - RNA, 20 nt, Human
aaaucugaagauuguuuauc

SEQ ID NO: 3415515 - RNA, 17 nt, Human
aaaucugaccaaaacaa

SEQ ID NO: 3415516 - RNA, 18 nt, Human
aaaucugacccagugccc

SEQ ID NO: 3415517 - RNA, 20 nt, Human
aaaucugagggaaauguuuu

SEQ ID NO: 3415518 - RNA, 13 nt, Human
aaaucugcagagg

SEQ ID NO: 3415519 - RNA, 11 nt, Human
aaaucugccac

SEQ ID NO: 3415520 - RNA, 13 nt, Human
aaaucugccuggg

SEQ ID NO: 3415521 - RNA, 20 nt, Human
aaaucugcuggaguuucaug

SEQ ID NO: 3415522 - RNA, 18 nt, Human
aaaucugcuuuuuaaaga

SEQ ID NO: 3415523 - RNA, 12 nt, Human
aaaucuggaagc

SEQ ID NO: 3415524 - RNA, 19 nt, Human
aaaucuguaacagguauuu

SEQ ID NO: 3415525 - RNA, 22 nt, Human
aaaucuguaacagguauuuugu

SEQ ID NO: 3415526 - RNA, 23 nt, Human
aaaucuguaacagguauuuuguu

SEQ ID NO: 3415527 - RNA, 17 nt, Human
aaaucuguaagcucuuu

SEQ ID NO: 3415528 - RNA, 19 nt, Human
aaaucuguaagcucuuuga

SEQ ID NO: 3415529 - RNA, 20 nt, Human
aaaucugucaagaguaguua

SEQ ID NO: 3415530 - RNA, 14 nt, Human
aaaucugucugcug

SEQ ID NO: 3415531 - RNA, 20 nt, Human
aaaucugugaacuugaaauu

SEQ ID NO: 3415532 - RNA, 20 nt, Human
aaaucuguguauauuauuug

SEQ ID NO: 3415533 - RNA, 15 nt, Human
aaaucuguucuaaca

SEQ ID NO: 3415534 - RNA, 12 nt, Human
aaaucuuaagaa

SEQ ID NO: 3415535 - RNA, 14 nt, Human
aaaucuuaagaaau

SEQ ID NO: 3415536 - RNA, 16 nt, Human
aaaucuuaagaaauaa

SEQ ID NO: 3415537 - RNA, 19 nt, Human
aaaucuuaauacuguuauu

SEQ ID NO: 3415538 - RNA, 13 nt, Human
aaaucuuacaaca

SEQ ID NO: 3415539 - RNA, 17 nt, Human
aaaucuuauaguucuag

SEQ ID NO: 3415540 - RNA, 20 nt, Human
aaaucuuauaguucuaggca

SEQ ID NO: 3415541 - RNA, 12 nt, Human
aaaucuuauuaa

SEQ ID NO: 3415542 - RNA, 21 nt, Human
aaaucuuauuaaaguuucaaa

SEQ ID NO: 3415543 - RNA, 16 nt, Human
aaaucuucauggaauu

SEQ ID NO: 3415544 - RNA, 20 nt, Human
aaaucuucauggaauucaca

SEQ ID NO: 3415545 - RNA, 14 nt, Human
aaaucuuccaauuu

SEQ ID NO: 3415546 - RNA, 23 nt, Human
aaaucuuccuggucgaaaguuag

SEQ ID NO: 3415547 - RNA, 15 nt, Human
aaaucuucuccagau

SEQ ID NO: 3415548 - RNA, 13 nt, Human
aaaucuugaaauu

SEQ ID NO: 3415549 - RNA, 13 nt, Human
aaaucuuggaagu

SEQ ID NO: 3415550 - RNA, 22 nt, Human
aaaucuugguugaugccaaaaa

SEQ ID NO: 3415551 - RNA, 11 nt, Human
aaaucuuuuac

SEQ ID NO: 3415552 - RNA, 14 nt, Human
aaaucuuuucuauu

SEQ ID NO: 3415553 - RNA, 14 nt, Human
aaaucuuuuugcuu

SEQ ID NO: 3415554 - RNA, 13 nt, Human
aaaucuuuuuugu

SEQ ID NO: 3415555 - RNA, 14 nt, Human
aaaugaaaaaauau

SEQ ID NO: 3415556 - RNA, 21 nt, Human
aaaugaaaacaguguguaaac

SEQ ID NO: 3415557 - RNA, 11 nt, Human
aaaugaaaaua

SEQ ID NO: 3415558 - RNA, 15 nt, Human
aaaugaaaaugucuu

SEQ ID NO: 3415559 - RNA, 16 nt, Human
aaaugaaaaugucuug

SEQ ID NO: 3415560 - RNA, 14 nt, Human
aaaugaaagaaaau

SEQ ID NO: 3415561 - RNA, 15 nt, Human
aaaugaaagaaaauu

SEQ ID NO: 3415562 - RNA, 21 nt, Human
aaaugaaagcagggacuugaa

SEQ ID NO: 3415563 - RNA, 22 nt, Human
aaaugaaagcagggacuugaac

SEQ ID NO: 3415564 - RNA, 18 nt, Human
aaaugaaagcaugucuca

SEQ ID NO: 3415565 - RNA, 14 nt, Human
aaaugaaagcuacu

SEQ ID NO: 3415566 - RNA, 12 nt, Human
aaaugaaauguu

SEQ ID NO: 3415567 - RNA, 22 nt, Human
aaaugaaauuacuacaaaauuu

SEQ ID NO: 3415568 - RNA, 15 nt, Human
aaaugaaauuguaaa

SEQ ID NO: 3415569 - RNA, 22 nt, Human
aaagcccccagagcccaggcuc

SEQ ID NO: 3415570 - RNA, 22 nt, Human
aaagcccuuccaugucgccucu

SEQ ID NO: 3415571 - RNA, 23 nt, Human
aaagccguuguuuacuuaaagau

SEQ ID NO: 3415572 - RNA, 16 nt, Human
aaaggguguuuuucug

SEQ ID NO: 3415573 - RNA, 16 nt, Human
aaagguauaauuuuau

SEQ ID NO: 3415574 - RNA, 19 nt, Human
aaaucuauagaaaguguuc

SEQ ID NO: 3415575 - RNA, 20 nt, Human
aaaucuaugccacucagaau

SEQ ID NO: 3415576 - RNA, 15 nt, Human
aaaucuauucugugu

SEQ ID NO: 3415577 - RNA, 22 nt, Human
aaaucuauuuauuaauauuuaa

SEQ ID NO: 3415578 - RNA, 15 nt, Human
aaaucucaaauuucu

SEQ ID NO: 3415579 - RNA, 16 nt, Human
aaaucucaaauuucua

SEQ ID NO: 3415580 - RNA, 18 nt, Human
aaaucucaauauuucaga

SEQ ID NO: 3415581 - RNA, 16 nt, Human
aaaucucccauuuugg

SEQ ID NO: 3415582 - RNA, 20 nt, Human
aaaucucccauuuuggaauu

SEQ ID NO: 3415583 - RNA, 13 nt, Human
aaaucuccuauuu

SEQ ID NO: 3415584 - RNA, 15 nt, Human
aaaucuccuauuuuu

SEQ ID NO: 3415585 - RNA, 12 nt, Human
aaaucucuaaua

SEQ ID NO: 3415586 - RNA, 13 nt, Human
aaaucucuaauau

SEQ ID NO: 3415587 - RNA, 22 nt, Human
aaaucucuacaaauuuuucugu

SEQ ID NO: 3415588 - RNA, 20 nt, Human
aaaucucuccacuuucagcu

SEQ ID NO: 3415589 - RNA, 21 nt, Human
aaaucucuccacuuucagcug

SEQ ID NO: 3415590 - RNA, 13 nt, Human
aaaucugaacauu

SEQ ID NO: 3415591 - RNA, 18 nt, Human
aaaucugaagauuguuua

SEQ ID NO: 3415592 - RNA, 23 nt, Human
aaaucugaagauuguuuaucuag

SEQ ID NO: 3415593 - RNA, 20 nt, Human
aaaucugacccagugccccc

SEQ ID NO: 3415594 - RNA, 23 nt, Human
aaaucugcagaaggaaaaaugug

SEQ ID NO: 3415595 - RNA, 15 nt, Human
aaaucugcuguuaac

SEQ ID NO: 3415596 - RNA, 18 nt, Human
aaaucuggcuucuggcca

SEQ ID NO: 3415597 - RNA, 20 nt, Human
aaaucuggucuuguuagaaa

SEQ ID NO: 3415598 - RNA, 15 nt, Human
aaaucugugaacuug

SEQ ID NO: 3415599 - RNA, 21 nt, Human
aaaucugugaacuugaaauuu

SEQ ID NO: 3415600 - RNA, 12 nt, Human
aaaucuguguau

SEQ ID NO: 3415601 - RNA, 22 nt, Human
aaaucuguguauauuauuuggc

SEQ ID NO: 3415602 - RNA, 20 nt, Human
aaaucuguucugggcucuuu

SEQ ID NO: 3415603 - RNA, 18 nt, Human
aaaucuguuugaucccug

SEQ ID NO: 3415604 - RNA, 14 nt, Human
aaaucuuaaaaagu

SEQ ID NO: 3415605 - RNA, 14 nt, Human
aaaucuuaacuuga

SEQ ID NO: 3415606 - RNA, 13 nt, Human
aaaucuuaagaaa

SEQ ID NO: 3415607 - RNA, 13 nt, Human
aaaucuuaauguu

SEQ ID NO: 3415608 - RNA, 23 nt, Human
aaaucuuaauguuccucaaagcu

SEQ ID NO: 3415609 - RNA, 16 nt, Human
aaaucuuauaguucua

SEQ ID NO: 3415610 - RNA, 18 nt, Human
aaaucuuauaguucuagg

SEQ ID NO: 3415611 - RNA, 19 nt, Human
aaaucuuauaguucuaggc

SEQ ID NO: 3415612 - RNA, 19 nt, Human
aaaucuuauauuccauaua

SEQ ID NO: 3415613 - RNA, 21 nt, Human
aaaucuuauauuccauauauu

SEQ ID NO: 3415614 - RNA, 19 nt, Human
aaaucuuauuaaaguuuca

SEQ ID NO: 3415615 - RNA, 22 nt, Human
aaaucuuauuaaaguuucaaaa

SEQ ID NO: 3415616 - RNA, 22 nt, Human
aaaucuucauggaauucacaaa

SEQ ID NO: 3415617 - RNA, 13 nt, Human
aaaucuucccaug

SEQ ID NO: 3415618 - RNA, 23 nt, Human
aaaucuuggaaguacaugaauac

SEQ ID NO: 3415619 - RNA, 20 nt, Human
aaaucuugguugaugccaaa

SEQ ID NO: 3415620 - RNA, 18 nt, Human
aaaucuugucauguguau

SEQ ID NO: 3415621 - RNA, 19 nt, Human
aaaucuugucauguguaua

SEQ ID NO: 3415622 - RNA, 21 nt, Human
aaaucuugucauguguauaaa

SEQ ID NO: 3415623 - RNA, 20 nt, Human
aaaucuugugcuagaauacu

SEQ ID NO: 3415624 - RNA, 23 nt, Human
aaaucuuucuuucuuagaaauuu

SEQ ID NO: 3415625 - RNA, 22 nt, Human
aaaucuuuuaaaaauucaaaug

SEQ ID NO: 3415626 - RNA, 17 nt, Human
aaaucuuuugaagcaua

SEQ ID NO: 3415627 - RNA, 20 nt, Human
aaaugaaaaacaaccaagcg

SEQ ID NO: 3415628 - RNA, 17 nt, Human
aaaugaaaaugucuugu

SEQ ID NO: 3415629 - RNA, 11 nt, Human
aaaugaaaauu

SEQ ID NO: 3415630 - RNA, 12 nt, Human
aaaugaaaauug

SEQ ID NO: 3415631 - RNA, 14 nt, Human
aaaugaaaauugua

SEQ ID NO: 3415632 - RNA, 14 nt, Human
aaaugaaagaugau

SEQ ID NO: 3415633 - RNA, 15 nt, Human
aaaugaaagaugauu

SEQ ID NO: 3415634 - RNA, 13 nt, Human
aaaugaaagcuac

SEQ ID NO: 3415635 - RNA, 21 nt, Human
aaaugaaauauauuuaaaaua

SEQ ID NO: 3415636 - RNA, 13 nt, Human
aaaugaaauauuu

SEQ ID NO: 3415637 - RNA, 12 nt, Human
aaaugaaaugca

SEQ ID NO: 3415638 - RNA, 15 nt, Human
aaaugaaauguaugc

SEQ ID NO: 3415639 - RNA, 14 nt, Human
aaaugaaauguuuu

SEQ ID NO: 3415640 - RNA, 21 nt, Human
aaaugaaauguuuuaaggcuu

SEQ ID NO: 3415641 - RNA, 11 nt, Human
aaaugaaauuu

SEQ ID NO: 3415642 - RNA, 15 nt, Human
aaaugaaauuuaaac

SEQ ID NO: 3415643 - RNA, 16 nt, Human
aaaugaaauuuaaaca

SEQ ID NO: 3415644 - RNA, 14 nt, Human
aaaugaaauuuuac

SEQ ID NO: 3415645 - RNA, 21 nt, Human
aaaugaacaagagaagcauuc

SEQ ID NO: 3415646 - RNA, 15 nt, Human
aaaugaacacaaauu

SEQ ID NO: 3415647 - RNA, 18 nt, Human
aaaugaacaucagaauuu

SEQ ID NO: 3415648 - RNA, 23 nt, Human
aaaugaacgauauguagcagaaa

SEQ ID NO: 3415649 - RNA, 18 nt, Human
aaaugaagaauuuaaaga

SEQ ID NO: 3415650 - RNA, 19 nt, Human
aaaugaagguuaggauuua

SEQ ID NO: 3415651 - RNA, 20 nt, Human
aaaugaagugcaaauuugau

SEQ ID NO: 3415652 - RNA, 16 nt, Human
aaaugaauggcucacu

SEQ ID NO: 3415653 - RNA, 20 nt, Human
aaaugacacucauauaauua

SEQ ID NO: 3415654 - RNA, 15 nt, Human
aaaugacaucuuuuu

SEQ ID NO: 3415655 - RNA, 21 nt, Human
aaaugaccaguaauugugaaa

SEQ ID NO: 3415656 - RNA, 17 nt, Human
aaaugacuacuuagcau

SEQ ID NO: 3415657 - RNA, 13 nt, Human
aaaugagaaaucu

SEQ ID NO: 3415658 - RNA, 14 nt, Human
aaaugagaacaugu

SEQ ID NO: 3415659 - RNA, 15 nt, Human
aaaugagaucaggcu

SEQ ID NO: 3415660 - RNA, 23 nt, Human
aaaugagcucgcauuugucaaug

SEQ ID NO: 3415661 - RNA, 18 nt, Human
aaaugaggauuauugaua

SEQ ID NO: 3415662 - RNA, 23 nt, Human
aaaugagguacucuccuggaaau

SEQ ID NO: 3415663 - RNA, 19 nt, Human
aaaugaggucagagccugc

SEQ ID NO: 3415664 - RNA, 16 nt, Human
aaaugaggucuguuua

SEQ ID NO: 3415665 - RNA, 12 nt, Human
aaaugaguaaca

SEQ ID NO: 3415666 - RNA, 18 nt, Human
aaaugaguguguuuguca

SEQ ID NO: 3415667 - RNA, 19 nt, Human
aaaugauauuaaaaauugg

SEQ ID NO: 3415668 - RNA, 20 nt, Human
aaaugauauuaaaaauuggc

SEQ ID NO: 3415669 - RNA, 16 nt, Human
aaaugaucaguuuuuu

SEQ ID NO: 3415670 - RNA, 22 nt, Human
aaaugauccccaagugugaaca

SEQ ID NO: 3415671 - RNA, 22 nt, Human
aaaugaugauguggaagaacuu

SEQ ID NO: 3415672 - RNA, 23 nt, Human
aaaugauguucauuuagauugaa

SEQ ID NO: 3415673 - RNA, 21 nt, Human
aaaugauuuguaguggaaaca

SEQ ID NO: 3415674 - RNA, 23 nt, Human
aaaugauuuuuacaaguuuuaaa

SEQ ID NO: 3415675 - RNA, 20 nt, Human
aaaugcaaaaaaucuuaaua

SEQ ID NO: 3415676 - RNA, 16 nt, Human
aaaugcaaaaaucucu

SEQ ID NO: 3415677 - RNA, 17 nt, Human
aaaugcaaacacacaaa

SEQ ID NO: 3415678 - RNA, 21 nt, Human
aaaugcaaacacacaaaggua

SEQ ID NO: 3415679 - RNA, 22 nt, Human
aaaugcaaacugggcuggaaga

SEQ ID NO: 3415680 - RNA, 15 nt, Human
aaaugcaaaguucug

SEQ ID NO: 3415681 - RNA, 19 nt, Human
aaaugcaaaguucuguguu

SEQ ID NO: 3415682 - RNA, 21 nt, Human
aaaugcaaauccuaugugauu

SEQ ID NO: 3415683 - RNA, 14 nt, Human
aaaugcaagauuuu

SEQ ID NO: 3415684 - RNA, 13 nt, Human
aaaugcaauaugu

SEQ ID NO: 3415685 - RNA, 16 nt, Human
aaaugcaauauguauu

SEQ ID NO: 3415686 - RNA, 12 nt, Human
aaaugcacaaug

SEQ ID NO: 3415687 - RNA, 19 nt, Human
aaaugcacauagcuaucaa

SEQ ID NO: 3415688 - RNA, 20 nt, Human
aaaugcacccaacuagcucu

SEQ ID NO: 3415689 - RNA, 14 nt, Human
aaaugcaccuggaa

SEQ ID NO: 3415690 - RNA, 12 nt, Human
aaaugcagccca

SEQ ID NO: 3415691 - RNA, 14 nt, Human
aaaugcaguauauu

SEQ ID NO: 3415692 - RNA, 17 nt, Human
aaaugcaguuacaaauu

SEQ ID NO: 3415693 - RNA, 19 nt, Human
aaaugcauauccugagcca

SEQ ID NO: 3415694 - RNA, 21 nt, Human
aaaugcaucaauccugugugg

SEQ ID NO: 3415695 - RNA, 16 nt, Human
aaaugcauccauuccu

SEQ ID NO: 3415696 - RNA, 23 nt, Human
aaaugcauccauuccucagggac

SEQ ID NO: 3415697 - RNA, 15 nt, Human
aaaugcaucuuugau

SEQ ID NO: 3415698 - RNA, 14 nt, Human
aaaugcaugauuuu

SEQ ID NO: 3415699 - RNA, 18 nt, Human
aaaugcaugauuuuguaa

SEQ ID NO: 3415700 - RNA, 13 nt, Human
aaaugcauuguau

SEQ ID NO: 3415701 - RNA, 20 nt, Human
aaaugccauaauacaaaagg

SEQ ID NO: 3415702 - RNA, 23 nt, Human
aaaugccauaauacaaaaggcuc

SEQ ID NO: 3415703 - RNA, 22 nt, Human
aaaugccaugaugccucugucu

SEQ ID NO: 3415704 - RNA, 22 nt, Human
aaaugccauuuauuuauugauu

SEQ ID NO: 3415705 - RNA, 13 nt, Human
aaaugcccagccc

SEQ ID NO: 3415706 - RNA, 14 nt, Human
aaaugcccagcccc

SEQ ID NO: 3415707 - RNA, 22 nt, Human
aaaugcccuuacacuuacuguu

SEQ ID NO: 3415708 - RNA, 15 nt, Human
aaaugccuaagaaga

SEQ ID NO: 3415709 - RNA, 16 nt, Human
aaaugccuaagaagau

SEQ ID NO: 3415710 - RNA, 15 nt, Human
aaaugccuuacuuug

SEQ ID NO: 3415711 - RNA, 16 nt, Human
aaaugccuuacuuugu

SEQ ID NO: 3415712 - RNA, 23 nt, Human
aaaugccuuagaaauguaaacug

SEQ ID NO: 3415713 - RNA, 15 nt, Human
aaaugccuuuguacu

SEQ ID NO: 3415714 - RNA, 16 nt, Human
aaaugccuuuucccaa

SEQ ID NO: 3415715 - RNA, 18 nt, Human
aaaugcuaauauuaaaag

SEQ ID NO: 3415716 - RNA, 15 nt, Human
aaauguugaauaaaa

SEQ ID NO: 3415717 - RNA, 23 nt, Human
aaauguugaauaaaaauauguac

SEQ ID NO: 3415718 - RNA, 20 nt, Human
aaauguugacauaccuuuua

SEQ ID NO: 3415719 - RNA, 23 nt, Human
aaauguugacaugggacauuugc

SEQ ID NO: 3415720 - RNA, 19 nt, Human
aaauguugagaaucccaaa

SEQ ID NO: 3415721 - RNA, 11 nt, Human
aaauguugcug

SEQ ID NO: 3415722 - RNA, 20 nt, Human
aaauguuggauuuauaaaug

SEQ ID NO: 3415723 - RNA, 15 nt, Human
aaauguuuauuuaaa

SEQ ID NO: 3415724 - RNA, 15 nt, Human
aaauguuucugcagu

SEQ ID NO: 3415725 - RNA, 19 nt, Human
aaauguuucuuuuguuugg

SEQ ID NO: 3415726 - RNA, 23 nt, Human
aaauguuuuaaggcuucaauuua

SEQ ID NO: 3415727 - RNA, 14 nt, Human
aaauguuuuauaag

SEQ ID NO: 3415728 - RNA, 22 nt, Human
aaauguuuucauauuuuucaaa

SEQ ID NO: 3415729 - RNA, 11 nt, Human
aaauguuuugc

SEQ ID NO: 3415730 - RNA, 19 nt, Human
aaauguuuuguaagaaacc

SEQ ID NO: 3415731 - RNA, 17 nt, Human
aaauguuuuucuaugua

SEQ ID NO: 3415732 - RNA, 20 nt, Human
aaagguauuuuaaucaccaa

SEQ ID NO: 3415733 - RNA, 18 nt, Human
aaagguauuuugaauacc

SEQ ID NO: 3415734 - RNA, 24 nt, Human
aaaggucaccucacucagcaccac

SEQ ID NO: 3415735 - RNA, 21 nt, Human
aaagguccacaggucuagacu

SEQ ID NO: 3415736 - RNA, 14 nt, Human
aaaggugaaggaau

SEQ ID NO: 3415737 - RNA, 22 nt, Human
aaaggugaccuugcaacuucau

SEQ ID NO: 3415738 - RNA, 19 nt, Human
aaagguggacuggaagggg

SEQ ID NO: 3415739 - RNA, 21 nt, Human
aaagguggccacaaauucuuu

SEQ ID NO: 3415740 - RNA, 17 nt, Human
aaaggugguaugugugu

SEQ ID NO: 3415741 - RNA, 19 nt, Human
aaaggugguaugugugugu

SEQ ID NO: 3415742 - RNA, 15 nt, Human
aaagguguauuuaaa

SEQ ID NO: 3415743 - RNA, 17 nt, Human
aaaggugugagacuggg

SEQ ID NO: 3415744 - RNA, 19 nt, Human
aaagguuagagaauaaauu

SEQ ID NO: 3415745 - RNA, 18 nt, Human
aaagguuauuuucuccug

SEQ ID NO: 3415746 - RNA, 18 nt, Human
aaagguucaugcaaacuu

SEQ ID NO: 3415747 - RNA, 15 nt, Human
aaagguucuucaucc

SEQ ID NO: 3415748 - RNA, 21 nt, Human
aaagguucuucaucccuuucc

SEQ ID NO: 3415749 - RNA, 22 nt, Human
aaagguucuucaucccuuucca

SEQ ID NO: 3415750 - RNA, 16 nt, Human
aaagguuuaaaugaac

SEQ ID NO: 3415751 - RNA, 20 nt, Human
aaagguuuaaaugaacaaga

SEQ ID NO: 3415752 - RNA, 22 nt, Human
aaagguuuaaaugaacaagaga

SEQ ID NO: 3415753 - RNA, 20 nt, Human
aaagguuuaagaaauagaau

SEQ ID NO: 3415754 - RNA, 21 nt, Human
aaagguuuauuuuucuguuac

SEQ ID NO: 3415755 - RNA, 18 nt, Human
aaagguuuuuuuucaguu

SEQ ID NO: 3415756 - RNA, 21 nt, Human
aaaguaaaaacaaagaaauua

SEQ ID NO: 3415757 - RNA, 14 nt, Human
aaaguaaaaugucu

SEQ ID NO: 3415758 - RNA, 12 nt, Human
aaaguaaagcua

SEQ ID NO: 3415759 - RNA, 14 nt, Human
aaaguaacucauuu

SEQ ID NO: 3415760 - RNA, 19 nt, Human
aaaguaaguaccacucagg

SEQ ID NO: 3415761 - RNA, 22 nt, Human
aaaguaauuucuucucaaaggg

SEQ ID NO: 3415762 - RNA, 14 nt, Human
aaaguaauuuggaa

SEQ ID NO: 3415763 - RNA, 16 nt, Human
aaaguacaauguguuu

SEQ ID NO: 3415764 - RNA, 18 nt, Human
aaaguacacuguuucaaa

SEQ ID NO: 3415765 - RNA, 20 nt, Human
aaaguacacuguuucaaacu

SEQ ID NO: 3415766 - RNA, 18 nt, Human
aaaguacagguacuuugu

SEQ ID NO: 3415767 - RNA, 17 nt, Human
aaaguacauauuuauuu

SEQ ID NO: 3415768 - RNA, 13 nt, Human
aaaguacauuuaa

SEQ ID NO: 3415769 - RNA, 15 nt, Human
aaaguacauuuaaua

SEQ ID NO: 3415770 - RNA, 21 nt, Human
aaaguacugagcagugauauu

SEQ ID NO: 3415771 - RNA, 20 nt, Human
aaaguacuucuccacccugc

SEQ ID NO: 3415772 - RNA, 18 nt, Human
aaaguacuugaguguaau

SEQ ID NO: 3415773 - RNA, 16 nt, Human
aaaguagaacuuugua

SEQ ID NO: 3415774 - RNA, 17 nt, Human
aaaguagaacuuuguau

SEQ ID NO: 3415775 - RNA, 20 nt, Human
aaaguagaagaggguuuuag

SEQ ID NO: 3415776 - RNA, 22 nt, Human
aaaguagaucaugcauagagug

SEQ ID NO: 3415777 - RNA, 14 nt, Human
aaaguaguaaaaau

SEQ ID NO: 3415778 - RNA, 21 nt, Human
aaaguaguaaaaauuaaaaaa

SEQ ID NO: 3415779 - RNA, 20 nt, Human
aaaguaguacuucuucugua

SEQ ID NO: 3415780 - RNA, 13 nt, Human
aaaguauaauguu

SEQ ID NO: 3415781 - RNA, 16 nt, Human
aaaguauaauguuuau

SEQ ID NO: 3415782 - RNA, 23 nt, Human
aaaguauaauguuuauuaaaugc

SEQ ID NO: 3415783 - RNA, 13 nt, Human
aaaguauauauag

SEQ ID NO: 3415784 - RNA, 14 nt, Human
aaaguauauguuag

SEQ ID NO: 3415785 - RNA, 22 nt, Human
aaaguaucauggaaauauuaug

SEQ ID NO: 3415786 - RNA, 19 nt, Human
aaaguaugcauuauuaaau

SEQ ID NO: 3415787 - RNA, 20 nt, Human
aaaguaugcauuauuaaauu

SEQ ID NO: 3415788 - RNA, 17 nt, Human
aaaguauguauuauuua

SEQ ID NO: 3415789 - RNA, 16 nt, Human
aaaguauguuuuacuu

SEQ ID NO: 3415790 - RNA, 15 nt, Human
aaaguauuaaaaugc

SEQ ID NO: 3415791 - RNA, 19 nt, Human
aaaguauuaagcauauauu

SEQ ID NO: 3415792 - RNA, 15 nt, Human
aaaguauuauuuucc

SEQ ID NO: 3415793 - RNA, 16 nt, Human
aaaguauuauuuucca

SEQ ID NO: 3415794 - RNA, 20 nt, Human
aaaguauuccaccuuaaauu

SEQ ID NO: 3415795 - RNA, 21 nt, Human
aaaguauuccaccuuaaauua

SEQ ID NO: 3415796 - RNA, 19 nt, Human
aaaguauucuguacucuua

SEQ ID NO: 3415797 - RNA, 12 nt, Human
aaaguauucuuc

SEQ ID NO: 3415798 - RNA, 18 nt, Human
aaaguauucuuuuucuuu

SEQ ID NO: 3415799 - RNA, 13 nt, Human
aaaguauugccaa

SEQ ID NO: 3415800 - RNA, 13 nt, Human
aaaguauuguaaa

SEQ ID NO: 3415801 - RNA, 20 nt, Human
aaaguauuguaaauuauauu

SEQ ID NO: 3415802 - RNA, 23 nt, Human
aaaguauuguaaauuauauuugu

SEQ ID NO: 3415803 - RNA, 17 nt, Human
aaaguauuuaauuagug

SEQ ID NO: 3415804 - RNA, 20 nt, Human
aaaguauuuaauuagugcua

SEQ ID NO: 3415805 - RNA, 21 nt, Human
aaaguauuuaauuagugcuaa

SEQ ID NO: 3415806 - RNA, 13 nt, Human
aaaguauuuuccu

SEQ ID NO: 3415807 - RNA, 18 nt, Human
aaaguauuuugaaguuua

SEQ ID NO: 3415808 - RNA, 14 nt, Human
aaagucacaauguu

SEQ ID NO: 3415809 - RNA, 22 nt, Human
aaagucacuuacuauuguugcu

SEQ ID NO: 3415810 - RNA, 15 nt, Human
aaagucagaaguuuu

SEQ ID NO: 3415811 - RNA, 14 nt, Human
aaagucagaaucag

SEQ ID NO: 3415812 - RNA, 15 nt, Human
aaagucagagacaga

SEQ ID NO: 3415813 - RNA, 15 nt, Human
aaagucaggaaucau

SEQ ID NO: 3415814 - RNA, 23 nt, Human
aaagucaguugcucaaaaagaaa

SEQ ID NO: 3415815 - RNA, 17 nt, Human
aaagucauaauugcauu

SEQ ID NO: 3415816 - RNA, 21 nt, Human
aaagucaugauguuuuuaaaa

SEQ ID NO: 3415817 - RNA, 22 nt, Human
aaagucaugauguuuuuaaaau

SEQ ID NO: 3415818 - RNA, 19 nt, Human
aaagucaugcaaaggcugg

SEQ ID NO: 3415819 - RNA, 13 nt, Human
aaagucauuggcu

SEQ ID NO: 3415820 - RNA, 17 nt, Human
aaagucauuggcuuuau

SEQ ID NO: 3415821 - RNA, 21 nt, Human
aaaguccauaccuuauauaug

SEQ ID NO: 3415822 - RNA, 12 nt, Human
aaaguccccaga

SEQ ID NO: 3415823 - RNA, 18 nt, Human
aaaguccuuuucuugcuu

SEQ ID NO: 3415824 - RNA, 16 nt, Human
aaaguccuuuuuuucc

SEQ ID NO: 3415825 - RNA, 15 nt, Human
aaagucguuuuccaa

SEQ ID NO: 3415826 - RNA, 16 nt, Human
aaagucguuuuccaaa

SEQ ID NO: 3415827 - RNA, 18 nt, Human
aaagucguuuuccaaacu

SEQ ID NO: 3415828 - RNA, 17 nt, Human
aaagucucuauuuaaau

SEQ ID NO: 3415829 - RNA, 21 nt, Human
aaagucucuauuuaaauucuu

SEQ ID NO: 3415830 - RNA, 14 nt, Human
aaagucuguccuug

SEQ ID NO: 3415831 - RNA, 18 nt, Human
aaagucugucuuuccuga

SEQ ID NO: 3415832 - RNA, 23 nt, Human
aaagucugugugaugaacuuucu

SEQ ID NO: 3415833 - RNA, 19 nt, Human
aaagucuguugauuaaaga

SEQ ID NO: 3415834 - RNA, 20 nt, Human
aaagucuguugauuaaagau

SEQ ID NO: 3415835 - RNA, 20 nt, Human
aaagucuugcuguggucucu

SEQ ID NO: 3415836 - RNA, 15 nt, Human
aaagucuugugacua

SEQ ID NO: 3415837 - RNA, 18 nt, Human
aaagucuugugacuagug

SEQ ID NO: 3415838 - RNA, 21 nt, Human
aaagucuugugacuagugcug

SEQ ID NO: 3415839 - RNA, 13 nt, Human
aaagucuuuuaaa

SEQ ID NO: 3415840 - RNA, 14 nt, Human
aaagucuuuuaaaa

SEQ ID NO: 3415841 - RNA, 15 nt, Human
aaagucuuuuaaaaa

SEQ ID NO: 3415842 - RNA, 16 nt, Human
aaagucuuuuaaaaag

SEQ ID NO: 3415843 - RNA, 20 nt, Human
aaagucuuuuaaaaaguauu

SEQ ID NO: 3415844 - RNA, 18 nt, Human
aaagucuuuuuuuuccug

SEQ ID NO: 3415845 - RNA, 15 nt, Human
aaagugaauaaaaau

SEQ ID NO: 3415846 - RNA, 16 nt, Human
aaagugaauaaacuuc

SEQ ID NO: 3415847 - RNA, 19 nt, Human
aaagugaauaaacuucagc

SEQ ID NO: 3415848 - RNA, 15 nt, Human
aaagugaaugaaaga

SEQ ID NO: 3415849 - RNA, 21 nt, Human
aaagugauaauuucuggaauu

SEQ ID NO: 3415850 - RNA, 17 nt, Human
aaagugaugacauauuu

SEQ ID NO: 3415851 - RNA, 23 nt, Human
aaagugcagcuccguuuggcagu

SEQ ID NO: 3415852 - RNA, 14 nt, Human
aaagugcauuuuug

SEQ ID NO: 3415853 - RNA, 15 nt, Human
aaagugccaaagaaa

SEQ ID NO: 3415854 - RNA, 16 nt, Human
aaagugccagaaagug

SEQ ID NO: 3415855 - RNA, 19 nt, Human
aaagugccauuaacaaaug

SEQ ID NO: 3415856 - RNA, 12 nt, Human
aaagugcccagc

SEQ ID NO: 3415857 - RNA, 17 nt, Human
aaagugccucaagagga

SEQ ID NO: 3415858 - RNA, 16 nt, Human
aaagugccuuucagga

SEQ ID NO: 3415859 - RNA, 23 nt, Human
aaagugccuuucaggaucuauuu

SEQ ID NO: 3415860 - RNA, 14 nt, Human
aacaccacagacac

SEQ ID NO: 3415861 - RNA, 19 nt, Human
aacaccacagacacacaca

SEQ ID NO: 3415862 - RNA, 17 nt, Human
aacaccagccccugccc

SEQ ID NO: 3415863 - RNA, 21 nt, Human
aacaccagguuuauggaaaau

SEQ ID NO: 3415864 - RNA, 19 nt, Human
aacaccaugauuccuuuaa

SEQ ID NO: 3415865 - RNA, 20 nt, Human
aacaccaugauuccuuuaac

SEQ ID NO: 3415866 - RNA, 17 nt, Human
aacaccauugaaggcuu

SEQ ID NO: 3415867 - RNA, 15 nt, Human
aacacccacaggcau

SEQ ID NO: 3415868 - RNA, 20 nt, Human
aacacccagucuguucccca

SEQ ID NO: 3415869 - RNA, 16 nt, Human
aacacccauuuuuccu

SEQ ID NO: 3415870 - RNA, 21 nt, Human
aacaccccucaguugugcagc

SEQ ID NO: 3415871 - RNA, 16 nt, Human
aacacccuauauuuug

SEQ ID NO: 3415872 - RNA, 18 nt, Human
aacacccucgaagcgcgc

SEQ ID NO: 3415873 - RNA, 14 nt, Human
aacacccuuagaaa

SEQ ID NO: 3415874 - RNA, 12 nt, Human
aacacccuuccu

SEQ ID NO: 3415875 - RNA, 20 nt, Human
aacaccgcuucugccuuuuc

SEQ ID NO: 3415876 - RNA, 16 nt, Human
aacaccuagaucagaa

SEQ ID NO: 3415877 - RNA, 18 nt, Human
aacaccugacagccccuc

SEQ ID NO: 3415878 - RNA, 15 nt, Human
aacaccugaugugua

SEQ ID NO: 3415879 - RNA, 19 nt, Human
aacaccuucuauagcauca

SEQ ID NO: 3415880 - RNA, 13 nt, Human
aacaccuucucug

SEQ ID NO: 3415881 - RNA, 20 nt, Human
aacaccuucuuauuauauau

SEQ ID NO: 3415882 - RNA, 12 nt, Human
aacacgaaacuu

SEQ ID NO: 3415883 - RNA, 14 nt, Human
aacacgaaacuugu

SEQ ID NO: 3415884 - RNA, 20 nt, Human
aacacgaaacuuguuauugu

SEQ ID NO: 3415885 - RNA, 14 nt, Human
aacacgcaccugcc

SEQ ID NO: 3415886 - RNA, 19 nt, Human
aacacgcaccugccucagg

SEQ ID NO: 3415887 - RNA, 21 nt, Human
aacacggccacaucaaagagg

SEQ ID NO: 3415888 - RNA, 15 nt, Human
aacacgugaugugau

SEQ ID NO: 3415889 - RNA, 20 nt, Human
aacacuaaagauccaagaag

SEQ ID NO: 3415890 - RNA, 13 nt, Human
aacacuaaauguu

SEQ ID NO: 3415891 - RNA, 16 nt, Human
aacacuaaauguuaaa

SEQ ID NO: 3415892 - RNA, 18 nt, Human
aacacuaacauauaaugu

SEQ ID NO: 3415893 - RNA, 17 nt, Human
aacacuaacaugauuug

SEQ ID NO: 3415894 - RNA, 11 nt, Human
aacacuaaccu

SEQ ID NO: 3415895 - RNA, 18 nt, Human
aacacuaacuaugcaugg

SEQ ID NO: 3415896 - RNA, 13 nt, Human
aacacuaauauau

SEQ ID NO: 3415897 - RNA, 23 nt, Human
aacacuaauauauuuaaaaauaa

SEQ ID NO: 3415898 - RNA, 23 nt, Human
aacacuagggccuuggaaauucc

SEQ ID NO: 3415899 - RNA, 16 nt, Human
aacacuauuuucagaa

SEQ ID NO: 3415900 - RNA, 18 nt, Human
aacacuauuuucagaauc

SEQ ID NO: 3415901 - RNA, 17 nt, Human
aacacucaagaagcagg

SEQ ID NO: 3415902 - RNA, 18 nt, Human
aacacucagaagccuggg

SEQ ID NO: 3415903 - RNA, 19 nt, Human
aacacucagaagccugggg

SEQ ID NO: 3415904 - RNA, 14 nt, Human
aacacucagcuguu

SEQ ID NO: 3415905 - RNA, 14 nt, Human
aacacucaugcuga

SEQ ID NO: 3415906 - RNA, 17 nt, Human
aacacuccaauuaagga

SEQ ID NO: 3415907 - RNA, 13 nt, Human
aacacuccucugc

SEQ ID NO: 3415908 - RNA, 16 nt, Human
aacacucuuuugcuuu

SEQ ID NO: 3415909 - RNA, 15 nt, Human
aacacugaaaaauua

SEQ ID NO: 3415910 - RNA, 14 nt, Human
aacacugauuuccc

SEQ ID NO: 3415911 - RNA, 12 nt, Human
aacacugccagc

SEQ ID NO: 3415912 - RNA, 23 nt, Human
aacacugccuuuuuauuuauaug

SEQ ID NO: 3415913 - RNA, 17 nt, Human
aacacugcuuguguuuu

SEQ ID NO: 3415914 - RNA, 19 nt, Human
aacacuggcaacaacaaag

SEQ ID NO: 3415915 - RNA, 15 nt, Human
aacacuggcagacug

SEQ ID NO: 3415916 - RNA, 23 nt, Human
aacacuggucugcuguuccagug

SEQ ID NO: 3415917 - RNA, 19 nt, Human
aacacuguaguaaauaaug

SEQ ID NO: 3415918 - RNA, 20 nt, Human
aacacugugcacaucugugu

SEQ ID NO: 3415919 - RNA, 16 nt, Human
aacacugugcccuggu

SEQ ID NO: 3415920 - RNA, 12 nt, Human
aacacuguuauc

SEQ ID NO: 3415921 - RNA, 15 nt, Human
aacacuguucucugc

SEQ ID NO: 3415922 - RNA, 15 nt, Human
aacacuuauugcuuu

SEQ ID NO: 3415923 - RNA, 11 nt, Human
aacacuuccau

SEQ ID NO: 3415924 - RNA, 19 nt, Human
aacacuucuguccugugag

SEQ ID NO: 3415925 - RNA, 21 nt, Human
aacacuucuguccugugaggu

SEQ ID NO: 3415926 - RNA, 16 nt, Human
aacacuugugacuuuu

SEQ ID NO: 3415927 - RNA, 22 nt, Human
aacacuugugacuuuugcuuua

SEQ ID NO: 3415928 - RNA, 23 nt, Human
aacacuugugacuuuugcuuuaa

SEQ ID NO: 3415929 - RNA, 16 nt, Human
aacagaaaaaaaacac

SEQ ID NO: 3415930 - RNA, 11 nt, Human
aacagaaaaca

SEQ ID NO: 3415931 - RNA, 19 nt, Human
aacagaaaacauucugauu

SEQ ID NO: 3415932 - RNA, 16 nt, Human
aacagaaacaaaaaca

SEQ ID NO: 3415933 - RNA, 19 nt, Human
aacagaaagucauuccuuc

SEQ ID NO: 3415934 - RNA, 14 nt, Human
aaauauaagccuuu

SEQ ID NO: 3415935 - RNA, 16 nt, Human
aaauauaauucuguaa

SEQ ID NO: 3415936 - RNA, 17 nt, Human
aaauauaauucuguaaa

SEQ ID NO: 3415937 - RNA, 18 nt, Human
aaauauaauucuguaaau

SEQ ID NO: 3415938 - RNA, 19 nt, Human
aaauauaauuguuuuuuau

SEQ ID NO: 3415939 - RNA, 18 nt, Human
aaauauacauguuuaugu

SEQ ID NO: 3415940 - RNA, 12 nt, Human
aaauauacugua

SEQ ID NO: 3415941 - RNA, 13 nt, Human
aaauauacuguaa

SEQ ID NO: 3415942 - RNA, 17 nt, Human
aaauauacuguaaagaa

SEQ ID NO: 3415943 - RNA, 12 nt, Human
aaauauagauua

SEQ ID NO: 3415944 - RNA, 18 nt, Human
aaauauagauuagaaaaa

SEQ ID NO: 3415945 - RNA, 21 nt, Human
aaauauagcuguacaaauaua

SEQ ID NO: 3415946 - RNA, 21 nt, Human
aaauauauaaaaagaaaagau

SEQ ID NO: 3415947 - RNA, 14 nt, Human
aaauauauacucaa

SEQ ID NO: 3415948 - RNA, 10 nt, Human
aaauauauau

SEQ ID NO: 3415949 - RNA, 14 nt, Human
aaauauauauaaac

SEQ ID NO: 3415950 - RNA, 14 nt, Human
aaauauauauaaau

SEQ ID NO: 3415951 - RNA, 19 nt, Human
aaauauauauaaauauaua

SEQ ID NO: 3415952 - RNA, 16 nt, Human
aaauauauauacauau

SEQ ID NO: 3415953 - RNA, 19 nt, Human
aaauauauauacauaugua

SEQ ID NO: 3415954 - RNA, 12 nt, Human
aaauauauauau

SEQ ID NO: 3415955 - RNA, 19 nt, Human
aaauauauauauauauaaa

SEQ ID NO: 3415956 - RNA, 12 nt, Human
aaauauauauua

SEQ ID NO: 3415957 - RNA, 17 nt, Human
aaauauauauuauacuu

SEQ ID NO: 3415958 - RNA, 22 nt, Human
aaauauauauuauacuuguaau

SEQ ID NO: 3415959 - RNA, 20 nt, Human
aaauauauggucuaauguuu

SEQ ID NO: 3415960 - RNA, 12 nt, Human
aaauauauguau

SEQ ID NO: 3415961 - RNA, 14 nt, Human
aaauauauguaugu

SEQ ID NO: 3415962 - RNA, 22 nt, Human
aaauauauguauuuuuauauaa

SEQ ID NO: 3415963 - RNA, 20 nt, Human
aaauauauuuaagauaauua

SEQ ID NO: 3415964 - RNA, 22 nt, Human
aaauauauuuaagauaauuaua

SEQ ID NO: 3415965 - RNA, 21 nt, Human
aaauaucaaagucauuaaaga

SEQ ID NO: 3415966 - RNA, 22 nt, Human
aaauaucaaagucauuaaagac

SEQ ID NO: 3415967 - RNA, 12 nt, Human
aaauaucaaauu

SEQ ID NO: 3415968 - RNA, 15 nt, Human
aaauaucagacuagu

SEQ ID NO: 3415969 - RNA, 14 nt, Human
aaauaucauucagc

SEQ ID NO: 3415970 - RNA, 13 nt, Human
aaauaucauugua

SEQ ID NO: 3415971 - RNA, 20 nt, Human
aaauaucuaguaauauauuu

SEQ ID NO: 3415972 - RNA, 10 nt, Human
aaauaucuga

SEQ ID NO: 3415973 - RNA, 14 nt, Human
aaauaucugaaaau

SEQ ID NO: 3415974 - RNA, 22 nt, Human
aaauaucugaaaauguaugugu

SEQ ID NO: 3415975 - RNA, 23 nt, Human
aaauaucugaaaauguaugugua

SEQ ID NO: 3415976 - RNA, 17 nt, Human
aaauaucugaacauuua

SEQ ID NO: 3415977 - RNA, 23 nt, Human
aaauaucugagcucuuugcacua

SEQ ID NO: 3415978 - RNA, 23 nt, Human
aaauaucuguaagaguguuuaua

SEQ ID NO: 3415979 - RNA, 13 nt, Human
aaauaucuguauu

SEQ ID NO: 3415980 - RNA, 15 nt, Human
aaauaucugugaaau

SEQ ID NO: 3415981 - RNA, 15 nt, Human
aaauaucuugaaagg

SEQ ID NO: 3415982 - RNA, 14 nt, Human
aaauaucuuggccu

SEQ ID NO: 3415983 - RNA, 21 nt, Human
aaauaucuuguguuguccuuu

SEQ ID NO: 3415984 - RNA, 22 nt, Human
aaauaucuuuuauguuugaaua

SEQ ID NO: 3415985 - RNA, 17 nt, Human
aaauaugaagaacugag

SEQ ID NO: 3415986 - RNA, 20 nt, Human
aaauaugaagacauaaaccc

SEQ ID NO: 3415987 - RNA, 12 nt, Human
aaauaugaaugc

SEQ ID NO: 3415988 - RNA, 19 nt, Human
aaauaugauauugcauaug

SEQ ID NO: 3415989 - RNA, 20 nt, Human
aaauaugauuuuauuugaca

SEQ ID NO: 3415990 - RNA, 16 nt, Human
aaauaugcaaagcacu

SEQ ID NO: 3415991 - RNA, 19 nt, Human
aaauaugcacuaagucucu

SEQ ID NO: 3415992 - RNA, 21 nt, Human
aaauaugcacuaagucucuuu

SEQ ID NO: 3415993 - RNA, 14 nt, Human
aaauaugcagugau

SEQ ID NO: 3415994 - RNA, 23 nt, Human
aaauaugcagugauauggcagaa

SEQ ID NO: 3415995 - RNA, 14 nt, Human
aaauaugccucucc

SEQ ID NO: 3415996 - RNA, 21 nt, Human
aaauaugccucuccuuuguau

SEQ ID NO: 3415997 - RNA, 22 nt, Human
aaauaugccucuccuuuguaua

SEQ ID NO: 3415998 - RNA, 15 nt, Human
aaauaugcuaauuug

SEQ ID NO: 3415999 - RNA, 16 nt, Human
aaauauggaacuuaca

SEQ ID NO: 3416000 - RNA, 21 nt, Human
aaauauggaacuuacauuguu

SEQ ID NO: 3416001 - RNA, 16 nt, Human
aaauauggaacuucua

SEQ ID NO: 3416002 - RNA, 16 nt, Human
aaauauggacacuuaa

SEQ ID NO: 3416003 - RNA, 20 nt, Human
aaauauggacacuuaauacu

SEQ ID NO: 3416004 - RNA, 18 nt, Human
aaauauggacugcucagg

SEQ ID NO: 3416005 - RNA, 19 nt, Human
aaauauggcuauaaauaua

SEQ ID NO: 3416006 - RNA, 12 nt, Human
aaauauguauua

SEQ ID NO: 3416007 - RNA, 21 nt, Human
aaauauguccauaucuaacca

SEQ ID NO: 3416008 - RNA, 18 nt, Human
aaauaugucucgcuagug

SEQ ID NO: 3416009 - RNA, 24 nt, Human
aaauaugugagauuuuuuauugcu

SEQ ID NO: 3416010 - RNA, 22 nt, Human
aaauauguuucacacaaacaag

SEQ ID NO: 3416011 - RNA, 12 nt, Human
aaauauuaaaaa

SEQ ID NO: 3416012 - RNA, 22 nt, Human
aaauauuaaaaagucuuuuaaa

SEQ ID NO: 3416013 - RNA, 19 nt, Human
aaauauuaagaaagacuau

SEQ ID NO: 3416014 - RNA, 15 nt, Human
aaauauuaagcaugu

SEQ ID NO: 3416015 - RNA, 14 nt, Human
aaauauuagaaaca

SEQ ID NO: 3416016 - RNA, 15 nt, Human
aaauauuagauguga

SEQ ID NO: 3416017 - RNA, 20 nt, Human
aaauauuagaugugauuuaa

SEQ ID NO: 3416018 - RNA, 19 nt, Human
aaauauuaggcuuaaaaac

SEQ ID NO: 3416019 - RNA, 15 nt, Human
aaauauuaucuuugu

SEQ ID NO: 3416020 - RNA, 22 nt, Human
aaauauuaucuuuguaauuauu

SEQ ID NO: 3416021 - RNA, 16 nt, Human
aaauauuaugagaugc

SEQ ID NO: 3416022 - RNA, 16 nt, Human
aaauauuauucuuaau

SEQ ID NO: 3416023 - RNA, 13 nt, Human
aaauauuauuugu

SEQ ID NO: 3416024 - RNA, 20 nt, Human
aaauauuauuuuaugaaagg

SEQ ID NO: 3416025 - RNA, 20 nt, Human
aaauauuccugcauuuguga

SEQ ID NO: 3416026 - RNA, 19 nt, Human
aaauauuccuuugcauauu

SEQ ID NO: 3416027 - RNA, 14 nt, Human
aaauauucuauaug

SEQ ID NO: 3416028 - RNA, 15 nt, Human
aaauauucucuauuu

SEQ ID NO: 3416029 - RNA, 23 nt, Human
aaauauucuucuauaaaugaauc

SEQ ID NO: 3416030 - RNA, 21 nt, Human
aaauauugaaaggcaaacauu

SEQ ID NO: 3416031 - RNA, 19 nt, Human
aaauauugacuuuuuaugg

SEQ ID NO: 3416032 - RNA, 18 nt, Human
aaauauugaggcuuugug

SEQ ID NO: 3416033 - RNA, 20 nt, Human
aaauauugaggcuuuguguu

SEQ ID NO: 3416034 - RNA, 12 nt, Human
aaauauugucuu

SEQ ID NO: 3416035 - RNA, 17 nt, Human
aaauauugucuuuuugu

SEQ ID NO: 3416036 - RNA, 20 nt, Human
aaauauugucuuuuuguaug

SEQ ID NO: 3416037 - RNA, 14 nt, Human
aaauauuuaaaaau

SEQ ID NO: 3416038 - RNA, 17 nt, Human
aaauauuuaauguugaa

SEQ ID NO: 3416039 - RNA, 16 nt, Human
aaauauuuagcaaaua

SEQ ID NO: 3416040 - RNA, 22 nt, Human
aaauauuuauuaaauaaaauca

SEQ ID NO: 3416041 - RNA, 23 nt, Human
aaauauuuauuaaauaaaaucaa

SEQ ID NO: 3416042 - RNA, 15 nt, Human
aaauauuuauuuuaa

SEQ ID NO: 3416043 - RNA, 21 nt, Human
aaauauuuauuuuaauaaugu

SEQ ID NO: 3416044 - RNA, 12 nt, Human
aaauauuucaag

SEQ ID NO: 3416045 - RNA, 13 nt, Human
aaauauuucaaga

SEQ ID NO: 3416046 - RNA, 17 nt, Human
aaauauuugacuauucu

SEQ ID NO: 3416047 - RNA, 15 nt, Human
aaauauuuguacaua

SEQ ID NO: 3416048 - RNA, 20 nt, Human
aaauauuuuaauuuuuaaau

SEQ ID NO: 3416049 - RNA, 14 nt, Human
aaauauuuucuauu

SEQ ID NO: 3416050 - RNA, 19 nt, Human
aaauauuuucuauuuuaag

SEQ ID NO: 3416051 - RNA, 12 nt, Human
aaauauuuucuc

SEQ ID NO: 3416052 - RNA, 13 nt, Human
aaauauuuucugu

SEQ ID NO: 3416053 - RNA, 14 nt, Human
aaauauuuucugug

SEQ ID NO: 3416054 - RNA, 15 nt, Human
aaauauuuucugugu

SEQ ID NO: 3416055 - RNA, 16 nt, Human
aaauauuuucugugug

SEQ ID NO: 3416056 - RNA, 18 nt, Human
aaauauuuucuguguguu

SEQ ID NO: 3416057 - RNA, 21 nt, Human
aaauauuuucuguguguuccu

SEQ ID NO: 3416058 - RNA, 17 nt, Human
aaauauuuugaucuuca

SEQ ID NO: 3416059 - RNA, 15 nt, Human
aaauauuuugucuaa

SEQ ID NO: 3416060 - RNA, 22 nt, Human
aaauauuuugucuaaaaugccu

SEQ ID NO: 3416061 - RNA, 14 nt, Human
aaauauuuuuagua

SEQ ID NO: 3416062 - RNA, 23 nt, Human
aaauauuuuuauagauuugaccu

SEQ ID NO: 3416063 - RNA, 20 nt, Human
aaauauuuuuuuguagauga

SEQ ID NO: 3416064 - RNA, 21 nt, Human
aaauauuuuuuuguagaugaa

SEQ ID NO: 3416065 - RNA, 13 nt, Human
aaaucaaagugcu

SEQ ID NO: 3416066 - RNA, 14 nt, Human
aaaucaaagugcua

SEQ ID NO: 3416067 - RNA, 15 nt, Human
aaaucaaagugcuau

SEQ ID NO: 3416068 - RNA, 12 nt, Human
aaaucaaauaug

SEQ ID NO: 3416069 - RNA, 14 nt, Human
aaaucaaauaugca

SEQ ID NO: 3416070 - RNA, 16 nt, Human
aaaucaaauaugcaaa

SEQ ID NO: 3416071 - RNA, 16 nt, Human
aaaucaacagaagcau

SEQ ID NO: 3416072 - RNA, 22 nt, Human
aaaucaacagaagcauuuguau

SEQ ID NO: 3416073 - RNA, 16 nt, Human
aaaucaacuuaacaug

SEQ ID NO: 3416074 - RNA, 11 nt, Human
aaaucaacuuu

SEQ ID NO: 3416075 - RNA, 21 nt, Human
aaaucaacuuuuuauugccuu

SEQ ID NO: 3416076 - RNA, 21 nt, Human
aaaucaagcagguuagagaaa

SEQ ID NO: 3416077 - RNA, 12 nt, Human
aaaucaaguauu

SEQ ID NO: 3416078 - RNA, 17 nt, Human
aaaucaaguauuauaaa

SEQ ID NO: 3416079 - RNA, 17 nt, Human
aaaucaauaaaugaaua

SEQ ID NO: 3416080 - RNA, 15 nt, Human
aaaucaauacacuag

SEQ ID NO: 3416081 - RNA, 15 nt, Human
aaaucaauaguugaa

SEQ ID NO: 3416082 - RNA, 14 nt, Human
aaaucaauuuuuag

SEQ ID NO: 3416083 - RNA, 19 nt, Human
aaaucaccacaaacuguaa

SEQ ID NO: 3416084 - RNA, 13 nt, Human
aacagggucucua

SEQ ID NO: 3416085 - RNA, 20 nt, Human
aacagggucucuagugcugu

SEQ ID NO: 3416086 - RNA, 15 nt, Human
aacagguaauauaaa

SEQ ID NO: 3416087 - RNA, 14 nt, Human
aacagguauuuugu

SEQ ID NO: 3416088 - RNA, 22 nt, Human
aacagguauuuuguuucuuuua

SEQ ID NO: 3416089 - RNA, 17 nt, Human
aacaggucuccucuuaa

SEQ ID NO: 3416090 - RNA, 19 nt, Human
aacaggucuccucuuaaaa

SEQ ID NO: 3416091 - RNA, 20 nt, Human
aacaggucuccucuuaaaaa

SEQ ID NO: 3416092 - RNA, 14 nt, Human
aacagguggagaaa

SEQ ID NO: 3416093 - RNA, 19 nt, Human
aacagguggcaggaccagg

SEQ ID NO: 3416094 - RNA, 21 nt, Human
aacagguggcaggaccaggac

SEQ ID NO: 3416095 - RNA, 23 nt, Human
aacagguggcaggaccaggacua

SEQ ID NO: 3416096 - RNA, 20 nt, Human
aacagguuauuuuaguuucu

SEQ ID NO: 3416097 - RNA, 16 nt, Human
aacagguuuuauaauu

SEQ ID NO: 3416098 - RNA, 13 nt, Human
aacaguaaaccac

SEQ ID NO: 3416099 - RNA, 15 nt, Human
aacaguaaaccacug

SEQ ID NO: 3416100 - RNA, 16 nt, Human
aacaguaaaccacuga

SEQ ID NO: 3416101 - RNA, 14 nt, Human
aacaguaaucaguu

SEQ ID NO: 3416102 - RNA, 21 nt, Human
aacaguacccugguugugugu

SEQ ID NO: 3416103 - RNA, 12 nt, Human
aacaguagcaua

SEQ ID NO: 3416104 - RNA, 18 nt, Human
aacaguaucucaaacaau

SEQ ID NO: 3416105 - RNA, 20 nt, Human
aacaguauuuauuuuguaau

SEQ ID NO: 3416106 - RNA, 12 nt, Human
aacagucauguu

SEQ ID NO: 3416107 - RNA, 14 nt, Human
aacagucauguuuu

SEQ ID NO: 3416108 - RNA, 13 nt, Human
aacagucucagga

SEQ ID NO: 3416109 - RNA, 17 nt, Human
aacagucucaggaaauc

SEQ ID NO: 3416110 - RNA, 17 nt, Human
aacagucuucaggcaaa

SEQ ID NO: 3416111 - RNA, 20 nt, Human
aacagugaaguuuuacuguc

SEQ ID NO: 3416112 - RNA, 23 nt, Human
aacagugagagacuccauaguuu

SEQ ID NO: 3416113 - RNA, 20 nt, Human
aacagugauuuuuuuuuaga

SEQ ID NO: 3416114 - RNA, 17 nt, Human
aacagugcaacacuggu

SEQ ID NO: 3416115 - RNA, 19 nt, Human
aacagugccauugucuuua

SEQ ID NO: 3416116 - RNA, 23 nt, Human
aacagugcuaaaaaugggacuuc

SEQ ID NO: 3416117 - RNA, 15 nt, Human
aacagugcuguuucc

SEQ ID NO: 3416118 - RNA, 15 nt, Human
aacaguggaauauaa

SEQ ID NO: 3416119 - RNA, 14 nt, Human
aacaguggaucaca

SEQ ID NO: 3416120 - RNA, 16 nt, Human
aacaguggggaagagu

SEQ ID NO: 3416121 - RNA, 13 nt, Human
aacagugugaagu

SEQ ID NO: 3416122 - RNA, 20 nt, Human
aacagugugaaguuagaauu

SEQ ID NO: 3416123 - RNA, 18 nt, Human
aacagugugcaaggcagc

SEQ ID NO: 3416124 - RNA, 13 nt, Human
aacaguguuuaaa

SEQ ID NO: 3416125 - RNA, 18 nt, Human
aacaguguuucccauaau

SEQ ID NO: 3416126 - RNA, 13 nt, Human
aacaguguuuuca

SEQ ID NO: 3416127 - RNA, 13 nt, Human
aacaguuaacuuu

SEQ ID NO: 3416128 - RNA, 20 nt, Human
aacaguuaacuuucagaaga

SEQ ID NO: 3416129 - RNA, 14 nt, Human
aacaguuccuucag

SEQ ID NO: 3416130 - RNA, 17 nt, Human
aacaguuccuuucaaag

SEQ ID NO: 3416131 - RNA, 14 nt, Human
aacaguugguaacu

SEQ ID NO: 3416132 - RNA, 21 nt, Human
aacaguugguaacuuuuguga

SEQ ID NO: 3416133 - RNA, 22 nt, Human
aacaguugguaacuuuugugaa

SEQ ID NO: 3416134 - RNA, 13 nt, Human
aacaguuuaauga

SEQ ID NO: 3416135 - RNA, 22 nt, Human
aacaguuuaugcagugcugcuu

SEQ ID NO: 3416136 - RNA, 14 nt, Human
aacaguuuguacag

SEQ ID NO: 3416137 - RNA, 17 nt, Human
aacaguuuuccaugaaa

SEQ ID NO: 3416138 - RNA, 19 nt, Human
aacaguuuuccaugaaaac

SEQ ID NO: 3416139 - RNA, 20 nt, Human
aacaguuuuccuaugcuuug

SEQ ID NO: 3416140 - RNA, 21 nt, Human
aacaguuuuccuaugcuuuga

SEQ ID NO: 3416141 - RNA, 12 nt, Human
aacaguuuugug

SEQ ID NO: 3416142 - RNA, 21 nt, Human
aacaguuuuuuaugcuaauca

SEQ ID NO: 3416143 - RNA, 16 nt, Human
aacauaaaaaaacuuc

SEQ ID NO: 3416144 - RNA, 19 nt, Human
aacauaaaaaggacaucag

SEQ ID NO: 3416145 - RNA, 13 nt, Human
aacauaaaaaguu

SEQ ID NO: 3416146 - RNA, 14 nt, Human
aacauaaaaaugau

SEQ ID NO: 3416147 - RNA, 14 nt, Human
aacauaaagcaaau

SEQ ID NO: 3416148 - RNA, 19 nt, Human
aacauaaagguaaaacaaa

SEQ ID NO: 3416149 - RNA, 12 nt, Human
aacauaaagguu

SEQ ID NO: 3416150 - RNA, 14 nt, Human
aacauaaauaaaau

SEQ ID NO: 3416151 - RNA, 17 nt, Human
aaauccuuuuaccuuuu

SEQ ID NO: 3416152 - RNA, 17 nt, Human
aaauccuuuuucuuuau

SEQ ID NO: 3416153 - RNA, 18 nt, Human
aaauccuuuuucuuuaua

SEQ ID NO: 3416154 - RNA, 13 nt, Human
aaaucgaaugaaa

SEQ ID NO: 3416155 - RNA, 14 nt, Human
aaaucgauuggcuu

SEQ ID NO: 3416156 - RNA, 15 nt, Human
aaaucgauuggcuuu

SEQ ID NO: 3416157 - RNA, 15 nt, Human
aaaucgcuuuugaua

SEQ ID NO: 3416158 - RNA, 22 nt, Human
aaaucggaucuggggcucuggg

SEQ ID NO: 3416159 - RNA, 17 nt, Human
aaaucuaaaucuauuua

SEQ ID NO: 3416160 - RNA, 20 nt, Human
aaaucuaaaucuauuuauua

SEQ ID NO: 3416161 - RNA, 15 nt, Human
aaaucuaacauuauu

SEQ ID NO: 3416162 - RNA, 15 nt, Human
aaaucuaagcugugu

SEQ ID NO: 3416163 - RNA, 19 nt, Human
aaaucuaaugacauucaau

SEQ ID NO: 3416164 - RNA, 18 nt, Human
aaaucuagaagagucuau

SEQ ID NO: 3416165 - RNA, 22 nt, Human
aaaucuagacucaagguuccca

SEQ ID NO: 3416166 - RNA, 19 nt, Human
aaaucuauuuaauuaggaa

SEQ ID NO: 3416167 - RNA, 16 nt, Human
aaaucuauuuauuaau

SEQ ID NO: 3416168 - RNA, 17 nt, Human
aaaucuauuuauuaaua

SEQ ID NO: 3416169 - RNA, 19 nt, Human
aaaucuauuuauuaauauu

SEQ ID NO: 3416170 - RNA, 17 nt, Human
aaaucucaaauuucuaa

SEQ ID NO: 3416171 - RNA, 15 nt, Human
aaaucucaauauuuc

SEQ ID NO: 3416172 - RNA, 22 nt, Human
aaaucucagaauuccuuuucua

SEQ ID NO: 3416173 - RNA, 15 nt, Human
aaaucucuaauaugg

SEQ ID NO: 3416174 - RNA, 23 nt, Human
aaaucucuccacuuucagcuguc

SEQ ID NO: 3416175 - RNA, 19 nt, Human
aaaucucucucuguugugu

SEQ ID NO: 3416176 - RNA, 16 nt, Human
aaaucugaacauucuc

SEQ ID NO: 3416177 - RNA, 16 nt, Human
aaaucugaagauuguu

SEQ ID NO: 3416178 - RNA, 19 nt, Human
aaaucugaagauuguuuau

SEQ ID NO: 3416179 - RNA, 21 nt, Human
aaaucugaagauuguuuaucu

SEQ ID NO: 3416180 - RNA, 23 nt, Human
aaaucugcaaagcauguuuugca

SEQ ID NO: 3416181 - RNA, 19 nt, Human
aaaucugccacaaaaacag

SEQ ID NO: 3416182 - RNA, 11 nt, Human
aaaucugccug

SEQ ID NO: 3416183 - RNA, 22 nt, Human
aaaucugcuggaguuucaugua

SEQ ID NO: 3416184 - RNA, 15 nt, Human
aaaucuggucuuguu

SEQ ID NO: 3416185 - RNA, 18 nt, Human
aaaucuguaacagguauu

SEQ ID NO: 3416186 - RNA, 23 nt, Human
aaaucuguaagcucuuugaaaca

SEQ ID NO: 3416187 - RNA, 16 nt, Human
aaaucugucaagagua

SEQ ID NO: 3416188 - RNA, 16 nt, Human
aaaucugugaacuuga

SEQ ID NO: 3416189 - RNA, 18 nt, Human
aaaucugugaacuugaaa

SEQ ID NO: 3416190 - RNA, 19 nt, Human
aaaucugugaugauccuca

SEQ ID NO: 3416191 - RNA, 19 nt, Human
aaaucugugccugagaaca

SEQ ID NO: 3416192 - RNA, 18 nt, Human
aaaucuguguauauuauu

SEQ ID NO: 3416193 - RNA, 12 nt, Human
aaaucuuaaaaa

SEQ ID NO: 3416194 - RNA, 17 nt, Human
aaaucuuaaaaaguugu

SEQ ID NO: 3416195 - RNA, 17 nt, Human
aaaucuuauaauuuaaa

SEQ ID NO: 3416196 - RNA, 14 nt, Human
aaaucuuauuaaag

SEQ ID NO: 3416197 - RNA, 20 nt, Human
aaaucuuauuaaaguuucaa

SEQ ID NO: 3416198 - RNA, 19 nt, Human
aaaucuuggaaguacauga

SEQ ID NO: 3416199 - RNA, 20 nt, Human
aaaucuuggaaguacaugaa

SEQ ID NO: 3416200 - RNA, 17 nt, Human
aaaucuugucaugugua

SEQ ID NO: 3416201 - RNA, 16 nt, Human
aaaucuuucuuucuua

SEQ ID NO: 3416202 - RNA, 18 nt, Human
aaaucuuuuauaggauuu

SEQ ID NO: 3416203 - RNA, 13 nt, Human
aaaucuuuuugcu

SEQ ID NO: 3416204 - RNA, 17 nt, Human
aaaugaaaaucgugaca

SEQ ID NO: 3416205 - RNA, 13 nt, Human
aaaugaaaauugu

SEQ ID NO: 3416206 - RNA, 21 nt, Human
aaaugaaacaaauaaucacau

SEQ ID NO: 3416207 - RNA, 12 nt, Human
aaaugaaagaaa

SEQ ID NO: 3416208 - RNA, 20 nt, Human
aaaugaaagaaaauugaguu

SEQ ID NO: 3416209 - RNA, 20 nt, Human
aaaugaaaguauaacugagu

SEQ ID NO: 3416210 - RNA, 16 nt, Human
aaaugaaauuuuacca

SEQ ID NO: 3416211 - RNA, 13 nt, Human
aaaugaacaagag

SEQ ID NO: 3416212 - RNA, 16 nt, Human
aaaugaacacaaauua

SEQ ID NO: 3416213 - RNA, 19 nt, Human
aaaugaacgauauguagca

SEQ ID NO: 3416214 - RNA, 21 nt, Human
aaaugaacugaaguuucacau

SEQ ID NO: 3416215 - RNA, 11 nt, Human
aaaugaagaaa

SEQ ID NO: 3416216 - RNA, 18 nt, Human
aaaugaagcagcuuuaaa

SEQ ID NO: 3416217 - RNA, 21 nt, Human
aaaugaauaaugccuuuguaa

SEQ ID NO: 3416218 - RNA, 17 nt, Human
aaaugaauaucuauuaa

SEQ ID NO: 3416219 - RNA, 14 nt, Human
aaaugaauauuuug

SEQ ID NO: 3416220 - RNA, 23 nt, Human
aaaugaauggaggaacuuuccaa

SEQ ID NO: 3416221 - RNA, 11 nt, Human
aaaugaaugug

SEQ ID NO: 3416222 - RNA, 14 nt, Human
aaaugaaugugugu

SEQ ID NO: 3416223 - RNA, 21 nt, Human
aaaugacaaucauguguguua

SEQ ID NO: 3416224 - RNA, 14 nt, Human
aaaugacagauguu

SEQ ID NO: 3416225 - RNA, 16 nt, Human
aaaugacaucuuuuua

SEQ ID NO: 3416226 - RNA, 14 nt, Human
aaaugacaugcacu

SEQ ID NO: 3416227 - RNA, 15 nt, Human
aaaugaccaauauua

SEQ ID NO: 3416228 - RNA, 19 nt, Human
aaaugaccaguaauuguga

SEQ ID NO: 3416229 - RNA, 14 nt, Human
aaaugacccaaaga

SEQ ID NO: 3416230 - RNA, 17 nt, Human
aaaugacccaaagacca

SEQ ID NO: 3416231 - RNA, 22 nt, Human
aaaugacuacuuagcauccuaa

SEQ ID NO: 3416232 - RNA, 20 nt, Human
aaaugacuuuauuauuuauu

SEQ ID NO: 3416233 - RNA, 11 nt, Human
aaaugagaaau

SEQ ID NO: 3416234 - RNA, 22 nt, Human
aaaugagaacauguugguauuu

SEQ ID NO: 3416235 - RNA, 13 nt, Human
aaaugagaaggaa

SEQ ID NO: 3416236 - RNA, 17 nt, Human
aaaugagaucaggcucu

SEQ ID NO: 3416237 - RNA, 19 nt, Human
aaaugagccuggcaagaau

SEQ ID NO: 3416238 - RNA, 19 nt, Human
aaaugagcucugaaaucuu

SEQ ID NO: 3416239 - RNA, 18 nt, Human
aaaugagcuugauuaaau

SEQ ID NO: 3416240 - RNA, 14 nt, Human
aaaugaggaaugua

SEQ ID NO: 3416241 - RNA, 18 nt, Human
aaaugaggaauguauaug

SEQ ID NO: 3416242 - RNA, 19 nt, Human
aaaugaggaauguauaugu

SEQ ID NO: 3416243 - RNA, 15 nt, Human
aaaugaggaggaugc

SEQ ID NO: 3416244 - RNA, 22 nt, Human
aaaugaggaggaugcuaaaaau

SEQ ID NO: 3416245 - RNA, 19 nt, Human
aaaugaggccauggacucu

SEQ ID NO: 3416246 - RNA, 22 nt, Human
aacauguggcuugaauuaagaa

SEQ ID NO: 3416247 - RNA, 13 nt, Human
aacauguguacuu

SEQ ID NO: 3416248 - RNA, 22 nt, Human
aacauguuaaugacaauauucc

SEQ ID NO: 3416249 - RNA, 20 nt, Human
aacauguuauuuguaauaga

SEQ ID NO: 3416250 - RNA, 16 nt, Human
aacauguugguauuua

SEQ ID NO: 3416251 - RNA, 21 nt, Human
aacauguugguauuuaucuau

SEQ ID NO: 3416252 - RNA, 11 nt, Human
aacauguuucc

SEQ ID NO: 3416253 - RNA, 17 nt, Human
aacauguuuccagcauu

SEQ ID NO: 3416254 - RNA, 15 nt, Human
aacauuaaaaaugga

SEQ ID NO: 3416255 - RNA, 21 nt, Human
aacauuaaaaauggaacugug

SEQ ID NO: 3416256 - RNA, 18 nt, Human
aacauuaaaugucuuaua

SEQ ID NO: 3416257 - RNA, 14 nt, Human
aacauuaagaaaau

SEQ ID NO: 3416258 - RNA, 18 nt, Human
aacauuaagaaaaucaua

SEQ ID NO: 3416259 - RNA, 19 nt, Human
aacauuaauagcagccuuu

SEQ ID NO: 3416260 - RNA, 12 nt, Human
aacauuaauguu

SEQ ID NO: 3416261 - RNA, 17 nt, Human
aacauuaauguugauuu

SEQ ID NO: 3416262 - RNA, 15 nt, Human
aacauuaguacuuua

SEQ ID NO: 3416263 - RNA, 20 nt, Human
aacauuauuacuuuuccucu

SEQ ID NO: 3416264 - RNA, 16 nt, Human
aacauuauuuauucag

SEQ ID NO: 3416265 - RNA, 14 nt, Human
aacauucaggagcu

SEQ ID NO: 3416266 - RNA, 18 nt, Human
aacauucaugcucauugc

SEQ ID NO: 3416267 - RNA, 12 nt, Human
aacauuccaaga

SEQ ID NO: 3416268 - RNA, 13 nt, Human
aacauuccauccu

SEQ ID NO: 3416269 - RNA, 14 nt, Human
aacauuccauccuu

SEQ ID NO: 3416270 - RNA, 22 nt, Human
aacauuccguuuacauuuuaga

SEQ ID NO: 3416271 - RNA, 18 nt, Human
aacauuccuaaaaugcuu

SEQ ID NO: 3416272 - RNA, 20 nt, Human
aacauuccucaugaauguaa

SEQ ID NO: 3416273 - RNA, 21 nt, Human
aacauuccucaugaauguaaa

SEQ ID NO: 3416274 - RNA, 16 nt, Human
aacauucugauuugga

SEQ ID NO: 3416275 - RNA, 18 nt, Human
aacauucugauuuggaaa

SEQ ID NO: 3416276 - RNA, 20 nt, Human
aacauugaccaagaacugca

SEQ ID NO: 3416277 - RNA, 23 nt, Human
aacauugaccaagaacugcaugg

SEQ ID NO: 3416278 - RNA, 16 nt, Human
aacauugcaauagaaa

SEQ ID NO: 3416279 - RNA, 20 nt, Human
aacauugcauauaacuuaua

SEQ ID NO: 3416280 - RNA, 14 nt, Human
aacauugccuauuu

SEQ ID NO: 3416281 - RNA, 14 nt, Human
aacauugcuuuuaa

SEQ ID NO: 3416282 - RNA, 17 nt, Human
aacauugcuuuuaaaac

SEQ ID NO: 3416283 - RNA, 12 nt, Human
aacauuggaagc

SEQ ID NO: 3416284 - RNA, 16 nt, Human
aacauuggaagcaggu

SEQ ID NO: 3416285 - RNA, 21 nt, Human
aacauuggaauguucucagau

SEQ ID NO: 3416286 - RNA, 18 nt, Human
aacauugggaaaucuuau

SEQ ID NO: 3416287 - RNA, 16 nt, Human
aacauugguucuugua

SEQ ID NO: 3416288 - RNA, 16 nt, Human
aacauuguagccucaa

SEQ ID NO: 3416289 - RNA, 13 nt, Human
aacauuguguucc

SEQ ID NO: 3416290 - RNA, 15 nt, Human
aacauuguuccagau

SEQ ID NO: 3416291 - RNA, 17 nt, Human
aacauuguuccagauuc

SEQ ID NO: 3416292 - RNA, 20 nt, Human
aacauuguugcucccuguga

SEQ ID NO: 3416293 - RNA, 15 nt, Human
aacauuuacaguccu

SEQ ID NO: 3416294 - RNA, 14 nt, Human
aacauuuacaugua

SEQ ID NO: 3416295 - RNA, 13 nt, Human
aacauuuacuaca

SEQ ID NO: 3416296 - RNA, 15 nt, Human
aaccuuuagggcagc

SEQ ID NO: 3416297 - RNA, 16 nt, Human
aaccuuuagggcagcu

SEQ ID NO: 3416298 - RNA, 13 nt, Human
aaccuuuccccca

SEQ ID NO: 3416299 - RNA, 20 nt, Human
aaccuuucccucacccccuc

SEQ ID NO: 3416300 - RNA, 16 nt, Human
aaccuuugugcccuau

SEQ ID NO: 3416301 - RNA, 20 nt, Human
aaccuuuuacugguugcaug

SEQ ID NO: 3416302 - RNA, 18 nt, Human
aaccuuuuuuaagauuuu

SEQ ID NO: 3416303 - RNA, 14 nt, Human
aacgaaaaucauug

SEQ ID NO: 3416304 - RNA, 21 nt, Human
aacgaaagcugggcaacaugc

SEQ ID NO: 3416305 - RNA, 21 nt, Human
aacgaaccuuggccugggccg

SEQ ID NO: 3416306 - RNA, 13 nt, Human
aacgaagaaaaaa

SEQ ID NO: 3416307 - RNA, 14 nt, Human
aacgaagaaaaaaa

SEQ ID NO: 3416308 - RNA, 12 nt, Human
aacgaaguuggg

SEQ ID NO: 3416309 - RNA, 18 nt, Human
aacgacaaaucugucugc

SEQ ID NO: 3416310 - RNA, 14 nt, Human
aacgacaauagcuu

SEQ ID NO: 3416311 - RNA, 17 nt, Human
aacgaucacaaaugacu

SEQ ID NO: 3416312 - RNA, 22 nt, Human
aacgaugaugcuuguaacaaga

SEQ ID NO: 3416313 - RNA, 13 nt, Human
aacgaugugucug

SEQ ID NO: 3416314 - RNA, 14 nt, Human
aacgauuuuuaaaa

SEQ ID NO: 3416315 - RNA, 18 nt, Human
aacgauuuuuaaaaugua

SEQ ID NO: 3416316 - RNA, 19 nt, Human
aacgauuuuuaaaauguac

SEQ ID NO: 3416317 - RNA, 20 nt, Human
aacgcaaagggcugaaagcc

SEQ ID NO: 3416318 - RNA, 13 nt, Human
aacgcagcccuag

SEQ ID NO: 3416319 - RNA, 21 nt, Human
aacgcagcccuagagccugcc

SEQ ID NO: 3416320 - RNA, 22 nt, Human
aacgcagcccuagagccugccu

SEQ ID NO: 3416321 - RNA, 16 nt, Human
aacgcagcccugcuuu

SEQ ID NO: 3416322 - RNA, 23 nt, Human
aacgcaucuaguuccccuguuua

SEQ ID NO: 3416323 - RNA, 18 nt, Human
aacgcauggaguguguau

SEQ ID NO: 3416324 - RNA, 22 nt, Human
aacgcauggaguguguauuguu

SEQ ID NO: 3416325 - RNA, 22 nt, Human
aacgccccagauaccagccccu

SEQ ID NO: 3416326 - RNA, 17 nt, Human
aacgccuccccugcccc

SEQ ID NO: 3416327 - RNA, 12 nt, Human
aacgccugagcc

SEQ ID NO: 3416328 - RNA, 17 nt, Human
aacgccugagcccaggg

SEQ ID NO: 3416329 - RNA, 14 nt, Human
aacgcgaaaccaau

SEQ ID NO: 3416330 - RNA, 16 nt, Human
aacgcguguguacacg

SEQ ID NO: 3416331 - RNA, 16 nt, Human
aacgcuaucugggaag

SEQ ID NO: 3416332 - RNA, 20 nt, Human
aacgcucuagguacgaugac

SEQ ID NO: 3416333 - RNA, 14 nt, Human
aacgcugccugccc

SEQ ID NO: 3416334 - RNA, 16 nt, Human
aacgcugucaaaaguu

SEQ ID NO: 3416335 - RNA, 17 nt, Human
aacggaacguuggacuu

SEQ ID NO: 3416336 - RNA, 23 nt, Human
aacggaggccugcgacccugggg

SEQ ID NO: 3416337 - RNA, 14 nt, Human
aacggaugauuucu

SEQ ID NO: 3416338 - RNA, 17 nt, Human
aacggaugauuucuaug

SEQ ID NO: 3416339 - RNA, 18 nt, Human
aacggauuauuuuuucag

SEQ ID NO: 3416340 - RNA, 21 nt, Human
aacggauuauuuuuucagacc

SEQ ID NO: 3416341 - RNA, 17 nt, Human
aacggccccagcuucuc

SEQ ID NO: 3416342 - RNA, 19 nt, Human
aacggcccugcagccagcu

SEQ ID NO: 3416343 - RNA, 14 nt, Human
aacggcuccaggau

SEQ ID NO: 3416344 - RNA, 12 nt, Human
aacggggagaaa

SEQ ID NO: 3416345 - RNA, 15 nt, Human
aacgggguccuucaa

SEQ ID NO: 3416346 - RNA, 17 nt, Human
aacgggucguaaugacu

SEQ ID NO: 3416347 - RNA, 22 nt, Human
aacgguacacagacuauugaca

SEQ ID NO: 3416348 - RNA, 13 nt, Human
aacgguuaaaacu

SEQ ID NO: 3416349 - RNA, 19 nt, Human
aacguaagcacuguuuuuc

SEQ ID NO: 3416350 - RNA, 21 nt, Human
aacguagucggcacagccugg

SEQ ID NO: 3416351 - RNA, 18 nt, Human
aacguaugcaugugaaga

SEQ ID NO: 3416352 - RNA, 12 nt, Human
aacgugaaaaug

SEQ ID NO: 3416353 - RNA, 15 nt, Human
aacgugaugaucagc

SEQ ID NO: 3416354 - RNA, 21 nt, Human
aacgugaugugcucaucagaa

SEQ ID NO: 3416355 - RNA, 23 nt, Human
aacgugaugugcucaucagaaac

SEQ ID NO: 3416356 - RNA, 20 nt, Human
aacgugcaacugacacuccc

SEQ ID NO: 3416357 - RNA, 11 nt, Human
aacgugcauug

SEQ ID NO: 3416358 - RNA, 14 nt, Human
aacgugcauugugc

SEQ ID NO: 3416359 - RNA, 20 nt, Human
aacgugcucuuuguuuugug

SEQ ID NO: 3416360 - RNA, 15 nt, Human
aacguggcugcuuca

SEQ ID NO: 3416361 - RNA, 16 nt, Human
aacguggcugcuucaa

SEQ ID NO: 3416362 - RNA, 19 nt, Human
aacguggcugcuucaagga

SEQ ID NO: 3416363 - RNA, 22 nt, Human
aacguggcugcuucaaggaucc

SEQ ID NO: 3416364 - RNA, 18 nt, Human
aacgugggaguucagcug

SEQ ID NO: 3416365 - RNA, 18 nt, Human
aacgugggauucagagaa

SEQ ID NO: 3416366 - RNA, 18 nt, Human
aacguggggcagcacaga

SEQ ID NO: 3416367 - RNA, 14 nt, Human
aacguguauguuuu

SEQ ID NO: 3416368 - RNA, 16 nt, Human
aacgugugcuguguuu

SEQ ID NO: 3416369 - RNA, 16 nt, Human
aacguguucaauauuu

SEQ ID NO: 3416370 - RNA, 20 nt, Human
aacguuacucagggcuccuc

SEQ ID NO: 3416371 - RNA, 16 nt, Human
aacguugcugugggaa

SEQ ID NO: 3416372 - RNA, 20 nt, Human
aacguuugguucaaaugugu

SEQ ID NO: 3416373 - RNA, 13 nt, Human
aacguuuuauugu

SEQ ID NO: 3416374 - RNA, 15 nt, Human
aacguuuuauugugu

SEQ ID NO: 3416375 - RNA, 13 nt, Human
aacguuuucuaau

SEQ ID NO: 3416376 - RNA, 15 nt, Human
aacguuuugaacuaa

SEQ ID NO: 3416377 - RNA, 20 nt, Human
aacuaaaacaaagccacuuu

SEQ ID NO: 3416378 - RNA, 16 nt, Human
aacuaaacuaguuuuu

SEQ ID NO: 3416379 - RNA, 18 nt, Human
aacuaaacucuuaccaua

SEQ ID NO: 3416380 - RNA, 13 nt, Human
aacuaaagcaaua

SEQ ID NO: 3416381 - RNA, 16 nt, Human
aacuaaaguuguacuu

SEQ ID NO: 3416382 - RNA, 15 nt, Human
aacuaaauagcaugu

SEQ ID NO: 3416383 - RNA, 13 nt, Human
aacuaaauguucu

SEQ ID NO: 3416384 - RNA, 18 nt, Human
aacuaaauguucuauggu

SEQ ID NO: 3416385 - RNA, 20 nt, Human
aacuaaauuugauacuuaua

SEQ ID NO: 3416386 - RNA, 14 nt, Human
aacuaaauuuuaaa

SEQ ID NO: 3416387 - RNA, 16 nt, Human
aacuaaauuuuaaagc

SEQ ID NO: 3416388 - RNA, 18 nt, Human
aacuaaauuuuaaagcca

SEQ ID NO: 3416389 - RNA, 16 nt, Human
aacuaacacuauuuua

SEQ ID NO: 3416390 - RNA, 19 nt, Human
aacuaagaaacuuaaauuu

SEQ ID NO: 3416391 - RNA, 16 nt, Human
aacuaagauucuuuua

SEQ ID NO: 3416392 - RNA, 17 nt, Human
aacuaagauucuuuuaa

SEQ ID NO: 3416393 - RNA, 18 nt, Human
aacuaagcagucccugag

SEQ ID NO: 3416394 - RNA, 17 nt, Human
aacuaagcccccgcugu

SEQ ID NO: 3416395 - RNA, 19 nt, Human
aacuaagcccccgcuguaa

SEQ ID NO: 3416396 - RNA, 22 nt, Human
aacuaaggugcuaaaucugcga

SEQ ID NO: 3416397 - RNA, 16 nt, Human
aacuaauaaaauauuu

SEQ ID NO: 3416398 - RNA, 22 nt, Human
aacuaauaaaauauuuucugug

SEQ ID NO: 3416399 - RNA, 19 nt, Human
aacuaaucuauuggguuca

SEQ ID NO: 3416400 - RNA, 12 nt, Human
aacuaaugaguu

SEQ ID NO: 3416401 - RNA, 15 nt, Human
aacuaaugccuuacu

SEQ ID NO: 3416402 - RNA, 15 nt, Human
aacuacaaacaaaau

SEQ ID NO: 3416403 - RNA, 16 nt, Human
aacuacaaagguuuaa

SEQ ID NO: 3416404 - RNA, 17 nt, Human
aacuacaaagguuuaaa

SEQ ID NO: 3416405 - RNA, 15 nt, Human
aacuacauuuaugag

SEQ ID NO: 3416406 - RNA, 14 nt, Human
aacuacauuuuaac

SEQ ID NO: 3416407 - RNA, 15 nt, Human
aacuaccuguauuua

SEQ ID NO: 3416408 - RNA, 20 nt, Human
aacuacuaccuguaaugaca

SEQ ID NO: 3416409 - RNA, 18 nt, Human
aacuacuaucucagagau

SEQ ID NO: 3416410 - RNA, 17 nt, Human
aacuacucagggaauga

SEQ ID NO: 3416411 - RNA, 17 nt, Human
aacuacuguguuaugca

SEQ ID NO: 3416412 - RNA, 16 nt, Human
aacuacuguguuccug

SEQ ID NO: 3416413 - RNA, 22 nt, Human
aacuacuucucuuguuagguaa

SEQ ID NO: 3416414 - RNA, 14 nt, Human
aacuacuugauuuu

SEQ ID NO: 3416415 - RNA, 15 nt, Human
aacuacuuuauaacu

SEQ ID NO: 3416416 - RNA, 16 nt, Human
aacuagaaccuggagg

SEQ ID NO: 3416417 - RNA, 17 nt, Human
aacuagaauuuauucaa

SEQ ID NO: 3416418 - RNA, 17 nt, Human
aacuagaauuucauuua

SEQ ID NO: 3416419 - RNA, 17 nt, Human
aacuagacaccaaaguu

SEQ ID NO: 3416420 - RNA, 20 nt, Human
aacuagagaugacugagucc

SEQ ID NO: 3416421 - RNA, 21 nt, Human
aacuagagaugugcaauugau

SEQ ID NO: 3416422 - RNA, 21 nt, Human
aacuagaguuuagcuggaaaa

SEQ ID NO: 3416423 - RNA, 15 nt, Human
aacuagaugaccuca

SEQ ID NO: 3416424 - RNA, 17 nt, Human
aacuagauggugcugag

SEQ ID NO: 3416425 - RNA, 20 nt, Human
aacuagauggugcugagaag

SEQ ID NO: 3416426 - RNA, 17 nt, Human
aacuagcauaucugccu

SEQ ID NO: 3416427 - RNA, 18 nt, Human
aacuagcauaucugccuu

SEQ ID NO: 3416428 - RNA, 15 nt, Human
aacuagcauuguaaa

SEQ ID NO: 3416429 - RNA, 13 nt, Human
aacuagccccugg

SEQ ID NO: 3416430 - RNA, 18 nt, Human
aacuaggaaggcacuucu

SEQ ID NO: 3416431 - RNA, 14 nt, Human
aacuaggaucagaa

SEQ ID NO: 3416432 - RNA, 15 nt, Human
aacuaggcugagcaa

SEQ ID NO: 3416433 - RNA, 15 nt, Human
aacuaguccuuuacu

SEQ ID NO: 3416434 - RNA, 20 nt, Human
aacuagugguggcucugaga

SEQ ID NO: 3416435 - RNA, 14 nt, Human
aacuaguguacauu

SEQ ID NO: 3416436 - RNA, 23 nt, Human
aacuaguuuuuccuaucauguua

SEQ ID NO: 3416437 - RNA, 20 nt, Human
aacuaucucauuuccaagca

SEQ ID NO: 3416438 - RNA, 23 nt, Human
aacuaucucauuuccaagcaagu

SEQ ID NO: 3416439 - RNA, 19 nt, Human
aacuaucuggccauauuua

SEQ ID NO: 3416440 - RNA, 11 nt, Human
aacuaucuugg

SEQ ID NO: 3416441 - RNA, 15 nt, Human
aaauuuauuuccaau

SEQ ID NO: 3416442 - RNA, 20 nt, Human
aaauuuauuuccuaguucug

SEQ ID NO: 3416443 - RNA, 23 nt, Human
aaauuuauuuuauaagaaaaacu

SEQ ID NO: 3416444 - RNA, 21 nt, Human
aaauuucaaaagacauguugu

SEQ ID NO: 3416445 - RNA, 22 nt, Human
aaauuuccaguaccuuugucac

SEQ ID NO: 3416446 - RNA, 23 nt, Human
aacuauuuaucuguguuuuugaa

SEQ ID NO: 3416447 - RNA, 17 nt, Human
aacuauuucuuauauau

SEQ ID NO: 3416448 - RNA, 18 nt, Human
aacuauuugucuuucagg

SEQ ID NO: 3416449 - RNA, 15 nt, Human
aacucaaaauauuug

SEQ ID NO: 3416450 - RNA, 17 nt, Human
aacucaaacucuuaaaa

SEQ ID NO: 3416451 - RNA, 22 nt, Human
aacucaaacugaggaauuucac

SEQ ID NO: 3416452 - RNA, 11 nt, Human
aacucaaaugc

SEQ ID NO: 3416453 - RNA, 22 nt, Human
aacucaaaugcuuggcuucuca

SEQ ID NO: 3416454 - RNA, 21 nt, Human
aacucaaauggggccagaucc

SEQ ID NO: 3416455 - RNA, 22 nt, Human
aacucaaauggggccagaucca

SEQ ID NO: 3416456 - RNA, 12 nt, Human
aacucaacaugg

SEQ ID NO: 3416457 - RNA, 17 nt, Human
aacucaaccaaauggua

SEQ ID NO: 3416458 - RNA, 23 nt, Human
aacucaaggauaccuucuuauuu

SEQ ID NO: 3416459 - RNA, 14 nt, Human
aacucacaaaugau

SEQ ID NO: 3416460 - RNA, 12 nt, Human
aacucaccccag

SEQ ID NO: 3416461 - RNA, 17 nt, Human
aacucaccuaauguuua

SEQ ID NO: 3416462 - RNA, 17 nt, Human
aacucaccucucaaggu

SEQ ID NO: 3416463 - RNA, 15 nt, Human
aacucaccugccccu

SEQ ID NO: 3416464 - RNA, 12 nt, Human
aacucaccugcu

SEQ ID NO: 3416465 - RNA, 22 nt, Human
aacucaccugcuggccccucac

SEQ ID NO: 3416466 - RNA, 15 nt, Human
aacucaccuggggcu

SEQ ID NO: 3416467 - RNA, 20 nt, Human
aacucaccuggggcugcugg

SEQ ID NO: 3416468 - RNA, 20 nt, Human
aacucacuccuuuuaaagaa

SEQ ID NO: 3416469 - RNA, 13 nt, Human
aacucacucuggg

SEQ ID NO: 3416470 - RNA, 12 nt, Human
aacucagaaggg

SEQ ID NO: 3416471 - RNA, 17 nt, Human
aacucagccaagcacag

SEQ ID NO: 3416472 - RNA, 21 nt, Human
aacucagccaagcacaguggu

SEQ ID NO: 3416473 - RNA, 17 nt, Human
aacucagccugggacag

SEQ ID NO: 3416474 - RNA, 15 nt, Human
aacucaggacuccag

SEQ ID NO: 3416475 - RNA, 18 nt, Human
aacucaggacuccagccc

SEQ ID NO: 3416476 - RNA, 18 nt, Human
aacucaguuuuaacuaga

SEQ ID NO: 3416477 - RNA, 21 nt, Human
aacucauaaucuauaaacaau

SEQ ID NO: 3416478 - RNA, 23 nt, Human
aacucauacacucguaugauacu

SEQ ID NO: 3416479 - RNA, 18 nt, Human
aacucauaccuuuaaagg

SEQ ID NO: 3416480 - RNA, 16 nt, Human
aacucauacugugcug

SEQ ID NO: 3416481 - RNA, 22 nt, Human
aacucauacugugcuggagcca

SEQ ID NO: 3416482 - RNA, 16 nt, Human
aacucauauuuucaug

SEQ ID NO: 3416483 - RNA, 18 nt, Human
aacucaucacuguggcug

SEQ ID NO: 3416484 - RNA, 14 nt, Human
aacucaucauaaaa

SEQ ID NO: 3416485 - RNA, 17 nt, Human
aacucaucauaaaauaa

SEQ ID NO: 3416486 - RNA, 14 nt, Human
aacucaucugaaau

SEQ ID NO: 3416487 - RNA, 23 nt, Human
aacucauuagacuggaacuugaa

SEQ ID NO: 3416488 - RNA, 14 nt, Human
aacucauuccagau

SEQ ID NO: 3416489 - RNA, 15 nt, Human
aacucauuccagauc

SEQ ID NO: 3416490 - RNA, 19 nt, Human
aacucauuccugccugucu

SEQ ID NO: 3416491 - RNA, 22 nt, Human
aacucauugcucuguuaauaau

SEQ ID NO: 3416492 - RNA, 12 nt, Human
aacucauuucua

SEQ ID NO: 3416493 - RNA, 23 nt, Human
aacuccaccaacccaucagaagg

SEQ ID NO: 3416494 - RNA, 15 nt, Human
aacuccaccuuccca

SEQ ID NO: 3416495 - RNA, 14 nt, Human
aacuccagaaagug

SEQ ID NO: 3416496 - RNA, 21 nt, Human
aacuccagaaagugacaagcu

SEQ ID NO: 3416497 - RNA, 10 nt, Human
aacuccaggg

SEQ ID NO: 3416498 - RNA, 18 nt, Human
aacuccaguacuggagcu

SEQ ID NO: 3416499 - RNA, 16 nt, Human
aacucccaucaccucu

SEQ ID NO: 3416500 - RNA, 17 nt, Human
aacuccccuguuucaau

SEQ ID NO: 3416501 - RNA, 18 nt, Human
aacuccgcccccagccua

SEQ ID NO: 3416502 - RNA, 21 nt, Human
aacuccggauugcguuccucc

SEQ ID NO: 3416503 - RNA, 21 nt, Human
aacuccuagggccacugaaga

SEQ ID NO: 3416504 - RNA, 14 nt, Human
aacuccuaguucua

SEQ ID NO: 3416505 - RNA, 15 nt, Human
aacuccuaguucuag

SEQ ID NO: 3416506 - RNA, 21 nt, Human
aacuccucacacacccugagg

SEQ ID NO: 3416507 - RNA, 22 nt, Human
aacuccucacacacccugaggu

SEQ ID NO: 3416508 - RNA, 14 nt, Human
aacuccucccaggg

SEQ ID NO: 3416509 - RNA, 16 nt, Human
aacuccugacagucuu

SEQ ID NO: 3416510 - RNA, 14 nt, Human
aacuccugaccuca

SEQ ID NO: 3416511 - RNA, 12 nt, Human
aacuccugcccc

SEQ ID NO: 3416512 - RNA, 17 nt, Human
aacuccugccccuguuc

SEQ ID NO: 3416513 - RNA, 21 nt, Human
aacuccugugaccacaacaug

SEQ ID NO: 3416514 - RNA, 14 nt, Human
aacuccuuccuggc

SEQ ID NO: 3416515 - RNA, 11 nt, Human
aacuccuuggc

SEQ ID NO: 3416516 - RNA, 13 nt, Human
aacuccuuggccu

SEQ ID NO: 3416517 - RNA, 18 nt, Human
aacuccuuuagcaggugg

SEQ ID NO: 3416518 - RNA, 21 nt, Human
aacucgguguccccaccaucu

SEQ ID NO: 3416519 - RNA, 15 nt, Human
aacucguauagcaug

SEQ ID NO: 3416520 - RNA, 21 nt, Human
aacucuaauucccauuuugca

SEQ ID NO: 3416521 - RNA, 23 nt, Human
aacucuauauuguucagcaugca

SEQ ID NO: 3416522 - RNA, 21 nt, Human
aacucuaucggagaacaugaa

SEQ ID NO: 3416523 - RNA, 14 nt, Human
aacucuaucugggc

SEQ ID NO: 3416524 - RNA, 21 nt, Human
aacucuaucugggccugggcu

SEQ ID NO: 3416525 - RNA, 14 nt, Human
aacucuauuuagau

SEQ ID NO: 3416526 - RNA, 15 nt, Human
aacucuccuccagag

SEQ ID NO: 3416527 - RNA, 18 nt, Human
aacucuccuccagaguca

SEQ ID NO: 3416528 - RNA, 16 nt, Human
aacucuccucugcugc

SEQ ID NO: 3416529 - RNA, 22 nt, Human
aacucucuccacccuauaugua

SEQ ID NO: 3416530 - RNA, 12 nt, Human
aacucucugaac

SEQ ID NO: 3416531 - RNA, 18 nt, Human
aacucucuuauugccuca

SEQ ID NO: 3416532 - RNA, 12 nt, Human
aacucugaauaa

SEQ ID NO: 3416533 - RNA, 18 nt, Human
aacucugaauaagcacuu

SEQ ID NO: 3416534 - RNA, 23 nt, Human
aacucugaauuuaucuuugauaa

SEQ ID NO: 3416535 - RNA, 22 nt, Human
aacucugacaacagacuucuga

SEQ ID NO: 3416536 - RNA, 23 nt, Human
aacucugacaacagacuucugaa

SEQ ID NO: 3416537 - RNA, 21 nt, Human
aacucugacaagggcugaccu

SEQ ID NO: 3416538 - RNA, 19 nt, Human
aacucugagugcaaacuuc

SEQ ID NO: 3416539 - RNA, 21 nt, Human
aacucugauguaaaugaagua

SEQ ID NO: 3416540 - RNA, 11 nt, Human
aacucugcugu

SEQ ID NO: 3416541 - RNA, 16 nt, Human
aacucuggcuuccagg

SEQ ID NO: 3416542 - RNA, 20 nt, Human
aacucuggcuuccagguauc

SEQ ID NO: 3416543 - RNA, 15 nt, Human
aacucuggcuuuugg

SEQ ID NO: 3416544 - RNA, 20 nt, Human
aacucugucuucaccugauu

SEQ ID NO: 3416545 - RNA, 23 nt, Human
aacucugucuucaccugauucaa

SEQ ID NO: 3416546 - RNA, 16 nt, Human
aacucuguggcauuau

SEQ ID NO: 3416547 - RNA, 20 nt, Human
aacucuguguugugaauguc

SEQ ID NO: 3416548 - RNA, 16 nt, Human
aacucuguuacacuuu

SEQ ID NO: 3416549 - RNA, 19 nt, Human
aacucuguugcaagugcaa

SEQ ID NO: 3416550 - RNA, 22 nt, Human
aacucuuaaucaaauagcauaa

SEQ ID NO: 3416551 - RNA, 22 nt, Human
aacucuuauaaauuucuauuuu

SEQ ID NO: 3416552 - RNA, 18 nt, Human
aacucuucacaaaaucug

SEQ ID NO: 3416553 - RNA, 17 nt, Human
aacucuucacucuucaa

SEQ ID NO: 3416554 - RNA, 23 nt, Human
aacucuucacucuucaaaugccu

SEQ ID NO: 3416555 - RNA, 11 nt, Human
aacucuuccuc

SEQ ID NO: 3416556 - RNA, 17 nt, Human
aacucuucucauuacuu

SEQ ID NO: 3416557 - RNA, 11 nt, Human
aacucuuuaac

SEQ ID NO: 3416558 - RNA, 13 nt, Human
aacucuuuaacuu

SEQ ID NO: 3416559 - RNA, 14 nt, Human
aacucuuugagaaa

SEQ ID NO: 3416560 - RNA, 13 nt, Human
aacucuuugcugc

SEQ ID NO: 3416561 - RNA, 23 nt, Human
aacucuuugcugcugcccauguu

SEQ ID NO: 3416562 - RNA, 19 nt, Human
aacugaaaacaagccauga

SEQ ID NO: 3416563 - RNA, 19 nt, Human
aacugaaaacauaaaaagu

SEQ ID NO: 3416564 - RNA, 12 nt, Human
aacugaaaagac

SEQ ID NO: 3416565 - RNA, 13 nt, Human
aacugaaaauuau

SEQ ID NO: 3416566 - RNA, 17 nt, Human
aacugaaauuaaaacua

SEQ ID NO: 3416567 - RNA, 23 nt, Human
aacugaacaccauugaaggcuua

SEQ ID NO: 3416568 - RNA, 15 nt, Human
aacugaacauuccag

SEQ ID NO: 3416569 - RNA, 20 nt, Human
aacugaacucugacaacaga

SEQ ID NO: 3416570 - RNA, 15 nt, Human
aacugaacuuugaag

SEQ ID NO: 3416571 - RNA, 15 nt, Human
aacugaagagacagu

SEQ ID NO: 3416572 - RNA, 17 nt, Human
aacugaagauguugaga

SEQ ID NO: 3416573 - RNA, 18 nt, Human
aacugaagcagccucucc

SEQ ID NO: 3416574 - RNA, 21 nt, Human
aacugaagcagccucucccca

SEQ ID NO: 3416575 - RNA, 14 nt, Human
aacugaagucugaa

SEQ ID NO: 3416576 - RNA, 18 nt, Human
aacugaauaccacucugu

SEQ ID NO: 3416577 - RNA, 12 nt, Human
aacugaaugaga

SEQ ID NO: 3416578 - RNA, 15 nt, Human
aacugaauuuugucu

SEQ ID NO: 3416579 - RNA, 10 nt, Human
aacugacaag

SEQ ID NO: 3416580 - RNA, 16 nt, Human
aacugacaagccaucu

SEQ ID NO: 3416581 - RNA, 19 nt, Human
aacugacaagcuccauuua

SEQ ID NO: 3416582 - RNA, 12 nt, Human
aacugacacagg

SEQ ID NO: 3416583 - RNA, 20 nt, Human
aacugacaugauuagcagaa

SEQ ID NO: 3416584 - RNA, 19 nt, Human
aacugaccagccuccaugc

SEQ ID NO: 3416585 - RNA, 20 nt, Human
aacugacucuuaagaagacu

SEQ ID NO: 3416586 - RNA, 21 nt, Human
aacuuagaauaaaauuguaaa

SEQ ID NO: 3416587 - RNA, 20 nt, Human
aacuuagaucaucagucacc

SEQ ID NO: 3416588 - RNA, 16 nt, Human
aacuuagauuuuacau

SEQ ID NO: 3416589 - RNA, 19 nt, Human
aacuuagauuuuacaugaa

SEQ ID NO: 3416590 - RNA, 21 nt, Human
aacuuagccauuuuucaaagc

SEQ ID NO: 3416591 - RNA, 21 nt, Human
aacuuaggcaugcacagcugu

SEQ ID NO: 3416592 - RNA, 23 nt, Human
aacuuagugcggacaaguuuuaa

SEQ ID NO: 3416593 - RNA, 16 nt, Human
aacuuaguuugugaau

SEQ ID NO: 3416594 - RNA, 15 nt, Human
aacuuauaaaucaua

SEQ ID NO: 3416595 - RNA, 13 nt, Human
aacuuauauugaa

SEQ ID NO: 3416596 - RNA, 19 nt, Human
aacuuauauugaagacaau

SEQ ID NO: 3416597 - RNA, 20 nt, Human
aacuuauauuguaagaaaua

SEQ ID NO: 3416598 - RNA, 19 nt, Human
aacuuauccuaaaacaaau

SEQ ID NO: 3416599 - RNA, 17 nt, Human
aacuuaucuuacaaagu

SEQ ID NO: 3416600 - RNA, 19 nt, Human
aacuuaucuuacaaagugu

SEQ ID NO: 3416601 - RNA, 21 nt, Human
aacuuauguagauauuuggcu

SEQ ID NO: 3416602 - RNA, 22 nt, Human
aacuuauguagauauuuggcuu

SEQ ID NO: 3416603 - RNA, 21 nt, Human
aacuuauuaaauggaaacuga

SEQ ID NO: 3416604 - RNA, 16 nt, Human
aacuuauugcugauuu

SEQ ID NO: 3416605 - RNA, 23 nt, Human
aaauuuccaguaccuuugucaca

SEQ ID NO: 3416606 - RNA, 22 nt, Human
aaauuuccugggagcuuuugua

SEQ ID NO: 3416607 - RNA, 14 nt, Human
aaauuucuuaugug

SEQ ID NO: 3416608 - RNA, 15 nt, Human
aaauuucuuauguga

SEQ ID NO: 3416609 - RNA, 13 nt, Human
aaauuugaaacau

SEQ ID NO: 3416610 - RNA, 14 nt, Human
aaauuugaaacauu

SEQ ID NO: 3416611 - RNA, 18 nt, Human
aaauuugaaccaaaacau

SEQ ID NO: 3416612 - RNA, 15 nt, Human
aaauuugaauuuugu

SEQ ID NO: 3416613 - RNA, 17 nt, Human
aaauuugacuaauuuua

SEQ ID NO: 3416614 - RNA, 18 nt, Human
aaauuugauacuuauauu

SEQ ID NO: 3416615 - RNA, 17 nt, Human
aaauuugauugauuuga

SEQ ID NO: 3416616 - RNA, 13 nt, Human
aaauuugcuagca

SEQ ID NO: 3416617 - RNA, 18 nt, Human
aaauuuggccaaacaagu

SEQ ID NO: 3416618 - RNA, 12 nt, Human
aaauuuguaagu

SEQ ID NO: 3416619 - RNA, 17 nt, Human
aaauuuguaaguuucag

SEQ ID NO: 3416620 - RNA, 20 nt, Human
aaauuuguaaguuucaggug

SEQ ID NO: 3416621 - RNA, 11 nt, Human
aaauuuguacu

SEQ ID NO: 3416622 - RNA, 21 nt, Human
aaauuugucugaaacauuuca

SEQ ID NO: 3416623 - RNA, 23 nt, Human
aaauuugucuugccuuauuaaag

SEQ ID NO: 3416624 - RNA, 12 nt, Human
aaauuuguguaa

SEQ ID NO: 3416625 - RNA, 18 nt, Human
aaauuuguuauaaugaau

SEQ ID NO: 3416626 - RNA, 18 nt, Human
aaauuuguugaaauuaug

SEQ ID NO: 3416627 - RNA, 14 nt, Human
aaauuuguugcaua

SEQ ID NO: 3416628 - RNA, 18 nt, Human
aaauuuguuugaaaucuu

SEQ ID NO: 3416629 - RNA, 12 nt, Human
aaauuuuaaagc

SEQ ID NO: 3416630 - RNA, 22 nt, Human
aaauuuuaauauggguucuuuu

SEQ ID NO: 3416631 - RNA, 14 nt, Human
aaauuuuaauuuau

SEQ ID NO: 3416632 - RNA, 15 nt, Human
aaauuuuaguccaaa

SEQ ID NO: 3416633 - RNA, 22 nt, Human
aaauuuuauaagcaaauuucaa

SEQ ID NO: 3416634 - RNA, 17 nt, Human
aaauuuuaucucuuauu

SEQ ID NO: 3416635 - RNA, 13 nt, Human
aaauuuuauuccu

SEQ ID NO: 3416636 - RNA, 23 nt, Human
aaauuuuccuguccucuuucagc

SEQ ID NO: 3416637 - RNA, 19 nt, Human
aaauuuucuagacuuucug

SEQ ID NO: 3416638 - RNA, 14 nt, Human
aaauuuucuucagu

SEQ ID NO: 3416639 - RNA, 18 nt, Human
aaauuuucuucaguuggu

SEQ ID NO: 3416640 - RNA, 17 nt, Human
aaauuuucuugauuuga

SEQ ID NO: 3416641 - RNA, 14 nt, Human
aaauuuugaaaagu

SEQ ID NO: 3416642 - RNA, 18 nt, Human
aaauuuugauguuuuaag

SEQ ID NO: 3416643 - RNA, 13 nt, Human
aaauuuugcaaau

SEQ ID NO: 3416644 - RNA, 18 nt, Human
aaauuuuguaagggagca

SEQ ID NO: 3416645 - RNA, 14 nt, Human
aaauuuuguaauga

SEQ ID NO: 3416646 - RNA, 15 nt, Human
aaauuuuguaaugaa

SEQ ID NO: 3416647 - RNA, 18 nt, Human
aaauuuuguaauuuucuu

SEQ ID NO: 3416648 - RNA, 19 nt, Human
aaauuuuguaauuuucuug

SEQ ID NO: 3416649 - RNA, 21 nt, Human
aaauuuugugauauggagccc

SEQ ID NO: 3416650 - RNA, 20 nt, Human
aaauuuuguuuauaagaaau

SEQ ID NO: 3416651 - RNA, 23 nt, Human
aaauuuuuaaucuuuaauuuuac

SEQ ID NO: 3416652 - RNA, 21 nt, Human
aaauuuuucagaugcuucugg

SEQ ID NO: 3416653 - RNA, 12 nt, Human
aaauuuuucaua

SEQ ID NO: 3416654 - RNA, 17 nt, Human
aaauuuuucauauuuua

SEQ ID NO: 3416655 - RNA, 16 nt, Human
aaauuuuucugcuuua

SEQ ID NO: 3416656 - RNA, 23 nt, Human
aaauuuuucuuccuuaaacuccu

SEQ ID NO: 3416657 - RNA, 13 nt, Human
aaauuuuuguaaa

SEQ ID NO: 3416658 - RNA, 20 nt, Human
aaauuuuuguaguagcguuu

SEQ ID NO: 3416659 - RNA, 12 nt, Human
aaauuuuuugac

SEQ ID NO: 3416660 - RNA, 23 nt, Human
aaauuuuuugacuuuuuuuguau

SEQ ID NO: 3416661 - RNA, 14 nt, Human
aaauuuuuuguuga

SEQ ID NO: 3416662 - RNA, 13 nt, Human
aaauuuuuuuaga

SEQ ID NO: 3416663 - RNA, 15 nt, Human
aaauuuuuuuagaaa

SEQ ID NO: 3416664 - RNA, 21 nt, Human
aaauuuuuuuagaaagcauuu

SEQ ID NO: 3416665 - RNA, 14 nt, Human
aaauuuuuuugguc

SEQ ID NO: 3416666 - RNA, 12 nt, Human
aaauuuuuuugu

SEQ ID NO: 3416667 - RNA, 13 nt, Human
aaauuuuuuugua

SEQ ID NO: 3416668 - RNA, 19 nt, Human
aaauuuuuuuguaugaaaa

SEQ ID NO: 3416669 - RNA, 20 nt, Human
aaauuuuuuuguaugaaaac

SEQ ID NO: 3416670 - RNA, 18 nt, Human
aaauuuuuuuuacauuuu

SEQ ID NO: 3416671 - RNA, 15 nt, Human
aaauuuuuuuucaug

SEQ ID NO: 3416672 - RNA, 13 nt, Human
aacaaaaaaaucu

SEQ ID NO: 3416673 - RNA, 14 nt, Human
aacaaaaaagcuaa

SEQ ID NO: 3416674 - RNA, 20 nt, Human
aacaaaaaccaaauguuuau

SEQ ID NO: 3416675 - RNA, 13 nt, Human
aacaaaaagaugu

SEQ ID NO: 3416676 - RNA, 16 nt, Human
aacaaaaagcuucccc

SEQ ID NO: 3416677 - RNA, 18 nt, Human
aacaaaacaaaacaacau

SEQ ID NO: 3416678 - RNA, 16 nt, Human
aacaaaacaaaacuau

SEQ ID NO: 3416679 - RNA, 21 nt, Human
aacaaaaccaaaaguuauuaa

SEQ ID NO: 3416680 - RNA, 9 nt, Human
aacaaaacu

SEQ ID NO: 3416681 - RNA, 17 nt, Human
aacaaaacuauacuuga

SEQ ID NO: 3416682 - RNA, 13 nt, Human
aacaaaagaugaa

SEQ ID NO: 3416683 - RNA, 15 nt, Human
aacaaaauagaaagu

SEQ ID NO: 3416684 - RNA, 17 nt, Human
aacaaaauggcuucagu

SEQ ID NO: 3416685 - RNA, 15 nt, Human
aacaaaauuacagac

SEQ ID NO: 3416686 - RNA, 15 nt, Human
aacaaaauuucuauu

SEQ ID NO: 3416687 - RNA, 24 nt, Human
aacaaaauuugacuaauuuuacau

SEQ ID NO: 3416688 - RNA, 19 nt, Human
aacaaacaccuucuuauua

SEQ ID NO: 3416689 - RNA, 21 nt, Human
aacaaacauuguguugacauu

SEQ ID NO: 3416690 - RNA, 22 nt, Human
aacaaacauuguguugacauua

SEQ ID NO: 3416691 - RNA, 10 nt, Human
aacaaaccau

SEQ ID NO: 3416692 - RNA, 14 nt, Human
aacaaacuauuucu

SEQ ID NO: 3416693 - RNA, 14 nt, Human
aacaaacugcacau

SEQ ID NO: 3416694 - RNA, 22 nt, Human
aacaaacugcacaugauuucac

SEQ ID NO: 3416695 - RNA, 14 nt, Human
aacaaagaaauauu

SEQ ID NO: 3416696 - RNA, 17 nt, Human
aacaaagaagacaacau

SEQ ID NO: 3416697 - RNA, 21 nt, Human
aacaaagaccaauuuuuugug

SEQ ID NO: 3416698 - RNA, 19 nt, Human
aacaaagagaaaaaauaca

SEQ ID NO: 3416699 - RNA, 23 nt, Human
aacaaagaguucaagaaauaagu

SEQ ID NO: 3416700 - RNA, 21 nt, Human
aacaaagaugccacauucaaa

SEQ ID NO: 3416701 - RNA, 12 nt, Human
aacaaagccaga

SEQ ID NO: 3416702 - RNA, 12 nt, Human
aacaaagcuguu

SEQ ID NO: 3416703 - RNA, 22 nt, Human
aacaaagcuguuaaacuguuag

SEQ ID NO: 3416704 - RNA, 14 nt, Human
aacaaagcuuagca

SEQ ID NO: 3416705 - RNA, 22 nt, Human
aacaaaggccuaauucuaugcc

SEQ ID NO: 3416706 - RNA, 18 nt, Human
aacaaaggguuuuaaugu

SEQ ID NO: 3416707 - RNA, 16 nt, Human
aacaaagguugagaug

SEQ ID NO: 3416708 - RNA, 16 nt, Human
aacaaauaaucacauu

SEQ ID NO: 3416709 - RNA, 12 nt, Human
aacaaauaugca

SEQ ID NO: 3416710 - RNA, 18 nt, Human
aacaaauaugcuaauuug

SEQ ID NO: 3416711 - RNA, 21 nt, Human
aacaaaucuaggaaaauauuu

SEQ ID NO: 3416712 - RNA, 12 nt, Human
aacaaaugaaga

SEQ ID NO: 3416713 - RNA, 15 nt, Human
aacaaauuauuuuug

SEQ ID NO: 3416714 - RNA, 16 nt, Human
aacaaauugaacucuu

SEQ ID NO: 3416715 - RNA, 19 nt, Human
aacaacaauugguaaaacu

SEQ ID NO: 3416716 - RNA, 14 nt, Human
aacaacacuguagu

SEQ ID NO: 3416717 - RNA, 18 nt, Human
aacaaccccccaucacaa

SEQ ID NO: 3416718 - RNA, 19 nt, Human
aacaaccccccaucacaaa

SEQ ID NO: 3416719 - RNA, 14 nt, Human
aacaacgaaagaag

SEQ ID NO: 3416720 - RNA, 21 nt, Human
aacaacuuucucuuguaaacg

SEQ ID NO: 3416721 - RNA, 12 nt, Human
aacaagaaaaau

SEQ ID NO: 3416722 - RNA, 17 nt, Human
aacaagaaaaauaaaga

SEQ ID NO: 3416723 - RNA, 23 nt, Human
aacaagaauaaaggcagcuguug

SEQ ID NO: 3416724 - RNA, 13 nt, Human
aacaagaaugcau

SEQ ID NO: 3416725 - RNA, 16 nt, Human
aacaagaaugcauuga

SEQ ID NO: 3416726 - RNA, 19 nt, Human
aacaagaccacguuucuaa

SEQ ID NO: 3416727 - RNA, 22 nt, Human
aacaagaccucagugccuuccu

SEQ ID NO: 3416728 - RNA, 15 nt, Human
aacaagagaagcauu

SEQ ID NO: 3416729 - RNA, 16 nt, Human
aacaagagaagcauuc

SEQ ID NO: 3416730 - RNA, 19 nt, Human
aacaagagcacuacauuca

SEQ ID NO: 3416731 - RNA, 22 nt, Human
aacaagaugcuggaugucugcc

SEQ ID NO: 3416732 - RNA, 12 nt, Human
aacaagauuucc

SEQ ID NO: 3416733 - RNA, 20 nt, Human
aacaagauuuccuugugcaa

SEQ ID NO: 3416734 - RNA, 13 nt, Human
aacaagcaugcag

SEQ ID NO: 3416735 - RNA, 15 nt, Human
aacaaggcaaggcug

SEQ ID NO: 3416736 - RNA, 21 nt, Human
aacaaggcaaggcugucaauu

SEQ ID NO: 3416737 - RNA, 19 nt, Human
aacaaggguggcaucccag

SEQ ID NO: 3416738 - RNA, 16 nt, Human
aacaagguaguuuuua

SEQ ID NO: 3416739 - RNA, 19 nt, Human
aacaagguuauaugaauau

SEQ ID NO: 3416740 - RNA, 20 nt, Human
aacaagguuauaugaauaua

SEQ ID NO: 3416741 - RNA, 23 nt, Human
aacaaguauuuguuaauuuagaa

SEQ ID NO: 3416742 - RNA, 15 nt, Human
aacaagucagucauu

SEQ ID NO: 3416743 - RNA, 18 nt, Human
aacaagucagucauucag

SEQ ID NO: 3416744 - RNA, 23 nt, Human
aacaagugaaauaacaaaaugga

SEQ ID NO: 3416745 - RNA, 14 nt, Human
aacaagugaacaca

SEQ ID NO: 3416746 - RNA, 14 nt, Human
aacaagugcuggca

SEQ ID NO: 3416747 - RNA, 15 nt, Human
aacaagugcuggcac

SEQ ID NO: 3416748 - RNA, 14 nt, Human
aacaaguugagcua

SEQ ID NO: 3416749 - RNA, 21 nt, Human
aacaaguugagcuaugacuua

SEQ ID NO: 3416750 - RNA, 23 nt, Human
aacaauaaaauuuuuuuucaugu

SEQ ID NO: 3416751 - RNA, 15 nt, Human
aacaauaaaugugca

SEQ ID NO: 3416752 - RNA, 18 nt, Human
aacaauaacuacuguguu

SEQ ID NO: 3416753 - RNA, 13 nt, Human
aacaauacaaaug

SEQ ID NO: 3416754 - RNA, 20 nt, Human
aacaauacucauaaugugaa

SEQ ID NO: 3416755 - RNA, 16 nt, Human
aacaauagaaaccugu

SEQ ID NO: 3416756 - RNA, 14 nt, Human
aacugacacaggaa

SEQ ID NO: 3416757 - RNA, 20 nt, Human
aacugacacucccacccagu

SEQ ID NO: 3416758 - RNA, 23 nt, Human
aacugacaugcccucccuucucc

SEQ ID NO: 3416759 - RNA, 15 nt, Human
aacugacccucccuu

SEQ ID NO: 3416760 - RNA, 22 nt, Human
aacugacccucccuuccugucc

SEQ ID NO: 3416761 - RNA, 15 nt, Human
aacugacuaucauaa

SEQ ID NO: 3416762 - RNA, 18 nt, Human
aacugacuaucauaaaau

SEQ ID NO: 3416763 - RNA, 15 nt, Human
aacugacucuuaaga

SEQ ID NO: 3416764 - RNA, 18 nt, Human
aacugagauccuuccuuu

SEQ ID NO: 3416765 - RNA, 20 nt, Human
aacugagaugugaacacauc

SEQ ID NO: 3416766 - RNA, 14 nt, Human
aacugagcuccucu

SEQ ID NO: 3416767 - RNA, 22 nt, Human
aacugagcuccucugggcagga

SEQ ID NO: 3416768 - RNA, 23 nt, Human
aacugaguauuaauaucugagga

SEQ ID NO: 3416769 - RNA, 17 nt, Human
aacugaguccuuaaaca

SEQ ID NO: 3416770 - RNA, 14 nt, Human
aacugauaaagaug

SEQ ID NO: 3416771 - RNA, 15 nt, Human
aacugauaguuacug

SEQ ID NO: 3416772 - RNA, 22 nt, Human
aacugauaguuacuguugugac

SEQ ID NO: 3416773 - RNA, 20 nt, Human
aacugaucauguuuaugaga

SEQ ID NO: 3416774 - RNA, 17 nt, Human
aacugauccagcaauua

SEQ ID NO: 3416775 - RNA, 21 nt, Human
aacugauccaguauaagacua

SEQ ID NO: 3416776 - RNA, 15 nt, Human
aacugaucuguuaua

SEQ ID NO: 3416777 - RNA, 13 nt, Human
aacugaugugaaa

SEQ ID NO: 3416778 - RNA, 14 nt, Human
aacugaugugaaac

SEQ ID NO: 3416779 - RNA, 19 nt, Human
aacugauucacaucucauu

SEQ ID NO: 3416780 - RNA, 22 nt, Human
aacugauuuuuuuuuccuucag

SEQ ID NO: 3416781 - RNA, 18 nt, Human
aacugcaaccuuguuuau

SEQ ID NO: 3416782 - RNA, 18 nt, Human
aacugcaagucacaaagg

SEQ ID NO: 3416783 - RNA, 17 nt, Human
aacugcaauaacuucug

SEQ ID NO: 3416784 - RNA, 21 nt, Human
aacugcaauaacuucugaccu

SEQ ID NO: 3416785 - RNA, 22 nt, Human
aacugcaauagagacuguagau

SEQ ID NO: 3416786 - RNA, 23 nt, Human
aacugcaauagagacuguagauu

SEQ ID NO: 3416787 - RNA, 21 nt, Human
aacugcacaugaagaaauacu

SEQ ID NO: 3416788 - RNA, 17 nt, Human
aacugcacaugauuuca

SEQ ID NO: 3416789 - RNA, 13 nt, Human
aacugcaggcccu

SEQ ID NO: 3416790 - RNA, 16 nt, Human
aacugcaggcccuggc

SEQ ID NO: 3416791 - RNA, 18 nt, Human
aacugcaggcccuggccu

SEQ ID NO: 3416792 - RNA, 21 nt, Human
aacugcaggcccuggccuccc

SEQ ID NO: 3416793 - RNA, 23 nt, Human
aacugcaggcccuggccuccccu

SEQ ID NO: 3416794 - RNA, 14 nt, Human
aacugcagggaaaa

SEQ ID NO: 3416795 - RNA, 16 nt, Human
aacugcauacacuuuu

SEQ ID NO: 3416796 - RNA, 15 nt, Human
aacugcauggaccua

SEQ ID NO: 3416797 - RNA, 23 nt, Human
aacugcauuaccgcguuguaaaa

SEQ ID NO: 3416798 - RNA, 20 nt, Human
aacugcauugagaacugcau

SEQ ID NO: 3416799 - RNA, 14 nt, Human
aacugcccaaagca

SEQ ID NO: 3416800 - RNA, 16 nt, Human
aacugcccccaacuuu

SEQ ID NO: 3416801 - RNA, 18 nt, Human
aacugcccccucugcccu

SEQ ID NO: 3416802 - RNA, 13 nt, Human
aacugccuagaaa

SEQ ID NO: 3416803 - RNA, 17 nt, Human
aacugccuagaaacaac

SEQ ID NO: 3416804 - RNA, 17 nt, Human
aacugccuuaaaacuuu

SEQ ID NO: 3416805 - RNA, 18 nt, Human
aacugcucauaugaugua

SEQ ID NO: 3416806 - RNA, 17 nt, Human
aacugcucccaccuccu

SEQ ID NO: 3416807 - RNA, 13 nt, Human
aacugcuccuccu

SEQ ID NO: 3416808 - RNA, 20 nt, Human
aacugcucuugggcaauauu

SEQ ID NO: 3416809 - RNA, 12 nt, Human
aacugcugccac

SEQ ID NO: 3416810 - RNA, 13 nt, Human
aacugcugcccca

SEQ ID NO: 3416811 - RNA, 20 nt, Human
aacugcugcuuuuugaggug

SEQ ID NO: 3416812 - RNA, 20 nt, Human
aacugcuggacgucuuucuu

SEQ ID NO: 3416813 - RNA, 22 nt, Human
aacugcuucccuuacuuugcug

SEQ ID NO: 3416814 - RNA, 18 nt, Human
aacugcuuccuauaauuu

SEQ ID NO: 3416815 - RNA, 19 nt, Human
aacugcuuccuuucuugau

SEQ ID NO: 3416816 - RNA, 18 nt, Human
aacugcuuucuguuccaa

SEQ ID NO: 3416817 - RNA, 22 nt, Human
aacugcuuuuuuuuuuccagca

SEQ ID NO: 3416818 - RNA, 20 nt, Human
aacuggaaaacagaacacuu

SEQ ID NO: 3416819 - RNA, 12 nt, Human
aacuggaaagaa

SEQ ID NO: 3416820 - RNA, 13 nt, Human
aacuggaagcaca

SEQ ID NO: 3416821 - RNA, 21 nt, Human
aacuggaauaagaagcaaaua

SEQ ID NO: 3416822 - RNA, 18 nt, Human
aacuggacccuguugcua

SEQ ID NO: 3416823 - RNA, 19 nt, Human
aacuggacccuguugcuaa

SEQ ID NO: 3416824 - RNA, 22 nt, Human
aacuggacccuguugcuaagcc

SEQ ID NO: 3416825 - RNA, 15 nt, Human
aacuggacucaggau

SEQ ID NO: 3416826 - RNA, 13 nt, Human
aacuggcaaagca

SEQ ID NO: 3416827 - RNA, 22 nt, Human
aacuggcaggcaggcucccagg

SEQ ID NO: 3416828 - RNA, 20 nt, Human
aacuggcaucugacacaaaa

SEQ ID NO: 3416829 - RNA, 16 nt, Human
aacuggccaagcugag

SEQ ID NO: 3416830 - RNA, 17 nt, Human
aacuggccaagcugagg

SEQ ID NO: 3416831 - RNA, 21 nt, Human
aacuggccaagcugaggugcc

SEQ ID NO: 3416832 - RNA, 21 nt, Human
aacuggccccggaucagagca

SEQ ID NO: 3416833 - RNA, 18 nt, Human
aacuggcccuauuuagau

SEQ ID NO: 3416834 - RNA, 22 nt, Human
aacuggcccuauuuagaugaua

SEQ ID NO: 3416835 - RNA, 21 nt, Human
aacuggcccucuucuuacuug

SEQ ID NO: 3416836 - RNA, 13 nt, Human
aacugggaccuuu

SEQ ID NO: 3416837 - RNA, 16 nt, Human
aacugggggaaaagau

SEQ ID NO: 3416838 - RNA, 16 nt, Human
aacuggguacuugugg

SEQ ID NO: 3416839 - RNA, 21 nt, Human
aacuggguacuuguggacaca

SEQ ID NO: 3416840 - RNA, 14 nt, Human
aacuggguuccugc

SEQ ID NO: 3416841 - RNA, 15 nt, Human
aacuggguuccugca

SEQ ID NO: 3416842 - RNA, 21 nt, Human
aacugguauucuguucuggag

SEQ ID NO: 3416843 - RNA, 13 nt, Human
aacugguauuuua

SEQ ID NO: 3416844 - RNA, 22 nt, Human
aacugguauuuuaucuuugauu

SEQ ID NO: 3416845 - RNA, 15 nt, Human
aacuggucuuccuuu

SEQ ID NO: 3416846 - RNA, 18 nt, Human
aacuggugcacuuuguaa

SEQ ID NO: 3416847 - RNA, 21 nt, Human
aacuggugcacuuuguaaauu

SEQ ID NO: 3416848 - RNA, 14 nt, Human
aacuguaaagaugu

SEQ ID NO: 3416849 - RNA, 20 nt, Human
aacuguaauuauuugaauga

SEQ ID NO: 3416850 - RNA, 16 nt, Human
aacuguacagugucuu

SEQ ID NO: 3416851 - RNA, 17 nt, Human
aacuguacagugucuuu

SEQ ID NO: 3416852 - RNA, 14 nt, Human
aacuguacauuuaa

SEQ ID NO: 3416853 - RNA, 22 nt, Human
aacuguaccaugugcuacaggg

SEQ ID NO: 3416854 - RNA, 15 nt, Human
aacuguacuuugauu

SEQ ID NO: 3416855 - RNA, 19 nt, Human
aacuguacuuugauucaca

SEQ ID NO: 3416856 - RNA, 20 nt, Human
aacuguacuuugauucacau

SEQ ID NO: 3416857 - RNA, 14 nt, Human
aacuguagaaauga

SEQ ID NO: 3416858 - RNA, 17 nt, Human
aacuguagaaaugauga

SEQ ID NO: 3416859 - RNA, 14 nt, Human
aacuguauauuugu

SEQ ID NO: 3416860 - RNA, 21 nt, Human
aacugucaaagaaucaaucca

SEQ ID NO: 3416861 - RNA, 17 nt, Human
aacuguccucuuucaga

SEQ ID NO: 3416862 - RNA, 19 nt, Human
aacuguccucuuucagaaa

SEQ ID NO: 3416863 - RNA, 11 nt, Human
aacuguccugu

SEQ ID NO: 3416864 - RNA, 18 nt, Human
aacuguccuguccugcuc

SEQ ID NO: 3416865 - RNA, 14 nt, Human
aacuguccuuuccu

SEQ ID NO: 3416866 - RNA, 19 nt, Human
aacugucuauuucugcuga

SEQ ID NO: 3416867 - RNA, 19 nt, Human
aacugucucucaugaaccu

SEQ ID NO: 3416868 - RNA, 14 nt, Human
aacugucuuccuca

SEQ ID NO: 3416869 - RNA, 16 nt, Human
aacugucuuccucaaa

SEQ ID NO: 3416870 - RNA, 19 nt, Human
aacugucuuuaaaagagag

SEQ ID NO: 3416871 - RNA, 23 nt, Human
aacugugaugaagccgaccuuag

SEQ ID NO: 3416872 - RNA, 15 nt, Human
aacugugccacaaug

SEQ ID NO: 3416873 - RNA, 14 nt, Human
aacuguggauauug

SEQ ID NO: 3416874 - RNA, 11 nt, Human
aacuguggccg

SEQ ID NO: 3416875 - RNA, 14 nt, Human
aacaugaaaugaua

SEQ ID NO: 3416876 - RNA, 20 nt, Human
aacaugaacacccuuagaaa

SEQ ID NO: 3416877 - RNA, 19 nt, Human
aacaugacauuuaccagca

SEQ ID NO: 3416878 - RNA, 18 nt, Human
aacaugaggccacuggag

SEQ ID NO: 3416879 - RNA, 14 nt, Human
aacaugaugaaacc

SEQ ID NO: 3416880 - RNA, 17 nt, Human
aacaugcaguuugaaau

SEQ ID NO: 3416881 - RNA, 18 nt, Human
aacaugcaguuugaaauu

SEQ ID NO: 3416882 - RNA, 22 nt, Human
aacaugccugccccaaacaaau

SEQ ID NO: 3416883 - RNA, 17 nt, Human
aacaugcuaccugaucc

SEQ ID NO: 3416884 - RNA, 17 nt, Human
aacaugcuguguaagcu

SEQ ID NO: 3416885 - RNA, 23 nt, Human
aacaugcuguuauuuagguauuu

SEQ ID NO: 3416886 - RNA, 23 nt, Human
aacaugcuuaugacaaugacugu

SEQ ID NO: 3416887 - RNA, 22 nt, Human
aacauggaacucauuccugccu

SEQ ID NO: 3416888 - RNA, 15 nt, Human
aacauggaaguacua

SEQ ID NO: 3416889 - RNA, 15 nt, Human
aacauggacuuguau

SEQ ID NO: 3416890 - RNA, 18 nt, Human
aacauggacuuguauauu

SEQ ID NO: 3416891 - RNA, 23 nt, Human
aacauggccuuugcuugaaagaa

SEQ ID NO: 3416892 - RNA, 13 nt, Human
aacauggcuuuga

SEQ ID NO: 3416893 - RNA, 20 nt, Human
aacaugguuacaaucauugc

SEQ ID NO: 3416894 - RNA, 23 nt, Human
aacaugguuugacucaucuuaua

SEQ ID NO: 3416895 - RNA, 12 nt, Human
aacauguaauau

SEQ ID NO: 3416896 - RNA, 18 nt, Human
aacauguaauauaaagau

SEQ ID NO: 3416897 - RNA, 23 nt, Human
aacauguaauuaaguacuaugua

SEQ ID NO: 3416898 - RNA, 15 nt, Human
aacauguacuguucu

SEQ ID NO: 3416899 - RNA, 11 nt, Human
aacauguaugu

SEQ ID NO: 3416900 - RNA, 19 nt, Human
aacauguccugccuauuau

SEQ ID NO: 3416901 - RNA, 20 nt, Human
aacauguggcuccucccagc

SEQ ID NO: 3416902 - RNA, 13 nt, Human
aacauguguuuua

SEQ ID NO: 3416903 - RNA, 12 nt, Human
aacauguuggua

SEQ ID NO: 3416904 - RNA, 14 nt, Human
aacauguugguauu

SEQ ID NO: 3416905 - RNA, 15 nt, Human
aacauguugguauuu

SEQ ID NO: 3416906 - RNA, 16 nt, Human
aacauguuuccagcau

SEQ ID NO: 3416907 - RNA, 18 nt, Human
aacauguuuccagcauuc

SEQ ID NO: 3416908 - RNA, 21 nt, Human
aacauguuuccagcauuccca

SEQ ID NO: 3416909 - RNA, 22 nt, Human
aacauguuuccagcauucccag

SEQ ID NO: 3416910 - RNA, 22 nt, Human
aacauguuuuucuucucccuca

SEQ ID NO: 3416911 - RNA, 16 nt, Human
aacauuaaaaauggaa

SEQ ID NO: 3416912 - RNA, 16 nt, Human
aacauuaagaaaauca

SEQ ID NO: 3416913 - RNA, 19 nt, Human
aacauuaauccacauguuu

SEQ ID NO: 3416914 - RNA, 18 nt, Human
aacauuaaugccugcuuu

SEQ ID NO: 3416915 - RNA, 23 nt, Human
aacauuaaugccugcuuuuugga

SEQ ID NO: 3416916 - RNA, 15 nt, Human
aacauuaauguugau

SEQ ID NO: 3416917 - RNA, 20 nt, Human
aacauuacagggaaugccug

SEQ ID NO: 3416918 - RNA, 16 nt, Human
aacauuaccuuacugu

SEQ ID NO: 3416919 - RNA, 21 nt, Human
aacauuaggcagguugcuuaa

SEQ ID NO: 3416920 - RNA, 23 nt, Human
aacauuauuuauucagcuucauu

SEQ ID NO: 3416921 - RNA, 17 nt, Human
aacauuccaagacucua

SEQ ID NO: 3416922 - RNA, 10 nt, Human
aacauuccau

SEQ ID NO: 3416923 - RNA, 23 nt, Human
aacauuccauccuugagucaaaa

SEQ ID NO: 3416924 - RNA, 19 nt, Human
aacauuccguuuacauuuu

SEQ ID NO: 3416925 - RNA, 22 nt, Human
aacauuccucaugaauguaaau

SEQ ID NO: 3416926 - RNA, 21 nt, Human
aacauucgaucucauucagua

SEQ ID NO: 3416927 - RNA, 14 nt, Human
aacauucuauuuca

SEQ ID NO: 3416928 - RNA, 16 nt, Human
aacauugaaguaauga

SEQ ID NO: 3416929 - RNA, 19 nt, Human
aacauugaccaagaacugc

SEQ ID NO: 3416930 - RNA, 17 nt, Human
aacauugcaauagaaau

SEQ ID NO: 3416931 - RNA, 20 nt, Human
aacauugccuauuucagugg

SEQ ID NO: 3416932 - RNA, 19 nt, Human
aacauugcuuuuaaaacua

SEQ ID NO: 3416933 - RNA, 24 nt, Human
aacauuggaagcagguuaaauguu

SEQ ID NO: 3416934 - RNA, 12 nt, Human
aacauuggauua

SEQ ID NO: 3416935 - RNA, 15 nt, Human
aacauuggcuccugu

SEQ ID NO: 3416936 - RNA, 23 nt, Human
aacauugguucuuguauuaagaa

SEQ ID NO: 3416937 - RNA, 23 nt, Human
aacauuguguucccauuucagcu

SEQ ID NO: 3416938 - RNA, 18 nt, Human
aacauuguuccagauuca

SEQ ID NO: 3416939 - RNA, 19 nt, Human
aacauuguuccagauucaa

SEQ ID NO: 3416940 - RNA, 17 nt, Human
aacauuuacuacaguuu

SEQ ID NO: 3416941 - RNA, 19 nt, Human
aacauuuacuacaguuuuu

SEQ ID NO: 3416942 - RNA, 19 nt, Human
aacauuuauuuuaugagaa

SEQ ID NO: 3416943 - RNA, 20 nt, Human
aacauuuauuuuaugagaaa

SEQ ID NO: 3416944 - RNA, 16 nt, Human
aacauuucucaauaau

SEQ ID NO: 3416945 - RNA, 16 nt, Human
aacauuucuguaaaua

SEQ ID NO: 3416946 - RNA, 12 nt, Human
aacauuugccuu

SEQ ID NO: 3416947 - RNA, 22 nt, Human
aacauuugugauauauguauua

SEQ ID NO: 3416948 - RNA, 17 nt, Human
aacauuuguguguuaua

SEQ ID NO: 3416949 - RNA, 15 nt, Human
aacauuuuaaauaaa

SEQ ID NO: 3416950 - RNA, 15 nt, Human
aacauuuuaaaugga

SEQ ID NO: 3416951 - RNA, 17 nt, Human
aacauuuuaaauggaca

SEQ ID NO: 3416952 - RNA, 14 nt, Human
aacauuuuaauuca

SEQ ID NO: 3416953 - RNA, 19 nt, Human
aacauuuucucuuagaaaa

SEQ ID NO: 3416954 - RNA, 23 nt, Human
aacauuuugaaagucuguccuug

SEQ ID NO: 3416955 - RNA, 16 nt, Human
aacauuuugucauaua

SEQ ID NO: 3416956 - RNA, 22 nt, Human
aacauuuuguggucauuaagca

SEQ ID NO: 3416957 - RNA, 16 nt, Human
aagaccuuuuucugca

SEQ ID NO: 3416958 - RNA, 21 nt, Human
aagacgaggcccucgggccca

SEQ ID NO: 3416959 - RNA, 15 nt, Human
aagacgccugagcuc

SEQ ID NO: 3416960 - RNA, 17 nt, Human
aagacgccuuucuccuc

SEQ ID NO: 3416961 - RNA, 23 nt, Human
aagacgcugugcugcccugccca

SEQ ID NO: 3416962 - RNA, 19 nt, Human
aagacgguuaaauacugug

SEQ ID NO: 3416963 - RNA, 16 nt, Human
aagacgugauuuugcu

SEQ ID NO: 3416964 - RNA, 16 nt, Human
aagacguguuuguguu

SEQ ID NO: 3416965 - RNA, 15 nt, Human
aagacguuuuauaag

SEQ ID NO: 3416966 - RNA, 22 nt, Human
aagacuauauauauaaauguau

SEQ ID NO: 3416967 - RNA, 18 nt, Human
aagacuaucuaaauguug

SEQ ID NO: 3416968 - RNA, 17 nt, Human
aagacuaugaaaaugcu

SEQ ID NO: 3416969 - RNA, 13 nt, Human
aagacuauucaaa

SEQ ID NO: 3416970 - RNA, 14 nt, Human
aagacucaaauguu

SEQ ID NO: 3416971 - RNA, 19 nt, Human
aagacucaaauguucuaag

SEQ ID NO: 3416972 - RNA, 16 nt, Human
aagacuccucggccug

SEQ ID NO: 3416973 - RNA, 22 nt, Human
aagacucuaccagacuguguau

SEQ ID NO: 3416974 - RNA, 13 nt, Human
aagacucuagagu

SEQ ID NO: 3416975 - RNA, 15 nt, Human
aagacugagcaccug

SEQ ID NO: 3416976 - RNA, 17 nt, Human
aagacugaguacguugu

SEQ ID NO: 3416977 - RNA, 18 nt, Human
aagacugcuguggccagg

SEQ ID NO: 3416978 - RNA, 19 nt, Human
aagacugcuguggccagga

SEQ ID NO: 3416979 - RNA, 11 nt, Human
aagacuggcuu

SEQ ID NO: 3416980 - RNA, 23 nt, Human
aagacuggcuuuuauuaaugcac

SEQ ID NO: 3416981 - RNA, 16 nt, Human
aagacuguacaaagua

SEQ ID NO: 3416982 - RNA, 15 nt, Human
aagacuguggcugcu

SEQ ID NO: 3416983 - RNA, 16 nt, Human
aagacuuacucuaaga

SEQ ID NO: 3416984 - RNA, 17 nt, Human
aagacuuagauugugcu

SEQ ID NO: 3416985 - RNA, 16 nt, Human
aagacuuccagagccu

SEQ ID NO: 3416986 - RNA, 18 nt, Human
aagacuuccagagccuca

SEQ ID NO: 3416987 - RNA, 13 nt, Human
aagacuugacagu

SEQ ID NO: 3416988 - RNA, 14 nt, Human
aagacuugacagug

SEQ ID NO: 3416989 - RNA, 19 nt, Human
aagacuuggcaacagaagc

SEQ ID NO: 3416990 - RNA, 16 nt, Human
aagacuuguuucugau

SEQ ID NO: 3416991 - RNA, 12 nt, Human
aagacuuguuuu

SEQ ID NO: 3416992 - RNA, 19 nt, Human
aagacuuugggauaggaaa

SEQ ID NO: 3416993 - RNA, 21 nt, Human
aagacuuuuccaacccucauc

SEQ ID NO: 3416994 - RNA, 13 nt, Human
aagagaaaaaaua

SEQ ID NO: 3416995 - RNA, 11 nt, Human
aagagaaaaag

SEQ ID NO: 3416996 - RNA, 18 nt, Human
aagagaaaacaucucauc

SEQ ID NO: 3416997 - RNA, 12 nt, Human
aagagaaaagaa

SEQ ID NO: 3416998 - RNA, 18 nt, Human
aagagaaaauugaauuua

SEQ ID NO: 3416999 - RNA, 18 nt, Human
aagagaaacuuuauacau

SEQ ID NO: 3417000 - RNA, 18 nt, Human
aagagaaacuuugugcua

SEQ ID NO: 3417001 - RNA, 20 nt, Human
aagagaaacuuugugcuaca

SEQ ID NO: 3417002 - RNA, 19 nt, Human
aagagaaaggccugcacac

SEQ ID NO: 3417003 - RNA, 11 nt, Human
aagagaaaucu

SEQ ID NO: 3417004 - RNA, 20 nt, Human
aagagaacccacgaacauuc

SEQ ID NO: 3417005 - RNA, 21 nt, Human
aagagaaccgagcaaagauca

SEQ ID NO: 3417006 - RNA, 17 nt, Human
aagagaagcugcugacc

SEQ ID NO: 3417007 - RNA, 13 nt, Human
aagagaaggagca

SEQ ID NO: 3417008 - RNA, 12 nt, Human
aagagaauauuu

SEQ ID NO: 3417009 - RNA, 13 nt, Human
aagagaauauuuu

SEQ ID NO: 3417010 - RNA, 18 nt, Human
aagagaauauuuuaagua

SEQ ID NO: 3417011 - RNA, 13 nt, Human
aagagaauguuga

SEQ ID NO: 3417012 - RNA, 14 nt, Human
aagagacagaaugu

SEQ ID NO: 3417013 - RNA, 18 nt, Human
aagagacagagacaagua

SEQ ID NO: 3417014 - RNA, 22 nt, Human
aagagacagagacaaguaauuu

SEQ ID NO: 3417015 - RNA, 14 nt, Human
aagagacaggcagg

SEQ ID NO: 3417016 - RNA, 17 nt, Human
aagagaccuaccucagg

SEQ ID NO: 3417017 - RNA, 15 nt, Human
aagagacucagccug

SEQ ID NO: 3417018 - RNA, 16 nt, Human
aagagacucagccugc

SEQ ID NO: 3417019 - RNA, 17 nt, Human
aagagacucagccugca

SEQ ID NO: 3417020 - RNA, 14 nt, Human
aaccagagcacugu

SEQ ID NO: 3417021 - RNA, 18 nt, Human
aaccagagccauggacuc

SEQ ID NO: 3417022 - RNA, 14 nt, Human
aaccagaggcagcu

SEQ ID NO: 3417023 - RNA, 13 nt, Human
aaccagauaacau

SEQ ID NO: 3417024 - RNA, 14 nt, Human
aaccagaucauugu

SEQ ID NO: 3417025 - RNA, 21 nt, Human
aaccagcuaagaaaagauuuu

SEQ ID NO: 3417026 - RNA, 17 nt, Human
aaccagcuuccuucaga

SEQ ID NO: 3417027 - RNA, 20 nt, Human
aaccagcuuccuucagagag

SEQ ID NO: 3417028 - RNA, 22 nt, Human
aaccagcuuccuucagagagca

SEQ ID NO: 3417029 - RNA, 18 nt, Human
aaccaggcaccucuuccu

SEQ ID NO: 3417030 - RNA, 21 nt, Human
aaccaggcuuucuagaaagaa

SEQ ID NO: 3417031 - RNA, 15 nt, Human
aaccagggauuguuu

SEQ ID NO: 3417032 - RNA, 19 nt, Human
aaccagggauuguuucugu

SEQ ID NO: 3417033 - RNA, 22 nt, Human
aaccagggcaccaagcccacag

SEQ ID NO: 3417034 - RNA, 22 nt, Human
aaccagguccaaugagcuuucu

SEQ ID NO: 3417035 - RNA, 18 nt, Human
aaccagguccagaugugc

SEQ ID NO: 3417036 - RNA, 21 nt, Human
aaccaguauuguacaaaguau

SEQ ID NO: 3417037 - RNA, 16 nt, Human
aaccaguauuuuugcu

SEQ ID NO: 3417038 - RNA, 22 nt, Human
aaccaguauuuuugcugcuucu

SEQ ID NO: 3417039 - RNA, 22 nt, Human
aaccaguccccccacccucauu

SEQ ID NO: 3417040 - RNA, 15 nt, Human
aaccagucugaaguu

SEQ ID NO: 3417041 - RNA, 13 nt, Human
aaccagugccaag

SEQ ID NO: 3417042 - RNA, 15 nt, Human
aaccagugccaagga

SEQ ID NO: 3417043 - RNA, 16 nt, Human
aaccagugccaaggac

SEQ ID NO: 3417044 - RNA, 14 nt, Human
aaccaguguagccu

SEQ ID NO: 3417045 - RNA, 17 nt, Human
aaccaguuuagauuuca

SEQ ID NO: 3417046 - RNA, 22 nt, Human
aaccaguuuagauuucaagaaa

SEQ ID NO: 3417047 - RNA, 15 nt, Human
aaccauaaaaagcug

SEQ ID NO: 3417048 - RNA, 18 nt, Human
aaccauaaacuucauggu

SEQ ID NO: 3417049 - RNA, 22 nt, Human
aaccauagcacaggcuaauuuu

SEQ ID NO: 3417050 - RNA, 22 nt, Human
aaccauaggcugcucugccugu

SEQ ID NO: 3417051 - RNA, 18 nt, Human
aaccauaguuacuguaaa

SEQ ID NO: 3417052 - RNA, 16 nt, Human
aaccauauggauauua

SEQ ID NO: 3417053 - RNA, 14 nt, Human
aaccauauuuagca

SEQ ID NO: 3417054 - RNA, 20 nt, Human
aaccaucauugaaaucuuuu

SEQ ID NO: 3417055 - RNA, 23 nt, Human
aaccaucauugaaaucuuuuugc

SEQ ID NO: 3417056 - RNA, 20 nt, Human
aaccauccagugacaaacca

SEQ ID NO: 3417057 - RNA, 19 nt, Human
aaccauccccuccguggca

SEQ ID NO: 3417058 - RNA, 12 nt, Human
aaccaucucccu

SEQ ID NO: 3417059 - RNA, 13 nt, Human
aaccaucucccug

SEQ ID NO: 3417060 - RNA, 15 nt, Human
aaccaucuggccugg

SEQ ID NO: 3417061 - RNA, 17 nt, Human
aaccaucuggccuggcc

SEQ ID NO: 3417062 - RNA, 17 nt, Human
aaccaugaagacaggau

SEQ ID NO: 3417063 - RNA, 23 nt, Human
aaccaugaagagauuuuucauga

SEQ ID NO: 3417064 - RNA, 24 nt, Human
aaccaugaagagauuuuucaugau

SEQ ID NO: 3417065 - RNA, 16 nt, Human
aaccauggacuuuaua

SEQ ID NO: 3417066 - RNA, 16 nt, Human
aaccauggcugaagga

SEQ ID NO: 3417067 - RNA, 16 nt, Human
aaccauggugcuuguu

SEQ ID NO: 3417068 - RNA, 20 nt, Human
aaccauguguuauguuuucg

SEQ ID NO: 3417069 - RNA, 13 nt, Human
aaccauguuuugg

SEQ ID NO: 3417070 - RNA, 15 nt, Human
aaccauuaaagucag

SEQ ID NO: 3417071 - RNA, 17 nt, Human
aaccauuaaccagaucu

SEQ ID NO: 3417072 - RNA, 23 nt, Human
aaccauuccauuuccaagcacuu

SEQ ID NO: 3417073 - RNA, 15 nt, Human
aaccauugcuucacu

SEQ ID NO: 3417074 - RNA, 14 nt, Human
aaccauugucuugu

SEQ ID NO: 3417075 - RNA, 15 nt, Human
aaccauugucuuguu

SEQ ID NO: 3417076 - RNA, 24 nt, Human
aaccauugucuuguucugugauga

SEQ ID NO: 3417077 - RNA, 15 nt, Human
aaccauuuaucuuga

SEQ ID NO: 3417078 - RNA, 14 nt, Human
aaccauuuucauua

SEQ ID NO: 3417079 - RNA, 23 nt, Human
aaccauuuugcugucccuuuucc

SEQ ID NO: 3417080 - RNA, 15 nt, Human
aacccaaaccuggag

SEQ ID NO: 3417081 - RNA, 17 nt, Human
aacccaaaccuggagau

SEQ ID NO: 3417082 - RNA, 13 nt, Human
aacccaaauguuc

SEQ ID NO: 3417083 - RNA, 16 nt, Human
aacccaacucuccugg

SEQ ID NO: 3417084 - RNA, 15 nt, Human
aacccaagcuccucc

SEQ ID NO: 3417085 - RNA, 13 nt, Human
aacccaaggagca

SEQ ID NO: 3417086 - RNA, 20 nt, Human
aacccaaggagcacaggucc

SEQ ID NO: 3417087 - RNA, 19 nt, Human
aacccaagguaccauccua

SEQ ID NO: 3417088 - RNA, 13 nt, Human
aacccaauaguug

SEQ ID NO: 3417089 - RNA, 14 nt, Human
aacccaauccaaau

SEQ ID NO: 3417090 - RNA, 22 nt, Human
aacccaccuuguuggagccugc

SEQ ID NO: 3417091 - RNA, 14 nt, Human
aacccagaaacacc

SEQ ID NO: 3417092 - RNA, 21 nt, Human
aacccagacggcuccacuagg

SEQ ID NO: 3417093 - RNA, 16 nt, Human
aacccagacucagaca

SEQ ID NO: 3417094 - RNA, 14 nt, Human
aacccagauaaagg

SEQ ID NO: 3417095 - RNA, 23 nt, Human
aacccagcaacagaaaaauggag

SEQ ID NO: 3417096 - RNA, 10 nt, Human
aacccagcuc

SEQ ID NO: 3417097 - RNA, 20 nt, Human
aacccagcucccuucuuccc

SEQ ID NO: 3417098 - RNA, 15 nt, Human
aacccagcugcaccc

SEQ ID NO: 3417099 - RNA, 16 nt, Human
aacccagcugcacccc

SEQ ID NO: 3417100 - RNA, 21 nt, Human
aacccagcugcaccccuuccu

SEQ ID NO: 3417101 - RNA, 12 nt, Human
aacccaggaggu

SEQ ID NO: 3417102 - RNA, 19 nt, Human
aacccagggcucugcccca

SEQ ID NO: 3417103 - RNA, 17 nt, Human
aacccagucacugugag

SEQ ID NO: 3417104 - RNA, 23 nt, Human
aacccagucgcccuuacuucuug

SEQ ID NO: 3417105 - RNA, 21 nt, Human
aacccauauuguaaaacaggu

SEQ ID NO: 3417106 - RNA, 21 nt, Human
aacccaucuaccccuggauga

SEQ ID NO: 3417107 - RNA, 15 nt, Human
aaccccaacgcacag

SEQ ID NO: 3417108 - RNA, 18 nt, Human
aaccccaacgcacaggaa

SEQ ID NO: 3417109 - RNA, 19 nt, Human
aaccccaacgcacaggaaa

SEQ ID NO: 3417110 - RNA, 16 nt, Human
aaccccaaguuaguuc

SEQ ID NO: 3417111 - RNA, 15 nt, Human
aaccccacccuguuu

SEQ ID NO: 3417112 - RNA, 15 nt, Human
aaccccagacacugg

SEQ ID NO: 3417113 - RNA, 12 nt, Human
aaccccagcucc

SEQ ID NO: 3417114 - RNA, 19 nt, Human
aaccccaguucugcuccuc

SEQ ID NO: 3417115 - RNA, 17 nt, Human
aaccccauguccucagc

SEQ ID NO: 3417116 - RNA, 14 nt, Human
aacccccacacaca

SEQ ID NO: 3417117 - RNA, 10 nt, Human
aacccccacc

SEQ ID NO: 3417118 - RNA, 11 nt, Human
aacccccaccc

SEQ ID NO: 3417119 - RNA, 17 nt, Human
aagaggcgggccagcca

SEQ ID NO: 3417120 - RNA, 20 nt, Human
aagaggcguugcuuucacuc

SEQ ID NO: 3417121 - RNA, 16 nt, Human
aagaggcugagacagg

SEQ ID NO: 3417122 - RNA, 18 nt, Human
aagaggcugaggccugga

SEQ ID NO: 3417123 - RNA, 22 nt, Human
aagaggcugaggcuggcacagg

SEQ ID NO: 3417124 - RNA, 14 nt, Human
aagaggcugcagcc

SEQ ID NO: 3417125 - RNA, 23 nt, Human
aagaggcugccccucucaccaaa

SEQ ID NO: 3417126 - RNA, 12 nt, Human
aagaggcugguu

SEQ ID NO: 3417127 - RNA, 22 nt, Human
aagagggaauccccgaaggugc

SEQ ID NO: 3417128 - RNA, 16 nt, Human
aagagggacgccuggg

SEQ ID NO: 3417129 - RNA, 18 nt, Human
aagagggagaagcaugaa

SEQ ID NO: 3417130 - RNA, 19 nt, Human
aagagggagagguggagca

SEQ ID NO: 3417131 - RNA, 18 nt, Human
aagagggagauggagacu

SEQ ID NO: 3417132 - RNA, 23 nt, Human
aagagggagggagggcuccagac

SEQ ID NO: 3417133 - RNA, 17 nt, Human
aagagggcacacacugu

SEQ ID NO: 3417134 - RNA, 12 nt, Human
aagagggccugu

SEQ ID NO: 3417135 - RNA, 14 nt, Human
aagagggccugugg

SEQ ID NO: 3417136 - RNA, 11 nt, Human
aagaggggcag

SEQ ID NO: 3417137 - RNA, 13 nt, Human
aagaggggcagcc

SEQ ID NO: 3417138 - RNA, 15 nt, Human
aagaggggcagcccu

SEQ ID NO: 3417139 - RNA, 21 nt, Human
aagaggggugcagaggcugug

SEQ ID NO: 3417140 - RNA, 17 nt, Human
aagagggugggugggua

SEQ ID NO: 3417141 - RNA, 22 nt, Human
aagaggguuuuagguagaaaaa

SEQ ID NO: 3417142 - RNA, 17 nt, Human
aagaggugaccccaggg

SEQ ID NO: 3417143 - RNA, 18 nt, Human
aagaggugaccccagggc

SEQ ID NO: 3417144 - RNA, 19 nt, Human
aagaggugaccccagggca

SEQ ID NO: 3417145 - RNA, 20 nt, Human
aagaggugaccccagggcac

SEQ ID NO: 3417146 - RNA, 22 nt, Human
aagaggugaccccagggcacag

SEQ ID NO: 3417147 - RNA, 24 nt, Human
aagaggugaccccagggcacagga

SEQ ID NO: 3417148 - RNA, 16 nt, Human
aagaggugggagggcc

SEQ ID NO: 3417149 - RNA, 16 nt, Human
aagaggugugcaagag

SEQ ID NO: 3417150 - RNA, 18 nt, Human
aagaggugugcaagagag

SEQ ID NO: 3417151 - RNA, 15 nt, Human
aagagguguuauuug

SEQ ID NO: 3417152 - RNA, 17 nt, Human
aagagguguuauuugga

SEQ ID NO: 3417153 - RNA, 17 nt, Human
aagagguguuuuuucua

SEQ ID NO: 3417154 - RNA, 18 nt, Human
aagagguuuuaaagcuuc

SEQ ID NO: 3417155 - RNA, 16 nt, Human
aagagguuuuucuuaa

SEQ ID NO: 3417156 - RNA, 17 nt, Human
aagaguaaaggaaauga

SEQ ID NO: 3417157 - RNA, 13 nt, Human
aagaguaaucaau

SEQ ID NO: 3417158 - RNA, 15 nt, Human
aagaguagaauugca

SEQ ID NO: 3417159 - RNA, 20 nt, Human
aagaguaggaagacuuugga

SEQ ID NO: 3417160 - RNA, 19 nt, Human
aagaguaguugauguugca

SEQ ID NO: 3417161 - RNA, 14 nt, Human
aagagucuuccaau

SEQ ID NO: 3417162 - RNA, 16 nt, Human
aagagucuuucuucuu

SEQ ID NO: 3417163 - RNA, 15 nt, Human
aagagugaaaaauga

SEQ ID NO: 3417164 - RNA, 22 nt, Human
aagagugacucuccaggggucc

SEQ ID NO: 3417165 - RNA, 15 nt, Human
aagauucccaggagu

SEQ ID NO: 3417166 - RNA, 24 nt, Human
aagauuccggauccuaagcaucua

SEQ ID NO: 3417167 - RNA, 22 nt, Human
aagauuccuuuucuuguuuauc

SEQ ID NO: 3417168 - RNA, 19 nt, Human
aagauucuauaguucuaga

SEQ ID NO: 3417169 - RNA, 21 nt, Human
aagauucuauguuaauauuuu

SEQ ID NO: 3417170 - RNA, 20 nt, Human
aagauucucuauguaucaaa

SEQ ID NO: 3417171 - RNA, 15 nt, Human
aagauucuucccauu

SEQ ID NO: 3417172 - RNA, 20 nt, Human
aagauucuucccauucucca

SEQ ID NO: 3417173 - RNA, 22 nt, Human
aagauucuucccauucuccauu

SEQ ID NO: 3417174 - RNA, 14 nt, Human
aagauugagaaguu

SEQ ID NO: 3417175 - RNA, 20 nt, Human
aagauugauaucuauaaaau

SEQ ID NO: 3417176 - RNA, 17 nt, Human
aagauugauguuuccuu

SEQ ID NO: 3417177 - RNA, 18 nt, Human
aagauugccccaucuaga

SEQ ID NO: 3417178 - RNA, 12 nt, Human
aagauugcugaa

SEQ ID NO: 3417179 - RNA, 17 nt, Human
aagauugugugguguuu

SEQ ID NO: 3417180 - RNA, 19 nt, Human
aagauuguuuaucuagaug

SEQ ID NO: 3417181 - RNA, 21 nt, Human
aagauuuaagcacaaacuuua

SEQ ID NO: 3417182 - RNA, 12 nt, Human
aagauuuaauau

SEQ ID NO: 3417183 - RNA, 16 nt, Human
aagauuuaccacuugu

SEQ ID NO: 3417184 - RNA, 14 nt, Human
aagauuuaucaaau

SEQ ID NO: 3417185 - RNA, 17 nt, Human
aagauuuaucaaaucag

SEQ ID NO: 3417186 - RNA, 22 nt, Human
aagauuuccuucuuuuuuucuu

SEQ ID NO: 3417187 - RNA, 22 nt, Human
aagauuugaugcuggagagguu

SEQ ID NO: 3417188 - RNA, 23 nt, Human
aagauuugaugcuggagagguua

SEQ ID NO: 3417189 - RNA, 15 nt, Human
aagauuugcccauuu

SEQ ID NO: 3417190 - RNA, 21 nt, Human
aagauuugcccauuuacacuu

SEQ ID NO: 3417191 - RNA, 20 nt, Human
aagauuuguuuuuaaacugu

SEQ ID NO: 3417192 - RNA, 16 nt, Human
aagauuuuaaagacau

SEQ ID NO: 3417193 - RNA, 13 nt, Human
aagauuuuaaauu

SEQ ID NO: 3417194 - RNA, 12 nt, Human
aagauuuuccuu

SEQ ID NO: 3417195 - RNA, 12 nt, Human
aagauuuugaaa

SEQ ID NO: 3417196 - RNA, 14 nt, Human
aagauuuugaaaac

SEQ ID NO: 3417197 - RNA, 15 nt, Human
aagauuuugaaugcu

SEQ ID NO: 3417198 - RNA, 13 nt, Human
aagauuuugaucu

SEQ ID NO: 3417199 - RNA, 20 nt, Human
aagauuuugaucucacauuu

SEQ ID NO: 3417200 - RNA, 21 nt, Human
aagauuuuggaggagaaggac

SEQ ID NO: 3417201 - RNA, 15 nt, Human
aagauuuuucucaaa

SEQ ID NO: 3417202 - RNA, 20 nt, Human
aagauuuuucucaaaguuuu

SEQ ID NO: 3417203 - RNA, 18 nt, Human
aagauuuuuguuuguuua

SEQ ID NO: 3417204 - RNA, 19 nt, Human
aagauuuuuuaauuguuua

SEQ ID NO: 3417205 - RNA, 20 nt, Human
aagcaaaaaaugaaugucua

SEQ ID NO: 3417206 - RNA, 23 nt, Human
aagcaaaaacaaaccaugacuga

SEQ ID NO: 3417207 - RNA, 14 nt, Human
aagcaaaaagugau

SEQ ID NO: 3417208 - RNA, 13 nt, Human
aagcaaaaaugcu

SEQ ID NO: 3417209 - RNA, 18 nt, Human
aagcaaaauaaaaacuau

SEQ ID NO: 3417210 - RNA, 21 nt, Human
aagcaaacucuaaaauuauaa

SEQ ID NO: 3417211 - RNA, 21 nt, Human
aagcaaagcacccauuucaau

SEQ ID NO: 3417212 - RNA, 12 nt, Human
aagcaaaggaga

SEQ ID NO: 3417213 - RNA, 21 nt, Human
aagcaaaggggacagcugugu

SEQ ID NO: 3417214 - RNA, 17 nt, Human
aagcaaaggugaagaga

SEQ ID NO: 3417215 - RNA, 16 nt, Human
aagcaaauaaauauca

SEQ ID NO: 3417216 - RNA, 20 nt, Human
aagcaaaugugaaucauuuu

SEQ ID NO: 3417217 - RNA, 14 nt, Human
aagcaaauguuaca

SEQ ID NO: 3417218 - RNA, 13 nt, Human
aagcaaauuucaa

SEQ ID NO: 3417219 - RNA, 20 nt, Human
aagcaaauuucaaaagacau

SEQ ID NO: 3417220 - RNA, 22 nt, Human
aagcaacaauuuucagauuugc

SEQ ID NO: 3417221 - RNA, 14 nt, Human
aagcaacaucagcu

SEQ ID NO: 3417222 - RNA, 15 nt, Human
aagcaacauggcuuu

SEQ ID NO: 3417223 - RNA, 20 nt, Human
aagcaaccucaguaauuuag

SEQ ID NO: 3417224 - RNA, 19 nt, Human
aagcaacuaggccuucagu

SEQ ID NO: 3417225 - RNA, 18 nt, Human
aagcaacugucuauuucu

SEQ ID NO: 3417226 - RNA, 14 nt, Human
aagcaacuguuaug

SEQ ID NO: 3417227 - RNA, 17 nt, Human
aagcaagaaucagagaa

SEQ ID NO: 3417228 - RNA, 13 nt, Human
aagcaagacugag

SEQ ID NO: 3417229 - RNA, 17 nt, Human
aagcaagagagauguuu

SEQ ID NO: 3417230 - RNA, 23 nt, Human
aagcaagaggcaagcugaaauuu

SEQ ID NO: 3417231 - RNA, 15 nt, Human
aagcaagcauucaga

SEQ ID NO: 3417232 - RNA, 21 nt, Human
aagcaagcauucagaagaaaa

SEQ ID NO: 3417233 - RNA, 12 nt, Human
aagcaagcucuc

SEQ ID NO: 3417234 - RNA, 16 nt, Human
aagcaagcucucuugc

SEQ ID NO: 3417235 - RNA, 16 nt, Human
aagcaaggaaaacuua

SEQ ID NO: 3417236 - RNA, 19 nt, Human
aagcaaggaucuuucaccc

SEQ ID NO: 3417237 - RNA, 17 nt, Human
aagcaauaaagaagagu

SEQ ID NO: 3417238 - RNA, 20 nt, Human
aagcaauaauggucccaucc

SEQ ID NO: 3417239 - RNA, 17 nt, Human
aagcaauauuguauauu

SEQ ID NO: 3417240 - RNA, 16 nt, Human
aagcaauccuccugag

SEQ ID NO: 3417241 - RNA, 22 nt, Human
aagcaauccucucaccucagcc

SEQ ID NO: 3417242 - RNA, 13 nt, Human
aagcaaugcauuu

SEQ ID NO: 3417243 - RNA, 16 nt, Human
aagcaauuccaaccuu

SEQ ID NO: 3417244 - RNA, 17 nt, Human
aagcaauugcugcaucu

SEQ ID NO: 3417245 - RNA, 16 nt, Human
aagcaauuuuccuuga

SEQ ID NO: 3417246 - RNA, 17 nt, Human
aagcaauuuuccuugaa

SEQ ID NO: 3417247 - RNA, 18 nt, Human
aagcaauuuuccuugaag

SEQ ID NO: 3417248 - RNA, 19 nt, Human
aagcaauuuuccuugaagc

SEQ ID NO: 3417249 - RNA, 18 nt, Human
aagcacaccaaucuuacu

SEQ ID NO: 3417250 - RNA, 14 nt, Human
aagcacacuuguag

SEQ ID NO: 3417251 - RNA, 19 nt, Human
aagcacagaaggaggagga

SEQ ID NO: 3417252 - RNA, 15 nt, Human
aagcacagaauauuu

SEQ ID NO: 3417253 - RNA, 16 nt, Human
aagcacagaauauuuu

SEQ ID NO: 3417254 - RNA, 16 nt, Human
aagcacagcagccugg

SEQ ID NO: 3417255 - RNA, 11 nt, Human
aagcacagcug

SEQ ID NO: 3417256 - RNA, 14 nt, Human
aagcacaggagaca

SEQ ID NO: 3417257 - RNA, 15 nt, Human
aagcacagugccugc

SEQ ID NO: 3417258 - RNA, 23 nt, Human
aagcacagugguggcagggccua

SEQ ID NO: 3417259 - RNA, 14 nt, Human
aagcacaguuugaa

SEQ ID NO: 3417260 - RNA, 16 nt, Human
aagcacaguuugaaca

SEQ ID NO: 3417261 - RNA, 23 nt, Human
aagcacauauuagugcagccaag

SEQ ID NO: 3417262 - RNA, 16 nt, Human
aagcacauauugagca

SEQ ID NO: 3417263 - RNA, 14 nt, Human
aagcacaugccucu

SEQ ID NO: 3417264 - RNA, 15 nt, Human
aagcacaugccucuc

SEQ ID NO: 3417265 - RNA, 16 nt, Human
aagcacaugccucucu

SEQ ID NO: 3417266 - RNA, 19 nt, Human
aagcacaugccucucucag

SEQ ID NO: 3417267 - RNA, 20 nt, Human
aagcacaugccucucucagg

SEQ ID NO: 3417268 - RNA, 22 nt, Human
aagcaccaaaauaagaaaagau

SEQ ID NO: 3417269 - RNA, 15 nt, Human
aagcaccauccccuc

SEQ ID NO: 3417270 - RNA, 15 nt, Human
aagcacccauuucaa

SEQ ID NO: 3417271 - RNA, 19 nt, Human
aagcaccgccuccaaaugc

SEQ ID NO: 3417272 - RNA, 16 nt, Human
aagcaccuccugccuc

SEQ ID NO: 3417273 - RNA, 17 nt, Human
aagcaccuccugccucg

SEQ ID NO: 3417274 - RNA, 12 nt, Human
aagcaccugccg

SEQ ID NO: 3417275 - RNA, 13 nt, Human
aagcacuagagaa

SEQ ID NO: 3417276 - RNA, 20 nt, Human
aagcacuagagaaugcacag

SEQ ID NO: 3417277 - RNA, 17 nt, Human
aagcacucuuaaagcaa

SEQ ID NO: 3417278 - RNA, 16 nt, Human
aagcacugaccuguca

SEQ ID NO: 3417279 - RNA, 12 nt, Human
aacccccacccc

SEQ ID NO: 3417280 - RNA, 13 nt, Human
aacccccacccca

SEQ ID NO: 3417281 - RNA, 17 nt, Human
aacccccaccccacacu

SEQ ID NO: 3417282 - RNA, 12 nt, Human
aacccccacugg

SEQ ID NO: 3417283 - RNA, 13 nt, Human
aacccccagccug

SEQ ID NO: 3417284 - RNA, 14 nt, Human
aaccccccagauau

SEQ ID NO: 3417285 - RNA, 16 nt, Human
aaccccccagauauca

SEQ ID NO: 3417286 - RNA, 14 nt, Human
aaccccccagcacu

SEQ ID NO: 3417287 - RNA, 18 nt, Human
aacccccuuugugcugug

SEQ ID NO: 3417288 - RNA, 22 nt, Human
aaccccgucgaggggcucucag

SEQ ID NO: 3417289 - RNA, 23 nt, Human
aaccccucgcccagucccagcag

SEQ ID NO: 3417290 - RNA, 20 nt, Human
aaccccuggcuccaggccag

SEQ ID NO: 3417291 - RNA, 12 nt, Human
aaccccuguccc

SEQ ID NO: 3417292 - RNA, 20 nt, Human
aaccccuuaagcccuggccc

SEQ ID NO: 3417293 - RNA, 12 nt, Human
aaccccuuccca

SEQ ID NO: 3417294 - RNA, 18 nt, Human
aaccccuuucccacccca

SEQ ID NO: 3417295 - RNA, 17 nt, Human
aacccgacagagggaag

SEQ ID NO: 3417296 - RNA, 15 nt, Human
aacccgaggcccgca

SEQ ID NO: 3417297 - RNA, 16 nt, Human
aacccgaggcccgcau

SEQ ID NO: 3417298 - RNA, 15 nt, Human
aacccgucuggccca

SEQ ID NO: 3417299 - RNA, 17 nt, Human
aacccuacacccagacc

SEQ ID NO: 3417300 - RNA, 14 nt, Human
aacccuagcaaaag

SEQ ID NO: 3417301 - RNA, 21 nt, Human
aacccuauacuguaguauucu

SEQ ID NO: 3417302 - RNA, 15 nt, Human
aacccuaucuccuga

SEQ ID NO: 3417303 - RNA, 22 nt, Human
aacccuaucuccugacagaagg

SEQ ID NO: 3417304 - RNA, 18 nt, Human
aacccucagggcaaagcc

SEQ ID NO: 3417305 - RNA, 16 nt, Human
aacccucccucagccc

SEQ ID NO: 3417306 - RNA, 18 nt, Human
aacccucccucagccccu

SEQ ID NO: 3417307 - RNA, 21 nt, Human
aacccucccucagccccucuu

SEQ ID NO: 3417308 - RNA, 19 nt, Human
aacccuccuaucaccuccc

SEQ ID NO: 3417309 - RNA, 21 nt, Human
aacccuccuaucaccuccccu

SEQ ID NO: 3417310 - RNA, 13 nt, Human
aaggagaacaaau

SEQ ID NO: 3417311 - RNA, 15 nt, Human
aaggagaaccagcac

SEQ ID NO: 3417312 - RNA, 15 nt, Human
aaggagaaggaagga

SEQ ID NO: 3417313 - RNA, 18 nt, Human
aaggagacacagauguuc

SEQ ID NO: 3417314 - RNA, 14 nt, Human
aaggagacaggcag

SEQ ID NO: 3417315 - RNA, 16 nt, Human
aaggagacaggcagag

SEQ ID NO: 3417316 - RNA, 19 nt, Human
aaggagacaggcagagcug

SEQ ID NO: 3417317 - RNA, 16 nt, Human
aaggagacucaccucu

SEQ ID NO: 3417318 - RNA, 14 nt, Human
aaggagagaaagug

SEQ ID NO: 3417319 - RNA, 17 nt, Human
aaggagaggaaagaacu

SEQ ID NO: 3417320 - RNA, 13 nt, Human
aaggagaggaggc

SEQ ID NO: 3417321 - RNA, 14 nt, Human
aaggagaggaggca

SEQ ID NO: 3417322 - RNA, 21 nt, Human
aaggagagucuugcagugauu

SEQ ID NO: 3417323 - RNA, 18 nt, Human
aaggagaugucuuggaac

SEQ ID NO: 3417324 - RNA, 14 nt, Human
aaggagauuuacaa

SEQ ID NO: 3417325 - RNA, 12 nt, Human
aaggagcaucua

SEQ ID NO: 3417326 - RNA, 12 nt, Human
aaggagccugug

SEQ ID NO: 3417327 - RNA, 16 nt, Human
aaggagcugccuggac

SEQ ID NO: 3417328 - RNA, 20 nt, Human
aaggagcugcuauagccugg

SEQ ID NO: 3417329 - RNA, 13 nt, Human
aaggaggacccag

SEQ ID NO: 3417330 - RNA, 22 nt, Human
aaggaggacccaggacaggauc

SEQ ID NO: 3417331 - RNA, 15 nt, Human
aaggaggagccuguc

SEQ ID NO: 3417332 - RNA, 18 nt, Human
aaggaggcaugccucuga

SEQ ID NO: 3417333 - RNA, 20 nt, Human
aaggaggcaugccucugaua

SEQ ID NO: 3417334 - RNA, 16 nt, Human
aaggaggccaccuccu

SEQ ID NO: 3417335 - RNA, 19 nt, Human
aaggaggcuccaggcagca

SEQ ID NO: 3417336 - RNA, 18 nt, Human
aaggaggcuggcuggggc

SEQ ID NO: 3417337 - RNA, 20 nt, Human
aaggaggggaaaaaaauguu

SEQ ID NO: 3417338 - RNA, 22 nt, Human
aaggaggggaaaaaaauguugu

SEQ ID NO: 3417339 - RNA, 17 nt, Human
aaggaggggcuguaaaa

SEQ ID NO: 3417340 - RNA, 12 nt, Human
aaggagggugag

SEQ ID NO: 3417341 - RNA, 21 nt, Human
aaggaggguggaucaccugag

SEQ ID NO: 3417342 - RNA, 15 nt, Human
aaggaggugagggau

SEQ ID NO: 3417343 - RNA, 19 nt, Human
aaggaguaaucuguguaca

SEQ ID NO: 3417344 - RNA, 20 nt, Human
aaggaguuccaugaagacca

SEQ ID NO: 3417345 - RNA, 12 nt, Human
aaggaguuuaug

SEQ ID NO: 3417346 - RNA, 13 nt, Human
aaggaguuuaugu

SEQ ID NO: 3417347 - RNA, 23 nt, Human
aaggaguuucuuuagcugacaga

SEQ ID NO: 3417348 - RNA, 13 nt, Human
aaggauaaagaag

SEQ ID NO: 3417349 - RNA, 11 nt, Human
aaggauaaagu

SEQ ID NO: 3417350 - RNA, 15 nt, Human
aaggauaaaucauaa

SEQ ID NO: 3417351 - RNA, 19 nt, Human
aaggauaaaucauaaaguc

SEQ ID NO: 3417352 - RNA, 22 nt, Human
aaggauaaaucauaaagucagu

SEQ ID NO: 3417353 - RNA, 15 nt, Human
aaggauacaggcugg

SEQ ID NO: 3417354 - RNA, 17 nt, Human
aaggauaccuucuuauu

SEQ ID NO: 3417355 - RNA, 13 nt, Human
aaggauacuuauu

SEQ ID NO: 3417356 - RNA, 17 nt, Human
aaggauagaagcugcag

SEQ ID NO: 3417357 - RNA, 19 nt, Human
aaggauagaucaaagucaa

SEQ ID NO: 3417358 - RNA, 15 nt, Human
aaggauagaugcugg

SEQ ID NO: 3417359 - RNA, 23 nt, Human
aaggauauuuaagaaaauacaau

SEQ ID NO: 3417360 - RNA, 13 nt, Human
aaggaucaucuga

SEQ ID NO: 3417361 - RNA, 12 nt, Human
aaggauccugag

SEQ ID NO: 3417362 - RNA, 22 nt, Human
aaggaucucucaggagcacagg

SEQ ID NO: 3417363 - RNA, 15 nt, Human
aaggaucuguuuuua

SEQ ID NO: 3417364 - RNA, 24 nt, Human
aaggaugcacagaguuguuacauu

SEQ ID NO: 3417365 - RNA, 14 nt, Human
aaggaugcccaaag

SEQ ID NO: 3417366 - RNA, 16 nt, Human
aaggaugcuuguacau

SEQ ID NO: 3417367 - RNA, 19 nt, Human
aaggaugcuuguacauaau

SEQ ID NO: 3417368 - RNA, 19 nt, Human
aaggauguaaacagugccu

SEQ ID NO: 3417369 - RNA, 23 nt, Human
aaggauguaaacagugccugcug

SEQ ID NO: 3417370 - RNA, 15 nt, Human
aaggauguacauuuc

SEQ ID NO: 3417371 - RNA, 23 nt, Human
aaggauguagcuuuucaccuuua

SEQ ID NO: 3417372 - RNA, 16 nt, Human
aaggaugucacagggc

SEQ ID NO: 3417373 - RNA, 17 nt, Human
aaggaugucacagggcc

SEQ ID NO: 3417374 - RNA, 15 nt, Human
aaggaugugauugug

SEQ ID NO: 3417375 - RNA, 22 nt, Human
aaggauuaauugcugcaaggac

SEQ ID NO: 3417376 - RNA, 20 nt, Human
aaggauuauggaaaaauaaa

SEQ ID NO: 3417377 - RNA, 16 nt, Human
aaggauucauguggaa

SEQ ID NO: 3417378 - RNA, 12 nt, Human
aaggauuguaaa

SEQ ID NO: 3417379 - RNA, 16 nt, Human
aaggauuuguguuuua

SEQ ID NO: 3417380 - RNA, 16 nt, Human
aaggauuuuaugcuuu

SEQ ID NO: 3417381 - RNA, 12 nt, Human
aaggauuuuucu

SEQ ID NO: 3417382 - RNA, 14 nt, Human
aaggcaaaaaugua

SEQ ID NO: 3417383 - RNA, 14 nt, Human
aaggcaaaauugca

SEQ ID NO: 3417384 - RNA, 15 nt, Human
aaggcaaacauuuga

SEQ ID NO: 3417385 - RNA, 22 nt, Human
aaggcaaaccuuucuauaauuu

SEQ ID NO: 3417386 - RNA, 18 nt, Human
aaggcaaauguguacaug

SEQ ID NO: 3417387 - RNA, 21 nt, Human
aaggcaacugaacaaaaaaau

SEQ ID NO: 3417388 - RNA, 11 nt, Human
aaggcaagcca

SEQ ID NO: 3417389 - RNA, 15 nt, Human
aaggcaaguuaagag

SEQ ID NO: 3417390 - RNA, 20 nt, Human
aaggcaaguuucuagcuaga

SEQ ID NO: 3417391 - RNA, 15 nt, Human
aaggcacaauauggg

SEQ ID NO: 3417392 - RNA, 15 nt, Human
aaggcaccagccggg

SEQ ID NO: 3417393 - RNA, 20 nt, Human
aaggcacccacaaauaaaug

SEQ ID NO: 3417394 - RNA, 22 nt, Human
aaggcaccuauaaaacagguca

SEQ ID NO: 3417395 - RNA, 14 nt, Human
aaggcacucuagau

SEQ ID NO: 3417396 - RNA, 15 nt, Human
aaggcacucuagauu

SEQ ID NO: 3417397 - RNA, 18 nt, Human
aaggcacuucauguaaag

SEQ ID NO: 3417398 - RNA, 15 nt, Human
aaggcagagaaaucu

SEQ ID NO: 3417399 - RNA, 22 nt, Human
aaggcagagaaaucuaagcugu

SEQ ID NO: 3417400 - RNA, 14 nt, Human
aaggcagaggccug

SEQ ID NO: 3417401 - RNA, 14 nt, Human
aaggcagcaaggcc

SEQ ID NO: 3417402 - RNA, 21 nt, Human
aaggcagcauguauaguugcu

SEQ ID NO: 3417403 - RNA, 11 nt, Human
aaggcagccac

SEQ ID NO: 3417404 - RNA, 19 nt, Human
aaggcagccgugggcccca

SEQ ID NO: 3417405 - RNA, 23 nt, Human
aaggcagccgugggccccacccu

SEQ ID NO: 3417406 - RNA, 16 nt, Human
aaggcaggaaugugug

SEQ ID NO: 3417407 - RNA, 18 nt, Human
aaggcaggcagggcucuc

SEQ ID NO: 3417408 - RNA, 20 nt, Human
aaggcagggagcgagggaga

SEQ ID NO: 3417409 - RNA, 12 nt, Human
aaggcagggagg

SEQ ID NO: 3417410 - RNA, 18 nt, Human
aaggcaggggaauguaug

SEQ ID NO: 3417411 - RNA, 14 nt, Human
aaggcaggugccuc

SEQ ID NO: 3417412 - RNA, 17 nt, Human
aaggcaggugccuccag

SEQ ID NO: 3417413 - RNA, 22 nt, Human
aaggcaggugccuccaggugug

SEQ ID NO: 3417414 - RNA, 15 nt, Human
aaggcaguuugcaaa

SEQ ID NO: 3417415 - RNA, 17 nt, Human
aaggcauacgagagcag

SEQ ID NO: 3417416 - RNA, 21 nt, Human
aaggcauacgagagcagaggu

SEQ ID NO: 3417417 - RNA, 22 nt, Human
aaggcaucgucaugcacaguau

SEQ ID NO: 3417418 - RNA, 17 nt, Human
aaggcaucuaucugugc

SEQ ID NO: 3417419 - RNA, 12 nt, Human
aaggcaugaagg

SEQ ID NO: 3417420 - RNA, 19 nt, Human
aaggcaugugugaaacaua

SEQ ID NO: 3417421 - RNA, 17 nt, Human
aaggcauucucugaaga

SEQ ID NO: 3417422 - RNA, 17 nt, Human
aaggccaaaccucuguu

SEQ ID NO: 3417423 - RNA, 16 nt, Human
aaggccaaaggaagca

SEQ ID NO: 3417424 - RNA, 21 nt, Human
aaggccaauuccuauacgcag

SEQ ID NO: 3417425 - RNA, 17 nt, Human
aaggccagaccugcaga

SEQ ID NO: 3417426 - RNA, 22 nt, Human
aaggccagaguggccuggccag

SEQ ID NO: 3417427 - RNA, 23 nt, Human
aaggccagaguggccuggccagg

SEQ ID NO: 3417428 - RNA, 18 nt, Human
aaggccaguggaaauuca

SEQ ID NO: 3417429 - RNA, 24 nt, Human
aaggccauaaaacagguaauauaa

SEQ ID NO: 3417430 - RNA, 14 nt, Human
aaggccaucagagc

SEQ ID NO: 3417431 - RNA, 22 nt, Human
aaggccaucugggcuccuccag

SEQ ID NO: 3417432 - RNA, 21 nt, Human
aaggccauggagagcuggagc

SEQ ID NO: 3417433 - RNA, 21 nt, Human
aaggcccacgagcuuguucuu

SEQ ID NO: 3417434 - RNA, 18 nt, Human
aaggcccagccccuagaa

SEQ ID NO: 3417435 - RNA, 19 nt, Human
aaggcccccugccugcccu

SEQ ID NO: 3417436 - RNA, 16 nt, Human
aaggccccgcccaggc

SEQ ID NO: 3417437 - RNA, 16 nt, Human
aaggcccgagcagcug

SEQ ID NO: 3417438 - RNA, 17 nt, Human
aaggcccgagcagcuga

SEQ ID NO: 3417439 - RNA, 19 nt, Human
aaggcccgagcagcugagc

SEQ ID NO: 3417440 - RNA, 21 nt, Human
aaggcccgagcagcugagcag

SEQ ID NO: 3417441 - RNA, 18 nt, Human
aaggcccugcugagucau

SEQ ID NO: 3417442 - RNA, 22 nt, Human
aaggccgaagaaggguccuucc

SEQ ID NO: 3417443 - RNA, 17 nt, Human
aaggccgagaagcaaga

SEQ ID NO: 3417444 - RNA, 16 nt, Human
aaggccuaggauucua

SEQ ID NO: 3417445 - RNA, 19 nt, Human
aaggccucccacagugacu

SEQ ID NO: 3417446 - RNA, 19 nt, Human
aaggccucccuagccagca

SEQ ID NO: 3417447 - RNA, 15 nt, Human
aaggccuccuggcug

SEQ ID NO: 3417448 - RNA, 15 nt, Human
aaggccucgcaggaa

SEQ ID NO: 3417449 - RNA, 16 nt, Human
aaggccucuuggagac

SEQ ID NO: 3417450 - RNA, 20 nt, Human
aaggccucuuguaaagacug

SEQ ID NO: 3417451 - RNA, 21 nt, Human
aaggccucuuguaaagacugg

SEQ ID NO: 3417452 - RNA, 17 nt, Human
aaggccuggggugaccc

SEQ ID NO: 3417453 - RNA, 22 nt, Human
aaggccuggggugacccggcac

SEQ ID NO: 3417454 - RNA, 20 nt, Human
aaggccugucagcuaaagaa

SEQ ID NO: 3417455 - RNA, 13 nt, Human
aacuguacuuuga

SEQ ID NO: 3417456 - RNA, 17 nt, Human
aacuguacuuugauuca

SEQ ID NO: 3417457 - RNA, 18 nt, Human
aacuguacuuugauucac

SEQ ID NO: 3417458 - RNA, 16 nt, Human
aacuguagaaaugaug

SEQ ID NO: 3417459 - RNA, 19 nt, Human
aacuguagaaaugaugaug

SEQ ID NO: 3417460 - RNA, 13 nt, Human
aacuguaucuuga

SEQ ID NO: 3417461 - RNA, 21 nt, Human
aacugucaggcugaaaacaau

SEQ ID NO: 3417462 - RNA, 21 nt, Human
aacuguccguaagcaguauau

SEQ ID NO: 3417463 - RNA, 14 nt, Human
aacuguccuguccu

SEQ ID NO: 3417464 - RNA, 15 nt, Human
aacugucgugucaua

SEQ ID NO: 3417465 - RNA, 19 nt, Human
aacugucuagcacuuccuu

SEQ ID NO: 3417466 - RNA, 17 nt, Human
aacugucuauuucugcu

SEQ ID NO: 3417467 - RNA, 21 nt, Human
aacugucuccuaccucugcuc

SEQ ID NO: 3417468 - RNA, 19 nt, Human
aacugugaaguuuacauug

SEQ ID NO: 3417469 - RNA, 16 nt, Human
aacugugauuucagga

SEQ ID NO: 3417470 - RNA, 22 nt, Human
aacugugcagagucuagaaguu

SEQ ID NO: 3417471 - RNA, 18 nt, Human
aacuguggauauuguuac

SEQ ID NO: 3417472 - RNA, 20 nt, Human
aacuguggccguuaucugga

SEQ ID NO: 3417473 - RNA, 13 nt, Human
aacuguguaacug

SEQ ID NO: 3417474 - RNA, 23 nt, Human
aacuguguacauaacugaaaaug

SEQ ID NO: 3417475 - RNA, 13 nt, Human
aacuguguagcau

SEQ ID NO: 3417476 - RNA, 17 nt, Human
aacuguguauguacaua

SEQ ID NO: 3417477 - RNA, 18 nt, Human
aacuguguggacugugau

SEQ ID NO: 3417478 - RNA, 14 nt, Human
aacuguguguaauu

SEQ ID NO: 3417479 - RNA, 17 nt, Human
aacuguguuguauuaac

SEQ ID NO: 3417480 - RNA, 18 nt, Human
aacuguguuguauuaaca

SEQ ID NO: 3417481 - RNA, 19 nt, Human
aacuguguuucaaguucaa

SEQ ID NO: 3417482 - RNA, 19 nt, Human
aacuguuaaauugcugugu

SEQ ID NO: 3417483 - RNA, 21 nt, Human
aacuguuaagaaaucuguuuu

SEQ ID NO: 3417484 - RNA, 14 nt, Human
aacuguuacaguaa

SEQ ID NO: 3417485 - RNA, 16 nt, Human
aaggcucugagagucu

SEQ ID NO: 3417486 - RNA, 23 nt, Human
aaggcucugagcaaauguggcuc

SEQ ID NO: 3417487 - RNA, 17 nt, Human
aaggcugaccaagagag

SEQ ID NO: 3417488 - RNA, 18 nt, Human
aaggcugacuacauuuuu

SEQ ID NO: 3417489 - RNA, 19 nt, Human
aaggcugagaggagagaga

SEQ ID NO: 3417490 - RNA, 18 nt, Human
aaggcugcagauaacaga

SEQ ID NO: 3417491 - RNA, 20 nt, Human
aaggcugccaacggggagcg

SEQ ID NO: 3417492 - RNA, 14 nt, Human
aaggcugcgucugg

SEQ ID NO: 3417493 - RNA, 16 nt, Human
aaggcugcuguacuga

SEQ ID NO: 3417494 - RNA, 16 nt, Human
aaggcugggggaagaa

SEQ ID NO: 3417495 - RNA, 19 nt, Human
aaggcugggggaagaagcu

SEQ ID NO: 3417496 - RNA, 12 nt, Human
aaggcuguauuc

SEQ ID NO: 3417497 - RNA, 17 nt, Human
aaggcuguauucagcaa

SEQ ID NO: 3417498 - RNA, 20 nt, Human
aaggcugucaauuacaggaa

SEQ ID NO: 3417499 - RNA, 22 nt, Human
aaggcuguccuuacccaucugc

SEQ ID NO: 3417500 - RNA, 22 nt, Human
aaggcugugcucccugguucug

SEQ ID NO: 3417501 - RNA, 14 nt, Human
aaggcuuauaaaac

SEQ ID NO: 3417502 - RNA, 21 nt, Human
aaggcuuauauucaaccaugg

SEQ ID NO: 3417503 - RNA, 23 nt, Human
aaggcuuauauucaaccauggac

SEQ ID NO: 3417504 - RNA, 23 nt, Human
aaggcuucaauuuauugcacaaa

SEQ ID NO: 3417505 - RNA, 14 nt, Human
aaggcuucucucuc

SEQ ID NO: 3417506 - RNA, 17 nt, Human
aaggcuucucucucacc

SEQ ID NO: 3417507 - RNA, 17 nt, Human
aaggcuucucucugugg

SEQ ID NO: 3417508 - RNA, 13 nt, Human
aaggcuugaagcu

SEQ ID NO: 3417509 - RNA, 15 nt, Human
aaggcuuuaucucag

SEQ ID NO: 3417510 - RNA, 20 nt, Human
aagggaaaaaucaaguauua

SEQ ID NO: 3417511 - RNA, 17 nt, Human
aagggaaacugccagca

SEQ ID NO: 3417512 - RNA, 14 nt, Human
aagggaaauaucau

SEQ ID NO: 3417513 - RNA, 16 nt, Human
aagggaaauaucauuu

SEQ ID NO: 3417514 - RNA, 15 nt, Human
aagggaaccuguguc

SEQ ID NO: 3417515 - RNA, 13 nt, Human
aagggaagacauu

SEQ ID NO: 3417516 - RNA, 23 nt, Human
aagggaaggccccacagacaagg

SEQ ID NO: 3417517 - RNA, 20 nt, Human
aagggaaguaguuaucaugu

SEQ ID NO: 3417518 - RNA, 22 nt, Human
aagggaaguaguuaucauguua

SEQ ID NO: 3417519 - RNA, 21 nt, Human
aagggaauagaaauguuugcu

SEQ ID NO: 3417520 - RNA, 20 nt, Human
aagggaaucacaucuuuuaa

SEQ ID NO: 3417521 - RNA, 12 nt, Human
aagggaauccuc

SEQ ID NO: 3417522 - RNA, 17 nt, Human
aagggaauccuccucca

SEQ ID NO: 3417523 - RNA, 19 nt, Human
aagggacccuuuggggguu

SEQ ID NO: 3417524 - RNA, 20 nt, Human
aagggacuuggaagcuccgc

SEQ ID NO: 3417525 - RNA, 12 nt, Human
aagggagaagaa

SEQ ID NO: 3417526 - RNA, 16 nt, Human
aagggagaagaaaggu

SEQ ID NO: 3417527 - RNA, 16 nt, Human
aagggagagagagagg

SEQ ID NO: 3417528 - RNA, 17 nt, Human
aagggagagcggggcag

SEQ ID NO: 3417529 - RNA, 17 nt, Human
aagggagcagaacugaa

SEQ ID NO: 3417530 - RNA, 13 nt, Human
aagggagccaagg

SEQ ID NO: 3417531 - RNA, 18 nt, Human
aagggagcuaucaggaac

SEQ ID NO: 3417532 - RNA, 18 nt, Human
aagggaggacgggagcug

SEQ ID NO: 3417533 - RNA, 21 nt, Human
aagggaggaggagcuucuggg

SEQ ID NO: 3417534 - RNA, 21 nt, Human
aagggagggcagagcuggugc

SEQ ID NO: 3417535 - RNA, 21 nt, Human
aagggagggcucugaggcgcc

SEQ ID NO: 3417536 - RNA, 13 nt, Human
aagggagggggag

SEQ ID NO: 3417537 - RNA, 12 nt, Human
aagggagguggg

SEQ ID NO: 3417538 - RNA, 19 nt, Human
aagggaguguacucccagg

SEQ ID NO: 3417539 - RNA, 15 nt, Human
aagggaguuuuugau

SEQ ID NO: 3417540 - RNA, 12 nt, Human
aagggauauuuu

SEQ ID NO: 3417541 - RNA, 17 nt, Human
aagggaugaauuguaaa

SEQ ID NO: 3417542 - RNA, 16 nt, Human
aagggaugcaggcucc

SEQ ID NO: 3417543 - RNA, 15 nt, Human
aagggauggaaaagg

SEQ ID NO: 3417544 - RNA, 21 nt, Human
aagggauggaaaaggaagacu

SEQ ID NO: 3417545 - RNA, 17 nt, Human
aagggauggacaucuug

SEQ ID NO: 3417546 - RNA, 14 nt, Human
aagggauggcaaga

SEQ ID NO: 3417547 - RNA, 22 nt, Human
aagggauguuauuauccuuggg

SEQ ID NO: 3417548 - RNA, 15 nt, Human
aagggauuucuuagg

SEQ ID NO: 3417549 - RNA, 23 nt, Human
aagggauuuucagcccucagaau

SEQ ID NO: 3417550 - RNA, 18 nt, Human
aagggcagaaguagggga

SEQ ID NO: 3417551 - RNA, 19 nt, Human
aagggcagcuuugcucaua

SEQ ID NO: 3417552 - RNA, 20 nt, Human
aagggcagcuuugcucauau

SEQ ID NO: 3417553 - RNA, 17 nt, Human
aagggcauaaaacagcu

SEQ ID NO: 3417554 - RNA, 14 nt, Human
aagggcauccuucu

SEQ ID NO: 3417555 - RNA, 16 nt, Human
aagggcaugccuugug

SEQ ID NO: 3417556 - RNA, 17 nt, Human
aagggcaugccuugugc

SEQ ID NO: 3417557 - RNA, 19 nt, Human
aagggcaugccuugugcug

SEQ ID NO: 3417558 - RNA, 12 nt, Human
aagggccaaaga

SEQ ID NO: 3417559 - RNA, 22 nt, Human
aagggccaaagaaccaaagaag

SEQ ID NO: 3417560 - RNA, 22 nt, Human
aagggccaccuacaauacaucu

SEQ ID NO: 3417561 - RNA, 9 nt, Human
aagggccag

SEQ ID NO: 3417562 - RNA, 16 nt, Human
aagggccagagccagg

SEQ ID NO: 3417563 - RNA, 17 nt, Human
aagggccagagccaggg

SEQ ID NO: 3417564 - RNA, 14 nt, Human
aagggccagucugg

SEQ ID NO: 3417565 - RNA, 17 nt, Human
aagggccaugcugaagg

SEQ ID NO: 3417566 - RNA, 19 nt, Human
aagggccaugcugaaggga

SEQ ID NO: 3417567 - RNA, 13 nt, Human
aagggcccagaga

SEQ ID NO: 3417568 - RNA, 22 nt, Human
aagggcccuuuuucaauaacug

SEQ ID NO: 3417569 - RNA, 19 nt, Human
aagggccugccuggccccu

SEQ ID NO: 3417570 - RNA, 13 nt, Human
aagggccuggccu

SEQ ID NO: 3417571 - RNA, 14 nt, Human
aagggccuggccug

SEQ ID NO: 3417572 - RNA, 19 nt, Human
aagggccuggccugagcug

SEQ ID NO: 3417573 - RNA, 19 nt, Human
aagggcuagaaccuggagg

SEQ ID NO: 3417574 - RNA, 16 nt, Human
aagggcuauguaaaua

SEQ ID NO: 3417575 - RNA, 20 nt, Human
aagggcugcaugauguuugc

SEQ ID NO: 3417576 - RNA, 16 nt, Human
aagggcugcuucccug

SEQ ID NO: 3417577 - RNA, 17 nt, Human
aagggcuguuauaaucu

SEQ ID NO: 3417578 - RNA, 22 nt, Human
aagggcuucugcacccuccacc

SEQ ID NO: 3417579 - RNA, 20 nt, Human
aaggggacccccgcccccug

SEQ ID NO: 3417580 - RNA, 14 nt, Human
aaggggaggcagcc

SEQ ID NO: 3417581 - RNA, 20 nt, Human
aaggggauuuuuaugucugg

SEQ ID NO: 3417582 - RNA, 12 nt, Human
aaggggcaaauu

SEQ ID NO: 3417583 - RNA, 19 nt, Human
aaggggcagucuggagggg

SEQ ID NO: 3417584 - RNA, 14 nt, Human
aaggggcaguggug

SEQ ID NO: 3417585 - RNA, 17 nt, Human
aaggggcaguggugguu

SEQ ID NO: 3417586 - RNA, 14 nt, Human
aaggggcccuugga

SEQ ID NO: 3417587 - RNA, 20 nt, Human
aaggggcccuuggagcgugg

SEQ ID NO: 3417588 - RNA, 14 nt, Human
aaggggccugagca

SEQ ID NO: 3417589 - RNA, 18 nt, Human
aaggggcgucuguucccc

SEQ ID NO: 3417590 - RNA, 16 nt, Human
aaggggcugaaagaac

SEQ ID NO: 3417591 - RNA, 22 nt, Human
aaggggcuucagguccaggcug

SEQ ID NO: 3417592 - RNA, 21 nt, Human
aagggggguugcaguggagag

SEQ ID NO: 3417593 - RNA, 21 nt, Human
aagggguaggauuacuaggug

SEQ ID NO: 3417594 - RNA, 14 nt, Human
aagggguuucuaac

SEQ ID NO: 3417595 - RNA, 12 nt, Human
aaggguaaacaa

SEQ ID NO: 3417596 - RNA, 16 nt, Human
aaggguaucaggugcu

SEQ ID NO: 3417597 - RNA, 17 nt, Human
aaggguaucaggugcug

SEQ ID NO: 3417598 - RNA, 11 nt, Human
aagggucaggc

SEQ ID NO: 3417599 - RNA, 12 nt, Human
aagggucaggcc

SEQ ID NO: 3417600 - RNA, 21 nt, Human
aaggagccugugaacccagga

SEQ ID NO: 3417601 - RNA, 22 nt, Human
aaggagccugugaacccaggac

SEQ ID NO: 3417602 - RNA, 22 nt, Human
aaggagcugagaauagaaggaa

SEQ ID NO: 3417603 - RNA, 17 nt, Human
aaggagcugccuggacc

SEQ ID NO: 3417604 - RNA, 18 nt, Human
aaggagcugccuggaccc

SEQ ID NO: 3417605 - RNA, 20 nt, Human
aaggaggaagagaaaaaaua

SEQ ID NO: 3417606 - RNA, 17 nt, Human
aaggaggacccaggaca

SEQ ID NO: 3417607 - RNA, 17 nt, Human
aaggaggagagggaaaa

SEQ ID NO: 3417608 - RNA, 22 nt, Human
aaggaggagccuguccugccug

SEQ ID NO: 3417609 - RNA, 14 nt, Human
aaggaggccaccuc

SEQ ID NO: 3417610 - RNA, 19 nt, Human
aaggaggccaccuccuaaa

SEQ ID NO: 3417611 - RNA, 13 nt, Human
aaggaggcuggcu

SEQ ID NO: 3417612 - RNA, 15 nt, Human
aaggaggcuggcugg

SEQ ID NO: 3417613 - RNA, 15 nt, Human
aaggagggagaugga

SEQ ID NO: 3417614 - RNA, 18 nt, Human
aaggaggggaaaaaaaug

SEQ ID NO: 3417615 - RNA, 19 nt, Human
aaggaggggaaaaaaaugu

SEQ ID NO: 3417616 - RNA, 20 nt, Human
aaggaggggauagagagaga

SEQ ID NO: 3417617 - RNA, 18 nt, Human
aaggaggguacagcuggg

SEQ ID NO: 3417618 - RNA, 19 nt, Human
aaggaggguacagcugggc

SEQ ID NO: 3417619 - RNA, 17 nt, Human
aaggagggucaggaagg

SEQ ID NO: 3417620 - RNA, 19 nt, Human
aaggaggguuagggagggg

SEQ ID NO: 3417621 - RNA, 18 nt, Human
aaggaguaaucuguguac

SEQ ID NO: 3417622 - RNA, 19 nt, Human
aaggaguguagcaacuaca

SEQ ID NO: 3417623 - RNA, 13 nt, Human
aaggaguuaagag

SEQ ID NO: 3417624 - RNA, 16 nt, Human
aaggaguuggaaguga

SEQ ID NO: 3417625 - RNA, 14 nt, Human
aaggaguuuauguu

SEQ ID NO: 3417626 - RNA, 22 nt, Human
aaggauaaacuuuuagaaacuu

SEQ ID NO: 3417627 - RNA, 21 nt, Human
aaggauaaaguugguaaaccu

SEQ ID NO: 3417628 - RNA, 23 nt, Human
aaggauaaaguugguaaaccuuu

SEQ ID NO: 3417629 - RNA, 13 nt, Human
aaggauaaugaau

SEQ ID NO: 3417630 - RNA, 17 nt, Human
aaggauauuuaagaaaa

SEQ ID NO: 3417631 - RNA, 15 nt, Human
aaggauccugagcca

SEQ ID NO: 3417632 - RNA, 17 nt, Human
aaggauccugagccaga

SEQ ID NO: 3417633 - RNA, 12 nt, Human
aaggaucuuuca

SEQ ID NO: 3417634 - RNA, 16 nt, Human
aaggaucuuuguggcc

SEQ ID NO: 3417635 - RNA, 18 nt, Human
aaggaucuuuguggccaa

SEQ ID NO: 3417636 - RNA, 20 nt, Human
aaggaugccaagaaguuuaa

SEQ ID NO: 3417637 - RNA, 19 nt, Human
aaggaugcccaaagaugca

SEQ ID NO: 3417638 - RNA, 17 nt, Human
aaggaugggguuaugaa

SEQ ID NO: 3417639 - RNA, 22 nt, Human
aaggauguagcuuuucaccuuu

SEQ ID NO: 3417640 - RNA, 17 nt, Human
aaggaugugauugugga

SEQ ID NO: 3417641 - RNA, 15 nt, Human
aaggauugcuacugu

SEQ ID NO: 3417642 - RNA, 13 nt, Human
aaggauuguaaaa

SEQ ID NO: 3417643 - RNA, 23 nt, Human
aaggauuguaaaaaaaaaugccu

SEQ ID NO: 3417644 - RNA, 17 nt, Human
aaggauugugauauuuu

SEQ ID NO: 3417645 - RNA, 16 nt, Human
aaggucuguuuugagu

SEQ ID NO: 3417646 - RNA, 22 nt, Human
aaggucuugcauuuaaaagaca

SEQ ID NO: 3417647 - RNA, 12 nt, Human
aaggucuuucag

SEQ ID NO: 3417648 - RNA, 17 nt, Human
aaggugaaacauuuucu

SEQ ID NO: 3417649 - RNA, 20 nt, Human
aaggugacagaaggaccagc

SEQ ID NO: 3417650 - RNA, 21 nt, Human
aaggugacaucggaaaaauaa

SEQ ID NO: 3417651 - RNA, 17 nt, Human
aaggugacccaaugauu

SEQ ID NO: 3417652 - RNA, 13 nt, Human
aaggugaggccug

SEQ ID NO: 3417653 - RNA, 14 nt, Human
aaggugaggccugu

SEQ ID NO: 3417654 - RNA, 19 nt, Human
aaggugaggccugucugug

SEQ ID NO: 3417655 - RNA, 19 nt, Human
aaggugauaagggaaaaga

SEQ ID NO: 3417656 - RNA, 13 nt, Human
aaggugauguugu

SEQ ID NO: 3417657 - RNA, 19 nt, Human
aaggugcucucuuucuguc

SEQ ID NO: 3417658 - RNA, 18 nt, Human
aaggugcugacggccagg

SEQ ID NO: 3417659 - RNA, 21 nt, Human
aaggugcuguugucauugcuu

SEQ ID NO: 3417660 - RNA, 16 nt, Human
aaggugcuuggaguuu

SEQ ID NO: 3417661 - RNA, 16 nt, Human
aagguggaccuuuuaa

SEQ ID NO: 3417662 - RNA, 15 nt, Human
aagguggaguggaug

SEQ ID NO: 3417663 - RNA, 19 nt, Human
aagguggauggccccagca

SEQ ID NO: 3417664 - RNA, 16 nt, Human
aaggugggcugagccc

SEQ ID NO: 3417665 - RNA, 21 nt, Human
aaggugggcugagcccuggca

SEQ ID NO: 3417666 - RNA, 21 nt, Human
aagguggggucuuugugagag

SEQ ID NO: 3417667 - RNA, 17 nt, Human
aaggugguaugugugug

SEQ ID NO: 3417668 - RNA, 20 nt, Human
aaggugguauguguguguau

SEQ ID NO: 3417669 - RNA, 21 nt, Human
aagguguauuuaaacuaucuu

SEQ ID NO: 3417670 - RNA, 13 nt, Human
aagguguuugaaa

SEQ ID NO: 3417671 - RNA, 20 nt, Human
aagguguuugaaaauaguuu

SEQ ID NO: 3417672 - RNA, 18 nt, Human
aagguuaccaagaagccu

SEQ ID NO: 3417673 - RNA, 18 nt, Human
aagguuagagaauaaauu

SEQ ID NO: 3417674 - RNA, 17 nt, Human
aagguuaggauuuaaca

SEQ ID NO: 3417675 - RNA, 22 nt, Human
aagguuauuuauuuaaaugucu

SEQ ID NO: 3417676 - RNA, 15 nt, Human
aagguuccacagagu

SEQ ID NO: 3417677 - RNA, 15 nt, Human
aagguucccuugugg

SEQ ID NO: 3417678 - RNA, 12 nt, Human
aagguucuaggu

SEQ ID NO: 3417679 - RNA, 13 nt, Human
aagguucuagguu

SEQ ID NO: 3417680 - RNA, 17 nt, Human
aagguucucauaggaaa

SEQ ID NO: 3417681 - RNA, 22 nt, Human
aagguugacaauaaaugugcuu

SEQ ID NO: 3417682 - RNA, 21 nt, Human
aagguugcauacugagccaag

SEQ ID NO: 3417683 - RNA, 13 nt, Human
aagguuguauugc

SEQ ID NO: 3417684 - RNA, 18 nt, Human
aagguuguuuugaaacug

SEQ ID NO: 3417685 - RNA, 21 nt, Human
aagguuuacaauuuacaaagu

SEQ ID NO: 3417686 - RNA, 19 nt, Human
aagguuuaggcugguggcc

SEQ ID NO: 3417687 - RNA, 20 nt, Human
aagguuuaggcugguggccc

SEQ ID NO: 3417688 - RNA, 17 nt, Human
aagguuuauuguuaaua

SEQ ID NO: 3417689 - RNA, 20 nt, Human
aagguuuauuguuaauacaa

SEQ ID NO: 3417690 - RNA, 23 nt, Human
aagguuucagaaagaagugggga

SEQ ID NO: 3417691 - RNA, 16 nt, Human
aagguuucguuucugu

SEQ ID NO: 3417692 - RNA, 16 nt, Human
aagguuucugaaaauu

SEQ ID NO: 3417693 - RNA, 18 nt, Human
aagguuuggaaggagcag

SEQ ID NO: 3417694 - RNA, 13 nt, Human
aagguuuggugug

SEQ ID NO: 3417695 - RNA, 12 nt, Human
aagguuuuaagu

SEQ ID NO: 3417696 - RNA, 15 nt, Human
aagguuuuagguucu

SEQ ID NO: 3417697 - RNA, 17 nt, Human
aagguuuuagguucuaa

SEQ ID NO: 3417698 - RNA, 23 nt, Human
aagguuuuagguucuaaaguucu

SEQ ID NO: 3417699 - RNA, 19 nt, Human
aagguuuuugauagcauug

SEQ ID NO: 3417700 - RNA, 13 nt, Human
aaguaaaaacaaa

SEQ ID NO: 3417701 - RNA, 17 nt, Human
aaguaaaaccacagcag

SEQ ID NO: 3417702 - RNA, 13 nt, Human
aaguaaaagcaaa

SEQ ID NO: 3417703 - RNA, 14 nt, Human
aaguaaaaugucuu

SEQ ID NO: 3417704 - RNA, 13 nt, Human
aaguaaaauugcu

SEQ ID NO: 3417705 - RNA, 20 nt, Human
aaguaaacuuuuuguucugg

SEQ ID NO: 3417706 - RNA, 17 nt, Human
aaguaaagccauuaaau

SEQ ID NO: 3417707 - RNA, 13 nt, Human
aaguaaauacaau

SEQ ID NO: 3417708 - RNA, 15 nt, Human
aaguaaauacaauuu

SEQ ID NO: 3417709 - RNA, 17 nt, Human
aaguaaauacaauuuuu

SEQ ID NO: 3417710 - RNA, 18 nt, Human
aaguaaauacaugcauau

SEQ ID NO: 3417711 - RNA, 12 nt, Human
aaguaacaaaaa

SEQ ID NO: 3417712 - RNA, 15 nt, Human
aaguaacauaacuag

SEQ ID NO: 3417713 - RNA, 15 nt, Human
aaguaacgcaauaaa

SEQ ID NO: 3417714 - RNA, 14 nt, Human
aaguaacugugaga

SEQ ID NO: 3417715 - RNA, 15 nt, Human
aaguaacuuuauucu

SEQ ID NO: 3417716 - RNA, 19 nt, Human
aaguaagaaaauauuuugu

SEQ ID NO: 3417717 - RNA, 15 nt, Human
aaguaaggugcaguu

SEQ ID NO: 3417718 - RNA, 21 nt, Human
aaguaaguaccacucaggcca

SEQ ID NO: 3417719 - RNA, 14 nt, Human
aaguaagucucaag

SEQ ID NO: 3417720 - RNA, 13 nt, Human
aaguaauauaaug

SEQ ID NO: 3417721 - RNA, 16 nt, Human
aaguaauauaauggaa

SEQ ID NO: 3417722 - RNA, 17 nt, Human
aaguaauaugcacacau

SEQ ID NO: 3417723 - RNA, 21 nt, Human
aaguaauaugcacacauuuuu

SEQ ID NO: 3417724 - RNA, 22 nt, Human
aaguaauauuuauuaaauuuuu

SEQ ID NO: 3417725 - RNA, 18 nt, Human
aaguaaucccgccaccua

SEQ ID NO: 3417726 - RNA, 14 nt, Human
aaguaauguggaag

SEQ ID NO: 3417727 - RNA, 23 nt, Human
aaguaauuaucgggaacaguguu

SEQ ID NO: 3417728 - RNA, 14 nt, Human
aaguaauuccucuc

SEQ ID NO: 3417729 - RNA, 16 nt, Human
aaguaauugugaaaaa

SEQ ID NO: 3417730 - RNA, 15 nt, Human
aaguaauuguuccag

SEQ ID NO: 3417731 - RNA, 16 nt, Human
aaguaauuucuucuca

SEQ ID NO: 3417732 - RNA, 18 nt, Human
aaguacaauguguuuuuc

SEQ ID NO: 3417733 - RNA, 16 nt, Human
aaguacacucugcugu

SEQ ID NO: 3417734 - RNA, 23 nt, Human
aaguacacugaauuuuuaugugu

SEQ ID NO: 3417735 - RNA, 13 nt, Human
aaguacacuguuu

SEQ ID NO: 3417736 - RNA, 19 nt, Human
aaguacacuguuucaaacu

SEQ ID NO: 3417737 - RNA, 16 nt, Human
aaguacagagaagcca

SEQ ID NO: 3417738 - RNA, 17 nt, Human
aaguacagagaagccau

SEQ ID NO: 3417739 - RNA, 15 nt, Human
aaguacagguacuuu

SEQ ID NO: 3417740 - RNA, 13 nt, Human
aaguacauauuua

SEQ ID NO: 3417741 - RNA, 17 nt, Human
aaguacauuuuuugaaa

SEQ ID NO: 3417742 - RNA, 16 nt, Human
aaguaccaaaguuuua

SEQ ID NO: 3417743 - RNA, 17 nt, Human
aaguaccacucaggcca

SEQ ID NO: 3417744 - RNA, 20 nt, Human
aaguacccguucacauuuuu

SEQ ID NO: 3417745 - RNA, 21 nt, Human
aagacugaguacguugugcau

SEQ ID NO: 3417746 - RNA, 22 nt, Human
aagacugaguacguugugcauu

SEQ ID NO: 3417747 - RNA, 16 nt, Human
aagacugcacaucaaa

SEQ ID NO: 3417748 - RNA, 17 nt, Human
aagacugcauuauauuu

SEQ ID NO: 3417749 - RNA, 22 nt, Human
aagacuggcuuuuauuaaugca

SEQ ID NO: 3417750 - RNA, 17 nt, Human
aagacugguuuucugcc

SEQ ID NO: 3417751 - RNA, 16 nt, Human
aagacuguaaugaauc

SEQ ID NO: 3417752 - RNA, 18 nt, Human
aagacuguggcugcuagc

SEQ ID NO: 3417753 - RNA, 22 nt, Human
aagacuuaaagggcccaaugaa

SEQ ID NO: 3417754 - RNA, 24 nt, Human
aagacuuaaagggcccaaugaauu

SEQ ID NO: 3417755 - RNA, 16 nt, Human
aagacuuaaugagacu

SEQ ID NO: 3417756 - RNA, 20 nt, Human
aagacuuacucuaagaucuu

SEQ ID NO: 3417757 - RNA, 21 nt, Human
aagacuucaguauguugucaa

SEQ ID NO: 3417758 - RNA, 21 nt, Human
aagacuucauugucccucuuc

SEQ ID NO: 3417759 - RNA, 14 nt, Human
aagacuucccagcu

SEQ ID NO: 3417760 - RNA, 18 nt, Human
aagacuucccuaacacuu

SEQ ID NO: 3417761 - RNA, 20 nt, Human
aagacuucucuuugccucaa

SEQ ID NO: 3417762 - RNA, 18 nt, Human
aagacuuggcaacagaag

SEQ ID NO: 3417763 - RNA, 19 nt, Human
aagacuuguaauauuuuua

SEQ ID NO: 3417764 - RNA, 17 nt, Human
aagacuuugguuauuuu

SEQ ID NO: 3417765 - RNA, 15 nt, Human
aagacuuuuaugaua

SEQ ID NO: 3417766 - RNA, 19 nt, Human
aagacuuuucuuucagcca

SEQ ID NO: 3417767 - RNA, 22 nt, Human
aagagaaaaaaaguuugccaga

SEQ ID NO: 3417768 - RNA, 13 nt, Human
aagagaaaagaaa

SEQ ID NO: 3417769 - RNA, 15 nt, Human
aagagaaaagaaaaa

SEQ ID NO: 3417770 - RNA, 16 nt, Human
aagagaaaagaaaaaa

SEQ ID NO: 3417771 - RNA, 15 nt, Human
aagagaaaagagaga

SEQ ID NO: 3417772 - RNA, 17 nt, Human
aagagaaaauguaaaua

SEQ ID NO: 3417773 - RNA, 17 nt, Human
aagagaaaauugaauuu

SEQ ID NO: 3417774 - RNA, 21 nt, Human
aagagaaaauugaauuuaaca

SEQ ID NO: 3417775 - RNA, 12 nt, Human
aagagaaacagg

SEQ ID NO: 3417776 - RNA, 19 nt, Human
aagagaaacuuuauacauu

SEQ ID NO: 3417777 - RNA, 14 nt, Human
aagagaaacuuugu

SEQ ID NO: 3417778 - RNA, 22 nt, Human
aagagaaccgagcaaagaucaa

SEQ ID NO: 3417779 - RNA, 11 nt, Human
aagagaacucg

SEQ ID NO: 3417780 - RNA, 15 nt, Human
aagagaacuuccaga

SEQ ID NO: 3417781 - RNA, 14 nt, Human
aagagaagcaauuu

SEQ ID NO: 3417782 - RNA, 18 nt, Human
aagagaagcuacuuuguu

SEQ ID NO: 3417783 - RNA, 13 nt, Human
aagagaagcugcu

SEQ ID NO: 3417784 - RNA, 14 nt, Human
aagagaagcugcug

SEQ ID NO: 3417785 - RNA, 15 nt, Human
aagagaagcugcuga

SEQ ID NO: 3417786 - RNA, 13 nt, Human
aagagaaguagaa

SEQ ID NO: 3417787 - RNA, 14 nt, Human
aagagaaguuauuu

SEQ ID NO: 3417788 - RNA, 11 nt, Human
aagagaaugag

SEQ ID NO: 3417789 - RNA, 19 nt, Human
aagagaaugccauucucuu

SEQ ID NO: 3417790 - RNA, 22 nt, Human
aagagaaugcccuucuccuuau

SEQ ID NO: 3417791 - RNA, 23 nt, Human
aagagaaugcccuucuccuuauu

SEQ ID NO: 3417792 - RNA, 10 nt, Human
aagagaaugu

SEQ ID NO: 3417793 - RNA, 13 nt, Human
aagagaauguuau

SEQ ID NO: 3417794 - RNA, 22 nt, Human
aagagaauguuauagugaauua

SEQ ID NO: 3417795 - RNA, 19 nt, Human
aagagacaaacaccuccca

SEQ ID NO: 3417796 - RNA, 13 nt, Human
aagagacaaacug

SEQ ID NO: 3417797 - RNA, 17 nt, Human
aagagacaauuucugca

SEQ ID NO: 3417798 - RNA, 13 nt, Human
aagagacacucca

SEQ ID NO: 3417799 - RNA, 16 nt, Human
aagagacagaauguau

SEQ ID NO: 3417800 - RNA, 21 nt, Human
aagagaccuaccucagguugc

SEQ ID NO: 3417801 - RNA, 19 nt, Human
aagagaccuguuuuaaaaa

SEQ ID NO: 3417802 - RNA, 19 nt, Human
aagagacucagccugcagu

SEQ ID NO: 3417803 - RNA, 18 nt, Human
aagagacugcguucugca

SEQ ID NO: 3417804 - RNA, 16 nt, Human
aagagagaaaaacaaa

SEQ ID NO: 3417805 - RNA, 12 nt, Human
aagagagaaaau

SEQ ID NO: 3417806 - RNA, 16 nt, Human
aagagagaaaauaaaa

SEQ ID NO: 3417807 - RNA, 19 nt, Human
aagagagaaaauaaaaagu

SEQ ID NO: 3417808 - RNA, 17 nt, Human
aagagagaacaggacua

SEQ ID NO: 3417809 - RNA, 11 nt, Human
aagagagaacc

SEQ ID NO: 3417810 - RNA, 19 nt, Human
aagagagagagagaaaaaa

SEQ ID NO: 3417811 - RNA, 19 nt, Human
aagagagagagagagagaa

SEQ ID NO: 3417812 - RNA, 15 nt, Human
aagagagauguuuug

SEQ ID NO: 3417813 - RNA, 15 nt, Human
aagagagcagagaau

SEQ ID NO: 3417814 - RNA, 15 nt, Human
aagagaggacacaaa

SEQ ID NO: 3417815 - RNA, 17 nt, Human
aagagaggagaggagag

SEQ ID NO: 3417816 - RNA, 19 nt, Human
aagagaggagaggagagag

SEQ ID NO: 3417817 - RNA, 11 nt, Human
aagagaggagu

SEQ ID NO: 3417818 - RNA, 16 nt, Human
aagagaggaguucaau

SEQ ID NO: 3417819 - RNA, 20 nt, Human
aagagaggaguucaaugauc

SEQ ID NO: 3417820 - RNA, 22 nt, Human
aagagagggccaugcaauucau

SEQ ID NO: 3417821 - RNA, 11 nt, Human
aagagaguuuu

SEQ ID NO: 3417822 - RNA, 14 nt, Human
aagagauaugggaa

SEQ ID NO: 3417823 - RNA, 17 nt, Human
aagagauggccugagaa

SEQ ID NO: 3417824 - RNA, 23 nt, Human
aagagauggcuuacaaaaagaaa

SEQ ID NO: 3417825 - RNA, 17 nt, Human
aagagaugggcuuguuu

SEQ ID NO: 3417826 - RNA, 20 nt, Human
aagagaugggcuuguuuucu

SEQ ID NO: 3417827 - RNA, 16 nt, Human
aagagauugugguuuc

SEQ ID NO: 3417828 - RNA, 19 nt, Human
aagagauugugguuucauu

SEQ ID NO: 3417829 - RNA, 21 nt, Human
aagagauuuaaacucugaauu

SEQ ID NO: 3417830 - RNA, 16 nt, Human
aagagauuuaauuaau

SEQ ID NO: 3417831 - RNA, 17 nt, Human
aagagauuuuucaugau

SEQ ID NO: 3417832 - RNA, 15 nt, Human
aagagcaaaagaaug

SEQ ID NO: 3417833 - RNA, 13 nt, Human
aagagcaaaguag

SEQ ID NO: 3417834 - RNA, 14 nt, Human
aagagcacagcccu

SEQ ID NO: 3417835 - RNA, 19 nt, Human
aagagcaccuuccucacuu

SEQ ID NO: 3417836 - RNA, 22 nt, Human
aagagcagcaccuccucagccu

SEQ ID NO: 3417837 - RNA, 14 nt, Human
aagagcagccugug

SEQ ID NO: 3417838 - RNA, 13 nt, Human
aagagcaggccag

SEQ ID NO: 3417839 - RNA, 22 nt, Human
aagagcaucaguacuuguuucu

SEQ ID NO: 3417840 - RNA, 18 nt, Human
aagagcaucaugccucug

SEQ ID NO: 3417841 - RNA, 19 nt, Human
aagagcaucaugccucuga

SEQ ID NO: 3417842 - RNA, 14 nt, Human
aagguucuaaggcc

SEQ ID NO: 3417843 - RNA, 17 nt, Human
aagguuggagcccaggg

SEQ ID NO: 3417844 - RNA, 16 nt, Human
aagguugggcagggug

SEQ ID NO: 3417845 - RNA, 21 nt, Human
aagguuuaggcugguggccca

SEQ ID NO: 3417846 - RNA, 17 nt, Human
aagguuuaugaaaaaga

SEQ ID NO: 3417847 - RNA, 13 nt, Human
aagguuuauuguu

SEQ ID NO: 3417848 - RNA, 21 nt, Human
aagguuuauuguuaauacaag

SEQ ID NO: 3417849 - RNA, 17 nt, Human
aagguuuauuuuucugu

SEQ ID NO: 3417850 - RNA, 21 nt, Human
aagguuuccucaaacugugau

SEQ ID NO: 3417851 - RNA, 20 nt, Human
aagguuuuagguucuaaagu

SEQ ID NO: 3417852 - RNA, 20 nt, Human
aagguuuuauaaggcugaug

SEQ ID NO: 3417853 - RNA, 16 nt, Human
aagguuuuauuuugua

SEQ ID NO: 3417854 - RNA, 20 nt, Human
aagguuuuccucuucuauuu

SEQ ID NO: 3417855 - RNA, 11 nt, Human
aagguuuuuuu

SEQ ID NO: 3417856 - RNA, 17 nt, Human
aagguuuuuuuucaguu

SEQ ID NO: 3417857 - RNA, 20 nt, Human
aaguaaaaacaaagaaauua

SEQ ID NO: 3417858 - RNA, 14 nt, Human
aaguaaaaccacag

SEQ ID NO: 3417859 - RNA, 15 nt, Human
aaguaaaaccacagc

SEQ ID NO: 3417860 - RNA, 12 nt, Human
aaguaaaacuug

SEQ ID NO: 3417861 - RNA, 12 nt, Human
aaguaaacuuuu

SEQ ID NO: 3417862 - RNA, 16 nt, Human
aaguaaagaacugcac

SEQ ID NO: 3417863 - RNA, 17 nt, Human
aaguaaaucucuucugu

SEQ ID NO: 3417864 - RNA, 13 nt, Human
aaguaacaaaaau

SEQ ID NO: 3417865 - RNA, 20 nt, Human
aaguaacaagagugauucuu

SEQ ID NO: 3417866 - RNA, 16 nt, Human
aaguaacucauuuguu

SEQ ID NO: 3417867 - RNA, 22 nt, Human
aaguaacuugucuuaaauaaaa

SEQ ID NO: 3417868 - RNA, 11 nt, Human
aaguaagaaaa

SEQ ID NO: 3417869 - RNA, 12 nt, Human
aaguaagaaaau

SEQ ID NO: 3417870 - RNA, 14 nt, Human
aaguaagaaaauau

SEQ ID NO: 3417871 - RNA, 15 nt, Human
aaguaagaaaauauu

SEQ ID NO: 3417872 - RNA, 18 nt, Human
aaguaagaaaauauuuug

SEQ ID NO: 3417873 - RNA, 20 nt, Human
aaguaagaagacaugaacca

SEQ ID NO: 3417874 - RNA, 15 nt, Human
aaguaagaggcugga

SEQ ID NO: 3417875 - RNA, 23 nt, Human
aaguaagcccuugaagauaucuu

SEQ ID NO: 3417876 - RNA, 16 nt, Human
aaguaaggaauuuuau

SEQ ID NO: 3417877 - RNA, 18 nt, Human
aaguaaggugcaguuccc

SEQ ID NO: 3417878 - RNA, 18 nt, Human
aaguaaguaccacucagg

SEQ ID NO: 3417879 - RNA, 20 nt, Human
aaguaaguaccacucaggcc

SEQ ID NO: 3417880 - RNA, 17 nt, Human
aaguaagucucaaggua

SEQ ID NO: 3417881 - RNA, 14 nt, Human
aaguaauaaaauuc

SEQ ID NO: 3417882 - RNA, 20 nt, Human
aaguaauaaaauucaacaaa

SEQ ID NO: 3417883 - RNA, 21 nt, Human
aaguaauauaauggaagagaa

SEQ ID NO: 3417884 - RNA, 16 nt, Human
aaguaauaugcacaca

SEQ ID NO: 3417885 - RNA, 15 nt, Human
aaguaaucaucuaag

SEQ ID NO: 3417886 - RNA, 16 nt, Human
aaguaauccuagggaa

SEQ ID NO: 3417887 - RNA, 19 nt, Human
aaguaaugauaacuggaaa

SEQ ID NO: 3417888 - RNA, 17 nt, Human
aaguaaugccucugucu

SEQ ID NO: 3417889 - RNA, 22 nt, Human
aaguaauucugcugucucagcc

SEQ ID NO: 3417890 - RNA, 14 nt, Human
aaguaauuucagug

SEQ ID NO: 3417891 - RNA, 21 nt, Human
aauacauacggucagguuuaa

SEQ ID NO: 3417892 - RNA, 23 nt, Human
aauacauacggucagguuuaaca

SEQ ID NO: 3417893 - RNA, 16 nt, Human
aauacauagugaaaau

SEQ ID NO: 3417894 - RNA, 17 nt, Human
aauacaugaagcuucau

SEQ ID NO: 3417895 - RNA, 19 nt, Human
aauacaugaagcuucaugc

SEQ ID NO: 3417896 - RNA, 23 nt, Human
aauacaugacauuuauuuuucau

SEQ ID NO: 3417897 - RNA, 15 nt, Human
aauacaugcauauaa

SEQ ID NO: 3417898 - RNA, 13 nt, Human
aauacaugcaucu

SEQ ID NO: 3417899 - RNA, 22 nt, Human
aauacaugcuaagagaaguaga

SEQ ID NO: 3417900 - RNA, 22 nt, Human
aauacauggauaacacauuuga

SEQ ID NO: 3417901 - RNA, 16 nt, Human
aauacauuaaagcagu

SEQ ID NO: 3417902 - RNA, 19 nt, Human
aauacauuauauuucuauu

SEQ ID NO: 3417903 - RNA, 22 nt, Human
aauacauucuuuuugcucuaaa

SEQ ID NO: 3417904 - RNA, 14 nt, Human
aauacauuuaaaac

SEQ ID NO: 3417905 - RNA, 22 nt, Human
aauacauuuaaaacauuaaaau

SEQ ID NO: 3417906 - RNA, 17 nt, Human
aauacauuuaaaacuua

SEQ ID NO: 3417907 - RNA, 20 nt, Human
aauaccaaaauuauuucaga

SEQ ID NO: 3417908 - RNA, 18 nt, Human
aauaccacucuguaauug

SEQ ID NO: 3417909 - RNA, 13 nt, Human
aauaccaguucug

SEQ ID NO: 3417910 - RNA, 18 nt, Human
aauaccauuuaguaagaa

SEQ ID NO: 3417911 - RNA, 14 nt, Human
aauacccuucuuuu

SEQ ID NO: 3417912 - RNA, 14 nt, Human
aauaccucauguuu

SEQ ID NO: 3417913 - RNA, 19 nt, Human
aauaccucauguuuaugaa

SEQ ID NO: 3417914 - RNA, 21 nt, Human
aauaccucauguuuaugaaaa

SEQ ID NO: 3417915 - RNA, 14 nt, Human
aauaccucugugug

SEQ ID NO: 3417916 - RNA, 16 nt, Human
aauaccucugugugcu

SEQ ID NO: 3417917 - RNA, 17 nt, Human
aauaccucuuagcugag

SEQ ID NO: 3417918 - RNA, 19 nt, Human
aauaccucuuugaaagaag

SEQ ID NO: 3417919 - RNA, 21 nt, Human
aauaccugucccccugacaac

SEQ ID NO: 3417920 - RNA, 16 nt, Human
aauacgcacuacaugu

SEQ ID NO: 3417921 - RNA, 20 nt, Human
aauacgccagaacugcuuua

SEQ ID NO: 3417922 - RNA, 14 nt, Human
aauacuaaaauaug

SEQ ID NO: 3417923 - RNA, 16 nt, Human
aauacuaccuugaaaa

SEQ ID NO: 3417924 - RNA, 17 nt, Human
aauacuaccuugaaaau

SEQ ID NO: 3417925 - RNA, 18 nt, Human
aauacuaccuugaaaaua

SEQ ID NO: 3417926 - RNA, 14 nt, Human
aauacuagccagag

SEQ ID NO: 3417927 - RNA, 16 nt, Human
aauacuagucacccca

SEQ ID NO: 3417928 - RNA, 15 nt, Human
aauacuauuuaagau

SEQ ID NO: 3417929 - RNA, 17 nt, Human
aauacuauuuuuacugc

SEQ ID NO: 3417930 - RNA, 19 nt, Human
aauacuauuuuuacugcca

SEQ ID NO: 3417931 - RNA, 16 nt, Human
aauacucauaauguga

SEQ ID NO: 3417932 - RNA, 17 nt, Human
aauacucauaaugugaa

SEQ ID NO: 3417933 - RNA, 18 nt, Human
aauacucauaaugugaag

SEQ ID NO: 3417934 - RNA, 23 nt, Human
aauacucauaaugugaaguguua

SEQ ID NO: 3417935 - RNA, 13 nt, Human
aauacucaugugu

SEQ ID NO: 3417936 - RNA, 16 nt, Human
aauacucuaauucuaa

SEQ ID NO: 3417937 - RNA, 17 nt, Human
aauacucugcccucuag

SEQ ID NO: 3417938 - RNA, 23 nt, Human
aauacucugcccucuagagccuu

SEQ ID NO: 3417939 - RNA, 18 nt, Human
aauacugaaccacuugua

SEQ ID NO: 3417940 - RNA, 18 nt, Human
aauacugagaaaaccugu

SEQ ID NO: 3417941 - RNA, 24 nt, Human
aauacugccagaugcugauguuca

SEQ ID NO: 3417942 - RNA, 15 nt, Human
aauacugcugagaua

SEQ ID NO: 3417943 - RNA, 14 nt, Human
aauacuguuauucu

SEQ ID NO: 3417944 - RNA, 16 nt, Human
aauacuguuauucuuu

SEQ ID NO: 3417945 - RNA, 15 nt, Human
aauacuuaaauguua

SEQ ID NO: 3417946 - RNA, 20 nt, Human
aauacuuaaauguuauguau

SEQ ID NO: 3417947 - RNA, 17 nt, Human
aauacuuagcaaaaagu

SEQ ID NO: 3417948 - RNA, 13 nt, Human
aauacuuauucau

SEQ ID NO: 3417949 - RNA, 14 nt, Human
aauacuuccagaag

SEQ ID NO: 3417950 - RNA, 17 nt, Human
aauacuucucaaaccug

SEQ ID NO: 3417951 - RNA, 22 nt, Human
aauacuucucaaaccuguuuaa

SEQ ID NO: 3417952 - RNA, 16 nt, Human
aauacuucucauuuuu

SEQ ID NO: 3417953 - RNA, 14 nt, Human
aauacuucuuuuua

SEQ ID NO: 3417954 - RNA, 17 nt, Human
aauacuugaaccauaaa

SEQ ID NO: 3417955 - RNA, 13 nt, Human
aauacuugaacuu

SEQ ID NO: 3417956 - RNA, 20 nt, Human
aauacuugaacuugccucuu

SEQ ID NO: 3417957 - RNA, 10 nt, Human
aauacuuguc

SEQ ID NO: 3417958 - RNA, 18 nt, Human
aauacuugucaauauuua

SEQ ID NO: 3417959 - RNA, 20 nt, Human
aauacuugucaauauuuaaa

SEQ ID NO: 3417960 - RNA, 15 nt, Human
aauacuugucuguuu

SEQ ID NO: 3417961 - RNA, 17 nt, Human
aauacuuuaaaggaaaa

SEQ ID NO: 3417962 - RNA, 16 nt, Human
aauacuuugaaugugu

SEQ ID NO: 3417963 - RNA, 20 nt, Human
aauacuuugaauguguuuca

SEQ ID NO: 3417964 - RNA, 23 nt, Human
aauacuuugcagcacagcugaga

SEQ ID NO: 3417965 - RNA, 23 nt, Human
aauacuuuguauacaaguacugg

SEQ ID NO: 3417966 - RNA, 13 nt, Human
aauacuuuuccuu

SEQ ID NO: 3417967 - RNA, 20 nt, Human
aauacuuuuccuuaccuuua

SEQ ID NO: 3417968 - RNA, 11 nt, Human
aauacuuuugc

SEQ ID NO: 3417969 - RNA, 17 nt, Human
aauacuuuuucuaauga

SEQ ID NO: 3417970 - RNA, 13 nt, Human
aauagaaaacuga

SEQ ID NO: 3417971 - RNA, 17 nt, Human
aauagaaaacugaaaau

SEQ ID NO: 3417972 - RNA, 18 nt, Human
aauagaaaacugaaaauc

SEQ ID NO: 3417973 - RNA, 20 nt, Human
aauagaaaacugaaaaucua

SEQ ID NO: 3417974 - RNA, 13 nt, Human
aauagaaacucac

SEQ ID NO: 3417975 - RNA, 16 nt, Human
aauagaaauccaauug

SEQ ID NO: 3417976 - RNA, 15 nt, Human
aauagaaauuuugua

SEQ ID NO: 3417977 - RNA, 13 nt, Human
aauagaaggugau

SEQ ID NO: 3417978 - RNA, 14 nt, Human
aauagaaggugaug

SEQ ID NO: 3417979 - RNA, 15 nt, Human
aauagaauaaaggca

SEQ ID NO: 3417980 - RNA, 17 nt, Human
aauagaauauaauuauc

SEQ ID NO: 3417981 - RNA, 20 nt, Human
aauagaauauaauuaucgga

SEQ ID NO: 3417982 - RNA, 14 nt, Human
aauagaauguaaau

SEQ ID NO: 3417983 - RNA, 16 nt, Human
aauagaauuauaacug

SEQ ID NO: 3417984 - RNA, 22 nt, Human
aauagaauugacauugaaaucu

SEQ ID NO: 3417985 - RNA, 18 nt, Human
aauagacaaaaaguauau

SEQ ID NO: 3417986 - RNA, 22 nt, Human
aauagacaaauagaaaaugguc

SEQ ID NO: 3417987 - RNA, 13 nt, Human
aauagacaauuua

SEQ ID NO: 3417988 - RNA, 16 nt, Human
aauagacuuaaaucuc

SEQ ID NO: 3417989 - RNA, 18 nt, Human
aauagagaugagcuuucu

SEQ ID NO: 3417990 - RNA, 15 nt, Human
aauagaguauaugca

SEQ ID NO: 3417991 - RNA, 17 nt, Human
aauagaguauaugcacu

SEQ ID NO: 3417992 - RNA, 19 nt, Human
aauagaguugggacaauug

SEQ ID NO: 3417993 - RNA, 22 nt, Human
aauagaguuugcuauuagagca

SEQ ID NO: 3417994 - RNA, 18 nt, Human
aauagauacagcagaggc

SEQ ID NO: 3417995 - RNA, 19 nt, Human
aauagaugacauugacuau

SEQ ID NO: 3417996 - RNA, 22 nt, Human
aauagaugacauugacuauuuu

SEQ ID NO: 3417997 - RNA, 11 nt, Human
aauagauguuu

SEQ ID NO: 3417998 - RNA, 12 nt, Human
aauagauucucu

SEQ ID NO: 3417999 - RNA, 19 nt, Human
aauagauugcucaaaucag

SEQ ID NO: 3418000 - RNA, 16 nt, Human
aauagcaaaagaagaa

SEQ ID NO: 3418001 - RNA, 13 nt, Human
aauagcaacuuuu

SEQ ID NO: 3418002 - RNA, 23 nt, Human
aauagcagaaaaaccaacaucua

SEQ ID NO: 3418003 - RNA, 18 nt, Human
aaguauuuuccuguaaaa

SEQ ID NO: 3418004 - RNA, 19 nt, Human
aaguauuuuuauaaauaua

SEQ ID NO: 3418005 - RNA, 14 nt, Human
aaguauuuuuucaa

SEQ ID NO: 3418006 - RNA, 15 nt, Human
aaguauuuuuucagu

SEQ ID NO: 3418007 - RNA, 18 nt, Human
aagucaaaauauuuuuaa

SEQ ID NO: 3418008 - RNA, 23 nt, Human
aagucaaagacauucugacaucu

SEQ ID NO: 3418009 - RNA, 14 nt, Human
aagucaaaguaaaa

SEQ ID NO: 3418010 - RNA, 22 nt, Human
aagucaaaguaaaacuugcugc

SEQ ID NO: 3418011 - RNA, 15 nt, Human
aagucaaauuaauaa

SEQ ID NO: 3418012 - RNA, 19 nt, Human
aagucaaauuaauaaucuu

SEQ ID NO: 3418013 - RNA, 13 nt, Human
aagucaacaguaa

SEQ ID NO: 3418014 - RNA, 14 nt, Human
aagucaacaguaaa

SEQ ID NO: 3418015 - RNA, 15 nt, Human
aagucaacaguaaac

SEQ ID NO: 3418016 - RNA, 16 nt, Human
aagucaacaguaaacc

SEQ ID NO: 3418017 - RNA, 16 nt, Human
aagucaaccugccuga

SEQ ID NO: 3418018 - RNA, 19 nt, Human
aagucaaggguaggguggg

SEQ ID NO: 3418019 - RNA, 21 nt, Human
aagucaagugaaaaaggagga

SEQ ID NO: 3418020 - RNA, 13 nt, Human
aagucacaaagga

SEQ ID NO: 3418021 - RNA, 15 nt, Human
aagucacaaaggaau

SEQ ID NO: 3418022 - RNA, 24 nt, Human
aagucacacaguauuacuucugcu

SEQ ID NO: 3418023 - RNA, 19 nt, Human
aagucacaguuaaggagaa

SEQ ID NO: 3418024 - RNA, 16 nt, Human
aagucacaucacagga

SEQ ID NO: 3418025 - RNA, 17 nt, Human
aagucacaucacaggac

SEQ ID NO: 3418026 - RNA, 16 nt, Human
aagucaccaaauagug

SEQ ID NO: 3418027 - RNA, 20 nt, Human
aagucaccacuccauuccca

SEQ ID NO: 3418028 - RNA, 19 nt, Human
aagucaccuuguguguucc

SEQ ID NO: 3418029 - RNA, 21 nt, Human
aagucacggcugcgcacugug

SEQ ID NO: 3418030 - RNA, 17 nt, Human
aagucacucccaagccc

SEQ ID NO: 3418031 - RNA, 14 nt, Human
aagucacugcacag

SEQ ID NO: 3418032 - RNA, 17 nt, Human
aagucagacugcuggga

SEQ ID NO: 3418033 - RNA, 12 nt, Human
aagucagagaca

SEQ ID NO: 3418034 - RNA, 15 nt, Human
aagucagagacagau

SEQ ID NO: 3418035 - RNA, 23 nt, Human
aagucagaggauggccagugucu

SEQ ID NO: 3418036 - RNA, 18 nt, Human
aauagggacuaucuaucu

SEQ ID NO: 3418037 - RNA, 15 nt, Human
aauaggggauauuua

SEQ ID NO: 3418038 - RNA, 20 nt, Human
aauaggguauauuuuccuau

SEQ ID NO: 3418039 - RNA, 14 nt, Human
aauagguucuucuu

SEQ ID NO: 3418040 - RNA, 15 nt, Human
aauaguaauauaaua

SEQ ID NO: 3418041 - RNA, 15 nt, Human
aauaguaauuuguaa

SEQ ID NO: 3418042 - RNA, 21 nt, Human
aauaguauccuccagguuuuu

SEQ ID NO: 3418043 - RNA, 16 nt, Human
aauagucaaauugugu

SEQ ID NO: 3418044 - RNA, 16 nt, Human
aauagucaagaaaaau

SEQ ID NO: 3418045 - RNA, 19 nt, Human
aauagucuagacuaaaaga

SEQ ID NO: 3418046 - RNA, 20 nt, Human
aauagucuagacuaaaagau

SEQ ID NO: 3418047 - RNA, 15 nt, Human
aauagucuauauuuu

SEQ ID NO: 3418048 - RNA, 13 nt, Human
aauagucugugug

SEQ ID NO: 3418049 - RNA, 19 nt, Human
aauagugcagaaucucaua

SEQ ID NO: 3418050 - RNA, 12 nt, Human
aauaguguggaa

SEQ ID NO: 3418051 - RNA, 19 nt, Human
aauaguguggaaauuaaga

SEQ ID NO: 3418052 - RNA, 20 nt, Human
aauaguguggaaauuaagaa

SEQ ID NO: 3418053 - RNA, 14 nt, Human
aauaguguguucug

SEQ ID NO: 3418054 - RNA, 23 nt, Human
aauaguguguucugauuagaaau

SEQ ID NO: 3418055 - RNA, 17 nt, Human
aauaguguuaaucaauu

SEQ ID NO: 3418056 - RNA, 22 nt, Human
aauaguguuaaucaauuuaaac

SEQ ID NO: 3418057 - RNA, 20 nt, Human
aauaguuacuccagugccaa

SEQ ID NO: 3418058 - RNA, 22 nt, Human
aauaguucaaagccaaguuuau

SEQ ID NO: 3418059 - RNA, 15 nt, Human
aauaguugaauuagu

SEQ ID NO: 3418060 - RNA, 19 nt, Human
aauaguugagccagcagac

SEQ ID NO: 3418061 - RNA, 21 nt, Human
aauaguugagccagcagacau

SEQ ID NO: 3418062 - RNA, 22 nt, Human
aauaguugagccagcagacauu

SEQ ID NO: 3418063 - RNA, 23 nt, Human
aauaguugagccagcagacauug

SEQ ID NO: 3418064 - RNA, 13 nt, Human
aauaguuggcuag

SEQ ID NO: 3418065 - RNA, 14 nt, Human
aauaguuguugauu

SEQ ID NO: 3418066 - RNA, 20 nt, Human
aauaguuuauuuuaaaacaa

SEQ ID NO: 3418067 - RNA, 20 nt, Human
aauauaaaaaaucaugccag

SEQ ID NO: 3418068 - RNA, 13 nt, Human
aauauaaaaauaa

SEQ ID NO: 3418069 - RNA, 14 nt, Human
aauauaaaauauga

SEQ ID NO: 3418070 - RNA, 21 nt, Human
aauauaaacaaagauucauga

SEQ ID NO: 3418071 - RNA, 22 nt, Human
aauauaaacaaagauucaugau

SEQ ID NO: 3418072 - RNA, 11 nt, Human
aauauaaagac

SEQ ID NO: 3418073 - RNA, 18 nt, Human
aauauaaagacguuuuau

SEQ ID NO: 3418074 - RNA, 20 nt, Human
aauauaaaguuuuauauauu

SEQ ID NO: 3418075 - RNA, 11 nt, Human
aauauaaaugc

SEQ ID NO: 3418076 - RNA, 13 nt, Human
aauauaaaugcaa

SEQ ID NO: 3418077 - RNA, 14 nt, Human
aauauaaaugcaaa

SEQ ID NO: 3418078 - RNA, 13 nt, Human
aauauaaaugugu

SEQ ID NO: 3418079 - RNA, 16 nt, Human
aauauaaaugugugua

SEQ ID NO: 3418080 - RNA, 20 nt, Human
aauauaaauguguguaugug

SEQ ID NO: 3418081 - RNA, 17 nt, Human
aauauaaauucacuuuc

SEQ ID NO: 3418082 - RNA, 15 nt, Human
aauauaacacauuuu

SEQ ID NO: 3418083 - RNA, 19 nt, Human
aauauaacaugaaaugaua

SEQ ID NO: 3418084 - RNA, 16 nt, Human
aauauaaccaauguuu

SEQ ID NO: 3418085 - RNA, 17 nt, Human
aauauaaccaauguuua

SEQ ID NO: 3418086 - RNA, 18 nt, Human
aauauaaccaauguuuaa

SEQ ID NO: 3418087 - RNA, 13 nt, Human
aauauaacugccu

SEQ ID NO: 3418088 - RNA, 22 nt, Human
aauauaagaauaaaauguugaa

SEQ ID NO: 3418089 - RNA, 23 nt, Human
aauauaaggaaagcaauaaauga

SEQ ID NO: 3418090 - RNA, 14 nt, Human
aauauaauaaauau

SEQ ID NO: 3418091 - RNA, 14 nt, Human
aauauaauacugua

SEQ ID NO: 3418092 - RNA, 19 nt, Human
aauauaauggaagagaaau

SEQ ID NO: 3418093 - RNA, 15 nt, Human
aauauaauucuguaa

SEQ ID NO: 3418094 - RNA, 18 nt, Human
aauauaauuuuuuagaga

SEQ ID NO: 3418095 - RNA, 20 nt, Human
aauauacucauuagaauuac

SEQ ID NO: 3418096 - RNA, 14 nt, Human
aauauacuguaaag

SEQ ID NO: 3418097 - RNA, 16 nt, Human
aauauacuguaaagaa

SEQ ID NO: 3418098 - RNA, 22 nt, Human
aauauacuguaaagaaagagag

SEQ ID NO: 3418099 - RNA, 13 nt, Human
aauauagaaaaaa

SEQ ID NO: 3418100 - RNA, 19 nt, Human
aauauagauuaaaucauac

SEQ ID NO: 3418101 - RNA, 15 nt, Human
aauauagcugagacu

SEQ ID NO: 3418102 - RNA, 19 nt, Human
aauauagcuguacaaauau

SEQ ID NO: 3418103 - RNA, 20 nt, Human
aauauagcuguacaaauaua

SEQ ID NO: 3418104 - RNA, 21 nt, Human
aauauagcuguacaaauauaa

SEQ ID NO: 3418105 - RNA, 21 nt, Human
aauauaggaacuuaaauaaug

SEQ ID NO: 3418106 - RNA, 18 nt, Human
aauauaguuccuaagaag

SEQ ID NO: 3418107 - RNA, 21 nt, Human
aauauaguuccuaagaagcuu

SEQ ID NO: 3418108 - RNA, 12 nt, Human
aauauauaaaaa

SEQ ID NO: 3418109 - RNA, 18 nt, Human
aauauauacgaacaaaac

SEQ ID NO: 3418110 - RNA, 13 nt, Human
aauauauagcauu

SEQ ID NO: 3418111 - RNA, 14 nt, Human
aauauauagcauuu

SEQ ID NO: 3418112 - RNA, 13 nt, Human
aauauauauaaac

SEQ ID NO: 3418113 - RNA, 19 nt, Human
aauauauauaaagaauaua

SEQ ID NO: 3418114 - RNA, 22 nt, Human
aauauauauaaagaauauauau

SEQ ID NO: 3418115 - RNA, 13 nt, Human
aauauauauaaau

SEQ ID NO: 3418116 - RNA, 16 nt, Human
aauauauauaaauaaa

SEQ ID NO: 3418117 - RNA, 15 nt, Human
aauauauauacauau

SEQ ID NO: 3418118 - RNA, 16 nt, Human
aauauauauacauaug

SEQ ID NO: 3418119 - RNA, 19 nt, Human
aauauauauacauauguag

SEQ ID NO: 3418120 - RNA, 22 nt, Human
aauauauauagugcuauauaua

SEQ ID NO: 3418121 - RNA, 18 nt, Human
aauauauauauauauaaa

SEQ ID NO: 3418122 - RNA, 21 nt, Human
aauauauauauauauaaaaua

SEQ ID NO: 3418123 - RNA, 19 nt, Human
aauauauauauauaucagu

SEQ ID NO: 3418124 - RNA, 17 nt, Human
aauauauaucugcuguc

SEQ ID NO: 3418125 - RNA, 13 nt, Human
aauauauaugaau

SEQ ID NO: 3418126 - RNA, 23 nt, Human
aauauauauuauacuuguaauua

SEQ ID NO: 3418127 - RNA, 13 nt, Human
aauauauauuauc

SEQ ID NO: 3418128 - RNA, 17 nt, Human
aauauaucuaaauugaa

SEQ ID NO: 3418129 - RNA, 20 nt, Human
aauauaucuaccccagacua

SEQ ID NO: 3418130 - RNA, 22 nt, Human
aauauauggcagaguuguaaau

SEQ ID NO: 3418131 - RNA, 23 nt, Human
aauauauggcagaguuguaaaua

SEQ ID NO: 3418132 - RNA, 18 nt, Human
aauauauggcauuugcag

SEQ ID NO: 3418133 - RNA, 12 nt, Human
aauauauguaug

SEQ ID NO: 3418134 - RNA, 13 nt, Human
aauauauguaugu

SEQ ID NO: 3418135 - RNA, 14 nt, Human
aauauauguauuuu

SEQ ID NO: 3418136 - RNA, 14 nt, Human
aauauaugugaaag

SEQ ID NO: 3418137 - RNA, 17 nt, Human
aauauaugugugccuau

SEQ ID NO: 3418138 - RNA, 12 nt, Human
aauauauguuua

SEQ ID NO: 3418139 - RNA, 13 nt, Human
aauauauguuuac

SEQ ID NO: 3418140 - RNA, 23 nt, Human
aauauauguuuuaaauauagaau

SEQ ID NO: 3418141 - RNA, 22 nt, Human
aauauauuaccagcaagaauaa

SEQ ID NO: 3418142 - RNA, 21 nt, Human
aauauauuaguaagauacugu

SEQ ID NO: 3418143 - RNA, 18 nt, Human
aauauauugaacuuuugu

SEQ ID NO: 3418144 - RNA, 15 nt, Human
aauauauuuaagaua

SEQ ID NO: 3418145 - RNA, 14 nt, Human
aauauauuuaauga

SEQ ID NO: 3418146 - RNA, 19 nt, Human
aauauauuuauuuaaagca

SEQ ID NO: 3418147 - RNA, 21 nt, Human
aauauauuucuaaauguuugg

SEQ ID NO: 3418148 - RNA, 20 nt, Human
aauauauuuuguaugcaagc

SEQ ID NO: 3418149 - RNA, 14 nt, Human
aauauauuuuuaga

SEQ ID NO: 3418150 - RNA, 18 nt, Human
aauauauuuuuagacuca

SEQ ID NO: 3418151 - RNA, 15 nt, Human
aauauauuuuuauau

SEQ ID NO: 3418152 - RNA, 19 nt, Human
aauauauuuuuauauuuag

SEQ ID NO: 3418153 - RNA, 21 nt, Human
aauaucaaagucauuaaagac

SEQ ID NO: 3418154 - RNA, 17 nt, Human
aauaucaaauuaauugu

SEQ ID NO: 3418155 - RNA, 14 nt, Human
aauaucaaucaagc

SEQ ID NO: 3418156 - RNA, 13 nt, Human
aauaucaaucauu

SEQ ID NO: 3418157 - RNA, 16 nt, Human
aauaucaaucauuuuc

SEQ ID NO: 3418158 - RNA, 18 nt, Human
aauaucaccaaaaaccua

SEQ ID NO: 3418159 - RNA, 15 nt, Human
aauaucacucauuaa

SEQ ID NO: 3418160 - RNA, 16 nt, Human
aauaucacucauuaau

SEQ ID NO: 3418161 - RNA, 15 nt, Human
aauaucacuugucaa

SEQ ID NO: 3418162 - RNA, 15 nt, Human
aauaucagacuagug

SEQ ID NO: 3418163 - RNA, 19 nt, Human
aauaucaguuacucagccc

SEQ ID NO: 3418164 - RNA, 16 nt, Human
aagugaggccacugaa

SEQ ID NO: 3418165 - RNA, 17 nt, Human
aagugagggcucacuca

SEQ ID NO: 3418166 - RNA, 18 nt, Human
aagugagggucagagagg

SEQ ID NO: 3418167 - RNA, 14 nt, Human
aagugaucaauaaa

SEQ ID NO: 3418168 - RNA, 23 nt, Human
aagugaucaauaaaaugugauuu

SEQ ID NO: 3418169 - RNA, 20 nt, Human
aagugauccucccaccucag

SEQ ID NO: 3418170 - RNA, 19 nt, Human
aagugauggagcagagcaa

SEQ ID NO: 3418171 - RNA, 16 nt, Human
aagugauucucaugcc

SEQ ID NO: 3418172 - RNA, 21 nt, Human
aagugauucuccugccucagc

SEQ ID NO: 3418173 - RNA, 15 nt, Human
aagugauuguuggca

SEQ ID NO: 3418174 - RNA, 21 nt, Human
aagugcacacagaaauauaua

SEQ ID NO: 3418175 - RNA, 15 nt, Human
aagugcacuuucuaa

SEQ ID NO: 3418176 - RNA, 19 nt, Human
aagugcagaacugcaguca

SEQ ID NO: 3418177 - RNA, 21 nt, Human
aagugcaggcuggcaccgccu

SEQ ID NO: 3418178 - RNA, 18 nt, Human
aagugcauaugaaauccu

SEQ ID NO: 3418179 - RNA, 15 nt, Human
aagugcauccaaagg

SEQ ID NO: 3418180 - RNA, 19 nt, Human
aagugcauccaaaggugcu

SEQ ID NO: 3418181 - RNA, 15 nt, Human
aagccugggggccug

SEQ ID NO: 3418182 - RNA, 17 nt, Human
aagccugggggccuggc

SEQ ID NO: 3418183 - RNA, 18 nt, Human
aagccugggggccuggcu

SEQ ID NO: 3418184 - RNA, 19 nt, Human
aagccugggggccuggcug

SEQ ID NO: 3418185 - RNA, 17 nt, Human
aagccuggucagcccaa

SEQ ID NO: 3418186 - RNA, 18 nt, Human
aagccuggucagcccaaa

SEQ ID NO: 3418187 - RNA, 17 nt, Human
aagccuguaacacuccu

SEQ ID NO: 3418188 - RNA, 18 nt, Human
aagccugugcaaaaaaau

SEQ ID NO: 3418189 - RNA, 14 nt, Human
aagccuguggauga

SEQ ID NO: 3418190 - RNA, 15 nt, Human
aagccuguggaugau

SEQ ID NO: 3418191 - RNA, 12 nt, Human
aagccuguggcu

SEQ ID NO: 3418192 - RNA, 16 nt, Human
aagccuguuccccuca

SEQ ID NO: 3418193 - RNA, 21 nt, Human
aagccuucaagcucugaggga

SEQ ID NO: 3418194 - RNA, 21 nt, Human
aagccuuccccuuauccuccc

SEQ ID NO: 3418195 - RNA, 11 nt, Human
aagccuugugu

SEQ ID NO: 3418196 - RNA, 21 nt, Human
aagccuuuaguaucaguguuu

SEQ ID NO: 3418197 - RNA, 15 nt, Human
aagccuuucauuuug

SEQ ID NO: 3418198 - RNA, 17 nt, Human
aagccuuucauuuugcu

SEQ ID NO: 3418199 - RNA, 21 nt, Human
aagccuuucauuuugcuuuaa

SEQ ID NO: 3418200 - RNA, 14 nt, Human
aagccuuuccauaa

SEQ ID NO: 3418201 - RNA, 15 nt, Human
aagccuuuccauaag

SEQ ID NO: 3418202 - RNA, 10 nt, Human
aagccuuugu

SEQ ID NO: 3418203 - RNA, 14 nt, Human
aagccuuuguugaa

SEQ ID NO: 3418204 - RNA, 23 nt, Human
aagcgaggcaugccugagagaca

SEQ ID NO: 3418205 - RNA, 18 nt, Human
aagcgaggucaacagaga

SEQ ID NO: 3418206 - RNA, 18 nt, Human
aagcgaucacuuccuaua

SEQ ID NO: 3418207 - RNA, 20 nt, Human
aagcgaugaauuuggagacu

SEQ ID NO: 3418208 - RNA, 20 nt, Human
aagcgauucuccugccucag

SEQ ID NO: 3418209 - RNA, 19 nt, Human
aagcgauucucuugccuca

SEQ ID NO: 3418210 - RNA, 21 nt, Human
aagcgauucuucugcuucagc

SEQ ID NO: 3418211 - RNA, 20 nt, Human
aauaagagagucauaaaccu

SEQ ID NO: 3418212 - RNA, 18 nt, Human
aauaagcagguggaucua

SEQ ID NO: 3418213 - RNA, 20 nt, Human
aauaagcuaguugaauacuu

SEQ ID NO: 3418214 - RNA, 23 nt, Human
aauaagcuaguugaauacuugaa

SEQ ID NO: 3418215 - RNA, 16 nt, Human
aauaagcuauuugaug

SEQ ID NO: 3418216 - RNA, 15 nt, Human
aauaaggaaaagcuu

SEQ ID NO: 3418217 - RNA, 15 nt, Human
aauaaggaaaaguuu

SEQ ID NO: 3418218 - RNA, 16 nt, Human
aauaaggaaaaguuua

SEQ ID NO: 3418219 - RNA, 12 nt, Human
aauaaggcaggg

SEQ ID NO: 3418220 - RNA, 15 nt, Human
aauaagguacaagaa

SEQ ID NO: 3418221 - RNA, 14 nt, Human
aauaagguugaaca

SEQ ID NO: 3418222 - RNA, 16 nt, Human
aauaagugcccucucc

SEQ ID NO: 3418223 - RNA, 14 nt, Human
aauaaguguauuuu

SEQ ID NO: 3418224 - RNA, 13 nt, Human
aauaaguuauugc

SEQ ID NO: 3418225 - RNA, 14 nt, Human
aauaaguuauugca

SEQ ID NO: 3418226 - RNA, 18 nt, Human
aauaaguuauugcaguuu

SEQ ID NO: 3418227 - RNA, 17 nt, Human
aauaauaaaaaauuuca

SEQ ID NO: 3418228 - RNA, 13 nt, Human
aauaauaaacuuu

SEQ ID NO: 3418229 - RNA, 21 nt, Human
aauaauaaagaucauguaaaa

SEQ ID NO: 3418230 - RNA, 18 nt, Human
aauaauaaagaugcucuu

SEQ ID NO: 3418231 - RNA, 15 nt, Human
aauaauaaauauuua

SEQ ID NO: 3418232 - RNA, 13 nt, Human
aauaauaaauugc

SEQ ID NO: 3418233 - RNA, 12 nt, Human
aauaauaauauc

SEQ ID NO: 3418234 - RNA, 15 nt, Human
aauaauaauauccag

SEQ ID NO: 3418235 - RNA, 11 nt, Human
aauaauaauua

SEQ ID NO: 3418236 - RNA, 21 nt, Human
aauaauaauuauccagaguuu

SEQ ID NO: 3418237 - RNA, 14 nt, Human
aauaauacacuaau

SEQ ID NO: 3418238 - RNA, 17 nt, Human
aauaauacauuauauuu

SEQ ID NO: 3418239 - RNA, 16 nt, Human
aauaauacugcugaga

SEQ ID NO: 3418240 - RNA, 13 nt, Human
aauaauagacugu

SEQ ID NO: 3418241 - RNA, 13 nt, Human
aauaauauacuug

SEQ ID NO: 3418242 - RNA, 16 nt, Human
aauaauauacuugugg

SEQ ID NO: 3418243 - RNA, 13 nt, Human
aauaauauauguu

SEQ ID NO: 3418244 - RNA, 19 nt, Human
aauaauauggcuaugcuua

SEQ ID NO: 3418245 - RNA, 17 nt, Human
aauaauauuguuuuucu

SEQ ID NO: 3418246 - RNA, 21 nt, Human
aauaauauuguuuuucuuucu

SEQ ID NO: 3418247 - RNA, 13 nt, Human
aauaaucaagagc

SEQ ID NO: 3418248 - RNA, 15 nt, Human
aauaauccaugaaag

SEQ ID NO: 3418249 - RNA, 19 nt, Human
aauaauccugcaaaguaca

SEQ ID NO: 3418250 - RNA, 16 nt, Human
aauaaucuauuucuau

SEQ ID NO: 3418251 - RNA, 15 nt, Human
aauaaugagaaaugu

SEQ ID NO: 3418252 - RNA, 23 nt, Human
aauaaugcaguaugguacauuuu

SEQ ID NO: 3418253 - RNA, 18 nt, Human
aauaaugccuuuguaacc

SEQ ID NO: 3418254 - RNA, 11 nt, Human
aauaaugcugc

SEQ ID NO: 3418255 - RNA, 14 nt, Human
aauaaugcuucaga

SEQ ID NO: 3418256 - RNA, 23 nt, Human
aauaauggaaaaaaaaaaaagag

SEQ ID NO: 3418257 - RNA, 20 nt, Human
aauaaugggcuuagagcagu

SEQ ID NO: 3418258 - RNA, 17 nt, Human
aauaaugguaccagaua

SEQ ID NO: 3418259 - RNA, 20 nt, Human
aauaaugguaccagauaaaa

SEQ ID NO: 3418260 - RNA, 21 nt, Human
aauaaugguaccagauaaaau

SEQ ID NO: 3418261 - RNA, 19 nt, Human
aauaauguaagacaaauau

SEQ ID NO: 3418262 - RNA, 15 nt, Human
aauaaugucuuguua

SEQ ID NO: 3418263 - RNA, 18 nt, Human
aauaaugucuuguuaaua

SEQ ID NO: 3418264 - RNA, 16 nt, Human
aauaaugugaaacugg

SEQ ID NO: 3418265 - RNA, 22 nt, Human
aauaaugugaaacuggauuaaa

SEQ ID NO: 3418266 - RNA, 15 nt, Human
aauaaugugaaucau

SEQ ID NO: 3418267 - RNA, 19 nt, Human
aauaauguuaacauggaca

SEQ ID NO: 3418268 - RNA, 22 nt, Human
aauaauuacagugccuaaaaua

SEQ ID NO: 3418269 - RNA, 20 nt, Human
aauaauuagguuaacauugu

SEQ ID NO: 3418270 - RNA, 22 nt, Human
aauaauuagguuaacauuguug

SEQ ID NO: 3418271 - RNA, 15 nt, Human
aauaauuauaugcua

SEQ ID NO: 3418272 - RNA, 16 nt, Human
aauaauuauuuauuac

SEQ ID NO: 3418273 - RNA, 22 nt, Human
aauaauucugaguuuuguguuu

SEQ ID NO: 3418274 - RNA, 14 nt, Human
aauaauucuuugau

SEQ ID NO: 3418275 - RNA, 15 nt, Human
aauaauucuuuuuua

SEQ ID NO: 3418276 - RNA, 20 nt, Human
aauaauucuuuuuuauuaau

SEQ ID NO: 3418277 - RNA, 21 nt, Human
aauaauucuuuuuuauuaauc

SEQ ID NO: 3418278 - RNA, 20 nt, Human
aauaauugauuucaagaccu

SEQ ID NO: 3418279 - RNA, 14 nt, Human
aauaauuguuguuc

SEQ ID NO: 3418280 - RNA, 16 nt, Human
aauaauuguuguucug

SEQ ID NO: 3418281 - RNA, 17 nt, Human
aauaauuguuguucugu

SEQ ID NO: 3418282 - RNA, 18 nt, Human
aauaauuguuguucuguu

SEQ ID NO: 3418283 - RNA, 13 nt, Human
aauaauuuaacua

SEQ ID NO: 3418284 - RNA, 12 nt, Human
aauaauuuagac

SEQ ID NO: 3418285 - RNA, 12 nt, Human
aauaauuuuaaa

SEQ ID NO: 3418286 - RNA, 14 nt, Human
aauaauuuuaaaaa

SEQ ID NO: 3418287 - RNA, 16 nt, Human
aauaauuuuaaacaaa

SEQ ID NO: 3418288 - RNA, 11 nt, Human
aauaauuuuau

SEQ ID NO: 3418289 - RNA, 14 nt, Human
aauaauuuuaucuc

SEQ ID NO: 3418290 - RNA, 16 nt, Human
aauaauuuuuauauuu

SEQ ID NO: 3418291 - RNA, 17 nt, Human
aauaauuuuuauauuug

SEQ ID NO: 3418292 - RNA, 14 nt, Human
aauacaaaaauuug

SEQ ID NO: 3418293 - RNA, 13 nt, Human
aauacaaauggau

SEQ ID NO: 3418294 - RNA, 22 nt, Human
aauacaacauguagcugaguuu

SEQ ID NO: 3418295 - RNA, 13 nt, Human
aauacaauaaacu

SEQ ID NO: 3418296 - RNA, 13 nt, Human
aauacaauuuugu

SEQ ID NO: 3418297 - RNA, 17 nt, Human
aauacaauuuuguuucu

SEQ ID NO: 3418298 - RNA, 14 nt, Human
aauacacauuugcu

SEQ ID NO: 3418299 - RNA, 22 nt, Human
aauacaccaccucacuccuguu

SEQ ID NO: 3418300 - RNA, 15 nt, Human
aauacaccacuacau

SEQ ID NO: 3418301 - RNA, 21 nt, Human
aauacaccagguagaacacaa

SEQ ID NO: 3418302 - RNA, 16 nt, Human
aauacacgagguauga

SEQ ID NO: 3418303 - RNA, 14 nt, Human
aauacacuugcccu

SEQ ID NO: 3418304 - RNA, 22 nt, Human
aauacacuugugauuauaaaau

SEQ ID NO: 3418305 - RNA, 15 nt, Human
aauacagaaucuugu

SEQ ID NO: 3418306 - RNA, 20 nt, Human
aauacagacacuaaguuaua

SEQ ID NO: 3418307 - RNA, 21 nt, Human
aauacagacacuaaguuauag

SEQ ID NO: 3418308 - RNA, 12 nt, Human
aauacagauaac

SEQ ID NO: 3418309 - RNA, 17 nt, Human
aauacagauaacauuag

SEQ ID NO: 3418310 - RNA, 12 nt, Human
aauacagauaua

SEQ ID NO: 3418311 - RNA, 14 nt, Human
aauacagauauauu

SEQ ID NO: 3418312 - RNA, 15 nt, Human
aauacagauauauuu

SEQ ID NO: 3418313 - RNA, 16 nt, Human
aauacagaucaucuug

SEQ ID NO: 3418314 - RNA, 19 nt, Human
aauacagccaaagauaauc

SEQ ID NO: 3418315 - RNA, 16 nt, Human
aauacagcuuucugac

SEQ ID NO: 3418316 - RNA, 19 nt, Human
aauacagcuuucugaccuu

SEQ ID NO: 3418317 - RNA, 16 nt, Human
aauacaggaaacaguu

SEQ ID NO: 3418318 - RNA, 18 nt, Human
aauacaggaaacaguugc

SEQ ID NO: 3418319 - RNA, 23 nt, Human
aauacaggaaacaguugcaugua

SEQ ID NO: 3418320 - RNA, 16 nt, Human
aauacagggcaugcau

SEQ ID NO: 3418321 - RNA, 17 nt, Human
aauacaguacaggcagc

SEQ ID NO: 3418322 - RNA, 21 nt, Human
aauacaguacaggcagcacag

SEQ ID NO: 3418323 - RNA, 21 nt, Human
aauacagucuuccacaaagaa

SEQ ID NO: 3418324 - RNA, 16 nt, Human
aauacaguucugcucu

SEQ ID NO: 3418325 - RNA, 17 nt, Human
aauacaguucugcucug

SEQ ID NO: 3418326 - RNA, 22 nt, Human
aauacauaccacgcuagggcug

SEQ ID NO: 3418327 - RNA, 22 nt, Human
aauaguguggaaauuaagaaga

SEQ ID NO: 3418328 - RNA, 21 nt, Human
aauaguguguucugauuagaa

SEQ ID NO: 3418329 - RNA, 18 nt, Human
aauaguguuaaucaauuu

SEQ ID NO: 3418330 - RNA, 22 nt, Human
aauaguguuauugagagagaug

SEQ ID NO: 3418331 - RNA, 23 nt, Human
aauaguguuauugagagagaugu

SEQ ID NO: 3418332 - RNA, 22 nt, Human
aauaguuaagacaugauuuccu

SEQ ID NO: 3418333 - RNA, 18 nt, Human
aauaguuacuccagugcc

SEQ ID NO: 3418334 - RNA, 20 nt, Human
aauaguugagccagcagaca

SEQ ID NO: 3418335 - RNA, 18 nt, Human
aauaguuguccauauuuu

SEQ ID NO: 3418336 - RNA, 19 nt, Human
aauaguuuauuuuaaaaca

SEQ ID NO: 3418337 - RNA, 14 nt, Human
aauaguuuggauau

SEQ ID NO: 3418338 - RNA, 15 nt, Human
aauaguuuguuuaau

SEQ ID NO: 3418339 - RNA, 11 nt, Human
aauauaaaaaa

SEQ ID NO: 3418340 - RNA, 22 nt, Human
aauauaaaacaaauaaaaaaua

SEQ ID NO: 3418341 - RNA, 11 nt, Human
aauauaaaacu

SEQ ID NO: 3418342 - RNA, 17 nt, Human
aauauaaaacuguacuu

SEQ ID NO: 3418343 - RNA, 23 nt, Human
aauauaaaaggcaaauguguaca

SEQ ID NO: 3418344 - RNA, 13 nt, Human
aauauaaaauagu

SEQ ID NO: 3418345 - RNA, 23 nt, Human
aauauaaacaaagauucaugauu

SEQ ID NO: 3418346 - RNA, 13 nt, Human
aauauaaacacua

SEQ ID NO: 3418347 - RNA, 21 nt, Human
aauauaaagauggcugacuuu

SEQ ID NO: 3418348 - RNA, 16 nt, Human
aauauaaagcaucuaa

SEQ ID NO: 3418349 - RNA, 17 nt, Human
aauauaaagcaucuaaa

SEQ ID NO: 3418350 - RNA, 21 nt, Human
aauauaaaguuuuauauauua

SEQ ID NO: 3418351 - RNA, 16 nt, Human
aauauaaaugcaaaua

SEQ ID NO: 3418352 - RNA, 19 nt, Human
aauauaaaugcaaauaaca

SEQ ID NO: 3418353 - RNA, 22 nt, Human
aauauaaaugcaaauaacaaau

SEQ ID NO: 3418354 - RNA, 12 nt, Human
aauauaaaugug

SEQ ID NO: 3418355 - RNA, 14 nt, Human
aauauaacacauuu

SEQ ID NO: 3418356 - RNA, 22 nt, Human
aauauaacugccuuaaaacuuu

SEQ ID NO: 3418357 - RNA, 21 nt, Human
aauauaacuuaaaaauguaaa

SEQ ID NO: 3418358 - RNA, 16 nt, Human
aauauaaguaaaguga

SEQ ID NO: 3418359 - RNA, 23 nt, Human
aauauaauggaagagaaaucuca

SEQ ID NO: 3418360 - RNA, 16 nt, Human
aauauaauucuguaaa

SEQ ID NO: 3418361 - RNA, 12 nt, Human
aauauaauuguu

SEQ ID NO: 3418362 - RNA, 14 nt, Human
aauauacaaaacuu

SEQ ID NO: 3418363 - RNA, 13 nt, Human
aauauacacacag

SEQ ID NO: 3418364 - RNA, 20 nt, Human
aauauacauguuuauguaaa

SEQ ID NO: 3418365 - RNA, 19 nt, Human
aauauacauucaaacuuaa

SEQ ID NO: 3418366 - RNA, 17 nt, Human
aauauacuauauuuaug

SEQ ID NO: 3418367 - RNA, 11 nt, Human
aauauacugua

SEQ ID NO: 3418368 - RNA, 23 nt, Human
aauauacuguaaagaaagagaga

SEQ ID NO: 3418369 - RNA, 13 nt, Human
aauauacuugugg

SEQ ID NO: 3418370 - RNA, 15 nt, Human
aauauacuuguggac

SEQ ID NO: 3418371 - RNA, 16 nt, Human
aauauacuuguggacu

SEQ ID NO: 3418372 - RNA, 22 nt, Human
aagcgcauccaaucucaaggaa

SEQ ID NO: 3418373 - RNA, 19 nt, Human
aagcgcccuggcccccaca

SEQ ID NO: 3418374 - RNA, 15 nt, Human
aagcgccuccaaccc

SEQ ID NO: 3418375 - RNA, 23 nt, Human
aagcggaaaagguuuuauuuugu

SEQ ID NO: 3418376 - RNA, 22 nt, Human
aagcggcucaagcccaggaggg

SEQ ID NO: 3418377 - RNA, 14 nt, Human
aagcgggaaacaug

SEQ ID NO: 3418378 - RNA, 21 nt, Human
aagcggugucucuccugcccc

SEQ ID NO: 3418379 - RNA, 13 nt, Human
aagcguauggcuu

SEQ ID NO: 3418380 - RNA, 17 nt, Human
aagcgugagacgccacc

SEQ ID NO: 3418381 - RNA, 16 nt, Human
aagcgugagccacugc

SEQ ID NO: 3418382 - RNA, 16 nt, Human
aagcuaaaaccugagc

SEQ ID NO: 3418383 - RNA, 23 nt, Human
aagcuaaaaccugagcuagaagc

SEQ ID NO: 3418384 - RNA, 11 nt, Human
aagcuaaagag

SEQ ID NO: 3418385 - RNA, 17 nt, Human
aagcuaagaugggugga

SEQ ID NO: 3418386 - RNA, 17 nt, Human
aagcuaagguuuagaua

SEQ ID NO: 3418387 - RNA, 17 nt, Human
aagcuaauaaaauauca

SEQ ID NO: 3418388 - RNA, 18 nt, Human
aagcuaauaaaauaucau

SEQ ID NO: 3418389 - RNA, 17 nt, Human
aagcuaauuauuuuaau

SEQ ID NO: 3418390 - RNA, 14 nt, Human
aagcuaauuugcau

SEQ ID NO: 3418391 - RNA, 15 nt, Human
aagcuaauuugcauu

SEQ ID NO: 3418392 - RNA, 18 nt, Human
aagcuacagguuacaaca

SEQ ID NO: 3418393 - RNA, 19 nt, Human
aagcuaccucaaacuucca

SEQ ID NO: 3418394 - RNA, 18 nt, Human
aagcuacuuuguuuuuaa

SEQ ID NO: 3418395 - RNA, 17 nt, Human
aagcuagacacaugaag

SEQ ID NO: 3418396 - RNA, 18 nt, Human
aagcuagacacaugaagg

SEQ ID NO: 3418397 - RNA, 20 nt, Human
aagcuagacacaugaaggua

SEQ ID NO: 3418398 - RNA, 21 nt, Human
aagcuagacacaugaagguaa

SEQ ID NO: 3418399 - RNA, 22 nt, Human
aagcuagacacaugaagguaaa

SEQ ID NO: 3418400 - RNA, 18 nt, Human
aagcuaggccuggccaga

SEQ ID NO: 3418401 - RNA, 22 nt, Human
aagcuaggguggcccuugcagu

SEQ ID NO: 3418402 - RNA, 17 nt, Human
aagcuagucaacaguac

SEQ ID NO: 3418403 - RNA, 19 nt, Human
aagcuaguggcuucaaaau

SEQ ID NO: 3418404 - RNA, 20 nt, Human
aagcuaguguaccuccucuc

SEQ ID NO: 3418405 - RNA, 18 nt, Human
aagcuauaaauuccucuu

SEQ ID NO: 3418406 - RNA, 20 nt, Human
aagcuauagacccgaggaaa

SEQ ID NO: 3418407 - RNA, 17 nt, Human
aagcuauccuggcucuu

SEQ ID NO: 3418408 - RNA, 14 nt, Human
aagcuaucuaaagu

SEQ ID NO: 3418409 - RNA, 22 nt, Human
aagcuaucuucauguaaauuga

SEQ ID NO: 3418410 - RNA, 23 nt, Human
aagcuauggugagaugcagcugg

SEQ ID NO: 3418411 - RNA, 16 nt, Human
aagcuauuagccagga

SEQ ID NO: 3418412 - RNA, 20 nt, Human
aagcuauuccuuucccuucc

SEQ ID NO: 3418413 - RNA, 23 nt, Human
aagcuauuccuuucccuuccucu

SEQ ID NO: 3418414 - RNA, 17 nt, Human
aagcuauuuaugggccc

SEQ ID NO: 3418415 - RNA, 20 nt, Human
aagcucaaagguuuggaagg

SEQ ID NO: 3418416 - RNA, 17 nt, Human
aagcucaaaugaaaugu

SEQ ID NO: 3418417 - RNA, 19 nt, Human
aagcucaaaugaaauguau

SEQ ID NO: 3418418 - RNA, 16 nt, Human
aagcucacaccaaauu

SEQ ID NO: 3418419 - RNA, 22 nt, Human
aagcucacaguuccucgcccug

SEQ ID NO: 3418420 - RNA, 15 nt, Human
aagcucacguccuga

SEQ ID NO: 3418421 - RNA, 16 nt, Human
aagcucacuugcuuua

SEQ ID NO: 3418422 - RNA, 17 nt, Human
aagcucagacugguuga

SEQ ID NO: 3418423 - RNA, 23 nt, Human
aagcucagaggcgcacugugacc

SEQ ID NO: 3418424 - RNA, 16 nt, Human
aagcucagcccacccc

SEQ ID NO: 3418425 - RNA, 17 nt, Human
aagcucagcuacugauu

SEQ ID NO: 3418426 - RNA, 16 nt, Human
aagcucagggccuggc

SEQ ID NO: 3418427 - RNA, 21 nt, Human
aagcucauauuuuguauauau

SEQ ID NO: 3418428 - RNA, 23 nt, Human
aagcucauauuuuguauauaucu

SEQ ID NO: 3418429 - RNA, 15 nt, Human
aagcucauuucaugc

SEQ ID NO: 3418430 - RNA, 18 nt, Human
aagcucauuucaugcucu

SEQ ID NO: 3418431 - RNA, 13 nt, Human
aagcuccaagccc

SEQ ID NO: 3418432 - RNA, 17 nt, Human
aagcuccaagcucccag

SEQ ID NO: 3418433 - RNA, 19 nt, Human
aagcuccacugucacccuc

SEQ ID NO: 3418434 - RNA, 19 nt, Human
aagcuccaguccugcucuc

SEQ ID NO: 3418435 - RNA, 15 nt, Human
aagcuccaucaauga

SEQ ID NO: 3418436 - RNA, 20 nt, Human
aagcuccaucuccacuccag

SEQ ID NO: 3418437 - RNA, 16 nt, Human
aagcuccaugugccuc

SEQ ID NO: 3418438 - RNA, 13 nt, Human
aagcucccaggaa

SEQ ID NO: 3418439 - RNA, 16 nt, Human
aagcuccucuccccag

SEQ ID NO: 3418440 - RNA, 20 nt, Human
aagcuccucuccccagccca

SEQ ID NO: 3418441 - RNA, 22 nt, Human
aagcuccucuccccagcccaga

SEQ ID NO: 3418442 - RNA, 14 nt, Human
aagcuccuguccuc

SEQ ID NO: 3418443 - RNA, 15 nt, Human
aagcuccuguccucc

SEQ ID NO: 3418444 - RNA, 18 nt, Human
aagcucgaaaacaauugu

SEQ ID NO: 3418445 - RNA, 20 nt, Human
aagcucuaguucuuaacaac

SEQ ID NO: 3418446 - RNA, 15 nt, Human
aagcucucugcaucu

SEQ ID NO: 3418447 - RNA, 22 nt, Human
aagcucucuugccgaggagcca

SEQ ID NO: 3418448 - RNA, 9 nt, Human
aagcucuga

SEQ ID NO: 3418449 - RNA, 16 nt, Human
aagcucugaagucaca

SEQ ID NO: 3418450 - RNA, 22 nt, Human
aagcucugaagucacaucacag

SEQ ID NO: 3418451 - RNA, 24 nt, Human
aagcucuggcugaacccugugcug

SEQ ID NO: 3418452 - RNA, 20 nt, Human
aagcucuggugacaccagcc

SEQ ID NO: 3418453 - RNA, 21 nt, Human
aagcucuggugacaccagccu

SEQ ID NO: 3418454 - RNA, 21 nt, Human
aagcucuugaagacacugaaa

SEQ ID NO: 3418455 - RNA, 11 nt, Human
aagcugaaauu

SEQ ID NO: 3418456 - RNA, 18 nt, Human
aagcugaacacauuucuu

SEQ ID NO: 3418457 - RNA, 17 nt, Human
aagcugaacacugaagu

SEQ ID NO: 3418458 - RNA, 17 nt, Human
aagcugaagugcaucca

SEQ ID NO: 3418459 - RNA, 13 nt, Human
aagcugaauacau

SEQ ID NO: 3418460 - RNA, 17 nt, Human
aagcugaccacaggcag

SEQ ID NO: 3418461 - RNA, 19 nt, Human
aagcugacgaacuuccaug

SEQ ID NO: 3418462 - RNA, 17 nt, Human
aagcugagaacuccuga

SEQ ID NO: 3418463 - RNA, 18 nt, Human
aagcugagaacuccugac

SEQ ID NO: 3418464 - RNA, 18 nt, Human
aagcugagagugcuauga

SEQ ID NO: 3418465 - RNA, 17 nt, Human
aagcugaggcgggagaa

SEQ ID NO: 3418466 - RNA, 18 nt, Human
aagcugaggugcccagga

SEQ ID NO: 3418467 - RNA, 22 nt, Human
aagcugaguuaggugucugucc

SEQ ID NO: 3418468 - RNA, 23 nt, Human
aagcugaguuaggugucuguccu

SEQ ID NO: 3418469 - RNA, 14 nt, Human
aagcugaguuuccu

SEQ ID NO: 3418470 - RNA, 21 nt, Human
aauaucuaauauauaugaaua

SEQ ID NO: 3418471 - RNA, 18 nt, Human
aauaucuaguaauauauu

SEQ ID NO: 3418472 - RNA, 14 nt, Human
aauaucuauuaaua

SEQ ID NO: 3418473 - RNA, 15 nt, Human
aauaucuauuaauau

SEQ ID NO: 3418474 - RNA, 21 nt, Human
aauaucuccgucaacucauau

SEQ ID NO: 3418475 - RNA, 20 nt, Human
aauaucugaaaauguaugug

SEQ ID NO: 3418476 - RNA, 15 nt, Human
aauaucugaacauuu

SEQ ID NO: 3418477 - RNA, 14 nt, Human
aauaucugcuguau

SEQ ID NO: 3418478 - RNA, 22 nt, Human
aauaucuguauuuaauuuugac

SEQ ID NO: 3418479 - RNA, 17 nt, Human
aauaucuucacuuguca

SEQ ID NO: 3418480 - RNA, 18 nt, Human
aauaucuucagcucuuuu

SEQ ID NO: 3418481 - RNA, 18 nt, Human
aauaucuucguuaguaau

SEQ ID NO: 3418482 - RNA, 15 nt, Human
aauaucuugcuugaa

SEQ ID NO: 3418483 - RNA, 19 nt, Human
aauaucuuuuauguuugaa

SEQ ID NO: 3418484 - RNA, 12 nt, Human
aauaugaagcuc

SEQ ID NO: 3418485 - RNA, 18 nt, Human
aauaugaauacagggcau

SEQ ID NO: 3418486 - RNA, 22 nt, Human
aauaugacagcugucccuguca

SEQ ID NO: 3418487 - RNA, 21 nt, Human
aauaugacggaagaacauaga

SEQ ID NO: 3418488 - RNA, 17 nt, Human
aauaugaugacuguuuu

SEQ ID NO: 3418489 - RNA, 20 nt, Human
aauaugauuuuuuaaaagaa

SEQ ID NO: 3418490 - RNA, 17 nt, Human
aauaugcaacauugucc

SEQ ID NO: 3418491 - RNA, 18 nt, Human
aauaugcacacagugcuu

SEQ ID NO: 3418492 - RNA, 17 nt, Human
aauaugcacacauuuuu

SEQ ID NO: 3418493 - RNA, 18 nt, Human
aauaugcacuaagucucu

SEQ ID NO: 3418494 - RNA, 20 nt, Human
aauaugcacuaagucucuuu

SEQ ID NO: 3418495 - RNA, 15 nt, Human
aauaugcaguucugc

SEQ ID NO: 3418496 - RNA, 20 nt, Human
aauaugcaucuaauaaaaaa

SEQ ID NO: 3418497 - RNA, 24 nt, Human
aauaugccccauucaacaucuagu

SEQ ID NO: 3418498 - RNA, 19 nt, Human
aauaugccucuccuuugua

SEQ ID NO: 3418499 - RNA, 23 nt, Human
aauaugccugcaaucugagccag

SEQ ID NO: 3418500 - RNA, 21 nt, Human
aauaugccugcuauuugaagu

SEQ ID NO: 3418501 - RNA, 21 nt, Human
aauaugccuguaauucagugu

SEQ ID NO: 3418502 - RNA, 17 nt, Human
aauaugccuuuuugaag

SEQ ID NO: 3418503 - RNA, 14 nt, Human
aauaugcuaauuug

SEQ ID NO: 3418504 - RNA, 21 nt, Human
aauaugcugcaacaaaaugua

SEQ ID NO: 3418505 - RNA, 22 nt, Human
aauaugcugccaaauuuuggcc

SEQ ID NO: 3418506 - RNA, 16 nt, Human
aauaugcuggcuggag

SEQ ID NO: 3418507 - RNA, 15 nt, Human
aauauggaacuuaca

SEQ ID NO: 3418508 - RNA, 14 nt, Human
aauauggaacuucu

SEQ ID NO: 3418509 - RNA, 18 nt, Human
aauauggaacuucuaaua

SEQ ID NO: 3418510 - RNA, 15 nt, Human
aauauggcuauaaau

SEQ ID NO: 3418511 - RNA, 18 nt, Human
aauauggcuauaaauaua

SEQ ID NO: 3418512 - RNA, 21 nt, Human
aauaugggggccuuuugggaa

SEQ ID NO: 3418513 - RNA, 14 nt, Human
aauauguauuguaa

SEQ ID NO: 3418514 - RNA, 20 nt, Human
aauauguauuguaaacaugu

SEQ ID NO: 3418515 - RNA, 12 nt, Human
aauauguauuuu

SEQ ID NO: 3418516 - RNA, 18 nt, Human
aauauguauuuuauguau

SEQ ID NO: 3418517 - RNA, 12 nt, Human
aauauguccugg

SEQ ID NO: 3418518 - RNA, 22 nt, Human
aauaugucucgcuagugauguu

SEQ ID NO: 3418519 - RNA, 14 nt, Human
aauaugugagauuu

SEQ ID NO: 3418520 - RNA, 19 nt, Human
aauaugugagauuuuuuau

SEQ ID NO: 3418521 - RNA, 21 nt, Human
aauaugugagauuuuuuauug

SEQ ID NO: 3418522 - RNA, 21 nt, Human
aauaugugagugccuuuugca

SEQ ID NO: 3418523 - RNA, 19 nt, Human
aauaugugauuuuuuuucc

SEQ ID NO: 3418524 - RNA, 14 nt, Human
aauauguguuuacu

SEQ ID NO: 3418525 - RNA, 22 nt, Human
aauauguuaaccucagugucau

SEQ ID NO: 3418526 - RNA, 22 nt, Human
aauauguugaugaaaaauagca

SEQ ID NO: 3418527 - RNA, 13 nt, Human
aauauguuucaaa

SEQ ID NO: 3418528 - RNA, 17 nt, Human
aauauguuucaaacuuu

SEQ ID NO: 3418529 - RNA, 15 nt, Human
aauauguuucacaca

SEQ ID NO: 3418530 - RNA, 23 nt, Human
aaugcagcaaggcccugcugccc

SEQ ID NO: 3418531 - RNA, 20 nt, Human
aaugcagcccauuucuccag

SEQ ID NO: 3418532 - RNA, 21 nt, Human
aaugcagcccauuucuccaga

SEQ ID NO: 3418533 - RNA, 14 nt, Human
aaugcagcgugaag

SEQ ID NO: 3418534 - RNA, 16 nt, Human
aaugcagcuugugugc

SEQ ID NO: 3418535 - RNA, 22 nt, Human
aaugcaguacaggacauauauu

SEQ ID NO: 3418536 - RNA, 18 nt, Human
aaugcaguacuaacauuu

SEQ ID NO: 3418537 - RNA, 17 nt, Human
aaugcaguaugguacau

SEQ ID NO: 3418538 - RNA, 23 nt, Human
aaugcaguaugguacauuuuuca

SEQ ID NO: 3418539 - RNA, 15 nt, Human
aaugcaguugucucu

SEQ ID NO: 3418540 - RNA, 16 nt, Human
aaugcauauuguauua

SEQ ID NO: 3418541 - RNA, 15 nt, Human
aaugcaucaauccug

SEQ ID NO: 3418542 - RNA, 16 nt, Human
aaugcaucuagauuau

SEQ ID NO: 3418543 - RNA, 15 nt, Human
aaugcaucuuugaug

SEQ ID NO: 3418544 - RNA, 19 nt, Human
aaugcaucuuugauguguu

SEQ ID NO: 3418545 - RNA, 18 nt, Human
aaugcaugaguaaaaaaa

SEQ ID NO: 3418546 - RNA, 16 nt, Human
aaugcaugauuuugua

SEQ ID NO: 3418547 - RNA, 13 nt, Human
aaugcauuaaacc

SEQ ID NO: 3418548 - RNA, 15 nt, Human
aaugcauuaaaccug

SEQ ID NO: 3418549 - RNA, 19 nt, Human
aaugcauugauauugugaa

SEQ ID NO: 3418550 - RNA, 22 nt, Human
aaugcauugauauugugaacau

SEQ ID NO: 3418551 - RNA, 18 nt, Human
aaugcauuuuguuuggua

SEQ ID NO: 3418552 - RNA, 16 nt, Human
aaugccaaauuaaaaa

SEQ ID NO: 3418553 - RNA, 17 nt, Human
aaugccaaauuaaaaaa

SEQ ID NO: 3418554 - RNA, 21 nt, Human
aaugccaaauuaaaaaagaua

SEQ ID NO: 3418555 - RNA, 15 nt, Human
aaugccacagcccug

SEQ ID NO: 3418556 - RNA, 22 nt, Human
aaugccacugccuucgcuucuu

SEQ ID NO: 3418557 - RNA, 14 nt, Human
aaugccauaauaca

SEQ ID NO: 3418558 - RNA, 21 nt, Human
aaugccaucaauaaaaaauua

SEQ ID NO: 3418559 - RNA, 22 nt, Human
aaugccauccucaaacacugca

SEQ ID NO: 3418560 - RNA, 17 nt, Human
aaugccaucuaucuagu

SEQ ID NO: 3418561 - RNA, 22 nt, Human
aaugccaugaugccucugucuu

SEQ ID NO: 3418562 - RNA, 13 nt, Human
aaugcccagcccc

SEQ ID NO: 3418563 - RNA, 23 nt, Human
aaugcccagccccuucugaccca

SEQ ID NO: 3418564 - RNA, 15 nt, Human
aaugcccccagcugg

SEQ ID NO: 3418565 - RNA, 18 nt, Human
aaugcccccagcuggccc

SEQ ID NO: 3418566 - RNA, 19 nt, Human
aaugcccguaaugcuuaga

SEQ ID NO: 3418567 - RNA, 18 nt, Human
aaugcccuuacacuuacu

SEQ ID NO: 3418568 - RNA, 21 nt, Human
aaugccgcccucccagcucug

SEQ ID NO: 3418569 - RNA, 24 nt, Human
aaugccuaguuuuuaguaaucugu

SEQ ID NO: 3418570 - RNA, 15 nt, Human
aaugccuccucccug

SEQ ID NO: 3418571 - RNA, 11 nt, Human
aaugccucugu

SEQ ID NO: 3418572 - RNA, 19 nt, Human
aaugccugcuuuuuggaaa

SEQ ID NO: 3418573 - RNA, 23 nt, Human
aaugccuuacccucauguucuua

SEQ ID NO: 3418574 - RNA, 17 nt, Human
aaugccuuacuuuguau

SEQ ID NO: 3418575 - RNA, 12 nt, Human
aaugccuuugag

SEQ ID NO: 3418576 - RNA, 14 nt, Human
aaugccuuugagac

SEQ ID NO: 3418577 - RNA, 16 nt, Human
aaugccuuugagacag

SEQ ID NO: 3418578 - RNA, 17 nt, Human
aaugccuuugagacagu

SEQ ID NO: 3418579 - RNA, 20 nt, Human
aaugccuuugagacaguuuc

SEQ ID NO: 3418580 - RNA, 13 nt, Human
aaugccuuuguaa

SEQ ID NO: 3418581 - RNA, 22 nt, Human
aaugcgauuuuauuacuggcgu

SEQ ID NO: 3418582 - RNA, 14 nt, Human
aaugcgcaggcugg

SEQ ID NO: 3418583 - RNA, 19 nt, Human
aaugcgcaggcuggcccug

SEQ ID NO: 3418584 - RNA, 21 nt, Human
aaugcgcaggcuggcccugcc

SEQ ID NO: 3418585 - RNA, 15 nt, Human
aaugcgccaauaaac

SEQ ID NO: 3418586 - RNA, 18 nt, Human
aaugcgggugagaguaau

SEQ ID NO: 3418587 - RNA, 21 nt, Human
aaugcgguuauaaaaaauggu

SEQ ID NO: 3418588 - RNA, 18 nt, Human
aaugcuaaagaaaaaguc

SEQ ID NO: 3418589 - RNA, 20 nt, Human
aaugcuaaagaaaaagucau

SEQ ID NO: 3418590 - RNA, 17 nt, Human
aaugcuaagggcaggcc

SEQ ID NO: 3418591 - RNA, 17 nt, Human
aaugcuaauauuaaaag

SEQ ID NO: 3418592 - RNA, 16 nt, Human
aaugcuacaauuuuaa

SEQ ID NO: 3418593 - RNA, 20 nt, Human
aaugcuacaauuuuaagagg

SEQ ID NO: 3418594 - RNA, 15 nt, Human
aaugcuacaugugag

SEQ ID NO: 3418595 - RNA, 23 nt, Human
aaugcuacgugugauuuuucugg

SEQ ID NO: 3418596 - RNA, 13 nt, Human
aaugcuacuuuau

SEQ ID NO: 3418597 - RNA, 19 nt, Human
aaugcuagguuaauuccaa

SEQ ID NO: 3418598 - RNA, 14 nt, Human
aaugcuagguucua

SEQ ID NO: 3418599 - RNA, 23 nt, Human
aaugcuauaacuauguugauaaa

SEQ ID NO: 3418600 - RNA, 17 nt, Human
aaugcuaugucauuuca

SEQ ID NO: 3418601 - RNA, 14 nt, Human
aaugcuauugaaaa

SEQ ID NO: 3418602 - RNA, 16 nt, Human
aaugcucauaacggau

SEQ ID NO: 3418603 - RNA, 21 nt, Human
aaugcucccccauccuccccu

SEQ ID NO: 3418604 - RNA, 13 nt, Human
aaugcucuccuuu

SEQ ID NO: 3418605 - RNA, 14 nt, Human
aaugcucuuauuuc

SEQ ID NO: 3418606 - RNA, 16 nt, Human
aaugcucuuauuucau

SEQ ID NO: 3418607 - RNA, 18 nt, Human
aaugcugaaaaaacaccu

SEQ ID NO: 3418608 - RNA, 15 nt, Human
aaugcugaaaauugc

SEQ ID NO: 3418609 - RNA, 15 nt, Human
aaugcugagguuaug

SEQ ID NO: 3418610 - RNA, 16 nt, Human
aaugcugcauuuuaau

SEQ ID NO: 3418611 - RNA, 21 nt, Human
aaugcugcauuuuaauuuuaa

SEQ ID NO: 3418612 - RNA, 14 nt, Human
aaugcugccugccu

SEQ ID NO: 3418613 - RNA, 14 nt, Human
aaugcuggacugga

SEQ ID NO: 3418614 - RNA, 15 nt, Human
aauuaucaagcuaau

SEQ ID NO: 3418615 - RNA, 19 nt, Human
aauuaucaagcuaauaaaa

SEQ ID NO: 3418616 - RNA, 13 nt, Human
aauuaucagcaaa

SEQ ID NO: 3418617 - RNA, 16 nt, Human
aauuaucccuuuucuu

SEQ ID NO: 3418618 - RNA, 17 nt, Human
aauuauccuauuucagu

SEQ ID NO: 3418619 - RNA, 21 nt, Human
aauuauccugaacucuucugc

SEQ ID NO: 3418620 - RNA, 15 nt, Human
aauuaucggaagcag

SEQ ID NO: 3418621 - RNA, 19 nt, Human
aauuaucuaauuuauaaaa

SEQ ID NO: 3418622 - RNA, 14 nt, Human
aauuaucuauuugu

SEQ ID NO: 3418623 - RNA, 19 nt, Human
aauuaucuugauacauuca

SEQ ID NO: 3418624 - RNA, 13 nt, Human
aauuaugaaaaua

SEQ ID NO: 3418625 - RNA, 18 nt, Human
aauuaugaaacuuuugga

SEQ ID NO: 3418626 - RNA, 17 nt, Human
aauuaugaaucugauuu

SEQ ID NO: 3418627 - RNA, 20 nt, Human
aauuaugaguuuuucaauua

SEQ ID NO: 3418628 - RNA, 17 nt, Human
aauuaugauggaagaca

SEQ ID NO: 3418629 - RNA, 18 nt, Human
aauuaugcacuaaauaug

SEQ ID NO: 3418630 - RNA, 19 nt, Human
aauuaugcacuaaauauga

SEQ ID NO: 3418631 - RNA, 22 nt, Human
aauuaugcuaagaauuuuuuau

SEQ ID NO: 3418632 - RNA, 22 nt, Human
aauuaugggaauaauugcuuuu

SEQ ID NO: 3418633 - RNA, 18 nt, Human
aauuaugguaaaauuuug

SEQ ID NO: 3418634 - RNA, 12 nt, Human
aauuauguagcu

SEQ ID NO: 3418635 - RNA, 16 nt, Human
aauuauguagcucuuu

SEQ ID NO: 3418636 - RNA, 15 nt, Human
aauuauguauguuua

SEQ ID NO: 3418637 - RNA, 22 nt, Human
aauuaugugacauuuuacauua

SEQ ID NO: 3418638 - RNA, 16 nt, Human
aauuauguuauugaaa

SEQ ID NO: 3418639 - RNA, 17 nt, Human
aauuauguuuauauaaa

SEQ ID NO: 3418640 - RNA, 21 nt, Human
aauuauguuuauauaaaugcu

SEQ ID NO: 3418641 - RNA, 17 nt, Human
aauuauuaccagugaau

SEQ ID NO: 3418642 - RNA, 23 nt, Human
aauuauuaccagugaaucuuugu

SEQ ID NO: 3418643 - RNA, 13 nt, Human
aauuauuauaaaa

SEQ ID NO: 3418644 - RNA, 18 nt, Human
aauuauuauaagcauuga

SEQ ID NO: 3418645 - RNA, 21 nt, Human
aauuauuauucuucauaacaa

SEQ ID NO: 3418646 - RNA, 21 nt, Human
aauuauuauuuauauauguau

SEQ ID NO: 3418647 - RNA, 22 nt, Human
aauuauuauuuauauauguauu

SEQ ID NO: 3418648 - RNA, 12 nt, Human
aauuauuauuug

SEQ ID NO: 3418649 - RNA, 16 nt, Human
aauuauuauuuguguu

SEQ ID NO: 3418650 - RNA, 13 nt, Human
aauuauucaguua

SEQ ID NO: 3418651 - RNA, 20 nt, Human
aauuauucaguuaagaaaaa

SEQ ID NO: 3418652 - RNA, 17 nt, Human
aauuauuccaaaccaaa

SEQ ID NO: 3418653 - RNA, 23 nt, Human
aauuauucuauaauuuccauuua

SEQ ID NO: 3418654 - RNA, 15 nt, Human
aauuauugacacuga

SEQ ID NO: 3418655 - RNA, 19 nt, Human
aauuauugacacugaacuu

SEQ ID NO: 3418656 - RNA, 13 nt, Human
aauuauugauaua

SEQ ID NO: 3418657 - RNA, 16 nt, Human
aauuauugauauauau

SEQ ID NO: 3418658 - RNA, 17 nt, Human
aauuauugauauauauu

SEQ ID NO: 3418659 - RNA, 15 nt, Human
aauuauugaugaaaa

SEQ ID NO: 3418660 - RNA, 14 nt, Human
aauuauugauugcu

SEQ ID NO: 3418661 - RNA, 12 nt, Human
aauuauuguaca

SEQ ID NO: 3418662 - RNA, 16 nt, Human
aauuauuuaauugucc

SEQ ID NO: 3418663 - RNA, 18 nt, Human
aauuauuuauuauuaaga

SEQ ID NO: 3418664 - RNA, 11 nt, Human
aauuauuucug

SEQ ID NO: 3418665 - RNA, 17 nt, Human
aauuauuucuuaauuau

SEQ ID NO: 3418666 - RNA, 12 nt, Human
aauuauuugaau

SEQ ID NO: 3418667 - RNA, 21 nt, Human
aauuauuugacuuuaauuuau

SEQ ID NO: 3418668 - RNA, 14 nt, Human
aauuauuugauuau

SEQ ID NO: 3418669 - RNA, 18 nt, Human
aauuauuuguguaauaga

SEQ ID NO: 3418670 - RNA, 13 nt, Human
aauuauuuucauc

SEQ ID NO: 3418671 - RNA, 11 nt, Human
aauuauuuugg

SEQ ID NO: 3418672 - RNA, 20 nt, Human
aauuauuuuguucauacaua

SEQ ID NO: 3418673 - RNA, 17 nt, Human
aauuauuuuuaauaugu

SEQ ID NO: 3418674 - RNA, 17 nt, Human
aauuauuuuuacaguuc

SEQ ID NO: 3418675 - RNA, 14 nt, Human
aauucaaaaagugu

SEQ ID NO: 3418676 - RNA, 22 nt, Human
aauucaaaaguuccaagagucu

SEQ ID NO: 3418677 - RNA, 23 nt, Human
aauucaaaaguuccaagagucua

SEQ ID NO: 3418678 - RNA, 13 nt, Human
aauucaaaccuaa

SEQ ID NO: 3418679 - RNA, 22 nt, Human
aauucaaauuuuaucugccucu

SEQ ID NO: 3418680 - RNA, 15 nt, Human
aauucaacaaacauu

SEQ ID NO: 3418681 - RNA, 15 nt, Human
aauucaacucagacu

SEQ ID NO: 3418682 - RNA, 16 nt, Human
aauucaacuuuguaaa

SEQ ID NO: 3418683 - RNA, 22 nt, Human
aauucaacuuuguaaaaaucuu

SEQ ID NO: 3418684 - RNA, 23 nt, Human
aauucaaggaauuucuuaacuuc

SEQ ID NO: 3418685 - RNA, 14 nt, Human
aauucaauuguaaa

SEQ ID NO: 3418686 - RNA, 17 nt, Human
aauucaauuguaaauug

SEQ ID NO: 3418687 - RNA, 13 nt, Human
aauucacaaacuu

SEQ ID NO: 3418688 - RNA, 14 nt, Human
aauucacaaacuuu

SEQ ID NO: 3418689 - RNA, 19 nt, Human
aauucacaaacuuuuauac

SEQ ID NO: 3418690 - RNA, 16 nt, Human
aauucacaagcugccu

SEQ ID NO: 3418691 - RNA, 18 nt, Human
aauucacaagcugccucc

SEQ ID NO: 3418692 - RNA, 21 nt, Human
aauucacccccuuuccuggac

SEQ ID NO: 3418693 - RNA, 23 nt, Human
aauucacucccacacccaagaag

SEQ ID NO: 3418694 - RNA, 12 nt, Human
aauucacucuga

SEQ ID NO: 3418695 - RNA, 13 nt, Human
aauucacuguacu

SEQ ID NO: 3418696 - RNA, 17 nt, Human
aauucagauauauuuuu

SEQ ID NO: 3418697 - RNA, 15 nt, Human
aauucagcaaaccau

SEQ ID NO: 3418698 - RNA, 23 nt, Human
aauucagcacugauuucacaaca

SEQ ID NO: 3418699 - RNA, 18 nt, Human
aauucaguguauuucagu

SEQ ID NO: 3418700 - RNA, 17 nt, Human
aauucaguuguuagugu

SEQ ID NO: 3418701 - RNA, 18 nt, Human
aauucaucccaacugucu

SEQ ID NO: 3418702 - RNA, 14 nt, Human
aauucaugaacuuc

SEQ ID NO: 3418703 - RNA, 23 nt, Human
aauucaugaacuucgcaucaaaa

SEQ ID NO: 3418704 - RNA, 21 nt, Human
aauucauuaaucugccucccu

SEQ ID NO: 3418705 - RNA, 13 nt, Human
aauucauuucacu

SEQ ID NO: 3418706 - RNA, 15 nt, Human
aauucauuucacugu

SEQ ID NO: 3418707 - RNA, 12 nt, Human
aauucauuucua

SEQ ID NO: 3418708 - RNA, 13 nt, Human
aauuccaaagcaa

SEQ ID NO: 3418709 - RNA, 14 nt, Human
aauuccaaagcaaa

SEQ ID NO: 3418710 - RNA, 15 nt, Human
aauuccaaagcaaaa

SEQ ID NO: 3418711 - RNA, 18 nt, Human
aauuccaacaguuuaaug

SEQ ID NO: 3418712 - RNA, 23 nt, Human
aauuccaaggaguuccaugaaga

SEQ ID NO: 3418713 - RNA, 18 nt, Human
aauuccaagugauugaaa

SEQ ID NO: 3418714 - RNA, 16 nt, Human
aauuccacaccuuuua

SEQ ID NO: 3418715 - RNA, 13 nt, Human
aauuccacagcug

SEQ ID NO: 3418716 - RNA, 15 nt, Human
aauuccacucugaua

SEQ ID NO: 3418717 - RNA, 22 nt, Human
aauuccacuuauaggaauugac

SEQ ID NO: 3418718 - RNA, 19 nt, Human
aauuccauauauccuuuuc

SEQ ID NO: 3418719 - RNA, 24 nt, Human
aauuccaucaagccaagccuccug

SEQ ID NO: 3418720 - RNA, 10 nt, Human
aauuccauga

SEQ ID NO: 3418721 - RNA, 16 nt, Human
aauucccauuuugcaa

SEQ ID NO: 3418722 - RNA, 12 nt, Human
aauuccccagau

SEQ ID NO: 3418723 - RNA, 20 nt, Human
aauucccguuuugucacuuu

SEQ ID NO: 3418724 - RNA, 20 nt, Human
aauucccucacucgucuccc

SEQ ID NO: 3418725 - RNA, 17 nt, Human
aauucccucucucugac

SEQ ID NO: 3418726 - RNA, 14 nt, Human
aauucccugcuguc

SEQ ID NO: 3418727 - RNA, 22 nt, Human
aauccccaugccuguggcugcg

SEQ ID NO: 3418728 - RNA, 18 nt, Human
aaucccccuugccacccc

SEQ ID NO: 3418729 - RNA, 14 nt, Human
aauccccuaaaaua

SEQ ID NO: 3418730 - RNA, 18 nt, Human
aauccccuccuugggcac

SEQ ID NO: 3418731 - RNA, 17 nt, Human
aauccccuuaugacuug

SEQ ID NO: 3418732 - RNA, 18 nt, Human
aauccccuucucaucacu

SEQ ID NO: 3418733 - RNA, 15 nt, Human
aauccccuucucccc

SEQ ID NO: 3418734 - RNA, 19 nt, Human
aaucccucaccuucugagu

SEQ ID NO: 3418735 - RNA, 13 nt, Human
aaucccugcucac

SEQ ID NO: 3418736 - RNA, 14 nt, Human
aaucccugcuuuuu

SEQ ID NO: 3418737 - RNA, 22 nt, Human
aaucccugcuuuuuguguuuuu

SEQ ID NO: 3418738 - RNA, 19 nt, Human
aaucccuguguuaauuuaa

SEQ ID NO: 3418739 - RNA, 20 nt, Human
aaucccuguguuaauuuaag

SEQ ID NO: 3418740 - RNA, 12 nt, Human
aaucccuguuca

SEQ ID NO: 3418741 - RNA, 18 nt, Human
aaucccuuaacaguugua

SEQ ID NO: 3418742 - RNA, 22 nt, Human
aaucccuuaacaguuguauuua

SEQ ID NO: 3418743 - RNA, 18 nt, Human
aaucccuucauacuugaa

SEQ ID NO: 3418744 - RNA, 13 nt, Human
aauccgaaccucc

SEQ ID NO: 3418745 - RNA, 17 nt, Human
aauccgcucucuuccug

SEQ ID NO: 3418746 - RNA, 15 nt, Human
aauccuaaaagaagc

SEQ ID NO: 3418747 - RNA, 16 nt, Human
aauccuaacacauuau

SEQ ID NO: 3418748 - RNA, 16 nt, Human
aauccuaauuucuccu

SEQ ID NO: 3418749 - RNA, 21 nt, Human
aauccuaauuucuccucccuu

SEQ ID NO: 3418750 - RNA, 16 nt, Human
aauccuaccaaccucu

SEQ ID NO: 3418751 - RNA, 17 nt, Human
aauccuaccucaaaauu

SEQ ID NO: 3418752 - RNA, 17 nt, Human
aauccuaccuguuuugu

SEQ ID NO: 3418753 - RNA, 16 nt, Human
aauccuagcugugugc

SEQ ID NO: 3418754 - RNA, 22 nt, Human
aauccuaugcaugguuucagca

SEQ ID NO: 3418755 - RNA, 20 nt, Human
aauccuccaaccaggcuccu

SEQ ID NO: 3418756 - RNA, 23 nt, Human
aauccuccugagugaucccauuu

SEQ ID NO: 3418757 - RNA, 21 nt, Human
aauccucucaaccaccuuuca

SEQ ID NO: 3418758 - RNA, 11 nt, Human
aauccucuggc

SEQ ID NO: 3418759 - RNA, 23 nt, Human
aaggucuggagaagcucccagga

SEQ ID NO: 3418760 - RNA, 23 nt, Human
aaggucuguuuuguguacuuuua

SEQ ID NO: 3418761 - RNA, 18 nt, Human
aaggucuuuaaaauauug

SEQ ID NO: 3418762 - RNA, 22 nt, Human
aaggugaaacauuuucucccug

SEQ ID NO: 3418763 - RNA, 11 nt, Human
aaggugaagga

SEQ ID NO: 3418764 - RNA, 14 nt, Human
aaggugaaggaaua

SEQ ID NO: 3418765 - RNA, 18 nt, Human
aaggugaaggaauauaug

SEQ ID NO: 3418766 - RNA, 15 nt, Human
aaggugaauagccau

SEQ ID NO: 3418767 - RNA, 19 nt, Human
aaggugacaucggaaaaau

SEQ ID NO: 3418768 - RNA, 20 nt, Human
aaggugacaucggaaaaaua

SEQ ID NO: 3418769 - RNA, 20 nt, Human
aaggugaggagcuugaaacc

SEQ ID NO: 3418770 - RNA, 22 nt, Human
aaggugaggccugucugugacc

SEQ ID NO: 3418771 - RNA, 17 nt, Human
aaggugauauauuuaaa

SEQ ID NO: 3418772 - RNA, 14 nt, Human
aaggugcaggcagg

SEQ ID NO: 3418773 - RNA, 14 nt, Human
aaggugccauggaa

SEQ ID NO: 3418774 - RNA, 18 nt, Human
aaggugccauggaagagg

SEQ ID NO: 3418775 - RNA, 11 nt, Human
aaggugccugu

SEQ ID NO: 3418776 - RNA, 18 nt, Human
aaggugccugugaggcag

SEQ ID NO: 3418777 - RNA, 20 nt, Human
aaggugccugugaggcaggg

SEQ ID NO: 3418778 - RNA, 19 nt, Human
aaggugcuaaaucugcgau

SEQ ID NO: 3418779 - RNA, 23 nt, Human
aaggugcuguugucauugcuuua

SEQ ID NO: 3418780 - RNA, 22 nt, Human
aagguggaccuuuuaaaguguu

SEQ ID NO: 3418781 - RNA, 22 nt, Human
aagguggauuuuguuuaaaaaa

SEQ ID NO: 3418782 - RNA, 19 nt, Human
aagguggggguuggcuggg

SEQ ID NO: 3418783 - RNA, 20 nt, Human
aagguggggguuggcugggu

SEQ ID NO: 3418784 - RNA, 23 nt, Human
aaggugggguauuuaccacagca

SEQ ID NO: 3418785 - RNA, 16 nt, Human
aagguggugugaucuu

SEQ ID NO: 3418786 - RNA, 16 nt, Human
aagguguccuacagaa

SEQ ID NO: 3418787 - RNA, 16 nt, Human
aaggugucuuccuccc

SEQ ID NO: 3418788 - RNA, 15 nt, Human
aaggugugagacugg

SEQ ID NO: 3418789 - RNA, 12 nt, Human
aagguguuugaa

SEQ ID NO: 3418790 - RNA, 15 nt, Human
aagguguuugaaaau

SEQ ID NO: 3418791 - RNA, 17 nt, Human
aagguguuuucugugua

SEQ ID NO: 3418792 - RNA, 18 nt, Human
aagguguuuucuguguaa

SEQ ID NO: 3418793 - RNA, 16 nt, Human
aagguuaauaaaguaa

SEQ ID NO: 3418794 - RNA, 20 nt, Human
aagguuaauguucaucaucc

SEQ ID NO: 3418795 - RNA, 18 nt, Human
aagguuaggauuuaacag

SEQ ID NO: 3418796 - RNA, 20 nt, Human
aagguuauuuauuuaaaugu

SEQ ID NO: 3418797 - RNA, 18 nt, Human
aagguuccaacuguauau

SEQ ID NO: 3418798 - RNA, 19 nt, Human
aagguuccaacuguauaua

SEQ ID NO: 3418799 - RNA, 21 nt, Human
aagguuccaacuguauauauu

SEQ ID NO: 3418800 - RNA, 21 nt, Human
aagguuccacagaguaagaca

SEQ ID NO: 3418801 - RNA, 16 nt, Human
aagguucccucugaga

SEQ ID NO: 3418802 - RNA, 11 nt, Human
aagguucuaag

SEQ ID NO: 3418803 - RNA, 18 nt, Human
aagguucuggugugaacu

SEQ ID NO: 3418804 - RNA, 17 nt, Human
aagguucuuacugcuug

SEQ ID NO: 3418805 - RNA, 17 nt, Human
aagguucuucaucccuu

SEQ ID NO: 3418806 - RNA, 19 nt, Human
aagguucuucaucccuuuc

SEQ ID NO: 3418807 - RNA, 13 nt, Human
aagguugaauaau

SEQ ID NO: 3418808 - RNA, 16 nt, Human
aagguuggagcccagg

SEQ ID NO: 3418809 - RNA, 18 nt, Human
aagguuggagcccagggc

SEQ ID NO: 3418810 - RNA, 14 nt, Human
aagguuggauggau

SEQ ID NO: 3418811 - RNA, 18 nt, Human
aagguuuaaaacuaguua

SEQ ID NO: 3418812 - RNA, 20 nt, Human
aagguuuaaagagucuagau

SEQ ID NO: 3418813 - RNA, 21 nt, Human
aagguuuaaagagucuagauu

SEQ ID NO: 3418814 - RNA, 14 nt, Human
aagguuuaaaugaa

SEQ ID NO: 3418815 - RNA, 16 nt, Human
aagguuuaaaugaaca

SEQ ID NO: 3418816 - RNA, 22 nt, Human
aagguuuaggcugguggcccag

SEQ ID NO: 3418817 - RNA, 14 nt, Human
aagguuuauuguua

SEQ ID NO: 3418818 - RNA, 22 nt, Human
aagguuucguuucuguauacaa

SEQ ID NO: 3418819 - RNA, 19 nt, Human
aagguuuggaaggagcaga

SEQ ID NO: 3418820 - RNA, 18 nt, Human
aagguuugguccagccug

SEQ ID NO: 3418821 - RNA, 23 nt, Human
aagguuuuaauuuaguaaaccaa

SEQ ID NO: 3418822 - RNA, 19 nt, Human
aagguuuuagguucuaaag

SEQ ID NO: 3418823 - RNA, 22 nt, Human
aagguuuuggaucuugaaugug

SEQ ID NO: 3418824 - RNA, 14 nt, Human
aagguuuuuguaaa

SEQ ID NO: 3418825 - RNA, 22 nt, Human
aaguaaaaacaaagaaauuaug

SEQ ID NO: 3418826 - RNA, 16 nt, Human
aaguaaaaccacagca

SEQ ID NO: 3418827 - RNA, 18 nt, Human
aaguaaaaccacagcagu

SEQ ID NO: 3418828 - RNA, 13 nt, Human
aaguaaaagaaac

SEQ ID NO: 3418829 - RNA, 21 nt, Human
aaguaaaagcaaaaaagaaaa

SEQ ID NO: 3418830 - RNA, 12 nt, Human
aaguaaaauguc

SEQ ID NO: 3418831 - RNA, 17 nt, Human
aaguaaacuaaugaguu

SEQ ID NO: 3418832 - RNA, 21 nt, Human
aaguaaagccauuaaaugaau

SEQ ID NO: 3418833 - RNA, 12 nt, Human
aaguaaagcuaa

SEQ ID NO: 3418834 - RNA, 21 nt, Human
aaguaaagcuaaaaugauuuu

SEQ ID NO: 3418835 - RNA, 12 nt, Human
aaguaaauacaa

SEQ ID NO: 3418836 - RNA, 15 nt, Human
aaguaaauagcaaca

SEQ ID NO: 3418837 - RNA, 15 nt, Human
aaguaaaugucugug

SEQ ID NO: 3418838 - RNA, 18 nt, Human
aaguaaaugucuguggcc

SEQ ID NO: 3418839 - RNA, 16 nt, Human
aaguaacaaaaauaaa

SEQ ID NO: 3418840 - RNA, 17 nt, Human
aaguaacaagagugauu

SEQ ID NO: 3418841 - RNA, 12 nt, Human
aaguaacucauu

SEQ ID NO: 3418842 - RNA, 15 nt, Human
aaguaacucauugcu

SEQ ID NO: 3418843 - RNA, 14 nt, Human
aaguaacucauuug

SEQ ID NO: 3418844 - RNA, 21 nt, Human
aaguaacucauuuguuaaaau

SEQ ID NO: 3418845 - RNA, 23 nt, Human
aaguaacugggauuacaggcaug

SEQ ID NO: 3418846 - RNA, 16 nt, Human
aaguaacuugucuuaa

SEQ ID NO: 3418847 - RNA, 18 nt, Human
aaguaacuuuaaauuaug

SEQ ID NO: 3418848 - RNA, 19 nt, Human
aaguaacuuuauucuugaa

SEQ ID NO: 3418849 - RNA, 16 nt, Human
aaguaagaaaauauuu

SEQ ID NO: 3418850 - RNA, 20 nt, Human
aaguaagaaagugaagcaaa

SEQ ID NO: 3418851 - RNA, 13 nt, Human
aaguaagaagaca

SEQ ID NO: 3418852 - RNA, 15 nt, Human
aaguaagaagacaug

SEQ ID NO: 3418853 - RNA, 13 nt, Human
aaguaagcaaaga

SEQ ID NO: 3418854 - RNA, 17 nt, Human
aaguaagcaacagcaua

SEQ ID NO: 3418855 - RNA, 19 nt, Human
aaguaagcaacagcauaac

SEQ ID NO: 3418856 - RNA, 20 nt, Human
aaguaagggaagcagaagga

SEQ ID NO: 3418857 - RNA, 16 nt, Human
aaguaagucucaaggu

SEQ ID NO: 3418858 - RNA, 23 nt, Human
aaguaauauaauggaagagaaau

SEQ ID NO: 3418859 - RNA, 12 nt, Human
aaguaauaugca

SEQ ID NO: 3418860 - RNA, 15 nt, Human
aaguaauaugcacac

SEQ ID NO: 3418861 - RNA, 20 nt, Human
aaguaauaugcacacauuuu

SEQ ID NO: 3418862 - RNA, 21 nt, Human
aaguaauccaccugccucggc

SEQ ID NO: 3418863 - RNA, 17 nt, Human
aaguaaugacagaacau

SEQ ID NO: 3418864 - RNA, 14 nt, Human
aaguaaugauaacu

SEQ ID NO: 3418865 - RNA, 13 nt, Human
aaguaauuaucgg

SEQ ID NO: 3418866 - RNA, 22 nt, Human
aaguaauuaucgggaacagugu

SEQ ID NO: 3418867 - RNA, 13 nt, Human
aaguaauuucagu

SEQ ID NO: 3418868 - RNA, 22 nt, Human
aaguaauuucuucucaaagggu

SEQ ID NO: 3418869 - RNA, 20 nt, Human
aaguacacuguuucaaacuu

SEQ ID NO: 3418870 - RNA, 23 nt, Human
aaguacacuguuucaaacuuuac

SEQ ID NO: 3418871 - RNA, 14 nt, Human
aaguacagaauuug

SEQ ID NO: 3418872 - RNA, 11 nt, Human
aaguacagaga

SEQ ID NO: 3418873 - RNA, 13 nt, Human
aaguacagagaag

SEQ ID NO: 3418874 - RNA, 15 nt, Human
aaguacagagaagcc

SEQ ID NO: 3418875 - RNA, 22 nt, Human
aaguacagagaagccaucaccu

SEQ ID NO: 3418876 - RNA, 18 nt, Human
aaguacauuauuguuuau

SEQ ID NO: 3418877 - RNA, 12 nt, Human
aaguacauuuaa

SEQ ID NO: 3418878 - RNA, 21 nt, Human
aaguacauuuuuugaaaugcu

SEQ ID NO: 3418879 - RNA, 16 nt, Human
aaguacguuauuguug

SEQ ID NO: 3418880 - RNA, 18 nt, Human
aaguacuacacauuuuua

SEQ ID NO: 3418881 - RNA, 19 nt, Human
aauucccuggccuuucaua

SEQ ID NO: 3418882 - RNA, 13 nt, Human
aauuccuacagca

SEQ ID NO: 3418883 - RNA, 19 nt, Human
aauuccuacagcacuacug

SEQ ID NO: 3418884 - RNA, 14 nt, Human
aauuccuagaauua

SEQ ID NO: 3418885 - RNA, 17 nt, Human
aauuccuagaauuaaac

SEQ ID NO: 3418886 - RNA, 15 nt, Human
aauuccuauaaggaa

SEQ ID NO: 3418887 - RNA, 12 nt, Human
aauuccuauugu

SEQ ID NO: 3418888 - RNA, 19 nt, Human
aauuccuauugugauuuga

SEQ ID NO: 3418889 - RNA, 22 nt, Human
aauuccucauccucagaugcuc

SEQ ID NO: 3418890 - RNA, 13 nt, Human
aauuccucuggga

SEQ ID NO: 3418891 - RNA, 13 nt, Human
aauuccuguuuuu

SEQ ID NO: 3418892 - RNA, 19 nt, Human
aauuccuguuuuuauuauu

SEQ ID NO: 3418893 - RNA, 16 nt, Human
aauuccuucaggguga

SEQ ID NO: 3418894 - RNA, 23 nt, Human
aauuccuucagggugaugccagg

SEQ ID NO: 3418895 - RNA, 19 nt, Human
aauuccuuuucuaacucuc

SEQ ID NO: 3418896 - RNA, 15 nt, Human
aauucgaaccaggaa

SEQ ID NO: 3418897 - RNA, 14 nt, Human
aauucgaccugauu

SEQ ID NO: 3418898 - RNA, 15 nt, Human
aauucgcccgagcug

SEQ ID NO: 3418899 - RNA, 14 nt, Human
aauucuaaaaugau

SEQ ID NO: 3418900 - RNA, 13 nt, Human
aauucuaaaugua

SEQ ID NO: 3418901 - RNA, 22 nt, Human
aauucuaaccagagcaagcuuu

SEQ ID NO: 3418902 - RNA, 14 nt, Human
aauucuacuuugag

SEQ ID NO: 3418903 - RNA, 16 nt, Human
aauucuagugcugcug

SEQ ID NO: 3418904 - RNA, 19 nt, Human
aauuguauuuuuguuguug

SEQ ID NO: 3418905 - RNA, 11 nt, Human
aauugucaugg

SEQ ID NO: 3418906 - RNA, 23 nt, Human
aauugucaugguuacaaacuaca

SEQ ID NO: 3418907 - RNA, 13 nt, Human
aauuguccccagu

SEQ ID NO: 3418908 - RNA, 16 nt, Human
aauugucccuuaaaca

SEQ ID NO: 3418909 - RNA, 18 nt, Human
aauugucccuuaaacaaa

SEQ ID NO: 3418910 - RNA, 14 nt, Human
aauugucuauuuau

SEQ ID NO: 3418911 - RNA, 21 nt, Human
aauugucuauuuaucuuuuau

SEQ ID NO: 3418912 - RNA, 16 nt, Human
aauugucuucauguac

SEQ ID NO: 3418913 - RNA, 19 nt, Human
aauugucuuuggugcuuuu

SEQ ID NO: 3418914 - RNA, 15 nt, Human
aauugugaugugucc

SEQ ID NO: 3418915 - RNA, 21 nt, Human
aauugugcaguacuuugugca

SEQ ID NO: 3418916 - RNA, 18 nt, Human
aauuguggcuauccugau

SEQ ID NO: 3418917 - RNA, 21 nt, Human
aauuguguagccuuuuuguau

SEQ ID NO: 3418918 - RNA, 13 nt, Human
aauugugucugca

SEQ ID NO: 3418919 - RNA, 15 nt, Human
aauugugugaacuug

SEQ ID NO: 3418920 - RNA, 15 nt, Human
aauuguguggauucu

SEQ ID NO: 3418921 - RNA, 21 nt, Human
aauugugugugcucugcuuca

SEQ ID NO: 3418922 - RNA, 16 nt, Human
aauuguuacaaauugu

SEQ ID NO: 3418923 - RNA, 16 nt, Human
aauuguuacuccauau

SEQ ID NO: 3418924 - RNA, 16 nt, Human
aauuguugaaauuuug

SEQ ID NO: 3418925 - RNA, 22 nt, Human
aauuguugaacagguguuuuuc

SEQ ID NO: 3418926 - RNA, 13 nt, Human
aauuguuguucug

SEQ ID NO: 3418927 - RNA, 16 nt, Human
aauuguuguucuguua

SEQ ID NO: 3418928 - RNA, 18 nt, Human
aauuguuguuucuuucua

SEQ ID NO: 3418929 - RNA, 15 nt, Human
aauuguuuaaguguu

SEQ ID NO: 3418930 - RNA, 17 nt, Human
aauuguuuggcuuccuc

SEQ ID NO: 3418931 - RNA, 20 nt, Human
aauuguuuggcuuccuccug

SEQ ID NO: 3418932 - RNA, 22 nt, Human
aauuguuuuaucugaauuuuua

SEQ ID NO: 3418933 - RNA, 16 nt, Human
aauuguuuugcacuuu

SEQ ID NO: 3418934 - RNA, 17 nt, Human
aauuguuuugcacuuuu

SEQ ID NO: 3418935 - RNA, 20 nt, Human
aauuguuuugcacuuuuuua

SEQ ID NO: 3418936 - RNA, 14 nt, Human
aauuguuuuuuauc

SEQ ID NO: 3418937 - RNA, 19 nt, Human
aauuguuuuuuaucuuuuc

SEQ ID NO: 3418938 - RNA, 22 nt, Human
aauuguuuuuuaucuuuucuac

SEQ ID NO: 3418939 - RNA, 14 nt, Human
aauuuaaaaaauaa

SEQ ID NO: 3418940 - RNA, 17 nt, Human
aauuuaaaaauauauuu

SEQ ID NO: 3418941 - RNA, 16 nt, Human
aauuuaaaacaaacaa

SEQ ID NO: 3418942 - RNA, 15 nt, Human
aauuuaaaaguaaaa

SEQ ID NO: 3418943 - RNA, 13 nt, Human
aauuuaaaagucu

SEQ ID NO: 3418944 - RNA, 10 nt, Human
aauuuaaaca

SEQ ID NO: 3418945 - RNA, 11 nt, Human
aauuuaaacag

SEQ ID NO: 3418946 - RNA, 19 nt, Human
aauuuaaacaggcccagca

SEQ ID NO: 3418947 - RNA, 20 nt, Human
aauuuaaagaaaaaaauguc

SEQ ID NO: 3418948 - RNA, 12 nt, Human
aauuuaaagaua

SEQ ID NO: 3418949 - RNA, 12 nt, Human
aauuuaaagcag

SEQ ID NO: 3418950 - RNA, 22 nt, Human
aauuuaaagcagguucuuguug

SEQ ID NO: 3418951 - RNA, 12 nt, Human
aauuuaaaggcu

SEQ ID NO: 3418952 - RNA, 19 nt, Human
aauuuaaaggguguacuua

SEQ ID NO: 3418953 - RNA, 12 nt, Human
aauuuaaaugaa

SEQ ID NO: 3418954 - RNA, 22 nt, Human
aauuuaaaugaaagaaaauuga

SEQ ID NO: 3418955 - RNA, 17 nt, Human
aauuuaaauuuaaagau

SEQ ID NO: 3418956 - RNA, 18 nt, Human
aauuuaaauuuaaagaua

SEQ ID NO: 3418957 - RNA, 13 nt, Human
aauuuaacaaugc

SEQ ID NO: 3418958 - RNA, 16 nt, Human
aauuuaacaaugcgaa

SEQ ID NO: 3418959 - RNA, 17 nt, Human
aauuuaacaaugcgaau

SEQ ID NO: 3418960 - RNA, 21 nt, Human
aauuuaacuacccuuaauuac

SEQ ID NO: 3418961 - RNA, 11 nt, Human
aauuuaagcau

SEQ ID NO: 3418962 - RNA, 16 nt, Human
aauuuaagcauuguuu

SEQ ID NO: 3418963 - RNA, 21 nt, Human
aauuuaaggucuguuugcugu

SEQ ID NO: 3418964 - RNA, 18 nt, Human
aauuuaaguguuggaaaa

SEQ ID NO: 3418965 - RNA, 17 nt, Human
aauuuaaguuuugacaa

SEQ ID NO: 3418966 - RNA, 23 nt, Human
aauuuaaguuuugacaagcuggc

SEQ ID NO: 3418967 - RNA, 17 nt, Human
aauuuaauaacuuuuua

SEQ ID NO: 3418968 - RNA, 14 nt, Human
aauuuaauauagcu

SEQ ID NO: 3418969 - RNA, 14 nt, Human
aauuuaaugcugcc

SEQ ID NO: 3418970 - RNA, 17 nt, Human
aauuuaaugcugccuuu

SEQ ID NO: 3418971 - RNA, 19 nt, Human
aauuuaauucauguuucuu

SEQ ID NO: 3418972 - RNA, 23 nt, Human
aauuuaauucauguuucuuaaau

SEQ ID NO: 3418973 - RNA, 21 nt, Human
aauuuacaaaaauauaaaaua

SEQ ID NO: 3418974 - RNA, 17 nt, Human
aauuuacaaagugugua

SEQ ID NO: 3418975 - RNA, 15 nt, Human
aauuuacacugccau

SEQ ID NO: 3418976 - RNA, 16 nt, Human
aauuuacaucauuucu

SEQ ID NO: 3418977 - RNA, 22 nt, Human
aauuuacccucuugaauauaau

SEQ ID NO: 3418978 - RNA, 16 nt, Human
aauuuaccuaagauua

SEQ ID NO: 3418979 - RNA, 17 nt, Human
aauuuaccuaagauuac

SEQ ID NO: 3418980 - RNA, 21 nt, Human
aauuuaccuaagauuacaaau

SEQ ID NO: 3418981 - RNA, 17 nt, Human
aauuuaccugaagucuu

SEQ ID NO: 3418982 - RNA, 16 nt, Human
aauuuaccugauuucu

SEQ ID NO: 3418983 - RNA, 12 nt, Human
aauuuacuauau

SEQ ID NO: 3418984 - RNA, 19 nt, Human
aauuuacuauauauauaug

SEQ ID NO: 3418985 - RNA, 14 nt, Human
aauuuacugugacu

SEQ ID NO: 3418986 - RNA, 15 nt, Human
aauuuacuuuggaaa

SEQ ID NO: 3418987 - RNA, 16 nt, Human
aauuuagaaaaagaac

SEQ ID NO: 3418988 - RNA, 16 nt, Human
aauuuagaaaacuuua

SEQ ID NO: 3418989 - RNA, 15 nt, Human
aauuuagaaaucauu

SEQ ID NO: 3418990 - RNA, 16 nt, Human
aauuuagcauuguagu

SEQ ID NO: 3418991 - RNA, 17 nt, Human
aauuuaggguacuaaau

SEQ ID NO: 3418992 - RNA, 15 nt, Human
aauuuaguaaauguu

SEQ ID NO: 3418993 - RNA, 14 nt, Human
aauuuaguuucaua

SEQ ID NO: 3418994 - RNA, 20 nt, Human
aauuuaguuuuuguucuuaa

SEQ ID NO: 3418995 - RNA, 14 nt, Human
aauuuauaaaauua

SEQ ID NO: 3418996 - RNA, 21 nt, Human
aauuuauaaaauuagaaagca

SEQ ID NO: 3418997 - RNA, 22 nt, Human
aauuuauaaacuuuuuucuuac

SEQ ID NO: 3418998 - RNA, 12 nt, Human
aauuuauaauuc

SEQ ID NO: 3418999 - RNA, 17 nt, Human
aauuuauaauucaguau

SEQ ID NO: 3419000 - RNA, 12 nt, Human
aauuuauaauuu

SEQ ID NO: 3419001 - RNA, 15 nt, Human
aauuuauaauuuuaa

SEQ ID NO: 3419002 - RNA, 17 nt, Human
aauuuauacaggucaua

SEQ ID NO: 3419003 - RNA, 18 nt, Human
aauuuauaguaaugaguu

SEQ ID NO: 3419004 - RNA, 16 nt, Human
aauuuauaguuuauac

SEQ ID NO: 3419005 - RNA, 17 nt, Human
aauuuauaguuuauaca

SEQ ID NO: 3419006 - RNA, 14 nt, Human
aauuuauaugaaaa

SEQ ID NO: 3419007 - RNA, 16 nt, Human
aauuuauauguauauu

SEQ ID NO: 3419008 - RNA, 14 nt, Human
aauuuaucaaagca

SEQ ID NO: 3419009 - RNA, 16 nt, Human
aauuuaucaaagcaua

SEQ ID NO: 3419010 - RNA, 12 nt, Human
aauuuaucuaaa

SEQ ID NO: 3419011 - RNA, 13 nt, Human
aauuuaucuuuga

SEQ ID NO: 3419012 - RNA, 20 nt, Human
aauuuaugaguuuuugauag

SEQ ID NO: 3419013 - RNA, 19 nt, Human
aauuuaugcacuuauaagg

SEQ ID NO: 3419014 - RNA, 19 nt, Human
aauuuauuaauugcuuuga

SEQ ID NO: 3419015 - RNA, 18 nt, Human
aauuuauuaguuaauaua

SEQ ID NO: 3419016 - RNA, 17 nt, Human
aauuuauuauggcacau

SEQ ID NO: 3419017 - RNA, 13 nt, Human
aauuuauuauuaa

SEQ ID NO: 3419018 - RNA, 16 nt, Human
aauuuauuauugaaau

SEQ ID NO: 3419019 - RNA, 23 nt, Human
aauuuauugaggaaaaauaugug

SEQ ID NO: 3419020 - RNA, 16 nt, Human
aauuuauuuauuaaga

SEQ ID NO: 3419021 - RNA, 23 nt, Human
aauuuauuuccaauguuucaagc

SEQ ID NO: 3419022 - RNA, 16 nt, Human
aauuuauuuccuaguu

SEQ ID NO: 3419023 - RNA, 18 nt, Human
aauuuauuuuauaagaaa

SEQ ID NO: 3419024 - RNA, 21 nt, Human
aauuuauuuuauaagaaaaac

SEQ ID NO: 3419025 - RNA, 23 nt, Human
aauuuauuuuauaagaaaaacuu

SEQ ID NO: 3419026 - RNA, 20 nt, Human
aauuuauuuuauuuuagcag

SEQ ID NO: 3419027 - RNA, 19 nt, Human
aauuuauuuuuaagaaaga

SEQ ID NO: 3419028 - RNA, 16 nt, Human
aauuucaaaaauauaa

SEQ ID NO: 3419029 - RNA, 17 nt, Human
aauuucaaaaauauaac

SEQ ID NO: 3419030 - RNA, 17 nt, Human
aauuucaagcuuauuuu

SEQ ID NO: 3419031 - RNA, 22 nt, Human
aauuucaagcuuauuuuggaga

SEQ ID NO: 3419032 - RNA, 17 nt, Human
aauuucaagguucuaac

SEQ ID NO: 3419033 - RNA, 14 nt, Human
aauuucacauuaau

SEQ ID NO: 3419034 - RNA, 16 nt, Human
aauuucaccuguaaac

SEQ ID NO: 3419035 - RNA, 22 nt, Human
aauuucacuacuagauugacua

SEQ ID NO: 3419036 - RNA, 16 nt, Human
aauuucacuuauaccu

SEQ ID NO: 3419037 - RNA, 13 nt, Human
aauuucagacucc

SEQ ID NO: 3419038 - RNA, 19 nt, Human
aauuucaggcuccccagau

SEQ ID NO: 3419039 - RNA, 17 nt, Human
aauuucagguuguuggu

SEQ ID NO: 3419040 - RNA, 16 nt, Human
aauuucaguaagauca

SEQ ID NO: 3419041 - RNA, 13 nt, Human
aauuucaguguaa

SEQ ID NO: 3419042 - RNA, 19 nt, Human
aauuucaguguaaagugug

SEQ ID NO: 3419043 - RNA, 13 nt, Human
aaguacuauguau

SEQ ID NO: 3419044 - RNA, 15 nt, Human
aaguacuauguauca

SEQ ID NO: 3419045 - RNA, 14 nt, Human
aaguacucuggagc

SEQ ID NO: 3419046 - RNA, 23 nt, Human
aaguacugagcagugauauucuu

SEQ ID NO: 3419047 - RNA, 23 nt, Human
aaguacugcuguaaauaaaugcu

SEQ ID NO: 3419048 - RNA, 15 nt, Human
aaguacuggagaaaa

SEQ ID NO: 3419049 - RNA, 20 nt, Human
aaguacugguaagauuguua

SEQ ID NO: 3419050 - RNA, 17 nt, Human
acaaggaaggugguggg

SEQ ID NO: 3419051 - RNA, 16 nt, Human
acaaggauagaugcug

SEQ ID NO: 3419052 - RNA, 17 nt, Human
acaaggauagaugcugg

SEQ ID NO: 3419053 - RNA, 18 nt, Human
acaaggauagaugcuggc

SEQ ID NO: 3419054 - RNA, 20 nt, Human
acaaggaugaucuaggaaga

SEQ ID NO: 3419055 - RNA, 13 nt, Human
acaaggauugaaa

SEQ ID NO: 3419056 - RNA, 15 nt, Human
acaaggauugaaaau

SEQ ID NO: 3419057 - RNA, 17 nt, Human
acaaggcaaaaacaaag

SEQ ID NO: 3419058 - RNA, 17 nt, Human
acaaggcaaggcuguca

SEQ ID NO: 3419059 - RNA, 19 nt, Human
acaaggcaaggcugucaau

SEQ ID NO: 3419060 - RNA, 15 nt, Human
acaaggcagcaaggc

SEQ ID NO: 3419061 - RNA, 21 nt, Human
acaaggcagcaaggcccgagc

SEQ ID NO: 3419062 - RNA, 13 nt, Human
acaaggccccaga

SEQ ID NO: 3419063 - RNA, 17 nt, Human
acaaggcuugcugcaga

SEQ ID NO: 3419064 - RNA, 23 nt, Human
acaagggaaaauaaaaaaagaaa

SEQ ID NO: 3419065 - RNA, 21 nt, Human
acaagggcugaccugccucuc

SEQ ID NO: 3419066 - RNA, 22 nt, Human
acaaggggcccuuggagcgugg

SEQ ID NO: 3419067 - RNA, 18 nt, Human
acaagggucuagggagag

SEQ ID NO: 3419068 - RNA, 19 nt, Human
acaagggucuagggagaga

SEQ ID NO: 3419069 - RNA, 20 nt, Human
acaagggucuagggagagac

SEQ ID NO: 3419070 - RNA, 18 nt, Human
acaaggguggcaucccag

SEQ ID NO: 3419071 - RNA, 22 nt, Human
acaagguagcccuggccagagg

SEQ ID NO: 3419072 - RNA, 14 nt, Human
acaagguaguuuuu

SEQ ID NO: 3419073 - RNA, 16 nt, Human
acaagguaguuuuuac

SEQ ID NO: 3419074 - RNA, 18 nt, Human
acaagguauaauaaaauu

SEQ ID NO: 3419075 - RNA, 15 nt, Human
acaaggucauggcca

SEQ ID NO: 3419076 - RNA, 23 nt, Human
acaaggucauggccacacuguga

SEQ ID NO: 3419077 - RNA, 20 nt, Human
acaagguucccucugagaau

SEQ ID NO: 3419078 - RNA, 22 nt, Human
acaagguucuucccuuuuacau

SEQ ID NO: 3419079 - RNA, 16 nt, Human
acaaguaaaacugugg

SEQ ID NO: 3419080 - RNA, 13 nt, Human
acaaguaacaaaa

SEQ ID NO: 3419081 - RNA, 15 nt, Human
acaaguaagagacuc

SEQ ID NO: 3419082 - RNA, 22 nt, Human
acaaguaccaaaguuuuaucaa

SEQ ID NO: 3419083 - RNA, 16 nt, Human
acaaguaguucuguau

SEQ ID NO: 3419084 - RNA, 17 nt, Human
acaaguaguucuguauu

SEQ ID NO: 3419085 - RNA, 21 nt, Human
acaaguaugaauaaagacacc

SEQ ID NO: 3419086 - RNA, 20 nt, Human
acaaguauuuguuaauuuag

SEQ ID NO: 3419087 - RNA, 20 nt, Human
acaagucagucauucagaua

SEQ ID NO: 3419088 - RNA, 23 nt, Human
acaagucauagguuaauauuuaa

SEQ ID NO: 3419089 - RNA, 21 nt, Human
acaagucauuuuaacuuuauc

SEQ ID NO: 3419090 - RNA, 16 nt, Human
acaaguccugugaauu

SEQ ID NO: 3419091 - RNA, 17 nt, Human
acaaguccugugaauuu

SEQ ID NO: 3419092 - RNA, 19 nt, Human
acaaguccugugaauuucu

SEQ ID NO: 3419093 - RNA, 13 nt, Human
acaagucuuccag

SEQ ID NO: 3419094 - RNA, 18 nt, Human
acaagugaaaaacaucca

SEQ ID NO: 3419095 - RNA, 16 nt, Human
aaguuguacaugaaau

SEQ ID NO: 3419096 - RNA, 21 nt, Human
aaguuguacuccaauggcuga

SEQ ID NO: 3419097 - RNA, 15 nt, Human
aaguuguacuuuaaa

SEQ ID NO: 3419098 - RNA, 18 nt, Human
aaguuguacuuuaaaaau

SEQ ID NO: 3419099 - RNA, 16 nt, Human
aaguuguagcagauug

SEQ ID NO: 3419100 - RNA, 16 nt, Human
aaguuguggauuucag

SEQ ID NO: 3419101 - RNA, 20 nt, Human
aaguuguggugcugacaaag

SEQ ID NO: 3419102 - RNA, 15 nt, Human
aaguuguuaauaaaa

SEQ ID NO: 3419103 - RNA, 21 nt, Human
aaguuguuacuaacuaaacuc

SEQ ID NO: 3419104 - RNA, 18 nt, Human
aaguuguuguaaccugcu

SEQ ID NO: 3419105 - RNA, 22 nt, Human
aaguuguuugagaaauuaagua

SEQ ID NO: 3419106 - RNA, 18 nt, Human
aaguuuaaaacaguauuu

SEQ ID NO: 3419107 - RNA, 14 nt, Human
aaguuuaaggaaua

SEQ ID NO: 3419108 - RNA, 15 nt, Human
aaguuuaaggaauau

SEQ ID NO: 3419109 - RNA, 14 nt, Human
aaguuuaauaaauu

SEQ ID NO: 3419110 - RNA, 18 nt, Human
aaguuuacaaucaaagga

SEQ ID NO: 3419111 - RNA, 19 nt, Human
aaguuuacaaucaaaggaa

SEQ ID NO: 3419112 - RNA, 21 nt, Human
aaguuuacaguaaauaaauug

SEQ ID NO: 3419113 - RNA, 22 nt, Human
aaguuuacaguaaauaaauugu

SEQ ID NO: 3419114 - RNA, 16 nt, Human
aaguuuaccagaaagc

SEQ ID NO: 3419115 - RNA, 14 nt, Human
aaguuuaccaucug

SEQ ID NO: 3419116 - RNA, 23 nt, Human
aaguuuagccccugaaagccaug

SEQ ID NO: 3419117 - RNA, 16 nt, Human
aaguuuagcucugaga

SEQ ID NO: 3419118 - RNA, 22 nt, Human
aaguuuaguuugaggaauucuu

SEQ ID NO: 3419119 - RNA, 15 nt, Human
aaguuuauacaguac

SEQ ID NO: 3419120 - RNA, 16 nt, Human
aaguuucaaaaaucug

SEQ ID NO: 3419121 - RNA, 19 nt, Human
aaguuucaaguuuuaaagu

SEQ ID NO: 3419122 - RNA, 20 nt, Human
aaguuucaaguuuuaaaguu

SEQ ID NO: 3419123 - RNA, 14 nt, Human
aaguuucaggugac

SEQ ID NO: 3419124 - RNA, 16 nt, Human
aaguuucaggugacau

SEQ ID NO: 3419125 - RNA, 17 nt, Human
aaguuucaggugacaug

SEQ ID NO: 3419126 - RNA, 16 nt, Human
aaguuucaguugauuu

SEQ ID NO: 3419127 - RNA, 23 nt, Human
aaguuucauucucccuuucacua

SEQ ID NO: 3419128 - RNA, 20 nt, Human
aaguuuccaagcaaauguua

SEQ ID NO: 3419129 - RNA, 22 nt, Human
aaguuuccaagcaaauguuaca

SEQ ID NO: 3419130 - RNA, 20 nt, Human
aaguuuccauagcaacagga

SEQ ID NO: 3419131 - RNA, 16 nt, Human
aaguuuccaucaucua

SEQ ID NO: 3419132 - RNA, 16 nt, Human
aaguuuccuuggcugg

SEQ ID NO: 3419133 - RNA, 18 nt, Human
aaguuuccuuggcuggug

SEQ ID NO: 3419134 - RNA, 13 nt, Human
aaguuucuaagau

SEQ ID NO: 3419135 - RNA, 15 nt, Human
aaguuucuaagauuc

SEQ ID NO: 3419136 - RNA, 19 nt, Human
aaguuucuaagauucuaaa

SEQ ID NO: 3419137 - RNA, 17 nt, Human
aaguuucucagcuccca

SEQ ID NO: 3419138 - RNA, 15 nt, Human
aaguuucucugcaga

SEQ ID NO: 3419139 - RNA, 20 nt, Human
aaguuugaaaagcaauauug

SEQ ID NO: 3419140 - RNA, 16 nt, Human
aaguuugaauguuaaa

SEQ ID NO: 3419141 - RNA, 21 nt, Human
aaguuugaauuccuaaaauua

SEQ ID NO: 3419142 - RNA, 21 nt, Human
aaguuugauaaauaguguuau

SEQ ID NO: 3419143 - RNA, 23 nt, Human
aaguuugaucuuccucugcuaaa

SEQ ID NO: 3419144 - RNA, 16 nt, Human
aaguuugauuucauua

SEQ ID NO: 3419145 - RNA, 20 nt, Human
aaguuugcacuaucuuucag

SEQ ID NO: 3419146 - RNA, 20 nt, Human
aaguuugccuuuguaccaua

SEQ ID NO: 3419147 - RNA, 16 nt, Human
aaguuugcuuagaaaa

SEQ ID NO: 3419148 - RNA, 15 nt, Human
aaguuugcuuguuuc

SEQ ID NO: 3419149 - RNA, 16 nt, Human
aaguuugcuuguuucu

SEQ ID NO: 3419150 - RNA, 15 nt, Human
aaguuuguguucugu

SEQ ID NO: 3419151 - RNA, 19 nt, Human
aaguuuguguucuguuugu

SEQ ID NO: 3419152 - RNA, 19 nt, Human
aaguuuuaaaaagccaguu

SEQ ID NO: 3419153 - RNA, 23 nt, Human
aaguuuuauauauuauauggaaa

SEQ ID NO: 3419154 - RNA, 13 nt, Human
aaguuuuaucaag

SEQ ID NO: 3419155 - RNA, 15 nt, Human
aaguuuugaaaagcu

SEQ ID NO: 3419156 - RNA, 15 nt, Human
aaguuuugacaagcu

SEQ ID NO: 3419157 - RNA, 19 nt, Human
aaguuuugacaagcuggcu

SEQ ID NO: 3419158 - RNA, 13 nt, Human
aaguuuugagaaa

SEQ ID NO: 3419159 - RNA, 20 nt, Human
aaguuuugaguagauauuac

SEQ ID NO: 3419160 - RNA, 13 nt, Human
aaguuuuguaaaa

SEQ ID NO: 3419161 - RNA, 15 nt, Human
aaguuuuguaaauuu

SEQ ID NO: 3419162 - RNA, 16 nt, Human
aaguuuugugaaauuu

SEQ ID NO: 3419163 - RNA, 20 nt, Human
aaguuuugugaaauuuuuca

SEQ ID NO: 3419164 - RNA, 22 nt, Human
aaguuuuguucuguccuggaau

SEQ ID NO: 3419165 - RNA, 22 nt, Human
aaguuuuguuguacuuaaaugg

SEQ ID NO: 3419166 - RNA, 13 nt, Human
aaguuuuuguacu

SEQ ID NO: 3419167 - RNA, 15 nt, Human
aaguuuuuguuugga

SEQ ID NO: 3419168 - RNA, 20 nt, Human
aauaaaaaaaagaaaugaaa

SEQ ID NO: 3419169 - RNA, 15 nt, Human
aauaaaaaagucucu

SEQ ID NO: 3419170 - RNA, 23 nt, Human
aauaaaaacauugccuuugaaug

SEQ ID NO: 3419171 - RNA, 22 nt, Human
aauaaaaaccaagaagaugucu

SEQ ID NO: 3419172 - RNA, 21 nt, Human
aauaaaaacccacaaaaaugu

SEQ ID NO: 3419173 - RNA, 21 nt, Human
aauaaaaacugacuccuuaga

SEQ ID NO: 3419174 - RNA, 17 nt, Human
aauaaaaagaucacuuu

SEQ ID NO: 3419175 - RNA, 11 nt, Human
aauaaaaaggc

SEQ ID NO: 3419176 - RNA, 18 nt, Human
aauaaaaaggcaccuaua

SEQ ID NO: 3419177 - RNA, 19 nt, Human
aauaaaaagugacacagca

SEQ ID NO: 3419178 - RNA, 20 nt, Human
aauaaaaagugacacagcag

SEQ ID NO: 3419179 - RNA, 13 nt, Human
aauaaaaaguuaa

SEQ ID NO: 3419180 - RNA, 14 nt, Human
aauaaaaaguuaaa

SEQ ID NO: 3419181 - RNA, 11 nt, Human
aauaaaaauau

SEQ ID NO: 3419182 - RNA, 15 nt, Human
aauaaaaauauauuu

SEQ ID NO: 3419183 - RNA, 20 nt, Human
aauaaaaauauauuuucaac

SEQ ID NO: 3419184 - RNA, 13 nt, Human
aauaaaaauucua

SEQ ID NO: 3419185 - RNA, 16 nt, Human
aauaaaaauucuagau

SEQ ID NO: 3419186 - RNA, 12 nt, Human
aauaaaacauuu

SEQ ID NO: 3419187 - RNA, 13 nt, Human
aauaaaacauuuu

SEQ ID NO: 3419188 - RNA, 13 nt, Human
aauaaaaccuuuc

SEQ ID NO: 3419189 - RNA, 14 nt, Human
aauaaaaccuuuca

SEQ ID NO: 3419190 - RNA, 22 nt, Human
aauaaaaccuuucaaauuucac

SEQ ID NO: 3419191 - RNA, 15 nt, Human
aauaaaacuuuuuaa

SEQ ID NO: 3419192 - RNA, 13 nt, Human
aauaaaagaaaau

SEQ ID NO: 3419193 - RNA, 18 nt, Human
aauaaaagcagcaucugc

SEQ ID NO: 3419194 - RNA, 17 nt, Human
aauuaauuggcagcaga

SEQ ID NO: 3419195 - RNA, 13 nt, Human
aauuaauugugug

SEQ ID NO: 3419196 - RNA, 13 nt, Human
aauuaauuucagu

SEQ ID NO: 3419197 - RNA, 13 nt, Human
aauuaauuugauu

SEQ ID NO: 3419198 - RNA, 22 nt, Human
aauuaauuugauuaacaaauau

SEQ ID NO: 3419199 - RNA, 13 nt, Human
aauuaauuuuacu

SEQ ID NO: 3419200 - RNA, 21 nt, Human
aauuaauuuuuuuauuguuua

SEQ ID NO: 3419201 - RNA, 22 nt, Human
aauuaauuuuuuuauuguuuaa

SEQ ID NO: 3419202 - RNA, 14 nt, Human
aauuacaauuguca

SEQ ID NO: 3419203 - RNA, 14 nt, Human
aauuacacccaaag

SEQ ID NO: 3419204 - RNA, 22 nt, Human
aauuacagaaauuuaauucaga

SEQ ID NO: 3419205 - RNA, 17 nt, Human
aauuacaggaaguacug

SEQ ID NO: 3419206 - RNA, 19 nt, Human
aauuacaggaaguacugga

SEQ ID NO: 3419207 - RNA, 19 nt, Human
aauuacagugccuaaaaua

SEQ ID NO: 3419208 - RNA, 14 nt, Human
aauuacauaauuuu

SEQ ID NO: 3419209 - RNA, 19 nt, Human
aauuacauuacugaaaacu

SEQ ID NO: 3419210 - RNA, 22 nt, Human
aauuacauuacugaaaacuuca

SEQ ID NO: 3419211 - RNA, 12 nt, Human
aauuacauuugu

SEQ ID NO: 3419212 - RNA, 15 nt, Human
aauuacauuuguaau

SEQ ID NO: 3419213 - RNA, 21 nt, Human
aauuaccacaccaucucccau

SEQ ID NO: 3419214 - RNA, 20 nt, Human
aauuaccaguaaaguguaac

SEQ ID NO: 3419215 - RNA, 21 nt, Human
aauuaccaugcuucacaaugu

SEQ ID NO: 3419216 - RNA, 18 nt, Human
aauuaccauuuguuaaua

SEQ ID NO: 3419217 - RNA, 14 nt, Human
aauuaccuguggau

SEQ ID NO: 3419218 - RNA, 21 nt, Human
aauuaccuuagauuagcucug

SEQ ID NO: 3419219 - RNA, 14 nt, Human
aauuaccuucuauu

SEQ ID NO: 3419220 - RNA, 17 nt, Human
aauuacgauaaggaaga

SEQ ID NO: 3419221 - RNA, 18 nt, Human
aauuacgauaaggaagaa

SEQ ID NO: 3419222 - RNA, 18 nt, Human
aauuacuaacuucuaaaa

SEQ ID NO: 3419223 - RNA, 19 nt, Human
aauuacucagcagaauggu

SEQ ID NO: 3419224 - RNA, 14 nt, Human
aauuacugguccaa

SEQ ID NO: 3419225 - RNA, 20 nt, Human
aauuacuuacguauguuugu

SEQ ID NO: 3419226 - RNA, 21 nt, Human
aauuacuuaucccugcccauu

SEQ ID NO: 3419227 - RNA, 22 nt, Human
aauuacuuuggggcuaauuuaa

SEQ ID NO: 3419228 - RNA, 13 nt, Human
aauuagaagacau

SEQ ID NO: 3419229 - RNA, 23 nt, Human
aauuagacugugauucagaaaau

SEQ ID NO: 3419230 - RNA, 14 nt, Human
aauuagagaaauau

SEQ ID NO: 3419231 - RNA, 17 nt, Human
aauuagauccauuaauu

SEQ ID NO: 3419232 - RNA, 21 nt, Human
aauuagauccauuaauuuaaa

SEQ ID NO: 3419233 - RNA, 23 nt, Human
aauuagauccauuaauuuaaaug

SEQ ID NO: 3419234 - RNA, 22 nt, Human
aauuagaugcauguugaccaug

SEQ ID NO: 3419235 - RNA, 13 nt, Human
aauuagauuuuaa

SEQ ID NO: 3419236 - RNA, 12 nt, Human
aauuagcaauug

SEQ ID NO: 3419237 - RNA, 12 nt, Human
aauuagccagua

SEQ ID NO: 3419238 - RNA, 18 nt, Human
aauuagccaguaauccug

SEQ ID NO: 3419239 - RNA, 14 nt, Human
aauuagccgggcgu

SEQ ID NO: 3419240 - RNA, 14 nt, Human
aauuagcugcuucu

SEQ ID NO: 3419241 - RNA, 22 nt, Human
aauuagcuuuuucauccccuua

SEQ ID NO: 3419242 - RNA, 13 nt, Human
aauuaggaaaaaa

SEQ ID NO: 3419243 - RNA, 17 nt, Human
aauuaggaagugauuau

SEQ ID NO: 3419244 - RNA, 20 nt, Human
aauuaggaauaaauaaaaau

SEQ ID NO: 3419245 - RNA, 21 nt, Human
aauuaggaggcucaacaauaa

SEQ ID NO: 3419246 - RNA, 15 nt, Human
aauuaggcuguaacu

SEQ ID NO: 3419247 - RNA, 16 nt, Human
aauuaggcuguaacua

SEQ ID NO: 3419248 - RNA, 21 nt, Human
aauuaggguacauuuauaauu

SEQ ID NO: 3419249 - RNA, 14 nt, Human
aauuagguuaacau

SEQ ID NO: 3419250 - RNA, 15 nt, Human
aauuagguuaacauu

SEQ ID NO: 3419251 - RNA, 18 nt, Human
aauuagguugaaacauau

SEQ ID NO: 3419252 - RNA, 17 nt, Human
aauuagguuuuguacaa

SEQ ID NO: 3419253 - RNA, 13 nt, Human
aauuaguaacauu

SEQ ID NO: 3419254 - RNA, 21 nt, Human
aauuaguaggcucauuuacug

SEQ ID NO: 3419255 - RNA, 20 nt, Human
acaagugacuguaucugugu

SEQ ID NO: 3419256 - RNA, 19 nt, Human
acaagugagacaaaaagca

SEQ ID NO: 3419257 - RNA, 22 nt, Human
acaagugaguuguugcccuggg

SEQ ID NO: 3419258 - RNA, 12 nt, Human
acaagugccacu

SEQ ID NO: 3419259 - RNA, 17 nt, Human
acaagugccgcaaauug

SEQ ID NO: 3419260 - RNA, 14 nt, Human
acaagugcugaaca

SEQ ID NO: 3419261 - RNA, 19 nt, Human
acaaguggacucagggcag

SEQ ID NO: 3419262 - RNA, 19 nt, Human
acaaguguauaucagaaaa

SEQ ID NO: 3419263 - RNA, 19 nt, Human
acaaguuaagauucuuggu

SEQ ID NO: 3419264 - RNA, 16 nt, Human
acaaguuauuuaaauc

SEQ ID NO: 3419265 - RNA, 17 nt, Human
acaaguuauuuaaaucu

SEQ ID NO: 3419266 - RNA, 22 nt, Human
acaaguucgagucaaaguugaa

SEQ ID NO: 3419267 - RNA, 17 nt, Human
acaaguugcgacggaga

SEQ ID NO: 3419268 - RNA, 22 nt, Human
acaaguuuuucugucaagaaga

SEQ ID NO: 3419269 - RNA, 20 nt, Human
acaauaaaauuuuuuuucau

SEQ ID NO: 3419270 - RNA, 22 nt, Human
acaauaaaauuuuuuuucaugu

SEQ ID NO: 3419271 - RNA, 15 nt, Human
acaauaaacccucag

SEQ ID NO: 3419272 - RNA, 20 nt, Human
acaauaaacccucagagccu

SEQ ID NO: 3419273 - RNA, 10 nt, Human
acaauaaacu

SEQ ID NO: 3419274 - RNA, 16 nt, Human
acaauaaauggcugua

SEQ ID NO: 3419275 - RNA, 13 nt, Human
acaauaaauguau

SEQ ID NO: 3419276 - RNA, 18 nt, Human
acaauaaauguauucaaa

SEQ ID NO: 3419277 - RNA, 15 nt, Human
acaauaaaugugcuu

SEQ ID NO: 3419278 - RNA, 16 nt, Human
acaauaacuacugugu

SEQ ID NO: 3419279 - RNA, 18 nt, Human
acaauaacuacuguguuc

SEQ ID NO: 3419280 - RNA, 16 nt, Human
acaauaacuccuccca

SEQ ID NO: 3419281 - RNA, 19 nt, Human
acaauaacuccucccaggg

SEQ ID NO: 3419282 - RNA, 16 nt, Human
acaauaagcaaaaaca

SEQ ID NO: 3419283 - RNA, 23 nt, Human
acaauaauauuguuguauaauuu

SEQ ID NO: 3419284 - RNA, 12 nt, Human
acaauaauuuca

SEQ ID NO: 3419285 - RNA, 12 nt, Human
acaauacaaaug

SEQ ID NO: 3419286 - RNA, 16 nt, Human
acaauacaaauggauu

SEQ ID NO: 3419287 - RNA, 13 nt, Human
acaauacaucuga

SEQ ID NO: 3419288 - RNA, 10 nt, Human
acaauaccug

SEQ ID NO: 3419289 - RNA, 14 nt, Human
acaauaccuuauuu

SEQ ID NO: 3419290 - RNA, 19 nt, Human
acaauagccgauaucagaa

SEQ ID NO: 3419291 - RNA, 19 nt, Human
acaauagcuuuacccucag

SEQ ID NO: 3419292 - RNA, 16 nt, Human
acaauagguaaagcua

SEQ ID NO: 3419293 - RNA, 19 nt, Human
acaauauaaaacuguacuu

SEQ ID NO: 3419294 - RNA, 21 nt, Human
acaauauaaccacaaagcaca

SEQ ID NO: 3419295 - RNA, 21 nt, Human
acaauauaagagcuuccaauu

SEQ ID NO: 3419296 - RNA, 15 nt, Human
acaauauauaaaaau

SEQ ID NO: 3419297 - RNA, 15 nt, Human
acaauaucauaucau

SEQ ID NO: 3419298 - RNA, 14 nt, Human
acaauaugugccaa

SEQ ID NO: 3419299 - RNA, 20 nt, Human
acaauaugugccaaucaaua

SEQ ID NO: 3419300 - RNA, 17 nt, Human
acaauauuccagaucuu

SEQ ID NO: 3419301 - RNA, 15 nt, Human
acaauauugacuuug

SEQ ID NO: 3419302 - RNA, 14 nt, Human
acaauauuuaaaau

SEQ ID NO: 3419303 - RNA, 18 nt, Human
acaauauuuaaaauuuau

SEQ ID NO: 3419304 - RNA, 15 nt, Human
acaauauuuauaaag

SEQ ID NO: 3419305 - RNA, 16 nt, Human
acaauauuuauuguau

SEQ ID NO: 3419306 - RNA, 14 nt, Human
acaauauuugugug

SEQ ID NO: 3419307 - RNA, 19 nt, Human
acaaucagccacauucuag

SEQ ID NO: 3419308 - RNA, 22 nt, Human
acaaucagcuccuuccuggaga

SEQ ID NO: 3419309 - RNA, 15 nt, Human
acaaucaguccccuc

SEQ ID NO: 3419310 - RNA, 22 nt, Human
acaaucaguccccucccaucug

SEQ ID NO: 3419311 - RNA, 17 nt, Human
acaaucaguuauacagu

SEQ ID NO: 3419312 - RNA, 13 nt, Human
acaaucauguaca

SEQ ID NO: 3419313 - RNA, 14 nt, Human
acaaucauugcuga

SEQ ID NO: 3419314 - RNA, 16 nt, Human
acaaucauuguuuuga

SEQ ID NO: 3419315 - RNA, 18 nt, Human
acaaucauuugcuuuuug

SEQ ID NO: 3419316 - RNA, 19 nt, Human
acaauccacgcuucuccgg

SEQ ID NO: 3419317 - RNA, 15 nt, Human
acaauccuagugcuu

SEQ ID NO: 3419318 - RNA, 16 nt, Human
acaauccuagugcuuu

SEQ ID NO: 3419319 - RNA, 16 nt, Human
acaaucgauggccuug

SEQ ID NO: 3419320 - RNA, 18 nt, Human
acaaucucggcucacugc

SEQ ID NO: 3419321 - RNA, 20 nt, Human
acaaucucggcucacugcau

SEQ ID NO: 3419322 - RNA, 19 nt, Human
acaaucucuuuuuguuugc

SEQ ID NO: 3419323 - RNA, 18 nt, Human
acaaucugacauucucag

SEQ ID NO: 3419324 - RNA, 18 nt, Human
acaaucuggaagaaaaaa

SEQ ID NO: 3419325 - RNA, 18 nt, Human
acaaugaaaacucuuugc

SEQ ID NO: 3419326 - RNA, 16 nt, Human
acaaugaacacuuaua

SEQ ID NO: 3419327 - RNA, 20 nt, Human
acaaugaaguugaaaaucau

SEQ ID NO: 3419328 - RNA, 23 nt, Human
acaaugaauaaaaacucaaggag

SEQ ID NO: 3419329 - RNA, 15 nt, Human
acaaugacaaagcag

SEQ ID NO: 3419330 - RNA, 20 nt, Human
acaaugacuuacuguacaug

SEQ ID NO: 3419331 - RNA, 15 nt, Human
acaaugauauaugga

SEQ ID NO: 3419332 - RNA, 21 nt, Human
acaaugaugaugauaaugaug

SEQ ID NO: 3419333 - RNA, 16 nt, Human
acaaugcaaaccauca

SEQ ID NO: 3419334 - RNA, 17 nt, Human
acaaugcaaaccaucau

SEQ ID NO: 3419335 - RNA, 18 nt, Human
acaaugcaaaccaucauu

SEQ ID NO: 3419336 - RNA, 19 nt, Human
acaaugcaaaccaucauug

SEQ ID NO: 3419337 - RNA, 19 nt, Human
acaaugcagaugccagagc

SEQ ID NO: 3419338 - RNA, 13 nt, Human
acaaugcagcaag

SEQ ID NO: 3419339 - RNA, 18 nt, Human
aauuauuauuuguguuuu

SEQ ID NO: 3419340 - RNA, 13 nt, Human
aauuauugacacu

SEQ ID NO: 3419341 - RNA, 16 nt, Human
aauuauugacacugaa

SEQ ID NO: 3419342 - RNA, 17 nt, Human
aauuauugacacugaac

SEQ ID NO: 3419343 - RNA, 14 nt, Human
aauuauugauauau

SEQ ID NO: 3419344 - RNA, 15 nt, Human
aauuauugauauaua

SEQ ID NO: 3419345 - RNA, 16 nt, Human
aauuauugaugaaaau

SEQ ID NO: 3419346 - RNA, 21 nt, Human
aauuauuguacauuuauaguu

SEQ ID NO: 3419347 - RNA, 16 nt, Human
aauuauugugauuucc

SEQ ID NO: 3419348 - RNA, 16 nt, Human
aauuauuguuuuucuu

SEQ ID NO: 3419349 - RNA, 12 nt, Human
aauuauuucaga

SEQ ID NO: 3419350 - RNA, 13 nt, Human
aauuauuucagaa

SEQ ID NO: 3419351 - RNA, 20 nt, Human
aauuauuugauuauuuaaga

SEQ ID NO: 3419352 - RNA, 15 nt, Human
aauuauuuguguaau

SEQ ID NO: 3419353 - RNA, 21 nt, Human
aauuauuuguguaauagaaaa

SEQ ID NO: 3419354 - RNA, 12 nt, Human
aauuauuuuaaa

SEQ ID NO: 3419355 - RNA, 14 nt, Human
aauuauuuuaaaca

SEQ ID NO: 3419356 - RNA, 17 nt, Human
aauuauuuuaaauuaua

SEQ ID NO: 3419357 - RNA, 21 nt, Human
aauuauuuuaaauuauaagga

SEQ ID NO: 3419358 - RNA, 22 nt, Human
aauuauuuuaaauuauaaggac

SEQ ID NO: 3419359 - RNA, 12 nt, Human
aauuauuuuaau

SEQ ID NO: 3419360 - RNA, 16 nt, Human
aauuauuuuaauuagg

SEQ ID NO: 3419361 - RNA, 18 nt, Human
aauuauuuuguucauaca

SEQ ID NO: 3419362 - RNA, 19 nt, Human
aauuauuuuguucauacau

SEQ ID NO: 3419363 - RNA, 21 nt, Human
aauuauuuuguucauacauau

SEQ ID NO: 3419364 - RNA, 16 nt, Human
aauucaaaaaguguuu

SEQ ID NO: 3419365 - RNA, 16 nt, Human
aauucaaaccuaaguu

SEQ ID NO: 3419366 - RNA, 20 nt, Human
aauucaaacuggggccucca

SEQ ID NO: 3419367 - RNA, 14 nt, Human
aauucaaagaauca

SEQ ID NO: 3419368 - RNA, 14 nt, Human
aauucaaagcucua

SEQ ID NO: 3419369 - RNA, 14 nt, Human
aauucaacccuuug

SEQ ID NO: 3419370 - RNA, 18 nt, Human
aauucaacccuuugcccc

SEQ ID NO: 3419371 - RNA, 18 nt, Human
aauucaacguuaauaauu

SEQ ID NO: 3419372 - RNA, 14 nt, Human
aauucaacuuugua

SEQ ID NO: 3419373 - RNA, 12 nt, Human
aauucaagaaaa

SEQ ID NO: 3419374 - RNA, 18 nt, Human
aauucaauaguaauauaa

SEQ ID NO: 3419375 - RNA, 13 nt, Human
aauucaauucaaa

SEQ ID NO: 3419376 - RNA, 17 nt, Human
aauucaauuuuaaagac

SEQ ID NO: 3419377 - RNA, 15 nt, Human
aauucacaaaguuaa

SEQ ID NO: 3419378 - RNA, 20 nt, Human
aauucacagugcucuuuucu

SEQ ID NO: 3419379 - RNA, 14 nt, Human
aauucaccaaagua

SEQ ID NO: 3419380 - RNA, 17 nt, Human
aauucaccacagacuuu

SEQ ID NO: 3419381 - RNA, 13 nt, Human
aauucacucccac

SEQ ID NO: 3419382 - RNA, 21 nt, Human
aauucagaaggaucuucaucu

SEQ ID NO: 3419383 - RNA, 22 nt, Human
aauucagacaucugagguuuua

SEQ ID NO: 3419384 - RNA, 20 nt, Human
aauucagauauauuuuucac

SEQ ID NO: 3419385 - RNA, 15 nt, Human
aauucagcacugauu

SEQ ID NO: 3419386 - RNA, 18 nt, Human
aauucagccauguacaga

SEQ ID NO: 3419387 - RNA, 13 nt, Human
aauucagcugccc

SEQ ID NO: 3419388 - RNA, 15 nt, Human
aauucaguuucauaa

SEQ ID NO: 3419389 - RNA, 16 nt, Human
aauucaguuucauaaa

SEQ ID NO: 3419390 - RNA, 14 nt, Human
aauucaguuuuuuu

SEQ ID NO: 3419391 - RNA, 17 nt, Human
aauucauaaucacucua

SEQ ID NO: 3419392 - RNA, 18 nt, Human
aauucauaguaagauuga

SEQ ID NO: 3419393 - RNA, 15 nt, Human
aauucauaucuauuu

SEQ ID NO: 3419394 - RNA, 11 nt, Human
aauucaugaac

SEQ ID NO: 3419395 - RNA, 22 nt, Human
aauucauggcaugcuuaaauuu

SEQ ID NO: 3419396 - RNA, 14 nt, Human
aauucauguuucuu

SEQ ID NO: 3419397 - RNA, 16 nt, Human
aauucauucauacuua

SEQ ID NO: 3419398 - RNA, 15 nt, Human
aauucauuucacauu

SEQ ID NO: 3419399 - RNA, 14 nt, Human
aauuccaaacaugg

SEQ ID NO: 3419400 - RNA, 12 nt, Human
aauuccaaaguc

SEQ ID NO: 3419401 - RNA, 20 nt, Human
aauuccaacaguuuaaugaa

SEQ ID NO: 3419402 - RNA, 14 nt, Human
aauuccacagcugc

SEQ ID NO: 3419403 - RNA, 13 nt, Human
aauuccacucaaa

SEQ ID NO: 3419404 - RNA, 21 nt, Human
aauuccacuggacuugagcuu

SEQ ID NO: 3419405 - RNA, 19 nt, Human
aauuccauaugcuguuuca

SEQ ID NO: 3419406 - RNA, 18 nt, Human
aauuccaugaaucgcuuc

SEQ ID NO: 3419407 - RNA, 16 nt, Human
aauuccaugaauguuc

SEQ ID NO: 3419408 - RNA, 21 nt, Human
aauuccauuugaggauuuaga

SEQ ID NO: 3419409 - RNA, 17 nt, Human
aauucccaacaaacauu

SEQ ID NO: 3419410 - RNA, 17 nt, Human
aauucccauuuugcaaa

SEQ ID NO: 3419411 - RNA, 21 nt, Human
aauucccauuuugcaaaauuu

SEQ ID NO: 3419412 - RNA, 21 nt, Human
aauucccguuuugucacuuuu

SEQ ID NO: 3419413 - RNA, 14 nt, Human
aauucccuaaagcc

SEQ ID NO: 3419414 - RNA, 10 nt, Human
aauucccuau

SEQ ID NO: 3419415 - RNA, 23 nt, Human
aauucccuaucuuuuaguuuuag

SEQ ID NO: 3419416 - RNA, 21 nt, Human
aauucccucucucugacucuc

SEQ ID NO: 3419417 - RNA, 22 nt, Human
acacaaagagaaaaagaaaugc

SEQ ID NO: 3419418 - RNA, 22 nt, Human
acacaaagagaguuaaucaacu

SEQ ID NO: 3419419 - RNA, 16 nt, Human
acacaaauuaugcuaa

SEQ ID NO: 3419420 - RNA, 21 nt, Human
acacaaauuaugcuaagaauu

SEQ ID NO: 3419421 - RNA, 22 nt, Human
acacaaauuaugcuaagaauuu

SEQ ID NO: 3419422 - RNA, 14 nt, Human
acacaacagccaac

SEQ ID NO: 3419423 - RNA, 18 nt, Human
acacaacuauuuuuccaa

SEQ ID NO: 3419424 - RNA, 13 nt, Human
acacaacucacuc

SEQ ID NO: 3419425 - RNA, 18 nt, Human
acacaagauugguguuuu

SEQ ID NO: 3419426 - RNA, 20 nt, Human
acacaagauugguguuuuuu

SEQ ID NO: 3419427 - RNA, 13 nt, Human
acacaagccacag

SEQ ID NO: 3419428 - RNA, 15 nt, Human
acacaagccacagaa

SEQ ID NO: 3419429 - RNA, 19 nt, Human
acacaagccacagaagcca

SEQ ID NO: 3419430 - RNA, 16 nt, Human
acacaaggucauggcc

SEQ ID NO: 3419431 - RNA, 14 nt, Human
acacaaguaaaacu

SEQ ID NO: 3419432 - RNA, 13 nt, Human
acacaaguaaaca

SEQ ID NO: 3419433 - RNA, 15 nt, Human
acacaaguaagagac

SEQ ID NO: 3419434 - RNA, 13 nt, Human
acacaagugcagu

SEQ ID NO: 3419435 - RNA, 14 nt, Human
acacaauaagcaaa

SEQ ID NO: 3419436 - RNA, 14 nt, Human
acacaauacaauaa

SEQ ID NO: 3419437 - RNA, 16 nt, Human
acacaaugguuuuuaa

SEQ ID NO: 3419438 - RNA, 17 nt, Human
acacaaugugucuuucu

SEQ ID NO: 3419439 - RNA, 15 nt, Human
acacaauuagauuuc

SEQ ID NO: 3419440 - RNA, 19 nt, Human
acacacaaaaaaugcacaa

SEQ ID NO: 3419441 - RNA, 22 nt, Human
acacacaaaauguacccaguau

SEQ ID NO: 3419442 - RNA, 14 nt, Human
acacacaaagagag

SEQ ID NO: 3419443 - RNA, 13 nt, Human
acacacaaagcag

SEQ ID NO: 3419444 - RNA, 15 nt, Human
acacacaacaaaaau

SEQ ID NO: 3419445 - RNA, 9 nt, Human
acacacaca

SEQ ID NO: 3419446 - RNA, 14 nt, Human
acacacacaaguaa

SEQ ID NO: 3419447 - RNA, 15 nt, Human
acacacacacacaca

SEQ ID NO: 3419448 - RNA, 14 nt, Human
acacacacacacag

SEQ ID NO: 3419449 - RNA, 15 nt, Human
acacacacacacagc

SEQ ID NO: 3419450 - RNA, 16 nt, Human
acacacacacacaugc

SEQ ID NO: 3419451 - RNA, 12 nt, Human
acacacacacag

SEQ ID NO: 3419452 - RNA, 12 nt, Human
acacacacacau

SEQ ID NO: 3419453 - RNA, 16 nt, Human
acacacacacgcacgc

SEQ ID NO: 3419454 - RNA, 14 nt, Human
acacacacagaaaa

SEQ ID NO: 3419455 - RNA, 13 nt, Human
acacacacagcca

SEQ ID NO: 3419456 - RNA, 11 nt, Human
acacacacauc

SEQ ID NO: 3419457 - RNA, 14 nt, Human
acacacacaugcac

SEQ ID NO: 3419458 - RNA, 14 nt, Human
acacacacaugcau

SEQ ID NO: 3419459 - RNA, 19 nt, Human
acacacacgcacgcacaca

SEQ ID NO: 3419460 - RNA, 13 nt, Human
acacacagaaaau

SEQ ID NO: 3419461 - RNA, 17 nt, Human
acacacagaaaauauac

SEQ ID NO: 3419462 - RNA, 22 nt, Human
acacacagaaaauauacuguaa

SEQ ID NO: 3419463 - RNA, 17 nt, Human
acacacagacucauauu

SEQ ID NO: 3419464 - RNA, 15 nt, Human
acacacagauacaca

SEQ ID NO: 3419465 - RNA, 19 nt, Human
acacacagauacacacaca

SEQ ID NO: 3419466 - RNA, 14 nt, Human
acacacagccacac

SEQ ID NO: 3419467 - RNA, 22 nt, Human
acacacagccacacacacagaa

SEQ ID NO: 3419468 - RNA, 17 nt, Human
acacacagcucuguccu

SEQ ID NO: 3419469 - RNA, 17 nt, Human
acacacaugcauacaca

SEQ ID NO: 3419470 - RNA, 19 nt, Human
acacacaugcauacacaca

SEQ ID NO: 3419471 - RNA, 20 nt, Human
acacacaugcauacacacac

SEQ ID NO: 3419472 - RNA, 23 nt, Human
acacacauugcugugaacaggaa

SEQ ID NO: 3419473 - RNA, 12 nt, Human
acacaccaggcu

SEQ ID NO: 3419474 - RNA, 21 nt, Human
acacaccuaagggacauguuu

SEQ ID NO: 3419475 - RNA, 23 nt, Human
acacacgcacacacacacacagg

SEQ ID NO: 3419476 - RNA, 13 nt, Human
acacacgcacgca

SEQ ID NO: 3419477 - RNA, 16 nt, Human
acacacgcacgcacac

SEQ ID NO: 3419478 - RNA, 20 nt, Human
acacacgcaggaacucccag

SEQ ID NO: 3419479 - RNA, 16 nt, Human
acacacgcgcgcacac

SEQ ID NO: 3419480 - RNA, 22 nt, Human
acacacgugcaauuuguuugug

SEQ ID NO: 3419481 - RNA, 17 nt, Human
acacacuacaccacaca

SEQ ID NO: 3419482 - RNA, 15 nt, Human
acacacucaaaucaa

SEQ ID NO: 3419483 - RNA, 20 nt, Human
acacacucaaaucaagaaac

SEQ ID NO: 3419484 - RNA, 13 nt, Human
acacacucagugc

SEQ ID NO: 3419485 - RNA, 14 nt, Human
acacacucagugca

SEQ ID NO: 3419486 - RNA, 15 nt, Human
aauauuguauuguua

SEQ ID NO: 3419487 - RNA, 13 nt, Human
aauauuguccauu

SEQ ID NO: 3419488 - RNA, 21 nt, Human
aauauugucuuuuuguauguc

SEQ ID NO: 3419489 - RNA, 23 nt, Human
aauauugugaagaaaaauaaagu

SEQ ID NO: 3419490 - RNA, 17 nt, Human
aauauuguguugugaau

SEQ ID NO: 3419491 - RNA, 15 nt, Human
aauauuguuccuaag

SEQ ID NO: 3419492 - RNA, 23 nt, Human
aauauuguuccuaaguucuuaga

SEQ ID NO: 3419493 - RNA, 16 nt, Human
aauauuguugacaacu

SEQ ID NO: 3419494 - RNA, 15 nt, Human
aauauuguuucugca

SEQ ID NO: 3419495 - RNA, 15 nt, Human
aauauuguuucuuua

SEQ ID NO: 3419496 - RNA, 20 nt, Human
aauauuguuugguaaauguu

SEQ ID NO: 3419497 - RNA, 17 nt, Human
aauauuguuuuacaaua

SEQ ID NO: 3419498 - RNA, 18 nt, Human
aauauuguuuuacaauag

SEQ ID NO: 3419499 - RNA, 16 nt, Human
aauauuuaaacagcag

SEQ ID NO: 3419500 - RNA, 17 nt, Human
aauauuuaagauaguuu

SEQ ID NO: 3419501 - RNA, 16 nt, Human
aauauuuaaggagaug

SEQ ID NO: 3419502 - RNA, 17 nt, Human
aauauuuaaggagaugu

SEQ ID NO: 3419503 - RNA, 15 nt, Human
aauauuuaauguuga

SEQ ID NO: 3419504 - RNA, 15 nt, Human
aauauuuacaaugua

SEQ ID NO: 3419505 - RNA, 17 nt, Human
aauauuuauaaaacuuc

SEQ ID NO: 3419506 - RNA, 17 nt, Human
aauauuuauauuucacu

SEQ ID NO: 3419507 - RNA, 14 nt, Human
aauauuuaugaaga

SEQ ID NO: 3419508 - RNA, 19 nt, Human
aauauuuauggaugcaaca

SEQ ID NO: 3419509 - RNA, 21 nt, Human
aauauuuaugucuauuuaagc

SEQ ID NO: 3419510 - RNA, 23 nt, Human
aauauuuaugucuauuuaagccu

SEQ ID NO: 3419511 - RNA, 21 nt, Human
aauauuuauuaaauaaaauca

SEQ ID NO: 3419512 - RNA, 22 nt, Human
aauauuuauuaaauaaaaucaa

SEQ ID NO: 3419513 - RNA, 15 nt, Human
aauauuuauuaaauu

SEQ ID NO: 3419514 - RNA, 13 nt, Human
aauauuuauuacc

SEQ ID NO: 3419515 - RNA, 15 nt, Human
aauauuuauuaccuc

SEQ ID NO: 3419516 - RNA, 12 nt, Human
aauauuuauuau

SEQ ID NO: 3419517 - RNA, 14 nt, Human
aauauuuauucauu

SEQ ID NO: 3419518 - RNA, 12 nt, Human
aauauuuauugc

SEQ ID NO: 3419519 - RNA, 17 nt, Human
aauauuuauugcuuuau

SEQ ID NO: 3419520 - RNA, 23 nt, Human
aauauuuauugcuuuauaaauaa

SEQ ID NO: 3419521 - RNA, 14 nt, Human
aauauuucagauaa

SEQ ID NO: 3419522 - RNA, 20 nt, Human
aauauuucagguucuucaga

SEQ ID NO: 3419523 - RNA, 23 nt, Human
aauauuuccauauggauuuucua

SEQ ID NO: 3419524 - RNA, 12 nt, Human
aauauuucuauu

SEQ ID NO: 3419525 - RNA, 12 nt, Human
aauauuucuuca

SEQ ID NO: 3419526 - RNA, 14 nt, Human
aauauuucuucaaa

SEQ ID NO: 3419527 - RNA, 15 nt, Human
aauauuucuucaaau

SEQ ID NO: 3419528 - RNA, 16 nt, Human
aauauuucuucaaaua

SEQ ID NO: 3419529 - RNA, 20 nt, Human
aauauuucuucaaauaucuc

SEQ ID NO: 3419530 - RNA, 21 nt, Human
aauauuugacuugcaugaaga

SEQ ID NO: 3419531 - RNA, 21 nt, Human
aauauuuggucucuauuucau

SEQ ID NO: 3419532 - RNA, 14 nt, Human
aauauuuguacaua

SEQ ID NO: 3419533 - RNA, 22 nt, Human
aauauuugucgauauuuccauc

SEQ ID NO: 3419534 - RNA, 17 nt, Human
aauauuugugacaaaaa

SEQ ID NO: 3419535 - RNA, 21 nt, Human
aauauuugugugcuaaacgug

SEQ ID NO: 3419536 - RNA, 13 nt, Human
aauauuuuaaaga

SEQ ID NO: 3419537 - RNA, 13 nt, Human
aauauuuuaagca

SEQ ID NO: 3419538 - RNA, 15 nt, Human
aauauuuuaagcauu

SEQ ID NO: 3419539 - RNA, 21 nt, Human
aauauuuuaagcauuacucuu

SEQ ID NO: 3419540 - RNA, 18 nt, Human
aauauuuuaaguauugca

SEQ ID NO: 3419541 - RNA, 21 nt, Human
aauauuuuaccacugcuguga

SEQ ID NO: 3419542 - RNA, 17 nt, Human
aauauuuuaugauccag

SEQ ID NO: 3419543 - RNA, 21 nt, Human
aauauuuuaugguuauguuuu

SEQ ID NO: 3419544 - RNA, 17 nt, Human
aauauuuuauuauauau

SEQ ID NO: 3419545 - RNA, 13 nt, Human
aauauuuuauuca

SEQ ID NO: 3419546 - RNA, 15 nt, Human
aauauuuuauucaag

SEQ ID NO: 3419547 - RNA, 17 nt, Human
aauauuuuauucaaggu

SEQ ID NO: 3419548 - RNA, 11 nt, Human
aauauuuucau

SEQ ID NO: 3419549 - RNA, 18 nt, Human
aauauuuucauacagcau

SEQ ID NO: 3419550 - RNA, 21 nt, Human
aauauuuuccaugaaaaugca

SEQ ID NO: 3419551 - RNA, 12 nt, Human
aauauuuuccuc

SEQ ID NO: 3419552 - RNA, 20 nt, Human
aauauuuuccuccugagugc

SEQ ID NO: 3419553 - RNA, 22 nt, Human
aauauuuucucuguacuuuuca

SEQ ID NO: 3419554 - RNA, 17 nt, Human
aauauuuucuguguguu

SEQ ID NO: 3419555 - RNA, 18 nt, Human
aauauuuucuguguguuc

SEQ ID NO: 3419556 - RNA, 19 nt, Human
aauauuuucuguguguucc

SEQ ID NO: 3419557 - RNA, 21 nt, Human
aauauuuucuguguguuccug

SEQ ID NO: 3419558 - RNA, 18 nt, Human
aauauuuucuuuaaugcu

SEQ ID NO: 3419559 - RNA, 19 nt, Human
aauauuuucuuuaaugcuu

SEQ ID NO: 3419560 - RNA, 14 nt, Human
aauauuuugaauca

SEQ ID NO: 3419561 - RNA, 18 nt, Human
aauauuuugaaucaauaa

SEQ ID NO: 3419562 - RNA, 23 nt, Human
aauauuuugacuuguugagggua

SEQ ID NO: 3419563 - RNA, 22 nt, Human
aauauuuugauaauaauauugu

SEQ ID NO: 3419564 - RNA, 13 nt, Human
aauauuuugaucu

SEQ ID NO: 3419565 - RNA, 23 nt, Human
aauauuuugaucuucaacaaauu

SEQ ID NO: 3419566 - RNA, 20 nt, Human
aauauuuugcuaguuuuuga

SEQ ID NO: 3419567 - RNA, 15 nt, Human
aauauuuuguauuau

SEQ ID NO: 3419568 - RNA, 20 nt, Human
aauauuuuguauuauugcug

SEQ ID NO: 3419569 - RNA, 14 nt, Human
aauauuuugucuaa

SEQ ID NO: 3419570 - RNA, 19 nt, Human
aauauuuugucuaaaaugc

SEQ ID NO: 3419571 - RNA, 20 nt, Human
aauauuuugucuaaaaugcc

SEQ ID NO: 3419572 - RNA, 15 nt, Human
aauauuuuuauauca

SEQ ID NO: 3419573 - RNA, 18 nt, Human
aauauuuuuauauuuccu

SEQ ID NO: 3419574 - RNA, 23 nt, Human
aauauuuuugaaaggcauguucc

SEQ ID NO: 3419575 - RNA, 22 nt, Human
aauauuuuuugaggcuaaagaa

SEQ ID NO: 3419576 - RNA, 18 nt, Human
aaucaaaagggccaaaga

SEQ ID NO: 3419577 - RNA, 14 nt, Human
aaucaaaagugccu

SEQ ID NO: 3419578 - RNA, 19 nt, Human
aaucaaaagugccucaaga

SEQ ID NO: 3419579 - RNA, 17 nt, Human
aaucaaacauuuucugg

SEQ ID NO: 3419580 - RNA, 23 nt, Human
aaucaaacauuuugaaagucugu

SEQ ID NO: 3419581 - RNA, 16 nt, Human
aaucaaagcaaugcau

SEQ ID NO: 3419582 - RNA, 22 nt, Human
aaucaaauaaaaauucuagauu

SEQ ID NO: 3419583 - RNA, 14 nt, Human
aaucaaauaaguau

SEQ ID NO: 3419584 - RNA, 15 nt, Human
aaucaaauaaguauu

SEQ ID NO: 3419585 - RNA, 19 nt, Human
aaucaaauaaguauuuaua

SEQ ID NO: 3419586 - RNA, 21 nt, Human
aaucaaauaauaccuuagaag

SEQ ID NO: 3419587 - RNA, 16 nt, Human
aaucaaauaugcaaag

SEQ ID NO: 3419588 - RNA, 12 nt, Human
aaucaaaugaau

SEQ ID NO: 3419589 - RNA, 15 nt, Human
aaucaaauguaaagu

SEQ ID NO: 3419590 - RNA, 20 nt, Human
aaucaaauuuguaggguuuc

SEQ ID NO: 3419591 - RNA, 22 nt, Human
aaucaaauuuguaggguuucua

SEQ ID NO: 3419592 - RNA, 16 nt, Human
aaucaacacuaccagc

SEQ ID NO: 3419593 - RNA, 20 nt, Human
aaucaacugaaaguguuucc

SEQ ID NO: 3419594 - RNA, 14 nt, Human
aaucaacugggcug

SEQ ID NO: 3419595 - RNA, 10 nt, Human
aaucaacuuu

SEQ ID NO: 3419596 - RNA, 19 nt, Human
aaucaacuuuuuauugccu

SEQ ID NO: 3419597 - RNA, 22 nt, Human
aaucaacuuuuuauugccuucu

SEQ ID NO: 3419598 - RNA, 19 nt, Human
aaucaagagccuuaaaaca

SEQ ID NO: 3419599 - RNA, 17 nt, Human
aaucaagauuaugauga

SEQ ID NO: 3419600 - RNA, 20 nt, Human
aaucaagauuuaauccuaga

SEQ ID NO: 3419601 - RNA, 22 nt, Human
aaucaagccauguauaaaugug

SEQ ID NO: 3419602 - RNA, 15 nt, Human
aaucaagggucaggc

SEQ ID NO: 3419603 - RNA, 17 nt, Human
aaucaagguuauaauuu

SEQ ID NO: 3419604 - RNA, 15 nt, Human
aaucaaguaaugaau

SEQ ID NO: 3419605 - RNA, 22 nt, Human
aaucaaguuguaacuuauauug

SEQ ID NO: 3419606 - RNA, 23 nt, Human
aaucaauaacagccgcuccagag

SEQ ID NO: 3419607 - RNA, 21 nt, Human
aaucaaucaugucagucugcu

SEQ ID NO: 3419608 - RNA, 18 nt, Human
aaucaauuuaaacccauu

SEQ ID NO: 3419609 - RNA, 14 nt, Human
aaucacaaaaauuu

SEQ ID NO: 3419610 - RNA, 19 nt, Human
aaucacagcuuguauuuug

SEQ ID NO: 3419611 - RNA, 21 nt, Human
aaucacagcuuguauuuugug

SEQ ID NO: 3419612 - RNA, 12 nt, Human
aaucacaggcug

SEQ ID NO: 3419613 - RNA, 21 nt, Human
aaucacaggcugggcugggca

SEQ ID NO: 3419614 - RNA, 15 nt, Human
aaucacaguuggccu

SEQ ID NO: 3419615 - RNA, 23 nt, Human
aaucacauauuuuaaaauuuguu

SEQ ID NO: 3419616 - RNA, 18 nt, Human
aaucaccacaaacuguaa

SEQ ID NO: 3419617 - RNA, 20 nt, Human
aaucaccacaccaaaccucu

SEQ ID NO: 3419618 - RNA, 16 nt, Human
aaucaccauguaagca

SEQ ID NO: 3419619 - RNA, 16 nt, Human
aaucacccuaccaacu

SEQ ID NO: 3419620 - RNA, 20 nt, Human
aaucaccuaauuaauuucag

SEQ ID NO: 3419621 - RNA, 13 nt, Human
acaaagacugagu

SEQ ID NO: 3419622 - RNA, 21 nt, Human
acaaagaguucaagaaauaag

SEQ ID NO: 3419623 - RNA, 22 nt, Human
acaaagaugggugaaggcuggc

SEQ ID NO: 3419624 - RNA, 22 nt, Human
acaaagauguuugucagauaug

SEQ ID NO: 3419625 - RNA, 19 nt, Human
acaaagauucucuauguau

SEQ ID NO: 3419626 - RNA, 15 nt, Human
acaaagcaauucuuu

SEQ ID NO: 3419627 - RNA, 14 nt, Human
acaaagcacagugu

SEQ ID NO: 3419628 - RNA, 15 nt, Human
acaaagcacaguguu

SEQ ID NO: 3419629 - RNA, 17 nt, Human
acaaagcacaguuugaa

SEQ ID NO: 3419630 - RNA, 19 nt, Human
acagagaaagaggaagcuu

SEQ ID NO: 3419631 - RNA, 18 nt, Human
aaucacgcuuuuugaaaa

SEQ ID NO: 3419632 - RNA, 15 nt, Human
aaucacucagagcag

SEQ ID NO: 3419633 - RNA, 12 nt, Human
aaucacucuugu

SEQ ID NO: 3419634 - RNA, 14 nt, Human
aaucacuguguaua

SEQ ID NO: 3419635 - RNA, 15 nt, Human
aaucacuguguauau

SEQ ID NO: 3419636 - RNA, 17 nt, Human
aaucacuguguauauuu

SEQ ID NO: 3419637 - RNA, 22 nt, Human
aaucacuguguauauuugauuu

SEQ ID NO: 3419638 - RNA, 23 nt, Human
aaucacuguguauauuugauuua

SEQ ID NO: 3419639 - RNA, 22 nt, Human
aaucacuguuuuuagacaccuu

SEQ ID NO: 3419640 - RNA, 15 nt, Human
aaucacuuucauaau

SEQ ID NO: 3419641 - RNA, 23 nt, Human
aaucacuuugucuaacucagaau

SEQ ID NO: 3419642 - RNA, 12 nt, Human
aaucagaacuca

SEQ ID NO: 3419643 - RNA, 20 nt, Human
aaucagaagucaucuugcua

SEQ ID NO: 3419644 - RNA, 20 nt, Human
aaucagacccuaccccacca

SEQ ID NO: 3419645 - RNA, 14 nt, Human
aaucagacuaugaa

SEQ ID NO: 3419646 - RNA, 21 nt, Human
aaucagagaccaggcccuggc

SEQ ID NO: 3419647 - RNA, 21 nt, Human
aaucagauagauauuccuauu

SEQ ID NO: 3419648 - RNA, 15 nt, Human
aaucagaucauuuca

SEQ ID NO: 3419649 - RNA, 14 nt, Human
aaucagcaagaaga

SEQ ID NO: 3419650 - RNA, 16 nt, Human
aaucagcacugaaaau

SEQ ID NO: 3419651 - RNA, 13 nt, Human
aaucagccagaca

SEQ ID NO: 3419652 - RNA, 16 nt, Human
aaucagccuaguugau

SEQ ID NO: 3419653 - RNA, 17 nt, Human
aaucagcuauuuuguga

SEQ ID NO: 3419654 - RNA, 20 nt, Human
aaucagcuccuuccuggaga

SEQ ID NO: 3419655 - RNA, 18 nt, Human
aaucagcugcuuuguuac

SEQ ID NO: 3419656 - RNA, 19 nt, Human
aaucagcugcuuuguuacc

SEQ ID NO: 3419657 - RNA, 15 nt, Human
aaucaggcuuuuguu

SEQ ID NO: 3419658 - RNA, 18 nt, Human
aaucagggaggucauuuu

SEQ ID NO: 3419659 - RNA, 22 nt, Human
aaucaggguuaguauuguccag

SEQ ID NO: 3419660 - RNA, 16 nt, Human
aaucaggguuuuuaga

SEQ ID NO: 3419661 - RNA, 22 nt, Human
aaucaguaagagguguuauuug

SEQ ID NO: 3419662 - RNA, 11 nt, Human
aaucaguaauu

SEQ ID NO: 3419663 - RNA, 17 nt, Human
aaucaguauaauucugu

SEQ ID NO: 3419664 - RNA, 15 nt, Human
aaucaguccccuccc

SEQ ID NO: 3419665 - RNA, 17 nt, Human
aaucagucuauccacag

SEQ ID NO: 3419666 - RNA, 20 nt, Human
aaucagucuauccacagaga

SEQ ID NO: 3419667 - RNA, 17 nt, Human
aaucagucucagaaugu

SEQ ID NO: 3419668 - RNA, 24 nt, Human
aaucagucucagaaugucauuuug

SEQ ID NO: 3419669 - RNA, 16 nt, Human
aaucaguguagcccca

SEQ ID NO: 3419670 - RNA, 17 nt, Human
aaucaguucauuagaaa

SEQ ID NO: 3419671 - RNA, 18 nt, Human
aaucaguucauuagaaau

SEQ ID NO: 3419672 - RNA, 20 nt, Human
aaucaguucauuagaaauau

SEQ ID NO: 3419673 - RNA, 21 nt, Human
aaucaguugcgcguucugaaa

SEQ ID NO: 3419674 - RNA, 13 nt, Human
aaucauaaaguca

SEQ ID NO: 3419675 - RNA, 14 nt, Human
aaucauaaagucag

SEQ ID NO: 3419676 - RNA, 23 nt, Human
aaucauaagauauuuuucaugau

SEQ ID NO: 3419677 - RNA, 14 nt, Human
aaucauaaguauuu

SEQ ID NO: 3419678 - RNA, 19 nt, Human
aaucauacuccuaugcuuu

SEQ ID NO: 3419679 - RNA, 22 nt, Human
aaucauaggcaccuuuuacugu

SEQ ID NO: 3419680 - RNA, 22 nt, Human
aaucauaguuacuguguaaacu

SEQ ID NO: 3419681 - RNA, 18 nt, Human
aaucauauaauaaaugua

SEQ ID NO: 3419682 - RNA, 17 nt, Human
aaucauauauaauaaau

SEQ ID NO: 3419683 - RNA, 14 nt, Human
aaucauaugugauc

SEQ ID NO: 3419684 - RNA, 17 nt, Human
aaucauauuagacuucu

SEQ ID NO: 3419685 - RNA, 23 nt, Human
aaucauauugaugaaaagauuua

SEQ ID NO: 3419686 - RNA, 14 nt, Human
aaucaucaagaagg

SEQ ID NO: 3419687 - RNA, 21 nt, Human
aaucaucaagagaauuugggg

SEQ ID NO: 3419688 - RNA, 15 nt, Human
aaucauccaaugcuc

SEQ ID NO: 3419689 - RNA, 23 nt, Human
aaucaucgaaaauucauuucaca

SEQ ID NO: 3419690 - RNA, 15 nt, Human
aaucaucuauaaaga

SEQ ID NO: 3419691 - RNA, 18 nt, Human
aaucaucuauaaagaaga

SEQ ID NO: 3419692 - RNA, 13 nt, Human
aaucaucuauuuu

SEQ ID NO: 3419693 - RNA, 15 nt, Human
aaucaucuauuuuga

SEQ ID NO: 3419694 - RNA, 19 nt, Human
aaucaucuauuuugaugca

SEQ ID NO: 3419695 - RNA, 20 nt, Human
aaucaugaagauauuuuucc

SEQ ID NO: 3419696 - RNA, 22 nt, Human
aaucauguaguaucaaauauua

SEQ ID NO: 3419697 - RNA, 16 nt, Human
aaucaugucaggccug

SEQ ID NO: 3419698 - RNA, 17 nt, Human
aaucauguuucuuugau

SEQ ID NO: 3419699 - RNA, 18 nt, Human
aaucauguuucuuugauc

SEQ ID NO: 3419700 - RNA, 17 nt, Human
aaucauuaagacaacug

SEQ ID NO: 3419701 - RNA, 12 nt, Human
aaucauuauuua

SEQ ID NO: 3419702 - RNA, 19 nt, Human
aaucauuauuuauuaaauu

SEQ ID NO: 3419703 - RNA, 23 nt, Human
aaucauucagaaauguugagucu

SEQ ID NO: 3419704 - RNA, 17 nt, Human
aaucauucuuacuaaaa

SEQ ID NO: 3419705 - RNA, 21 nt, Human
aaucauugcuuugaagcaguu

SEQ ID NO: 3419706 - RNA, 13 nt, Human
aaucauuguacag

SEQ ID NO: 3419707 - RNA, 22 nt, Human
aaucauuguacaguuuguuuac

SEQ ID NO: 3419708 - RNA, 14 nt, Human
aaucauuguaugug

SEQ ID NO: 3419709 - RNA, 15 nt, Human
aaucauuguccagag

SEQ ID NO: 3419710 - RNA, 17 nt, Human
aaucauuguuuugaaua

SEQ ID NO: 3419711 - RNA, 20 nt, Human
aaucauuguuuugaauauua

SEQ ID NO: 3419712 - RNA, 20 nt, Human
aaucauuucuauuucuccuc

SEQ ID NO: 3419713 - RNA, 18 nt, Human
aaucauuuguucaaagcu

SEQ ID NO: 3419714 - RNA, 16 nt, Human
aaucauuuguuuacau

SEQ ID NO: 3419715 - RNA, 15 nt, Human
aaucauuuuaauuau

SEQ ID NO: 3419716 - RNA, 16 nt, Human
aaucauuuuaauuauu

SEQ ID NO: 3419717 - RNA, 20 nt, Human
aaucauuuuaauuauuauuc

SEQ ID NO: 3419718 - RNA, 13 nt, Human
aaucauuuuaugu

SEQ ID NO: 3419719 - RNA, 19 nt, Human
aaucauuuugccucuuuuc

SEQ ID NO: 3419720 - RNA, 18 nt, Human
aaucauuuuuuauauaua

SEQ ID NO: 3419721 - RNA, 14 nt, Human
aauccaaacuugga

SEQ ID NO: 3419722 - RNA, 16 nt, Human
aauccaaauauuguua

SEQ ID NO: 3419723 - RNA, 20 nt, Human
aauccaaauggcgucuggaa

SEQ ID NO: 3419724 - RNA, 18 nt, Human
aauccaaccauuuucauu

SEQ ID NO: 3419725 - RNA, 22 nt, Human
aauccaagauauuuuaaaaucu

SEQ ID NO: 3419726 - RNA, 17 nt, Human
aauccaagccuccacag

SEQ ID NO: 3419727 - RNA, 22 nt, Human
aauccaagccuccacagcgagg

SEQ ID NO: 3419728 - RNA, 14 nt, Human
aauccaagcucccu

SEQ ID NO: 3419729 - RNA, 19 nt, Human
aauccaagcucccugcccc

SEQ ID NO: 3419730 - RNA, 18 nt, Human
aauccacaaucugacauu

SEQ ID NO: 3419731 - RNA, 18 nt, Human
aauccacauguuucagag

SEQ ID NO: 3419732 - RNA, 18 nt, Human
aauccaccugccucggcc

SEQ ID NO: 3419733 - RNA, 15 nt, Human
aauccacucccaggc

SEQ ID NO: 3419734 - RNA, 13 nt, Human
aauccagaaagaa

SEQ ID NO: 3419735 - RNA, 17 nt, Human
aauccagaaagaaaaaa

SEQ ID NO: 3419736 - RNA, 22 nt, Human
aauccagaauugaccuuuugac

SEQ ID NO: 3419737 - RNA, 17 nt, Human
aauccagacccggcugc

SEQ ID NO: 3419738 - RNA, 20 nt, Human
aauccaggcagauccaggac

SEQ ID NO: 3419739 - RNA, 19 nt, Human
aauccagguacgcacagac

SEQ ID NO: 3419740 - RNA, 21 nt, Human
aauccagguacgcacagacag

SEQ ID NO: 3419741 - RNA, 22 nt, Human
aauccagguacgcacagacagg

SEQ ID NO: 3419742 - RNA, 16 nt, Human
aauccauacauuugug

SEQ ID NO: 3419743 - RNA, 23 nt, Human
aauccaucuaaauaccugcccug

SEQ ID NO: 3419744 - RNA, 19 nt, Human
aauccaugaaagaacuuaa

SEQ ID NO: 3419745 - RNA, 16 nt, Human
aauccauguaagguau

SEQ ID NO: 3419746 - RNA, 17 nt, Human
aaucccacccacaugug

SEQ ID NO: 3419747 - RNA, 14 nt, Human
aaucccacuguaug

SEQ ID NO: 3419748 - RNA, 20 nt, Human
aaucccagcacuuugggagg

SEQ ID NO: 3419749 - RNA, 19 nt, Human
aaucccagcccccugacca

SEQ ID NO: 3419750 - RNA, 14 nt, Human
aaucccauuauuca

SEQ ID NO: 3419751 - RNA, 21 nt, Human
aaucccauuauucaaaguugc

SEQ ID NO: 3419752 - RNA, 18 nt, Human
aauccccaacaugcacug

SEQ ID NO: 3419753 - RNA, 23 nt, Human
aauccccaguucgccuggagccc

SEQ ID NO: 3419754 - RNA, 17 nt, Human
aauccccuaaaauaaca

SEQ ID NO: 3419755 - RNA, 14 nt, Human
aauccccucauuca

SEQ ID NO: 3419756 - RNA, 19 nt, Human
aauccccuccuugggcacu

SEQ ID NO: 3419757 - RNA, 15 nt, Human
aauccccuuaugacu

SEQ ID NO: 3419758 - RNA, 13 nt, Human
aauccccuucucc

SEQ ID NO: 3419759 - RNA, 23 nt, Human
aaucccuagacuuuaggcuuuca

SEQ ID NO: 3419760 - RNA, 13 nt, Human
aaucccugcuuuu

SEQ ID NO: 3419761 - RNA, 14 nt, Human
aaucccuggcaaag

SEQ ID NO: 3419762 - RNA, 23 nt, Human
aaucccugguuuuaaguaucaau

SEQ ID NO: 3419763 - RNA, 18 nt, Human
aaucccuguguuaauuua

SEQ ID NO: 3419764 - RNA, 13 nt, Human
aaucccuguuuaa

SEQ ID NO: 3419765 - RNA, 21 nt, Human
aaucccuuaauauccuaaaca

SEQ ID NO: 3419766 - RNA, 19 nt, Human
aaucccuuuauuacccccu

SEQ ID NO: 3419767 - RNA, 12 nt, Human
aauccgaaccuc

SEQ ID NO: 3419768 - RNA, 19 nt, Human
aauccgaaccuccucugug

SEQ ID NO: 3419769 - RNA, 21 nt, Human
aauccgaccacuaauugccaa

SEQ ID NO: 3419770 - RNA, 15 nt, Human
aauccgcucucuucc

SEQ ID NO: 3419771 - RNA, 18 nt, Human
aauccgcucucuuccugc

SEQ ID NO: 3419772 - RNA, 23 nt, Human
aauccgcucucuuccugccccuc

SEQ ID NO: 3419773 - RNA, 17 nt, Human
aauccuaagacacaaau

SEQ ID NO: 3419774 - RNA, 19 nt, Human
acaaucagcugcuuuguua

SEQ ID NO: 3419775 - RNA, 16 nt, Human
acaaucaguccccucc

SEQ ID NO: 3419776 - RNA, 20 nt, Human
acaaucaguccccucccauc

SEQ ID NO: 3419777 - RNA, 19 nt, Human
acaaucaugaaauaugcau

SEQ ID NO: 3419778 - RNA, 15 nt, Human
acaaucauguguguu

SEQ ID NO: 3419779 - RNA, 13 nt, Human
acaaucauugcug

SEQ ID NO: 3419780 - RNA, 21 nt, Human
acaaucauugcugaaaauggu

SEQ ID NO: 3419781 - RNA, 22 nt, Human
acaauccacgcuucuccggauc

SEQ ID NO: 3419782 - RNA, 17 nt, Human
acaaucuauuuauugga

SEQ ID NO: 3419783 - RNA, 21 nt, Human
acaaucucccuucacaaguuu

SEQ ID NO: 3419784 - RNA, 20 nt, Human
acaaucuuaaggggcagcuu

SEQ ID NO: 3419785 - RNA, 16 nt, Human
aauccucacugggugg

SEQ ID NO: 3419786 - RNA, 14 nt, Human
aauccucccagaaa

SEQ ID NO: 3419787 - RNA, 9 nt, Human
aauccuccu

SEQ ID NO: 3419788 - RNA, 11 nt, Human
aauccuccucc

SEQ ID NO: 3419789 - RNA, 18 nt, Human
aauccucuuccucugagg

SEQ ID NO: 3419790 - RNA, 14 nt, Human
aauccugcaaugaa

SEQ ID NO: 3419791 - RNA, 16 nt, Human
aauccugccauuuaaa

SEQ ID NO: 3419792 - RNA, 11 nt, Human
aauccugcccc

SEQ ID NO: 3419793 - RNA, 16 nt, Human
aauccuggcagcccag

SEQ ID NO: 3419794 - RNA, 20 nt, Human
aauccuguaggaagguacug

SEQ ID NO: 3419795 - RNA, 23 nt, Human
aauccuguaggaagguacuguau

SEQ ID NO: 3419796 - RNA, 20 nt, Human
aauccugucgauuagacugg

SEQ ID NO: 3419797 - RNA, 12 nt, Human
aauccugucuuu

SEQ ID NO: 3419798 - RNA, 21 nt, Human
aauccugugugguuuagugua

SEQ ID NO: 3419799 - RNA, 23 nt, Human
aauccugugugguuuaguguaaa

SEQ ID NO: 3419800 - RNA, 20 nt, Human
aauccuguugaaaagccaug

SEQ ID NO: 3419801 - RNA, 19 nt, Human
aauccuucuauucuagccu

SEQ ID NO: 3419802 - RNA, 22 nt, Human
aauccuucuauucuagccugca

SEQ ID NO: 3419803 - RNA, 13 nt, Human
aauccuugaagau

SEQ ID NO: 3419804 - RNA, 19 nt, Human
aauccuugauaauauauug

SEQ ID NO: 3419805 - RNA, 13 nt, Human
aauccuugcuuau

SEQ ID NO: 3419806 - RNA, 18 nt, Human
aauccuuuuccuguucau

SEQ ID NO: 3419807 - RNA, 13 nt, Human
aauccuuuuguag

SEQ ID NO: 3419808 - RNA, 17 nt, Human
aaucgagacugcaaugu

SEQ ID NO: 3419809 - RNA, 17 nt, Human
aaucgaggaaccagagc

SEQ ID NO: 3419810 - RNA, 14 nt, Human
aaucgauuggcuuu

SEQ ID NO: 3419811 - RNA, 17 nt, Human
aaucguuauguguguau

SEQ ID NO: 3419812 - RNA, 14 nt, Human
aaucuaaagccagu

SEQ ID NO: 3419813 - RNA, 14 nt, Human
aaucuaaaucuauu

SEQ ID NO: 3419814 - RNA, 15 nt, Human
aaucuaaaucuauuu

SEQ ID NO: 3419815 - RNA, 12 nt, Human
aaucuaaaugga

SEQ ID NO: 3419816 - RNA, 15 nt, Human
aaucuaaauggaacc

SEQ ID NO: 3419817 - RNA, 16 nt, Human
aaucuaacaauggaag

SEQ ID NO: 3419818 - RNA, 17 nt, Human
aaucuaagugauauaaa

SEQ ID NO: 3419819 - RNA, 20 nt, Human
aaucuaauauuaaaaauaug

SEQ ID NO: 3419820 - RNA, 14 nt, Human
aaucuaauuuuuuc

SEQ ID NO: 3419821 - RNA, 16 nt, Human
aaucuacccaaaggau

SEQ ID NO: 3419822 - RNA, 15 nt, Human
aaucuaccuucugua

SEQ ID NO: 3419823 - RNA, 16 nt, Human
aaucuaccuucuguag

SEQ ID NO: 3419824 - RNA, 12 nt, Human
aaucuagaagaa

SEQ ID NO: 3419825 - RNA, 13 nt, Human
aaucuagaagaaa

SEQ ID NO: 3419826 - RNA, 14 nt, Human
aaucuagaagaaau

SEQ ID NO: 3419827 - RNA, 19 nt, Human
aaucuagaggaaaagaaag

SEQ ID NO: 3419828 - RNA, 19 nt, Human
aaucuaguuuacagaaaaa

SEQ ID NO: 3419829 - RNA, 15 nt, Human
aaucuauagaaagug

SEQ ID NO: 3419830 - RNA, 20 nt, Human
aaucuaugaaguauauaaug

SEQ ID NO: 3419831 - RNA, 18 nt, Human
aaucuaugauuccaggug

SEQ ID NO: 3419832 - RNA, 21 nt, Human
aaucuauggucgggagacagc

SEQ ID NO: 3419833 - RNA, 18 nt, Human
aaucuauuauacuguauu

SEQ ID NO: 3419834 - RNA, 12 nt, Human
aaucuauucaga

SEQ ID NO: 3419835 - RNA, 18 nt, Human
aaucuauucagacaagca

SEQ ID NO: 3419836 - RNA, 13 nt, Human
aaucuauucugug

SEQ ID NO: 3419837 - RNA, 15 nt, Human
aaucuauuggguuca

SEQ ID NO: 3419838 - RNA, 17 nt, Human
aaucuauuggguucauu

SEQ ID NO: 3419839 - RNA, 20 nt, Human
aaucuauuuaauuaggaaaa

SEQ ID NO: 3419840 - RNA, 18 nt, Human
aaucuauuuauuaauauu

SEQ ID NO: 3419841 - RNA, 21 nt, Human
aaucuauuuauuaauauuuaa

SEQ ID NO: 3419842 - RNA, 16 nt, Human
aaucuauuuauuggac

SEQ ID NO: 3419843 - RNA, 23 nt, Human
aaucuauuucacuuauuuuggcu

SEQ ID NO: 3419844 - RNA, 13 nt, Human
aaucuauuuucua

SEQ ID NO: 3419845 - RNA, 19 nt, Human
aaucuauuuucuauguacu

SEQ ID NO: 3419846 - RNA, 20 nt, Human
aaucuauuuucuauguacua

SEQ ID NO: 3419847 - RNA, 13 nt, Human
aaucucaaaauua

SEQ ID NO: 3419848 - RNA, 12 nt, Human
aaucucaaauag

SEQ ID NO: 3419849 - RNA, 16 nt, Human
aaucucaaauaggcua

SEQ ID NO: 3419850 - RNA, 15 nt, Human
aaucucaaauuucua

SEQ ID NO: 3419851 - RNA, 21 nt, Human
aaucucaaggaaucuuuaagc

SEQ ID NO: 3419852 - RNA, 15 nt, Human
aaucucacauauaca

SEQ ID NO: 3419853 - RNA, 22 nt, Human
aaucucagagguagggcugcca

SEQ ID NO: 3419854 - RNA, 16 nt, Human
aaucucauaauuuaua

SEQ ID NO: 3419855 - RNA, 18 nt, Human
aaucucauaccucugacc

SEQ ID NO: 3419856 - RNA, 19 nt, Human
aaucucauaccucugacca

SEQ ID NO: 3419857 - RNA, 23 nt, Human
aaucucauagguugccaauaaua

SEQ ID NO: 3419858 - RNA, 16 nt, Human
aaucucccauuuugga

SEQ ID NO: 3419859 - RNA, 18 nt, Human
aaucucccauuuuggaau

SEQ ID NO: 3419860 - RNA, 15 nt, Human
aaucuccuauuuuuu

SEQ ID NO: 3419861 - RNA, 19 nt, Human
aaucucguuucaaaaacac

SEQ ID NO: 3419862 - RNA, 14 nt, Human
aaucucuaggaagu

SEQ ID NO: 3419863 - RNA, 19 nt, Human
aaucucuaggaagucaaua

SEQ ID NO: 3419864 - RNA, 18 nt, Human
aaucucuccacuuucagc

SEQ ID NO: 3419865 - RNA, 22 nt, Human
aaucucuccacuuucagcuguc

SEQ ID NO: 3419866 - RNA, 23 nt, Human
aaucucuccacuuucagcugucu

SEQ ID NO: 3419867 - RNA, 12 nt, Human
aaucucuguaaa

SEQ ID NO: 3419868 - RNA, 13 nt, Human
aaucucugugccu

SEQ ID NO: 3419869 - RNA, 19 nt, Human
aaucucuguuauguacugu

SEQ ID NO: 3419870 - RNA, 15 nt, Human
aaucucuuuuugacu

SEQ ID NO: 3419871 - RNA, 15 nt, Human
aaucugaaauucuaa

SEQ ID NO: 3419872 - RNA, 16 nt, Human
aaucugaaauucuaaa

SEQ ID NO: 3419873 - RNA, 12 nt, Human
aaucugaaugua

SEQ ID NO: 3419874 - RNA, 13 nt, Human
aaucugaauguaa

SEQ ID NO: 3419875 - RNA, 17 nt, Human
aaucugacccagugccc

SEQ ID NO: 3419876 - RNA, 17 nt, Human
aaucugaggccuccucu

SEQ ID NO: 3419877 - RNA, 21 nt, Human
aaucugagggaaauguuuugu

SEQ ID NO: 3419878 - RNA, 19 nt, Human
aaucugaucguucuuucua

SEQ ID NO: 3419879 - RNA, 21 nt, Human
aaucugaucguucuuucuagc

SEQ ID NO: 3419880 - RNA, 15 nt, Human
aaucugaucugagug

SEQ ID NO: 3419881 - RNA, 15 nt, Human
aaucugauggccuua

SEQ ID NO: 3419882 - RNA, 19 nt, Human
aaucugauggccuuaauuu

SEQ ID NO: 3419883 - RNA, 23 nt, Human
aaucugauggccuuaauuuccuu

SEQ ID NO: 3419884 - RNA, 23 nt, Human
aaucugauuuuuaugaugaugaa

SEQ ID NO: 3419885 - RNA, 23 nt, Human
aaucugcaaagcauguuuugcau

SEQ ID NO: 3419886 - RNA, 23 nt, Human
aaucugcagaaggaaaaaugugu

SEQ ID NO: 3419887 - RNA, 19 nt, Human
aaucugccuauugcagcug

SEQ ID NO: 3419888 - RNA, 21 nt, Human
aaucugcugguuuuaacaacu

SEQ ID NO: 3419889 - RNA, 19 nt, Human
aaucugcuuguauuccaag

SEQ ID NO: 3419890 - RNA, 17 nt, Human
aaucuggacuccucugu

SEQ ID NO: 3419891 - RNA, 16 nt, Human
aaucugggaagggaag

SEQ ID NO: 3419892 - RNA, 17 nt, Human
aaucugggccagaauuu

SEQ ID NO: 3419893 - RNA, 14 nt, Human
aaucuggucuuguu

SEQ ID NO: 3419894 - RNA, 11 nt, Human
aaucuguaaac

SEQ ID NO: 3419895 - RNA, 15 nt, Human
aaucuguaaacugug

SEQ ID NO: 3419896 - RNA, 21 nt, Human
aaucuguaacagguauuuugu

SEQ ID NO: 3419897 - RNA, 18 nt, Human
aaucuguaagcucuuuga

SEQ ID NO: 3419898 - RNA, 15 nt, Human
aaucuguagggcugg

SEQ ID NO: 3419899 - RNA, 12 nt, Human
aaucugucaaaa

SEQ ID NO: 3419900 - RNA, 19 nt, Human
aaucugucaaaacacugug

SEQ ID NO: 3419901 - RNA, 20 nt, Human
aaucugucaaaacacugugg

SEQ ID NO: 3419902 - RNA, 23 nt, Human
aaucugucaaaacacuguggaac

SEQ ID NO: 3419903 - RNA, 19 nt, Human
aaucugucaagaguaguua

SEQ ID NO: 3419904 - RNA, 20 nt, Human
aaucugucaagaguaguuau

SEQ ID NO: 3419905 - RNA, 22 nt, Human
aaucugugaacuugaaauuuga

SEQ ID NO: 3419906 - RNA, 12 nt, Human
aaucugugauga

SEQ ID NO: 3419907 - RNA, 19 nt, Human
aaucugugcuguuucaaag

SEQ ID NO: 3419908 - RNA, 22 nt, Human
aaucugugcuguuucaaaguuc

SEQ ID NO: 3419909 - RNA, 17 nt, Human
aaucuguguacaaagaa

SEQ ID NO: 3419910 - RNA, 21 nt, Human
aaucuguguauauuauuuggc

SEQ ID NO: 3419911 - RNA, 20 nt, Human
aaucugugugaaacuuucau

SEQ ID NO: 3419912 - RNA, 23 nt, Human
aaucuguuauguacuaguguucu

SEQ ID NO: 3419913 - RNA, 16 nt, Human
aaucuguuuuucuaac

SEQ ID NO: 3419914 - RNA, 15 nt, Human
aaucuuaaaaaguug

SEQ ID NO: 3419915 - RNA, 15 nt, Human
aaucuuaauacuguu

SEQ ID NO: 3419916 - RNA, 16 nt, Human
aaucuuaauacuguua

SEQ ID NO: 3419917 - RNA, 17 nt, Human
aaucuuaauacuguuau

SEQ ID NO: 3419918 - RNA, 18 nt, Human
aaucuuaauacuguuauu

SEQ ID NO: 3419919 - RNA, 19 nt, Human
acaguguauguagaagcau

SEQ ID NO: 3419920 - RNA, 12 nt, Human
acagugucuuuu

SEQ ID NO: 3419921 - RNA, 21 nt, Human
acagugucuuuuuuuguauag

SEQ ID NO: 3419922 - RNA, 16 nt, Human
acagugugaaguuaga

SEQ ID NO: 3419923 - RNA, 19 nt, Human
acagugugaauaaagugcu

SEQ ID NO: 3419924 - RNA, 14 nt, Human
acaguguguaaaca

SEQ ID NO: 3419925 - RNA, 19 nt, Human
acaguguuaggccuggcac

SEQ ID NO: 3419926 - RNA, 22 nt, Human
acaguguuauuuucuuugaaau

SEQ ID NO: 3419927 - RNA, 16 nt, Human
acaguguucuguuuaa

SEQ ID NO: 3419928 - RNA, 19 nt, Human
acaguguugaaaauguuca

SEQ ID NO: 3419929 - RNA, 20 nt, Human
acaguguuuacacuuuggac

SEQ ID NO: 3419930 - RNA, 20 nt, Human
acaguguuuauccuuucaua

SEQ ID NO: 3419931 - RNA, 18 nt, Human
acaguguuucccauaauu

SEQ ID NO: 3419932 - RNA, 16 nt, Human
acaguguuuucagaag

SEQ ID NO: 3419933 - RNA, 18 nt, Human
acaguuaaggagaaucau

SEQ ID NO: 3419934 - RNA, 13 nt, Human
acaguuacauaau

SEQ ID NO: 3419935 - RNA, 14 nt, Human
acaguuacuuuucc

SEQ ID NO: 3419936 - RNA, 23 nt, Human
acaguuagcaaacuuuguauguc

SEQ ID NO: 3419937 - RNA, 14 nt, Human
acaguuauaaaauu

SEQ ID NO: 3419938 - RNA, 16 nt, Human
acaguuauagaaagca

SEQ ID NO: 3419939 - RNA, 15 nt, Human
acaguuaucuaaguu

SEQ ID NO: 3419940 - RNA, 23 nt, Human
acaguuaucuaaguuaauuuaaa

SEQ ID NO: 3419941 - RNA, 14 nt, Human
acaguuauuuauag

SEQ ID NO: 3419942 - RNA, 17 nt, Human
acaguucacacccugca

SEQ ID NO: 3419943 - RNA, 20 nt, Human
acaguucacacccugcaagg

SEQ ID NO: 3419944 - RNA, 13 nt, Human
acaguucaguggc

SEQ ID NO: 3419945 - RNA, 21 nt, Human
acaguucaguuccucuuugca

SEQ ID NO: 3419946 - RNA, 15 nt, Human
acaguucauauguac

SEQ ID NO: 3419947 - RNA, 18 nt, Human
acaguuccucgcccuggg

SEQ ID NO: 3419948 - RNA, 23 nt, Human
acaguucggugagcuacaaaugc

SEQ ID NO: 3419949 - RNA, 18 nt, Human
acaguucuacagaaaaac

SEQ ID NO: 3419950 - RNA, 16 nt, Human
acaguucucuccuucu

SEQ ID NO: 3419951 - RNA, 17 nt, Human
acaguucucuccuucuu

SEQ ID NO: 3419952 - RNA, 19 nt, Human
acaguucuucgggaagaga

SEQ ID NO: 3419953 - RNA, 19 nt, Human
acaguucuuugggccagac

SEQ ID NO: 3419954 - RNA, 16 nt, Human
acaguugaaaaacagc

SEQ ID NO: 3419955 - RNA, 14 nt, Human
acaguugcacagca

SEQ ID NO: 3419956 - RNA, 13 nt, Human
acaguugcaugua

SEQ ID NO: 3419957 - RNA, 20 nt, Human
acaguugccaccaccucugu

SEQ ID NO: 3419958 - RNA, 22 nt, Human
acaguugccaccaccucugugg

SEQ ID NO: 3419959 - RNA, 19 nt, Human
acaguugcucuaugcuuuc

SEQ ID NO: 3419960 - RNA, 22 nt, Human
acaguugcugucauaagaauga

SEQ ID NO: 3419961 - RNA, 16 nt, Human
acaguuggccuucaga

SEQ ID NO: 3419962 - RNA, 15 nt, Human
acaguugggaaaaua

SEQ ID NO: 3419963 - RNA, 24 nt, Human
acaguugguaacuuuugugaauua

SEQ ID NO: 3419964 - RNA, 12 nt, Human
acaguuguauuu

SEQ ID NO: 3419965 - RNA, 13 nt, Human
acaguuguauuua

SEQ ID NO: 3419966 - RNA, 17 nt, Human
acaguugucuagagaua

SEQ ID NO: 3419967 - RNA, 12 nt, Human
acaguugugcag

SEQ ID NO: 3419968 - RNA, 11 nt, Human
acaguuguuug

SEQ ID NO: 3419969 - RNA, 13 nt, Human
acaguuguuugau

SEQ ID NO: 3419970 - RNA, 15 nt, Human
acaguuguuugaugc

SEQ ID NO: 3419971 - RNA, 20 nt, Human
acaguuuagagugaaauaua

SEQ ID NO: 3419972 - RNA, 16 nt, Human
acaguuuaucaugaag

SEQ ID NO: 3419973 - RNA, 17 nt, Human
acaguuuaucaugaagc

SEQ ID NO: 3419974 - RNA, 22 nt, Human
acaguuuaucaugaagccugug

SEQ ID NO: 3419975 - RNA, 15 nt, Human
acaguuuauuuguug

SEQ ID NO: 3419976 - RNA, 18 nt, Human
acaguuugaaauaagcua

SEQ ID NO: 3419977 - RNA, 16 nt, Human
acaguuugaugucauu

SEQ ID NO: 3419978 - RNA, 20 nt, Human
acaguuugaugucauuaaug

SEQ ID NO: 3419979 - RNA, 17 nt, Human
acaguuuguaaauguua

SEQ ID NO: 3419980 - RNA, 15 nt, Human
acaguuuguuuacac

SEQ ID NO: 3419981 - RNA, 13 nt, Human
acaguuuuaaaga

SEQ ID NO: 3419982 - RNA, 19 nt, Human
acaguuuuaacuguggaua

SEQ ID NO: 3419983 - RNA, 14 nt, Human
acaguuuuccauga

SEQ ID NO: 3419984 - RNA, 20 nt, Human
acaguuuuccuaugcuuuga

SEQ ID NO: 3419985 - RNA, 14 nt, Human
acaguuuuccuucu

SEQ ID NO: 3419986 - RNA, 13 nt, Human
aaugccauaauac

SEQ ID NO: 3419987 - RNA, 16 nt, Human
aaugccauaauacaaa

SEQ ID NO: 3419988 - RNA, 16 nt, Human
aaugccaucaauaaaa

SEQ ID NO: 3419989 - RNA, 15 nt, Human
aaugccaucaucucc

SEQ ID NO: 3419990 - RNA, 21 nt, Human
aaugccauccucaaacacugc

SEQ ID NO: 3419991 - RNA, 21 nt, Human
aaugccauggacagaagaagg

SEQ ID NO: 3419992 - RNA, 12 nt, Human
aaugcccagccc

SEQ ID NO: 3419993 - RNA, 16 nt, Human
aaugcccuuaaaucau

SEQ ID NO: 3419994 - RNA, 13 nt, Human
aaugcccuucacu

SEQ ID NO: 3419995 - RNA, 16 nt, Human
aaugccuaauaaacaa

SEQ ID NO: 3419996 - RNA, 15 nt, Human
aaugccuauuguaau

SEQ ID NO: 3419997 - RNA, 20 nt, Human
aaugccucaaugugaccagg

SEQ ID NO: 3419998 - RNA, 23 nt, Human
aaugccucaguguauuuguauuu

SEQ ID NO: 3419999 - RNA, 12 nt, Human
aaugccuccucc

SEQ ID NO: 3420000 - RNA, 13 nt, Human
aaugccuccugug

SEQ ID NO: 3420001 - RNA, 20 nt, Human
aaugccucuccuuaaaugcu

SEQ ID NO: 3420002 - RNA, 23 nt, Human
aaugccucuggcucuacacauau

SEQ ID NO: 3420003 - RNA, 16 nt, Human
aaugccucuugucuuc

SEQ ID NO: 3420004 - RNA, 22 nt, Human
aaugccugacuagggagccaug

SEQ ID NO: 3420005 - RNA, 16 nt, Human
aaugccugagugccug

SEQ ID NO: 3420006 - RNA, 17 nt, Human
aaugccugagugccugg

SEQ ID NO: 3420007 - RNA, 17 nt, Human
aaugccugcuuuuugga

SEQ ID NO: 3420008 - RNA, 21 nt, Human
aaugccugcuuuuuggaaagu

SEQ ID NO: 3420009 - RNA, 19 nt, Human
aaugccuuacuuuguauga

SEQ ID NO: 3420010 - RNA, 13 nt, Human
aaugccuuugaga

SEQ ID NO: 3420011 - RNA, 19 nt, Human
aaugcgaaugguagucuaa

SEQ ID NO: 3420012 - RNA, 13 nt, Human
aaugcgauuuuau

SEQ ID NO: 3420013 - RNA, 18 nt, Human
aaugcgcaggcuggcccu

SEQ ID NO: 3420014 - RNA, 14 nt, Human
aaugcguaauuaaa

SEQ ID NO: 3420015 - RNA, 19 nt, Human
aaugcgugcauaccacuuu

SEQ ID NO: 3420016 - RNA, 21 nt, Human
aaugcuaaauguaagaaucau

SEQ ID NO: 3420017 - RNA, 14 nt, Human
aaugcuaauauuaa

SEQ ID NO: 3420018 - RNA, 23 nt, Human
aaugcuaccgccccaaaguaaaa

SEQ ID NO: 3420019 - RNA, 21 nt, Human
aaugcuagguuaauuccaauu

SEQ ID NO: 3420020 - RNA, 21 nt, Human
aaugcuaugucauuucauguc

SEQ ID NO: 3420021 - RNA, 15 nt, Human
aaugcuauugaaaau

SEQ ID NO: 3420022 - RNA, 16 nt, Human
aaugcuauuugaacaa

SEQ ID NO: 3420023 - RNA, 23 nt, Human
aaugcuauuuuuguuuuuagaau

SEQ ID NO: 3420024 - RNA, 20 nt, Human
aaugcuauuuuuuauuuuac

SEQ ID NO: 3420025 - RNA, 14 nt, Human
aaugcucaaagaaa

SEQ ID NO: 3420026 - RNA, 15 nt, Human
aaugcucagaccagc

SEQ ID NO: 3420027 - RNA, 11 nt, Human
aaugcucuagu

SEQ ID NO: 3420028 - RNA, 23 nt, Human
aaugcucuuuacuucauggacuu

SEQ ID NO: 3420029 - RNA, 23 nt, Human
aaugcugacccaugggcaggaga

SEQ ID NO: 3420030 - RNA, 18 nt, Human
aaugcugaugaaucacug

SEQ ID NO: 3420031 - RNA, 22 nt, Human
aaugcugcaaguuaugaaauau

SEQ ID NO: 3420032 - RNA, 20 nt, Human
aaugcugcagauuugggcug

SEQ ID NO: 3420033 - RNA, 17 nt, Human
aaugcugccagugugga

SEQ ID NO: 3420034 - RNA, 22 nt, Human
aaugcugcccaugccaccgcuu

SEQ ID NO: 3420035 - RNA, 23 nt, Human
aaugcugccuuuucuuuaacuuu

SEQ ID NO: 3420036 - RNA, 19 nt, Human
aaugcugcgcccuucccca

SEQ ID NO: 3420037 - RNA, 14 nt, Human
aaugcugcuggcca

SEQ ID NO: 3420038 - RNA, 17 nt, Human
aaugcuggacuggaggc

SEQ ID NO: 3420039 - RNA, 20 nt, Human
aaugcuggcuggccuugugg

SEQ ID NO: 3420040 - RNA, 22 nt, Human
aaugcuggcuguuggcuggggg

SEQ ID NO: 3420041 - RNA, 15 nt, Human
aaugcugguuuuccu

SEQ ID NO: 3420042 - RNA, 23 nt, Human
aaugcugguuuuccuaaaugcag

SEQ ID NO: 3420043 - RNA, 23 nt, Human
aaugcuguacaucuauuuuggau

SEQ ID NO: 3420044 - RNA, 17 nt, Human
aaugcugucaacuauga

SEQ ID NO: 3420045 - RNA, 21 nt, Human
aaugcugucuuucuugcuccc

SEQ ID NO: 3420046 - RNA, 13 nt, Human
aaugcugugcccu

SEQ ID NO: 3420047 - RNA, 15 nt, Human
aaugcuuagaaauuc

SEQ ID NO: 3420048 - RNA, 18 nt, Human
aaugcuucagauauuauu

SEQ ID NO: 3420049 - RNA, 21 nt, Human
aaugcuuccugacaaucaacu

SEQ ID NO: 3420050 - RNA, 19 nt, Human
aaugcuucuaaguaaauac

SEQ ID NO: 3420051 - RNA, 17 nt, Human
aaugcuucugacuucau

SEQ ID NO: 3420052 - RNA, 21 nt, Human
aaugcuucugacuucauagau

SEQ ID NO: 3420053 - RNA, 13 nt, Human
aaugcuugaaaaa

SEQ ID NO: 3420054 - RNA, 22 nt, Human
aaugcuugcugcugauuuaaac

SEQ ID NO: 3420055 - RNA, 23 nt, Human
aaugcuugcugcugauuuaaaca

SEQ ID NO: 3420056 - RNA, 23 nt, Human
aaugcuuggaauaucugcuguau

SEQ ID NO: 3420057 - RNA, 18 nt, Human
aaugcuuuagaaagguuu

SEQ ID NO: 3420058 - RNA, 17 nt, Human
aaugcuuuauuuguaaa

SEQ ID NO: 3420059 - RNA, 12 nt, Human
aaugcuuucgau

SEQ ID NO: 3420060 - RNA, 14 nt, Human
aaugcuuugaaauu

SEQ ID NO: 3420061 - RNA, 22 nt, Human
aaugcuuugaaauugaaccuuu

SEQ ID NO: 3420062 - RNA, 16 nt, Human
aaugcuuuuagugugu

SEQ ID NO: 3420063 - RNA, 22 nt, Human
acauacggucagguuuaacauu

SEQ ID NO: 3420064 - RNA, 15 nt, Human
acauacgugugcaug

SEQ ID NO: 3420065 - RNA, 16 nt, Human
acauacgugugcaugu

SEQ ID NO: 3420066 - RNA, 22 nt, Human
acauacgugugcaugugucuuu

SEQ ID NO: 3420067 - RNA, 21 nt, Human
acauacuaaccagcagaaaug

SEQ ID NO: 3420068 - RNA, 12 nt, Human
acauacucauuu

SEQ ID NO: 3420069 - RNA, 14 nt, Human
acauacucauuuuu

SEQ ID NO: 3420070 - RNA, 17 nt, Human
acauacucauuuuucau

SEQ ID NO: 3420071 - RNA, 17 nt, Human
acauacucccaucugug

SEQ ID NO: 3420072 - RNA, 12 nt, Human
acauacugcugu

SEQ ID NO: 3420073 - RNA, 18 nt, Human
acauacuggccuggacug

SEQ ID NO: 3420074 - RNA, 20 nt, Human
acauacuugaagggccagag

SEQ ID NO: 3420075 - RNA, 23 nt, Human
acauacuugaagggccagagcca

SEQ ID NO: 3420076 - RNA, 13 nt, Human
acauacuuuuugg

SEQ ID NO: 3420077 - RNA, 17 nt, Human
acauacuuuuuggguuu

SEQ ID NO: 3420078 - RNA, 22 nt, Human
acauagaaauggaaauuuugcu

SEQ ID NO: 3420079 - RNA, 14 nt, Human
acauagaauuaaca

SEQ ID NO: 3420080 - RNA, 13 nt, Human
acauagauguccc

SEQ ID NO: 3420081 - RNA, 15 nt, Human
acauagaugucccuu

SEQ ID NO: 3420082 - RNA, 16 nt, Human
acauagcccacuuaca

SEQ ID NO: 3420083 - RNA, 21 nt, Human
acauagcccacuuacauuuac

SEQ ID NO: 3420084 - RNA, 18 nt, Human
acauagcccaucccugcc

SEQ ID NO: 3420085 - RNA, 19 nt, Human
acauagcgaauacaaaauu

SEQ ID NO: 3420086 - RNA, 21 nt, Human
acauagcuuacaagccagcug

SEQ ID NO: 3420087 - RNA, 14 nt, Human
acauaguauucaug

SEQ ID NO: 3420088 - RNA, 19 nt, Human
acauaguauucaugacuau

SEQ ID NO: 3420089 - RNA, 18 nt, Human
acauagucugaagugaag

SEQ ID NO: 3420090 - RNA, 14 nt, Human
acauagugaaaauu

SEQ ID NO: 3420091 - RNA, 21 nt, Human
acauagugaugguuccccugu

SEQ ID NO: 3420092 - RNA, 19 nt, Human
acauaguguaggcuuuacu

SEQ ID NO: 3420093 - RNA, 23 nt, Human
acauaguguaggcuuuacuuagc

SEQ ID NO: 3420094 - RNA, 15 nt, Human
acauaguuauuuauu

SEQ ID NO: 3420095 - RNA, 23 nt, Human
acauaguucuccaguuguaugga

SEQ ID NO: 3420096 - RNA, 13 nt, Human
acauaguuuuuaa

SEQ ID NO: 3420097 - RNA, 13 nt, Human
acauauaaaauaa

SEQ ID NO: 3420098 - RNA, 15 nt, Human
acauauacaacacca

SEQ ID NO: 3420099 - RNA, 17 nt, Human
acauauacauacuuaca

SEQ ID NO: 3420100 - RNA, 22 nt, Human
acauauacauacuuacaugugu

SEQ ID NO: 3420101 - RNA, 16 nt, Human
acauauagaaugcaga

SEQ ID NO: 3420102 - RNA, 14 nt, Human
acauauaguguaca

SEQ ID NO: 3420103 - RNA, 16 nt, Human
acauauauauauauaa

SEQ ID NO: 3420104 - RNA, 20 nt, Human
acauauauauauuuuuuaau

SEQ ID NO: 3420105 - RNA, 17 nt, Human
acauaucgcugacuuca

SEQ ID NO: 3420106 - RNA, 17 nt, Human
acauaucuaguaugaaa

SEQ ID NO: 3420107 - RNA, 15 nt, Human
acauaucuuagaugg

SEQ ID NO: 3420108 - RNA, 19 nt, Human
acauaucuuuauuaaucac

SEQ ID NO: 3420109 - RNA, 18 nt, Human
acauaugaucugucugug

SEQ ID NO: 3420110 - RNA, 17 nt, Human
acauaugcaaaaauaua

SEQ ID NO: 3420111 - RNA, 17 nt, Human
acauaugcaccuugugu

SEQ ID NO: 3420112 - RNA, 20 nt, Human
acauaugcaccuugugucug

SEQ ID NO: 3420113 - RNA, 16 nt, Human
acauauggauguuacu

SEQ ID NO: 3420114 - RNA, 16 nt, Human
acauauguaaacauaa

SEQ ID NO: 3420115 - RNA, 16 nt, Human
acauauguagacuaua

SEQ ID NO: 3420116 - RNA, 23 nt, Human
acauauguagacuauauacaugu

SEQ ID NO: 3420117 - RNA, 16 nt, Human
acauauguauacaugu

SEQ ID NO: 3420118 - RNA, 17 nt, Human
acauauguauacaugug

SEQ ID NO: 3420119 - RNA, 18 nt, Human
acauauguauacaugugc

SEQ ID NO: 3420120 - RNA, 21 nt, Human
acauaugugcuggaauucuaa

SEQ ID NO: 3420121 - RNA, 14 nt, Human
acauauugauuucc

SEQ ID NO: 3420122 - RNA, 18 nt, Human
acauauuuaacuggugca

SEQ ID NO: 3420123 - RNA, 12 nt, Human
acauauuuaaug

SEQ ID NO: 3420124 - RNA, 13 nt, Human
acauauuuaaugu

SEQ ID NO: 3420125 - RNA, 14 nt, Human
acauauuuaauguu

SEQ ID NO: 3420126 - RNA, 17 nt, Human
acauauuuaauguuuua

SEQ ID NO: 3420127 - RNA, 19 nt, Human
acauauuuauauaacguga

SEQ ID NO: 3420128 - RNA, 17 nt, Human
acauauuuguggaauaa

SEQ ID NO: 3420129 - RNA, 19 nt, Human
acauauuuguuaaauauuu
